United States Patent Application Publication US 2019/0290729 A1 - sequence listing, part 3

SEQ ID NO: 20679 - protein, 43 aa, Artificial Sequence
  Non-cyclic GFR-binding peptide
  MOD_RES (2)..(37)..(38): Xaa is C or S
  MOD_RES (15)..(16)..(17)..(18)..(19): Xaa is A or G
  MOD_RES (20)..(21)..(22)..(23): Xaa is A or G or absent
GXEAVSMGEPIKGYXXXXXXXXXFYLVNIPSLKTPVXXAKGVK

SEQ ID NO: 20680 - protein, 43 aa, Artificial Sequence
  Non-cyclic GFR-binding peptide
  MOD_RES (2)..(4)..(38)..(39): Xaa is C or S
  MOD_RES (16)..(17)..(18)..(19)..(20): Xaa is A or G
  MOD_RES (21)..(22)..(23)..(24): Xaa is A or G or absent
HXGXARVVMNPIKGYXXXXXXXXXFYLVNIPSLQTPAXXPKPV

SEQ ID NO: 20681 - protein, 40 aa, Artificial Sequence
  Non-cyclic GFR-binding peptide
  MOD_RES (1)..(3)..(35)..(36): Xaa is C or S
XGXSEVVMDPIKGYVVNNASDFYLINIPSLRTPVXXTPPT

SEQ ID NO: 20682 - protein, 33 aa, Artificial Sequence
  Non-cyclic GFR-binding peptide
  MOD_RES (33)..(33): Xaa is C or S
EAVSMGEPIKGYTPVGMDDFYLVNIPSLKTPVX

SEQ ID NO: 20683 - protein, 38 aa, Artificial Sequence
  Non-cyclic GFR-binding peptide
  MOD_RES (33)..(33): Xaa is C or S
  MOD_RES (11)..(12)..(13)..(14)..(15): Xaa is A or G
  MOD_RES (16)..(17)..(18)..(19): Xaa is A or G or absent
RVVMNPIKGYXXXXXXXXXFYLVNIPSLKTPAXTPKTV

SEQ ID NO: 20684 - protein, 44 aa, Artificial Sequence
  Non-cyclic GFR-binding peptide
  MOD_RES (1)..(3)..(38)..(39): Xaa is C or S
  MOD_RES (16)..(17)..(18)..(19)..(20): Xaa is A or G
  MOD_RES (21)..(22)..(23)..(24): Xaa is A or G or absent
XGXEAVSMGEPIKGYXXXXXXXXXFYLVNIPSLKTPVXXAKGVK

SEQ ID NO: 20685 - protein, 38 aa, Artificial Sequence
  Non-cyclic GFR-binding peptide
  MOD_RES (2)..(34)..(35): Xaa is C or S
GXESVAMGPIKGYYTVVGKDFYLINIPSLKTPVXXAKS

SEQ ID NO: 20686 - protein, 39 aa, Artificial Sequence
  Non-cyclic GFR-binding peptide
  MOD_RES (35)..(36): Xaa is C or S
  MOD_RES (13)..(14)..(15)..(16)..(17): Xaa is A or G
  MOD_RES (18)..(19)..(20)..(21): Xaa is A or G or absent
EAVSMGEPIKGYXXXXXXXXXFYLVNIPSLKTPVXXAKG

SEQ ID NO: 20687 - protein, 41 aa, Artificial Sequence
  Non-cyclic GFR-binding peptide
  MOD_RES (1)..(35)..(36): Xaa is C or S
  MOD_RES (13)..(14)..(15)..(16)..(17): Xaa is A or G
  MOD_RES (18)..(19)..(20)..(21): Xaa is A or G or absent
XSRVVMNPIKGYXXXXXXXXXFYLVNIPSLKTPAXXPKPVY

SEQ ID NO: 20688 - protein, 41 aa, Artificial Sequence
  Non-cyclic GFR-binding peptide
  MOD_RES (1)..(35)..(36): Xaa is C or S
  MOD_RES (13)..(14)..(15)..(16)..(17): Xaa is A or G
  MOD_RES (18)..(19)..(20)..(21): Xaa is A or G or absent
XAEVVMDPIKGYXXXXXXXXXFYLINIPSLRAPVXXSAPAA

SEQ ID NO: 20689 - protein, 33 aa, Artificial Sequence
  Non-cyclic GFR-binding peptide
  MOD_RES (1)..(33): Xaa is C or S
XARVVMNPIKGYIVNSSDDFYLVNIPSLQTPAX

SEQ ID NO: 20690 - protein, 34 aa, Artificial Sequence
  Non-cyclic GFR-binding peptide
  MOD_RES (1)..(1): Xaa is C or S
  MOD_RES (13)..(14)..(15)..(16)..(17): Xaa is A or G
  MOD_RES (18)..(19)..(20)..(21): Xaa is A or G or absent
XAKVVMNPIKGYXXXXXXXXXFYLVNIPSLKTPA

SEQ ID NO: 20691 - protein, 33 aa, Artificial Sequence
  Non-cyclic GFR-binding peptide
  MOD_RES (1)..(1): Xaa is C or S
  MOD_RES (12)..(13)..(14)..(15)..(16): Xaa is A or G
  MOD_RES (17)..(18)..(19)..(20): Xaa is A or G or absent
XEEVIMPIKGYXXXXXXXXXFYLMNIPSTKVPA

SEQ ID NO: 20692 - protein, 35 aa, Artificial Sequence
  Non-cyclic GFR-binding peptide
  MOD_RES (2)..(4): Xaa is C or S
RXGXSEVVMDPIKGYVVNNASDFYLINIPSLRTPV

SEQ ID NO: 20693 - protein, 39 aa, Artificial Sequence
  Non-cyclic GFR-binding peptide
  MOD_RES (1)..(3)..(36)..(37): Xaa is C or S
XGXEAVSMGEPIKGYTPVGMDDFYLVNIPSLKTPVXXAK

SEQ ID NO: 20694 - protein, 34 aa, Artificial Sequence
  Non-cyclic GFR-binding peptide
  MOD_RES (32)..(33): Xaa is C or S
AKVVMNPIKGYIVNNSSDFYLVNIPSLKTPAXXA

SEQ ID NO: 20695 - protein, 32 aa, Artificial Sequence
  Non-cyclic GFR-binding peptide
  MOD_RES (32)..(32): Xaa is C or S
ARVVMNPIKGYIVNSSDDFYLVNIPSLQTPAX

SEQ ID NO: 20696 - protein, 39 aa, Artificial Sequence
  Non-cyclic GFR-binding peptide
  MOD_RES (1)..(3)..(35)..(36): Xaa is C or S
XGXGEVVMEPIKGYVVKDYEDFYLMNIPSLETPVXXAKP

SEQ ID NO: 20697 - protein, 38 aa, Artificial Sequence
  Non-cyclic GFR-binding peptide
  MOD_RES (33)..(34): Xaa is C or S
  MOD_RES (11)..(12)..(13)..(14)..(15): Xaa is A or G
  MOD_RES (16)..(17)..(18)..(19): Xaa is A or G or absent
SVAMGPIKGYXXXXXXXXXFYLINIPSLKTPVXXAKSA

SEQ ID NO: 20698 - protein, 42 aa, Artificial Sequence
  Non-cyclic GFR-binding peptide
  MOD_RES (1)..(3)..(37)..(38): Xaa is C or S
  MOD_RES (15)..(16)..(17)..(18)..(19): Xaa is A or G
  MOD_RES (20)..(21)..(22)..(23): Xaa is A or G or absent
XGXGEVVMEPIKGYXXXXXXXXXFYLMNIPSLETPVXXAKPI

SEQ ID NO: 20699 - protein, 36 aa, Artificial Sequence
  Non-cyclic GFR-binding peptide
  MOD_RES (1)..(33)..(34): Xaa is C or S
XSEVVMDPIKGYVVNNASDFYLINIPSLRTPVXXTP

SEQ ID NO: 20700 - protein, 41 aa, Artificial Sequence
  Non-cyclic GFR-binding peptide
  MOD_RES (1)..(36)..(37): Xaa is C or S
  MOD_RES (14)..(15)..(16)..(17)..(18): Xaa is A or G
  MOD_RES (19)..(20)..(21)..(22): Xaa is A or G or absent
XEAVSMGEPIKGYXXXXXXXXXFYLVNIPSLKTPVXXAKGV

SEQ ID NO: 20701 - protein, 34 aa, Artificial Sequence
  Non-cyclic GFR-binding peptide
  MOD_RES (33)..(34): Xaa is C or S
  MOD_RES (11)..(12)..(13)..(14)..(15): Xaa is A or G
  MOD_RES (16)..(17)..(18)..(19): Xaa is A or G or absent
SVAMGPIKGYXXXXXXXXXFYLINIPSLKTPVXX

SEQ ID NO: 20702 - protein, 32 aa, Artificial Sequence
  Non-cyclic GFR-binding peptide
  MOD_RES (31)..(32): Xaa is C or S
SVAMGPIKGYYTVVGKDFYLINIPSLKTPVXX

SEQ ID NO: 20703 - protein, 38 aa, Artificial Sequence
  Non-cyclic GFR-binding peptide
  MOD_RES (2)..(4)..(36)..(37): Xaa is C or S
HXGXAKVVMNPIKGYIVNNSSDFYLVNIPSLKTPAXXA

SEQ ID NO: 20704 - protein, 37 aa, Artificial Sequence
  Non-cyclic GFR-binding peptide
  MOD_RES (2)..(36)..(37): Xaa is C or S
  MOD_RES (14)..(15)..(16)..(17)..(18): Xaa is A or G
  MOD_RES (19)..(20)..(21)..(22): Xaa is A or G or absent
GXAKVVMNPIKGYXXXXXXXXXFYLVNIPSLKTPAXX

SEQ ID NO: 20705 - protein, 36 aa, Artificial Sequence
  Non-cyclic GFR-binding peptide
  MOD_RES (32)..(33): Xaa is C or S
AEVVMDPIKGYVVNNAADFYLINIPSLRAPVXXSAP

SEQ ID NO: 20706 - protein, 31 aa, Artificial Sequence
  Non-cyclic GFR-binding peptide
  MOD_RES (1)..(1): Xaa is C or S
XEEVIMPIKGYLLVRGNDFYLMNIPSTKVPA

SEQ ID NO: 20707 - protein, 34 aa, Artificial Sequence
  Non-cyclic GFR-binding peptide
  MOD_RES (2)..(4): Xaa is C or S
LXGXEEVIMPIKGYLLVRGNDFYLMNIPSTKVPA

SEQ ID NO: 20708 - protein, 40 aa, Artificial Sequence
  Non-cyclic GFR-binding peptide
  MOD_RES (1)..(3)..(37)..(38): Xaa is C or S
  MOD_RES (15)..(16)..(17)..(18)..(19): Xaa is A or G
  MOD_RES (20)..(21)..(22)..(23): Xaa is A or G or absent
XGXGEVVMDPIKGYXXXXXXXXXFYLMNIPSLETPVXXAK

SEQ ID NO: 20709 - protein, 39 aa, Artificial Sequence
  Non-cyclic GFR-binding peptide
  MOD_RES (1)..(33)..(34): Xaa is C or S
XAKVVMNPIKGYIVNNSSDFYLVNIPSLKTPAXXAKPVA

SEQ ID NO: 20710 - protein, 35 aa, Artificial Sequence
  Non-cyclic GFR-binding peptide
  MOD_RES (33)..(34): Xaa is C or S
  MOD_RES (11)..(12)..(13)..(14)..(15): Xaa is A or G
  MOD_RES (16)..(17)..(18)..(19): Xaa is A or G or absent
EVVMEPIKGYXXXXXXXXXFYLMNIPSLETPVXXA

SEQ ID NO: 20711 - protein, 42 aa, Artificial Sequence
  Non-cyclic GFR-binding peptide
  MOD_RES (2)..(4)..(36)..(37): Xaa is C or S
RXGXSEVVMDPIKGYVVNNASDFYLINIPSLRTPVXXTPPTS

SEQ ID NO: 20712 - protein, 41 aa, Artificial Sequence
  Non-cyclic GFR-binding peptide
  MOD_RES (2)..(4)..(36)..(37): Xaa is C or S
RXGXESVAMGPIKGYYTVVGKDFYLINIPSLKTPVXXAKSA

SEQ ID NO: 20713 - protein, 39 aa, Artificial Sequence
  Non-cyclic GFR-binding peptide
  MOD_RES (2)..(4)..(38)..(39): Xaa is C or S
  MOD_RES (16)..(17)..(18)..(19)..(20): Xaa is A or G
  MOD_RES (21)..(22)..(23)..(24): Xaa is A or G or absent
RXGXSEVVMDPIKGYXXXXXXXXXFYLINIPSLRTPVXX

SEQ ID NO: 20714 - protein, 37 aa, Artificial Sequence
  Non-cyclic GFR-binding peptide
  MOD_RES (2)..(36)..(37): Xaa is C or S
  MOD_RES (14)..(15)..(16)..(17)..(18): Xaa is A or G
  MOD_RES (19)..(20)..(21)..(22): Xaa is A or G or absent
GXARVVMNPIKGYXXXXXXXXXFYLVNIPSLQTPAXX

SEQ ID NO: 20715 - protein, 39 aa, Artificial Sequence
  Non-cyclic GFR-binding peptide
  MOD_RES (2)..(36)..(37): Xaa is C or S
  MOD_RES (14)..(15)..(16)..(17)..(18): Xaa is A or G
  MOD_RES (19)..(20)..(21)..(22): Xaa is A or G or absent
GXAEVVMDPIKGYXXXXXXXXXFYLINIPSLRAPVXXSA

SEQ ID NO: 20716 - protein, 37 aa, Artificial Sequence
  Non-cyclic GFR-binding peptide
  MOD_RES (1)..(33)..(34): Xaa is C or S
XGEVVMDPIKGYVVKENEDFYLMNIPSLETPVXXAKP

SEQ ID NO: 20717 - protein, 41 aa, Artificial Sequence
  Non-cyclic GFR-binding peptide
  MOD_RES (2)..(4)..(36)..(37): Xaa is C or S
HXGXSRVVMNPIKGYIVNSSDDFYLVNIPSLKTPAXXPKPV

SEQ ID NO: 20718 - protein, 39 aa, Artificial Sequence
  Non-cyclic GFR-binding peptide
  MOD_RES (34)..(35): Xaa is C or S
  MOD_RES (12)..(13)..(14)..(15)..(16): Xaa is A or G
  MOD_RES (17)..(18)..(19)..(20): Xaa is A or G or absent
SEVVMDPIKGYXXXXXXXXXFYLINIPSLRTPVXXTPPT

SEQ ID NO: 20719 - protein, 36 aa, Artificial Sequence
  Non-cyclic GFR-binding peptide
  MOD_RES (1)..(3): Xaa is C or S
  MOD_RES (15)..(16)..(17)..(18)..(19): Xaa is A or G
  MOD_RES (20)..(21)..(22)..(23): Xaa is A or G or absent
XGXSRVVMNPIKGYXXXXXXXXXFYLVNIPSLKTPA

SEQ ID NO: 20720 - protein, 37 aa, Artificial Sequence
  Non-cyclic GFR-binding peptide
  MOD_RES (1)..(3)..(35)..(36): Xaa is C or S
XGXGEVVMDPIKGYVVKENEDFYLMNIPSLETPVXXA

SEQ ID NO: 20721 - protein, 33 aa, Artificial Sequence
  Non-cyclic GFR-binding peptide
  MOD_RES (2)..(33): Xaa is C or S
GXEEVIMPIKGYLLVRGNDFYLMNIPSTKVPAX

SEQ ID NO: 20722 - protein, 36 aa, Artificial Sequence
  Non-cyclic GFR-binding peptide
  MOD_RES (2)..(35)..(36): Xaa is C or S
  MOD_RES (13)..(14)..(15)..(16)..(17): Xaa is A or G
  MOD_RES (18)..(19)..(20)..(21): Xaa is A or G or absent
GXEEVIMPIKGYXXXXXXXXXFYLMNIPSTKVPAXX

SEQ ID NO: 20723 - protein, 34 aa, Artificial Sequence
  Non-cyclic GFR-binding peptide
  MOD_RES (1)..(1): Xaa is C or S
  MOD_RES (13)..(14)..(15)..(16)..(17): Xaa is A or G
  MOD_RES (18)..(19)..(20)..(21): Xaa is A or G or absent
XSEVVMDPIKGYXXXXXXXXXFYLINIPSLRTPV

SEQ ID NO: 20724 - protein, 35 aa, Artificial Sequence
  Non-cyclic GFR-binding peptide
  MOD_RES (2)..(34)..(35): Xaa is C or S
GXAKVVMNPIKGYIVNNSSDFYLVNIPSLKTPAXX

SEQ ID NO: 20725 - protein, 41 aa, Artificial Sequence
  Non-cyclic GFR-binding peptide
  MOD_RES (2)..(4)..(38)..(39): Xaa is C or S
  MOD_RES (16)..(17)..(18)..(19)..(20): Xaa is A or G
  MOD_RES (21)..(22)..(23)..(24): Xaa is A or G or absent
HXGXARVVMNPIKGYXXXXXXXXXFYLVNIPSLQTPAXXPK

SEQ ID NO: 20726 - protein, 43 aa, Artificial Sequence
  Non-cyclic GFR-binding peptide
  MOD_RES (1)..(3)..(37)..(38): Xaa is C or S
  MOD_RES (15)..(16)..(17)..(18)..(19): Xaa is A or G
  MOD_RES (20)..(21)..(22)..(23): Xaa is A or G or absent
XGXAEVVMDPIKGYXXXXXXXXXFYLINIPSLRAPVXXSAPAA

SEQ ID NO: 20727 - protein, 36 aa, Artificial Sequence
  Non-cyclic GFR-binding peptide
  MOD_RES (1)..(33): Xaa is C or S
XSRVVMNPIKGYIVNSSDDFYLVNIPSLKTPAXTPK

SEQ ID NO: 20728 - protein, 35 aa, Artificial Sequence
  Non-cyclic GFR-binding peptide
  MOD_RES (33)..(34): Xaa is C or S
  MOD_RES (11)..(12)..(13)..(14)..(15): Xaa is A or G
  MOD_RES (16)..(17)..(18)..(19): Xaa is A or G or absent
RVVMNPIKGYXXXXXXXXXFYLVNIPSLKTPAXXP

SEQ ID NO: 20729 - protein, 41 aa, Artificial Sequence
  Non-cyclic GFR-binding peptide
  MOD_RES (2)..(4)..(35)..(36): Xaa is C or S
LXGXEEVIMPIKGYLLVRGNDFYLMNIPSTKVPAXXTSPVR

SEQ ID NO: 20730 - protein, 36 aa, Artificial Sequence
  Non-cyclic GFR-binding peptide
  MOD_RES (2)..(36): Xaa is C or S
  MOD_RES (14)..(15)..(16)..(17)..(18): Xaa is A or G
  MOD_RES (19)..(20)..(21)..(22): Xaa is A or G or absent
GXSEVVMDPIKGYXXXXXXXXXFYLINIPSLRTPVX

SEQ ID NO: 20731 - protein, 35 aa, Artificial Sequence
  Non-cyclic GFR-binding peptide
  MOD_RES (1)..(34)..(35): Xaa is C or S
  MOD_RES (12)..(13)..(14)..(15)..(16): Xaa is A or G
  MOD_RES (17)..(18)..(19)..(20): Xaa is A or G or absent
XEEVIMPIKGYXXXXXXXXXFYLMNIPSTKVPAXX

SEQ ID NO: 20732 - protein, 32 aa, Artificial Sequence
  Non-cyclic GFR-binding peptide
  MOD_RES (11)..(12)..(13)..(14)..(15): Xaa is A or G
  MOD_RES (16)..(17)..(18)..(19): Xaa is A or G or absent
EVVMDPIKGYXXXXXXXXXFYLINIPSLRTPV

SEQ ID NO: 20733 - protein, 32 aa, Artificial Sequence
  Non-cyclic GFR-binding peptide
  MOD_RES (31)..(32): Xaa is C or S
EEVIMPIKGYLLVRGNDFYLMNIPSTKVPAXX

SEQ ID NO: 20734 - protein, 40 aa, Artificial Sequence
  Non-cyclic GFR-binding peptide
  MOD_RES (1)..(36)..(37): Xaa is C or S
  MOD_RES (14)..(15)..(16)..(17)..(18): Xaa is A or G
  MOD_RES (19)..(20)..(21)..(22): Xaa is A or G or absent
XEAVSMGEPIKGYXXXXXXXXXFYLVNIPSLKTPVXXAKG

SEQ ID NO: 20735 - protein, 32 aa, Artificial Sequence
  Non-cyclic GFR-binding peptide
  MOD_RES (11)..(12)..(13)..(14)..(15): Xaa is A or G
  MOD_RES (16)..(17)..(18)..(19): Xaa is A or G or absent
EVVMDPIKGYXXXXXXXXXFYLINIPSLRAPV

SEQ ID NO: 20736 - protein, 36 aa, Artificial Sequence
  Non-cyclic GFR-binding peptide
  MOD_RES (2)..(4)..(36): Xaa is C or S
RXGXGEVVMEPIKGYVVKDYEDFYLMNIPSLETPVX

SEQ ID NO: 20737 - protein, 42 aa, Artificial Sequence
  Non-cyclic GFR-binding peptide
  MOD_RES (1)..(3)..(37)..(38): Xaa is C or S
  MOD_RES (15)..(16)..(17)..(18)..(19): Xaa is A or G
  MOD_RES (20)..(21)..(22)..(23): Xaa is A or G or absent
XGXESVAMGPIKGYXXXXXXXXXFYLINIPSLKTPVXXAKSA

SEQ ID NO: 20738 - protein, 39 aa, Artificial Sequence
  Non-cyclic GFR-binding peptide
  MOD_RES (1)..(34)..(35): Xaa is C or S
  MOD_RES (12)..(13)..(14)..(15)..(16): Xaa is A or G
  MOD_RES (17)..(18)..(19)..(20): Xaa is A or G or absent
XEEVIMPIKGYXXXXXXXXXFYLMNIPSTKVPAXXTSPV

SEQ ID NO: 20739 - protein, 43 aa, Artificial Sequence
  Non-cyclic GFR-binding peptide
  MOD_RES (1)..(3)..(37)..(38): Xaa is C or S
  MOD_RES (15)..(16)..(17)..(18)..(19): Xaa is A or G
  MOD_RES (20)..(21)..(22)..(23): Xaa is A or G or absent
XGXGEVVMEPIKGYXXXXXXXXXFYLMNIPSLETPVXXAKPIS

SEQ ID NO: 20740 - protein, 43 aa, Artificial Sequence
  Non-cyclic GFR-binding peptide
  MOD_RES (2)..(4)..(38)..(39): Xaa is C or S
  MOD_RES (16)..(17)..(18)..(19)..(20): Xaa is A or G
  MOD_RES (21)..(22)..(23)..(24): Xaa is A or G or absent
RXGXAEVVMDPIKGYXXXXXXXXXFYLINIPSLRAPVXXSAPA

SEQ ID NO: 20741 - protein, 35 aa, Artificial Sequence
  Non-cyclic GFR-binding peptide
  MOD_RES (34)..(35): Xaa is C or S
  MOD_RES (12)..(13)..(14)..(15)..(16): Xaa is A or G
  MOD_RES (17)..(18)..(19)..(20): Xaa is A or G or absent
SEVVMDPIKGYXXXXXXXXXFYLINIPSLRTPVXX

SEQ ID NO: 20742 - protein, 37 aa, Artificial Sequence
  Non-cyclic GFR-binding peptide
  MOD_RES (1)..(3)..(37): Xaa is C or S
  MOD_RES (15)..(16)..(17)..(18)..(19): Xaa is A or G
  MOD_RES (20)..(21)..(22)..(23): Xaa is A or G or absent
XGXSRVVMNPIKGYXXXXXXXXXFYLVNIPSLKTPAX

SEQ ID NO: 20743 - protein, 33 aa, Artificial Sequence
  Non-cyclic GFR-binding peptide
  MOD_RES (33)..(33): Xaa is C or S
  MOD_RES (11)..(12)..(13)..(14)..(15): Xaa is A or G
  MOD_RES (16)..(17)..(18)..(19): Xaa is A or G or absent
EEVIMPIKGYXXXXXXXXXFYLMNIPSTKVPAX

SEQ ID NO: 20744 - protein, 37 aa, Artificial Sequence
  Non-cyclic GFR-binding peptide
  MOD_RES (31)..(32): Xaa is C or S
RVVMNPIKGYIVNSSDDFYLVNIPSLKTPAXXPKPVH

SEQ ID NO: 20745 - protein, 41 aa, Artificial Sequence
  Non-cyclic GFR-binding peptide
  MOD_RES (2)..(36): Xaa is C or S
  MOD_RES (14)..(15)..(16)..(17)..(18): Xaa is A or G
  MOD_RES (19)..(20)..(21)..(22): Xaa is A or G or absent
GXSRVVMNPIKGYXXXXXXXXXFYLVNIPSLKTPAXTPKTV

SEQ ID NO: 20746 - protein, 37 aa, Artificial Sequence
  Non-cyclic GFR-binding peptide
  MOD_RES (2)..(4)..(37): Xaa is C or S
RXGXEAVSMGEPIKGYTPVGMDDFYLVNIPSLKTPVX

SEQ ID NO: 20747 - protein, 40 aa, Artificial Sequence
  Non-cyclic GFR-binding peptide
  MOD_RES (1)..(3)..(37)..(38): Xaa is C or S
  MOD_RES (15)..(16)..(17)..(18)..(19): Xaa is A or G
  MOD_RES (20)..(21)..(22)..(23): Xaa is A or G or absent
XGXSRVVMNPIKGYXXXXXXXXXFYLVNIPSLKTPAXXPK

SEQ ID NO: 20748 - protein, 38 aa, Artificial Sequence
  Non-cyclic GFR-binding peptide
  MOD_RES (2)..(34)..(35): Xaa is C or S
GXARVVMNPIKGYIVNSSDDFYLVNIPSLQTPAXXPKP

SEQ ID NO: 20749 - protein, 33 aa, Artificial Sequence
  Non-cyclic GFR-binding peptide
  MOD_RES (31)..(32): Xaa is C or S
EVVMDPIKGYVVKENEDFYLMNIPSLETPVXXA

SEQ ID NO: 20750 - protein, 36 aa, Artificial Sequence
  Non-cyclic GFR-binding peptide
  MOD_RES (33)..(34): Xaa is C or S
  MOD_RES (11)..(12)..(13)..(14)..(15): Xaa is A or G
  MOD_RES (16)..(17)..(18)..(19): Xaa is A or G or absent
EVVMDPIKGYXXXXXXXXXFYLINIPSLRTPVXXTP

SEQ ID NO: 20751 - protein, 39 aa, Artificial Sequence
  Non-cyclic GFR-binding peptide
  MOD_RES (2)..(36)..(37): Xaa is C or S
  MOD_RES (14)..(15)..(16)..(17)..(18): Xaa is A or G
  MOD_RES (19)..(20)..(21)..(22): Xaa is A or G or absent
GXGEVVMEPIKGYXXXXXXXXXFYLMNIPSLETPVXXAK

SEQ ID NO: 20752 - protein, 38 aa, Artificial Sequence
  Non-cyclic GFR-binding peptide
  MOD_RES (1)..(35): Xaa is C or S
  MOD_RES (13)..(14)..(15)..(16)..(17): Xaa is A or G
  MOD_RES (18)..(19)..(20)..(21): Xaa is A or G or absent
XSRVVMNPIKGYXXXXXXXXXFYLVNIPSLKTPAXTPK

SEQ ID NO: 20753 - protein, 38 aa, Artificial Sequence
  Non-cyclic GFR-binding peptide
  MOD_RES (2)..(4)..(36): Xaa is C or S
HXGXSRVVMNPIKGYIVNSSDDFYLVNIPSLKTPAXTP

SEQ ID NO: 20754 - protein, 42 aa, Artificial Sequence
  Non-cyclic GFR-binding peptide
  MOD_RES (2)..(36)..(37): Xaa is C or S
  MOD_RES (14)..(15)..(16)..(17)..(18): Xaa is A or G
  MOD_RES (19)..(20)..(21)..(22): Xaa is A or G or absent
GXSRVVMNPIKGYXXXXXXXXXFYLVNIPSLKTPAXXPKPVH

SEQ ID NO: 20755 - protein, 41 aa, Artificial Sequence
  Non-cyclic GFR-binding peptide
  MOD_RES (1)..(3)..(37): Xaa is C or S
  MOD_RES (15)..(16)..(17)..(18)..(19): Xaa is A or G
  MOD_RES (20)..(21)..(22)..(23): Xaa is A or G or absent
XGXSRVVMNPIKGYXXXXXXXXXFYLVNIPSLKTPAXTPKT

SEQ ID NO: 20756 - protein, 40 aa, Artificial Sequence
  Non-cyclic GFR-binding peptide
  MOD_RES (2)..(34)..(35): Xaa is C or S
GXGEVVMDPIKGYVVKENEDFYLMNIPSLETPVXXAKPIK

SEQ ID NO: 20757 - protein, 39 aa, Artificial Sequence
  Non-cyclic GFR-binding peptide
  MOD_RES (2)..(4)..(36)..(37): Xaa is C or S
RXGXGEVVMEPIKGYVVKDYEDFYLMNIPSLETPVXXAK

SEQ ID NO: 20758 - protein, 37 aa, Artificial Sequence
  Non-cyclic GFR-binding peptide
  MOD_RES (2)..(4)..(35)..(36): Xaa is C or S
LXGXEEVIMPIKGYLLVRGNDFYLMNIPSTKVPAXXT

SEQ ID NO: 20759 - protein, 40 aa, Artificial Sequence
  Non-cyclic GFR-binding peptide
  MOD_RES (2)..(4)..(39)..(40): Xaa is C or S
  MOD_RES (17)..(18)..(19)..(20)..(21): Xaa is A or G
  MOD_RES (22)..(23)..(24)..(25): Xaa is A or G or absent
RXGXEAVSMGEPIKGYXXXXXXXXXFYLVNIPSLKTPVXX

SEQ ID NO: 20760 - protein, 43 aa, Artificial Sequence
  Non-cyclic GFR-binding peptide
  MOD_RES (2)..(4)..(38): Xaa is C or S
  MOD_RES (16)..(17)..(18)..(19)..(20): Xaa is A or G
  MOD_RES (21)..(22)..(23)..(24): Xaa is A or G or absent
HXGXSRVVMNPIKGYXXXXXXXXXFYLVNIPSLKTPAXTPKTV

SEQ ID NO: 20761 - protein, 33 aa, Artificial Sequence
  Non-cyclic GFR-binding peptide
  MOD_RES (1)..(33): Xaa is C or S
XAKVVMNPIKGYIVNNSSDFYLVNIPSLKTPAX

SEQ ID NO: 20762 - protein, 33 aa, Artificial Sequence
  Non-cyclic GFR-binding peptide
  MOD_RES (33)..(33): Xaa is C or S
  MOD_RES (11)..(12)..(13)..(14)..(15): Xaa is A or G
  MOD_RES (16)..(17)..(18)..(19): Xaa is A or G or absent
KVVMNPIKGYXXXXXXXXXFYLVNIPSLKTPAX

SEQ ID NO: 20763 - protein, 36 aa, Artificial Sequence
  Non-cyclic GFR-binding peptide
  MOD_RES (2)..(34)..(35): Xaa is C or S
GXGEVVMDPIKGYVVKENEDFYLMNIPSLETPVXXA

SEQ ID NO: 20764 - protein, 38 aa, Artificial Sequence
  Non-cyclic GFR-binding peptide
  MOD_RES (2)..(36): Xaa is C or S
  MOD_RES (14)..(15)..(16)..(17)..(18): Xaa is A or G
  MOD_RES (19)..(20)..(21)..(22): Xaa is A or G or absent
GXSRVVMNPIKGYXXXXXXXXXFYLVNIPSLKTPAXTP

SEQ ID NO: 20765 - protein, 37 aa, Artificial Sequence
  Non-cyclic GFR-binding peptide
  MOD_RES (33)..(34): Xaa is C or S
EAVSMGEPIKGYTPVGMDDFYLVNIPSLKTPVXXAKG

SEQ ID NO: 20766 - protein, 33 aa, Artificial Sequence
  Non-cyclic GFR-binding peptide
  MOD_RES (33)..(33): Xaa is C or S
  MOD_RES (11)..(12)..(13)..(14)..(15): Xaa is A or G
  MOD_RES (16)..(17)..(18)..(19): Xaa is A or G or absent
RVVMNPIKGYXXXXXXXXXFYLVNIPSLKTPAX

SEQ ID NO: 20767 - protein, 34 aa, Artificial Sequence
  Non-cyclic GFR-binding peptide
  MOD_RES (34)..(34): Xaa is C or S
  MOD_RES (12)..(13)..(14)..(15)..(16): Xaa is A or G
  MOD_RES (17)..(18)..(19)..(20): Xaa is A or G or absent
AKVVMNPIKGYXXXXXXXXXFYLVNIPSLKTPAX

SEQ ID NO: 20768 - protein, 38 aa, Artificial Sequence
  Non-cyclic GFR-binding peptide
  MOD_RES (2)..(36)..(37): Xaa is C or S
  MOD_RES (14)..(15)..(16)..(17)..(18): Xaa is A or G
  MOD_RES (19)..(20)..(21)..(22): Xaa is A or G or absent
GXGEVVMDPIKGYXXXXXXXXXFYLMNIPSLETPVXXA

SEQ ID NO: 20769 - protein, 41 aa, Artificial Sequence
  Non-cyclic GFR-binding peptide
  MOD_RES (2)..(36)..(37): Xaa is C or S
  MOD_RES (14)..(15)..(16)..(17)..(18): Xaa is A or G
  MOD_RES (19)..(20)..(21)..(22): Xaa is A or G or absent
GXGEVVMDPIKGYXXXXXXXXXFYLMNIPSLETPVXXAKPI

SEQ ID NO: 20770 - protein, 37 aa, Artificial Sequence
  Non-cyclic GFR-binding peptide
  MOD_RES (34)..(35): Xaa is C or S
  MOD_RES (12)..(13)..(14)..(15)..(16): Xaa is A or G
  MOD_RES (17)..(18)..(19)..(20): Xaa is A or G or absent
GEVVMDPIKGYXXXXXXXXXFYLMNIPSLETPVXXAK

SEQ ID NO: 20771 - protein, 37 aa, Artificial Sequence
  Non-cyclic GFR-binding peptide
  MOD_RES (1)..(35)..(36): Xaa is C or S
  MOD_RES (13)..(14)..(15)..(16)..(17): Xaa is A or G
  MOD_RES (18)..(19)..(20)..(21): Xaa is A or G or absent
XGEVVMEPIKGYXXXXXXXXXFYLMNIPSLETPVXXA

SEQ ID NO: 20772 - protein, 38 aa, Artificial Sequence
  Non-cyclic GFR-binding peptide
  MOD_RES (1)..(33)..(34): Xaa is C or S
XAEVVMDPIKGYVVNNAADFYLINIPSLRAPVXXSAPA

SEQ ID NO: 20773 - protein, 38 aa, Artificial Sequence
  Non-cyclic GFR-binding peptide
  MOD_RES (2)..(4)..(38): Xaa is C or S
  MOD_RES (16)..(17)..(18)..(19)..(20): Xaa is A or G
  MOD_RES (21)..(22)..(23)..(24): Xaa is A or G or absent
HXGXAKVVMNPIKGYXXXXXXXXXFYLVNIPSLKTPAX

SEQ ID NO: 20774 - protein, 42 aa, Artificial Sequence
  Non-cyclic GFR-binding peptide
  MOD_RES (1)..(3)..(37)..(38): Xaa is C or S
  MOD_RES (15)..(16)..(17)..(18)..(19): Xaa is A or G
  MOD_RES (20)..(21)..(22)..(23): Xaa is A or G or absent
XGXARVVMNPIKGYXXXXXXXXXFYLVNIPSLQTPAXXPKPV

SEQ ID NO: 20775 - protein, 36 aa, Artificial Sequence
  Non-cyclic GFR-binding peptide
  MOD_RES (2)..(36): Xaa is C or S
  MOD_RES (14)..(15)..(16)..(17)..(18): Xaa is A or G
  MOD_RES (19)..(20)..(21)..(22): Xaa is A or G or absent
GXAKVVMNPIKGYXXXXXXXXXFYLVNIPSLKTPAX

SEQ ID NO: 20776 - protein, 36 aa, Artificial Sequence
  Non-cyclic GFR-binding peptide
  MOD_RES (2)..(4)..(35)..(36): Xaa is C or S
LXGXEEVIMPIKGYLLVRGNDFYLMNIPSTKVPAXX

SEQ ID NO: 20777 - protein, 30 aa, Artificial Sequence
  Non-cyclic GFR-binding peptide
RVVMNPIKGYIVNSSDDFYLVNIPSLQTPA

SEQ ID NO: 20778 - protein, 37 aa, Artificial Sequence
  Non-cyclic GFR-binding peptide
  MOD_RES (1)..(34)..(35): Xaa is C or S
XEAVSMGEPIKGYTPVGMDDFYLVNIPSLKTPVXXAK

SEQ ID NO: 20779 - protein, 38 aa, Artificial Sequence
  Non-cyclic GFR-binding peptide
  MOD_RES (2)..(4)..(36)..(37): Xaa is C or S
HXGXSRVVMNPIKGYIVNSSDDFYLVNIPSLKTPAXXP

SEQ ID NO: 20780 - protein, 33 aa, Artificial Sequence
  Non-cyclic GFR-binding peptide
  MOD_RES (1)..(33): Xaa is C or S
XGEVVMEPIKGYVVKDYEDFYLMNIPSLETPVX

SEQ ID NO: 20781 - protein, 37 aa, Artificial Sequence
  Non-cyclic GFR-binding peptide
  MOD_RES (33)..(33): Xaa is C or S
  MOD_RES (11)..(12)..(13)..(14)..(15): Xaa is A or G
  MOD_RES (16)..(17)..(18)..(19): Xaa is A or G or absent
RVVMNPIKGYXXXXXXXXXFYLVNIPSLKTPAXTPKT

SEQ ID NO: 20782 - protein, 35 aa, Artificial Sequence
  Non-cyclic GFR-binding peptide
  MOD_RES (1)..(33)..(34): Xaa is C or S
XSRVVMNPIKGYIVNSSDDFYLVNIPSLKTPAXXP

SEQ ID NO: 20783 - protein, 43 aa, Artificial Sequence
  Non-cyclic GFR-binding peptide
  MOD_RES (1)..(3)..(38)..(39): Xaa is C or S
  MOD_RES (16)..(17)..(18)..(19)..(20): Xaa is A or G
  MOD_RES (21)..(22)..(23)..(24): Xaa is A or G or absent
XGXEAVSMGEPIKGYXXXXXXXXXFYLVNIPSLKTPVXXAKGV

SEQ ID NO: 20784 - protein, 34 aa, Artificial Sequence
  Non-cyclic GFR-binding peptide
  MOD_RES (34)..(34): Xaa is C or S
  MOD_RES (12)..(13)..(14)..(15)..(16): Xaa is A or G
  MOD_RES (17)..(18)..(19)..(20): Xaa is A or G or absent
GEVVMDPIKGYXXXXXXXXXFYLMNIPSLETPVX

SEQ ID NO: 20785 - protein, 37 aa, Artificial Sequence
  Non-cyclic GFR-binding peptide
  MOD_RES (32)..(33): Xaa is C or S
AKVVMNPIKGYIVNNSSDFYLVNIPSLKTPAXXAKPV

SEQ ID NO: 20786 - protein, 39 aa, Artificial Sequence
  Non-cyclic GFR-binding peptide
  MOD_RES (1)..(3)..(38)..(39): Xaa is C or S
  MOD_RES (16)..(17)..(18)..(19)..(20): Xaa is A or G
  MOD_RES (21)..(22)..(23)..(24): Xaa is A or G or absent
XGXEAVSMGEPIKGYXXXXXXXXXFYLVNIPSLKTPVXX

SEQ ID NO: 20787 - protein, 35 aa, Artificial Sequence
  Non-cyclic GFR-binding peptide
  MOD_RES (2)..(35): Xaa is C or S
GXEAVSMGEPIKGYTPVGMDDFYLVNIPSLKTPVX

SEQ ID NO: 20788 - protein, 38 aa, Artificial Sequence
  Non-cyclic GFR-binding peptide
  MOD_RES (2)..(36)..(37): Xaa is C or S
  MOD_RES (14)..(15)..(16)..(17)..(18): Xaa is A or G
  MOD_RES (19)..(20)..(21)..(22): Xaa is A or G or absent
GXSEVVMDPIKGYXXXXXXXXXFYLINIPSLRTPVXXT

SEQ ID NO: 20789 - protein, 43 aa, Artificial Sequence
  Non-cyclic GFR-binding peptide
  MOD_RES (2)..(4)..(37)..(38): Xaa is C or S
RXGXEAVSMGEPIKGYTPVGMDDFYLVNIPSLKTPVXXAKGVK

SEQ ID NO: 20790 - protein, 36 aa, Artificial Sequence
  Non-cyclic GFR-binding peptide
  MOD_RES (1)..(34)..(35): Xaa is C or S
XEAVSMGEPIKGYTPVGMDDFYLVNIPSLKTPVXXA

SEQ ID NO: 20791 - protein, 41 aa, Artificial Sequence
  Non-cyclic GFR-binding peptide
  MOD_RES (35)..(36): Xaa is C or S
  MOD_RES (13)..(14)..(15)..(16)..(17): Xaa is A or G
  MOD_RES (18)..(19)..(20)..(21): Xaa is A or G or absent
EAVSMGEPIKGYXXXXXXXXXFYLVNIPSLKTPVXXAKGVK

SEQ ID NO: 20792 - protein, 39 aa, Artificial Sequence
  Non-cyclic GFR-binding peptide
  MOD_RES (2)..(4)..(38)..(39): Xaa is C or S
  MOD_RES (16)..(17)..(18)..(19)..(20): Xaa is A or G
  MOD_RES (21)..(22)..(23)..(24): Xaa is A or G or absent
HXGXARVVMNPIKGYXXXXXXXXXFYLVNIPSLQTPAXX

SEQ ID NO: 20793 - protein, 33 aa, Artificial Sequence
  Non-cyclic GFR-binding peptide
  MOD_RES (31)..(32): Xaa is C or S
EVVMEPIKGYVVKDYEDFYLMNIPSLETPVXXA

SEQ ID NO: 20794 - protein, 36 aa, Artificial Sequence
  Non-cyclic GFR-binding peptide
  MOD_RES (1)..(33)..(34): Xaa is C or S
XGEVVMEPIKGYVVKDYEDFYLMNIPSLETPVXXAK

SEQ ID NO: 20795 - protein, 38 aa, Artificial Sequence
  Non-cyclic GFR-binding peptide
  MOD_RES (34)..(35): Xaa is C or S
  MOD_RES (12)..(13)..(14)..(15)..(16): Xaa is A or G
  MOD_RES (17)..(18)..(19)..(20): Xaa is A or G or absent
GEVVMEPIKGYXXXXXXXXXFYLMNIPSLETPVXXAKP

SEQ ID NO: 20796 - protein, 41 aa, Artificial Sequence
  Non-cyclic GFR-binding peptide
  MOD_RES (1)..(3)..(36)..(37): Xaa is C or S
XGXEAVSMGEPIKGYTPVGMDDFYLVNIPSLKTPVXXAKGV

SEQ ID NO: 20797 - protein, 40 aa, Artificial Sequence
  Non-cyclic GFR-binding peptide
  MOD_RES (2)..(4)..(36)..(37): Xaa is C or S
RXGXGEVVMEPIKGYVVKDYEDFYLMNIPSLETPVXXAKP

SEQ ID NO: 20798 - protein, 35 aa, Artificial Sequence
  Non-cyclic GFR-binding peptide
  MOD_RES (2)..(34)..(35): Xaa is C or S
GXAEVVMDPIKGYVVNNAADFYLINIPSLRAPVXX

SEQ ID NO: 20799 - protein, 41 aa, Artificial Sequence
  Non-cyclic GFR-binding peptide
  MOD_RES (2)..(36)..(37): Xaa is C or S
  MOD_RES (14)..(15)..(16)..(17)..(18): Xaa is A or G
  MOD_RES (19)..(20)..(21)..(22): Xaa is A or G or absent
GXARVVMNPIKGYXXXXXXXXXFYLVNIPSLQTPAXXPKPV

SEQ ID NO: 20800 - protein, 38 aa, Artificial Sequence
  Non-cyclic GFR-binding peptide
  MOD_RES (1)..(3)..(35)..(36): Xaa is C or S
XGXAEVVMDPIKGYVVNNAADFYLINIPSLRAPVXXSA

SEQ ID NO: 20801 - protein, 40 aa, Artificial Sequence
  Non-cyclic GFR-binding peptide
  MOD_RES (34)..(35): Xaa is C or S
  MOD_RES (12)..(13)..(14)..(15)..(16): Xaa is A or G
  MOD_RES (17)..(18)..(19)..(20): Xaa is A or G or absent
AEVVMDPIKGYXXXXXXXXXFYLINIPSLRAPVXXSAPAA

SEQ ID NO: 20802 - protein, 40 aa, Artificial Sequence
  Non-cyclic GFR-binding peptide
  MOD_RES (1)..(3)..(37)..(38): Xaa is C or S
  MOD_RES (15)..(16)..(17)..(18)..(19): Xaa is A or G
  MOD_RES (20)..(21)..(22)..(23): Xaa is A or G or absent
XGXAKVVMNPIKGYXXXXXXXXXFYLVNIPSLKTPAXXAK

SEQ ID NO: 20803 - protein, 40 aa, Artificial Sequence
  Non-cyclic GFR-binding peptide
  MOD_RES (2)..(35)..(36): Xaa is C or S
GXEAVSMGEPIKGYTPVGMDDFYLVNIPSLKTPVXXAKGV

SEQ ID NO: 20804 - protein, 36 aa, Artificial Sequence
  Non-cyclic GFR-binding peptide
  MOD_RES (33)..(34): Xaa is C or S
EAVSMGEPIKGYTPVGMDDFYLVNIPSLKTPVXXAK

SEQ ID NO: 20805 - protein, 39 aa, Artificial Sequence
  Non-cyclic GFR-binding peptide
  MOD_RES (2)..(4)..(38)..(39): Xaa is C or S
  MOD_RES (16)..(17)..(18)..(19)..(20): Xaa is A or G
  MOD_RES (21)..(22)..(23)..(24): Xaa is A or G or absent
RXGXGEVVMDPIKGYXXXXXXXXXFYLMNIPSLETPVXX

SEQ ID NO: 20806 - protein, 39 aa, Artificial Sequence
  Non-cyclic GFR-binding peptide
  MOD_RES (1)..(3)..(35): Xaa is C or S
XGXSRVVMNPIKGYIVNSSDDFYLVNIPSLKTPAXTPKT

SEQ ID NO: 20807 - protein, 30 aa, Artificial Sequence; identical to SEQ ID NO: 1964
  Non-cyclic GFR-binding peptide

SEQ ID NO: 20808 - protein, 38 aa, Artificial Sequence
  Non-cyclic GFR-binding peptide
  MOD_RES (34)..(35): Xaa is C or S
  MOD_RES (12)..(13)..(14)..(15)..(16): Xaa is A or G
  MOD_RES (17)..(18)..(19)..(20): Xaa is A or G or absent
ARVVMNPIKGYXXXXXXXXXFYLVNIPSLQTPAXXPKP

SEQ ID NO: 20809 - protein, 36 aa, Artificial Sequence
  Non-cyclic GFR-binding peptide
  MOD_RES (34)..(35): Xaa is C or S
  MOD_RES (12)..(13)..(14)..(15)..(16): Xaa is A or G
  MOD_RES (17)..(18)..(19)..(20): Xaa is A or G or absent
ESVAMGPIKGYXXXXXXXXXFYLINIPSLKTPVXXA

SEQ ID NO: 20810 - protein, 34 aa, Artificial Sequence
  Non-cyclic GFR-binding peptide
  MOD_RES (33)..(34): Xaa is C or S
  MOD_RES (11)..(12)..(13)..(14)..(15): Xaa is A or G
  MOD_RES (16)..(17)..(18)..(19): Xaa is A or G or absent
EEVIMPIKGYXXXXXXXXXFYLMNIPSTKVPAXX

SEQ ID NO: 20811 - protein, 33 aa, Artificial Sequence
  Non-cyclic GFR-binding peptide
  MOD_RES (31)..(32): Xaa is C or S
EVVMDPIKGYVVNNAADFYLINIPSLRAPVXXS

SEQ ID NO: 20812 - protein, 38 aa, Artificial Sequence
  Non-cyclic GFR-binding peptide
  MOD_RES (1)..(3)..(38): Xaa is C or S
  MOD_RES (16)..(17)..(18)..(19)..(20): Xaa is A or G
  MOD_RES (21)..(22)..(23)..(24): Xaa is A or G or absent
XGXEAVSMGEPIKGYXXXXXXXXXFYLVNIPSLKTPVX

SEQ ID NO: 20813 - protein, 35 aa, Artificial Sequence
  Non-cyclic GFR-binding peptide
  MOD_RES (2)..(2): Xaa is C or S
  MOD_RES (14)..(15)..(16)..(17)..(18): Xaa is A or G
  MOD_RES (19)..(20)..(21)..(22): Xaa is A or G or absent
GXGEVVMEPIKGYXXXXXXXXXFYLMNIPSLETPV

SEQ ID NO: 20814 - protein, 32 aa, Artificial Sequence
  Non-cyclic GFR-binding peptide
  MOD_RES (32)..(32): Xaa is C or S
GEVVMEPIKGYVVKDYEDFYLMNIPSLETPVX

SEQ ID NO: 20815 - protein, 34 aa, Artificial Sequence
  Non-cyclic GFR-binding peptide
  MOD_RES (2)..(34): Xaa is C or S
GXESVAMGPIKGYYTVVGKDFYLINIPSLKTPVX

SEQ ID NO: 20816 - protein, 40 aa, Artificial Sequence
  Non-cyclic GFR-binding peptide
  MOD_RES (2)..(4)..(37)..(38): Xaa is C or S
  MOD_RES (15)..(16)..(17)..(18)..(19): Xaa is A or G
  MOD_RES (20)..(21)..(22)..(23): Xaa is A or G or absent
LXGXEEVIMPIKGYXXXXXXXXXFYLMNIPSTKVPAXXTS

SEQ ID NO: 20817 - protein, 37 aa, Artificial Sequence
  Non-cyclic GFR-binding peptide
  MOD_RES (2)..(36)..(37): Xaa is C or S
  MOD_RES (14)..(15)..(16)..(17)..(18): Xaa is A or G
  MOD_RES (19)..(20)..(21)..(22): Xaa is A or G or absent
GXAEVVMDPIKGYXXXXXXXXXFYLINIPSLRAPVXX

SEQ ID NO: 20818 - protein, 35 aa, Artificial Sequence
  Non-cyclic GFR-binding peptide
  MOD_RES (34)..(35): Xaa is C or S
  MOD_RES (12)..(13)..(14)..(15)..(16): Xaa is A or G
  MOD_RES (17)..(18)..(19)..(20): Xaa is A or G or absent
ARVVMNPIKGYXXXXXXXXXFYLVNIPSLQTPAXX

SEQ ID NO: 20819 - protein, 34 aa, Artificial Sequence
  Non-cyclic GFR-binding peptide
  MOD_RES (1)..(33)..(34): Xaa is C or S
XGEVVMDPIKGYVVKENEDFYLMNIPSLETPVXX

SEQ ID NO: 20820 - protein, 38 aa, Artificial Sequence
  Non-cyclic GFR-binding peptide
  MOD_RES (32)..(33): Xaa is C or S
ARVVMNPIKGYIVNSSDDFYLVNIPSLQTPAXXPKPVT

SEQ ID NO: 20821 - protein, 34 aa, Artificial Sequence
  Non-cyclic GFR-binding peptide
  MOD_RES (33)..(34): Xaa is C or S
  MOD_RES (11)..(12)..(13)..(14)..(15): Xaa is A or G
  MOD_RES (16)..(17)..(18)..(19): Xaa is A or G or absent
RVVMNPIKGYXXXXXXXXXFYLVNIPSLKTPAXX

SEQ ID NO: 20822 - protein, 34 aa, Artificial Sequence
  Non-cyclic GFR-binding peptide
  MOD_RES (33)..(34): Xaa is C or S
  MOD_RES (11)..(12)..(13)..(14)..(15): Xaa is A or G
  MOD_RES (16)..(17)..(18)..(19): Xaa is A or G or absent
KVVMNPIKGYXXXXXXXXXFYLVNIPSLKTPAXX

SEQ ID NO: 20823 - protein, 36 aa, Artificial Sequence
  Non-cyclic GFR-binding peptide
  MOD_RES (2)..(2): Xaa is C or S
  MOD_RES (15)..(16)..(17)..(18)..(19): Xaa is A or G
  MOD_RES (20)..(21)..(22)..(23): Xaa is A or G or absent
GXEAVSMGEPIKGYXXXXXXXXXFYLVNIPSLKTPV

SEQ ID NO: 20824 - protein, 38 aa, Artificial Sequence
  Non-cyclic GFR-binding peptide
  MOD_RES (2)..(34)..(35): Xaa is C or S
GXGEVVMEPIKGYVVKDYEDFYLMNIPSLETPVXXAKP

SEQ ID NO: 20825 - protein, 36 aa, Artificial Sequence
  Non-cyclic GFR-binding peptide
  MOD_RES (2)..(36): Xaa is C or S
  MOD_RES (14)..(15)..(16)..(17)..(18): Xaa is A or G
  MOD_RES (19)..(20)..(21)..(22): Xaa is A or G or absent
GXGEVVMEPIKGYXXXXXXXXXFYLMNIPSLETPVX

SEQ ID NO: 20826 - protein, 43 aa, Artificial Sequence
  Non-cyclic GFR-binding peptide
  MOD_RES (1)..(3)..(37): Xaa is C or S
  MOD_RES (15)..(16)..(17)..(18)..(19): Xaa is A or G
  MOD_RES (20)..(21)..(22)..(23): Xaa is A or G or absent
XGXSRVVMNPIKGYXXXXXXXXXFYLVNIPSLKTPAXTPKTVH

SEQ ID NO: 20827 - protein, 36 aa, Artificial Sequence
  Non-cyclic GFR-binding peptide
  MOD_RES (35)..(36): Xaa is C or S
  MOD_RES (13)..(14)..(15)..(16)..(17): Xaa is A or G
  MOD_RES (18)..(19)..(20)..(21): Xaa is A or G or absent
EAVSMGEPIKGYXXXXXXXXXFYLVNIPSLKTPVXX

SEQ ID NO: 20828 - protein, 32 aa, Artificial Sequence
  Non-cyclic GFR-binding peptide
  MOD_RES (1)..(1): Xaa is C or S
XGEVVMDPIKGYVVKENEDFYLMNIPSLETPV

SEQ ID NO: 20829 - protein, 40 aa, Artificial Sequence
  Non-cyclic GFR-binding peptide
  MOD_RES (2)..(4)..(38)..(39): Xaa is C or S
  MOD_RES (16)..(17)..(18)..(19)..(20): Xaa is A or G
  MOD_RES (21)..(22)..(23)..(24): Xaa is A or G or absent
RXGXSEVVMDPIKGYXXXXXXXXXFYLINIPSLRTPVXXT

SEQ ID NO: 20830 - protein, 39 aa, Artificial Sequence
  Non-cyclic GFR-binding peptide
  MOD_RES (1)..(35)..(36): Xaa is C or S
  MOD_RES (13)..(14)..(15)..(16)..(17): Xaa is A or G
  MOD_RES (18)..(19)..(20)..(21): Xaa is A or G or absent
XSRVVMNPIKGYXXXXXXXXXFYLVNIPSLKTPAXXPKP

SEQ ID NO: 20831 - protein, 38 aa, Artificial Sequence
  Non-cyclic GFR-binding peptide
  MOD_RES (34)..(35): Xaa is C or S
  MOD_RES (12)..(13)..(14)..(15)..(16): Xaa is A or G
  MOD_RES (17)..(18)..(19)..(20): Xaa is A or G or absent
AEVVMDPIKGYXXXXXXXXXFYLINIPSLRAPVXXSAP

SEQ ID NO: 20832 - protein, 38 aa, Artificial Sequence
  Non-cyclic GFR-binding peptide
  MOD_RES (2)..(4)..(35)..(36): Xaa is C or S
LXGXEEVIMPIKGYLLVRGNDFYLMNIPSTKVPAXXTS

SEQ ID NO: 20833 - protein, 36 aa, Artificial Sequence
  Non-cyclic GFR-binding peptide
  MOD_RES (33)..(34): Xaa is C or S
  MOD_RES (11)..(12)..(13)..(14)..(15): Xaa is A or G
  MOD_RES (16)..(17)..(18)..(19): Xaa is A or G or absent
SVAMGPIKGYXXXXXXXXXFYLINIPSLKTPVXXAK

SEQ ID NO: 20834 - protein, 34 aa, Artificial Sequence
  Non-cyclic GFR-binding peptide
  MOD_RES (1)..(3): Xaa is C or S
XGXAKVVMNPIKGYIVNNSSDFYLVNIPSLKTPA

SEQ ID NO: 20835 - protein, 39 aa, Artificial Sequence
  Non-cyclic GFR-binding peptide
  MOD_RES (1)..(35)..(36): Xaa is C or S
  MOD_RES (13)..(14)..(15)..(16)..(17): Xaa is A or G
  MOD_RES (18)..(19)..(20)..(21): Xaa is A or G or absent
XGEVVMDPIKGYXXXXXXXXXFYLMNIPSLETPVXXAKP

SEQ ID NO: 20836 - protein, 40 aa, Artificial Sequence
  Non-cyclic GFR-binding peptide
  MOD_RES (1)..(3)..(35)..(36): Xaa is C or S
XGXGEVVMDPIKGYVVKENEDFYLMNIPSLETPVXXAKPI

SEQ ID NO: 20837 - protein, 34 aa, Artificial Sequence
  Non-cyclic GFR-binding peptide
  MOD_RES (1)..(33)..(34): Xaa is C or S
XGEVVMEPIKGYVVKDYEDFYLMNIPSLETPVXX

SEQ ID NO: 20838 - protein, 33 aa, Artificial Sequence
  Non-cyclic GFR-binding peptide
  MOD_RES (12)..(13)..(14)..(15)..(16): Xaa is A or G
  MOD_RES (17)..(18)..(19)..(20): Xaa is A or G or absent
ARVVMNPIKGYXXXXXXXXXFYLVNIPSLQTPA

SEQ ID NO: 20839 - protein, 40 aa, Artificial Sequence
  Non-cyclic GFR-binding peptide
  MOD_RES (2)..(4)..(38)..(39): Xaa is C or S
  MOD_RES (16)..(17)..(18)..(19)..(20): Xaa is A or G
  MOD_RES (21)..(22)..(23)..(24): Xaa is A or G or absent
HXGXARVVMNPIKGYXXXXXXXXXFYLVNIPSLQTPAXXP

SEQ ID NO: 20840 - protein, 36 aa, Artificial Sequence
  Non-cyclic GFR-binding peptide
  MOD_RES (1)..(3): Xaa is C or S
  MOD_RES (15)..(16)..(17)..(18)..(19): Xaa is A or G
  MOD_RES (20)..(21)..(22)..(23): Xaa is A or G or absent
XGXSEVVMDPIKGYXXXXXXXXXFYLINIPSLRTPV

SEQ ID NO: 20841 - protein, 39 aa, Artificial Sequence
  Non-cyclic GFR-binding peptide
  MOD_RES (1)..(35)..(36): Xaa is C or S
  MOD_RES (13)..(14)..(15)..(16)..(17): Xaa is A or G
  MOD_RES (18)..(19)..(20)..(21): Xaa is A or G or absent
XSEVVMDPIKGYXXXXXXXXXFYLINIPSLRTPVXXTPP

SEQ ID NO: 20842 - protein, 37 aa, Artificial Sequence
  Non-cyclic GFR-binding peptide
  MOD_RES (2)..(4)..(36)..(37): Xaa is C or S
RXGXGEVVMEPIKGYVVKDYEDFYLMNIPSLETPVXX

SEQ ID NO: 20843 - protein, 39 aa, Artificial Sequence
  Non-cyclic GFR-binding peptide
  MOD_RES (34)..(35): Xaa is C or S
  MOD_RES (12)..(13)..(14)..(15)..(16): Xaa is A or G
  MOD_RES (17)..(18)..(19)..(20): Xaa is A or G or absent
AEVVMDPIKGYXXXXXXXXXFYLINIPSLRAPVXXSAPA

SEQ ID NO: 20844 - protein, 37 aa, Artificial Sequence
  Non-cyclic GFR-binding peptide
  MOD_RES (2)..(4)..(36)..(37): Xaa is C or S
RXGXSEVVMDPIKGYVVNNASDFYLINIPSLRTPVXX

SEQ ID NO: 20845 - protein, 37 aa, Artificial Sequence
  Non-cyclic GFR-binding peptide
  MOD_RES (2)..(34)..(35): Xaa is C or S
GXESVAMGPIKGYYTVVGKDFYLINIPSLKTPVXXAK

SEQ ID NO: 20846 - protein, 36 aa, Artificial Sequence
  Non-cyclic GFR-binding peptide
  MOD_RES (34)..(35): Xaa is C or S
  MOD_RES (12)..(13)..(14)..(15)..(16): Xaa is A or G
  MOD_RES (17)..(18)..(19)..(20): Xaa is A or G or absent
AKVVMNPIKGYXXXXXXXXXFYLVNIPSLKTPAXXA

SEQ ID NO: 20847 - protein, 38 aa, Artificial Sequence
  Non-cyclic GFR-binding peptide
  MOD_RES (1)..(3)..(35)..(36): Xaa is C or S
XGXAKVVMNPIKGYIVNNSSDFYLVNIPSLKTPAXXAK

SEQ ID NO: 20848 - protein, 36 aa, Artificial Sequence
  Non-cyclic GFR-binding peptide
  MOD_RES (32)..(33): Xaa is C or S
SRVVMNPIKGYIVNSSDDFYLVNIPSLKTPAXXPKP

SEQ ID NO: 20849 - protein, 38 aa, Artificial Sequence
  Non-cyclic GFR-binding peptide
  MOD_RES (1)..(36)..(37): Xaa is C or S
  MOD_RES (14)..(15)..(16)..(17)..(18): Xaa is A or G
  MOD_RES (19)..(20)..(21)..(22): Xaa is A or G or absent
XEAVSMGEPIKGYXXXXXXXXXFYLVNIPSLKTPVXXA

SEQ ID NO: 20850 - protein, 35 aa, Artificial Sequence
  Non-cyclic GFR-binding peptide
  MOD_RES (2)..(34)..(35): Xaa is C or S
GXSRVVMNPIKGYIVNSSDDFYLVNIPSLKTPAXX

SEQ ID NO: 20851 - protein, 41 aa, Artificial Sequence
  Non-cyclic GFR-binding peptide
  MOD_RES (2)..(4)..(38)..(39): Xaa is C or S
  MOD_RES (16)..(17)..(18)..(19)..(20): Xaa is A or G
  MOD_RES (21)..(22)..(23)..(24): Xaa is A or G or absent
HXGXSRVVMNPIKGYXXXXXXXXXFYLVNIPSLKTPAXXPK

SEQ ID NO: 20852 - protein, 42 aa, Artificial Sequence
  Non-cyclic GFR-binding peptide
  MOD_RES (2)..(4)..(38): Xaa is C or S
  MOD_RES (16)..(17)..(18)..(19)..(20): Xaa is A or G
  MOD_RES (21)..(22)..(23)..(24): Xaa is A or G or absent
HXGXSRVVMNPIKGYXXXXXXXXXFYLVNIPSLKTPAXTPKT

SEQ ID NO: 20853 - protein, 38 aa, Artificial Sequence
  Non-cyclic GFR-binding peptide
  MOD_RES (1)..(3)..(35)..(36): Xaa is C or S
XGXSEVVMDPIKGYVVNNASDFYLINIPSLRTPVXXTP

SEQ ID NO: 20854 - protein, 38 aa, Artificial Sequence
  Non-cyclic GFR-binding peptide
  MOD_RES (32)..(32): Xaa is C or S
SRVVMNPIKGYIVNSSDDFYLVNIPSLKTPAXTPKTVH

SEQ ID NO: 20855 - protein, 37 aa, Artificial Sequence
  Non-cyclic GFR-binding peptide
  MOD_RES (1)..(3)..(37): Xaa is C or S
  MOD_RES (15)..(16)..(17)..(18)..(19): Xaa is A or G
  MOD_RES (20)..(21)..(22)..(23): Xaa is A or G or absent
XGXARVVMNPIKGYXXXXXXXXXFYLVNIPSLQTPAX

SEQ ID NO: 20856 - protein, 34 aa, Artificial Sequence
  Non-cyclic GFR-binding peptide
  MOD_RES (1)..(3): Xaa is C or S
XGXSRVVMNPIKGYIVNSSDDFYLVNIPSLKTPA

SEQ ID NO: 20857 - protein, 40 aa, Artificial Sequence
  Non-cyclic GFR-binding peptide
  MOD_RES (1)..(3)..(35)..(36): Xaa is C or S
XGXGEVVMEPIKGYVVKDYEDFYLMNIPSLETPVXXAKPI

SEQ ID NO: 20858 - protein, 42 aa, Artificial Sequence
  Non-cyclic GFR-binding peptide
  MOD_RES (2)..(36)..(37): Xaa is C or S
  MOD_RES (14)..(15)..(16)..(17)..(18): Xaa is A or G
  MOD_RES (19)..(20)..(21)..(22): Xaa is A or G or absent
GXARVVMNPIKGYXXXXXXXXXFYLVNIPSLQTPAXXPKPVT

SEQ ID NO: 20859 - protein, 40 aa, Artificial Sequence
  Non-cyclic GFR-binding peptide
  MOD_RES (34)..(35): Xaa is C or S
  MOD_RES (12)..(13)..(14)..(15)..(16): Xaa is A or G
  MOD_RES (17)..(18)..(19)..(20): Xaa is A or G or absent
SRVVMNPIKGYXXXXXXXXXFYLVNIPSLKTPAXXPKPVY

SEQ ID NO: 20860 - protein, 33 aa, Artificial Sequence
  Non-cyclic GFR-binding peptide
  MOD_RES (1)..(3): Xaa is C or S
XGXEEVIMPIKGYLLVRGNDFYLMNIPSTKVPA

SEQ ID NO: 20861 - protein, 35 aa, Artificial Sequence
  Non-cyclic GFR-binding peptide
  MOD_RES (1)..(35): Xaa is C or S
  MOD_RES (13)..(14)..(15)..(16)..(17): Xaa is A or G
  MOD_RES (18)..(19)..(20)..(21): Xaa is A or G or absent
XGEVVMDPIKGYXXXXXXXXXFYLMNIPSLETPVX

SEQ ID NO: 20862 - protein, 37 aa, Artificial Sequence
  Non-cyclic GFR-binding peptide
  MOD_RES (31)..(32): Xaa is C or S
EVVMEPIKGYVVKDYEDFYLMNIPSLETPVXXAKPIS

SEQ ID NO: 20863 - protein, 37 aa, Artificial Sequence
  Non-cyclic GFR-binding peptide
  MOD_RES (32)..(33): Xaa is C or S
SRVVMNPIKGYIVNSSDDFYLVNIPSLKTPAXXPKPV

SEQ ID NO: 20864 - protein, 43 aa, Artificial Sequence
  Non-cyclic GFR-binding peptide
  MOD_RES (2)..(4)..(38)..(39): Xaa is C or S
  MOD_RES (16)..(17)..(18)..(19)..(20): Xaa is A or G
  MOD_RES (21)..(22)..(23)..(24): Xaa is A or G or absent
HXGXSRVVMNPIKGYXXXXXXXXXFYLVNIPSLKTPAXXPKPV

SEQ ID NO: 20865 - protein, 37 aa, Artificial Sequence
  Non-cyclic GFR-binding peptide
  MOD_RES (1)..(3)..(37): Xaa is C or S
  MOD_RES (15)..(16)..(17)..(18)..(19): Xaa is A or G
  MOD_RES (20)..(21)..(22)..(23): Xaa is A or G or absent
XGXGEVVMDPIKGYXXXXXXXXXFYLMNIPSLETPVX

SEQ ID NO: 20866 - protein, 36 aa, Artificial Sequence
  Non-cyclic GFR-binding peptide
  MOD_RES (1)..(3)..(35)..(36): Xaa is C or S
XGXARVVMNPIKGYIVNSSDDFYLVNIPSLQTPAXX

SEQ ID NO: 20867 - protein, 39 aa, Artificial Sequence
  Non-cyclic GFR-binding peptide
  MOD_RES (2)..(4)..(39): Xaa is C or S
  MOD_RES (17)..(18)..(19)..(20)..(21): Xaa is A or G
  MOD_RES (22)..(23)..(24)..(25): Xaa is A or G or absent
RXGXEAVSMGEPIKGYXXXXXXXXXFYLVNIPSLKTPVX

SEQ ID NO: 20868 - protein, 33 aa, Artificial Sequence
  Non-cyclic GFR-binding peptide
  MOD_RES (33)..(33): Xaa is C or S
  MOD_RES (11)..(12)..(13)..(14)..(15): Xaa is A or G
  MOD_RES (16)..(17)..(18)..(19): Xaa is A or G or absent
SVAMGPIKGYXXXXXXXXXFYLINIPSLKTPVX

SEQ ID NO: 20869 - protein, 40 aa, Artificial Sequence
  Non-cyclic GFR-binding peptide
  MOD_RES (1)..(3)..(36)..(37): Xaa is C or S
XGXEAVSMGEPIKGYTPVGMDDFYLVNIPSLKTPVXXAKG

SEQ ID NO: 20870 - protein, 37 aa, Artificial Sequence
  Non-cyclic GFR-binding peptide
  MOD_RES (31)..(32): Xaa is C or S
EVVMDPIKGYVVNNASDFYLINIPSLRTPVXXTPPTS

SEQ ID NO: 20871 - protein, 36 aa, Artificial Sequence
  Non-cyclic GFR-binding peptide
  MOD_RES (1)..(33)..(34): Xaa is C or S
XAEVVMDPIKGYVVNNAADFYLINIPSLRAPVXXSA

SEQ ID NO: 20872 - protein, 37 aa, Artificial Sequence
  Non-cyclic GFR-binding peptide
  MOD_RES (1)..(3)..(37): Xaa is C or S
  MOD_RES (15)..(16)..(17)..(18)..(19): Xaa is A or G
  MOD_RES (20)..(21)..(22)..(23): Xaa is A or G or absent
XGXESVAMGPIKGYXXXXXXXXXFYLINIPSLKTPVX

SEQ ID NO: 20873 - protein, 38 aa, Artificial Sequence
  Non-cyclic GFR-binding peptide
  MOD_RES (2)..(4)..(38): Xaa is C or S
  MOD_RES (16)..(17)..(18)..(19)..(20): Xaa is A or G
  MOD_RES (21)..(22)..(23)..(24): Xaa is A or G or absent
RXGXGEVVMEPIKGYXXXXXXXXXFYLMNIPSLETPVX

SEQ ID NO: 20874 - protein, 40 aa, Artificial Sequence
  Non-cyclic GFR-binding peptide
  MOD_RES (2)..(36)..(37): Xaa is C or S
  MOD_RES (14)..(15)..(16)..(17)..(18): Xaa is A or G
  MOD_RES (19)..(20)..(21)..(22): Xaa is A or G or absent
GXARVVMNPIKGYXXXXXXXXXFYLVNIPSLQTPAXXPKP

SEQ ID NO: 20875 - protein, 36 aa, Artificial Sequence
  Non-cyclic GFR-binding peptide
  MOD_RES (1)..(3)..(35): Xaa is C or S
XGXSRVVMNPIKGYIVNSSDDFYLVNIPSLKTPAXT

SEQ ID NO: 20876 - protein, 34 aa, Artificial Sequence
  Non-cyclic GFR-binding peptide
  MOD_RES (34)..(34): Xaa is C or S
  MOD_RES (12)..(13)..(14)..(15)..(16): Xaa is A or G
  MOD_RES (17)..(18)..(19)..(20): Xaa is A or G or absent
SRVVMNPIKGYXXXXXXXXXFYLVNIPSLKTPAX

SEQ ID NO: 20877 - protein, 36 aa, Artificial Sequence
  Non-cyclic GFR-binding peptide
  MOD_RES (2)..(4)..(36): Xaa is C or S
RXGXSEVVMDPIKGYVVNNASDFYLINIPSLRTPVX

SEQ ID NO: 20878 - protein, 41 aa, Artificial Sequence
  Non-cyclic GFR-binding peptide
  MOD_RES (1)..(3)..(37)..(38): Xaa is C or S
  MOD_RES (15)..(16)..(17)..(18)..(19): Xaa is A or G
  MOD_RES (20)..(21)..(22)..(23): Xaa is A or G or absent
XGXSEVVMDPIKGYXXXXXXXXXFYLINIPSLRTPVXXTPP

SEQ ID NO: 20879 - protein, 37 aa, Artificial Sequence
  Non-cyclic GFR-binding peptide
  MOD_RES (1)..(35)..(36): Xaa is C or S
  MOD_RES (13)..(14)..(15)..(16)..(17): Xaa is A or G
  MOD_RES (18)..(19)..(20)..(21): Xaa is A or G or absent
XAKVVMNPIKGYXXXXXXXXXFYLVNIPSLKTPAXXA

SEQ ID NO: 20880 - protein, 37 aa, Artificial Sequence
  Non-cyclic GFR-binding peptide
  MOD_RES (1)..(3)..(35): Xaa is C or S
XGXSRVVMNPIKGYIVNSSDDFYLVNIPSLKTPAXTP

SEQ ID NO: 20881 - protein, 39 aa, Artificial Sequence
  Non-cyclic GFR-binding peptide
  MOD_RES (34)..(35): Xaa is C or S
  MOD_RES (12)..(13)..(14)..(15)..(16): Xaa is A or G
  MOD_RES (17)..(18)..(19)..(20): Xaa is A or G or absent
ARVVMNPIKGYXXXXXXXXXFYLVNIPSLQTPAXXPKPV

SEQ ID NO: 20882 - protein, 37 aa, Artificial Sequence
  Non-cyclic GFR-binding peptide
  MOD_RES (1)..(33)..(34): Xaa is C or S
XAEVVMDPIKGYVVNNAADFYLINIPSLRAPVXXSAP

SEQ ID NO: 20883 - protein, 37 aa, Artificial Sequence
  Non-cyclic GFR-binding peptide
  MOD_RES (1)..(3)..(37): Xaa is C or S
  MOD_RES (15)..(16)..(17)..(18)..(19): Xaa is A or G
  MOD_RES (20)..(21)..(22)..(23): Xaa is A or G or absent
XGXGEVVMEPIKGYXXXXXXXXXFYLMNIPSLETPVX

SEQ ID NO: 20884 - protein, 39 aa, Artificial Sequence
  Non-cyclic GFR-binding peptide
  MOD_RES (1)..(34)..(35): Xaa is C or S
XEAVSMGEPIKGYTPVGMDDFYLVNIPSLKTPVXXAKGV

SEQ ID NO: 20885 - protein, 37 aa, Artificial Sequence
  Non-cyclic GFR-binding peptide
  MOD_RES (33)..(34): Xaa is C or S
  MOD_RES (11)..(12)..(13)..(14)..(15): Xaa is A or G
  MOD_RES (16)..(17)..(18)..(19): Xaa is A or G or absent
EVVMEPIKGYXXXXXXXXXFYLMNIPSLETPVXXAKP

SEQ ID NO: 20886 - protein, 35 aa, Artificial Sequence
  Non-cyclic GFR-binding peptide
  MOD_RES (1)..(35): Xaa is C or S
  MOD_RES (13)..(14)..(15)..(16)..(17): Xaa is A or G
  MOD_RES (18)..(19)..(20)..(21): Xaa is A or G or absent
XSRVVMNPIKGYXXXXXXXXXFYLVNIPSLKTPAX

SEQ ID NO: 20887 - protein, 34 aa, Artificial Sequence
  Non-cyclic GFR-binding peptide
  MOD_RES (1)..(1): Xaa is C or S
  MOD_RES (13)..(14)..(15)..(16)..(17): Xaa is A or G
  MOD_RES (18)..(19)..(20)..(21): Xaa is A or G or absent
XESVAMGPIKGYXXXXXXXXXFYLINIPSLKTPV

SEQ ID NO: 20888 - protein, 38 aa, Artificial Sequence
  Non-cyclic GFR-binding peptide
  MOD_RES (2)..(4)..(36)..(37): Xaa is C or S
RXGXAEVVMDPIKGYVVNNAADFYLINIPSLRAPVXXS

SEQ ID NO: 20889 - protein, 38 aa, Artificial Sequence
  Non-cyclic GFR-binding peptide
  MOD_RES (33)..(34): Xaa is C or S
  MOD_RES (11)..(12)..(13)..(14)..(15): Xaa is A or G
  MOD_RES (16)..(17)..(18)..(19): Xaa is A or G or absent
EVVMEPIKGYXXXXXXXXXFYLMNIPSLETPVXXAKPI

SEQ ID NO: 20890 - protein, 32 aa, Artificial Sequence
  Non-cyclic GFR-binding peptide
  MOD_RES (11)..(12)..(13)..(14)..(15): Xaa is A or G
  MOD_RES (16)..(17)..(18)..(19): Xaa is A or G or absent
RVVMNPIKGYXXXXXXXXXFYLVNIPSLKTPA

SEQ ID NO: 20891 - protein, 36 aa, Artificial Sequence
  Non-cyclic GFR-binding peptide
  MOD_RES (33)..(34): Xaa is C or S
  MOD_RES (11)..(12)..(13)..(14)..(15): Xaa is A or G
  MOD_RES (16)..(17)..(18)..(19): Xaa is A or G or absent
KVVMNPIKGYXXXXXXXXXFYLVNIPSLKTPAXXAK

SEQ ID NO: 20892 - protein, 44 aa, Artificial Sequence
  Non-cyclic GFR-binding peptide
  MOD_RES (2)..(4)..(38)..(39): Xaa is C or S
  MOD_RES (16)..(17)..(18)..(19)..(20): Xaa is A or G
  MOD_RES (21)..(22)..(23)..(24): Xaa is A or G or absent
HXGXSRVVMNPIKGYXXXXXXXXXFYLVNIPSLKTPAXXPKPVH

SEQ ID NO: 20893 - protein, 32 aa, Artificial Sequence
  Non-cyclic GFR-binding peptide
  MOD_RES (32)..(32): Xaa is C or S
ESVAMGPIKGYYTVVGKDFYLINIPSLKTPVX

SEQ ID NO: 20894 - protein, 40 aa, Artificial Sequence
  Non-cyclic GFR-binding peptide
  MOD_RES (2)..(4)..(38)..(39): Xaa is C or S
  MOD_RES (16)..(17)..(18)..(19)..(20): Xaa is A or G
  MOD_RES (21)..(22)..(23)..(24): Xaa is A or G or absent
RXGXGEVVMDPIKGYXXXXXXXXXFYLMNIPSLETPVXXA

SEQ ID NO: 20895 - protein, 38 aa, Artificial Sequence
  Non-cyclic GFR-binding peptide
  MOD_RES (33)..(34): Xaa is C or S
EAVSMGEPIKGYTPVGMDDFYLVNIPSLKTPVXXAKGV

SEQ ID NO: 20896 - protein, 43 aa, Artificial Sequence
  Non-cyclic GFR-binding peptide
  MOD_RES (1)..(3)..(37)..(38): Xaa is C or S
  MOD_RES (15)..(16)..(17)..(18)..(19): Xaa is A or G
  MOD_RES (20)..(21)..(22)..(23): Xaa is A or G or absent
XGXSRVVMNPIKGYXXXXXXXXXFYLVNIPSLKTPAXXPKPVH

SEQ ID NO: 20897 - protein, 32 aa, Artificial Sequence
  Non-cyclic GFR-binding peptide
  MOD_RES (31)..(31): Xaa is C or S
RVVMNPIKGYIVNSSDDFYLVNIPSLKTPAXT

SEQ ID NO: 20898 - protein, 37 aa, Artificial Sequence
  Non-cyclic GFR-binding peptide
  MOD_RES (33)..(34): Xaa is C or S
  MOD_RES (11)..(12)..(13)..(14)..(15): Xaa is A or G
  MOD_RES (16)..(17)..(18)..(19): Xaa is A or G or absent
RVVMNPIKGYXXXXXXXXXFYLVNIPSLKTPAXXPKP

SEQ ID NO: 20899 - protein, 37 aa, Artificial Sequence
  Non-cyclic GFR-binding peptide
  MOD_RES (2)..(4)..(36)..(37): Xaa is C or S
RXGXGEVVMDPIKGYVVKENEDFYLMNIPSLETPVXX

SEQ ID NO: 20900 - protein, 37 aa, Artificial Sequence
  Non-cyclic GFR-binding peptide
  MOD_RES (1)..(3)..(35)..(36): Xaa is C or S
XGXSRVVMNPIKGYIVNSSDDFYLVNIPSLKTPAXXP

SEQ ID NO: 20901 - protein, 37 aa, Artificial Sequence
  Non-cyclic GFR-binding peptide
  MOD_RES (1)..(3)..(35)..(36): Xaa is C or S
XGXSEVVMDPIKGYVVNNASDFYLINIPSLRTPVXXT

SEQ ID NO: 20902 - protein, 41 aa, Artificial Sequence
  Non-cyclic GFR-binding peptide
  MOD_RES (2)..(4)..(36)..(37): Xaa is C or S
HXGXAKVVMNPIKGYIVNNSSDFYLVNIPSLKTPAXXAKPV

SEQ ID NO: 20903 - protein, 39 aa, Artificial Sequence
  Non-cyclic GFR-binding peptide
  MOD_RES (2)..(4)..(38)..(39): Xaa is C or S
  MOD_RES (16)..(17)..(18)..(19)..(20): Xaa is A or G
  MOD_RES (21)..(22)..(23)..(24): Xaa is A or G or absent
HXGXSRVVMNPIKGYXXXXXXXXXFYLVNIPSLKTPAXX

SEQ ID NO: 20904 - protein, 35 aa, Artificial Sequence
  Non-cyclic GFR-binding peptide
  MOD_RES (2)..(34): Xaa is C or S
GXSRVVMNPIKGYIVNSSDDFYLVNIPSLKTPAXT

SEQ ID NO: 20905 - protein, 34 aa, Artificial Sequence
  Non-cyclic GFR-binding peptide
  MOD_RES (2)..(34): Xaa is C or S
GXAEVVMDPIKGYVVNNAADFYLINIPSLRAPVX

SEQ ID NO: 20906 - protein, 35 aa, Artificial Sequence
  Non-cyclic GFR-binding peptide
  MOD_RES (31)..(32): Xaa is C or S
EVVMDPIKGYVVNNASDFYLINIPSLRTPVXXTPP

SEQ ID NO: 20907 - protein, 34 aa, Artificial Sequence
  Non-cyclic GFR-binding peptide
  MOD_RES (1)..(33)..(34): Xaa is C or S
XAKVVMNPIKGYIVNNSSDFYLVNIPSLKTPAXX

SEQ ID NO: 20908 - protein, 40 aa, Artificial Sequence
  Non-cyclic GFR-binding peptide
  MOD_RES (2)..(34)..(35): Xaa is C or S
GXSRVVMNPIKGYIVNSSDDFYLVNIPSLKTPAXXPKPVY

SEQ ID NO: 20909 - protein, 36 aa, Artificial Sequence
  Non-cyclic GFR-binding peptide
  MOD_RES (34)..(34): Xaa is C or S
  MOD_RES (12)..(13)..(14)..(15)..(16): Xaa is A or G
  MOD_RES (17)..(18)..(19)..(20): Xaa is A or G or absent
SRVVMNPIKGYXXXXXXXXXFYLVNIPSLKTPAXTP

SEQ ID NO: 20910 - protein, 39 aa, Artificial Sequence
  Non-cyclic GFR-binding peptide
  MOD_RES (2)..(34)..(35): Xaa is C or S
GXESVAMGPIKGYYTVVGKDFYLINIPSLKTPVXXAKSA

SEQ ID NO: 20911 - protein, 37 aa, Artificial Sequence
  Non-cyclic GFR-binding peptide
  MOD_RES (2)..(4): Xaa is C or S
  MOD_RES (16)..(17)..(18)..(19)..(20): Xaa is A or G
  MOD_RES (21)..(22)..(23)..(24): Xaa is A or G or absent
HXGXAKVVMNPIKGYXXXXXXXXXFYLVNIPSLKTPA

SEQ ID NO: 20912 - protein, 38 aa, Artificial Sequence
  Non-cyclic GFR-binding peptide
  MOD_RES (2)..(34)..(35): Xaa is C or S
GXAKVVMNPIKGYIVNNSSDFYLVNIPSLKTPAXXAKP

SEQ ID NO: 20913 - protein, 32 aa, Artificial Sequence
  Non-cyclic GFR-binding peptide
  MOD_RES (1)..(1): Xaa is C or S
XAEVVMDPIKGYVVNNAADFYLINIPSLRAPV

SEQ ID NO: 20914 - protein, 39 aa, Artificial Sequence
  Non-cyclic GFR-binding peptide
  MOD_RES (2)..(37)..(38): Xaa is C or S
  MOD_RES (15)..(16)..(17)..(18)..(19): Xaa is A or G
  MOD_RES (20)..(21)..(22)..(23): Xaa is A or G or absent
GXEAVSMGEPIKGYXXXXXXXXXFYLVNIPSLKTPVXXA

SEQ ID NO: 20915 - protein, 35 aa, Artificial Sequence
  Non-cyclic GFR-binding peptide
  MOD_RES (31)..(32): Xaa is C or S
KVVMNPIKGYIVNNSSDFYLVNIPSLKTPAXXAKP

SEQ ID NO: 20916 - protein, 34 aa, Artificial Sequence
  Non-cyclic GFR-binding peptide
  MOD_RES (2)..(2): Xaa is C or S
  MOD_RES (13)..(14)..(15)..(16)..(17): Xaa is A or G
  MOD_RES (18)..(19)..(20)..(21): Xaa is A or G or absent
GXEEVIMPIKGYXXXXXXXXXFYLMNIPSTKVPA

SEQ ID NO: 20917 - protein, 34 aa, Artificial Sequence
  Non-cyclic GFR-binding peptide
  MOD_RES (31)..(32): Xaa is C or S
RVVMNPIKGYIVNSSDDFYLVNIPSLKTPAXXPK

SEQ ID NO: 20918 - protein, 41 aa, Artificial Sequence
  Non-cyclic GFR-binding peptide
  MOD_RES (1)..(3)..(35)..(36): Xaa is C or S
XGXGEVVMDPIKGYVVKENEDFYLMNIPSLETPVXXAKPIK

SEQ ID NO: 20919 - protein, 37 aa, Artificial Sequence
  Non-cyclic GFR-binding peptide
  MOD_RES (2)..(36): Xaa is C or S
  MOD_RES (14)..(15)..(16)..(17)..(18): Xaa is A or G
  MOD_RES (19)..(20)..(21)..(22): Xaa is A or G or absent
GXSRVVMNPIKGYXXXXXXXXXFYLVNIPSLKTPAXT

SEQ ID NO: 20920 - protein, 35 aa, Artificial Sequence
  Non-cyclic GFR-binding peptide
  MOD_RES (31)..(32): Xaa is C or S
SVAMGPIKGYYTVVGKDFYLINIPSLKTPVXXAKS

SEQ ID NO: 20921 - protein, 36 aa, Artificial Sequence
  Non-cyclic GFR-binding peptide
  MOD_RES (33)..(34): Xaa is C or S
  MOD_RES (11)..(12)..(13)..(14)..(15): Xaa is A or G
  MOD_RES (16)..(17)..(18)..(19): Xaa is A or G or absent
EEVIMPIKGYXXXXXXXXXFYLMNIPSTKVPAXXTS

SEQ ID NO: 20922 - protein, 39 aa, Artificial Sequence
  Non-cyclic GFR-binding peptide
  MOD_RES (1)..(3)..(37)..(38): Xaa is C or S
  MOD_RES (15)..(16)..(17)..(18)..(19): Xaa is A or G
  MOD_RES (20)..(21)..(22)..(23): Xaa is A or G or absent
XGXGEVVMEPIKGYXXXXXXXXXFYLMNIPSLETPVXXA

SEQ ID NO: 20923 - protein, 38 aa, Artificial Sequence
  Non-cyclic GFR-binding peptide
  MOD_RES (2)..(34)..(35): Xaa is C or S
GXAEVVMDPIKGYVVNNAADFYLINIPSLRAPVXXSAP

SEQ ID NO: 20924 - protein, 39 aa, Artificial Sequence
  Non-cyclic GFR-binding peptide
  MOD_RES (1)..(3)..(35)..(36): Xaa is C or S
XGXAEVVMDPIKGYVVNNAADFYLINIPSLRAPVXXSAP

SEQ ID NO: 20925 - protein, 35 aa, Artificial Sequence
  Non-cyclic GFR-binding peptide
  MOD_RES (2)..(2): Xaa is C or S
  MOD_RES (14)..(15)..(16)..(17)..(18): Xaa is A or G
  MOD_RES (19)..(20)..(21)..(22): Xaa is A or G or absent
GXSEVVMDPIKGYXXXXXXXXXFYLINIPSLRTPV

SEQ ID NO: 20926 - protein, 40 aa, Artificial Sequence
  Non-cyclic GFR-binding peptide
  MOD_RES (1)..(35)..(36): Xaa is C or S
  MOD_RES (13)..(14)..(15)..(16)..(17): Xaa is A or G
  MOD_RES (18)..(19)..(20)..(21): Xaa is A or G or absent
XSRVVMNPIKGYXXXXXXXXXFYLVNIPSLKTPAXXPKPV

SEQ ID NO: 20927 - protein, 37 aa, Artificial Sequence
  Non-cyclic GFR-binding peptide
  MOD_RES (1)..(35): Xaa is C or S
  MOD_RES (13)..(14)..(15)..(16)..(17): Xaa is A or G
  MOD_RES (18)..(19)..(20)..(21): Xaa is A or G or absent
XSRVVMNPIKGYXXXXXXXXXFYLVNIPSLKTPAXTP

SEQ ID NO: 20928 - protein, 35 aa, Artificial Sequence
  Non-cyclic GFR-binding peptide
  MOD_RES (2)..(2): Xaa is C or S
  MOD_RES (14)..(15)..(16)..(17)..(18): Xaa is A or G
  MOD_RES (19)..(20)..(21)..(22): Xaa is A or G or absent
GXSRVVMNPIKGYXXXXXXXXXFYLVNIPSLKTPA

SEQ ID NO: 20929 - protein, 38 aa, Artificial Sequence
  Non-cyclic GFR-binding peptide
  MOD_RES (33)..(34): Xaa is C or S
  MOD_RES (11)..(12)..(13)..(14)..(15): Xaa is A or G
  MOD_RES (16)..(17)..(18)..(19): Xaa is A or G or absent
EVVMDPIKGYXXXXXXXXXFYLMNIPSLETPVXXAKPI

SEQ ID NO: 20930 - protein, 32 aa, Artificial Sequence
  Non-cyclic GFR-binding peptide
  MOD_RES (32)..(32): Xaa is C or S
AKVVMNPIKGYIVNNSSDFYLVNIPSLKTPAX

SEQ ID NO: 20931 - protein, 38 aa, Artificial Sequence
  Non-cyclic GFR-binding peptide
  MOD_RES (32)..(33): Xaa is C or S
AKVVMNPIKGYIVNNSSDFYLVNIPSLKTPAXXAKPVA

SEQ ID NO: 20932 - protein, 34 aa, Artificial Sequence
  Non-cyclic GFR-binding peptide
  MOD_RES (2)..(2): Xaa is C or S
GXEAVSMGEPIKGYTPVGMDDFYLVNIPSLKTPV

SEQ ID NO: 20933 - protein, 40 aa, Artificial Sequence
  Non-cyclic GFR-binding peptide
  MOD_RES (1)..(3)..(35): Xaa is C or S
XGXSRVVMNPIKGYIVNSSDDFYLVNIPSLKTPAXTPKTV

SEQ ID NO: 20934 - protein, 37 aa, Artificial Sequence
  Non-cyclic GFR-binding peptide
  MOD_RES (32)..(33): Xaa is C or S
ARVVMNPIKGYIVNSSDDFYLVNIPSLQTPAXXPKPV

SEQ ID NO: 20935 - protein, 37 aa, Artificial Sequence
  Non-cyclic GFR-binding peptide
  MOD_RES (31)..(32): Xaa is C or S
KVVMNPIKGYIVNNSSDFYLVNIPSLKTPAXXAKPVA

SEQ ID NO: 20936 - protein, 35 aa, Artificial Sequence
  Non-cyclic GFR-binding peptide
  MOD_RES (32)..(33): Xaa is C or S
GEVVMEPIKGYVVKDYEDFYLMNIPSLETPVXXAK

SEQ ID NO: 20937 - protein, 40 aa, Artificial Sequence
  Non-cyclic GFR-binding peptide
  MOD_RES (2)..(4)..(38)..(39): Xaa is C or S
  MOD_RES (16)..(17)..(18)..(19)..(20): Xaa is A or G
  MOD_RES (21)..(22)..(23)..(24): Xaa is A or G or absent
RXGXAEVVMDPIKGYXXXXXXXXXFYLINIPSLRAPVXXS

SEQ ID NO: 20938 - protein, 36 aa, Artificial Sequence
  Non-cyclic GFR-binding peptide
  MOD_RES (31)..(32): Xaa is C or S
RVVMNPIKGYIVNSSDDFYLVNIPSLQTPAXXPKPV

SEQ ID NO: 20939 - protein, 39 aa, Artificial Sequence
  Non-cyclic GFR-binding peptide
  MOD_RES (2)..(36)..(37): Xaa is C or S
  MOD_RES (14)..(15)..(16)..(17)..(18): Xaa is A or G
  MOD_RES (19)..(20)..(21)..(22): Xaa is A or G or absent
GXSEVVMDPIKGYXXXXXXXXXFYLINIPSLRTPVXXTP

SEQ ID NO: 20940 - protein, 32 aa, Artificial Sequence
  Non-cyclic GFR-binding peptide
  MOD_RES (11)..(12)..(13)..(14)..(15): Xaa is A or G
  MOD_RES (16)..(17)..(18)..(19): Xaa is A or G or absent
SVAMGPIKGYXXXXXXXXXFYLINIPSLKTPV

SEQ ID NO: 20941 - protein, 40 aa, Artificial Sequence
  Non-cyclic GFR-binding peptide
  MOD_RES (2)..(4)..(38)..(39): Xaa is C or S
  MOD_RES (16)..(17)..(18)..(19)..(20): Xaa is A or G
  MOD_RES (21)..(22)..(23)..(24): Xaa is A or G or absent
HXGXSRVVMNPIKGYXXXXXXXXXFYLVNIPSLKTPAXXP

SEQ ID NO: 20942 - protein, 40 aa, Artificial Sequence
  Non-cyclic GFR-binding peptide
  MOD_RES (2)..(36)..(37): Xaa is C or S
  MOD_RES (14)..(15)..(16)..(17)..(18): Xaa is A or G
  MOD_RES (19)..(20)..(21)..(22): Xaa is A or G or absent
GXGEVVMEPIKGYXXXXXXXXXFYLMNIPSLETPVXXAKP

SEQ ID NO: 20943 - protein, 42 aa, Artificial Sequence
  Non-cyclic GFR-binding peptide
  MOD_RES (2)..(4)..(38)..(39): Xaa is C or S
  MOD_RES (16)..(17)..(18)..(19)..(20): Xaa is A or G
  MOD_RES (21)..(22)..(23)..(24): Xaa is A or G or absent
RXGXESVAMGPIKGYXXXXXXXXXFYLINIPSLKTPVXXAKS

SEQ ID NO: 20944 - protein, 42 aa, Artificial Sequence
  Non-cyclic GFR-binding peptide
  MOD_RES (2)..(4)..(36): Xaa is C or S
HXGXSRVVMNPIKGYIVNSSDDFYLVNIPSLKTPAXTPKTVH

SEQ ID NO: 20945 - protein, 38 aa, Artificial Sequence
  Non-cyclic GFR-binding peptide
  MOD_RES (2)..(4)..(38): Xaa is C or S
  MOD_RES (16)..(17)..(18)..(19)..(20): Xaa is A or G
  MOD_RES (21)..(22)..(23)..(24): Xaa is A or G or absent
RXGXSEVVMDPIKGYXXXXXXXXXFYLINIPSLRTPVX

SEQ ID NO: 20946 - protein, 33 aa, Artificial Sequence
  Non-cyclic GFR-binding peptide
  MOD_RES (1)..(32)..(33): Xaa is C or S
XEEVIMPIKGYLLVRGNDFYLMNIPSTKVPAXX

SEQ ID NO: 20947 - protein, 36 aa, Artificial Sequence
  Non-cyclic GFR-binding peptide
  MOD_RES (1)..(35)..(36): Xaa is C or S
  MOD_RES (13)..(14)..(15)..(16)..(17): Xaa is A or G
  MOD_RES (18)..(19)..(20)..(21): Xaa is A or G or absent
XAKVVMNPIKGYXXXXXXXXXFYLVNIPSLKTPAXX

SEQ ID NO: 20948 - protein, 42 aa, Artificial Sequence
  Non-cyclic GFR-binding peptide
  MOD_RES (2)..(4)..(38)..(39): Xaa is C or S
  MOD_RES (16)..(17)..(18)..(19)..(20): Xaa is A or G
  MOD_RES (21)..(22)..(23)..(24): Xaa is A or G or absent
HXGXSRVVMNPIKGYXXXXXXXXXFYLVNIPSLKTPAXXPKP

SEQ ID NO: 20949 - protein, 39 aa, Artificial Sequence
  Non-cyclic GFR-binding peptide
  MOD_RES (1)..(35): Xaa is C or S
  MOD_RES (13)..(14)..(15)..(16)..(17): Xaa is A or G
  MOD_RES (18)..(19)..(20)..(21): Xaa is A or G or absent
XSRVVMNPIKGYXXXXXXXXXFYLVNIPSLKTPAXTPKT

SEQ ID NO: 20950 - protein, 35 aa, Artificial Sequence
  Non-cyclic GFR-binding peptide
  MOD_RES (2)..(4): Xaa is C or S
RXGXAEVVMDPIKGYVVNNAADFYLINIPSLRAPV

SEQ ID NO: 20951 - protein, 41 aa, Artificial Sequence
  Non-cyclic GFR-binding peptide
  MOD_RES (2)..(4)..(37)..(38): Xaa is C or S
RXGXEAVSMGEPIKGYTPVGMDDFYLVNIPSLKTPVXXAKG

SEQ ID NO: 20952 - protein, 32 aa, Artificial Sequence
  Non-cyclic GFR-binding peptide
  MOD_RES (1)..(1): Xaa is C or S
XARVVMNPIKGYIVNSSDDFYLVNIPSLQTPA

SEQ ID NO: 20953 - protein, 41 aa, Artificial Sequence
  Non-cyclic GFR-binding peptide
  MOD_RES (2)..(4)..(36)..(37): Xaa is C or S
RXGXGEVVMDPIKGYVVKENEDFYLMNIPSLETPVXXAKPI

SEQ ID NO: 20954 - protein, 39 aa, Artificial Sequence
  Non-cyclic GFR-binding peptide
  MOD_RES (2)..(4)..(35)..(36): Xaa is C or S
LXGXEEVIMPIKGYLLVRGNDFYLMNIPSTKVPAXXTSP

SEQ ID NO: 20955 - protein, 34 aa, Artificial Sequence
  Non-cyclic GFR-binding peptide
  MOD_RES (1)..(1): Xaa is C or S
  MOD_RES (13)..(14)..(15)..(16)..(17): Xaa is A or G
  MOD_RES (18)..(19)..(20)..(21): Xaa is A or G or absent
XGEVVMDPIKGYXXXXXXXXXFYLMNIPSLETPV

SEQ ID NO: 20956 - protein, 38 aa, Artificial Sequence
  Non-cyclic GFR-binding peptide
  MOD_RES (1)..(33)..(34): Xaa is C or S
XARVVMNPIKGYIVNSSDDFYLVNIPSLQTPAXXPKPV

SEQ ID NO: 20957 - protein, 39 aa, Artificial Sequence
  Non-cyclic GFR-binding peptide
  MOD_RES (1)..(3)..(37)..(38): Xaa is C or S
  MOD_RES (15)..(16)..(17)..(18)..(19): Xaa is A or G
  MOD_RES (20)..(21)..(22)..(23): Xaa is A or G or absent
XGXESVAMGPIKGYXXXXXXXXXFYLINIPSLKTPVXXA

SEQ ID NO: 20958 - protein, 35 aa, Artificial Sequence
  Non-cyclic GFR-binding peptide
  MOD_RES (31)..(32): Xaa is C or S
EEVIMPIKGYLLVRGNDFYLMNIPSTKVPAXXTSP

SEQ ID NO: 20959 - protein, 42 aa, Artificial Sequence
  Non-cyclic GFR-binding peptide
  MOD_RES (2)..(4)..(39)..(40): Xaa is C or S
  MOD_RES (17)..(18)..(19)..(20)..(21): Xaa is A or G
  MOD_RES (22)..(23)..(24)..(25): Xaa is A or G or absent
RXGXEAVSMGEPIKGYXXXXXXXXXFYLVNIPSLKTPVXXAK

SEQ ID NO: 20960 - protein, 37 aa, Artificial Sequence
  Non-cyclic GFR-binding peptide
  MOD_RES (34)..(35): Xaa is C or S
  MOD_RES (12)..(13)..(14)..(15)..(16): Xaa is A or G
  MOD_RES (17)..(18)..(19)..(20): Xaa is A or G or absent
ARVVMNPIKGYXXXXXXXXXFYLVNIPSLQTPAXXPK

SEQ ID NO: 20961 - protein, 35 aa, Artificial Sequence
  Non-cyclic GFR-binding peptide
  MOD_RES (1)..(33)..(34): Xaa is C or S
XAEVVMDPIKGYVVNNAADFYLINIPSLRAPVXXS

SEQ ID NO: 20962 - protein, 38 aa, Artificial Sequence
  Non-cyclic GFR-binding peptide
  MOD_RES (2)..(36)..(37): Xaa is C or S
  MOD_RES (14)..(15)..(16)..(17)..(18): Xaa is A or G
  MOD_RES (19)..(20)..(21)..(22): Xaa is A or G or absent
GXSRVVMNPIKGYXXXXXXXXXFYLVNIPSLKTPAXXP

SEQ ID NO: 20963 - protein, 34 aa, Artificial Sequence
  Non-cyclic GFR-binding peptide
  MOD_RES (1)..(1): Xaa is C or S
  MOD_RES (13)..(14)..(15)..(16)..(17): Xaa is A or G
  MOD_RES (18)..(19)..(20)..(21): Xaa is A or G or absent
XSRVVMNPIKGYXXXXXXXXXFYLVNIPSLKTPA

SEQ ID NO: 20964 - protein, 35 aa, Artificial Sequence
  Non-cyclic GFR-binding peptide
  MOD_RES (1)..(33)..(34): Xaa is C or S
XESVAMGPIKGYYTVVGKDFYLINIPSLKTPVXXA

SEQ ID NO: 20965 - protein, 43 aa, Artificial Sequence
  Non-cyclic GFR-binding peptide
  MOD_RES (1)..(3)..(37)..(38): Xaa is C or S
  MOD_RES (15)..(16)..(17)..(18)..(19): Xaa is A or G
  MOD_RES (20)..(21)..(22)..(23): Xaa is A or G or absent
XGXSRVVMNPIKGYXXXXXXXXXFYLVNIPSLKTPAXXPKPVY

SEQ ID NO: 20966 - protein, 41 aa, Artificial Sequence
  Non-cyclic GFR-binding peptide
  MOD_RES (1)..(3)..(37)..(38): Xaa is C or S
  MOD_RES (15)..(16)..(17)..(18)..(19): Xaa is A or G
  MOD_RES (20)..(21)..(22)..(23): Xaa is A or G or absent
XGXARVVMNPIKGYXXXXXXXXXFYLVNIPSLQTPAXXPKP

SEQ ID NO: 20967 - protein, 35 aa, Artificial Sequence
  Non-cyclic GFR-binding peptide
  MOD_RES (2)..(35): Xaa is C or S
  MOD_RES (13)..(14)..(15)..(16)..(17): Xaa is A or G
  MOD_RES (18)..(19)..(20)..(21): Xaa is A or G or absent
GXEEVIMPIKGYXXXXXXXXXFYLMNIPSTKVPAX

SEQ ID NO: 20968 - protein, 37 aa, Artificial Sequence
  Non-cyclic GFR-binding peptide
  MOD_RES (1)..(33)..(34): Xaa is C or S
XARVVMNPIKGYIVNSSDDFYLVNIPSLQTPAXXPKP

SEQ ID NO: 20969 - protein, 39 aa, Artificial Sequence
  Non-cyclic GFR-binding peptide
  MOD_RES (1)..(3)..(37)..(38): Xaa is C or S
  MOD_RES (15)..(16)..(17)..(18)..(19): Xaa is A or G
  MOD_RES (20)..(21)..(22)..(23): Xaa is A or G or absent
XGXGEVVMDPIKGYXXXXXXXXXFYLMNIPSLETPVXXA

SEQ ID NO: 20970 - protein, 34 aa, Artificial Sequence
  Non-cyclic GFR-binding peptide
  MOD_RES (33)..(34): Xaa is C or S
EAVSMGEPIKGYTPVGMDDFYLVNIPSLKTPVXX

SEQ ID NO: 20971 - protein, 35 aa, Artificial Sequence
  Non-cyclic GFR-binding peptide
  MOD_RES (1)..(35): Xaa is C or S
  MOD_RES (13)..(14)..(15)..(16)..(17): Xaa is A or G
  MOD_RES (18)..(19)..(20)..(21): Xaa is A or G or absent
XESVAMGPIKGYXXXXXXXXXFYLINIPSLKTPVX

SEQ ID NO: 20972 - protein, 35 aa, Artificial Sequence
  Non-cyclic GFR-binding peptide
  MOD_RES (1)..(33)..(34): Xaa is C or S
XARVVMNPIKGYIVNSSDDFYLVNIPSLQTPAXXP

SEQ ID NO: 20973 - protein, 39 aa, Artificial Sequence
  Non-cyclic GFR-binding peptide
  MOD_RES (2)..(4)..(38): Xaa is C or S
  MOD_RES (16)..(17)..(18)..(19)..(20): Xaa is A or G
  MOD_RES (21)..(22)..(23)..(24): Xaa is A or G or absent
HXGXSRVVMNPIKGYXXXXXXXXXFYLVNIPSLKTPAXT

SEQ ID NO: 20974 - protein, 40 aa, Artificial Sequence
  Non-cyclic GFR-binding peptide
  MOD_RES (2)..(4)..(36)..(37): Xaa is C or S
RXGXAEVVMDPIKGYVVNNAADFYLINIPSLRAPVXXSAP

SEQ ID NO: 20975 - protein, 36 aa, Artificial Sequence
  Non-cyclic GFR-binding peptide
  MOD_RES (1)..(3)..(35)..(36): Xaa is C or S
XGXAEVVMDPIKGYVVNNAADFYLINIPSLRAPVXX

SEQ ID NO: 20976 - protein, 40 aa, Artificial Sequence
  Non-cyclic GFR-binding peptide
  MOD_RES (2)..(4)..(36)..(37): Xaa is C or S
HXGXAKVVMNPIKGYIVNNSSDFYLVNIPSLKTPAXXAKP

SEQ ID NO: 20977 - protein, 37 aa, Artificial Sequence
  Non-cyclic GFR-binding peptide
  MOD_RES (1)..(33): Xaa is C or S
XSRVVMNPIKGYIVNSSDDFYLVNIPSLKTPAXTPKT

SEQ ID NO: 20978 - protein, 41 aa, Artificial Sequence
  Non-cyclic GFR-binding peptide
  MOD_RES (2)..(4)..(36)..(37): Xaa is C or S
RXGXAEVVMDPIKGYVVNNAADFYLINIPSLRAPVXXSAPA

SEQ ID NO: 20979 - protein, 42 aa, Artificial Sequence
  Non-cyclic GFR-binding peptide
  MOD_RES (1)..(3)..(37)..(38): Xaa is C or S
  MOD_RES (15)..(16)..(17)..(18)..(19): Xaa is A or G
  MOD_RES (20)..(21)..(22)..(23): Xaa is A or G or absent
XGXAEVVMDPIKGYXXXXXXXXXFYLINIPSLRAPVXXSAPA

SEQ ID NO: 20980 - protein, 35 aa, Artificial Sequence
  Non-cyclic GFR-binding peptide
  MOD_RES (1)..(35): Xaa is C or S
  MOD_RES (13)..(14)..(15)..(16)..(17): Xaa is A or G
  MOD_RES (18)..(19)..(20)..(21): Xaa is A or G or absent
XGEVVMEPIKGYXXXXXXXXXFYLMNIPSLETPVX

SEQ ID NO: 20981 - protein, 36 aa, Artificial Sequence
  Non-cyclic GFR-binding peptide
  MOD_RES (2)..(34)..(35): Xaa is C or S
GXGEVVMEPIKGYVVKDYEDFYLMNIPSLETPVXXA

SEQ ID NO: 20982 - protein, 37 aa, Artificial Sequence
  Non-cyclic GFR-binding peptide
  MOD_RES (2)..(4): Xaa is C or S
  MOD_RES (16)..(17)..(18)..(19)..(20): Xaa is A or G
  MOD_RES (21)..(22)..(23)..(24): Xaa is A or G or absent
RXGXSEVVMDPIKGYXXXXXXXXXFYLINIPSLRTPV

SEQ ID NO: 20983 - protein, 32 aa, Artificial Sequence
  Non-cyclic GFR-binding peptide
EAVSMGEPIKGYTPVGMDDFYLVNIPSLKTPV

SEQ ID NO: 20984 - protein, 38 aa, Artificial Sequence
  Non-cyclic GFR-binding peptide
  MOD_RES (1)..(3)..(36)..(37): Xaa is C or S
  MOD_RES (14)..(15)..(16)..(17)..(18): Xaa is A or G
  MOD_RES (19)..(20)..(21)..(22): Xaa is A or G or absent
XGXEEVIMPIKGYXXXXXXXXXFYLMNIPSTKVPAXXT

SEQ ID NO: 20985 - protein, 38 aa, Artificial Sequence
  Non-cyclic GFR-binding peptide
  MOD_RES (1)..(35)..(36): Xaa is C or S
  MOD_RES (13)..(14)..(15)..(16)..(17): Xaa is A or G
  MOD_RES (18)..(19)..(20)..(21): Xaa is A or G or absent
XSEVVMDPIKGYXXXXXXXXXFYLINIPSLRTPVXXTP

SEQ ID NO: 20986 - protein, 40 aa, Artificial Sequence
  Non-cyclic GFR-binding peptide
  MOD_RES (1)..(3)..(36)..(37): Xaa is C or S
  MOD_RES (14)..(15)..(16)..(17)..(18): Xaa is A or G
  MOD_RES (19)..(20)..(21)..(22): Xaa is A or G or absent
XGXEEVIMPIKGYXXXXXXXXXFYLMNIPSTKVPAXXTSP

SEQ ID NO: 20987 - protein, 35 aa, Artificial Sequence
  Non-cyclic GFR-binding peptide
  MOD_RES (2)..(34)..(35): Xaa is C or S
GXESVAMGPIKGYYTVVGKDFYLINIPSLKTPVXX

SEQ ID NO: 20988 - protein, 36 aa, Artificial Sequence
  Non-cyclic GFR-binding peptide
  MOD_RES (31)..(32): Xaa is C or S
EVVMDPIKGYVVKENEDFYLMNIPSLETPVXXAKPI

SEQ ID NO: 20989 - protein, 40 aa, Artificial Sequence
  Non-cyclic GFR-binding peptide
  MOD_RES (2)..(34): Xaa is C or S
GXSRVVMNPIKGYIVNSSDDFYLVNIPSLKTPAXTPKTVH

SEQ ID NO: 20990 - protein, 39 aa, Artificial Sequence
  Non-cyclic GFR-binding peptide
  MOD_RES (2)..(4)..(36)..(37): Xaa is C or S
RXGXGEVVMDPIKGYVVKENEDFYLMNIPSLETPVXXAK

SEQ ID NO: 20991 - protein, 35 aa, Artificial Sequence
  Non-cyclic GFR-binding peptide
  MOD_RES (1)..(3): Xaa is C or S
XGXEAVSMGEPIKGYTPVGMDDFYLVNIPSLKTPV

SEQ ID NO: 20992 - protein, 36 aa, Artificial Sequence
  Non-cyclic GFR-binding peptide
  MOD_RES (31)..(32): Xaa is C or S
RVVMNPIKGYIVNSSDDFYLVNIPSLKTPAXXPKPV

SEQ ID NO: 20993 - protein, 37 aa, Artificial Sequence
  Non-cyclic GFR-binding peptide
  MOD_RES (1)..(3)..(34)..(35): Xaa is C or S
XGXEEVIMPIKGYLLVRGNDFYLMNIPSTKVPAXXTS

SEQ ID NO: 20994 - protein, 41 aa, Artificial Sequence
  Non-cyclic GFR-binding peptide
  MOD_RES (1)..(3)..(35)..(36): Xaa is C or S
XGXSEVVMDPIKGYVVNNASDFYLINIPSLRTPVXXTPPTS

SEQ ID NO: 20995 - protein, 36 aa, Artificial Sequence
  Non-cyclic GFR-binding peptide
  MOD_RES (34)..(35): Xaa is C or S
  MOD_RES (12)..(13)..(14)..(15)..(16): Xaa is A or G
  MOD_RES (17)..(18)..(19)..(20): Xaa is A or G or absent
AEVVMDPIKGYXXXXXXXXXFYLINIPSLRAPVXXS

SEQ ID NO: 20996 - protein, 36 aa, Artificial Sequence
  Non-cyclic GFR-binding peptide
  MOD_RES (33)..(34): Xaa is C or S
  MOD_RES (11)..(12)..(13)..(14)..(15): Xaa is A or G
  MOD_RES (16)..(17)..(18)..(19): Xaa is A or G or absent
RVVMNPIKGYXXXXXXXXXFYLVNIPSLQTPAXXPK

SEQ ID NO: 20997 - protein, 36 aa, Artificial Sequence
  Non-cyclic GFR-binding peptide
  MOD_RES (2)..(36): Xaa is C or S
  MOD_RES (14)..(15)..(16)..(17)..(18): Xaa is A or G
  MOD_RES (19)..(20)..(21)..(22): Xaa is A or G or absent
GXESVAMGPIKGYXXXXXXXXXFYLINIPSLKTPVX

SEQ ID NO: 20998 - protein, 32 aa, Artificial Sequence
  Non-cyclic GFR-binding peptide
  MOD_RES (11)..(12)..(13)..(14)..(15): Xaa is A or G
  MOD_RES (16)..(17)..(18)..(19): Xaa is A or G or absent
RVVMNPIKGYXXXXXXXXXFYLVNIPSLQTPA

SEQ ID NO: 20999 - protein, 40 aa, Artificial Sequence
  Non-cyclic GFR-binding peptide
  MOD_RES (1)..(35)..(36): Xaa is C or S
  MOD_RES (13)..(14)..(15)..(16)..(17): Xaa is A or G
  MOD_RES (18)..(19)..(20)..(21): Xaa is A or G or absent
XSEVVMDPIKGYXXXXXXXXXFYLINIPSLRTPVXXTPPT

SEQ ID NO: 21000 - protein, 39 aa, Artificial Sequence
  Non-cyclic GFR-binding peptide
  MOD_RES (2)..(34)..(35): Xaa is C or S
GXSEVVMDPIKGYVVNNASDFYLINIPSLRTPVXXTPPT

SEQ ID NO: 21001 - protein, 35 aa, Artificial Sequence
  Non-cyclic GFR-binding peptide
  MOD_RES (1)..(3): Xaa is C or S
  MOD_RES (14)..(15)..(16)..(17)..(18): Xaa is A or G
  MOD_RES (19)..(20)..(21)..(22): Xaa is A or G or absent
XGXEEVIMPIKGYXXXXXXXXXFYLMNIPSTKVPA

SEQ ID NO: 21002 - protein, 36 aa, Artificial Sequence
  Non-cyclic GFR-binding peptide
  MOD_RES (31)..(32): Xaa is C or S
EEVIMPIKGYLLVRGNDFYLMNIPSTKVPAXXTSPV

SEQ ID NO: 21003 - protein, 37 aa, Artificial Sequence
  Non-cyclic GFR-binding peptide
  MOD_RES (1)..(3)..(35)..(36): Xaa is C or S
XGXAKVVMNPIKGYIVNNSSDFYLVNIPSLKTPAXXA

SEQ ID NO: 21004 - protein, 40 aa, Artificial Sequence
  Non-cyclic GFR-binding peptide
  MOD_RES (1)..(3)..(37)..(38): Xaa is C or S
  MOD_RES (15)..(16)..(17)..(18)..(19): Xaa is A or G
  MOD_RES (20)..(21)..(22)..(23): Xaa is A or G or absent
XGXGEVVMEPIKGYXXXXXXXXXFYLMNIPSLETPVXXAK

SEQ ID NO: 21005 - protein, 37 aa, Artificial Sequence
  Non-cyclic GFR-binding peptide
  MOD_RES (2)..(4)..(37): Xaa is C or S
  MOD_RES (15)..(16)..(17)..(18)..(19): Xaa is A or G
  MOD_RES (20)..(21)..(22)..(23): Xaa is A or G or absent
LXGXEEVIMPIKGYXXXXXXXXXFYLMNIPSTKVPAX

SEQ ID NO: 21006 - protein, 41 aa, Artificial Sequence
  Non-cyclic GFR-binding peptide
  MOD_RES (2)..(4)..(36): Xaa is C or S
HXGXSRVVMNPIKGYIVNSSDDFYLVNIPSLKTPAXTPKTV

SEQ ID NO: 21007 - protein, 37 aa, Artificial Sequence
  Non-cyclic GFR-binding peptide
  MOD_RES (2)..(4): Xaa is C or S
  MOD_RES (16)..(17)..(18)..(19)..(20): Xaa is A or G
  MOD_RES (21)..(22)..(23)..(24): Xaa is A or G or absent
HXGXSRVVMNPIKGYXXXXXXXXXFYLVNIPSLKTPA

SEQ ID NO: 21008 - protein, 45 aa, Artificial Sequence
  Non-cyclic GFR-binding peptide
  MOD_RES (2)..(4)..(39)..(40): Xaa is C or S
  MOD_RES (17)..(18)..(19)..(20)..(21): Xaa is A or G
  MOD_RES (22)..(23)..(24)..(25): Xaa is A or G or absent
RXGXEAVSMGEPIKGYXXXXXXXXXFYLVNIPSLKTPVXXAKGVK

SEQ ID NO: 21009 - protein, 33 aa, Artificial Sequence
  Non-cyclic GFR-binding peptide
  MOD_RES (32)..(33): Xaa is C or S
AKVVMNPIKGYIVNNSSDFYLVNIPSLKTPAXX

SEQ ID NO: 21010 - protein, 36 aa, Artificial Sequence
  Non-cyclic GFR-binding peptide
  MOD_RES (2)..(4)..(36): Xaa is C or S
HXGXSRVVMNPIKGYIVNSSDDFYLVNIPSLKTPAX

SEQ ID NO: 21011 - protein, 39 aa, Artificial Sequence
  Non-cyclic GFR-binding peptide
  MOD_RES (33)..(34): Xaa is C or S
  MOD_RES (11)..(12)..(13)..(14)..(15): Xaa is A or G
  MOD_RES (16)..(17)..(18)..(19): Xaa is A or G or absent
EVVMEPIKGYXXXXXXXXXFYLMNIPSLETPVXXAKPIS

SEQ ID NO: 21012 - protein, 32 aa, Artificial Sequence
  Non-cyclic GFR-binding peptide
  MOD_RES (1)..(1): Xaa is C or S
XSEVVMDPIKGYVVNNASDFYLINIPSLRTPV

SEQ ID NO: 21013 - protein, 35 aa, Artificial Sequence
  Non-cyclic GFR-binding peptide
  MOD_RES (33)..(34): Xaa is C or S
  MOD_RES (11)..(12)..(13)..(14)..(15): Xaa is A or G
  MOD_RES (16)..(17)..(18)..(19): Xaa is A or G or absent
KVVMNPIKGYXXXXXXXXXFYLVNIPSLKTPAXXA

SEQ ID NO: 21014 - protein, 39 aa, Artificial Sequence
  Non-cyclic GFR-binding peptide
  MOD_RES (1)..(35)..(36): Xaa is C or S
  MOD_RES (13)..(14)..(15)..(16)..(17): Xaa is A or G
  MOD_RES (18)..(19)..(20)..(21): Xaa is A or G or absent
XARVVMNPIKGYXXXXXXXXXFYLVNIPSLQTPAXXPKP

SEQ ID NO: 21015 - protein, 38 aa, Artificial Sequence
  Non-cyclic GFR-binding peptide
  MOD_RES (33)..(34): Xaa is C or S
  MOD_RES (11)..(12)..(13)..(14)..(15): Xaa is A or G
  MOD_RES (16)..(17)..(18)..(19): Xaa is A or G or absent
RVVMNPIKGYXXXXXXXXXFYLVNIPSLKTPAXXPKPV

SEQ ID NO: 21016 - protein, 32 aa, Artificial Sequence
  Non-cyclic GFR-binding peptide
  MOD_RES (11)..(12)..(13)..(14)..(15): Xaa is A or G
  MOD_RES (16)..(17)..(18)..(19): Xaa is A or G or absent
EVVMEPIKGYXXXXXXXXXFYLMNIPSLETPV

SEQ ID NO: 21017 - protein, 36 aa, Artificial Sequence
  Non-cyclic GFR-binding peptide
  MOD_RES (2)..(4)..(36): Xaa is C or S
HXGXAKVVMNPIKGYIVNNSSDFYLVNIPSLKTPAX

SEQ ID NO: 21018 - protein, 31 aa, Artificial Sequence
  Non-cyclic GFR-binding peptide
  MOD_RES (31)..(31): Xaa is C or S
EEVIMPIKGYLLVRGNDFYLMNIPSTKVPAX

SEQ ID NO: 21019 - protein, 41 aa, Artificial Sequence
  Non-cyclic GFR-binding peptide
  MOD_RES (2)..(36)..(37): Xaa is C or S
  MOD_RES (14)..(15)..(16)..(17)..(18): Xaa is A or G
  MOD_RES (19)..(20)..(21)..(22): Xaa is A or G or absent
GXESVAMGPIKGYXXXXXXXXXFYLINIPSLKTPVXXAKSA

SEQ ID NO: 21020 - protein, 34 aa, Artificial Sequence
  Non-cyclic GFR-binding peptide
  MOD_RES (32)..(33): Xaa is C or S
ESVAMGPIKGYYTVVGKDFYLINIPSLKTPVXXA

SEQ ID NO: 21021 - protein, 34 aa, Artificial Sequence
  Non-cyclic GFR-binding peptide
  MOD_RES (1)..(3): Xaa is C or S
XGXGEVVMDPIKGYVVKENEDFYLMNIPSLETPV

SEQ ID NO: 21022 - protein, 34 aa, Artificial Sequence
  Non-cyclic GFR-binding peptide
  MOD_RES (32)..(33): Xaa is C or S
SEVVMDPIKGYVVNNASDFYLINIPSLRTPVXXT

SEQ ID NO: 21023 - protein, 41 aa, Artificial Sequence
  Non-cyclic GFR-binding peptide
  MOD_RES (2)..(4)..(38)..(39): Xaa is C or S
  MOD_RES (16)..(17)..(18)..(19)..(20): Xaa is A or G
  MOD_RES (21)..(22)..(23)..(24): Xaa is A or G or absent
HXGXAKVVMNPIKGYXXXXXXXXXFYLVNIPSLKTPAXXAK

SEQ ID NO: 21024 - protein, 40 aa, Artificial Sequence
  Non-cyclic GFR-binding peptide
  MOD_RES (2)..(34)..(35): Xaa is C or S
GXGEVVMEPIKGYVVKDYEDFYLMNIPSLETPVXXAKPIS

SEQ ID NO: 21025 - protein, 40 aa, Artificial Sequence
  Non-cyclic GFR-binding peptide
  MOD_RES (2)..(4)..(38): Xaa is C or S
  MOD_RES (16)..(17)..(18)..(19)..(20): Xaa is A or G
  MOD_RES (21)..(22)..(23)..(24): Xaa is A or G or absent
HXGXSRVVMNPIKGYXXXXXXXXXFYLVNIPSLKTPAXTP

SEQ ID NO: 21026 - protein, 33 aa, Artificial Sequence
  Non-cyclic GFR-binding peptide
  MOD_RES (12)..(13)..(14)..(15)..(16): Xaa is A or G
  MOD_RES (17)..(18)..(19)..(20): Xaa is A or G or absent
GEVVMDPIKGYXXXXXXXXXFYLMNIPSLETPV

SEQ ID NO: 21027 - protein, 40 aa, Artificial Sequence
  Non-cyclic GFR-binding peptide
  MOD_RES (2)..(34)..(35): Xaa is C or S
GXESVAMGPIKGYYTVVGKDFYLINIPSLKTPVXXAKSAK

SEQ ID NO: 21028 - protein, 33 aa, Artificial Sequence
  Non-cyclic GFR-binding peptide
  MOD_RES (12)..(13)..(14)..(15)..(16): Xaa is A or G
  MOD_RES (17)..(18)..(19)..(20): Xaa is A or G or absent
AKVVMNPIKGYXXXXXXXXXFYLVNIPSLKTPA

SEQ ID NO: 21029 - protein, 38 aa, Artificial Sequence
  Non-cyclic GFR-binding peptide
  MOD_RES (32)..(33): Xaa is C or S
ESVAMGPIKGYYTVVGKDFYLINIPSLKTPVXXAKSAK

SEQ ID NO: 21030 - protein, 36 aa, Artificial Sequence
  Non-cyclic GFR-binding peptide
  MOD_RES (34)..(35): Xaa is C or S
  MOD_RES (12)..(13)..(14)..(15)..(16): Xaa is A or G
  MOD_RES (17)..(18)..(19)..(20): Xaa is A or G or absent
GEVVMEPIKGYXXXXXXXXXFYLMNIPSLETPVXXA

SEQ ID NO: 21031 - protein, 36 aa, Artificial Sequence
  Non-cyclic GFR-binding peptide
  MOD_RES (1)..(3): Xaa is C or S
  MOD_RES (15)..(16)..(17)..(18)..(19): Xaa is A or G
  MOD_RES (20)..(21)..(22)..(23): Xaa is A or G or absent
XGXGEVVMDPIKGYXXXXXXXXXFYLMNIPSLETPV

SEQ ID NO: 21032 - protein, 37 aa, Artificial Sequence
  Non-cyclic GFR-binding peptide
  MOD_RES (2)..(4): Xaa is C or S
  MOD_RES (16)..(17)..(18)..(19)..(20): Xaa is A or G
  MOD_RES (21)..(22)..(23)..(24): Xaa is A or G or absent
RXGXGEVVMEPIKGYXXXXXXXXXFYLMNIPSLETPV

SEQ ID NO: 21033 - protein, 42 aa, Artificial Sequence
  Non-cyclic GFR-binding peptide
  MOD_RES (2)..(36)..(37): Xaa is C or S
  MOD_RES (14)..(15)..(16)..(17)..(18): Xaa is A or G
  MOD_RES (19)..(20)..(21)..(22): Xaa is A or G or absent
GXSRVVMNPIKGYXXXXXXXXXFYLVNIPSLKTPAXXPKPVY

SEQ ID NO: 21034 - protein, 38 aa, Artificial Sequence
  Non-cyclic GFR-binding peptide
  MOD_RES (1)..(35)..(36): Xaa is C or S
  MOD_RES (13)..(14)..(15)..(16)..(17): Xaa is A or G
  MOD_RES (18)..(19)..(20)..(21): Xaa is A or G or absent
XGEVVMEPIKGYXXXXXXXXXFYLMNIPSLETPVXXAK

SEQ ID NO: 21035 - protein, 38 aa, Artificial Sequence
  Non-cyclic GFR-binding peptide
  MOD_RES (2)..(36)..(37): Xaa is C or S
  MOD_RES (14)..(15)..(16)..(17)..(18): Xaa is A or G
  MOD_RES (19)..(20)..(21)..(22): Xaa is A or G or absent
GXAEVVMDPIKGYXXXXXXXXXFYLINIPSLRAPVXXS

SEQ ID NO: 21036 - protein, 34 aa, Artificial Sequence
  Non-cyclic GFR-binding peptide
  MOD_RES (1)..(33): Xaa is C or S
XSRVVMNPIKGYIVNSSDDFYLVNIPSLKTPAXT

SEQ ID NO: 21037 - protein, 38 aa, Artificial Sequence
  Non-cyclic GFR-binding peptide
  MOD_RES (1)..(35)..(36): Xaa is C or S
  MOD_RES (13)..(14)..(15)..(16)..(17): Xaa is A or G
  MOD_RES (18)..(19)..(20)..(21): Xaa is A or G or absent
XESVAMGPIKGYXXXXXXXXXFYLINIPSLKTPVXXAK

SEQ ID NO: 21038 - protein, 33 aa, Artificial Sequence
  Non-cyclic GFR-binding peptide
  MOD_RES (12)..(13)..(14)..(15)..(16): Xaa is A or G
  MOD_RES (17)..(18)..(19)..(20): Xaa is A or G or absent
SRVVMNPIKGYXXXXXXXXXFYLVNIPSLKTPA

SEQ ID NO: 21039 - protein, 43 aa, Artificial Sequence
  Non-cyclic GFR-binding peptide
  MOD_RES (2)..(4)..(39)..(40): Xaa is C or S
  MOD_RES (17)..(18)..(19)..(20)..(21): Xaa is A or G
  MOD_RES (22)..(23)..(24)..(25): Xaa is A or G or absent
RXGXEAVSMGEPIKGYXXXXXXXXXFYLVNIPSLKTPVXXAKG

SEQ ID NO: 21040 - protein, 36 aa, Artificial Sequence
  Non-cyclic GFR-binding peptide
  MOD_RES (1)..(3)..(35)..(36): Xaa is C or S
XGXESVAMGPIKGYYTVVGKDFYLINIPSLKTPVXX

SEQ ID NO: 21041 - protein, 36 aa, Artificial Sequence
  Non-cyclic GFR-binding peptide
  MOD_RES (1)..(3): Xaa is C or S
  MOD_RES (15)..(16)..(17)..(18)..(19): Xaa is A or G
  MOD_RES (20)..(21)..(22)..(23): Xaa is A or G or absent
XGXAEVVMDPIKGYXXXXXXXXXFYLINIPSLRAPV

SEQ ID NO: 21042 - protein, 30 aa, Artificial Sequence
  Non-cyclic GFR-binding peptide
EVVMDPIKGYVVNNASDFYLINIPSLRTPV

SEQ ID NO: 21043 - protein, 35 aa, Artificial Sequence
  Non-cyclic GFR-binding peptide
  MOD_RES (2)..(34)..(35): Xaa is C or S
GXGEVVMDPIKGYVVKENEDFYLMNIPSLETPVXX

SEQ ID NO: 21044 - protein, 38 aa, Artificial Sequence
  Non-cyclic GFR-binding peptide
  MOD_RES (35)..(36): Xaa is C or S
  MOD_RES (13)..(14)..(15)..(16)..(17): Xaa is A or G
  MOD_RES (18)..(19)..(20)..(21): Xaa is A or G or absent
EAVSMGEPIKGYXXXXXXXXXFYLVNIPSLKTPVXXAK

SEQ ID NO: 21045 - protein, 34 aa, Artificial Sequence
  Non-cyclic GFR-binding peptide
  MOD_RES (1)..(3): Xaa is C or S
XGXAEVVMDPIKGYVVNNAADFYLINIPSLRAPV

SEQ ID NO: 21046 - protein, 33 aa, Artificial Sequence
  Non-cyclic GFR-binding peptide
  MOD_RES (2)..(2): Xaa is C or S
GXGEVVMEPIKGYVVKDYEDFYLMNIPSLETPV

SEQ ID NO: 21047 - protein, 34 aa, Artificial Sequence
  Non-cyclic GFR-binding peptide
  MOD_RES (31)..(32): Xaa is C or S
EEVIMPIKGYLLVRGNDFYLMNIPSTKVPAXXTS

SEQ ID NO: 21048 - protein, 40 aa, Artificial Sequence
  Non-cyclic GFR-binding peptide
  MOD_RES (1)..(35)..(36): Xaa is C or S
  MOD_RES (13)..(14)..(15)..(16)..(17): Xaa is A or G
  MOD_RES (18)..(19)..(20)..(21): Xaa is A or G or absent
XGEVVMEPIKGYXXXXXXXXXFYLMNIPSLETPVXXAKPI

SEQ ID NO: 21049 - protein, 33 aa, Artificial Sequence
  Non-cyclic GFR-binding peptide
  MOD_RES (12)..(13)..(14)..(15)..(16): Xaa is A or G
  MOD_RES (17)..(18)..(19)..(20): Xaa is A or G or absent
ESVAMGPIKGYXXXXXXXXXFYLINIPSLKTPV

SEQ ID NO: 21050 - protein, 37 aa, Artificial Sequence
  Non-cyclic GFR-binding peptide
  MOD_RES (2)..(4)..(36)..(37): Xaa is C or S
HXGXSRVVMNPIKGYIVNSSDDFYLVNIPSLKTPAXX

SEQ ID NO: 21051 - protein, 41 aa, Artificial Sequence
  Non-cyclic GFR-binding peptide
  MOD_RES (1)..(3)..(35)..(36): Xaa is C or S
XGXAEVVMDPIKGYVVNNAADFYLINIPSLRAPVXXSAPAA

SEQ ID NO: 21052 - protein, 41 aa, Artificial Sequence
  Non-cyclic GFR-binding peptide
  MOD_RES (1)..(3)..(35)..(36): Xaa is C or S
XGXAKVVMNPIKGYIVNNSSDFYLVNIPSLKTPAXXAKPVA

SEQ ID NO: 21053 - protein, 35 aa, Artificial Sequence
  Non-cyclic GFR-binding peptide
  MOD_RES (33)..(33): Xaa is C or S
  MOD_RES (11)..(12)..(13)..(14)..(15): Xaa is A or G
  MOD_RES (16)..(17)..(18)..(19): Xaa is A or G or absent
RVVMNPIKGYXXXXXXXXXFYLVNIPSLKTPAXTP

SEQ ID NO: 21054 - protein, 38 aa, Artificial Sequence
  Non-cyclic GFR-binding peptide
  MOD_RES (2)..(34)..(35): Xaa is C or S
GXGEVVMDPIKGYVVKENEDFYLMNIPSLETPVXXAKP

SEQ ID NO: 21055 - protein, 37 aa, Artificial Sequence
  Non-cyclic GFR-binding peptide
  MOD_RES (1)..(35)..(36): Xaa is C or S
  MOD_RES (13)..(14)..(15)..(16)..(17): Xaa is A or G
  MOD_RES (18)..(19)..(20)..(21): Xaa is A or G or absent
XAEVVMDPIKGYXXXXXXXXXFYLINIPSLRAPVXXS

SEQ ID NO: 21056 - protein, 40 aa, Artificial Sequence
  Non-cyclic GFR-binding peptide
  MOD_RES (2)..(4)..(35)..(36): Xaa is C or S
LXGXEEVIMPIKGYLLVRGNDFYLMNIPSTKVPAXXTSPV

SEQ ID NO: 21057 - protein, 41 aa, Artificial Sequence
  Non-cyclic GFR-binding peptide
  MOD_RES (1)..(3)..(37)..(38): Xaa is C or S
  MOD_RES (15)..(16)..(17)..(18)..(19): Xaa is A or G
  MOD_RES (20)..(21)..(22)..(23): Xaa is A or G or absent
XGXGEVVMDPIKGYXXXXXXXXXFYLMNIPSLETPVXXAKP

SEQ ID NO: 21058 - protein, 35 aa, Artificial Sequence
  Non-cyclic GFR-binding peptide
  MOD_RES (2)..(34)..(35): Xaa is C or S
GXSEVVMDPIKGYVVNNASDFYLINIPSLRTPVXX

SEQ ID NO: 21059 - protein, 31 aa, Artificial Sequence
  Non-cyclic GFR-binding peptide
SEVVMDPIKGYVVNNASDFYLINIPSLRTPV

SEQ ID NO: 21060 - protein, 35 aa, Artificial Sequence
  Non-cyclic GFR-binding peptide
  MOD_RES (31)..(32): Xaa is C or S
EVVMDPIKGYVVKENEDFYLMNIPSLETPVXXAKP

SEQ ID NO: 21061 - protein, 37 aa, Artificial Sequence
  Non-cyclic GFR-binding peptide
  MOD_RES (2)..(4)..(36)..(37): Xaa is C or S
RXGXAEVVMDPIKGYVVNNAADFYLINIPSLRAPVXX

SEQ ID NO: 21062 - protein, 41 aa, Artificial Sequence
  Non-cyclic GFR-binding peptide
  MOD_RES (2)..(36)..(37): Xaa is C or S
  MOD_RES (14)..(15)..(16)..(17)..(18): Xaa is A or G
  MOD_RES (19)..(20)..(21)..(22): Xaa is A or G or absent
GXAKVVMNPIKGYXXXXXXXXXFYLVNIPSLKTPAXXAKPV

SEQ ID NO: 21063 - protein, 36 aa, Artificial Sequence
  Non-cyclic GFR-binding peptide
  MOD_RES (1)..(3)..(35)..(36): Xaa is C or S
XGXGEVVMEPIKGYVVKDYEDFYLMNIPSLETPVXX

SEQ ID NO: 21064 - protein, 33 aa, Artificial Sequence
  Non-cyclic GFR-binding peptide
  MOD_RES (31)..(32): Xaa is C or S
KVVMNPIKGYIVNNSSDFYLVNIPSLKTPAXXA

SEQ ID NO: 21065 - protein, 43 aa, Artificial Sequence
  Non-cyclic GFR-binding peptide
  MOD_RES (2)..(4)..(37)..(38): Xaa is C or S
  MOD_RES (15)..(16)..(17)..(18)..(19): Xaa is A or G
  MOD_RES (20)..(21)..(22)..(23): Xaa is A or G or absent
LXGXEEVIMPIKGYXXXXXXXXXFYLMNIPSTKVPAXXTSPVR

SEQ ID NO: 21066 - protein, 36 aa, Artificial Sequence
  Non-cyclic GFR-binding peptide
  MOD_RES (1)..(3)..(36): Xaa is C or S
XGXEAVSMGEPIKGYTPVGMDDFYLVNIPSLKTPVX

SEQ ID NO: 21067 - protein, 31 aa, Artificial Sequence
  Non-cyclic GFR-binding peptide
  MOD_RES (31)..(31): Xaa is C or S
EVVMDPIKGYVVNNASDFYLINIPSLRTPVX

SEQ ID NO: 21068 - protein, 30 aa, Artificial Sequence; identical to SEQ ID NO: 1974
  Non-cyclic GFR-binding peptide

SEQ ID NO: 21069 - protein, 37 aa, Artificial Sequence
  Non-cyclic GFR-binding peptide
  MOD_RES (33)..(34): Xaa is C or S
  MOD_RES (11)..(12)..(13)..(14)..(15): Xaa is A or G
  MOD_RES (16)..(17)..(18)..(19): Xaa is A or G or absent
EVVMDPIKGYXXXXXXXXXFYLMNIPSLETPVXXAKP

SEQ ID NO: 21070 - protein, 33 aa, Artificial Sequence
  Non-cyclic GFR-binding peptide
  MOD_RES (31)..(32): Xaa is C or S
SVAMGPIKGYYTVVGKDFYLINIPSLKTPVXXA

SEQ ID NO: 21071 - protein, 36 aa, Artificial Sequence
  Non-cyclic GFR-binding peptide
  MOD_RES (2)..(4)..(36): Xaa is C or S
RXGXESVAMGPIKGYYTVVGKDFYLINIPSLKTPVX

SEQ ID NO: 21072 - protein, 36 aa, Artificial Sequence
  Non-cyclic GFR-binding peptide
  MOD_RES (1)..(3)..(36): Xaa is C or S
  MOD_RES (14)..(15)..(16)..(17)..(18): Xaa is A or G
  MOD_RES (19)..(20)..(21)..(22): Xaa is A or G or absent
XGXEEVIMPIKGYXXXXXXXXXFYLMNIPSTKVPAX

SEQ ID NO: 21073 - protein, 32 aa, Artificial Sequence
  Non-cyclic GFR-binding peptide
  MOD_RES (11)..(12)..(13)..(14)..(15): Xaa is A or G
  MOD_RES (16)..(17)..(18)..(19): Xaa is A or G or absent
EVVMDPIKGYXXXXXXXXXFYLMNIPSLETPV

SEQ ID NO: 21074 - protein, 44 aa, Artificial Sequence
  Non-cyclic GFR-binding peptide
  MOD_RES (2)..(4)..(38)..(39): Xaa is C or S
  MOD_RES (16)..(17)..(18)..(19)..(20): Xaa is A or G
  MOD_RES (21)..(22)..(23)..(24): Xaa is A or G or absent
RXGXAEVVMDPIKGYXXXXXXXXXFYLINIPSLRAPVXXSAPAA

SEQ ID NO: 21075 - protein, 41 aa, Artificial Sequence
  Non-cyclic GFR-binding peptide
  MOD_RES (1)..(35)..(36): Xaa is C or S
  MOD_RES (13)..(14)..(15)..(16)..(17): Xaa is A or G
  MOD_RES (18)..(19)..(20)..(21): Xaa is A or G or absent
XESVAMGPIKGYXXXXXXXXXFYLINIPSLKTPVXXAKSAK

SEQ ID NO: 21076 - protein, 34 aa, Artificial Sequence
  Non-cyclic GFR-binding peptide
  MOD_RES (34)..(34): Xaa is C or S
  MOD_RES (12)..(13)..(14)..(15)..(16): Xaa is A or G
  MOD_RES (17)..(18)..(19)..(20): Xaa is A or G or absent
ARVVMNPIKGYXXXXXXXXXFYLVNIPSLQTPAX

SEQ ID NO: 21077 - protein, 36 aa, Artificial Sequence
  Non-cyclic GFR-binding peptide
  MOD_RES (1)..(33)..(34): Xaa is C or S
XGEVVMDPIKGYVVKENEDFYLMNIPSLETPVXXAK

SEQ ID NO: 21078 - protein, 37 aa, Artificial Sequence
  Non-cyclic GFR-binding peptide
  MOD_RES (2)..(35)..(36): Xaa is C or S
  MOD_RES (13)..(14)..(15)..(16)..(17): Xaa is A or G
  MOD_RES (18)..(19)..(20)..(21): Xaa is A or G or absent
GXEEVIMPIKGYXXXXXXXXXFYLMNIPSTKVPAXXT

SEQ ID NO: 21079 - protein, 35 aa, Artificial Sequence
  Non-cyclic GFR-binding peptide
  MOD_RES (31)..(31): Xaa is C or S
RVVMNPIKGYIVNSSDDFYLVNIPSLKTPAXTPKT

SEQ ID NO: 21080 - protein, 35 aa, Artificial Sequence
  Non-cyclic GFR-binding peptide
  MOD_RES (33)..(34): Xaa is C or S
  MOD_RES (11)..(12)..(13)..(14)..(15): Xaa is A or G
  MOD_RES (16)..(17)..(18)..(19): Xaa is A or G or absent
RVVMNPIKGYXXXXXXXXXFYLVNIPSLQTPAXXP

SEQ ID NO: 21081 - protein, 35 aa, Artificial Sequence
  Non-cyclic GFR-binding peptide
  MOD_RES (2)..(4): Xaa is C or S
HXGXARVVMNPIKGYIVNSSDDFYLVNIPSLQTPA

SEQ ID NO: 21082 - protein, 38 aa, Artificial Sequence
  Non-cyclic GFR-binding peptide
  MOD_RES (2)..(4)..(38): Xaa is C or S
  MOD_RES (16)..(17)..(18)..(19)..(20): Xaa is A or G
  MOD_RES (21)..(22)..(23)..(24): Xaa is A or G or absent
RXGXAEVVMDPIKGYXXXXXXXXXFYLINIPSLRAPVX

SEQ ID NO: 21083 - protein, 36 aa, Artificial Sequence
  Non-cyclic GFR-binding peptide
  MOD_RES (1)..(35)..(36): Xaa is C or S
  MOD_RES (13)..(14)..(15)..(16)..(17): Xaa is A or G
  MOD_RES (18)..(19)..(20)..(21): Xaa is A or G or absent
XGEVVMEPIKGYXXXXXXXXXFYLMNIPSLETPVXX

SEQ ID NO: 21084 - protein, 35 aa, Artificial Sequence
  Non-cyclic GFR-binding peptide
  MOD_RES (1)..(33)..(34): Xaa is C or S
XSEVVMDPIKGYVVNNASDFYLINIPSLRTPVXXT

SEQ ID NO: 21085 - protein, 35 aa, Artificial Sequence
  Non-cyclic GFR-binding peptide
  MOD_RES (2)..(4): Xaa is C or S
RXGXESVAMGPIKGYYTVVGKDFYLINIPSLKTPV

SEQ ID NO: 21086 - protein, 39 aa, Artificial Sequence
  Non-cyclic GFR-binding peptide
  MOD_RES (1)..(3)..(37)..(38): Xaa is C or S
  MOD_RES (15)..(16)..(17)..(18)..(19): Xaa is A or G
  MOD_RES (20)..(21)..(22)..(23): Xaa is A or G or absent
XGXAEVVMDPIKGYXXXXXXXXXFYLINIPSLRAPVXXS

SEQ ID NO: 21087 - protein, 39 aa, Artificial Sequence
  Non-cyclic GFR-binding peptide
  MOD_RES (2)..(36): Xaa is C or S
  MOD_RES (14)..(15)..(16)..(17)..(18): Xaa is A or G
  MOD_RES (19)..(20)..(21)..(22): Xaa is A or G or absent
GXSRVVMNPIKGYXXXXXXXXXFYLVNIPSLKTPAXTPK

SEQ ID NO: 21088 - protein, 40 aa, Artificial Sequence
  Non-cyclic GFR-binding peptide
  MOD_RES (1)..(3)..(35)..(36): Xaa is C or S
XGXAKVVMNPIKGYIVNNSSDFYLVNIPSLKTPAXXAKPV

SEQ ID NO: 21089 - protein, 33 aa, Artificial Sequence
  Non-cyclic GFR-binding peptide
  MOD_RES (1)..(33): Xaa is C or S
XGEVVMDPIKGYVVKENEDFYLMNIPSLETPVX

SEQ ID NO: 21090 - protein, 38 aa, Artificial Sequence
  Non-cyclic GFR-binding peptide
  MOD_RES (2)..(4): Xaa is C or S
  MOD_RES (17)..(18)..(19)..(20)..(21): Xaa is A or G
  MOD_RES (22)..(23)..(24)..(25): Xaa is A or G or absent
RXGXEAVSMGEPIKGYXXXXXXXXXFYLVNIPSLKTPV

SEQ ID NO: 21091 - protein, 37 aa, Artificial Sequence
  Non-cyclic GFR-binding peptide
  MOD_RES (1)..(3)..(35)..(36): Xaa is C or S
XGXESVAMGPIKGYYTVVGKDFYLINIPSLKTPVXXA

SEQ ID NO: 21092 - protein, 38 aa, Artificial Sequence
  Non-cyclic GFR-binding peptide
  MOD_RES (32)..(33): Xaa is C or S
GEVVMDPIKGYVVKENEDFYLMNIPSLETPVXXAKPIK

SEQ ID NO: 21093 - protein, 36 aa, Artificial Sequence
  Non-cyclic GFR-binding peptide
  MOD_RES (2)..(4)..(36): Xaa is C or S
HXGXARVVMNPIKGYIVNSSDDFYLVNIPSLQTPAX

SEQ ID NO: 21094 - protein, 39 aa, Artificial Sequence
  Non-cyclic GFR-binding peptide
  MOD_RES (2)..(36)..(37): Xaa is C or S
  MOD_RES (14)..(15)..(16)..(17)..(18): Xaa is A or G
  MOD_RES (19)..(20)..(21)..(22): Xaa is A or G or absent
GXARVVMNPIKGYXXXXXXXXXFYLVNIPSLQTPAXXPK

SEQ ID NO: 21095 - protein, 38 aa, Artificial Sequence
  Non-cyclic GFR-binding peptide
  MOD_RES (2)..(4)..(36)..(37): Xaa is C or S
RXGXGEVVMDPIKGYVVKENEDFYLMNIPSLETPVXXA

SEQ ID NO: 21096 - protein, 42 aa, Artificial Sequence
  Non-cyclic GFR-binding peptide
  MOD_RES (2)..(4)..(38)..(39): Xaa is C or S
  MOD_RES (16)..(17)..(18)..(19)..(20): Xaa is A or G
  MOD_RES (21)..(22)..(23)..(24): Xaa is A or G or absent
HXGXARVVMNPIKGYXXXXXXXXXFYLVNIPSLQTPAXXPKP

SEQ ID NO: 21097 - protein, 40 aa, Artificial Sequence
  Non-cyclic GFR-binding peptide
  MOD_RES (1)..(3)..(37)..(38): Xaa is C or S
  MOD_RES (15)..(16)..(17)..(18)..(19): Xaa is A or G
  MOD_RES (20)..(21)..(22)..(23): Xaa is A or G or absent
XGXSEVVMDPIKGYXXXXXXXXXFYLINIPSLRTPVXXTP

SEQ ID NO: 21098 - protein, 36 aa, Artificial Sequence
  Non-cyclic GFR-binding peptide
  MOD_RES (1)..(36): Xaa is C or S
  MOD_RES (14)..(15)..(16)..(17)..(18): Xaa is A or G
  MOD_RES (19)..(20)..(21)..(22): Xaa is A or G or absent
XEAVSMGEPIKGYXXXXXXXXXFYLVNIPSLKTPVX

SEQ ID NO: 21099 - protein, 33 aa, Artificial Sequence
  Non-cyclic GFR-binding peptide
  MOD_RES (32)..(33): Xaa is C or S
GEVVMEPIKGYVVKDYEDFYLMNIPSLETPVXX

SEQ ID NO: 21100 - protein, 42 aa, Artificial Sequence
  Non-cyclic GFR-binding peptide
  MOD_RES (2)..(4)..(37)..(38): Xaa is C or S
  MOD_RES (15)..(16)..(17)..(18)..(19): Xaa is A or G
  MOD_RES (20)..(21)..(22)..(23): Xaa is A or G or absent
LXGXEEVIMPIKGYXXXXXXXXXFYLMNIPSTKVPAXXTSPV

SEQ ID NO: 21101 - protein, 38 aa, Artificial Sequence
  Non-cyclic GFR-binding peptide
  MOD_RES (2)..(4)..(38): Xaa is C or S
  MOD_RES (16)..(17)..(18)..(19)..(20): Xaa is A or G
  MOD_RES (21)..(22)..(23)..(24): Xaa is A or G or absent
HXGXSRVVMNPIKGYXXXXXXXXXFYLVNIPSLKTPAX

SEQ ID NO: 21102 - protein, 37 aa, Artificial Sequence
  Non-cyclic GFR-binding peptide
  MOD_RES (1)..(3)..(35)..(36): Xaa is C or S
XGXGEVVMEPIKGYVVKDYEDFYLMNIPSLETPVXXA

SEQ ID NO: 21103 - protein, 35 aa, Artificial Sequence
  Non-cyclic GFR-binding peptide
  MOD_RES (32)..(33): Xaa is C or S
AKVVMNPIKGYIVNNSSDFYLVNIPSLKTPAXXAK

SEQ ID NO: 21104 - protein, 37 aa, Artificial Sequence
  Non-cyclic GFR-binding peptide
  MOD_RES (1)..(3)..(37): Xaa is C or S
  MOD_RES (15)..(16)..(17)..(18)..(19): Xaa is A or G
  MOD_RES (20)..(21)..(22)..(23): Xaa is A or G or absent
XGXSEVVMDPIKGYXXXXXXXXXFYLINIPSLRTPVX

SEQ ID NO: 21105 - protein, 37 aa, Artificial Sequence
  Non-cyclic GFR-binding peptide
  MOD_RES (1)..(3)..(37): Xaa is C or S
  MOD_RES (15)..(16)..(17)..(18)..(19): Xaa is A or G
  MOD_RES (20)..(21)..(22)..(23): Xaa is A or G or absent
XGXAKVVMNPIKGYXXXXXXXXXFYLVNIPSLKTPAX

SEQ ID NO: 21106 - protein, 35 aa, Artificial Sequence
  Non-cyclic GFR-binding peptide
  MOD_RES (31)..(32): Xaa is C or S
RVVMNPIKGYIVNSSDDFYLVNIPSLQTPAXXPKP

SEQ ID NO: 21107 - protein, 34 aa, Artificial Sequence
  Non-cyclic GFR-binding peptide
  MOD_RES (1)..(3): Xaa is C or S
XGXGEVVMEPIKGYVVKDYEDFYLMNIPSLETPV

SEQ ID NO: 21108 - protein, 32 aa, Artificial Sequence
  Non-cyclic GFR-binding peptide
  MOD_RES (32)..(32): Xaa is C or S
SEVVMDPIKGYVVNNASDFYLINIPSLRTPVX

SEQ ID NO: 21109 - protein, 31 aa, Artificial Sequence
  Non-cyclic GFR-binding peptide
  MOD_RES (31)..(31): Xaa is C or S
SVAMGPIKGYYTVVGKDFYLINIPSLKTPVX

SEQ ID NO: 21110 - protein, 35 aa, Artificial Sequence
  Non-cyclic GFR-binding peptide
  MOD_RES (2)..(2): Xaa is C or S
  MOD_RES (14)..(15)..(16)..(17)..(18): Xaa is A or G
  MOD_RES (19)..(20)..(21)..(22): Xaa is A or G or absent
GXAEVVMDPIKGYXXXXXXXXXFYLINIPSLRAPV

SEQ ID NO: 21111 - protein, 37 aa, Artificial Sequence
  Non-cyclic GFR-binding peptide
  MOD_RES (1)..(35)..(36): Xaa is C or S
  MOD_RES (13)..(14)..(15)..(16)..(17): Xaa is A or G
  MOD_RES (18)..(19)..(20)..(21): Xaa is A or G or absent
XESVAMGPIKGYXXXXXXXXXFYLINIPSLKTPVXXA

SEQ ID NO: 21112 - protein, 40 aa, Artificial Sequence
  Non-cyclic GFR-binding peptide
  MOD_RES (2)..(36): Xaa is C or S
  MOD_RES (14)..(15)..(16)..(17)..(18): Xaa is A or G
  MOD_RES (19)..(20)..(21)..(22): Xaa is A or G or absent
GXSRVVMNPIKGYXXXXXXXXXFYLVNIPSLKTPAXTPKT

SEQ ID NO: 21113 - protein, 37 aa, Artificial Sequence
  Non-cyclic GFR-binding peptide
  MOD_RES (33)..(34): Xaa is C or S
  MOD_RES (11)..(12)..(13)..(14)..(15): Xaa is A or G
  MOD_RES (16)..(17)..(18)..(19): Xaa is A or G or absent
EVVMDPIKGYXXXXXXXXXFYLINIPSLRAPVXXSAP

SEQ ID NO: 21114 - protein, 36 aa, Artificial Sequence
  Non-cyclic GFR-binding peptide
  MOD_RES (32)..(33): Xaa is C or S
AKVVMNPIKGYIVNNSSDFYLVNIPSLKTPAXXAKP

SEQ ID NO: 21115 - protein, 37 aa, Artificial Sequence
  Non-cyclic GFR-binding peptide
  MOD_RES (32)..(33): Xaa is C or S
SEVVMDPIKGYVVNNASDFYLINIPSLRTPVXXTPPT

SEQ ID NO: 21116 - protein, 36 aa, Artificial Sequence
  Non-cyclic GFR-binding peptide
  MOD_RES (31)..(32): Xaa is C or S
SVAMGPIKGYYTVVGKDFYLINIPSLKTPVXXAKSA

SEQ ID NO: 21117 - protein, 34 aa, Artificial Sequence
  Non-cyclic GFR-binding peptide
  MOD_RES (32)..(33): Xaa is C or S
AEVVMDPIKGYVVNNAADFYLINIPSLRAPVXXS

SEQ ID NO: 21118 - protein, 32 aa, Artificial Sequence
  Non-cyclic GFR-binding peptide
  MOD_RES (1)..(1): Xaa is C or S
XGEVVMEPIKGYVVKDYEDFYLMNIPSLETPV

SEQ ID NO: 21119 - protein, 36 aa, Artificial Sequence
  Non-cyclic GFR-binding peptide
  MOD_RES (1)..(35)..(36): Xaa is C or S
  MOD_RES (13)..(14)..(15)..(16)..(17): Xaa is A or G
  MOD_RES (18)..(19)..(20)..(21): Xaa is A or G or absent
XSRVVMNPIKGYXXXXXXXXXFYLVNIPSLKTPAXX

SEQ ID NO: 21120 - protein, 40 aa, Artificial Sequence
  Non-cyclic GFR-binding peptide
  MOD_RES (1)..(34)..(35): Xaa is C or S
  MOD_RES (12)..(13)..(14)..(15)..(16): Xaa is A or G
  MOD_RES (17)..(18)..(19)..(20): Xaa is A or G or absent
XEEVIMPIKGYXXXXXXXXXFYLMNIPSTKVPAXXTSPVR

SEQ ID NO: 21121 - protein, 40 aa, Artificial Sequence
  Non-cyclic GFR-binding peptide
  MOD_RES (2)..(4)..(36)..(37): Xaa is C or S
RXGXSEVVMDPIKGYVVNNASDFYLINIPSLRTPVXXTPP

SEQ ID NO: 21122 - protein, 39 aa, Artificial Sequence
  Non-cyclic GFR-binding peptide
  MOD_RES (2)..(36)..(37): Xaa is C or S
  MOD_RES (14)..(15)..(16)..(17)..(18): Xaa is A or G
  MOD_RES (19)..(20)..(21)..(22): Xaa is A or G or absent
GXSRVVMNPIKGYXXXXXXXXXFYLVNIPSLKTPAXXPK

SEQ ID NO: 21123 - protein, 38 aa, Artificial Sequence
  Non-cyclic GFR-binding peptide
  MOD_RES (1)..(33)..(34): Xaa is C or S
XSEVVMDPIKGYVVNNASDFYLINIPSLRTPVXXTPPT

SEQ ID NO: 21124 - protein, 38 aa, Artificial Sequence
  Non-cyclic GFR-binding peptide
  MOD_RES (34)..(35): Xaa is C or S
  MOD_RES (12)..(13)..(14)..(15)..(16): Xaa is A or G
  MOD_RES (17)..(18)..(19)..(20): Xaa is A or G or absent
ESVAMGPIKGYXXXXXXXXXFYLINIPSLKTPVXXAKS

SEQ ID NO: 21125 - protein, 41 aa, Artificial Sequence
  Non-cyclic GFR-binding peptide
  MOD_RES (2)..(36)..(37): Xaa is C or S
  MOD_RES (14)..(15)..(16)..(17)..(18): Xaa is A or G
  MOD_RES (19)..(20)..(21)..(22): Xaa is A or G or absent
GXSEVVMDPIKGYXXXXXXXXXFYLINIPSLRTPVXXTPPT

SEQ ID NO: 21126 - protein, 36 aa, Artificial Sequence
  Non-cyclic GFR-binding peptide
  MOD_RES (1)..(3)..(34)..(35): Xaa is C or S
XGXEEVIMPIKGYLLVRGNDFYLMNIPSTKVPAXXT

SEQ ID NO: 21127 - protein, 36 aa, Artificial Sequence
  Non-cyclic GFR-binding peptide
  MOD_RES (1)..(3)..(35)..(36): Xaa is C or S
XGXAKVVMNPIKGYIVNNSSDFYLVNIPSLKTPAXX

SEQ ID NO: 21128 - protein, 33 aa, Artificial Sequence
  Non-cyclic GFR-binding peptide
  MOD_RES (31)..(32): Xaa is C or S
EVVMDPIKGYVVNNASDFYLINIPSLRTPVXXT

SEQ ID NO: 21129 - protein, 39 aa, Artificial Sequence
  Non-cyclic GFR-binding peptide
  MOD_RES (34)..(34): Xaa is C or S
  MOD_RES (12)..(13)..(14)..(15)..(16): Xaa is A or G
  MOD_RES (17)..(18)..(19)..(20): Xaa is A or G or absent
SRVVMNPIKGYXXXXXXXXXFYLVNIPSLKTPAXTPKTV

SEQ ID NO: 21130 - protein, 34 aa, Artificial Sequence
  Non-cyclic GFR-binding peptide
  MOD_RES (32)..(33): Xaa is C or S
GEVVMDPIKGYVVKENEDFYLMNIPSLETPVXXA

SEQ ID NO: 21131 - protein, 38 aa, Artificial Sequence
  Non-cyclic GFR-binding peptide
  MOD_RES (2)..(34): Xaa is C or S
GXSRVVMNPIKGYIVNSSDDFYLVNIPSLKTPAXTPKT

SEQ ID NO: 21132 - protein, 35 aa, Artificial Sequence
  Non-cyclic GFR-binding peptide
  MOD_RES (2)..(4): Xaa is C or S
HXGXSRVVMNPIKGYIVNSSDDFYLVNIPSLKTPA

SEQ ID NO: 21133 - protein, 41 aa, Artificial Sequence
  Non-cyclic GFR-binding peptide
  MOD_RES (2)..(4)..(38)..(39): Xaa is C or S
  MOD_RES (16)..(17)..(18)..(19)..(20): Xaa is A or G
  MOD_RES (21)..(22)..(23)..(24): Xaa is A or G or absent
RXGXSEVVMDPIKGYXXXXXXXXXFYLINIPSLRTPVXXTP

SEQ ID NO: 21134 - protein, 30 aa, Artificial Sequence
  Non-cyclic GFR-binding peptide
KVVMNPIKGYIVNNSSDFYLVNIPSLKTPA

SEQ ID NO: 21135 - protein, 38 aa, Artificial Sequence
  Non-cyclic GFR-binding peptide
  MOD_RES (1)..(33): Xaa is C or S
XSRVVMNPIKGYIVNSSDDFYLVNIPSLKTPAXTPKTV

SEQ ID NO: 21136 - protein, 41 aa, Artificial Sequence
  Non-cyclic GFR-binding peptide
  MOD_RES (1)..(3)..(35)..(36): Xaa is C or S
XGXGEVVMEPIKGYVVKDYEDFYLMNIPSLETPVXXAKPIS

SEQ ID NO: 21137 - protein, 42 aa, Artificial Sequence
  Non-cyclic GFR-binding peptide
  MOD_RES (1)..(3)..(37): Xaa is C or S
  MOD_RES (15)..(16)..(17)..(18)..(19): Xaa is A or G
  MOD_RES (20)..(21)..(22)..(23): Xaa is A or G or absent
XGXSRVVMNPIKGYXXXXXXXXXFYLVNIPSLKTPAXTPKTV

SEQ ID NO: 21138 - protein, 36 aa, Artificial Sequence
  Non-cyclic GFR-binding peptide
  MOD_RES (32)..(32): Xaa is C or S
SRVVMNPIKGYIVNSSDDFYLVNIPSLKTPAXTPKT

SEQ ID NO: 21139 - protein, 36 aa, Artificial Sequence
  Non-cyclic GFR-binding peptide
  MOD_RES (2)..(36): Xaa is C or S
  MOD_RES (14)..(15)..(16)..(17)..(18): Xaa is A or G
  MOD_RES (19)..(20)..(21)..(22): Xaa is A or G or absent
GXARVVMNPIKGYXXXXXXXXXFYLVNIPSLQTPAX

SEQ ID NO: 21140 - protein, 35 aa, Artificial Sequence
  Non-cyclic GFR-binding peptide
  MOD_RES (1)..(35): Xaa is C or S
  MOD_RES (13)..(14)..(15)..(16)..(17): Xaa is A or G
  MOD_RES (18)..(19)..(20)..(21): Xaa is A or G or absent
XSEVVMDPIKGYXXXXXXXXXFYLINIPSLRTPVX

SEQ ID NO: 21141 - protein, 37 aa, Artificial Sequence
  Non-cyclic GFR-binding peptide
  MOD_RES (34)..(35): Xaa is C or S
  MOD_RES (12)..(13)..(14)..(15)..(16): Xaa is A or G
  MOD_RES (17)..(18)..(19)..(20): Xaa is A or G or absent
ESVAMGPIKGYXXXXXXXXXFYLINIPSLKTPVXXAK

SEQ ID NO: 21142 - protein, 34 aa, Artificial Sequence
  Non-cyclic GFR-binding peptide
  MOD_RES (1)..(33)..(34): Xaa is C or S
XAEVVMDPIKGYVVNNAADFYLINIPSLRAPVXX

SEQ ID NO: 21143 - protein, 40 aa, Artificial Sequence
  Non-cyclic GFR-binding peptide
  MOD_RES (1)..(34)..(35): Xaa is C or S
XEAVSMGEPIKGYTPVGMDDFYLVNIPSLKTPVXXAKGVK

SEQ ID NO: 21144 - protein, 39 aa, Artificial Sequence
  Non-cyclic GFR-binding peptide
  MOD_RES (1)..(3)..(35)..(36): Xaa is C or S
XGXESVAMGPIKGYYTVVGKDFYLINIPSLKTPVXXAKS

SEQ ID NO: 21145 - protein, 34 aa, Artificial Sequence
  Non-cyclic GFR-binding peptide
  MOD_RES (2)..(33)..(34): Xaa is C or S
GXEEVIMPIKGYLLVRGNDFYLMNIPSTKVPAXX

SEQ ID NO: 21146 - protein, 39 aa, Artificial Sequence
  Non-cyclic GFR-binding peptide
  MOD_RES (2)..(35)..(36): Xaa is C or S
GXEAVSMGEPIKGYTPVGMDDFYLVNIPSLKTPVXXAKG

SEQ ID NO: 21147 - protein, 41 aa, Artificial Sequence
  Non-cyclic GFR-binding peptide
  MOD_RES (2)..(4)..(38)..(39): Xaa is C or S
  MOD_RES (16)..(17)..(18)..(19)..(20): Xaa is A or G
  MOD_RES (21)..(22)..(23)..(24): Xaa is A or G or absent
RXGXGEVVMDPIKGYXXXXXXXXXFYLMNIPSLETPVXXAK

SEQ ID NO: 21148 - protein, 35 aa, Artificial Sequence
  Non-cyclic GFR-binding peptide
  MOD_RES (32)..(33): Xaa is C or S
ARVVMNPIKGYIVNSSDDFYLVNIPSLQTPAXXPK

SEQ ID NO: 21149 - protein, 39 aa, Artificial Sequence
  Non-cyclic GFR-binding peptide
  MOD_RES (34)..(35): Xaa is C or S
  MOD_RES (12)..(13)..(14)..(15)..(16): Xaa is A or G
  MOD_RES (17)..(18)..(19)..(20): Xaa is A or G or absent
SRVVMNPIKGYXXXXXXXXXFYLVNIPSLKTPAXXPKPV

SEQ ID NO: 21150 - protein, 39 aa, Artificial Sequence
  Non-cyclic GFR-binding peptide
  MOD_RES (2)..(36)..(37): Xaa is C or S
  MOD_RES (14)..(15)..(16)..(17)..(18): Xaa is A or G
  MOD_RES (19)..(20)..(21)..(22): Xaa is A or G or absent
GXESVAMGPIKGYXXXXXXXXXFYLINIPSLKTPVXXAK

SEQ ID NO: 21151 - protein, 32 aa, Artificial Sequence
  Non-cyclic GFR-binding peptide
  MOD_RES (1)..(1): Xaa is C or S
XAKVVMNPIKGYIVNNSSDFYLVNIPSLKTPA

SEQ ID NO: 21152 - protein, 39 aa, Artificial Sequence
  Non-cyclic GFR-binding peptide
  MOD_RES (1)..(33)..(34): Xaa is C or S
XGEVVMEPIKGYVVKDYEDFYLMNIPSLETPVXXAKPIS

SEQ ID NO: 21153 - protein, 39 aa, Artificial Sequence
  Non-cyclic GFR-binding peptide
  MOD_RES (34)..(35): Xaa is C or S
  MOD_RES (12)..(13)..(14)..(15)..(16): Xaa is A or G
  MOD_RES (17)..(18)..(19)..(20): Xaa is A or G or absent
ESVAMGPIKGYXXXXXXXXXFYLINIPSLKTPVXXAKSA

SEQ ID NO: 21154 - protein, 42 aa, Artificial Sequence
  Non-cyclic GFR-binding peptide
  MOD_RES (2)..(4)..(38)..(39): Xaa is C or S
  MOD_RES (16)..(17)..(18)..(19)..(20): Xaa is A or G
  MOD_RES (21)..(22)..(23)..(24): Xaa is A or G or absent
RXGXGEVVMEPIKGYXXXXXXXXXFYLMNIPSLETPVXXAKP

SEQ ID NO: 21155 - protein, 37 aa, Artificial Sequence
  Non-cyclic GFR-binding peptide
  MOD_RES (33)..(34): Xaa is C or S
  MOD_RES (11)..(12)..(13)..(14)..(15): Xaa is A or G
  MOD_RES (16)..(17)..(18)..(19): Xaa is A or G or absent
SVAMGPIKGYXXXXXXXXXFYLINIPSLKTPVXXAKS

SEQ ID NO: 21156 - protein, 40 aa, Artificial Sequence
  Non-cyclic GFR-binding peptide
  MOD_RES (1)..(3)..(37)..(38): Xaa is C or S
  MOD_RES (15)..(16)..(17)..(18)..(19): Xaa is A or G
  MOD_RES (20)..(21)..(22)..(23): Xaa is A or G or absent
XGXARVVMNPIKGYXXXXXXXXXFYLVNIPSLQTPAXXPK

SEQ ID NO: 21157 - protein, 33 aa, Artificial Sequence
  Non-cyclic GFR-binding peptide
  MOD_RES (1)..(33): Xaa is C or S
XSEVVMDPIKGYVVNNASDFYLINIPSLRTPVX

SEQ ID NO: 21158 - protein, 39 aa, Artificial Sequence
  Non-cyclic GFR-binding peptide
  MOD_RES (33)..(34): Xaa is C or S
  MOD_RES (11)..(12)..(13)..(14)..(15): Xaa is A or G
  MOD_RES (16)..(17)..(18)..(19): Xaa is A or G or absent
EVVMDPIKGYXXXXXXXXXFYLINIPSLRAPVXXSAPAA

SEQ ID NO: 21159 - protein, 37 aa, Artificial Sequence
  Non-cyclic GFR-binding peptide
  MOD_RES (2)..(34)..(35): Xaa is C or S
GXGEVVMDPIKGYVVKENEDFYLMNIPSLETPVXXAK

SEQ ID NO: 21160 - protein, 31 aa, Artificial Sequence
  Non-cyclic GFR-binding peptide
ESVAMGPIKGYYTVVGKDFYLINIPSLKTPV

SEQ ID NO: 21161 - protein, 34 aa, Artificial Sequence
  Non-cyclic GFR-binding peptide
  MOD_RES (33)..(33): Xaa is C or S
  MOD_RES (11)..(12)..(13)..(14)..(15): Xaa is A or G
  MOD_RES (16)..(17)..(18)..(19): Xaa is A or G or absent
RVVMNPIKGYXXXXXXXXXFYLVNIPSLKTPAXT

SEQ ID NO: 21162 - protein, 34 aa, Artificial Sequence
  Non-cyclic GFR-binding peptide
  MOD_RES (1)..(3): Xaa is C or S
XGXARVVMNPIKGYIVNSSDDFYLVNIPSLQTPA

SEQ ID NO: 21163 - protein, 38 aa, Artificial Sequence
  Non-cyclic GFR-binding peptide
  MOD_RES (1)..(33)..(34): Xaa is C or S
XSRVVMNPIKGYIVNSSDDFYLVNIPSLKTPAXXPKPV

SEQ ID NO: 21164 - protein, 37 aa, Artificial Sequence
  Non-cyclic GFR-binding peptide
  MOD_RES (2)..(4)..(36)..(37): Xaa is C or S
RXGXESVAMGPIKGYYTVVGKDFYLINIPSLKTPVXX

SEQ ID NO: 21165 - protein, 37 aa, Artificial Sequence
  Non-cyclic GFR-binding peptide
  MOD_RES (2)..(4): Xaa is C or S
  MOD_RES (16)..(17)..(18)..(19)..(20): Xaa is A or G
  MOD_RES (21)..(22)..(23)..(24): Xaa is A or G or absent
RXGXAEVVMDPIKGYXXXXXXXXXFYLINIPSLRAPV

SEQ ID NO: 21166 - protein, 36 aa, Artificial Sequence
  Non-cyclic GFR-binding peptide
  MOD_RES (2)..(36): Xaa is C or S
  MOD_RES (14)..(15)..(16)..(17)..(18): Xaa is A or G
  MOD_RES (19)..(20)..(21)..(22): Xaa is A or G or absent
GXGEVVMDPIKGYXXXXXXXXXFYLMNIPSLETPVX

SEQ ID NO: 21167 - protein, 38 aa, Artificial Sequence
  Non-cyclic GFR-binding peptide
  MOD_RES (1)..(3)..(37)..(38): Xaa is C or S
  MOD_RES (15)..(16)..(17)..(18)..(19): Xaa is A or G
  MOD_RES (20)..(21)..(22)..(23): Xaa is A or G or absent
XGXAKVVMNPIKGYXXXXXXXXXFYLVNIPSLKTPAXX

SEQ ID NO: 21168 - protein, 33 aa, Artificial Sequence
  Non-cyclic GFR-binding peptide
  MOD_RES (12)..(13)..(14)..(15)..(16): Xaa is A or G
  MOD_RES (17)..(18)..(19)..(20): Xaa is A or G or absent
GEVVMEPIKGYXXXXXXXXXFYLMNIPSLETPV

SEQ ID NO: 21169 - protein, 41 aa, Artificial Sequence
  Non-cyclic GFR-binding peptide
  MOD_RES (1)..(3)..(35)..(36): Xaa is C or S
XGXSRVVMNPIKGYIVNSSDDFYLVNIPSLKTPAXXPKPVY

SEQ ID NO: 21170 - protein, 39 aa, Artificial Sequence
  Non-cyclic GFR-binding peptide
  MOD_RES (33)..(34): Xaa is C or S
  MOD_RES (11)..(12)..(13)..(14)..(15): Xaa is A or G
  MOD_RES (16)..(17)..(18)..(19): Xaa is A or G or absent
RVVMNPIKGYXXXXXXXXXFYLVNIPSLKTPAXXPKPVY

SEQ ID NO: 21171 - protein, 41 aa, Artificial Sequence
  Non-cyclic GFR-binding peptide
  MOD_RES (2)..(36)..(37): Xaa is C or S
  MOD_RES (14)..(15)..(16)..(17)..(18): Xaa is A or G
  MOD_RES (19)..(20)..(21)..(22): Xaa is A or G or absent
GXGEVVMEPIKGYXXXXXXXXXFYLMNIPSLETPVXXAKPI

SEQ ID NO: 21172 - protein, 37 aa, Artificial Sequence
  Non-cyclic GFR-binding peptide
  MOD_RES (2)..(33)..(34): Xaa is C or S
GXEEVIMPIKGYLLVRGNDFYLMNIPSTKVPAXXTSP

SEQ ID NO: 21173 - protein, 36 aa, Artificial Sequence
  Non-cyclic GFR-binding peptide
  MOD_RES (1)..(3)..(35)..(36): Xaa is C or S
XGXSRVVMNPIKGYIVNSSDDFYLVNIPSLKTPAXX

SEQ ID NO: 21174 - protein, 37 aa, Artificial Sequence
  Non-cyclic GFR-binding peptide
  MOD_RES (1)..(32)..(33): Xaa is C or S
XEEVIMPIKGYLLVRGNDFYLMNIPSTKVPAXXTSPV

SEQ ID NO: 21175 - protein, 37 aa, Artificial Sequence
  Non-cyclic GFR-binding peptide
  MOD_RES (34)..(35): Xaa is C or S
  MOD_RES (12)..(13)..(14)..(15)..(16): Xaa is A or G
  MOD_RES (17)..(18)..(19)..(20): Xaa is A or G or absent
SRVVMNPIKGYXXXXXXXXXFYLVNIPSLKTPAXXPK

SEQ ID NO: 21176 - protein, 37 aa, Artificial Sequence
  Non-cyclic GFR-binding peptide
  MOD_RES (1)..(3)..(35)..(36): Xaa is C or S
XGXAEVVMDPIKGYVVNNAADFYLINIPSLRAPVXXS

SEQ ID NO: 21177 - protein, 38 aa, Artificial Sequence
  Non-cyclic GFR-binding peptide
  MOD_RES (2)..(35)..(36): Xaa is C or S
  MOD_RES (13)..(14)..(15)..(16)..(17): Xaa is A or G
  MOD_RES (18)..(19)..(20)..(21): Xaa is A or G or absent
GXEEVIMPIKGYXXXXXXXXXFYLMNIPSTKVPAXXTS

SEQ ID NO: 21178 - protein, 30 aa, Artificial Sequence; identical to SEQ ID NO: 1966
  Non-cyclic GFR-binding peptide

SEQ ID NO: 21179 - protein, 32 aa, Artificial Sequence
  Non-cyclic GFR-binding peptide
  MOD_RES (1)..(1): Xaa is C or S
XSRVVMNPIKGYIVNSSDDFYLVNIPSLKTPA

SEQ ID NO: 21180 - protein, 40 aa, Artificial Sequence
  Non-cyclic GFR-binding peptide
  MOD_RES (34)..(35): Xaa is C or S
  MOD_RES (12)..(13)..(14)..(15)..(16): Xaa is A or G
  MOD_RES (17)..(18)..(19)..(20): Xaa is A or G or absent
GEVVMDPIKGYXXXXXXXXXFYLMNIPSLETPVXXAKPIK

SEQ ID NO: 21181 - protein, 38 aa, Artificial Sequence
  Non-cyclic GFR-binding peptide
  MOD_RES (32)..(33): Xaa is C or S
SRVVMNPIKGYIVNSSDDFYLVNIPSLKTPAXXPKPVH

SEQ ID NO: 21182 - protein, 34 aa, Artificial Sequence
  Non-cyclic GFR-binding peptide
  MOD_RES (1)..(33)..(34): Xaa is C or S
XESVAMGPIKGYYTVVGKDFYLINIPSLKTPVXX

SEQ ID NO: 21183 - protein, 42 aa, Artificial Sequence
  Non-cyclic GFR-binding peptide
  MOD_RES (2)..(4)..(36)..(37): Xaa is C or S
HXGXARVVMNPIKGYIVNSSDDFYLVNIPSLQTPAXXPKPVT

SEQ ID NO: 21184 - protein, 35 aa, Artificial Sequence
  Non-cyclic GFR-binding peptide
  MOD_RES (2)..(4): Xaa is C or S
RXGXGEVVMEPIKGYVVKDYEDFYLMNIPSLETPV

SEQ ID NO: 21185 - protein, 32 aa, Artificial Sequence
  Non-cyclic GFR-binding peptide
  MOD_RES (1)..(32): Xaa is C or S
XEEVIMPIKGYLLVRGNDFYLMNIPSTKVPAX

SEQ ID NO: 21186 - protein, 34 aa, Artificial Sequence
  Non-cyclic GFR-binding peptide
  MOD_RES (32)..(32): Xaa is C or S
SRVVMNPIKGYIVNSSDDFYLVNIPSLKTPAXTP

SEQ ID NO: 21187 - protein, 37 aa, Artificial Sequence
  Non-cyclic GFR-binding peptide
  MOD_RES (2)..(34)..(35): Xaa is C or S
GXAKVVMNPIKGYIVNNSSDFYLVNIPSLKTPAXXAK

SEQ ID NO: 21188 - protein, 37 aa, Artificial Sequence
  Non-cyclic GFR-binding peptide
  MOD_RES (31)..(32): Xaa is C or S
RVVMNPIKGYIVNSSDDFYLVNIPSLQTPAXXPKPVT

SEQ ID NO: 21189 - protein, 40 aa, Artificial Sequence
  Non-cyclic GFR-binding peptide
  MOD_RES (1)..(3)..(37)..(38): Xaa is C or S
  MOD_RES (15)..(16)..(17)..(18)..(19): Xaa is A or G
  MOD_RES (20)..(21)..(22)..(23): Xaa is A or G or absent
XGXESVAMGPIKGYXXXXXXXXXFYLINIPSLKTPVXXAK

SEQ ID NO: 21190 - protein, 34 aa, Artificial Sequence
  Non-cyclic GFR-binding peptide
  MOD_RES (34)..(34): Xaa is C or S
  MOD_RES (12)..(13)..(14)..(15)..(16): Xaa is A or G
  MOD_RES (17)..(18)..(19)..(20): Xaa is A or G or absent
SEVVMDPIKGYXXXXXXXXXFYLINIPSLRTPVX

SEQ ID NO: 21191 - protein, 32 aa, Artificial Sequence
  Non-cyclic GFR-binding peptide
  MOD_RES (31)..(32): Xaa is C or S
RVVMNPIKGYIVNSSDDFYLVNIPSLQTPAXX

SEQ ID NO: 21192 - protein, 36 aa, Artificial Sequence
  Non-cyclic GFR-binding peptide
  MOD_RES (32)..(33): Xaa is C or S
ARVVMNPIKGYIVNSSDDFYLVNIPSLQTPAXXPKP

SEQ ID NO: 21193 - protein, 37 aa, Artificial Sequence
  Non-cyclic GFR-binding peptide
  MOD_RES (1)..(35)..(36): Xaa is C or S
  MOD_RES (13)..(14)..(15)..(16)..(17): Xaa is A or G
  MOD_RES (18)..(19)..(20)..(21): Xaa is A or G or absent
XARVVMNPIKGYXXXXXXXXXFYLVNIPSLQTPAXXP

SEQ ID NO: 21194 - protein, 44 aa, Artificial Sequence
  Non-cyclic GFR-binding peptide
  MOD_RES (2)..(4)..(38): Xaa is C or S
  MOD_RES (16)..(17)..(18)..(19)..(20): Xaa is A or G
  MOD_RES (21)..(22)..(23)..(24): Xaa is A or G or absent
HXGXSRVVMNPIKGYXXXXXXXXXFYLVNIPSLKTPAXTPKTVH

SEQ ID NO: 21195 - protein, 33 aa, Artificial Sequence
  Non-cyclic GFR-binding peptide
  MOD_RES (32)..(32): Xaa is C or S
SRVVMNPIKGYIVNSSDDFYLVNIPSLKTPAXT

SEQ ID NO: 21196 - protein, 44 aa, Artificial Sequence
  Non-cyclic GFR-binding peptide
  MOD_RES (2)..(4)..(38)..(39): Xaa is C or S
  MOD_RES (16)..(17)..(18)..(19)..(20): Xaa is A or G
  MOD_RES (21)..(22)..(23)..(24): Xaa is A or G or absent
RXGXGEVVMEPIKGYXXXXXXXXXFYLMNIPSLETPVXXAKPIS

SEQ ID NO: 21197 - protein, 38 aa, Artificial Sequence
  Non-cyclic GFR-binding peptide
  MOD_RES (1)..(3)..(37)..(38): Xaa is C or S
  MOD_RES (15)..(16)..(17)..(18)..(19): Xaa is A or G
  MOD_RES (20)..(21)..(22)..(23): Xaa is A or G or absent
XGXSEVVMDPIKGYXXXXXXXXXFYLINIPSLRTPVXX

SEQ ID NO: 21198 - protein, 38 aa, Artificial Sequence
  Non-cyclic GFR-binding peptide
  MOD_RES (32)..(33): Xaa is C or S
SRVVMNPIKGYIVNSSDDFYLVNIPSLKTPAXXPKPVY

SEQ ID NO: 21199 - protein, 36 aa, Artificial Sequence
  Non-cyclic GFR-binding peptide
  MOD_RES (2)..(34)..(35): Xaa is C or S
GXARVVMNPIKGYIVNSSDDFYLVNIPSLQTPAXXP

SEQ ID NO: 21200 - protein, 38 aa, Artificial Sequence
  Non-cyclic GFR-binding peptide
  MOD_RES (2)..(36)..(37): Xaa is C or S
  MOD_RES (14)..(15)..(16)..(17)..(18): Xaa is A or G
  MOD_RES (19)..(20)..(21)..(22): Xaa is A or G or absent
GXAKVVMNPIKGYXXXXXXXXXFYLVNIPSLKTPAXXA

SEQ ID NO: 21201 - protein, 35 aa, Artificial Sequence
  Non-cyclic GFR-binding peptide
  MOD_RES (1)..(35): Xaa is C or S
  MOD_RES (13)..(14)..(15)..(16)..(17): Xaa is A or G
  MOD_RES (18)..(19)..(20)..(21): Xaa is A or G or absent
XAKVVMNPIKGYXXXXXXXXXFYLVNIPSLKTPAX

SEQ ID NO: 21202 - protein, 31 aa, Artificial Sequence
  Non-cyclic GFR-binding peptide
  MOD_RES (31)..(31): Xaa is C or S
RVVMNPIKGYIVNSSDDFYLVNIPSLQTPAX

SEQ ID NO: 21203 - protein, 35 aa, Artificial Sequence
  Non-cyclic GFR-binding peptide
  MOD_RES (31)..(32): Xaa is C or S
EVVMDPIKGYVVNNAADFYLINIPSLRAPVXXSAP

SEQ ID NO: 21204 - protein, 43 aa, Artificial Sequence
  Non-cyclic GFR-binding peptide
  MOD_RES (1)..(3)..(37)..(38): Xaa is C or S
  MOD_RES (15)..(16)..(17)..(18)..(19): Xaa is A or G
  MOD_RES (20)..(21)..(22)..(23): Xaa is A or G or absent
XGXGEVVMDPIKGYXXXXXXXXXFYLMNIPSLETPVXXAKPIK

SEQ ID NO: 21205 - protein, 37 aa, Artificial Sequence
  Non-cyclic GFR-binding peptide
  MOD_RES (34)..(35): Xaa is C or S
  MOD_RES (12)..(13)..(14)..(15)..(16): Xaa is A or G
  MOD_RES (17)..(18)..(19)..(20): Xaa is A or G or absent
AEVVMDPIKGYXXXXXXXXXFYLINIPSLRAPVXXSA

SEQ ID NO: 21206 - protein, 33 aa, Artificial Sequence
  Non-cyclic GFR-binding peptide
  MOD_RES (31)..(32): Xaa is C or S
RVVMNPIKGYIVNSSDDFYLVNIPSLQTPAXXP

SEQ ID NO: 21207 - protein, 42 aa, Artificial Sequence
  Non-cyclic GFR-binding peptide
  MOD_RES (1)..(3)..(37)..(38): Xaa is C or S
  MOD_RES (15)..(16)..(17)..(18)..(19): Xaa is A or G
  MOD_RES (20)..(21)..(22)..(23): Xaa is A or G or absent
XGXGEVVMDPIKGYXXXXXXXXXFYLMNIPSLETPVXXAKPI

SEQ ID NO: 21208 - protein, 38 aa, Artificial Sequence
  Non-cyclic GFR-binding peptide
  MOD_RES (2)..(37)..(38): Xaa is C or S
  MOD_RES (15)..(16)..(17)..(18)..(19): Xaa is A or G
  MOD_RES (20)..(21)..(22)..(23): Xaa is A or G or absent
GXEAVSMGEPIKGYXXXXXXXXXFYLVNIPSLKTPVXX

SEQ ID NO: 21209 - protein, 35 aa, Artificial Sequence
  Non-cyclic GFR-binding peptide
  MOD_RES (1)..(33)..(34): Xaa is C or S
XAKVVMNPIKGYIVNNSSDFYLVNIPSLKTPAXXA

SEQ ID NO: 21210 - protein, 39 aa, Artificial Sequence
  Non-cyclic GFR-binding peptide
  MOD_RES (1)..(35)..(36): Xaa is C or S
  MOD_RES (13)..(14)..(15)..(16)..(17): Xaa is A or G
  MOD_RES (18)..(19)..(20)..(21): Xaa is A or G or absent
XAEVVMDPIKGYXXXXXXXXXFYLINIPSLRAPVXXSAP

SEQ ID NO: 21211 - protein, 33 aa, Artificial Sequence
  Non-cyclic GFR-binding peptide
  MOD_RES (32)..(33): Xaa is C or S
AEVVMDPIKGYVVNNAADFYLINIPSLRAPVXX

SEQ ID NO: 21212 - protein, 34 aa, Artificial Sequence
  Non-cyclic GFR-binding peptide
  MOD_RES (1)..(33)..(34): Xaa is C or S
XARVVMNPIKGYIVNSSDDFYLVNIPSLQTPAXX

SEQ ID NO: 21213 - protein, 39 aa, Artificial Sequence
  Non-cyclic GFR-binding peptide
  MOD_RES (2)..(4)..(36)..(37): Xaa is C or S
HXGXARVVMNPIKGYIVNSSDDFYLVNIPSLQTPAXXPK

SEQ ID NO: 21214 - protein, 36 aa, Artificial Sequence
  Non-cyclic GFR-binding peptide
  MOD_RES (2)..(34)..(35): Xaa is C or S
GXESVAMGPIKGYYTVVGKDFYLINIPSLKTPVXXA

SEQ ID NO: 21215 - protein, 41 aa, Artificial Sequence
  Non-cyclic GFR-binding peptide
  MOD_RES (2)..(36)..(37): Xaa is C or S
  MOD_RES (14)..(15)..(16)..(17)..(18): Xaa is A or G
  MOD_RES (19)..(20)..(21)..(22): Xaa is A or G or absent
GXAEVVMDPIKGYXXXXXXXXXFYLINIPSLRAPVXXSAPA

SEQ ID NO: 21216 - protein, 39 aa, Artificial Sequence
  Non-cyclic GFR-binding peptide
  MOD_RES (33)..(34): Xaa is C or S
  MOD_RES (11)..(12)..(13)..(14)..(15): Xaa is A or G
  MOD_RES (16)..(17)..(18)..(19): Xaa is A or G or absent
SVAMGPIKGYXXXXXXXXXFYLINIPSLKTPVXXAKSAK

SEQ ID NO: 21217 - protein, 39 aa, Artificial Sequence
  Non-cyclic GFR-binding peptide
  MOD_RES (2)..(34)..(35): Xaa is C or S
GXAEVVMDPIKGYVVNNAADFYLINIPSLRAPVXXSAPA

SEQ ID NO: 21218 - protein, 36 aa, Artificial Sequence
  Non-cyclic GFR-binding peptide
  MOD_RES (1)..(35)..(36): Xaa is C or S
  MOD_RES (13)..(14)..(15)..(16)..(17): Xaa is A or G
  MOD_RES (18)..(19)..(20)..(21): Xaa is A or G or absent
XESVAMGPIKGYXXXXXXXXXFYLINIPSLKTPVXX

SEQ ID NO: 21219 - protein, 37 aa, Artificial Sequence
  Non-cyclic GFR-binding peptide
  MOD_RES (2)..(34)..(35): Xaa is C or S
GXSEVVMDPIKGYVVNNASDFYLINIPSLRTPVXXTP

SEQ ID NO: 21220 - protein, 36 aa, Artificial Sequence
  Non-cyclic GFR-binding peptide
  MOD_RES (2)..(36): Xaa is C or S
  MOD_RES (14)..(15)..(16)..(17)..(18): Xaa is A or G
  MOD_RES (19)..(20)..(21)..(22): Xaa is A or G or absent
GXSRVVMNPIKGYXXXXXXXXXFYLVNIPSLKTPAX

SEQ ID NO: 21221 - protein, 36 aa, Artificial Sequence
  Non-cyclic GFR-binding peptide
  MOD_RES (1)..(3)..(35)..(36): Xaa is C or S
XGXGEVVMDPIKGYVVKENEDFYLMNIPSLETPVXX

SEQ ID NO: 21222 - protein, 37 aa, Artificial Sequence
  Non-cyclic GFR-binding peptide
  MOD_RES (34)..(35): Xaa is C or S
  MOD_RES (12)..(13)..(14)..(15)..(16): Xaa is A or G
  MOD_RES (17)..(18)..(19)..(20): Xaa is A or G or absent
SEVVMDPIKGYXXXXXXXXXFYLINIPSLRTPVXXTP

SEQ ID NO: 21223 - protein, 36 aa, Artificial Sequence
  Non-cyclic GFR-binding peptide
  MOD_RES (2)..(4)..(36): Xaa is C or S
RXGXAEVVMDPIKGYVVNNAADFYLINIPSLRAPVX

SEQ ID NO: 21224 - protein, 37 aa, Artificial Sequence
  Non-cyclic GFR-binding peptide
  MOD_RES (32)..(33): Xaa is C or S
GEVVMEPIKGYVVKDYEDFYLMNIPSLETPVXXAKPI

SEQ ID NO: 21225 - protein, 37 aa, Artificial Sequence
  Non-cyclic GFR-binding peptide
  MOD_RES (2)..(34)..(35): Xaa is C or S
GXAEVVMDPIKGYVVNNAADFYLINIPSLRAPVXXSA

SEQ ID NO: 21226 - protein, 41 aa, Artificial Sequence
  Non-cyclic GFR-binding peptide
  MOD_RES (1)..(35): Xaa is C or S
  MOD_RES (13)..(14)..(15)..(16)..(17): Xaa is A or G
  MOD_RES (18)..(19)..(20)..(21): Xaa is A or G or absent
XSRVVMNPIKGYXXXXXXXXXFYLVNIPSLKTPAXTPKTVH

SEQ ID NO: 21227 - protein, 39 aa, Artificial Sequence
  Non-cyclic GFR-binding peptide
  MOD_RES (2)..(4)..(36)..(37): Xaa is C or S
HXGXSRVVMNPIKGYIVNSSDDFYLVNIPSLKTPAXXPK

SEQ ID NO: 21228 - protein, 39 aa, Artificial Sequence
  Non-cyclic GFR-binding peptide
  MOD_RES (1)..(33)..(34): Xaa is C or S
XAEVVMDPIKGYVVNNAADFYLINIPSLRAPVXXSAPAA

SEQ ID NO: 21229 - protein, 42 aa, Artificial Sequence
  Non-cyclic GFR-binding peptide
  MOD_RES (1)..(3)..(36)..(37): Xaa is C or S
XGXEAVSMGEPIKGYTPVGMDDFYLVNIPSLKTPVXXAKGVK

SEQ ID NO: 21230 - protein, 39 aa, Artificial Sequence
  Non-cyclic GFR-binding peptide
  MOD_RES (1)..(3)..(35)..(36): Xaa is C or S
XGXSRVVMNPIKGYIVNSSDDFYLVNIPSLKTPAXXPKP

SEQ ID NO: 21231 - protein, 35 aa, Artificial Sequence
  Non-cyclic GFR-binding peptide
  MOD_RES (34)..(35): Xaa is C or S
  MOD_RES (12)..(13)..(14)..(15)..(16): Xaa is A or G
  MOD_RES (17)..(18)..(19)..(20): Xaa is A or G or absent
GEVVMEPIKGYXXXXXXXXXFYLMNIPSLETPVXX

SEQ ID NO: 21232 - protein, 40 aa, Artificial Sequence
  Non-cyclic GFR-binding peptide
  MOD_RES (2)..(34)..(35): Xaa is C or S
GXAEVVMDPIKGYVVNNAADFYLINIPSLRAPVXXSAPAA

SEQ ID NO: 21233 - protein, 38 aa, Artificial Sequence
  Non-cyclic GFR-binding peptide
  MOD_RES (1)..(35)..(36): Xaa is C or S
  MOD_RES (13)..(14)..(15)..(16)..(17): Xaa is A or G
  MOD_RES (18)..(19)..(20)..(21): Xaa is A or G or absent
XAEVVMDPIKGYXXXXXXXXXFYLINIPSLRAPVXXSA

SEQ ID NO: 21234 - protein, 43 aa, Artificial Sequence
  Non-cyclic GFR-binding peptide
  MOD_RES (2)..(4)..(38)..(39): Xaa is C or S
  MOD_RES (16)..(17)..(18)..(19)..(20): Xaa is A or G
  MOD_RES (21)..(22)..(23)..(24): Xaa is A or G or absent
RXGXGEVVMEPIKGYXXXXXXXXXFYLMNIPSLETPVXXAKPI

SEQ ID NO: 21235 - protein, 41 aa, Artificial Sequence
  Non-cyclic GFR-binding peptide
  MOD_RES (1)..(35)..(36): Xaa is C or S
  MOD_RES (13)..(14)..(15)..(16)..(17): Xaa is A or G
  MOD_RES (18)..(19)..(20)..(21): Xaa is A or G or absent
XGEVVMDPIKGYXXXXXXXXXFYLMNIPSLETPVXXAKPIK

SEQ ID NO: 21236 - protein, 39 aa, Artificial Sequence
  Non-cyclic GFR-binding peptide
  MOD_RES (2)..(34)..(35): Xaa is C or S
GXAKVVMNPIKGYIVNNSSDFYLVNIPSLKTPAXXAKPV

SEQ ID NO: 21237 - protein, 37 aa, Artificial Sequence
  Non-cyclic GFR-binding peptide
  MOD_RES (2)..(36)..(37): Xaa is C or S
  MOD_RES (14)..(15)..(16)..(17)..(18): Xaa is A or G
  MOD_RES (19)..(20)..(21)..(22): Xaa is A or G or absent
GXSEVVMDPIKGYXXXXXXXXXFYLINIPSLRTPVXX

SEQ ID NO: 21238 - protein, 34 aa, Artificial Sequence
  Non-cyclic GFR-binding peptide
  MOD_RES (1)..(34): Xaa is C or S
  MOD_RES (12)..(13)..(14)..(15)..(16): Xaa is A or G
  MOD_RES (17)..(18)..(19)..(20): Xaa is A or G or absent
XEEVIMPIKGYXXXXXXXXXFYLMNIPSTKVPAX

SEQ ID NO: 21239 - protein, 37 aa, Artificial Sequence
  Non-cyclic GFR-binding peptide
  MOD_RES (1)..(33)..(34): Xaa is C or S
XAKVVMNPIKGYIVNNSSDFYLVNIPSLKTPAXXAKP

SEQ ID NO: 21240 - protein, 34 aa, Artificial Sequence
  Non-cyclic GFR-binding peptide
  MOD_RES (1)..(33)..(34): Xaa is C or S
XSRVVMNPIKGYIVNSSDDFYLVNIPSLKTPAXX

SEQ ID NO: 21241 - protein, 38 aa, Artificial Sequence
  Non-cyclic GFR-binding peptide
  MOD_RES (2)..(35)..(36): Xaa is C or S
GXEAVSMGEPIKGYTPVGMDDFYLVNIPSLKTPVXXAK

SEQ ID NO: 21242 - protein, 40 aa, Artificial Sequence
  Non-cyclic GFR-binding peptide
  MOD_RES (1)..(35)..(36): Xaa is C or S
  MOD_RES (13)..(14)..(15)..(16)..(17): Xaa is A or G
  MOD_RES (18)..(19)..(20)..(21): Xaa is A or G or absent
XAKVVMNPIKGYXXXXXXXXXFYLVNIPSLKTPAXXAKPV

SEQ ID NO: 21243 - protein, 39 aa, Artificial Sequence
  Non-cyclic GFR-binding peptide
  MOD_RES (33)..(33): Xaa is C or S
  MOD_RES (11)..(12)..(13)..(14)..(15): Xaa is A or G
  MOD_RES (16)..(17)..(18)..(19): Xaa is A or G or absent
RVVMNPIKGYXXXXXXXXXFYLVNIPSLKTPAXTPKTVH

SEQ ID NO: 21244 - protein, 39 aa, Artificial Sequence
  Non-cyclic GFR-binding peptide
  MOD_RES (1)..(35)..(36): Xaa is C or S
  MOD_RES (13)..(14)..(15)..(16)..(17): Xaa is A or G
  MOD_RES (18)..(19)..(20)..(21): Xaa is A or G or absent
XGEVVMEPIKGYXXXXXXXXXFYLMNIPSLETPVXXAKP

SEQ ID NO: 21245 - protein, 36 aa, Artificial Sequence
  Non-cyclic GFR-binding peptide
  MOD_RES (1)..(35)..(36): Xaa is C or S
  MOD_RES (13)..(14)..(15)..(16)..(17): Xaa is A or G
  MOD_RES (18)..(19)..(20)..(21): Xaa is A or G or absent
XAEVVMDPIKGYXXXXXXXXXFYLINIPSLRAPVXX

SEQ ID NO: 21246 - protein, 38 aa, Artificial Sequence
  Non-cyclic GFR-binding peptide
  MOD_RES (1)..(3)..(35)..(36): Xaa is C or S
XGXSRVVMNPIKGYIVNSSDDFYLVNIPSLKTPAXXPK

SEQ ID NO: 21247 - protein, 37 aa, Artificial Sequence
  Non-cyclic GFR-binding peptide
  MOD_RES (2)..(36)..(37): Xaa is C or S
  MOD_RES (14)..(15)..(16)..(17)..(18): Xaa is A or G
  MOD_RES (19)..(20)..(21)..(22): Xaa is A or G or absent
GXGEVVMEPIKGYXXXXXXXXXFYLMNIPSLETPVXX

SEQ ID NO: 21248 - protein, 38 aa, Artificial Sequence
  Non-cyclic GFR-binding peptide
  MOD_RES (34)..(34): Xaa is C or S
  MOD_RES (12)..(13)..(14)..(15)..(16): Xaa is A or G
  MOD_RES (17)..(18)..(19)..(20): Xaa is A or G or absent
SRVVMNPIKGYXXXXXXXXXFYLVNIPSLKTPAXTPKT

SEQ ID NO: 21249 - protein, 31 aa, Artificial Sequence
  Non-cyclic GFR-binding peptide
GEVVMDPIKGYVVKENEDFYLMNIPSLETPV

SEQ ID NO: 21250 - protein, 38 aa, Artificial Sequence
  Non-cyclic GFR-binding peptide
  MOD_RES (1)..(35)..(36): Xaa is C or S
  MOD_RES (13)..(14)..(15)..(16)..(17): Xaa is A or G
  MOD_RES (18)..(19)..(20)..(21): Xaa is A or G or absent
XARVVMNPIKGYXXXXXXXXXFYLVNIPSLQTPAXXPK

SEQ ID NO: 21251 - protein, 33 aa, Artificial Sequence
  Non-cyclic GFR-binding peptide
  MOD_RES (33)..(33): Xaa is C or S
  MOD_RES (11)..(12)..(13)..(14)..(15): Xaa is A or G
  MOD_RES (16)..(17)..(18)..(19): Xaa is A or G or absent
EVVMEPIKGYXXXXXXXXXFYLMNIPSLETPVX

SEQ ID NO: 21252 - protein, 37 aa, Artificial Sequence
  Non-cyclic GFR-binding peptide
  MOD_RES (34)..(35): Xaa is C or S
  MOD_RES (12)..(13)..(14)..(15)..(16): Xaa is A or G
  MOD_RES (17)..(18)..(19)..(20): Xaa is A or G or absent
AKVVMNPIKGYXXXXXXXXXFYLVNIPSLKTPAXXAK

SEQ ID NO: 21253 - protein, 37 aa, Artificial Sequence
  Non-cyclic GFR-binding peptide
  MOD_RES (1)..(35)..(36): Xaa is C or S
  MOD_RES (13)..(14)..(15)..(16)..(17): Xaa is A or G
  MOD_RES (18)..(19)..(20)..(21): Xaa is A or G or absent
XSEVVMDPIKGYXXXXXXXXXFYLINIPSLRTPVXXT

SEQ ID NO: 21254 - protein, 33 aa, Artificial Sequence
  Non-cyclic GFR-binding peptide
  MOD_RES (1)..(33): Xaa is C or S
XAEVVMDPIKGYVVNNAADFYLINIPSLRAPVX

SEQ ID NO: 21255 - protein, 35 aa, Artificial Sequence
  Non-cyclic GFR-binding peptide
  MOD_RES (32)..(32): Xaa is C or S
SRVVMNPIKGYIVNSSDDFYLVNIPSLKTPAXTPK

SEQ ID NO: 21256 - protein, 40 aa, Artificial Sequence
  Non-cyclic GFR-binding peptide
  MOD_RES (2)..(4)..(36)..(37): Xaa is C or S
HXGXSRVVMNPIKGYIVNSSDDFYLVNIPSLKTPAXXPKP

SEQ ID NO: 21257 - protein, 42 aa, Artificial Sequence
  Non-cyclic GFR-binding peptide
  MOD_RES (1)..(3)..(36)..(37): Xaa is C or S
  MOD_RES (14)..(15)..(16)..(17)..(18): Xaa is A or G
  MOD_RES (19)..(20)..(21)..(22): Xaa is A or G or absent
XGXEEVIMPIKGYXXXXXXXXXFYLMNIPSTKVPAXXTSPVR

SEQ ID NO: 21258 - protein, 41 aa, Artificial Sequence
  Non-cyclic GFR-binding peptide
  MOD_RES (1)..(3)..(37)..(38): Xaa is C or S
  MOD_RES (15)..(16)..(17)..(18)..(19): Xaa is A or G
  MOD_RES (20)..(21)..(22)..(23): Xaa is A or G or absent
XGXAEVVMDPIKGYXXXXXXXXXFYLINIPSLRAPVXXSAP

SEQ ID NO: 21259 - protein, 40 aa, Artificial Sequence
  Non-cyclic GFR-binding peptide
  MOD_RES (35)..(36): Xaa is C or S
  MOD_RES (13)..(14)..(15)..(16)..(17): Xaa is A or G
  MOD_RES (18)..(19)..(20)..(21): Xaa is A or G or absent
EAVSMGEPIKGYXXXXXXXXXFYLVNIPSLKTPVXXAKGV

SEQ ID NO: 21260 - protein, 37 aa, Artificial Sequence
  Non-cyclic GFR-binding peptide
  MOD_RES (33)..(34): Xaa is C or S
  MOD_RES (11)..(12)..(13)..(14)..(15): Xaa is A or G
  MOD_RES (16)..(17)..(18)..(19): Xaa is A or G or absent
EVVMDPIKGYXXXXXXXXXFYLINIPSLRTPVXXTPP

SEQ ID NO: 21261 - protein, 35 aa, Artificial Sequence
  Non-cyclic GFR-binding peptide
  MOD_RES (1)..(35): Xaa is C or S
  MOD_RES (13)..(14)..(15)..(16)..(17): Xaa is A or G
  MOD_RES (18)..(19)..(20)..(21): Xaa is A or G or absent
XAEVVMDPIKGYXXXXXXXXXFYLINIPSLRAPVX

SEQ ID NO: 21262 - protein, 36 aa, Artificial Sequence
  Non-cyclic GFR-binding peptide
  MOD_RES (32)..(33): Xaa is C or S
ESVAMGPIKGYYTVVGKDFYLINIPSLKTPVXXAKS

SEQ ID NO: 21263 - protein, 41 aa, Artificial Sequence
  Non-cyclic GFR-binding peptide
  MOD_RES (2)..(4)..(39)..(40): Xaa is C or S
  MOD_RES (17)..(18)..(19)..(20)..(21): Xaa is A or G
  MOD_RES (22)..(23)..(24)..(25): Xaa is A or G or absent
RXGXEAVSMGEPIKGYXXXXXXXXXFYLVNIPSLKTPVXXA

SEQ ID NO: 21264 - protein, 44 aa, Artificial Sequence
  Non-cyclic GFR-binding peptide
  MOD_RES (2)..(4)..(38)..(39): Xaa is C or S
  MOD_RES (16)..(17)..(18)..(19)..(20): Xaa is A or G
  MOD_RES (21)..(22)..(23)..(24): Xaa is A or G or absent
RXGXESVAMGPIKGYXXXXXXXXXFYLINIPSLKTPVXXAKSAK

SEQ ID NO: 21265 - protein, 41 aa, Artificial Sequence
  Non-cyclic GFR-binding peptide
  MOD_RES (1)..(3)..(37)..(38): Xaa is C or S
  MOD_RES (15)..(16)..(17)..(18)..(19): Xaa is A or G
  MOD_RES (20)..(21)..(22)..(23): Xaa is A or G or absent
XGXGEVVMEPIKGYXXXXXXXXXFYLMNIPSLETPVXXAKP

SEQ ID NO: 21266 - protein, 39 aa, Artificial Sequence
  Non-cyclic GFR-binding peptide
  MOD_RES (1)..(3)..(37)..(38): Xaa is C or S
  MOD_RES (15)..(16)..(17)..(18)..(19): Xaa is A or G
  MOD_RES (20)..(21)..(22)..(23): Xaa is A or G or absent
XGXSRVVMNPIKGYXXXXXXXXXFYLVNIPSLKTPAXXP

SEQ ID NO: 21267 - protein, 42 aa, Artificial Sequence
  Non-cyclic GFR-binding peptide
  MOD_RES (2)..(4)..(36)..(37): Xaa is C or S
HXGXSRVVMNPIKGYIVNSSDDFYLVNIPSLKTPAXXPKPVH

SEQ ID NO: 21268 - protein, 42 aa, Artificial Sequence
  Non-cyclic GFR-binding peptide
  MOD_RES (2)..(36): Xaa is C or S
  MOD_RES (14)..(15)..(16)..(17)..(18): Xaa is A or G
  MOD_RES (19)..(20)..(21)..(22): Xaa is A or G or absent
GXSRVVMNPIKGYXXXXXXXXXFYLVNIPSLKTPAXTPKTVH

SEQ ID NO: 21269 - protein, 35 aa, Artificial Sequence
  Non-cyclic GFR-binding peptide
  MOD_RES (1)..(3)..(35): Xaa is C or S
XGXSRVVMNPIKGYIVNSSDDFYLVNIPSLKTPAX

SEQ ID NO: 21270 - protein, 36 aa, Artificial Sequence
  Non-cyclic GFR-binding peptide
  MOD_RES (2)..(35)..(36): Xaa is C or S
GXEAVSMGEPIKGYTPVGMDDFYLVNIPSLKTPVXX

SEQ ID NO: 21271 - protein, 36 aa, Artificial Sequence
  Non-cyclic GFR-binding peptide
  MOD_RES (1)..(34)..(35): Xaa is C or S
  MOD_RES (12)..(13)..(14)..(15)..(16): Xaa is A or G
  MOD_RES (17)..(18)..(19)..(20): Xaa is A or G or absent
XEEVIMPIKGYXXXXXXXXXFYLMNIPSTKVPAXXT

SEQ ID NO: 21272 - protein, 36 aa, Artificial Sequence
  Non-cyclic GFR-binding peptide
  MOD_RES (2)..(36): Xaa is C or S
  MOD_RES (14)..(15)..(16)..(17)..(18): Xaa is A or G
  MOD_RES (19)..(20)..(21)..(22): Xaa is A or G or absent
GXAEVVMDPIKGYXXXXXXXXXFYLINIPSLRAPVX

SEQ ID NO: 21273 - protein, 40 aa, Artificial Sequence
  Non-cyclic GFR-binding peptide
  MOD_RES (2)..(4)..(38)..(39): Xaa is C or S
  MOD_RES (16)..(17)..(18)..(19)..(20): Xaa is A or G
  MOD_RES (21)..(22)..(23)..(24): Xaa is A or G or absent
RXGXGEVVMEPIKGYXXXXXXXXXFYLMNIPSLETPVXXA

SEQ ID NO: 21274 - protein, 40 aa, Artificial Sequence
  Non-cyclic GFR-binding peptide
  MOD_RES (2)..(36)..(37): Xaa is C or S
  MOD_RES (14)..(15)..(16)..(17)..(18): Xaa is A or G
  MOD_RES (19)..(20)..(21)..(22): Xaa is A or G or absent
GXAKVVMNPIKGYXXXXXXXXXFYLVNIPSLKTPAXXAKP

SEQ ID NO: 21275 - protein, 39 aa, Artificial Sequence
  Non-cyclic GFR-binding peptide
  MOD_RES (2)..(36)..(37): Xaa is C or S
  MOD_RES (14)..(15)..(16)..(17)..(18): Xaa is A or G
  MOD_RES (19)..(20)..(21)..(22): Xaa is A or G or absent
GXAKVVMNPIKGYXXXXXXXXXFYLVNIPSLKTPAXXAK

SEQ ID NO: 21276 - protein, 37 aa, Artificial Sequence
  Non-cyclic GFR-binding peptide
  MOD_RES (1)..(33)..(34): Xaa is C or S
XGEVVMEPIKGYVVKDYEDFYLMNIPSLETPVXXAKP

SEQ ID NO: 21277 - protein, 37 aa, Artificial Sequence
  Non-cyclic GFR-binding peptide
  MOD_RES (1)..(33)..(34): Xaa is C or S
XESVAMGPIKGYYTVVGKDFYLINIPSLKTPVXXAKS

SEQ ID NO: 21278 - protein, 40 aa, Artificial Sequence
  Non-cyclic GFR-binding peptide
  MOD_RES (34)..(35): Xaa is C or S
  MOD_RES (12)..(13)..(14)..(15)..(16): Xaa is A or G
  MOD_RES (17)..(18)..(19)..(20): Xaa is A or G or absent
GEVVMEPIKGYXXXXXXXXXFYLMNIPSLETPVXXAKPIS

SEQ ID NO: 21279 - protein, 32 aa, Artificial Sequence
  Non-cyclic GFR-binding peptide
  MOD_RES (1)..(1): Xaa is C or S
XESVAMGPIKGYYTVVGKDFYLINIPSLKTPV

SEQ ID NO: 21280 - protein, 33 aa, Artificial Sequence
  Non-cyclic GFR-binding peptide
  MOD_RES (2)..(2): Xaa is C or S
GXARVVMNPIKGYIVNSSDDFYLVNIPSLQTPA

SEQ ID NO: 21281 - protein, 40 aa, Artificial Sequence
  Non-cyclic GFR-binding peptide
  MOD_RES (1)..(35): Xaa is C or S
  MOD_RES (13)..(14)..(15)..(16)..(17): Xaa is A or G
  MOD_RES (18)..(19)..(20)..(21): Xaa is A or G or absent
XSRVVMNPIKGYXXXXXXXXXFYLVNIPSLKTPAXTPKTV

SEQ ID NO: 21282 - protein, 37 aa, Artificial Sequence
  Non-cyclic GFR-binding peptide
  MOD_RES (2)..(4): Xaa is C or S
  MOD_RES (16)..(17)..(18)..(19)..(20): Xaa is A or G
  MOD_RES (21)..(22)..(23)..(24): Xaa is A or G or absent
HXGXARVVMNPIKGYXXXXXXXXXFYLVNIPSLQTPA

SEQ ID NO: 21283 - protein, 42 aa, Artificial Sequence
  Non-cyclic GFR-binding peptide
  MOD_RES (2)..(36)..(37): Xaa is C or S
  MOD_RES (14)..(15)..(16)..(17)..(18): Xaa is A or G
  MOD_RES (19)..(20)..(21)..(22): Xaa is A or G or absent
GXGEVVMEPIKGYXXXXXXXXXFYLMNIPSLETPVXXAKPIS

SEQ ID NO: 21284 - protein, 31 aa, Artificial Sequence
  Non-cyclic GFR-binding peptide
  MOD_RES (31)..(31): Xaa is C or S
EVVMEPIKGYVVKDYEDFYLMNIPSLETPVX

SEQ ID NO: 21285 - protein, 39 aa, Artificial Sequence
  Non-cyclic GFR-binding peptide
  MOD_RES (2)..(4)..(38)..(39): Xaa is C or S
  MOD_RES (16)..(17)..(18)..(19)..(20): Xaa is A or G
  MOD_RES (21)..(22)..(23)..(24): Xaa is A or G or absent
HXGXAKVVMNPIKGYXXXXXXXXXFYLVNIPSLKTPAXX

SEQ ID NO: 21286 - protein, 44 aa, Artificial Sequence
  Non-cyclic GFR-binding peptide
  MOD_RES (2)..(4)..(38)..(39): Xaa is C or S
  MOD_RES (16)..(17)..(18)..(19)..(20): Xaa is A or G
  MOD_RES (21)..(22)..(23)..(24): Xaa is A or G or absent
HXGXARVVMNPIKGYXXXXXXXXXFYLVNIPSLQTPAXXPKPVT

SEQ ID NO: 21287 - protein, 36 aa, Artificial Sequence
  Non-cyclic GFR-binding peptide
  MOD_RES (1)..(35): Xaa is C or S
  MOD_RES (13)..(14)..(15)..(16)..(17): Xaa is A or G
  MOD_RES (18)..(19)..(20)..(21): Xaa is A or G or absent
XSRVVMNPIKGYXXXXXXXXXFYLVNIPSLKTPAXT

SEQ ID NO: 21288 - protein, 37 aa, Artificial Sequence
  Non-cyclic GFR-binding peptide
  MOD_RES (2)..(4): Xaa is C or S
  MOD_RES (16)..(17)..(18)..(19)..(20): Xaa is A or G
  MOD_RES (21)..(22)..(23)..(24): Xaa is A or G or absent
RXGXGEVVMDPIKGYXXXXXXXXXFYLMNIPSLETPV

SEQ ID NO: 21289 - protein, 39 aa, Artificial Sequence
  Non-cyclic GFR-binding peptide
  MOD_RES (2)..(34)..(35): Xaa is C or S
GXGEVVMDPIKGYVVKENEDFYLMNIPSLETPVXXAKPI

SEQ ID NO: 21290 - protein, 44 aa, Artificial Sequence
  Non-cyclic GFR-binding peptide
  MOD_RES (2)..(4)..(38)..(39): Xaa is C or S
  MOD_RES (16)..(17)..(18)..(19)..(20): Xaa is A or G
  MOD_RES (21)..(22)..(23)..(24): Xaa is A or G or absent
RXGXGEVVMDPIKGYXXXXXXXXXFYLMNIPSLETPVXXAKPIK

SEQ ID NO: 21291 - protein, 33 aa, Artificial Sequence
  Non-cyclic GFR-binding peptide
  MOD_RES (2)..(2): Xaa is C or S
GXESVAMGPIKGYYTVVGKDFYLINIPSLKTPV

SEQ ID NO: 21292 - protein, 37 aa, Artificial Sequence
  Non-cyclic GFR-binding peptide
  MOD_RES (1)..(3): Xaa is C or S
  MOD_RES (16)..(17)..(18)..(19)..(20): Xaa is A or G
  MOD_RES (21)..(22)..(23)..(24): Xaa is A or G or absent
XGXEAVSMGEPIKGYXXXXXXXXXFYLVNIPSLKTPV

SEQ ID NO: 21293 - protein, 42 aa, Artificial Sequence
  Non-cyclic GFR-binding peptide
  MOD_RES (2)..(4)..(36)..(37): Xaa is C or S
RXGXGEVVMDPIKGYVVKENEDFYLMNIPSLETPVXXAKPIK

SEQ ID NO: 21294 - protein, 37 aa, Artificial Sequence
  Non-cyclic GFR-binding peptide
  MOD_RES (33)..(34): Xaa is C or S
  MOD_RES (11)..(12)..(13)..(14)..(15): Xaa is A or G
  MOD_RES (16)..(17)..(18)..(19): Xaa is A or G or absent
EEVIMPIKGYXXXXXXXXXFYLMNIPSTKVPAXXTSP

SEQ ID NO: 21295 - protein, 38 aa, Artificial Sequence
  Non-cyclic GFR-binding peptide
  MOD_RES (1)..(3)..(37): Xaa is C or S
  MOD_RES (15)..(16)..(17)..(18)..(19): Xaa is A or G
  MOD_RES (20)..(21)..(22)..(23): Xaa is A or G or absent
XGXSRVVMNPIKGYXXXXXXXXXFYLVNIPSLKTPAXT

SEQ ID NO: 21296 - protein, 35 aa, Artificial Sequence
  Non-cyclic GFR-binding peptide
  MOD_RES (32)..(33): Xaa is C or S
SRVVMNPIKGYIVNSSDDFYLVNIPSLKTPAXXPK

SEQ ID NO: 21297 - protein, 38 aa, Artificial Sequence
  Non-cyclic GFR-binding peptide
  MOD_RES (1)..(3)..(35): Xaa is C or S
XGXSRVVMNPIKGYIVNSSDDFYLVNIPSLKTPAXTPK

SEQ ID NO: 21298 - protein, 33 aa, Artificial Sequence
  Non-cyclic GFR-binding peptide
  MOD_RES (32)..(33): Xaa is C or S
SEVVMDPIKGYVVNNASDFYLINIPSLRTPVXX

SEQ ID NO: 21299 - protein, 38 aa, Artificial Sequence
  Non-cyclic GFR-binding peptide
  MOD_RES (32)..(33): Xaa is C or S
SEVVMDPIKGYVVNNASDFYLINIPSLRTPVXXTPPTS

SEQ ID NO: 21300 - protein, 40 aa, Artificial Sequence
  Non-cyclic GFR-binding peptide
  MOD_RES (1)..(35)..(36): Xaa is C or S
  MOD_RES (13)..(14)..(15)..(16)..(17): Xaa is A or G
  MOD_RES (18)..(19)..(20)..(21): Xaa is A or G or absent
XAEVVMDPIKGYXXXXXXXXXFYLINIPSLRAPVXXSAPA

SEQ ID NO: 21301 - protein, 39 aa, Artificial Sequence
  Non-cyclic GFR-binding peptide
  MOD_RES (1)..(3)..(35)..(36): Xaa is C or S
XGXARVVMNPIKGYIVNSSDDFYLVNIPSLQTPAXXPKP

SEQ ID NO: 21302 - protein, 31 aa, Artificial Sequence
  Non-cyclic GFR-binding peptide
  MOD_RES (31)..(31): Xaa is C or S
EVVMDPIKGYVVNNAADFYLINIPSLRAPVX

SEQ ID NO: 21303 - protein, 39 aa, Artificial Sequence
  Non-cyclic GFR-binding peptide
  MOD_RES (2)..(4)..(37)..(38): Xaa is C or S
  MOD_RES (15)..(16)..(17)..(18)..(19): Xaa is A or G
  MOD_RES (20)..(21)..(22)..(23): Xaa is A or G or absent
LXGXEEVIMPIKGYXXXXXXXXXFYLMNIPSTKVPAXXT

SEQ ID NO: 21304 - protein, 38 aa, Artificial Sequence
  Non-cyclic GFR-binding peptide
  MOD_RES (34)..(35): Xaa is C or S
  MOD_RES (12)..(13)..(14)..(15)..(16): Xaa is A or G
  MOD_RES (17)..(18)..(19)..(20): Xaa is A or G or absent
AKVVMNPIKGYXXXXXXXXXFYLVNIPSLKTPAXXAKP

SEQ ID NO: 21305 - protein, 38 aa, Artificial Sequence
  Non-cyclic GFR-binding peptide
  MOD_RES (1)..(33)..(34): Xaa is C or S
XAKVVMNPIKGYIVNNSSDFYLVNIPSLKTPAXXAKPV

SEQ ID NO: 21306 - protein, 34 aa, Artificial Sequence
  Non-cyclic GFR-binding peptide
  MOD_RES (1)..(1): Xaa is C or S
  MOD_RES (13)..(14)..(15)..(16)..(17): Xaa is A or G
  MOD_RES (18)..(19)..(20)..(21): Xaa is A or G or absent
XAEVVMDPIKGYXXXXXXXXXFYLINIPSLRAPV

SEQ ID NO: 21307 - protein, 38 aa, Artificial Sequence
  Non-cyclic GFR-binding peptide
  MOD_RES (33)..(34): Xaa is C or S
  MOD_RES (11)..(12)..(13)..(14)..(15): Xaa is A or G
  MOD_RES (16)..(17)..(18)..(19): Xaa is A or G or absent
EVVMDPIKGYXXXXXXXXXFYLINIPSLRTPVXXTPPT

SEQ ID NO: 21308 - protein, 38 aa, Artificial Sequence
  Non-cyclic GFR-binding peptide
  MOD_RES (2)..(4)..(37)..(38): Xaa is C or S
RXGXEAVSMGEPIKGYTPVGMDDFYLVNIPSLKTPVXX

SEQ ID NO: 21309 - protein, 37 aa, Artificial Sequence
  Non-cyclic GFR-binding peptide
  MOD_RES (2)..(34)..(35): Xaa is C or S
GXSRVVMNPIKGYIVNSSDDFYLVNIPSLKTPAXXPK

SEQ ID NO: 21310 - protein, 30 aa, Artificial Sequence
  Non-cyclic GFR-binding peptide
EVVMDPIKGYVVNNAADFYLINIPSLRAPV

SEQ ID NO: 21311 - protein, 41 aa, Artificial Sequence
  Non-cyclic GFR-binding peptide
  MOD_RES (1)..(3)..(36)..(37): Xaa is C or S
  MOD_RES (14)..(15)..(16)..(17)..(18): Xaa is A or G
  MOD_RES (19)..(20)..(21)..(22): Xaa is A or G or absent
XGXEEVIMPIKGYXXXXXXXXXFYLMNIPSTKVPAXXTSPV

SEQ ID NO: 21312 - protein, 31 aa, Artificial Sequence
  Non-cyclic GFR-binding peptide
  MOD_RES (31)..(31): Xaa is C or S
EVVMDPIKGYVVKENEDFYLMNIPSLETPVX

SEQ ID NO: 21313 - protein, 35 aa, Artificial Sequence
  Non-cyclic GFR-binding peptide
  MOD_RES (33)..(34): Xaa is C or S
  MOD_RES (11)..(12)..(13)..(14)..(15): Xaa is A or G
  MOD_RES (16)..(17)..(18)..(19): Xaa is A or G or absent
EVVMDPIKGYXXXXXXXXXFYLINIPSLRAPVXXS

SEQ ID NO: 21314 - protein, 38 aa, Artificial Sequence
  Non-cyclic GFR-binding peptide
  MOD_RES (1)..(3)..(37)..(38): Xaa is C or S
  MOD_RES (15)..(16)..(17)..(18)..(19): Xaa is A or G
  MOD_RES (20)..(21)..(22)..(23): Xaa is A or G or absent
XGXSRVVMNPIKGYXXXXXXXXXFYLVNIPSLKTPAXX

SEQ ID NO: 21315 - protein, 39 aa, Artificial Sequence
  Non-cyclic GFR-binding peptide
  MOD_RES (2)..(33)..(34): Xaa is C or S
GXEEVIMPIKGYLLVRGNDFYLMNIPSTKVPAXXTSPVR

SEQ ID NO: 21316 - protein, 35 aa, Artificial Sequence
  Non-cyclic GFR-binding peptide
  MOD_RES (1)..(3)..(35): Xaa is C or S
XGXSEVVMDPIKGYVVNNASDFYLINIPSLRTPVX

SEQ ID NO: 21317 - protein, 33 aa, Artificial Sequence
  Non-cyclic GFR-binding peptide
  MOD_RES (33)..(33): Xaa is C or S
  MOD_RES (11)..(12)..(13)..(14)..(15): Xaa is A or G
  MOD_RES (16)..(17)..(18)..(19): Xaa is A or G or absent
EVVMDPIKGYXXXXXXXXXFYLMNIPSLETPVX

SEQ ID NO: 21318 - protein, 34 aa, Artificial Sequence
  Non-cyclic GFR-binding peptide
  MOD_RES (31)..(32): Xaa is C or S
EVVMDPIKGYVVNNAADFYLINIPSLRAPVXXSA

SEQ ID NO: 21319 - protein, 34 aa, Artificial Sequence
  Non-cyclic GFR-binding peptide
  MOD_RES (31)..(31): Xaa is C or S
RVVMNPIKGYIVNSSDDFYLVNIPSLKTPAXTPK

SEQ ID NO: 21320 - protein, 40 aa, Artificial Sequence
  Non-cyclic GFR-binding peptide
  MOD_RES (34)..(35): Xaa is C or S
  MOD_RES (12)..(13)..(14)..(15)..(16): Xaa is A or G
  MOD_RES (17)..(18)..(19)..(20): Xaa is A or G or absent
SEVVMDPIKGYXXXXXXXXXFYLINIPSLRTPVXXTPPTS

SEQ ID NO: 21321 - protein, 38 aa, Artificial Sequence
  Non-cyclic GFR-binding peptide
  MOD_RES (2)..(4)..(38): Xaa is C or S
  MOD_RES (16)..(17)..(18)..(19)..(20): Xaa is A or G
  MOD_RES (21)..(22)..(23)..(24): Xaa is A or G or absent
HXGXARVVMNPIKGYXXXXXXXXXFYLVNIPSLQTPAX

SEQ ID NO: 21322 - protein, 35 aa, Artificial Sequence
  Non-cyclic GFR-binding peptide
  MOD_RES (34)..(34): Xaa is C or S
  MOD_RES (12)..(13)..(14)..(15)..(16): Xaa is A or G
  MOD_RES (17)..(18)..(19)..(20): Xaa is A or G or absent
SRVVMNPIKGYXXXXXXXXXFYLVNIPSLKTPAXT

SEQ ID NO: 21323 - protein, 36 aa, Artificial Sequence
  Non-cyclic GFR-binding peptide
  MOD_RES (1)..(33)..(34): Xaa is C or S
XAKVVMNPIKGYIVNNSSDFYLVNIPSLKTPAXXAK

SEQ ID NO: 21324 - protein, 35 aa, Artificial Sequence
  Non-cyclic GFR-binding peptide
  MOD_RES (33)..(34): Xaa is C or S
  MOD_RES (11)..(12)..(13)..(14)..(15): Xaa is A or G
  MOD_RES (16)..(17)..(18)..(19): Xaa is A or G or absent
SVAMGPIKGYXXXXXXXXXFYLINIPSLKTPVXXA

SEQ ID NO: 21325 - protein, 36 aa, Artificial Sequence
  Non-cyclic GFR-binding peptide
  MOD_RES (32)..(33): Xaa is C or S
GEVVMEPIKGYVVKDYEDFYLMNIPSLETPVXXAKP

SEQ ID NO: 21326 - protein, 36 aa, Artificial Sequence
  Non-cyclic GFR-binding peptide
  MOD_RES (1)..(33)..(34): Xaa is C or S
XSRVVMNPIKGYIVNSSDDFYLVNIPSLKTPAXXPK

SEQ ID NO: 21327 - protein, 36 aa, Artificial Sequence
  Non-cyclic GFR-binding peptide
  MOD_RES (34)..(35): Xaa is C or S
  MOD_RES (12)..(13)..(14)..(15)..(16): Xaa is A or G
  MOD_RES (17)..(18)..(19)..(20): Xaa is A or G or absent
ARVVMNPIKGYXXXXXXXXXFYLVNIPSLQTPAXXP

SEQ ID NO: 21328 - protein, 40 aa, Artificial Sequence
  Non-cyclic GFR-binding peptide
  MOD_RES (34)..(35): Xaa is C or S
  MOD_RES (12)..(13)..(14)..(15)..(16): Xaa is A or G
  MOD_RES (17)..(18)..(19)..(20): Xaa is A or G or absent
SRVVMNPIKGYXXXXXXXXXFYLVNIPSLKTPAXXPKPVH

SEQ ID NO: 21329 - protein, 37 aa, Artificial Sequence
  Non-cyclic GFR-binding peptide
  MOD_RES (31)..(31): Xaa is C or S
RVVMNPIKGYIVNSSDDFYLVNIPSLKTPAXTPKTVH

SEQ ID NO: 21330 - protein, 38 aa, Artificial Sequence
  Non-cyclic GFR-binding peptide
  MOD_RES (1)..(33)..(34): Xaa is C or S
XGEVVMDPIKGYVVKENEDFYLMNIPSLETPVXXAKPI

SEQ ID NO: 21331 - protein, 41 aa, Artificial Sequence
  Non-cyclic GFR-binding peptide
  MOD_RES (1)..(35)..(36): Xaa is C or S
  MOD_RES (13)..(14)..(15)..(16)..(17): Xaa is A or G
  MOD_RES (18)..(19)..(20)..(21): Xaa is A or G or absent
XSRVVMNPIKGYXXXXXXXXXFYLVNIPSLKTPAXXPKPVH

SEQ ID NO: 21332 - protein, 42 aa, Artificial Sequence
  Non-cyclic GFR-binding peptide
  MOD_RES (1)..(3)..(37)..(38): Xaa is C or S
  MOD_RES (15)..(16)..(17)..(18)..(19): Xaa is A or G
  MOD_RES (20)..(21)..(22)..(23): Xaa is A or G or absent
XGXAKVVMNPIKGYXXXXXXXXXFYLVNIPSLKTPAXXAKPV

SEQ ID NO: 21333 - protein, 34 aa, Artificial Sequence
  Non-cyclic GFR-binding peptide
  MOD_RES (33)..(34): Xaa is C or S
  MOD_RES (11)..(12)..(13)..(14)..(15): Xaa is A or G
  MOD_RES (16)..(17)..(18)..(19): Xaa is A or G or absent
EVVMDPIKGYXXXXXXXXXFYLMNIPSLETPVXX

SEQ ID NO: 21334 - protein, 39 aa, Artificial Sequence
  Non-cyclic GFR-binding peptide
  MOD_RES (33)..(34): Xaa is C or S
  MOD_RES (11)..(12)..(13)..(14)..(15): Xaa is A or G
  MOD_RES (16)..(17)..(18)..(19): Xaa is A or G or absent
RVVMNPIKGYXXXXXXXXXFYLVNIPSLQTPAXXPKPVT

SEQ ID NO: 21335 - protein, 38 aa, Artificial Sequence
  Non-cyclic GFR-binding peptide
  MOD_RES (2)..(4)..(36)..(37): Xaa is C or S
HXGXARVVMNPIKGYIVNSSDDFYLVNIPSLQTPAXXP

SEQ ID NO: 21336 - protein, 41 aa, Artificial Sequence
  Non-cyclic GFR-binding peptide
  MOD_RES (2)..(37)..(38): Xaa is C or S
  MOD_RES (15)..(16)..(17)..(18)..(19): Xaa is A or G
  MOD_RES (20)..(21)..(22)..(23): Xaa is A or G or absent
GXEAVSMGEPIKGYXXXXXXXXXFYLVNIPSLKTPVXXAKG

SEQ ID NO: 21337 - protein, 41 aa, Artificial Sequence
  Non-cyclic GFR-binding peptide
  MOD_RES (2)..(4)..(36)..(37): Xaa is C or S
HXGXARVVMNPIKGYIVNSSDDFYLVNIPSLQTPAXXPKPV

SEQ ID NO: 21338 - protein, 39 aa, Artificial Sequence
  Non-cyclic GFR-binding peptide
  MOD_RES (1)..(35)..(36): Xaa is C or S
  MOD_RES (13)..(14)..(15)..(16)..(17): Xaa is A or G
  MOD_RES (18)..(19)..(20)..(21): Xaa is A or G or absent
XAKVVMNPIKGYXXXXXXXXXFYLVNIPSLKTPAXXAKP

SEQ ID NO: 21339 - protein, 41 aa, Artificial Sequence
  Non-cyclic GFR-binding peptide
  MOD_RES (1)..(35)..(36): Xaa is C or S
  MOD_RES (13)..(14)..(15)..(16)..(17): Xaa is A or G
  MOD_RES (18)..(19)..(20)..(21): Xaa is A or G or absent
XARVVMNPIKGYXXXXXXXXXFYLVNIPSLQTPAXXPKPVT

SEQ ID NO: 21340 - protein, 35 aa, Artificial Sequence
  Non-cyclic GFR-binding peptide
  MOD_RES (2)..(34)..(35): Xaa is C or S
GXGEVVMEPIKGYVVKDYEDFYLMNIPSLETPVXX

SEQ ID NO: 21341 - protein, 33 aa, Artificial Sequence
  Non-cyclic GFR-binding peptide
  MOD_RES (1)..(1): Xaa is C or S
XEAVSMGEPIKGYTPVGMDDFYLVNIPSLKTPV

SEQ ID NO: 21342 - protein, 40 aa, Artificial Sequence
  Non-cyclic GFR-binding peptide
  MOD_RES (2)..(4)..(38)..(39): Xaa is C or S
  MOD_RES (16)..(17)..(18)..(19)..(20): Xaa is A or G
  MOD_RES (21)..(22)..(23)..(24): Xaa is A or G or absent
RXGXESVAMGPIKGYXXXXXXXXXFYLINIPSLKTPVXXA

SEQ ID NO: 21343 - protein, 34 aa, Artificial Sequence
  Non-cyclic GFR-binding peptide
  MOD_RES (1)..(34): Xaa is C or S
XEAVSMGEPIKGYTPVGMDDFYLVNIPSLKTPVX

SEQ ID NO: 21344 - protein, 39 aa, Artificial Sequence
  Non-cyclic GFR-binding peptide
  MOD_RES (1)..(33)..(34): Xaa is C or S
XESVAMGPIKGYYTVVGKDFYLINIPSLKTPVXXAKSAK

SEQ ID NO: 21345 - protein, 33 aa, Artificial Sequence
  Non-cyclic GFR-binding peptide
  MOD_RES (2)..(2): Xaa is C or S
GXGEVVMDPIKGYVVKENEDFYLMNIPSLETPV

SEQ ID NO: 21346 - protein, 34 aa, Artificial Sequence
  Non-cyclic GFR-binding peptide
  MOD_RES (2)..(34): Xaa is C or S
GXGEVVMEPIKGYVVKDYEDFYLMNIPSLETPVX

SEQ ID NO: 21347 - protein, 38 aa, Artificial Sequence
  Non-cyclic GFR-binding peptide
  MOD_RES (1)..(34)..(35): Xaa is C or S
  MOD_RES (12)..(13)..(14)..(15)..(16): Xaa is A or G
  MOD_RES (17)..(18)..(19)..(20): Xaa is A or G or absent
XEEVIMPIKGYXXXXXXXXXFYLMNIPSTKVPAXXTSP

SEQ ID NO: 21348 - protein, 41 aa, Artificial Sequence
  Non-cyclic GFR-binding peptide
  MOD_RES (1)..(35)..(36): Xaa is C or S
  MOD_RES (13)..(14)..(15)..(16)..(17): Xaa is A or G
  MOD_RES (18)..(19)..(20)..(21): Xaa is A or G or absent
XGEVVMEPIKGYXXXXXXXXXFYLMNIPSLETPVXXAKPIS

SEQ ID NO: 21349 - protein, 41 aa, Artificial Sequence
  Non-cyclic GFR-binding peptide
  MOD_RES (2)..(4)..(38)..(39): Xaa is C or S
  MOD_RES (16)..(17)..(18)..(19)..(20): Xaa is A or G
  MOD_RES (21)..(22)..(23)..(24): Xaa is A or G or absent
RXGXESVAMGPIKGYXXXXXXXXXFYLINIPSLKTPVXXAK

SEQ ID NO: 21350 - protein, 39 aa, Artificial Sequence
  Non-cyclic GFR-binding peptide
  MOD_RES (33)..(34): Xaa is C or S
  MOD_RES (11)..(12)..(13)..(14)..(15): Xaa is A or G
  MOD_RES (16)..(17)..(18)..(19): Xaa is A or G or absent
RVVMNPIKGYXXXXXXXXXFYLVNIPSLKTPAXXPKPVH

SEQ ID NO: 21351 - protein, 37 aa, Artificial Sequence
  Non-cyclic GFR-binding peptide
  MOD_RES (1)..(33)..(34): Xaa is C or S
XSEVVMDPIKGYVVNNASDFYLINIPSLRTPVXXTPP

SEQ ID NO: 21352 - protein, 40 aa, Artificial Sequence
  Non-cyclic GFR-binding peptide
  MOD_RES (2)..(34)..(35): Xaa is C or S
GXSRVVMNPIKGYIVNSSDDFYLVNIPSLKTPAXXPKPVH

SEQ ID NO: 21353 - protein, 34 aa, Artificial Sequence
  Non-cyclic GFR-binding peptide
  MOD_RES (32)..(33): Xaa is C or S
SRVVMNPIKGYIVNSSDDFYLVNIPSLKTPAXXP

SEQ ID NO: 21354 - protein, 40 aa, Artificial Sequence
  Non-cyclic GFR-binding peptide
  MOD_RES (2)..(36)..(37): Xaa is C or S
  MOD_RES (14)..(15)..(16)..(17)..(18): Xaa is A or G
  MOD_RES (19)..(20)..(21)..(22): Xaa is A or G or absent
GXGEVVMDPIKGYXXXXXXXXXFYLMNIPSLETPVXXAKP

SEQ ID NO: 21355 - protein, 37 aa, Artificial Sequence
  Non-cyclic GFR-binding peptide
  MOD_RES (32)..(32): Xaa is C or S
SRVVMNPIKGYIVNSSDDFYLVNIPSLKTPAXTPKTV

SEQ ID NO: 21356 - protein, 36 aa, Artificial Sequence
  Non-cyclic GFR-binding peptide
  MOD_RES (33)..(33): Xaa is C or S
  MOD_RES (11)..(12)..(13)..(14)..(15): Xaa is A or G
  MOD_RES (16)..(17)..(18)..(19): Xaa is A or G or absent
RVVMNPIKGYXXXXXXXXXFYLVNIPSLKTPAXTPK

SEQ ID NO: 21357 - protein, 40 aa, Artificial Sequence
  Non-cyclic GFR-binding peptide
  MOD_RES (2)..(36)..(37): Xaa is C or S
  MOD_RES (14)..(15)..(16)..(17)..(18): Xaa is A or G
  MOD_RES (19)..(20)..(21)..(22): Xaa is A or G or absent
GXESVAMGPIKGYXXXXXXXXXFYLINIPSLKTPVXXAKS

SEQ ID NO: 21358 - protein, 40 aa, Artificial Sequence
  Non-cyclic GFR-binding peptide
  MOD_RES (1)..(35)..(36): Xaa is C or S
  MOD_RES (13)..(14)..(15)..(16)..(17): Xaa is A or G
  MOD_RES (18)..(19)..(20)..(21): Xaa is A or G or absent
XARVVMNPIKGYXXXXXXXXXFYLVNIPSLQTPAXXPKPV

SEQ ID NO: 21359 - protein, 38 aa, Artificial Sequence
  Non-cyclic GFR-binding peptide
  MOD_RES (2)..(34)..(35): Xaa is C or S
GXSEVVMDPIKGYVVNNASDFYLINIPSLRTPVXXTPP

SEQ ID NO: 21360 - protein, 31 aa, Artificial Sequence
  Non-cyclic GFR-binding peptide
ARVVMNPIKGYIVNSSDDFYLVNIPSLQTPA

SEQ ID NO: 21361 - protein, 39 aa, Artificial Sequence
  Non-cyclic GFR-binding peptide
  MOD_RES (1)..(33)..(34): Xaa is C or S
XSRVVMNPIKGYIVNSSDDFYLVNIPSLKTPAXXPKPVY

SEQ ID NO: 21362 - protein, 38 aa, Artificial Sequence
  Non-cyclic GFR-binding peptide
  MOD_RES (2)..(4)..(38): Xaa is C or S
  MOD_RES (16)..(17)..(18)..(19)..(20): Xaa is A or G
  MOD_RES (21)..(22)..(23)..(24): Xaa is A or G or absent
RXGXGEVVMDPIKGYXXXXXXXXXFYLMNIPSLETPVX

SEQ ID NO: 21363 - protein, 39 aa, Artificial Sequence
  Non-cyclic GFR-binding peptide
  MOD_RES (2)..(4)..(36)..(37): Xaa is C or S
RXGXSEVVMDPIKGYVVNNASDFYLINIPSLRTPVXXTP

SEQ ID NO: 21364 - protein, 37 aa, Artificial Sequence
  Non-cyclic GFR-binding peptide
  MOD_RES (2)..(37): Xaa is C or S
  MOD_RES (15)..(16)..(17)..(18)..(19): Xaa is A or G
  MOD_RES (20)..(21)..(22)..(23): Xaa is A or G or absent
GXEAVSMGEPIKGYXXXXXXXXXFYLVNIPSLKTPVX

SEQ ID NO: 21365 - protein, 41 aa, Artificial Sequence
  Non-cyclic GFR-binding peptide
  MOD_RES (2)..(36)..(37): Xaa is C or S
  MOD_RES (14)..(15)..(16)..(17)..(18): Xaa is A or G
  MOD_RES (19)..(20)..(21)..(22): Xaa is A or G or absent
GXSRVVMNPIKGYXXXXXXXXXFYLVNIPSLKTPAXXPKPV

SEQ ID NO: 21366 - protein, 36 aa, Artificial Sequence
  Non-cyclic GFR-binding peptide
  MOD_RES (33)..(34): Xaa is C or S
  MOD_RES (11)..(12)..(13)..(14)..(15): Xaa is A or G
  MOD_RES (16)..(17)..(18)..(19): Xaa is A or G or absent
RVVMNPIKGYXXXXXXXXXFYLVNIPSLKTPAXXPK

SEQ ID NO: 21367 - protein, 41 aa, Artificial Sequence
  Non-cyclic GFR-binding peptide
  MOD_RES (1)..(35)..(36): Xaa is C or S
  MOD_RES (13)..(14)..(15)..(16)..(17): Xaa is A or G
  MOD_RES (18)..(19)..(20)..(21): Xaa is A or G or absent
XSEVVMDPIKGYXXXXXXXXXFYLINIPSLRTPVXXTPPTS

SEQ ID NO: 21368 - protein, 39 aa, Artificial Sequence
  Non-cyclic GFR-binding peptide
  MOD_RES (2)..(4)..(38)..(39): Xaa is C or S
  MOD_RES (16)..(17)..(18)..(19)..(20): Xaa is A or G
  MOD_RES (21)..(22)..(23)..(24): Xaa is A or G or absent
RXGXESVAMGPIKGYXXXXXXXXXFYLINIPSLKTPVXX

SEQ ID NO: 21369 - protein, 41 aa, Artificial Sequence
  Non-cyclic GFR-binding peptide
  MOD_RES (1)..(35)..(36): Xaa is C or S
  MOD_RES (13)..(14)..(15)..(16)..(17): Xaa is A or G
  MOD_RES (18)..(19)..(20)..(21): Xaa is A or G or absent
XAKVVMNPIKGYXXXXXXXXXFYLVNIPSLKTPAXXAKPVA

SEQ ID NO: 21370 - protein, 30 aa, Artificial Sequence
  Non-cyclic GFR-binding peptide
RVVMNPIKGYIVNSSDDFYLVNIPSLKTPA

SEQ ID NO: 21371 - protein, 34 aa, Artificial Sequence
  Non-cyclic GFR-binding peptide
  MOD_RES (1)..(1): Xaa is C or S
  MOD_RES (13)..(14)..(15)..(16)..(17): Xaa is A or G
  MOD_RES (18)..(19)..(20)..(21): Xaa is A or G or absent
XARVVMNPIKGYXXXXXXXXXFYLVNIPSLQTPA

SEQ ID NO: 21372 - protein, 42 aa, Artificial Sequence
  Non-cyclic GFR-binding peptide
  MOD_RES (2)..(36)..(37): Xaa is C or S
  MOD_RES (14)..(15)..(16)..(17)..(18): Xaa is A or G
  MOD_RES (19)..(20)..(21)..(22): Xaa is A or G or absent
GXSEVVMDPIKGYXXXXXXXXXFYLINIPSLRTPVXXTPPTS

SEQ ID NO: 21373 - protein, 40 aa, Artificial Sequence
  Non-cyclic GFR-binding peptide
  MOD_RES (2)..(37)..(38): Xaa is C or S
  MOD_RES (15)..(16)..(17)..(18)..(19): Xaa is A or G
  MOD_RES (20)..(21)..(22)..(23): Xaa is A or G or absent
GXEAVSMGEPIKGYXXXXXXXXXFYLVNIPSLKTPVXXAK

SEQ ID NO: 21374 - protein, 36 aa, Artificial Sequence
  Non-cyclic GFR-binding peptide
  MOD_RES (31)..(32): Xaa is C or S
EVVMDPIKGYVVNNAADFYLINIPSLRAPVXXSAPA

SEQ ID NO: 21375 - protein, 32 aa, Artificial Sequence
  Non-cyclic GFR-binding peptide
  MOD_RES (31)..(32): Xaa is C or S
EVVMEPIKGYVVKDYEDFYLMNIPSLETPVXX

SEQ ID NO: 21376 - protein, 36 aa, Artificial Sequence
  Non-cyclic GFR-binding peptide
  MOD_RES (1)..(32)..(33): Xaa is C or S
XEEVIMPIKGYLLVRGNDFYLMNIPSTKVPAXXTSP

SEQ ID NO: 21377 - protein, 35 aa, Artificial Sequence
  Non-cyclic GFR-binding peptide
  MOD_RES (1)..(33)..(34): Xaa is C or S
XGEVVMEPIKGYVVKDYEDFYLMNIPSLETPVXXA

SEQ ID NO: 21378 - protein, 36 aa, Artificial Sequence
  Non-cyclic GFR-binding peptide
  MOD_RES (33)..(34): Xaa is C or S
  MOD_RES (11)..(12)..(13)..(14)..(15): Xaa is A or G
  MOD_RES (16)..(17)..(18)..(19): Xaa is A or G or absent
EVVMEPIKGYXXXXXXXXXFYLMNIPSLETPVXXAK

SEQ ID NO: 21379 - protein, 31 aa, Artificial Sequence
  Non-cyclic GFR-binding peptide
  MOD_RES (31)..(31): Xaa is C or S
KVVMNPIKGYIVNNSSDFYLVNIPSLKTPAX

SEQ ID NO: 21380 - protein, 38 aa, Artificial Sequence
  Non-cyclic GFR-binding peptide
  MOD_RES (1)..(3)..(37)..(38): Xaa is C or S
  MOD_RES (15)..(16)..(17)..(18)..(19): Xaa is A or G
  MOD_RES (20)..(21)..(22)..(23): Xaa is A or G or absent
XGXESVAMGPIKGYXXXXXXXXXFYLINIPSLKTPVXX

SEQ ID NO: 21381 - protein, 33 aa, Artificial Sequence
  Non-cyclic GFR-binding peptide
  MOD_RES (1)..(33): Xaa is C or S
XSRVVMNPIKGYIVNSSDDFYLVNIPSLKTPAX

SEQ ID NO: 21382 - protein, 34 aa, Artificial Sequence
  Non-cyclic GFR-binding peptide
  MOD_RES (34)..(34): Xaa is C or S
  MOD_RES (12)..(13)..(14)..(15)..(16): Xaa is A or G
  MOD_RES (17)..(18)..(19)..(20): Xaa is A or G or absent
ESVAMGPIKGYXXXXXXXXXFYLINIPSLKTPVX

SEQ ID NO: 21383 - protein, 40 aa, Artificial Sequence
  Non-cyclic GFR-binding peptide
  MOD_RES (2)..(4)..(38)..(39): Xaa is C or S
  MOD_RES (16)..(17)..(18)..(19)..(20): Xaa is A or G
  MOD_RES (21)..(22)..(23)..(24): Xaa is A or G or absent
HXGXAKVVMNPIKGYXXXXXXXXXFYLVNIPSLKTPAXXA

SEQ ID NO: 21384 - protein, 40 aa, Artificial Sequence
  Non-cyclic GFR-binding peptide
  MOD_RES (2)..(4)..(36)..(37): Xaa is C or S
RXGXESVAMGPIKGYYTVVGKDFYLINIPSLKTPVXXAKS

SEQ ID NO: 21385 - protein, 34 aa, Artificial Sequence
  Non-cyclic GFR-binding peptide
  MOD_RES (31)..(32): Xaa is C or S
RVVMNPIKGYIVNSSDDFYLVNIPSLQTPAXXPK

SEQ ID NO: 21386 - protein, 42 aa, Artificial Sequence
  Non-cyclic GFR-binding peptide
  MOD_RES (2)..(36)..(37): Xaa is C or S
  MOD_RES (14)..(15)..(16)..(17)..(18): Xaa is A or G
  MOD_RES (19)..(20)..(21)..(22): Xaa is A or G or absent
GXESVAMGPIKGYXXXXXXXXXFYLINIPSLKTPVXXAKSAK

SEQ ID NO: 21387 - protein, 38 aa, Artificial Sequence
  Non-cyclic GFR-binding peptide
  MOD_RES (1)..(3)..(37)..(38): Xaa is C or S
  MOD_RES (15)..(16)..(17)..(18)..(19): Xaa is A or G
  MOD_RES (20)..(21)..(22)..(23): Xaa is A or G or absent
XGXGEVVMDPIKGYXXXXXXXXXFYLMNIPSLETPVXX

SEQ ID NO: 21388 - protein, 36 aa, Artificial Sequence
  Non-cyclic GFR-binding peptide
  MOD_RES (1)..(33)..(34): Xaa is C or S
XESVAMGPIKGYYTVVGKDFYLINIPSLKTPVXXAK

SEQ ID NO: 21389 - protein, 39 aa, Artificial Sequence
  Non-cyclic GFR-binding peptide
  MOD_RES (1)..(3)..(37)..(38): Xaa is C or S
  MOD_RES (15)..(16)..(17)..(18)..(19): Xaa is A or G
  MOD_RES (20)..(21)..(22)..(23): Xaa is A or G or absent
XGXARVVMNPIKGYXXXXXXXXXFYLVNIPSLQTPAXXP

SEQ ID NO: 21390 - protein, 35 aa, Artificial Sequence
  Non-cyclic GFR-binding peptide
  MOD_RES (2)..(4): Xaa is C or S
HXGXAKVVMNPIKGYIVNNSSDFYLVNIPSLKTPA

SEQ ID NO: 21391 - protein, 38 aa, Artificial Sequence
  Non-cyclic GFR-binding peptide
  MOD_RES (1)..(3)..(35)..(36): Xaa is C or S
XGXARVVMNPIKGYIVNSSDDFYLVNIPSLQTPAXXPK

SEQ ID NO: 21392 - protein, 37 aa, Artificial Sequence
  Non-cyclic GFR-binding peptide
  MOD_RES (31)..(32): Xaa is C or S
EVVMDPIKGYVVKENEDFYLMNIPSLETPVXXAKPIK

SEQ ID NO: 21393 - protein, 38 aa, Artificial Sequence
  Non-cyclic GFR-binding peptide
  MOD_RES (2)..(4)..(36)..(37): Xaa is C or S
RXGXGEVVMEPIKGYVVKDYEDFYLMNIPSLETPVXXA

SEQ ID NO: 21394 - protein, 39 aa, Artificial Sequence
  Non-cyclic GFR-binding peptide
  MOD_RES (33)..(34): Xaa is C or S
  MOD_RES (11)..(12)..(13)..(14)..(15): Xaa is A or G
  MOD_RES (16)..(17)..(18)..(19): Xaa is A or G or absent
EVVMDPIKGYXXXXXXXXXFYLINIPSLRTPVXXTPPTS

SEQ ID NO: 21395 - protein, 39 aa, Artificial Sequence
  Non-cyclic GFR-binding peptide
  MOD_RES (2)..(4)..(36): Xaa is C or S
HXGXSRVVMNPIKGYIVNSSDDFYLVNIPSLKTPAXTPK

SEQ ID NO: 21396 - protein, 40 aa, Artificial Sequence
  Non-cyclic GFR-binding peptide
  MOD_RES (2)..(36)..(37): Xaa is C or S
  MOD_RES (14)..(15)..(16)..(17)..(18): Xaa is A or G
  MOD_RES (19)..(20)..(21)..(22): Xaa is A or G or absent
GXSRVVMNPIKGYXXXXXXXXXFYLVNIPSLKTPAXXPKP

SEQ ID NO: 21397 - protein, 38 aa, Artificial Sequence
  Non-cyclic GFR-binding peptide
  MOD_RES (33)..(34): Xaa is C or S
  MOD_RES (11)..(12)..(13)..(14)..(15): Xaa is A or G
  MOD_RES (16)..(17)..(18)..(19): Xaa is A or G or absent
EEVIMPIKGYXXXXXXXXXFYLMNIPSTKVPAXXTSPV

SEQ ID NO: 21398 - protein, 35 aa, Artificial Sequence
  Non-cyclic GFR-binding peptide
  MOD_RES (2)..(2): Xaa is C or S
  MOD_RES (14)..(15)..(16)..(17)..(18): Xaa is A or G
  MOD_RES (19)..(20)..(21)..(22): Xaa is A or G or absent
GXAKVVMNPIKGYXXXXXXXXXFYLVNIPSLKTPA

SEQ ID NO: 21399 - protein, 41 aa, Artificial Sequence
  Non-cyclic GFR-binding peptide
  MOD_RES (2)..(35)..(36): Xaa is C or S
  MOD_RES (13)..(14)..(15)..(16)..(17): Xaa is A or G
  MOD_RES (18)..(19)..(20)..(21): Xaa is A or G or absent
GXEEVIMPIKGYXXXXXXXXXFYLMNIPSTKVPAXXTSPVR

SEQ ID NO: 21400 - protein, 43 aa, Artificial Sequence
  Non-cyclic GFR-binding peptide
  MOD_RES (2)..(4)..(38)..(39): Xaa is C or S
  MOD_RES (16)..(17)..(18)..(19)..(20): Xaa is A or G
  MOD_RES (21)..(22)..(23)..(24): Xaa is A or G or absent
HXGXAKVVMNPIKGYXXXXXXXXXFYLVNIPSLKTPAXXAKPV

SEQ ID NO: 21401 - protein, 34 aa, Artificial Sequence
  Non-cyclic GFR-binding peptide
  MOD_RES (33)..(34): Xaa is C or S
  MOD_RES (11)..(12)..(13)..(14)..(15): Xaa is A or G
  MOD_RES (16)..(17)..(18)..(19): Xaa is A or G or absent
EVVMEPIKGYXXXXXXXXXFYLMNIPSLETPVXX

SEQ ID NO: 21402 - protein, 42 aa, Artificial Sequence
  Non-cyclic GFR-binding peptide
  MOD_RES (2)..(36)..(37): Xaa is C or S
  MOD_RES (14)..(15)..(16)..(17)..(18): Xaa is A or G
  MOD_RES (19)..(20)..(21)..(22): Xaa is A or G or absent
GXAEVVMDPIKGYXXXXXXXXXFYLINIPSLRAPVXXSAPAA

SEQ ID NO: 21403 - protein, 39 aa, Artificial Sequence
  Non-cyclic GFR-binding peptide
  MOD_RES (2)..(34)..(35): Xaa is C or S
GXSRVVMNPIKGYIVNSSDDFYLVNIPSLKTPAXXPKPV

SEQ ID NO: 21404 - protein, 39 aa, Artificial Sequence
  Non-cyclic GFR-binding peptide
  MOD_RES (34)..(35): Xaa is C or S
  MOD_RES (12)..(13)..(14)..(15)..(16): Xaa is A or G
  MOD_RES (17)..(18)..(19)..(20): Xaa is A or G or absent
AKVVMNPIKGYXXXXXXXXXFYLVNIPSLKTPAXXAKPV

SEQ ID NO: 21405 - protein, 39 aa, Artificial Sequence
  Non-cyclic GFR-binding peptide
  MOD_RES (1)..(33)..(34): Xaa is C or S
XARVVMNPIKGYIVNSSDDFYLVNIPSLQTPAXXPKPVT

SEQ ID NO: 21406 - protein, 38 aa, Artificial Sequence
  Non-cyclic GFR-binding peptide
  MOD_RES (1)..(35)..(36): Xaa is C or S
  MOD_RES (13)..(14)..(15)..(16)..(17): Xaa is A or G
  MOD_RES (18)..(19)..(20)..(21): Xaa is A or G or absent
XAKVVMNPIKGYXXXXXXXXXFYLVNIPSLKTPAXXAK

SEQ ID NO: 21407 - protein, 40 aa, Artificial Sequence
  Non-cyclic GFR-binding peptide
  MOD_RES (1)..(35)..(36): Xaa is C or S
  MOD_RES (13)..(14)..(15)..(16)..(17): Xaa is A or G
  MOD_RES (18)..(19)..(20)..(21): Xaa is A or G or absent
XGEVVMDPIKGYXXXXXXXXXFYLMNIPSLETPVXXAKPI

SEQ ID NO: 21408 - protein, 40 aa, Artificial Sequence
  Non-cyclic GFR-binding peptide
  MOD_RES (2)..(4)..(37)..(38): Xaa is C or S
RXGXEAVSMGEPIKGYTPVGMDDFYLVNIPSLKTPVXXAK

SEQ ID NO: 21409 - protein, 36 aa, Artificial Sequence
  Non-cyclic GFR-binding peptide
  MOD_RES (1)..(35)..(36): Xaa is C or S
  MOD_RES (13)..(14)..(15)..(16)..(17): Xaa is A or G
  MOD_RES (18)..(19)..(20)..(21): Xaa is A or G or absent
XSEVVMDPIKGYXXXXXXXXXFYLINIPSLRTPVXX

SEQ ID NO: 21410 - protein, 38 aa, Artificial Sequence
  Non-cyclic GFR-binding peptide
  MOD_RES (1)..(3)..(37)..(38): Xaa is C or S
  MOD_RES (15)..(16)..(17)..(18)..(19): Xaa is A or G
  MOD_RES (20)..(21)..(22)..(23): Xaa is A or G or absent
XGXAEVVMDPIKGYXXXXXXXXXFYLINIPSLRAPVXX

SEQ ID NO: 21411 - protein, 37 aa, Artificial Sequence
  Non-cyclic GFR-binding peptide
  MOD_RES (32)..(33): Xaa is C or S
ESVAMGPIKGYYTVVGKDFYLINIPSLKTPVXXAKSA

SEQ ID NO: 21412 - protein, 40 aa, Artificial Sequence
  Non-cyclic GFR-binding peptide
  MOD_RES (2)..(35)..(36): Xaa is C or S
  MOD_RES (13)..(14)..(15)..(16)..(17): Xaa is A or G
  MOD_RES (18)..(19)..(20)..(21): Xaa is A or G or absent
GXEEVIMPIKGYXXXXXXXXXFYLMNIPSTKVPAXXTSPV

SEQ ID NO: 21413 - protein, 37 aa, Artificial Sequence
  Non-cyclic GFR-binding peptide
  MOD_RES (31)..(32): Xaa is C or S
EEVIMPIKGYLLVRGNDFYLMNIPSTKVPAXXTSPVR

SEQ ID NO: 21414 - protein, 42 aa, Artificial Sequence
  Non-cyclic GFR-binding peptide
  MOD_RES (2)..(4)..(38)..(39): Xaa is C or S
  MOD_RES (16)..(17)..(18)..(19)..(20): Xaa is A or G
  MOD_RES (21)..(22)..(23)..(24): Xaa is A or G or absent
RXGXAEVVMDPIKGYXXXXXXXXXFYLINIPSLRAPVXXSAP

SEQ ID NO: 21415 - protein, 36 aa, Artificial Sequence
  Non-cyclic GFR-binding peptide
  MOD_RES (34)..(35): Xaa is C or S
  MOD_RES (12)..(13)..(14)..(15)..(16): Xaa is A or G
  MOD_RES (17)..(18)..(19)..(20): Xaa is A or G or absent
GEVVMDPIKGYXXXXXXXXXFYLMNIPSLETPVXXA

SEQ ID NO: 21416 - protein, 34 aa, Artificial Sequence
  Non-cyclic GFR-binding peptide
  MOD_RES (31)..(32): Xaa is C or S
EVVMEPIKGYVVKDYEDFYLMNIPSLETPVXXAK

SEQ ID NO: 21417 - protein, 33 aa, Artificial Sequence
  Non-cyclic GFR-binding peptide
  MOD_RES (32)..(33): Xaa is C or S
ARVVMNPIKGYIVNSSDDFYLVNIPSLQTPAXX

SEQ ID NO: 21418 - protein, 37 aa, Artificial Sequence
  Non-cyclic GFR-binding peptide
  MOD_RES (2)..(4)..(36)..(37): Xaa is C or S
HXGXAKVVMNPIKGYIVNNSSDFYLVNIPSLKTPAXX

SEQ ID NO: 21419 - protein, 32 aa, Artificial Sequence
  Non-cyclic GFR-binding peptide
  MOD_RES (31)..(32): Xaa is C or S
KVVMNPIKGYIVNNSSDFYLVNIPSLKTPAXX

SEQ ID NO: 21420 - protein, 35 aa, Artificial Sequence
  Non-cyclic GFR-binding peptide
  MOD_RES (2)..(4)..(35): Xaa is C or S
LXGXEEVIMPIKGYLLVRGNDFYLMNIPSTKVPAX

SEQ ID NO: 21421 - protein, 34 aa, Artificial Sequence
  Non-cyclic GFR-binding peptide
  MOD_RES (34)..(34): Xaa is C or S
  MOD_RES (12)..(13)..(14)..(15)..(16): Xaa is A or G
  MOD_RES (17)..(18)..(19)..(20): Xaa is A or G or absent
AEVVMDPIKGYXXXXXXXXXFYLINIPSLRAPVX

SEQ ID NO: 21422 - protein, 38 aa, Artificial Sequence
  Non-cyclic GFR-binding peptide
  MOD_RES (1)..(34)..(35): Xaa is C or S
XEAVSMGEPIKGYTPVGMDDFYLVNIPSLKTPVXXAKG

SEQ ID NO: 21423 - protein, 33 aa, Artificial Sequence
  Non-cyclic GFR-binding peptide
  MOD_RES (31)..(31): Xaa is C or S
RVVMNPIKGYIVNSSDDFYLVNIPSLKTPAXTP

SEQ ID NO: 21424 - protein, 38 aa, Artificial Sequence
  Non-cyclic GFR-binding peptide
  MOD_RES (2)..(36)..(37): Xaa is C or S
  MOD_RES (14)..(15)..(16)..(17)..(18): Xaa is A or G
  MOD_RES (19)..(20)..(21)..(22): Xaa is A or G or absent
GXARVVMNPIKGYXXXXXXXXXFYLVNIPSLQTPAXXP

SEQ ID NO: 21425 - protein, 44 aa, Artificial Sequence
  Non-cyclic GFR-binding peptide
  MOD_RES (2)..(4)..(39)..(40): Xaa is C or S
  MOD_RES (17)..(18)..(19)..(20)..(21): Xaa is A or G
  MOD_RES (22)..(23)..(24)..(25): Xaa is A or G or absent
RXGXEAVSMGEPIKGYXXXXXXXXXFYLVNIPSLKTPVXXAKGV

SEQ ID NO: 21426 - protein, 35 aa, Artificial Sequence
  Non-cyclic GFR-binding peptide
  MOD_RES (1)..(3)..(35): Xaa is C or S
XGXARVVMNPIKGYIVNSSDDFYLVNIPSLQTPAX

SEQ ID NO: 21427 - protein, 39 aa, Artificial Sequence
  Non-cyclic GFR-binding peptide
  MOD_RES (2)..(34)..(35): Xaa is C or S
GXARVVMNPIKGYIVNSSDDFYLVNIPSLQTPAXXPKPV

SEQ ID NO: 21428 - protein, 42 aa, Artificial Sequence
  Non-cyclic GFR-binding peptide
  MOD_RES (2)..(4)..(36)..(37): Xaa is C or S
HXGXAKVVMNPIKGYIVNNSSDFYLVNIPSLKTPAXXAKPVA

SEQ ID NO: 21429 - protein, 42 aa, Artificial Sequence
  Non-cyclic GFR-binding peptide
  MOD_RES (2)..(36)..(37): Xaa is C or S
  MOD_RES (14)..(15)..(16)..(17)..(18): Xaa is A or G
  MOD_RES (19)..(20)..(21)..(22): Xaa is A or G or absent
GXAKVVMNPIKGYXXXXXXXXXFYLVNIPSLKTPAXXAKPVA

SEQ ID NO: 21430 - protein, 42 aa, Artificial Sequence
  Non-cyclic GFR-binding peptide
  MOD_RES (2)..(4)..(36)..(37): Xaa is C or S
RXGXGEVVMEPIKGYVVKDYEDFYLMNIPSLETPVXXAKPIS

SEQ ID NO: 21431 - protein, 39 aa, Artificial Sequence
  Non-cyclic GFR-binding peptide
  MOD_RES (1)..(36)..(37): Xaa is C or S
  MOD_RES (14)..(15)..(16)..(17)..(18): Xaa is A or G
  MOD_RES (19)..(20)..(21)..(22): Xaa is A or G or absent
XEAVSMGEPIKGYXXXXXXXXXFYLVNIPSLKTPVXXAK

SEQ ID NO: 21432 - protein, 36 aa, Artificial Sequence
  Non-cyclic GFR-binding peptide
  MOD_RES (1)..(3): Xaa is C or S
  MOD_RES (15)..(16)..(17)..(18)..(19): Xaa is A or G
  MOD_RES (20)..(21)..(22)..(23): Xaa is A or G or absent
XGXARVVMNPIKGYXXXXXXXXXFYLVNIPSLQTPA

SEQ ID NO: 21433 - protein, 35 aa, Artificial Sequence
  Non-cyclic GFR-binding peptide
  MOD_RES (1)..(33): Xaa is C or S
XSRVVMNPIKGYIVNSSDDFYLVNIPSLKTPAXTP

SEQ ID NO: 21434 - protein, 38 aa, Artificial Sequence
  Non-cyclic GFR-binding peptide
  MOD_RES (2)..(36)..(37): Xaa is C or S
  MOD_RES (14)..(15)..(16)..(17)..(18): Xaa is A or G
  MOD_RES (19)..(20)..(21)..(22): Xaa is A or G or absent
GXESVAMGPIKGYXXXXXXXXXFYLINIPSLKTPVXXA

SEQ ID NO: 21435 - protein, 34 aa, Artificial Sequence
  Non-cyclic GFR-binding peptide
  MOD_RES (34)..(34): Xaa is C or S
  MOD_RES (12)..(13)..(14)..(15)..(16): Xaa is A or G
  MOD_RES (17)..(18)..(19)..(20): Xaa is A or G or absent
GEVVMEPIKGYXXXXXXXXXFYLMNIPSLETPVX

SEQ ID NO: 21436 - protein, 40 aa, Artificial Sequence
  Non-cyclic GFR-binding peptide
  MOD_RES (34)..(35): Xaa is C or S
  MOD_RES (12)..(13)..(14)..(15)..(16): Xaa is A or G
  MOD_RES (17)..(18)..(19)..(20): Xaa is A or G or absent
ESVAMGPIKGYXXXXXXXXXFYLINIPSLKTPVXXAKSAK

SEQ ID NO: 21437 - protein, 39 aa, Artificial Sequence
  Non-cyclic GFR-binding peptide
  MOD_RES (1)..(35)..(36): Xaa is C or S
  MOD_RES (13)..(14)..(15)..(16)..(17): Xaa is A or G
  MOD_RES (18)..(19)..(20)..(21): Xaa is A or G or absent
XESVAMGPIKGYXXXXXXXXXFYLINIPSLKTPVXXAKS

SEQ ID NO: 21438 - protein, 41 aa, Artificial Sequence
  Non-cyclic GFR-binding peptide
  MOD_RES (2)..(4)..(37)..(38): Xaa is C or S
  MOD_RES (15)..(16)..(17)..(18)..(19): Xaa is A or G
  MOD_RES (20)..(21)..(22)..(23): Xaa is A or G or absent
LXGXEEVIMPIKGYXXXXXXXXXFYLMNIPSTKVPAXXTSP

SEQ ID NO: 21439 - protein, 35 aa, Artificial Sequence
  Non-cyclic GFR-binding peptide
  MOD_RES (33)..(34): Xaa is C or S
  MOD_RES (11)..(12)..(13)..(14)..(15): Xaa is A or G
  MOD_RES (16)..(17)..(18)..(19): Xaa is A or G or absent
EVVMDPIKGYXXXXXXXXXFYLINIPSLRTPVXXT

SEQ ID NO: 21440 - protein, 31 aa, Artificial Sequence
  Non-cyclic GFR-binding peptide
SRVVMNPIKGYIVNSSDDFYLVNIPSLKTPA

SEQ ID NO: 21441 - protein, 39 aa, Artificial Sequence
  Non-cyclic GFR-binding peptide
  MOD_RES (33)..(34): Xaa is C or S
  MOD_RES (11)..(12)..(13)..(14)..(15): Xaa is A or G
  MOD_RES (16)..(17)..(18)..(19): Xaa is A or G or absent
EVVMDPIKGYXXXXXXXXXFYLMNIPSLETPVXXAKPIK

SEQ ID NO: 21442 - protein, 42 aa, Artificial Sequence
  Non-cyclic GFR-binding peptide
  MOD_RES (1)..(3)..(37)..(38): Xaa is C or S
  MOD_RES (15)..(16)..(17)..(18)..(19): Xaa is A or G
  MOD_RES (20)..(21)..(22)..(23): Xaa is A or G or absent
XGXSRVVMNPIKGYXXXXXXXXXFYLVNIPSLKTPAXXPKPV

SEQ ID NO: 21443 - protein, 34 aa, Artificial Sequence
  Non-cyclic GFR-binding peptide
  MOD_RES (33)..(34): Xaa is C or S
  MOD_RES (11)..(12)..(13)..(14)..(15): Xaa is A or G
  MOD_RES (16)..(17)..(18)..(19): Xaa is A or G or absent
RVVMNPIKGYXXXXXXXXXFYLVNIPSLQTPAXX

SEQ ID NO: 21444 - protein, 36 aa, Artificial Sequence
  Non-cyclic GFR-binding peptide
  MOD_RES (1)..(3): Xaa is C or S
  MOD_RES (15)..(16)..(17)..(18)..(19): Xaa is A or G
  MOD_RES (20)..(21)..(22)..(23): Xaa is A or G or absent
XGXGEVVMEPIKGYXXXXXXXXXFYLMNIPSLETPV

SEQ ID NO: 21445 - protein, 39 aa, Artificial Sequence
  Non-cyclic GFR-binding peptide
  MOD_RES (1)..(3)..(36)..(37): Xaa is C or S
  MOD_RES (14)..(15)..(16)..(17)..(18): Xaa is A or G
  MOD_RES (19)..(20)..(21)..(22): Xaa is A or G or absent
XGXEEVIMPIKGYXXXXXXXXXFYLMNIPSTKVPAXXTS

SEQ ID NO: 21446 - protein, 38 aa, Artificial Sequence
  Non-cyclic GFR-binding peptide
  MOD_RES (1)..(3)..(34)..(35): Xaa is C or S
XGXEEVIMPIKGYLLVRGNDFYLMNIPSTKVPAXXTSP

SEQ ID NO: 21447 - protein, 37 aa, Artificial Sequence
  Non-cyclic GFR-binding peptide
  MOD_RES (2)..(36)..(37): Xaa is C or S
  MOD_RES (14)..(15)..(16)..(17)..(18): Xaa is A or G
  MOD_RES (19)..(20)..(21)..(22): Xaa is A or G or absent
GXESVAMGPIKGYXXXXXXXXXFYLINIPSLKTPVXX

SEQ ID NO: 21448 - protein, 36 aa, Artificial Sequence
  Non-cyclic GFR-binding peptide
  MOD_RES (33)..(34): Xaa is C or S
  MOD_RES (11)..(12)..(13)..(14)..(15): Xaa is A or G
  MOD_RES (16)..(17)..(18)..(19): Xaa is A or G or absent
EVVMDPIKGYXXXXXXXXXFYLMNIPSLETPVXXAK

SEQ ID NO: 21449 - protein, 37 aa, Artificial Sequence
  Non-cyclic GFR-binding peptide
  MOD_RES (2)..(4)..(36)..(37): Xaa is C or S
HXGXARVVMNPIKGYIVNSSDDFYLVNIPSLQTPAXX

SEQ ID NO: 21450 - protein, 38 aa, Artificial Sequence
  Non-cyclic GFR-binding peptide
  MOD_RES (1)..(32)..(33): Xaa is C or S
XEEVIMPIKGYLLVRGNDFYLMNIPSTKVPAXXTSPVR

SEQ ID NO: 21451 - protein, 34 aa, Artificial Sequence
  Non-cyclic GFR-binding peptide
  MOD_RES (2)..(34): Xaa is C or S
GXAKVVMNPIKGYIVNNSSDFYLVNIPSLKTPAX

SEQ ID NO: 21452 - protein, 39 aa, Artificial Sequence
  Non-cyclic GFR-binding peptide
  MOD_RES (33)..(34): Xaa is C or S
  MOD_RES (11)..(12)..(13)..(14)..(15): Xaa is A or G
  MOD_RES (16)..(17)..(18)..(19): Xaa is A or G or absent
KVVMNPIKGYXXXXXXXXXFYLVNIPSLKTPAXXAKPVA

SEQ ID NO: 21453 - protein, 39 aa, Artificial Sequence
  Non-cyclic GFR-binding peptide
  MOD_RES (2)..(36)..(37): Xaa is C or S
  MOD_RES (14)..(15)..(16)..(17)..(18): Xaa is A or G
  MOD_RES (19)..(20)..(21)..(22): Xaa is A or G or absent
GXGEVVMDPIKGYXXXXXXXXXFYLMNIPSLETPVXXAK

SEQ ID NO: 21454 - protein, 30 aa, Artificial Sequence
  Non-cyclic GFR-binding peptide
SVAMGPIKGYYTVVGKDFYLINIPSLKTPV

SEQ ID NO: 21455 - protein, 35 aa, Artificial Sequence
  Non-cyclic GFR-binding peptide
  MOD_RES (2)..(2): Xaa is C or S
  MOD_RES (14)..(15)..(16)..(17)..(18): Xaa is A or G
  MOD_RES (19)..(20)..(21)..(22): Xaa is A or G or absent
GXGEVVMDPIKGYXXXXXXXXXFYLMNIPSLETPV

SEQ ID NO: 21456 - protein, 39 aa, Artificial Sequence
  Non-cyclic GFR-binding peptide
  MOD_RES (1)..(33): Xaa is C or S
XSRVVMNPIKGYIVNSSDDFYLVNIPSLKTPAXTPKTVH

SEQ ID NO: 21457 - protein, 32 aa, Artificial Sequence
  Non-cyclic GFR-binding peptide
  MOD_RES (32)..(32): Xaa is C or S
AEVVMDPIKGYVVNNAADFYLINIPSLRAPVX

SEQ ID NO: 21458 - protein, 36 aa, Artificial Sequence
  Non-cyclic GFR-binding peptide
  MOD_RES (2)..(34): Xaa is C or S
GXSRVVMNPIKGYIVNSSDDFYLVNIPSLKTPAXTP

SEQ ID NO: 21459 - protein, 33 aa, Artificial Sequence
  Non-cyclic GFR-binding peptide
  MOD_RES (12)..(13)..(14)..(15)..(16): Xaa is A or G
  MOD_RES (17)..(18)..(19)..(20): Xaa is A or G or absent
SEVVMDPIKGYXXXXXXXXXFYLINIPSLRTPV

SEQ ID NO: 21460 - protein, 33 aa, Artificial Sequence
  Non-cyclic GFR-binding peptide
  MOD_RES (31)..(32): Xaa is C or S
EEVIMPIKGYLLVRGNDFYLMNIPSTKVPAXXT

SEQ ID NO: 21461 - protein, 37 aa, Artificial Sequence
  Non-cyclic GFR-binding peptide
  MOD_RES (1)..(3)..(36)..(37): Xaa is C or S
XGXEAVSMGEPIKGYTPVGMDDFYLVNIPSLKTPVXX

SEQ ID NO: 21462 - protein, 38 aa, Artificial Sequence
  Non-cyclic GFR-binding peptide
  MOD_RES (2)..(4)..(37)..(38): Xaa is C or S
  MOD_RES (15)..(16)..(17)..(18)..(19): Xaa is A or G
  MOD_RES (20)..(21)..(22)..(23): Xaa is A or G or absent
LXGXEEVIMPIKGYXXXXXXXXXFYLMNIPSTKVPAXX

SEQ ID NO: 21463 - protein, 35 aa, Artificial Sequence
  Non-cyclic GFR-binding peptide
  MOD_RES (34)..(35): Xaa is C or S
  MOD_RES (12)..(13)..(14)..(15)..(16): Xaa is A or G
  MOD_RES (17)..(18)..(19)..(20): Xaa is A or G or absent
AEVVMDPIKGYXXXXXXXXXFYLINIPSLRAPVXX

SEQ ID NO: 21464 - protein, 38 aa, Artificial Sequence
  Non-cyclic GFR-binding peptide
  MOD_RES (33)..(34): Xaa is C or S
  MOD_RES (11)..(12)..(13)..(14)..(15): Xaa is A or G
  MOD_RES (16)..(17)..(18)..(19): Xaa is A or G or absent
KVVMNPIKGYXXXXXXXXXFYLVNIPSLKTPAXXAKPV

SEQ ID NO: 21465 - protein, 37 aa, Artificial Sequence
  Non-cyclic GFR-binding peptide
  MOD_RES (1)..(3)..(36)..(37): Xaa is C or S
  MOD_RES (14)..(15)..(16)..(17)..(18): Xaa is A or G
  MOD_RES (19)..(20)..(21)..(22): Xaa is A or G or absent
XGXEEVIMPIKGYXXXXXXXXXFYLMNIPSTKVPAXX

SEQ ID NO: 21466 - protein, 39 aa, Artificial Sequence
  Non-cyclic GFR-binding peptide
  MOD_RES (6)..(7)..(39): Xaa is C or S
STPPTXXVPTRLSPINILYFDSANNVVYGKIPDMVVESX

SEQ ID NO: 21467 - protein, 40 aa, Artificial Sequence
  Non-cyclic GFR-binding peptide
  MOD_RES (6)..(7): Xaa is C or S
  MOD_RES (21)..(22)..(23)..(24)..(25): Xaa is A or G
  MOD_RES (26)..(27)..(28)..(29): Xaa is A or G or absent
TVPKPXXAPTQLSPINVLYFXXXXXXXXXYGKIPNMVVRA

SEQ ID NO: 21468 - protein, 37 aa, Artificial Sequence
  Non-cyclic GFR-binding peptide
  MOD_RES (5)..(6): Xaa is C or S
IPKAXXVPTELSPINMLYFDENEKVVYGKIPDMVVEG

SEQ ID NO: 21469 - protein, 40 aa, Artificial Sequence
  Non-cyclic GFR-binding peptide
  MOD_RES (3)..(4)..(38)..(40): Xaa is C or S
  MOD_RES (18)..(19)..(20)..(21)..(22): Xaa is A or G
  MOD_RES (23)..(24)..(25)..(26): Xaa is A or G or absent
ASXXVPARLSPINILYFXXXXXXXXXYGKIPDMVVEAXGX

SEQ ID NO: 21470 - protein, 32 aa, Artificial Sequence
  Non-cyclic GFR-binding peptide
  MOD_RES (31)..(31): Xaa is C or S
APVKTSPINMLYFDNGRVLLYGKIPMIVEEXG

SEQ ID NO: 21471 - protein, 35 aa, Artificial Sequence
  Non-cyclic GFR-binding peptide
  MOD_RES (3)..(4): Xaa is C or S
PTXXVPTRLSPINILYFDSANNVVYGKIPDMVVES

SEQ ID NO: 21472 - protein, 42 aa, Artificial Sequence
  Non-cyclic GFR-binding peptide
  MOD_RES (5)..(6)..(40)..(42): Xaa is C or S
  MOD_RES (20)..(21)..(22)..(23)..(24): Xaa is A or G
  MOD_RES (25)..(26)..(27)..(28): Xaa is A or G or absent
TPPTXXVPTRLSPINILYFXXXXXXXXXYGKIPDMVVESXGX

SEQ ID NO: 21473 - protein, 39 aa, Artificial Sequence
  Non-cyclic GFR-binding peptide
  MOD_RES (3)..(4)..(36)..(38): Xaa is C or S
KAXXVPTKLSPINILYFDKGVVTYYGKIPGMAVSEXGXR

SEQ ID NO: 21474 - protein, 41 aa, Artificial Sequence
  Non-cyclic GFR-binding peptide
  MOD_RES (4)..(5)..(39)..(41): Xaa is C or S
  MOD_RES (19)..(20)..(21)..(22)..(23): Xaa is A or G
  MOD_RES (24)..(25)..(26)..(27): Xaa is A or G or absent
PKPXXAPTKLSPINVLYFXXXXXXXXXYGKIPNMVVRSXGX

SEQ ID NO: 21475 - protein, 35 aa, Artificial Sequence
  Non-cyclic GFR-binding peptide
  MOD_RES (2)..(3)..(35): Xaa is C or S
AXXVPTELSPINMLYFDENEKVVYGKIPDMVVEGX

SEQ ID NO: 21476 - protein, 35 aa, Artificial Sequence
  Non-cyclic GFR-binding peptide
  MOD_RES (1)..(2): Xaa is C or S
  MOD_RES (16)..(17)..(18)..(19)..(20): Xaa is A or G
  MOD_RES (21)..(22)..(23)..(24): Xaa is A or G or absent
XXVPTKLSPINILYFXXXXXXXXXYGKIPGMAVSE

SEQ ID NO: 21477 - protein, 40 aa, Artificial Sequence
  Non-cyclic GFR-binding peptide
  MOD_RES (5)..(6)..(38)..(40): Xaa is C or S
ASKAXXVPTKLSPINILYFDKGVVTYYGKIPGMAVSEXGX

SEQ ID NO: 21478 - protein, 37 aa, Artificial Sequence
  Non-cyclic GFR-binding peptide
  MOD_RES (4)..(36): Xaa is C or S
KPTXAPTKLSPINVLYFDDSSNVIYGKIPNMVVRSXG

SEQ ID NO: 21479 - protein, 40 aa, Artificial Sequence
  Non-cyclic GFR-binding peptide
  MOD_RES (7)..(7): Xaa is C or S
  MOD_RES (21)..(22)..(23)..(24)..(25): Xaa is A or G
  MOD_RES (26)..(27)..(28)..(29): Xaa is A or G or absent
HVTKPTXAPTKLSPINVLYFXXXXXXXXXYGKIPNMVVRS

SEQ ID NO: 21480 - protein, 34 aa, Artificial Sequence
  Non-cyclic GFR-binding peptide
  MOD_RES (1)..(33): Xaa is C or S
XAPTKLSPINVLYFDDSSNVIYGKIPNMVVRSXG

SEQ ID NO: 21481 - protein, 41 aa, Artificial Sequence
  Non-cyclic GFR-binding peptide
  MOD_RES (4)..(5)..(39)..(41): Xaa is C or S
  MOD_RES (19)..(20)..(21)..(22)..(23): Xaa is A or G
  MOD_RES (24)..(25)..(26)..(27): Xaa is A or G or absent
SKAXXVPTKLSPINILYFXXXXXXXXXYGKIPGMAVSEXGX

SEQ ID NO: 21482 - protein, 40 aa, Artificial Sequence
  Non-cyclic GFR-binding peptide
  MOD_RES (5)..(6)..(40): Xaa is C or S
  MOD_RES (20)..(21)..(22)..(23)..(24): Xaa is A or G
  MOD_RES (25)..(26)..(27)..(28): Xaa is A or G or absent
ASKAXXVPTKLSPINILYFXXXXXXXXXYGKIPGMAVSEX

SEQ ID NO: 21483 - protein, 35 aa, Artificial Sequence
  Non-cyclic GFR-binding peptide
  MOD_RES (3)..(4): Xaa is C or S
KAXXVPTELSPINMLYFDENEKVVYGKIPDMVVEG

SEQ ID NO: 21484 - protein, 36 aa, Artificial Sequence
  Non-cyclic GFR-binding peptide
  MOD_RES (5)..(6): Xaa is C or S
TPPTXXVPTRLSPINILYFDSANNVVYGKIPDMVVE

SEQ ID NO: 21485 - protein, 39 aa, Artificial Sequence
  Non-cyclic GFR-binding peptide
  MOD_RES (1)..(2)..(36)..(38): Xaa is C or S
  MOD_RES (16)..(17)..(18)..(19)..(20): Xaa is A or G
  MOD_RES (21)..(22)..(23)..(24): Xaa is A or G or absent
XXVPARLSPINILYFXXXXXXXXXYGKIPDMVVEAXGXR

SEQ ID NO: 21486 - protein, 35 aa, Artificial Sequence
  Non-cyclic GFR-binding peptide
  MOD_RES (2)..(3): Xaa is C or S
  MOD_RES (17)..(18)..(19)..(20)..(21): Xaa is A or G
  MOD_RES (22)..(23)..(24)..(25): Xaa is A or G or absent
AXXVPTELSPINMLYFXXXXXXXXXYGKIPDMVVE

SEQ ID NO: 21487 - protein, 39 aa, Artificial Sequence
  Non-cyclic GFR-binding peptide
  MOD_RES (2)..(3)..(36)..(38): Xaa is C or S
AXXVPTKLSPINVLYFDDMGVPTYGKIPEGMSVAEXGXR

SEQ ID NO: 21488 - protein, 39 aa, Artificial Sequence
  Non-cyclic GFR-binding peptide
  MOD_RES (3)..(37)..(39): Xaa is C or S
  MOD_RES (17)..(18)..(19)..(20)..(21): Xaa is A or G
  MOD_RES (22)..(23)..(24)..(25): Xaa is A or G or absent
PTXAPTKLSPINVLYFXXXXXXXXXYGKIPNMVVRSXGX

SEQ ID NO: 21489 - protein, 36 aa, Artificial Sequence
  Non-cyclic GFR-binding peptide
  MOD_RES (4)..(5): Xaa is C or S
PPTXXVPTRLSPINILYFDSANNVVYGKIPDMVVES

SEQ ID NO: 21490 - protein, 37 aa, Artificial Sequence
  Non-cyclic GFR-binding peptide
  MOD_RES (4)..(5): Xaa is C or S
  MOD_RES (19)..(20)..(21)..(22)..(23): Xaa is A or G
  MOD_RES (24)..(25)..(26)..(27): Xaa is A or G or absent
PKPXXAPTQLSPINVLYFXXXXXXXXXYGKIPNMVVR

SEQ ID NO: 21491 - protein, 36 aa, Artificial Sequence
  Non-cyclic GFR-binding peptide
  MOD_RES (2)..(3)..(35): Xaa is C or S
SXXVPARLSPINILYFDAANNVVYGKIPDMVVEAXG

SEQ ID NO: 21492 - protein, 42 aa, Artificial Sequence
  Non-cyclic GFR-binding peptide
  MOD_RES (5)..(6)..(39)..(41): Xaa is C or S
VGKAXXVPTKLSPINVLYFDDMGVPTYGKIPEGMSVAEXGXR

SEQ ID NO: 21493 - protein, 33 aa, Artificial Sequence
  Non-cyclic GFR-binding peptide
  MOD_RES (1)..(2): Xaa is C or S
XXVPTKLSPINILYFDKGVVTYYGKIPGMAVSE

SEQ ID NO: 21494 - protein, 35 aa, Artificial Sequence
  Non-cyclic GFR-binding peptide
  MOD_RES (1)..(33)..(35): Xaa is C or S
XVPTELSPINMLYFDEYDKVVYGKIPEMVVEGXGX

SEQ ID NO: 21495 - protein, 39 aa, Artificial Sequence
  Non-cyclic GFR-binding peptide
  MOD_RES (3)..(4)..(36)..(38): Xaa is C or S
ASXXVPARLSPINILYFDAANNVVYGKIPDMVVEAXGXR

SEQ ID NO: 21496 - protein, 35 aa, Artificial Sequence
  Non-cyclic GFR-binding peptide
  MOD_RES (1)..(2)..(35): Xaa is C or S
XXVPTKLSPINVLYFDDMGVPTYGKIPEGMSVAEX

SEQ ID NO: 21497 - protein, 38 aa, Artificial Sequence
  Non-cyclic GFR-binding peptide
  MOD_RES (5)..(6)..(37): Xaa is C or S
VPSTXXAPVKTSPINMLYFDNGRVLLYGKIPMIVEEXG

SEQ ID NO: 21498 - protein, 43 aa, Artificial Sequence
  Non-cyclic GFR-binding peptide
  MOD_RES (5)..(6)..(40)..(42): Xaa is C or S
  MOD_RES (20)..(21)..(22)..(23)..(24): Xaa is A or G
  MOD_RES (25)..(26)..(27)..(28): Xaa is A or G or absent
ASKAXXVPTKLSPINILYFXXXXXXXXXYGKIPGMAVSEXGXR

SEQ ID NO: 21499 - protein, 43 aa, Artificial Sequence
  Non-cyclic GFR-binding peptide
  MOD_RES (6)..(7)..(41)..(43): Xaa is C or S
  MOD_RES (21)..(22)..(23)..(24)..(25): Xaa is A or G
  MOD_RES (26)..(27)..(28)..(29): Xaa is A or G or absent
AVPKAXXAPTKLSPINVLYFXXXXXXXXXYGKIPNMVVKAXGX

SEQ ID NO: 21500 - protein, 36 aa, Artificial Sequence
  Non-cyclic GFR-binding peptide
  MOD_RES (34)..(36): Xaa is C or S
  MOD_RES (14)..(15)..(16)..(17)..(18): Xaa is A or G
  MOD_RES (19)..(20)..(21)..(22): Xaa is A or G or absent
VPTKLSPINILYFXXXXXXXXXYGKIPGMAVSEXGX

SEQ ID NO: 21501 - protein, 40 aa, Artificial Sequence
  Non-cyclic GFR-binding peptide
  MOD_RES (4)..(38)..(40): Xaa is C or S
  MOD_RES (18)..(19)..(20)..(21)..(22): Xaa is A or G
  MOD_RES (23)..(24)..(25)..(26): Xaa is A or G or absent
KPTXAPTKLSPINVLYFXXXXXXXXXYGKIPNMVVRSXGX

SEQ ID NO: 21502 - protein, 44 aa, Artificial Sequence
  Non-cyclic GFR-binding peptide
  MOD_RES (6)..(7)..(41)..(43): Xaa is C or S
  MOD_RES (21)..(22)..(23)..(24)..(25): Xaa is A or G
  MOD_RES (26)..(27)..(28)..(29): Xaa is A or G or absent
AVPKAXXAPTKLSPINVLYFXXXXXXXXXYGKIPNMVVKAXGXH

SEQ ID NO: 21503 - protein, 39 aa, Artificial Sequence
  Non-cyclic GFR-binding peptide
  MOD_RES (6)..(7)..(39): Xaa is C or S
KIPKAXXVPTELSPINMLYFDENEKVVYGKIPDMVVEGX

SEQ ID NO: 21504 - protein, 43 aa, Artificial Sequence
  Non-cyclic GFR-binding peptide
  MOD_RES (6)..(7)..(41)..(43): Xaa is C or S
  MOD_RES (21)..(22)..(23)..(24)..(25): Xaa is A or G
  MOD_RES (26)..(27)..(28)..(29): Xaa is A or G or absent
KASKAXXVPTKLSPINILYFXXXXXXXXXYGKIPGMAVSEXGX

SEQ ID NO: 21505 - protein, 34 aa, Artificial Sequence
  Non-cyclic GFR-binding peptide
  MOD_RES (2)..(3): Xaa is C or S
PXXAPTQLSPINVLYFDDSSNVIYGKIPNMVVRA

SEQ ID NO: 21506 - protein, 37 aa, Artificial Sequence
  Non-cyclic GFR-binding peptide
  MOD_RES (2)..(34)..(36): Xaa is C or S
TXAPTKLSPINVLYFDDSSNVIYGKIPNMVVRSXGXH

SEQ ID NO: 21507 - protein, 35 aa, Artificial Sequence
  Non-cyclic GFR-binding peptide
  MOD_RES (35)..(35): Xaa is C or S
  MOD_RES (14)..(15)..(16)..(17)..(18): Xaa is A or G
  MOD_RES (19)..(20)..(21)..(22): Xaa is A or G or absent
VPTKLSPINVLYFXXXXXXXXXYGKIPEGMSVAEX

SEQ ID NO: 21508 - protein, 39 aa, Artificial Sequence
  Non-cyclic GFR-binding peptide
  MOD_RES (3)..(4)..(36)..(38): Xaa is C or S
KAXXAPTKLSPINVLYFDSSNNVIYGKIPNMVVKAXGXH

SEQ ID NO: 21509 - protein, 37 aa, Artificial Sequence
  Non-cyclic GFR-binding peptide
  MOD_RES (2)..(3)..(36): Xaa is C or S
AXXVPTKLSPINVLYFDDMGVPTYGKIPEGMSVAEXG

SEQ ID NO: 21510 - protein, 42 aa, Artificial Sequence
  Non-cyclic GFR-binding peptide
  MOD_RES (4)..(5)..(39)..(41): Xaa is C or S
  MOD_RES (19)..(20)..(21)..(22)..(23): Xaa is A or G
  MOD_RES (24)..(25)..(26)..(27): Xaa is A or G or absent
PKAXXAPTKLSPINVLYFXXXXXXXXXYGKIPNMVVKAXGXH

SEQ ID NO: 21511 - protein, 34 aa, Artificial Sequence
  Non-cyclic GFR-binding peptide
  MOD_RES (1)..(32)..(34): Xaa is C or S
XAPVKTSPINMLYFDNGRVLLYGKIPMIVEEXGX

SEQ ID NO: 21512 - protein, 42 aa, Artificial Sequence
  Non-cyclic GFR-binding peptide
  MOD_RES (4)..(5)..(39)..(41): Xaa is C or S
  MOD_RES (19)..(20)..(21)..(22)..(23): Xaa is A or G
  MOD_RES (24)..(25)..(26)..(27): Xaa is A or G or absent
PPTXXVPTRLSPINILYFXXXXXXXXXYGKIPDMVVESXGXR

SEQ ID NO: 21513 - protein, 36 aa, Artificial Sequence
  Non-cyclic GFR-binding peptide
  MOD_RES (1)..(33)..(35): Xaa is C or S
XVPTELSPINMLYFDENEKVVYGKIPDMVVEGXGXR

SEQ ID NO: 21514 - protein, 37 aa, Artificial Sequence
  Non-cyclic GFR-binding peptide
  MOD_RES (6)..(7): Xaa is C or S
KASKAXXVPTKLSPINILYFDKGVVTYYGKIPGMAVS

SEQ ID NO: 21515 - protein, 40 aa, Artificial Sequence
  Non-cyclic GFR-binding peptide
  MOD_RES (6)..(7)..(39): Xaa is C or S
TVPKPXXAPTQLSPINVLYFDDSSNVIYGKIPNMVVRAXG

SEQ ID NO: 21516 - protein, 40 aa, Artificial Sequence
  Non-cyclic GFR-binding peptide
  MOD_RES (4)..(5)..(39): Xaa is C or S
  MOD_RES (19)..(20)..(21)..(22)..(23): Xaa is A or G
  MOD_RES (24)..(25)..(26)..(27): Xaa is A or G or absent
PPTXXVPTRLSPINILYFXXXXXXXXXYGKIPDMVVESXG

SEQ ID NO: 21517 - protein, 35 aa, Artificial Sequence
  Non-cyclic GFR-binding peptide
  MOD_RES (1)..(2): Xaa is C or S
  MOD_RES (16)..(17)..(18)..(19)..(20): Xaa is A or G
  MOD_RES (21)..(22)..(23)..(24): Xaa is A or G or absent
XXAPTKLSPINVLYFXXXXXXXXXYGKIPNMVVRS

SEQ ID NO: 21518 - protein, 39 aa, Artificial Sequence
  Non-cyclic GFR-binding peptide
  MOD_RES (5)..(6): Xaa is C or S
  MOD_RES (20)..(21)..(22)..(23)..(24): Xaa is A or G
  MOD_RES (25)..(26)..(27)..(28): Xaa is A or G or absent
IPKAXXVPTELSPINMLYFXXXXXXXXXYGKIPDMVVEG

SEQ ID NO: 21519 - protein, 35 aa, Artificial Sequence
  Non-cyclic GFR-binding peptide
  MOD_RES (1)..(33)..(35): Xaa is C or S
XVPTKLSPINILYFDKGVVTYYGKIPGMAVSEXGX

SEQ ID NO: 21520 - protein, 35 aa, Artificial Sequence
  Non-cyclic GFR-binding peptide
  MOD_RES (34)..(34): Xaa is C or S
  MOD_RES (14)..(15)..(16)..(17)..(18): Xaa is A or G
  MOD_RES (19)..(20)..(21)..(22): Xaa is A or G or absent
APTQLSPINVLYFXXXXXXXXXYGKIPNMVVRAXG

SEQ ID NO: 21521 - protein, 36 aa, Artificial Sequence
  Non-cyclic GFR-binding peptide
  MOD_RES (5)..(6): Xaa is C or S
IPKAXXVPTELSPINMLYFDEYDKVVYGKIPEMVVE

SEQ ID NO: 21522 - protein, 38 aa, Artificial Sequence
  Non-cyclic GFR-binding peptide
  MOD_RES (3)..(4)..(36)..(38): Xaa is C or S
KAXXVPTELSPINMLYFDEYDKVVYGKIPEMVVEGXGX

SEQ ID NO: 21523 - protein, 42 aa, Artificial Sequence
  Non-cyclic GFR-binding peptide
  MOD_RES (4)..(5)..(39)..(41): Xaa is C or S
  MOD_RES (19)..(20)..(21)..(22)..(23): Xaa is A or G
  MOD_RES (24)..(25)..(26)..(27): Xaa is A or G or absent
PKAXXVPTELSPINMLYFXXXXXXXXXYGKIPDMVVEGXGXR

SEQ ID NO: 21524 - protein, 41 aa, Artificial Sequence
  Non-cyclic GFR-binding peptide
  MOD_RES (3)..(4)..(39)..(41): Xaa is C or S
  MOD_RES (18)..(19)..(20)..(21)..(22): Xaa is A or G
  MOD_RES (23)..(24)..(25)..(26): Xaa is A or G or absent
KAXXVPTKLSPINVLYFXXXXXXXXXYGKIPEGMSVAEXGX

SEQ ID NO: 21525 - protein, 39 aa, Artificial Sequence
  Non-cyclic GFR-binding peptide
  MOD_RES (4)..(5)..(38): Xaa is C or S
  MOD_RES (19)..(20)..(21)..(22)..(23): Xaa is A or G
  MOD_RES (24)..(25)..(26)..(27): Xaa is A or G or absent
PSTXXAPVKTSPINMLYFXXXXXXXXXYGKIPMIVEEXG

SEQ ID NO: 21526 - protein, 39 aa, Artificial Sequence
  Non-cyclic GFR-binding peptide
  MOD_RES (6)..(38): Xaa is C or S
VTKPTXAPTKLSPINVLYFDDSSNVIYGKIPNMVVRSXG

SEQ ID NO: 21527 - protein, 42 aa, Artificial Sequence
  Non-cyclic GFR-binding peptide
  MOD_RES (5)..(6)..(41): Xaa is C or S
  MOD_RES (20)..(21)..(22)..(23)..(24): Xaa is A or G
  MOD_RES (25)..(26)..(27)..(28): Xaa is A or G or absent
VGKAXXVPTKLSPINVLYFXXXXXXXXXYGKIPEGMSVAEXG

SEQ ID NO: 21528 - protein, 40 aa, Artificial Sequence
  Non-cyclic GFR-binding peptide
  MOD_RES (6)..(7)..(39): Xaa is C or S
STPPTXXVPTRLSPINILYFDSANNVVYGKIPDMVVESXG

SEQ ID NO: 21529 - protein, 38 aa, Artificial Sequence
  Non-cyclic GFR-binding peptide
  MOD_RES (3)..(4)..(38): Xaa is C or S
  MOD_RES (18)..(19)..(20)..(21)..(22): Xaa is A or G
  MOD_RES (23)..(24)..(25)..(26): Xaa is A or G or absent
KPXXAPTKLSPINVLYFXXXXXXXXXYGKIPNMVVRSX

SEQ ID NO: 21530 - protein, 34 aa, Artificial Sequence
  Non-cyclic GFR-binding peptide
  MOD_RES (14)..(15)..(16)..(17)..(18): Xaa is A or G
  MOD_RES (19)..(20)..(21)..(22): Xaa is A or G or absent
VPTKLSPINVLYFXXXXXXXXXYGKIPEGMSVAE

SEQ ID NO: 21531 - protein, 32 aa, Artificial Sequence
  Non-cyclic GFR-binding peptide
  MOD_RES (1)..(1): Xaa is C or S
XVPTELSPINMLYFDENEKVVYGKIPDMVVEG

SEQ ID NO: 21532 - protein, 37 aa, Artificial Sequence
  Non-cyclic GFR-binding peptide
  MOD_RES (3)..(4)..(36): Xaa is C or S
KAXXVPTELSPINMLYFDEYDKVVYGKIPEMVVEGXG

SEQ ID NO: 21533 - protein, 41 aa, Artificial Sequence
  Non-cyclic GFR-binding peptide
  MOD_RES (4)..(5)..(39)..(41): Xaa is C or S
  MOD_RES (19)..(20)..(21)..(22)..(23): Xaa is A or G
  MOD_RES (24)..(25)..(26)..(27): Xaa is A or G or absent
PKAXXAPTKLSPINVLYFXXXXXXXXXYGKIPNMVVKAXGX

SEQ ID NO: 21534 - protein, 40 aa, Artificial Sequence
  Non-cyclic GFR-binding peptide
  MOD_RES (5)..(6)..(38)..(40): Xaa is C or S
VPKPXXAPTKLSPINVLYFDDSSNVIYGKIPNMVVRSXGX

SEQ ID NO: 21535 - protein, 36 aa, Artificial Sequence
  Non-cyclic GFR-binding peptide
  MOD_RES (34)..(36): Xaa is C or S
  MOD_RES (14)..(15)..(16)..(17)..(18): Xaa is A or G
  MOD_RES (19)..(20)..(21)..(22): Xaa is A or G or absent
APTKLSPINVLYFXXXXXXXXXYGKIPNMVVKAXGX

SEQ ID NO: 21536 - protein, 34 aa, Artificial Sequence
  Non-cyclic GFR-binding peptide
  MOD_RES (1)..(33): Xaa is C or S
XVPTRLSPINILYFDSANNVVYGKIPDMVVESXG

SEQ ID NO: 21537 - protein, 37 aa, Artificial Sequence
  Non-cyclic GFR-binding peptide
  MOD_RES (5)..(6): Xaa is C or S
APASXXVPARLSPINILYFDAANNVVYGKIPDMVVEA

SEQ ID NO: 21538 - protein, 35 aa, Artificial Sequence
  Non-cyclic GFR-binding peptide
  MOD_RES (32)..(34): Xaa is C or S
VPTELSPINMLYFDENEKVVYGKIPDMVVEGXGXR

SEQ ID NO: 21539 - protein, 41 aa, Artificial Sequence
  Non-cyclic GFR-binding peptide
  MOD_RES (5)..(6)..(38)..(40): Xaa is C or S
IPKAXXVPTELSPINMLYFDEYDKVVYGKIPEMVVEGXGXR

SEQ ID NO: 21540 - protein, 34 aa, Artificial Sequence
  Non-cyclic GFR-binding peptide
  MOD_RES (3)..(4): Xaa is C or S
KAXXVPTELSPINMLYFDENEKVVYGKIPDMVVE

SEQ ID NO: 21541 - protein, 41 aa, Artificial Sequence
  Non-cyclic GFR-binding peptide
  MOD_RES (7)..(39)..(41): Xaa is C or S
HVTKPTXAPTKLSPINVLYFDDSSNVIYGKIPNMVVRSXGX

SEQ ID NO: 21542 - protein, 35 aa, Artificial Sequence
  Non-cyclic GFR-binding peptide
  MOD_RES (4)..(5): Xaa is C or S
PKPXXAPTKLSPINVLYFDDSSNVIYGKIPNMVVR

SEQ ID NO: 21543 - protein, 41 aa, Artificial Sequence
  Non-cyclic GFR-binding peptide
  MOD_RES (6)..(7)..(39)..(41): Xaa is C or S
HVPKPXXAPTKLSPINVLYFDDSSNVIYGKIPNMVVRSXGX

SEQ ID NO: 21544 - protein, 38 aa, Artificial Sequence
  Non-cyclic GFR-binding peptide
  MOD_RES (2)..(3)..(37): Xaa is C or S
  MOD_RES (17)..(18)..(19)..(20)..(21): Xaa is A or G
  MOD_RES (22)..(23)..(24)..(25): Xaa is A or G or absent
AXXVPTELSPINMLYFXXXXXXXXXYGKIPEMVVEGXG

SEQ ID NO: 21545 - protein, 38 aa, Artificial Sequence
  Non-cyclic GFR-binding peptide
  MOD_RES (1)..(2)..(36)..(38): Xaa is C or S
  MOD_RES (16)..(17)..(18)..(19)..(20): Xaa is A or G
  MOD_RES (21)..(22)..(23)..(24): Xaa is A or G or absent
XXAPTQLSPINVLYFXXXXXXXXXYGKIPNMVVRAXGX

SEQ ID NO: 21546 - protein, 38 aa, Artificial Sequence
  Non-cyclic GFR-binding peptide
  MOD_RES (5)..(6)..(38): Xaa is C or S
IPKAXXVPTELSPINMLYFDEYDKVVYGKIPEMVVEGX

SEQ ID NO: 21547 - protein, 37 aa, Artificial Sequence
  Non-cyclic GFR-binding peptide
  MOD_RES (3)..(4)..(37): Xaa is C or S
  MOD_RES (18)..(19)..(20)..(21)..(22): Xaa is A or G
  MOD_RES (23)..(24)..(25)..(26): Xaa is A or G or absent
STXXAPVKTSPINMLYFXXXXXXXXXYGKIPMIVEEX

SEQ ID NO: 21548 - protein, 35 aa, Artificial Sequence
  Non-cyclic GFR-binding peptide
  MOD_RES (4)..(5): Xaa is C or S
PKAXXVPTELSPINMLYFDEYDKVVYGKIPEMVVE

SEQ ID NO: 21549 - protein, 41 aa, Artificial Sequence
  Non-cyclic GFR-binding peptide
  MOD_RES (4)..(38)..(40): Xaa is C or S
  MOD_RES (18)..(19)..(20)..(21)..(22): Xaa is A or G
  MOD_RES (23)..(24)..(25)..(26): Xaa is A or G or absent
KPTXAPTKLSPINVLYFXXXXXXXXXYGKIPNMVVRSXGXH

SEQ ID NO: 21550 - protein, 39 aa, Artificial Sequence
  Non-cyclic GFR-binding peptide
  MOD_RES (6)..(7): Xaa is C or S
KVGKAXXVPTKLSPINVLYFDDMGVPTYGKIPEGMSVAE

SEQ ID NO: 21551 - protein, 31 aa, Artificial Sequence
  Non-cyclic GFR-binding peptide
VPARLSPINILYFDAANNVVYGKIPDMVVEA

SEQ ID NO: 21552 - protein, 32 aa, Artificial Sequence
  Non-cyclic GFR-binding peptide
  MOD_RES (14)..(15)..(16)..(17)..(18): Xaa is A or G
  MOD_RES (19)..(20)..(21)..(22): Xaa is A or G or absent
APTKLSPINVLYFXXXXXXXXXYGKIPNMVVK

SEQ ID NO: 21553 - protein, 43 aa, Artificial Sequence
  Non-cyclic GFR-binding peptide
  MOD_RES (5)..(6)..(40)..(42): Xaa is C or S
  MOD_RES (20)..(21)..(22)..(23)..(24): Xaa is A or G
  MOD_RES (25)..(26)..(27)..(28): Xaa is A or G or absent
IPKAXXVPTELSPINMLYFXXXXXXXXXYGKIPDMVVEGXGXR

SEQ ID NO: 21554 - protein, 42 aa, Artificial Sequence
  Non-cyclic GFR-binding peptide
  MOD_RES (6)..(7)..(41): Xaa is C or S
  MOD_RES (21)..(22)..(23)..(24)..(25): Xaa is A or G
  MOD_RES (26)..(27)..(28)..(29): Xaa is A or G or absent
KIPKAXXVPTELSPINMLYFXXXXXXXXXYGKIPDMVVEGXG

SEQ ID NO: 21555 - protein, 32 aa, Artificial Sequence
  Non-cyclic GFR-binding peptide
  MOD_RES (14)..(15)..(16)..(17)..(18): Xaa is A or G
  MOD_RES (19)..(20)..(21)..(22): Xaa is A or G or absent
APVKTSPINMLYFXXXXXXXXXYGKIPMIVEE

SEQ ID NO: 21556 - protein, 38 aa, Artificial Sequence
  Non-cyclic GFR-binding peptide
  MOD_RES (3)..(4)..(36)..(38): Xaa is C or S
KAXXVPTELSPINMLYFDENEKVVYGKIPDMVVEGXGX

SEQ ID NO: 21557 - protein, 33 aa, Artificial Sequence
  Non-cyclic GFR-binding peptide
  MOD_RES (1)..(1): Xaa is C or S
  MOD_RES (15)..(16)..(17)..(18)..(19): Xaa is A or G
  MOD_RES (20)..(21)..(22)..(23): Xaa is A or G or absent
XVPARLSPINILYFXXXXXXXXXYGKIPDMVVE

SEQ ID NO: 21558 - protein, 34 aa, Artificial Sequence
  Non-cyclic GFR-binding peptide
  MOD_RES (1)..(33): Xaa is C or S
XVPTELSPINMLYFDENEKVVYGKIPDMVVEGXG

SEQ ID NO: 21559 - protein, 35 aa, Artificial Sequence
  Non-cyclic GFR-binding peptide
  MOD_RES (1)..(2)..(34): Xaa is C or S
XXAPTQLSPINVLYFDDSSNVIYGKIPNMVVRAXG

SEQ ID NO: 21560 - protein, 31 aa, Artificial Sequence
  Non-cyclic GFR-binding peptide
VPTELSPINMLYFDEYDKVVYGKIPEMVVEG

SEQ ID NO: 21561 - protein, 40 aa, Artificial Sequence
  Non-cyclic GFR-binding peptide
  MOD_RES (4)..(5)..(37)..(39): Xaa is C or S
PKAXXVPTELSPINMLYFDENEKVVYGKIPDMVVEGXGXR

SEQ ID NO: 21562 - protein, 38 aa, Artificial Sequence
  Non-cyclic GFR-binding peptide
  MOD_RES (2)..(3)..(35)..(37): Xaa is C or S
AXXVPTKLSPINILYFDKGVVTYYGKIPGMAVSEXGXR

SEQ ID NO: 21563 - protein, 37 aa, Artificial Sequence
  Non-cyclic GFR-binding peptide
  MOD_RES (34)..(36): Xaa is C or S
  MOD_RES (14)..(15)..(16)..(17)..(18): Xaa is A or G
  MOD_RES (19)..(20)..(21)..(22): Xaa is A or G or absent
VPTKLSPINILYFXXXXXXXXXYGKIPGMAVSEXGXR

SEQ ID NO: 21564 - protein, 40 aa, Artificial Sequence
  Non-cyclic GFR-binding peptide
  MOD_RES (6)..(7)..(39): Xaa is C or S
AVPKAXXAPTKLSPINVLYFDSSNNVIYGKIPNMVVKAXG

SEQ ID NO: 21565 - protein, 36 aa, Artificial Sequence
  Non-cyclic GFR-binding peptide
  MOD_RES (2)..(3)..(35): Xaa is C or S
AXXAPTKLSPINVLYFDSSNNVIYGKIPNMVVKAXG

SEQ ID NO: 21566 - protein, 34 aa, Artificial Sequence
  Non-cyclic GFR-binding peptide
  MOD_RES (32)..(34): Xaa is C or S
VPTRLSPINILYFDSANNVVYGKIPDMVVESXGX

SEQ ID NO: 21567 - protein, 37 aa, Artificial Sequence
  Non-cyclic GFR-binding peptide
  MOD_RES (6)..(7): Xaa is C or S
YVPKPXXAPTKLSPINVLYFDDSSNVIYGKIPNMVVR

SEQ ID NO: 21568 - protein, 39 aa, Artificial Sequence
  Non-cyclic GFR-binding peptide
  MOD_RES (5)..(6)..(38): Xaa is C or S
IPKAXXVPTELSPINMLYFDEYDKVVYGKIPEMVVEGXG

SEQ ID NO: 21569 - protein, 32 aa, Artificial Sequence
  Non-cyclic GFR-binding peptide
  MOD_RES (1)..(1): Xaa is C or S
XAPTKLSPINVLYFDDSSNVIYGKIPNMVVRS

SEQ ID NO: 21570 - protein, 35 aa, Artificial Sequence
  Non-cyclic GFR-binding peptide
  MOD_RES (1)..(33)..(35): Xaa is C or S
XAPTKLSPINVLYFDSSNNVIYGKIPNMVVKAXGX

SEQ ID NO: 21571 - protein, 36 aa, Artificial Sequence
  Non-cyclic GFR-binding peptide
  MOD_RES (4)..(5): Xaa is C or S
PKAXXVPTELSPINMLYFDENEKVVYGKIPDMVVEG

SEQ ID NO: 21572 - protein, 40 aa, Artificial Sequence
  Non-cyclic GFR-binding peptide
  MOD_RES (4)..(5)..(39): Xaa is C or S
  MOD_RES (19)..(20)..(21)..(22)..(23): Xaa is A or G
  MOD_RES (24)..(25)..(26)..(27): Xaa is A or G or absent
PASXXVPARLSPINILYFXXXXXXXXXYGKIPDMVVEAXG

SEQ ID NO: 21573 - protein, 35 aa, Artificial Sequence
  Non-cyclic GFR-binding peptide
  MOD_RES (3)..(4)..(35): Xaa is C or S
STXXAPVKTSPINMLYFDNGRVLLYGKIPMIVEEX

SEQ ID NO: 21574 - protein, 36 aa, Artificial Sequence
  Non-cyclic GFR-binding peptide
  MOD_RES (6)..(6): Xaa is C or S
VTKPTXAPTKLSPINVLYFDDSSNVIYGKIPNMVVR

SEQ ID NO: 21575 - protein, 39 aa, Artificial Sequence
  Non-cyclic GFR-binding peptide
  MOD_RES (6)..(7)..(39): Xaa is C or S
HVPKPXXAPTKLSPINVLYFDDSSNVIYGKIPNMVVRSX

SEQ ID NO: 21576 - protein, 40 aa, Artificial Sequence
  Non-cyclic GFR-binding peptide
  MOD_RES (6)..(7)..(38)..(40): Xaa is C or S
RVPSTXXAPVKTSPINMLYFDNGRVLLYGKIPMIVEEXGX

SEQ ID NO: 21577 - protein, 38 aa, Artificial Sequence
  Non-cyclic GFR-binding peptide
  MOD_RES (4)..(5)..(37): Xaa is C or S
PKPXXAPTKLSPINVLYFDDSSNVIYGKIPNMVVRSXG

SEQ ID NO: 21578 - protein, 36 aa, Artificial Sequence
  Non-cyclic GFR-binding peptide
  MOD_RES (3)..(4)..(36): Xaa is C or S
KPXXAPTQLSPINVLYFDDSSNVIYGKIPNMVVRAX

SEQ ID NO: 21579 - protein, 36 aa, Artificial Sequence
  Non-cyclic GFR-binding peptide
  MOD_RES (2)..(3): Xaa is C or S
  MOD_RES (17)..(18)..(19)..(20)..(21): Xaa is A or G
  MOD_RES (22)..(23)..(24)..(25): Xaa is A or G or absent
PXXAPTKLSPINVLYFXXXXXXXXXYGKIPNMVVRS

SEQ ID NO: 21580 - protein, 36 aa, Artificial Sequence
  Non-cyclic GFR-binding peptide
  MOD_RES (3)..(4)..(35): Xaa is C or S
STXXAPVKTSPINMLYFDNGRVLLYGKIPMIVEEXG

SEQ ID NO: 21581 - protein, 40 aa, Artificial Sequence
  Non-cyclic GFR-binding peptide
  MOD_RES (6)..(7): Xaa is C or S
  MOD_RES (21)..(22)..(23)..(24)..(25): Xaa is A or G
  MOD_RES (26)..(27)..(28)..(29): Xaa is A or G or absent
AVPKAXXAPTKLSPINVLYFXXXXXXXXXYGKIPNMVVKA

SEQ ID NO: 21582 - protein, 32 aa, Artificial Sequence
  Non-cyclic GFR-binding peptide
  MOD_RES (1)..(2): Xaa is C or S
XXVPTELSPINMLYFDENEKVVYGKIPDMVVE

SEQ ID NO: 21583 - protein, 35 aa, Artificial Sequence
  Non-cyclic GFR-binding peptide
  MOD_RES (1)..(35): Xaa is C or S
  MOD_RES (15)..(16)..(17)..(18)..(19): Xaa is A or G
  MOD_RES (20)..(21)..(22)..(23): Xaa is A or G or absent
XAPTQLSPINVLYFXXXXXXXXXYGKIPNMVVRAX

SEQ ID NO: 21584 - protein, 44 aa, Artificial Sequence
  Non-cyclic GFR-binding peptide
  MOD_RES (6)..(7)..(41)..(43): Xaa is C or S
  MOD_RES (21)..(22)..(23)..(24)..(25): Xaa is A or G
  MOD_RES (26)..(27)..(28)..(29): Xaa is A or G or absent
YVPKPXXAPTKLSPINVLYFXXXXXXXXXYGKIPNMVVRSXGXH

SEQ ID NO: 21585 - protein, 39 aa, Artificial Sequence
  Non-cyclic GFR-binding peptide
  MOD_RES (6)..(7): Xaa is C or S
  MOD_RES (21)..(22)..(23)..(24)..(25): Xaa is A or G
  MOD_RES (26)..(27)..(28)..(29): Xaa is A or G or absent
RVPSTXXAPVKTSPINMLYFXXXXXXXXXYGKIPMIVEE

SEQ ID NO: 21586 - protein, 34 aa, Artificial Sequence
  Non-cyclic GFR-binding peptide
  MOD_RES (34)..(34): Xaa is C or S
  MOD_RES (14)..(15)..(16)..(17)..(18): Xaa is A or G
  MOD_RES (19)..(20)..(21)..(22): Xaa is A or G or absent
VPTELSPINMLYFXXXXXXXXXYGKIPEMVVEGX

SEQ ID NO: 21587 - protein, 38 aa, Artificial Sequence
  Non-cyclic GFR-binding peptide
  MOD_RES (4)..(5): Xaa is C or S
  MOD_RES (19)..(20)..(21)..(22)..(23): Xaa is A or G
  MOD_RES (24)..(25)..(26)..(27): Xaa is A or G or absent
PPTXXVPTRLSPINILYFXXXXXXXXXYGKIPDMVVES

SEQ ID NO: 21588 - protein, 36 aa, Artificial Sequence
  Non-cyclic GFR-binding peptide
  MOD_RES (33)..(35): Xaa is C or S
  MOD_RES (14)..(15)..(16)..(17)..(18): Xaa is A or G
  MOD_RES (19)..(20)..(21)..(22): Xaa is A or G or absent
APVKTSPINMLYFXXXXXXXXXYGKIPMIVEEXGXL

SEQ ID NO: 21589 - protein, 33 aa, Artificial Sequence
  Non-cyclic GFR-binding peptide
  MOD_RES (1)..(2): Xaa is C or S
XXAPTKLSPINVLYFDDSSNVIYGKIPNMVVRS

SEQ ID NO: 21590 - protein, 35 aa, Artificial Sequence
  Non-cyclic GFR-binding peptide
  MOD_RES (1)..(33)..(35): Xaa is C or S
XVPARLSPINILYFDAANNVVYGKIPDMVVEAXGX

SEQ ID NO: 21591 - protein, 37 aa, Artificial Sequence
  Non-cyclic GFR-binding peptide
  MOD_RES (3)..(4)..(36): Xaa is C or S
KPXXAPTQLSPINVLYFDDSSNVIYGKIPNMVVRAXG

SEQ ID NO: 21592 - protein, 37 aa, Artificial Sequence
  Non-cyclic GFR-binding peptide
  MOD_RES (1)..(2)..(37): Xaa is C or S
  MOD_RES (16)..(17)..(18)..(19)..(20): Xaa is A or G
  MOD_RES (21)..(22)..(23)..(24): Xaa is A or G or absent
XXVPTKLSPINVLYFXXXXXXXXXYGKIPEGMSVAEX

SEQ ID NO: 21593 - protein, 33 aa, Artificial Sequence
  Non-cyclic GFR-binding peptide
  MOD_RES (1)..(1): Xaa is C or S
  MOD_RES (15)..(16)..(17)..(18)..(19): Xaa is A or G
  MOD_RES (20)..(21)..(22)..(23): Xaa is A or G or absent
XVPTRLSPINILYFXXXXXXXXXYGKIPDMVVE

SEQ ID NO: 21594 - protein, 39 aa, Artificial Sequence
  Non-cyclic GFR-binding peptide
  MOD_RES (5)..(6)..(37)..(39): Xaa is C or S
VPSTXXAPVKTSPINMLYFDNGRVLLYGKIPMIVEEXGX

SEQ ID NO: 21595 - protein, 34 aa, Artificial Sequence
  Non-cyclic GFR-binding peptide
  MOD_RES (3)..(4): Xaa is C or S
KAXXAPTKLSPINVLYFDSSNNVIYGKIPNMVVK

SEQ ID NO: 21596 - protein, 37 aa, Artificial Sequence
  Non-cyclic GFR-binding peptide
  MOD_RES (1)..(35)..(37): Xaa is C or S
  MOD_RES (15)..(16)..(17)..(18)..(19): Xaa is A or G
  MOD_RES (20)..(21)..(22)..(23): Xaa is A or G or absent
XVPARLSPINILYFXXXXXXXXXYGKIPDMVVEAXGX

SEQ ID NO: 21597 - protein, 42 aa, Artificial Sequence
  Non-cyclic GFR-binding peptide
  MOD_RES (6)..(7)..(39)..(41): Xaa is C or S
YVPKPXXAPTKLSPINVLYFDDSSNVIYGKIPNMVVRSXGXH

SEQ ID NO: 21598 - protein, 35 aa, Artificial Sequence
  Non-cyclic GFR-binding peptide
  MOD_RES (1)..(1): Xaa is C or S
  MOD_RES (15)..(16)..(17)..(18)..(19): Xaa is A or G
  MOD_RES (20)..(21)..(22)..(23): Xaa is A or G or absent
XVPTKLSPINVLYFXXXXXXXXXYGKIPEGMSVAE

SEQ ID NO: 21599 - protein, 36 aa, Artificial Sequence
  Non-cyclic GFR-binding peptide
  MOD_RES (2)..(3)..(35): Xaa is C or S
TXXVPTRLSPINILYFDSANNVVYGKIPDMVVESXG

SEQ ID NO: 21600 - protein, 38 aa, Artificial Sequence
  Non-cyclic GFR-binding peptide
  MOD_RES (6)..(7): Xaa is C or S
SIPKAXXVPTELSPINMLYFDEYDKVVYGKIPEMVVEG

SEQ ID NO: 21601 - protein, 38 aa, Artificial Sequence
  Non-cyclic GFR-binding peptide
  MOD_RES (1)..(2)..(36)..(38): Xaa is C or S
  MOD_RES (16)..(17)..(18)..(19)..(20): Xaa is A or G
  MOD_RES (21)..(22)..(23)..(24): Xaa is A or G or absent
XXVPTELSPINMLYFXXXXXXXXXYGKIPEMVVEGXGX

SEQ ID NO: 21602 - protein, 36 aa, Artificial Sequence
  Non-cyclic GFR-binding peptide
  MOD_RES (1)..(2)..(36): Xaa is C or S
  MOD_RES (16)..(17)..(18)..(19)..(20): Xaa is A or G
  MOD_RES (21)..(22)..(23)..(24): Xaa is A or G or absent
XXAPTQLSPINVLYFXXXXXXXXXYGKIPNMVVRAX

SEQ ID NO: 21603 - protein, 36 aa, Artificial Sequence
  Non-cyclic GFR-binding peptide
  MOD_RES (5)..(6): Xaa is C or S
VPKAXXAPTKLSPINVLYFDSSNNVIYGKIPNMVVK

SEQ ID NO: 21604 - protein, 43 aa, Artificial Sequence
  Non-cyclic GFR-binding peptide
  MOD_RES (6)..(7)..(41)..(43): Xaa is C or S
  MOD_RES (21)..(22)..(23)..(24)..(25): Xaa is A or G
  MOD_RES (26)..(27)..(28)..(29): Xaa is A or G or absent
TVPKPXXAPTQLSPINVLYFXXXXXXXXXYGKIPNMVVRAXGX

SEQ ID NO: 21605 - protein, 37 aa, Artificial Sequence
  Non-cyclic GFR-binding peptide
  MOD_RES (4)..(5): Xaa is C or S
  MOD_RES (19)..(20)..(21)..(22)..(23): Xaa is A or G
  MOD_RES (24)..(25)..(26)..(27): Xaa is A or G or absent
PKAXXAPTKLSPINVLYFXXXXXXXXXYGKIPNMVVK

SEQ ID NO: 21606 - protein, 35 aa, Artificial Sequence
  Non-cyclic GFR-binding peptide
  MOD_RES (1)..(2): Xaa is C or S
  MOD_RES (16)..(17)..(18)..(19)..(20): Xaa is A or G
  MOD_RES (21)..(22)..(23)..(24): Xaa is A or G or absent
XXAPTKLSPINVLYFXXXXXXXXXYGKIPNMVVKA

SEQ ID NO: 21607 - protein, 31 aa, Artificial Sequence
  Non-cyclic GFR-binding peptide
APTKLSPINVLYFDSSNNVIYGKIPNMVVKA

SEQ ID NO: 21608 - protein, 41 aa, Artificial Sequence
  Non-cyclic GFR-binding peptide
  MOD_RES (3)..(4)..(38)..(40): Xaa is C or S
  MOD_RES (18)..(19)..(20)..(21)..(22): Xaa is A or G
  MOD_RES (23)..(24)..(25)..(26): Xaa is A or G or absent
KAXXVPTELSPINMLYFXXXXXXXXXYGKIPEMVVEGXGXR

SEQ ID NO: 21609 - protein, 40 aa, Artificial Sequence
  Non-cyclic GFR-binding peptide
  MOD_RES (5)..(6)..(38)..(40): Xaa is C or S
VPKPXXAPTQLSPINVLYFDDSSNVIYGKIPNMVVRAXGX

SEQ ID NO: 21610 - protein, 37 aa, Artificial Sequence
  Non-cyclic GFR-binding peptide
  MOD_RES (4)..(5)..(37): Xaa is C or S
PKPXXAPTKLSPINVLYFDDSSNVIYGKIPNMVVRSX

SEQ ID NO: 21611 - protein, 37 aa, Artificial Sequence
  Non-cyclic GFR-binding peptide
  MOD_RES (6)..(7): Xaa is C or S
AAPASXXVPARLSPINILYFDAANNVVYGKIPDMVVE

SEQ ID NO: 21612 - protein, 34 aa, Artificial Sequence
  Non-cyclic GFR-binding peptide
  MOD_RES (2)..(3)..(34): Xaa is C or S
TXXAPVKTSPINMLYFDNGRVLLYGKIPMIVEEX

SEQ ID NO: 21613 - protein, 36 aa, Artificial Sequence
  Non-cyclic GFR-binding peptide
  MOD_RES (2)..(3): Xaa is C or S
  MOD_RES (17)..(18)..(19)..(20)..(21): Xaa is A or G
  MOD_RES (22)..(23)..(24)..(25): Xaa is A or G or absent
TXXVPTRLSPINILYFXXXXXXXXXYGKIPDMVVES

SEQ ID NO: 21614 - protein, 31 aa, Artificial Sequence
  Non-cyclic GFR-binding peptide
  MOD_RES (1)..(1): Xaa is C or S
XAPTKLSPINVLYFDDSSNVIYGKIPNMVVR

SEQ ID NO: 21615 - protein, 41 aa, Artificial Sequence
  Non-cyclic GFR-binding peptide
  MOD_RES (6)..(7)..(40): Xaa is C or S
KVGKAXXVPTKLSPINVLYFDDMGVPTYGKIPEGMSVAEXG

SEQ ID NO: 21616 - protein, 37 aa, Artificial Sequence
  Non-cyclic GFR-binding peptide
  MOD_RES (2)..(3): Xaa is C or S
  MOD_RES (17)..(18)..(19)..(20)..(21): Xaa is A or G
  MOD_RES (22)..(23)..(24)..(25): Xaa is A or G or absent
AXXVPTKLSPINVLYFXXXXXXXXXYGKIPEGMSVAE

SEQ ID NO: 21617 - protein, 37 aa, Artificial Sequence
  Non-cyclic GFR-binding peptide
  MOD_RES (1)..(2)..(36): Xaa is C or S
  MOD_RES (16)..(17)..(18)..(19)..(20): Xaa is A or G
  MOD_RES (21)..(22)..(23)..(24): Xaa is A or G or absent
XXAPTKLSPINVLYFXXXXXXXXXYGKIPNMVVRSXG

SEQ ID NO: 21618 - protein, 32 aa, Artificial Sequence
  Non-cyclic GFR-binding peptide
  MOD_RES (1)..(2): Xaa is C or S
XXVPTRLSPINILYFDSANNVVYGKIPDMVVE

SEQ ID NO: 21619 - protein, 34 aa, Artificial Sequence
  Non-cyclic GFR-binding peptide
  MOD_RES (1)..(2): Xaa is C or S
  MOD_RES (16)..(17)..(18)..(19)..(20): Xaa is A or G
  MOD_RES (21)..(22)..(23)..(24): Xaa is A or G or absent
XXVPARLSPINILYFXXXXXXXXXYGKIPDMVVE

SEQ ID NO: 21620 - protein, 38 aa, Artificial Sequence
  Non-cyclic GFR-binding peptide
  MOD_RES (2)..(3)..(36)..(38): Xaa is C or S
AXXVPTKLSPINVLYFDDMGVPTYGKIPEGMSVAEXGX

SEQ ID NO: 21621 - protein, 36 aa, Artificial Sequence
  Non-cyclic GFR-binding peptide
  MOD_RES (2)..(3)..(35): Xaa is C or S
PXXAPTKLSPINVLYFDDSSNVIYGKIPNMVVRSXG

SEQ ID NO: 21622 - protein, 34 aa, Artificial Sequence
  Non-cyclic GFR-binding peptide
  MOD_RES (3)..(4): Xaa is C or S
KAXXVPTKLSPINILYFDKGVVTYYGKIPGMAVS

SEQ ID NO: 21623 - protein, 43 aa, Artificial Sequence
  Non-cyclic GFR-binding peptide
  MOD_RES (5)..(6)..(40)..(42): Xaa is C or S
  MOD_RES (20)..(21)..(22)..(23)..(24): Xaa is A or G
  MOD_RES (25)..(26)..(27)..(28): Xaa is A or G or absent
TPPTXXVPTRLSPINILYFXXXXXXXXXYGKIPDMVVESXGXR

SEQ ID NO: 21624 - protein, 32 aa, Artificial Sequence
  Non-cyclic GFR-binding peptide
  MOD_RES (1)..(2): Xaa is C or S
XXVPARLSPINILYFDAANNVVYGKIPDMVVE

SEQ ID NO: 21625 - protein, 36 aa, Artificial Sequence
  Non-cyclic GFR-binding peptide
  MOD_RES (1)..(2)..(34)..(36): Xaa is C or S
XXVPTRLSPINILYFDSANNVVYGKIPDMVVESXGX

SEQ ID NO: 21626 - protein, 37 aa, Artificial Sequence
  Non-cyclic GFR-binding peptide
  MOD_RES (4)..(4): Xaa is C or S
  MOD_RES (18)..(19)..(20)..(21)..(22): Xaa is A or G
  MOD_RES (23)..(24)..(25)..(26): Xaa is A or G or absent
KPTXAPTKLSPINVLYFXXXXXXXXXYGKIPNMVVRS

SEQ ID NO: 21627 - protein, 38 aa, Artificial Sequence
  Non-cyclic GFR-binding peptide
  MOD_RES (5)..(6)..(38): Xaa is C or S
ASKAXXVPTKLSPINILYFDKGVVTYYGKIPGMAVSEX

SEQ ID NO: 21628 - protein, 38 aa, Artificial Sequence
  Non-cyclic GFR-binding peptide
  MOD_RES (3)..(4)..(38): Xaa is C or S
  MOD_RES (18)..(19)..(20)..(21)..(22): Xaa is A or G
  MOD_RES (23)..(24)..(25)..(26): Xaa is A or G or absent
KAXXVPTELSPINMLYFXXXXXXXXXYGKIPDMVVEGX

SEQ ID NO: 21629 - protein, 37 aa, Artificial Sequence
  Non-cyclic GFR-binding peptide
  MOD_RES (2)..(3)..(35)..(37): Xaa is C or S
PXXAPTQLSPINVLYFDDSSNVIYGKIPNMVVRAXGX

SEQ ID NO: 21630 - protein, 38 aa, Artificial Sequence
  Non-cyclic GFR-binding peptide
  MOD_RES (5)..(6): Xaa is C or S
  MOD_RES (20)..(21)..(22)..(23)..(24): Xaa is A or G
  MOD_RES (25)..(26)..(27)..(28): Xaa is A or G or absent
VPKPXXAPTQLSPINVLYFXXXXXXXXXYGKIPNMVVR

SEQ ID NO: 21631 - protein, 35 aa, Artificial Sequence
  Non-cyclic GFR-binding peptide
  MOD_RES (1)..(2): Xaa is C or S
  MOD_RES (16)..(17)..(18)..(19)..(20): Xaa is A or G
  MOD_RES (21)..(22)..(23)..(24): Xaa is A or G or absent
XXVPTELSPINMLYFXXXXXXXXXYGKIPDMVVEG

SEQ ID NO: 21632 - protein, 33 aa, Artificial Sequence
  Non-cyclic GFR-binding peptide
  MOD_RES (14)..(15)..(16)..(17)..(18): Xaa is A or G
  MOD_RES (19)..(20)..(21)..(22): Xaa is A or G or absent
VPARLSPINILYFXXXXXXXXXYGKIPDMVVEA

SEQ ID NO: 21633 - protein, 34 aa, Artificial Sequence
  Non-cyclic GFR-binding peptide
  MOD_RES (3)..(4): Xaa is C or S
PTXXVPTRLSPINILYFDSANNVVYGKIPDMVVE

SEQ ID NO: 21634 - protein, 36 aa, Artificial Sequence
  Non-cyclic GFR-binding peptide
  MOD_RES (3)..(4): Xaa is C or S
  MOD_RES (18)..(19)..(20)..(21)..(22): Xaa is A or G
  MOD_RES (23)..(24)..(25)..(26): Xaa is A or G or absent
ASXXVPARLSPINILYFXXXXXXXXXYGKIPDMVVE

SEQ ID NO: 21635 - protein, 40 aa, Artificial Sequence
  Non-cyclic GFR-binding peptide
  MOD_RES (5)..(37)..(39): Xaa is C or S
TKPTXAPTKLSPINVLYFDDSSNVIYGKIPNMVVRSXGXH

SEQ ID NO: 21636 - protein, 39 aa, Artificial Sequence
  Non-cyclic GFR-binding peptide
  MOD_RES (4)..(5)..(37)..(39): Xaa is C or S
PKAXXAPTKLSPINVLYFDSSNNVIYGKIPNMVVKAXGX

SEQ ID NO: 21637 - protein, 42 aa, Artificial Sequence
  Non-cyclic GFR-binding peptide
  MOD_RES (4)..(5)..(40)..(42): Xaa is C or S
  MOD_RES (19)..(20)..(21)..(22)..(23): Xaa is A or G
  MOD_RES (24)..(25)..(26)..(27): Xaa is A or G or absent
GKAXXVPTKLSPINVLYFXXXXXXXXXYGKIPEGMSVAEXGX

SEQ ID NO: 21638 - protein, 39 aa, Artificial Sequence
  Non-cyclic GFR-binding peptide
  MOD_RES (5)..(6): Xaa is C or S
  MOD_RES (20)..(21)..(22)..(23)..(24): Xaa is A or G
  MOD_RES (25)..(26)..(27)..(28): Xaa is A or G or absent
IPKAXXVPTELSPINMLYFXXXXXXXXXYGKIPEMVVEG

SEQ ID NO: 21639 - protein, 34 aa, Artificial Sequence
  Non-cyclic GFR-binding peptide
  MOD_RES (1)..(2): Xaa is C or S
  MOD_RES (16)..(17)..(18)..(19)..(20): Xaa is A or G
  MOD_RES (21)..(22)..(23)..(24): Xaa is A or G or absent
XXVPTRLSPINILYFXXXXXXXXXYGKIPDMVVE

SEQ ID NO: 21640 - protein, 37 aa, Artificial Sequence
  Non-cyclic GFR-binding peptide
  MOD_RES (3)..(4): Xaa is C or S
  MOD_RES (18)..(19)..(20)..(21)..(22): Xaa is A or G
  MOD_RES (23)..(24)..(25)..(26): Xaa is A or G or absent
KAXXVPTELSPINMLYFXXXXXXXXXYGKIPEMVVEG

SEQ ID NO: 21641 - protein, 34 aa, Artificial Sequence
  Non-cyclic GFR-binding peptide
  MOD_RES (2)..(3): Xaa is C or S
AXXVPTELSPINMLYFDEYDKVVYGKIPEMVVEG

SEQ ID NO: 21642 - protein, 38 aa, Artificial Sequence
  Non-cyclic GFR-binding peptide
  MOD_RES (2)..(3)..(35)..(37): Xaa is C or S
TXXVPTRLSPINILYFDSANNVVYGKIPDMVVESXGXR

SEQ ID NO: 21643 - protein, 33 aa, Artificial Sequence
  Non-cyclic GFR-binding peptide
  MOD_RES (2)..(3): Xaa is C or S
PXXAPTKLSPINVLYFDDSSNVIYGKIPNMVVR

SEQ ID NO: 21644 - protein, 38 aa, Artificial Sequence
  Non-cyclic GFR-binding peptide
  MOD_RES (1)..(35)..(37): Xaa is C or S
  MOD_RES (15)..(16)..(17)..(18)..(19): Xaa is A or G
  MOD_RES (20)..(21)..(22)..(23): Xaa is A or G or absent
XVPTKLSPINILYFXXXXXXXXXYGKIPGMAVSEXGXR

SEQ ID NO: 21645 - protein, 33 aa, Artificial Sequence
  Non-cyclic GFR-binding peptide
  MOD_RES (32)..(32): Xaa is C or S
APTKLSPINVLYFDSSNNVIYGKIPNMVVKAXG

SEQ ID NO: 21646 - protein, 37 aa, Artificial Sequence
  Non-cyclic GFR-binding peptide
  MOD_RES (2)..(3)..(37): Xaa is C or S
  MOD_RES (17)..(18)..(19)..(20)..(21): Xaa is A or G
  MOD_RES (22)..(23)..(24)..(25): Xaa is A or G or absent
PXXAPTKLSPINVLYFXXXXXXXXXYGKIPNMVVRSX

SEQ ID NO: 21647 - protein, 39 aa, Artificial Sequence
  Non-cyclic GFR-binding peptide
  MOD_RES (1)..(2)..(36)..(38): Xaa is C or S
  MOD_RES (16)..(17)..(18)..(19)..(20): Xaa is A or G
  MOD_RES (21)..(22)..(23)..(24): Xaa is A or G or absent
XXVPTELSPINMLYFXXXXXXXXXYGKIPEMVVEGXGXR

SEQ ID NO: 21648 - protein, 41 aa, Artificial Sequence
  Non-cyclic GFR-binding peptide
  MOD_RES (3)..(4)..(38)..(40): Xaa is C or S
  MOD_RES (18)..(19)..(20)..(21)..(22): Xaa is A or G
  MOD_RES (23)..(24)..(25)..(26): Xaa is A or G or absent
ASXXVPARLSPINILYFXXXXXXXXXYGKIPDMVVEAXGXR

SEQ ID NO: 21649 - protein, 40 aa, Artificial Sequence
  Non-cyclic GFR-binding peptide
  MOD_RES (2)..(3)..(38)..(40): Xaa is C or S
  MOD_RES (17)..(18)..(19)..(20)..(21): Xaa is A or G
  MOD_RES (22)..(23)..(24)..(25): Xaa is A or G or absent
AXXVPTKLSPINVLYFXXXXXXXXXYGKIPEGMSVAEXGX

SEQ ID NO: 21650 - protein, 39 aa, Artificial Sequence
  Non-cyclic GFR-binding peptide
  MOD_RES (4)..(5)..(37)..(39): Xaa is C or S
PKAXXVPTELSPINMLYFDENEKVVYGKIPDMVVEGXGX

SEQ ID NO: 21651 - protein, 33 aa, Artificial Sequence
  Non-cyclic GFR-binding peptide
  MOD_RES (32)..(32): Xaa is C or S
VPARLSPINILYFDAANNVVYGKIPDMVVEAXG

SEQ ID NO: 21652 - protein, 35 aa, Artificial Sequence
  Non-cyclic GFR-binding peptide
  MOD_RES (34)..(34): Xaa is C or S
  MOD_RES (14)..(15)..(16)..(17)..(18): Xaa is A or G
  MOD_RES (19)..(20)..(21)..(22): Xaa is A or G or absent
VPTKLSPINILYFXXXXXXXXXYGKIPGMAVSEXG

SEQ ID NO: 21653 - protein, 33 aa, Artificial Sequence
  Non-cyclic GFR-binding peptide
  MOD_RES (32)..(32): Xaa is C or S
APTKLSPINVLYFDDSSNVIYGKIPNMVVRSXG

SEQ ID NO: 21654 - protein, 39 aa, Artificial Sequence
  Non-cyclic GFR-binding peptide
  MOD_RES (2)..(3)..(37)..(39): Xaa is C or S
  MOD_RES (17)..(18)..(19)..(20)..(21): Xaa is A or G
  MOD_RES (22)..(23)..(24)..(25): Xaa is A or G or absent
TXXVPTRLSPINILYFXXXXXXXXXYGKIPDMVVESXGX

SEQ ID NO: 21655 - protein, 37 aa, Artificial Sequence
  Non-cyclic GFR-binding peptide
  MOD_RES (2)..(3)..(37): Xaa is C or S
  MOD_RES (17)..(18)..(19)..(20)..(21): Xaa is A or G
  MOD_RES (22)..(23)..(24)..(25): Xaa is A or G or absent
AXXVPTELSPINMLYFXXXXXXXXXYGKIPDMVVEGX

SEQ ID NO: 21656 - protein, 33 aa, Artificial Sequence
  Non-cyclic GFR-binding peptide
  MOD_RES (1)..(33): Xaa is C or S
XVPTKLSPINILYFDKGVVTYYGKIPGMAVSEX

SEQ ID NO: 21657 - protein, 36 aa, Artificial Sequence
  Non-cyclic GFR-binding peptide
  MOD_RES (1)..(2)..(36): Xaa is C or S
  MOD_RES (16)..(17)..(18)..(19)..(20): Xaa is A or G
  MOD_RES (21)..(22)..(23)..(24): Xaa is A or G or absent
XXVPTELSPINMLYFXXXXXXXXXYGKIPDMVVEGX

SEQ ID NO: 21658 - protein, 35 aa, Artificial Sequence
  Non-cyclic GFR-binding peptide
  MOD_RES (2)..(3): Xaa is C or S
AXXVPTKLSPINVLYFDDMGVPTYGKIPEGMSVAE

SEQ ID NO: 21659 - protein, 42 aa, Artificial Sequence
  Non-cyclic GFR-binding peptide
  MOD_RES (6)..(7)..(42): Xaa is C or S
  MOD_RES (21)..(22)..(23)..(24)..(25): Xaa is A or G
  MOD_RES (26)..(27)..(28)..(29): Xaa is A or G or absent
KVGKAXXVPTKLSPINVLYFXXXXXXXXXYGKIPEGMSVAEX

SEQ ID NO: 21660 - protein, 39 aa, Artificial Sequence
  Non-cyclic GFR-binding peptide
  MOD_RES (4)..(5)..(37)..(39): Xaa is C or S
PPTXXVPTRLSPINILYFDSANNVVYGKIPDMVVESXGX

SEQ ID NO: 21661 - protein, 38 aa, Artificial Sequence
  Non-cyclic GFR-binding peptide
  MOD_RES (5)..(6): Xaa is C or S
  MOD_RES (20)..(21)..(22)..(23)..(24): Xaa is A or G
  MOD_RES (25)..(26)..(27)..(28): Xaa is A or G or absent
APASXXVPARLSPINILYFXXXXXXXXXYGKIPDMVVE

SEQ ID NO: 21662 - protein, 37 aa, Artificial Sequence
  Non-cyclic GFR-binding peptide
  MOD_RES (1)..(2)..(36): Xaa is C or S
  MOD_RES (16)..(17)..(18)..(19)..(20): Xaa is A or G
  MOD_RES (21)..(22)..(23)..(24): Xaa is A or G or absent
XXVPTELSPINMLYFXXXXXXXXXYGKIPDMVVEGXG

SEQ ID NO: 21663 - protein, 38 aa, Artificial Sequence
  Non-cyclic GFR-binding peptide
  MOD_RES (4)..(5): Xaa is C or S
  MOD_RES (19)..(20)..(21)..(22)..(23): Xaa is A or G
  MOD_RES (24)..(25)..(26)..(27): Xaa is A or G or absent
PKPXXAPTKLSPINVLYFXXXXXXXXXYGKIPNMVVRS

SEQ ID NO: 21664 - protein, 33 aa, Artificial Sequence
  Non-cyclic GFR-binding peptide
  MOD_RES (32)..(32): Xaa is C or S
VPTRLSPINILYFDSANNVVYGKIPDMVVESXG

SEQ ID NO: 21665 - protein, 35 aa, Artificial Sequence
  Non-cyclic GFR-binding peptide
  MOD_RES (3)..(4): Xaa is C or S
ASXXVPARLSPINILYFDAANNVVYGKIPDMVVEA

SEQ ID NO: 21666 - protein, 35 aa, Artificial Sequence
  Non-cyclic GFR-binding peptide
  MOD_RES (1)..(2)..(33)..(35): Xaa is C or S
XXAPVKTSPINMLYFDNGRVLLYGKIPMIVEEXGX

SEQ ID NO: 21667 - protein, 42 aa, Artificial Sequence
  Non-cyclic GFR-binding peptide
  MOD_RES (6)..(7)..(39)..(41): Xaa is C or S
KASKAXXVPTKLSPINILYFDKGVVTYYGKIPGMAVSEXGXR

SEQ ID NO: 21668 - protein, 35 aa, Artificial Sequence
  Non-cyclic GFR-binding peptide
  MOD_RES (2)..(3): Xaa is C or S
  MOD_RES (17)..(18)..(19)..(20)..(21): Xaa is A or G
  MOD_RES (22)..(23)..(24)..(25): Xaa is A or G or absent
TXXAPVKTSPINMLYFXXXXXXXXXYGKIPMIVEE

SEQ ID NO: 21669 - protein, 39 aa, Artificial Sequence
  Non-cyclic GFR-binding peptide
  MOD_RES (2)..(3)..(37)..(39): Xaa is C or S
  MOD_RES (17)..(18)..(19)..(20)..(21): Xaa is A or G
  MOD_RES (22)..(23)..(24)..(25): Xaa is A or G or absent
AXXAPTKLSPINVLYFXXXXXXXXXYGKIPNMVVKAXGX

SEQ ID NO: 21670 - protein, 33 aa, Artificial Sequence
  Non-cyclic GFR-binding peptide
  MOD_RES (1)..(2): Xaa is C or S
XXVPTELSPINMLYFDENEKVVYGKIPDMVVEG

SEQ ID NO: 21671 - protein, 38 aa, Artificial Sequence
  Non-cyclic GFR-binding peptide
  MOD_RES (4)..(5): Xaa is C or S
  MOD_RES (19)..(20)..(21)..(22)..(23): Xaa is A or G
  MOD_RES (24)..(25)..(26)..(27): Xaa is A or G or absent
PKAXXVPTELSPINMLYFXXXXXXXXXYGKIPDMVVEG

SEQ ID NO: 21672 - protein, 35 aa, Artificial Sequence
  Non-cyclic GFR-binding peptide
  MOD_RES (1)..(33)..(35): Xaa is C or S
XVPTELSPINMLYFDENEKVVYGKIPDMVVEGXGX

SEQ ID NO: 21673 - protein, 40 aa, Artificial Sequence
  Non-cyclic GFR-binding peptide
  MOD_RES (4)..(5)..(37)..(39): Xaa is C or S
PKPXXAPTQLSPINVLYFDDSSNVIYGKIPNMVVRAXGXH

SEQ ID NO: 21674 - protein, 41 aa, Artificial Sequence
  Non-cyclic GFR-binding peptide
  MOD_RES (6)..(7)..(39)..(41): Xaa is C or S
KASKAXXVPTKLSPINILYFDKGVVTYYGKIPGMAVSEXGX

SEQ ID NO: 21675 - protein, 32 aa, Artificial Sequence
  Non-cyclic GFR-binding peptide
  MOD_RES (1)..(2): Xaa is C or S
XXAPTKLSPINVLYFDDSSNVIYGKIPNMVVR

SEQ ID NO: 21676 - protein, 43 aa, Artificial Sequence
  Non-cyclic GFR-binding peptide
  MOD_RES (6)..(7)..(41)..(43): Xaa is C or S
  MOD_RES (21)..(22)..(23)..(24)..(25): Xaa is A or G
  MOD_RES (26)..(27)..(28)..(29): Xaa is A or G or absent
STPPTXXVPTRLSPINILYFXXXXXXXXXYGKIPDMVVESXGX

SEQ ID NO: 21677 - protein, 38 aa, Artificial Sequence
  Non-cyclic GFR-binding peptide
  MOD_RES (3)..(4)..(36)..(38): Xaa is C or S
KAXXVPTKLSPINILYFDKGVVTYYGKIPGMAVSEXGX

SEQ ID NO: 21678 - protein, 38 aa, Artificial Sequence
  Non-cyclic GFR-binding peptide
  MOD_RES (6)..(7): Xaa is C or S
AAPASXXVPARLSPINILYFDAANNVVYGKIPDMVVEA

SEQ ID NO: 21679 - protein, 44 aa, Artificial Sequence
  Non-cyclic GFR-binding peptide
  MOD_RES (6)..(7)..(41)..(43): Xaa is C or S
  MOD_RES (21)..(22)..(23)..(24)..(25): Xaa is A or G
  MOD_RES (26)..(27)..(28)..(29): Xaa is A or G or absent
STPPTXXVPTRLSPINILYFXXXXXXXXXYGKIPDMVVESXGXR

SEQ ID NO: 21680 - protein, 41 aa, Artificial Sequence
  Non-cyclic GFR-binding peptide
  MOD_RES (5)..(6)..(38)..(40): Xaa is C or S
TPPTXXVPTRLSPINILYFDSANNVVYGKIPDMVVESXGXR

SEQ ID NO: 21681 - protein, 36 aa, Artificial Sequence
  Non-cyclic GFR-binding peptide
  MOD_RES (33)..(35): Xaa is C or S
VPTKLSPINVLYFDDMGVPTYGKIPEGMSVAEXGXR

SEQ ID NO: 21682 - protein, 41 aa, Artificial Sequence
  Non-cyclic GFR-binding peptide
  MOD_RES (6)..(7)..(39)..(41): Xaa is C or S
TVPKPXXAPTQLSPINVLYFDDSSNVIYGKIPNMVVRAXGX

SEQ ID NO: 21683 - protein, 33 aa, Artificial Sequence
  Non-cyclic GFR-binding peptide
  MOD_RES (1)..(1): Xaa is C or S
  MOD_RES (15)..(16)..(17)..(18)..(19): Xaa is A or G
  MOD_RES (20)..(21)..(22)..(23): Xaa is A or G or absent
XAPTQLSPINVLYFXXXXXXXXXYGKIPNMVVR

SEQ ID NO: 21684 - protein, 35 aa, Artificial Sequence
  Non-cyclic GFR-binding peptide
  MOD_RES (2)..(3)..(34): Xaa is C or S
TXXAPVKTSPINMLYFDNGRVLLYGKIPMIVEEXG

SEQ ID NO: 21685 - protein, 34 aa, Artificial Sequence
  Non-cyclic GFR-binding peptide
  MOD_RES (1)..(2)..(34): Xaa is C or S
XXVPTRLSPINILYFDSANNVVYGKIPDMVVESX

SEQ ID NO: 21686 - protein, 35 aa, Artificial Sequence
  Non-cyclic GFR-binding peptide
  MOD_RES (3)..(4): Xaa is C or S
KAXXVPTKLSPINILYFDKGVVTYYGKIPGMAVSE

SEQ ID NO: 21687 - protein, 43 aa, Artificial Sequence
  Non-cyclic GFR-binding peptide
  MOD_RES (6)..(7)..(42): Xaa is C or S
  MOD_RES (21)..(22)..(23)..(24)..(25): Xaa is A or G
  MOD_RES (26)..(27)..(28)..(29): Xaa is A or G or absent
KVGKAXXVPTKLSPINVLYFXXXXXXXXXYGKIPEGMSVAEXG

SEQ ID NO: 21688 - protein, 43 aa, Artificial Sequence
  Non-cyclic GFR-binding peptide
  MOD_RES (5)..(6)..(40)..(42): Xaa is C or S
  MOD_RES (20)..(21)..(22)..(23)..(24): Xaa is A or G
  MOD_RES (25)..(26)..(27)..(28): Xaa is A or G or absent
VPKPXXAPTQLSPINVLYFXXXXXXXXXYGKIPNMVVRAXGXH

SEQ ID NO: 21689 - protein, 40 aa, Artificial Sequence
  Non-cyclic GFR-binding peptide
  MOD_RES (5)..(6)..(38)..(40): Xaa is C or S
TPPTXXVPTRLSPINILYFDSANNVVYGKIPDMVVESXGX

SEQ ID NO: 21690 - protein, 33 aa, Artificial Sequence
  Non-cyclic GFR-binding peptide
  MOD_RES (1)..(1): Xaa is C or S
XVPTKLSPINVLYFDDMGVPTYGKIPEGMSVAE

SEQ ID NO: 21691 - protein, 38 aa, Artificial Sequence
  Non-cyclic GFR-binding peptide
  MOD_RES (6)..(6): Xaa is C or S
  MOD_RES (20)..(21)..(22)..(23)..(24): Xaa is A or G
  MOD_RES (25)..(26)..(27)..(28): Xaa is A or G or absent
VTKPTXAPTKLSPINVLYFXXXXXXXXXYGKIPNMVVR

SEQ ID NO: 21692 - protein, 44 aa, Artificial Sequence
  Non-cyclic GFR-binding peptide
  MOD_RES (6)..(7)..(42)..(44): Xaa is C or S
  MOD_RES (21)..(22)..(23)..(24)..(25): Xaa is A or G
  MOD_RES (26)..(27)..(28)..(29): Xaa is A or G or absent
KVGKAXXVPTKLSPINVLYFXXXXXXXXXYGKIPEGMSVAEXGX

SEQ ID NO: 21693 - protein, 38 aa, Artificial Sequence
  Non-cyclic GFR-binding peptide
  MOD_RES (4)..(5)..(37): Xaa is C or S
SKAXXVPTKLSPINILYFDKGVVTYYGKIPGMAVSEXG

SEQ ID NO: 21694 - protein, 39 aa, Artificial Sequence
  Non-cyclic GFR-binding peptide
  MOD_RES (4)..(5): Xaa is C or S
  MOD_RES (19)..(20)..(21)..(22)..(23): Xaa is A or G
  MOD_RES (24)..(25)..(26)..(27): Xaa is A or G or absent
GKAXXVPTKLSPINVLYFXXXXXXXXXYGKIPEGMSVAE

SEQ ID NO: 21695 - protein, 41 aa, Artificial Sequence
  Non-cyclic GFR-binding peptide
  MOD_RES (6)..(7)..(41): Xaa is C or S
  MOD_RES (21)..(22)..(23)..(24)..(25): Xaa is A or G
  MOD_RES (26)..(27)..(28)..(29): Xaa is A or G or absent
YVPKPXXAPTKLSPINVLYFXXXXXXXXXYGKIPNMVVRSX

SEQ ID NO: 21696 - protein, 41 aa, Artificial Sequence
  Non-cyclic GFR-binding peptide
  MOD_RES (6)..(7)..(41): Xaa is C or S
  MOD_RES (21)..(22)..(23)..(24)..(25): Xaa is A or G
  MOD_RES (26)..(27)..(28)..(29): Xaa is A or G or absent
AAPASXXVPARLSPINILYFXXXXXXXXXYGKIPDMVVEAX

SEQ ID NO: 21697 - protein, 33 aa, Artificial Sequence
  Non-cyclic GFR-binding peptide
  MOD_RES (1)..(33): Xaa is C or S
XAPTQLSPINVLYFDDSSNVIYGKIPNMVVRAX

SEQ ID NO: 21698 - protein, 34 aa, Artificial Sequence
  Non-cyclic GFR-binding peptide
  MOD_RES (34)..(34): Xaa is C or S
  MOD_RES (14)..(15)..(16)..(17)..(18): Xaa is A or G
  MOD_RES (19)..(20)..(21)..(22): Xaa is A or G or absent
APTKLSPINVLYFXXXXXXXXXYGKIPNMVVKAX

SEQ ID NO: 21699 - protein, 33 aa, Artificial Sequence
  Non-cyclic GFR-binding peptide
  MOD_RES (33)..(33): Xaa is C or S
  MOD_RES (14)..(15)..(16)..(17)..(18): Xaa is A or G
  MOD_RES (19)..(20)..(21)..(22): Xaa is A or G or absent
APVKTSPINMLYFXXXXXXXXXYGKIPMIVEEX

SEQ ID NO: 21700 - protein, 35 aa, Artificial Sequence
  Non-cyclic GFR-binding peptide
  MOD_RES (32)..(34): Xaa is C or S
VPTRLSPINILYFDSANNVVYGKIPDMVVESXGXR

SEQ ID NO: 21701 - protein, 39 aa, Artificial Sequence
  Non-cyclic GFR-binding peptide
  MOD_RES (3)..(4)..(37)..(39): Xaa is C or S
KAXXVPTKLSPINVLYFDDMGVPTYGKIPEGMSVAEXGX

SEQ ID NO: 21702 - protein, 34 aa, Artificial Sequence
  Non-cyclic GFR-binding peptide
  MOD_RES (2)..(3): Xaa is C or S
AXXAPTKLSPINVLYFDSSNNVIYGKIPNMVVKA

SEQ ID NO: 21703 - protein, 32 aa, Artificial Sequence
  Non-cyclic GFR-binding peptide
  MOD_RES (1)..(1): Xaa is C or S
XAPTQLSPINVLYFDDSSNVIYGKIPNMVVRA

SEQ ID NO: 21704 - protein, 39 aa, Artificial Sequence
  Non-cyclic GFR-binding peptide
  MOD_RES (4)..(5)..(37)..(39): Xaa is C or S
PKAXXVPTELSPINMLYFDEYDKVVYGKIPEMVVEGXGX

SEQ ID NO: 21705 - protein, 38 aa, Artificial Sequence
  Non-cyclic GFR-binding peptide
  MOD_RES (5)..(6): Xaa is C or S
  MOD_RES (20)..(21)..(22)..(23)..(24): Xaa is A or G
  MOD_RES (25)..(26)..(27)..(28): Xaa is A or G or absent
ASKAXXVPTKLSPINILYFXXXXXXXXXYGKIPGMAVS

SEQ ID NO: 21706 - protein, 42 aa, Artificial Sequence
  Non-cyclic GFR-binding peptide
  MOD_RES (5)..(6)..(40)..(42): Xaa is C or S
  MOD_RES (20)..(21)..(22)..(23)..(24): Xaa is A or G
  MOD_RES (25)..(26)..(27)..(28): Xaa is A or G or absent
IPKAXXVPTELSPINMLYFXXXXXXXXXYGKIPEMVVEGXGX

SEQ ID NO: 21707 - protein, 36 aa, Artificial Sequence
  Non-cyclic GFR-binding peptide
  MOD_RES (3)..(4)..(36): Xaa is C or S
PTXXVPTRLSPINILYFDSANNVVYGKIPDMVVESX

SEQ ID NO: 21708 - protein, 41 aa, Artificial Sequence
  Non-cyclic GFR-binding peptide
  MOD_RES (5)..(6)..(41): Xaa is C or S
  MOD_RES (20)..(21)..(22)..(23)..(24): Xaa is A or G
  MOD_RES (25)..(26)..(27)..(28): Xaa is A or G or absent
VGKAXXVPTKLSPINVLYFXXXXXXXXXYGKIPEGMSVAEX

SEQ ID NO: 21709 - protein, 34 aa, Artificial Sequence
  Non-cyclic GFR-binding peptide
  MOD_RES (1)..(2): Xaa is C or S
  MOD_RES (16)..(17)..(18)..(19)..(20): Xaa is A or G
  MOD_RES (21)..(22)..(23)..(24): Xaa is A or G or absent
XXVPTKLSPINILYFXXXXXXXXXYGKIPGMAVS

SEQ ID NO: 21710 - protein, 32 aa, Artificial Sequence
  Non-cyclic GFR-binding peptide
  MOD_RES (1)..(2): Xaa is C or S
XXVPTKLSPINILYFDKGVVTYYGKIPGMAVS

SEQ ID NO: 21711 - protein, 38 aa, Artificial Sequence
  Non-cyclic GFR-binding peptide
  MOD_RES (2)..(3)..(35)..(37): Xaa is C or S
AXXAPTKLSPINVLYFDSSNNVIYGKIPNMVVKAXGXH

SEQ ID NO: 21712 - protein, 37 aa, Artificial Sequence
  Non-cyclic GFR-binding peptide
  MOD_RES (1)..(2)..(36): Xaa is C or S
  MOD_RES (16)..(17)..(18)..(19)..(20): Xaa is A or G
  MOD_RES (21)..(22)..(23)..(24): Xaa is A or G or absent
XXAPTKLSPINVLYFXXXXXXXXXYGKIPNMVVKAXG

SEQ ID NO: 21713 - protein, 36 aa, Artificial Sequence
  Non-cyclic GFR-binding peptide
  MOD_RES (4)..(5): Xaa is C or S
PASXXVPARLSPINILYFDAANNVVYGKIPDMVVEA

SEQ ID NO: 21714 - protein, 31 aa, Artificial Sequence
  Non-cyclic GFR-binding peptide
  MOD_RES (31)..(31): Xaa is C or S
APVKTSPINMLYFDNGRVLLYGKIPMIVEEX

SEQ ID NO: 21715 - protein, 34 aa, Artificial Sequence
  Non-cyclic GFR-binding peptide
  MOD_RES (31)..(33): Xaa is C or S
APVKTSPINMLYFDNGRVLLYGKIPMIVEEXGXL

SEQ ID NO: 21716 - protein, 40 aa, Artificial Sequence
  Non-cyclic GFR-binding peptide
  MOD_RES (3)..(4)..(38)..(40): Xaa is C or S
  MOD_RES (18)..(19)..(20)..(21)..(22): Xaa is A or G
  MOD_RES (23)..(24)..(25)..(26): Xaa is A or G or absent
KAXXVPTELSPINMLYFXXXXXXXXXYGKIPDMVVEGXGX

SEQ ID NO: 21717 - protein, 39 aa, Artificial Sequence
  Non-cyclic GFR-binding peptide
  MOD_RES (6)..(7)..(39): Xaa is C or S
AVPKAXXAPTKLSPINVLYFDSSNNVIYGKIPNMVVKAX

SEQ ID NO: 21718 - protein, 35 aa, Artificial Sequence
  Non-cyclic GFR-binding peptide
  MOD_RES (2)..(3): Xaa is C or S
  MOD_RES (17)..(18)..(19)..(20)..(21): Xaa is A or G
  MOD_RES (22)..(23)..(24)..(25): Xaa is A or G or absent
AXXVPTELSPINMLYFXXXXXXXXXYGKIPEMVVE

SEQ ID NO: 21719 - protein, 42 aa, Artificial Sequence
  Non-cyclic GFR-binding peptide
  MOD_RES (6)..(7)..(39)..(41): Xaa is C or S
STPPTXXVPTRLSPINILYFDSANNVVYGKIPDMVVESXGXR

SEQ ID NO: 21720 - protein, 41 aa, Artificial Sequence
  Non-cyclic GFR-binding peptide
  MOD_RES (5)..(6)..(38)..(40): Xaa is C or S
ASKAXXVPTKLSPINILYFDKGVVTYYGKIPGMAVSEXGXR

SEQ ID NO: 21721 - protein, 39 aa, Artificial Sequence
  Non-cyclic GFR-binding peptide
  MOD_RES (1)..(2)..(36)..(38): Xaa is C or S
  MOD_RES (16)..(17)..(18)..(19)..(20): Xaa is A or G
  MOD_RES (21)..(22)..(23)..(24): Xaa is A or G or absent
XXVPTRLSPINILYFXXXXXXXXXYGKIPDMVVESXGXR

SEQ ID NO: 21722 - protein, 37 aa, Artificial Sequence
  Non-cyclic GFR-binding peptide
  MOD_RES (1)..(2)..(36): Xaa is C or S
  MOD_RES (16)..(17)..(18)..(19)..(20): Xaa is A or G
  MOD_RES (21)..(22)..(23)..(24): Xaa is A or G or absent
XXAPTQLSPINVLYFXXXXXXXXXYGKIPNMVVRAXG

SEQ ID NO: 21723 - protein, 39 aa, Artificial Sequence
  Non-cyclic GFR-binding peptide
  MOD_RES (3)..(4)..(38): Xaa is C or S
  MOD_RES (18)..(19)..(20)..(21)..(22): Xaa is A or G
  MOD_RES (23)..(24)..(25)..(26): Xaa is A or G or absent
ASXXVPARLSPINILYFXXXXXXXXXYGKIPDMVVEAXG

SEQ ID NO: 21724 - protein, 37 aa, Artificial Sequence
  Non-cyclic GFR-binding peptide
  MOD_RES (4)..(5)..(37): Xaa is C or S
PKAXXVPTELSPINMLYFDENEKVVYGKIPDMVVEGX

SEQ ID NO: 21725 - protein, 41 aa, Artificial Sequence
  Non-cyclic GFR-binding peptide
  MOD_RES (5)..(6)..(38)..(40): Xaa is C or S
VPKPXXAPTKLSPINVLYFDDSSNVIYGKIPNMVVRSXGXH

SEQ ID NO: 21726 - protein, 39 aa, Artificial Sequence
  Non-cyclic GFR-binding peptide
  MOD_RES (5)..(6): Xaa is C or S
  MOD_RES (20)..(21)..(22)..(23)..(24): Xaa is A or G
  MOD_RES (25)..(26)..(27)..(28): Xaa is A or G or absent
TPPTXXVPTRLSPINILYFXXXXXXXXXYGKIPDMVVES

SEQ ID NO: 21727 - protein, 36 aa, Artificial Sequence
  Non-cyclic GFR-binding peptide
  MOD_RES (34)..(36): Xaa is C or S
  MOD_RES (14)..(15)..(16)..(17)..(18): Xaa is A or G
  MOD_RES (19)..(20)..(21)..(22): Xaa is A or G or absent
APTKLSPINVLYFXXXXXXXXXYGKIPNMVVRSXGX

SEQ ID NO: 21728 - protein, 37 aa, Artificial Sequence
  Non-cyclic GFR-binding peptide
  MOD_RES (2)..(3)..(35)..(37): Xaa is C or S
AXXVPTELSPINMLYFDENEKVVYGKIPDMVVEGXGX

SEQ ID NO: 21729 - protein, 33 aa, Artificial Sequence
  Non-cyclic GFR-binding peptide
  MOD_RES (1)..(32): Xaa is C or S
XAPVKTSPINMLYFDNGRVLLYGKIPMIVEEXG

SEQ ID NO: 21730 - protein, 36 aa, Artificial Sequence
  Non-cyclic GFR-binding peptide
  MOD_RES (1)..(2)..(35): Xaa is C or S
  MOD_RES (16)..(17)..(18)..(19)..(20): Xaa is A or G
  MOD_RES (21)..(22)..(23)..(24): Xaa is A or G or absent
XXAPVKTSPINMLYFXXXXXXXXXYGKIPMIVEEXG

SEQ ID NO: 21731 - protein, 34 aa, Artificial Sequence
  Non-cyclic GFR-binding peptide
  MOD_RES (34)..(34): Xaa is C or S
  MOD_RES (14)..(15)..(16)..(17)..(18): Xaa is A or G
  MOD_RES (19)..(20)..(21)..(22): Xaa is A or G or absent
VPTRLSPINILYFXXXXXXXXXYGKIPDMVVESX

SEQ ID NO: 21732 - protein, 35 aa, Artificial Sequence
  Non-cyclic GFR-binding peptide
  MOD_RES (1)..(2)..(34): Xaa is C or S
XXAPTKLSPINVLYFDSSNNVIYGKIPNMVVKAXG

SEQ ID NO: 21733 - protein, 41 aa, Artificial Sequence
  Non-cyclic GFR-binding peptide
  MOD_RES (3)..(4)..(38)..(40): Xaa is C or S
  MOD_RES (18)..(19)..(20)..(21)..(22): Xaa is A or G
  MOD_RES (23)..(24)..(25)..(26): Xaa is A or G or absent
KPXXAPTQLSPINVLYFXXXXXXXXXYGKIPNMVVRAXGXH

SEQ ID NO: 21734 - protein, 43 aa, Artificial Sequence
  Non-cyclic GFR-binding peptide
  MOD_RES (6)..(7)..(41)..(43): Xaa is C or S
  MOD_RES (21)..(22)..(23)..(24)..(25): Xaa is A or G
  MOD_RES (26)..(27)..(28)..(29): Xaa is A or G or absent
AAPASXXVPARLSPINILYFXXXXXXXXXYGKIPDMVVEAXGX

SEQ ID NO: 21735 - protein, 36 aa, Artificial Sequence
  Non-cyclic GFR-binding peptide
  MOD_RES (4)..(36): Xaa is C or S
KPTXAPTKLSPINVLYFDDSSNVIYGKIPNMVVRSX

SEQ ID NO: 21736 - protein, 35 aa, Artificial Sequence
  Non-cyclic GFR-binding peptide
  MOD_RES (2)..(3): Xaa is C or S
  MOD_RES (17)..(18)..(19)..(20)..(21): Xaa is A or G
  MOD_RES (22)..(23)..(24)..(25): Xaa is A or G or absent
PXXAPTKLSPINVLYFXXXXXXXXXYGKIPNMVVR

SEQ ID NO: 21737 - protein, 41 aa, Artificial Sequence
  Non-cyclic GFR-binding peptide
  MOD_RES (6)..(7)..(38)..(40): Xaa is C or S
RVPSTXXAPVKTSPINMLYFDNGRVLLYGKIPMIVEEXGXL

SEQ ID NO: 21738 - protein, 36 aa, Artificial Sequence
  Non-cyclic GFR-binding peptide
  MOD_RES (1)..(35): Xaa is C or S
  MOD_RES (15)..(16)..(17)..(18)..(19): Xaa is A or G
  MOD_RES (20)..(21)..(22)..(23): Xaa is A or G or absent
XVPTRLSPINILYFXXXXXXXXXYGKIPDMVVESXG

SEQ ID NO: 21739 - protein, 35 aa, Artificial Sequence
  Non-cyclic GFR-binding peptide
  MOD_RES (1)..(2)..(35): Xaa is C or S
  MOD_RES (16)..(17)..(18)..(19)..(20): Xaa is A or G
  MOD_RES (21)..(22)..(23)..(24): Xaa is A or G or absent
XXAPVKTSPINMLYFXXXXXXXXXYGKIPMIVEEX

SEQ ID NO: 21740 - protein, 32 aa, Artificial Sequence
  Non-cyclic GFR-binding peptide
  MOD_RES (14)..(15)..(16)..(17)..(18): Xaa is A or G
  MOD_RES (19)..(20)..(21)..(22): Xaa is A or G or absent
VPTRLSPINILYFXXXXXXXXXYGKIPDMVVE

SEQ ID NO: 21741 - protein, 32 aa, Artificial Sequence
  Non-cyclic GFR-binding peptide
  MOD_RES (1)..(2): Xaa is C or S
XXAPVKTSPINMLYFDNGRVLLYGKIPMIVEE

SEQ ID NO: 21742 - protein, 40 aa, Artificial Sequence
  Non-cyclic GFR-binding peptide
  MOD_RES (4)..(5)..(40): Xaa is C or S
  MOD_RES (19)..(20)..(21)..(22)..(23): Xaa is A or G
  MOD_RES (24)..(25)..(26)..(27): Xaa is A or G or absent
GKAXXVPTKLSPINVLYFXXXXXXXXXYGKIPEGMSVAEX

SEQ ID NO: 21743 - protein, 32 aa, Artificial Sequence
  Non-cyclic GFR-binding peptide
  MOD_RES (14)..(15)..(16)..(17)..(18): Xaa is A or G
  MOD_RES (19)..(20)..(21)..(22): Xaa is A or G or absent
VPARLSPINILYFXXXXXXXXXYGKIPDMVVE

SEQ ID NO: 21744 - protein, 36 aa, Artificial Sequence
  Non-cyclic GFR-binding peptide
  MOD_RES (1)..(33)..(35): Xaa is C or S
XVPTELSPINMLYFDEYDKVVYGKIPEMVVEGXGXR

SEQ ID NO: 21745 - protein, 42 aa, Artificial Sequence
  Non-cyclic GFR-binding peptide
  MOD_RES (5)..(6)..(40)..(42): Xaa is C or S
  MOD_RES (20)..(21)..(22)..(23)..(24): Xaa is A or G
  MOD_RES (25)..(26)..(27)..(28): Xaa is A or G or absent
ASKAXXVPTKLSPINILYFXXXXXXXXXYGKIPGMAVSEXGX

SEQ ID NO: 21746 - protein, 39 aa, Artificial Sequence
  Non-cyclic GFR-binding peptide
  MOD_RES (5)..(6)..(39): Xaa is C or S
  MOD_RES (20)..(21)..(22)..(23)..(24): Xaa is A or G
  MOD_RES (25)..(26)..(27)..(28): Xaa is A or G or absent
VPSTXXAPVKTSPINMLYFXXXXXXXXXYGKIPMIVEEX

SEQ ID NO: 21747 - protein, 43 aa, Artificial Sequence
  Non-cyclic GFR-binding peptide
  MOD_RES (6)..(7)..(41)..(43): Xaa is C or S
  MOD_RES (21)..(22)..(23)..(24)..(25): Xaa is A or G
  MOD_RES (26)..(27)..(28)..(29): Xaa is A or G or absent
SIPKAXXVPTELSPINMLYFXXXXXXXXXYGKIPEMVVEGXGX

SEQ ID NO: 21748 - protein, 43 aa, Artificial Sequence
  Non-cyclic GFR-binding peptide
  MOD_RES (5)..(6)..(40)..(42): Xaa is C or S
  MOD_RES (20)..(21)..(22)..(23)..(24): Xaa is A or G
  MOD_RES (25)..(26)..(27)..(28): Xaa is A or G or absent
APASXXVPARLSPINILYFXXXXXXXXXYGKIPDMVVEAXGXR

SEQ ID NO: 21749 - protein, 42 aa, Artificial Sequence
  Non-cyclic GFR-binding peptide
  MOD_RES (6)..(7)..(39)..(41): Xaa is C or S
AAPASXXVPARLSPINILYFDAANNVVYGKIPDMVVEAXGXR

SEQ ID NO: 21750 - protein, 35 aa, Artificial Sequence
  Non-cyclic GFR-binding peptide
  MOD_RES (1)..(2): Xaa is C or S
  MOD_RES (16)..(17)..(18)..(19)..(20): Xaa is A or G
  MOD_RES (21)..(22)..(23)..(24): Xaa is A or G or absent
XXVPTRLSPINILYFXXXXXXXXXYGKIPDMVVES

SEQ ID NO: 21751 - protein, 37 aa, Artificial Sequence
  Non-cyclic GFR-binding peptide
  MOD_RES (1)..(35)..(37): Xaa is C or S
  MOD_RES (15)..(16)..(17)..(18)..(19): Xaa is A or G
  MOD_RES (20)..(21)..(22)..(23): Xaa is A or G or absent
XAPTKLSPINVLYFXXXXXXXXXYGKIPNMVVRSXGX

SEQ ID NO: 21752 - protein, 33 aa, Artificial Sequence
  Non-cyclic GFR-binding peptide
  MOD_RES (1)..(1): Xaa is C or S
  MOD_RES (15)..(16)..(17)..(18)..(19): Xaa is A or G
  MOD_RES (20)..(21)..(22)..(23): Xaa is A or G or absent
XAPVKTSPINMLYFXXXXXXXXXYGKIPMIVEE

SEQ ID NO: 21753 - protein, 37 aa, Artificial Sequence
  Non-cyclic GFR-binding peptide
  MOD_RES (6)..(7): Xaa is C or S
HVPKPXXAPTKLSPINVLYFDDSSNVIYGKIPNMVVR

SEQ ID NO: 21754 - protein, 41 aa, Artificial Sequence
  Non-cyclic GFR-binding peptide
  MOD_RES (6)..(40): Xaa is C or S
  MOD_RES (20)..(21)..(22)..(23)..(24): Xaa is A or G
  MOD_RES (25)..(26)..(27)..(28): Xaa is A or G or absent
VTKPTXAPTKLSPINVLYFXXXXXXXXXYGKIPNMVVRSXG

SEQ ID NO: 21755 - protein, 37 aa, Artificial Sequence
  Non-cyclic GFR-binding peptide
  MOD_RES (1)..(34)..(36): Xaa is C or S
XVPTKLSPINVLYFDDMGVPTYGKIPEGMSVAEXGXR

SEQ ID NO: 21756 - protein, 40 aa, Artificial Sequence
  Non-cyclic GFR-binding peptide
  MOD_RES (3)..(4)..(38)..(40): Xaa is C or S
  MOD_RES (18)..(19)..(20)..(21)..(22): Xaa is A or G
  MOD_RES (23)..(24)..(25)..(26): Xaa is A or G or absent
KPXXAPTKLSPINVLYFXXXXXXXXXYGKIPNMVVRSXGX

SEQ ID NO: 21757 - protein, 38 aa, Artificial Sequence
  Non-cyclic GFR-binding peptide
  MOD_RES (4)..(5)..(37): Xaa is C or S
PKPXXAPTQLSPINVLYFDDSSNVIYGKIPNMVVRAXG

SEQ ID NO: 21758 - protein, 33 aa, Artificial Sequence
  Non-cyclic GFR-binding peptide
  MOD_RES (2)..(3): Xaa is C or S
AXXVPTELSPINMLYFDENEKVVYGKIPDMVVE

SEQ ID NO: 21759 - protein, 36 aa, Artificial Sequence
  Non-cyclic GFR-binding peptide
  MOD_RES (3)..(4): Xaa is C or S
  MOD_RES (18)..(19)..(20)..(21)..(22): Xaa is A or G
  MOD_RES (23)..(24)..(25)..(26): Xaa is A or G or absent
PTXXVPTRLSPINILYFXXXXXXXXXYGKIPDMVVE

SEQ ID NO: 21760 - protein, 39 aa, Artificial Sequence
  Non-cyclic GFR-binding peptide
  MOD_RES (3)..(4)..(38): Xaa is C or S
  MOD_RES (18)..(19)..(20)..(21)..(22): Xaa is A or G
  MOD_RES (23)..(24)..(25)..(26): Xaa is A or G or absent
KAXXVPTELSPINMLYFXXXXXXXXXYGKIPEMVVEGXG

SEQ ID NO: 21761 - protein, 38 aa, Artificial Sequence
  Non-cyclic GFR-binding peptide
  MOD_RES (4)..(38): Xaa is C or S
  MOD_RES (18)..(19)..(20)..(21)..(22): Xaa is A or G
  MOD_RES (23)..(24)..(25)..(26): Xaa is A or G or absent
KPTXAPTKLSPINVLYFXXXXXXXXXYGKIPNMVVRSX

SEQ ID NO: 21762 - protein, 38 aa, Artificial Sequence
  Non-cyclic GFR-binding peptide
  MOD_RES (3)..(35)..(37): Xaa is C or S
PTXAPTKLSPINVLYFDDSSNVIYGKIPNMVVRSXGXH

SEQ ID NO: 21763 - protein, 42 aa, Artificial Sequence
  Non-cyclic GFR-binding peptide
  MOD_RES (6)..(7)..(41): Xaa is C or S
  MOD_RES (21)..(22)..(23)..(24)..(25): Xaa is A or G
  MOD_RES (26)..(27)..(28)..(29): Xaa is A or G or absent
HVPKPXXAPTKLSPINVLYFXXXXXXXXXYGKIPNMVVRSXG

SEQ ID NO: 21764 - protein, 41 aa, Artificial Sequence
  Non-cyclic GFR-binding peptide
  MOD_RES (5)..(39)..(41): Xaa is C or S
  MOD_RES (19)..(20)..(21)..(22)..(23): Xaa is A or G
  MOD_RES (24)..(25)..(26)..(27): Xaa is A or G or absent
TKPTXAPTKLSPINVLYFXXXXXXXXXYGKIPNMVVRSXGX

SEQ ID NO: 21765 - protein, 40 aa, Artificial Sequence
  Non-cyclic GFR-binding peptide
  MOD_RES (6)..(7)..(39): Xaa is C or S
KIPKAXXVPTELSPINMLYFDENEKVVYGKIPDMVVEGXG

SEQ ID NO: 21766 - protein, 39 aa, Artificial Sequence
  Non-cyclic GFR-binding peptide
  MOD_RES (3)..(4)..(36)..(38): Xaa is C or S
KAXXVPTELSPINMLYFDEYDKVVYGKIPEMVVEGXGXR

SEQ ID NO: 21767 - protein, 37 aa, Artificial Sequence
  Non-cyclic GFR-binding peptide
  MOD_RES (2)..(3)..(34)..(36): Xaa is C or S
TXXAPVKTSPINMLYFDNGRVLLYGKIPMIVEEXGXL

SEQ ID NO: 21768 - protein, 40 aa, Artificial Sequence
  Non-cyclic GFR-binding peptide
  MOD_RES (1)..(2)..(37)..(39): Xaa is C or S
  MOD_RES (16)..(17)..(18)..(19)..(20): Xaa is A or G
  MOD_RES (21)..(22)..(23)..(24): Xaa is A or G or absent
XXVPTKLSPINVLYFXXXXXXXXXYGKIPEGMSVAEXGXR

SEQ ID NO: 21769 - protein, 43 aa, Artificial Sequence
  Non-cyclic GFR-binding peptide
  MOD_RES (6)..(40)..(42): Xaa is C or S
  MOD_RES (20)..(21)..(22)..(23)..(24): Xaa is A or G
  MOD_RES (25)..(26)..(27)..(28): Xaa is A or G or absent
VTKPTXAPTKLSPINVLYFXXXXXXXXXYGKIPNMVVRSXGXH

SEQ ID NO: 21770 - protein, 33 aa, Artificial Sequence
  Non-cyclic GFR-binding peptide
  MOD_RES (1)..(33): Xaa is C or S
XAPTKLSPINVLYFDSSNNVIYGKIPNMVVKAX

SEQ ID NO: 21771 - protein, 33 aa, Artificial Sequence
  Non-cyclic GFR-binding peptide
  MOD_RES (1)..(1): Xaa is C or S
  MOD_RES (15)..(16)..(17)..(18)..(19): Xaa is A or G
  MOD_RES (20)..(21)..(22)..(23): Xaa is A or G or absent
XAPTKLSPINVLYFXXXXXXXXXYGKIPNMVVK

SEQ ID NO: 21772 - protein, 36 aa, Artificial Sequence
  Non-cyclic GFR-binding peptide
  MOD_RES (2)..(3)..(35): Xaa is C or S
AXXVPTELSPINMLYFDENEKVVYGKIPDMVVEGXG

SEQ ID NO: 21773 - protein, 38 aa, Artificial Sequence
  Non-cyclic GFR-binding peptide
  MOD_RES (3)..(37): Xaa is C or S
  MOD_RES (17)..(18)..(19)..(20)..(21): Xaa is A or G
  MOD_RES (22)..(23)..(24)..(25): Xaa is A or G or absent
PTXAPTKLSPINVLYFXXXXXXXXXYGKIPNMVVRSXG

SEQ ID NO: 21774 - protein, 37 aa, Artificial Sequence
  Non-cyclic GFR-binding peptide
  MOD_RES (4)..(5): Xaa is C or S
GKAXXVPTKLSPINVLYFDDMGVPTYGKIPEGMSVAE

SEQ ID NO: 21775 - protein, 33 aa, Artificial Sequence
  Non-cyclic GFR-binding peptide
  MOD_RES (1)..(1): Xaa is C or S
  MOD_RES (15)..(16)..(17)..(18)..(19): Xaa is A or G
  MOD_RES (20)..(21)..(22)..(23): Xaa is A or G or absent
XAPTKLSPINVLYFXXXXXXXXXYGKIPNMVVR

SEQ ID NO: 21776 - protein, 34 aa, Artificial Sequence
  Non-cyclic GFR-binding peptide
  MOD_RES (1)..(1): Xaa is C or S
  MOD_RES (15)..(16)..(17)..(18)..(19): Xaa is A or G
  MOD_RES (20)..(21)..(22)..(23): Xaa is A or G or absent
XAPTKLSPINVLYFXXXXXXXXXYGKIPNMVVKA

SEQ ID NO: 21777 - protein, 38 aa, Artificial Sequence
  Non-cyclic GFR-binding peptide
  MOD_RES (2)..(3)..(37): Xaa is C or S
  MOD_RES (17)..(18)..(19)..(20)..(21): Xaa is A or G
  MOD_RES (22)..(23)..(24)..(25): Xaa is A or G or absent
AXXVPTELSPINMLYFXXXXXXXXXYGKIPDMVVEGXG

SEQ ID NO: 21778 - protein, 41 aa, Artificial Sequence
  Non-cyclic GFR-binding peptide
  MOD_RES (5)..(6)..(40): Xaa is C or S
  MOD_RES (20)..(21)..(22)..(23)..(24): Xaa is A or G
  MOD_RES (25)..(26)..(27)..(28): Xaa is A or G or absent
IPKAXXVPTELSPINMLYFXXXXXXXXXYGKIPDMVVEGXG

SEQ ID NO: 21779 - protein, 37 aa, Artificial Sequence
  Non-cyclic GFR-binding peptide
  MOD_RES (3)..(4): Xaa is C or S
  MOD_RES (18)..(19)..(20)..(21)..(22): Xaa is A or G
  MOD_RES (23)..(24)..(25)..(26): Xaa is A or G or absent
KAXXVPTELSPINMLYFXXXXXXXXXYGKIPDMVVEG

SEQ ID NO: 21780 - protein, 37 aa, Artificial Sequence
  Non-cyclic GFR-binding peptide
  MOD_RES (2)..(3)..(37): Xaa is C or S
  MOD_RES (17)..(18)..(19)..(20)..(21): Xaa is A or G
  MOD_RES (22)..(23)..(24)..(25): Xaa is A or G or absent
AXXVPTELSPINMLYFXXXXXXXXXYGKIPEMVVEGX

SEQ ID NO: 21781 - protein, 38 aa, Artificial Sequence
  Non-cyclic GFR-binding peptide
  MOD_RES (5)..(6)..(38): Xaa is C or S
APASXXVPARLSPINILYFDAANNVVYGKIPDMVVEAX

SEQ ID NO: 21782 - protein, 38 aa, Artificial Sequence
  Non-cyclic GFR-binding peptide
  MOD_RES (1)..(35)..(37): Xaa is C or S
  MOD_RES (15)..(16)..(17)..(18)..(19): Xaa is A or G
  MOD_RES (20)..(21)..(22)..(23): Xaa is A or G or absent
XAPTKLSPINVLYFXXXXXXXXXYGKIPNMVVKAXGXH

SEQ ID NO: 21783 - protein, 42 aa, Artificial Sequence
  Non-cyclic GFR-binding peptide
  MOD_RES (5)..(6)..(40)..(42): Xaa is C or S
  MOD_RES (20)..(21)..(22)..(23)..(24): Xaa is A or G
  MOD_RES (25)..(26)..(27)..(28): Xaa is A or G or absent
VPKPXXAPTQLSPINVLYFXXXXXXXXXYGKIPNMVVRAXGX

SEQ ID NO: 21784 - protein, 36 aa, Artificial Sequence
  Non-cyclic GFR-binding peptide
  MOD_RES (1)..(35): Xaa is C or S
  MOD_RES (15)..(16)..(17)..(18)..(19): Xaa is A or G
  MOD_RES (20)..(21)..(22)..(23): Xaa is A or G or absent
XAPTKLSPINVLYFXXXXXXXXXYGKIPNMVVKAXG

SEQ ID NO: 21785 - protein, 36 aa, Artificial Sequence
  Non-cyclic GFR-binding peptide
  MOD_RES (1)..(2)..(33)..(35): Xaa is C or S
XXAPVKTSPINMLYFDNGRVLLYGKIPMIVEEXGXL

SEQ ID NO: 21786 - protein, 30 aa, Artificial Sequence
  Non-cyclic GFR-binding peptide
APTQLSPINVLYFDDSSNVIYGKIPNMVVR

SEQ ID NO: 21787 - protein, 37 aa, Artificial Sequence
  Non-cyclic GFR-binding peptide
  MOD_RES (3)..(4)..(37): Xaa is C or S
KAXXVPTKLSPINVLYFDDMGVPTYGKIPEGMSVAEX

SEQ ID NO: 21788 - protein, 38 aa, Artificial Sequence
  Non-cyclic GFR-binding peptide
  MOD_RES (2)..(3)..(35)..(37): Xaa is C or S
PXXAPTKLSPINVLYFDDSSNVIYGKIPNMVVRSXGXH

SEQ ID NO: 21789 - protein, 33 aa, Artificial Sequence
  Non-cyclic GFR-binding peptide
  MOD_RES (1)..(33): Xaa is C or S
XVPTELSPINMLYFDEYDKVVYGKIPEMVVEGX

SEQ ID NO: 21790 - protein, 37 aa, Artificial Sequence
  Non-cyclic GFR-binding peptide
  MOD_RES (5)..(5): Xaa is C or S
  MOD_RES (19)..(20)..(21)..(22)..(23): Xaa is A or G
  MOD_RES (24)..(25)..(26)..(27): Xaa is A or G or absent
TKPTXAPTKLSPINVLYFXXXXXXXXXYGKIPNMVVR

SEQ ID NO: 21791 - protein, 35 aa, Artificial Sequence
  Non-cyclic GFR-binding peptide
  MOD_RES (2)..(3)..(35): Xaa is C or S
PXXAPTKLSPINVLYFDDSSNVIYGKIPNMVVRSX

SEQ ID NO: 21792 - protein, 43 aa, Artificial Sequence
  Non-cyclic GFR-binding peptide
  MOD_RES (5)..(6)..(41)..(43): Xaa is C or S
  MOD_RES (20)..(21)..(22)..(23)..(24): Xaa is A or G
  MOD_RES (25)..(26)..(27)..(28): Xaa is A or G or absent
VGKAXXVPTKLSPINVLYFXXXXXXXXXYGKIPEGMSVAEXGX

SEQ ID NO: 21793 - protein, 34 aa, Artificial Sequence
  Non-cyclic GFR-binding peptide
  MOD_RES (1)..(1): Xaa is C or S
  MOD_RES (15)..(16)..(17)..(18)..(19): Xaa is A or G
  MOD_RES (20)..(21)..(22)..(23): Xaa is A or G or absent
XVPTELSPINMLYFXXXXXXXXXYGKIPDMVVEG

SEQ ID NO: 21794 - protein, 37 aa, Artificial Sequence
  Non-cyclic GFR-binding peptide
  MOD_RES (5)..(6): Xaa is C or S
VPKAXXAPTKLSPINVLYFDSSNNVIYGKIPNMVVKA

SEQ ID NO: 21795 - protein, 39 aa, Artificial Sequence
  Non-cyclic GFR-binding peptide
  MOD_RES (1)..(2)..(37)..(39): Xaa is C or S
  MOD_RES (16)..(17)..(18)..(19)..(20): Xaa is A or G
  MOD_RES (21)..(22)..(23)..(24): Xaa is A or G or absent
XXVPTKLSPINVLYFXXXXXXXXXYGKIPEGMSVAEXGX

SEQ ID NO: 21796 - protein, 35 aa, Artificial Sequence
  Non-cyclic GFR-binding peptide
  MOD_RES (1)..(34): Xaa is C or S
XVPTKLSPINVLYFDDMGVPTYGKIPEGMSVAEXG

SEQ ID NO: 21797 - protein, 38 aa, Artificial Sequence
  Non-cyclic GFR-binding peptide
  MOD_RES (2)..(3)..(37): Xaa is C or S
  MOD_RES (17)..(18)..(19)..(20)..(21): Xaa is A or G
  MOD_RES (22)..(23)..(24)..(25): Xaa is A or G or absent
TXXVPTRLSPINILYFXXXXXXXXXYGKIPDMVVESXG

SEQ ID NO: 21798 - protein, 43 aa, Artificial Sequence
  Non-cyclic GFR-binding peptide
  MOD_RES (6)..(7)..(40)..(42): Xaa is C or S
KVGKAXXVPTKLSPINVLYFDDMGVPTYGKIPEGMSVAEXGXR

SEQ ID NO: 21799 - protein, 36 aa, Artificial Sequence
  Non-cyclic GFR-binding peptide
  MOD_RES (2)..(3)..(36): Xaa is C or S
AXXVPTKLSPINVLYFDDMGVPTYGKIPEGMSVAEX

SEQ ID NO: 21800 - protein, 41 aa, Artificial Sequence
  Non-cyclic GFR-binding peptide
  MOD_RES (6)..(7): Xaa is C or S
  MOD_RES (21)..(22)..(23)..(24)..(25): Xaa is A or G
  MOD_RES (26)..(27)..(28)..(29): Xaa is A or G or absent
KVGKAXXVPTKLSPINVLYFXXXXXXXXXYGKIPEGMSVAE

SEQ ID NO: 21801 - protein, 39 aa, Artificial Sequence
  Non-cyclic GFR-binding peptide
  MOD_RES (1)..(2)..(36)..(38): Xaa is C or S
  MOD_RES (16)..(17)..(18)..(19)..(20): Xaa is A or G
  MOD_RES (21)..(22)..(23)..(24): Xaa is A or G or absent
XXAPTQLSPINVLYFXXXXXXXXXYGKIPNMVVRAXGXH

SEQ ID NO: 21802 - protein, 33 aa, Artificial Sequence
  Non-cyclic GFR-binding peptide
  MOD_RES (2)..(3): Xaa is C or S
AXXVPTELSPINMLYFDEYDKVVYGKIPEMVVE

SEQ ID NO: 21803 - protein, 34 aa, Artificial Sequence
  Non-cyclic GFR-binding peptide
  MOD_RES (1)..(33): Xaa is C or S
XAPTQLSPINVLYFDDSSNVIYGKIPNMVVRAXG

SEQ ID NO: 21804 - protein, 36 aa, Artificial Sequence
  Non-cyclic GFR-binding peptide
  MOD_RES (3)..(4)..(36): Xaa is C or S
KAXXVPTELSPINMLYFDEYDKVVYGKIPEMVVEGX

SEQ ID NO: 21805 - protein, 38 aa, Artificial Sequence
  Non-cyclic GFR-binding peptide
  MOD_RES (4)..(5): Xaa is C or S
  MOD_RES (19)..(20)..(21)..(22)..(23): Xaa is A or G
  MOD_RES (24)..(25)..(26)..(27): Xaa is A or G or absent
PKAXXVPTELSPINMLYFXXXXXXXXXYGKIPEMVVEG

SEQ ID NO: 21806 - protein, 41 aa, Artificial Sequence
  Non-cyclic GFR-binding peptide
  MOD_RES (5)..(6)..(39)..(41): Xaa is C or S
VGKAXXVPTKLSPINVLYFDDMGVPTYGKIPEGMSVAEXGX

SEQ ID NO: 21807 - protein, 40 aa, Artificial Sequence
  Non-cyclic GFR-binding peptide
  MOD_RES (4)..(5)..(37)..(39): Xaa is C or S
PKAXXVPTELSPINMLYFDEYDKVVYGKIPEMVVEGXGXR

SEQ ID NO: 21808 - protein, 35 aa, Artificial Sequence
  Non-cyclic GFR-binding peptide
  MOD_RES (1)..(2)..(34): Xaa is C or S
XXVPARLSPINILYFDAANNVVYGKIPDMVVEAXG

SEQ ID NO: 21809 - protein, 41 aa, Artificial Sequence
  Non-cyclic GFR-binding peptide
  MOD_RES (5)..(6)..(40): Xaa is C or S
  MOD_RES (20)..(21)..(22)..(23)..(24): Xaa is A or G
  MOD_RES (25)..(26)..(27)..(28): Xaa is A or G or absent
VPKPXXAPTQLSPINVLYFXXXXXXXXXYGKIPNMVVRAXG

SEQ ID NO: 21810 - protein, 38 aa, Artificial Sequence
  Non-cyclic GFR-binding peptide
  MOD_RES (3)..(4)..(36)..(38): Xaa is C or S
ASXXVPARLSPINILYFDAANNVVYGKIPDMVVEAXGX

SEQ ID NO: 21811 - protein, 40 aa, Artificial Sequence
  Non-cyclic GFR-binding peptide
  MOD_RES (6)..(7): Xaa is C or S
  MOD_RES (21)..(22)..(23)..(24)..(25): Xaa is A or G
  MOD_RES (26)..(27)..(28)..(29): Xaa is A or G or absent
AAPASXXVPARLSPINILYFXXXXXXXXXYGKIPDMVVEA

SEQ ID NO: 21812 - protein, 40 aa, Artificial Sequence
  Non-cyclic GFR-binding peptide
  MOD_RES (3)..(4)..(38)..(40): Xaa is C or S
  MOD_RES (18)..(19)..(20)..(21)..(22): Xaa is A or G
  MOD_RES (23)..(24)..(25)..(26): Xaa is A or G or absent
KAXXAPTKLSPINVLYFXXXXXXXXXYGKIPNMVVKAXGX

SEQ ID NO: 21813 - protein, 40 aa, Artificial Sequence
  Non-cyclic GFR-binding peptide
  MOD_RES (5)..(6)..(39): Xaa is C or S
VGKAXXVPTKLSPINVLYFDDMGVPTYGKIPEGMSVAEXG

SEQ ID NO: 21814 - protein, 36 aa, Artificial Sequence
  Non-cyclic GFR-binding peptide
  MOD_RES (3)..(4): Xaa is C or S
KAXXVPTKLSPINVLYFDDMGVPTYGKIPEGMSVAE

SEQ ID NO: 21815 - protein, 39 aa, Artificial Sequence
  Non-cyclic GFR-binding peptide
  MOD_RES (1)..(2)..(36)..(38): Xaa is C or S
  MOD_RES (16)..(17)..(18)..(19)..(20): Xaa is A or G
  MOD_RES (21)..(22)..(23)..(24): Xaa is A or G or absent
XXVPTELSPINMLYFXXXXXXXXXYGKIPDMVVEGXGXR

SEQ ID NO: 21816 - protein, 39 aa, Artificial Sequence
  Non-cyclic GFR-binding peptide
  MOD_RES (5)..(37)..(39): Xaa is C or S
TKPTXAPTKLSPINVLYFDDSSNVIYGKIPNMVVRSXGX

SEQ ID NO: 21817 - protein, 30 aa, Artificial Sequence; identical to SEQ ID NO: 909
  Non-cyclic GFR-binding peptide

SEQ ID NO: 21818 - protein, 38 aa, Artificial Sequence
  Non-cyclic GFR-binding peptide
  MOD_RES (4)..(5): Xaa is C or S
  MOD_RES (19)..(20)..(21)..(22)..(23): Xaa is A or G
  MOD_RES (24)..(25)..(26)..(27): Xaa is A or G or absent
PKPXXAPTQLSPINVLYFXXXXXXXXXYGKIPNMVVRA

SEQ ID NO: 21819 - protein, 36 aa, Artificial Sequence
  Non-cyclic GFR-binding peptide
  MOD_RES (2)..(3): Xaa is C or S
  MOD_RES (17)..(18)..(19)..(20)..(21): Xaa is A or G
  MOD_RES (22)..(23)..(24)..(25): Xaa is A or G or absent
AXXVPTKLSPINILYFXXXXXXXXXYGKIPGMAVSE

SEQ ID NO: 21820 - protein, 34 aa, Artificial Sequence
  Non-cyclic GFR-binding peptide
  MOD_RES (1)..(2): Xaa is C or S
  MOD_RES (16)..(17)..(18)..(19)..(20): Xaa is A or G
  MOD_RES (21)..(22)..(23)..(24): Xaa is A or G or absent
XXAPVKTSPINMLYFXXXXXXXXXYGKIPMIVEE

SEQ ID NO: 21821 - protein, 33 aa, Artificial Sequence
  Non-cyclic GFR-binding peptide
  MOD_RES (2)..(3): Xaa is C or S
SXXVPARLSPINILYFDAANNVVYGKIPDMVVE

SEQ ID NO: 21822 - protein, 38 aa, Artificial Sequence
  Non-cyclic GFR-binding peptide
  MOD_RES (1)..(36)..(38): Xaa is C or S
  MOD_RES (15)..(16)..(17)..(18)..(19): Xaa is A or G
  MOD_RES (20)..(21)..(22)..(23): Xaa is A or G or absent
XVPTKLSPINVLYFXXXXXXXXXYGKIPEGMSVAEXGX

SEQ ID NO: 21823 - protein, 35 aa, Artificial Sequence
  Non-cyclic GFR-binding peptide
  MOD_RES (34)..(34): Xaa is C or S
  MOD_RES (14)..(15)..(16)..(17)..(18): Xaa is A or G
  MOD_RES (19)..(20)..(21)..(22): Xaa is A or G or absent
VPTELSPINMLYFXXXXXXXXXYGKIPEMVVEGXG

SEQ ID NO: 21824 - protein, 32 aa, Artificial Sequence
  Non-cyclic GFR-binding peptide
  MOD_RES (1)..(1): Xaa is C or S
XVPTELSPINMLYFDEYDKVVYGKIPEMVVEG

SEQ ID NO: 21825 - protein, 34 aa, Artificial Sequence
  Non-cyclic GFR-binding peptide
  MOD_RES (1)..(33): Xaa is C or S
XVPTKLSPINILYFDKGVVTYYGKIPGMAVSEXG

SEQ ID NO: 21826 - protein, 40 aa, Artificial Sequence
  Non-cyclic GFR-binding peptide
  MOD_RES (3)..(4)..(37)..(39): Xaa is C or S
  MOD_RES (18)..(19)..(20)..(21)..(22): Xaa is A or G
  MOD_RES (23)..(24)..(25)..(26): Xaa is A or G or absent
STXXAPVKTSPINMLYFXXXXXXXXXYGKIPMIVEEXGXL

SEQ ID NO: 21827 - protein, 37 aa, Artificial Sequence
  Non-cyclic GFR-binding peptide
  MOD_RES (1)..(2)..(36): Xaa is C or S
  MOD_RES (16)..(17)..(18)..(19)..(20): Xaa is A or G
  MOD_RES (21)..(22)..(23)..(24): Xaa is A or G or absent
XXVPARLSPINILYFXXXXXXXXXYGKIPDMVVEAXG

SEQ ID NO: 21828 - protein, 35 aa, Artificial Sequence
  Non-cyclic GFR-binding peptide
  MOD_RES (1)..(2): Xaa is C or S
  MOD_RES (16)..(17)..(18)..(19)..(20): Xaa is A or G
  MOD_RES (21)..(22)..(23)..(24): Xaa is A or G or absent
XXAPTQLSPINVLYFXXXXXXXXXYGKIPNMVVRA

SEQ ID NO: 21829 - protein, 34 aa, Artificial Sequence
  Non-cyclic GFR-binding peptide
  MOD_RES (1)..(2)..(34): Xaa is C or S
XXVPTELSPINMLYFDENEKVVYGKIPDMVVEGX

SEQ ID NO: 21830 - protein, 38 aa, Artificial Sequence
  Non-cyclic GFR-binding peptide
  MOD_RES (6)..(7): Xaa is C or S
TVPKPXXAPTQLSPINVLYFDDSSNVIYGKIPNMVVRA

SEQ ID NO: 21831 - protein, 34 aa, Artificial Sequence
  Non-cyclic GFR-binding peptide
  MOD_RES (1)..(2): Xaa is C or S
  MOD_RES (16)..(17)..(18)..(19)..(20): Xaa is A or G
  MOD_RES (21)..(22)..(23)..(24): Xaa is A or G or absent
XXAPTKLSPINVLYFXXXXXXXXXYGKIPNMVVR

SEQ ID NO: 21832 - protein, 34 aa, Artificial Sequence
  Non-cyclic GFR-binding peptide
  MOD_RES (1)..(2): Xaa is C or S
  MOD_RES (16)..(17)..(18)..(19)..(20): Xaa is A or G
  MOD_RES (21)..(22)..(23)..(24): Xaa is A or G or absent
XXAPTKLSPINVLYFXXXXXXXXXYGKIPNMVVK

SEQ ID NO: 21833 - protein, 36 aa, Artificial Sequence
  Non-cyclic GFR-binding peptide
  MOD_RES (35)..(35): Xaa is C or S
  MOD_RES (14)..(15)..(16)..(17)..(18): Xaa is A or G
  MOD_RES (19)..(20)..(21)..(22): Xaa is A or G or absent
VPTKLSPINVLYFXXXXXXXXXYGKIPEGMSVAEXG

SEQ ID NO: 21834 - protein, 38 aa, Artificial Sequence
  Non-cyclic GFR-binding peptide
  MOD_RES (4)..(5)..(37): Xaa is C or S
PKAXXVPTELSPINMLYFDEYDKVVYGKIPEMVVEGXG

SEQ ID NO: 21835 - protein, 36 aa, Artificial Sequence
  Non-cyclic GFR-binding peptide
  MOD_RES (1)..(35): Xaa is C or S
  MOD_RES (15)..(16)..(17)..(18)..(19): Xaa is A or G
  MOD_RES (20)..(21)..(22)..(23): Xaa is A or G or absent
XVPTELSPINMLYFXXXXXXXXXYGKIPEMVVEGXG

SEQ ID NO: 21836 - protein, 43 aa, Artificial Sequence
  Non-cyclic GFR-binding peptide
  MOD_RES (7)..(41)..(43): Xaa is C or S
  MOD_RES (21)..(22)..(23)..(24)..(25): Xaa is A or G
  MOD_RES (26)..(27)..(28)..(29): Xaa is A or G or absent
HVTKPTXAPTKLSPINVLYFXXXXXXXXXYGKIPNMVVRSXGX

SEQ ID NO: 21837 - protein, 36 aa, Artificial Sequence
  Non-cyclic GFR-binding peptide
  MOD_RES (1)..(2): Xaa is C or S
  MOD_RES (16)..(17)..(18)..(19)..(20): Xaa is A or G
  MOD_RES (21)..(22)..(23)..(24): Xaa is A or G or absent
XXVPTKLSPINVLYFXXXXXXXXXYGKIPEGMSVAE

SEQ ID NO: 21838 - protein, 32 aa, Artificial Sequence
  Non-cyclic GFR-binding peptide
  MOD_RES (32)..(32): Xaa is C or S
VPTELSPINMLYFDENEKVVYGKIPDMVVEGX

SEQ ID NO: 21839 - protein, 40 aa, Artificial Sequence
  Non-cyclic GFR-binding peptide
  MOD_RES (2)..(3)..(37)..(39): Xaa is C or S
  MOD_RES (17)..(18)..(19)..(20)..(21): Xaa is A or G
  MOD_RES (22)..(23)..(24)..(25): Xaa is A or G or absent
TXXVPTRLSPINILYFXXXXXXXXXYGKIPDMVVESXGXR

SEQ ID NO: 21840 - protein, 39 aa, Artificial Sequence
  Non-cyclic GFR-binding peptide
  MOD_RES (4)..(5)..(39): Xaa is C or S
  MOD_RES (19)..(20)..(21)..(22)..(23): Xaa is A or G
  MOD_RES (24)..(25)..(26)..(27): Xaa is A or G or absent
PKPXXAPTKLSPINVLYFXXXXXXXXXYGKIPNMVVRSX

SEQ ID NO: 21841 - protein, 38 aa, Artificial Sequence
  Non-cyclic GFR-binding peptide
  MOD_RES (4)..(5): Xaa is C or S
  MOD_RES (19)..(20)..(21)..(22)..(23): Xaa is A or G
  MOD_RES (24)..(25)..(26)..(27): Xaa is A or G or absent
PASXXVPARLSPINILYFXXXXXXXXXYGKIPDMVVEA

SEQ ID NO: 21842 - protein, 38 aa, Artificial Sequence
  Non-cyclic GFR-binding peptide
  MOD_RES (3)..(4)..(35)..(37): Xaa is C or S
STXXAPVKTSPINMLYFDNGRVLLYGKIPMIVEEXGXL

SEQ ID NO: 21843 - protein, 36 aa, Artificial Sequence
  Non-cyclic GFR-binding peptide
  MOD_RES (3)..(4): Xaa is C or S
  MOD_RES (18)..(19)..(20)..(21)..(22): Xaa is A or G
  MOD_RES (23)..(24)..(25)..(26): Xaa is A or G or absent
KAXXVPTKLSPINILYFXXXXXXXXXYGKIPGMAVS

SEQ ID NO: 21844 - protein, 34 aa, Artificial Sequence
  Non-cyclic GFR-binding peptide
  MOD_RES (32)..(34): Xaa is C or S
APTKLSPINVLYFDSSNNVIYGKIPNMVVKAXGX

SEQ ID NO: 21845 - protein, 39 aa, Artificial Sequence
  Non-cyclic GFR-binding peptide
  MOD_RES (4)..(5)..(39): Xaa is C or S
  MOD_RES (19)..(20)..(21)..(22)..(23): Xaa is A or G
  MOD_RES (24)..(25)..(26)..(27): Xaa is A or G or absent
PKAXXVPTELSPINMLYFXXXXXXXXXYGKIPDMVVEGX

SEQ ID NO: 21846 - protein, 40 aa, Artificial Sequence
  Non-cyclic GFR-binding peptide
  MOD_RES (5)..(6)..(38)..(40): Xaa is C or S
IPKAXXVPTELSPINMLYFDENEKVVYGKIPDMVVEGXGX

SEQ ID NO: 21847 - protein, 34 aa, Artificial Sequence
  Non-cyclic GFR-binding peptide
  MOD_RES (1)..(2)..(34): Xaa is C or S
XXVPTELSPINMLYFDEYDKVVYGKIPEMVVEGX

SEQ ID NO: 21848 - protein, 33 aa, Artificial Sequence
  Non-cyclic GFR-binding peptide
  MOD_RES (14)..(15)..(16)..(17)..(18): Xaa is A or G
  MOD_RES (19)..(20)..(21)..(22): Xaa is A or G or absent
APTQLSPINVLYFXXXXXXXXXYGKIPNMVVRA

SEQ ID NO: 21849 - protein, 40 aa, Artificial Sequence
  Non-cyclic GFR-binding peptide
  MOD_RES (2)..(3)..(37)..(39): Xaa is C or S
  MOD_RES (17)..(18)..(19)..(20)..(21): Xaa is A or G
  MOD_RES (22)..(23)..(24)..(25): Xaa is A or G or absent
PXXAPTQLSPINVLYFXXXXXXXXXYGKIPNMVVRAXGXH

SEQ ID NO: 21850 - protein, 36 aa, Artificial Sequence
  Non-cyclic GFR-binding peptide
  MOD_RES (34)..(36): Xaa is C or S
  MOD_RES (14)..(15)..(16)..(17)..(18): Xaa is A or G
  MOD_RES (19)..(20)..(21)..(22): Xaa is A or G or absent
VPTRLSPINILYFXXXXXXXXXYGKIPDMVVESXGX

SEQ ID NO: 21851 - protein, 39 aa, Artificial Sequence
  Non-cyclic GFR-binding peptide
  MOD_RES (4)..(5)..(39): Xaa is C or S
  MOD_RES (19)..(20)..(21)..(22)..(23): Xaa is A or G
  MOD_RES (24)..(25)..(26)..(27): Xaa is A or G or absent
PPTXXVPTRLSPINILYFXXXXXXXXXYGKIPDMVVESX

SEQ ID NO: 21852 - protein, 37 aa, Artificial Sequence
  Non-cyclic GFR-binding peptide
  MOD_RES (1)..(2)..(34)..(36): Xaa is C or S
XXVPTELSPINMLYFDEYDKVVYGKIPEMVVEGXGXR

SEQ ID NO: 21853 - protein, 39 aa, Artificial Sequence
  Non-cyclic GFR-binding peptide
  MOD_RES (5)..(6): Xaa is C or S
  MOD_RES (20)..(21)..(22)..(23)..(24): Xaa is A or G
  MOD_RES (25)..(26)..(27)..(28): Xaa is A or G or absent
APASXXVPARLSPINILYFXXXXXXXXXYGKIPDMVVEA

SEQ ID NO: 21854 - protein, 37 aa, Artificial Sequence
  Non-cyclic GFR-binding peptide
  MOD_RES (1)..(2)..(34)..(36): Xaa is C or S
XXVPTRLSPINILYFDSANNVVYGKIPDMVVESXGXR

SEQ ID NO: 21855 - protein, 37 aa, Artificial Sequence
  Non-cyclic GFR-binding peptide
  MOD_RES (3)..(4)..(36): Xaa is C or S
KAXXVPTKLSPINILYFDKGVVTYYGKIPGMAVSEXG

SEQ ID NO: 21856 - protein, 36 aa, Artificial Sequence
  Non-cyclic GFR-binding peptide
  MOD_RES (2)..(3): Xaa is C or S
  MOD_RES (17)..(18)..(19)..(20)..(21): Xaa is A or G
  MOD_RES (22)..(23)..(24)..(25): Xaa is A or G or absent
AXXAPTKLSPINVLYFXXXXXXXXXYGKIPNMVVKA

SEQ ID NO: 21857 - protein, 38 aa, Artificial Sequence
  Non-cyclic GFR-binding peptide
  MOD_RES (3)..(4)..(36)..(38): Xaa is C or S
KAXXAPTKLSPINVLYFDSSNNVIYGKIPNMVVKAXGX

SEQ ID NO: 21858 - protein, 36 aa, Artificial Sequence
  Non-cyclic GFR-binding peptide
  MOD_RES (4)..(5): Xaa is C or S
PKPXXAPTKLSPINVLYFDDSSNVIYGKIPNMVVRS

SEQ ID NO: 21859 - protein, 38 aa, Artificial Sequence
  Non-cyclic GFR-binding peptide
  MOD_RES (2)..(3)..(38): Xaa is C or S
  MOD_RES (17)..(18)..(19)..(20)..(21): Xaa is A or G
  MOD_RES (22)..(23)..(24)..(25): Xaa is A or G or absent
AXXVPTKLSPINVLYFXXXXXXXXXYGKIPEGMSVAEX

SEQ ID NO: 21860 - protein, 35 aa, Artificial Sequence
  Non-cyclic GFR-binding peptide
  MOD_RES (1)..(2)..(34): Xaa is C or S
XXAPTKLSPINVLYFDDSSNVIYGKIPNMVVRSXG

SEQ ID NO: 21861 - protein, 41 aa, Artificial Sequence
  Non-cyclic GFR-binding peptide
  MOD_RES (3)..(4)..(38)..(40): Xaa is C or S
  MOD_RES (18)..(19)..(20)..(21)..(22): Xaa is A or G
  MOD_RES (23)..(24)..(25)..(26): Xaa is A or G or absent
KPXXAPTKLSPINVLYFXXXXXXXXXYGKIPNMVVRSXGXH

SEQ ID NO: 21862 - protein, 42 aa, Artificial Sequence
  Non-cyclic GFR-binding peptide
  MOD_RES (5)..(39)..(41): Xaa is C or S
  MOD_RES (19)..(20)..(21)..(22)..(23): Xaa is A or G
  MOD_RES (24)..(25)..(26)..(27): Xaa is A or G or absent
TKPTXAPTKLSPINVLYFXXXXXXXXXYGKIPNMVVRSXGXH

SEQ ID NO: 21863 - protein, 38 aa, Artificial Sequence
  Non-cyclic GFR-binding peptide
  MOD_RES (3)..(4)..(36)..(38): Xaa is C or S
PTXXVPTRLSPINILYFDSANNVVYGKIPDMVVESXGX

SEQ ID NO: 21864 - protein, 38 aa, Artificial Sequence
  Non-cyclic GFR-binding peptide
  MOD_RES (7)..(7): Xaa is C or S
HVTKPTXAPTKLSPINVLYFDDSSNVIYGKIPNMVVRS

SEQ ID NO: 21865 - protein, 37 aa, Artificial Sequence
  Non-cyclic GFR-binding peptide
  MOD_RES (1)..(35)..(37): Xaa is C or S
  MOD_RES (15)..(16)..(17)..(18)..(19): Xaa is A or G
  MOD_RES (20)..(21)..(22)..(23): Xaa is A or G or absent
XAPTQLSPINVLYFXXXXXXXXXYGKIPNMVVRAXGX

SEQ ID NO: 21866 - protein, 34 aa, Artificial Sequence
  Non-cyclic GFR-binding peptide
  MOD_RES (32)..(34): Xaa is C or S
APTKLSPINVLYFDDSSNVIYGKIPNMVVRSXGX

SEQ ID NO: 21867 - protein, 40 aa, Artificial Sequence
  Non-cyclic GFR-binding peptide
  MOD_RES (5)..(6)..(38)..(40): Xaa is C or S
IPKAXXVPTELSPINMLYFDEYDKVVYGKIPEMVVEGXGX

SEQ ID NO: 21868 - protein, 42 aa, Artificial Sequence
  Non-cyclic GFR-binding peptide
  MOD_RES (6)..(7)..(41): Xaa is C or S
  MOD_RES (21)..(22)..(23)..(24)..(25): Xaa is A or G
  MOD_RES (26)..(27)..(28)..(29): Xaa is A or G or absent
TVPKPXXAPTQLSPINVLYFXXXXXXXXXYGKIPNMVVRAXG

SEQ ID NO: 21869 - protein, 40 aa, Artificial Sequence
  Non-cyclic GFR-binding peptide
  MOD_RES (6)..(7): Xaa is C or S
  MOD_RES (21)..(22)..(23)..(24)..(25): Xaa is A or G
  MOD_RES (26)..(27)..(28)..(29): Xaa is A or G or absent
YVPKPXXAPTKLSPINVLYFXXXXXXXXXYGKIPNMVVRS

SEQ ID NO: 21870 - protein, 33 aa, Artificial Sequence
  Non-cyclic GFR-binding peptide
  MOD_RES (31)..(33): Xaa is C or S
APVKTSPINMLYFDNGRVLLYGKIPMIVEEXGX

SEQ ID NO: 21871 - protein, 35 aa, Artificial Sequence
  Non-cyclic GFR-binding peptide
  MOD_RES (1)..(35): Xaa is C or S
  MOD_RES (15)..(16)..(17)..(18)..(19): Xaa is A or G
  MOD_RES (20)..(21)..(22)..(23): Xaa is A or G or absent
XVPTELSPINMLYFXXXXXXXXXYGKIPDMVVEGX

SEQ ID NO: 21872 - protein, 37 aa, Artificial Sequence
  Non-cyclic GFR-binding peptide
  MOD_RES (6)..(7): Xaa is C or S
SIPKAXXVPTELSPINMLYFDEYDKVVYGKIPEMVVE

SEQ ID NO: 21873 - protein, 37 aa, Artificial Sequence
  Non-cyclic GFR-binding peptide
  MOD_RES (5)..(6): Xaa is C or S
VPKPXXAPTKLSPINVLYFDDSSNVIYGKIPNMVVRS

SEQ ID NO: 21874 - protein, 43 aa, Artificial Sequence
  Non-cyclic GFR-binding peptide
  MOD_RES (5)..(6)..(40)..(42): Xaa is C or S
  MOD_RES (20)..(21)..(22)..(23)..(24): Xaa is A or G
  MOD_RES (25)..(26)..(27)..(28): Xaa is A or G or absent
VPKPXXAPTKLSPINVLYFXXXXXXXXXYGKIPNMVVRSXGXH

SEQ ID NO: 21875 - protein, 37 aa, Artificial Sequence
  Non-cyclic GFR-binding peptide
  MOD_RES (1)..(35)..(37): Xaa is C or S
  MOD_RES (15)..(16)..(17)..(18)..(19): Xaa is A or G
  MOD_RES (20)..(21)..(22)..(23): Xaa is A or G or absent
XVPTELSPINMLYFXXXXXXXXXYGKIPDMVVEGXGX

SEQ ID NO: 21876 - protein, 36 aa, Artificial Sequence
  Non-cyclic GFR-binding peptide
  MOD_RES (1)..(2)..(34)..(36): Xaa is C or S
XXAPTQLSPINVLYFDDSSNVIYGKIPNMVVRAXGX

SEQ ID NO: 21877 - protein, 39 aa, Artificial Sequence
  Non-cyclic GFR-binding peptide
  MOD_RES (1)..(36)..(38): Xaa is C or S
  MOD_RES (15)..(16)..(17)..(18)..(19): Xaa is A or G
  MOD_RES (20)..(21)..(22)..(23): Xaa is A or G or absent
XVPTKLSPINVLYFXXXXXXXXXYGKIPEGMSVAEXGXR

SEQ ID NO: 21878 - protein, 33 aa, Artificial Sequence
  Non-cyclic GFR-binding peptide
  MOD_RES (1)..(1): Xaa is C or S
  MOD_RES (15)..(16)..(17)..(18)..(19): Xaa is A or G
  MOD_RES (20)..(21)..(22)..(23): Xaa is A or G or absent
XVPTKLSPINILYFXXXXXXXXXYGKIPGMAVS

SEQ ID NO: 21879 - protein, 40 aa, Artificial Sequence
  Non-cyclic GFR-binding peptide
  MOD_RES (4)..(5)..(38)..(40): Xaa is C or S
GKAXXVPTKLSPINVLYFDDMGVPTYGKIPEGMSVAEXGX

SEQ ID NO: 21880 - protein, 37 aa, Artificial Sequence
  Non-cyclic GFR-binding peptide
  MOD_RES (6)..(7): Xaa is C or S
STPPTXXVPTRLSPINILYFDSANNVVYGKIPDMVVE

SEQ ID NO: 21881 - protein, 36 aa, Artificial Sequence
  Non-cyclic GFR-binding peptide
  MOD_RES (3)..(4)..(36): Xaa is C or S
ASXXVPARLSPINILYFDAANNVVYGKIPDMVVEAX

SEQ ID NO: 21882 - protein, 37 aa, Artificial Sequence
  Non-cyclic GFR-binding peptide
  MOD_RES (1)..(35)..(37): Xaa is C or S
  MOD_RES (15)..(16)..(17)..(18)..(19): Xaa is A or G
  MOD_RES (20)..(21)..(22)..(23): Xaa is A or G or absent
XVPTKLSPINILYFXXXXXXXXXYGKIPGMAVSEXGX

SEQ ID NO: 21883 - protein, 38 aa, Artificial Sequence
  Non-cyclic GFR-binding peptide
  MOD_RES (1)..(35)..(37): Xaa is C or S
  MOD_RES (15)..(16)..(17)..(18)..(19): Xaa is A or G
  MOD_RES (20)..(21)..(22)..(23): Xaa is A or G or absent
XVPTELSPINMLYFXXXXXXXXXYGKIPEMVVEGXGXR

SEQ ID NO: 21884 - protein, 40 aa, Artificial Sequence
  Non-cyclic GFR-binding peptide
  MOD_RES (4)..(5)..(39): Xaa is C or S
  MOD_RES (19)..(20)..(21)..(22)..(23): Xaa is A or G
  MOD_RES (24)..(25)..(26)..(27): Xaa is A or G or absent
PKPXXAPTQLSPINVLYFXXXXXXXXXYGKIPNMVVRAXG

SEQ ID NO: 21885 - protein, 36 aa, Artificial Sequence
  Non-cyclic GFR-binding peptide
  MOD_RES (2)..(34)..(36): Xaa is C or S
TXAPTKLSPINVLYFDDSSNVIYGKIPNMVVRSXGX

SEQ ID NO: 21886 - protein, 34 aa, Artificial Sequence
  Non-cyclic GFR-binding peptide
  MOD_RES (1)..(1): Xaa is C or S
  MOD_RES (15)..(16)..(17)..(18)..(19): Xaa is A or G
  MOD_RES (20)..(21)..(22)..(23): Xaa is A or G or absent
XAPTKLSPINVLYFXXXXXXXXXYGKIPNMVVRS

SEQ ID NO: 21887 - protein, 36 aa, Artificial Sequence
  Non-cyclic GFR-binding peptide
  MOD_RES (1)..(33)..(35): Xaa is C or S
XVPTRLSPINILYFDSANNVVYGKIPDMVVESXGXR

SEQ ID NO: 21888 - protein, 41 aa, Artificial Sequence
  Non-cyclic GFR-binding peptide
  MOD_RES (4)..(5)..(39)..(41): Xaa is C or S
  MOD_RES (19)..(20)..(21)..(22)..(23): Xaa is A or G
  MOD_RES (24)..(25)..(26)..(27): Xaa is A or G or absent
PPTXXVPTRLSPINILYFXXXXXXXXXYGKIPDMVVESXGX

SEQ ID NO: 21889 - protein, 37 aa, Artificial Sequence
  Non-cyclic GFR-binding peptide
  MOD_RES (2)..(3)..(37): Xaa is C or S
  MOD_RES (17)..(18)..(19)..(20)..(21): Xaa is A or G
  MOD_RES (22)..(23)..(24)..(25): Xaa is A or G or absent
AXXAPTKLSPINVLYFXXXXXXXXXYGKIPNMVVKAX

SEQ ID NO: 21890 - protein, 37 aa, Artificial Sequence
  Non-cyclic GFR-binding peptide
  MOD_RES (3)..(35)..(37): Xaa is C or S
PTXAPTKLSPINVLYFDDSSNVIYGKIPNMVVRSXGX

SEQ ID NO: 21891 - protein, 39 aa, Artificial Sequence
  Non-cyclic GFR-binding peptide
  MOD_RES (5)..(6): Xaa is C or S
  MOD_RES (20)..(21)..(22)..(23)..(24): Xaa is A or G
  MOD_RES (25)..(26)..(27)..(28): Xaa is A or G or absent
VPKPXXAPTQLSPINVLYFXXXXXXXXXYGKIPNMVVRA

SEQ ID NO: 21892 - protein, 37 aa, Artificial Sequence
  Non-cyclic GFR-binding peptide
  MOD_RES (4)..(5)..(37): Xaa is C or S
PASXXVPARLSPINILYFDAANNVVYGKIPDMVVEAX

SEQ ID NO: 21893 - protein, 37 aa, Artificial Sequence
  Non-cyclic GFR-binding peptide
  MOD_RES (1)..(35)..(37): Xaa is C or S
  MOD_RES (15)..(16)..(17)..(18)..(19): Xaa is A or G
  MOD_RES (20)..(21)..(22)..(23): Xaa is A or G or absent
XVPTELSPINMLYFXXXXXXXXXYGKIPEMVVEGXGX

SEQ ID NO: 21894 - protein, 39 aa, Artificial Sequence
  Non-cyclic GFR-binding peptide
  MOD_RES (5)..(6)..(39): Xaa is C or S
VGKAXXVPTKLSPINVLYFDDMGVPTYGKIPEGMSVAEX

SEQ ID NO: 21895 - protein, 37 aa, Artificial Sequence
  Non-cyclic GFR-binding peptide
  MOD_RES (4)..(5): Xaa is C or S
  MOD_RES (19)..(20)..(21)..(22)..(23): Xaa is A or G
  MOD_RES (24)..(25)..(26)..(27): Xaa is A or G or absent
PKAXXVPTELSPINMLYFXXXXXXXXXYGKIPEMVVE

SEQ ID NO: 21896 - protein, 35 aa, Artificial Sequence
  Non-cyclic GFR-binding peptide
  MOD_RES (1)..(35): Xaa is C or S
  MOD_RES (15)..(16)..(17)..(18)..(19): Xaa is A or G
  MOD_RES (20)..(21)..(22)..(23): Xaa is A or G or absent
XAPTKLSPINVLYFXXXXXXXXXYGKIPNMVVRSX

SEQ ID NO: 21897 - protein, 34 aa, Artificial Sequence
  Non-cyclic GFR-binding peptide
  MOD_RES (34)..(34): Xaa is C or S
  MOD_RES (14)..(15)..(16)..(17)..(18): Xaa is A or G
  MOD_RES (19)..(20)..(21)..(22): Xaa is A or G or absent
VPTKLSPINILYFXXXXXXXXXYGKIPGMAVSEX

SEQ ID NO: 21898 - protein, 38 aa, Artificial Sequence
  Non-cyclic GFR-binding peptide
  MOD_RES (2)..(3)..(35)..(37): Xaa is C or S
SXXVPARLSPINILYFDAANNVVYGKIPDMVVEAXGXR

SEQ ID NO: 21899 - protein, 38 aa, Artificial Sequence
  Non-cyclic GFR-binding peptide
  MOD_RES (5)..(6): Xaa is C or S
  MOD_RES (20)..(21)..(22)..(23)..(24): Xaa is A or G
  MOD_RES (25)..(26)..(27)..(28): Xaa is A or G or absent
IPKAXXVPTELSPINMLYFXXXXXXXXXYGKIPEMVVE

SEQ ID NO: 21900 - protein, 32 aa, Artificial Sequence
  Non-cyclic GFR-binding peptide
  MOD_RES (14)..(15)..(16)..(17)..(18): Xaa is A or G
  MOD_RES (19)..(20)..(21)..(22): Xaa is A or G or absent
APTKLSPINVLYFXXXXXXXXXYGKIPNMVVR

SEQ ID NO: 21901 - protein, 36 aa, Artificial Sequence
  Non-cyclic GFR-binding peptide
  MOD_RES (3)..(4): Xaa is C or S
  MOD_RES (18)..(19)..(20)..(21)..(22): Xaa is A or G
  MOD_RES (23)..(24)..(25)..(26): Xaa is A or G or absent
KAXXAPTKLSPINVLYFXXXXXXXXXYGKIPNMVVK

SEQ ID NO: 21902 - protein, 44 aa, Artificial Sequence
  Non-cyclic GFR-binding peptide
  MOD_RES (6)..(7)..(41)..(43): Xaa is C or S
  MOD_RES (21)..(22)..(23)..(24)..(25): Xaa is A or G
  MOD_RES (26)..(27)..(28)..(29): Xaa is A or G or absent
HVPKPXXAPTKLSPINVLYFXXXXXXXXXYGKIPNMVVRSXGXH

SEQ ID NO: 21903 - protein, 32 aa, Artificial Sequence
  Non-cyclic GFR-binding peptide
  MOD_RES (1)..(1): Xaa is C or S
XVPTKLSPINILYFDKGVVTYYGKIPGMAVSE

SEQ ID NO: 21904 - protein, 40 aa, Artificial Sequence
  Non-cyclic GFR-binding peptide
  MOD_RES (2)..(3)..(37)..(39): Xaa is C or S
  MOD_RES (17)..(18)..(19)..(20)..(21): Xaa is A or G
  MOD_RES (22)..(23)..(24)..(25): Xaa is A or G or absent
AXXVPTELSPINMLYFXXXXXXXXXYGKIPDMVVEGXGXR

SEQ ID NO: 21905 - protein, 38 aa, Artificial Sequence
  Non-cyclic GFR-binding peptide
  MOD_RES (5)..(6): Xaa is C or S
VGKAXXVPTKLSPINVLYFDDMGVPTYGKIPEGMSVAE

SEQ ID NO: 21906 - protein, 43 aa, Artificial Sequence
  Non-cyclic GFR-binding peptide
  MOD_RES (6)..(7)..(41)..(43): Xaa is C or S
  MOD_RES (21)..(22)..(23)..(24)..(25): Xaa is A or G
  MOD_RES (26)..(27)..(28)..(29): Xaa is A or G or absent
HVPKPXXAPTKLSPINVLYFXXXXXXXXXYGKIPNMVVRSXGX

SEQ ID NO: 21907 - protein, 32 aa, Artificial Sequence
  Non-cyclic GFR-binding peptide
  MOD_RES (2)..(2): Xaa is C or S
TXAPTKLSPINVLYFDDSSNVIYGKIPNMVVR

SEQ ID NO: 21908 - protein, 37 aa, Artificial Sequence
  Non-cyclic GFR-binding peptide
  MOD_RES (4)..(5): Xaa is C or S
  MOD_RES (19)..(20)..(21)..(22)..(23): Xaa is A or G
  MOD_RES (24)..(25)..(26)..(27): Xaa is A or G or absent
PKPXXAPTKLSPINVLYFXXXXXXXXXYGKIPNMVVR

SEQ ID NO: 21909 - protein, 37 aa, Artificial Sequence
  Non-cyclic GFR-binding peptide
  MOD_RES (1)..(2)..(34)..(36): Xaa is C or S
XXVPTELSPINMLYFDENEKVVYGKIPDMVVEGXGXR

SEQ ID NO: 21910 - protein, 37 aa, Artificial Sequence
  Non-cyclic GFR-binding peptide
  MOD_RES (2)..(3)..(35)..(37): Xaa is C or S
PXXAPTKLSPINVLYFDDSSNVIYGKIPNMVVRSXGX

SEQ ID NO: 21911 - protein, 37 aa, Artificial Sequence
  Non-cyclic GFR-binding peptide
  MOD_RES (2)..(3)..(35)..(37): Xaa is C or S
TXXVPTRLSPINILYFDSANNVVYGKIPDMVVESXGX

SEQ ID NO: 21912 - protein, 41 aa, Artificial Sequence
  Non-cyclic GFR-binding peptide
  MOD_RES (5)..(6)..(38)..(40): Xaa is C or S
VPKAXXAPTKLSPINVLYFDSSNNVIYGKIPNMVVKAXGXH

SEQ ID NO: 21913 - protein, 39 aa, Artificial Sequence
  Non-cyclic GFR-binding peptide
  MOD_RES (1)..(2)..(36)..(38): Xaa is C or S
  MOD_RES (16)..(17)..(18)..(19)..(20): Xaa is A or G
  MOD_RES (21)..(22)..(23)..(24): Xaa is A or G or absent
XXAPTKLSPINVLYFXXXXXXXXXYGKIPNMVVRSXGXH

SEQ ID NO: 21914 - protein, 35 aa, Artificial Sequence
  Non-cyclic GFR-binding peptide
  MOD_RES (2)..(34): Xaa is C or S
TXAPTKLSPINVLYFDDSSNVIYGKIPNMVVRSXG

SEQ ID NO: 21915 - protein, 34 aa, Artificial Sequence
  Non-cyclic GFR-binding peptide
  MOD_RES (1)..(33): Xaa is C or S
XVPARLSPINILYFDAANNVVYGKIPDMVVEAXG

SEQ ID NO: 21916 - protein, 35 aa, Artificial Sequence
  Non-cyclic GFR-binding peptide
  MOD_RES (4)..(5): Xaa is C or S
PPTXXVPTRLSPINILYFDSANNVVYGKIPDMVVE

SEQ ID NO: 21917 - protein, 34 aa, Artificial Sequence
  Non-cyclic GFR-binding peptide
  MOD_RES (1)..(2)..(34): Xaa is C or S
XXAPTKLSPINVLYFDSSNNVIYGKIPNMVVKAX

SEQ ID NO: 21918 - protein, 40 aa, Artificial Sequence
  Non-cyclic GFR-binding peptide
  MOD_RES (6)..(7)..(39): Xaa is C or S
YVPKPXXAPTKLSPINVLYFDDSSNVIYGKIPNMVVRSXG

SEQ ID NO: 21919 - protein, 36 aa, Artificial Sequence
  Non-cyclic GFR-binding peptide
  MOD_RES (3)..(3): Xaa is C or S
  MOD_RES (17)..(18)..(19)..(20)..(21): Xaa is A or G
  MOD_RES (22)..(23)..(24)..(25): Xaa is A or G or absent
PTXAPTKLSPINVLYFXXXXXXXXXYGKIPNMVVRS

SEQ ID NO: 21920 - protein, 39 aa, Artificial Sequence
  Non-cyclic GFR-binding peptide
  MOD_RES (5)..(6)..(38): Xaa is C or S
ASKAXXVPTKLSPINILYFDKGVVTYYGKIPGMAVSEXG

SEQ ID NO: 21921 - protein, 37 aa, Artificial Sequence
  Non-cyclic GFR-binding peptide
  MOD_RES (34)..(36): Xaa is C or S
  MOD_RES (14)..(15)..(16)..(17)..(18): Xaa is A or G
  MOD_RES (19)..(20)..(21)..(22): Xaa is A or G or absent
APTKLSPINVLYFXXXXXXXXXYGKIPNMVVKAXGXH

SEQ ID NO: 21922 - protein, 38 aa, Artificial Sequence
  Non-cyclic GFR-binding peptide
  MOD_RES (4)..(5)..(37): Xaa is C or S
PKAXXAPTKLSPINVLYFDSSNNVIYGKIPNMVVKAXG

SEQ ID NO: 21923 - protein, 32 aa, Artificial Sequence
  Non-cyclic GFR-binding peptide
  MOD_RES (32)..(32): Xaa is C or S
VPARLSPINILYFDAANNVVYGKIPDMVVEAX

SEQ ID NO: 21924 - protein, 39 aa, Artificial Sequence
  Non-cyclic GFR-binding peptide
  MOD_RES (2)..(3)..(38): Xaa is C or S
  MOD_RES (17)..(18)..(19)..(20)..(21): Xaa is A or G
  MOD_RES (22)..(23)..(24)..(25): Xaa is A or G or absent
AXXVPTKLSPINVLYFXXXXXXXXXYGKIPEGMSVAEXG

SEQ ID NO: 21925 - protein, 35 aa, Artificial Sequence
  Non-cyclic GFR-binding peptide
  MOD_RES (4)..(5): Xaa is C or S
PKAXXAPTKLSPINVLYFDSSNNVIYGKIPNMVVK

SEQ ID NO: 21926 - protein, 34 aa, Artificial Sequence
  Non-cyclic GFR-binding peptide
  MOD_RES (33)..(33): Xaa is C or S
  MOD_RES (14)..(15)..(16)..(17)..(18): Xaa is A or G
  MOD_RES (19)..(20)..(21)..(22): Xaa is A or G or absent
APVKTSPINMLYFXXXXXXXXXYGKIPMIVEEXG

SEQ ID NO: 21927 - protein, 34 aa, Artificial Sequence
  Non-cyclic GFR-binding peptide
  MOD_RES (3)..(4): Xaa is C or S
KPXXAPTKLSPINVLYFDDSSNVIYGKIPNMVVR

SEQ ID NO: 21928 - protein, 41 aa, Artificial Sequence
  Non-cyclic GFR-binding peptide
  MOD_RES (6)..(7)..(39)..(41): Xaa is C or S
KIPKAXXVPTELSPINMLYFDENEKVVYGKIPDMVVEGXGX

SEQ ID NO: 21929 - protein, 37 aa, Artificial Sequence
  Non-cyclic GFR-binding peptide
  MOD_RES (2)..(36): Xaa is C or S
  MOD_RES (16)..(17)..(18)..(19)..(20): Xaa is A or G
  MOD_RES (21)..(22)..(23)..(24): Xaa is A or G or absent
TXAPTKLSPINVLYFXXXXXXXXXYGKIPNMVVRSXG

SEQ ID NO: 21930 - protein, 35 aa, Artificial Sequence
  Non-cyclic GFR-binding peptide
  MOD_RES (4)..(5): Xaa is C or S
SKAXXVPTKLSPINILYFDKGVVTYYGKIPGMAVS

SEQ ID NO: 21931 - protein, 36 aa, Artificial Sequence
  Non-cyclic GFR-binding peptide
  MOD_RES (3)..(4): Xaa is C or S
  MOD_RES (18)..(19)..(20)..(21)..(22): Xaa is A or G
  MOD_RES (23)..(24)..(25)..(26): Xaa is A or G or absent
STXXAPVKTSPINMLYFXXXXXXXXXYGKIPMIVEE

SEQ ID NO: 21932 - protein, 39 aa, Artificial Sequence
  Non-cyclic GFR-binding peptide
  MOD_RES (2)..(3)..(37)..(39): Xaa is C or S
  MOD_RES (17)..(18)..(19)..(20)..(21): Xaa is A or G
  MOD_RES (22)..(23)..(24)..(25): Xaa is A or G or absent
AXXVPTELSPINMLYFXXXXXXXXXYGKIPEMVVEGXGX

SEQ ID NO: 21933 - protein, 38 aa, Artificial Sequence
  Non-cyclic GFR-binding peptide
  MOD_RES (4)..(5)..(37): Xaa is C or S
PASXXVPARLSPINILYFDAANNVVYGKIPDMVVEAXG

SEQ ID NO: 21934 - protein, 39 aa, Artificial Sequence
  Non-cyclic GFR-binding peptide
  MOD_RES (4)..(5)..(37)..(39): Xaa is C or S
PASXXVPARLSPINILYFDAANNVVYGKIPDMVVEAXGX

SEQ ID NO: 21935 - protein, 35 aa, Artificial Sequence
  Non-cyclic GFR-binding peptide
  MOD_RES (34)..(34): Xaa is C or S
  MOD_RES (14)..(15)..(16)..(17)..(18): Xaa is A or G
  MOD_RES (19)..(20)..(21)..(22): Xaa is A or G or absent
VPTRLSPINILYFXXXXXXXXXYGKIPDMVVESXG

SEQ ID NO: 21936 - protein, 40 aa, Artificial Sequence
  Non-cyclic GFR-binding peptide
  MOD_RES (5)..(6)..(40): Xaa is C or S
  MOD_RES (20)..(21)..(22)..(23)..(24): Xaa is A or G
  MOD_RES (25)..(26)..(27)..(28): Xaa is A or G or absent
VPKPXXAPTKLSPINVLYFXXXXXXXXXYGKIPNMVVRSX

SEQ ID NO: 21937 - protein, 37 aa, Artificial Sequence
  Non-cyclic GFR-binding peptide
  MOD_RES (3)..(37): Xaa is C or S
  MOD_RES (17)..(18)..(19)..(20)..(21): Xaa is A or G
  MOD_RES (22)..(23)..(24)..(25): Xaa is A or G or absent
PTXAPTKLSPINVLYFXXXXXXXXXYGKIPNMVVRSX

SEQ ID NO: 21938 - protein, 35 aa, Artificial Sequence
  Non-cyclic GFR-binding peptide
  MOD_RES (34)..(34): Xaa is C or S
  MOD_RES (14)..(15)..(16)..(17)..(18): Xaa is A or G
  MOD_RES (19)..(20)..(21)..(22): Xaa is A or G or absent
APTKLSPINVLYFXXXXXXXXXYGKIPNMVVRSXG

SEQ ID NO: 21939 - protein, 38 aa, Artificial Sequence
  Non-cyclic GFR-binding peptide
  MOD_RES (5)..(6): Xaa is C or S
  MOD_RES (20)..(21)..(22)..(23)..(24): Xaa is A or G
  MOD_RES (25)..(26)..(27)..(28): Xaa is A or G or absent
IPKAXXVPTELSPINMLYFXXXXXXXXXYGKIPDMVVE

SEQ ID NO: 21940 - protein, 32 aa, Artificial Sequence
  Non-cyclic GFR-binding peptide
  MOD_RES (1)..(1): Xaa is C or S
XAPTKLSPINVLYFDSSNNVIYGKIPNMVVKA

SEQ ID NO: 21941 - protein, 38 aa, Artificial Sequence
  Non-cyclic GFR-binding peptide
  MOD_RES (6)..(7): Xaa is C or S
AVPKAXXAPTKLSPINVLYFDSSNNVIYGKIPNMVVKA

SEQ ID NO: 21942 - protein, 34 aa, Artificial Sequence
  Non-cyclic GFR-binding peptide
  MOD_RES (33)..(33): Xaa is C or S
VPTKLSPINVLYFDDMGVPTYGKIPEGMSVAEXG

SEQ ID NO: 21943 - protein, 40 aa, Artificial Sequence
  Non-cyclic GFR-binding peptide
  MOD_RES (6)..(38)..(40): Xaa is C or S
VTKPTXAPTKLSPINVLYFDDSSNVIYGKIPNMVVRSXGX

SEQ ID NO: 21944 - protein, 37 aa, Artificial Sequence
  Non-cyclic GFR-binding peptide
  MOD_RES (5)..(6): Xaa is C or S
VPKPXXAPTQLSPINVLYFDDSSNVIYGKIPNMVVRA

SEQ ID NO: 21945 - protein, 37 aa, Artificial Sequence
  Non-cyclic GFR-binding peptide
  MOD_RES (6)..(7): Xaa is C or S
AVPKAXXAPTKLSPINVLYFDSSNNVIYGKIPNMVVK

SEQ ID NO: 21946 - protein, 35 aa, Artificial Sequence
  Non-cyclic GFR-binding peptide
  MOD_RES (3)..(4): Xaa is C or S
KAXXVPTELSPINMLYFDEYDKVVYGKIPEMVVEG

SEQ ID NO: 21947 - protein, 40 aa, Artificial Sequence
  Non-cyclic GFR-binding peptide
  MOD_RES (2)..(3)..(37)..(39): Xaa is C or S
  MOD_RES (17)..(18)..(19)..(20)..(21): Xaa is A or G
  MOD_RES (22)..(23)..(24)..(25): Xaa is A or G or absent
SXXVPARLSPINILYFXXXXXXXXXYGKIPDMVVEAXGXR

SEQ ID NO: 21948 - protein, 36 aa, Artificial Sequence
  Non-cyclic GFR-binding peptide
  MOD_RES (5)..(6): Xaa is C or S
VPKPXXAPTQLSPINVLYFDDSSNVIYGKIPNMVVR

SEQ ID NO: 21949 - protein, 39 aa, Artificial Sequence
  Non-cyclic GFR-binding peptide
  MOD_RES (3)..(4)..(38): Xaa is C or S
  MOD_RES (18)..(19)..(20)..(21)..(22): Xaa is A or G
  MOD_RES (23)..(24)..(25)..(26): Xaa is A or G or absent
PTXXVPTRLSPINILYFXXXXXXXXXYGKIPDMVVESXG

SEQ ID NO: 21950 - protein, 32 aa, Artificial Sequence
  Non-cyclic GFR-binding peptide
  MOD_RES (14)..(15)..(16)..(17)..(18): Xaa is A or G
  MOD_RES (19)..(20)..(21)..(22): Xaa is A or G or absent
VPTKLSPINILYFXXXXXXXXXYGKIPGMAVS

SEQ ID NO: 21951 - protein, 40 aa, Artificial Sequence
  Non-cyclic GFR-binding peptide
  MOD_RES (2)..(3)..(37)..(39): Xaa is C or S
  MOD_RES (17)..(18)..(19)..(20)..(21): Xaa is A or G
  MOD_RES (22)..(23)..(24)..(25): Xaa is A or G or absent
PXXAPTKLSPINVLYFXXXXXXXXXYGKIPNMVVRSXGXH

SEQ ID NO: 21952 - protein, 40 aa, Artificial Sequence
  Non-cyclic GFR-binding peptide
  MOD_RES (4)..(5)..(39): Xaa is C or S
  MOD_RES (19)..(20)..(21)..(22)..(23): Xaa is A or G
  MOD_RES (24)..(25)..(26)..(27): Xaa is A or G or absent
PKAXXVPTELSPINMLYFXXXXXXXXXYGKIPEMVVEGXG

SEQ ID NO: 21953 - protein, 42 aa, Artificial Sequence
  Non-cyclic GFR-binding peptide
  MOD_RES (4)..(5)..(39)..(41): Xaa is C or S
  MOD_RES (19)..(20)..(21)..(22)..(23): Xaa is A or G
  MOD_RES (24)..(25)..(26)..(27): Xaa is A or G or absent
SKAXXVPTKLSPINILYFXXXXXXXXXYGKIPGMAVSEXGXR

SEQ ID NO: 21954 - protein, 42 aa, Artificial Sequence
  Non-cyclic GFR-binding peptide
  MOD_RES (7)..(39)..(41): Xaa is C or S
HVTKPTXAPTKLSPINVLYFDDSSNVIYGKIPNMVVRSXGXH

SEQ ID NO: 21955 - protein, 38 aa, Artificial Sequence
  Non-cyclic GFR-binding peptide
  MOD_RES (1)..(35)..(37): Xaa is C or S
  MOD_RES (15)..(16)..(17)..(18)..(19): Xaa is A or G
  MOD_RES (20)..(21)..(22)..(23): Xaa is A or G or absent
XVPTRLSPINILYFXXXXXXXXXYGKIPDMVVESXGXR

SEQ ID NO: 21956 - protein, 33 aa, Artificial Sequence
  Non-cyclic GFR-binding peptide
  MOD_RES (1)..(2)..(33): Xaa is C or S
XXAPVKTSPINMLYFDNGRVLLYGKIPMIVEEX

SEQ ID NO: 21957 - protein, 36 aa, Artificial Sequence
  Non-cyclic GFR-binding peptide
  MOD_RES (1)..(2)..(36): Xaa is C or S
  MOD_RES (16)..(17)..(18)..(19)..(20): Xaa is A or G
  MOD_RES (21)..(22)..(23)..(24): Xaa is A or G or absent
XXAPTKLSPINVLYFXXXXXXXXXYGKIPNMVVKAX

SEQ ID NO: 21958 - protein, 42 aa, Artificial Sequence
  Non-cyclic GFR-binding peptide
  MOD_RES (4)..(5)..(39)..(41): Xaa is C or S
  MOD_RES (19)..(20)..(21)..(22)..(23): Xaa is A or G
  MOD_RES (24)..(25)..(26)..(27): Xaa is A or G or absent
PKPXXAPTKLSPINVLYFXXXXXXXXXYGKIPNMVVRSXGXH

SEQ ID NO: 21959 - protein, 39 aa, Artificial Sequence
  Non-cyclic GFR-binding peptide
  MOD_RES (5)..(39): Xaa is C or S
  MOD_RES (19)..(20)..(21)..(22)..(23): Xaa is A or G
  MOD_RES (24)..(25)..(26)..(27): Xaa is A or G or absent
TKPTXAPTKLSPINVLYFXXXXXXXXXYGKIPNMVVRSX

SEQ ID NO: 21960 - protein, 35 aa, Artificial Sequence
  Non-cyclic GFR-binding peptide
  MOD_RES (32)..(34): Xaa is C or S
VPARLSPINILYFDAANNVVYGKIPDMVVEAXGXR

SEQ ID NO: 21961 - protein, 41 aa, Artificial Sequence
  Non-cyclic GFR-binding peptide
  MOD_RES (4)..(5)..(38)..(40): Xaa is C or S
GKAXXVPTKLSPINVLYFDDMGVPTYGKIPEGMSVAEXGXR

SEQ ID NO: 21962 - protein, 32 aa, Artificial Sequence
  Non-cyclic GFR-binding peptide
  MOD_RES (32)..(32): Xaa is C or S
APTQLSPINVLYFDDSSNVIYGKIPNMVVRAX

SEQ ID NO: 21963 - protein, 41 aa, Artificial Sequence
  Non-cyclic GFR-binding peptide
  MOD_RES (5)..(6)..(38)..(40): Xaa is C or S
IPKAXXVPTELSPINMLYFDENEKVVYGKIPDMVVEGXGXR

SEQ ID NO: 21964 - protein, 39 aa, Artificial Sequence
  Non-cyclic GFR-binding peptide
  MOD_RES (4)..(5)..(36)..(38): Xaa is C or S
PSTXXAPVKTSPINMLYFDNGRVLLYGKIPMIVEEXGXL

SEQ ID NO: 21965 - protein, 34 aa, Artificial Sequence
  Non-cyclic GFR-binding peptide
  MOD_RES (34)..(34): Xaa is C or S
  MOD_RES (14)..(15)..(16)..(17)..(18): Xaa is A or G
  MOD_RES (19)..(20)..(21)..(22): Xaa is A or G or absent
VPTELSPINMLYFXXXXXXXXXYGKIPDMVVEGX

SEQ ID NO: 21966 - protein, 38 aa, Artificial Sequence
  Non-cyclic GFR-binding peptide
  MOD_RES (5)..(6)..(38): Xaa is C or S
VPKPXXAPTQLSPINVLYFDDSSNVIYGKIPNMVVRAX

SEQ ID NO: 21967 - protein, 39 aa, Artificial Sequence
  Non-cyclic GFR-binding peptide
  MOD_RES (2)..(3)..(37)..(39): Xaa is C or S
  MOD_RES (17)..(18)..(19)..(20)..(21): Xaa is A or G
  MOD_RES (22)..(23)..(24)..(25): Xaa is A or G or absent
AXXVPTKLSPINILYFXXXXXXXXXYGKIPGMAVSEXGX

SEQ ID NO: 21968 - protein, 35 aa, Artificial Sequence
  Non-cyclic GFR-binding peptide
  MOD_RES (4)..(5): Xaa is C or S
PSTXXAPVKTSPINMLYFDNGRVLLYGKIPMIVEE

SEQ ID NO: 21969 - protein, 42 aa, Artificial Sequence
  Non-cyclic GFR-binding peptide
  MOD_RES (3)..(4)..(39)..(41): Xaa is C or S
  MOD_RES (18)..(19)..(20)..(21)..(22): Xaa is A or G
  MOD_RES (23)..(24)..(25)..(26): Xaa is A or G or absent
KAXXVPTKLSPINVLYFXXXXXXXXXYGKIPEGMSVAEXGXR

SEQ ID NO: 21970 - protein, 37 aa, Artificial Sequence
  Non-cyclic GFR-binding peptide
  MOD_RES (3)..(4): Xaa is C or S
  MOD_RES (18)..(19)..(20)..(21)..(22): Xaa is A or G
  MOD_RES (23)..(24)..(25)..(26): Xaa is A or G or absent
KPXXAPTQLSPINVLYFXXXXXXXXXYGKIPNMVVRA

SEQ ID NO: 21971 - protein, 35 aa, Artificial Sequence
  Non-cyclic GFR-binding peptide
  MOD_RES (2)..(3)..(35): Xaa is C or S
SXXVPARLSPINILYFDAANNVVYGKIPDMVVEAX

SEQ ID NO: 21972 - protein, 38 aa, Artificial Sequence
  Non-cyclic GFR-binding peptide
  MOD_RES (2)..(3)..(37): Xaa is C or S
  MOD_RES (17)..(18)..(19)..(20)..(21): Xaa is A or G
  MOD_RES (22)..(23)..(24)..(25): Xaa is A or G or absent
PXXAPTKLSPINVLYFXXXXXXXXXYGKIPNMVVRSXG

SEQ ID NO: 21973 - protein, 34 aa, Artificial Sequence
  Non-cyclic GFR-binding peptide
  MOD_RES (34)..(34): Xaa is C or S
  MOD_RES (14)..(15)..(16)..(17)..(18): Xaa is A or G
  MOD_RES (19)..(20)..(21)..(22): Xaa is A or G or absent
APTKLSPINVLYFXXXXXXXXXYGKIPNMVVRSX

SEQ ID NO: 21974 - protein, 35 aa, Artificial Sequence
  Non-cyclic GFR-binding peptide
  MOD_RES (2)..(3)..(35): Xaa is C or S
AXXVPTKLSPINILYFDKGVVTYYGKIPGMAVSEX

SEQ ID NO: 21975 - protein, 43 aa, Artificial Sequence
  Non-cyclic GFR-binding peptide
  MOD_RES (6)..(7)..(41)..(43): Xaa is C or S
  MOD_RES (21)..(22)..(23)..(24)..(25): Xaa is A or G
  MOD_RES (26)..(27)..(28)..(29): Xaa is A or G or absent
YVPKPXXAPTKLSPINVLYFXXXXXXXXXYGKIPNMVVRSXGX

SEQ ID NO: 21976 - protein, 41 aa, Artificial Sequence
  Non-cyclic GFR-binding peptide
  MOD_RES (4)..(5)..(39)..(41): Xaa is C or S
  MOD_RES (19)..(20)..(21)..(22)..(23): Xaa is A or G
  MOD_RES (24)..(25)..(26)..(27): Xaa is A or G or absent
PKPXXAPTQLSPINVLYFXXXXXXXXXYGKIPNMVVRAXGX

SEQ ID NO: 21977 - protein, 35 aa, Artificial Sequence
  Non-cyclic GFR-binding peptide
  MOD_RES (1)..(34): Xaa is C or S
  MOD_RES (15)..(16)..(17)..(18)..(19): Xaa is A or G
  MOD_RES (20)..(21)..(22)..(23): Xaa is A or G or absent
XAPVKTSPINMLYFXXXXXXXXXYGKIPMIVEEXG

SEQ ID NO: 21978 - protein, 37 aa, Artificial Sequence
  Non-cyclic GFR-binding peptide
  MOD_RES (4)..(5)..(37): Xaa is C or S
PKPXXAPTQLSPINVLYFDDSSNVIYGKIPNMVVRAX

SEQ ID NO: 21979 - protein, 39 aa, Artificial Sequence
  Non-cyclic GFR-binding peptide
  MOD_RES (2)..(3)..(37)..(39): Xaa is C or S
  MOD_RES (17)..(18)..(19)..(20)..(21): Xaa is A or G
  MOD_RES (22)..(23)..(24)..(25): Xaa is A or G or absent
AXXVPTELSPINMLYFXXXXXXXXXYGKIPDMVVEGXGX

SEQ ID NO: 21980 - protein, 34 aa, Artificial Sequence
  Non-cyclic GFR-binding peptide
  MOD_RES (1)..(2): Xaa is C or S
XXVPTKLSPINVLYFDDMGVPTYGKIPEGMSVAE

SEQ ID NO: 21981 - protein, 35 aa, Artificial Sequence
  Non-cyclic GFR-binding peptide
  MOD_RES (1)..(35): Xaa is C or S
  MOD_RES (15)..(16)..(17)..(18)..(19): Xaa is A or G
  MOD_RES (20)..(21)..(22)..(23): Xaa is A or G or absent
XVPTKLSPINILYFXXXXXXXXXYGKIPGMAVSEX

SEQ ID NO: 21982 - protein, 35 aa, Artificial Sequence
  Non-cyclic GFR-binding peptide
  MOD_RES (2)..(3)..(35): Xaa is C or S
PXXAPTQLSPINVLYFDDSSNVIYGKIPNMVVRAX

SEQ ID NO: 21983 - protein, 39 aa, Artificial Sequence
  Non-cyclic GFR-binding peptide
  MOD_RES (2)..(36)..(38): Xaa is C or S
  MOD_RES (16)..(17)..(18)..(19)..(20): Xaa is A or G
  MOD_RES (21)..(22)..(23)..(24): Xaa is A or G or absent
TXAPTKLSPINVLYFXXXXXXXXXYGKIPNMVVRSXGXH

SEQ ID NO: 21984 - protein, 40 aa, Artificial Sequence
  Non-cyclic GFR-binding peptide
  MOD_RES (4)..(5)..(37)..(39): Xaa is C or S
PASXXVPARLSPINILYFDAANNVVYGKIPDMVVEAXGXR

SEQ ID NO: 21985 - protein, 36 aa, Artificial Sequence
  Non-cyclic GFR-binding peptide
  MOD_RES (1)..(2)..(34)..(36): Xaa is C or S
XXVPARLSPINILYFDAANNVVYGKIPDMVVEAXGX

SEQ ID NO: 21986 - protein, 40 aa, Artificial Sequence
  Non-cyclic GFR-binding peptide
  MOD_RES (4)..(5)..(37)..(39): Xaa is C or S
PKAXXAPTKLSPINVLYFDSSNNVIYGKIPNMVVKAXGXH

SEQ ID NO: 21987 - protein, 37 aa, Artificial Sequence
  Non-cyclic GFR-binding peptide
  MOD_RES (5)..(37): Xaa is C or S
TKPTXAPTKLSPINVLYFDDSSNVIYGKIPNMVVRSX

SEQ ID NO: 21988 - protein, 41 aa, Artificial Sequence
  Non-cyclic GFR-binding peptide
  MOD_RES (5)..(6)..(38)..(40): Xaa is C or S
APASXXVPARLSPINILYFDAANNVVYGKIPDMVVEAXGXR

SEQ ID NO: 21989 - protein, 42 aa, Artificial Sequence
  Non-cyclic GFR-binding peptide
  MOD_RES (5)..(6)..(40)..(42): Xaa is C or S
  MOD_RES (20)..(21)..(22)..(23)..(24): Xaa is A or G
  MOD_RES (25)..(26)..(27)..(28): Xaa is A or G or absent
APASXXVPARLSPINILYFXXXXXXXXXYGKIPDMVVEAXGX

SEQ ID NO: 21990 - protein, 35 aa, Artificial Sequence
  Non-cyclic GFR-binding peptide
  MOD_RES (1)..(35): Xaa is C or S
  MOD_RES (15)..(16)..(17)..(18)..(19): Xaa is A or G
  MOD_RES (20)..(21)..(22)..(23): Xaa is A or G or absent
XVPTELSPINMLYFXXXXXXXXXYGKIPEMVVEGX

SEQ ID NO: 21991 - protein, 36 aa, Artificial Sequence
  Non-cyclic GFR-binding peptide
  MOD_RES (2)..(3)..(35): Xaa is C or S
AXXVPTELSPINMLYFDEYDKVVYGKIPEMVVEGXG

SEQ ID NO: 21992 - protein, 37 aa, Artificial Sequence
  Non-cyclic GFR-binding peptide
  MOD_RES (34)..(36): Xaa is C or S
  MOD_RES (14)..(15)..(16)..(17)..(18): Xaa is A or G
  MOD_RES (19)..(20)..(21)..(22): Xaa is A or G or absent
VPTRLSPINILYFXXXXXXXXXYGKIPDMVVESXGXR

SEQ ID NO: 21993 - protein, 32 aa, Artificial Sequence
  Non-cyclic GFR-binding peptide
VPTKLSPINVLYFDDMGVPTYGKIPEGMSVAE

SEQ ID NO: 21994 - protein, 38 aa, Artificial Sequence
  Non-cyclic GFR-binding peptide
  MOD_RES (2)..(3)..(36)..(38): Xaa is C or S
  MOD_RES (17)..(18)..(19)..(20)..(21): Xaa is A or G
  MOD_RES (22)..(23)..(24)..(25): Xaa is A or G or absent
TXXAPVKTSPINMLYFXXXXXXXXXYGKIPMIVEEXGX

SEQ ID NO: 21995 - protein, 38 aa, Artificial Sequence
  Non-cyclic GFR-binding peptide
  MOD_RES (3)..(4)..(38): Xaa is C or S
  MOD_RES (18)..(19)..(20)..(21)..(22): Xaa is A or G
  MOD_RES (23)..(24)..(25)..(26): Xaa is A or G or absent
PTXXVPTRLSPINILYFXXXXXXXXXYGKIPDMVVESX

SEQ ID NO: 21996 - protein, 40 aa, Artificial Sequence
  Non-cyclic GFR-binding peptide
  MOD_RES (4)..(5)..(38)..(40): Xaa is C or S
  MOD_RES (19)..(20)..(21)..(22)..(23): Xaa is A or G
  MOD_RES (24)..(25)..(26)..(27): Xaa is A or G or absent
PSTXXAPVKTSPINMLYFXXXXXXXXXYGKIPMIVEEXGX

SEQ ID NO: 21997 - protein, 35 aa, Artificial Sequence
  Non-cyclic GFR-binding peptide
  MOD_RES (1)..(2)..(34): Xaa is C or S
XXVPTKLSPINILYFDKGVVTYYGKIPGMAVSEXG

SEQ ID NO: 21998 - protein, 36 aa, Artificial Sequence
  Non-cyclic GFR-binding peptide
  MOD_RES (5)..(6): Xaa is C or S
IPKAXXVPTELSPINMLYFDENEKVVYGKIPDMVVE

SEQ ID NO: 21999 - protein, 40 aa, Artificial Sequence
  Non-cyclic GFR-binding peptide
  MOD_RES (7)..(39): Xaa is C or S
HVTKPTXAPTKLSPINVLYFDDSSNVIYGKIPNMVVRSXG

SEQ ID NO: 22000 - protein, 39 aa, Artificial Sequence
  Non-cyclic GFR-binding peptide
  MOD_RES (3)..(4)..(36)..(38): Xaa is C or S
KAXXVPTELSPINMLYFDENEKVVYGKIPDMVVEGXGXR

SEQ ID NO: 22001 - protein, 35 aa, Artificial Sequence
  Non-cyclic GFR-binding peptide
  MOD_RES (33)..(35): Xaa is C or S
VPTKLSPINVLYFDDMGVPTYGKIPEGMSVAEXGX

SEQ ID NO: 22002 - protein, 36 aa, Artificial Sequence
  Non-cyclic GFR-binding peptide
  MOD_RES (5)..(6): Xaa is C or S
VPKPXXAPTKLSPINVLYFDDSSNVIYGKIPNMVVR

SEQ ID NO: 22003 - protein, 37 aa, Artificial Sequence
  Non-cyclic GFR-binding peptide
  MOD_RES (3)..(4)..(35)..(37): Xaa is C or S
STXXAPVKTSPINMLYFDNGRVLLYGKIPMIVEEXGX

SEQ ID NO: 22004 - protein, 41 aa, Artificial Sequence
  Non-cyclic GFR-binding peptide
  MOD_RES (6)..(7)..(39)..(41): Xaa is C or S
STPPTXXVPTRLSPINILYFDSANNVVYGKIPDMVVESXGX

SEQ ID NO: 22005 - protein, 36 aa, Artificial Sequence
  Non-cyclic GFR-binding peptide
  MOD_RES (2)..(3): Xaa is C or S
  MOD_RES (17)..(18)..(19)..(20)..(21): Xaa is A or G
  MOD_RES (22)..(23)..(24)..(25): Xaa is A or G or absent
SXXVPARLSPINILYFXXXXXXXXXYGKIPDMVVEA

SEQ ID NO: 22006 - protein, 36 aa, Artificial Sequence
  Non-cyclic GFR-binding peptide
  MOD_RES (3)..(4): Xaa is C or S
  MOD_RES (18)..(19)..(20)..(21)..(22): Xaa is A or G
  MOD_RES (23)..(24)..(25)..(26): Xaa is A or G or absent
KPXXAPTQLSPINVLYFXXXXXXXXXYGKIPNMVVR

SEQ ID NO: 22007 - protein, 36 aa, Artificial Sequence
  Non-cyclic GFR-binding peptide
  MOD_RES (1)..(35): Xaa is C or S
  MOD_RES (15)..(16)..(17)..(18)..(19): Xaa is A or G
  MOD_RES (20)..(21)..(22)..(23): Xaa is A or G or absent
XVPTKLSPINILYFXXXXXXXXXYGKIPGMAVSEXG

SEQ ID NO: 22008 - protein, 32 aa, Artificial Sequence
  Non-cyclic GFR-binding peptide
  MOD_RES (14)..(15)..(16)..(17)..(18): Xaa is A or G
  MOD_RES (19)..(20)..(21)..(22): Xaa is A or G or absent
APTQLSPINVLYFXXXXXXXXXYGKIPNMVVR

SEQ ID NO: 22009 - protein, 40 aa, Artificial Sequence
  Non-cyclic GFR-binding peptide
  MOD_RES (5)..(6)..(40): Xaa is C or S
  MOD_RES (20)..(21)..(22)..(23)..(24): Xaa is A or G
  MOD_RES (25)..(26)..(27)..(28): Xaa is A or G or absent
TPPTXXVPTRLSPINILYFXXXXXXXXXYGKIPDMVVESX

SEQ ID NO: 22010 - protein, 39 aa, Artificial Sequence
  Non-cyclic GFR-binding peptide
  MOD_RES (5)..(6)..(38): Xaa is C or S
TPPTXXVPTRLSPINILYFDSANNVVYGKIPDMVVESXG

SEQ ID NO: 22011 - protein, 35 aa, Artificial Sequence
  Non-cyclic GFR-binding peptide
  MOD_RES (33)..(35): Xaa is C or S
  MOD_RES (14)..(15)..(16)..(17)..(18): Xaa is A or G
  MOD_RES (19)..(20)..(21)..(22): Xaa is A or G or absent
APVKTSPINMLYFXXXXXXXXXYGKIPMIVEEXGX

SEQ ID NO: 22012 - protein, 36 aa, Artificial Sequence
  Non-cyclic GFR-binding peptide
  MOD_RES (5)..(6): Xaa is C or S
VPSTXXAPVKTSPINMLYFDNGRVLLYGKIPMIVEE

SEQ ID NO: 22013 - protein, 37 aa, Artificial Sequence
  Non-cyclic GFR-binding peptide
  MOD_RES (2)..(3)..(35)..(37): Xaa is C or S
AXXAPTKLSPINVLYFDSSNNVIYGKIPNMVVKAXGX

SEQ ID NO: 22014 - protein, 40 aa, Artificial Sequence
  Non-cyclic GFR-binding peptide
  MOD_RES (3)..(4)..(38)..(40): Xaa is C or S
  MOD_RES (18)..(19)..(20)..(21)..(22): Xaa is A or G
  MOD_RES (23)..(24)..(25)..(26): Xaa is A or G or absent
KAXXVPTELSPINMLYFXXXXXXXXXYGKIPEMVVEGXGX

SEQ ID NO: 22015 - protein, 37 aa, Artificial Sequence
  Non-cyclic GFR-binding peptide
  MOD_RES (1)..(34)..(36): Xaa is C or S
  MOD_RES (15)..(16)..(17)..(18)..(19): Xaa is A or G
  MOD_RES (20)..(21)..(22)..(23): Xaa is A or G or absent
XAPVKTSPINMLYFXXXXXXXXXYGKIPMIVEEXGXL

SEQ ID NO: 22016 - protein, 41 aa, Artificial Sequence
  Non-cyclic GFR-binding peptide
  MOD_RES (6)..(38)..(40): Xaa is C or S
VTKPTXAPTKLSPINVLYFDDSSNVIYGKIPNMVVRSXGXH

SEQ ID NO: 22017 - protein, 37 aa, Artificial Sequence
  Non-cyclic GFR-binding peptide
  MOD_RES (34)..(36): Xaa is C or S
  MOD_RES (14)..(15)..(16)..(17)..(18): Xaa is A or G
  MOD_RES (19)..(20)..(21)..(22): Xaa is A or G or absent
APTKLSPINVLYFXXXXXXXXXYGKIPNMVVRSXGXH

SEQ ID NO: 22018 - protein, 45 aa, Artificial Sequence
  Non-cyclic GFR-binding peptide
  MOD_RES (6)..(7)..(42)..(44): Xaa is C or S
  MOD_RES (21)..(22)..(23)..(24)..(25): Xaa is A or G
  MOD_RES (26)..(27)..(28)..(29): Xaa is A or G or absent
KVGKAXXVPTKLSPINVLYFXXXXXXXXXYGKIPEGMSVAEXGXR

SEQ ID NO: 22019 - protein, 33 aa, Artificial Sequence
  Non-cyclic GFR-binding peptide
  MOD_RES (1)..(2): Xaa is C or S
XXAPTKLSPINVLYFDSSNNVIYGKIPNMVVKA

SEQ ID NO: 22020 - protein, 36 aa, Artificial Sequence
  Non-cyclic GFR-binding peptide
  MOD_RES (1)..(33)..(35): Xaa is C or S
XAPTKLSPINVLYFDDSSNVIYGKIPNMVVRSXGXH

SEQ ID NO: 22021 - protein, 39 aa, Artificial Sequence
  Non-cyclic GFR-binding peptide
  MOD_RES (6)..(7): Xaa is C or S
  MOD_RES (21)..(22)..(23)..(24)..(25): Xaa is A or G
  MOD_RES (26)..(27)..(28)..(29): Xaa is A or G or absent
SIPKAXXVPTELSPINMLYFXXXXXXXXXYGKIPEMVVE

SEQ ID NO: 22022 - protein, 32 aa, Artificial Sequence
  Non-cyclic GFR-binding peptide
  MOD_RES (32)..(32): Xaa is C or S
VPTRLSPINILYFDSANNVVYGKIPDMVVESX

SEQ ID NO: 22023 - protein, 35 aa, Artificial Sequence
  Non-cyclic GFR-binding peptide
  MOD_RES (2)..(3): Xaa is C or S
  MOD_RES (17)..(18)..(19)..(20)..(21): Xaa is A or G
  MOD_RES (22)..(23)..(24)..(25): Xaa is A or G or absent
AXXAPTKLSPINVLYFXXXXXXXXXYGKIPNMVVK

SEQ ID NO: 22024 - protein, 39 aa, Artificial Sequence
  Non-cyclic GFR-binding peptide
  MOD_RES (4)..(5)..(39): Xaa is C or S
  MOD_RES (19)..(20)..(21)..(22)..(23): Xaa is A or G
  MOD_RES (24)..(25)..(26)..(27): Xaa is A or G or absent
PKPXXAPTQLSPINVLYFXXXXXXXXXYGKIPNMVVRAX

SEQ ID NO: 22025 - protein, 38 aa, Artificial Sequence
  Non-cyclic GFR-binding peptide
  MOD_RES (5)..(6): Xaa is C or S
  MOD_RES (20)..(21)..(22)..(23)..(24): Xaa is A or G
  MOD_RES (25)..(26)..(27)..(28): Xaa is A or G or absent
VPKPXXAPTKLSPINVLYFXXXXXXXXXYGKIPNMVVR

SEQ ID NO: 22026 - protein, 32 aa, Artificial Sequence
  Non-cyclic GFR-binding peptide
  MOD_RES (14)..(15)..(16)..(17)..(18): Xaa is A or G
  MOD_RES (19)..(20)..(21)..(22): Xaa is A or G or absent
VPTELSPINMLYFXXXXXXXXXYGKIPEMVVE

SEQ ID NO: 22027 - protein, 36 aa, Artificial Sequence
  Non-cyclic GFR-binding peptide
  MOD_RES (1)..(33)..(35): Xaa is C or S
XAPTKLSPINVLYFDSSNNVIYGKIPNMVVKAXGXH

SEQ ID NO: 22028 - protein, 31 aa, Artificial Sequence
  Non-cyclic GFR-binding peptide
  MOD_RES (1)..(1): Xaa is C or S
XAPVKTSPINMLYFDNGRVLLYGKIPMIVEE

SEQ ID NO: 22029 - protein, 41 aa, Artificial Sequence
  Non-cyclic GFR-binding peptide
  MOD_RES (5)..(6)..(40): Xaa is C or S
  MOD_RES (20)..(21)..(22)..(23)..(24): Xaa is A or G
  MOD_RES (25)..(26)..(27)..(28): Xaa is A or G or absent
ASKAXXVPTKLSPINILYFXXXXXXXXXYGKIPGMAVSEXG

SEQ ID NO: 22030 - protein, 34 aa, Artificial Sequence
  Non-cyclic GFR-binding peptide
  MOD_RES (2)..(3): Xaa is C or S
AXXVPTKLSPINILYFDKGVVTYYGKIPGMAVSE

SEQ ID NO: 22031 - protein, 34 aa, Artificial Sequence
  Non-cyclic GFR-binding peptide
  MOD_RES (32)..(34): Xaa is C or S
VPTELSPINMLYFDENEKVVYGKIPDMVVEGXGX

SEQ ID NO: 22032 - protein, 34 aa, Artificial Sequence
  Non-cyclic GFR-binding peptide
  MOD_RES (2)..(3): Xaa is C or S
TXXVPTRLSPINILYFDSANNVVYGKIPDMVVES

SEQ ID NO: 22033 - protein, 41 aa, Artificial Sequence
  Non-cyclic GFR-binding peptide
  MOD_RES (3)..(4)..(38)..(40): Xaa is C or S
  MOD_RES (18)..(19)..(20)..(21)..(22): Xaa is A or G
  MOD_RES (23)..(24)..(25)..(26): Xaa is A or G or absent
KAXXAPTKLSPINVLYFXXXXXXXXXYGKIPNMVVKAXGXH

SEQ ID NO: 22034 - protein, 40 aa, Artificial Sequence
  Non-cyclic GFR-binding peptide
  MOD_RES (6)..(7)..(39): Xaa is C or S
SIPKAXXVPTELSPINMLYFDEYDKVVYGKIPEMVVEGXG

SEQ ID NO: 22035 - protein, 40 aa, Artificial Sequence
  Non-cyclic GFR-binding peptide
  MOD_RES (3)..(37)..(39): Xaa is C or S
  MOD_RES (17)..(18)..(19)..(20)..(21): Xaa is A or G
  MOD_RES (22)..(23)..(24)..(25): Xaa is A or G or absent
PTXAPTKLSPINVLYFXXXXXXXXXYGKIPNMVVRSXGXH

SEQ ID NO: 22036 - protein, 33 aa, Artificial Sequence
  Non-cyclic GFR-binding peptide
  MOD_RES (14)..(15)..(16)..(17)..(18): Xaa is A or G
  MOD_RES (19)..(20)..(21)..(22): Xaa is A or G or absent
VPTELSPINMLYFXXXXXXXXXYGKIPDMVVEG

SEQ ID NO: 22037 - protein, 40 aa, Artificial Sequence
  Non-cyclic GFR-binding peptide
  MOD_RES (6)..(7)..(39): Xaa is C or S
KASKAXXVPTKLSPINILYFDKGVVTYYGKIPGMAVSEXG

SEQ ID NO: 22038 - protein, 33 aa, Artificial Sequence
  Non-cyclic GFR-binding peptide
  MOD_RES (14)..(15)..(16)..(17)..(18): Xaa is A or G
  MOD_RES (19)..(20)..(21)..(22): Xaa is A or G or absent
APTKLSPINVLYFXXXXXXXXXYGKIPNMVVKA

SEQ ID NO: 22039 - protein, 38 aa, Artificial Sequence
  Non-cyclic GFR-binding peptide
  MOD_RES (6)..(7): Xaa is C or S
KASKAXXVPTKLSPINILYFDKGVVTYYGKIPGMAVSE

SEQ ID NO: 22040 - protein, 36 aa, Artificial Sequence
  Non-cyclic GFR-binding peptide
  MOD_RES (2)..(3): Xaa is C or S
  MOD_RES (17)..(18)..(19)..(20)..(21): Xaa is A or G
  MOD_RES (22)..(23)..(24)..(25): Xaa is A or G or absent
AXXVPTELSPINMLYFXXXXXXXXXYGKIPEMVVEG

SEQ ID NO: 22041 - protein, 36 aa, Artificial Sequence
  Non-cyclic GFR-binding peptide
  MOD_RES (34)..(36): Xaa is C or S
  MOD_RES (14)..(15)..(16)..(17)..(18): Xaa is A or G
  MOD_RES (19)..(20)..(21)..(22): Xaa is A or G or absent
VPTELSPINMLYFXXXXXXXXXYGKIPDMVVEGXGX

SEQ ID NO: 22042 - protein, 37 aa, Artificial Sequence
  Non-cyclic GFR-binding peptide
  MOD_RES (34)..(36): Xaa is C or S
  MOD_RES (14)..(15)..(16)..(17)..(18): Xaa is A or G
  MOD_RES (19)..(20)..(21)..(22): Xaa is A or G or absent
VPTELSPINMLYFXXXXXXXXXYGKIPEMVVEGXGXR

SEQ ID NO: 22043 - protein, 42 aa, Artificial Sequence
  Non-cyclic GFR-binding peptide
  MOD_RES (6)..(7)..(41): Xaa is C or S
  MOD_RES (21)..(22)..(23)..(24)..(25): Xaa is A or G
  MOD_RES (26)..(27)..(28)..(29): Xaa is A or G or absent
YVPKPXXAPTKLSPINVLYFXXXXXXXXXYGKIPNMVVRSXG

SEQ ID NO: 22044 - protein, 38 aa, Artificial Sequence
  Non-cyclic GFR-binding peptide
  MOD_RES (3)..(4)..(38): Xaa is C or S
  MOD_RES (18)..(19)..(20)..(21)..(22): Xaa is A or G
  MOD_RES (23)..(24)..(25)..(26): Xaa is A or G or absent
KAXXVPTELSPINMLYFXXXXXXXXXYGKIPEMVVEGX

SEQ ID NO: 22045 - protein, 38 aa, Artificial Sequence
  Non-cyclic GFR-binding peptide
  MOD_RES (2)..(3)..(37): Xaa is C or S
  MOD_RES (17)..(18)..(19)..(20)..(21): Xaa is A or G
  MOD_RES (22)..(23)..(24)..(25): Xaa is A or G or absent
SXXVPARLSPINILYFXXXXXXXXXYGKIPDMVVEAXG

SEQ ID NO: 22046 - protein, 34 aa, Artificial Sequence
  Non-cyclic GFR-binding peptide
  MOD_RES (2)..(34): Xaa is C or S
TXAPTKLSPINVLYFDDSSNVIYGKIPNMVVRSX

SEQ ID NO: 22047 - protein, 38 aa, Artificial Sequence
  Non-cyclic GFR-binding peptide
  MOD_RES (3)..(4)..(38): Xaa is C or S
  MOD_RES (18)..(19)..(20)..(21)..(22): Xaa is A or G
  MOD_RES (23)..(24)..(25)..(26): Xaa is A or G or absent
KAXXVPTKLSPINILYFXXXXXXXXXYGKIPGMAVSEX

SEQ ID NO: 22048 - protein, 33 aa, Artificial Sequence
  Non-cyclic GFR-binding peptide
  MOD_RES (14)..(15)..(16)..(17)..(18): Xaa is A or G
  MOD_RES (19)..(20)..(21)..(22): Xaa is A or G or absent
APTKLSPINVLYFXXXXXXXXXYGKIPNMVVRS

SEQ ID NO: 22049 - protein, 43 aa, Artificial Sequence
  Non-cyclic GFR-binding peptide
  MOD_RES (4)..(5)..(40)..(42): Xaa is C or S
  MOD_RES (19)..(20)..(21)..(22)..(23): Xaa is A or G
  MOD_RES (24)..(25)..(26)..(27): Xaa is A or G or absent
GKAXXVPTKLSPINVLYFXXXXXXXXXYGKIPEGMSVAEXGXR

SEQ ID NO: 22050 - protein, 40 aa, Artificial Sequence
  Non-cyclic GFR-binding peptide
  MOD_RES (5)..(6)..(38)..(40): Xaa is C or S
APASXXVPARLSPINILYFDAANNVVYGKIPDMVVEAXGX

SEQ ID NO: 22051 - protein, 36 aa, Artificial Sequence
  Non-cyclic GFR-binding peptide
  MOD_RES (1)..(2)..(34)..(36): Xaa is C or S
XXVPTKLSPINILYFDKGVVTYYGKIPGMAVSEXGX

SEQ ID NO: 22052 - protein, 36 aa, Artificial Sequence
  Non-cyclic GFR-binding peptide
  MOD_RES (34)..(36): Xaa is C or S
  MOD_RES (14)..(15)..(16)..(17)..(18): Xaa is A or G
  MOD_RES (19)..(20)..(21)..(22): Xaa is A or G or absent
VPARLSPINILYFXXXXXXXXXYGKIPDMVVEAXGX

SEQ ID NO: 22053 - protein, 30 aa, Artificial Sequence
  Non-cyclic GFR-binding peptide
VPTRLSPINILYFDSANNVVYGKIPDMVVE

SEQ ID NO: 22054 - protein, 35 aa, Artificial Sequence
  Non-cyclic GFR-binding peptide
  MOD_RES (1)..(2)..(34): Xaa is C or S
XXVPTELSPINMLYFDENEKVVYGKIPDMVVEGXG

SEQ ID NO: 22055 - protein, 38 aa, Artificial Sequence
  Non-cyclic GFR-binding peptide
  MOD_RES (3)..(4): Xaa is C or S
  MOD_RES (18)..(19)..(20)..(21)..(22): Xaa is A or G
  MOD_RES (23)..(24)..(25)..(26): Xaa is A or G or absent
KAXXVPTKLSPINVLYFXXXXXXXXXYGKIPEGMSVAE

SEQ ID NO: 22056 - protein, 34 aa, Artificial Sequence
  Non-cyclic GFR-binding peptide
  MOD_RES (32)..(34): Xaa is C or S
VPARLSPINILYFDAANNVVYGKIPDMVVEAXGX

SEQ ID NO: 22057 - protein, 33 aa, Artificial Sequence
  Non-cyclic GFR-binding peptide
  MOD_RES (32)..(32): Xaa is C or S
VPTELSPINMLYFDEYDKVVYGKIPEMVVEGXG

SEQ ID NO: 22058 - protein, 34 aa, Artificial Sequence
  Non-cyclic GFR-binding peptide
  MOD_RES (3)..(4): Xaa is C or S
STXXAPVKTSPINMLYFDNGRVLLYGKIPMIVEE

SEQ ID NO: 22059 - protein, 40 aa, Artificial Sequence
  Non-cyclic GFR-binding peptide
  MOD_RES (5)..(6)..(40): Xaa is C or S
  MOD_RES (20)..(21)..(22)..(23)..(24): Xaa is A or G
  MOD_RES (25)..(26)..(27)..(28): Xaa is A or G or absent
IPKAXXVPTELSPINMLYFXXXXXXXXXYGKIPEMVVEGX

SEQ ID NO: 22060 - protein, 33 aa, Artificial Sequence
  Non-cyclic GFR-binding peptide
  MOD_RES (14)..(15)..(16)..(17)..(18): Xaa is A or G
  MOD_RES (19)..(20)..(21)..(22): Xaa is A or G or absent
VPTKLSPINILYFXXXXXXXXXYGKIPGMAVSE

SEQ ID NO: 22061 - protein, 37 aa, Artificial Sequence
  Non-cyclic GFR-binding peptide
  MOD_RES (1)..(2)..(34)..(36): Xaa is C or S
XXAPTKLSPINVLYFDDSSNVIYGKIPNMVVRSXGXH

SEQ ID NO: 22062 - protein, 41 aa, Artificial Sequence
  Non-cyclic GFR-binding peptide
  MOD_RES (6)..(7)..(39)..(41): Xaa is C or S
AAPASXXVPARLSPINILYFDAANNVVYGKIPDMVVEAXGX

SEQ ID NO: 22063 - protein, 41 aa, Artificial Sequence
  Non-cyclic GFR-binding peptide
  MOD_RES (6)..(7)..(39)..(41): Xaa is C or S
AVPKAXXAPTKLSPINVLYFDSSNNVIYGKIPNMVVKAXGX

SEQ ID NO: 22064 - protein, 35 aa, Artificial Sequence
  Non-cyclic GFR-binding peptide
  MOD_RES (3)..(3): Xaa is C or S
  MOD_RES (17)..(18)..(19)..(20)..(21): Xaa is A or G
  MOD_RES (22)..(23)..(24)..(25): Xaa is A or G or absent
PTXAPTKLSPINVLYFXXXXXXXXXYGKIPNMVVR

SEQ ID NO: 22065 - protein, 38 aa, Artificial Sequence
  Non-cyclic GFR-binding peptide
  MOD_RES (4)..(5)..(37): Xaa is C or S
PKAXXVPTELSPINMLYFDENEKVVYGKIPDMVVEGXG

SEQ ID NO: 22066 - protein, 37 aa, Artificial Sequence
  Non-cyclic GFR-binding peptide
  MOD_RES (2)..(3)..(37): Xaa is C or S
  MOD_RES (17)..(18)..(19)..(20)..(21): Xaa is A or G
  MOD_RES (22)..(23)..(24)..(25): Xaa is A or G or absent
SXXVPARLSPINILYFXXXXXXXXXYGKIPDMVVEAX

SEQ ID NO: 22067 - protein, 40 aa, Artificial Sequence
  Non-cyclic GFR-binding peptide
  MOD_RES (5)..(6)..(37)..(39): Xaa is C or S
VPSTXXAPVKTSPINMLYFDNGRVLLYGKIPMIVEEXGXL

SEQ ID NO: 22068 - protein, 41 aa, Artificial Sequence
  Non-cyclic GFR-binding peptide
  MOD_RES (4)..(5)..(39)..(41): Xaa is C or S
  MOD_RES (19)..(20)..(21)..(22)..(23): Xaa is A or G
  MOD_RES (24)..(25)..(26)..(27): Xaa is A or G or absent
PKAXXVPTELSPINMLYFXXXXXXXXXYGKIPDMVVEGXGX

SEQ ID NO: 22069 - protein, 35 aa, Artificial Sequence
  Non-cyclic GFR-binding peptide
  MOD_RES (1)..(2)..(34): Xaa is C or S
XXVPTRLSPINILYFDSANNVVYGKIPDMVVESXG

SEQ ID NO: 22070 - protein, 31 aa, Artificial Sequence
  Non-cyclic GFR-binding peptide
VPTRLSPINILYFDSANNVVYGKIPDMVVES

SEQ ID NO: 22071 - protein, 35 aa, Artificial Sequence
  Non-cyclic GFR-binding peptide
  MOD_RES (4)..(5): Xaa is C or S
PKAXXVPTELSPINMLYFDENEKVVYGKIPDMVVE

SEQ ID NO: 22072 - protein, 37 aa, Artificial Sequence
  Non-cyclic GFR-binding peptide
  MOD_RES (1)..(2)..(34)..(36): Xaa is C or S
XXVPARLSPINILYFDAANNVVYGKIPDMVVEAXGXR

SEQ ID NO: 22073 - protein, 41 aa, Artificial Sequence
  Non-cyclic GFR-binding peptide
  MOD_RES (5)..(6)..(40): Xaa is C or S
  MOD_RES (20)..(21)..(22)..(23)..(24): Xaa is A or G
  MOD_RES (25)..(26)..(27)..(28): Xaa is A or G or absent
VPKAXXAPTKLSPINVLYFXXXXXXXXXYGKIPNMVVKAXG

SEQ ID NO: 22074 - protein, 36 aa, Artificial Sequence
  Non-cyclic GFR-binding peptide
  MOD_RES (1)..(2)..(34)..(36): Xaa is C or S
XXVPTELSPINMLYFDEYDKVVYGKIPEMVVEGXGX

SEQ ID NO: 22075 - protein, 33 aa, Artificial Sequence
  Non-cyclic GFR-binding peptide
  MOD_RES (2)..(3): Xaa is C or S
AXXAPTKLSPINVLYFDSSNNVIYGKIPNMVVK

SEQ ID NO: 22076 - protein, 43 aa, Artificial Sequence
  Non-cyclic GFR-binding peptide
  MOD_RES (6)..(7)..(40)..(42): Xaa is C or S
  MOD_RES (21)..(22)..(23)..(24)..(25): Xaa is A or G
  MOD_RES (26)..(27)..(28)..(29): Xaa is A or G or absent
RVPSTXXAPVKTSPINMLYFXXXXXXXXXYGKIPMIVEEXGXL

SEQ ID NO: 22077 - protein, 36 aa, Artificial Sequence
  Non-cyclic GFR-binding peptide
  MOD_RES (1)..(34)..(36): Xaa is C or S
XVPTKLSPINVLYFDDMGVPTYGKIPEGMSVAEXGX

SEQ ID NO: 22078 - protein, 31 aa, Artificial Sequence
  Non-cyclic GFR-binding peptide
  MOD_RES (1)..(1): Xaa is C or S
XVPTRLSPINILYFDSANNVVYGKIPDMVVE

SEQ ID NO: 22079 - protein, 30 aa, Artificial Sequence; identical to SEQ ID NO: 919
  Non-cyclic GFR-binding peptide

SEQ ID NO: 22080 - protein, 37 aa, Artificial Sequence
  Non-cyclic GFR-binding peptide
  MOD_RES (4)..(5): Xaa is C or S
  MOD_RES (19)..(20)..(21)..(22)..(23): Xaa is A or G
  MOD_RES (24)..(25)..(26)..(27): Xaa is A or G or absent
PKAXXVPTELSPINMLYFXXXXXXXXXYGKIPDMVVE

SEQ ID NO: 22081 - protein, 33 aa, Artificial Sequence
  Non-cyclic GFR-binding peptide
  MOD_RES (2)..(3): Xaa is C or S
AXXVPTKLSPINILYFDKGVVTYYGKIPGMAVS

SEQ ID NO: 22082 - protein, 36 aa, Artificial Sequence
  Non-cyclic GFR-binding peptide
  MOD_RES (1)..(33)..(35): Xaa is C or S
XVPTKLSPINILYFDKGVVTYYGKIPGMAVSEXGXR

SEQ ID NO: 22083 - protein, 36 aa, Artificial Sequence
  Non-cyclic GFR-binding peptide
  MOD_RES (1)..(34)..(36): Xaa is C or S
  MOD_RES (15)..(16)..(17)..(18)..(19): Xaa is A or G
  MOD_RES (20)..(21)..(22)..(23): Xaa is A or G or absent
XAPVKTSPINMLYFXXXXXXXXXYGKIPMIVEEXGX

SEQ ID NO: 22084 - protein, 32 aa, Artificial Sequence
  Non-cyclic GFR-binding peptide
  MOD_RES (14)..(15)..(16)..(17)..(18): Xaa is A or G
  MOD_RES (19)..(20)..(21)..(22): Xaa is A or G or absent
VPTELSPINMLYFXXXXXXXXXYGKIPDMVVE

SEQ ID NO: 22085 - protein, 44 aa, Artificial Sequence
  Non-cyclic GFR-binding peptide
  MOD_RES (6)..(7)..(41)..(43): Xaa is C or S
  MOD_RES (21)..(22)..(23)..(24)..(25): Xaa is A or G
  MOD_RES (26)..(27)..(28)..(29): Xaa is A or G or absent
AAPASXXVPARLSPINILYFXXXXXXXXXYGKIPDMVVEAXGXR

SEQ ID NO: 22086 - protein, 41 aa, Artificial Sequence
  Non-cyclic GFR-binding peptide
  MOD_RES (6)..(7)..(41): Xaa is C or S
  MOD_RES (21)..(22)..(23)..(24)..(25): Xaa is A or G
  MOD_RES (26)..(27)..(28)..(29): Xaa is A or G or absent
KASKAXXVPTKLSPINILYFXXXXXXXXXYGKIPGMAVSEX

SEQ ID NO: 22087 - protein, 34 aa, Artificial Sequence
  Non-cyclic GFR-binding peptide
  MOD_RES (1)..(1): Xaa is C or S
  MOD_RES (15)..(16)..(17)..(18)..(19): Xaa is A or G
  MOD_RES (20)..(21)..(22)..(23): Xaa is A or G or absent
XAPTQLSPINVLYFXXXXXXXXXYGKIPNMVVRA

SEQ ID NO: 22088 - protein, 36 aa, Artificial Sequence
  Non-cyclic GFR-binding peptide
  MOD_RES (3)..(4)..(36): Xaa is C or S
KAXXVPTELSPINMLYFDENEKVVYGKIPDMVVEGX

SEQ ID NO: 22089 - protein, 37 aa, Artificial Sequence
  Non-cyclic GFR-binding peptide
  MOD_RES (2)..(3)..(36): Xaa is C or S
  MOD_RES (17)..(18)..(19)..(20)..(21): Xaa is A or G
  MOD_RES (22)..(23)..(24)..(25): Xaa is A or G or absent
TXXAPVKTSPINMLYFXXXXXXXXXYGKIPMIVEEXG

SEQ ID NO: 22090 - protein, 35 aa, Artificial Sequence
  Non-cyclic GFR-binding peptide
  MOD_RES (5)..(5): Xaa is C or S
TKPTXAPTKLSPINVLYFDDSSNVIYGKIPNMVVR

SEQ ID NO: 22091 - protein, 35 aa, Artificial Sequence
  Non-cyclic GFR-binding peptide
  MOD_RES (2)..(3): Xaa is C or S
  MOD_RES (17)..(18)..(19)..(20)..(21): Xaa is A or G
  MOD_RES (22)..(23)..(24)..(25): Xaa is A or G or absent
PXXAPTQLSPINVLYFXXXXXXXXXYGKIPNMVVR

SEQ ID NO: 22092 - protein, 35 aa, Artificial Sequence
  Non-cyclic GFR-binding peptide
  MOD_RES (32)..(34): Xaa is C or S
APTQLSPINVLYFDDSSNVIYGKIPNMVVRAXGXH

SEQ ID NO: 22093 - protein, 38 aa, Artificial Sequence
  Non-cyclic GFR-binding peptide
  MOD_RES (1)..(35)..(37): Xaa is C or S
  MOD_RES (15)..(16)..(17)..(18)..(19): Xaa is A or G
  MOD_RES (20)..(21)..(22)..(23): Xaa is A or G or absent
XVPARLSPINILYFXXXXXXXXXYGKIPDMVVEAXGXR

SEQ ID NO: 22094 - protein, 36 aa, Artificial Sequence
  Non-cyclic GFR-binding peptide
  MOD_RES (1)..(2)..(36): Xaa is C or S
  MOD_RES (16)..(17)..(18)..(19)..(20): Xaa is A or G
  MOD_RES (21)..(22)..(23)..(24): Xaa is A or G or absent
XXVPTELSPINMLYFXXXXXXXXXYGKIPEMVVEGX

SEQ ID NO: 22095 - protein, 35 aa, Artificial Sequence
  Non-cyclic GFR-binding peptide
  MOD_RES (2)..(3)..(35): Xaa is C or S
TXXVPTRLSPINILYFDSANNVVYGKIPDMVVESX

SEQ ID NO: 22096 - protein, 35 aa, Artificial Sequence
  Non-cyclic GFR-binding peptide
  MOD_RES (32)..(34): Xaa is C or S
VPTKLSPINILYFDKGVVTYYGKIPGMAVSEXGXR

SEQ ID NO: 22097 - protein, 39 aa, Artificial Sequence
  Non-cyclic GFR-binding peptide
  MOD_RES (2)..(3)..(37)..(39): Xaa is C or S
  MOD_RES (17)..(18)..(19)..(20)..(21): Xaa is A or G
  MOD_RES (22)..(23)..(24)..(25): Xaa is A or G or absent
SXXVPARLSPINILYFXXXXXXXXXYGKIPDMVVEAXGX

SEQ ID NO: 22098 - protein, 39 aa, Artificial Sequence
  Non-cyclic GFR-binding peptide
  MOD_RES (4)..(38): Xaa is C or S
  MOD_RES (18)..(19)..(20)..(21)..(22): Xaa is A or G
  MOD_RES (23)..(24)..(25)..(26): Xaa is A or G or absent
KPTXAPTKLSPINVLYFXXXXXXXXXYGKIPNMVVRSXG

SEQ ID NO: 22099 - protein, 40 aa, Artificial Sequence
  Non-cyclic GFR-binding peptide
  MOD_RES (5)..(6)..(38)..(40): Xaa is C or S
VPKAXXAPTKLSPINVLYFDSSNNVIYGKIPNMVVKAXGX

SEQ ID NO: 22100 - protein, 33 aa, Artificial Sequence
  Non-cyclic GFR-binding peptide
  MOD_RES (1)..(33): Xaa is C or S
XVPTELSPINMLYFDENEKVVYGKIPDMVVEGX

SEQ ID NO: 22101 - protein, 38 aa, Artificial Sequence
  Non-cyclic GFR-binding peptide
  MOD_RES (35)..(37): Xaa is C or S
  MOD_RES (14)..(15)..(16)..(17)..(18): Xaa is A or G
  MOD_RES (19)..(20)..(21)..(22): Xaa is A or G or absent
VPTKLSPINVLYFXXXXXXXXXYGKIPEGMSVAEXGXR

SEQ ID NO: 22102 - protein, 37 aa, Artificial Sequence
  Non-cyclic GFR-binding peptide
  MOD_RES (2)..(3)..(35)..(37): Xaa is C or S
AXXVPTKLSPINILYFDKGVVTYYGKIPGMAVSEXGX

SEQ ID NO: 22103 - protein, 38 aa, Artificial Sequence
  Non-cyclic GFR-binding peptide
  MOD_RES (6)..(7): Xaa is C or S
KIPKAXXVPTELSPINMLYFDENEKVVYGKIPDMVVEG

SEQ ID NO: 22104 - protein, 36 aa, Artificial Sequence
  Non-cyclic GFR-binding peptide
  MOD_RES (1)..(33)..(35): Xaa is C or S
XAPTQLSPINVLYFDDSSNVIYGKIPNMVVRAXGXH

SEQ ID NO: 22105 - protein, 39 aa, Artificial Sequence
  Non-cyclic GFR-binding peptide
  MOD_RES (3)..(4)..(38): Xaa is C or S
  MOD_RES (18)..(19)..(20)..(21)..(22): Xaa is A or G
  MOD_RES (23)..(24)..(25)..(26): Xaa is A or G or absent
KPXXAPTQLSPINVLYFXXXXXXXXXYGKIPNMVVRAXG

SEQ ID NO: 22106 - protein, 38 aa, Artificial Sequence
  Non-cyclic GFR-binding peptide
  MOD_RES (2)..(3)..(35)..(37): Xaa is C or S
AXXVPTELSPINMLYFDENEKVVYGKIPDMVVEGXGXR

SEQ ID NO: 22107 - protein, 42 aa, Artificial Sequence
  Non-cyclic GFR-binding peptide
  MOD_RES (4)..(5)..(39)..(41): Xaa is C or S
  MOD_RES (19)..(20)..(21)..(22)..(23): Xaa is A or G
  MOD_RES (24)..(25)..(26)..(27): Xaa is A or G or absent
PKPXXAPTQLSPINVLYFXXXXXXXXXYGKIPNMVVRAXGXH

SEQ ID NO: 22108 - protein, 40 aa, Artificial Sequence
  Non-cyclic GFR-binding peptide
  MOD_RES (3)..(4)..(38)..(40): Xaa is C or S
  MOD_RES (18)..(19)..(20)..(21)..(22): Xaa is A or G
  MOD_RES (23)..(24)..(25)..(26): Xaa is A or G or absent
PTXXVPTRLSPINILYFXXXXXXXXXYGKIPDMVVESXGX

SEQ ID NO: 22109 - protein, 36 aa, Artificial Sequence
  Non-cyclic GFR-binding peptide
  MOD_RES (1)..(36): Xaa is C or S
  MOD_RES (15)..(16)..(17)..(18)..(19): Xaa is A or G
  MOD_RES (20)..(21)..(22)..(23): Xaa is A or G or absent
XVPTKLSPINVLYFXXXXXXXXXYGKIPEGMSVAEX

SEQ ID NO: 22110 - protein, 33 aa, Artificial Sequence
  Non-cyclic GFR-binding peptide
  MOD_RES (1)..(2): Xaa is C or S
XXVPTELSPINMLYFDEYDKVVYGKIPEMVVEG

SEQ ID NO: 22111 - protein, 42 aa, Artificial Sequence
  Non-cyclic GFR-binding peptide
  MOD_RES (5)..(6)..(39)..(41): Xaa is C or S
  MOD_RES (20)..(21)..(22)..(23)..(24): Xaa is A or G
  MOD_RES (25)..(26)..(27)..(28): Xaa is A or G or absent
VPSTXXAPVKTSPINMLYFXXXXXXXXXYGKIPMIVEEXGXL

SEQ ID NO: 22112 - protein, 38 aa, Artificial Sequence
  Non-cyclic GFR-binding peptide
  MOD_RES (1)..(35)..(37): Xaa is C or S
  MOD_RES (15)..(16)..(17)..(18)..(19): Xaa is A or G
  MOD_RES (20)..(21)..(22)..(23): Xaa is A or G or absent
XAPTKLSPINVLYFXXXXXXXXXYGKIPNMVVRSXGXH

SEQ ID NO: 22113 - protein, 37 aa, Artificial Sequence
  Non-cyclic GFR-binding peptide
  MOD_RES (2)..(3)..(35)..(37): Xaa is C or S
AXXVPTELSPINMLYFDEYDKVVYGKIPEMVVEGXGX

SEQ ID NO: 22114 - protein, 35 aa, Artificial Sequence
  Non-cyclic GFR-binding peptide
  MOD_RES (3)..(4): Xaa is C or S
KAXXAPTKLSPINVLYFDSSNNVIYGKIPNMVVKA

SEQ ID NO: 22115 - protein, 34 aa, Artificial Sequence
  Non-cyclic GFR-binding peptide
  MOD_RES (32)..(34): Xaa is C or S
VPTKLSPINILYFDKGVVTYYGKIPGMAVSEXGX

SEQ ID NO: 22116 - protein, 37 aa, Artificial Sequence
  Non-cyclic GFR-binding peptide
  MOD_RES (1)..(35)..(37): Xaa is C or S
  MOD_RES (15)..(16)..(17)..(18)..(19): Xaa is A or G
  MOD_RES (20)..(21)..(22)..(23): Xaa is A or G or absent
XVPTRLSPINILYFXXXXXXXXXYGKIPDMVVESXGX

SEQ ID NO: 22117 - protein, 37 aa, Artificial Sequence
  Non-cyclic GFR-binding peptide
  MOD_RES (1)..(35)..(37): Xaa is C or S
  MOD_RES (15)..(16)..(17)..(18)..(19): Xaa is A or G
  MOD_RES (20)..(21)..(22)..(23): Xaa is A or G or absent
XAPTKLSPINVLYFXXXXXXXXXYGKIPNMVVKAXGX

SEQ ID NO: 22118 - protein, 35 aa, Artificial Sequence
  Non-cyclic GFR-binding peptide
  MOD_RES (4)..(5): Xaa is C or S
PKPXXAPTQLSPINVLYFDDSSNVIYGKIPNMVVR

SEQ ID NO: 22119 - protein, 34 aa, Artificial Sequence
  Non-cyclic GFR-binding peptide
  MOD_RES (32)..(34): Xaa is C or S
VPTELSPINMLYFDEYDKVVYGKIPEMVVEGXGX

SEQ ID NO: 22120 - protein, 32 aa, Artificial Sequence
  Non-cyclic GFR-binding peptide
  MOD_RES (1)..(1): Xaa is C or S
XVPTRLSPINILYFDSANNVVYGKIPDMVVES

SEQ ID NO: 22121 - protein, 31 aa, Artificial Sequence
  Non-cyclic GFR-binding peptide
  MOD_RES (1)..(1): Xaa is C or S
XVPTKLSPINILYFDKGVVTYYGKIPGMAVS

SEQ ID NO: 22122 - protein, 35 aa, Artificial Sequence
  Non-cyclic GFR-binding peptide
  MOD_RES (34)..(34): Xaa is C or S
  MOD_RES (14)..(15)..(16)..(17)..(18): Xaa is A or G
  MOD_RES (19)..(20)..(21)..(22): Xaa is A or G or absent
VPARLSPINILYFXXXXXXXXXYGKIPDMVVEAXG

SEQ ID NO: 22123 - protein, 37 aa, Artificial Sequence
  Non-cyclic GFR-binding peptide
  MOD_RES (2)..(3)..(37): Xaa is C or S
  MOD_RES (17)..(18)..(19)..(20)..(21): Xaa is A or G
  MOD_RES (22)..(23)..(24)..(25): Xaa is A or G or absent
AXXVPTKLSPINILYFXXXXXXXXXYGKIPGMAVSEX

SEQ ID NO: 22124 - protein, 40 aa, Artificial Sequence
  Non-cyclic GFR-binding peptide
  MOD_RES (5)..(39): Xaa is C or S
  MOD_RES (19)..(20)..(21)..(22)..(23): Xaa is A or G
  MOD_RES (24)..(25)..(26)..(27): Xaa is A or G or absent
TKPTXAPTKLSPINVLYFXXXXXXXXXYGKIPNMVVRSXG

SEQ ID NO: 22125 - protein, 37 aa, Artificial Sequence
  Non-cyclic GFR-binding peptide
  MOD_RES (4)..(5): Xaa is C or S
  MOD_RES (19)..(20)..(21)..(22)..(23): Xaa is A or G
  MOD_RES (24)..(25)..(26)..(27): Xaa is A or G or absent
PASXXVPARLSPINILYFXXXXXXXXXYGKIPDMVVE

SEQ ID NO: 22126 - protein, 36 aa, Artificial Sequence
  Non-cyclic GFR-binding peptide
  MOD_RES (4)..(5): Xaa is C or S
PKAXXAPTKLSPINVLYFDSSNNVIYGKIPNMVVKA

SEQ ID NO: 22127 - protein, 37 aa, Artificial Sequence
  Non-cyclic GFR-binding peptide
  MOD_RES (5)..(6): Xaa is C or S
TPPTXXVPTRLSPINILYFDSANNVVYGKIPDMVVES

SEQ ID NO: 22128 - protein, 36 aa, Artificial Sequence
  Non-cyclic GFR-binding peptide
  MOD_RES (5)..(6): Xaa is C or S
ASKAXXVPTKLSPINILYFDKGVVTYYGKIPGMAVS

SEQ ID NO: 22129 - protein, 34 aa, Artificial Sequence
  Non-cyclic GFR-binding peptide
  MOD_RES (2)..(3): Xaa is C or S
SXXVPARLSPINILYFDAANNVVYGKIPDMVVEA

SEQ ID NO: 22130 - protein, 32 aa, Artificial Sequence
  Non-cyclic GFR-binding peptide
  MOD_RES (32)..(32): Xaa is C or S
VPTELSPINMLYFDEYDKVVYGKIPEMVVEGX

SEQ ID NO: 22131 - protein, 36 aa, Artificial Sequence
  Non-cyclic GFR-binding peptide
  MOD_RES (1)..(2)..(36): Xaa is C or S
  MOD_RES (16)..(17)..(18)..(19)..(20): Xaa is A or G
  MOD_RES (21)..(22)..(23)..(24): Xaa is A or G or absent
XXAPTKLSPINVLYFXXXXXXXXXYGKIPNMVVRSX

SEQ ID NO: 22132 - protein, 40 aa, Artificial Sequence
  Non-cyclic GFR-binding peptide
  MOD_RES (6)..(7)..(40): Xaa is C or S
  MOD_RES (21)..(22)..(23)..(24)..(25): Xaa is A or G
  MOD_RES (26)..(27)..(28)..(29): Xaa is A or G or absent
RVPSTXXAPVKTSPINMLYFXXXXXXXXXYGKIPMIVEEX

SEQ ID NO: 22133 - protein, 40 aa, Artificial Sequence
  Non-cyclic GFR-binding peptide
  MOD_RES (4)..(5)..(37)..(39): Xaa is C or S
PPTXXVPTRLSPINILYFDSANNVVYGKIPDMVVESXGXR

SEQ ID NO: 22134 - protein, 39 aa, Artificial Sequence
  Non-cyclic GFR-binding peptide
  MOD_RES (3)..(4)..(38): Xaa is C or S
  MOD_RES (18)..(19)..(20)..(21)..(22): Xaa is A or G
  MOD_RES (23)..(24)..(25)..(26): Xaa is A or G or absent
KPXXAPTKLSPINVLYFXXXXXXXXXYGKIPNMVVRSXG

SEQ ID NO: 22135 - protein, 38 aa, Artificial Sequence
  Non-cyclic GFR-binding peptide
  MOD_RES (5)..(6)..(38): Xaa is C or S
TPPTXXVPTRLSPINILYFDSANNVVYGKIPDMVVESX

SEQ ID NO: 22136 - protein, 38 aa, Artificial Sequence
  Non-cyclic GFR-binding peptide
  MOD_RES (4)..(5): Xaa is C or S
  MOD_RES (19)..(20)..(21)..(22)..(23): Xaa is A or G
  MOD_RES (24)..(25)..(26)..(27): Xaa is A or G or absent
SKAXXVPTKLSPINILYFXXXXXXXXXYGKIPGMAVSE

SEQ ID NO: 22137 - protein, 41 aa, Artificial Sequence
  Non-cyclic GFR-binding peptide
  MOD_RES (5)..(6)..(40): Xaa is C or S
  MOD_RES (20)..(21)..(22)..(23)..(24): Xaa is A or G
  MOD_RES (25)..(26)..(27)..(28): Xaa is A or G or absent
TPPTXXVPTRLSPINILYFXXXXXXXXXYGKIPDMVVESXG

SEQ ID NO: 22138 - protein, 36 aa, Artificial Sequence
  Non-cyclic GFR-binding peptide
  MOD_RES (2)..(3)..(34)..(36): Xaa is C or S
TXXAPVKTSPINMLYFDNGRVLLYGKIPMIVEEXGX

SEQ ID NO: 22139 - protein, 36 aa, Artificial Sequence
  Non-cyclic GFR-binding peptide
  MOD_RES (1)..(2)..(34)..(36): Xaa is C or S
XXAPTKLSPINVLYFDSSNNVIYGKIPNMVVKAXGX

SEQ ID NO: 22140 - protein, 33 aa, Artificial Sequence
  Non-cyclic GFR-binding peptide
  MOD_RES (2)..(3): Xaa is C or S
TXXVPTRLSPINILYFDSANNVVYGKIPDMVVE

SEQ ID NO: 22141 - protein, 39 aa, Artificial Sequence
  Non-cyclic GFR-binding peptide
  MOD_RES (6)..(6): Xaa is C or S
  MOD_RES (20)..(21)..(22)..(23)..(24): Xaa is A or G
  MOD_RES (25)..(26)..(27)..(28): Xaa is A or G or absent
VTKPTXAPTKLSPINVLYFXXXXXXXXXYGKIPNMVVRS

SEQ ID NO: 22142 - protein, 34 aa, Artificial Sequence
  Non-cyclic GFR-binding peptide
  MOD_RES (2)..(3): Xaa is C or S
AXXVPTELSPINMLYFDENEKVVYGKIPDMVVEG

SEQ ID NO: 22143 - protein, 38 aa, Artificial Sequence
  Non-cyclic GFR-binding peptide
  MOD_RES (5)..(37): Xaa is C or S
TKPTXAPTKLSPINVLYFDDSSNVIYGKIPNMVVRSXG

SEQ ID NO: 22144 - protein, 35 aa, Artificial Sequence
  Non-cyclic GFR-binding peptide
  MOD_RES (32)..(34): Xaa is C or S
APTKLSPINVLYFDDSSNVIYGKIPNMVVRSXGXH

SEQ ID NO: 22145 - protein, 41 aa, Artificial Sequence
  Non-cyclic GFR-binding peptide
  MOD_RES (3)..(4)..(38)..(40): Xaa is C or S
  MOD_RES (18)..(19)..(20)..(21)..(22): Xaa is A or G
  MOD_RES (23)..(24)..(25)..(26): Xaa is A or G or absent
PTXXVPTRLSPINILYFXXXXXXXXXYGKIPDMVVESXGXR

SEQ ID NO: 22146 - protein, 30 aa, Artificial Sequence
  Non-cyclic GFR-binding peptide
APTKLSPINVLYFDSSNNVIYGKIPNMVVK

SEQ ID NO: 22147 - protein, 38 aa, Artificial Sequence
  Non-cyclic GFR-binding peptide
  MOD_RES (6)..(38): Xaa is C or S
VTKPTXAPTKLSPINVLYFDDSSNVIYGKIPNMVVRSX

SEQ ID NO: 22148 - protein, 41 aa, Artificial Sequence
  Non-cyclic GFR-binding peptide
  MOD_RES (6)..(7)..(39)..(41): Xaa is C or S
SIPKAXXVPTELSPINMLYFDEYDKVVYGKIPEMVVEGXGX

SEQ ID NO: 22149 - protein, 42 aa, Artificial Sequence
  Non-cyclic GFR-binding peptide
  MOD_RES (6)..(40)..(42): Xaa is C or S
  MOD_RES (20)..(21)..(22)..(23)..(24): Xaa is A or G
  MOD_RES (25)..(26)..(27)..(28): Xaa is A or G or absent
VTKPTXAPTKLSPINVLYFXXXXXXXXXYGKIPNMVVRSXGX

SEQ ID NO: 22150 - protein, 36 aa, Artificial Sequence
  Non-cyclic GFR-binding peptide
  MOD_RES (5)..(5): Xaa is C or S
TKPTXAPTKLSPINVLYFDDSSNVIYGKIPNMVVRS

SEQ ID NO: 22151 - protein, 36 aa, Artificial Sequence
  Non-cyclic GFR-binding peptide
  MOD_RES (1)..(35): Xaa is C or S
  MOD_RES (15)..(16)..(17)..(18)..(19): Xaa is A or G
  MOD_RES (20)..(21)..(22)..(23): Xaa is A or G or absent
XAPTQLSPINVLYFXXXXXXXXXYGKIPNMVVRAXG

SEQ ID NO: 22152 - protein, 35 aa, Artificial Sequence
  Non-cyclic GFR-binding peptide
  MOD_RES (1)..(35): Xaa is C or S
  MOD_RES (15)..(16)..(17)..(18)..(19): Xaa is A or G
  MOD_RES (20)..(21)..(22)..(23): Xaa is A or G or absent
XVPTRLSPINILYFXXXXXXXXXYGKIPDMVVESX

SEQ ID NO: 22153 - protein, 37 aa, Artificial Sequence
  Non-cyclic GFR-binding peptide
  MOD_RES (3)..(4): Xaa is C or S
  MOD_RES (18)..(19)..(20)..(21)..(22): Xaa is A or G
  MOD_RES (23)..(24)..(25)..(26): Xaa is A or G or absent
KAXXVPTKLSPINILYFXXXXXXXXXYGKIPGMAVSE

SEQ ID NO: 22154 - protein, 34 aa, Artificial Sequence
  Non-cyclic GFR-binding peptide
  MOD_RES (1)..(2)..(34): Xaa is C or S
XXVPARLSPINILYFDAANNVVYGKIPDMVVEAX

SEQ ID NO: 22155 - protein, 40 aa, Artificial Sequence
  Non-cyclic GFR-binding peptide
  MOD_RES (6)..(7)..(40): Xaa is C or S
KVGKAXXVPTKLSPINVLYFDDMGVPTYGKIPEGMSVAEX

SEQ ID NO: 22156 - protein, 39 aa, Artificial Sequence
  Non-cyclic GFR-binding peptide
  MOD_RES (4)..(5)..(37)..(39): Xaa is C or S
SKAXXVPTKLSPINILYFDKGVVTYYGKIPGMAVSEXGX

SEQ ID NO: 22157 - protein, 34 aa, Artificial Sequence
  Non-cyclic GFR-binding peptide
  MOD_RES (1)..(2)..(33): Xaa is C or S
XXAPVKTSPINMLYFDNGRVLLYGKIPMIVEEXG

SEQ ID NO: 22158 - protein, 39 aa, Artificial Sequence
  Non-cyclic GFR-binding peptide
  MOD_RES (4)..(5)..(38): Xaa is C or S
GKAXXVPTKLSPINVLYFDDMGVPTYGKIPEGMSVAEXG

SEQ ID NO: 22159 - protein, 41 aa, Artificial Sequence
  Non-cyclic GFR-binding peptide
  MOD_RES (3)..(4)..(38)..(40): Xaa is C or S
  MOD_RES (18)..(19)..(20)..(21)..(22): Xaa is A or G
  MOD_RES (23)..(24)..(25)..(26): Xaa is A or G or absent
KAXXVPTELSPINMLYFXXXXXXXXXYGKIPDMVVEGXGXR

SEQ ID NO: 22160 - protein, 35 aa, Artificial Sequence
  Non-cyclic GFR-binding peptide
  MOD_RES (3)..(4): Xaa is C or S
KPXXAPTQLSPINVLYFDDSSNVIYGKIPNMVVRA

SEQ ID NO: 22161 - protein, 39 aa, Artificial Sequence
  Non-cyclic GFR-binding peptide
  MOD_RES (5)..(6): Xaa is C or S
  MOD_RES (20)..(21)..(22)..(23)..(24): Xaa is A or G
  MOD_RES (25)..(26)..(27)..(28): Xaa is A or G or absent
VPKPXXAPTKLSPINVLYFXXXXXXXXXYGKIPNMVVRS

SEQ ID NO: 22162 - protein, 39 aa, Artificial Sequence
  Non-cyclic GFR-binding peptide
  MOD_RES (3)..(4)..(38): Xaa is C or S
  MOD_RES (18)..(19)..(20)..(21)..(22): Xaa is A or G
  MOD_RES (23)..(24)..(25)..(26): Xaa is A or G or absent
KAXXVPTKLSPINILYFXXXXXXXXXYGKIPGMAVSEXG

SEQ ID NO: 22163 - protein, 32 aa, Artificial Sequence
  Non-cyclic GFR-binding peptide
  MOD_RES (32)..(32): Xaa is C or S
APTKLSPINVLYFDSSNNVIYGKIPNMVVKAX

SEQ ID NO: 22164 - protein, 39 aa, Artificial Sequence
  Non-cyclic GFR-binding peptide
  MOD_RES (6)..(7)..(39): Xaa is C or S
SIPKAXXVPTELSPINMLYFDEYDKVVYGKIPEMVVEGX

SEQ ID NO: 22165 - protein, 39 aa, Artificial Sequence
  Non-cyclic GFR-binding peptide
  MOD_RES (5)..(6): Xaa is C or S
  MOD_RES (20)..(21)..(22)..(23)..(24): Xaa is A or G
  MOD_RES (25)..(26)..(27)..(28): Xaa is A or G or absent
ASKAXXVPTKLSPINILYFXXXXXXXXXYGKIPGMAVSE

SEQ ID NO: 22166 - protein, 42 aa, Artificial Sequence
  Non-cyclic GFR-binding peptide
  MOD_RES (4)..(5)..(39)..(41): Xaa is C or S
  MOD_RES (19)..(20)..(21)..(22)..(23): Xaa is A or G
  MOD_RES (24)..(25)..(26)..(27): Xaa is A or G or absent
PKAXXVPTELSPINMLYFXXXXXXXXXYGKIPEMVVEGXGXR

SEQ ID NO: 22167 - protein, 37 aa, Artificial Sequence
  Non-cyclic GFR-binding peptide
  MOD_RES (4)..(5): Xaa is C or S
  MOD_RES (19)..(20)..(21)..(22)..(23): Xaa is A or G
  MOD_RES (24)..(25)..(26)..(27): Xaa is A or G or absent
SKAXXVPTKLSPINILYFXXXXXXXXXYGKIPGMAVS

SEQ ID NO: 22168 - protein, 40 aa, Artificial Sequence
  Non-cyclic GFR-binding peptide
  MOD_RES (3)..(4)..(38)..(40): Xaa is C or S
  MOD_RES (18)..(19)..(20)..(21)..(22): Xaa is A or G
  MOD_RES (23)..(24)..(25)..(26): Xaa is A or G or absent
KPXXAPTQLSPINVLYFXXXXXXXXXYGKIPNMVVRAXGX

SEQ ID NO: 22169 - protein, 33 aa, Artificial Sequence
  Non-cyclic GFR-binding peptide
  MOD_RES (1)..(33): Xaa is C or S
XVPTRLSPINILYFDSANNVVYGKIPDMVVESX

SEQ ID NO: 22170 - protein, 39 aa, Artificial Sequence
  Non-cyclic GFR-binding peptide
  MOD_RES (6)..(7): Xaa is C or S
  MOD_RES (21)..(22)..(23)..(24)..(25): Xaa is A or G
  MOD_RES (26)..(27)..(28)..(29): Xaa is A or G or absent
AAPASXXVPARLSPINILYFXXXXXXXXXYGKIPDMVVE

SEQ ID NO: 22171 - protein, 37 aa, Artificial Sequence
  Non-cyclic GFR-binding peptide
  MOD_RES (3)..(4)..(36): Xaa is C or S
KAXXVPTELSPINMLYFDENEKVVYGKIPDMVVEGXG

SEQ ID NO: 22172 - protein, 31 aa, Artificial Sequence
  Non-cyclic GFR-binding peptide
VPTKLSPINILYFDKGVVTYYGKIPGMAVSE

SEQ ID NO: 22173 - protein, 34 aa, Artificial Sequence
  Non-cyclic GFR-binding peptide
  MOD_RES (2)..(2): Xaa is C or S
  MOD_RES (16)..(17)..(18)..(19)..(20): Xaa is A or G
  MOD_RES (21)..(22)..(23)..(24): Xaa is A or G or absent
TXAPTKLSPINVLYFXXXXXXXXXYGKIPNMVVR

SEQ ID NO: 22174 - protein, 34 aa, Artificial Sequence
  Non-cyclic GFR-binding peptide
  MOD_RES (32)..(34): Xaa is C or S
APTQLSPINVLYFDDSSNVIYGKIPNMVVRAXGX

SEQ ID NO: 22175 - protein, 38 aa, Artificial Sequence
  Non-cyclic GFR-binding peptide
  MOD_RES (5)..(6)..(38): Xaa is C or S
VPKPXXAPTKLSPINVLYFDDSSNVIYGKIPNMVVRSX

SEQ ID NO: 22176 - protein, 37 aa, Artificial Sequence
  Non-cyclic GFR-binding peptide
  MOD_RES (1)..(2)..(34)..(36): Xaa is C or S
XXVPTKLSPINILYFDKGVVTYYGKIPGMAVSEXGXR

SEQ ID NO: 22177 - protein, 37 aa, Artificial Sequence
  Non-cyclic GFR-binding peptide
  MOD_RES (34)..(36): Xaa is C or S
  MOD_RES (14)..(15)..(16)..(17)..(18): Xaa is A or G
  MOD_RES (19)..(20)..(21)..(22): Xaa is A or G or absent
VPARLSPINILYFXXXXXXXXXYGKIPDMVVEAXGXR

SEQ ID NO: 22178 - protein, 36 aa, Artificial Sequence
  Non-cyclic GFR-binding peptide
  MOD_RES (1)..(35): Xaa is C or S
  MOD_RES (15)..(16)..(17)..(18)..(19): Xaa is A or G
  MOD_RES (20)..(21)..(22)..(23): Xaa is A or G or absent
XVPTELSPINMLYFXXXXXXXXXYGKIPDMVVEGXG

SEQ ID NO: 22179 - protein, 38 aa, Artificial Sequence
  Non-cyclic GFR-binding peptide
  MOD_RES (1)..(2)..(36)..(38): Xaa is C or S
  MOD_RES (16)..(17)..(18)..(19)..(20): Xaa is A or G
  MOD_RES (21)..(22)..(23)..(24): Xaa is A or G or absent
XXAPTKLSPINVLYFXXXXXXXXXYGKIPNMVVKAXGX

SEQ ID NO: 22180 - protein, 33 aa, Artificial Sequence
  Non-cyclic GFR-binding peptide
  MOD_RES (14)..(15)..(16)..(17)..(18): Xaa is A or G
  MOD_RES (19)..(20)..(21)..(22): Xaa is A or G or absent
VPTELSPINMLYFXXXXXXXXXYGKIPEMVVEG

SEQ ID NO: 22181 - protein, 41 aa, Artificial Sequence
  Non-cyclic GFR-binding peptide
  MOD_RES (6)..(7)..(39)..(41): Xaa is C or S
YVPKPXXAPTKLSPINVLYFDDSSNVIYGKIPNMVVRSXGX

SEQ ID NO: 22182 - protein, 39 aa, Artificial Sequence
  Non-cyclic GFR-binding peptide
  MOD_RES (6)..(7): Xaa is C or S
  MOD_RES (21)..(22)..(23)..(24)..(25): Xaa is A or G
  MOD_RES (26)..(27)..(28)..(29): Xaa is A or G or absent
YVPKPXXAPTKLSPINVLYFXXXXXXXXXYGKIPNMVVR

SEQ ID NO: 22183 - protein, 41 aa, Artificial Sequence
  Non-cyclic GFR-binding peptide
  MOD_RES (5)..(6)..(40): Xaa is C or S
  MOD_RES (20)..(21)..(22)..(23)..(24): Xaa is A or G
  MOD_RES (25)..(26)..(27)..(28): Xaa is A or G or absent
IPKAXXVPTELSPINMLYFXXXXXXXXXYGKIPEMVVEGXG

SEQ ID NO: 22184 - protein, 37 aa, Artificial Sequence
  Non-cyclic GFR-binding peptide
  MOD_RES (4)..(5)..(36): Xaa is C or S
PSTXXAPVKTSPINMLYFDNGRVLLYGKIPMIVEEXG

SEQ ID NO: 22185 - protein, 36 aa, Artificial Sequence
  Non-cyclic GFR-binding peptide
  MOD_RES (1)..(2)..(34)..(36): Xaa is C or S
XXAPTKLSPINVLYFDDSSNVIYGKIPNMVVRSXGX

SEQ ID NO: 22186 - protein, 37 aa, Artificial Sequence
  Non-cyclic GFR-binding peptide
  MOD_RES (5)..(6)..(37): Xaa is C or S
VPSTXXAPVKTSPINMLYFDNGRVLLYGKIPMIVEEX

SEQ ID NO: 22187 - protein, 37 aa, Artificial Sequence
  Non-cyclic GFR-binding peptide
  MOD_RES (3)..(4): Xaa is C or S
  MOD_RES (18)..(19)..(20)..(21)..(22): Xaa is A or G
  MOD_RES (23)..(24)..(25)..(26): Xaa is A or G or absent
KPXXAPTKLSPINVLYFXXXXXXXXXYGKIPNMVVRS

SEQ ID NO: 22188 - protein, 37 aa, Artificial Sequence
  Non-cyclic GFR-binding peptide
  MOD_RES (2)..(3)..(35)..(37): Xaa is C or S
SXXVPARLSPINILYFDAANNVVYGKIPDMVVEAXGX

SEQ ID NO: 22189 - protein, 38 aa, Artificial Sequence
  Non-cyclic GFR-binding peptide
  MOD_RES (3)..(4)..(37): Xaa is C or S
  MOD_RES (18)..(19)..(20)..(21)..(22): Xaa is A or G
  MOD_RES (23)..(24)..(25)..(26): Xaa is A or G or absent
STXXAPVKTSPINMLYFXXXXXXXXXYGKIPMIVEEXG

SEQ ID NO: 22190 - protein, 30 aa, Artificial Sequence; identical to SEQ ID NO: 911
  Non-cyclic GFR-binding peptide

SEQ ID NO: 22191 - protein, 32 aa, Artificial Sequence
  Non-cyclic GFR-binding peptide
  MOD_RES (32)..(32): Xaa is C or S
APTKLSPINVLYFDDSSNVIYGKIPNMVVRSX

SEQ ID NO: 22192 - protein, 40 aa, Artificial Sequence
  Non-cyclic GFR-binding peptide
  MOD_RES (6)..(7): Xaa is C or S
  MOD_RES (21)..(22)..(23)..(24)..(25): Xaa is A or G
  MOD_RES (26)..(27)..(28)..(29): Xaa is A or G or absent
KIPKAXXVPTELSPINMLYFXXXXXXXXXYGKIPDMVVEG

SEQ ID NO: 22193 - protein, 38 aa, Artificial Sequence
  Non-cyclic GFR-binding peptide
  MOD_RES (6)..(7): Xaa is C or S
HVPKPXXAPTKLSPINVLYFDDSSNVIYGKIPNMVVRS

SEQ ID NO: 22194 - protein, 34 aa, Artificial Sequence
  Non-cyclic GFR-binding peptide
  MOD_RES (1)..(2)..(34): Xaa is C or S
XXVPTKLSPINILYFDKGVVTYYGKIPGMAVSEX

SEQ ID NO: 22195 - protein, 42 aa, Artificial Sequence
  Non-cyclic GFR-binding peptide
  MOD_RES (6)..(7)..(39)..(41): Xaa is C or S
TVPKPXXAPTQLSPINVLYFDDSSNVIYGKIPNMVVRAXGXH

SEQ ID NO: 22196 - protein, 35 aa, Artificial Sequence
  Non-cyclic GFR-binding peptide
  MOD_RES (32)..(34): Xaa is C or S
VPTELSPINMLYFDEYDKVVYGKIPEMVVEGXGXR

SEQ ID NO: 22197 - protein, 32 aa, Artificial Sequence
  Non-cyclic GFR-binding peptide
  MOD_RES (1)..(32): Xaa is C or S
XAPVKTSPINMLYFDNGRVLLYGKIPMIVEEX

SEQ ID NO: 22198 - protein, 34 aa, Artificial Sequence
  Non-cyclic GFR-binding peptide
  MOD_RES (3)..(3): Xaa is C or S
PTXAPTKLSPINVLYFDDSSNVIYGKIPNMVVRS

SEQ ID NO: 22199 - protein, 37 aa, Artificial Sequence
  Non-cyclic GFR-binding peptide
  MOD_RES (3)..(4)..(36): Xaa is C or S
KAXXAPTKLSPINVLYFDSSNNVIYGKIPNMVVKAXG

SEQ ID NO: 22200 - protein, 37 aa, Artificial Sequence
  Non-cyclic GFR-binding peptide
  MOD_RES (6)..(7): Xaa is C or S
TVPKPXXAPTQLSPINVLYFDDSSNVIYGKIPNMVVR

SEQ ID NO: 22201 - protein, 40 aa, Artificial Sequence
  Non-cyclic GFR-binding peptide
  MOD_RES (3)..(4)..(38)..(40): Xaa is C or S
  MOD_RES (18)..(19)..(20)..(21)..(22): Xaa is A or G
  MOD_RES (23)..(24)..(25)..(26): Xaa is A or G or absent
KAXXVPTKLSPINILYFXXXXXXXXXYGKIPGMAVSEXGX

SEQ ID NO: 22202 - protein, 34 aa, Artificial Sequence
  Non-cyclic GFR-binding peptide
  MOD_RES (1)..(1): Xaa is C or S
  MOD_RES (15)..(16)..(17)..(18)..(19): Xaa is A or G
  MOD_RES (20)..(21)..(22)..(23): Xaa is A or G or absent
XVPTRLSPINILYFXXXXXXXXXYGKIPDMVVES

SEQ ID NO: 22203 - protein, 32 aa, Artificial Sequence
  Non-cyclic GFR-binding peptide
  MOD_RES (1)..(2): Xaa is C or S
XXAPTQLSPINVLYFDDSSNVIYGKIPNMVVR

SEQ ID NO: 22204 - protein, 36 aa, Artificial Sequence
  Non-cyclic GFR-binding peptide
  MOD_RES (4)..(5): Xaa is C or S
PKPXXAPTQLSPINVLYFDDSSNVIYGKIPNMVVRA

SEQ ID NO: 22205 - protein, 37 aa, Artificial Sequence
  Non-cyclic GFR-binding peptide
  MOD_RES (2)..(3)..(37): Xaa is C or S
  MOD_RES (17)..(18)..(19)..(20)..(21): Xaa is A or G
  MOD_RES (22)..(23)..(24)..(25): Xaa is A or G or absent
PXXAPTQLSPINVLYFXXXXXXXXXYGKIPNMVVRAX

SEQ ID NO: 22206 - protein, 44 aa, Artificial Sequence
  Non-cyclic GFR-binding peptide
  MOD_RES (7)..(41)..(43): Xaa is C or S
  MOD_RES (21)..(22)..(23)..(24)..(25): Xaa is A or G
  MOD_RES (26)..(27)..(28)..(29): Xaa is A or G or absent
HVTKPTXAPTKLSPINVLYFXXXXXXXXXYGKIPNMVVRSXGXH

SEQ ID NO: 22207 - protein, 33 aa, Artificial Sequence
  Non-cyclic GFR-binding peptide
  MOD_RES (2)..(2): Xaa is C or S
TXAPTKLSPINVLYFDDSSNVIYGKIPNMVVRS

SEQ ID NO: 22208 - protein, 44 aa, Artificial Sequence
  Non-cyclic GFR-binding peptide
  MOD_RES (6)..(7)..(41)..(43): Xaa is C or S
  MOD_RES (21)..(22)..(23)..(24)..(25): Xaa is A or G
  MOD_RES (26)..(27)..(28)..(29): Xaa is A or G or absent
SIPKAXXVPTELSPINMLYFXXXXXXXXXYGKIPEMVVEGXGXR

SEQ ID NO: 22209 - protein, 38 aa, Artificial Sequence
  Non-cyclic GFR-binding peptide
  MOD_RES (1)..(2)..(36)..(38): Xaa is C or S
  MOD_RES (16)..(17)..(18)..(19)..(20): Xaa is A or G
  MOD_RES (21)..(22)..(23)..(24): Xaa is A or G or absent
XXVPTRLSPINILYFXXXXXXXXXYGKIPDMVVESXGX

SEQ ID NO: 22210 - protein, 38 aa, Artificial Sequence
  Non-cyclic GFR-binding peptide
  MOD_RES (6)..(7): Xaa is C or S
YVPKPXXAPTKLSPINVLYFDDSSNVIYGKIPNMVVRS

SEQ ID NO: 22211 - protein, 36 aa, Artificial Sequence
  Non-cyclic GFR-binding peptide
  MOD_RES (2)..(3)..(35): Xaa is C or S
PXXAPTQLSPINVLYFDDSSNVIYGKIPNMVVRAXG

SEQ ID NO: 22212 - protein, 38 aa, Artificial Sequence
  Non-cyclic GFR-binding peptide
  MOD_RES (2)..(3)..(37): Xaa is C or S
  MOD_RES (17)..(18)..(19)..(20)..(21): Xaa is A or G
  MOD_RES (22)..(23)..(24)..(25): Xaa is A or G or absent
AXXAPTKLSPINVLYFXXXXXXXXXYGKIPNMVVKAXG

SEQ ID NO: 22213 - protein, 35 aa, Artificial Sequence
  Non-cyclic GFR-binding peptide
  MOD_RES (1)..(35): Xaa is C or S
  MOD_RES (15)..(16)..(17)..(18)..(19): Xaa is A or G
  MOD_RES (20)..(21)..(22)..(23): Xaa is A or G or absent
XAPTKLSPINVLYFXXXXXXXXXYGKIPNMVVKAX

SEQ ID NO: 22214 - protein, 31 aa, Artificial Sequence
  Non-cyclic GFR-binding peptide
  MOD_RES (1)..(1): Xaa is C or S
XAPTQLSPINVLYFDDSSNVIYGKIPNMVVR

SEQ ID NO: 22215 - protein, 35 aa, Artificial Sequence
  Non-cyclic GFR-binding peptide
  MOD_RES (4)..(5): Xaa is C or S
PASXXVPARLSPINILYFDAANNVVYGKIPDMVVE

SEQ ID NO: 22216 - protein, 43 aa, Artificial Sequence
  Non-cyclic GFR-binding peptide
  MOD_RES (6)..(7)..(41)..(43): Xaa is C or S
  MOD_RES (21)..(22)..(23)..(24)..(25): Xaa is A or G
  MOD_RES (26)..(27)..(28)..(29): Xaa is A or G or absent
KIPKAXXVPTELSPINMLYFXXXXXXXXXYGKIPDMVVEGXGX

SEQ ID NO: 22217 - protein, 37 aa, Artificial Sequence
  Non-cyclic GFR-binding peptide
  MOD_RES (3)..(4): Xaa is C or S
  MOD_RES (18)..(19)..(20)..(21)..(22): Xaa is A or G
  MOD_RES (23)..(24)..(25)..(26): Xaa is A or G or absent
ASXXVPARLSPINILYFXXXXXXXXXYGKIPDMVVEA

SEQ ID NO: 22218 - protein, 33 aa, Artificial Sequence
  Non-cyclic GFR-binding peptide
  MOD_RES (2)..(3): Xaa is C or S
PXXAPTQLSPINVLYFDDSSNVIYGKIPNMVVR

SEQ ID NO: 22219 - protein, 42 aa, Artificial Sequence
  Non-cyclic GFR-binding peptide
  MOD_RES (5)..(6)..(40)..(42): Xaa is C or S
  MOD_RES (20)..(21)..(22)..(23)..(24): Xaa is A or G
  MOD_RES (25)..(26)..(27)..(28): Xaa is A or G or absent
IPKAXXVPTELSPINMLYFXXXXXXXXXYGKIPDMVVEGXGX

SEQ ID NO: 22220 - protein, 38 aa, Artificial Sequence
  Non-cyclic GFR-binding peptide
  MOD_RES (1)..(2)..(37): Xaa is C or S
  MOD_RES (16)..(17)..(18)..(19)..(20): Xaa is A or G
  MOD_RES (21)..(22)..(23)..(24): Xaa is A or G or absent
XXVPTKLSPINVLYFXXXXXXXXXYGKIPEGMSVAEXG

SEQ ID NO: 22221 - protein, 35 aa, Artificial Sequence
  Non-cyclic GFR-binding peptide
  MOD_RES (2)..(3)..(35): Xaa is C or S
AXXAPTKLSPINVLYFDSSNNVIYGKIPNMVVKAX

SEQ ID NO: 22222 - protein, 39 aa, Artificial Sequence
  Non-cyclic GFR-binding peptide
  MOD_RES (4)..(5)..(39): Xaa is C or S
  MOD_RES (19)..(20)..(21)..(22)..(23): Xaa is A or G
  MOD_RES (24)..(25)..(26)..(27): Xaa is A or G or absent
PASXXVPARLSPINILYFXXXXXXXXXYGKIPDMVVEAX

SEQ ID NO: 22223 - protein, 33 aa, Artificial Sequence
  Non-cyclic GFR-binding peptide
  MOD_RES (1)..(2): Xaa is C or S
XXVPARLSPINILYFDAANNVVYGKIPDMVVEA

SEQ ID NO: 22224 - protein, 34 aa, Artificial Sequence
  Non-cyclic GFR-binding peptide
  MOD_RES (1)..(2)..(34): Xaa is C or S
XXAPTQLSPINVLYFDDSSNVIYGKIPNMVVRAX

SEQ ID NO: 22225 - protein, 39 aa, Artificial Sequence
  Non-cyclic GFR-binding peptide
  MOD_RES (3)..(4)..(36)..(38): Xaa is C or S
KPXXAPTQLSPINVLYFDDSSNVIYGKIPNMVVRAXGXH

SEQ ID NO: 22226 - protein, 36 aa, Artificial Sequence
  Non-cyclic GFR-binding peptide
  MOD_RES (2)..(3)..(35): Xaa is C or S
AXXVPTKLSPINILYFDKGVVTYYGKIPGMAVSEXG

SEQ ID NO: 22227 - protein, 41 aa, Artificial Sequence
  Non-cyclic GFR-binding peptide
  MOD_RES (5)..(6)..(40): Xaa is C or S
  MOD_RES (20)..(21)..(22)..(23)..(24): Xaa is A or G
  MOD_RES (25)..(26)..(27)..(28): Xaa is A or G or absent
APASXXVPARLSPINILYFXXXXXXXXXYGKIPDMVVEAXG

SEQ ID NO: 22228 - protein, 39 aa, Artificial Sequence
  Non-cyclic GFR-binding peptide
  MOD_RES (6)..(7): Xaa is C or S
  MOD_RES (21)..(22)..(23)..(24)..(25): Xaa is A or G
  MOD_RES (26)..(27)..(28)..(29): Xaa is A or G or absent
KASKAXXVPTKLSPINILYFXXXXXXXXXYGKIPGMAVS

SEQ ID NO: 22229 - protein, 39 aa, Artificial Sequence
  Non-cyclic GFR-binding peptide
  MOD_RES (5)..(6)..(38): Xaa is C or S
APASXXVPARLSPINILYFDAANNVVYGKIPDMVVEAXG

SEQ ID NO: 22230 - protein, 36 aa, Artificial Sequence
  Non-cyclic GFR-binding peptide
  MOD_RES (1)..(2)..(36): Xaa is C or S
  MOD_RES (16)..(17)..(18)..(19)..(20): Xaa is A or G
  MOD_RES (21)..(22)..(23)..(24): Xaa is A or G or absent
XXVPTKLSPINILYFXXXXXXXXXYGKIPGMAVSEX

SEQ ID NO: 22231 - protein, 37 aa, Artificial Sequence
  Non-cyclic GFR-binding peptide
  MOD_RES (3)..(4)..(36): Xaa is C or S
PTXXVPTRLSPINILYFDSANNVVYGKIPDMVVESXG

SEQ ID NO: 22232 - protein, 36 aa, Artificial Sequence
  Non-cyclic GFR-binding peptide
  MOD_RES (1)..(35): Xaa is C or S
  MOD_RES (15)..(16)..(17)..(18)..(19): Xaa is A or G
  MOD_RES (20)..(21)..(22)..(23): Xaa is A or G or absent
XAPTKLSPINVLYFXXXXXXXXXYGKIPNMVVRSXG

SEQ ID NO: 22233 - protein, 36 aa, Artificial Sequence
  Non-cyclic GFR-binding peptide
  MOD_RES (1)..(2)..(34)..(36): Xaa is C or S
XXVPTELSPINMLYFDENEKVVYGKIPDMVVEGXGX

SEQ ID NO: 22234 - protein, 37 aa, Artificial Sequence
  Non-cyclic GFR-binding peptide
  MOD_RES (3)..(4): Xaa is C or S
  MOD_RES (18)..(19)..(20)..(21)..(22): Xaa is A or G
  MOD_RES (23)..(24)..(25)..(26): Xaa is A or G or absent
PTXXVPTRLSPINILYFXXXXXXXXXYGKIPDMVVES

SEQ ID NO: 22235 - protein, 36 aa, Artificial Sequence
  Non-cyclic GFR-binding peptide
  MOD_RES (1)..(33)..(35): Xaa is C or S
XVPARLSPINILYFDAANNVVYGKIPDMVVEAXGXR

SEQ ID NO: 22236 - protein, 37 aa, Artificial Sequence
  Non-cyclic GFR-binding peptide
  MOD_RES (5)..(6): Xaa is C or S
IPKAXXVPTELSPINMLYFDEYDKVVYGKIPEMVVEG

SEQ ID NO: 22237 - protein, 37 aa, Artificial Sequence
  Non-cyclic GFR-binding peptide
  MOD_RES (3)..(4)..(36): Xaa is C or S
ASXXVPARLSPINILYFDAANNVVYGKIPDMVVEAXG

SEQ ID NO: 22238 - protein, 41 aa, Artificial Sequence
  Non-cyclic GFR-binding peptide
  MOD_RES (7)..(41): Xaa is C or S
  MOD_RES (21)..(22)..(23)..(24)..(25): Xaa is A or G
  MOD_RES (26)..(27)..(28)..(29): Xaa is A or G or absent
HVTKPTXAPTKLSPINVLYFXXXXXXXXXYGKIPNMVVRSX

SEQ ID NO: 22239 - protein, 39 aa, Artificial Sequence
  Non-cyclic GFR-binding peptide
  MOD_RES (3)..(4)..(36)..(38): Xaa is C or S
KPXXAPTKLSPINVLYFDDSSNVIYGKIPNMVVRSXGXH

SEQ ID NO: 22240 - protein, 39 aa, Artificial Sequence
  Non-cyclic GFR-binding peptide
  MOD_RES (6)..(7)..(39): Xaa is C or S
AAPASXXVPARLSPINILYFDAANNVVYGKIPDMVVEAX

SEQ ID NO: 22241 - protein, 42 aa, Artificial Sequence
  Non-cyclic GFR-binding peptide
  MOD_RES (6)..(7)..(40)..(42): Xaa is C or S
KVGKAXXVPTKLSPINVLYFDDMGVPTYGKIPEGMSVAEXGX

SEQ ID NO: 22242 - protein, 39 aa, Artificial Sequence
  Non-cyclic GFR-binding peptide
  MOD_RES (4)..(5)..(37)..(39): Xaa is C or S
PKPXXAPTKLSPINVLYFDDSSNVIYGKIPNMVVRSXGX

SEQ ID NO: 22243 - protein, 35 aa, Artificial Sequence
  Non-cyclic GFR-binding peptide
  MOD_RES (1)..(2): Xaa is C or S
  MOD_RES (16)..(17)..(18)..(19)..(20): Xaa is A or G
  MOD_RES (21)..(22)..(23)..(24): Xaa is A or G or absent
XXVPTELSPINMLYFXXXXXXXXXYGKIPEMVVEG

SEQ ID NO: 22244 - protein, 40 aa, Artificial Sequence
  Non-cyclic GFR-binding peptide
  MOD_RES (6)..(7)..(39): Xaa is C or S
AAPASXXVPARLSPINILYFDAANNVVYGKIPDMVVEAXG

SEQ ID NO: 22245 - protein, 38 aa, Artificial Sequence
  Non-cyclic GFR-binding peptide
  MOD_RES (3)..(4)..(38): Xaa is C or S
  MOD_RES (18)..(19)..(20)..(21)..(22): Xaa is A or G
  MOD_RES (23)..(24)..(25)..(26): Xaa is A or G or absent
ASXXVPARLSPINILYFXXXXXXXXXYGKIPDMVVEAX

SEQ ID NO: 22246 - protein, 43 aa, Artificial Sequence
  Non-cyclic GFR-binding peptide
  MOD_RES (5)..(6)..(40)..(42): Xaa is C or S
  MOD_RES (20)..(21)..(22)..(23)..(24): Xaa is A or G
  MOD_RES (25)..(26)..(27)..(28): Xaa is A or G or absent
IPKAXXVPTELSPINMLYFXXXXXXXXXYGKIPEMVVEGXGXR

SEQ ID NO: 22247 - protein, 41 aa, Artificial Sequence
  Non-cyclic GFR-binding peptide
  MOD_RES (6)..(7)..(41): Xaa is C or S
  MOD_RES (21)..(22)..(23)..(24)..(25): Xaa is A or G
  MOD_RES (26)..(27)..(28)..(29): Xaa is A or G or absent
KIPKAXXVPTELSPINMLYFXXXXXXXXXYGKIPDMVVEGX

SEQ ID NO: 22248 - protein, 39 aa, Artificial Sequence
  Non-cyclic GFR-binding peptide
  MOD_RES (5)..(6)..(38): Xaa is C or S
VPKAXXAPTKLSPINVLYFDSSNNVIYGKIPNMVVKAXG

SEQ ID NO: 22249 - protein, 37 aa, Artificial Sequence
  Non-cyclic GFR-binding peptide
  MOD_RES (1)..(2)..(36): Xaa is C or S
  MOD_RES (16)..(17)..(18)..(19)..(20): Xaa is A or G
  MOD_RES (21)..(22)..(23)..(24): Xaa is A or G or absent
XXVPTRLSPINILYFXXXXXXXXXYGKIPDMVVESXG

SEQ ID NO: 22250 - protein, 34 aa, Artificial Sequence
  Non-cyclic GFR-binding peptide
  MOD_RES (1)..(34): Xaa is C or S
  MOD_RES (15)..(16)..(17)..(18)..(19): Xaa is A or G
  MOD_RES (20)..(21)..(22)..(23): Xaa is A or G or absent
XAPVKTSPINMLYFXXXXXXXXXYGKIPMIVEEX

SEQ ID NO: 22251 - protein, 37 aa, Artificial Sequence
  Non-cyclic GFR-binding peptide
  MOD_RES (4)..(5)..(37): Xaa is C or S
PKAXXAPTKLSPINVLYFDSSNNVIYGKIPNMVVKAX

SEQ ID NO: 22252 - protein, 34 aa, Artificial Sequence
  Non-cyclic GFR-binding peptide
  MOD_RES (1)..(2)..(34): Xaa is C or S
XXAPTKLSPINVLYFDDSSNVIYGKIPNMVVRSX

SEQ ID NO: 22253 - protein, 38 aa, Artificial Sequence
  Non-cyclic GFR-binding peptide
  MOD_RES (3)..(4)..(37): Xaa is C or S
KAXXVPTKLSPINVLYFDDMGVPTYGKIPEGMSVAEXG

SEQ ID NO: 22254 - protein, 40 aa, Artificial Sequence
  Non-cyclic GFR-binding peptide
  MOD_RES (5)..(6)..(40): Xaa is C or S
  MOD_RES (20)..(21)..(22)..(23)..(24): Xaa is A or G
  MOD_RES (25)..(26)..(27)..(28): Xaa is A or G or absent
VPKAXXAPTKLSPINVLYFXXXXXXXXXYGKIPNMVVKAX

SEQ ID NO: 22255 - protein, 39 aa, Artificial Sequence
  Non-cyclic GFR-binding peptide
  MOD_RES (7)..(7): Xaa is C or S
  MOD_RES (21)..(22)..(23)..(24)..(25): Xaa is A or G
  MOD_RES (26)..(27)..(28)..(29): Xaa is A or G or absent
HVTKPTXAPTKLSPINVLYFXXXXXXXXXYGKIPNMVVR

SEQ ID NO: 22256 - protein, 39 aa, Artificial Sequence
  Non-cyclic GFR-binding peptide
  MOD_RES (4)..(5)..(39): Xaa is C or S
  MOD_RES (19)..(20)..(21)..(22)..(23): Xaa is A or G
  MOD_RES (24)..(25)..(26)..(27): Xaa is A or G or absent
PKAXXVPTELSPINMLYFXXXXXXXXXYGKIPEMVVEGX

SEQ ID NO: 22257 - protein, 36 aa, Artificial Sequence
  Non-cyclic GFR-binding peptide
  MOD_RES (1)..(2)..(36): Xaa is C or S
  MOD_RES (16)..(17)..(18)..(19)..(20): Xaa is A or G
  MOD_RES (21)..(22)..(23)..(24): Xaa is A or G or absent
XXVPARLSPINILYFXXXXXXXXXYGKIPDMVVEAX

SEQ ID NO: 22258 - protein, 38 aa, Artificial Sequence
  Non-cyclic GFR-binding peptide
  MOD_RES (3)..(4)..(36)..(38): Xaa is C or S
KPXXAPTKLSPINVLYFDDSSNVIYGKIPNMVVRSXGX

SEQ ID NO: 22259 - protein, 37 aa, Artificial Sequence
  Non-cyclic GFR-binding peptide
  MOD_RES (1)..(2)..(36): Xaa is C or S
  MOD_RES (16)..(17)..(18)..(19)..(20): Xaa is A or G
  MOD_RES (21)..(22)..(23)..(24): Xaa is A or G or absent
XXVPTELSPINMLYFXXXXXXXXXYGKIPEMVVEGXG

SEQ ID NO: 22260 - protein, 38 aa, Artificial Sequence
  Non-cyclic GFR-binding peptide
  MOD_RES (5)..(5): Xaa is C or S
  MOD_RES (19)..(20)..(21)..(22)..(23): Xaa is A or G
  MOD_RES (24)..(25)..(26)..(27): Xaa is A or G or absent
TKPTXAPTKLSPINVLYFXXXXXXXXXYGKIPNMVVRS

SEQ ID NO: 22261 - protein, 31 aa, Artificial Sequence
  Non-cyclic GFR-binding peptide
VPTELSPINMLYFDENEKVVYGKIPDMVVEG

SEQ ID NO: 22262 - protein, 38 aa, Artificial Sequence
  Non-cyclic GFR-binding peptide
  MOD_RES (3)..(4)..(38): Xaa is C or S
  MOD_RES (18)..(19)..(20)..(21)..(22): Xaa is A or G
  MOD_RES (23)..(24)..(25)..(26): Xaa is A or G or absent
KPXXAPTQLSPINVLYFXXXXXXXXXYGKIPNMVVRAX

SEQ ID NO: 22263 - protein, 33 aa, Artificial Sequence
  Non-cyclic GFR-binding peptide
  MOD_RES (1)..(1): Xaa is C or S
  MOD_RES (15)..(16)..(17)..(18)..(19): Xaa is A or G
  MOD_RES (20)..(21)..(22)..(23): Xaa is A or G or absent
XVPTELSPINMLYFXXXXXXXXXYGKIPEMVVE

SEQ ID NO: 22264 - protein, 37 aa, Artificial Sequence
  Non-cyclic GFR-binding peptide
  MOD_RES (3)..(4): Xaa is C or S
  MOD_RES (18)..(19)..(20)..(21)..(22): Xaa is A or G
  MOD_RES (23)..(24)..(25)..(26): Xaa is A or G or absent
KAXXAPTKLSPINVLYFXXXXXXXXXYGKIPNMVVKA

SEQ ID NO: 22265 - protein, 37 aa, Artificial Sequence
  Non-cyclic GFR-binding peptide
  MOD_RES (2)..(3)..(37): Xaa is C or S
  MOD_RES (17)..(18)..(19)..(20)..(21): Xaa is A or G
  MOD_RES (22)..(23)..(24)..(25): Xaa is A or G or absent
TXXVPTRLSPINILYFXXXXXXXXXYGKIPDMVVESX

SEQ ID NO: 22266 - protein, 33 aa, Artificial Sequence
  Non-cyclic GFR-binding peptide
  MOD_RES (1)..(33): Xaa is C or S
XVPARLSPINILYFDAANNVVYGKIPDMVVEAX

SEQ ID NO: 22267 - protein, 35 aa, Artificial Sequence
  Non-cyclic GFR-binding peptide
  MOD_RES (4)..(4): Xaa is C or S
KPTXAPTKLSPINVLYFDDSSNVIYGKIPNMVVRS

SEQ ID NO: 22268 - protein, 40 aa, Artificial Sequence
  Non-cyclic GFR-binding peptide
  MOD_RES (4)..(5)..(37)..(39): Xaa is C or S
PKPXXAPTKLSPINVLYFDDSSNVIYGKIPNMVVRSXGXH

SEQ ID NO: 22269 - protein, 42 aa, Artificial Sequence
  Non-cyclic GFR-binding peptide
  MOD_RES (6)..(7)..(40)..(42): Xaa is C or S
  MOD_RES (21)..(22)..(23)..(24)..(25): Xaa is A or G
  MOD_RES (26)..(27)..(28)..(29): Xaa is A or G or absent
RVPSTXXAPVKTSPINMLYFXXXXXXXXXYGKIPMIVEEXGX

SEQ ID NO: 22270 - protein, 41 aa, Artificial Sequence
  Non-cyclic GFR-binding peptide
  MOD_RES (4)..(5)..(39)..(41): Xaa is C or S
  MOD_RES (19)..(20)..(21)..(22)..(23): Xaa is A or G
  MOD_RES (24)..(25)..(26)..(27): Xaa is A or G or absent
PASXXVPARLSPINILYFXXXXXXXXXYGKIPDMVVEAXGX

SEQ ID NO: 22271 - protein, 40 aa, Artificial Sequence
  Non-cyclic GFR-binding peptide
  MOD_RES (5)..(6): Xaa is C or S
  MOD_RES (20)..(21)..(22)..(23)..(24): Xaa is A or G
  MOD_RES (25)..(26)..(27)..(28): Xaa is A or G or absent
VGKAXXVPTKLSPINVLYFXXXXXXXXXYGKIPEGMSVAE

SEQ ID NO: 22272 - protein, 37 aa, Artificial Sequence
  Non-cyclic GFR-binding peptide
  MOD_RES (4)..(5): Xaa is C or S
  MOD_RES (19)..(20)..(21)..(22)..(23): Xaa is A or G
  MOD_RES (24)..(25)..(26)..(27): Xaa is A or G or absent
PPTXXVPTRLSPINILYFXXXXXXXXXYGKIPDMVVE

SEQ ID NO: 22273 - protein, 35 aa, Artificial Sequence
  Non-cyclic GFR-binding peptide
  MOD_RES (1)..(35): Xaa is C or S
  MOD_RES (15)..(16)..(17)..(18)..(19): Xaa is A or G
  MOD_RES (20)..(21)..(22)..(23): Xaa is A or G or absent
XVPARLSPINILYFXXXXXXXXXYGKIPDMVVEAX

SEQ ID NO: 22274 - protein, 36 aa, Artificial Sequence
  Non-cyclic GFR-binding peptide
  MOD_RES (4)..(5): Xaa is C or S
SKAXXVPTKLSPINILYFDKGVVTYYGKIPGMAVSE

SEQ ID NO: 22275 - protein, 41 aa, Artificial Sequence
  Non-cyclic GFR-binding peptide
  MOD_RES (2)..(3)..(38)..(40): Xaa is C or S
  MOD_RES (17)..(18)..(19)..(20)..(21): Xaa is A or G
  MOD_RES (22)..(23)..(24)..(25): Xaa is A or G or absent
AXXVPTKLSPINVLYFXXXXXXXXXYGKIPEGMSVAEXGXR

SEQ ID NO: 22276 - protein, 44 aa, Artificial Sequence
  Non-cyclic GFR-binding peptide
  MOD_RES (6)..(7)..(41)..(43): Xaa is C or S
  MOD_RES (21)..(22)..(23)..(24)..(25): Xaa is A or G
  MOD_RES (26)..(27)..(28)..(29): Xaa is A or G or absent
KASKAXXVPTKLSPINILYFXXXXXXXXXYGKIPGMAVSEXGXR

SEQ ID NO: 22277 - protein, 41 aa, Artificial Sequence
  Non-cyclic GFR-binding peptide
  MOD_RES (4)..(5)..(39)..(41): Xaa is C or S
  MOD_RES (19)..(20)..(21)..(22)..(23): Xaa is A or G
  MOD_RES (24)..(25)..(26)..(27): Xaa is A or G or absent
PKAXXVPTELSPINMLYFXXXXXXXXXYGKIPEMVVEGXGX

SEQ ID NO: 22278 - protein, 39 aa, Artificial Sequence
  Non-cyclic GFR-binding peptide
  MOD_RES (2)..(3)..(37)..(39): Xaa is C or S
  MOD_RES (17)..(18)..(19)..(20)..(21): Xaa is A or G
  MOD_RES (22)..(23)..(24)..(25): Xaa is A or G or absent
PXXAPTKLSPINVLYFXXXXXXXXXYGKIPNMVVRSXGX

SEQ ID NO: 22279 - protein, 42 aa, Artificial Sequence
  Non-cyclic GFR-binding peptide
  MOD_RES (6)..(7)..(39)..(41): Xaa is C or S
HVPKPXXAPTKLSPINVLYFDDSSNVIYGKIPNMVVRSXGXH

SEQ ID NO: 22280 - protein, 42 aa, Artificial Sequence
  Non-cyclic GFR-binding peptide
  MOD_RES (7)..(41): Xaa is C or S
  MOD_RES (21)..(22)..(23)..(24)..(25): Xaa is A or G
  MOD_RES (26)..(27)..(28)..(29): Xaa is A or G or absent
HVTKPTXAPTKLSPINVLYFXXXXXXXXXYGKIPNMVVRSXG

SEQ ID NO: 22281 - protein, 35 aa, Artificial Sequence
  Non-cyclic GFR-binding peptide
  MOD_RES (1)..(33)..(35): Xaa is C or S
XAPTKLSPINVLYFDDSSNVIYGKIPNMVVRSXGX

SEQ ID NO: 22282 - protein, 36 aa, Artificial Sequence
  Non-cyclic GFR-binding peptide
  MOD_RES (1)..(2)..(35): Xaa is C or S
XXVPTKLSPINVLYFDDMGVPTYGKIPEGMSVAEXG

SEQ ID NO: 22283 - protein, 36 aa, Artificial Sequence
  Non-cyclic GFR-binding peptide
  MOD_RES (2)..(3)..(36): Xaa is C or S
  MOD_RES (17)..(18)..(19)..(20)..(21): Xaa is A or G
  MOD_RES (22)..(23)..(24)..(25): Xaa is A or G or absent
TXXAPVKTSPINMLYFXXXXXXXXXYGKIPMIVEEX

SEQ ID NO: 22284 - protein, 36 aa, Artificial Sequence
  Non-cyclic GFR-binding peptide
  MOD_RES (1)..(35): Xaa is C or S
  MOD_RES (15)..(16)..(17)..(18)..(19): Xaa is A or G
  MOD_RES (20)..(21)..(22)..(23): Xaa is A or G or absent
XVPARLSPINILYFXXXXXXXXXYGKIPDMVVEAXG

SEQ ID NO: 22285 - protein, 40 aa, Artificial Sequence
  Non-cyclic GFR-binding peptide
  MOD_RES (2)..(3)..(37)..(39): Xaa is C or S
  MOD_RES (17)..(18)..(19)..(20)..(21): Xaa is A or G
  MOD_RES (22)..(23)..(24)..(25): Xaa is A or G or absent
AXXVPTELSPINMLYFXXXXXXXXXYGKIPEMVVEGXGXR

SEQ ID NO: 22286 - protein, 40 aa, Artificial Sequence
  Non-cyclic GFR-binding peptide
  MOD_RES (4)..(5)..(39): Xaa is C or S
  MOD_RES (19)..(20)..(21)..(22)..(23): Xaa is A or G
  MOD_RES (24)..(25)..(26)..(27): Xaa is A or G or absent
PKAXXAPTKLSPINVLYFXXXXXXXXXYGKIPNMVVKAXG

SEQ ID NO: 22287 - protein, 39 aa, Artificial Sequence
  Non-cyclic GFR-binding peptide
  MOD_RES (3)..(4)..(38): Xaa is C or S
  MOD_RES (18)..(19)..(20)..(21)..(22): Xaa is A or G
  MOD_RES (23)..(24)..(25)..(26): Xaa is A or G or absent
KAXXAPTKLSPINVLYFXXXXXXXXXYGKIPNMVVKAXG

SEQ ID NO: 22288 - protein, 37 aa, Artificial Sequence
  Non-cyclic GFR-binding peptide
  MOD_RES (4)..(5)..(37): Xaa is C or S
PKAXXVPTELSPINMLYFDEYDKVVYGKIPEMVVEGX

SEQ ID NO: 22289 - protein, 37 aa, Artificial Sequence
  Non-cyclic GFR-binding peptide
  MOD_RES (4)..(5)..(37): Xaa is C or S
SKAXXVPTKLSPINILYFDKGVVTYYGKIPGMAVSEX

SEQ ID NO: 22290 - protein, 40 aa, Artificial Sequence
  Non-cyclic GFR-binding peptide
  MOD_RES (6)..(7): Xaa is C or S
  MOD_RES (21)..(22)..(23)..(24)..(25): Xaa is A or G
  MOD_RES (26)..(27)..(28)..(29): Xaa is A or G or absent
SIPKAXXVPTELSPINMLYFXXXXXXXXXYGKIPEMVVEG

SEQ ID NO: 22291 - protein, 32 aa, Artificial Sequence
  Non-cyclic GFR-binding peptide
  MOD_RES (32)..(32): Xaa is C or S
VPTKLSPINILYFDKGVVTYYGKIPGMAVSEX

SEQ ID NO: 22292 - protein, 33 aa, Artificial Sequence
  Non-cyclic GFR-binding peptide
  MOD_RES (32)..(32): Xaa is C or S
APTQLSPINVLYFDDSSNVIYGKIPNMVVRAXG

SEQ ID NO: 22293 - protein, 40 aa, Artificial Sequence
  Non-cyclic GFR-binding peptide
  MOD_RES (6)..(40): Xaa is C or S
  MOD_RES (20)..(21)..(22)..(23)..(24): Xaa is A or G
  MOD_RES (25)..(26)..(27)..(28): Xaa is A or G or absent
VTKPTXAPTKLSPINVLYFXXXXXXXXXYGKIPNMVVRSX

SEQ ID NO: 22294 - protein, 37 aa, Artificial Sequence
  Non-cyclic GFR-binding peptide
  MOD_RES (34)..(36): Xaa is C or S
  MOD_RES (14)..(15)..(16)..(17)..(18): Xaa is A or G
  MOD_RES (19)..(20)..(21)..(22): Xaa is A or G or absent
APTQLSPINVLYFXXXXXXXXXYGKIPNMVVRAXGXH

SEQ ID NO: 22295 - protein, 42 aa, Artificial Sequence
  Non-cyclic GFR-binding peptide
  MOD_RES (6)..(7)..(41): Xaa is C or S
  MOD_RES (21)..(22)..(23)..(24)..(25): Xaa is A or G
  MOD_RES (26)..(27)..(28)..(29): Xaa is A or G or absent
SIPKAXXVPTELSPINMLYFXXXXXXXXXYGKIPEMVVEGXG

SEQ ID NO: 22296 - protein, 31 aa, Artificial Sequence
  Non-cyclic GFR-binding peptide
  MOD_RES (1)..(1): Xaa is C or S
XVPTELSPINMLYFDEYDKVVYGKIPEMVVE

SEQ ID NO: 22297 - protein, 39 aa, Artificial Sequence
  Non-cyclic GFR-binding peptide
  MOD_RES (1)..(2)..(36)..(38): Xaa is C or S
  MOD_RES (16)..(17)..(18)..(19)..(20): Xaa is A or G
  MOD_RES (21)..(22)..(23)..(24): Xaa is A or G or absent
XXAPTKLSPINVLYFXXXXXXXXXYGKIPNMVVKAXGXH

SEQ ID NO: 22298 - protein, 44 aa, Artificial Sequence
  Non-cyclic GFR-binding peptide
  MOD_RES (6)..(7)..(41)..(43): Xaa is C or S
  MOD_RES (21)..(22)..(23)..(24)..(25): Xaa is A or G
  MOD_RES (26)..(27)..(28)..(29): Xaa is A or G or absent
TVPKPXXAPTQLSPINVLYFXXXXXXXXXYGKIPNMVVRAXGXH

SEQ ID NO: 22299 - protein, 36 aa, Artificial Sequence
  Non-cyclic GFR-binding peptide
  MOD_RES (2)..(36): Xaa is C or S
  MOD_RES (16)..(17)..(18)..(19)..(20): Xaa is A or G
  MOD_RES (21)..(22)..(23)..(24): Xaa is A or G or absent
TXAPTKLSPINVLYFXXXXXXXXXYGKIPNMVVRSX

SEQ ID NO: 22300 - protein, 37 aa, Artificial Sequence
  Non-cyclic GFR-binding peptide
  MOD_RES (34)..(36): Xaa is C or S
  MOD_RES (14)..(15)..(16)..(17)..(18): Xaa is A or G
  MOD_RES (19)..(20)..(21)..(22): Xaa is A or G or absent
VPTELSPINMLYFXXXXXXXXXYGKIPDMVVEGXGXR

SEQ ID NO: 22301 - protein, 39 aa, Artificial Sequence
  Non-cyclic GFR-binding peptide
  MOD_RES (5)..(6)..(38): Xaa is C or S
IPKAXXVPTELSPINMLYFDENEKVVYGKIPDMVVEGXG

SEQ ID NO: 22302 - protein, 44 aa, Artificial Sequence
  Non-cyclic GFR-binding peptide
  MOD_RES (6)..(7)..(41)..(43): Xaa is C or S
  MOD_RES (21)..(22)..(23)..(24)..(25): Xaa is A or G
  MOD_RES (26)..(27)..(28)..(29): Xaa is A or G or absent
KIPKAXXVPTELSPINMLYFXXXXXXXXXYGKIPDMVVEGXGXR

SEQ ID NO: 22303 - protein, 33 aa, Artificial Sequence
  Non-cyclic GFR-binding peptide
  MOD_RES (32)..(32): Xaa is C or S
VPTKLSPINILYFDKGVVTYYGKIPGMAVSEXG

SEQ ID NO: 22304 - protein, 37 aa, Artificial Sequence
  Non-cyclic GFR-binding peptide
  MOD_RES (35)..(37): Xaa is C or S
  MOD_RES (14)..(15)..(16)..(17)..(18): Xaa is A or G
  MOD_RES (19)..(20)..(21)..(22): Xaa is A or G or absent
VPTKLSPINVLYFXXXXXXXXXYGKIPEGMSVAEXGX

SEQ ID NO: 22305 - protein, 42 aa, Artificial Sequence
  Non-cyclic GFR-binding peptide
  MOD_RES (6)..(7)..(39)..(41): Xaa is C or S
KIPKAXXVPTELSPINMLYFDENEKVVYGKIPDMVVEGXGXR

SEQ ID NO: 22306 - protein, 37 aa, Artificial Sequence
  Non-cyclic GFR-binding peptide
  MOD_RES (4)..(5): Xaa is C or S
  MOD_RES (19)..(20)..(21)..(22)..(23): Xaa is A or G
  MOD_RES (24)..(25)..(26)..(27): Xaa is A or G or absent
PSTXXAPVKTSPINMLYFXXXXXXXXXYGKIPMIVEE

SEQ ID NO: 22307 - protein, 38 aa, Artificial Sequence
  Non-cyclic GFR-binding peptide
  MOD_RES (2)..(36)..(38): Xaa is C or S
  MOD_RES (16)..(17)..(18)..(19)..(20): Xaa is A or G
  MOD_RES (21)..(22)..(23)..(24): Xaa is A or G or absent
TXAPTKLSPINVLYFXXXXXXXXXYGKIPNMVVRSXGX

SEQ ID NO: 22308 - protein, 35 aa, Artificial Sequence
  Non-cyclic GFR-binding peptide
  MOD_RES (3)..(4): Xaa is C or S
KPXXAPTKLSPINVLYFDDSSNVIYGKIPNMVVRS

SEQ ID NO: 22309 - protein, 38 aa, Artificial Sequence
  Non-cyclic GFR-binding peptide
  MOD_RES (4)..(36)..(38): Xaa is C or S
KPTXAPTKLSPINVLYFDDSSNVIYGKIPNMVVRSXGX

SEQ ID NO: 22310 - protein, 33 aa, Artificial Sequence
  Non-cyclic GFR-binding peptide
  MOD_RES (1)..(2): Xaa is C or S
XXVPTRLSPINILYFDSANNVVYGKIPDMVVES

SEQ ID NO: 22311 - protein, 38 aa, Artificial Sequence
  Non-cyclic GFR-binding peptide
  MOD_RES (6)..(7): Xaa is C or S
STPPTXXVPTRLSPINILYFDSANNVVYGKIPDMVVES

SEQ ID NO: 22312 - protein, 40 aa, Artificial Sequence
  Non-cyclic GFR-binding peptide
  MOD_RES (5)..(6)..(40): Xaa is C or S
  MOD_RES (20)..(21)..(22)..(23)..(24): Xaa is A or G
  MOD_RES (25)..(26)..(27)..(28): Xaa is A or G or absent
APASXXVPARLSPINILYFXXXXXXXXXYGKIPDMVVEAX

SEQ ID NO: 22313 - protein, 39 aa, Artificial Sequence
  Non-cyclic GFR-binding peptide
  MOD_RES (4)..(5)..(37)..(39): Xaa is C or S
PKPXXAPTQLSPINVLYFDDSSNVIYGKIPNMVVRAXGX

SEQ ID NO: 22314 - protein, 31 aa, Artificial Sequence
  Non-cyclic GFR-binding peptide
  MOD_RES (1)..(1): Xaa is C or S
XVPARLSPINILYFDAANNVVYGKIPDMVVE

SEQ ID NO: 22315 - protein, 39 aa, Artificial Sequence
  Non-cyclic GFR-binding peptide
  MOD_RES (2)..(3)..(36)..(38): Xaa is C or S
  MOD_RES (17)..(18)..(19)..(20)..(21): Xaa is A or G
  MOD_RES (22)..(23)..(24)..(25): Xaa is A or G or absent
TXXAPVKTSPINMLYFXXXXXXXXXYGKIPMIVEEXGXL

SEQ ID NO: 22316 - protein, 38 aa, Artificial Sequence
  Non-cyclic GFR-binding peptide
  MOD_RES (4)..(5): Xaa is C or S
  MOD_RES (19)..(20)..(21)..(22)..(23): Xaa is A or G
  MOD_RES (24)..(25)..(26)..(27): Xaa is A or G or absent
PKAXXAPTKLSPINVLYFXXXXXXXXXYGKIPNMVVKA

SEQ ID NO: 22317 - protein, 38 aa, Artificial Sequence
  Non-cyclic GFR-binding peptide
  MOD_RES (5)..(6)..(38): Xaa is C or S
VPKAXXAPTKLSPINVLYFDSSNNVIYGKIPNMVVKAX

SEQ ID NO: 22318 - protein, 34 aa, Artificial Sequence
  Non-cyclic GFR-binding peptide
  MOD_RES (34)..(34): Xaa is C or S
  MOD_RES (14)..(15)..(16)..(17)..(18): Xaa is A or G
  MOD_RES (19)..(20)..(21)..(22): Xaa is A or G or absent
VPARLSPINILYFXXXXXXXXXYGKIPDMVVEAX

SEQ ID NO: 22319 - protein, 38 aa, Artificial Sequence
  Non-cyclic GFR-binding peptide
  MOD_RES (1)..(2)..(35)..(37): Xaa is C or S
XXVPTKLSPINVLYFDDMGVPTYGKIPEGMSVAEXGXR

SEQ ID NO: 22320 - protein, 37 aa, Artificial Sequence
  Non-cyclic GFR-binding peptide
  MOD_RES (3)..(4)..(36): Xaa is C or S
KPXXAPTKLSPINVLYFDDSSNVIYGKIPNMVVRSXG

SEQ ID NO: 22321 - protein, 30 aa, Artificial Sequence
  Non-cyclic GFR-binding peptide
VPARLSPINILYFDAANNVVYGKIPDMVVE

SEQ ID NO: 22322 - protein, 41 aa, Artificial Sequence
  Non-cyclic GFR-binding peptide
  MOD_RES (5)..(6)..(39)..(41): Xaa is C or S
  MOD_RES (20)..(21)..(22)..(23)..(24): Xaa is A or G
  MOD_RES (25)..(26)..(27)..(28): Xaa is A or G or absent
VPSTXXAPVKTSPINMLYFXXXXXXXXXYGKIPMIVEEXGX

SEQ ID NO: 22323 - protein, 31 aa, Artificial Sequence
  Non-cyclic GFR-binding peptide
  MOD_RES (1)..(1): Xaa is C or S
XVPTELSPINMLYFDENEKVVYGKIPDMVVE

SEQ ID NO: 22324 - protein, 35 aa, Artificial Sequence
  Non-cyclic GFR-binding peptide
  MOD_RES (2)..(3): Xaa is C or S
  MOD_RES (17)..(18)..(19)..(20)..(21): Xaa is A or G
  MOD_RES (22)..(23)..(24)..(25): Xaa is A or G or absent
SXXVPARLSPINILYFXXXXXXXXXYGKIPDMVVE

SEQ ID NO: 22325 - protein, 38 aa, Artificial Sequence
  Non-cyclic GFR-binding peptide
  MOD_RES (1)..(2)..(36)..(38): Xaa is C or S
  MOD_RES (16)..(17)..(18)..(19)..(20): Xaa is A or G
  MOD_RES (21)..(22)..(23)..(24): Xaa is A or G or absent
XXAPTKLSPINVLYFXXXXXXXXXYGKIPNMVVRSXGX

SEQ ID NO: 22326 - protein, 39 aa, Artificial Sequence
  Non-cyclic GFR-binding peptide
  MOD_RES (6)..(7)..(38): Xaa is C or S
RVPSTXXAPVKTSPINMLYFDNGRVLLYGKIPMIVEEXG

SEQ ID NO: 22327 - protein, 35 aa, Artificial Sequence
  Non-cyclic GFR-binding peptide
  MOD_RES (1)..(33)..(35): Xaa is C or S
XVPTRLSPINILYFDSANNVVYGKIPDMVVESXGX

SEQ ID NO: 22328 - protein, 33 aa, Artificial Sequence
  Non-cyclic GFR-binding peptide
  MOD_RES (1)..(1): Xaa is C or S
  MOD_RES (15)..(16)..(17)..(18)..(19): Xaa is A or G
  MOD_RES (20)..(21)..(22)..(23): Xaa is A or G or absent
XVPTELSPINMLYFXXXXXXXXXYGKIPDMVVE

SEQ ID NO: 22329 - protein, 34 aa, Artificial Sequence
  Non-cyclic GFR-binding peptide
  MOD_RES (3)..(4): Xaa is C or S
ASXXVPARLSPINILYFDAANNVVYGKIPDMVVE

SEQ ID NO: 22330 - protein, 34 aa, Artificial Sequence
  Non-cyclic GFR-binding peptide
  MOD_RES (4)..(4): Xaa is C or S
KPTXAPTKLSPINVLYFDDSSNVIYGKIPNMVVR

SEQ ID NO: 22331 - protein, 40 aa, Artificial Sequence
  Non-cyclic GFR-binding peptide
  MOD_RES (6)..(7): Xaa is C or S
  MOD_RES (21)..(22)..(23)..(24)..(25): Xaa is A or G
  MOD_RES (26)..(27)..(28)..(29): Xaa is A or G or absent
STPPTXXVPTRLSPINILYFXXXXXXXXXYGKIPDMVVES

SEQ ID NO: 22332 - protein, 38 aa, Artificial Sequence
  Non-cyclic GFR-binding peptide
  MOD_RES (1)..(35)..(37): Xaa is C or S
  MOD_RES (15)..(16)..(17)..(18)..(19): Xaa is A or G
  MOD_RES (20)..(21)..(22)..(23): Xaa is A or G or absent
XAPTQLSPINVLYFXXXXXXXXXYGKIPNMVVRAXGXH

SEQ ID NO: 22333 - protein, 35 aa, Artificial Sequence
  Non-cyclic GFR-binding peptide
  MOD_RES (2)..(2): Xaa is C or S
  MOD_RES (16)..(17)..(18)..(19)..(20): Xaa is A or G
  MOD_RES (21)..(22)..(23)..(24): Xaa is A or G or absent
TXAPTKLSPINVLYFXXXXXXXXXYGKIPNMVVRS

SEQ ID NO: 22334 - protein, 36 aa, Artificial Sequence
  Non-cyclic GFR-binding peptide
  MOD_RES (3)..(4)..(36): Xaa is C or S
KAXXAPTKLSPINVLYFDSSNNVIYGKIPNMVVKAX

SEQ ID NO: 22335 - protein, 35 aa, Artificial Sequence
  Non-cyclic GFR-binding peptide
  MOD_RES (2)..(3): Xaa is C or S
  MOD_RES (17)..(18)..(19)..(20)..(21): Xaa is A or G
  MOD_RES (22)..(23)..(24)..(25): Xaa is A or G or absent
AXXVPTKLSPINILYFXXXXXXXXXYGKIPGMAVS

SEQ ID NO: 22336 - protein, 36 aa, Artificial Sequence
  Non-cyclic GFR-binding peptide
  MOD_RES (4)..(5): Xaa is C or S
PKAXXVPTELSPINMLYFDEYDKVVYGKIPEMVVEG

SEQ ID NO: 22337 - protein, 36 aa, Artificial Sequence
  Non-cyclic GFR-binding peptide
  MOD_RES (3)..(4)..(36): Xaa is C or S
KPXXAPTKLSPINVLYFDDSSNVIYGKIPNMVVRSX

SEQ ID NO: 22338 - protein, 36 aa, Artificial Sequence
  Non-cyclic GFR-binding peptide
  MOD_RES (2)..(3): Xaa is C or S
  MOD_RES (17)..(18)..(19)..(20)..(21): Xaa is A or G
  MOD_RES (22)..(23)..(24)..(25): Xaa is A or G or absent
PXXAPTQLSPINVLYFXXXXXXXXXYGKIPNMVVRA

SEQ ID NO: 22339 - protein, 40 aa, Artificial Sequence
  Non-cyclic GFR-binding peptide
  MOD_RES (6)..(7): Xaa is C or S
  MOD_RES (21)..(22)..(23)..(24)..(25): Xaa is A or G
  MOD_RES (26)..(27)..(28)..(29): Xaa is A or G or absent
HVPKPXXAPTKLSPINVLYFXXXXXXXXXYGKIPNMVVRS

SEQ ID NO: 22340 - protein, 37 aa, Artificial Sequence
  Non-cyclic GFR-binding peptide
  MOD_RES (7)..(7): Xaa is C or S
HVTKPTXAPTKLSPINVLYFDDSSNVIYGKIPNMVVR

SEQ ID NO: 22341 - protein, 38 aa, Artificial Sequence
  Non-cyclic GFR-binding peptide
  MOD_RES (5)..(6)..(38): Xaa is C or S
IPKAXXVPTELSPINMLYFDENEKVVYGKIPDMVVEGX

SEQ ID NO: 22342 - protein, 41 aa, Artificial Sequence
  Non-cyclic GFR-binding peptide
  MOD_RES (6)..(7)..(41): Xaa is C or S
  MOD_RES (21)..(22)..(23)..(24)..(25): Xaa is A or G
  MOD_RES (26)..(27)..(28)..(29): Xaa is A or G or absent
HVPKPXXAPTKLSPINVLYFXXXXXXXXXYGKIPNMVVRSX

SEQ ID NO: 22343 - protein, 42 aa, Artificial Sequence
  Non-cyclic GFR-binding peptide
  MOD_RES (5)..(6)..(40)..(42): Xaa is C or S
  MOD_RES (20)..(21)..(22)..(23)..(24): Xaa is A or G
  MOD_RES (25)..(26)..(27)..(28): Xaa is A or G or absent
VPKAXXAPTKLSPINVLYFXXXXXXXXXYGKIPNMVVKAXGX

SEQ ID NO: 22344 - protein, 34 aa, Artificial Sequence
  Non-cyclic GFR-binding peptide
  MOD_RES (1)..(2): Xaa is C or S
  MOD_RES (16)..(17)..(18)..(19)..(20): Xaa is A or G
  MOD_RES (21)..(22)..(23)..(24): Xaa is A or G or absent
XXVPTELSPINMLYFXXXXXXXXXYGKIPDMVVE

SEQ ID NO: 22345 - protein, 39 aa, Artificial Sequence
  Non-cyclic GFR-binding peptide
  MOD_RES (6)..(7): Xaa is C or S
  MOD_RES (21)..(22)..(23)..(24)..(25): Xaa is A or G
  MOD_RES (26)..(27)..(28)..(29): Xaa is A or G or absent
TVPKPXXAPTQLSPINVLYFXXXXXXXXXYGKIPNMVVR

SEQ ID NO: 22346 - protein, 38 aa, Artificial Sequence
  Non-cyclic GFR-binding peptide
  MOD_RES (2)..(3)..(35)..(37): Xaa is C or S
PXXAPTQLSPINVLYFDDSSNVIYGKIPNMVVRAXGXH

SEQ ID NO: 22347 - protein, 41 aa, Artificial Sequence
  Non-cyclic GFR-binding peptide
  MOD_RES (4)..(5)..(40): Xaa is C or S
  MOD_RES (19)..(20)..(21)..(22)..(23): Xaa is A or G
  MOD_RES (24)..(25)..(26)..(27): Xaa is A or G or absent
GKAXXVPTKLSPINVLYFXXXXXXXXXYGKIPEGMSVAEXG

SEQ ID NO: 22348 - protein, 41 aa, Artificial Sequence
  Non-cyclic GFR-binding peptide
  MOD_RES (5)..(6)..(38)..(40): Xaa is C or S
VPKPXXAPTQLSPINVLYFDDSSNVIYGKIPNMVVRAXGXH

SEQ ID NO: 22349 - protein, 39 aa, Artificial Sequence
  Non-cyclic GFR-binding peptide
  MOD_RES (4)..(5)..(39): Xaa is C or S
  MOD_RES (19)..(20)..(21)..(22)..(23): Xaa is A or G
  MOD_RES (24)..(25)..(26)..(27): Xaa is A or G or absent
PKAXXAPTKLSPINVLYFXXXXXXXXXYGKIPNMVVKAX

SEQ ID NO: 22350 - protein, 41 aa, Artificial Sequence
  Non-cyclic GFR-binding peptide
  MOD_RES (6)..(7)..(41): Xaa is C or S
  MOD_RES (21)..(22)..(23)..(24)..(25): Xaa is A or G
  MOD_RES (26)..(27)..(28)..(29): Xaa is A or G or absent
TVPKPXXAPTQLSPINVLYFXXXXXXXXXYGKIPNMVVRAX

SEQ ID NO: 22351 - protein, 35 aa, Artificial Sequence
  Non-cyclic GFR-binding peptide
  MOD_RES (1)..(2)..(34): Xaa is C or S
XXVPTELSPINMLYFDEYDKVVYGKIPEMVVEGXG

SEQ ID NO: 22352 - protein, 33 aa, Artificial Sequence
  Non-cyclic GFR-binding peptide
  MOD_RES (33)..(33): Xaa is C or S
VPTKLSPINVLYFDDMGVPTYGKIPEGMSVAEX

SEQ ID NO: 22353 - protein, 40 aa, Artificial Sequence
  Non-cyclic GFR-binding peptide
  MOD_RES (2)..(3)..(37)..(39): Xaa is C or S
  MOD_RES (17)..(18)..(19)..(20)..(21): Xaa is A or G
  MOD_RES (22)..(23)..(24)..(25): Xaa is A or G or absent
AXXVPTKLSPINILYFXXXXXXXXXYGKIPGMAVSEXGXR

SEQ ID NO: 22354 - protein, 34 aa, Artificial Sequence
  Non-cyclic GFR-binding peptide
  MOD_RES (1)..(34): Xaa is C or S
XVPTKLSPINVLYFDDMGVPTYGKIPEGMSVAEX

SEQ ID NO: 22355 - protein, 39 aa, Artificial Sequence
  Non-cyclic GFR-binding peptide
  MOD_RES (6)..(7)..(39): Xaa is C or S
KASKAXXVPTKLSPINILYFDKGVVTYYGKIPGMAVSEX

SEQ ID NO: 22356 - protein, 33 aa, Artificial Sequence
  Non-cyclic GFR-binding peptide
  MOD_RES (32)..(32): Xaa is C or S
VPTELSPINMLYFDENEKVVYGKIPDMVVEGXG

SEQ ID NO: 22357 - protein, 34 aa, Artificial Sequence
  Non-cyclic GFR-binding peptide
  MOD_RES (1)..(33): Xaa is C or S
XVPTELSPINMLYFDEYDKVVYGKIPEMVVEGXG

SEQ ID NO: 22358 - protein, 38 aa, Artificial Sequence
  Non-cyclic GFR-binding peptide
  MOD_RES (4)..(5)..(38): Xaa is C or S
  MOD_RES (19)..(20)..(21)..(22)..(23): Xaa is A or G
  MOD_RES (24)..(25)..(26)..(27): Xaa is A or G or absent
PSTXXAPVKTSPINMLYFXXXXXXXXXYGKIPMIVEEX

SEQ ID NO: 22359 - protein, 41 aa, Artificial Sequence
  Non-cyclic GFR-binding peptide
  MOD_RES (6)..(7)..(41): Xaa is C or S
  MOD_RES (21)..(22)..(23)..(24)..(25): Xaa is A or G
  MOD_RES (26)..(27)..(28)..(29): Xaa is A or G or absent
SIPKAXXVPTELSPINMLYFXXXXXXXXXYGKIPEMVVEGX

SEQ ID NO: 22360 - protein, 41 aa, Artificial Sequence
  Non-cyclic GFR-binding peptide
  MOD_RES (3)..(4)..(38)..(40): Xaa is C or S
  MOD_RES (18)..(19)..(20)..(21)..(22): Xaa is A or G
  MOD_RES (23)..(24)..(25)..(26): Xaa is A or G or absent
KAXXVPTKLSPINILYFXXXXXXXXXYGKIPGMAVSEXGXR

SEQ ID NO: 22361 - protein, 39 aa, Artificial Sequence
  Non-cyclic GFR-binding peptide
  MOD_RES (6)..(7): Xaa is C or S
  MOD_RES (21)..(22)..(23)..(24)..(25): Xaa is A or G
  MOD_RES (26)..(27)..(28)..(29): Xaa is A or G or absent
HVPKPXXAPTKLSPINVLYFXXXXXXXXXYGKIPNMVVR

SEQ ID NO: 22362 - protein, 37 aa, Artificial Sequence
  Non-cyclic GFR-binding peptide
  MOD_RES (4)..(5)..(37): Xaa is C or S
PPTXXVPTRLSPINILYFDSANNVVYGKIPDMVVESX

SEQ ID NO: 22363 - protein, 40 aa, Artificial Sequence
  Non-cyclic GFR-binding peptide
  MOD_RES (6)..(7)..(39): Xaa is C or S
HVPKPXXAPTKLSPINVLYFDDSSNVIYGKIPNMVVRSXG

SEQ ID NO: 22364 - protein, 34 aa, Artificial Sequence
  Non-cyclic GFR-binding peptide
  MOD_RES (2)..(3): Xaa is C or S
PXXAPTKLSPINVLYFDDSSNVIYGKIPNMVVRS

SEQ ID NO: 22365 - protein, 40 aa, Artificial Sequence
  Non-cyclic GFR-binding peptide
  MOD_RES (4)..(5)..(39): Xaa is C or S
  MOD_RES (19)..(20)..(21)..(22)..(23): Xaa is A or G
  MOD_RES (24)..(25)..(26)..(27): Xaa is A or G or absent
PKAXXVPTELSPINMLYFXXXXXXXXXYGKIPDMVVEGXG

SEQ ID NO: 22366 - protein, 37 aa, Artificial Sequence
  Non-cyclic GFR-binding peptide
  MOD_RES (6)..(6): Xaa is C or S
VTKPTXAPTKLSPINVLYFDDSSNVIYGKIPNMVVRS

SEQ ID NO: 22367 - protein, 36 aa, Artificial Sequence
  Non-cyclic GFR-binding peptide
  MOD_RES (4)..(4): Xaa is C or S
  MOD_RES (18)..(19)..(20)..(21)..(22): Xaa is A or G
  MOD_RES (23)..(24)..(25)..(26): Xaa is A or G or absent
KPTXAPTKLSPINVLYFXXXXXXXXXYGKIPNMVVR

SEQ ID NO: 22368 - protein, 40 aa, Artificial Sequence
  Non-cyclic GFR-binding peptide
  MOD_RES (4)..(5)..(39): Xaa is C or S
  MOD_RES (19)..(20)..(21)..(22)..(23): Xaa is A or G
  MOD_RES (24)..(25)..(26)..(27): Xaa is A or G or absent
SKAXXVPTKLSPINILYFXXXXXXXXXYGKIPGMAVSEXG

SEQ ID NO: 22369 - protein, 40 aa, Artificial Sequence
  Non-cyclic GFR-binding peptide
  MOD_RES (5)..(6)..(40): Xaa is C or S
  MOD_RES (20)..(21)..(22)..(23)..(24): Xaa is A or G
  MOD_RES (25)..(26)..(27)..(28): Xaa is A or G or absent
VPKPXXAPTQLSPINVLYFXXXXXXXXXYGKIPNMVVRAX

SEQ ID NO: 22370 - protein, 38 aa, Artificial Sequence
  Non-cyclic GFR-binding peptide
  MOD_RES (4)..(5)..(37): Xaa is C or S
PPTXXVPTRLSPINILYFDSANNVVYGKIPDMVVESXG

SEQ ID NO: 22371 - protein, 31 aa, Artificial Sequence
  Non-cyclic GFR-binding peptide
APTQLSPINVLYFDDSSNVIYGKIPNMVVRA

SEQ ID NO: 22372 - protein, 39 aa, Artificial Sequence
  Non-cyclic GFR-binding peptide
  MOD_RES (6)..(7)..(39): Xaa is C or S
YVPKPXXAPTKLSPINVLYFDDSSNVIYGKIPNMVVRSX

SEQ ID NO: 22373 - protein, 38 aa, Artificial Sequence
  Non-cyclic GFR-binding peptide
  MOD_RES (1)..(35)..(37): Xaa is C or S
  MOD_RES (15)..(16)..(17)..(18)..(19): Xaa is A or G
  MOD_RES (20)..(21)..(22)..(23): Xaa is A or G or absent
XVPTELSPINMLYFXXXXXXXXXYGKIPDMVVEGXGXR

SEQ ID NO: 22374 - protein, 39 aa, Artificial Sequence
  Non-cyclic GFR-binding peptide
  MOD_RES (3)..(4)..(36)..(38): Xaa is C or S
PTXXVPTRLSPINILYFDSANNVVYGKIPDMVVESXGXR

SEQ ID NO: 22375 - protein, 37 aa, Artificial Sequence
  Non-cyclic GFR-binding peptide
  MOD_RES (1)..(36): Xaa is C or S
  MOD_RES (15)..(16)..(17)..(18)..(19): Xaa is A or G
  MOD_RES (20)..(21)..(22)..(23): Xaa is A or G or absent
XVPTKLSPINVLYFXXXXXXXXXYGKIPEGMSVAEXG

SEQ ID NO: 22376 - protein, 41 aa, Artificial Sequence
  Non-cyclic GFR-binding peptide
  MOD_RES (5)..(6)..(40): Xaa is C or S
  MOD_RES (20)..(21)..(22)..(23)..(24): Xaa is A or G
  MOD_RES (25)..(26)..(27)..(28): Xaa is A or G or absent
VPKPXXAPTKLSPINVLYFXXXXXXXXXYGKIPNMVVRSXG

SEQ ID NO: 22377 - protein, 36 aa, Artificial Sequence
  Non-cyclic GFR-binding peptide
  MOD_RES (3)..(4): Xaa is C or S
  MOD_RES (18)..(19)..(20)..(21)..(22): Xaa is A or G
  MOD_RES (23)..(24)..(25)..(26): Xaa is A or G or absent
KPXXAPTKLSPINVLYFXXXXXXXXXYGKIPNMVVR

SEQ ID NO: 22378 - protein, 41 aa, Artificial Sequence
  Non-cyclic GFR-binding peptide
  MOD_RES (6)..(7)..(41): Xaa is C or S
  MOD_RES (21)..(22)..(23)..(24)..(25): Xaa is A or G
  MOD_RES (26)..(27)..(28)..(29): Xaa is A or G or absent
STPPTXXVPTRLSPINILYFXXXXXXXXXYGKIPDMVVESX

SEQ ID NO: 22379 - protein, 39 aa, Artificial Sequence
  Non-cyclic GFR-binding peptide
  MOD_RES (1)..(2)..(36)..(38): Xaa is C or S
  MOD_RES (16)..(17)..(18)..(19)..(20): Xaa is A or G
  MOD_RES (21)..(22)..(23)..(24): Xaa is A or G or absent
XXVPTKLSPINILYFXXXXXXXXXYGKIPGMAVSEXGXR

SEQ ID NO: 22380 - protein, 41 aa, Artificial Sequence
  Non-cyclic GFR-binding peptide
  MOD_RES (6)..(7)..(41): Xaa is C or S
  MOD_RES (21)..(22)..(23)..(24)..(25): Xaa is A or G
  MOD_RES (26)..(27)..(28)..(29): Xaa is A or G or absent
AVPKAXXAPTKLSPINVLYFXXXXXXXXXYGKIPNMVVKAX

SEQ ID NO: 22381 - protein, 30 aa, Artificial Sequence
  Non-cyclic GFR-binding peptide
APTKLSPINVLYFDDSSNVIYGKIPNMVVR

SEQ ID NO: 22382 - protein, 34 aa, Artificial Sequence
  Non-cyclic GFR-binding peptide
  MOD_RES (34)..(34): Xaa is C or S
  MOD_RES (14)..(15)..(16)..(17)..(18): Xaa is A or G
  MOD_RES (19)..(20)..(21)..(22): Xaa is A or G or absent
APTQLSPINVLYFXXXXXXXXXYGKIPNMVVRAX

SEQ ID NO: 22383 - protein, 42 aa, Artificial Sequence
  Non-cyclic GFR-binding peptide
  MOD_RES (6)..(7)..(41): Xaa is C or S
  MOD_RES (21)..(22)..(23)..(24)..(25): Xaa is A or G
  MOD_RES (26)..(27)..(28)..(29): Xaa is A or G or absent
STPPTXXVPTRLSPINILYFXXXXXXXXXYGKIPDMVVESXG

SEQ ID NO: 22384 - protein, 40 aa, Artificial Sequence
  Non-cyclic GFR-binding peptide
  MOD_RES (3)..(4)..(39): Xaa is C or S
  MOD_RES (18)..(19)..(20)..(21)..(22): Xaa is A or G
  MOD_RES (23)..(24)..(25)..(26): Xaa is A or G or absent
KAXXVPTKLSPINVLYFXXXXXXXXXYGKIPEGMSVAEXG

SEQ ID NO: 22385 - protein, 36 aa, Artificial Sequence
  Non-cyclic GFR-binding peptide
  MOD_RES (5)..(6): Xaa is C or S
APASXXVPARLSPINILYFDAANNVVYGKIPDMVVE

SEQ ID NO: 22386 - protein, 32 aa, Artificial Sequence
  Non-cyclic GFR-binding peptide
  MOD_RES (1)..(2): Xaa is C or S
XXVPTELSPINMLYFDEYDKVVYGKIPEMVVE

SEQ ID NO: 22387 - protein, 36 aa, Artificial Sequence
  Non-cyclic GFR-binding peptide
  MOD_RES (4)..(5)..(36): Xaa is C or S
PSTXXAPVKTSPINMLYFDNGRVLLYGKIPMIVEEX

SEQ ID NO: 22388 - protein, 35 aa, Artificial Sequence
  Non-cyclic GFR-binding peptide
  MOD_RES (2)..(3)..(35): Xaa is C or S
AXXVPTELSPINMLYFDEYDKVVYGKIPEMVVEGX

SEQ ID NO: 22389 - protein, 36 aa, Artificial Sequence
  Non-cyclic GFR-binding peptide
  MOD_RES (3)..(4): Xaa is C or S
  MOD_RES (18)..(19)..(20)..(21)..(22): Xaa is A or G
  MOD_RES (23)..(24)..(25)..(26): Xaa is A or G or absent
KAXXVPTELSPINMLYFXXXXXXXXXYGKIPEMVVE

SEQ ID NO: 22390 - protein, 31 aa, Artificial Sequence
  Non-cyclic GFR-binding peptide
  MOD_RES (1)..(1): Xaa is C or S
XAPTKLSPINVLYFDSSNNVIYGKIPNMVVK

SEQ ID NO: 22391 - protein, 38 aa, Artificial Sequence
  Non-cyclic GFR-binding peptide
  MOD_RES (1)..(2)..(36)..(38): Xaa is C or S
  MOD_RES (16)..(17)..(18)..(19)..(20): Xaa is A or G
  MOD_RES (21)..(22)..(23)..(24): Xaa is A or G or absent
XXVPTKLSPINILYFXXXXXXXXXYGKIPGMAVSEXGX

SEQ ID NO: 22392 - protein, 33 aa, Artificial Sequence
  Non-cyclic GFR-binding peptide
  MOD_RES (1)..(33): Xaa is C or S
XAPTKLSPINVLYFDDSSNVIYGKIPNMVVRSX

SEQ ID NO: 22393 - protein, 34 aa, Artificial Sequence
  Non-cyclic GFR-binding peptide
  MOD_RES (1)..(1): Xaa is C or S
  MOD_RES (15)..(16)..(17)..(18)..(19): Xaa is A or G
  MOD_RES (20)..(21)..(22)..(23): Xaa is A or G or absent
XVPTKLSPINILYFXXXXXXXXXYGKIPGMAVSE

SEQ ID NO: 22394 - protein, 40 aa, Artificial Sequence
  Non-cyclic GFR-binding peptide
  MOD_RES (2)..(3)..(37)..(39): Xaa is C or S
  MOD_RES (17)..(18)..(19)..(20)..(21): Xaa is A or G
  MOD_RES (22)..(23)..(24)..(25): Xaa is A or G or absent
AXXAPTKLSPINVLYFXXXXXXXXXYGKIPNMVVKAXGXH

SEQ ID NO: 22395 - protein, 40 aa, Artificial Sequence
  Non-cyclic GFR-binding peptide
  MOD_RES (4)..(5)..(37)..(39): Xaa is C or S
SKAXXVPTKLSPINILYFDKGVVTYYGKIPGMAVSEXGXR

SEQ ID NO: 22396 - protein, 34 aa, Artificial Sequence
  Non-cyclic GFR-binding peptide
  MOD_RES (3)..(4): Xaa is C or S
KPXXAPTQLSPINVLYFDDSSNVIYGKIPNMVVR

SEQ ID NO: 22397 - protein, 42 aa, Artificial Sequence
  Non-cyclic GFR-binding peptide
  MOD_RES (6)..(7)..(41): Xaa is C or S
  MOD_RES (21)..(22)..(23)..(24)..(25): Xaa is A or G
  MOD_RES (26)..(27)..(28)..(29): Xaa is A or G or absent
KASKAXXVPTKLSPINILYFXXXXXXXXXYGKIPGMAVSEXG

SEQ ID NO: 22398 - protein, 38 aa, Artificial Sequence
  Non-cyclic GFR-binding peptide
  MOD_RES (1)..(2)..(36)..(38): Xaa is C or S
  MOD_RES (16)..(17)..(18)..(19)..(20): Xaa is A or G
  MOD_RES (21)..(22)..(23)..(24): Xaa is A or G or absent
XXVPTELSPINMLYFXXXXXXXXXYGKIPDMVVEGXGX

SEQ ID NO: 22399 - protein, 36 aa, Artificial Sequence
  Non-cyclic GFR-binding peptide
  MOD_RES (3)..(4)..(36): Xaa is C or S
KAXXVPTKLSPINILYFDKGVVTYYGKIPGMAVSEX

SEQ ID NO: 22400 - protein, 39 aa, Artificial Sequence
  Non-cyclic GFR-binding peptide
  MOD_RES (2)..(3)..(37)..(39): Xaa is C or S
  MOD_RES (17)..(18)..(19)..(20)..(21): Xaa is A or G
  MOD_RES (22)..(23)..(24)..(25): Xaa is A or G or absent
PXXAPTQLSPINVLYFXXXXXXXXXYGKIPNMVVRAXGX

SEQ ID NO: 22401 - protein, 35 aa, Artificial Sequence
  Non-cyclic GFR-binding peptide
  MOD_RES (32)..(34): Xaa is C or S
APTKLSPINVLYFDSSNNVIYGKIPNMVVKAXGXH

SEQ ID NO: 22402 - protein, 38 aa, Artificial Sequence
  Non-cyclic GFR-binding peptide
  MOD_RES (3)..(4)..(36)..(38): Xaa is C or S
KPXXAPTQLSPINVLYFDDSSNVIYGKIPNMVVRAXGX

SEQ ID NO: 22403 - protein, 37 aa, Artificial Sequence
  Non-cyclic GFR-binding peptide
  MOD_RES (6)..(7): Xaa is C or S
KIPKAXXVPTELSPINMLYFDENEKVVYGKIPDMVVE

SEQ ID NO: 22404 - protein, 38 aa, Artificial Sequence
  Non-cyclic GFR-binding peptide
  MOD_RES (2)..(3)..(35)..(37): Xaa is C or S
AXXVPTELSPINMLYFDEYDKVVYGKIPEMVVEGXGXR

SEQ ID NO: 22405 - protein, 39 aa, Artificial Sequence
  Non-cyclic GFR-binding peptide
  MOD_RES (6)..(7): Xaa is C or S
  MOD_RES (21)..(22)..(23)..(24)..(25): Xaa is A or G
  MOD_RES (26)..(27)..(28)..(29): Xaa is A or G or absent
STPPTXXVPTRLSPINILYFXXXXXXXXXYGKIPDMVVE

SEQ ID NO: 22406 - protein, 39 aa, Artificial Sequence
  Non-cyclic GFR-binding peptide
  MOD_RES (4)..(36)..(38): Xaa is C or S
KPTXAPTKLSPINVLYFDDSSNVIYGKIPNMVVRSXGXH

SEQ ID NO: 22407 - protein, 40 aa, Artificial Sequence
  Non-cyclic GFR-binding peptide
  MOD_RES (4)..(5)..(39): Xaa is C or S
  MOD_RES (19)..(20)..(21)..(22)..(23): Xaa is A or G
  MOD_RES (24)..(25)..(26)..(27): Xaa is A or G or absent
PKPXXAPTKLSPINVLYFXXXXXXXXXYGKIPNMVVRSXG

SEQ ID NO: 22408 - protein, 38 aa, Artificial Sequence
  Non-cyclic GFR-binding peptide
  MOD_RES (5)..(6): Xaa is C or S
  MOD_RES (20)..(21)..(22)..(23)..(24): Xaa is A or G
  MOD_RES (25)..(26)..(27)..(28): Xaa is A or G or absent
VPSTXXAPVKTSPINMLYFXXXXXXXXXYGKIPMIVEE

SEQ ID NO: 22409 - protein, 35 aa, Artificial Sequence
  Non-cyclic GFR-binding peptide
  MOD_RES (34)..(34): Xaa is C or S
  MOD_RES (14)..(15)..(16)..(17)..(18): Xaa is A or G
  MOD_RES (19)..(20)..(21)..(22): Xaa is A or G or absent
APTKLSPINVLYFXXXXXXXXXYGKIPNMVVKAXG

SEQ ID NO: 22410 - protein, 41 aa, Artificial Sequence
  Non-cyclic GFR-binding peptide
  MOD_RES (6)..(7)..(40): Xaa is C or S
  MOD_RES (21)..(22)..(23)..(24)..(25): Xaa is A or G
  MOD_RES (26)..(27)..(28)..(29): Xaa is A or G or absent
RVPSTXXAPVKTSPINMLYFXXXXXXXXXYGKIPMIVEEXG

SEQ ID NO: 22411 - protein, 43 aa, Artificial Sequence
  Non-cyclic GFR-binding peptide
  MOD_RES (5)..(6)..(40)..(42): Xaa is C or S
  MOD_RES (20)..(21)..(22)..(23)..(24): Xaa is A or G
  MOD_RES (25)..(26)..(27)..(28): Xaa is A or G or absent
VPKAXXAPTKLSPINVLYFXXXXXXXXXYGKIPNMVVKAXGXH

SEQ ID NO: 22412 - protein, 34 aa, Artificial Sequence
  Non-cyclic GFR-binding peptide
  MOD_RES (1)..(2): Xaa is C or S
  MOD_RES (16)..(17)..(18)..(19)..(20): Xaa is A or G
  MOD_RES (21)..(22)..(23)..(24): Xaa is A or G or absent
XXVPTELSPINMLYFXXXXXXXXXYGKIPEMVVE

SEQ ID NO: 22413 - protein, 42 aa, Artificial Sequence
  Non-cyclic GFR-binding peptide
  MOD_RES (6)..(7)..(41): Xaa is C or S
  MOD_RES (21)..(22)..(23)..(24)..(25): Xaa is A or G
  MOD_RES (26)..(27)..(28)..(29): Xaa is A or G or absent
AAPASXXVPARLSPINILYFXXXXXXXXXYGKIPDMVVEAXG

SEQ ID NO: 22414 - protein, 39 aa, Artificial Sequence
  Non-cyclic GFR-binding peptide
  MOD_RES (5)..(6)..(38): Xaa is C or S
VPKPXXAPTKLSPINVLYFDDSSNVIYGKIPNMVVRSXG

SEQ ID NO: 22415 - protein, 39 aa, Artificial Sequence
  Non-cyclic GFR-binding peptide
  MOD_RES (5)..(6): Xaa is C or S
  MOD_RES (20)..(21)..(22)..(23)..(24): Xaa is A or G
  MOD_RES (25)..(26)..(27)..(28): Xaa is A or G or absent
VPKAXXAPTKLSPINVLYFXXXXXXXXXYGKIPNMVVKA

SEQ ID NO: 22416 - protein, 39 aa, Artificial Sequence
  Non-cyclic GFR-binding peptide
  MOD_RES (6)..(7)..(39): Xaa is C or S
TVPKPXXAPTQLSPINVLYFDDSSNVIYGKIPNMVVRAX

SEQ ID NO: 22417 - protein, 38 aa, Artificial Sequence
  Non-cyclic GFR-binding peptide
  MOD_RES (3)..(4)..(38): Xaa is C or S
  MOD_RES (18)..(19)..(20)..(21)..(22): Xaa is A or G
  MOD_RES (23)..(24)..(25)..(26): Xaa is A or G or absent
KAXXAPTKLSPINVLYFXXXXXXXXXYGKIPNMVVKAX

SEQ ID NO: 22418 - protein, 40 aa, Artificial Sequence
  Non-cyclic GFR-binding peptide
  MOD_RES (5)..(6)..(40): Xaa is C or S
  MOD_RES (20)..(21)..(22)..(23)..(24): Xaa is A or G
  MOD_RES (25)..(26)..(27)..(28): Xaa is A or G or absent
IPKAXXVPTELSPINMLYFXXXXXXXXXYGKIPDMVVEGX

SEQ ID NO: 22419 - protein, 40 aa, Artificial Sequence
  Non-cyclic GFR-binding peptide
  MOD_RES (3)..(4)..(37)..(39): Xaa is C or S
KAXXVPTKLSPINVLYFDDMGVPTYGKIPEGMSVAEXGXR

SEQ ID NO: 22420 - protein, 36 aa, Artificial Sequence
  Non-cyclic GFR-binding peptide
  MOD_RES (1)..(2)..(36): Xaa is C or S
  MOD_RES (16)..(17)..(18)..(19)..(20): Xaa is A or G
  MOD_RES (21)..(22)..(23)..(24): Xaa is A or G or absent
XXVPTRLSPINILYFXXXXXXXXXYGKIPDMVVESX

SEQ ID NO: 22421 - protein, 38 aa, Artificial Sequence
  Non-cyclic GFR-binding peptide
  MOD_RES (1)..(2)..(36)..(38): Xaa is C or S
  MOD_RES (16)..(17)..(18)..(19)..(20): Xaa is A or G
  MOD_RES (21)..(22)..(23)..(24): Xaa is A or G or absent
XXVPARLSPINILYFXXXXXXXXXYGKIPDMVVEAXGX

SEQ ID NO: 22422 - protein, 37 aa, Artificial Sequence
  Non-cyclic GFR-binding peptide
  MOD_RES (5)..(6): Xaa is C or S
ASKAXXVPTKLSPINILYFDKGVVTYYGKIPGMAVSE

SEQ ID NO: 22423 - protein, 40 aa, Artificial Sequence
  Non-cyclic GFR-binding peptide
  MOD_RES (5)..(6)..(39): Xaa is C or S
  MOD_RES (20)..(21)..(22)..(23)..(24): Xaa is A or G
  MOD_RES (25)..(26)..(27)..(28): Xaa is A or G or absent
VPSTXXAPVKTSPINMLYFXXXXXXXXXYGKIPMIVEEXG

SEQ ID NO: 22424 - protein, 37 aa, Artificial Sequence
  Non-cyclic GFR-binding peptide
  MOD_RES (6)..(7): Xaa is C or S
RVPSTXXAPVKTSPINMLYFDNGRVLLYGKIPMIVEE

SEQ ID NO: 22425 - protein, 42 aa, Artificial Sequence
  Non-cyclic GFR-binding peptide
  MOD_RES (4)..(5)..(39)..(41): Xaa is C or S
  MOD_RES (19)..(20)..(21)..(22)..(23): Xaa is A or G
  MOD_RES (24)..(25)..(26)..(27): Xaa is A or G or absent
PASXXVPARLSPINILYFXXXXXXXXXYGKIPDMVVEAXGXR

SEQ ID NO: 22426 - protein, 36 aa, Artificial Sequence
  Non-cyclic GFR-binding peptide
  MOD_RES (2)..(3): Xaa is C or S
  MOD_RES (17)..(18)..(19)..(20)..(21): Xaa is A or G
  MOD_RES (22)..(23)..(24)..(25): Xaa is A or G or absent
AXXVPTELSPINMLYFXXXXXXXXXYGKIPDMVVEG

SEQ ID NO: 22427 - protein, 34 aa, Artificial Sequence
  Non-cyclic GFR-binding peptide
  MOD_RES (3)..(4): Xaa is C or S
KAXXVPTELSPINMLYFDEYDKVVYGKIPEMVVE

SEQ ID NO: 22428 - protein, 33 aa, Artificial Sequence
  Non-cyclic GFR-binding peptide
  MOD_RES (1)..(2): Xaa is C or S
XXAPTQLSPINVLYFDDSSNVIYGKIPNMVVRA

SEQ ID NO: 22429 - protein, 37 aa, Artificial Sequence
  Non-cyclic GFR-binding peptide
  MOD_RES (1)..(2)..(34)..(36): Xaa is C or S
XXAPTKLSPINVLYFDSSNNVIYGKIPNMVVKAXGXH

SEQ ID NO: 22430 - protein, 32 aa, Artificial Sequence
  Non-cyclic GFR-binding peptide
  MOD_RES (1)..(2): Xaa is C or S
XXAPTKLSPINVLYFDSSNNVIYGKIPNMVVK

SEQ ID NO: 22431 - protein, 35 aa, Artificial Sequence
  Non-cyclic GFR-binding peptide
  MOD_RES (1)..(32)..(34): Xaa is C or S
XAPVKTSPINMLYFDNGRVLLYGKIPMIVEEXGXL

SEQ ID NO: 22432 - protein, 34 aa, Artificial Sequence
  Non-cyclic GFR-binding peptide
  MOD_RES (1)..(1): Xaa is C or S
  MOD_RES (15)..(16)..(17)..(18)..(19): Xaa is A or G
  MOD_RES (20)..(21)..(22)..(23): Xaa is A or G or absent
XVPARLSPINILYFXXXXXXXXXYGKIPDMVVEA

SEQ ID NO: 22433 - protein, 38 aa, Artificial Sequence
  Non-cyclic GFR-binding peptide
  MOD_RES (4)..(5)..(38): Xaa is C or S
GKAXXVPTKLSPINVLYFDDMGVPTYGKIPEGMSVAEX

SEQ ID NO: 22434 - protein, 33 aa, Artificial Sequence
  Non-cyclic GFR-binding peptide
  MOD_RES (3)..(3): Xaa is C or S
PTXAPTKLSPINVLYFDDSSNVIYGKIPNMVVR

SEQ ID NO: 22435 - protein, 38 aa, Artificial Sequence
  Non-cyclic GFR-binding peptide
  MOD_RES (2)..(3)..(37): Xaa is C or S
  MOD_RES (17)..(18)..(19)..(20)..(21): Xaa is A or G
  MOD_RES (22)..(23)..(24)..(25): Xaa is A or G or absent
PXXAPTQLSPINVLYFXXXXXXXXXYGKIPNMVVRAXG

SEQ ID NO: 22436 - protein, 44 aa, Artificial Sequence
  Non-cyclic GFR-binding peptide
  MOD_RES (5)..(6)..(41)..(43): Xaa is C or S
  MOD_RES (20)..(21)..(22)..(23)..(24): Xaa is A or G
  MOD_RES (25)..(26)..(27)..(28): Xaa is A or G or absent
VGKAXXVPTKLSPINVLYFXXXXXXXXXYGKIPEGMSVAEXGXR

SEQ ID NO: 22437 - protein, 35 aa, Artificial Sequence
  Non-cyclic GFR-binding peptide
  MOD_RES (1)..(33)..(35): Xaa is C or S
XAPTQLSPINVLYFDDSSNVIYGKIPNMVVRAXGX

SEQ ID NO: 22438 - protein, 39 aa, Artificial Sequence
  Non-cyclic GFR-binding peptide
  MOD_RES (5)..(6)..(38): Xaa is C or S
VPKPXXAPTQLSPINVLYFDDSSNVIYGKIPNMVVRAXG

SEQ ID NO: 22439 - protein, 42 aa, Artificial Sequence
  Non-cyclic GFR-binding peptide
  MOD_RES (6)..(7)..(39)..(41): Xaa is C or S
AVPKAXXAPTKLSPINVLYFDSSNNVIYGKIPNMVVKAXGXH

SEQ ID NO: 22440 - protein, 42 aa, Artificial Sequence
  Non-cyclic GFR-binding peptide
  MOD_RES (6)..(7)..(41): Xaa is C or S
  MOD_RES (21)..(22)..(23)..(24)..(25): Xaa is A or G
  MOD_RES (26)..(27)..(28)..(29): Xaa is A or G or absent
AVPKAXXAPTKLSPINVLYFXXXXXXXXXYGKIPNMVVKAXG

SEQ ID NO: 22441 - protein, 42 aa, Artificial Sequence
  Non-cyclic GFR-binding peptide
  MOD_RES (6)..(7)..(39)..(41): Xaa is C or S
SIPKAXXVPTELSPINMLYFDEYDKVVYGKIPEMVVEGXGXR

SEQ ID NO: 22442 - protein, 39 aa, Artificial Sequence
  Non-cyclic GFR-binding peptide
  MOD_RES (3)..(4)..(39): Xaa is C or S
  MOD_RES (18)..(19)..(20)..(21)..(22): Xaa is A or G
  MOD_RES (23)..(24)..(25)..(26): Xaa is A or G or absent
KAXXVPTKLSPINVLYFXXXXXXXXXYGKIPEGMSVAEX

SEQ ID NO: 22443 - protein, 36 aa, Artificial Sequence
  Non-cyclic GFR-binding peptide
  MOD_RES (34)..(36): Xaa is C or S
  MOD_RES (14)..(15)..(16)..(17)..(18): Xaa is A or G
  MOD_RES (19)..(20)..(21)..(22): Xaa is A or G or absent
APTQLSPINVLYFXXXXXXXXXYGKIPNMVVRAXGX

SEQ ID NO: 22444 - protein, 35 aa, Artificial Sequence
  Non-cyclic GFR-binding peptide
  MOD_RES (3)..(35): Xaa is C or S
PTXAPTKLSPINVLYFDDSSNVIYGKIPNMVVRSX

SEQ ID NO: 22445 - protein, 38 aa, Artificial Sequence
  Non-cyclic GFR-binding peptide
  MOD_RES (2)..(3)..(37): Xaa is C or S
  MOD_RES (17)..(18)..(19)..(20)..(21): Xaa is A or G
  MOD_RES (22)..(23)..(24)..(25): Xaa is A or G or absent
AXXVPTKLSPINILYFXXXXXXXXXYGKIPGMAVSEXG

SEQ ID NO: 22446 - protein, 34 aa, Artificial Sequence
  Non-cyclic GFR-binding peptide
  MOD_RES (1)..(1): Xaa is C or S
  MOD_RES (15)..(16)..(17)..(18)..(19): Xaa is A or G
  MOD_RES (20)..(21)..(22)..(23): Xaa is A or G or absent
XVPTELSPINMLYFXXXXXXXXXYGKIPEMVVEG

SEQ ID NO: 22447 - protein, 40 aa, Artificial Sequence
  Non-cyclic GFR-binding peptide
  MOD_RES (6)..(7): Xaa is C or S
  MOD_RES (21)..(22)..(23)..(24)..(25): Xaa is A or G
  MOD_RES (26)..(27)..(28)..(29): Xaa is A or G or absent
KASKAXXVPTKLSPINILYFXXXXXXXXXYGKIPGMAVSE

SEQ ID NO: 22448 - protein, 39 aa, Artificial Sequence
  Non-cyclic GFR-binding peptide
  MOD_RES (4)..(5)..(39): Xaa is C or S
  MOD_RES (19)..(20)..(21)..(22)..(23): Xaa is A or G
  MOD_RES (24)..(25)..(26)..(27): Xaa is A or G or absent
SKAXXVPTKLSPINILYFXXXXXXXXXYGKIPGMAVSEX

SEQ ID NO: 22449 - protein, 41 aa, Artificial Sequence
  Non-cyclic GFR-binding peptide
  MOD_RES (4)..(5)..(38)..(40): Xaa is C or S
  MOD_RES (19)..(20)..(21)..(22)..(23): Xaa is A or G
  MOD_RES (24)..(25)..(26)..(27): Xaa is A or G or absent
PSTXXAPVKTSPINMLYFXXXXXXXXXYGKIPMIVEEXGXL

SEQ ID NO: 22450 - protein, 35 aa, Artificial Sequence
  Non-cyclic GFR-binding peptide
  MOD_RES (2)..(3): Xaa is C or S
  MOD_RES (17)..(18)..(19)..(20)..(21): Xaa is A or G
  MOD_RES (22)..(23)..(24)..(25): Xaa is A or G or absent
TXXVPTRLSPINILYFXXXXXXXXXYGKIPDMVVE

SEQ ID NO: 22451 - protein, 31 aa, Artificial Sequence
  Non-cyclic GFR-binding peptide
APTKLSPINVLYFDDSSNVIYGKIPNMVVRS

SEQ ID NO: 22452 - protein, 39 aa, Artificial Sequence
  Non-cyclic GFR-binding peptide
  MOD_RES (6)..(7): Xaa is C or S
  MOD_RES (21)..(22)..(23)..(24)..(25): Xaa is A or G
  MOD_RES (26)..(27)..(28)..(29): Xaa is A or G or absent
KIPKAXXVPTELSPINMLYFXXXXXXXXXYGKIPDMVVE

SEQ ID NO: 22453 - protein, 42 aa, Artificial Sequence
  Non-cyclic GFR-binding peptide
  MOD_RES (5)..(6)..(40)..(42): Xaa is C or S
  MOD_RES (20)..(21)..(22)..(23)..(24): Xaa is A or G
  MOD_RES (25)..(26)..(27)..(28): Xaa is A or G or absent
VPKPXXAPTKLSPINVLYFXXXXXXXXXYGKIPNMVVRSXGX

SEQ ID NO: 22454 - protein, 34 aa, Artificial Sequence
  Non-cyclic GFR-binding peptide
  MOD_RES (1)..(2): Xaa is C or S
  MOD_RES (16)..(17)..(18)..(19)..(20): Xaa is A or G
  MOD_RES (21)..(22)..(23)..(24): Xaa is A or G or absent
XXAPTQLSPINVLYFXXXXXXXXXYGKIPNMVVR

SEQ ID NO: 22455 - protein, 36 aa, Artificial Sequence
  Non-cyclic GFR-binding peptide
  MOD_RES (34)..(36): Xaa is C or S
  MOD_RES (14)..(15)..(16)..(17)..(18): Xaa is A or G
  MOD_RES (19)..(20)..(21)..(22): Xaa is A or G or absent
VPTELSPINMLYFXXXXXXXXXYGKIPEMVVEGXGX

SEQ ID NO: 22456 - protein, 39 aa, Artificial Sequence
  Non-cyclic GFR-binding peptide
  MOD_RES (3)..(4)..(37)..(39): Xaa is C or S
  MOD_RES (18)..(19)..(20)..(21)..(22): Xaa is A or G
  MOD_RES (23)..(24)..(25)..(26): Xaa is A or G or absent
STXXAPVKTSPINMLYFXXXXXXXXXYGKIPMIVEEXGX

SEQ ID NO: 22457 - protein, 38 aa, Artificial Sequence
  Non-cyclic GFR-binding peptide
  MOD_RES (4)..(5)..(36)..(38): Xaa is C or S
PSTXXAPVKTSPINMLYFDNGRVLLYGKIPMIVEEXGX

SEQ ID NO: 22458 - protein, 37 aa, Artificial Sequence
  Non-cyclic GFR-binding peptide
  MOD_RES (1)..(2)..(36): Xaa is C or S
  MOD_RES (16)..(17)..(18)..(19)..(20): Xaa is A or G
  MOD_RES (21)..(22)..(23)..(24): Xaa is A or G or absent
XXVPTKLSPINILYFXXXXXXXXXYGKIPGMAVSEXG

SEQ ID NO: 22459 - protein, 36 aa, Artificial Sequence
  Non-cyclic GFR-binding peptide
  MOD_RES (3)..(4): Xaa is C or S
  MOD_RES (18)..(19)..(20)..(21)..(22): Xaa is A or G
  MOD_RES (23)..(24)..(25)..(26): Xaa is A or G or absent
KAXXVPTELSPINMLYFXXXXXXXXXYGKIPDMVVE

SEQ ID NO: 22460 - protein, 37 aa, Artificial Sequence
  Non-cyclic GFR-binding peptide
  MOD_RES (1)..(2)..(34)..(36): Xaa is C or S
XXAPTQLSPINVLYFDDSSNVIYGKIPNMVVRAXGXH

SEQ ID NO: 22461 - protein, 38 aa, Artificial Sequence
  Non-cyclic GFR-binding peptide
  MOD_RES (6)..(7)..(38): Xaa is C or S
RVPSTXXAPVKTSPINMLYFDNGRVLLYGKIPMIVEEX

SEQ ID NO: 22462 - protein, 34 aa, Artificial Sequence
  Non-cyclic GFR-binding peptide
  MOD_RES (1)..(33): Xaa is C or S
XAPTKLSPINVLYFDSSNNVIYGKIPNMVVKAXG

SEQ ID NO: 22463 - protein, 39 aa, Artificial Sequence
  Non-cyclic GFR-binding peptide
  MOD_RES (6)..(7): Xaa is C or S
  MOD_RES (21)..(22)..(23)..(24)..(25): Xaa is A or G
  MOD_RES (26)..(27)..(28)..(29): Xaa is A or G or absent
AVPKAXXAPTKLSPINVLYFXXXXXXXXXYGKIPNMVVK

SEQ ID NO: 22464 - protein, 39 aa, Artificial Sequence
  Non-cyclic GFR-binding peptide
  MOD_RES (3)..(4)..(38): Xaa is C or S
  MOD_RES (18)..(19)..(20)..(21)..(22): Xaa is A or G
  MOD_RES (23)..(24)..(25)..(26): Xaa is A or G or absent
KAXXVPTELSPINMLYFXXXXXXXXXYGKIPDMVVEGXG

SEQ ID NO: 22465 - protein, 30 aa, Artificial Sequence
  Non-cyclic GFR-binding peptide
VPTKLSPINILYFDKGVVTYYGKIPGMAVS

SEQ ID NO: 22466 - protein, 35 aa, Artificial Sequence
  Non-cyclic GFR-binding peptide
  MOD_RES (34)..(34): Xaa is C or S
  MOD_RES (14)..(15)..(16)..(17)..(18): Xaa is A or G
  MOD_RES (19)..(20)..(21)..(22): Xaa is A or G or absent
VPTELSPINMLYFXXXXXXXXXYGKIPDMVVEGXG

SEQ ID NO: 22467 - protein, 39 aa, Artificial Sequence
  Non-cyclic GFR-binding peptide
  MOD_RES (7)..(39): Xaa is C or S
HVTKPTXAPTKLSPINVLYFDDSSNVIYGKIPNMVVRSX

SEQ ID NO: 22468 - protein, 32 aa, Artificial Sequence
  Non-cyclic GFR-binding peptide
  MOD_RES (1)..(1): Xaa is C or S
XVPARLSPINILYFDAANNVVYGKIPDMVVEA

SEQ ID NO: 22469 - protein, 36 aa, Artificial Sequence
  Non-cyclic GFR-binding peptide
  MOD_RES (3)..(35): Xaa is C or S
PTXAPTKLSPINVLYFDDSSNVIYGKIPNMVVRSXG

SEQ ID NO: 22470 - protein, 33 aa, Artificial Sequence
  Non-cyclic GFR-binding peptide
  MOD_RES (14)..(15)..(16)..(17)..(18): Xaa is A or G
  MOD_RES (19)..(20)..(21)..(22): Xaa is A or G or absent
VPTRLSPINILYFXXXXXXXXXYGKIPDMVVES

SEQ ID NO: 22471 - protein, 33 aa, Artificial Sequence
  Non-cyclic GFR-binding peptide
  MOD_RES (2)..(3): Xaa is C or S
TXXAPVKTSPINMLYFDNGRVLLYGKIPMIVEE

SEQ ID NO: 22472 - protein, 37 aa, Artificial Sequence
  Non-cyclic GFR-binding peptide
  MOD_RES (1)..(2)..(35)..(37): Xaa is C or S
XXVPTKLSPINVLYFDDMGVPTYGKIPEGMSVAEXGX

SEQ ID NO: 22473 - protein, 38 aa, Artificial Sequence
  Non-cyclic GFR-binding peptide
  MOD_RES (1)..(2)..(35)..(37): Xaa is C or S
  MOD_RES (16)..(17)..(18)..(19)..(20): Xaa is A or G
  MOD_RES (21)..(22)..(23)..(24): Xaa is A or G or absent
XXAPVKTSPINMLYFXXXXXXXXXYGKIPMIVEEXGXL

SEQ ID NO: 22474 - protein, 35 aa, Artificial Sequence
  Non-cyclic GFR-binding peptide
  MOD_RES (1)..(2): Xaa is C or S
  MOD_RES (16)..(17)..(18)..(19)..(20): Xaa is A or G
  MOD_RES (21)..(22)..(23)..(24): Xaa is A or G or absent
XXVPARLSPINILYFXXXXXXXXXYGKIPDMVVEA

SEQ ID NO: 22475 - protein, 38 aa, Artificial Sequence
  Non-cyclic GFR-binding peptide
  MOD_RES (5)..(6): Xaa is C or S
  MOD_RES (20)..(21)..(22)..(23)..(24): Xaa is A or G
  MOD_RES (25)..(26)..(27)..(28): Xaa is A or G or absent
VPKAXXAPTKLSPINVLYFXXXXXXXXXYGKIPNMVVK

SEQ ID NO: 22476 - protein, 37 aa, Artificial Sequence
  Non-cyclic GFR-binding peptide
  MOD_RES (1)..(2)..(35)..(37): Xaa is C or S
  MOD_RES (16)..(17)..(18)..(19)..(20): Xaa is A or G
  MOD_RES (21)..(22)..(23)..(24): Xaa is A or G or absent
XXAPVKTSPINMLYFXXXXXXXXXYGKIPMIVEEXGX

SEQ ID NO: 22477 - protein, 34 aa, Artificial Sequence
  Non-cyclic GFR-binding peptide
  MOD_RES (2)..(2): Xaa is C or S
  MOD_RES (13)..(14)..(15)..(16)..(17): Xaa is A or G
  MOD_RES (18)..(19)..(20)..(21): Xaa is A or G or absent
GXEEVIMEYQKYXXXXXXXXXIYLMSIPSTKVPA

SEQ ID NO: 22478 - protein, 38 aa, Artificial Sequence
  Non-cyclic GFR-binding peptide
  MOD_RES (2)..(33)..(34): Xaa is C or S
GXEEVIMEYQKYLLVRGNDIYLMSIPSTKVPAXXTSPV

SEQ ID NO: 22479 - protein, 35 aa, Artificial Sequence
  Non-cyclic GFR-binding peptide
  MOD_RES (31)..(32): Xaa is C or S
EEVIMEYQKYLLVRGNDIYLMSIPSTKVPAXXTSP

SEQ ID NO: 22480 - protein, 32 aa, Artificial Sequence
  Non-cyclic GFR-binding peptide
  MOD_RES (2)..(2): Xaa is C or S
GXEEVIMEYQKYLLVRGNDIYLMSIPSTKVPA

SEQ ID NO: 22481 - protein, 40 aa, Artificial Sequence
  Non-cyclic GFR-binding peptide
  MOD_RES (1)..(3)..(36)..(37): Xaa is C or S
  MOD_RES (14)..(15)..(16)..(17)..(18): Xaa is A or G
  MOD_RES (19)..(20)..(21)..(22): Xaa is A or G or absent
XGXEEVIMEYQKYXXXXXXXXXIYLMSIPSTKVPAXXTSP

SEQ ID NO: 22482 - protein, 39 aa, Artificial Sequence
  Non-cyclic GFR-binding peptide
  MOD_RES (34)..(35): Xaa is C or S
  MOD_RES (12)..(13)..(14)..(15)..(16): Xaa is A or G
  MOD_RES (17)..(18)..(19)..(20): Xaa is A or G or absent
RDVVMGEYQKYXXXXXXXXXIYLMSIPSMKTPTXXPGAS

SEQ ID NO: 22483 - protein, 32 aa, Artificial Sequence
  Non-cyclic GFR-binding peptide
  MOD_RES (1)..(32): Xaa is C or S
XEEVIMEYQKYLLVRGNDIYLMSIPSTKVPAX

SEQ ID NO: 22484 - protein, 33 aa, Artificial Sequence
  Non-cyclic GFR-binding peptide
  MOD_RES (1)..(33): Xaa is C or S
XRDVVMGEYQKYIIQQKDNIYLMSIPSMKTPTX

SEQ ID NO: 22485 - protein, 35 aa, Artificial Sequence
  Non-cyclic GFR-binding peptide
  MOD_RES (2)..(33)..(34): Xaa is C or S
GXEEVIMEYQKYLLVRGNDIYLMSIPSTKVPAXXT

SEQ ID NO: 22486 - protein, 37 aa, Artificial Sequence
  Non-cyclic GFR-binding peptide
  MOD_RES (1)..(3)..(34)..(35): Xaa is C or S
XGXEEVIMEYQKYLLVRGNDIYLMSIPSTKVPAXXTS

SEQ ID NO: 22487 - protein, 33 aa, Artificial Sequence
  Non-cyclic GFR-binding peptide
  MOD_RES (33)..(33): Xaa is C or S
  MOD_RES (11)..(12)..(13)..(14)..(15): Xaa is A or G
  MOD_RES (16)..(17)..(18)..(19): Xaa is A or G or absent
DVVMGEYQKYXXXXXXXXXIYLMSIPSMKTPTX

SEQ ID NO: 22488 - protein, 37 aa, Artificial Sequence
  Non-cyclic GFR-binding peptide
  MOD_RES (2)..(36)..(37): Xaa is C or S
  MOD_RES (14)..(15)..(16)..(17)..(18): Xaa is A or G
  MOD_RES (19)..(20)..(21)..(22): Xaa is A or G or absent
GXRDVVMGEYQKYXXXXXXXXXIYLMSIPSMKTPTXX

SEQ ID NO: 22489 - protein, 36 aa, Artificial Sequence
  Non-cyclic GFR-binding peptide
  MOD_RES (1)..(33)..(34): Xaa is C or S
XRDVVMGEYQKYIIQQKDNIYLMSIPSMKTPTXXPG

SEQ ID NO: 22490 - protein, 33 aa, Artificial Sequence
  Non-cyclic GFR-binding peptide
  MOD_RES (32)..(33): Xaa is C or S
RDVVMGEYQKYIIQQKDNIYLMSIPSMKTPTXX

SEQ ID NO: 22491 - protein, 34 aa, Artificial Sequence
  Non-cyclic GFR-binding peptide
  MOD_RES (33)..(34): Xaa is C or S
  MOD_RES (11)..(12)..(13)..(14)..(15): Xaa is A or G
  MOD_RES (16)..(17)..(18)..(19): Xaa is A or G or absent
DVVMGEYQKYXXXXXXXXXIYLMSIPSMKTPTXX

SEQ ID NO: 22492 - protein, 36 aa, Artificial Sequence
  Non-cyclic GFR-binding peptide
  MOD_RES (1)..(3)..(36): Xaa is C or S
  MOD_RES (14)..(15)..(16)..(17)..(18): Xaa is A or G
  MOD_RES (19)..(20)..(21)..(22): Xaa is A or G or absent
XGXEEVIMEYQKYXXXXXXXXXIYLMSIPSTKVPAX

SEQ ID NO: 22493 - protein, 36 aa, Artificial Sequence
  Non-cyclic GFR-binding peptide
  MOD_RES (33)..(34): Xaa is C or S
  MOD_RES (11)..(12)..(13)..(14)..(15): Xaa is A or G
  MOD_RES (16)..(17)..(18)..(19): Xaa is A or G or absent
EEVIMEYQKYXXXXXXXXXIYLMSIPSTKVPAXXTS

SEQ ID NO: 22494 - protein, 39 aa, Artificial Sequence
  Non-cyclic GFR-binding peptide
  MOD_RES (2)..(34)..(35): Xaa is C or S
GXRDVVMGEYQKYIIQQKDNIYLMSIPSMKTPTXXPGAS

SEQ ID NO: 22495 - protein, 35 aa, Artificial Sequence
  Non-cyclic GFR-binding peptide
  MOD_RES (1)..(3): Xaa is C or S
  MOD_RES (14)..(15)..(16)..(17)..(18): Xaa is A or G
  MOD_RES (19)..(20)..(21)..(22): Xaa is A or G or absent
XGXEEVIMEYQKYXXXXXXXXXIYLMSIPSTKVPA

SEQ ID NO: 22496 - protein, 36 aa, Artificial Sequence
  Non-cyclic GFR-binding peptide
  MOD_RES (1)..(32)..(33): Xaa is C or S
XEEVIMEYQKYLLVRGNDIYLMSIPSTKVPAXXTSP

SEQ ID NO: 22497 - protein, 41 aa, Artificial Sequence
  Non-cyclic GFR-binding peptide
  MOD_RES (2)..(4)..(36)..(37): Xaa is C or S
SXGXRDVVMGEYQKYIIQQKDNIYLMSIPSMKTPTXXPGAS

SEQ ID NO: 22498 - protein, 38 aa, Artificial Sequence
  Non-cyclic GFR-binding peptide
  MOD_RES (1)..(3)..(36)..(37): Xaa is C or S
  MOD_RES (14)..(15)..(16)..(17)..(18): Xaa is A or G
  MOD_RES (19)..(20)..(21)..(22): Xaa is A or G or absent
XGXEEVIMEYQKYXXXXXXXXXIYLMSIPSTKVPAXXT

SEQ ID NO: 22499 - protein, 42 aa, Artificial Sequence
  Non-cyclic GFR-binding peptide
  MOD_RES (2)..(4)..(38)..(39): Xaa is C or S
  MOD_RES (16)..(17)..(18)..(19)..(20): Xaa is A or G
  MOD_RES (21)..(22)..(23)..(24): Xaa is A or G or absent
SXGXRDVVMGEYQKYXXXXXXXXXIYLMSIPSMKTPTXXPGA

SEQ ID NO: 22500 - protein, 37 aa, Artificial Sequence
  Non-cyclic GFR-binding peptide
  MOD_RES (2)..(4)..(37): Xaa is C or S
  MOD_RES (15)..(16)..(17)..(18)..(19): Xaa is A or G
  MOD_RES (20)..(21)..(22)..(23): Xaa is A or G or absent
LXGXEEVIMEYQKYXXXXXXXXXIYLMSIPSTKVPAX

SEQ ID NO: 22501 - protein, 40 aa, Artificial Sequence
  Non-cyclic GFR-binding peptide
  MOD_RES (1)..(34)..(35): Xaa is C or S
  MOD_RES (12)..(13)..(14)..(15)..(16): Xaa is A or G
  MOD_RES (17)..(18)..(19)..(20): Xaa is A or G or absent
XEEVIMEYQKYXXXXXXXXXIYLMSIPSTKVPAXXTSPVR

SEQ ID NO: 22502 - protein, 35 aa, Artificial Sequence
  Non-cyclic GFR-binding peptide
  MOD_RES (1)..(3)..(35): Xaa is C or S
XGXRDVVMGEYQKYIIQQKDNIYLMSIPSMKTPTX

SEQ ID NO: 22503 - protein, 38 aa, Artificial Sequence
  Non-cyclic GFR-binding peptide
  MOD_RES (2)..(4)..(37)..(38): Xaa is C or S
  MOD_RES (15)..(16)..(17)..(18)..(19): Xaa is A or G
  MOD_RES (20)..(21)..(22)..(23): Xaa is A or G or absent
LXGXEEVIMEYQKYXXXXXXXXXIYLMSIPSTKVPAXX

SEQ ID NO: 22504 - protein, 43 aa, Artificial Sequence
  Non-cyclic GFR-binding peptide
  MOD_RES (2)..(4)..(37)..(38): Xaa is C or S
  MOD_RES (15)..(16)..(17)..(18)..(19): Xaa is A or G
  MOD_RES (20)..(21)..(22)..(23): Xaa is A or G or absent
LXGXEEVIMEYQKYXXXXXXXXXIYLMSIPSTKVPAXXTSPVR

SEQ ID NO: 22505 - protein, 37 aa, Artificial Sequence
  Non-cyclic GFR-binding peptide
  MOD_RES (1)..(3)..(36)..(37): Xaa is C or S
  MOD_RES (14)..(15)..(16)..(17)..(18): Xaa is A or G
  MOD_RES (19)..(20)..(21)..(22): Xaa is A or G or absent
XGXEEVIMEYQKYXXXXXXXXXIYLMSIPSTKVPAXX

SEQ ID NO: 22506 - protein, 32 aa, Artificial Sequence
  Non-cyclic GFR-binding peptide
  MOD_RES (1)..(1): Xaa is C or S
XRDVVMGEYQKYIIQQKDNIYLMSIPSMKTPT

SEQ ID NO: 22507 - protein, 37 aa, Artificial Sequence
  Non-cyclic GFR-binding peptide
  MOD_RES (1)..(32)..(33): Xaa is C or S
XEEVIMEYQKYLLVRGNDIYLMSIPSTKVPAXXTSPV

SEQ ID NO: 22508 - protein, 30 aa, Artificial Sequence
  Non-cyclic GFR-binding peptide
DVVMGEYQKYIIQQKDNIYLMSIPSMKTPT

SEQ ID NO: 22509 - protein, 39 aa, Artificial Sequence
  Non-cyclic GFR-binding peptide
  MOD_RES (2)..(4)..(38)..(39): Xaa is C or S
  MOD_RES (16)..(17)..(18)..(19)..(20): Xaa is A or G
  MOD_RES (21)..(22)..(23)..(24): Xaa is A or G or absent
SXGXRDVVMGEYQKYXXXXXXXXXIYLMSIPSMKTPTXX

SEQ ID NO: 22510 - protein, 40 aa, Artificial Sequence
  Non-cyclic GFR-binding peptide
  MOD_RES (1)..(35)..(36): Xaa is C or S
  MOD_RES (13)..(14)..(15)..(16)..(17): Xaa is A or G
  MOD_RES (18)..(19)..(20)..(21): Xaa is A or G or absent
XRDVVMGEYQKYXXXXXXXXXIYLMSIPSMKTPTXXPGAS

SEQ ID NO: 22511 - protein, 32 aa, Artificial Sequence
  Non-cyclic GFR-binding peptide
  MOD_RES (31)..(32): Xaa is C or S
EEVIMEYQKYLLVRGNDIYLMSIPSTKVPAXX

SEQ ID NO: 22512 - protein, 37 aa, Artificial Sequence
  Non-cyclic GFR-binding peptide
  MOD_RES (2)..(35)..(36): Xaa is C or S
  MOD_RES (13)..(14)..(15)..(16)..(17): Xaa is A or G
  MOD_RES (18)..(19)..(20)..(21): Xaa is A or G or absent
GXEEVIMEYQKYXXXXXXXXXIYLMSIPSTKVPAXXT

SEQ ID NO: 22513 - protein, 40 aa, Artificial Sequence
  Non-cyclic GFR-binding peptide
  MOD_RES (2)..(34)..(35): Xaa is C or S
GXSRVVMNEYQKYIVNSSDDIYLVSIPSLKTPAXXPKPVH

SEQ ID NO: 22514 - protein, 35 aa, Artificial Sequence
  Non-cyclic GFR-binding peptide
  MOD_RES (2)..(34)..(35): Xaa is C or S
GXRDVVMGEYQKYIIQQKDNIYLMSIPSMKTPTXX

SEQ ID NO: 22515 - protein, 35 aa, Artificial Sequence
  Non-cyclic GFR-binding peptide
  MOD_RES (31)..(32): Xaa is C or S
DVVMGEYQKYIIQQKDNIYLMSIPSMKTPTXXPGA

SEQ ID NO: 22516 - protein, 41 aa, Artificial Sequence
  Non-cyclic GFR-binding peptide
  MOD_RES (1)..(35)..(36): Xaa is C or S
  MOD_RES (13)..(14)..(15)..(16)..(17): Xaa is A or G
  MOD_RES (18)..(19)..(20)..(21): Xaa is A or G or absent
XSRVVMNEYQKYXXXXXXXXXIYLVSIPSLKTPAXXPKPVH

SEQ ID NO: 22517 - protein, 33 aa, Artificial Sequence
  Non-cyclic GFR-binding peptide
  MOD_RES (1)..(3): Xaa is C or S
XGXEEVIMEYQKYLLVRGNDIYLMSIPSTKVPA

SEQ ID NO: 22518 - protein, 37 aa, Artificial Sequence
  Non-cyclic GFR-binding peptide
  MOD_RES (2)..(34)..(35): Xaa is C or S
GXRDVVMGEYQKYIIQQKDNIYLMSIPSMKTPTXXPG

SEQ ID NO: 22519 - protein, 34 aa, Artificial Sequence
  Non-cyclic GFR-binding peptide
  MOD_RES (32)..(33): Xaa is C or S
RDVVMGEYQKYIIQQKDNIYLMSIPSMKTPTXXP

SEQ ID NO: 22520 - protein, 37 aa, Artificial Sequence
  Non-cyclic GFR-binding peptide
  MOD_RES (1)..(35)..(36): Xaa is C or S
  MOD_RES (13)..(14)..(15)..(16)..(17): Xaa is A or G
  MOD_RES (18)..(19)..(20)..(21): Xaa is A or G or absent
XRDVVMGEYQKYXXXXXXXXXIYLMSIPSMKTPTXXP

SEQ ID NO: 22521 - protein, 41 aa, Artificial Sequence
  Non-cyclic GFR-binding peptide
  MOD_RES (1)..(3)..(35)..(36): Xaa is C or S
XGXRDVVMGEYQKYIIQQKDNIYLMSIPSMKTPTXXPGASG

SEQ ID NO: 22522 - protein, 33 aa, Artificial Sequence
  Non-cyclic GFR-binding peptide
  MOD_RES (31)..(32): Xaa is C or S
EEVIMEYQKYLLVRGNDIYLMSIPSTKVPAXXT

SEQ ID NO: 22523 - protein, 34 aa, Artificial Sequence
  Non-cyclic GFR-binding peptide
  MOD_RES (1)..(3): Xaa is C or S
XGXRDVVMGEYQKYIIQQKDNIYLMSIPSMKTPT

SEQ ID NO: 22524 - protein, 38 aa, Artificial Sequence
  Non-cyclic GFR-binding peptide
  MOD_RES (1)..(3)..(34)..(35): Xaa is C or S
XGXEEVIMEYQKYLLVRGNDIYLMSIPSTKVPAXXTSP

SEQ ID NO: 22525 - protein, 37 aa, Artificial Sequence
  Non-cyclic GFR-binding peptide
  MOD_RES (1)..(3)..(37): Xaa is C or S
  MOD_RES (15)..(16)..(17)..(18)..(19): Xaa is A or G
  MOD_RES (20)..(21)..(22)..(23): Xaa is A or G or absent
XGXRDVVMGEYQKYXXXXXXXXXIYLMSIPSMKTPTX

SEQ ID NO: 22526 - protein, 39 aa, Artificial Sequence
  Non-cyclic GFR-binding peptide
  MOD_RES (33)..(34): Xaa is C or S
  MOD_RES (11)..(12)..(13)..(14)..(15): Xaa is A or G
  MOD_RES (16)..(17)..(18)..(19): Xaa is A or G or absent
DVVMGEYQKYXXXXXXXXXIYLMSIPSMKTPTXXPGASG

SEQ ID NO: 22527 - protein, 37 aa, Artificial Sequence
  Non-cyclic GFR-binding peptide
  MOD_RES (1)..(33)..(34): Xaa is C or S
XRDVVMGEYQKYIIQQKDNIYLMSIPSMKTPTXXPGA

SEQ ID NO: 22528 - protein, 34 aa, Artificial Sequence
  Non-cyclic GFR-binding peptide
  MOD_RES (2)..(4): Xaa is C or S
LXGXEEVIMEYQKYLLVRGNDIYLMSIPSTKVPA

SEQ ID NO: 22529 - protein, 36 aa, Artificial Sequence
  Non-cyclic GFR-binding peptide
  MOD_RES (32)..(33): Xaa is C or S
RDVVMGEYQKYIIQQKDNIYLMSIPSMKTPTXXPGA

SEQ ID NO: 22530 - protein, 38 aa, Artificial Sequence
  Non-cyclic GFR-binding peptide
  MOD_RES (1)..(34)..(35): Xaa is C or S
  MOD_RES (12)..(13)..(14)..(15)..(16): Xaa is A or G
  MOD_RES (17)..(18)..(19)..(20): Xaa is A or G or absent
XEEVIMEYQKYXXXXXXXXXIYLMSIPSTKVPAXXTSP

SEQ ID NO: 22531 - protein, 34 aa, Artificial Sequence
  Non-cyclic GFR-binding peptide
  MOD_RES (1)..(34): Xaa is C or S
  MOD_RES (12)..(13)..(14)..(15)..(16): Xaa is A or G
  MOD_RES (17)..(18)..(19)..(20): Xaa is A or G or absent
XEEVIMEYQKYXXXXXXXXXIYLMSIPSTKVPAX

SEQ ID NO: 22532 - protein, 36 aa, Artificial Sequence
  Non-cyclic GFR-binding peptide
  MOD_RES (1)..(3)..(34)..(35): Xaa is C or S
XGXEEVIMEYQKYLLVRGNDIYLMSIPSTKVPAXXT

SEQ ID NO: 22533 - protein, 38 aa, Artificial Sequence
  Non-cyclic GFR-binding peptide
  MOD_RES (34)..(35): Xaa is C or S
  MOD_RES (12)..(13)..(14)..(15)..(16): Xaa is A or G
  MOD_RES (17)..(18)..(19)..(20): Xaa is A or G or absent
RDVVMGEYQKYXXXXXXXXXIYLMSIPSMKTPTXXPGA

SEQ ID NO: 22534 - protein, 40 aa, Artificial Sequence
  Non-cyclic GFR-binding peptide
  MOD_RES (2)..(4)..(35)..(36): Xaa is C or S
LXGXEEVIMEYQKYLLVRGNDIYLMSIPSTKVPAXXTSPV

SEQ ID NO: 22535 - protein, 36 aa, Artificial Sequence
  Non-cyclic GFR-binding peptide
  MOD_RES (31)..(32): Xaa is C or S
DVVMGEYQKYIIQQKDNIYLMSIPSMKTPTXXPGAS

SEQ ID NO: 22536 - protein, 44 aa, Artificial Sequence
  Non-cyclic GFR-binding peptide
  MOD_RES (2)..(4)..(38)..(39): Xaa is C or S
  MOD_RES (16)..(17)..(18)..(19)..(20): Xaa is A or G
  MOD_RES (21)..(22)..(23)..(24): Xaa is A or G or absent
SXGXRDVVMGEYQKYXXXXXXXXXIYLMSIPSMKTPTXXPGASG

SEQ ID NO: 22537 - protein, 38 aa, Artificial Sequence
  Non-cyclic GFR-binding peptide
  MOD_RES (1)..(3)..(35)..(36): Xaa is C or S
XGXRDVVMGEYQKYIIQQKDNIYLMSIPSMKTPTXXPG

SEQ ID NO: 22538 - protein, 36 aa, Artificial Sequence
  Non-cyclic GFR-binding peptide
  MOD_RES (1)..(35)..(36): Xaa is C or S
  MOD_RES (13)..(14)..(15)..(16)..(17): Xaa is A or G
  MOD_RES (18)..(19)..(20)..(21): Xaa is A or G or absent
XRDVVMGEYQKYXXXXXXXXXIYLMSIPSMKTPTXX

SEQ ID NO: 22539 - protein, 31 aa, Artificial Sequence
  Non-cyclic GFR-binding peptide
RDVVMGEYQKYIIQQKDNIYLMSIPSMKTPT

SEQ ID NO: 22540 - protein, 44 aa, Artificial Sequence
  Non-cyclic GFR-binding peptide
  MOD_RES (2)..(4)..(38)..(39): Xaa is C or S
  MOD_RES (16)..(17)..(18)..(19)..(20): Xaa is A or G
  MOD_RES (21)..(22)..(23)..(24): Xaa is A or G or absent
RXGXSEVVMDEYQKYXXXXXXXXXIYLISIPSLRTPVXXTPPTS

SEQ ID NO: 22541 - protein, 42 aa, Artificial Sequence
  Non-cyclic GFR-binding peptide
  MOD_RES (2)..(36)..(37): Xaa is C or S
  MOD_RES (14)..(15)..(16)..(17)..(18): Xaa is A or G
  MOD_RES (19)..(20)..(21)..(22): Xaa is A or G or absent
GXSRVVMNEYQKYXXXXXXXXXIYLVSIPSLKTPAXXPKPVH

SEQ ID NO: 22542 - protein, 36 aa, Artificial Sequence
  Non-cyclic GFR-binding peptide
  MOD_RES (2)..(4)..(35)..(36): Xaa is C or S
LXGXEEVIMEYQKYLLVRGNDIYLMSIPSTKVPAXX

SEQ ID NO: 22543 - protein, 40 aa, Artificial Sequence
  Non-cyclic GFR-binding peptide
  MOD_RES (2)..(4)..(36)..(37): Xaa is C or S
SXGXRDVVMGEYQKYIIQQKDNIYLMSIPSMKTPTXXPGA

SEQ ID NO: 22544 - protein, 36 aa, Artificial Sequence
  Non-cyclic GFR-binding peptide
  MOD_RES (2)..(34)..(35): Xaa is C or S
GXRDVVMGEYQKYIIQQKDNIYLMSIPSMKTPTXXP

SEQ ID NO: 22545 - protein, 39 aa, Artificial Sequence
  Non-cyclic GFR-binding peptide
  MOD_RES (2)..(4)..(37)..(38): Xaa is C or S
  MOD_RES (15)..(16)..(17)..(18)..(19): Xaa is A or G
  MOD_RES (20)..(21)..(22)..(23): Xaa is A or G or absent
LXGXEEVIMEYQKYXXXXXXXXXIYLMSIPSTKVPAXXT

SEQ ID NO: 22546 - protein, 36 aa, Artificial Sequence
  Non-cyclic GFR-binding peptide
  MOD_RES (1)..(34)..(35): Xaa is C or S
  MOD_RES (12)..(13)..(14)..(15)..(16): Xaa is A or G
  MOD_RES (17)..(18)..(19)..(20): Xaa is A or G or absent
XEEVIMEYQKYXXXXXXXXXIYLMSIPSTKVPAXXT

SEQ ID NO: 22547 - protein, 34 aa, Artificial Sequence
  Non-cyclic GFR-binding peptide
  MOD_RES (1)..(32)..(33): Xaa is C or S
XEEVIMEYQKYLLVRGNDIYLMSIPSTKVPAXXT

SEQ ID NO: 22548 - protein, 42 aa, Artificial Sequence
  Non-cyclic GFR-binding peptide
  MOD_RES (2)..(4)..(37)..(38): Xaa is C or S
  MOD_RES (15)..(16)..(17)..(18)..(19): Xaa is A or G
  MOD_RES (20)..(21)..(22)..(23): Xaa is A or G or absent
LXGXEEVIMEYQKYXXXXXXXXXIYLMSIPSTKVPAXXTSPV

SEQ ID NO: 22549 - protein, 35 aa, Artificial Sequence
  Non-cyclic GFR-binding peptide
  MOD_RES (1)..(3)..(34)..(35): Xaa is C or S
XGXEEVIMEYQKYLLVRGNDIYLMSIPSTKVPAXX

SEQ ID NO: 22550 - protein, 37 aa, Artificial Sequence
  Non-cyclic GFR-binding peptide
  MOD_RES (2)..(4)..(35)..(36): Xaa is C or S
LXGXEEVIMEYQKYLLVRGNDIYLMSIPSTKVPAXXT

SEQ ID NO: 22551 - protein, 38 aa, Artificial Sequence
  Non-cyclic GFR-binding peptide
  MOD_RES (2)..(4)..(38): Xaa is C or S
  MOD_RES (16)..(17)..(18)..(19)..(20): Xaa is A or G
  MOD_RES (21)..(22)..(23)..(24): Xaa is A or G or absent
SXGXRDVVMGEYQKYXXXXXXXXXIYLMSIPSMKTPTX

SEQ ID NO: 22552 - protein, 41 aa, Artificial Sequence
  Non-cyclic GFR-binding peptide
  MOD_RES (1)..(35)..(36): Xaa is C or S
  MOD_RES (13)..(14)..(15)..(16)..(17): Xaa is A or G
  MOD_RES (18)..(19)..(20)..(21): Xaa is A or G or absent
XRDVVMGEYQKYXXXXXXXXXIYLMSIPSMKTPTXXPGASG

SEQ ID NO: 22553 - protein, 33 aa, Artificial Sequence
  Non-cyclic GFR-binding peptide
  MOD_RES (31)..(32): Xaa is C or S
DVVMGEYQKYIIQQKDNIYLMSIPSMKTPTXXP

SEQ ID NO: 22554 - protein, 32 aa, Artificial Sequence
  Non-cyclic GFR-binding peptide
  MOD_RES (11)..(12)..(13)..(14)..(15): Xaa is A or G
  MOD_RES (16)..(17)..(18)..(19): Xaa is A or G or absent
DVVMGEYQKYXXXXXXXXXIYLMSIPSMKTPT

SEQ ID NO: 22555 - protein, 31 aa, Artificial Sequence
  Non-cyclic GFR-binding peptide
  MOD_RES (31)..(31): Xaa is C or S
DVVMGEYQKYIIQQKDNIYLMSIPSMKTPTX

SEQ ID NO: 22556 - protein, 40 aa, Artificial Sequence
  Non-cyclic GFR-binding peptide
  MOD_RES (2)..(36)..(37): Xaa is C or S
  MOD_RES (14)..(15)..(16)..(17)..(18): Xaa is A or G
  MOD_RES (19)..(20)..(21)..(22): Xaa is A or G or absent
GXRDVVMGEYQKYXXXXXXXXXIYLMSIPSMKTPTXXPGA

SEQ ID NO: 22557 - protein, 34 aa, Artificial Sequence
  Non-cyclic GFR-binding peptide
  MOD_RES (2)..(34): Xaa is C or S
GXRDVVMGEYQKYIIQQKDNIYLMSIPSMKTPTX

SEQ ID NO: 22558 - protein, 33 aa, Artificial Sequence
  Non-cyclic GFR-binding peptide
  MOD_RES (1)..(32)..(33): Xaa is C or S
XEEVIMEYQKYLLVRGNDIYLMSIPSTKVPAXX

SEQ ID NO: 22559 - protein, 34 aa, Artificial Sequence
  Non-cyclic GFR-binding peptide
  MOD_RES (31)..(32): Xaa is C or S
DVVMGEYQKYIIQQKDNIYLMSIPSMKTPTXXPG

SEQ ID NO: 22560 - protein, 42 aa, Artificial Sequence
  Non-cyclic GFR-binding peptide
  MOD_RES (2)..(4)..(36)..(37): Xaa is C or S
SXGXRDVVMGEYQKYIIQQKDNIYLMSIPSMKTPTXXPGASG

SEQ ID NO: 22561 - protein, 44 aa, Artificial Sequence
  Non-cyclic GFR-binding peptide
  MOD_RES (2)..(4)..(38)..(39): Xaa is C or S
  MOD_RES (16)..(17)..(18)..(19)..(20): Xaa is A or G
  MOD_RES (21)..(22)..(23)..(24): Xaa is A or G or absent
HXGXSRVVMNEYQKYXXXXXXXXXIYLVSIPSLKTPAXXPKPVH

SEQ ID NO: 22562 - protein, 37 aa, Artificial Sequence
  Non-cyclic GFR-binding peptide
  MOD_RES (1)..(3)..(35)..(36): Xaa is C or S
XGXRDVVMGEYQKYIIQQKDNIYLMSIPSMKTPTXXP

SEQ ID NO: 22563 - protein, 36 aa, Artificial Sequence
  Non-cyclic GFR-binding peptide
  MOD_RES (34)..(35): Xaa is C or S
  MOD_RES (12)..(13)..(14)..(15)..(16): Xaa is A or G
  MOD_RES (17)..(18)..(19)..(20): Xaa is A or G or absent
RDVVMGEYQKYXXXXXXXXXIYLMSIPSMKTPTXXP

SEQ ID NO: 22564 - protein, 39 aa, Artificial Sequence
  Non-cyclic GFR-binding peptide
  MOD_RES (2)..(4)..(36)..(37): Xaa is C or S
SXGXRDVVMGEYQKYIIQQKDNIYLMSIPSMKTPTXXPG

SEQ ID NO: 22565 - protein, 39 aa, Artificial Sequence
  Non-cyclic GFR-binding peptide
  MOD_RES (33)..(34): Xaa is C or S
  MOD_RES (11)..(12)..(13)..(14)..(15): Xaa is A or G
  MOD_RES (16)..(17)..(18)..(19): Xaa is A or G or absent
EEVIMEYQKYXXXXXXXXXIYLMSIPSTKVPAXXTSPVR

SEQ ID NO: 22566 - protein, 39 aa, Artificial Sequence
  Non-cyclic GFR-binding peptide
  MOD_RES (1)..(33)..(34): Xaa is C or S
XSRVVMNEYQKYIVNSSDDIYLVSIPSLKTPAXXPKPVH

SEQ ID NO: 22567 - protein, 40 aa, Artificial Sequence
  Non-cyclic GFR-binding peptide
  MOD_RES (2)..(35)..(36): Xaa is C or S
  MOD_RES (13)..(14)..(15)..(16)..(17): Xaa is A or G
  MOD_RES (18)..(19)..(20)..(21): Xaa is A or G or absent
GXEEVIMEYQKYXXXXXXXXXIYLMSIPSTKVPAXXTSPV

SEQ ID NO: 22568 - protein, 34 aa, Artificial Sequence
  Non-cyclic GFR-binding peptide
  MOD_RES (34)..(34): Xaa is C or S
  MOD_RES (12)..(13)..(14)..(15)..(16): Xaa is A or G
  MOD_RES (17)..(18)..(19)..(20): Xaa is A or G or absent
RDVVMGEYQKYXXXXXXXXXIYLMSIPSMKTPTX

SEQ ID NO: 22569 - protein, 33 aa, Artificial Sequence
  Non-cyclic GFR-binding peptide
  MOD_RES (2)..(2): Xaa is C or S
GXRDVVMGEYQKYIIQQKDNIYLMSIPSMKTPT

SEQ ID NO: 22570 - protein, 36 aa, Artificial Sequence
  Non-cyclic GFR-binding peptide
  MOD_RES (2)..(4)..(36): Xaa is C or S
SXGXRDVVMGEYQKYIIQQKDNIYLMSIPSMKTPTX

SEQ ID NO: 22571 - protein, 39 aa, Artificial Sequence
  Non-cyclic GFR-binding peptide
  MOD_RES (2)..(4)..(35)..(36): Xaa is C or S
LXGXEEVIMEYQKYLLVRGNDIYLMSIPSTKVPAXXTSP

SEQ ID NO: 22572 - protein, 41 aa, Artificial Sequence
  Non-cyclic GFR-binding peptide
  MOD_RES (1)..(3)..(37)..(38): Xaa is C or S
  MOD_RES (15)..(16)..(17)..(18)..(19): Xaa is A or G
  MOD_RES (20)..(21)..(22)..(23): Xaa is A or G or absent
XGXRDVVMGEYQKYXXXXXXXXXIYLMSIPSMKTPTXXPGA

SEQ ID NO: 22573 - protein, 40 aa, Artificial Sequence
  Non-cyclic GFR-binding peptide
  MOD_RES (1)..(3)..(37)..(38): Xaa is C or S
  MOD_RES (15)..(16)..(17)..(18)..(19): Xaa is A or G
  MOD_RES (20)..(21)..(22)..(23): Xaa is A or G or absent
XGXRDVVMGEYQKYXXXXXXXXXIYLMSIPSMKTPTXXPG

SEQ ID NO: 22574 - protein, 39 aa, Artificial Sequence
  Non-cyclic GFR-binding peptide
  MOD_RES (1)..(3)..(36)..(37): Xaa is C or S
  MOD_RES (14)..(15)..(16)..(17)..(18): Xaa is A or G
  MOD_RES (19)..(20)..(21)..(22): Xaa is A or G or absent
XGXEEVIMEYQKYXXXXXXXXXIYLMSIPSTKVPAXXTS

SEQ ID NO: 22575 - protein, 31 aa, Artificial Sequence
  Non-cyclic GFR-binding peptide
  MOD_RES (31)..(31): Xaa is C or S
EEVIMEYQKYLLVRGNDIYLMSIPSTKVPAX

SEQ ID NO: 22576 - protein, 37 aa, Artificial Sequence
  Non-cyclic GFR-binding peptide
  MOD_RES (2)..(4): Xaa is C or S
  MOD_RES (16)..(17)..(18)..(19)..(20): Xaa is A or G
  MOD_RES (21)..(22)..(23)..(24): Xaa is A or G or absent
SXGXRDVVMGEYQKYXXXXXXXXXIYLMSIPSMKTPT

SEQ ID NO: 22577 - protein, 38 aa, Artificial Sequence
  Non-cyclic GFR-binding peptide
  MOD_RES (2)..(4)..(35)..(36): Xaa is C or S
LXGXEEVIMEYQKYLLVRGNDIYLMSIPSTKVPAXXTS

SEQ ID NO: 22578 - protein, 39 aa, Artificial Sequence
  Non-cyclic GFR-binding peptide
  MOD_RES (1)..(3)..(35)..(36): Xaa is C or S
XGXRDVVMGEYQKYIIQQKDNIYLMSIPSMKTPTXXPGA

SEQ ID NO: 22579 - protein, 36 aa, Artificial Sequence
  Non-cyclic GFR-binding peptide
  MOD_RES (2)..(4): Xaa is C or S
  MOD_RES (15)..(16)..(17)..(18)..(19): Xaa is A or G
  MOD_RES (20)..(21)..(22)..(23): Xaa is A or G or absent
LXGXEEVIMEYQKYXXXXXXXXXIYLMSIPSTKVPA

SEQ ID NO: 22580 - protein, 37 aa, Artificial Sequence
  Non-cyclic GFR-binding peptide
  MOD_RES (31)..(32): Xaa is C or S
EEVIMEYQKYLLVRGNDIYLMSIPSTKVPAXXTSPVR

SEQ ID NO: 22581 - protein, 41 aa, Artificial Sequence
  Non-cyclic GFR-binding peptide
  MOD_RES (2)..(4)..(35)..(36): Xaa is C or S
LXGXEEVIMEYQKYLLVRGNDIYLMSIPSTKVPAXXTSPVR

SEQ ID NO: 22582 - protein, 32 aa, Artificial Sequence
  Non-cyclic GFR-binding peptide
  MOD_RES (31)..(32): Xaa is C or S
DVVMGEYQKYIIQQKDNIYLMSIPSMKTPTXX

SEQ ID NO: 22583 - protein, 34 aa, Artificial Sequence
  Non-cyclic GFR-binding peptide
  MOD_RES (31)..(32): Xaa is C or S
EEVIMEYQKYLLVRGNDIYLMSIPSTKVPAXXTS

SEQ ID NO: 22584 - protein, 39 aa, Artificial Sequence
  Non-cyclic GFR-binding peptide
  MOD_RES (33)..(34): Xaa is C or S
  MOD_RES (11)..(12)..(13)..(14)..(15): Xaa is A or G
  MOD_RES (16)..(17)..(18)..(19): Xaa is A or G or absent
RVVMNEYQKYXXXXXXXXXIYLVSIPSLKTPAXXPKPVH

SEQ ID NO: 22585 - protein, 36 aa, Artificial Sequence
  Non-cyclic GFR-binding peptide
  MOD_RES (31)..(32): Xaa is C or S
EEVIMEYQKYLLVRGNDIYLMSIPSTKVPAXXTSPV

SEQ ID NO: 22586 - protein, 30 aa, Artificial Sequence
  Non-cyclic GFR-binding peptide
EEVIMEYQKYLLVRGNDIYLMSIPSTKVPA

SEQ ID NO: 22587 - protein, 43 aa, Artificial Sequence
  Non-cyclic GFR-binding peptide
  MOD_RES (1)..(3)..(37)..(38): Xaa is C or S
  MOD_RES (15)..(16)..(17)..(18)..(19): Xaa is A or G
  MOD_RES (20)..(21)..(22)..(23): Xaa is A or G or absent
XGXRDVVMGEYQKYXXXXXXXXXIYLMSIPSMKTPTXXPGASG

SEQ ID NO: 22588 - protein, 37 aa, Artificial Sequence
  Non-cyclic GFR-binding peptide
  MOD_RES (33)..(34): Xaa is C or S
  MOD_RES (11)..(12)..(13)..(14)..(15): Xaa is A or G
  MOD_RES (16)..(17)..(18)..(19): Xaa is A or G or absent
EEVIMEYQKYXXXXXXXXXIYLMSIPSTKVPAXXTSP

SEQ ID NO: 22589 - protein, 35 aa, Artificial Sequence
  Non-cyclic GFR-binding peptide
  MOD_RES (1)..(33)..(34): Xaa is C or S
XRDVVMGEYQKYIIQQKDNIYLMSIPSMKTPTXXP

SEQ ID NO: 22590 - protein, 37 aa, Artificial Sequence
  Non-cyclic GFR-binding peptide
  MOD_RES (2)..(33)..(34): Xaa is C or S
GXEEVIMEYQKYLLVRGNDIYLMSIPSTKVPAXXTSP

SEQ ID NO: 22591 - protein, 35 aa, Artificial Sequence
  Non-cyclic GFR-binding peptide
  MOD_RES (2)..(4)..(35): Xaa is C or S
LXGXEEVIMEYQKYLLVRGNDIYLMSIPSTKVPAX

SEQ ID NO: 22592 - protein, 35 aa, Artificial Sequence
  Non-cyclic GFR-binding peptide
  MOD_RES (2)..(4): Xaa is C or S
SXGXRDVVMGEYQKYIIQQKDNIYLMSIPSMKTPT

SEQ ID NO: 22593 - protein, 40 aa, Artificial Sequence
  Non-cyclic GFR-binding peptide
  MOD_RES (1)..(3)..(34)..(35): Xaa is C or S
XGXEEVIMEYQKYLLVRGNDIYLMSIPSTKVPAXXTSPVR

SEQ ID NO: 22594 - protein, 36 aa, Artificial Sequence
  Non-cyclic GFR-binding peptide
  MOD_RES (2)..(36): Xaa is C or S
  MOD_RES (14)..(15)..(16)..(17)..(18): Xaa is A or G
  MOD_RES (19)..(20)..(21)..(22): Xaa is A or G or absent
GXRDVVMGEYQKYXXXXXXXXXIYLMSIPSMKTPTX

SEQ ID NO: 22595 - protein, 39 aa, Artificial Sequence
  Non-cyclic GFR-binding peptide
  MOD_RES (2)..(35)..(36): Xaa is C or S
  MOD_RES (13)..(14)..(15)..(16)..(17): Xaa is A or G
  MOD_RES (18)..(19)..(20)..(21): Xaa is A or G or absent
GXEEVIMEYQKYXXXXXXXXXIYLMSIPSTKVPAXXTSP

SEQ ID NO: 22596 - protein, 42 aa, Artificial Sequence
  Non-cyclic GFR-binding peptide
  MOD_RES (2)..(36)..(37): Xaa is C or S
  MOD_RES (14)..(15)..(16)..(17)..(18): Xaa is A or G
  MOD_RES (19)..(20)..(21)..(22): Xaa is A or G or absent
GXRDVVMGEYQKYXXXXXXXXXIYLMSIPSMKTPTXXPGASG

SEQ ID NO: 22597 - protein, 37 aa, Artificial Sequence
  Non-cyclic GFR-binding peptide
  MOD_RES (33)..(34): Xaa is C or S
  MOD_RES (11)..(12)..(13)..(14)..(15): Xaa is A or G
  MOD_RES (16)..(17)..(18)..(19): Xaa is A or G or absent
DVVMGEYQKYXXXXXXXXXIYLMSIPSMKTPTXXPGA

SEQ ID NO: 22598 - protein, 39 aa, Artificial Sequence
  Non-cyclic GFR-binding peptide
  MOD_RES (1)..(35)..(36): Xaa is C or S
  MOD_RES (13)..(14)..(15)..(16)..(17): Xaa is A or G
  MOD_RES (18)..(19)..(20)..(21): Xaa is A or G or absent
XRDVVMGEYQKYXXXXXXXXXIYLMSIPSMKTPTXXPGA

SEQ ID NO: 22599 - protein, 42 aa, Artificial Sequence
  Non-cyclic GFR-binding peptide
  MOD_RES (1)..(3)..(37)..(38): Xaa is C or S
  MOD_RES (15)..(16)..(17)..(18)..(19): Xaa is A or G
  MOD_RES (20)..(21)..(22)..(23): Xaa is A or G or absent
XGXRDVVMGEYQKYXXXXXXXXXIYLMSIPSMKTPTXXPGAS

SEQ ID NO: 22600 - protein, 40 aa, Artificial Sequence
  Non-cyclic GFR-binding peptide
  MOD_RES (1)..(3)..(35)..(36): Xaa is C or S
XGXRDVVMGEYQKYIIQQKDNIYLMSIPSMKTPTXXPGAS

SEQ ID NO: 22601 - protein, 33 aa, Artificial Sequence
  Non-cyclic GFR-binding peptide
  MOD_RES (33)..(33): Xaa is C or S
  MOD_RES (11)..(12)..(13)..(14)..(15): Xaa is A or G
  MOD_RES (16)..(17)..(18)..(19): Xaa is A or G or absent
EEVIMEYQKYXXXXXXXXXIYLMSIPSTKVPAX

SEQ ID NO: 22602 - protein, 41 aa, Artificial Sequence
  Non-cyclic GFR-binding peptide
  MOD_RES (1)..(3)..(36)..(37): Xaa is C or S
  MOD_RES (14)..(15)..(16)..(17)..(18): Xaa is A or G
  MOD_RES (19)..(20)..(21)..(22): Xaa is A or G or absent
XGXEEVIMEYQKYXXXXXXXXXIYLMSIPSTKVPAXXTSPV

SEQ ID NO: 22603 - protein, 37 aa, Artificial Sequence
  Non-cyclic GFR-binding peptide
  MOD_RES (31)..(32): Xaa is C or S
DVVMGEYQKYIIQQKDNIYLMSIPSMKTPTXXPGASG

SEQ ID NO: 22604 - protein, 39 aa, Artificial Sequence
  Non-cyclic GFR-binding peptide
  MOD_RES (1)..(3)..(34)..(35): Xaa is C or S
XGXEEVIMEYQKYLLVRGNDIYLMSIPSTKVPAXXTSPV

SEQ ID NO: 22605 - protein, 35 aa, Artificial Sequence
  Non-cyclic GFR-binding peptide
  MOD_RES (1)..(34)..(35): Xaa is C or S
  MOD_RES (12)..(13)..(14)..(15)..(16): Xaa is A or G
  MOD_RES (17)..(18)..(19)..(20): Xaa is A or G or absent
XEEVIMEYQKYXXXXXXXXXIYLMSIPSTKVPAXX

SEQ ID NO: 22606 - protein, 35 aa, Artificial Sequence
  Non-cyclic GFR-binding peptide
  MOD_RES (2)..(35): Xaa is C or S
  MOD_RES (13)..(14)..(15)..(16)..(17): Xaa is A or G
  MOD_RES (18)..(19)..(20)..(21): Xaa is A or G or absent
GXEEVIMEYQKYXXXXXXXXXIYLMSIPSTKVPAX

SEQ ID NO: 22607 - protein, 38 aa, Artificial Sequence
  Non-cyclic GFR-binding peptide
  MOD_RES (32)..(33): Xaa is C or S
SRVVMNEYQKYIVNSSDDIYLVSIPSLKTPAXXPKPVH

SEQ ID NO: 22608 - protein, 40 aa, Artificial Sequence
  Non-cyclic GFR-binding peptide
  MOD_RES (2)..(34)..(35): Xaa is C or S
GXRDVVMGEYQKYIIQQKDNIYLMSIPSMKTPTXXPGASG

SEQ ID NO: 22609 - protein, 34 aa, Artificial Sequence
  Non-cyclic GFR-binding peptide
  MOD_RES (1)..(3)..(34): Xaa is C or S
XGXEEVIMEYQKYLLVRGNDIYLMSIPSTKVPAX

SEQ ID NO: 22610 - protein, 39 aa, Artificial Sequence
  Non-cyclic GFR-binding peptide
  MOD_RES (2)..(33)..(34): Xaa is C or S
GXEEVIMEYQKYLLVRGNDIYLMSIPSTKVPAXXTSPVR

SEQ ID NO: 22611 - protein, 36 aa, Artificial Sequence
  Non-cyclic GFR-binding peptide
  MOD_RES (1)..(3)..(35)..(36): Xaa is C or S
XGXRDVVMGEYQKYIIQQKDNIYLMSIPSMKTPTXX

SEQ ID NO: 22612 - protein, 41 aa, Artificial Sequence
  Non-cyclic GFR-binding peptide
  MOD_RES (1)..(3)..(35)..(36): Xaa is C or S
XGXSRVVMNEYQKYIVNSSDDIYLVSIPSLKTPAXXPKPVH

SEQ ID NO: 22613 - protein, 42 aa, Artificial Sequence
  Non-cyclic GFR-binding peptide
  MOD_RES (2)..(4)..(36)..(37): Xaa is C or S
RXGXSEVVMDEYQKYVVNNASDIYLISIPSLRTPVXXTPPTS

SEQ ID NO: 22614 - protein, 32 aa, Artificial Sequence
  Non-cyclic GFR-binding peptide
  MOD_RES (11)..(12)..(13)..(14)..(15): Xaa is A or G
  MOD_RES (16)..(17)..(18)..(19): Xaa is A or G or absent
EEVIMEYQKYXXXXXXXXXIYLMSIPSTKVPA

SEQ ID NO: 22615 - protein, 33 aa, Artificial Sequence
  Non-cyclic GFR-binding peptide
  MOD_RES (12)..(13)..(14)..(15)..(16): Xaa is A or G
  MOD_RES (17)..(18)..(19)..(20): Xaa is A or G or absent
RDVVMGEYQKYXXXXXXXXXIYLMSIPSMKTPT

SEQ ID NO: 22616 - protein, 35 aa, Artificial Sequence
  Non-cyclic GFR-binding peptide
  MOD_RES (1)..(32)..(33): Xaa is C or S
XEEVIMEYQKYLLVRGNDIYLMSIPSTKVPAXXTS

SEQ ID NO: 22617 - protein, 38 aa, Artificial Sequence
  Non-cyclic GFR-binding peptide
  MOD_RES (33)..(34): Xaa is C or S
  MOD_RES (11)..(12)..(13)..(14)..(15): Xaa is A or G
  MOD_RES (16)..(17)..(18)..(19): Xaa is A or G or absent
EEVIMEYQKYXXXXXXXXXIYLMSIPSTKVPAXXTSPV

SEQ ID NO: 22618 - protein, 41 aa, Artificial Sequence
  Non-cyclic GFR-binding peptide
  MOD_RES (2)..(4)..(38)..(39): Xaa is C or S
  MOD_RES (16)..(17)..(18)..(19)..(20): Xaa is A or G
  MOD_RES (21)..(22)..(23)..(24): Xaa is A or G or absent
SXGXRDVVMGEYQKYXXXXXXXXXIYLMSIPSMKTPTXXPG

SEQ ID NO: 22619 - protein, 35 aa, Artificial Sequence
  Non-cyclic GFR-binding peptide
  MOD_RES (33)..(34): Xaa is C or S
  MOD_RES (11)..(12)..(13)..(14)..(15): Xaa is A or G
  MOD_RES (16)..(17)..(18)..(19): Xaa is A or G or absent
DVVMGEYQKYXXXXXXXXXIYLMSIPSMKTPTXXP

SEQ ID NO: 22620 - protein, 31 aa, Artificial Sequence
  Non-cyclic GFR-binding peptide
  MOD_RES (1)..(1): Xaa is C or S
XEEVIMEYQKYLLVRGNDIYLMSIPSTKVPA

SEQ ID NO: 22621 - protein, 33 aa, Artificial Sequence
  Non-cyclic GFR-binding peptide
  MOD_RES (1)..(1): Xaa is C or S
  MOD_RES (12)..(13)..(14)..(15)..(16): Xaa is A or G
  MOD_RES (17)..(18)..(19)..(20): Xaa is A or G or absent
XEEVIMEYQKYXXXXXXXXXIYLMSIPSTKVPA

SEQ ID NO: 22622 - protein, 37 aa, Artificial Sequence
  Non-cyclic GFR-binding peptide
  MOD_RES (34)..(35): Xaa is C or S
  MOD_RES (12)..(13)..(14)..(15)..(16): Xaa is A or G
  MOD_RES (17)..(18)..(19)..(20): Xaa is A or G or absent
RDVVMGEYQKYXXXXXXXXXIYLMSIPSMKTPTXXPG

SEQ ID NO: 22623 - protein, 40 aa, Artificial Sequence
  Non-cyclic GFR-binding peptide
  MOD_RES (2)..(4)..(38)..(39): Xaa is C or S
  MOD_RES (16)..(17)..(18)..(19)..(20): Xaa is A or G
  MOD_RES (21)..(22)..(23)..(24): Xaa is A or G or absent
SXGXRDVVMGEYQKYXXXXXXXXXIYLMSIPSMKTPTXXP

SEQ ID NO: 22624 - protein, 41 aa, Artificial Sequence
  Non-cyclic GFR-binding peptide
  MOD_RES (2)..(35)..(36): Xaa is C or S
  MOD_RES (13)..(14)..(15)..(16)..(17): Xaa is A or G
  MOD_RES (18)..(19)..(20)..(21): Xaa is A or G or absent
GXEEVIMEYQKYXXXXXXXXXIYLMSIPSTKVPAXXTSPVR

SEQ ID NO: 22625 - protein, 37 aa, Artificial Sequence
  Non-cyclic GFR-binding peptide
  MOD_RES (1)..(34)..(35): Xaa is C or S
  MOD_RES (12)..(13)..(14)..(15)..(16): Xaa is A or G
  MOD_RES (17)..(18)..(19)..(20): Xaa is A or G or absent
XEEVIMEYQKYXXXXXXXXXIYLMSIPSTKVPAXXTS

SEQ ID NO: 22626 - protein, 38 aa, Artificial Sequence
  Non-cyclic GFR-binding peptide
  MOD_RES (1)..(33)..(34): Xaa is C or S
XRDVVMGEYQKYIIQQKDNIYLMSIPSMKTPTXXPGAS

SEQ ID NO: 22627 - protein, 41 aa, Artificial Sequence
  Non-cyclic GFR-binding peptide
  MOD_RES (2)..(4)..(37)..(38): Xaa is C or S
  MOD_RES (15)..(16)..(17)..(18)..(19): Xaa is A or G
  MOD_RES (20)..(21)..(22)..(23): Xaa is A or G or absent
LXGXEEVIMEYQKYXXXXXXXXXIYLMSIPSTKVPAXXTSP

SEQ ID NO: 22628 - protein, 38 aa, Artificial Sequence
  Non-cyclic GFR-binding peptide
  MOD_RES (2)..(34)..(35): Xaa is C or S
GXRDVVMGEYQKYIIQQKDNIYLMSIPSMKTPTXXPGA

SEQ ID NO: 22629 - protein, 37 aa, Artificial Sequence
  Non-cyclic GFR-binding peptide
  MOD_RES (2)..(4)..(36)..(37): Xaa is C or S
SXGXRDVVMGEYQKYIIQQKDNIYLMSIPSMKTPTXX

SEQ ID NO: 22630 - protein, 35 aa, Artificial Sequence
  Non-cyclic GFR-binding peptide
  MOD_RES (1)..(35): Xaa is C or S
  MOD_RES (13)..(14)..(15)..(16)..(17): Xaa is A or G
  MOD_RES (18)..(19)..(20)..(21): Xaa is A or G or absent
XRDVVMGEYQKYXXXXXXXXXIYLMSIPSMKTPTX

SEQ ID NO: 22631 - protein, 39 aa, Artificial Sequence
  Non-cyclic GFR-binding peptide
  MOD_RES (1)..(34)..(35): Xaa is C or S
  MOD_RES (12)..(13)..(14)..(15)..(16): Xaa is A or G
  MOD_RES (17)..(18)..(19)..(20): Xaa is A or G or absent
XEEVIMEYQKYXXXXXXXXXIYLMSIPSTKVPAXXTSPV

SEQ ID NO: 22632 - protein, 37 aa, Artificial Sequence
  Non-cyclic GFR-binding peptide
  MOD_RES (31)..(32): Xaa is C or S
RVVMNEYQKYIVNSSDDIYLVSIPSLKTPAXXPKPVH

SEQ ID NO: 22633 - protein, 40 aa, Artificial Sequence
  Non-cyclic GFR-binding peptide
  MOD_RES (2)..(4)..(37)..(38): Xaa is C or S
  MOD_RES (15)..(16)..(17)..(18)..(19): Xaa is A or G
  MOD_RES (20)..(21)..(22)..(23): Xaa is A or G or absent
LXGXEEVIMEYQKYXXXXXXXXXIYLMSIPSTKVPAXXTS

SEQ ID NO: 22634 - protein, 35 aa, Artificial Sequence
  Non-cyclic GFR-binding peptide
  MOD_RES (33)..(34): Xaa is C or S
  MOD_RES (11)..(12)..(13)..(14)..(15): Xaa is A or G
  MOD_RES (16)..(17)..(18)..(19): Xaa is A or G or absent
EEVIMEYQKYXXXXXXXXXIYLMSIPSTKVPAXXT

SEQ ID NO: 22635 - protein, 40 aa, Artificial Sequence
  Non-cyclic GFR-binding peptide
  MOD_RES (34)..(35): Xaa is C or S
  MOD_RES (12)..(13)..(14)..(15)..(16): Xaa is A or G
  MOD_RES (17)..(18)..(19)..(20): Xaa is A or G or absent
SRVVMNEYQKYXXXXXXXXXIYLVSIPSLKTPAXXPKPVH

SEQ ID NO: 22636 - protein, 41 aa, Artificial Sequence
  Non-cyclic GFR-binding peptide
  MOD_RES (2)..(36)..(37): Xaa is C or S
  MOD_RES (14)..(15)..(16)..(17)..(18): Xaa is A or G
  MOD_RES (19)..(20)..(21)..(22): Xaa is A or G or absent
GXRDVVMGEYQKYXXXXXXXXXIYLMSIPSMKTPTXXPGAS

SEQ ID NO: 22637 - protein, 39 aa, Artificial Sequence
  Non-cyclic GFR-binding peptide
  MOD_RES (1)..(33)..(34): Xaa is C or S
XRDVVMGEYQKYIIQQKDNIYLMSIPSMKTPTXXPGASG

SEQ ID NO: 22638 - protein, 40 aa, Artificial Sequence
  Non-cyclic GFR-binding peptide
  MOD_RES (34)..(35): Xaa is C or S
  MOD_RES (12)..(13)..(14)..(15)..(16): Xaa is A or G
  MOD_RES (17)..(18)..(19)..(20): Xaa is A or G or absent
RDVVMGEYQKYXXXXXXXXXIYLMSIPSMKTPTXXPGASG

SEQ ID NO: 22639 - protein, 32 aa, Artificial Sequence
  Non-cyclic GFR-binding peptide
  MOD_RES (32)..(32): Xaa is C or S
RDVVMGEYQKYIIQQKDNIYLMSIPSMKTPTX

SEQ ID NO: 22640 - protein, 43 aa, Artificial Sequence
  Non-cyclic GFR-binding peptide
  MOD_RES (1)..(3)..(37)..(38): Xaa is C or S
  MOD_RES (15)..(16)..(17)..(18)..(19): Xaa is A or G
  MOD_RES (20)..(21)..(22)..(23): Xaa is A or G or absent
XGXSRVVMNEYQKYXXXXXXXXXIYLVSIPSLKTPAXXPKPVH

SEQ ID NO: 22641 - protein, 38 aa, Artificial Sequence
  Non-cyclic GFR-binding peptide
  MOD_RES (2)..(36)..(37): Xaa is C or S
  MOD_RES (14)..(15)..(16)..(17)..(18): Xaa is A or G
  MOD_RES (19)..(20)..(21)..(22): Xaa is A or G or absent
GXRDVVMGEYQKYXXXXXXXXXIYLMSIPSMKTPTXXP

SEQ ID NO: 22642 - protein, 33 aa, Artificial Sequence
  Non-cyclic GFR-binding peptide
  MOD_RES (2)..(33): Xaa is C or S
GXEEVIMEYQKYLLVRGNDIYLMSIPSTKVPAX

SEQ ID NO: 22643 - protein, 34 aa, Artificial Sequence
  Non-cyclic GFR-binding peptide
  MOD_RES (1)..(1): Xaa is C or S
  MOD_RES (13)..(14)..(15)..(16)..(17): Xaa is A or G
  MOD_RES (18)..(19)..(20)..(21): Xaa is A or G or absent
XRDVVMGEYQKYXXXXXXXXXIYLMSIPSMKTPT

SEQ ID NO: 22644 - protein, 38 aa, Artificial Sequence
  Non-cyclic GFR-binding peptide
  MOD_RES (1)..(3)..(37)..(38): Xaa is C or S
  MOD_RES (15)..(16)..(17)..(18)..(19): Xaa is A or G
  MOD_RES (20)..(21)..(22)..(23): Xaa is A or G or absent
XGXRDVVMGEYQKYXXXXXXXXXIYLMSIPSMKTPTXX

SEQ ID NO: 22645 - protein, 38 aa, Artificial Sequence
  Non-cyclic GFR-binding peptide
  MOD_RES (32)..(33): Xaa is C or S
RDVVMGEYQKYIIQQKDNIYLMSIPSMKTPTXXPGASG

SEQ ID NO: 22646 - protein, 35 aa, Artificial Sequence
  Non-cyclic GFR-binding peptide
  MOD_RES (2)..(2): Xaa is C or S
  MOD_RES (14)..(15)..(16)..(17)..(18): Xaa is A or G
  MOD_RES (19)..(20)..(21)..(22): Xaa is A or G or absent
GXRDVVMGEYQKYXXXXXXXXXIYLMSIPSMKTPT

SEQ ID NO: 22647 - protein, 43 aa, Artificial Sequence
  Non-cyclic GFR-binding peptide
  MOD_RES (2)..(4)..(38)..(39): Xaa is C or S
  MOD_RES (16)..(17)..(18)..(19)..(20): Xaa is A or G
  MOD_RES (21)..(22)..(23)..(24): Xaa is A or G or absent
SXGXRDVVMGEYQKYXXXXXXXXXIYLMSIPSMKTPTXXPGAS

SEQ ID NO: 22648 - protein, 35 aa, Artificial Sequence
  Non-cyclic GFR-binding peptide
  MOD_RES (32)..(33): Xaa is C or S
RDVVMGEYQKYIIQQKDNIYLMSIPSMKTPTXXPG

SEQ ID NO: 22649 - protein, 38 aa, Artificial Sequence
  Non-cyclic GFR-binding peptide
  MOD_RES (2)..(4)..(36)..(37): Xaa is C or S
SXGXRDVVMGEYQKYIIQQKDNIYLMSIPSMKTPTXXP

SEQ ID NO: 22650 - protein, 35 aa, Artificial Sequence
  Non-cyclic GFR-binding peptide
  MOD_RES (34)..(35): Xaa is C or S
  MOD_RES (12)..(13)..(14)..(15)..(16): Xaa is A or G
  MOD_RES (17)..(18)..(19)..(20): Xaa is A or G or absent
RDVVMGEYQKYXXXXXXXXXIYLMSIPSMKTPTXX

SEQ ID NO: 22651 - protein, 34 aa, Artificial Sequence
  Non-cyclic GFR-binding peptide
  MOD_RES (2)..(33)..(34): Xaa is C or S
GXEEVIMEYQKYLLVRGNDIYLMSIPSTKVPAXX

SEQ ID NO: 22652 - protein, 39 aa, Artificial Sequence
  Non-cyclic GFR-binding peptide
  MOD_RES (2)..(36)..(37): Xaa is C or S
  MOD_RES (14)..(15)..(16)..(17)..(18): Xaa is A or G
  MOD_RES (19)..(20)..(21)..(22): Xaa is A or G or absent
GXRDVVMGEYQKYXXXXXXXXXIYLMSIPSMKTPTXXPG

SEQ ID NO: 22653 - protein, 38 aa, Artificial Sequence
  Non-cyclic GFR-binding peptide
  MOD_RES (2)..(35)..(36): Xaa is C or S
  MOD_RES (13)..(14)..(15)..(16)..(17): Xaa is A or G
  MOD_RES (18)..(19)..(20)..(21): Xaa is A or G or absent
GXEEVIMEYQKYXXXXXXXXXIYLMSIPSTKVPAXXTS

SEQ ID NO: 22654 - protein, 38 aa, Artificial Sequence
  Non-cyclic GFR-binding peptide
  MOD_RES (1)..(32)..(33): Xaa is C or S
XEEVIMEYQKYLLVRGNDIYLMSIPSTKVPAXXTSPVR

SEQ ID NO: 22655 - protein, 36 aa, Artificial Sequence
  Non-cyclic GFR-binding peptide
  MOD_RES (1)..(3): Xaa is C or S
  MOD_RES (15)..(16)..(17)..(18)..(19): Xaa is A or G
  MOD_RES (20)..(21)..(22)..(23): Xaa is A or G or absent
XGXRDVVMGEYQKYXXXXXXXXXIYLMSIPSMKTPT

SEQ ID NO: 22656 - protein, 36 aa, Artificial Sequence
  Non-cyclic GFR-binding peptide
  MOD_RES (33)..(34): Xaa is C or S
  MOD_RES (11)..(12)..(13)..(14)..(15): Xaa is A or G
  MOD_RES (16)..(17)..(18)..(19): Xaa is A or G or absent
DVVMGEYQKYXXXXXXXXXIYLMSIPSMKTPTXXPG

SEQ ID NO: 22657 - protein, 42 aa, Artificial Sequence
  Non-cyclic GFR-binding peptide
  MOD_RES (2)..(4)..(36)..(37): Xaa is C or S
HXGXSRVVMNEYQKYIVNSSDDIYLVSIPSLKTPAXXPKPVH

SEQ ID NO: 22658 - protein, 39 aa, Artificial Sequence
  Non-cyclic GFR-binding peptide
  MOD_RES (1)..(3)..(37)..(38): Xaa is C or S
  MOD_RES (15)..(16)..(17)..(18)..(19): Xaa is A or G
  MOD_RES (20)..(21)..(22)..(23): Xaa is A or G or absent
XGXRDVVMGEYQKYXXXXXXXXXIYLMSIPSMKTPTXXP

SEQ ID NO: 22659 - protein, 34 aa, Artificial Sequence
  Non-cyclic GFR-binding peptide
  MOD_RES (1)..(33)..(34): Xaa is C or S
XRDVVMGEYQKYIIQQKDNIYLMSIPSMKTPTXX

SEQ ID NO: 22660 - protein, 42 aa, Artificial Sequence
  Non-cyclic GFR-binding peptide
  MOD_RES (1)..(3)..(36)..(37): Xaa is C or S
  MOD_RES (14)..(15)..(16)..(17)..(18): Xaa is A or G
  MOD_RES (19)..(20)..(21)..(22): Xaa is A or G or absent
XGXEEVIMEYQKYXXXXXXXXXIYLMSIPSTKVPAXXTSPVR

SEQ ID NO: 22661 - protein, 36 aa, Artificial Sequence
  Non-cyclic GFR-binding peptide
  MOD_RES (2)..(33)..(34): Xaa is C or S
GXEEVIMEYQKYLLVRGNDIYLMSIPSTKVPAXXTS

SEQ ID NO: 22662 - protein, 38 aa, Artificial Sequence
  Non-cyclic GFR-binding peptide
  MOD_RES (1)..(35)..(36): Xaa is C or S
  MOD_RES (13)..(14)..(15)..(16)..(17): Xaa is A or G
  MOD_RES (18)..(19)..(20)..(21): Xaa is A or G or absent
XRDVVMGEYQKYXXXXXXXXXIYLMSIPSMKTPTXXPG

SEQ ID NO: 22663 - protein, 38 aa, Artificial Sequence
  Non-cyclic GFR-binding peptide
  MOD_RES (33)..(34): Xaa is C or S
  MOD_RES (11)..(12)..(13)..(14)..(15): Xaa is A or G
  MOD_RES (16)..(17)..(18)..(19): Xaa is A or G or absent
DVVMGEYQKYXXXXXXXXXIYLMSIPSMKTPTXXPGAS

SEQ ID NO: 22664 - protein, 34 aa, Artificial Sequence
  Non-cyclic GFR-binding peptide
  MOD_RES (33)..(34): Xaa is C or S
  MOD_RES (11)..(12)..(13)..(14)..(15): Xaa is A or G
  MOD_RES (16)..(17)..(18)..(19): Xaa is A or G or absent
EEVIMEYQKYXXXXXXXXXIYLMSIPSTKVPAXX

SEQ ID NO: 22665 - protein, 37 aa, Artificial Sequence
  Non-cyclic GFR-binding peptide
  MOD_RES (32)..(33): Xaa is C or S
RDVVMGEYQKYIIQQKDNIYLMSIPSMKTPTXXPGAS

SEQ ID NO: 22666 - protein, 34 aa, Artificial Sequence
  Non-cyclic GFR-binding peptide
  MOD_RES (33)..(33): Xaa is C or S
  MOD_RES (14)..(15)..(16)..(17)..(18): Xaa is A or G
  MOD_RES (19)..(20)..(21)..(22): Xaa is A or G or absent
APVKTSPISMLYIXXXXXXXXXYKQYEMIVEEXG

SEQ ID NO: 22667 - protein, 38 aa, Artificial Sequence
  Non-cyclic GFR-binding peptide
  MOD_RES (5)..(6)..(37): Xaa is C or S
VPSTXXAPVKTSPISMLYIDNGRVLLYKQYEMIVEEXG

SEQ ID NO: 22668 - protein, 35 aa, Artificial Sequence
  Non-cyclic GFR-binding peptide
  MOD_RES (4)..(5): Xaa is C or S
PSTXXAPVKTSPISMLYIDNGRVLLYKQYEMIVEE

SEQ ID NO: 22669 - protein, 32 aa, Artificial Sequence
  Non-cyclic GFR-binding peptide
  MOD_RES (31)..(31): Xaa is C or S
APVKTSPISMLYIDNGRVLLYKQYEMIVEEXG

SEQ ID NO: 22670 - protein, 40 aa, Artificial Sequence
  Non-cyclic GFR-binding peptide
  MOD_RES (4)..(5)..(38)..(40): Xaa is C or S
  MOD_RES (19)..(20)..(21)..(22)..(23): Xaa is A or G
  MOD_RES (24)..(25)..(26)..(27): Xaa is A or G or absent
PSTXXAPVKTSPISMLYIXXXXXXXXXYKQYEMIVEEXGX

SEQ ID NO: 22671 - protein, 39 aa, Artificial Sequence
  Non-cyclic GFR-binding peptide
  MOD_RES (5)..(6): Xaa is C or S
  MOD_RES (20)..(21)..(22)..(23)..(24): Xaa is A or G
  MOD_RES (25)..(26)..(27)..(28): Xaa is A or G or absent
SAGPXXTPTKMSPISMLYIXXXXXXXXXYKQYEGMVVDR

SEQ ID NO: 22672 - protein, 32 aa, Artificial Sequence
  Non-cyclic GFR-binding peptide
  MOD_RES (1)..(32): Xaa is C or S
XAPVKTSPISMLYIDNGRVLLYKQYEMIVEEX

SEQ ID NO: 22673 - protein, 33 aa, Artificial Sequence
  Non-cyclic GFR-binding peptide
  MOD_RES (1)..(33): Xaa is C or S
XTPTKMSPISMLYINDKQQIIYKQYEGMVVDRX

SEQ ID NO: 22674 - protein, 35 aa, Artificial Sequence
  Non-cyclic GFR-binding peptide
  MOD_RES (2)..(3)..(34): Xaa is C or S
TXXAPVKTSPISMLYIDNGRVLLYKQYEMIVEEXG

SEQ ID NO: 22675 - protein, 37 aa, Artificial Sequence
  Non-cyclic GFR-binding peptide
  MOD_RES (3)..(4)..(35)..(37): Xaa is C or S
STXXAPVKTSPISMLYIDNGRVLLYKQYEMIVEEXGX

SEQ ID NO: 22676 - protein, 33 aa, Artificial Sequence
  Non-cyclic GFR-binding peptide
  MOD_RES (1)..(1): Xaa is C or S
  MOD_RES (15)..(16)..(17)..(18)..(19): Xaa is A or G
  MOD_RES (20)..(21)..(22)..(23): Xaa is A or G or absent
XTPTKMSPISMLYIXXXXXXXXXYKQYEGMVVD

SEQ ID NO: 22677 - protein, 37 aa, Artificial Sequence
  Non-cyclic GFR-binding peptide
  MOD_RES (1)..(2)..(36): Xaa is C or S
  MOD_RES (16)..(17)..(18)..(19)..(20): Xaa is A or G
  MOD_RES (21)..(22)..(23)..(24): Xaa is A or G or absent
XXTPTKMSPISMLYIXXXXXXXXXYKQYEGMVVDRXG

SEQ ID NO: 22678 - protein, 36 aa, Artificial Sequence
  Non-cyclic GFR-binding peptide
  MOD_RES (3)..(4)..(36): Xaa is C or S
GPXXTPTKMSPISMLYINDKQQIIYKQYEGMVVDRX

SEQ ID NO: 22679 - protein, 33 aa, Artificial Sequence
  Non-cyclic GFR-binding peptide
  MOD_RES (1)..(2): Xaa is C or S
XXTPTKMSPISMLYINDKQQIIYKQYEGMVVDR

SEQ ID NO: 22680 - protein, 34 aa, Artificial Sequence
  Non-cyclic GFR-binding peptide
  MOD_RES (1)..(2): Xaa is C or S
  MOD_RES (16)..(17)..(18)..(19)..(20): Xaa is A or G
  MOD_RES (21)..(22)..(23)..(24): Xaa is A or G or absent
XXTPTKMSPISMLYIXXXXXXXXXYKQYEGMVVD

SEQ ID NO: 22681 - protein, 36 aa, Artificial Sequence
  Non-cyclic GFR-binding peptide
  MOD_RES (1)..(34)..(36): Xaa is C or S
  MOD_RES (15)..(16)..(17)..(18)..(19): Xaa is A or G
  MOD_RES (20)..(21)..(22)..(23): Xaa is A or G or absent
XAPVKTSPISMLYIXXXXXXXXXYKQYEMIVEEXGX

SEQ ID NO: 22682 - protein, 36 aa, Artificial Sequence
  Non-cyclic GFR-binding peptide
  MOD_RES (3)..(4): Xaa is C or S
  MOD_RES (18)..(19)..(20)..(21)..(22): Xaa is A or G
  MOD_RES (23)..(24)..(25)..(26): Xaa is A or G or absent
STXXAPVKTSPISMLYIXXXXXXXXXYKQYEMIVEE

SEQ ID NO: 22683 - protein, 39 aa, Artificial Sequence
  Non-cyclic GFR-binding peptide
  MOD_RES (5)..(6)..(38): Xaa is C or S
SAGPXXTPTKMSPISMLYINDKQQIIYKQYEGMVVDRXG

SEQ ID NO: 22684 - protein, 35 aa, Artificial Sequence
  Non-cyclic GFR-binding peptide
  MOD_RES (33)..(35): Xaa is C or S
  MOD_RES (14)..(15)..(16)..(17)..(18): Xaa is A or G
  MOD_RES (19)..(20)..(21)..(22): Xaa is A or G or absent
APVKTSPISMLYIXXXXXXXXXYKQYEMIVEEXGX

SEQ ID NO: 22685 - protein, 36 aa, Artificial Sequence
  Non-cyclic GFR-binding peptide
  MOD_RES (4)..(5)..(36): Xaa is C or S
PSTXXAPVKTSPISMLYIDNGRVLLYKQYEMIVEEX

SEQ ID NO: 22686 - protein, 41 aa, Artificial Sequence
  Non-cyclic GFR-binding peptide
  MOD_RES (5)..(6)..(38)..(40): Xaa is C or S
SAGPXXTPTKMSPISMLYINDKQQIIYKQYEGMVVDRXGXS

SEQ ID NO: 22687 - protein, 38 aa, Artificial Sequence
  Non-cyclic GFR-binding peptide
  MOD_RES (2)..(3)..(36)..(38): Xaa is C or S
  MOD_RES (17)..(18)..(19)..(20)..(21): Xaa is A or G
  MOD_RES (22)..(23)..(24)..(25): Xaa is A or G or absent
TXXAPVKTSPISMLYIXXXXXXXXXYKQYEMIVEEXGX

SEQ ID NO: 22688 - protein, 42 aa, Artificial Sequence
  Non-cyclic GFR-binding peptide
  MOD_RES (4)..(5)..(39)..(41): Xaa is C or S
  MOD_RES (19)..(20)..(21)..(22)..(23): Xaa is A or G
  MOD_RES (24)..(25)..(26)..(27): Xaa is A or G or absent
AGPXXTPTKMSPISMLYIXXXXXXXXXYKQYEGMVVDRXGXS

SEQ ID NO: 22689 - protein, 37 aa, Artificial Sequence
  Non-cyclic GFR-binding peptide
  MOD_RES (1)..(34)..(36): Xaa is C or S
  MOD_RES (15)..(16)..(17)..(18)..(19): Xaa is A or G
  MOD_RES (20)..(21)..(22)..(23): Xaa is A or G or absent
XAPVKTSPISMLYIXXXXXXXXXYKQYEMIVEEXGXL

SEQ ID NO: 22690 - protein, 40 aa, Artificial Sequence
  Non-cyclic GFR-binding peptide
  MOD_RES (6)..(7)..(40): Xaa is C or S
  MOD_RES (21)..(22)..(23)..(24)..(25): Xaa is A or G
  MOD_RES (26)..(27)..(28)..(29): Xaa is A or G or absent
RVPSTXXAPVKTSPISMLYIXXXXXXXXXYKQYEMIVEEX

SEQ ID NO: 22691 - protein, 35 aa, Artificial Sequence
  Non-cyclic GFR-binding peptide
  MOD_RES (1)..(33)..(35): Xaa is C or S
XTPTKMSPISMLYINDKQQIIYKQYEGMVVDRXGX

SEQ ID NO: 22692 - protein, 38 aa, Artificial Sequence
  Non-cyclic GFR-binding peptide
  MOD_RES (1)..(2)..(35)..(37): Xaa is C or S
  MOD_RES (16)..(17)..(18)..(19)..(20): Xaa is A or G
  MOD_RES (21)..(22)..(23)..(24): Xaa is A or G or absent
XXAPVKTSPISMLYIXXXXXXXXXYKQYEMIVEEXGXL

SEQ ID NO: 22693 - protein, 43 aa, Artificial Sequence
  Non-cyclic GFR-binding peptide
  MOD_RES (6)..(7)..(40)..(42): Xaa is C or S
  MOD_RES (21)..(22)..(23)..(24)..(25): Xaa is A or G
  MOD_RES (26)..(27)..(28)..(29): Xaa is A or G or absent
RVPSTXXAPVKTSPISMLYIXXXXXXXXXYKQYEMIVEEXGXL

SEQ ID NO: 22694 - protein, 37 aa, Artificial Sequence
  Non-cyclic GFR-binding peptide
  MOD_RES (1)..(2)..(35)..(37): Xaa is C or S
  MOD_RES (16)..(17)..(18)..(19)..(20): Xaa is A or G
  MOD_RES (21)..(22)..(23)..(24): Xaa is A or G or absent
XXAPVKTSPISMLYIXXXXXXXXXYKQYEMIVEEXGX

SEQ ID NO: 22695 - protein, 32 aa, Artificial Sequence
  Non-cyclic GFR-binding peptide
  MOD_RES (32)..(32): Xaa is C or S
TPTKMSPISMLYINDKQQIIYKQYEGMVVDRX

SEQ ID NO: 22696 - protein, 37 aa, Artificial Sequence
  Non-cyclic GFR-binding peptide
  MOD_RES (5)..(6)..(37): Xaa is C or S
VPSTXXAPVKTSPISMLYIDNGRVLLYKQYEMIVEEX

SEQ ID NO: 22697 - protein, 30 aa, Artificial Sequence
  Non-cyclic GFR-binding peptide
TPTKMSPISMLYINDKQQIIYKQYEGMVVD

SEQ ID NO: 22698 - protein, 39 aa, Artificial Sequence
  Non-cyclic GFR-binding peptide
  MOD_RES (1)..(2)..(36)..(38): Xaa is C or S
  MOD_RES (16)..(17)..(18)..(19)..(20): Xaa is A or G
  MOD_RES (21)..(22)..(23)..(24): Xaa is A or G or absent
XXTPTKMSPISMLYIXXXXXXXXXYKQYEGMVVDRXGXS

SEQ ID NO: 22699 - protein, 40 aa, Artificial Sequence
  Non-cyclic GFR-binding peptide
  MOD_RES (5)..(6)..(40): Xaa is C or S
  MOD_RES (20)..(21)..(22)..(23)..(24): Xaa is A or G
  MOD_RES (25)..(26)..(27)..(28): Xaa is A or G or absent
SAGPXXTPTKMSPISMLYIXXXXXXXXXYKQYEGMVVDRX

SEQ ID NO: 22700 - protein, 32 aa, Artificial Sequence
  Non-cyclic GFR-binding peptide
  MOD_RES (1)..(2): Xaa is C or S
XXAPVKTSPISMLYIDNGRVLLYKQYEMIVEE

SEQ ID NO: 22701 - protein, 37 aa, Artificial Sequence
  Non-cyclic GFR-binding peptide
  MOD_RES (2)..(3)..(36): Xaa is C or S
  MOD_RES (17)..(18)..(19)..(20)..(21): Xaa is A or G
  MOD_RES (22)..(23)..(24)..(25): Xaa is A or G or absent
TXXAPVKTSPISMLYIXXXXXXXXXYKQYEMIVEEXG

SEQ ID NO: 22702 - protein, 40 aa, Artificial Sequence
  Non-cyclic GFR-binding peptide
  MOD_RES (6)..(7)..(39): Xaa is C or S
HVPKPXXAPTKLSPISVLYIDDSSNVIYKQYENMVVRSXG

SEQ ID NO: 22703 - protein, 35 aa, Artificial Sequence
  Non-cyclic GFR-binding peptide
  MOD_RES (1)..(2)..(34): Xaa is C or S
XXTPTKMSPISMLYINDKQQIIYKQYEGMVVDRXG

SEQ ID NO: 22704 - protein, 35 aa, Artificial Sequence
  Non-cyclic GFR-binding peptide
  MOD_RES (4)..(5): Xaa is C or S
AGPXXTPTKMSPISMLYINDKQQIIYKQYEGMVVD

SEQ ID NO: 22705 - protein, 41 aa, Artificial Sequence
  Non-cyclic GFR-binding peptide
  MOD_RES (6)..(7)..(41): Xaa is C or S
  MOD_RES (21)..(22)..(23)..(24)..(25): Xaa is A or G
  MOD_RES (26)..(27)..(28)..(29): Xaa is A or G or absent
HVPKPXXAPTKLSPISVLYIXXXXXXXXXYKQYENMVVRSX

SEQ ID NO: 22706 - protein, 33 aa, Artificial Sequence
  Non-cyclic GFR-binding peptide
  MOD_RES (31)..(33): Xaa is C or S
APVKTSPISMLYIDNGRVLLYKQYEMIVEEXGX

SEQ ID NO: 22707 - protein, 37 aa, Artificial Sequence
  Non-cyclic GFR-binding peptide
  MOD_RES (3)..(4)..(36): Xaa is C or S
GPXXTPTKMSPISMLYINDKQQIIYKQYEGMVVDRXG

SEQ ID NO: 22708 - protein, 37 aa, Artificial Sequence
  Non-cyclic GFR-binding peptide
  MOD_RES (2)..(3)..(37): Xaa is C or S
  MOD_RES (17)..(18)..(19)..(20)..(21): Xaa is A or G
  MOD_RES (22)..(23)..(24)..(25): Xaa is A or G or absent
PXXTPTKMSPISMLYIXXXXXXXXXYKQYEGMVVDRX

SEQ ID NO: 22709 - protein, 41 aa, Artificial Sequence
  Non-cyclic GFR-binding peptide
  MOD_RES (6)..(7)..(39)..(41): Xaa is C or S
GSAGPXXTPTKMSPISMLYINDKQQIIYKQYEGMVVDRXGX

SEQ ID NO: 22710 - protein, 33 aa, Artificial Sequence
  Non-cyclic GFR-binding peptide
  MOD_RES (2)..(3): Xaa is C or S
TXXAPVKTSPISMLYIDNGRVLLYKQYEMIVEE

SEQ ID NO: 22711 - protein, 34 aa, Artificial Sequence
  Non-cyclic GFR-binding peptide
  MOD_RES (32)..(34): Xaa is C or S
TPTKMSPISMLYINDKQQIIYKQYEGMVVDRXGX

SEQ ID NO: 22712 - protein, 38 aa, Artificial Sequence
  Non-cyclic GFR-binding peptide
  MOD_RES (4)..(5)..(36)..(38): Xaa is C or S
PSTXXAPVKTSPISMLYIDNGRVLLYKQYEMIVEEXGX

SEQ ID NO: 22713 - protein, 37 aa, Artificial Sequence
  Non-cyclic GFR-binding peptide
  MOD_RES (1)..(35)..(37): Xaa is C or S
  MOD_RES (15)..(16)..(17)..(18)..(19): Xaa is A or G
  MOD_RES (20)..(21)..(22)..(23): Xaa is A or G or absent
XTPTKMSPISMLYIXXXXXXXXXYKQYEGMVVDRXGX

SEQ ID NO: 22714 - protein, 39 aa, Artificial Sequence
  Non-cyclic GFR-binding peptide
  MOD_RES (6)..(7): Xaa is C or S
  MOD_RES (21)..(22)..(23)..(24)..(25): Xaa is A or G
  MOD_RES (26)..(27)..(28)..(29): Xaa is A or G or absent
GSAGPXXTPTKMSPISMLYIXXXXXXXXXYKQYEGMVVD

SEQ ID NO: 22715 - protein, 37 aa, Artificial Sequence
  Non-cyclic GFR-binding peptide
  MOD_RES (4)..(5)..(37): Xaa is C or S
AGPXXTPTKMSPISMLYINDKQQIIYKQYEGMVVDRX

SEQ ID NO: 22716 - protein, 34 aa, Artificial Sequence
  Non-cyclic GFR-binding peptide
  MOD_RES (31)..(33): Xaa is C or S
APVKTSPISMLYIDNGRVLLYKQYEMIVEEXGXL

SEQ ID NO: 22717 - protein, 36 aa, Artificial Sequence
  Non-cyclic GFR-binding peptide
  MOD_RES (4)..(5): Xaa is C or S
AGPXXTPTKMSPISMLYINDKQQIIYKQYEGMVVDR

SEQ ID NO: 22718 - protein, 38 aa, Artificial Sequence
  Non-cyclic GFR-binding peptide
  MOD_RES (4)..(5)..(38): Xaa is C or S
  MOD_RES (19)..(20)..(21)..(22)..(23): Xaa is A or G
  MOD_RES (24)..(25)..(26)..(27): Xaa is A or G or absent
PSTXXAPVKTSPISMLYIXXXXXXXXXYKQYEMIVEEX

SEQ ID NO: 22719 - protein, 34 aa, Artificial Sequence
  Non-cyclic GFR-binding peptide
  MOD_RES (1)..(34): Xaa is C or S
  MOD_RES (15)..(16)..(17)..(18)..(19): Xaa is A or G
  MOD_RES (20)..(21)..(22)..(23): Xaa is A or G or absent
XAPVKTSPISMLYIXXXXXXXXXYKQYEMIVEEX

SEQ ID NO: 22720 - protein, 36 aa, Artificial Sequence
  Non-cyclic GFR-binding peptide
  MOD_RES (2)..(3)..(34)..(36): Xaa is C or S
TXXAPVKTSPISMLYIDNGRVLLYKQYEMIVEEXGX

SEQ ID NO: 22721 - protein, 38 aa, Artificial Sequence
  Non-cyclic GFR-binding peptide
  MOD_RES (4)..(5): Xaa is C or S
  MOD_RES (19)..(20)..(21)..(22)..(23): Xaa is A or G
  MOD_RES (24)..(25)..(26)..(27): Xaa is A or G or absent
AGPXXTPTKMSPISMLYIXXXXXXXXXYKQYEGMVVDR

SEQ ID NO: 22722 - protein, 40 aa, Artificial Sequence
  Non-cyclic GFR-binding peptide
  MOD_RES (5)..(6)..(37)..(39): Xaa is C or S
VPSTXXAPVKTSPISMLYIDNGRVLLYKQYEMIVEEXGXL

SEQ ID NO: 22723 - protein, 36 aa, Artificial Sequence
  Non-cyclic GFR-binding peptide
  MOD_RES (5)..(6): Xaa is C or S
SAGPXXTPTKMSPISMLYINDKQQIIYKQYEGMVVD

SEQ ID NO: 22724 - protein, 44 aa, Artificial Sequence
  Non-cyclic GFR-binding peptide
  MOD_RES (6)..(7)..(41)..(43): Xaa is C or S
  MOD_RES (21)..(22)..(23)..(24)..(25): Xaa is A or G
  MOD_RES (26)..(27)..(28)..(29): Xaa is A or G or absent
GSAGPXXTPTKMSPISMLYIXXXXXXXXXYKQYEGMVVDRXGXS

SEQ ID NO: 22725 - protein, 38 aa, Artificial Sequence
  Non-cyclic GFR-binding peptide
  MOD_RES (3)..(4)..(36)..(38): Xaa is C or S
GPXXTPTKMSPISMLYINDKQQIIYKQYEGMVVDRXGX

SEQ ID NO: 22726 - protein, 36 aa, Artificial Sequence
  Non-cyclic GFR-binding peptide
  MOD_RES (1)..(2)..(36): Xaa is C or S
  MOD_RES (16)..(17)..(18)..(19)..(20): Xaa is A or G
  MOD_RES (21)..(22)..(23)..(24): Xaa is A or G or absent
XXTPTKMSPISMLYIXXXXXXXXXYKQYEGMVVDRX

SEQ ID NO: 22727 - protein, 31 aa, Artificial Sequence
  Non-cyclic GFR-binding peptide
TPTKMSPISMLYINDKQQIIYKQYEGMVVDR

SEQ ID NO: 22728 - protein, 44 aa, Artificial Sequence
  Non-cyclic GFR-binding peptide
  MOD_RES (6)..(7)..(41)..(43): Xaa is C or S
  MOD_RES (21)..(22)..(23)..(24)..(25): Xaa is A or G
  MOD_RES (26)..(27)..(28)..(29): Xaa is A or G or absent
STPPTXXVPTRLSPISILYIXXXXXXXXXYKQYEDMVVESXGXR

SEQ ID NO: 22729 - protein, 42 aa, Artificial Sequence
  Non-cyclic GFR-binding peptide
  MOD_RES (6)..(7)..(41): Xaa is C or S
  MOD_RES (21)..(22)..(23)..(24)..(25): Xaa is A or G
  MOD_RES (26)..(27)..(28)..(29): Xaa is A or G or absent
HVPKPXXAPTKLSPISVLYIXXXXXXXXXYKQYENMVVRSXG

SEQ ID NO: 22730 - protein, 36 aa, Artificial Sequence
  Non-cyclic GFR-binding peptide
  MOD_RES (1)..(2)..(33)..(35): Xaa is C or S
XXAPVKTSPISMLYIDNGRVLLYKQYEMIVEEXGXL

SEQ ID NO: 22731 - protein, 40 aa, Artificial Sequence
  Non-cyclic GFR-binding peptide
  MOD_RES (4)..(5)..(37)..(39): Xaa is C or S
AGPXXTPTKMSPISMLYINDKQQIIYKQYEGMVVDRXGXS

SEQ ID NO: 22732 - protein, 36 aa, Artificial Sequence
  Non-cyclic GFR-binding peptide
  MOD_RES (2)..(3)..(35): Xaa is C or S
PXXTPTKMSPISMLYINDKQQIIYKQYEGMVVDRXG

SEQ ID NO: 22733 - protein, 39 aa, Artificial Sequence
  Non-cyclic GFR-binding peptide
  MOD_RES (2)..(3)..(36)..(38): Xaa is C or S
  MOD_RES (17)..(18)..(19)..(20)..(21): Xaa is A or G
  MOD_RES (22)..(23)..(24)..(25): Xaa is A or G or absent
TXXAPVKTSPISMLYIXXXXXXXXXYKQYEMIVEEXGXL

SEQ ID NO: 22734 - protein, 36 aa, Artificial Sequence
  Non-cyclic GFR-binding peptide
  MOD_RES (2)..(3)..(36): Xaa is C or S
  MOD_RES (17)..(18)..(19)..(20)..(21): Xaa is A or G
  MOD_RES (22)..(23)..(24)..(25): Xaa is A or G or absent
TXXAPVKTSPISMLYIXXXXXXXXXYKQYEMIVEEX

SEQ ID NO: 22735 - protein, 34 aa, Artificial Sequence
  Non-cyclic GFR-binding peptide
  MOD_RES (2)..(3)..(34): Xaa is C or S
TXXAPVKTSPISMLYIDNGRVLLYKQYEMIVEEX

SEQ ID NO: 22736 - protein, 42 aa, Artificial Sequence
  Non-cyclic GFR-binding peptide
  MOD_RES (5)..(6)..(39)..(41): Xaa is C or S
  MOD_RES (20)..(21)..(22)..(23)..(24): Xaa is A or G
  MOD_RES (25)..(26)..(27)..(28): Xaa is A or G or absent
VPSTXXAPVKTSPISMLYIXXXXXXXXXYKQYEMIVEEXGXL

SEQ ID NO: 22737 - protein, 35 aa, Artificial Sequence
  Non-cyclic GFR-binding peptide
  MOD_RES (1)..(2)..(33)..(35): Xaa is C or S
XXAPVKTSPISMLYIDNGRVLLYKQYEMIVEEXGX

SEQ ID NO: 22738 - protein, 37 aa, Artificial Sequence
  Non-cyclic GFR-binding peptide
  MOD_RES (2)..(3)..(34)..(36): Xaa is C or S
TXXAPVKTSPISMLYIDNGRVLLYKQYEMIVEEXGXL

SEQ ID NO: 22739 - protein, 38 aa, Artificial Sequence
  Non-cyclic GFR-binding peptide
  MOD_RES (1)..(35)..(37): Xaa is C or S
  MOD_RES (15)..(16)..(17)..(18)..(19): Xaa is A or G
  MOD_RES (20)..(21)..(22)..(23): Xaa is A or G or absent
XTPTKMSPISMLYIXXXXXXXXXYKQYEGMVVDRXGXS

SEQ ID NO: 22740 - protein, 41 aa, Artificial Sequence
  Non-cyclic GFR-binding peptide
  MOD_RES (6)..(7)..(41): Xaa is C or S
  MOD_RES (21)..(22)..(23)..(24)..(25): Xaa is A or G
  MOD_RES (26)..(27)..(28)..(29): Xaa is A or G or absent
GSAGPXXTPTKMSPISMLYIXXXXXXXXXYKQYEGMVVDRX

SEQ ID NO: 22741 - protein, 33 aa, Artificial Sequence
  Non-cyclic GFR-binding peptide
  MOD_RES (2)..(3): Xaa is C or S
PXXTPTKMSPISMLYINDKQQIIYKQYEGMVVD

SEQ ID NO: 22742 - protein, 32 aa, Artificial Sequence
  Non-cyclic GFR-binding peptide
  MOD_RES (14)..(15)..(16)..(17)..(18): Xaa is A or G
  MOD_RES (19)..(20)..(21)..(22): Xaa is A or G or absent
TPTKMSPISMLYIXXXXXXXXXYKQYEGMVVD

SEQ ID NO: 22743 - protein, 31 aa, Artificial Sequence
  Non-cyclic GFR-binding peptide
  MOD_RES (1)..(1): Xaa is C or S
XTPTKMSPISMLYINDKQQIIYKQYEGMVVD

SEQ ID NO: 22744 - protein, 40 aa, Artificial Sequence
  Non-cyclic GFR-binding peptide
  MOD_RES (4)..(5)..(39): Xaa is C or S
  MOD_RES (19)..(20)..(21)..(22)..(23): Xaa is A or G
  MOD_RES (24)..(25)..(26)..(27): Xaa is A or G or absent
AGPXXTPTKMSPISMLYIXXXXXXXXXYKQYEGMVVDRXG

SEQ ID NO: 22745 - protein, 34 aa, Artificial Sequence
  Non-cyclic GFR-binding peptide
  MOD_RES (1)..(33): Xaa is C or S
XTPTKMSPISMLYINDKQQIIYKQYEGMVVDRXG

SEQ ID NO: 22746 - protein, 33 aa, Artificial Sequence
  Non-cyclic GFR-binding peptide
  MOD_RES (1)..(2)..(33): Xaa is C or S
XXAPVKTSPISMLYIDNGRVLLYKQYEMIVEEX

SEQ ID NO: 22747 - protein, 34 aa, Artificial Sequence
  Non-cyclic GFR-binding peptide
  MOD_RES (3)..(4): Xaa is C or S
GPXXTPTKMSPISMLYINDKQQIIYKQYEGMVVD

SEQ ID NO: 22748 - protein, 42 aa, Artificial Sequence
  Non-cyclic GFR-binding peptide
  MOD_RES (6)..(7)..(39)..(41): Xaa is C or S
GSAGPXXTPTKMSPISMLYINDKQQIIYKQYEGMVVDRXGXS

SEQ ID NO: 22749 - protein, 44 aa, Artificial Sequence
  Non-cyclic GFR-binding peptide
  MOD_RES (6)..(7)..(41)..(43): Xaa is C or S
  MOD_RES (21)..(22)..(23)..(24)..(25): Xaa is A or G
  MOD_RES (26)..(27)..(28)..(29): Xaa is A or G or absent
HVPKPXXAPTKLSPISVLYIXXXXXXXXXYKQYENMVVRSXGXH

SEQ ID NO: 22750 - protein, 37 aa, Artificial Sequence
  Non-cyclic GFR-binding peptide
  MOD_RES (2)..(3)..(35)..(37): Xaa is C or S
PXXTPTKMSPISMLYINDKQQIIYKQYEGMVVDRXGX

SEQ ID NO: 22751 - protein, 36 aa, Artificial Sequence
  Non-cyclic GFR-binding peptide
  MOD_RES (2)..(3): Xaa is C or S
  MOD_RES (17)..(18)..(19)..(20)..(21): Xaa is A or G
  MOD_RES (22)..(23)..(24)..(25): Xaa is A or G or absent
PXXTPTKMSPISMLYIXXXXXXXXXYKQYEGMVVDR

SEQ ID NO: 22752 - protein, 39 aa, Artificial Sequence
  Non-cyclic GFR-binding peptide
  MOD_RES (3)..(4)..(36)..(38): Xaa is C or S
GPXXTPTKMSPISMLYINDKQQIIYKQYEGMVVDRXGXS

SEQ ID NO: 22753 - protein, 39 aa, Artificial Sequence
  Non-cyclic GFR-binding peptide
  MOD_RES (6)..(7): Xaa is C or S
  MOD_RES (21)..(22)..(23)..(24)..(25): Xaa is A or G
  MOD_RES (26)..(27)..(28)..(29): Xaa is A or G or absent
RVPSTXXAPVKTSPISMLYIXXXXXXXXXYKQYEMIVEE

SEQ ID NO: 22754 - protein, 39 aa, Artificial Sequence
  Non-cyclic GFR-binding peptide
  MOD_RES (6)..(7)..(39): Xaa is C or S
HVPKPXXAPTKLSPISVLYIDDSSNVIYKQYENMVVRSX

SEQ ID NO: 22755 - protein, 40 aa, Artificial Sequence
  Non-cyclic GFR-binding peptide
  MOD_RES (5)..(6)..(39): Xaa is C or S
  MOD_RES (20)..(21)..(22)..(23)..(24): Xaa is A or G
  MOD_RES (25)..(26)..(27)..(28): Xaa is A or G or absent
VPSTXXAPVKTSPISMLYIXXXXXXXXXYKQYEMIVEEXG

SEQ ID NO: 22756 - protein, 34 aa, Artificial Sequence
  Non-cyclic GFR-binding peptide
  MOD_RES (1)..(1): Xaa is C or S
  MOD_RES (15)..(16)..(17)..(18)..(19): Xaa is A or G
  MOD_RES (20)..(21)..(22)..(23): Xaa is A or G or absent
XTPTKMSPISMLYIXXXXXXXXXYKQYEGMVVDR

SEQ ID NO: 22757 - protein, 33 aa, Artificial Sequence
  Non-cyclic GFR-binding peptide
  MOD_RES (32)..(32): Xaa is C or S
TPTKMSPISMLYINDKQQIIYKQYEGMVVDRXG

SEQ ID NO: 22758 - protein, 36 aa, Artificial Sequence
  Non-cyclic GFR-binding peptide
  MOD_RES (1)..(33)..(35): Xaa is C or S
XTPTKMSPISMLYINDKQQIIYKQYEGMVVDRXGXS

SEQ ID NO: 22759 - protein, 39 aa, Artificial Sequence
  Non-cyclic GFR-binding peptide
  MOD_RES (4)..(5)..(36)..(38): Xaa is C or S
PSTXXAPVKTSPISMLYIDNGRVLLYKQYEMIVEEXGXL

SEQ ID NO: 22760 - protein, 41 aa, Artificial Sequence
  Non-cyclic GFR-binding peptide
  MOD_RES (4)..(5)..(39)..(41): Xaa is C or S
  MOD_RES (19)..(20)..(21)..(22)..(23): Xaa is A or G
  MOD_RES (24)..(25)..(26)..(27): Xaa is A or G or absent
AGPXXTPTKMSPISMLYIXXXXXXXXXYKQYEGMVVDRXGX

SEQ ID NO: 22761 - protein, 40 aa, Artificial Sequence
  Non-cyclic GFR-binding peptide
  MOD_RES (3)..(4)..(38)..(40): Xaa is C or S
  MOD_RES (18)..(19)..(20)..(21)..(22): Xaa is A or G
  MOD_RES (23)..(24)..(25)..(26): Xaa is A or G or absent
GPXXTPTKMSPISMLYIXXXXXXXXXYKQYEGMVVDRXGX

SEQ ID NO: 22762 - protein, 39 aa, Artificial Sequence
  Non-cyclic GFR-binding peptide
  MOD_RES (3)..(4)..(37)..(39): Xaa is C or S
  MOD_RES (18)..(19)..(20)..(21)..(22): Xaa is A or G
  MOD_RES (23)..(24)..(25)..(26): Xaa is A or G or absent
STXXAPVKTSPISMLYIXXXXXXXXXYKQYEMIVEEXGX

SEQ ID NO: 22763 - protein, 31 aa, Artificial Sequence
  Non-cyclic GFR-binding peptide
  MOD_RES (1)..(1): Xaa is C or S
XAPVKTSPISMLYIDNGRVLLYKQYEMIVEE

SEQ ID NO: 22764 - protein, 37 aa, Artificial Sequence
  Non-cyclic GFR-binding peptide
  MOD_RES (34)..(36): Xaa is C or S
  MOD_RES (14)..(15)..(16)..(17)..(18): Xaa is A or G
  MOD_RES (19)..(20)..(21)..(22): Xaa is A or G or absent
TPTKMSPISMLYIXXXXXXXXXYKQYEGMVVDRXGXS

SEQ ID NO: 22765 - protein, 38 aa, Artificial Sequence
  Non-cyclic GFR-binding peptide
  MOD_RES (3)..(4)..(35)..(37): Xaa is C or S
STXXAPVKTSPISMLYIDNGRVLLYKQYEMIVEEXGXL

SEQ ID NO: 22766 - protein, 39 aa, Artificial Sequence
  Non-cyclic GFR-binding peptide
  MOD_RES (4)..(5)..(37)..(39): Xaa is C or S
AGPXXTPTKMSPISMLYINDKQQIIYKQYEGMVVDRXGX

SEQ ID NO: 22767 - protein, 36 aa, Artificial Sequence
  Non-cyclic GFR-binding peptide
  MOD_RES (33)..(35): Xaa is C or S
  MOD_RES (14)..(15)..(16)..(17)..(18): Xaa is A or G
  MOD_RES (19)..(20)..(21)..(22): Xaa is A or G or absent
APVKTSPISMLYIXXXXXXXXXYKQYEMIVEEXGXL

SEQ ID NO: 22768 - protein, 37 aa, Artificial Sequence
  Non-cyclic GFR-binding peptide
  MOD_RES (6)..(7): Xaa is C or S
RVPSTXXAPVKTSPISMLYIDNGRVLLYKQYEMIVEE

SEQ ID NO: 22769 - protein, 41 aa, Artificial Sequence
  Non-cyclic GFR-binding peptide
  MOD_RES (6)..(7)..(38)..(40): Xaa is C or S
RVPSTXXAPVKTSPISMLYIDNGRVLLYKQYEMIVEEXGXL

SEQ ID NO: 22770 - protein, 32 aa, Artificial Sequence
  Non-cyclic GFR-binding peptide
  MOD_RES (1)..(2): Xaa is C or S
XXTPTKMSPISMLYINDKQQIIYKQYEGMVVD

SEQ ID NO: 22771 - protein, 34 aa, Artificial Sequence
  Non-cyclic GFR-binding peptide
  MOD_RES (3)..(4): Xaa is C or S
STXXAPVKTSPISMLYIDNGRVLLYKQYEMIVEE

SEQ ID NO: 22772 - protein, 39 aa, Artificial Sequence
  Non-cyclic GFR-binding peptide
  MOD_RES (6)..(7): Xaa is C or S
  MOD_RES (21)..(22)..(23)..(24)..(25): Xaa is A or G
  MOD_RES (26)..(27)..(28)..(29): Xaa is A or G or absent
HVPKPXXAPTKLSPISVLYIXXXXXXXXXYKQYENMVVR

SEQ ID NO: 22773 - protein, 36 aa, Artificial Sequence
  Non-cyclic GFR-binding peptide
  MOD_RES (5)..(6): Xaa is C or S
VPSTXXAPVKTSPISMLYIDNGRVLLYKQYEMIVEE

SEQ ID NO: 22774 - protein, 30 aa, Artificial Sequence
  Non-cyclic GFR-binding peptide
APVKTSPISMLYIDNGRVLLYKQYEMIVEE

SEQ ID NO: 22775 - protein, 43 aa, Artificial Sequence
  Non-cyclic GFR-binding peptide
  MOD_RES (6)..(7)..(41)..(43): Xaa is C or S
  MOD_RES (21)..(22)..(23)..(24)..(25): Xaa is A or G
  MOD_RES (26)..(27)..(28)..(29): Xaa is A or G or absent
GSAGPXXTPTKMSPISMLYIXXXXXXXXXYKQYEGMVVDRXGX

SEQ ID NO: 22776 - protein, 37 aa, Artificial Sequence
  Non-cyclic GFR-binding peptide
  MOD_RES (4)..(5): Xaa is C or S
  MOD_RES (19)..(20)..(21)..(22)..(23): Xaa is A or G
  MOD_RES (24)..(25)..(26)..(27): Xaa is A or G or absent
PSTXXAPVKTSPISMLYIXXXXXXXXXYKQYEMIVEE

SEQ ID NO: 22777 - protein, 35 aa, Artificial Sequence
  Non-cyclic GFR-binding peptide
  MOD_RES (2)..(3)..(35): Xaa is C or S
PXXTPTKMSPISMLYINDKQQIIYKQYEGMVVDRX

SEQ ID NO: 22778 - protein, 37 aa, Artificial Sequence
  Non-cyclic GFR-binding peptide
  MOD_RES (4)..(5)..(36): Xaa is C or S
PSTXXAPVKTSPISMLYIDNGRVLLYKQYEMIVEEXG

SEQ ID NO: 22779 - protein, 36 aa, Artificial Sequence
  Non-cyclic GFR-binding peptide
  MOD_RES (1)..(2)..(35): Xaa is C or S
  MOD_RES (16)..(17)..(18)..(19)..(20): Xaa is A or G
  MOD_RES (21)..(22)..(23)..(24): Xaa is A or G or absent
XXAPVKTSPISMLYIXXXXXXXXXYKQYEMIVEEXG

SEQ ID NO: 22780 - protein, 35 aa, Artificial Sequence
  Non-cyclic GFR-binding peptide
  MOD_RES (1)..(32)..(34): Xaa is C or S
XAPVKTSPISMLYIDNGRVLLYKQYEMIVEEXGXL

SEQ ID NO: 22781 - protein, 35 aa, Artificial Sequence
  Non-cyclic GFR-binding peptide
  MOD_RES (32)..(34): Xaa is C or S
TPTKMSPISMLYINDKQQIIYKQYEGMVVDRXGXS

SEQ ID NO: 22782 - protein, 40 aa, Artificial Sequence
  Non-cyclic GFR-binding peptide
  MOD_RES (6)..(7)..(38)..(40): Xaa is C or S
RVPSTXXAPVKTSPISMLYIDNGRVLLYKQYEMIVEEXGX

SEQ ID NO: 22783 - protein, 36 aa, Artificial Sequence
  Non-cyclic GFR-binding peptide
  MOD_RES (1)..(35): Xaa is C or S
  MOD_RES (15)..(16)..(17)..(18)..(19): Xaa is A or G
  MOD_RES (20)..(21)..(22)..(23): Xaa is A or G or absent
XTPTKMSPISMLYIXXXXXXXXXYKQYEGMVVDRXG

SEQ ID NO: 22784 - protein, 39 aa, Artificial Sequence
  Non-cyclic GFR-binding peptide
  MOD_RES (4)..(5)..(38): Xaa is C or S
  MOD_RES (19)..(20)..(21)..(22)..(23): Xaa is A or G
  MOD_RES (24)..(25)..(26)..(27): Xaa is A or G or absent
PSTXXAPVKTSPISMLYIXXXXXXXXXYKQYEMIVEEXG

SEQ ID NO: 22785 - protein, 42 aa, Artificial Sequence
  Non-cyclic GFR-binding peptide
  MOD_RES (6)..(7)..(41): Xaa is C or S
  MOD_RES (21)..(22)..(23)..(24)..(25): Xaa is A or G
  MOD_RES (26)..(27)..(28)..(29): Xaa is A or G or absent
GSAGPXXTPTKMSPISMLYIXXXXXXXXXYKQYEGMVVDRXG

SEQ ID NO: 22786 - protein, 37 aa, Artificial Sequence
  Non-cyclic GFR-binding peptide
  MOD_RES (4)..(5): Xaa is C or S
  MOD_RES (19)..(20)..(21)..(22)..(23): Xaa is A or G
  MOD_RES (24)..(25)..(26)..(27): Xaa is A or G or absent
AGPXXTPTKMSPISMLYIXXXXXXXXXYKQYEGMVVD

SEQ ID NO: 22787 - protein, 39 aa, Artificial Sequence
  Non-cyclic GFR-binding peptide
  MOD_RES (4)..(5)..(39): Xaa is C or S
  MOD_RES (19)..(20)..(21)..(22)..(23): Xaa is A or G
  MOD_RES (24)..(25)..(26)..(27): Xaa is A or G or absent
AGPXXTPTKMSPISMLYIXXXXXXXXXYKQYEGMVVDRX

SEQ ID NO: 22788 - protein, 42 aa, Artificial Sequence
  Non-cyclic GFR-binding peptide
  MOD_RES (5)..(6)..(40)..(42): Xaa is C or S
  MOD_RES (20)..(21)..(22)..(23)..(24): Xaa is A or G
  MOD_RES (25)..(26)..(27)..(28): Xaa is A or G or absent
SAGPXXTPTKMSPISMLYIXXXXXXXXXYKQYEGMVVDRXGX

SEQ ID NO: 22789 - protein, 40 aa, Artificial Sequence
  Non-cyclic GFR-binding peptide
  MOD_RES (5)..(6)..(38)..(40): Xaa is C or S
SAGPXXTPTKMSPISMLYINDKQQIIYKQYEGMVVDRXGX

SEQ ID NO: 22790 - protein, 33 aa, Artificial Sequence
  Non-cyclic GFR-binding peptide
  MOD_RES (1)..(1): Xaa is C or S
  MOD_RES (15)..(16)..(17)..(18)..(19): Xaa is A or G
  MOD_RES (20)..(21)..(22)..(23): Xaa is A or G or absent
XAPVKTSPISMLYIXXXXXXXXXYKQYEMIVEE

SEQ ID NO: 22791 - protein, 41 aa, Artificial Sequence
  Non-cyclic GFR-binding peptide
  MOD_RES (5)..(6)..(39)..(41): Xaa is C or S
  MOD_RES (20)..(21)..(22)..(23)..(24): Xaa is A or G
  MOD_RES (25)..(26)..(27)..(28): Xaa is A or G or absent
VPSTXXAPVKTSPISMLYIXXXXXXXXXYKQYEMIVEEXGX

SEQ ID NO: 22792 - protein, 37 aa, Artificial Sequence
  Non-cyclic GFR-binding peptide
  MOD_RES (6)..(7): Xaa is C or S
GSAGPXXTPTKMSPISMLYINDKQQIIYKQYEGMVVD

SEQ ID NO: 22793 - protein, 39 aa, Artificial Sequence
  Non-cyclic GFR-binding peptide
  MOD_RES (5)..(6)..(37)..(39): Xaa is C or S
VPSTXXAPVKTSPISMLYIDNGRVLLYKQYEMIVEEXGX

SEQ ID NO: 22794 - protein, 35 aa, Artificial Sequence
  Non-cyclic GFR-binding peptide
  MOD_RES (1)..(2)..(35): Xaa is C or S
  MOD_RES (16)..(17)..(18)..(19)..(20): Xaa is A or G
  MOD_RES (21)..(22)..(23)..(24): Xaa is A or G or absent
XXAPVKTSPISMLYIXXXXXXXXXYKQYEMIVEEX

SEQ ID NO: 22795 - protein, 35 aa, Artificial Sequence
  Non-cyclic GFR-binding peptide
  MOD_RES (1)..(34): Xaa is C or S
  MOD_RES (15)..(16)..(17)..(18)..(19): Xaa is A or G
  MOD_RES (20)..(21)..(22)..(23): Xaa is A or G or absent
XAPVKTSPISMLYIXXXXXXXXXYKQYEMIVEEXG

SEQ ID NO: 22796 - protein, 38 aa, Artificial Sequence
  Non-cyclic GFR-binding peptide
  MOD_RES (6)..(7): Xaa is C or S
HVPKPXXAPTKLSPISVLYIDDSSNVIYKQYENMVVRS

SEQ ID NO: 22797 - protein, 40 aa, Artificial Sequence
  Non-cyclic GFR-binding peptide
  MOD_RES (6)..(7)..(39): Xaa is C or S
GSAGPXXTPTKMSPISMLYINDKQQIIYKQYEGMVVDRXG

SEQ ID NO: 22798 - protein, 34 aa, Artificial Sequence
  Non-cyclic GFR-binding peptide
  MOD_RES (1)..(32)..(34): Xaa is C or S
XAPVKTSPISMLYIDNGRVLLYKQYEMIVEEXGX

SEQ ID NO: 22799 - protein, 39 aa, Artificial Sequence
  Non-cyclic GFR-binding peptide
  MOD_RES (6)..(7)..(38): Xaa is C or S
RVPSTXXAPVKTSPISMLYIDNGRVLLYKQYEMIVEEXG

SEQ ID NO: 22800 - protein, 36 aa, Artificial Sequence
  Non-cyclic GFR-binding peptide
  MOD_RES (1)..(2)..(34)..(36): Xaa is C or S
XXTPTKMSPISMLYINDKQQIIYKQYEGMVVDRXGX

SEQ ID NO: 22801 - protein, 41 aa, Artificial Sequence
  Non-cyclic GFR-binding peptide
  MOD_RES (6)..(7)..(39)..(41): Xaa is C or S
HVPKPXXAPTKLSPISVLYIDDSSNVIYKQYENMVVRSXGX

SEQ ID NO: 22802 - protein, 42 aa, Artificial Sequence
  Non-cyclic GFR-binding peptide
  MOD_RES (6)..(7)..(39)..(41): Xaa is C or S
STPPTXXVPTRLSPISILYIDSANNVVYKQYEDMVVESXGXR

SEQ ID NO: 22803 - protein, 32 aa, Artificial Sequence
  Non-cyclic GFR-binding peptide
  MOD_RES (14)..(15)..(16)..(17)..(18): Xaa is A or G
  MOD_RES (19)..(20)..(21)..(22): Xaa is A or G or absent
APVKTSPISMLYIXXXXXXXXXYKQYEMIVEE

SEQ ID NO: 22804 - protein, 33 aa, Artificial Sequence
  Non-cyclic GFR-binding peptide
  MOD_RES (14)..(15)..(16)..(17)..(18): Xaa is A or G
  MOD_RES (19)..(20)..(21)..(22): Xaa is A or G or absent
TPTKMSPISMLYIXXXXXXXXXYKQYEGMVVDR

SEQ ID NO: 22805 - protein, 35 aa, Artificial Sequence
  Non-cyclic GFR-binding peptide
  MOD_RES (3)..(4)..(35): Xaa is C or S
STXXAPVKTSPISMLYIDNGRVLLYKQYEMIVEEX

SEQ ID NO: 22806 - protein, 38 aa, Artificial Sequence
  Non-cyclic GFR-binding peptide
  MOD_RES (5)..(6): Xaa is C or S
  MOD_RES (20)..(21)..(22)..(23)..(24): Xaa is A or G
  MOD_RES (25)..(26)..(27)..(28): Xaa is A or G or absent
VPSTXXAPVKTSPISMLYIXXXXXXXXXYKQYEMIVEE

SEQ ID NO: 22807 - protein, 41 aa, Artificial Sequence
  Non-cyclic GFR-binding peptide
  MOD_RES (3)..(4)..(38)..(40): Xaa is C or S
  MOD_RES (18)..(19)..(20)..(21)..(22): Xaa is A or G
  MOD_RES (23)..(24)..(25)..(26): Xaa is A or G or absent
GPXXTPTKMSPISMLYIXXXXXXXXXYKQYEGMVVDRXGXS

SEQ ID NO: 22808 - protein, 35 aa, Artificial Sequence
  Non-cyclic GFR-binding peptide
  MOD_RES (2)..(3): Xaa is C or S
  MOD_RES (17)..(18)..(19)..(20)..(21): Xaa is A or G
  MOD_RES (22)..(23)..(24)..(25): Xaa is A or G or absent
PXXTPTKMSPISMLYIXXXXXXXXXYKQYEGMVVD

SEQ ID NO: 22809 - protein, 31 aa, Artificial Sequence
  Non-cyclic GFR-binding peptide
  MOD_RES (31)..(31): Xaa is C or S
APVKTSPISMLYIDNGRVLLYKQYEMIVEEX

SEQ ID NO: 22810 - protein, 33 aa, Artificial Sequence
  Non-cyclic GFR-binding peptide
  MOD_RES (33)..(33): Xaa is C or S
  MOD_RES (14)..(15)..(16)..(17)..(18): Xaa is A or G
  MOD_RES (19)..(20)..(21)..(22): Xaa is A or G or absent
APVKTSPISMLYIXXXXXXXXXYKQYEMIVEEX

SEQ ID NO: 22811 - protein, 37 aa, Artificial Sequence
  Non-cyclic GFR-binding peptide
  MOD_RES (3)..(4): Xaa is C or S
  MOD_RES (18)..(19)..(20)..(21)..(22): Xaa is A or G
  MOD_RES (23)..(24)..(25)..(26): Xaa is A or G or absent
GPXXTPTKMSPISMLYIXXXXXXXXXYKQYEGMVVDR

SEQ ID NO: 22812 - protein, 40 aa, Artificial Sequence
  Non-cyclic GFR-binding peptide
  MOD_RES (2)..(3)..(37)..(39): Xaa is C or S
  MOD_RES (17)..(18)..(19)..(20)..(21): Xaa is A or G
  MOD_RES (22)..(23)..(24)..(25): Xaa is A or G or absent
PXXTPTKMSPISMLYIXXXXXXXXXYKQYEGMVVDRXGXS

SEQ ID NO: 22813 - protein, 41 aa, Artificial Sequence
  Non-cyclic GFR-binding peptide
  MOD_RES (6)..(7)..(40): Xaa is C or S
  MOD_RES (21)..(22)..(23)..(24)..(25): Xaa is A or G
  MOD_RES (26)..(27)..(28)..(29): Xaa is A or G or absent
RVPSTXXAPVKTSPISMLYIXXXXXXXXXYKQYEMIVEEXG

SEQ ID NO: 22814 - protein, 37 aa, Artificial Sequence
  Non-cyclic GFR-binding peptide
  MOD_RES (3)..(4)..(37): Xaa is C or S
  MOD_RES (18)..(19)..(20)..(21)..(22): Xaa is A or G
  MOD_RES (23)..(24)..(25)..(26): Xaa is A or G or absent
STXXAPVKTSPISMLYIXXXXXXXXXYKQYEMIVEEX

SEQ ID NO: 22815 - protein, 38 aa, Artificial Sequence
  Non-cyclic GFR-binding peptide
  MOD_RES (5)..(6)..(38): Xaa is C or S
SAGPXXTPTKMSPISMLYINDKQQIIYKQYEGMVVDRX

SEQ ID NO: 22816 - protein, 41 aa, Artificial Sequence
  Non-cyclic GFR-binding peptide
  MOD_RES (4)..(5)..(38)..(40): Xaa is C or S
  MOD_RES (19)..(20)..(21)..(22)..(23): Xaa is A or G
  MOD_RES (24)..(25)..(26)..(27): Xaa is A or G or absent
PSTXXAPVKTSPISMLYIXXXXXXXXXYKQYEMIVEEXGXL

SEQ ID NO: 22817 - protein, 38 aa, Artificial Sequence
  Non-cyclic GFR-binding peptide
  MOD_RES (4)..(5)..(37): Xaa is C or S
AGPXXTPTKMSPISMLYINDKQQIIYKQYEGMVVDRXG

SEQ ID NO: 22818 - protein, 37 aa, Artificial Sequence
  Non-cyclic GFR-binding peptide
  MOD_RES (1)..(2)..(34)..(36): Xaa is C or S
XXTPTKMSPISMLYINDKQQIIYKQYEGMVVDRXGXS

SEQ ID NO: 22819 - protein, 35 aa, Artificial Sequence
  Non-cyclic GFR-binding peptide
  MOD_RES (1)..(35): Xaa is C or S
  MOD_RES (15)..(16)..(17)..(18)..(19): Xaa is A or G
  MOD_RES (20)..(21)..(22)..(23): Xaa is A or G or absent
XTPTKMSPISMLYIXXXXXXXXXYKQYEGMVVDRX

SEQ ID NO: 22820 - protein, 39 aa, Artificial Sequence
  Non-cyclic GFR-binding peptide
  MOD_RES (5)..(6)..(39): Xaa is C or S
  MOD_RES (20)..(21)..(22)..(23)..(24): Xaa is A or G
  MOD_RES (25)..(26)..(27)..(28): Xaa is A or G or absent
VPSTXXAPVKTSPISMLYIXXXXXXXXXYKQYEMIVEEX

SEQ ID NO: 22821 - protein, 37 aa, Artificial Sequence
  Non-cyclic GFR-binding peptide
  MOD_RES (6)..(7): Xaa is C or S
HVPKPXXAPTKLSPISVLYIDDSSNVIYKQYENMVVR

SEQ ID NO: 22822 - protein, 40 aa, Artificial Sequence
  Non-cyclic GFR-binding peptide
  MOD_RES (3)..(4)..(37)..(39): Xaa is C or S
  MOD_RES (18)..(19)..(20)..(21)..(22): Xaa is A or G
  MOD_RES (23)..(24)..(25)..(26): Xaa is A or G or absent
STXXAPVKTSPISMLYIXXXXXXXXXYKQYEMIVEEXGXL

SEQ ID NO: 22823 - protein, 35 aa, Artificial Sequence
  Non-cyclic GFR-binding peptide
  MOD_RES (2)..(3): Xaa is C or S
  MOD_RES (17)..(18)..(19)..(20)..(21): Xaa is A or G
  MOD_RES (22)..(23)..(24)..(25): Xaa is A or G or absent
TXXAPVKTSPISMLYIXXXXXXXXXYKQYEMIVEE

SEQ ID NO: 22824 - protein, 40 aa, Artificial Sequence
  Non-cyclic GFR-binding peptide
  MOD_RES (6)..(7): Xaa is C or S
  MOD_RES (21)..(22)..(23)..(24)..(25): Xaa is A or G
  MOD_RES (26)..(27)..(28)..(29): Xaa is A or G or absent
HVPKPXXAPTKLSPISVLYIXXXXXXXXXYKQYENMVVRS

SEQ ID NO: 22825 - protein, 41 aa, Artificial Sequence
  Non-cyclic GFR-binding peptide
  MOD_RES (5)..(6)..(40): Xaa is C or S
  MOD_RES (20)..(21)..(22)..(23)..(24): Xaa is A or G
  MOD_RES (25)..(26)..(27)..(28): Xaa is A or G or absent
SAGPXXTPTKMSPISMLYIXXXXXXXXXYKQYEGMVVDRXG

SEQ ID NO: 22826 - protein, 39 aa, Artificial Sequence
  Non-cyclic GFR-binding peptide
  MOD_RES (6)..(7)..(39): Xaa is C or S
GSAGPXXTPTKMSPISMLYINDKQQIIYKQYEGMVVDRX

SEQ ID NO: 22827 - protein, 40 aa, Artificial Sequence
  Non-cyclic GFR-binding peptide
  MOD_RES (6)..(7): Xaa is C or S
  MOD_RES (21)..(22)..(23)..(24)..(25): Xaa is A or G
  MOD_RES (26)..(27)..(28)..(29): Xaa is A or G or absent
GSAGPXXTPTKMSPISMLYIXXXXXXXXXYKQYEGMVVDR

SEQ ID NO: 22828 - protein, 32 aa, Artificial Sequence
  Non-cyclic GFR-binding peptide
  MOD_RES (1)..(1): Xaa is C or S
XTPTKMSPISMLYINDKQQIIYKQYEGMVVDR

SEQ ID NO: 22829 - protein, 43 aa, Artificial Sequence
  Non-cyclic GFR-binding peptide
  MOD_RES (6)..(7)..(41)..(43): Xaa is C or S
  MOD_RES (21)..(22)..(23)..(24)..(25): Xaa is A or G
  MOD_RES (26)..(27)..(28)..(29): Xaa is A or G or absent
HVPKPXXAPTKLSPISVLYIXXXXXXXXXYKQYENMVVRSXGX

SEQ ID NO: 22830 - protein, 38 aa, Artificial Sequence
  Non-cyclic GFR-binding peptide
  MOD_RES (2)..(3)..(37): Xaa is C or S
  MOD_RES (17)..(18)..(19)..(20)..(21): Xaa is A or G
  MOD_RES (22)..(23)..(24)..(25): Xaa is A or G or absent
PXXTPTKMSPISMLYIXXXXXXXXXYKQYEGMVVDRXG

SEQ ID NO: 22831 - protein, 33 aa, Artificial Sequence
  Non-cyclic GFR-binding peptide
  MOD_RES (1)..(32): Xaa is C or S
XAPVKTSPISMLYIDNGRVLLYKQYEMIVEEXG

SEQ ID NO: 22832 - protein, 34 aa, Artificial Sequence
  Non-cyclic GFR-binding peptide
  MOD_RES (34)..(34): Xaa is C or S
  MOD_RES (14)..(15)..(16)..(17)..(18): Xaa is A or G
  MOD_RES (19)..(20)..(21)..(22): Xaa is A or G or absent
TPTKMSPISMLYIXXXXXXXXXYKQYEGMVVDRX

SEQ ID NO: 22833 - protein, 38 aa, Artificial Sequence
  Non-cyclic GFR-binding peptide
  MOD_RES (1)..(2)..(36)..(38): Xaa is C or S
  MOD_RES (16)..(17)..(18)..(19)..(20): Xaa is A or G
  MOD_RES (21)..(22)..(23)..(24): Xaa is A or G or absent
XXTPTKMSPISMLYIXXXXXXXXXYKQYEGMVVDRXGX

SEQ ID NO: 22834 - protein, 38 aa, Artificial Sequence
  Non-cyclic GFR-binding peptide
  MOD_RES (6)..(7): Xaa is C or S
GSAGPXXTPTKMSPISMLYINDKQQIIYKQYEGMVVDR

SEQ ID NO: 22835 - protein, 35 aa, Artificial Sequence
  Non-cyclic GFR-binding peptide
  MOD_RES (34)..(34): Xaa is C or S
  MOD_RES (14)..(15)..(16)..(17)..(18): Xaa is A or G
  MOD_RES (19)..(20)..(21)..(22): Xaa is A or G or absent
TPTKMSPISMLYIXXXXXXXXXYKQYEGMVVDRXG

SEQ ID NO: 22836 - protein, 43 aa, Artificial Sequence
  Non-cyclic GFR-binding peptide
  MOD_RES (5)..(6)..(40)..(42): Xaa is C or S
  MOD_RES (20)..(21)..(22)..(23)..(24): Xaa is A or G
  MOD_RES (25)..(26)..(27)..(28): Xaa is A or G or absent
SAGPXXTPTKMSPISMLYIXXXXXXXXXYKQYEGMVVDRXGXS

SEQ ID NO: 22837 - protein, 35 aa, Artificial Sequence
  Non-cyclic GFR-binding peptide
  MOD_RES (3)..(4): Xaa is C or S
GPXXTPTKMSPISMLYINDKQQIIYKQYEGMVVDR

SEQ ID NO: 22838 - protein, 38 aa, Artificial Sequence
  Non-cyclic GFR-binding peptide
  MOD_RES (2)..(3)..(35)..(37): Xaa is C or S
PXXTPTKMSPISMLYINDKQQIIYKQYEGMVVDRXGXS

SEQ ID NO: 22839 - protein, 35 aa, Artificial Sequence
  Non-cyclic GFR-binding peptide
  MOD_RES (1)..(2): Xaa is C or S
  MOD_RES (16)..(17)..(18)..(19)..(20): Xaa is A or G
  MOD_RES (21)..(22)..(23)..(24): Xaa is A or G or absent
XXTPTKMSPISMLYIXXXXXXXXXYKQYEGMVVDR

SEQ ID NO: 22840 - protein, 34 aa, Artificial Sequence
  Non-cyclic GFR-binding peptide
  MOD_RES (1)..(2)..(33): Xaa is C or S
XXAPVKTSPISMLYIDNGRVLLYKQYEMIVEEXG

SEQ ID NO: 22841 - protein, 39 aa, Artificial Sequence
  Non-cyclic GFR-binding peptide
  MOD_RES (3)..(4)..(38): Xaa is C or S
  MOD_RES (18)..(19)..(20)..(21)..(22): Xaa is A or G
  MOD_RES (23)..(24)..(25)..(26): Xaa is A or G or absent
GPXXTPTKMSPISMLYIXXXXXXXXXYKQYEGMVVDRXG

SEQ ID NO: 22842 - protein, 38 aa, Artificial Sequence
  Non-cyclic GFR-binding peptide
  MOD_RES (3)..(4)..(37): Xaa is C or S
  MOD_RES (18)..(19)..(20)..(21)..(22): Xaa is A or G
  MOD_RES (23)..(24)..(25)..(26): Xaa is A or G or absent
STXXAPVKTSPISMLYIXXXXXXXXXYKQYEMIVEEXG

SEQ ID NO: 22843 - protein, 38 aa, Artificial Sequence
  Non-cyclic GFR-binding peptide
  MOD_RES (6)..(7)..(38): Xaa is C or S
RVPSTXXAPVKTSPISMLYIDNGRVLLYKQYEMIVEEX

SEQ ID NO: 22844 - protein, 36 aa, Artificial Sequence
  Non-cyclic GFR-binding peptide
  MOD_RES (34)..(36): Xaa is C or S
  MOD_RES (14)..(15)..(16)..(17)..(18): Xaa is A or G
  MOD_RES (19)..(20)..(21)..(22): Xaa is A or G or absent
TPTKMSPISMLYIXXXXXXXXXYKQYEGMVVDRXGX

SEQ ID NO: 22845 - protein, 36 aa, Artificial Sequence
  Non-cyclic GFR-binding peptide
  MOD_RES (3)..(4): Xaa is C or S
  MOD_RES (18)..(19)..(20)..(21)..(22): Xaa is A or G
  MOD_RES (23)..(24)..(25)..(26): Xaa is A or G or absent
GPXXTPTKMSPISMLYIXXXXXXXXXYKQYEGMVVD

SEQ ID NO: 22846 - protein, 42 aa, Artificial Sequence
  Non-cyclic GFR-binding peptide
  MOD_RES (6)..(7)..(39)..(41): Xaa is C or S
HVPKPXXAPTKLSPISVLYIDDSSNVIYKQYENMVVRSXGXH

SEQ ID NO: 22847 - protein, 39 aa, Artificial Sequence
  Non-cyclic GFR-binding peptide
  MOD_RES (2)..(3)..(37)..(39): Xaa is C or S
  MOD_RES (17)..(18)..(19)..(20)..(21): Xaa is A or G
  MOD_RES (22)..(23)..(24)..(25): Xaa is A or G or absent
PXXTPTKMSPISMLYIXXXXXXXXXYKQYEGMVVDRXGX

SEQ ID NO: 22848 - protein, 34 aa, Artificial Sequence
  Non-cyclic GFR-binding peptide
  MOD_RES (1)..(2)..(34): Xaa is C or S
XXTPTKMSPISMLYINDKQQIIYKQYEGMVVDRX

SEQ ID NO: 22849 - protein, 42 aa, Artificial Sequence
  Non-cyclic GFR-binding peptide
  MOD_RES (6)..(7)..(40)..(42): Xaa is C or S
  MOD_RES (21)..(22)..(23)..(24)..(25): Xaa is A or G
  MOD_RES (26)..(27)..(28)..(29): Xaa is A or G or absent
RVPSTXXAPVKTSPISMLYIXXXXXXXXXYKQYEMIVEEXGX

SEQ ID NO: 22850 - protein, 36 aa, Artificial Sequence
  Non-cyclic GFR-binding peptide
  MOD_RES (3)..(4)..(35): Xaa is C or S
STXXAPVKTSPISMLYIDNGRVLLYKQYEMIVEEXG

SEQ ID NO: 22851 - protein, 38 aa, Artificial Sequence
  Non-cyclic GFR-binding peptide
  MOD_RES (3)..(4)..(38): Xaa is C or S
  MOD_RES (18)..(19)..(20)..(21)..(22): Xaa is A or G
  MOD_RES (23)..(24)..(25)..(26): Xaa is A or G or absent
GPXXTPTKMSPISMLYIXXXXXXXXXYKQYEGMVVDRX

SEQ ID NO: 22852 - protein, 38 aa, Artificial Sequence
  Non-cyclic GFR-binding peptide
  MOD_RES (5)..(6): Xaa is C or S
  MOD_RES (20)..(21)..(22)..(23)..(24): Xaa is A or G
  MOD_RES (25)..(26)..(27)..(28): Xaa is A or G or absent
SAGPXXTPTKMSPISMLYIXXXXXXXXXYKQYEGMVVD

SEQ ID NO: 22853 - protein, 34 aa, Artificial Sequence
  Non-cyclic GFR-binding peptide
  MOD_RES (1)..(2): Xaa is C or S
  MOD_RES (16)..(17)..(18)..(19)..(20): Xaa is A or G
  MOD_RES (21)..(22)..(23)..(24): Xaa is A or G or absent
XXAPVKTSPISMLYIXXXXXXXXXYKQYEMIVEE

SEQ ID NO: 22854 - protein, 37 aa, Artificial Sequence
  Non-cyclic GFR-binding peptide
  MOD_RES (5)..(6): Xaa is C or S
SAGPXXTPTKMSPISMLYINDKQQIIYKQYEGMVVDR

SEQ ID NO: 22855 - protein, 40 aa, Artificial Sequence
  Non-cyclic GFR-binding peptide
  MOD_RES (1)..(3)..(36)..(37): Xaa is C or S
XGXEAVSMGEPYVKLTPVGMDDFFLVSLSSLKTPVXXAKG

SEQ ID NO: 22856 - protein, 33 aa, Artificial Sequence
  Non-cyclic GFR-binding peptide
  MOD_RES (12)..(13)..(14)..(15)..(16): Xaa is A or G
  MOD_RES (17)..(18)..(19)..(20): Xaa is A or G or absent
GEVVMEPYVKLXXXXXXXXXFFLMSLSSLETPV

SEQ ID NO: 22857 - protein, 38 aa, Artificial Sequence
  Non-cyclic GFR-binding peptide
  MOD_RES (2)..(4)..(35)..(36): Xaa is C or S
SXKXSKVVMPYVKLVKPTRGVFFLISLSSLDQPVXXPS

SEQ ID NO: 22858 - protein, 41 aa, Artificial Sequence
  Non-cyclic GFR-binding peptide
  MOD_RES (1)..(3)..(35)..(36): Xaa is C or S
XGXSRVVMNPYVKLIVNSSDDFFLVSLSSLKTPAXXPKPVY

SEQ ID NO: 22859 - protein, 43 aa, Artificial Sequence
  Non-cyclic GFR-binding peptide
  MOD_RES (2)..(4)..(38)..(39): Xaa is C or S
  MOD_RES (16)..(17)..(18)..(19)..(20): Xaa is A or G
  MOD_RES (21)..(22)..(23)..(24): Xaa is A or G or absent
RXGXAEVVMDPYVKLXXXXXXXXXFFLISLSSLRAPVXXSAPA

SEQ ID NO: 22860 - protein, 32 aa, Artificial Sequence
  Non-cyclic GFR-binding peptide
  MOD_RES (1)..(1): Xaa is C or S
XAKVVMNPYVKLIVNNSSDFFLVSLSSLKTPA

SEQ ID NO: 22861 - protein, 37 aa, Artificial Sequence
  Non-cyclic GFR-binding peptide
  MOD_RES (1)..(3)..(34)..(35): Xaa is C or S
XKXSKVVMPYVKLVKPTRGVFFLISLSSLDQPVXXPS

SEQ ID NO: 22862 - protein, 31 aa, Artificial Sequence
  Non-cyclic GFR-binding peptide
  MOD_RES (31)..(31): Xaa is C or S
KVVMNPYVKLIVNNSSDFFLVSLSSLKTPAX

SEQ ID NO: 22863 - protein, 35 aa, Artificial Sequence
  Non-cyclic GFR-binding peptide
  MOD_RES (2)..(2): Xaa is C or S
  MOD_RES (14)..(15)..(16)..(17)..(18): Xaa is A or G
  MOD_RES (19)..(20)..(21)..(22): Xaa is A or G or absent
GXRDVVMGPYVKLXXXXXXXXXFFLMSLSSMKTPT

SEQ ID NO: 22864 - protein, 40 aa, Artificial Sequence
  Non-cyclic GFR-binding peptide
  MOD_RES (1)..(35): Xaa is C or S
  MOD_RES (13)..(14)..(15)..(16)..(17): Xaa is A or G
  MOD_RES (18)..(19)..(20)..(21): Xaa is A or G or absent
XKNHQLFPYVKLXXXXXXXXXFFLMSLSSEETPVXELGED

SEQ ID NO: 22865 - protein, 34 aa, Artificial Sequence
  Non-cyclic GFR-binding peptide
  MOD_RES (33)..(34): Xaa is C or S
  MOD_RES (11)..(12)..(13)..(14)..(15): Xaa is A or G
  MOD_RES (16)..(17)..(18)..(19): Xaa is A or G or absent
SKVIMPYVKLXXXXXXXXXFFLISLSSLDQSVXX

SEQ ID NO: 22866 - protein, 32 aa, Artificial Sequence
  Non-cyclic GFR-binding peptide
  MOD_RES (1)..(1): Xaa is C or S
XGEVVMEPYVKLVVKDYEDFFLMSLSSLETPV

SEQ ID NO: 22867 - protein, 34 aa, Artificial Sequence
  Non-cyclic GFR-binding peptide
  MOD_RES (1)..(33)..(34): Xaa is C or S
XAEVVMDPYVKLVVNNAADFFLISLSSLRAPVXX

SEQ ID NO: 22868 - protein, 40 aa, Artificial Sequence
  Non-cyclic GFR-binding peptide
  MOD_RES (2)..(36): Xaa is C or S
  MOD_RES (14)..(15)..(16)..(17)..(18): Xaa is A or G
  MOD_RES (19)..(20)..(21)..(22): Xaa is A or G or absent
GXSRVVMNPYVKLXXXXXXXXXFFLVSLSSLKTPAXTPKT

SEQ ID NO: 22869 - protein, 33 aa, Artificial Sequence
  Non-cyclic GFR-binding peptide
  MOD_RES (2)..(33): Xaa is C or S
KXSKVIMPYVKLIKPTKGIFFLISLSSLDQSVX

SEQ ID NO: 22870 - protein, 34 aa, Artificial Sequence
  Non-cyclic GFR-binding peptide
  MOD_RES (1)..(1): Xaa is C or S
  MOD_RES (13)..(14)..(15)..(16)..(17): Xaa is A or G
  MOD_RES (18)..(19)..(20)..(21): Xaa is A or G or absent
XGEVVMEPYVKLXXXXXXXXXFFLMSLSSLETPV

SEQ ID NO: 22871 - protein, 41 aa, Artificial Sequence
  Non-cyclic GFR-binding peptide
  MOD_RES (2)..(4)..(37)..(38): Xaa is C or S
RXGXEAVSMGEPYVKLTPVGMDDFFLVSLSSLKTPVXXAKG

SEQ ID NO: 22872 - protein, 36 aa, Artificial Sequence
  Non-cyclic GFR-binding peptide
  MOD_RES (1)..(34)..(35): Xaa is C or S
XEAVSMGEPYVKLTPVGMDDFFLVSLSSLKTPVXXA

SEQ ID NO: 22873 - protein, 40 aa, Artificial Sequence
  Non-cyclic GFR-binding peptide
  MOD_RES (2)..(4): Xaa is C or S
AXAXELHEELRPYVKLLKPKKRVYEFFLVSLSSHHVRSPQ

SEQ ID NO: 22874 - protein, 41 aa, Artificial Sequence
  Non-cyclic GFR-binding peptide
  MOD_RES (1)..(3)..(36)..(37): Xaa is C or S
  MOD_RES (14)..(15)..(16)..(17)..(18): Xaa is A or G
  MOD_RES (19)..(20)..(21)..(22): Xaa is A or G or absent
XKXSRVIMPYVKLXXXXXXXXXFFLISLSSLAQPVXXPAAS

SEQ ID NO: 22875 - protein, 36 aa, Artificial Sequence
  Non-cyclic GFR-binding peptide
  MOD_RES (2)..(36): Xaa is C or S
EXKNHQLFPYVKLHQGQHPKIRFFLMSLSSEETPVX

SEQ ID NO: 22876 - protein, 38 aa, Artificial Sequence
  Non-cyclic GFR-binding peptide
  MOD_RES (1)..(33): Xaa is C or S
XSRVVMNPYVKLIVNSSDDFFLVSLSSLKTPAXTPKTV

SEQ ID NO: 22877 - protein, 36 aa, Artificial Sequence
  Non-cyclic GFR-binding peptide
  MOD_RES (32)..(33): Xaa is C or S
ARVVMNPYVKLIVNSSDDFFLVSLSSLQTPAXXPKP

SEQ ID NO: 22878 - protein, 39 aa, Artificial Sequence
  Non-cyclic GFR-binding peptide
  MOD_RES (1)..(3)..(37)..(38): Xaa is C or S
  MOD_RES (15)..(16)..(17)..(18)..(19): Xaa is A or G
  MOD_RES (20)..(21)..(22)..(23): Xaa is A or G or absent
XGXAKVVMNPYVKLXXXXXXXXXFFLVSLSSLKTPAXXA

SEQ ID NO: 22879 - protein, 35 aa, Artificial Sequence
  Non-cyclic GFR-binding peptide
  MOD_RES (34)..(35): Xaa is C or S
  MOD_RES (12)..(13)..(14)..(15)..(16): Xaa is A or G
  MOD_RES (17)..(18)..(19)..(20): Xaa is A or G or absent
AEVVMDPYVKLXXXXXXXXXFFLISLSSLRAPVXX

SEQ ID NO: 22880 - protein, 39 aa, Artificial Sequence
  Non-cyclic GFR-binding peptide
  MOD_RES (2)..(4)..(38)..(39): Xaa is C or S
  MOD_RES (16)..(17)..(18)..(19)..(20): Xaa is A or G
  MOD_RES (21)..(22)..(23)..(24): Xaa is A or G or absent
HXGXARVVMNPYVKLXXXXXXXXXFFLVSLSSLQTPAXX

SEQ ID NO: 22881 - protein, 34 aa, Artificial Sequence
  Non-cyclic GFR-binding peptide
  MOD_RES (2)..(2): Xaa is C or S
  MOD_RES (13)..(14)..(15)..(16)..(17): Xaa is A or G
  MOD_RES (18)..(19)..(20)..(21): Xaa is A or G or absent
KXSKVVMPYVKLXXXXXXXXXFFLISLSSLDQPV

SEQ ID NO: 22882 - protein, 41 aa, Artificial Sequence
  Non-cyclic GFR-binding peptide
  MOD_RES (2)..(4)..(36)..(37): Xaa is C or S
HXGXAKVVMNPYVKLIVNNSSDFFLVSLSSLKTPAXXAKPV

SEQ ID NO: 22883 - protein, 39 aa, Artificial Sequence
  Non-cyclic GFR-binding peptide
  MOD_RES (1)..(3)..(37)..(38): Xaa is C or S
  MOD_RES (15)..(16)..(17)..(18)..(19): Xaa is A or G
  MOD_RES (20)..(21)..(22)..(23): Xaa is A or G or absent
XGXRDVVMGPYVKLXXXXXXXXXFFLMSLSSMKTPTXXP

SEQ ID NO: 22884 - protein, 40 aa, Artificial Sequence
  Non-cyclic GFR-binding peptide
  MOD_RES (34)..(35): Xaa is C or S
  MOD_RES (12)..(13)..(14)..(15)..(16): Xaa is A or G
  MOD_RES (17)..(18)..(19)..(20): Xaa is A or G or absent
SEVVMDPYVKLXXXXXXXXXFFLISLSSLRTPVXXTPPTS

SEQ ID NO: 22885 - protein, 39 aa, Artificial Sequence
  Non-cyclic GFR-binding peptide
  MOD_RES (1)..(3)..(34)..(35): Xaa is C or S
XGXEEVIMPYVKLLLVRGNDFFLMSLSSTKVPAXXTSPV

SEQ ID NO: 22886 - protein, 33 aa, Artificial Sequence
  Non-cyclic GFR-binding peptide
  MOD_RES (1)..(33): Xaa is C or S
XSEVVMDPYVKLVVNNASDFFLISLSSLRTPVX

SEQ ID NO: 22887 - protein, 33 aa, Artificial Sequence
  Non-cyclic GFR-binding peptide
  MOD_RES (31)..(32): Xaa is C or S
EVVMDPYVKLVVNNAADFFLISLSSLRAPVXXS

SEQ ID NO: 22888 - protein, 40 aa, Artificial Sequence
  Non-cyclic GFR-binding peptide
  MOD_RES (2)..(4)..(36)..(37): Xaa is C or S
HXGXARVVMNPYVKLIVNSSDDFFLVSLSSLQTPAXXPKP

SEQ ID NO: 22889 - protein, 44 aa, Artificial Sequence
  Non-cyclic GFR-binding peptide
  MOD_RES (2)..(4)..(38)..(39): Xaa is C or S
  MOD_RES (16)..(17)..(18)..(19)..(20): Xaa is A or G
  MOD_RES (21)..(22)..(23)..(24): Xaa is A or G or absent
RXGXESVAMGPYVKLXXXXXXXXXFFLISLSSLKTPVXXAKSAK

SEQ ID NO: 22890 - protein, 40 aa, Artificial Sequence
  Non-cyclic GFR-binding peptide
  MOD_RES (1)..(3)..(34)..(35): Xaa is C or S
XGXEEVIMPYVKLLLVRGNDFFLMSLSSTKVPAXXTSPVR

SEQ ID NO: 22891 - protein, 36 aa, Artificial Sequence
  Non-cyclic GFR-binding peptide
  MOD_RES (31)..(32): Xaa is C or S
SVAMGPYVKLYTVVGKDFFLISLSSLKTPVXXAKSA

SEQ ID NO: 22892 - protein, 34 aa, Artificial Sequence
  Non-cyclic GFR-binding peptide
  MOD_RES (32)..(33): Xaa is C or S
RDVVMGPYVKLIIQQKDNFFLMSLSSMKTPTXXP

SEQ ID NO: 22893 - protein, 37 aa, Artificial Sequence
  Non-cyclic GFR-binding peptide
  MOD_RES (1)..(3)..(37): Xaa is C or S
  MOD_RES (15)..(16)..(17)..(18)..(19): Xaa is A or G
  MOD_RES (20)..(21)..(22)..(23): Xaa is A or G or absent
XGXARVVMNPYVKLXXXXXXXXXFFLVSLSSLQTPAX

SEQ ID NO: 22894 - protein, 36 aa, Artificial Sequence
  Non-cyclic GFR-binding peptide
  MOD_RES (36)..(36): Xaa is C or S
  MOD_RES (12)..(13)..(14)..(15)..(16): Xaa is A or G
  MOD_RES (17)..(18)..(19)..(20): Xaa is A or G or absent
LHEELRPYVKLXXXXXXXXXFFLVSLSSHHVRSPQX

SEQ ID NO: 22895 - protein, 38 aa, Artificial Sequence
  Non-cyclic GFR-binding peptide
  MOD_RES (2)..(4)..(38): Xaa is C or S
  MOD_RES (16)..(17)..(18)..(19)..(20): Xaa is A or G
  MOD_RES (21)..(22)..(23)..(24): Xaa is A or G or absent
HXGXAKVVMNPYVKLXXXXXXXXXFFLVSLSSLKTPAX

SEQ ID NO: 22896 - protein, 38 aa, Artificial Sequence
  Non-cyclic GFR-binding peptide
  MOD_RES (1)..(3): Xaa is C or S
  MOD_RES (16)..(17)..(18)..(19)..(20): Xaa is A or G
  MOD_RES (21)..(22)..(23)..(24): Xaa is A or G or absent
XAXELHEELRPYVKLXXXXXXXXXFFLVSLSSHHVRSP

SEQ ID NO: 22897 - protein, 34 aa, Artificial Sequence
  Non-cyclic GFR-binding peptide
  MOD_RES (2)..(34): Xaa is C or S
GXAEVVMDPYVKLVVNNAADFFLISLSSLRAPVX

SEQ ID NO: 22898 - protein, 39 aa, Artificial Sequence
  Non-cyclic GFR-binding peptide
  MOD_RES (1)..(35)..(36): Xaa is C or S
  MOD_RES (13)..(14)..(15)..(16)..(17): Xaa is A or G
  MOD_RES (18)..(19)..(20)..(21): Xaa is A or G or absent
XRDVVMGPYVKLXXXXXXXXXFFLMSLSSMKTPTXXPGA

SEQ ID NO: 22899 - protein, 34 aa, Artificial Sequence
  Non-cyclic GFR-binding peptide
  MOD_RES (31)..(31): Xaa is C or S
RVVMNPYVKLIVNSSDDFFLVSLSSLKTPAXTPK

SEQ ID NO: 22900 - protein, 45 aa, Artificial Sequence
  Non-cyclic GFR-binding peptide
  MOD_RES (2)..(4)..(41): Xaa is C or S
  MOD_RES (17)..(18)..(19)..(20)..(21): Xaa is A or G
  MOD_RES (22)..(23)..(24)..(25): Xaa is A or G or absent
AXAXELHEELRPYVKLXXXXXXXXXFFLVSLSSHHVRSPQXKVSS

SEQ ID NO: 22901 - protein, 33 aa, Artificial Sequence
  Non-cyclic GFR-binding peptide
  MOD_RES (32)..(33): Xaa is C or S
AEVVMDPYVKLVVNNAADFFLISLSSLRAPVXX

SEQ ID NO: 22902 - protein, 34 aa, Artificial Sequence
  Non-cyclic GFR-binding peptide
  MOD_RES (32)..(32): Xaa is C or S
SRVVMNPYVKLIVNSSDDFFLVSLSSLKTPAXTP

SEQ ID NO: 22903 - protein, 34 aa, Artificial Sequence
  Non-cyclic GFR-binding peptide
  MOD_RES (1)..(3): Xaa is C or S
XGXESVAMGPYVKLYTVVGKDFFLISLSSLKTPV

SEQ ID NO: 22904 - protein, 33 aa, Artificial Sequence
  Non-cyclic GFR-binding peptide
  MOD_RES (2)..(2): Xaa is C or S
GXARVVMNPYVKLIVNSSDDFFLVSLSSLQTPA

SEQ ID NO: 22905 - protein, 41 aa, Artificial Sequence
  Non-cyclic GFR-binding peptide
  MOD_RES (2)..(36)..(37): Xaa is C or S
  MOD_RES (14)..(15)..(16)..(17)..(18): Xaa is A or G
  MOD_RES (19)..(20)..(21)..(22): Xaa is A or G or absent
GXARVVMNPYVKLXXXXXXXXXFFLVSLSSLQTPAXXPKPV

SEQ ID NO: 22906 - protein, 36 aa, Artificial Sequence
  Non-cyclic GFR-binding peptide
  MOD_RES (2)..(36): Xaa is C or S
  MOD_RES (14)..(15)..(16)..(17)..(18): Xaa is A or G
  MOD_RES (19)..(20)..(21)..(22): Xaa is A or G or absent
GXSRVVMNPYVKLXXXXXXXXXFFLVSLSSLKTPAX

SEQ ID NO: 22907 - protein, 32 aa, Artificial Sequence
  Non-cyclic GFR-binding peptide
  MOD_RES (32)..(32): Xaa is C or S
RDVVMGPYVKLIIQQKDNFFLMSLSSMKTPTX

SEQ ID NO: 22908 - protein, 38 aa, Artificial Sequence
  Non-cyclic GFR-binding peptide
  MOD_RES (32)..(33): Xaa is C or S
ESVAMGPYVKLYTVVGKDFFLISLSSLKTPVXXAKSAK

SEQ ID NO: 22909 - protein, 39 aa, Artificial Sequence
  Non-cyclic GFR-binding peptide
  MOD_RES (1)..(3)..(34)..(35): Xaa is C or S
XKXSKVVMPYVKLVKPTRGVFFLISLSSLDQPVXXPSAS

SEQ ID NO: 22910 - protein, 37 aa, Artificial Sequence
  Non-cyclic GFR-binding peptide
  MOD_RES (36)..(36): Xaa is C or S
  MOD_RES (12)..(13)..(14)..(15)..(16): Xaa is A or G
  MOD_RES (17)..(18)..(19)..(20): Xaa is A or G or absent
LHEELRPYVKLXXXXXXXXXFFLVSLSSHHVRSPQXK

SEQ ID NO: 22911 - protein, 38 aa, Artificial Sequence
  Non-cyclic GFR-binding peptide
  MOD_RES (33)..(33): Xaa is C or S
  MOD_RES (11)..(12)..(13)..(14)..(15): Xaa is A or G
  MOD_RES (16)..(17)..(18)..(19): Xaa is A or G or absent
NHQLFPYVKLXXXXXXXXXFFLMSLSSEETPVXELGED

SEQ ID NO: 22912 - protein, 39 aa, Artificial Sequence
  Non-cyclic GFR-binding peptide
  MOD_RES (1)..(33)..(34): Xaa is C or S
XARVVMNPYVKLIVNSSDDFFLVSLSSLQTPAXXPKPVT

SEQ ID NO: 22913 - protein, 39 aa, Artificial Sequence
  Non-cyclic GFR-binding peptide
  MOD_RES (34)..(35): Xaa is C or S
  MOD_RES (12)..(13)..(14)..(15)..(16): Xaa is A or G
  MOD_RES (17)..(18)..(19)..(20): Xaa is A or G or absent
AKVVMNPYVKLXXXXXXXXXFFLVSLSSLKTPAXXAKPV

SEQ ID NO: 22914 - protein, 36 aa, Artificial Sequence
  Non-cyclic GFR-binding peptide
  MOD_RES (34)..(34): Xaa is C or S
  MOD_RES (12)..(13)..(14)..(15)..(16): Xaa is A or G
  MOD_RES (17)..(18)..(19)..(20): Xaa is A or G or absent
KNHQLFPYVKLXXXXXXXXXFFLMSLSSEETPVXEL

SEQ ID NO: 22915 - protein, 34 aa, Artificial Sequence
  Non-cyclic GFR-binding peptide
  MOD_RES (31)..(32): Xaa is C or S
SRVIMPYVKLVKPKRGVFFLISLSSLAQPVXXPA

SEQ ID NO: 22916 - protein, 30 aa, Artificial Sequence; identical to SEQ ID NO: 1812
  Non-cyclic GFR-binding peptide

SEQ ID NO: 22917 - protein, 38 aa, Artificial Sequence
  Non-cyclic GFR-binding peptide
  MOD_RES (1)..(3)..(37)..(38): Xaa is C or S
  MOD_RES (15)..(16)..(17)..(18)..(19): Xaa is A or G
  MOD_RES (20)..(21)..(22)..(23): Xaa is A or G or absent
XGXGEVVMEPYVKLXXXXXXXXXFFLMSLSSLETPVXX

SEQ ID NO: 22918 - protein, 40 aa, Artificial Sequence
  Non-cyclic GFR-binding peptide
  MOD_RES (34)..(35): Xaa is C or S
  MOD_RES (12)..(13)..(14)..(15)..(16): Xaa is A or G
  MOD_RES (17)..(18)..(19)..(20): Xaa is A or G or absent
SRVVMNPYVKLXXXXXXXXXFFLVSLSSLKTPAXXPKPVY

SEQ ID NO: 22919 - protein, 43 aa, Artificial Sequence
  Non-cyclic GFR-binding peptide
  MOD_RES (2)..(4)..(37)..(38): Xaa is C or S
RXGXEAVSMGEPYVKLTPVGMDDFFLVSLSSLKTPVXXAKGVK

SEQ ID NO: 22920 - protein, 39 aa, Artificial Sequence
  Non-cyclic GFR-binding peptide
  MOD_RES (1)..(3)..(35)..(36): Xaa is C or S
XGXESVAMGPYVKLYTVVGKDFFLISLSSLKTPVXXAKS

SEQ ID NO: 22921 - protein, 39 aa, Artificial Sequence
  Non-cyclic GFR-binding peptide
  MOD_RES (33)..(34): Xaa is C or S
  MOD_RES (11)..(12)..(13)..(14)..(15): Xaa is A or G
  MOD_RES (16)..(17)..(18)..(19): Xaa is A or G or absent
RVVMNPYVKLXXXXXXXXXFFLVSLSSLKTPAXXPKPVY

SEQ ID NO: 22922 - protein, 35 aa, Artificial Sequence
  Non-cyclic GFR-binding peptide
  MOD_RES (31)..(32): Xaa is C or S
EVVMDPYVKLVVNNAADFFLISLSSLRAPVXXSAP

SEQ ID NO: 22923 - protein, 35 aa, Artificial Sequence
  Non-cyclic GFR-binding peptide
  MOD_RES (31)..(32): Xaa is C or S
EVVMDPYVKLVVNNASDFFLISLSSLRTPVXXTPP

SEQ ID NO: 22924 - protein, 41 aa, Artificial Sequence
  Non-cyclic GFR-binding peptide
  MOD_RES (1)..(3)..(37)..(38): Xaa is C or S
  MOD_RES (15)..(16)..(17)..(18)..(19): Xaa is A or G
  MOD_RES (20)..(21)..(22)..(23): Xaa is A or G or absent
XGXAEVVMDPYVKLXXXXXXXXXFFLISLSSLRAPVXXSAP

SEQ ID NO: 22925 - protein, 37 aa, Artificial Sequence
  Non-cyclic GFR-binding peptide
  MOD_RES (1)..(3)..(36)..(37): Xaa is C or S
  MOD_RES (14)..(15)..(16)..(17)..(18): Xaa is A or G
  MOD_RES (19)..(20)..(21)..(22): Xaa is A or G or absent
XKXSKVIMPYVKLXXXXXXXXXFFLISLSSLDQSVXX

SEQ ID NO: 22926 - protein, 37 aa, Artificial Sequence
  Non-cyclic GFR-binding peptide
  MOD_RES (2)..(4)..(35)..(36): Xaa is C or S
LXGXEEVIMPYVKLLLVRGNDFFLMSLSSTKVPAXXT

SEQ ID NO: 22927 - protein, 40 aa, Artificial Sequence
  Non-cyclic GFR-binding peptide
  MOD_RES (2)..(4)..(35)..(36): Xaa is C or S
SXKXSKVVMPYVKLVKPTRGVFFLISLSSLDQPVXXPSAS

SEQ ID NO: 22928 - protein, 33 aa, Artificial Sequence
  Non-cyclic GFR-binding peptide
  MOD_RES (33)..(33): Xaa is C or S
  MOD_RES (11)..(12)..(13)..(14)..(15): Xaa is A or G
  MOD_RES (16)..(17)..(18)..(19): Xaa is A or G or absent
SKVVMPYVKLXXXXXXXXXFFLISLSSLDQPVX

SEQ ID NO: 22929 - protein, 38 aa, Artificial Sequence
  Non-cyclic GFR-binding peptide
  MOD_RES (1)..(35)..(36): Xaa is C or S
  MOD_RES (13)..(14)..(15)..(16)..(17): Xaa is A or G
  MOD_RES (18)..(19)..(20)..(21): Xaa is A or G or absent
XSRVVMNPYVKLXXXXXXXXXFFLVSLSSLKTPAXXPK

SEQ ID NO: 22930 - protein, 39 aa, Artificial Sequence
  Non-cyclic GFR-binding peptide
  MOD_RES (2)..(39): Xaa is C or S
  MOD_RES (15)..(16)..(17)..(18)..(19): Xaa is A or G
  MOD_RES (20)..(21)..(22)..(23): Xaa is A or G or absent
AXELHEELRPYVKLXXXXXXXXXFFLVSLSSHHVRSPQX

SEQ ID NO: 22931 - protein, 39 aa, Artificial Sequence
  Non-cyclic GFR-binding peptide
  MOD_RES (33)..(34): Xaa is C or S
  MOD_RES (11)..(12)..(13)..(14)..(15): Xaa is A or G
  MOD_RES (16)..(17)..(18)..(19): Xaa is A or G or absent
EVVMEPYVKLXXXXXXXXXFFLMSLSSLETPVXXAKPIS

SEQ ID NO: 22932 - protein, 42 aa, Artificial Sequence
  Non-cyclic GFR-binding peptide
  MOD_RES (1)..(3)..(38)..(39): Xaa is C or S
  MOD_RES (16)..(17)..(18)..(19)..(20): Xaa is A or G
  MOD_RES (21)..(22)..(23)..(24): Xaa is A or G or absent
XGXEAVSMGEPYVKLXXXXXXXXXFFLVSLSSLKTPVXXAKG

SEQ ID NO: 22933 - protein, 38 aa, Artificial Sequence
  Non-cyclic GFR-binding peptide
  MOD_RES (1)..(3)..(37)..(38): Xaa is C or S
  MOD_RES (15)..(16)..(17)..(18)..(19): Xaa is A or G
  MOD_RES (20)..(21)..(22)..(23): Xaa is A or G or absent
XGXSRVVMNPYVKLXXXXXXXXXFFLVSLSSLKTPAXX

SEQ ID NO: 22934 - protein, 33 aa, Artificial Sequence
  Non-cyclic GFR-binding peptide
  MOD_RES (2)..(2): Xaa is C or S
GXAKVVMNPYVKLIVNNSSDFFLVSLSSLKTPA

SEQ ID NO: 22935 - protein, 34 aa, Artificial Sequence
  Non-cyclic GFR-binding peptide
  MOD_RES (31)..(32): Xaa is C or S
EVVMEPYVKLVVKDYEDFFLMSLSSLETPVXXAK

SEQ ID NO: 22936 - protein, 35 aa, Artificial Sequence
  Non-cyclic GFR-binding peptide
  MOD_RES (1)..(34)..(35): Xaa is C or S
  MOD_RES (12)..(13)..(14)..(15)..(16): Xaa is A or G
  MOD_RES (17)..(18)..(19)..(20): Xaa is A or G or absent
XSRVIMPYVKLXXXXXXXXXFFLISLSSLAQPVXX

SEQ ID NO: 22937 - protein, 40 aa, Artificial Sequence
  Non-cyclic GFR-binding peptide
  MOD_RES (2)..(36)..(37): Xaa is C or S
  MOD_RES (14)..(15)..(16)..(17)..(18): Xaa is A or G
  MOD_RES (19)..(20)..(21)..(22): Xaa is A or G or absent
GXSRVVMNPYVKLXXXXXXXXXFFLVSLSSLKTPAXXPKP

SEQ ID NO: 22938 - protein, 40 aa, Artificial Sequence
  Non-cyclic GFR-binding peptide
  MOD_RES (34)..(35): Xaa is C or S
  MOD_RES (12)..(13)..(14)..(15)..(16): Xaa is A or G
  MOD_RES (17)..(18)..(19)..(20): Xaa is A or G or absent
RDVVMGPYVKLXXXXXXXXXFFLMSLSSMKTPTXXPGASG

SEQ ID NO: 22939 - protein, 35 aa, Artificial Sequence
  Non-cyclic GFR-binding peptide
  MOD_RES (1)..(3): Xaa is C or S
  MOD_RES (14)..(15)..(16)..(17)..(18): Xaa is A or G
  MOD_RES (19)..(20)..(21)..(22): Xaa is A or G or absent
XKXSKVVMPYVKLXXXXXXXXXFFLISLSSLDQPV

SEQ ID NO: 22940 - protein, 43 aa, Artificial Sequence
  Non-cyclic GFR-binding peptide
  MOD_RES (1)..(3)..(37)..(38): Xaa is C or S
  MOD_RES (15)..(16)..(17)..(18)..(19): Xaa is A or G
  MOD_RES (20)..(21)..(22)..(23): Xaa is A or G or absent
XGXARVVMNPYVKLXXXXXXXXXFFLVSLSSLQTPAXXPKPVT

SEQ ID NO: 22941 - protein, 40 aa, Artificial Sequence
  Non-cyclic GFR-binding peptide
  MOD_RES (2)..(4)..(37)..(38): Xaa is C or S
RXGXEAVSMGEPYVKLTPVGMDDFFLVSLSSLKTPVXXAK

SEQ ID NO: 22942 - protein, 36 aa, Artificial Sequence
  Non-cyclic GFR-binding peptide
  MOD_RES (1)..(3): Xaa is C or S
  MOD_RES (15)..(16)..(17)..(18)..(19): Xaa is A or G
  MOD_RES (20)..(21)..(22)..(23): Xaa is A or G or absent
XGXSEVVMDPYVKLXXXXXXXXXFFLISLSSLRTPV

SEQ ID NO: 22943 - protein, 42 aa, Artificial Sequence
  Non-cyclic GFR-binding peptide
  MOD_RES (1)..(3)..(37)..(38): Xaa is C or S
  MOD_RES (15)..(16)..(17)..(18)..(19): Xaa is A or G
  MOD_RES (20)..(21)..(22)..(23): Xaa is A or G or absent
XGXAKVVMNPYVKLXXXXXXXXXFFLVSLSSLKTPAXXAKPV

SEQ ID NO: 22944 - protein, 43 aa, Artificial Sequence
  Non-cyclic GFR-binding peptide
  MOD_RES (1)..(3)..(37): Xaa is C or S
  MOD_RES (15)..(16)..(17)..(18)..(19): Xaa is A or G
  MOD_RES (20)..(21)..(22)..(23): Xaa is A or G or absent
XGXSRVVMNPYVKLXXXXXXXXXFFLVSLSSLKTPAXTPKTVH

SEQ ID NO: 22945 - protein, 36 aa, Artificial Sequence
  Non-cyclic GFR-binding peptide
  MOD_RES (1)..(32)..(33): Xaa is C or S
XSKVIMPYVKLIKPTKGIFFLISLSSLDQSVXXPSA

SEQ ID NO: 22946 - protein, 36 aa, Artificial Sequence
  Non-cyclic GFR-binding peptide
  MOD_RES (1)..(3)..(36): Xaa is C or S
  MOD_RES (14)..(15)..(16)..(17)..(18): Xaa is A or G
  MOD_RES (19)..(20)..(21)..(22): Xaa is A or G or absent
XKXSKVVMPYVKLXXXXXXXXXFFLISLSSLDQPVX

SEQ ID NO: 22947 - protein, 37 aa, Artificial Sequence
  Non-cyclic GFR-binding peptide
  MOD_RES (33)..(34): Xaa is C or S
  MOD_RES (11)..(12)..(13)..(14)..(15): Xaa is A or G
  MOD_RES (16)..(17)..(18)..(19): Xaa is A or G or absent
SVAMGPYVKLXXXXXXXXXFFLISLSSLKTPVXXAKS

SEQ ID NO: 22948 - protein, 41 aa, Artificial Sequence
  Non-cyclic GFR-binding peptide
  MOD_RES (2)..(4)..(36)..(37): Xaa is C or S
RXGXSEVVMDPYVKLVVNNASDFFLISLSSLRTPVXXTPPT

SEQ ID NO: 22949 - protein, 37 aa, Artificial Sequence
  Non-cyclic GFR-binding peptide
  MOD_RES (2)..(36)..(37): Xaa is C or S
  MOD_RES (14)..(15)..(16)..(17)..(18): Xaa is A or G
  MOD_RES (19)..(20)..(21)..(22): Xaa is A or G or absent
GXRDVVMGPYVKLXXXXXXXXXFFLMSLSSMKTPTXX

SEQ ID NO: 22950 - protein, 41 aa, Artificial Sequence
  Non-cyclic GFR-binding peptide
  MOD_RES (1)..(38): Xaa is C or S
  MOD_RES (14)..(15)..(16)..(17)..(18): Xaa is A or G
  MOD_RES (19)..(20)..(21)..(22): Xaa is A or G or absent
XELHEELRPYVKLXXXXXXXXXFFLVSLSSHHVRSPQXKVS

SEQ ID NO: 22951 - protein, 34 aa, Artificial Sequence
  Non-cyclic GFR-binding peptide
  MOD_RES (2)..(4): Xaa is C or S
SXKXSKVVMPYVKLVKPTRGVFFLISLSSLDQPV

SEQ ID NO: 22952 - protein, 34 aa, Artificial Sequence
  Non-cyclic GFR-binding peptide
  MOD_RES (2)..(34): Xaa is C or S
GXAKVVMNPYVKLIVNNSSDFFLVSLSSLKTPAX

SEQ ID NO: 22953 - protein, 34 aa, Artificial Sequence
  Non-cyclic GFR-binding peptide
  MOD_RES (1)..(32)..(33): Xaa is C or S
XEEVIMPYVKLLLVRGNDFFLMSLSSTKVPAXXT

SEQ ID NO: 22954 - protein, 37 aa, Artificial Sequence
  Non-cyclic GFR-binding peptide
  MOD_RES (31)..(32): Xaa is C or S
SKVIMPYVKLIKPTKGIFFLISLSSLDQSVXXPSASA

SEQ ID NO: 22955 - protein, 38 aa, Artificial Sequence
  Non-cyclic GFR-binding peptide
  MOD_RES (1)..(33)..(34): Xaa is C or S
XSRVVMNPYVKLIVNSSDDFFLVSLSSLKTPAXXPKPV

SEQ ID NO: 22956 - protein, 37 aa, Artificial Sequence
  Non-cyclic GFR-binding peptide
  MOD_RES (2)..(36)..(37): Xaa is C or S
  MOD_RES (14)..(15)..(16)..(17)..(18): Xaa is A or G
  MOD_RES (19)..(20)..(21)..(22): Xaa is A or G or absent
GXSEVVMDPYVKLXXXXXXXXXFFLISLSSLRTPVXX

SEQ ID NO: 22957 - protein, 38 aa, Artificial Sequence
  Non-cyclic GFR-binding peptide
  MOD_RES (36)..(36): Xaa is C or S
LHEELRPYVKLLKPKKRVYEFFLVSLSSHHVRSPQXKV

SEQ ID NO: 22958 - protein, 38 aa, Artificial Sequence
  Non-cyclic GFR-binding peptide
  MOD_RES (37)..(37): Xaa is C or S
ELHEELRPYVKLLKPKKRVYEFFLVSLSSHHVRSPQXK

SEQ ID NO: 22959 - protein, 34 aa, Artificial Sequence
  Non-cyclic GFR-binding peptide
  MOD_RES (1)..(1): Xaa is C or S
  MOD_RES (13)..(14)..(15)..(16)..(17): Xaa is A or G
  MOD_RES (18)..(19)..(20)..(21): Xaa is A or G or absent
XAKVVMNPYVKLXXXXXXXXXFFLVSLSSLKTPA

SEQ ID NO: 22960 - protein, 41 aa, Artificial Sequence
  Non-cyclic GFR-binding peptide
  MOD_RES (35)..(36): Xaa is C or S
  MOD_RES (13)..(14)..(15)..(16)..(17): Xaa is A or G
  MOD_RES (18)..(19)..(20)..(21): Xaa is A or G or absent
EAVSMGEPYVKLXXXXXXXXXFFLVSLSSLKTPVXXAKGVK

SEQ ID NO: 22961 - protein, 36 aa, Artificial Sequence
  Non-cyclic GFR-binding peptide
  MOD_RES (1)..(3)..(35)..(36): Xaa is C or S
XGXESVAMGPYVKLYTVVGKDFFLISLSSLKTPVXX

SEQ ID NO: 22962 - protein, 36 aa, Artificial Sequence
  Non-cyclic GFR-binding peptide
  MOD_RES (35)..(35): Xaa is C or S
  MOD_RES (11)..(12)..(13)..(14)..(15): Xaa is A or G
  MOD_RES (16)..(17)..(18)..(19): Xaa is A or G or absent
HEELRPYVKLXXXXXXXXXFFLVSLSSHHVRSPQXK

SEQ ID NO: 22963 - protein, 40 aa, Artificial Sequence
  Non-cyclic GFR-binding peptide
  MOD_RES (1)..(3)..(35)..(36): Xaa is C or S
XGXSEVVMDPYVKLVVNNASDFFLISLSSLRTPVXXTPPT

SEQ ID NO: 22964 - protein, 34 aa, Artificial Sequence
  Non-cyclic GFR-binding peptide
  MOD_RES (2)..(34): Xaa is C or S
GXARVVMNPYVKLIVNSSDDFFLVSLSSLQTPAX

SEQ ID NO: 22965 - protein, 40 aa, Artificial Sequence
  Non-cyclic GFR-binding peptide
  MOD_RES (1)..(3)..(40): Xaa is C or S
  MOD_RES (16)..(17)..(18)..(19)..(20): Xaa is A or G
  MOD_RES (21)..(22)..(23)..(24): Xaa is A or G or absent
XAXELHEELRPYVKLXXXXXXXXXFFLVSLSSHHVRSPQX

SEQ ID NO: 22966 - protein, 37 aa, Artificial Sequence
  Non-cyclic GFR-binding peptide
  MOD_RES (2)..(4): Xaa is C or S
  MOD_RES (16)..(17)..(18)..(19)..(20): Xaa is A or G
  MOD_RES (21)..(22)..(23)..(24): Xaa is A or G or absent
SXGXRDVVMGPYVKLXXXXXXXXXFFLMSLSSMKTPT

SEQ ID NO: 22967 - protein, 40 aa, Artificial Sequence
  Non-cyclic GFR-binding peptide
  MOD_RES (1)..(3)..(36)..(37): Xaa is C or S
  MOD_RES (14)..(15)..(16)..(17)..(18): Xaa is A or G
  MOD_RES (19)..(20)..(21)..(22): Xaa is A or G or absent
XKXSKVVMPYVKLXXXXXXXXXFFLISLSSLDQPVXXPSA

SEQ ID NO: 22968 - protein, 32 aa, Artificial Sequence
  Non-cyclic GFR-binding peptide
  MOD_RES (32)..(32): Xaa is C or S
AKVVMNPYVKLIVNNSSDFFLVSLSSLKTPAX

SEQ ID NO: 22969 - protein, 36 aa, Artificial Sequence
  Non-cyclic GFR-binding peptide
  MOD_RES (2)..(36): Xaa is C or S
  MOD_RES (14)..(15)..(16)..(17)..(18): Xaa is A or G
  MOD_RES (19)..(20)..(21)..(22): Xaa is A or G or absent
GXESVAMGPYVKLXXXXXXXXXFFLISLSSLKTPVX

SEQ ID NO: 22970 - protein, 39 aa, Artificial Sequence
  Non-cyclic GFR-binding peptide
  MOD_RES (2)..(35)..(36): Xaa is C or S
  MOD_RES (13)..(14)..(15)..(16)..(17): Xaa is A or G
  MOD_RES (18)..(19)..(20)..(21): Xaa is A or G or absent
KXSKVIMPYVKLXXXXXXXXXFFLISLSSLDQSVXXPSA

SEQ ID NO: 22971 - protein, 35 aa, Artificial Sequence
  Non-cyclic GFR-binding peptide
  MOD_RES (1)..(3)..(35): Xaa is C or S
XGXARVVMNPYVKLIVNSSDDFFLVSLSSLQTPAX

SEQ ID NO: 22972 - protein, 42 aa, Artificial Sequence
  Non-cyclic GFR-binding peptide
  MOD_RES (2)..(4)..(36)..(37): Xaa is C or S
RXGXAEVVMDPYVKLVVNNAADFFLISLSSLRAPVXXSAPAA

SEQ ID NO: 22973 - protein, 35 aa, Artificial Sequence
  Non-cyclic GFR-binding peptide
  MOD_RES (1)..(32)..(33): Xaa is C or S
XSKVIMPYVKLIKPTKGIFFLISLSSLDQSVXXPS

SEQ ID NO: 22974 - protein, 40 aa, Artificial Sequence
  Non-cyclic GFR-binding peptide
  MOD_RES (1)..(3)..(35)..(36): Xaa is C or S
XGXAEVVMDPYVKLVVNNAADFFLISLSSLRAPVXXSAPA

SEQ ID NO: 22975 - protein, 37 aa, Artificial Sequence
  Non-cyclic GFR-binding peptide
  MOD_RES (33)..(34): Xaa is C or S
  MOD_RES (11)..(12)..(13)..(14)..(15): Xaa is A or G
  MOD_RES (16)..(17)..(18)..(19): Xaa is A or G or absent
EVVMEPYVKLXXXXXXXXXFFLMSLSSLETPVXXAKP

SEQ ID NO: 22976 - protein, 33 aa, Artificial Sequence
  Non-cyclic GFR-binding peptide
  MOD_RES (33)..(33): Xaa is C or S
NHQLFPYVKLHQGQHPKIRFFLMSLSSEETPVX

SEQ ID NO: 22977 - protein, 34 aa, Artificial Sequence
  Non-cyclic GFR-binding peptide
ELHEELRPYVKLLKPKKRVYEFFLVSLSSHHVRS

SEQ ID NO: 22978 - protein, 36 aa, Artificial Sequence
  Non-cyclic GFR-binding peptide
  MOD_RES (2)..(4): Xaa is C or S
  MOD_RES (15)..(16)..(17)..(18)..(19): Xaa is A or G
  MOD_RES (20)..(21)..(22)..(23): Xaa is A or G or absent
LXGXEEVIMPYVKLXXXXXXXXXFFLMSLSSTKVPA

SEQ ID NO: 22979 - protein, 30 aa, Artificial Sequence; identical to SEQ ID NO: 1815
  Non-cyclic GFR-binding peptide

SEQ ID NO: 22980 - protein, 39 aa, Artificial Sequence
  Non-cyclic GFR-binding peptide
  MOD_RES (2)..(4)..(39): Xaa is C or S
  MOD_RES (17)..(18)..(19)..(20)..(21): Xaa is A or G
  MOD_RES (22)..(23)..(24)..(25): Xaa is A or G or absent
RXGXEAVSMGEPYVKLXXXXXXXXXFFLVSLSSLKTPVX

SEQ ID NO: 22981 - protein, 37 aa, Artificial Sequence
  Non-cyclic GFR-binding peptide
  MOD_RES (1)..(33)..(34): Xaa is C or S
XESVAMGPYVKLYTVVGKDFFLISLSSLKTPVXXAKS

SEQ ID NO: 22982 - protein, 40 aa, Artificial Sequence
  Non-cyclic GFR-binding peptide
  MOD_RES (37)..(37): Xaa is C or S
ELHEELRPYVKLLKPKKRVYEFFLVSLSSHHVRSPQXKVS

SEQ ID NO: 22983 - protein, 31 aa, Artificial Sequence
  Non-cyclic GFR-binding peptide
  MOD_RES (1)..(1): Xaa is C or S
XSKVVMPYVKLVKPTRGVFFLISLSSLDQPV

SEQ ID NO: 22984 - protein, 39 aa, Artificial Sequence
  Non-cyclic GFR-binding peptide
  MOD_RES (1)..(3)..(36)..(37): Xaa is C or S
  MOD_RES (14)..(15)..(16)..(17)..(18): Xaa is A or G
  MOD_RES (19)..(20)..(21)..(22): Xaa is A or G or absent
XKXSKVIMPYVKLXXXXXXXXXFFLISLSSLDQSVXXPS

SEQ ID NO: 22985 - protein, 39 aa, Artificial Sequence
  Non-cyclic GFR-binding peptide
  MOD_RES (34)..(35): Xaa is C or S
  MOD_RES (12)..(13)..(14)..(15)..(16): Xaa is A or G
  MOD_RES (17)..(18)..(19)..(20): Xaa is A or G or absent
RDVVMGPYVKLXXXXXXXXXFFLMSLSSMKTPTXXPGAS

SEQ ID NO: 22986 - protein, 41 aa, Artificial Sequence
  Non-cyclic GFR-binding peptide
  MOD_RES (1)..(3)..(37)..(38): Xaa is C or S
  MOD_RES (15)..(16)..(17)..(18)..(19): Xaa is A or G
  MOD_RES (20)..(21)..(22)..(23): Xaa is A or G or absent
XGXSRVVMNPYVKLXXXXXXXXXFFLVSLSSLKTPAXXPKP

SEQ ID NO: 22987 - protein, 32 aa, Artificial Sequence
  Non-cyclic GFR-binding peptide
HEELRPYVKLLKPKKRVYEFFLVSLSSHHVRS

SEQ ID NO: 22988 - protein, 38 aa, Artificial Sequence
  Non-cyclic GFR-binding peptide
  MOD_RES (2)..(4)..(38): Xaa is C or S
  MOD_RES (16)..(17)..(18)..(19)..(20): Xaa is A or G
  MOD_RES (21)..(22)..(23)..(24): Xaa is A or G or absent
RXGXESVAMGPYVKLXXXXXXXXXFFLISLSSLKTPVX

SEQ ID NO: 22989 - protein, 38 aa, Artificial Sequence
  Non-cyclic GFR-binding peptide
  MOD_RES (1)..(36)..(37): Xaa is C or S
  MOD_RES (14)..(15)..(16)..(17)..(18): Xaa is A or G
  MOD_RES (19)..(20)..(21)..(22): Xaa is A or G or absent
XEAVSMGEPYVKLXXXXXXXXXFFLVSLSSLKTPVXXA

SEQ ID NO: 22990 - protein, 38 aa, Artificial Sequence
  Non-cyclic GFR-binding peptide
  MOD_RES (33)..(34): Xaa is C or S
  MOD_RES (11)..(12)..(13)..(14)..(15): Xaa is A or G
  MOD_RES (16)..(17)..(18)..(19): Xaa is A or G or absent
SRVIMPYVKLXXXXXXXXXFFLISLSSLAQPVXXPAAS

SEQ ID NO: 22991 - protein, 41 aa, Artificial Sequence
  Non-cyclic GFR-binding peptide
  MOD_RES (1)..(3)..(35)..(36): Xaa is C or S
XGXESVAMGPYVKLYTVVGKDFFLISLSSLKTPVXXAKSAK

SEQ ID NO: 22992 - protein, 39 aa, Artificial Sequence
  Non-cyclic GFR-binding peptide
  MOD_RES (2)..(4)..(35)..(36): Xaa is C or S
SXKXSRVIMPYVKLVKPKRGVFFLISLSSLAQPVXXPAA

SEQ ID NO: 22993 - protein, 39 aa, Artificial Sequence
  Non-cyclic GFR-binding peptide
  MOD_RES (2)..(34)..(35): Xaa is C or S
GXSRVVMNPYVKLIVNSSDDFFLVSLSSLKTPAXXPKPV

SEQ ID NO: 22994 - protein, 41 aa, Artificial Sequence
  Non-cyclic GFR-binding peptide
  MOD_RES (1)..(3)..(37): Xaa is C or S
  MOD_RES (15)..(16)..(17)..(18)..(19): Xaa is A or G
  MOD_RES (20)..(21)..(22)..(23): Xaa is A or G or absent
XGXSRVVMNPYVKLXXXXXXXXXFFLVSLSSLKTPAXTPKT

SEQ ID NO: 22995 - protein, 42 aa, Artificial Sequence
  Non-cyclic GFR-binding peptide
  MOD_RES (2)..(4)..(38)..(39): Xaa is C or S
  MOD_RES (16)..(17)..(18)..(19)..(20): Xaa is A or G
  MOD_RES (21)..(22)..(23)..(24): Xaa is A or G or absent
RXGXGEVVMEPYVKLXXXXXXXXXFFLMSLSSLETPVXXAKP

SEQ ID NO: 22996 - protein, 41 aa, Artificial Sequence
  Non-cyclic GFR-binding peptide
  MOD_RES (2)..(4)..(38)..(39): Xaa is C or S
  MOD_RES (16)..(17)..(18)..(19)..(20): Xaa is A or G
  MOD_RES (21)..(22)..(23)..(24): Xaa is A or G or absent
RXGXAEVVMDPYVKLXXXXXXXXXFFLISLSSLRAPVXXSA

SEQ ID NO: 22997 - protein, 38 aa, Artificial Sequence
  Non-cyclic GFR-binding peptide
  MOD_RES (1)..(3)..(37): Xaa is C or S
  MOD_RES (15)..(16)..(17)..(18)..(19): Xaa is A or G
  MOD_RES (20)..(21)..(22)..(23): Xaa is A or G or absent
XGXSRVVMNPYVKLXXXXXXXXXFFLVSLSSLKTPAXT

SEQ ID NO: 22998 - protein, 39 aa, Artificial Sequence
  Non-cyclic GFR-binding peptide
  MOD_RES (1)..(35)..(36): Xaa is C or S
  MOD_RES (13)..(14)..(15)..(16)..(17): Xaa is A or G
  MOD_RES (18)..(19)..(20)..(21): Xaa is A or G or absent
XSEVVMDPYVKLXXXXXXXXXFFLISLSSLRTPVXXTPP

SEQ ID NO: 22999 - protein, 34 aa, Artificial Sequence
  Non-cyclic GFR-binding peptide
  MOD_RES (31)..(32): Xaa is C or S
DVVMGPYVKLIIQQKDNFFLMSLSSMKTPTXXPG

SEQ ID NO: 23000 - protein, 41 aa, Artificial Sequence
  Non-cyclic GFR-binding peptide
  MOD_RES (2)..(4)..(36)..(37): Xaa is C or S
RXGXGEVVMEPYVKLVVKDYEDFFLMSLSSLETPVXXAKPI

SEQ ID NO: 23001 - protein, 37 aa, Artificial Sequence
  Non-cyclic GFR-binding peptide
  MOD_RES (1)..(3)..(37): Xaa is C or S
  MOD_RES (15)..(16)..(17)..(18)..(19): Xaa is A or G
  MOD_RES (20)..(21)..(22)..(23): Xaa is A or G or absent
XGXRDVVMGPYVKLXXXXXXXXXFFLMSLSSMKTPTX

SEQ ID NO: 23002 - protein, 35 aa, Artificial Sequence
  Non-cyclic GFR-binding peptide
  MOD_RES (34)..(34): Xaa is C or S
KNHQLFPYVKLHQGQHPKIRFFLMSLSSEETPVXE

SEQ ID NO: 23003 - protein, 38 aa, Artificial Sequence
  Non-cyclic GFR-binding peptide
  MOD_RES (1)..(3)..(34)..(35): Xaa is C or S
XGXEEVIMPYVKLLLVRGNDFFLMSLSSTKVPAXXTSP

SEQ ID NO: 23004 - protein, 38 aa, Artificial Sequence
  Non-cyclic GFR-binding peptide
  MOD_RES (1)..(32)..(33): Xaa is C or S
XEEVIMPYVKLLLVRGNDFFLMSLSSTKVPAXXTSPVR

SEQ ID NO: 23005 - protein, 32 aa, Artificial Sequence
  Non-cyclic GFR-binding peptide
  MOD_RES (11)..(12)..(13)..(14)..(15): Xaa is A or G
  MOD_RES (16)..(17)..(18)..(19): Xaa is A or G or absent
SVAMGPYVKLXXXXXXXXXFFLISLSSLKTPV

SEQ ID NO: 23006 - protein, 41 aa, Artificial Sequence
  Non-cyclic GFR-binding peptide
  MOD_RES (2)..(4)..(37)..(38): Xaa is C or S
  MOD_RES (15)..(16)..(17)..(18)..(19): Xaa is A or G
  MOD_RES (20)..(21)..(22)..(23): Xaa is A or G or absent
SXKXSRVIMPYVKLXXXXXXXXXFFLISLSSLAQPVXXPAA

SEQ ID NO: 23007 - protein, 39 aa, Artificial Sequence
  Non-cyclic GFR-binding peptide
  MOD_RES (2)..(4)..(38)..(39): Xaa is C or S
  MOD_RES (16)..(17)..(18)..(19)..(20): Xaa is A or G
  MOD_RES (21)..(22)..(23)..(24): Xaa is A or G or absent
RXGXGEVVMEPYVKLXXXXXXXXXFFLMSLSSLETPVXX

SEQ ID NO: 23008 - protein, 36 aa, Artificial Sequence
  Non-cyclic GFR-binding peptide
  MOD_RES (2)..(4)..(35)..(36): Xaa is C or S
SXKXSKVVMPYVKLVKPTRGVFFLISLSSLDQPVXX

SEQ ID NO: 23009 - protein, 40 aa, Artificial Sequence
  Non-cyclic GFR-binding peptide
  MOD_RES (2)..(36)..(37): Xaa is C or S
  MOD_RES (14)..(15)..(16)..(17)..(18): Xaa is A or G
  MOD_RES (19)..(20)..(21)..(22): Xaa is A or G or absent
GXGEVVMEPYVKLXXXXXXXXXFFLMSLSSLETPVXXAKP

SEQ ID NO: 23010 - protein, 37 aa, Artificial Sequence
  Non-cyclic GFR-binding peptide
  MOD_RES (1)..(3)..(35)..(36): Xaa is C or S
XGXSEVVMDPYVKLVVNNASDFFLISLSSLRTPVXXT

SEQ ID NO: 23011 - protein, 35 aa, Artificial Sequence
  Non-cyclic GFR-binding peptide
  MOD_RES (2)..(35): Xaa is C or S
  MOD_RES (13)..(14)..(15)..(16)..(17): Xaa is A or G
  MOD_RES (18)..(19)..(20)..(21): Xaa is A or G or absent
KXSKVIMPYVKLXXXXXXXXXFFLISLSSLDQSVX

SEQ ID NO: 23012 - protein, 31 aa, Artificial Sequence
  Non-cyclic GFR-binding peptide
  MOD_RES (31)..(31): Xaa is C or S
EVVMDPYVKLVVNNAADFFLISLSSLRAPVX

SEQ ID NO: 23013 - protein, 41 aa, Artificial Sequence
  Non-cyclic GFR-binding peptide
  MOD_RES (2)..(4)..(35)..(36): Xaa is C or S
SXKXSKVVMPYVKLVKPTRGVFFLISLSSLDQPVXXPSASA

SEQ ID NO: 23014 - protein, 35 aa, Artificial Sequence
  Non-cyclic GFR-binding peptide
  MOD_RES (1)..(3): Xaa is C or S
  MOD_RES (14)..(15)..(16)..(17)..(18): Xaa is A or G
  MOD_RES (19)..(20)..(21)..(22): Xaa is A or G or absent
XKXSKVIMPYVKLXXXXXXXXXFFLISLSSLDQSV

SEQ ID NO: 23015 - protein, 33 aa, Artificial Sequence
  Non-cyclic GFR-binding peptide
  MOD_RES (33)..(33): Xaa is C or S
  MOD_RES (11)..(12)..(13)..(14)..(15): Xaa is A or G
  MOD_RES (16)..(17)..(18)..(19): Xaa is A or G or absent
SKVIMPYVKLXXXXXXXXXFFLISLSSLDQSVX

SEQ ID NO: 23016 - protein, 36 aa, Artificial Sequence
  Non-cyclic GFR-binding peptide
  MOD_RES (1)..(33)..(34): Xaa is C or S
XGEVVMEPYVKLVVKDYEDFFLMSLSSLETPVXXAK

SEQ ID NO: 23017 - protein, 36 aa, Artificial Sequence
  Non-cyclic GFR-binding peptide
  MOD_RES (31)..(32): Xaa is C or S
SRVIMPYVKLVKPKRGVFFLISLSSLAQPVXXPAAS

SEQ ID NO: 23018 - protein, 35 aa, Artificial Sequence
  Non-cyclic GFR-binding peptide
  MOD_RES (1)..(34)..(35): Xaa is C or S
XEAVSMGEPYVKLTPVGMDDFFLVSLSSLKTPVXX

SEQ ID NO: 23019 - protein, 35 aa, Artificial Sequence
  Non-cyclic GFR-binding peptide
  MOD_RES (2)..(2): Xaa is C or S
  MOD_RES (14)..(15)..(16)..(17)..(18): Xaa is A or G
  MOD_RES (19)..(20)..(21)..(22): Xaa is A or G or absent
GXSEVVMDPYVKLXXXXXXXXXFFLISLSSLRTPV

SEQ ID NO: 23020 - protein, 42 aa, Artificial Sequence
  Non-cyclic GFR-binding peptide
  MOD_RES (2)..(4)..(39)..(40): Xaa is C or S
  MOD_RES (17)..(18)..(19)..(20)..(21): Xaa is A or G
  MOD_RES (22)..(23)..(24)..(25): Xaa is A or G or absent
RXGXEAVSMGEPYVKLXXXXXXXXXFFLVSLSSLKTPVXXAK

SEQ ID NO: 23021 - protein, 38 aa, Artificial Sequence
  Non-cyclic GFR-binding peptide
  MOD_RES (2)..(4)..(36)..(37): Xaa is C or S
RXGXESVAMGPYVKLYTVVGKDFFLISLSSLKTPVXXA

SEQ ID NO: 23022 - protein, 41 aa, Artificial Sequence
  Non-cyclic GFR-binding peptide
  MOD_RES (1)..(3)..(36)..(37): Xaa is C or S
  MOD_RES (14)..(15)..(16)..(17)..(18): Xaa is A or G
  MOD_RES (19)..(20)..(21)..(22): Xaa is A or G or absent
XKXSKVIMPYVKLXXXXXXXXXFFLISLSSLDQSVXXPSAS

SEQ ID NO: 23023 - protein, 44 aa, Artificial Sequence
  Non-cyclic GFR-binding peptide
  MOD_RES (1)..(3)..(38)..(39): Xaa is C or S
  MOD_RES (16)..(17)..(18)..(19)..(20): Xaa is A or G
  MOD_RES (21)..(22)..(23)..(24): Xaa is A or G or absent
XGXEAVSMGEPYVKLXXXXXXXXXFFLVSLSSLKTPVXXAKGVK

SEQ ID NO: 23024 - protein, 43 aa, Artificial Sequence
  Non-cyclic GFR-binding peptide
  MOD_RES (2)..(39): Xaa is C or S
AXELHEELRPYVKLLKPKKRVYEFFLVSLSSHHVRSPQXKVSS

SEQ ID NO: 23025 - protein, 34 aa, Artificial Sequence
  Non-cyclic GFR-binding peptide
  MOD_RES (1)..(33)..(34): Xaa is C or S
XRDVVMGPYVKLIIQQKDNFFLMSLSSMKTPTXX

SEQ ID NO: 23026 - protein, 36 aa, Artificial Sequence
  Non-cyclic GFR-binding peptide
  MOD_RES (1)..(33)..(34): Xaa is C or S
XSRVVMNPYVKLIVNSSDDFFLVSLSSLKTPAXXPK

SEQ ID NO: 23027 - protein, 36 aa, Artificial Sequence
  Non-cyclic GFR-binding peptide
  MOD_RES (1)..(34)..(35): Xaa is C or S
  MOD_RES (12)..(13)..(14)..(15)..(16): Xaa is A or G
  MOD_RES (17)..(18)..(19)..(20): Xaa is A or G or absent
XEEVIMPYVKLXXXXXXXXXFFLMSLSSTKVPAXXT

SEQ ID NO: 23028 - protein, 38 aa, Artificial Sequence
  Non-cyclic GFR-binding peptide
  MOD_RES (1)..(3)..(35)..(36): Xaa is C or S
XGXSRVVMNPYVKLIVNSSDDFFLVSLSSLKTPAXXPK

SEQ ID NO: 23029 - protein, 45 aa, Artificial Sequence
  Non-cyclic GFR-binding peptide
  MOD_RES (2)..(4)..(39)..(40): Xaa is C or S
  MOD_RES (17)..(18)..(19)..(20)..(21): Xaa is A or G
  MOD_RES (22)..(23)..(24)..(25): Xaa is A or G or absent
RXGXEAVSMGEPYVKLXXXXXXXXXFFLVSLSSLKTPVXXAKGVK

SEQ ID NO: 23030 - protein, 42 aa, Artificial Sequence
  Non-cyclic GFR-binding peptide
  MOD_RES (2)..(36)..(37): Xaa is C or S
  MOD_RES (14)..(15)..(16)..(17)..(18): Xaa is A or G
  MOD_RES (19)..(20)..(21)..(22): Xaa is A or G or absent
GXAKVVMNPYVKLXXXXXXXXXFFLVSLSSLKTPAXXAKPVA

SEQ ID NO: 23031 - protein, 44 aa, Artificial Sequence
  Non-cyclic GFR-binding peptide
  MOD_RES (2)..(4)..(39)..(40): Xaa is C or S
  MOD_RES (17)..(18)..(19)..(20)..(21): Xaa is A or G
  MOD_RES (22)..(23)..(24)..(25): Xaa is A or G or absent
RXGXEAVSMGEPYVKLXXXXXXXXXFFLVSLSSLKTPVXXAKGV

SEQ ID NO: 23032 - protein, 38 aa, Artificial Sequence
  Non-cyclic GFR-binding peptide
  MOD_RES (2)..(4): Xaa is C or S
  MOD_RES (17)..(18)..(19)..(20)..(21): Xaa is A or G
  MOD_RES (22)..(23)..(24)..(25): Xaa is A or G or absent
AXAXELHEELRPYVKLXXXXXXXXXFFLVSLSSHHVRS

SEQ ID NO: 23033 - protein, 35 aa, Artificial Sequence
  Non-cyclic GFR-binding peptide
  MOD_RES (1)..(3)..(34)..(35): Xaa is C or S
XKXSRVIMPYVKLVKPKRGVFFLISLSSLAQPVXX

SEQ ID NO: 23034 - protein, 39 aa, Artificial Sequence
  Non-cyclic GFR-binding peptide
  MOD_RES (1)..(3): Xaa is C or S
XAXELHEELRPYVKLLKPKKRVYEFFLVSLSSHHVRSPQ

SEQ ID NO: 23035 - protein, 42 aa, Artificial Sequence
  Non-cyclic GFR-binding peptide
  MOD_RES (2)..(37)..(38): Xaa is C or S
  MOD_RES (15)..(16)..(17)..(18)..(19): Xaa is A or G
  MOD_RES (20)..(21)..(22)..(23): Xaa is A or G or absent
GXEAVSMGEPYVKLXXXXXXXXXFFLVSLSSLKTPVXXAKGV

SEQ ID NO: 23036 - protein, 37 aa, Artificial Sequence
  Non-cyclic GFR-binding peptide
  MOD_RES (1)..(3)..(35): Xaa is C or S
XGXSRVVMNPYVKLIVNSSDDFFLVSLSSLKTPAXTP

SEQ ID NO: 23037 - protein, 35 aa, Artificial Sequence
  Non-cyclic GFR-binding peptide
  MOD_RES (34)..(35): Xaa is C or S
  MOD_RES (12)..(13)..(14)..(15)..(16): Xaa is A or G
  MOD_RES (17)..(18)..(19)..(20): Xaa is A or G or absent
SEVVMDPYVKLXXXXXXXXXFFLISLSSLRTPVXX

SEQ ID NO: 23038 - protein, 44 aa, Artificial Sequence
  Non-cyclic GFR-binding peptide
  MOD_RES (2)..(4)..(38)..(39): Xaa is C or S
  MOD_RES (16)..(17)..(18)..(19)..(20): Xaa is A or G
  MOD_RES (21)..(22)..(23)..(24): Xaa is A or G or absent
SXGXRDVVMGPYVKLXXXXXXXXXFFLMSLSSMKTPTXXPGASG

SEQ ID NO: 23039 - protein, 37 aa, Artificial Sequence
  Non-cyclic GFR-binding peptide
  MOD_RES (2)..(34): Xaa is C or S
GXSRVVMNPYVKLIVNSSDDFFLVSLSSLKTPAXTPK

SEQ ID NO: 23040 - protein, 42 aa, Artificial Sequence
  Non-cyclic GFR-binding peptide
  MOD_RES (2)..(36): Xaa is C or S
  MOD_RES (14)..(15)..(16)..(17)..(18): Xaa is A or G
  MOD_RES (19)..(20)..(21)..(22): Xaa is A or G or absent
GXSRVVMNPYVKLXXXXXXXXXFFLVSLSSLKTPAXTPKTVH

SEQ ID NO: 23041 - protein, 42 aa, Artificial Sequence
  Non-cyclic GFR-binding peptide
  MOD_RES (1)..(3)..(37)..(38): Xaa is C or S
  MOD_RES (15)..(16)..(17)..(18)..(19): Xaa is A or G
  MOD_RES (20)..(21)..(22)..(23): Xaa is A or G or absent
XGXARVVMNPYVKLXXXXXXXXXFFLVSLSSLQTPAXXPKPV

SEQ ID NO: 23042 - protein, 38 aa, Artificial Sequence
  Non-cyclic GFR-binding peptide
  MOD_RES (1)..(3)..(34)..(35): Xaa is C or S
XKXSRVIMPYVKLVKPKRGVFFLISLSSLAQPVXXPAA

SEQ ID NO: 23043 - protein, 37 aa, Artificial Sequence
  Non-cyclic GFR-binding peptide
  MOD_RES (1)..(1): Xaa is C or S
XELHEELRPYVKLLKPKKRVYEFFLVSLSSHHVRSPQ

SEQ ID NO: 23044 - protein, 39 aa, Artificial Sequence
  Non-cyclic GFR-binding peptide
  MOD_RES (34)..(34): Xaa is C or S
  MOD_RES (12)..(13)..(14)..(15)..(16): Xaa is A or G
  MOD_RES (17)..(18)..(19)..(20): Xaa is A or G or absent
KNHQLFPYVKLXXXXXXXXXFFLMSLSSEETPVXELGED

SEQ ID NO: 23045 - protein, 35 aa, Artificial Sequence
  Non-cyclic GFR-binding peptide
  MOD_RES (2)..(4)..(35): Xaa is C or S
SXKXSKVIMPYVKLIKPTKGIFFLISLSSLDQSVX

SEQ ID NO: 23046 - protein, 36 aa, Artificial Sequence
  Non-cyclic GFR-binding peptide
  MOD_RES (33)..(34): Xaa is C or S
  MOD_RES (11)..(12)..(13)..(14)..(15): Xaa is A or G
  MOD_RES (16)..(17)..(18)..(19): Xaa is A or G or absent
EVVMDPYVKLXXXXXXXXXFFLISLSSLRTPVXXTP

SEQ ID NO: 23047 - protein, 38 aa, Artificial Sequence
  Non-cyclic GFR-binding peptide
  MOD_RES (33)..(34): Xaa is C or S
  MOD_RES (11)..(12)..(13)..(14)..(15): Xaa is A or G
  MOD_RES (16)..(17)..(18)..(19): Xaa is A or G or absent
RVVMNPYVKLXXXXXXXXXFFLVSLSSLKTPAXXPKPV

SEQ ID NO: 23048 - protein, 40 aa, Artificial Sequence
  Non-cyclic GFR-binding peptide
  MOD_RES (2)..(4)..(37)..(38): Xaa is C or S
  MOD_RES (15)..(16)..(17)..(18)..(19): Xaa is A or G
  MOD_RES (20)..(21)..(22)..(23): Xaa is A or G or absent
SXKXSKVVMPYVKLXXXXXXXXXFFLISLSSLDQPVXXPS

SEQ ID NO: 23049 - protein, 39 aa, Artificial Sequence
  Non-cyclic GFR-binding peptide
  MOD_RES (1)..(38): Xaa is C or S
  MOD_RES (14)..(15)..(16)..(17)..(18): Xaa is A or G
  MOD_RES (19)..(20)..(21)..(22): Xaa is A or G or absent
XELHEELRPYVKLXXXXXXXXXFFLVSLSSHHVRSPQXK

SEQ ID NO: 23050 - protein, 43 aa, Artificial Sequence
  Non-cyclic GFR-binding peptide
  MOD_RES (2)..(4)..(38)..(39): Xaa is C or S
  MOD_RES (16)..(17)..(18)..(19)..(20): Xaa is A or G
  MOD_RES (21)..(22)..(23)..(24): Xaa is A or G or absent
HXGXARVVMNPYVKLXXXXXXXXXFFLVSLSSLQTPAXXPKPV

SEQ ID NO: 23051 - protein, 43 aa, Artificial Sequence
  Non-cyclic GFR-binding peptide
  MOD_RES (1)..(3)..(37)..(38): Xaa is C or S
  MOD_RES (15)..(16)..(17)..(18)..(19): Xaa is A or G
  MOD_RES (20)..(21)..(22)..(23): Xaa is A or G or absent
XGXAEVVMDPYVKLXXXXXXXXXFFLISLSSLRAPVXXSAPAA

SEQ ID NO: 23052 - protein, 33 aa, Artificial Sequence
  Non-cyclic GFR-binding peptide
  MOD_RES (31)..(32): Xaa is C or S
KVVMNPYVKLIVNNSSDFFLVSLSSLKTPAXXA

SEQ ID NO: 23053 - protein, 35 aa, Artificial Sequence
  Non-cyclic GFR-binding peptide
  MOD_RES (2)..(2): Xaa is C or S
  MOD_RES (14)..(15)..(16)..(17)..(18): Xaa is A or G
  MOD_RES (19)..(20)..(21)..(22): Xaa is A or G or absent
GXAKVVMNPYVKLXXXXXXXXXFFLVSLSSLKTPA

SEQ ID NO: 23054 - protein, 35 aa, Artificial Sequence
  Non-cyclic GFR-binding peptide
  MOD_RES (1)..(35): Xaa is C or S
  MOD_RES (13)..(14)..(15)..(16)..(17): Xaa is A or G
  MOD_RES (18)..(19)..(20)..(21): Xaa is A or G or absent
XKNHQLFPYVKLXXXXXXXXXFFLMSLSSEETPVX

SEQ ID NO: 23055 - protein, 36 aa, Artificial Sequence
  Non-cyclic GFR-binding peptide
  MOD_RES (1)..(3): Xaa is C or S
XEXKNHQLFPYVKLHQGQHPKIRFFLMSLSSEETPV

SEQ ID NO: 23056 - protein, 38 aa, Artificial Sequence
  Non-cyclic GFR-binding peptide
  MOD_RES (33)..(34): Xaa is C or S
  MOD_RES (11)..(12)..(13)..(14)..(15): Xaa is A or G
  MOD_RES (16)..(17)..(18)..(19): Xaa is A or G or absent
EEVIMPYVKLXXXXXXXXXFFLMSLSSTKVPAXXTSPV

SEQ ID NO: 23057 - protein, 38 aa, Artificial Sequence
  Non-cyclic GFR-binding peptide
  MOD_RES (2)..(34)..(35): Xaa is C or S
GXGEVVMEPYVKLVVKDYEDFFLMSLSSLETPVXXAKP

SEQ ID NO: 23058 - protein, 34 aa, Artificial Sequence
  Non-cyclic GFR-binding peptide
  MOD_RES (32)..(33): Xaa is C or S
SEVVMDPYVKLVVNNASDFFLISLSSLRTPVXXT

SEQ ID NO: 23059 - protein, 33 aa, Artificial Sequence
  Non-cyclic GFR-binding peptide
  MOD_RES (12)..(13)..(14)..(15)..(16): Xaa is A or G
  MOD_RES (17)..(18)..(19)..(20): Xaa is A or G or absent
RDVVMGPYVKLXXXXXXXXXFFLMSLSSMKTPT

SEQ ID NO: 23060 - protein, 38 aa, Artificial Sequence
  Non-cyclic GFR-binding peptide
  MOD_RES (1)..(32)..(33): Xaa is C or S
XSKVIMPYVKLIKPTKGIFFLISLSSLDQSVXXPSASA

SEQ ID NO: 23061 - protein, 34 aa, Artificial Sequence
  Non-cyclic GFR-binding peptide
  MOD_RES (1)..(3): Xaa is C or S
XGXAEVVMDPYVKLVVNNAADFFLISLSSLRAPV

SEQ ID NO: 23062 - protein, 43 aa, Artificial Sequence
  Non-cyclic GFR-binding peptide
  MOD_RES (1)..(3)..(37)..(38): Xaa is C or S
  MOD_RES (15)..(16)..(17)..(18)..(19): Xaa is A or G
  MOD_RES (20)..(21)..(22)..(23): Xaa is A or G or absent
XGXSEVVMDPYVKLXXXXXXXXXFFLISLSSLRTPVXXTPPTS

SEQ ID NO: 23063 - protein, 36 aa, Artificial Sequence
  Non-cyclic GFR-binding peptide
  MOD_RES (34)..(35): Xaa is C or S
  MOD_RES (12)..(13)..(14)..(15)..(16): Xaa is A or G
  MOD_RES (17)..(18)..(19)..(20): Xaa is A or G or absent
GEVVMEPYVKLXXXXXXXXXFFLMSLSSLETPVXXA

SEQ ID NO: 23064 - protein, 38 aa, Artificial Sequence
  Non-cyclic GFR-binding peptide
  MOD_RES (2)..(4)..(37)..(38): Xaa is C or S
  MOD_RES (15)..(16)..(17)..(18)..(19): Xaa is A or G
  MOD_RES (20)..(21)..(22)..(23): Xaa is A or G or absent
LXGXEEVIMPYVKLXXXXXXXXXFFLMSLSSTKVPAXX

SEQ ID NO: 23065 - protein, 41 aa, Artificial Sequence
  Non-cyclic GFR-binding peptide
  MOD_RES (2)..(4)..(36)..(37): Xaa is C or S
RXGXESVAMGPYVKLYTVVGKDFFLISLSSLKTPVXXAKSA

SEQ ID NO: 23066 - protein, 40 aa, Artificial Sequence
  Non-cyclic GFR-binding peptide
  MOD_RES (1)..(3)..(36)..(37): Xaa is C or S
  MOD_RES (14)..(15)..(16)..(17)..(18): Xaa is A or G
  MOD_RES (19)..(20)..(21)..(22): Xaa is A or G or absent
XKXSRVIMPYVKLXXXXXXXXXFFLISLSSLAQPVXXPAA

SEQ ID NO: 23067 - protein, 36 aa, Artificial Sequence
  Non-cyclic GFR-binding peptide
  MOD_RES (2)..(34)..(35): Xaa is C or S
GXSEVVMDPYVKLVVNNASDFFLISLSSLRTPVXXT

SEQ ID NO: 23068 - protein, 36 aa, Artificial Sequence
  Non-cyclic GFR-binding peptide
  MOD_RES (2)..(4)..(36): Xaa is C or S
RXGXSEVVMDPYVKLVVNNASDFFLISLSSLRTPVX

SEQ ID NO: 23069 - protein, 37 aa, Artificial Sequence
  Non-cyclic GFR-binding peptide
  MOD_RES (1)..(33)..(34): Xaa is C or S
XSEVVMDPYVKLVVNNASDFFLISLSSLRTPVXXTPP

SEQ ID NO: 23070 - protein, 34 aa, Artificial Sequence
  Non-cyclic GFR-binding peptide
  MOD_RES (2)..(2): Xaa is C or S
GXEAVSMGEPYVKLTPVGMDDFFLVSLSSLKTPV

SEQ ID NO: 23071 - protein, 33 aa, Artificial Sequence
  Non-cyclic GFR-binding peptide
  MOD_RES (1)..(3): Xaa is C or S
XKXSKVVMPYVKLVKPTRGVFFLISLSSLDQPV

SEQ ID NO: 23072 - protein, 41 aa, Artificial Sequence
  Non-cyclic GFR-binding peptide
  MOD_RES (2)..(36)..(37): Xaa is C or S
  MOD_RES (14)..(15)..(16)..(17)..(18): Xaa is A or G
  MOD_RES (19)..(20)..(21)..(22): Xaa is A or G or absent
GXAEVVMDPYVKLXXXXXXXXXFFLISLSSLRAPVXXSAPA

SEQ ID NO: 23073 - protein, 38 aa, Artificial Sequence
  Non-cyclic GFR-binding peptide
  MOD_RES (1)..(3)..(37)..(38): Xaa is C or S
  MOD_RES (15)..(16)..(17)..(18)..(19): Xaa is A or G
  MOD_RES (20)..(21)..(22)..(23): Xaa is A or G or absent
XGXAEVVMDPYVKLXXXXXXXXXFFLISLSSLRAPVXX

SEQ ID NO: 23074 - protein, 35 aa, Artificial Sequence
  Non-cyclic GFR-binding peptide
  MOD_RES (1)..(1): Xaa is C or S
  MOD_RES (14)..(15)..(16)..(17)..(18): Xaa is A or G
  MOD_RES (19)..(20)..(21)..(22): Xaa is A or G or absent
XELHEELRPYVKLXXXXXXXXXFFLVSLSSHHVRS

SEQ ID NO: 23075 - protein, 34 aa, Artificial Sequence
  Non-cyclic GFR-binding peptide
  MOD_RES (31)..(32): Xaa is C or S
SKVVMPYVKLVKPTRGVFFLISLSSLDQPVXXPS

SEQ ID NO: 23076 - protein, 38 aa, Artificial Sequence
  Non-cyclic GFR-binding peptide
  MOD_RES (1)..(3): Xaa is C or S
XAXELHEELRPYVKLLKPKKRVYEFFLVSLSSHHVRSP

SEQ ID NO: 23077 - protein, 42 aa, Artificial Sequence
  Non-cyclic GFR-binding peptide
  MOD_RES (1)..(3)..(37): Xaa is C or S
XEXKNHQLFPYVKLHQGQHPKIRFFLMSLSSEETPVXELGED

SEQ ID NO: 23078 - protein, 33 aa, Artificial Sequence
  Non-cyclic GFR-binding peptide
  MOD_RES (1)..(32)..(33): Xaa is C or S
XSRVIMPYVKLVKPKRGVFFLISLSSLAQPVXX

SEQ ID NO: 23079 - protein, 36 aa, Artificial Sequence
  Non-cyclic GFR-binding peptide
  MOD_RES (1)..(1): Xaa is C or S
XELHEELRPYVKLLKPKKRVYEFFLVSLSSHHVRSP

SEQ ID NO: 23080 - protein, 38 aa, Artificial Sequence
  Non-cyclic GFR-binding peptide
  MOD_RES (2)..(34)..(35): Xaa is C or S
GXAEVVMDPYVKLVVNNAADFFLISLSSLRAPVXXSAP

SEQ ID NO: 23081 - protein, 38 aa, Artificial Sequence
  Non-cyclic GFR-binding peptide
  MOD_RES (1)..(3)..(36)..(37): Xaa is C or S
XGXEAVSMGEPYVKLTPVGMDDFFLVSLSSLKTPVXXA

SEQ ID NO: 23082 - protein, 38 aa, Artificial Sequence
  Non-cyclic GFR-binding peptide
  MOD_RES (2)..(4)..(38): Xaa is C or S
  MOD_RES (16)..(17)..(18)..(19)..(20): Xaa is A or G
  MOD_RES (21)..(22)..(23)..(24): Xaa is A or G or absent
SXGXRDVVMGPYVKLXXXXXXXXXFFLMSLSSMKTPTX

SEQ ID NO: 23083 - protein, 43 aa, Artificial Sequence
  Non-cyclic GFR-binding peptide
  MOD_RES (2)..(4)..(38): Xaa is C or S
  MOD_RES (16)..(17)..(18)..(19)..(20): Xaa is A or G
  MOD_RES (21)..(22)..(23)..(24): Xaa is A or G or absent
RXEXKNHQLFPYVKLXXXXXXXXXFFLMSLSSEETPVXELGED

SEQ ID NO: 23084 - protein, 36 aa, Artificial Sequence
  Non-cyclic GFR-binding peptide
  MOD_RES (31)..(32): Xaa is C or S
SKVIMPYVKLIKPTKGIFFLISLSSLDQSVXXPSAS

SEQ ID NO: 23085 - protein, 37 aa, Artificial Sequence
  Non-cyclic GFR-binding peptide
  MOD_RES (2)..(2): Xaa is C or S
  MOD_RES (15)..(16)..(17)..(18)..(19): Xaa is A or G
  MOD_RES (20)..(21)..(22)..(23): Xaa is A or G or absent
AXELHEELRPYVKLXXXXXXXXXFFLVSLSSHHVRSP

SEQ ID NO: 23086 - protein, 42 aa, Artificial Sequence
  Non-cyclic GFR-binding peptide
  MOD_RES (1)..(3)..(36)..(37): Xaa is C or S
  MOD_RES (14)..(15)..(16)..(17)..(18): Xaa is A or G
  MOD_RES (19)..(20)..(21)..(22): Xaa is A or G or absent
XKXSRVIMPYVKLXXXXXXXXXFFLISLSSLAQPVXXPAASA

SEQ ID NO: 23087 - protein, 33 aa, Artificial Sequence
  Non-cyclic GFR-binding peptide
  MOD_RES (1)..(33): Xaa is C or S
XSRVVMNPYVKLIVNSSDDFFLVSLSSLKTPAX

SEQ ID NO: 23088 - protein, 33 aa, Artificial Sequence
  Non-cyclic GFR-binding peptide
  MOD_RES (1)..(33): Xaa is C or S
XESVAMGPYVKLYTVVGKDFFLISLSSLKTPVX

SEQ ID NO: 23089 - protein, 34 aa, Artificial Sequence
  Non-cyclic GFR-binding peptide
  MOD_RES (31)..(32): Xaa is C or S
SKVIMPYVKLIKPTKGIFFLISLSSLDQSVXXPS

SEQ ID NO: 23090 - protein, 36 aa, Artificial Sequence
  Non-cyclic GFR-binding peptide
  MOD_RES (31)..(32): Xaa is C or S
SKVVMPYVKLVKPTRGVFFLISLSSLDQPVXXPSAS

SEQ ID NO: 23091 - protein, 37 aa, Artificial Sequence
  Non-cyclic GFR-binding peptide
  MOD_RES (31)..(32): Xaa is C or S
SRVIMPYVKLVKPKRGVFFLISLSSLAQPVXXPAASA

SEQ ID NO: 23092 - protein, 41 aa, Artificial Sequence
  Non-cyclic GFR-binding peptide
  MOD_RES (2)..(4)..(37)..(38): Xaa is C or S
  MOD_RES (15)..(16)..(17)..(18)..(19): Xaa is A or G
  MOD_RES (20)..(21)..(22)..(23): Xaa is A or G or absent
SXKXSKVVMPYVKLXXXXXXXXXFFLISLSSLDQPVXXPSA

SEQ ID NO: 23093 - protein, 35 aa, Artificial Sequence
  Non-cyclic GFR-binding peptide
  MOD_RES (1)..(33)..(34): Xaa is C or S
XGEVVMEPYVKLVVKDYEDFFLMSLSSLETPVXXA

SEQ ID NO: 23094 - protein, 34 aa, Artificial Sequence
  Non-cyclic GFR-binding peptide
  MOD_RES (33)..(34): Xaa is C or S
  MOD_RES (11)..(12)..(13)..(14)..(15): Xaa is A or G
  MOD_RES (16)..(17)..(18)..(19): Xaa is A or G or absent
RVVMNPYVKLXXXXXXXXXFFLVSLSSLKTPAXX

SEQ ID NO: 23095 - protein, 32 aa, Artificial Sequence
  Non-cyclic GFR-binding peptide
  MOD_RES (32)..(32): Xaa is C or S
GEVVMEPYVKLVVKDYEDFFLMSLSSLETPVX

SEQ ID NO: 23096 - protein, 42 aa, Artificial Sequence
  Non-cyclic GFR-binding peptide
  MOD_RES (1)..(3)..(37)..(38): Xaa is C or S
  MOD_RES (15)..(16)..(17)..(18)..(19): Xaa is A or G
  MOD_RES (20)..(21)..(22)..(23): Xaa is A or G or absent
XGXRDVVMGPYVKLXXXXXXXXXFFLMSLSSMKTPTXXPGAS

SEQ ID NO: 23097 - protein, 34 aa, Artificial Sequence
  Non-cyclic GFR-binding peptide
  MOD_RES (33)..(34): Xaa is C or S
  MOD_RES (11)..(12)..(13)..(14)..(15): Xaa is A or G
  MOD_RES (16)..(17)..(18)..(19): Xaa is A or G or absent
KVVMNPYVKLXXXXXXXXXFFLVSLSSLKTPAXX

SEQ ID NO: 23098 - protein, 31 aa, Artificial Sequence
  Non-cyclic GFR-binding peptide
  MOD_RES (31)..(31): Xaa is C or S
RVVMNPYVKLIVNSSDDFFLVSLSSLKTPAX

SEQ ID NO: 23099 - protein, 38 aa, Artificial Sequence
  Non-cyclic GFR-binding peptide
  MOD_RES (2)..(36)..(37): Xaa is C or S
  MOD_RES (14)..(15)..(16)..(17)..(18): Xaa is A or G
  MOD_RES (19)..(20)..(21)..(22): Xaa is A or G or absent
GXRDVVMGPYVKLXXXXXXXXXFFLMSLSSMKTPTXXP

SEQ ID NO: 23100 - protein, 40 aa, Artificial Sequence
  Non-cyclic GFR-binding peptide
  MOD_RES (2)..(4)..(38): Xaa is C or S
  MOD_RES (16)..(17)..(18)..(19)..(20): Xaa is A or G
  MOD_RES (21)..(22)..(23)..(24): Xaa is A or G or absent
HXGXSRVVMNPYVKLXXXXXXXXXFFLVSLSSLKTPAXTP

SEQ ID NO: 23101 - protein, 38 aa, Artificial Sequence
  Non-cyclic GFR-binding peptide
  MOD_RES (2)..(4)..(36)..(37): Xaa is C or S
RXGXSEVVMDPYVKLVVNNASDFFLISLSSLRTPVXXT

SEQ ID NO: 23102 - protein, 42 aa, Artificial Sequence
  Non-cyclic GFR-binding peptide
  MOD_RES (2)..(4)..(38): Xaa is C or S
RXEXKNHQLFPYVKLHQGQHPKIRFFLMSLSSEETPVXELGE

SEQ ID NO: 23103 - protein, 40 aa, Artificial Sequence
  Non-cyclic GFR-binding peptide
  MOD_RES (1)..(3)..(36)..(37): Xaa is C or S
  MOD_RES (14)..(15)..(16)..(17)..(18): Xaa is A or G
  MOD_RES (19)..(20)..(21)..(22): Xaa is A or G or absent
XKXSKVIMPYVKLXXXXXXXXXFFLISLSSLDQSVXXPSA

SEQ ID NO: 23104 - protein, 37 aa, Artificial Sequence
  Non-cyclic GFR-binding peptide
  MOD_RES (1)..(35): Xaa is C or S
XKNHQLFPYVKLHQGQHPKIRFFLMSLSSEETPVXEL

SEQ ID NO: 23105 - protein, 44 aa, Artificial Sequence
  Non-cyclic GFR-binding peptide
  MOD_RES (2)..(4)..(41): Xaa is C or S
  MOD_RES (17)..(18)..(19)..(20)..(21): Xaa is A or G
  MOD_RES (22)..(23)..(24)..(25): Xaa is A or G or absent
AXAXELHEELRPYVKLXXXXXXXXXFFLVSLSSHHVRSPQXKVS

SEQ ID NO: 23106 - protein, 39 aa, Artificial Sequence
  Non-cyclic GFR-binding peptide
  MOD_RES (2)..(36)..(37): Xaa is C or S
  MOD_RES (14)..(15)..(16)..(17)..(18): Xaa is A or G
  MOD_RES (19)..(20)..(21)..(22): Xaa is A or G or absent
GXARVVMNPYVKLXXXXXXXXXFFLVSLSSLQTPAXXPK

SEQ ID NO: 23107 - protein, 31 aa, Artificial Sequence
  Non-cyclic GFR-binding peptide
ESVAMGPYVKLYTVVGKDFFLISLSSLKTPV

SEQ ID NO: 23108 - protein, 34 aa, Artificial Sequence
  Non-cyclic GFR-binding peptide
  MOD_RES (12)..(13)..(14)..(15)..(16): Xaa is A or G
  MOD_RES (17)..(18)..(19)..(20): Xaa is A or G or absent
LHEELRPYVKLXXXXXXXXXFFLVSLSSHHVRSP

SEQ ID NO: 23109 - protein, 30 aa, Artificial Sequence
  Non-cyclic GFR-binding peptide
EEVIMPYVKLLLVRGNDFFLMSLSSTKVPA

SEQ ID NO: 23110 - protein, 36 aa, Artificial Sequence
  Non-cyclic GFR-binding peptide
  MOD_RES (33)..(34): Xaa is C or S
  MOD_RES (11)..(12)..(13)..(14)..(15): Xaa is A or G
  MOD_RES (16)..(17)..(18)..(19): Xaa is A or G or absent
SVAMGPYVKLXXXXXXXXXFFLISLSSLKTPVXXAK

SEQ ID NO: 23111 - protein, 32 aa, Artificial Sequence
  Non-cyclic GFR-binding peptide
  MOD_RES (1)..(32): Xaa is C or S
XSKVVMPYVKLVKPTRGVFFLISLSSLDQPVX

SEQ ID NO: 23112 - protein, 42 aa, Artificial Sequence
  Non-cyclic GFR-binding peptide
  MOD_RES (2)..(4)..(37)..(38): Xaa is C or S
  MOD_RES (15)..(16)..(17)..(18)..(19): Xaa is A or G
  MOD_RES (20)..(21)..(22)..(23): Xaa is A or G or absent
LXGXEEVIMPYVKLXXXXXXXXXFFLMSLSSTKVPAXXTSPV

SEQ ID NO: 23113 - protein, 35 aa, Artificial Sequence
  Non-cyclic GFR-binding peptide
  MOD_RES (2)..(2): Xaa is C or S
  MOD_RES (14)..(15)..(16)..(17)..(18): Xaa is A or G
  MOD_RES (19)..(20)..(21)..(22): Xaa is A or G or absent
GXGEVVMEPYVKLXXXXXXXXXFFLMSLSSLETPV

SEQ ID NO: 23114 - protein, 40 aa, Artificial Sequence
  Non-cyclic GFR-binding peptide
  MOD_RES (1)..(3)..(35)..(36): Xaa is C or S
XGXESVAMGPYVKLYTVVGKDFFLISLSSLKTPVXXAKSA

SEQ ID NO: 23115 - protein, 36 aa, Artificial Sequence
  Non-cyclic GFR-binding peptide
  MOD_RES (1)..(35)..(36): Xaa is C or S
  MOD_RES (13)..(14)..(15)..(16)..(17): Xaa is A or G
  MOD_RES (18)..(19)..(20)..(21): Xaa is A or G or absent
XAEVVMDPYVKLXXXXXXXXXFFLISLSSLRAPVXX

SEQ ID NO: 23116 - protein, 36 aa, Artificial Sequence
  Non-cyclic GFR-binding peptide
  MOD_RES (1)..(3)..(35)..(36): Xaa is C or S
XGXAEVVMDPYVKLVVNNAADFFLISLSSLRAPVXX

SEQ ID NO: 23117 - protein, 40 aa, Artificial Sequence
  Non-cyclic GFR-binding peptide
  MOD_RES (1)..(3)..(35)..(36): Xaa is C or S
XGXGEVVMEPYVKLVVKDYEDFFLMSLSSLETPVXXAKPI

SEQ ID NO: 23118 - protein, 38 aa, Artificial Sequence
  Non-cyclic GFR-binding peptide
  MOD_RES (34)..(34): Xaa is C or S
KNHQLFPYVKLHQGQHPKIRFFLMSLSSEETPVXELGE

SEQ ID NO: 23119 - protein, 33 aa, Artificial Sequence
  Non-cyclic GFR-binding peptide
  MOD_RES (32)..(33): Xaa is C or S
SRVVMNPYVKLIVNSSDDFFLVSLSSLKTPAXX

SEQ ID NO: 23120 - protein, 42 aa, Artificial Sequence
  Non-cyclic GFR-binding peptide
  MOD_RES (2)..(4)..(38)..(39): Xaa is C or S
  MOD_RES (16)..(17)..(18)..(19)..(20): Xaa is A or G
  MOD_RES (21)..(22)..(23)..(24): Xaa is A or G or absent
HXGXARVVMNPYVKLXXXXXXXXXFFLVSLSSLQTPAXXPKP

SEQ ID NO: 23121 - protein, 37 aa, Artificial Sequence
  Non-cyclic GFR-binding peptide
  MOD_RES (2)..(4): Xaa is C or S
  MOD_RES (16)..(17)..(18)..(19)..(20): Xaa is A or G
  MOD_RES (21)..(22)..(23)..(24): Xaa is A or G or absent
RXGXESVAMGPYVKLXXXXXXXXXFFLISLSSLKTPV

SEQ ID NO: 23122 - protein, 39 aa, Artificial Sequence
  Non-cyclic GFR-binding peptide
  MOD_RES (2)..(34)..(35): Xaa is C or S
GXSEVVMDPYVKLVVNNASDFFLISLSSLRTPVXXTPPT

SEQ ID NO: 23123 - protein, 42 aa, Artificial Sequence
  Non-cyclic GFR-binding peptide
  MOD_RES (1)..(3)..(36)..(37): Xaa is C or S
  MOD_RES (14)..(15)..(16)..(17)..(18): Xaa is A or G
  MOD_RES (19)..(20)..(21)..(22): Xaa is A or G or absent
XKXSKVIMPYVKLXXXXXXXXXFFLISLSSLDQSVXXPSASA

SEQ ID NO: 23124 - protein, 38 aa, Artificial Sequence
  Non-cyclic GFR-binding peptide
  MOD_RES (2)..(36)..(37): Xaa is C or S
  MOD_RES (14)..(15)..(16)..(17)..(18): Xaa is A or G
  MOD_RES (19)..(20)..(21)..(22): Xaa is A or G or absent
GXSRVVMNPYVKLXXXXXXXXXFFLVSLSSLKTPAXXP

SEQ ID NO: 23125 - protein, 39 aa, Artificial Sequence
  Non-cyclic GFR-binding peptide
  MOD_RES (2)..(4)..(38)..(39): Xaa is C or S
  MOD_RES (16)..(17)..(18)..(19)..(20): Xaa is A or G
  MOD_RES (21)..(22)..(23)..(24): Xaa is A or G or absent
SXGXRDVVMGPYVKLXXXXXXXXXFFLMSLSSMKTPTXX

SEQ ID NO: 23126 - protein, 37 aa, Artificial Sequence
  Non-cyclic GFR-binding peptide
  MOD_RES (2)..(36)..(37): Xaa is C or S
  MOD_RES (14)..(15)..(16)..(17)..(18): Xaa is A or G
  MOD_RES (19)..(20)..(21)..(22): Xaa is A or G or absent
GXAEVVMDPYVKLXXXXXXXXXFFLISLSSLRAPVXX

SEQ ID NO: 23127 - protein, 41 aa, Artificial Sequence
  Non-cyclic GFR-binding peptide
  MOD_RES (2)..(4)..(38): Xaa is C or S
  MOD_RES (16)..(17)..(18)..(19)..(20): Xaa is A or G
  MOD_RES (21)..(22)..(23)..(24): Xaa is A or G or absent
HXGXSRVVMNPYVKLXXXXXXXXXFFLVSLSSLKTPAXTPK

SEQ ID NO: 23128 - protein, 35 aa, Artificial Sequence
  Non-cyclic GFR-binding peptide
  MOD_RES (1)..(34)..(35): Xaa is C or S
  MOD_RES (12)..(13)..(14)..(15)..(16): Xaa is A or G
  MOD_RES (17)..(18)..(19)..(20): Xaa is A or G or absent
XEEVIMPYVKLXXXXXXXXXFFLMSLSSTKVPAXX

SEQ ID NO: 23129 - protein, 37 aa, Artificial Sequence
  Non-cyclic GFR-binding peptide
  MOD_RES (34)..(35): Xaa is C or S
  MOD_RES (12)..(13)..(14)..(15)..(16): Xaa is A or G
  MOD_RES (17)..(18)..(19)..(20): Xaa is A or G or absent
GEVVMEPYVKLXXXXXXXXXFFLMSLSSLETPVXXAK

SEQ ID NO: 23130 - protein, 35 aa, Artificial Sequence
  Non-cyclic GFR-binding peptide
  MOD_RES (31)..(32): Xaa is C or S
EEVIMPYVKLLLVRGNDFFLMSLSSTKVPAXXTSP

SEQ ID NO: 23131 - protein, 41 aa, Artificial Sequence
  Non-cyclic GFR-binding peptide
  MOD_RES (1)..(35): Xaa is C or S
  MOD_RES (13)..(14)..(15)..(16)..(17): Xaa is A or G
  MOD_RES (18)..(19)..(20)..(21): Xaa is A or G or absent
XSRVVMNPYVKLXXXXXXXXXFFLVSLSSLKTPAXTPKTVH

SEQ ID NO: 23132 - protein, 41 aa, Artificial Sequence
  Non-cyclic GFR-binding peptide
  MOD_RES (1)..(35)..(36): Xaa is C or S
  MOD_RES (13)..(14)..(15)..(16)..(17): Xaa is A or G
  MOD_RES (18)..(19)..(20)..(21): Xaa is A or G or absent
XRDVVMGPYVKLXXXXXXXXXFFLMSLSSMKTPTXXPGASG

SEQ ID NO: 23133 - protein, 35 aa, Artificial Sequence
  Non-cyclic GFR-binding peptide
  MOD_RES (2)..(33)..(34): Xaa is C or S
GXEEVIMPYVKLLLVRGNDFFLMSLSSTKVPAXXT

SEQ ID NO: 23134 - protein, 38 aa, Artificial Sequence
  Non-cyclic GFR-binding peptide
  MOD_RES (2)..(34)..(35): Xaa is C or S
GXRDVVMGPYVKLIIQQKDNFFLMSLSSMKTPTXXPGA

SEQ ID NO: 23135 - protein, 36 aa, Artificial Sequence
  Non-cyclic GFR-binding peptide
  MOD_RES (1)..(3): Xaa is C or S
  MOD_RES (15)..(16)..(17)..(18)..(19): Xaa is A or G
  MOD_RES (20)..(21)..(22)..(23): Xaa is A or G or absent
XGXESVAMGPYVKLXXXXXXXXXFFLISLSSLKTPV

SEQ ID NO: 23136 - protein, 41 aa, Artificial Sequence
  Non-cyclic GFR-binding peptide
  MOD_RES (2)..(36): Xaa is C or S
EXKNHQLFPYVKLHQGQHPKIRFFLMSLSSEETPVXELGED

SEQ ID NO: 23137 - protein, 37 aa, Artificial Sequence
  Non-cyclic GFR-binding peptide
  MOD_RES (34)..(34): Xaa is C or S
  MOD_RES (12)..(13)..(14)..(15)..(16): Xaa is A or G
  MOD_RES (17)..(18)..(19)..(20): Xaa is A or G or absent
KNHQLFPYVKLXXXXXXXXXFFLMSLSSEETPVXELG

SEQ ID NO: 23138 - protein, 37 aa, Artificial Sequence
  Non-cyclic GFR-binding peptide
  MOD_RES (2)..(34)..(35): Xaa is C or S
GXSEVVMDPYVKLVVNNASDFFLISLSSLRTPVXXTP

SEQ ID NO: 23139 - protein, 39 aa, Artificial Sequence
  Non-cyclic GFR-binding peptide
  MOD_RES (1)..(3)..(34)..(35): Xaa is C or S
XKXSRVIMPYVKLVKPKRGVFFLISLSSLAQPVXXPAAS

SEQ ID NO: 23140 - protein, 36 aa, Artificial Sequence
  Non-cyclic GFR-binding peptide
  MOD_RES (1)..(32)..(33): Xaa is C or S
XEEVIMPYVKLLLVRGNDFFLMSLSSTKVPAXXTSP

SEQ ID NO: 23141 - protein, 37 aa, Artificial Sequence
  Non-cyclic GFR-binding peptide
  MOD_RES (1)..(34)..(35): Xaa is C or S
  MOD_RES (12)..(13)..(14)..(15)..(16): Xaa is A or G
  MOD_RES (17)..(18)..(19)..(20): Xaa is A or G or absent
XSKVIMPYVKLXXXXXXXXXFFLISLSSLDQSVXXPS

SEQ ID NO: 23142 - protein, 41 aa, Artificial Sequence
  Non-cyclic GFR-binding peptide
  MOD_RES (1)..(3)..(36)..(37): Xaa is C or S
  MOD_RES (14)..(15)..(16)..(17)..(18): Xaa is A or G
  MOD_RES (19)..(20)..(21)..(22): Xaa is A or G or absent
XKXSKVVMPYVKLXXXXXXXXXFFLISLSSLDQPVXXPSAS

SEQ ID NO: 23143 - protein, 36 aa, Artificial Sequence
  Non-cyclic GFR-binding peptide
  MOD_RES (2)..(33)..(34): Xaa is C or S
KXSKVVMPYVKLVKPTRGVFFLISLSSLDQPVXXPS

SEQ ID NO: 23144 - protein, 39 aa, Artificial Sequence
  Non-cyclic GFR-binding peptide
  MOD_RES (2)..(4)..(37)..(38): Xaa is C or S
RXGXEAVSMGEPYVKLTPVGMDDFFLVSLSSLKTPVXXA

SEQ ID NO: 23145 - protein, 35 aa, Artificial Sequence
  Non-cyclic GFR-binding peptide
  MOD_RES (31)..(32): Xaa is C or S
SVAMGPYVKLYTVVGKDFFLISLSSLKTPVXXAKS

SEQ ID NO: 23146 - protein, 38 aa, Artificial Sequence
  Non-cyclic GFR-binding peptide
  MOD_RES (2)..(33)..(34): Xaa is C or S
KXSRVIMPYVKLVKPKRGVFFLISLSSLAQPVXXPAAS

SEQ ID NO: 23147 - protein, 34 aa, Artificial Sequence
  Non-cyclic GFR-binding peptide
  MOD_RES (31)..(32): Xaa is C or S
SVAMGPYVKLYTVVGKDFFLISLSSLKTPVXXAK

SEQ ID NO: 23148 - protein, 36 aa, Artificial Sequence
  Non-cyclic GFR-binding peptide
  MOD_RES (2)..(35)..(36): Xaa is C or S
GXEAVSMGEPYVKLTPVGMDDFFLVSLSSLKTPVXX

SEQ ID NO: 23149 - protein, 36 aa, Artificial Sequence
  Non-cyclic GFR-binding peptide
  MOD_RES (1)..(32)..(33): Xaa is C or S
XSRVIMPYVKLVKPKRGVFFLISLSSLAQPVXXPAA

SEQ ID NO: 23150 - protein, 38 aa, Artificial Sequence
  Non-cyclic GFR-binding peptide
  MOD_RES (34)..(35): Xaa is C or S
  MOD_RES (12)..(13)..(14)..(15)..(16): Xaa is A or G
  MOD_RES (17)..(18)..(19)..(20): Xaa is A or G or absent
ESVAMGPYVKLXXXXXXXXXFFLISLSSLKTPVXXAKS

SEQ ID NO: 23151 - protein, 35 aa, Artificial Sequence
  Non-cyclic GFR-binding peptide
  MOD_RES (1)..(35): Xaa is C or S
  MOD_RES (13)..(14)..(15)..(16)..(17): Xaa is A or G
  MOD_RES (18)..(19)..(20)..(21): Xaa is A or G or absent
XAEVVMDPYVKLXXXXXXXXXFFLISLSSLRAPVX

SEQ ID NO: 23152 - protein, 41 aa, Artificial Sequence
  Non-cyclic GFR-binding peptide
  MOD_RES (2)..(35)..(36): Xaa is C or S
  MOD_RES (13)..(14)..(15)..(16)..(17): Xaa is A or G
  MOD_RES (18)..(19)..(20)..(21): Xaa is A or G or absent
KXSRVIMPYVKLXXXXXXXXXFFLISLSSLAQPVXXPAASA

SEQ ID NO: 23153 - protein, 35 aa, Artificial Sequence
  Non-cyclic GFR-binding peptide
  MOD_RES (2)..(35): Xaa is C or S
GXEAVSMGEPYVKLTPVGMDDFFLVSLSSLKTPVX

SEQ ID NO: 23154 - protein, 38 aa, Artificial Sequence
  Non-cyclic GFR-binding peptide
  MOD_RES (2)..(4)..(36)..(37): Xaa is C or S
HXGXAKVVMNPYVKLIVNNSSDFFLVSLSSLKTPAXXA

SEQ ID NO: 23155 - protein, 34 aa, Artificial Sequence
  Non-cyclic GFR-binding peptide
  MOD_RES (1)..(1): Xaa is C or S
  MOD_RES (13)..(14)..(15)..(16)..(17): Xaa is A or G
  MOD_RES (18)..(19)..(20)..(21): Xaa is A or G or absent
XRDVVMGPYVKLXXXXXXXXXFFLMSLSSMKTPT

SEQ ID NO: 23156 - protein, 33 aa, Artificial Sequence
  Non-cyclic GFR-binding peptide
KNHQLFPYVKLHQGQHPKIRFFLMSLSSEETPV

SEQ ID NO: 23157 - protein, 41 aa, Artificial Sequence
  Non-cyclic GFR-binding peptide
  MOD_RES (1)..(35): Xaa is C or S
XKNHQLFPYVKLHQGQHPKIRFFLMSLSSEETPVXELGEDN

SEQ ID NO: 23158 - protein, 37 aa, Artificial Sequence
  Non-cyclic GFR-binding peptide
  MOD_RES (1)..(34)..(35): Xaa is C or S
  MOD_RES (12)..(13)..(14)..(15)..(16): Xaa is A or G
  MOD_RES (17)..(18)..(19)..(20): Xaa is A or G or absent
XSRVIMPYVKLXXXXXXXXXFFLISLSSLAQPVXXPA

SEQ ID NO: 23159 - protein, 39 aa, Artificial Sequence
  Non-cyclic GFR-binding peptide
  MOD_RES (2)..(33)..(34): Xaa is C or S
KXSKVVMPYVKLVKPTRGVFFLISLSSLDQPVXXPSASA

SEQ ID NO: 23160 - protein, 36 aa, Artificial Sequence
  Non-cyclic GFR-binding peptide
  MOD_RES (1)..(35): Xaa is C or S
  MOD_RES (13)..(14)..(15)..(16)..(17): Xaa is A or G
  MOD_RES (18)..(19)..(20)..(21): Xaa is A or G or absent
XSRVVMNPYVKLXXXXXXXXXFFLVSLSSLKTPAXT

SEQ ID NO: 23161 - protein, 36 aa, Artificial Sequence
  Non-cyclic GFR-binding peptide
  MOD_RES (32)..(33): Xaa is C or S
GEVVMEPYVKLVVKDYEDFFLMSLSSLETPVXXAKP

SEQ ID NO: 23162 - protein, 37 aa, Artificial Sequence
  Non-cyclic GFR-binding peptide
  MOD_RES (31)..(32): Xaa is C or S
RVVMNPYVKLIVNSSDDFFLVSLSSLQTPAXXPKPVT

SEQ ID NO: 23163 - protein, 30 aa, Artificial Sequence
  Non-cyclic GFR-binding peptide
RVVMNPYVKLIVNSSDDFFLVSLSSLQTPA

SEQ ID NO: 23164 - protein, 32 aa, Artificial Sequence
  Non-cyclic GFR-binding peptide
  MOD_RES (31)..(32): Xaa is C or S
SKVVMPYVKLVKPTRGVFFLISLSSLDQPVXX

SEQ ID NO: 23165 - protein, 36 aa, Artificial Sequence
  Non-cyclic GFR-binding peptide
  MOD_RES (31)..(31): Xaa is C or S
RVVMNPYVKLIVNSSDDFFLVSLSSLKTPAXTPKTV

SEQ ID NO: 23166 - protein, 33 aa, Artificial Sequence
  Non-cyclic GFR-binding peptide
  MOD_RES (2)..(2): Xaa is C or S
GXGEVVMEPYVKLVVKDYEDFFLMSLSSLETPV

SEQ ID NO: 23167 - protein, 39 aa, Artificial Sequence
  Non-cyclic GFR-binding peptide
  MOD_RES (2)..(36)..(37): Xaa is C or S
  MOD_RES (14)..(15)..(16)..(17)..(18): Xaa is A or G
  MOD_RES (19)..(20)..(21)..(22): Xaa is A or G or absent
GXAEVVMDPYVKLXXXXXXXXXFFLISLSSLRAPVXXSA

SEQ ID NO: 23168 - protein, 36 aa, Artificial Sequence
  Non-cyclic GFR-binding peptide
  MOD_RES (2)..(35)..(36): Xaa is C or S
  MOD_RES (13)..(14)..(15)..(16)..(17): Xaa is A or G
  MOD_RES (18)..(19)..(20)..(21): Xaa is A or G or absent
KXSKVIMPYVKLXXXXXXXXXFFLISLSSLDQSVXX

SEQ ID NO: 23169 - protein, 39 aa, Artificial Sequence
  Non-cyclic GFR-binding peptide
  MOD_RES (1)..(3)..(36)..(37): Xaa is C or S
  MOD_RES (14)..(15)..(16)..(17)..(18): Xaa is A or G
  MOD_RES (19)..(20)..(21)..(22): Xaa is A or G or absent
XKXSRVIMPYVKLXXXXXXXXXFFLISLSSLAQPVXXPA

SEQ ID NO: 23170 - protein, 39 aa, Artificial Sequence
  Non-cyclic GFR-binding peptide
  MOD_RES (1)..(33)..(34): Xaa is C or S
XSEVVMDPYVKLVVNNASDFFLISLSSLRTPVXXTPPTS

SEQ ID NO: 23171 - protein, 38 aa, Artificial Sequence
  Non-cyclic GFR-binding peptide
  MOD_RES (2)..(34)..(35): Xaa is C or S
GXAKVVMNPYVKLIVNNSSDFFLVSLSSLKTPAXXAKP

SEQ ID NO: 23172 - protein, 35 aa, Artificial Sequence
  Non-cyclic GFR-binding peptide
  MOD_RES (1)..(33)..(34): Xaa is C or S
XARVVMNPYVKLIVNSSDDFFLVSLSSLQTPAXXP

SEQ ID NO: 23173 - protein, 34 aa, Artificial Sequence
  Non-cyclic GFR-binding peptide
  MOD_RES (33)..(34): Xaa is C or S
  MOD_RES (11)..(12)..(13)..(14)..(15): Xaa is A or G
  MOD_RES (16)..(17)..(18)..(19): Xaa is A or G or absent
EVVMDPYVKLXXXXXXXXXFFLISLSSLRAPVXX

SEQ ID NO: 23174 - protein, 38 aa, Artificial Sequence
  Non-cyclic GFR-binding peptide
  MOD_RES (32)..(33): Xaa is C or S
AEVVMDPYVKLVVNNAADFFLISLSSLRAPVXXSAPAA

SEQ ID NO: 23175 - protein, 32 aa, Artificial Sequence
  Non-cyclic GFR-binding peptide
  MOD_RES (32)..(32): Xaa is C or S
ARVVMNPYVKLIVNSSDDFFLVSLSSLQTPAX

SEQ ID NO: 23176 - protein, 37 aa, Artificial Sequence
  Non-cyclic GFR-binding peptide
  MOD_RES (2)..(4)..(35)..(36): Xaa is C or S
SXKXSKVIMPYVKLIKPTKGIFFLISLSSLDQSVXXP

SEQ ID NO: 23177 - protein, 43 aa, Artificial Sequence
  Non-cyclic GFR-binding peptide
  MOD_RES (2)..(4)..(41): Xaa is C or S
AXAXELHEELRPYVKLLKPKKRVYEFFLVSLSSHHVRSPQXKV

SEQ ID NO: 23178 - protein, 39 aa, Artificial Sequence
  Non-cyclic GFR-binding peptide
  MOD_RES (33)..(34): Xaa is C or S
  MOD_RES (11)..(12)..(13)..(14)..(15): Xaa is A or G
  MOD_RES (16)..(17)..(18)..(19): Xaa is A or G or absent
SVAMGPYVKLXXXXXXXXXFFLISLSSLKTPVXXAKSAK

SEQ ID NO: 23179 - protein, 37 aa, Artificial Sequence
  Non-cyclic GFR-binding peptide
  MOD_RES (2)..(4)..(37): Xaa is C or S
  MOD_RES (15)..(16)..(17)..(18)..(19): Xaa is A or G
  MOD_RES (20)..(21)..(22)..(23): Xaa is A or G or absent
SXKXSKVIMPYVKLXXXXXXXXXFFLISLSSLDQSVX

SEQ ID NO: 23180 - protein, 36 aa, Artificial Sequence
  Non-cyclic GFR-binding peptide
  MOD_RES (1)..(35)..(36): Xaa is C or S
  MOD_RES (13)..(14)..(15)..(16)..(17): Xaa is A or G
  MOD_RES (18)..(19)..(20)..(21): Xaa is A or G or absent
XSEVVMDPYVKLXXXXXXXXXFFLISLSSLRTPVXX

SEQ ID NO: 23181 - protein, 40 aa, Artificial Sequence
  Non-cyclic GFR-binding peptide
  MOD_RES (2)..(4)..(38)..(39): Xaa is C or S
  MOD_RES (16)..(17)..(18)..(19)..(20): Xaa is A or G
  MOD_RES (21)..(22)..(23)..(24): Xaa is A or G or absent
HXGXSRVVMNPYVKLXXXXXXXXXFFLVSLSSLKTPAXXP

SEQ ID NO: 23182 - protein, 38 aa, Artificial Sequence
  Non-cyclic GFR-binding peptide
  MOD_RES (33)..(34): Xaa is C or S
  MOD_RES (11)..(12)..(13)..(14)..(15): Xaa is A or G
  MOD_RES (16)..(17)..(18)..(19): Xaa is A or G or absent
RVVMNPYVKLXXXXXXXXXFFLVSLSSLQTPAXXPKPV

SEQ ID NO: 23183 - protein, 33 aa, Artificial Sequence
  Non-cyclic GFR-binding peptide
  MOD_RES (2)..(33): Xaa is C or S
KXSKVVMPYVKLVKPTRGVFFLISLSSLDQPVX

SEQ ID NO: 23184 - protein, 38 aa, Artificial Sequence
  Non-cyclic GFR-binding peptide
  MOD_RES (2)..(4)..(38): Xaa is C or S
  MOD_RES (16)..(17)..(18)..(19)..(20): Xaa is A or G
  MOD_RES (21)..(22)..(23)..(24): Xaa is A or G or absent
RXGXGEVVMEPYVKLXXXXXXXXXFFLMSLSSLETPVX

SEQ ID NO: 23185 - protein, 42 aa, Artificial Sequence
  Non-cyclic GFR-binding peptide
  MOD_RES (2)..(36)..(37): Xaa is C or S
  MOD_RES (14)..(15)..(16)..(17)..(18): Xaa is A or G
  MOD_RES (19)..(20)..(21)..(22): Xaa is A or G or absent
GXSRVVMNPYVKLXXXXXXXXXFFLVSLSSLKTPAXXPKPVH

SEQ ID NO: 23186 - protein, 44 aa, Artificial Sequence
  Non-cyclic GFR-binding peptide
  MOD_RES (2)..(4)..(38)..(39): Xaa is C or S
  MOD_RES (16)..(17)..(18)..(19)..(20): Xaa is A or G
  MOD_RES (21)..(22)..(23)..(24): Xaa is A or G or absent
HXGXSRVVMNPYVKLXXXXXXXXXFFLVSLSSLKTPAXXPKPVH

SEQ ID NO: 23187 - protein, 41 aa, Artificial Sequence
  Non-cyclic GFR-binding peptide
  MOD_RES (1)..(35)..(36): Xaa is C or S
  MOD_RES (13)..(14)..(15)..(16)..(17): Xaa is A or G
  MOD_RES (18)..(19)..(20)..(21): Xaa is A or G or absent
XGEVVMEPYVKLXXXXXXXXXFFLMSLSSLETPVXXAKPIS

SEQ ID NO: 23188 - protein, 41 aa, Artificial Sequence
  Non-cyclic GFR-binding peptide
  MOD_RES (1)..(35)..(36): Xaa is C or S
  MOD_RES (13)..(14)..(15)..(16)..(17): Xaa is A or G
  MOD_RES (18)..(19)..(20)..(21): Xaa is A or G or absent
XARVVMNPYVKLXXXXXXXXXFFLVSLSSLQTPAXXPKPVT

SEQ ID NO: 23189 - protein, 31 aa, Artificial Sequence
  Non-cyclic GFR-binding peptide
  MOD_RES (31)..(31): Xaa is C or S
SKVVMPYVKLVKPTRGVFFLISLSSLDQPVX

SEQ ID NO: 23190 - protein, 40 aa, Artificial Sequence
  Non-cyclic GFR-binding peptide
  MOD_RES (2)..(35)..(36): Xaa is C or S
  MOD_RES (13)..(14)..(15)..(16)..(17): Xaa is A or G
  MOD_RES (18)..(19)..(20)..(21): Xaa is A or G or absent
KXSKVVMPYVKLXXXXXXXXXFFLISLSSLDQPVXXPSAS

SEQ ID NO: 23191 - protein, 41 aa, Artificial Sequence
  Non-cyclic GFR-binding peptide
  MOD_RES (1)..(3)..(35)..(36): Xaa is C or S
XGXGEVVMEPYVKLVVKDYEDFFLMSLSSLETPVXXAKPIS

SEQ ID NO: 23192 - protein, 39 aa, Artificial Sequence
  Non-cyclic GFR-binding peptide
  MOD_RES (2)..(4)..(36)..(37): Xaa is C or S
RXGXGEVVMEPYVKLVVKDYEDFFLMSLSSLETPVXXAK

SEQ ID NO: 23193 - protein, 40 aa, Artificial Sequence
  Non-cyclic GFR-binding peptide
  MOD_RES (2)..(36): Xaa is C or S
EXKNHQLFPYVKLHQGQHPKIRFFLMSLSSEETPVXELGE

SEQ ID NO: 23194 - protein, 40 aa, Artificial Sequence
  Non-cyclic GFR-binding peptide
  MOD_RES (34)..(35): Xaa is C or S
  MOD_RES (12)..(13)..(14)..(15)..(16): Xaa is A or G
  MOD_RES (17)..(18)..(19)..(20): Xaa is A or G or absent
AKVVMNPYVKLXXXXXXXXXFFLVSLSSLKTPAXXAKPVA

SEQ ID NO: 23195 - protein, 39 aa, Artificial Sequence
  Non-cyclic GFR-binding peptide
  MOD_RES (1)..(3)..(37)..(38): Xaa is C or S
  MOD_RES (15)..(16)..(17)..(18)..(19): Xaa is A or G
  MOD_RES (20)..(21)..(22)..(23): Xaa is A or G or absent
XGXARVVMNPYVKLXXXXXXXXXFFLVSLSSLQTPAXXP

SEQ ID NO: 23196 - protein, 37 aa, Artificial Sequence
  Non-cyclic GFR-binding peptide
  MOD_RES (32)..(33): Xaa is C or S
AEVVMDPYVKLVVNNAADFFLISLSSLRAPVXXSAPA

SEQ ID NO: 23197 - protein, 38 aa, Artificial Sequence
  Non-cyclic GFR-binding peptide
  MOD_RES (1)..(3)..(37)..(38): Xaa is C or S
  MOD_RES (15)..(16)..(17)..(18)..(19): Xaa is A or G
  MOD_RES (20)..(21)..(22)..(23): Xaa is A or G or absent
XGXESVAMGPYVKLXXXXXXXXXFFLISLSSLKTPVXX

SEQ ID NO: 23198 - protein, 36 aa, Artificial Sequence
  Non-cyclic GFR-binding peptide
  MOD_RES (1)..(33)..(34): Xaa is C or S
XAKVVMNPYVKLIVNNSSDFFLVSLSSLKTPAXXAK

SEQ ID NO: 23199 - protein, 40 aa, Artificial Sequence
  Non-cyclic GFR-binding peptide
  MOD_RES (1)..(3)..(40): Xaa is C or S
XAXELHEELRPYVKLLKPKKRVYEFFLVSLSSHHVRSPQX

SEQ ID NO: 23200 - protein, 40 aa, Artificial Sequence
  Non-cyclic GFR-binding peptide
  MOD_RES (1)..(3)..(36)..(37): Xaa is C or S
  MOD_RES (14)..(15)..(16)..(17)..(18): Xaa is A or G
  MOD_RES (19)..(20)..(21)..(22): Xaa is A or G or absent
XGXEEVIMPYVKLXXXXXXXXXFFLMSLSSTKVPAXXTSP

SEQ ID NO: 23201 - protein, 35 aa, Artificial Sequence
  Non-cyclic GFR-binding peptide
  MOD_RES (1)..(35): Xaa is C or S
  MOD_RES (13)..(14)..(15)..(16)..(17): Xaa is A or G
  MOD_RES (18)..(19)..(20)..(21): Xaa is A or G or absent
XGEVVMEPYVKLXXXXXXXXXFFLMSLSSLETPVX

SEQ ID NO: 23202 - protein, 37 aa, Artificial Sequence
  Non-cyclic GFR-binding peptide
  MOD_RES (2)..(35)..(36): Xaa is C or S
  MOD_RES (13)..(14)..(15)..(16)..(17): Xaa is A or G
  MOD_RES (18)..(19)..(20)..(21): Xaa is A or G or absent
KXSRVIMPYVKLXXXXXXXXXFFLISLSSLAQPVXXP

SEQ ID NO: 23203 - protein, 36 aa, Artificial Sequence
  Non-cyclic GFR-binding peptide
  MOD_RES (34)..(35): Xaa is C or S
  MOD_RES (12)..(13)..(14)..(15)..(16): Xaa is A or G
  MOD_RES (17)..(18)..(19)..(20): Xaa is A or G or absent
AKVVMNPYVKLXXXXXXXXXFFLVSLSSLKTPAXXA

SEQ ID NO: 23204 - protein, 39 aa, Artificial Sequence
  Non-cyclic GFR-binding peptide
  MOD_RES (1)..(3)..(35)..(36): Xaa is C or S
XGXSEVVMDPYVKLVVNNASDFFLISLSSLRTPVXXTPP

SEQ ID NO: 23205 - protein, 41 aa, Artificial Sequence
  Non-cyclic GFR-binding peptide
  MOD_RES (2)..(4)..(36)..(37): Xaa is C or S
RXGXAEVVMDPYVKLVVNNAADFFLISLSSLRAPVXXSAPA

SEQ ID NO: 23206 - protein, 43 aa, Artificial Sequence
  Non-cyclic GFR-binding peptide
  MOD_RES (2)..(4)..(38): Xaa is C or S
RXEXKNHQLFPYVKLHQGQHPKIRFFLMSLSSEETPVXELGED

SEQ ID NO: 23207 - protein, 35 aa, Artificial Sequence
  Non-cyclic GFR-binding peptide
  MOD_RES (2)..(34): Xaa is C or S
GXSRVVMNPYVKLIVNSSDDFFLVSLSSLKTPAXT

SEQ ID NO: 23208 - protein, 37 aa, Artificial Sequence
  Non-cyclic GFR-binding peptide
  MOD_RES (33)..(34): Xaa is C or S
  MOD_RES (11)..(12)..(13)..(14)..(15): Xaa is A or G
  MOD_RES (16)..(17)..(18)..(19): Xaa is A or G or absent
DVVMGPYVKLXXXXXXXXXFFLMSLSSMKTPTXXPGA

SEQ ID NO: 23209 - protein, 41 aa, Artificial Sequence
  Non-cyclic GFR-binding peptide
  MOD_RES (2)..(36): Xaa is C or S
  MOD_RES (14)..(15)..(16)..(17)..(18): Xaa is A or G
  MOD_RES (19)..(20)..(21)..(22): Xaa is A or G or absent
GXSRVVMNPYVKLXXXXXXXXXFFLVSLSSLKTPAXTPKTV

SEQ ID NO: 23210 - protein, 36 aa, Artificial Sequence
  Non-cyclic GFR-binding peptide
  MOD_RES (2)..(4)..(36): Xaa is C or S
HXGXSRVVMNPYVKLIVNSSDDFFLVSLSSLKTPAX

SEQ ID NO: 23211 - protein, 38 aa, Artificial Sequence
  Non-cyclic GFR-binding peptide
  MOD_RES (2)..(4)..(36)..(37): Xaa is C or S
HXGXSRVVMNPYVKLIVNSSDDFFLVSLSSLKTPAXXP

SEQ ID NO: 23212 - protein, 41 aa, Artificial Sequence
  Non-cyclic GFR-binding peptide
  MOD_RES (1)..(3)..(37): Xaa is C or S
  MOD_RES (15)..(16)..(17)..(18)..(19): Xaa is A or G
  MOD_RES (20)..(21)..(22)..(23): Xaa is A or G or absent
XEXKNHQLFPYVKLXXXXXXXXXFFLMSLSSEETPVXELGE

SEQ ID NO: 23213 - protein, 34 aa, Artificial Sequence
  Non-cyclic GFR-binding peptide
  MOD_RES (1)..(3): Xaa is C or S
XGXSRVVMNPYVKLIVNSSDDFFLVSLSSLKTPA

SEQ ID NO: 23214 - protein, 37 aa, Artificial Sequence
  Non-cyclic GFR-binding peptide
  MOD_RES (2)..(4)..(36)..(37): Xaa is C or S
RXGXAEVVMDPYVKLVVNNAADFFLISLSSLRAPVXX

SEQ ID NO: 23215 - protein, 37 aa, Artificial Sequence
  Non-cyclic GFR-binding peptide
  MOD_RES (2)..(34)..(35): Xaa is C or S
GXESVAMGPYVKLYTVVGKDFFLISLSSLKTPVXXAK

SEQ ID NO: 23216 - protein, 36 aa, Artificial Sequence
  Non-cyclic GFR-binding peptide
  MOD_RES (1)..(3): Xaa is C or S
  MOD_RES (15)..(16)..(17)..(18)..(19): Xaa is A or G
  MOD_RES (20)..(21)..(22)..(23): Xaa is A or G or absent
XGXGEVVMEPYVKLXXXXXXXXXFFLMSLSSLETPV

SEQ ID NO: 23217 - protein, 37 aa, Artificial Sequence
  Non-cyclic GFR-binding peptide
  MOD_RES (1)..(3)..(36)..(37): Xaa is C or S
  MOD_RES (14)..(15)..(16)..(17)..(18): Xaa is A or G
  MOD_RES (19)..(20)..(21)..(22): Xaa is A or G or absent
XKXSKVVMPYVKLXXXXXXXXXFFLISLSSLDQPVXX

SEQ ID NO: 23218 - protein, 34 aa, Artificial Sequence
  Non-cyclic GFR-binding peptide
  MOD_RES (33)..(33): Xaa is C or S
  MOD_RES (11)..(12)..(13)..(14)..(15): Xaa is A or G
  MOD_RES (16)..(17)..(18)..(19): Xaa is A or G or absent
RVVMNPYVKLXXXXXXXXXFFLVSLSSLKTPAXT

SEQ ID NO: 23219 - protein, 39 aa, Artificial Sequence
  Non-cyclic GFR-binding peptide
  MOD_RES (2)..(33)..(34): Xaa is C or S
GXEEVIMPYVKLLLVRGNDFFLMSLSSTKVPAXXTSPVR

SEQ ID NO: 23220 - protein, 38 aa, Artificial Sequence
  Non-cyclic GFR-binding peptide
  MOD_RES (1)..(33)..(34): Xaa is C or S
XAKVVMNPYVKLIVNNSSDFFLVSLSSLKTPAXXAKPV

SEQ ID NO: 23221 - protein, 39 aa, Artificial Sequence
  Non-cyclic GFR-binding peptide
  MOD_RES (1)..(3)..(36)..(37): Xaa is C or S
  MOD_RES (14)..(15)..(16)..(17)..(18): Xaa is A or G
  MOD_RES (19)..(20)..(21)..(22): Xaa is A or G or absent
XGXEEVIMPYVKLXXXXXXXXXFFLMSLSSTKVPAXXTS

SEQ ID NO: 23222 - protein, 39 aa, Artificial Sequence
  Non-cyclic GFR-binding peptide
  MOD_RES (36)..(36): Xaa is C or S
  MOD_RES (12)..(13)..(14)..(15)..(16): Xaa is A or G
  MOD_RES (17)..(18)..(19)..(20): Xaa is A or G or absent
LHEELRPYVKLXXXXXXXXXFFLVSLSSHHVRSPQXKVS

SEQ ID NO: 23223 - protein, 41 aa, Artificial Sequence
  Non-cyclic GFR-binding peptide
  MOD_RES (2)..(35)..(36): Xaa is C or S
GXEAVSMGEPYVKLTPVGMDDFFLVSLSSLKTPVXXAKGVK

SEQ ID NO: 23224 - protein, 37 aa, Artificial Sequence
  Non-cyclic GFR-binding peptide
  MOD_RES (2)..(4): Xaa is C or S
  MOD_RES (16)..(17)..(18)..(19)..(20): Xaa is A or G
  MOD_RES (21)..(22)..(23)..(24): Xaa is A or G or absent
HXGXAKVVMNPYVKLXXXXXXXXXFFLVSLSSLKTPA

SEQ ID NO: 23225 - protein, 34 aa, Artificial Sequence
  Non-cyclic GFR-binding peptide
  MOD_RES (2)..(4): Xaa is C or S
SXKXSKVIMPYVKLIKPTKGIFFLISLSSLDQSV

SEQ ID NO: 23226 - protein, 43 aa, Artificial Sequence
  Non-cyclic GFR-binding peptide
  MOD_RES (1)..(3)..(38)..(39): Xaa is C or S
  MOD_RES (16)..(17)..(18)..(19)..(20): Xaa is A or G
  MOD_RES (21)..(22)..(23)..(24): Xaa is A or G or absent
XGXEAVSMGEPYVKLXXXXXXXXXFFLVSLSSLKTPVXXAKGV

SEQ ID NO: 23227 - protein, 41 aa, Artificial Sequence
  Non-cyclic GFR-binding peptide
  MOD_RES (2)..(4)..(41): Xaa is C or S
  MOD_RES (17)..(18)..(19)..(20)..(21): Xaa is A or G
  MOD_RES (22)..(23)..(24)..(25): Xaa is A or G or absent
AXAXELHEELRPYVKLXXXXXXXXXFFLVSLSSHHVRSPQX

SEQ ID NO: 23228 - protein, 42 aa, Artificial Sequence
  Non-cyclic GFR-binding peptide
  MOD_RES (1)..(3)..(37)..(38): Xaa is C or S
  MOD_RES (15)..(16)..(17)..(18)..(19): Xaa is A or G
  MOD_RES (20)..(21)..(22)..(23): Xaa is A or G or absent
XGXSEVVMDPYVKLXXXXXXXXXFFLISLSSLRTPVXXTPPT

SEQ ID NO: 23229 - protein, 41 aa, Artificial Sequence
  Non-cyclic GFR-binding peptide
  MOD_RES (2)..(39): Xaa is C or S
AXELHEELRPYVKLLKPKKRVYEFFLVSLSSHHVRSPQXKV

SEQ ID NO: 23230 - protein, 32 aa, Artificial Sequence
  Non-cyclic GFR-binding peptide
  MOD_RES (32)..(32): Xaa is C or S
SEVVMDPYVKLVVNNASDFFLISLSSLRTPVX

SEQ ID NO: 23231 - protein, 34 aa, Artificial Sequence
  Non-cyclic GFR-binding peptide
  MOD_RES (1)..(3): Xaa is C or S
XGXRDVVMGPYVKLIIQQKDNFFLMSLSSMKTPT

SEQ ID NO: 23232 - protein, 39 aa, Artificial Sequence
  Non-cyclic GFR-binding peptide
  MOD_RES (2)..(36)..(37): Xaa is C or S
  MOD_RES (14)..(15)..(16)..(17)..(18): Xaa is A or G
  MOD_RES (19)..(20)..(21)..(22): Xaa is A or G or absent
GXESVAMGPYVKLXXXXXXXXXFFLISLSSLKTPVXXAK

SEQ ID NO: 23233 - protein, 30 aa, Artificial Sequence; identical to SEQ ID NO: 1818
  Non-cyclic GFR-binding peptide

SEQ ID NO: 23234 - protein, 40 aa, Artificial Sequence
  Non-cyclic GFR-binding peptide
  MOD_RES (2)..(4)..(38)..(39): Xaa is C or S
  MOD_RES (16)..(17)..(18)..(19)..(20): Xaa is A or G
  MOD_RES (21)..(22)..(23)..(24): Xaa is A or G or absent
RXGXAEVVMDPYVKLXXXXXXXXXFFLISLSSLRAPVXXS

SEQ ID NO: 23235 - protein, 36 aa, Artificial Sequence
  Non-cyclic GFR-binding peptide
  MOD_RES (2)..(36): Xaa is C or S
  MOD_RES (14)..(15)..(16)..(17)..(18): Xaa is A or G
  MOD_RES (19)..(20)..(21)..(22): Xaa is A or G or absent
GXAKVVMNPYVKLXXXXXXXXXFFLVSLSSLKTPAX

SEQ ID NO: 23236 - protein, 37 aa, Artificial Sequence
  Non-cyclic GFR-binding peptide
  MOD_RES (2)..(33)..(34): Xaa is C or S
KXSKVVMPYVKLVKPTRGVFFLISLSSLDQPVXXPSA

SEQ ID NO: 23237 - protein, 42 aa, Artificial Sequence
  Non-cyclic GFR-binding peptide
  MOD_RES (2)..(4)..(38)..(39): Xaa is C or S
  MOD_RES (16)..(17)..(18)..(19)..(20): Xaa is A or G
  MOD_RES (21)..(22)..(23)..(24): Xaa is A or G or absent
RXGXESVAMGPYVKLXXXXXXXXXFFLISLSSLKTPVXXAKS

SEQ ID NO: 23238 - protein, 41 aa, Artificial Sequence
  Non-cyclic GFR-binding peptide
  MOD_RES (2)..(36)..(37): Xaa is C or S
  MOD_RES (14)..(15)..(16)..(17)..(18): Xaa is A or G
  MOD_RES (19)..(20)..(21)..(22): Xaa is A or G or absent
GXAKVVMNPYVKLXXXXXXXXXFFLVSLSSLKTPAXXAKPV

SEQ ID NO: 23239 - protein, 34 aa, Artificial Sequence
  Non-cyclic GFR-binding peptide
  MOD_RES (1)..(32)..(33): Xaa is C or S
XSKVVMPYVKLVKPTRGVFFLISLSSLDQPVXXP

SEQ ID NO: 23240 - protein, 36 aa, Artificial Sequence
  Non-cyclic GFR-binding peptide
  MOD_RES (32)..(33): Xaa is C or S
AKVVMNPYVKLIVNNSSDFFLVSLSSLKTPAXXAKP

SEQ ID NO: 23241 - protein, 37 aa, Artificial Sequence
  Non-cyclic GFR-binding peptide
  MOD_RES (1)..(34)..(35): Xaa is C or S
  MOD_RES (12)..(13)..(14)..(15)..(16): Xaa is A or G
  MOD_RES (17)..(18)..(19)..(20): Xaa is A or G or absent
XSKVVMPYVKLXXXXXXXXXFFLISLSSLDQPVXXPS

SEQ ID NO: 23242 - protein, 32 aa, Artificial Sequence
  Non-cyclic GFR-binding peptide
  MOD_RES (2)..(2): Xaa is C or S
KXSRVIMPYVKLVKPKRGVFFLISLSSLAQPV

SEQ ID NO: 23243 - protein, 42 aa, Artificial Sequence
  Non-cyclic GFR-binding peptide
  MOD_RES (2)..(4)..(38)..(39): Xaa is C or S
  MOD_RES (16)..(17)..(18)..(19)..(20): Xaa is A or G
  MOD_RES (21)..(22)..(23)..(24): Xaa is A or G or absent
SXGXRDVVMGPYVKLXXXXXXXXXFFLMSLSSMKTPTXXPGA

SEQ ID NO: 23244 - protein, 38 aa, Artificial Sequence
  Non-cyclic GFR-binding peptide
  MOD_RES (1)..(3)..(35)..(36): Xaa is C or S
XGXAKVVMNPYVKLIVNNSSDFFLVSLSSLKTPAXXAK

SEQ ID NO: 23245 - protein, 38 aa, Artificial Sequence
  Non-cyclic GFR-binding peptide
  MOD_RES (1)..(3)..(37): Xaa is C or S
XEXKNHQLFPYVKLHQGQHPKIRFFLMSLSSEETPVXE

SEQ ID NO: 23246 - protein, 40 aa, Artificial Sequence
  Non-cyclic GFR-binding peptide
  MOD_RES (1)..(3)..(37): Xaa is C or S
  MOD_RES (15)..(16)..(17)..(18)..(19): Xaa is A or G
  MOD_RES (20)..(21)..(22)..(23): Xaa is A or G or absent
XEXKNHQLFPYVKLXXXXXXXXXFFLMSLSSEETPVXELG

SEQ ID NO: 23247 - protein, 37 aa, Artificial Sequence
  Non-cyclic GFR-binding peptide
  MOD_RES (1)..(35)..(36): Xaa is C or S
  MOD_RES (13)..(14)..(15)..(16)..(17): Xaa is A or G
  MOD_RES (18)..(19)..(20)..(21): Xaa is A or G or absent
XAEVVMDPYVKLXXXXXXXXXFFLISLSSLRAPVXXS

SEQ ID NO: 23248 - protein, 34 aa, Artificial Sequence
  Non-cyclic GFR-binding peptide
  MOD_RES (13)..(14)..(15)..(16)..(17): Xaa is A or G
  MOD_RES (18)..(19)..(20)..(21): Xaa is A or G or absent
ELHEELRPYVKLXXXXXXXXXFFLVSLSSHHVRS

SEQ ID NO: 23249 - protein, 40 aa, Artificial Sequence
  Non-cyclic GFR-binding peptide
  MOD_RES (2)..(4)..(36)..(37): Xaa is C or S
RXGXGEVVMEPYVKLVVKDYEDFFLMSLSSLETPVXXAKP

SEQ ID NO: 23250 - protein, 40 aa, Artificial Sequence
  Non-cyclic GFR-binding peptide
  MOD_RES (2)..(37)..(38): Xaa is C or S
  MOD_RES (15)..(16)..(17)..(18)..(19): Xaa is A or G
  MOD_RES (20)..(21)..(22)..(23): Xaa is A or G or absent
GXEAVSMGEPYVKLXXXXXXXXXFFLVSLSSLKTPVXXAK

SEQ ID NO: 23251 - protein, 38 aa, Artificial Sequence
  Non-cyclic GFR-binding peptide
  MOD_RES (1)..(35)..(36): Xaa is C or S
  MOD_RES (13)..(14)..(15)..(16)..(17): Xaa is A or G
  MOD_RES (18)..(19)..(20)..(21): Xaa is A or G or absent
XAEVVMDPYVKLXXXXXXXXXFFLISLSSLRAPVXXSA

SEQ ID NO: 23252 - protein, 38 aa, Artificial Sequence
  Non-cyclic GFR-binding peptide
  MOD_RES (33)..(34): Xaa is C or S
  MOD_RES (11)..(12)..(13)..(14)..(15): Xaa is A or G
  MOD_RES (16)..(17)..(18)..(19): Xaa is A or G or absent
EVVMDPYVKLXXXXXXXXXFFLISLSSLRAPVXXSAPA

SEQ ID NO: 23253 - protein, 44 aa, Artificial Sequence
  Non-cyclic GFR-binding peptide
  MOD_RES (1)..(3)..(40): Xaa is C or S
  MOD_RES (16)..(17)..(18)..(19)..(20): Xaa is A or G
  MOD_RES (21)..(22)..(23)..(24): Xaa is A or G or absent
XAXELHEELRPYVKLXXXXXXXXXFFLVSLSSHHVRSPQXKVSS

SEQ ID NO: 23254 - protein, 38 aa, Artificial Sequence
  Non-cyclic GFR-binding peptide
  MOD_RES (1)..(3)..(34)..(35): Xaa is C or S
XKXSKVVMPYVKLVKPTRGVFFLISLSSLDQPVXXPSA

SEQ ID NO: 23255 - protein, 33 aa, Artificial Sequence
  Non-cyclic GFR-binding peptide
  MOD_RES (12)..(13)..(14)..(15)..(16): Xaa is A or G
  MOD_RES (17)..(18)..(19)..(20): Xaa is A or G or absent
SEVVMDPYVKLXXXXXXXXXFFLISLSSLRTPV

SEQ ID NO: 23256 - protein, 37 aa, Artificial Sequence
  Non-cyclic GFR-binding peptide
  MOD_RES (32)..(33): Xaa is C or S
ESVAMGPYVKLYTVVGKDFFLISLSSLKTPVXXAKSA

SEQ ID NO: 23257 - protein, 34 aa, Artificial Sequence
  Non-cyclic GFR-binding peptide
  MOD_RES (2)..(4): Xaa is C or S
SXKXSRVIMPYVKLVKPKRGVFFLISLSSLAQPV

SEQ ID NO: 23258 - protein, 38 aa, Artificial Sequence
  Non-cyclic GFR-binding peptide
  MOD_RES (2)..(4)..(38): Xaa is C or S
RXEXKNHQLFPYVKLHQGQHPKIRFFLMSLSSEETPVX

SEQ ID NO: 23259 - protein, 39 aa, Artificial Sequence
  Non-cyclic GFR-binding peptide
  MOD_RES (33)..(34): Xaa is C or S
  MOD_RES (11)..(12)..(13)..(14)..(15): Xaa is A or G
  MOD_RES (16)..(17)..(18)..(19): Xaa is A or G or absent
SKVIMPYVKLXXXXXXXXXFFLISLSSLDQSVXXPSASA

SEQ ID NO: 23260 - protein, 38 aa, Artificial Sequence
  Non-cyclic GFR-binding peptide
  MOD_RES (34)..(35): Xaa is C or S
  MOD_RES (12)..(13)..(14)..(15)..(16): Xaa is A or G
  MOD_RES (17)..(18)..(19)..(20): Xaa is A or G or absent
AKVVMNPYVKLXXXXXXXXXFFLVSLSSLKTPAXXAKP

SEQ ID NO: 23261 - protein, 36 aa, Artificial Sequence
  Non-cyclic GFR-binding peptide
  MOD_RES (1)..(33): Xaa is C or S
XSRVVMNPYVKLIVNSSDDFFLVSLSSLKTPAXTPK

SEQ ID NO: 23262 - protein, 35 aa, Artificial Sequence
  Non-cyclic GFR-binding peptide
  MOD_RES (1)..(35): Xaa is C or S
  MOD_RES (13)..(14)..(15)..(16)..(17): Xaa is A or G
  MOD_RES (18)..(19)..(20)..(21): Xaa is A or G or absent
XESVAMGPYVKLXXXXXXXXXFFLISLSSLKTPVX

SEQ ID NO: 23263 - protein, 37 aa, Artificial Sequence
  Non-cyclic GFR-binding peptide
  MOD_RES (35)..(35): Xaa is C or S
HEELRPYVKLLKPKKRVYEFFLVSLSSHHVRSPQXKV

SEQ ID NO: 23264 - protein, 40 aa, Artificial Sequence
  Non-cyclic GFR-binding peptide
  MOD_RES (36)..(36): Xaa is C or S
  MOD_RES (12)..(13)..(14)..(15)..(16): Xaa is A or G
  MOD_RES (17)..(18)..(19)..(20): Xaa is A or G or absent
LHEELRPYVKLXXXXXXXXXFFLVSLSSHHVRSPQXKVSS

SEQ ID NO: 23265 - protein, 31 aa, Artificial Sequence
  Non-cyclic GFR-binding peptide
  MOD_RES (31)..(31): Xaa is C or S
DVVMGPYVKLIIQQKDNFFLMSLSSMKTPTX

SEQ ID NO: 23266 - protein, 37 aa, Artificial Sequence
  Non-cyclic GFR-binding peptide
  MOD_RES (2)..(34)..(35): Xaa is C or S
GXSRVVMNPYVKLIVNSSDDFFLVSLSSLKTPAXXPK

SEQ ID NO: 23267 - protein, 37 aa, Artificial Sequence
  Non-cyclic GFR-binding peptide
  MOD_RES (33)..(34): Xaa is C or S
  MOD_RES (11)..(12)..(13)..(14)..(15): Xaa is A or G
  MOD_RES (16)..(17)..(18)..(19): Xaa is A or G or absent
RVVMNPYVKLXXXXXXXXXFFLVSLSSLQTPAXXPKP

SEQ ID NO: 23268 - protein, 38 aa, Artificial Sequence
  Non-cyclic GFR-binding peptide
  MOD_RES (33)..(34): Xaa is C or S
  MOD_RES (11)..(12)..(13)..(14)..(15): Xaa is A or G
  MOD_RES (16)..(17)..(18)..(19): Xaa is A or G or absent
SKVVMPYVKLXXXXXXXXXFFLISLSSLDQPVXXPSAS

SEQ ID NO: 23269 - protein, 40 aa, Artificial Sequence
  Non-cyclic GFR-binding peptide
  MOD_RES (2)..(36)..(37): Xaa is C or S
  MOD_RES (14)..(15)..(16)..(17)..(18): Xaa is A or G
  MOD_RES (19)..(20)..(21)..(22): Xaa is A or G or absent
GXESVAMGPYVKLXXXXXXXXXFFLISLSSLKTPVXXAKS

SEQ ID NO: 23270 - protein, 38 aa, Artificial Sequence
  Non-cyclic GFR-binding peptide
  MOD_RES (2)..(4)..(37)..(38): Xaa is C or S
RXGXEAVSMGEPYVKLTPVGMDDFFLVSLSSLKTPVXX

SEQ ID NO: 23271 - protein, 38 aa, Artificial Sequence
  Non-cyclic GFR-binding peptide
  MOD_RES (34)..(35): Xaa is C or S
  MOD_RES (12)..(13)..(14)..(15)..(16): Xaa is A or G
  MOD_RES (17)..(18)..(19)..(20): Xaa is A or G or absent
AEVVMDPYVKLXXXXXXXXXFFLISLSSLRAPVXXSAP

SEQ ID NO: 23272 - protein, 33 aa, Artificial Sequence
  Non-cyclic GFR-binding peptide
  MOD_RES (31)..(32): Xaa is C or S
SKVIMPYVKLIKPTKGIFFLISLSSLDQSVXXP

SEQ ID NO: 23273 - protein, 33 aa, Artificial Sequence
  Non-cyclic GFR-binding peptide
  MOD_RES (11)..(12)..(13)..(14)..(15): Xaa is A or G
  MOD_RES (16)..(17)..(18)..(19): Xaa is A or G or absent
HEELRPYVKLXXXXXXXXXFFLVSLSSHHVRSP

SEQ ID NO: 23274 - protein, 39 aa, Artificial Sequence
  Non-cyclic GFR-binding peptide
  MOD_RES (1)..(34)..(35): Xaa is C or S
  MOD_RES (12)..(13)..(14)..(15)..(16): Xaa is A or G
  MOD_RES (17)..(18)..(19)..(20): Xaa is A or G or absent
XSKVVMPYVKLXXXXXXXXXFFLISLSSLDQPVXXPSAS

SEQ ID NO: 23275 - protein, 43 aa, Artificial Sequence
  Non-cyclic GFR-binding peptide
  MOD_RES (2)..(4)..(38)..(39): Xaa is C or S
  MOD_RES (16)..(17)..(18)..(19)..(20): Xaa is A or G
  MOD_RES (21)..(22)..(23)..(24): Xaa is A or G or absent
SXGXRDVVMGPYVKLXXXXXXXXXFFLMSLSSMKTPTXXPGAS

SEQ ID NO: 23276 - protein, 42 aa, Artificial Sequence
  Non-cyclic GFR-binding peptide
  MOD_RES (2)..(4)..(36)..(37): Xaa is C or S
SXGXRDVVMGPYVKLIIQQKDNFFLMSLSSMKTPTXXPGASG

SEQ ID NO: 23277 - protein, 36 aa, Artificial Sequence
  Non-cyclic GFR-binding peptide
  MOD_RES (2)..(36): Xaa is C or S
  MOD_RES (14)..(15)..(16)..(17)..(18): Xaa is A or G
  MOD_RES (19)..(20)..(21)..(22): Xaa is A or G or absent
EXKNHQLFPYVKLXXXXXXXXXFFLMSLSSEETPVX

SEQ ID NO: 23278 - protein, 40 aa, Artificial Sequence
  Non-cyclic GFR-binding peptide
  MOD_RES (2)..(4)..(38)..(39): Xaa is C or S
  MOD_RES (16)..(17)..(18)..(19)..(20): Xaa is A or G
  MOD_RES (21)..(22)..(23)..(24): Xaa is A or G or absent
RXGXGEVVMEPYVKLXXXXXXXXXFFLMSLSSLETPVXXA

SEQ ID NO: 23279 - protein, 37 aa, Artificial Sequence
  Non-cyclic GFR-binding peptide
  MOD_RES (1)..(3)..(35)..(36): Xaa is C or S
XGXARVVMNPYVKLIVNSSDDFFLVSLSSLQTPAXXP

SEQ ID NO: 23280 - protein, 35 aa, Artificial Sequence
  Non-cyclic GFR-binding peptide
  MOD_RES (1)..(35): Xaa is C or S
  MOD_RES (13)..(14)..(15)..(16)..(17): Xaa is A or G
  MOD_RES (18)..(19)..(20)..(21): Xaa is A or G or absent
XAKVVMNPYVKLXXXXXXXXXFFLVSLSSLKTPAX

SEQ ID NO: 23281 - protein, 37 aa, Artificial Sequence
  Non-cyclic GFR-binding peptide
  MOD_RES (31)..(32): Xaa is C or S
EVVMDPYVKLVVNNAADFFLISLSSLRAPVXXSAPAA

SEQ ID NO: 23282 - protein, 36 aa, Artificial Sequence
  Non-cyclic GFR-binding peptide
  MOD_RES (1)..(35)..(36): Xaa is C or S
  MOD_RES (13)..(14)..(15)..(16)..(17): Xaa is A or G
  MOD_RES (18)..(19)..(20)..(21): Xaa is A or G or absent
XESVAMGPYVKLXXXXXXXXXFFLISLSSLKTPVXX

SEQ ID NO: 23283 - protein, 38 aa, Artificial Sequence
  Non-cyclic GFR-binding peptide
  MOD_RES (2)..(4)..(36)..(37): Xaa is C or S
RXGXGEVVMEPYVKLVVKDYEDFFLMSLSSLETPVXXA

SEQ ID NO: 23284 - protein, 37 aa, Artificial Sequence
  Non-cyclic GFR-binding peptide
  MOD_RES (1)..(3)..(37): Xaa is C or S
  MOD_RES (15)..(16)..(17)..(18)..(19): Xaa is A or G
  MOD_RES (20)..(21)..(22)..(23): Xaa is A or G or absent
XGXSEVVMDPYVKLXXXXXXXXXFFLISLSSLRTPVX

SEQ ID NO: 23285 - protein, 41 aa, Artificial Sequence
  Non-cyclic GFR-binding peptide
  MOD_RES (1)..(35)..(36): Xaa is C or S
  MOD_RES (13)..(14)..(15)..(16)..(17): Xaa is A or G
  MOD_RES (18)..(19)..(20)..(21): Xaa is A or G or absent
XESVAMGPYVKLXXXXXXXXXFFLISLSSLKTPVXXAKSAK

SEQ ID NO: 23286 - protein, 43 aa, Artificial Sequence
  Non-cyclic GFR-binding peptide
  MOD_RES (2)..(4)..(38): Xaa is C or S
  MOD_RES (16)..(17)..(18)..(19)..(20): Xaa is A or G
  MOD_RES (21)..(22)..(23)..(24): Xaa is A or G or absent
HXGXSRVVMNPYVKLXXXXXXXXXFFLVSLSSLKTPAXTPKTV

SEQ ID NO: 23287 - protein, 40 aa, Artificial Sequence
  Non-cyclic GFR-binding peptide
  MOD_RES (1)..(3)..(37)..(38): Xaa is C or S
  MOD_RES (15)..(16)..(17)..(18)..(19): Xaa is A or G
  MOD_RES (20)..(21)..(22)..(23): Xaa is A or G or absent
XGXARVVMNPYVKLXXXXXXXXXFFLVSLSSLQTPAXXPK

SEQ ID NO: 23288 - protein, 34 aa, Artificial Sequence
  Non-cyclic GFR-binding peptide
  MOD_RES (33)..(34): Xaa is C or S
  MOD_RES (11)..(12)..(13)..(14)..(15): Xaa is A or G
  MOD_RES (16)..(17)..(18)..(19): Xaa is A or G or absent
SVAMGPYVKLXXXXXXXXXFFLISLSSLKTPVXX

SEQ ID NO: 23289 - protein, 41 aa, Artificial Sequence
  Non-cyclic GFR-binding peptide
  MOD_RES (1)..(35)..(36): Xaa is C or S
  MOD_RES (13)..(14)..(15)..(16)..(17): Xaa is A or G
  MOD_RES (18)..(19)..(20)..(21): Xaa is A or G or absent
XSEVVMDPYVKLXXXXXXXXXFFLISLSSLRTPVXXTPPTS

SEQ ID NO: 23290 - protein, 32 aa, Artificial Sequence
  Non-cyclic GFR-binding peptide
  MOD_RES (1)..(32): Xaa is C or S
XSKVIMPYVKLIKPTKGIFFLISLSSLDQSVX

SEQ ID NO: 23291 - protein, 36 aa, Artificial Sequence
  Non-cyclic GFR-binding peptide
  MOD_RES (2)..(36): Xaa is C or S
  MOD_RES (14)..(15)..(16)..(17)..(18): Xaa is A or G
  MOD_RES (19)..(20)..(21)..(22): Xaa is A or G or absent
GXSEVVMDPYVKLXXXXXXXXXFFLISLSSLRTPVX

SEQ ID NO: 23292 - protein, 37 aa, Artificial Sequence
  Non-cyclic GFR-binding peptide
  MOD_RES (1)..(35)..(36): Xaa is C or S
  MOD_RES (13)..(14)..(15)..(16)..(17): Xaa is A or G
  MOD_RES (18)..(19)..(20)..(21): Xaa is A or G or absent
XARVVMNPYVKLXXXXXXXXXFFLVSLSSLQTPAXXP

SEQ ID NO: 23293 - protein, 37 aa, Artificial Sequence
  Non-cyclic GFR-binding peptide
  MOD_RES (1)..(3): Xaa is C or S
  MOD_RES (16)..(17)..(18)..(19)..(20): Xaa is A or G
  MOD_RES (21)..(22)..(23)..(24): Xaa is A or G or absent
XGXEAVSMGEPYVKLXXXXXXXXXFFLVSLSSLKTPV

SEQ ID NO: 23294 - protein, 38 aa, Artificial Sequence
  Non-cyclic GFR-binding peptide
  MOD_RES (33)..(34): Xaa is C or S
  MOD_RES (11)..(12)..(13)..(14)..(15): Xaa is A or G
  MOD_RES (16)..(17)..(18)..(19): Xaa is A or G or absent
DVVMGPYVKLXXXXXXXXXFFLMSLSSMKTPTXXPGAS

SEQ ID NO: 23295 - protein, 32 aa, Artificial Sequence
  Non-cyclic GFR-binding peptide
  MOD_RES (31)..(32): Xaa is C or S
EVVMDPYVKLVVNNAADFFLISLSSLRAPVXX

SEQ ID NO: 23296 - protein, 37 aa, Artificial Sequence
  Non-cyclic GFR-binding peptide
  MOD_RES (2)..(33)..(34): Xaa is C or S
KXSRVIMPYVKLVKPKRGVFFLISLSSLAQPVXXPAA

SEQ ID NO: 23297 - protein, 41 aa, Artificial Sequence
  Non-cyclic GFR-binding peptide
  MOD_RES (1)..(3)..(37)..(38): Xaa is C or S
  MOD_RES (15)..(16)..(17)..(18)..(19): Xaa is A or G
  MOD_RES (20)..(21)..(22)..(23): Xaa is A or G or absent
XGXGEVVMEPYVKLXXXXXXXXXFFLMSLSSLETPVXXAKP

SEQ ID NO: 23298 - protein, 35 aa, Artificial Sequence
  Non-cyclic GFR-binding peptide
  MOD_RES (2)..(4): Xaa is C or S
HXGXSRVVMNPYVKLIVNSSDDFFLVSLSSLKTPA

SEQ ID NO: 23299 - protein, 32 aa, Artificial Sequence
  Non-cyclic GFR-binding peptide
  MOD_RES (1)..(1): Xaa is C or S
XAEVVMDPYVKLVVNNAADFFLISLSSLRAPV

SEQ ID NO: 23300 - protein, 36 aa, Artificial Sequence
  Non-cyclic GFR-binding peptide
  MOD_RES (1)..(35)..(36): Xaa is C or S
  MOD_RES (13)..(14)..(15)..(16)..(17): Xaa is A or G
  MOD_RES (18)..(19)..(20)..(21): Xaa is A or G or absent
XGEVVMEPYVKLXXXXXXXXXFFLMSLSSLETPVXX

SEQ ID NO: 23301 - protein, 31 aa, Artificial Sequence
  Non-cyclic GFR-binding peptide
ARVVMNPYVKLIVNSSDDFFLVSLSSLQTPA

SEQ ID NO: 23302 - protein, 33 aa, Artificial Sequence
  Non-cyclic GFR-binding peptide
  MOD_RES (31)..(32): Xaa is C or S
SRVIMPYVKLVKPKRGVFFLISLSSLAQPVXXP

SEQ ID NO: 23303 - protein, 39 aa, Artificial Sequence
  Non-cyclic GFR-binding peptide
  MOD_RES (34)..(35): Xaa is C or S
  MOD_RES (12)..(13)..(14)..(15)..(16): Xaa is A or G
  MOD_RES (17)..(18)..(19)..(20): Xaa is A or G or absent
GEVVMEPYVKLXXXXXXXXXFFLMSLSSLETPVXXAKPI

SEQ ID NO: 23304 - protein, 37 aa, Artificial Sequence
  Non-cyclic GFR-binding peptide
  MOD_RES (1)..(3)..(36)..(37): Xaa is C or S
  MOD_RES (14)..(15)..(16)..(17)..(18): Xaa is A or G
  MOD_RES (19)..(20)..(21)..(22): Xaa is A or G or absent
XKXSRVIMPYVKLXXXXXXXXXFFLISLSSLAQPVXX

SEQ ID NO: 23305 - protein, 37 aa, Artificial Sequence
  Non-cyclic GFR-binding peptide
  MOD_RES (2)..(36): Xaa is C or S
  MOD_RES (14)..(15)..(16)..(17)..(18): Xaa is A or G
  MOD_RES (19)..(20)..(21)..(22): Xaa is A or G or absent
EXKNHQLFPYVKLXXXXXXXXXFFLMSLSSEETPVXE

SEQ ID NO: 23306 - protein, 41 aa, Artificial Sequence
  Non-cyclic GFR-binding peptide
  MOD_RES (1)..(3)..(40): Xaa is C or S
  MOD_RES (16)..(17)..(18)..(19)..(20): Xaa is A or G
  MOD_RES (21)..(22)..(23)..(24): Xaa is A or G or absent
XAXELHEELRPYVKLXXXXXXXXXFFLVSLSSHHVRSPQXK

SEQ ID NO: 23307 - protein, 37 aa, Artificial Sequence
  Non-cyclic GFR-binding peptide
  MOD_RES (2)..(36): Xaa is C or S
  MOD_RES (14)..(15)..(16)..(17)..(18): Xaa is A or G
  MOD_RES (19)..(20)..(21)..(22): Xaa is A or G or absent
GXSRVVMNPYVKLXXXXXXXXXFFLVSLSSLKTPAXT

SEQ ID NO: 23308 - protein, 36 aa, Artificial Sequence
  Non-cyclic GFR-binding peptide
  MOD_RES (2)..(33)..(34): Xaa is C or S
KXSKVIMPYVKLIKPTKGIFFLISLSSLDQSVXXPS

SEQ ID NO: 23309 - protein, 35 aa, Artificial Sequence
  Non-cyclic GFR-binding peptide
  MOD_RES (12)..(13)..(14)..(15)..(16): Xaa is A or G
  MOD_RES (17)..(18)..(19)..(20): Xaa is A or G or absent
LHEELRPYVKLXXXXXXXXXFFLVSLSSHHVRSPQ

SEQ ID NO: 23310 - protein, 40 aa, Artificial Sequence
  Non-cyclic GFR-binding peptide
  MOD_RES (2)..(4)..(38)..(39): Xaa is C or S
  MOD_RES (16)..(17)..(18)..(19)..(20): Xaa is A or G
  MOD_RES (21)..(22)..(23)..(24): Xaa is A or G or absent
HXGXARVVMNPYVKLXXXXXXXXXFFLVSLSSLQTPAXXP

SEQ ID NO: 23311 - protein, 33 aa, Artificial Sequence
  Non-cyclic GFR-binding peptide
  MOD_RES (2)..(33): Xaa is C or S
GXEEVIMPYVKLLLVRGNDFFLMSLSSTKVPAX

SEQ ID NO: 23312 - protein, 36 aa, Artificial Sequence
  Non-cyclic GFR-binding peptide
  MOD_RES (1)..(3)..(34)..(35): Xaa is C or S
XKXSKVIMPYVKLIKPTKGIFFLISLSSLDQSVXXP

SEQ ID NO: 23313 - protein, 39 aa, Artificial Sequence
  Non-cyclic GFR-binding peptide
  MOD_RES (1)..(33)..(34): Xaa is C or S
XAKVVMNPYVKLIVNNSSDFFLVSLSSLKTPAXXAKPVA

SEQ ID NO: 23314 - protein, 33 aa, Artificial Sequence
  Non-cyclic GFR-binding peptide
  MOD_RES (1)..(33): Xaa is C or S
XARVVMNPYVKLIVNSSDDFFLVSLSSLQTPAX

SEQ ID NO: 23315 - protein, 35 aa, Artificial Sequence
  Non-cyclic GFR-binding peptide
  MOD_RES (2)..(4): Xaa is C or S
RXGXAEVVMDPYVKLVVNNAADFFLISLSSLRAPV

SEQ ID NO: 23316 - protein, 34 aa, Artificial Sequence
  Non-cyclic GFR-binding peptide
  MOD_RES (1)..(34): Xaa is C or S
  MOD_RES (12)..(13)..(14)..(15)..(16): Xaa is A or G
  MOD_RES (17)..(18)..(19)..(20): Xaa is A or G or absent
XSRVIMPYVKLXXXXXXXXXFFLISLSSLAQPVX

SEQ ID NO: 23317 - protein, 39 aa, Artificial Sequence
  Non-cyclic GFR-binding peptide
  MOD_RES (2)..(4)..(37)..(38): Xaa is C or S
  MOD_RES (15)..(16)..(17)..(18)..(19): Xaa is A or G
  MOD_RES (20)..(21)..(22)..(23): Xaa is A or G or absent
SXKXSKVIMPYVKLXXXXXXXXXFFLISLSSLDQSVXXP

SEQ ID NO: 23318 - protein, 39 aa, Artificial Sequence
  Non-cyclic GFR-binding peptide
  MOD_RES (2)..(4)..(35)..(36): Xaa is C or S
LXGXEEVIMPYVKLLLVRGNDFFLMSLSSTKVPAXXTSP

SEQ ID NO: 23319 - protein, 35 aa, Artificial Sequence
  Non-cyclic GFR-binding peptide
  MOD_RES (32)..(33): Xaa is C or S
SEVVMDPYVKLVVNNASDFFLISLSSLRTPVXXTP

SEQ ID NO: 23320 - protein, 36 aa, Artificial Sequence
  Non-cyclic GFR-binding peptide
  MOD_RES (1)..(3)..(34)..(35): Xaa is C or S
XKXSRVIMPYVKLVKPKRGVFFLISLSSLAQPVXXP

SEQ ID NO: 23321 - protein, 38 aa, Artificial Sequence
  Non-cyclic GFR-binding peptide
  MOD_RES (2)..(34)..(35): Xaa is C or S
GXSEVVMDPYVKLVVNNASDFFLISLSSLRTPVXXTPP

SEQ ID NO: 23322 - protein, 42 aa, Artificial Sequence
  Non-cyclic GFR-binding peptide
  MOD_RES (2)..(4)..(38): Xaa is C or S
  MOD_RES (16)..(17)..(18)..(19)..(20): Xaa is A or G
  MOD_RES (21)..(22)..(23)..(24): Xaa is A or G or absent
RXEXKNHQLFPYVKLXXXXXXXXXFFLMSLSSEETPVXELGE

SEQ ID NO: 23323 - protein, 42 aa, Artificial Sequence
  Non-cyclic GFR-binding peptide
  MOD_RES (2)..(4)..(37)..(38): Xaa is C or S
  MOD_RES (15)..(16)..(17)..(18)..(19): Xaa is A or G
  MOD_RES (20)..(21)..(22)..(23): Xaa is A or G or absent
SXKXSKVIMPYVKLXXXXXXXXXFFLISLSSLDQSVXXPSAS

SEQ ID NO: 23324 - protein, 37 aa, Artificial Sequence
  Non-cyclic GFR-binding peptide
  MOD_RES (2)..(34)..(35): Xaa is C or S
GXAEVVMDPYVKLVVNNAADFFLISLSSLRAPVXXSA

SEQ ID NO: 23325 - protein, 37 aa, Artificial Sequence
  Non-cyclic GFR-binding peptide
  MOD_RES (1)..(32)..(33): Xaa is C or S
XSKVVMPYVKLVKPTRGVFFLISLSSLDQPVXXPSAS

SEQ ID NO: 23326 - protein, 34 aa, Artificial Sequence
  Non-cyclic GFR-binding peptide
  MOD_RES (32)..(33): Xaa is C or S
ARVVMNPYVKLIVNSSDDFFLVSLSSLQTPAXXP

SEQ ID NO: 23327 - protein, 36 aa, Artificial Sequence
  Non-cyclic GFR-binding peptide
  MOD_RES (2)..(34): Xaa is C or S
GXSRVVMNPYVKLIVNSSDDFFLVSLSSLKTPAXTP

SEQ ID NO: 23328 - protein, 38 aa, Artificial Sequence
  Non-cyclic GFR-binding peptide
  MOD_RES (1)..(35)..(36): Xaa is C or S
  MOD_RES (13)..(14)..(15)..(16)..(17): Xaa is A or G
  MOD_RES (18)..(19)..(20)..(21): Xaa is A or G or absent
XSEVVMDPYVKLXXXXXXXXXFFLISLSSLRTPVXXTP

SEQ ID NO: 23329 - protein, 39 aa, Artificial Sequence
  Non-cyclic GFR-binding peptide
  MOD_RES (1)..(3)..(35)..(36): Xaa is C or S
XGXRDVVMGPYVKLIIQQKDNFFLMSLSSMKTPTXXPGA

SEQ ID NO: 23330 - protein, 40 aa, Artificial Sequence
  Non-cyclic GFR-binding peptide
  MOD_RES (2)..(39): Xaa is C or S
AXELHEELRPYVKLLKPKKRVYEFFLVSLSSHHVRSPQXK

SEQ ID NO: 23331 - protein, 38 aa, Artificial Sequence
  Non-cyclic GFR-binding peptide
  MOD_RES (34)..(34): Xaa is C or S
  MOD_RES (12)..(13)..(14)..(15)..(16): Xaa is A or G
  MOD_RES (17)..(18)..(19)..(20): Xaa is A or G or absent
SRVVMNPYVKLXXXXXXXXXFFLVSLSSLKTPAXTPKT

SEQ ID NO: 23332 - protein, 38 aa, Artificial Sequence
  Non-cyclic GFR-binding peptide
  MOD_RES (1)..(35)..(36): Xaa is C or S
  MOD_RES (13)..(14)..(15)..(16)..(17): Xaa is A or G
  MOD_RES (18)..(19)..(20)..(21): Xaa is A or G or absent
XAKVVMNPYVKLXXXXXXXXXFFLVSLSSLKTPAXXAK

SEQ ID NO: 23333 - protein, 38 aa, Artificial Sequence
  Non-cyclic GFR-binding peptide
  MOD_RES (1)..(3)..(36)..(37): Xaa is C or S
  MOD_RES (14)..(15)..(16)..(17)..(18): Xaa is A or G
  MOD_RES (19)..(20)..(21)..(22): Xaa is A or G or absent
XGXEEVIMPYVKLXXXXXXXXXFFLMSLSSTKVPAXXT

SEQ ID NO: 23334 - protein, 41 aa, Artificial Sequence
  Non-cyclic GFR-binding peptide
  MOD_RES (2)..(4)..(38)..(39): Xaa is C or S
  MOD_RES (16)..(17)..(18)..(19)..(20): Xaa is A or G
  MOD_RES (21)..(22)..(23)..(24): Xaa is A or G or absent
HXGXSRVVMNPYVKLXXXXXXXXXFFLVSLSSLKTPAXXPK

SEQ ID NO: 23335 - protein, 31 aa, Artificial Sequence
  Non-cyclic GFR-binding peptide
GEVVMEPYVKLVVKDYEDFFLMSLSSLETPV

SEQ ID NO: 23336 - protein, 45 aa, Artificial Sequence
  Non-cyclic GFR-binding peptide
  MOD_RES (2)..(4)..(41): Xaa is C or S
AXAXELHEELRPYVKLLKPKKRVYEFFLVSLSSHHVRSPQXKVSS

SEQ ID NO: 23337 - protein, 40 aa, Artificial Sequence
  Non-cyclic GFR-binding peptide
  MOD_RES (1)..(35)..(36): Xaa is C or S
  MOD_RES (13)..(14)..(15)..(16)..(17): Xaa is A or G
  MOD_RES (18)..(19)..(20)..(21): Xaa is A or G or absent
XSRVVMNPYVKLXXXXXXXXXFFLVSLSSLKTPAXXPKPV

SEQ ID NO: 23338 - protein, 37 aa, Artificial Sequence
  Non-cyclic GFR-binding peptide
  MOD_RES (2)..(36)..(37): Xaa is C or S
  MOD_RES (14)..(15)..(16)..(17)..(18): Xaa is A or G
  MOD_RES (19)..(20)..(21)..(22): Xaa is A or G or absent
GXSRVVMNPYVKLXXXXXXXXXFFLVSLSSLKTPAXX

SEQ ID NO: 23339 - protein, 35 aa, Artificial Sequence
  Non-cyclic GFR-binding peptide
  MOD_RES (33)..(34): Xaa is C or S
  MOD_RES (11)..(12)..(13)..(14)..(15): Xaa is A or G
  MOD_RES (16)..(17)..(18)..(19): Xaa is A or G or absent
EEVIMPYVKLXXXXXXXXXFFLMSLSSTKVPAXXT

SEQ ID NO: 23340 - protein, 39 aa, Artificial Sequence
  Non-cyclic GFR-binding peptide
  MOD_RES (1)..(35)..(36): Xaa is C or S
  MOD_RES (13)..(14)..(15)..(16)..(17): Xaa is A or G
  MOD_RES (18)..(19)..(20)..(21): Xaa is A or G or absent
XARVVMNPYVKLXXXXXXXXXFFLVSLSSLQTPAXXPKP

SEQ ID NO: 23341 - protein, 40 aa, Artificial Sequence
  Non-cyclic GFR-binding peptide
  MOD_RES (2)..(4)..(37)..(38): Xaa is C or S
  MOD_RES (15)..(16)..(17)..(18)..(19): Xaa is A or G
  MOD_RES (20)..(21)..(22)..(23): Xaa is A or G or absent
LXGXEEVIMPYVKLXXXXXXXXXFFLMSLSSTKVPAXXTS

SEQ ID NO: 23342 - protein, 39 aa, Artificial Sequence
  Non-cyclic GFR-binding peptide
  MOD_RES (2)..(33)..(34): Xaa is C or S
KXSKVIMPYVKLIKPTKGIFFLISLSSLDQSVXXPSASA

SEQ ID NO: 23343 - protein, 36 aa, Artificial Sequence
  Non-cyclic GFR-binding peptide
  MOD_RES (34)..(34): Xaa is C or S
KNHQLFPYVKLHQGQHPKIRFFLMSLSSEETPVXEL

SEQ ID NO: 23344 - protein, 34 aa, Artificial Sequence
  Non-cyclic GFR-binding peptide
  MOD_RES (1)..(1): Xaa is C or S
XKNHQLFPYVKLHQGQHPKIRFFLMSLSSEETPV

SEQ ID NO: 23345 - protein, 39 aa, Artificial Sequence
  Non-cyclic GFR-binding peptide
  MOD_RES (2)..(34)..(35): Xaa is C or S
GXRDVVMGPYVKLIIQQKDNFFLMSLSSMKTPTXXPGAS

SEQ ID NO: 23346 - protein, 37 aa, Artificial Sequence
  Non-cyclic GFR-binding peptide
  MOD_RES (2)..(36)..(37): Xaa is C or S
  MOD_RES (14)..(15)..(16)..(17)..(18): Xaa is A or G
  MOD_RES (19)..(20)..(21)..(22): Xaa is A or G or absent
GXGEVVMEPYVKLXXXXXXXXXFFLMSLSSLETPVXX

SEQ ID NO: 23347 - protein, 42 aa, Artificial Sequence
  Non-cyclic GFR-binding peptide
  MOD_RES (2)..(4)..(36)..(37): Xaa is C or S
RXGXGEVVMDPYVKLVVKENEDFFLMSLSSLETPVXXAKPIK

SEQ ID NO: 23348 - protein, 33 aa, Artificial Sequence
  Non-cyclic GFR-binding peptide
  MOD_RES (1)..(33): Xaa is C or S
XAEVVMDPYVKLVVNNAADFFLISLSSLRAPVX

SEQ ID NO: 23349 - protein, 32 aa, Artificial Sequence
  Non-cyclic GFR-binding peptide
  MOD_RES (31)..(32): Xaa is C or S
SRVIMPYVKLVKPKRGVFFLISLSSLAQPVXX

SEQ ID NO: 23350 - protein, 37 aa, Artificial Sequence
  Non-cyclic GFR-binding peptide
  MOD_RES (31)..(32): Xaa is C or S
SVAMGPYVKLYTVVGKDFFLISLSSLKTPVXXAKSAK

SEQ ID NO: 23351 - protein, 38 aa, Artificial Sequence
  Non-cyclic GFR-binding peptide
  MOD_RES (2)..(34): Xaa is C or S
GXSRVVMNPYVKLIVNSSDDFFLVSLSSLKTPAXTPKT

SEQ ID NO: 23352 - protein, 40 aa, Artificial Sequence
  Non-cyclic GFR-binding peptide
  MOD_RES (2)..(4)..(36)..(37): Xaa is C or S
HXGXAKVVMNPYVKLIVNNSSDFFLVSLSSLKTPAXXAKP

SEQ ID NO: 23353 - protein, 36 aa, Artificial Sequence
  Non-cyclic GFR-binding peptide
  MOD_RES (1)..(3)..(35)..(36): Xaa is C or S
XGXRDVVMGPYVKLIIQQKDNFFLMSLSSMKTPTXX

SEQ ID NO: 23354 - protein, 36 aa, Artificial Sequence
  Non-cyclic GFR-binding peptide
  MOD_RES (1)..(35)..(36): Xaa is C or S
  MOD_RES (13)..(14)..(15)..(16)..(17): Xaa is A or G
  MOD_RES (18)..(19)..(20)..(21): Xaa is A or G or absent
XRDVVMGPYVKLXXXXXXXXXFFLMSLSSMKTPTXX

SEQ ID NO: 23355 - protein, 40 aa, Artificial Sequence
  Non-cyclic GFR-binding peptide
  MOD_RES (2)..(39): Xaa is C or S
  MOD_RES (15)..(16)..(17)..(18)..(19): Xaa is A or G
  MOD_RES (20)..(21)..(22)..(23): Xaa is A or G or absent
AXELHEELRPYVKLXXXXXXXXXFFLVSLSSHHVRSPQXK

SEQ ID NO: 23356 - protein, 36 aa, Artificial Sequence
  Non-cyclic GFR-binding peptide
  MOD_RES (1)..(34)..(35): Xaa is C or S
  MOD_RES (12)..(13)..(14)..(15)..(16): Xaa is A or G
  MOD_RES (17)..(18)..(19)..(20): Xaa is A or G or absent
XSRVIMPYVKLXXXXXXXXXFFLISLSSLAQPVXXP

SEQ ID NO: 23357 - protein, 32 aa, Artificial Sequence
  Non-cyclic GFR-binding peptide
  MOD_RES (11)..(12)..(13)..(14)..(15): Xaa is A or G
  MOD_RES (16)..(17)..(18)..(19): Xaa is A or G or absent
SKVIMPYVKLXXXXXXXXXFFLISLSSLDQSV

SEQ ID NO: 23358 - protein, 36 aa, Artificial Sequence
  Non-cyclic GFR-binding peptide
  MOD_RES (33)..(33): Xaa is C or S
  MOD_RES (11)..(12)..(13)..(14)..(15): Xaa is A or G
  MOD_RES (16)..(17)..(18)..(19): Xaa is A or G or absent
RVVMNPYVKLXXXXXXXXXFFLVSLSSLKTPAXTPK

SEQ ID NO: 23359 - protein, 39 aa, Artificial Sequence
  Non-cyclic GFR-binding peptide
  MOD_RES (2)..(34)..(35): Xaa is C or S
GXESVAMGPYVKLYTVVGKDFFLISLSSLKTPVXXAKSA

SEQ ID NO: 23360 - protein, 38 aa, Artificial Sequence
  Non-cyclic GFR-binding peptide
  MOD_RES (35)..(35): Xaa is C or S
HEELRPYVKLLKPKKRVYEFFLVSLSSHHVRSPQXKVS

SEQ ID NO: 23361 - protein, 39 aa, Artificial Sequence
  Non-cyclic GFR-binding peptide
  MOD_RES (33)..(34): Xaa is C or S
  MOD_RES (11)..(12)..(13)..(14)..(15): Xaa is A or G
  MOD_RES (16)..(17)..(18)..(19): Xaa is A or G or absent
RVVMNPYVKLXXXXXXXXXFFLVSLSSLQTPAXXPKPVT

SEQ ID NO: 23362 - protein, 39 aa, Artificial Sequence
  Non-cyclic GFR-binding peptide
  MOD_RES (1)..(35)..(36): Xaa is C or S
  MOD_RES (13)..(14)..(15)..(16)..(17): Xaa is A or G
  MOD_RES (18)..(19)..(20)..(21): Xaa is A or G or absent
XAEVVMDPYVKLXXXXXXXXXFFLISLSSLRAPVXXSAP

SEQ ID NO: 23363 - protein, 31 aa, Artificial Sequence
  Non-cyclic GFR-binding peptide
SRVVMNPYVKLIVNSSDDFFLVSLSSLKTPA

SEQ ID NO: 23364 - protein, 35 aa, Artificial Sequence
  Non-cyclic GFR-binding peptide
  MOD_RES (1)..(3): Xaa is C or S
XGXEAVSMGEPYVKLTPVGMDDFFLVSLSSLKTPV

SEQ ID NO: 23365 - protein, 41 aa, Artificial Sequence
  Non-cyclic GFR-binding peptide
  MOD_RES (2)..(4)..(38)..(39): Xaa is C or S
  MOD_RES (16)..(17)..(18)..(19)..(20): Xaa is A or G
  MOD_RES (21)..(22)..(23)..(24): Xaa is A or G or absent
RXGXSEVVMDPYVKLXXXXXXXXXFFLISLSSLRTPVXXTP

SEQ ID NO: 23366 - protein, 35 aa, Artificial Sequence
  Non-cyclic GFR-binding peptide
  MOD_RES (1)..(3)..(35): Xaa is C or S
XGXAKVVMNPYVKLIVNNSSDFFLVSLSSLKTPAX

SEQ ID NO: 23367 - protein, 41 aa, Artificial Sequence
  Non-cyclic GFR-binding peptide
  MOD_RES (2)..(4)..(35)..(36): Xaa is C or S
SXKXSKVIMPYVKLIKPTKGIFFLISLSSLDQSVXXPSASA

SEQ ID NO: 23368 - protein, 39 aa, Artificial Sequence
  Non-cyclic GFR-binding peptide
  MOD_RES (2)..(4)..(37)..(38): Xaa is C or S
  MOD_RES (15)..(16)..(17)..(18)..(19): Xaa is A or G
  MOD_RES (20)..(21)..(22)..(23): Xaa is A or G or absent
SXKXSKVVMPYVKLXXXXXXXXXFFLISLSSLDQPVXXP

SEQ ID NO: 23369 - protein, 34 aa, Artificial Sequence
  Non-cyclic GFR-binding peptide
  MOD_RES (34)..(34): Xaa is C or S
  MOD_RES (12)..(13)..(14)..(15)..(16): Xaa is A or G
  MOD_RES (17)..(18)..(19)..(20): Xaa is A or G or absent
SEVVMDPYVKLXXXXXXXXXFFLISLSSLRTPVX

SEQ ID NO: 23370 - protein, 31 aa, Artificial Sequence
  Non-cyclic GFR-binding peptide
  MOD_RES (1)..(1): Xaa is C or S
XSRVIMPYVKLVKPKRGVFFLISLSSLAQPV

SEQ ID NO: 23371 - protein, 38 aa, Artificial Sequence
  Non-cyclic GFR-binding peptide
  MOD_RES (32)..(33): Xaa is C or S
GEVVMEPYVKLVVKDYEDFFLMSLSSLETPVXXAKPIS

SEQ ID NO: 23372 - protein, 38 aa, Artificial Sequence
  Non-cyclic GFR-binding peptide
  MOD_RES (2)..(4)..(38): Xaa is C or S
  MOD_RES (16)..(17)..(18)..(19)..(20): Xaa is A or G
  MOD_RES (21)..(22)..(23)..(24): Xaa is A or G or absent
RXEXKNHQLFPYVKLXXXXXXXXXFFLMSLSSEETPVX

SEQ ID NO: 23373 - protein, 36 aa, Artificial Sequence
  Non-cyclic GFR-binding peptide
  MOD_RES (34)..(35): Xaa is C or S
  MOD_RES (12)..(13)..(14)..(15)..(16): Xaa is A or G
  MOD_RES (17)..(18)..(19)..(20): Xaa is A or G or absent
SRVVMNPYVKLXXXXXXXXXFFLVSLSSLKTPAXXP

SEQ ID NO: 23374 - protein, 33 aa, Artificial Sequence
  Non-cyclic GFR-binding peptide
  MOD_RES (1)..(33): Xaa is C or S
XRDVVMGPYVKLIIQQKDNFFLMSLSSMKTPTX

SEQ ID NO: 23375 - protein, 33 aa, Artificial Sequence
  Non-cyclic GFR-binding peptide
  MOD_RES (33)..(33): Xaa is C or S
  MOD_RES (11)..(12)..(13)..(14)..(15): Xaa is A or G
  MOD_RES (16)..(17)..(18)..(19): Xaa is A or G or absent
SVAMGPYVKLXXXXXXXXXFFLISLSSLKTPVX

SEQ ID NO: 23376 - protein, 33 aa, Artificial Sequence
  Non-cyclic GFR-binding peptide
  MOD_RES (31)..(32): Xaa is C or S
EVVMDPYVKLVVNNASDFFLISLSSLRTPVXXT

SEQ ID NO: 23377 - protein, 37 aa, Artificial Sequence
  Non-cyclic GFR-binding peptide
  MOD_RES (1)..(34)..(35): Xaa is C or S
XEAVSMGEPYVKLTPVGMDDFFLVSLSSLKTPVXXAK

SEQ ID NO: 23378 - protein, 37 aa, Artificial Sequence
  Non-cyclic GFR-binding peptide
  MOD_RES (2)..(35)..(36): Xaa is C or S
  MOD_RES (13)..(14)..(15)..(16)..(17): Xaa is A or G
  MOD_RES (18)..(19)..(20)..(21): Xaa is A or G or absent
KXSKVIMPYVKLXXXXXXXXXFFLISLSSLDQSVXXP

SEQ ID NO: 23379 - protein, 32 aa, Artificial Sequence
  Non-cyclic GFR-binding peptide
  MOD_RES (1)..(32): Xaa is C or S
XSRVIMPYVKLVKPKRGVFFLISLSSLAQPVX

SEQ ID NO: 23380 - protein, 36 aa, Artificial Sequence
  Non-cyclic GFR-binding peptide
  MOD_RES (1)..(3): Xaa is C or S
  MOD_RES (15)..(16)..(17)..(18)..(19): Xaa is A or G
  MOD_RES (20)..(21)..(22)..(23): Xaa is A or G or absent
XGXAEVVMDPYVKLXXXXXXXXXFFLISLSSLRAPV

SEQ ID NO: 23381 - protein, 34 aa, Artificial Sequence
  Non-cyclic GFR-binding peptide
  MOD_RES (33)..(34): Xaa is C or S
EAVSMGEPYVKLTPVGMDDFFLVSLSSLKTPVXX

SEQ ID NO: 23382 - protein, 39 aa, Artificial Sequence
  Non-cyclic GFR-binding peptide
  MOD_RES (35)..(35): Xaa is C or S
  MOD_RES (11)..(12)..(13)..(14)..(15): Xaa is A or G
  MOD_RES (16)..(17)..(18)..(19): Xaa is A or G or absent
HEELRPYVKLXXXXXXXXXFFLVSLSSHHVRSPQXKVSS

SEQ ID NO: 23383 - protein, 37 aa, Artificial Sequence
  Non-cyclic GFR-binding peptide
  MOD_RES (1)..(36)..(37): Xaa is C or S
  MOD_RES (14)..(15)..(16)..(17)..(18): Xaa is A or G
  MOD_RES (19)..(20)..(21)..(22): Xaa is A or G or absent
XEAVSMGEPYVKLXXXXXXXXXFFLVSLSSLKTPVXX

SEQ ID NO: 23384 - protein, 38 aa, Artificial Sequence
  Non-cyclic GFR-binding peptide
  MOD_RES (33)..(34): Xaa is C or S
  MOD_RES (11)..(12)..(13)..(14)..(15): Xaa is A or G
  MOD_RES (16)..(17)..(18)..(19): Xaa is A or G or absent
SKVIMPYVKLXXXXXXXXXFFLISLSSLDQSVXXPSAS

SEQ ID NO: 23385 - protein, 32 aa, Artificial Sequence
  Non-cyclic GFR-binding peptide
NHQLFPYVKLHQGQHPKIRFFLMSLSSEETPV

SEQ ID NO: 23386 - protein, 37 aa, Artificial Sequence
  Non-cyclic GFR-binding peptide
  MOD_RES (2)..(4)..(37): Xaa is C or S
  MOD_RES (15)..(16)..(17)..(18)..(19): Xaa is A or G
  MOD_RES (20)..(21)..(22)..(23): Xaa is A or G or absent
SXKXSKVVMPYVKLXXXXXXXXXFFLISLSSLDQPVX

SEQ ID NO: 23387 - protein, 34 aa, Artificial Sequence
  Non-cyclic GFR-binding peptide
  MOD_RES (32)..(33): Xaa is C or S
SRVVMNPYVKLIVNSSDDFFLVSLSSLKTPAXXP

SEQ ID NO: 23388 - protein, 37 aa, Artificial Sequence
  Non-cyclic GFR-binding peptide
  MOD_RES (32)..(32): Xaa is C or S
SRVVMNPYVKLIVNSSDDFFLVSLSSLKTPAXTPKTV

SEQ ID NO: 23389 - protein, 35 aa, Artificial Sequence
  Non-cyclic GFR-binding peptide
  MOD_RES (1)..(32)..(33): Xaa is C or S
XSRVIMPYVKLVKPKRGVFFLISLSSLAQPVXXPA

SEQ ID NO: 23390 - protein, 36 aa, Artificial Sequence
  Non-cyclic GFR-binding peptide
  MOD_RES (1)..(35)..(36): Xaa is C or S
  MOD_RES (13)..(14)..(15)..(16)..(17): Xaa is A or G
  MOD_RES (18)..(19)..(20)..(21): Xaa is A or G or absent
XSRVVMNPYVKLXXXXXXXXXFFLVSLSSLKTPAXX

SEQ ID NO: 23391 - protein, 40 aa, Artificial Sequence
  Non-cyclic GFR-binding peptide
  MOD_RES (1)..(3)..(37)..(38): Xaa is C or S
  MOD_RES (15)..(16)..(17)..(18)..(19): Xaa is A or G
  MOD_RES (20)..(21)..(22)..(23): Xaa is A or G or absent
XGXGEVVMEPYVKLXXXXXXXXXFFLMSLSSLETPVXXAK

SEQ ID NO: 23392 - protein, 34 aa, Artificial Sequence
  Non-cyclic GFR-binding peptide
  MOD_RES (1)..(1): Xaa is C or S
  MOD_RES (13)..(14)..(15)..(16)..(17): Xaa is A or G
  MOD_RES (18)..(19)..(20)..(21): Xaa is A or G or absent
XKNHQLFPYVKLXXXXXXXXXFFLMSLSSEETPV

SEQ ID NO: 23393 - protein, 38 aa, Artificial Sequence
  Non-cyclic GFR-binding peptide
  MOD_RES (2)..(37)..(38): Xaa is C or S
  MOD_RES (15)..(16)..(17)..(18)..(19): Xaa is A or G
  MOD_RES (20)..(21)..(22)..(23): Xaa is A or G or absent
GXEAVSMGEPYVKLXXXXXXXXXFFLVSLSSLKTPVXX

SEQ ID NO: 23394 - protein, 35 aa, Artificial Sequence
  Non-cyclic GFR-binding peptide
  MOD_RES (33)..(34): Xaa is C or S
  MOD_RES (11)..(12)..(13)..(14)..(15): Xaa is A or G
  MOD_RES (16)..(17)..(18)..(19): Xaa is A or G or absent
DVVMGPYVKLXXXXXXXXXFFLMSLSSMKTPTXXP

SEQ ID NO: 23395 - protein, 41 aa, Artificial Sequence
  Non-cyclic GFR-binding peptide
  MOD_RES (2)..(4)..(36): Xaa is C or S
HXGXSRVVMNPYVKLIVNSSDDFFLVSLSSLKTPAXTPKTV

SEQ ID NO: 23396 - protein, 32 aa, Artificial Sequence
  Non-cyclic GFR-binding peptide
  MOD_RES (31)..(32): Xaa is C or S
SKVIMPYVKLIKPTKGIFFLISLSSLDQSVXX

SEQ ID NO: 23397 - protein, 36 aa, Artificial Sequence
  Non-cyclic GFR-binding peptide
  MOD_RES (2)..(35)..(36): Xaa is C or S
  MOD_RES (13)..(14)..(15)..(16)..(17): Xaa is A or G
  MOD_RES (18)..(19)..(20)..(21): Xaa is A or G or absent
KXSKVVMPYVKLXXXXXXXXXFFLISLSSLDQPVXX

SEQ ID NO: 23398 - protein, 35 aa, Artificial Sequence
  Non-cyclic GFR-binding peptide
  MOD_RES (33)..(34): Xaa is C or S
  MOD_RES (11)..(12)..(13)..(14)..(15): Xaa is A or G
  MOD_RES (16)..(17)..(18)..(19): Xaa is A or G or absent
SVAMGPYVKLXXXXXXXXXFFLISLSSLKTPVXXA

SEQ ID NO: 23399 - protein, 35 aa, Artificial Sequence
  Non-cyclic GFR-binding peptide
  MOD_RES (34)..(35): Xaa is C or S
  MOD_RES (12)..(13)..(14)..(15)..(16): Xaa is A or G
  MOD_RES (17)..(18)..(19)..(20): Xaa is A or G or absent
AKVVMNPYVKLXXXXXXXXXFFLVSLSSLKTPAXX

SEQ ID NO: 23400 - protein, 33 aa, Artificial Sequence
  Non-cyclic GFR-binding peptide
  MOD_RES (33)..(33): Xaa is C or S
  MOD_RES (11)..(12)..(13)..(14)..(15): Xaa is A or G
  MOD_RES (16)..(17)..(18)..(19): Xaa is A or G or absent
EVVMDPYVKLXXXXXXXXXFFLISLSSLRAPVX

SEQ ID NO: 23401 - protein, 40 aa, Artificial Sequence
  Non-cyclic GFR-binding peptide
  MOD_RES (1)..(38): Xaa is C or S
  MOD_RES (14)..(15)..(16)..(17)..(18): Xaa is A or G
  MOD_RES (19)..(20)..(21)..(22): Xaa is A or G or absent
XELHEELRPYVKLXXXXXXXXXFFLVSLSSHHVRSPQXKV

SEQ ID NO: 23402 - protein, 38 aa, Artificial Sequence
  Non-cyclic GFR-binding peptide
  MOD_RES (33)..(34): Xaa is C or S
  MOD_RES (11)..(12)..(13)..(14)..(15): Xaa is A or G
  MOD_RES (16)..(17)..(18)..(19): Xaa is A or G or absent
EVVMDPYVKLXXXXXXXXXFFLISLSSLRTPVXXTPPT

SEQ ID NO: 23403 - protein, 33 aa, Artificial Sequence
  Non-cyclic GFR-binding peptide
  MOD_RES (33)..(33): Xaa is C or S
  MOD_RES (11)..(12)..(13)..(14)..(15): Xaa is A or G
  MOD_RES (16)..(17)..(18)..(19): Xaa is A or G or absent
SRVIMPYVKLXXXXXXXXXFFLISLSSLAQPVX

SEQ ID NO: 23404 - protein, 40 aa, Artificial Sequence
  Non-cyclic GFR-binding peptide
  MOD_RES (2)..(4)..(38): Xaa is C or S
  MOD_RES (16)..(17)..(18)..(19)..(20): Xaa is A or G
  MOD_RES (21)..(22)..(23)..(24): Xaa is A or G or absent
RXEXKNHQLFPYVKLXXXXXXXXXFFLMSLSSEETPVXEL

SEQ ID NO: 23405 - protein, 39 aa, Artificial Sequence
  Non-cyclic GFR-binding peptide
  MOD_RES (1)..(38): Xaa is C or S
XELHEELRPYVKLLKPKKRVYEFFLVSLSSHHVRSPQXK

SEQ ID NO: 23406 - protein, 39 aa, Artificial Sequence
  Non-cyclic GFR-binding peptide
  MOD_RES (1)..(33)..(34): Xaa is C or S
XSRVVMNPYVKLIVNSSDDFFLVSLSSLKTPAXXPKPVH

SEQ ID NO: 23407 - protein, 34 aa, Artificial Sequence
  Non-cyclic GFR-binding peptide
  MOD_RES (2)..(33)..(34): Xaa is C or S
KXSRVIMPYVKLVKPKRGVFFLISLSSLAQPVXX

SEQ ID NO: 23408 - protein, 41 aa, Artificial Sequence
  Non-cyclic GFR-binding peptide
  MOD_RES (2)..(36)..(37): Xaa is C or S
  MOD_RES (14)..(15)..(16)..(17)..(18): Xaa is A or G
  MOD_RES (19)..(20)..(21)..(22): Xaa is A or G or absent
GXSRVVMNPYVKLXXXXXXXXXFFLVSLSSLKTPAXXPKPV

SEQ ID NO: 23409 - protein, 43 aa, Artificial Sequence
  Non-cyclic GFR-binding peptide
  MOD_RES (2)..(4)..(38)..(39): Xaa is C or S
  MOD_RES (16)..(17)..(18)..(19)..(20): Xaa is A or G
  MOD_RES (21)..(22)..(23)..(24): Xaa is A or G or absent
RXGXSEVVMDPYVKLXXXXXXXXXFFLISLSSLRTPVXXTPPT

SEQ ID NO: 23410 - protein, 36 aa, Artificial Sequence
  Non-cyclic GFR-binding peptide
  MOD_RES (33)..(34): Xaa is C or S
  MOD_RES (11)..(12)..(13)..(14)..(15): Xaa is A or G
  MOD_RES (16)..(17)..(18)..(19): Xaa is A or G or absent
EVVMEPYVKLXXXXXXXXXFFLMSLSSLETPVXXAK

SEQ ID NO: 23411 - protein, 31 aa, Artificial Sequence
  Non-cyclic GFR-binding peptide
  MOD_RES (31)..(31): Xaa is C or S
SKVIMPYVKLIKPTKGIFFLISLSSLDQSVX

SEQ ID NO: 23412 - protein, 36 aa, Artificial Sequence
  Non-cyclic GFR-binding peptide
  MOD_RES (1)..(3): Xaa is C or S
  MOD_RES (15)..(16)..(17)..(18)..(19): Xaa is A or G
  MOD_RES (20)..(21)..(22)..(23): Xaa is A or G or absent
XEXKNHQLFPYVKLXXXXXXXXXFFLMSLSSEETPV

SEQ ID NO: 23413 - protein, 42 aa, Artificial Sequence
  Non-cyclic GFR-binding peptide
  MOD_RES (1)..(3)..(37)..(38): Xaa is C or S
  MOD_RES (15)..(16)..(17)..(18)..(19): Xaa is A or G
  MOD_RES (20)..(21)..(22)..(23): Xaa is A or G or absent
XGXGEVVMEPYVKLXXXXXXXXXFFLMSLSSLETPVXXAKPI

SEQ ID NO: 23414 - protein, 35 aa, Artificial Sequence
  Non-cyclic GFR-binding peptide
  MOD_RES (1)..(3)..(34)..(35): Xaa is C or S
XKXSKVVMPYVKLVKPTRGVFFLISLSSLDQPVXX

SEQ ID NO: 23415 - protein, 39 aa, Artificial Sequence
  Non-cyclic GFR-binding peptide
  MOD_RES (34)..(34): Xaa is C or S
  MOD_RES (12)..(13)..(14)..(15)..(16): Xaa is A or G
  MOD_RES (17)..(18)..(19)..(20): Xaa is A or G or absent
SRVVMNPYVKLXXXXXXXXXFFLVSLSSLKTPAXTPKTV

SEQ ID NO: 23416 - protein, 36 aa, Artificial Sequence
  Non-cyclic GFR-binding peptide
  MOD_RES (2)..(4)..(36): Xaa is C or S
RXGXESVAMGPYVKLYTVVGKDFFLISLSSLKTPVX

SEQ ID NO: 23417 - protein, 33 aa, Artificial Sequence
  Non-cyclic GFR-binding peptide
  MOD_RES (32)..(33): Xaa is C or S
SEVVMDPYVKLVVNNASDFFLISLSSLRTPVXX

SEQ ID NO: 23418 - protein, 42 aa, Artificial Sequence
  Non-cyclic GFR-binding peptide
  MOD_RES (1)..(3)..(36)..(37): Xaa is C or S
  MOD_RES (14)..(15)..(16)..(17)..(18): Xaa is A or G
  MOD_RES (19)..(20)..(21)..(22): Xaa is A or G or absent
XGXEEVIMPYVKLXXXXXXXXXFFLMSLSSTKVPAXXTSPVR

SEQ ID NO: 23419 - protein, 38 aa, Artificial Sequence
  Non-cyclic GFR-binding peptide
  MOD_RES (1)..(35)..(36): Xaa is C or S
  MOD_RES (13)..(14)..(15)..(16)..(17): Xaa is A or G
  MOD_RES (18)..(19)..(20)..(21): Xaa is A or G or absent
XGEVVMEPYVKLXXXXXXXXXFFLMSLSSLETPVXXAK

SEQ ID NO: 23420 - protein, 37 aa, Artificial Sequence
  Non-cyclic GFR-binding peptide
  MOD_RES (1)..(1): Xaa is C or S
  MOD_RES (14)..(15)..(16)..(17)..(18): Xaa is A or G
  MOD_RES (19)..(20)..(21)..(22): Xaa is A or G or absent
XELHEELRPYVKLXXXXXXXXXFFLVSLSSHHVRSPQ

SEQ ID NO: 23421 - protein, 40 aa, Artificial Sequence
  Non-cyclic GFR-binding peptide
  MOD_RES (2)..(4): Xaa is C or S
  MOD_RES (17)..(18)..(19)..(20)..(21): Xaa is A or G
  MOD_RES (22)..(23)..(24)..(25): Xaa is A or G or absent
AXAXELHEELRPYVKLXXXXXXXXXFFLVSLSSHHVRSPQ

SEQ ID NO: 23422 - protein, 37 aa, Artificial Sequence
  Non-cyclic GFR-binding peptide
  MOD_RES (34)..(35): Xaa is C or S
  MOD_RES (12)..(13)..(14)..(15)..(16): Xaa is A or G
  MOD_RES (17)..(18)..(19)..(20): Xaa is A or G or absent
RDVVMGPYVKLXXXXXXXXXFFLMSLSSMKTPTXXPG

SEQ ID NO: 23423 - protein, 38 aa, Artificial Sequence
  Non-cyclic GFR-binding peptide
  MOD_RES (2)..(4)..(35)..(36): Xaa is C or S
LXGXEEVIMPYVKLLLVRGNDFFLMSLSSTKVPAXXTS

SEQ ID NO: 23424 - protein, 35 aa, Artificial Sequence
  Non-cyclic GFR-binding peptide
  MOD_RES (1)..(3)..(35): Xaa is C or S
XGXSEVVMDPYVKLVVNNASDFFLISLSSLRTPVX

SEQ ID NO: 23425 - protein, 35 aa, Artificial Sequence
  Non-cyclic GFR-binding peptide
  MOD_RES (35)..(35): Xaa is C or S
  MOD_RES (11)..(12)..(13)..(14)..(15): Xaa is A or G
  MOD_RES (16)..(17)..(18)..(19): Xaa is A or G or absent
HEELRPYVKLXXXXXXXXXFFLVSLSSHHVRSPQX

SEQ ID NO: 23426 - protein, 38 aa, Artificial Sequence
  Non-cyclic GFR-binding peptide
  MOD_RES (2)..(36)..(37): Xaa is C or S
  MOD_RES (14)..(15)..(16)..(17)..(18): Xaa is A or G
  MOD_RES (19)..(20)..(21)..(22): Xaa is A or G or absent
GXGEVVMEPYVKLXXXXXXXXXFFLMSLSSLETPVXXA

SEQ ID NO: 23427 - protein, 37 aa, Artificial Sequence
  Non-cyclic GFR-binding peptide
  MOD_RES (33)..(33): Xaa is C or S
  MOD_RES (11)..(12)..(13)..(14)..(15): Xaa is A or G
  MOD_RES (16)..(17)..(18)..(19): Xaa is A or G or absent
RVVMNPYVKLXXXXXXXXXFFLVSLSSLKTPAXTPKT

SEQ ID NO: 23428 - protein, 36 aa, Artificial Sequence
  Non-cyclic GFR-binding peptide
  MOD_RES (2)..(4): Xaa is C or S
  MOD_RES (15)..(16)..(17)..(18)..(19): Xaa is A or G
  MOD_RES (20)..(21)..(22)..(23): Xaa is A or G or absent
SXKXSKVVMPYVKLXXXXXXXXXFFLISLSSLDQPV

SEQ ID NO: 23429 - protein, 38 aa, Artificial Sequence
  Non-cyclic GFR-binding peptide
  MOD_RES (2)..(34)..(35): Xaa is C or S
GXSRVVMNPYVKLIVNSSDDFFLVSLSSLKTPAXXPKP

SEQ ID NO: 23430 - protein, 39 aa, Artificial Sequence
  Non-cyclic GFR-binding peptide
  MOD_RES (1)..(3)..(36)..(37): Xaa is C or S
  MOD_RES (14)..(15)..(16)..(17)..(18): Xaa is A or G
  MOD_RES (19)..(20)..(21)..(22): Xaa is A or G or absent
XKXSKVVMPYVKLXXXXXXXXXFFLISLSSLDQPVXXPS

SEQ ID NO: 23431 - protein, 36 aa, Artificial Sequence
  Non-cyclic GFR-binding peptide
  MOD_RES (1)..(3): Xaa is C or S
  MOD_RES (15)..(16)..(17)..(18)..(19): Xaa is A or G
  MOD_RES (20)..(21)..(22)..(23): Xaa is A or G or absent
XGXRDVVMGPYVKLXXXXXXXXXFFLMSLSSMKTPT

SEQ ID NO: 23432 - protein, 37 aa, Artificial Sequence
  Non-cyclic GFR-binding peptide
  MOD_RES (34)..(35): Xaa is C or S
  MOD_RES (12)..(13)..(14)..(15)..(16): Xaa is A or G
  MOD_RES (17)..(18)..(19)..(20): Xaa is A or G or absent
SRVVMNPYVKLXXXXXXXXXFFLVSLSSLKTPAXXPK

SEQ ID NO: 23433 - protein, 42 aa, Artificial Sequence
  Non-cyclic GFR-binding peptide
  MOD_RES (2)..(36)..(37): Xaa is C or S
  MOD_RES (14)..(15)..(16)..(17)..(18): Xaa is A or G
  MOD_RES (19)..(20)..(21)..(22): Xaa is A or G or absent
GXSEVVMDPYVKLXXXXXXXXXFFLISLSSLRTPVXXTPPTS

SEQ ID NO: 23434 - protein, 43 aa, Artificial Sequence
  Non-cyclic GFR-binding peptide
  MOD_RES (2)..(4)..(37)..(38): Xaa is C or S
  MOD_RES (15)..(16)..(17)..(18)..(19): Xaa is A or G
  MOD_RES (20)..(21)..(22)..(23): Xaa is A or G or absent
LXGXEEVIMPYVKLXXXXXXXXXFFLMSLSSTKVPAXXTSPVR

SEQ ID NO: 23435 - protein, 38 aa, Artificial Sequence
  Non-cyclic GFR-binding peptide
  MOD_RES (2)..(4)..(36)..(37): Xaa is C or S
SXGXRDVVMGPYVKLIIQQKDNFFLMSLSSMKTPTXXP

SEQ ID NO: 23436 - protein, 36 aa, Artificial Sequence
  Non-cyclic GFR-binding peptide
  MOD_RES (31)..(32): Xaa is C or S
EVVMDPYVKLVVNNAADFFLISLSSLRAPVXXSAPA

SEQ ID NO: 23437 - protein, 35 aa, Artificial Sequence
  Non-cyclic GFR-binding peptide
  MOD_RES (2)..(2): Xaa is C or S
  MOD_RES (14)..(15)..(16)..(17)..(18): Xaa is A or G
  MOD_RES (19)..(20)..(21)..(22): Xaa is A or G or absent
GXAEVVMDPYVKLXXXXXXXXXFFLISLSSLRAPV

SEQ ID NO: 23438 - protein, 33 aa, Artificial Sequence
  Non-cyclic GFR-binding peptide
  MOD_RES (12)..(13)..(14)..(15)..(16): Xaa is A or G
  MOD_RES (17)..(18)..(19)..(20): Xaa is A or G or absent
SRVVMNPYVKLXXXXXXXXXFFLVSLSSLKTPA

SEQ ID NO: 23439 - protein, 40 aa, Artificial Sequence
  Non-cyclic GFR-binding peptide
  MOD_RES (1)..(34)..(35): Xaa is C or S
  MOD_RES (12)..(13)..(14)..(15)..(16): Xaa is A or G
  MOD_RES (17)..(18)..(19)..(20): Xaa is A or G or absent
XSKVIMPYVKLXXXXXXXXXFFLISLSSLDQSVXXPSASA

SEQ ID NO: 23440 - protein, 39 aa, Artificial Sequence
  Non-cyclic GFR-binding peptide
  MOD_RES (2)..(4)..(38): Xaa is C or S
  MOD_RES (16)..(17)..(18)..(19)..(20): Xaa is A or G
  MOD_RES (21)..(22)..(23)..(24): Xaa is A or G or absent
HXGXSRVVMNPYVKLXXXXXXXXXFFLVSLSSLKTPAXT

SEQ ID NO: 23441 - protein, 39 aa, Artificial Sequence
  Non-cyclic GFR-binding peptide
  MOD_RES (2)..(4)..(38)..(39): Xaa is C or S
  MOD_RES (16)..(17)..(18)..(19)..(20): Xaa is A or G
  MOD_RES (21)..(22)..(23)..(24): Xaa is A or G or absent
RXGXAEVVMDPYVKLXXXXXXXXXFFLISLSSLRAPVXX

SEQ ID NO: 23442 - protein, 38 aa, Artificial Sequence
  Non-cyclic GFR-binding peptide
  MOD_RES (33)..(34): Xaa is C or S
  MOD_RES (11)..(12)..(13)..(14)..(15): Xaa is A or G
  MOD_RES (16)..(17)..(18)..(19): Xaa is A or G or absent
KVVMNPYVKLXXXXXXXXXFFLVSLSSLKTPAXXAKPV

SEQ ID NO: 23443 - protein, 34 aa, Artificial Sequence
  Non-cyclic GFR-binding peptide
  MOD_RES (2)..(34): Xaa is C or S
GXSEVVMDPYVKLVVNNASDFFLISLSSLRTPVX

SEQ ID NO: 23444 - protein, 37 aa, Artificial Sequence
  Non-cyclic GFR-binding peptide
  MOD_RES (1)..(35)..(36): Xaa is C or S
  MOD_RES (13)..(14)..(15)..(16)..(17): Xaa is A or G
  MOD_RES (18)..(19)..(20)..(21): Xaa is A or G or absent
XSRVVMNPYVKLXXXXXXXXXFFLVSLSSLKTPAXXP

SEQ ID NO: 23445 - protein, 38 aa, Artificial Sequence
  Non-cyclic GFR-binding peptide
  MOD_RES (1)..(38): Xaa is C or S
XELHEELRPYVKLLKPKKRVYEFFLVSLSSHHVRSPQX

SEQ ID NO: 23446 - protein, 43 aa, Artificial Sequence
  Non-cyclic GFR-binding peptide
  MOD_RES (1)..(3)..(37): Xaa is C or S
XEXKNHQLFPYVKLHQGQHPKIRFFLMSLSSEETPVXELGEDN

SEQ ID NO: 23447 - protein, 40 aa, Artificial Sequence
  Non-cyclic GFR-binding peptide
  MOD_RES (2)..(35)..(36): Xaa is C or S
GXEAVSMGEPYVKLTPVGMDDFFLVSLSSLKTPVXXAKGV

SEQ ID NO: 23448 - protein, 32 aa, Artificial Sequence
  Non-cyclic GFR-binding peptide
  MOD_RES (11)..(12)..(13)..(14)..(15): Xaa is A or G
  MOD_RES (16)..(17)..(18)..(19): Xaa is A or G or absent
EVVMDPYVKLXXXXXXXXXFFLISLSSLRAPV

SEQ ID NO: 23449 - protein, 40 aa, Artificial Sequence
  Non-cyclic GFR-binding peptide
  MOD_RES (34)..(35): Xaa is C or S
  MOD_RES (12)..(13)..(14)..(15)..(16): Xaa is A or G
  MOD_RES (17)..(18)..(19)..(20): Xaa is A or G or absent
ESVAMGPYVKLXXXXXXXXXFFLISLSSLKTPVXXAKSAK

SEQ ID NO: 23450 - protein, 35 aa, Artificial Sequence
  Non-cyclic GFR-binding peptide
  MOD_RES (1)..(35): Xaa is C or S
  MOD_RES (13)..(14)..(15)..(16)..(17): Xaa is A or G
  MOD_RES (18)..(19)..(20)..(21): Xaa is A or G or absent
XSRVVMNPYVKLXXXXXXXXXFFLVSLSSLKTPAX

SEQ ID NO: 23451 - protein, 37 aa, Artificial Sequence
  Non-cyclic GFR-binding peptide
  MOD_RES (33)..(34): Xaa is C or S
  MOD_RES (11)..(12)..(13)..(14)..(15): Xaa is A or G
  MOD_RES (16)..(17)..(18)..(19): Xaa is A or G or absent
EVVMDPYVKLXXXXXXXXXFFLISLSSLRTPVXXTPP

SEQ ID NO: 23452 - protein, 41 aa, Artificial Sequence
  Non-cyclic GFR-binding peptide
  MOD_RES (2)..(4)..(36)..(37): Xaa is C or S
HXGXSRVVMNPYVKLIVNSSDDFFLVSLSSLKTPAXXPKPV

SEQ ID NO: 23453 - protein, 40 aa, Artificial Sequence
  Non-cyclic GFR-binding peptide
  MOD_RES (36)..(36): Xaa is C or S
LHEELRPYVKLLKPKKRVYEFFLVSLSSHHVRSPQXKVSS

SEQ ID NO: 23454 - protein, 33 aa, Artificial Sequence
  Non-cyclic GFR-binding peptide
  MOD_RES (12)..(13)..(14)..(15)..(16): Xaa is A or G
  MOD_RES (17)..(18)..(19)..(20): Xaa is A or G or absent
ESVAMGPYVKLXXXXXXXXXFFLISLSSLKTPV

SEQ ID NO: 23455 - protein, 37 aa, Artificial Sequence
  Non-cyclic GFR-binding peptide
  MOD_RES (37)..(37): Xaa is C or S
ELHEELRPYVKLLKPKKRVYEFFLVSLSSHHVRSPQX

SEQ ID NO: 23456 - protein, 37 aa, Artificial Sequence
  Non-cyclic GFR-binding peptide
  MOD_RES (1)..(3)..(34)..(35): Xaa is C or S
XKXSRVIMPYVKLVKPKRGVFFLISLSSLAQPVXXPA

SEQ ID NO: 23457 - protein, 39 aa, Artificial Sequence
  Non-cyclic GFR-binding peptide
  MOD_RES (2)..(4)..(36): Xaa is C or S
HXGXSRVVMNPYVKLIVNSSDDFFLVSLSSLKTPAXTPK

SEQ ID NO: 23458 - protein, 37 aa, Artificial Sequence
  Non-cyclic GFR-binding peptide
  MOD_RES (2)..(4): Xaa is C or S
  MOD_RES (16)..(17)..(18)..(19)..(20): Xaa is A or G
  MOD_RES (21)..(22)..(23)..(24): Xaa is A or G or absent
HXGXSRVVMNPYVKLXXXXXXXXXFFLVSLSSLKTPA

SEQ ID NO: 23459 - protein, 35 aa, Artificial Sequence
  Non-cyclic GFR-binding peptide
  MOD_RES (2)..(4): Xaa is C or S
RXGXSEVVMDPYVKLVVNNASDFFLISLSSLRTPV

SEQ ID NO: 23460 - protein, 32 aa, Artificial Sequence
  Non-cyclic GFR-binding peptide
  MOD_RES (31)..(32): Xaa is C or S
DVVMGPYVKLIIQQKDNFFLMSLSSMKTPTXX

SEQ ID NO: 23461 - protein, 39 aa, Artificial Sequence
  Non-cyclic GFR-binding peptide
  MOD_RES (1)..(3)..(36)..(37): Xaa is C or S
XGXEAVSMGEPYVKLTPVGMDDFFLVSLSSLKTPVXXAK

SEQ ID NO: 23462 - protein, 34 aa, Artificial Sequence
  Non-cyclic GFR-binding peptide
  MOD_RES (1)..(34): Xaa is C or S
  MOD_RES (12)..(13)..(14)..(15)..(16): Xaa is A or G
  MOD_RES (17)..(18)..(19)..(20): Xaa is A or G or absent
XSKVVMPYVKLXXXXXXXXXFFLISLSSLDQPVX

SEQ ID NO: 23463 - protein, 41 aa, Artificial Sequence
  Non-cyclic GFR-binding peptide
  MOD_RES (1)..(3)..(35)..(36): Xaa is C or S
XGXRDVVMGPYVKLIIQQKDNFFLMSLSSMKTPTXXPGASG

SEQ ID NO: 23464 - protein, 35 aa, Artificial Sequence
  Non-cyclic GFR-binding peptide
  MOD_RES (33)..(34): Xaa is C or S
  MOD_RES (11)..(12)..(13)..(14)..(15): Xaa is A or G
  MOD_RES (16)..(17)..(18)..(19): Xaa is A or G or absent
EVVMDPYVKLXXXXXXXXXFFLISLSSLRTPVXXT

SEQ ID NO: 23465 - protein, 32 aa, Artificial Sequence
  Non-cyclic GFR-binding peptide
  MOD_RES (1)..(1): Xaa is C or S
XRDVVMGPYVKLIIQQKDNFFLMSLSSMKTPT

SEQ ID NO: 23466 - protein, 33 aa, Artificial Sequence
  Non-cyclic GFR-binding peptide
  MOD_RES (1)..(32)..(33): Xaa is C or S
XEEVIMPYVKLLLVRGNDFFLMSLSSTKVPAXX

SEQ ID NO: 23467 - protein, 39 aa, Artificial Sequence
  Non-cyclic GFR-binding peptide
  MOD_RES (1)..(35): Xaa is C or S
  MOD_RES (13)..(14)..(15)..(16)..(17): Xaa is A or G
  MOD_RES (18)..(19)..(20)..(21): Xaa is A or G or absent
XSRVVMNPYVKLXXXXXXXXXFFLVSLSSLKTPAXTPKT

SEQ ID NO: 23468 - protein, 37 aa, Artificial Sequence
  Non-cyclic GFR-binding peptide
  MOD_RES (31)..(32): Xaa is C or S
EEVIMPYVKLLLVRGNDFFLMSLSSTKVPAXXTSPVR

SEQ ID NO: 23469 - protein, 35 aa, Artificial Sequence
  Non-cyclic GFR-binding peptide
  MOD_RES (2)..(35): Xaa is C or S
  MOD_RES (13)..(14)..(15)..(16)..(17): Xaa is A or G
  MOD_RES (18)..(19)..(20)..(21): Xaa is A or G or absent
GXEEVIMPYVKLXXXXXXXXXFFLMSLSSTKVPAX

SEQ ID NO: 23470 - protein, 41 aa, Artificial Sequence
  Non-cyclic GFR-binding peptide
  MOD_RES (2)..(4)..(38)..(39): Xaa is C or S
  MOD_RES (16)..(17)..(18)..(19)..(20): Xaa is A or G
  MOD_RES (21)..(22)..(23)..(24): Xaa is A or G or absent
HXGXAKVVMNPYVKLXXXXXXXXXFFLVSLSSLKTPAXXAK

SEQ ID NO: 23471 - protein, 40 aa, Artificial Sequence
  Non-cyclic GFR-binding peptide
  MOD_RES (1)..(3)..(37)..(38): Xaa is C or S
  MOD_RES (15)..(16)..(17)..(18)..(19): Xaa is A or G
  MOD_RES (20)..(21)..(22)..(23): Xaa is A or G or absent
XGXSEVVMDPYVKLXXXXXXXXXFFLISLSSLRTPVXXTP

SEQ ID NO: 23472 - protein, 44 aa, Artificial Sequence
  Non-cyclic GFR-binding peptide
  MOD_RES (2)..(4)..(38)..(39): Xaa is C or S
  MOD_RES (16)..(17)..(18)..(19)..(20): Xaa is A or G
  MOD_RES (21)..(22)..(23)..(24): Xaa is A or G or absent
HXGXAKVVMNPYVKLXXXXXXXXXFFLVSLSSLKTPAXXAKPVA

SEQ ID NO: 23473 - protein, 39 aa, Artificial Sequence
  Non-cyclic GFR-binding peptide
  MOD_RES (2)..(4)..(35)..(36): Xaa is C or S
SXKXSKVIMPYVKLIKPTKGIFFLISLSSLDQSVXXPSA

SEQ ID NO: 23474 - protein, 37 aa, Artificial Sequence
  Non-cyclic GFR-binding peptide
  MOD_RES (33)..(34): Xaa is C or S
  MOD_RES (11)..(12)..(13)..(14)..(15): Xaa is A or G
  MOD_RES (16)..(17)..(18)..(19): Xaa is A or G or absent
SRVIMPYVKLXXXXXXXXXFFLISLSSLAQPVXXPAA

SEQ ID NO: 23475 - protein, 30 aa, Artificial Sequence
  Non-cyclic GFR-binding peptide
RVVMNPYVKLIVNSSDDFFLVSLSSLKTPA

SEQ ID NO: 23476 - protein, 43 aa, Artificial Sequence
  Non-cyclic GFR-binding peptide
  MOD_RES (1)..(3)..(37)..(38): Xaa is C or S
  MOD_RES (15)..(16)..(17)..(18)..(19): Xaa is A or G
  MOD_RES (20)..(21)..(22)..(23): Xaa is A or G or absent
XGXAKVVMNPYVKLXXXXXXXXXFFLVSLSSLKTPAXXAKPVA

SEQ ID NO: 23477 - protein, 40 aa, Artificial Sequence
  Non-cyclic GFR-binding peptide
  MOD_RES (2)..(4)..(36)..(37): Xaa is C or S
RXGXESVAMGPYVKLYTVVGKDFFLISLSSLKTPVXXAKS

SEQ ID NO: 23478 - protein, 33 aa, Artificial Sequence
  Non-cyclic GFR-binding peptide
  MOD_RES (31)..(32): Xaa is C or S
DVVMGPYVKLIIQQKDNFFLMSLSSMKTPTXXP

SEQ ID NO: 23479 - protein, 38 aa, Artificial Sequence
  Non-cyclic GFR-binding peptide
  MOD_RES (1)..(3)..(36)..(37): Xaa is C or S
  MOD_RES (14)..(15)..(16)..(17)..(18): Xaa is A or G
  MOD_RES (19)..(20)..(21)..(22): Xaa is A or G or absent
XKXSKVIMPYVKLXXXXXXXXXFFLISLSSLDQSVXXP

SEQ ID NO: 23480 - protein, 35 aa, Artificial Sequence
  Non-cyclic GFR-binding peptide
  MOD_RES (33)..(34): Xaa is C or S
  MOD_RES (11)..(12)..(13)..(14)..(15): Xaa is A or G
  MOD_RES (16)..(17)..(18)..(19): Xaa is A or G or absent
RVVMNPYVKLXXXXXXXXXFFLVSLSSLKTPAXXP

SEQ ID NO: 23481 - protein, 34 aa, Artificial Sequence
  Non-cyclic GFR-binding peptide
  MOD_RES (31)..(32): Xaa is C or S
EEVIMPYVKLLLVRGNDFFLMSLSSTKVPAXXTS

SEQ ID NO: 23482 - protein, 36 aa, Artificial Sequence
  Non-cyclic GFR-binding peptide
  MOD_RES (2)..(4): Xaa is C or S
  MOD_RES (15)..(16)..(17)..(18)..(19): Xaa is A or G
  MOD_RES (20)..(21)..(22)..(23): Xaa is A or G or absent
SXKXSKVIMPYVKLXXXXXXXXXFFLISLSSLDQSV

SEQ ID NO: 23483 - protein, 36 aa, Artificial Sequence
  Non-cyclic GFR-binding peptide
  MOD_RES (2)..(34)..(35): Xaa is C or S
GXGEVVMEPYVKLVVKDYEDFFLMSLSSLETPVXXA

SEQ ID NO: 23484 - protein, 34 aa, Artificial Sequence
  Non-cyclic GFR-binding peptide
  MOD_RES (33)..(34): Xaa is C or S
  MOD_RES (11)..(12)..(13)..(14)..(15): Xaa is A or G
  MOD_RES (16)..(17)..(18)..(19): Xaa is A or G or absent
DVVMGPYVKLXXXXXXXXXFFLMSLSSMKTPTXX

SEQ ID NO: 23485 - protein, 37 aa, Artificial Sequence
  Non-cyclic GFR-binding peptide
  MOD_RES (2)..(4)..(36)..(37): Xaa is C or S
HXGXAKVVMNPYVKLIVNNSSDFFLVSLSSLKTPAXX

SEQ ID NO: 23486 - protein, 40 aa, Artificial Sequence
  Non-cyclic GFR-binding peptide
  MOD_RES (2)..(34)..(35): Xaa is C or S
GXESVAMGPYVKLYTVVGKDFFLISLSSLKTPVXXAKSAK

SEQ ID NO: 23487 - protein, 42 aa, Artificial Sequence
  Non-cyclic GFR-binding peptide
  MOD_RES (2)..(36): Xaa is C or S
  MOD_RES (14)..(15)..(16)..(17)..(18): Xaa is A or G
  MOD_RES (19)..(20)..(21)..(22): Xaa is A or G or absent
EXKNHQLFPYVKLXXXXXXXXXFFLMSLSSEETPVXELGEDN

SEQ ID NO: 23488 - protein, 36 aa, Artificial Sequence
  Non-cyclic GFR-binding peptide
  MOD_RES (2)..(35)..(36): Xaa is C or S
  MOD_RES (13)..(14)..(15)..(16)..(17): Xaa is A or G
  MOD_RES (18)..(19)..(20)..(21): Xaa is A or G or absent
GXEEVIMPYVKLXXXXXXXXXFFLMSLSSTKVPAXX

SEQ ID NO: 23489 - protein, 37 aa, Artificial Sequence
  Non-cyclic GFR-binding peptide
  MOD_RES (2)..(36)..(37): Xaa is C or S
  MOD_RES (14)..(15)..(16)..(17)..(18): Xaa is A or G
  MOD_RES (19)..(20)..(21)..(22): Xaa is A or G or absent
GXARVVMNPYVKLXXXXXXXXXFFLVSLSSLQTPAXX

SEQ ID NO: 23490 - protein, 32 aa, Artificial Sequence
  Non-cyclic GFR-binding peptide
  MOD_RES (11)..(12)..(13)..(14)..(15): Xaa is A or G
  MOD_RES (16)..(17)..(18)..(19): Xaa is A or G or absent
SKVVMPYVKLXXXXXXXXXFFLISLSSLDQPV

SEQ ID NO: 23491 - protein, 39 aa, Artificial Sequence
  Non-cyclic GFR-binding peptide
  MOD_RES (2)..(36): Xaa is C or S
  MOD_RES (14)..(15)..(16)..(17)..(18): Xaa is A or G
  MOD_RES (19)..(20)..(21)..(22): Xaa is A or G or absent
EXKNHQLFPYVKLXXXXXXXXXFFLMSLSSEETPVXELG

SEQ ID NO: 23492 - protein, 38 aa, Artificial Sequence
  Non-cyclic GFR-binding peptide
  MOD_RES (1)..(33)..(34): Xaa is C or S
XARVVMNPYVKLIVNSSDDFFLVSLSSLQTPAXXPKPV

SEQ ID NO: 23493 - protein, 37 aa, Artificial Sequence
  Non-cyclic GFR-binding peptide
  MOD_RES (2)..(4)..(37): Xaa is C or S
  MOD_RES (15)..(16)..(17)..(18)..(19): Xaa is A or G
  MOD_RES (20)..(21)..(22)..(23): Xaa is A or G or absent
LXGXEEVIMPYVKLXXXXXXXXXFFLMSLSSTKVPAX

SEQ ID NO: 23494 - protein, 34 aa, Artificial Sequence
  Non-cyclic GFR-binding peptide
  MOD_RES (2)..(2): Xaa is C or S
  MOD_RES (13)..(14)..(15)..(16)..(17): Xaa is A or G
  MOD_RES (18)..(19)..(20)..(21): Xaa is A or G or absent
KXSKVIMPYVKLXXXXXXXXXFFLISLSSLDQSV

SEQ ID NO: 23495 - protein, 38 aa, Artificial Sequence
  Non-cyclic GFR-binding peptide
  MOD_RES (1)..(35): Xaa is C or S
  MOD_RES (13)..(14)..(15)..(16)..(17): Xaa is A or G
  MOD_RES (18)..(19)..(20)..(21): Xaa is A or G or absent
XSRVVMNPYVKLXXXXXXXXXFFLVSLSSLKTPAXTPK

SEQ ID NO: 23496 - protein, 31 aa, Artificial Sequence
  Non-cyclic GFR-binding peptide
  MOD_RES (31)..(31): Xaa is C or S
EEVIMPYVKLLLVRGNDFFLMSLSSTKVPAX

SEQ ID NO: 23497 - protein, 38 aa, Artificial Sequence
  Non-cyclic GFR-binding peptide
  MOD_RES (37)..(37): Xaa is C or S
  MOD_RES (13)..(14)..(15)..(16)..(17): Xaa is A or G
  MOD_RES (18)..(19)..(20)..(21): Xaa is A or G or absent
ELHEELRPYVKLXXXXXXXXXFFLVSLSSHHVRSPQXK

SEQ ID NO: 23498 - protein, 41 aa, Artificial Sequence
  Non-cyclic GFR-binding peptide
  MOD_RES (1)..(3)..(35)..(36): Xaa is C or S
XGXSEVVMDPYVKLVVNNASDFFLISLSSLRTPVXXTPPTS

SEQ ID NO: 23499 - protein, 39 aa, Artificial Sequence
  Non-cyclic GFR-binding peptide
  MOD_RES (33)..(34): Xaa is C or S
  MOD_RES (11)..(12)..(13)..(14)..(15): Xaa is A or G
  MOD_RES (16)..(17)..(18)..(19): Xaa is A or G or absent
DVVMGPYVKLXXXXXXXXXFFLMSLSSMKTPTXXPGASG

SEQ ID NO: 23500 - protein, 31 aa, Artificial Sequence
  Non-cyclic GFR-binding peptide
  MOD_RES (31)..(31): Xaa is C or S
SRVIMPYVKLVKPKRGVFFLISLSSLAQPVX

SEQ ID NO: 23501 - protein, 41 aa, Artificial Sequence
  Non-cyclic GFR-binding peptide
  MOD_RES (1)..(35)..(36): Xaa is C or S
  MOD_RES (13)..(14)..(15)..(16)..(17): Xaa is A or G
  MOD_RES (18)..(19)..(20)..(21): Xaa is A or G or absent
XAEVVMDPYVKLXXXXXXXXXFFLISLSSLRAPVXXSAPAA

SEQ ID NO: 23502 - protein, 42 aa, Artificial Sequence
  Non-cyclic GFR-binding peptide
  MOD_RES (2)..(36)..(37): Xaa is C or S
  MOD_RES (14)..(15)..(16)..(17)..(18): Xaa is A or G
  MOD_RES (19)..(20)..(21)..(22): Xaa is A or G or absent
GXGEVVMEPYVKLXXXXXXXXXFFLMSLSSLETPVXXAKPIS

SEQ ID NO: 23503 - protein, 39 aa, Artificial Sequence
  Non-cyclic GFR-binding peptide
  MOD_RES (2)..(34)..(35): Xaa is C or S
GXAEVVMDPYVKLVVNNAADFFLISLSSLRAPVXXSAPA

SEQ ID NO: 23504 - protein, 39 aa, Artificial Sequence
  Non-cyclic GFR-binding peptide
  MOD_RES (1)..(3)..(35)..(36): Xaa is C or S
XGXGEVVMEPYVKLVVKDYEDFFLMSLSSLETPVXXAKP

SEQ ID NO: 23505 - protein, 40 aa, Artificial Sequence
  Non-cyclic GFR-binding peptide
  MOD_RES (1)..(34)..(35): Xaa is C or S
  MOD_RES (12)..(13)..(14)..(15)..(16): Xaa is A or G
  MOD_RES (17)..(18)..(19)..(20): Xaa is A or G or absent
XEEVIMPYVKLXXXXXXXXXFFLMSLSSTKVPAXXTSPVR

SEQ ID NO: 23506 - protein, 38 aa, Artificial Sequence
  Non-cyclic GFR-binding peptide
  MOD_RES (1)..(32)..(33): Xaa is C or S
XSKVVMPYVKLVKPTRGVFFLISLSSLDQPVXXPSASA

SEQ ID NO: 23507 - protein, 39 aa, Artificial Sequence
  Non-cyclic GFR-binding peptide
  MOD_RES (34)..(35): Xaa is C or S
  MOD_RES (12)..(13)..(14)..(15)..(16): Xaa is A or G
  MOD_RES (17)..(18)..(19)..(20): Xaa is A or G or absent
SRVVMNPYVKLXXXXXXXXXFFLVSLSSLKTPAXXPKPV

SEQ ID NO: 23508 - protein, 38 aa, Artificial Sequence
  Non-cyclic GFR-binding peptide
  MOD_RES (2)..(4)..(37)..(38): Xaa is C or S
  MOD_RES (15)..(16)..(17)..(18)..(19): Xaa is A or G
  MOD_RES (20)..(21)..(22)..(23): Xaa is A or G or absent
SXKXSKVVMPYVKLXXXXXXXXXFFLISLSSLDQPVXX

SEQ ID NO: 23509 - protein, 39 aa, Artificial Sequence
  Non-cyclic GFR-binding peptide
  MOD_RES (37)..(37): Xaa is C or S
ELHEELRPYVKLLKPKKRVYEFFLVSLSSHHVRSPQXKV

SEQ ID NO: 23510 - protein, 34 aa, Artificial Sequence
  Non-cyclic GFR-binding peptide
  MOD_RES (2)..(2): Xaa is C or S
  MOD_RES (13)..(14)..(15)..(16)..(17): Xaa is A or G
  MOD_RES (18)..(19)..(20)..(21): Xaa is A or G or absent
GXEEVIMPYVKLXXXXXXXXXFFLMSLSSTKVPA

SEQ ID NO: 23511 - protein, 38 aa, Artificial Sequence
  Non-cyclic GFR-binding peptide
  MOD_RES (32)..(32): Xaa is C or S
SRVVMNPYVKLIVNSSDDFFLVSLSSLKTPAXTPKTVH

SEQ ID NO: 23512 - protein, 35 aa, Artificial Sequence
  Non-cyclic GFR-binding peptide
  MOD_RES (1)..(33)..(34): Xaa is C or S
XAKVVMNPYVKLIVNNSSDFFLVSLSSLKTPAXXA

SEQ ID NO: 23513 - protein, 42 aa, Artificial Sequence
  Non-cyclic GFR-binding peptide
  MOD_RES (2)..(36)..(37): Xaa is C or S
  MOD_RES (14)..(15)..(16)..(17)..(18): Xaa is A or G
  MOD_RES (19)..(20)..(21)..(22): Xaa is A or G or absent
GXAEVVMDPYVKLXXXXXXXXXFFLISLSSLRAPVXXSAPAA

SEQ ID NO: 23514 - protein, 37 aa, Artificial Sequence
  Non-cyclic GFR-binding peptide
  MOD_RES (1)..(33)..(34): Xaa is C or S
XARVVMNPYVKLIVNSSDDFFLVSLSSLQTPAXXPKP

SEQ ID NO: 23515 - protein, 36 aa, Artificial Sequence
  Non-cyclic GFR-binding peptide
  MOD_RES (2)..(2): Xaa is C or S
AXELHEELRPYVKLLKPKKRVYEFFLVSLSSHHVRS

SEQ ID NO: 23516 - protein, 32 aa, Artificial Sequence
  Non-cyclic GFR-binding peptide
  MOD_RES (1)..(1): Xaa is C or S
XARVVMNPYVKLIVNSSDDFFLVSLSSLQTPA

SEQ ID NO: 23517 - protein, 37 aa, Artificial Sequence
  Non-cyclic GFR-binding peptide
  MOD_RES (2)..(4)..(36)..(37): Xaa is C or S
HXGXARVVMNPYVKLIVNSSDDFFLVSLSSLQTPAXX

SEQ ID NO: 23518 - protein, 38 aa, Artificial Sequence
  Non-cyclic GFR-binding peptide
  MOD_RES (34)..(35): Xaa is C or S
  MOD_RES (12)..(13)..(14)..(15)..(16): Xaa is A or G
  MOD_RES (17)..(18)..(19)..(20): Xaa is A or G or absent
SRVVMNPYVKLXXXXXXXXXFFLVSLSSLKTPAXXPKP

SEQ ID NO: 23519 - protein, 35 aa, Artificial Sequence
  Non-cyclic GFR-binding peptide
  MOD_RES (2)..(34)..(35): Xaa is C or S
GXAKVVMNPYVKLIVNNSSDFFLVSLSSLKTPAXX

SEQ ID NO: 23520 - protein, 34 aa, Artificial Sequence
  Non-cyclic GFR-binding peptide
  MOD_RES (34)..(34): Xaa is C or S
  MOD_RES (12)..(13)..(14)..(15)..(16): Xaa is A or G
  MOD_RES (17)..(18)..(19)..(20): Xaa is A or G or absent
RDVVMGPYVKLXXXXXXXXXFFLMSLSSMKTPTX

SEQ ID NO: 23521 - protein, 33 aa, Artificial Sequence
  Non-cyclic GFR-binding peptide
  MOD_RES (31)..(32): Xaa is C or S
SVAMGPYVKLYTVVGKDFFLISLSSLKTPVXXA

SEQ ID NO: 23522 - protein, 31 aa, Artificial Sequence
  Non-cyclic GFR-binding peptide
AEVVMDPYVKLVVNNAADFFLISLSSLRAPV

SEQ ID NO: 23523 - protein, 41 aa, Artificial Sequence
  Non-cyclic GFR-binding peptide
  MOD_RES (1)..(3)..(35)..(36): Xaa is C or S
XGXAEVVMDPYVKLVVNNAADFFLISLSSLRAPVXXSAPAA

SEQ ID NO: 23524 - protein, 41 aa, Artificial Sequence
  Non-cyclic GFR-binding peptide
  MOD_RES (1)..(38): Xaa is C or S
XELHEELRPYVKLLKPKKRVYEFFLVSLSSHHVRSPQXKVS

SEQ ID NO: 23525 - protein, 39 aa, Artificial Sequence
  Non-cyclic GFR-binding peptide
  MOD_RES (33)..(34): Xaa is C or S
  MOD_RES (11)..(12)..(13)..(14)..(15): Xaa is A or G
  MOD_RES (16)..(17)..(18)..(19): Xaa is A or G or absent
RVVMNPYVKLXXXXXXXXXFFLVSLSSLKTPAXXPKPVH

SEQ ID NO: 23526 - protein, 38 aa, Artificial Sequence
  Non-cyclic GFR-binding peptide
  MOD_RES (1)..(3)..(35)..(36): Xaa is C or S
XGXESVAMGPYVKLYTVVGKDFFLISLSSLKTPVXXAK

SEQ ID NO: 23527 - protein, 36 aa, Artificial Sequence
  Non-cyclic GFR-binding peptide
  MOD_RES (1)..(35): Xaa is C or S
  MOD_RES (13)..(14)..(15)..(16)..(17): Xaa is A or G
  MOD_RES (18)..(19)..(20)..(21): Xaa is A or G or absent
XKNHQLFPYVKLXXXXXXXXXFFLMSLSSEETPVXE

SEQ ID NO: 23528 - protein, 41 aa, Artificial Sequence
  Non-cyclic GFR-binding peptide
  MOD_RES (2)..(4)..(41): Xaa is C or S
AXAXELHEELRPYVKLLKPKKRVYEFFLVSLSSHHVRSPQX

SEQ ID NO: 23529 - protein, 41 aa, Artificial Sequence
  Non-cyclic GFR-binding peptide
  MOD_RES (2)..(4)..(38)..(39): Xaa is C or S
  MOD_RES (16)..(17)..(18)..(19)..(20): Xaa is A or G
  MOD_RES (21)..(22)..(23)..(24): Xaa is A or G or absent
RXGXESVAMGPYVKLXXXXXXXXXFFLISLSSLKTPVXXAK

SEQ ID NO: 23530 - protein, 38 aa, Artificial Sequence
  Non-cyclic GFR-binding peptide
  MOD_RES (1)..(3)..(35)..(36): Xaa is C or S
XGXGEVVMEPYVKLVVKDYEDFFLMSLSSLETPVXXAK

SEQ ID NO: 23531 - protein, 35 aa, Artificial Sequence
  Non-cyclic GFR-binding peptide
  MOD_RES (1)..(33)..(34): Xaa is C or S
XESVAMGPYVKLYTVVGKDFFLISLSSLKTPVXXA

SEQ ID NO: 23532 - protein, 30 aa, Artificial Sequence
  Non-cyclic GFR-binding peptide
EVVMEPYVKLVVKDYEDFFLMSLSSLETPV

SEQ ID NO: 23533 - protein, 40 aa, Artificial Sequence
  Non-cyclic GFR-binding peptide
  MOD_RES (1)..(34)..(35): Xaa is C or S
XEAVSMGEPYVKLTPVGMDDFFLVSLSSLKTPVXXAKGVK

SEQ ID NO: 23534 - protein, 36 aa, Artificial Sequence
  Non-cyclic GFR-binding peptide
  MOD_RES (2)..(4): Xaa is C or S
RXGXEAVSMGEPYVKLTPVGMDDFFLVSLSSLKTPV

SEQ ID NO: 23535 - protein, 39 aa, Artificial Sequence
  Non-cyclic GFR-binding peptide
  MOD_RES (2)..(4)..(36)..(37): Xaa is C or S
HXGXSRVVMNPYVKLIVNSSDDFFLVSLSSLKTPAXXPK

SEQ ID NO: 23536 - protein, 35 aa, Artificial Sequence
  Non-cyclic GFR-binding peptide
  MOD_RES (2)..(35): Xaa is C or S
  MOD_RES (13)..(14)..(15)..(16)..(17): Xaa is A or G
  MOD_RES (18)..(19)..(20)..(21): Xaa is A or G or absent
KXSKVVMPYVKLXXXXXXXXXFFLISLSSLDQPVX

SEQ ID NO: 23537 - protein, 38 aa, Artificial Sequence
  Non-cyclic GFR-binding peptide
  MOD_RES (2)..(36): Xaa is C or S
EXKNHQLFPYVKLHQGQHPKIRFFLMSLSSEETPVXEL

SEQ ID NO: 23538 - protein, 37 aa, Artificial Sequence
  Non-cyclic GFR-binding peptide
  MOD_RES (2)..(35)..(36): Xaa is C or S
  MOD_RES (13)..(14)..(15)..(16)..(17): Xaa is A or G
  MOD_RES (18)..(19)..(20)..(21): Xaa is A or G or absent
KXSKVVMPYVKLXXXXXXXXXFFLISLSSLDQPVXXP

SEQ ID NO: 23539 - protein, 32 aa, Artificial Sequence
  Non-cyclic GFR-binding peptide
  MOD_RES (2)..(2): Xaa is C or S
GXEEVIMPYVKLLLVRGNDFFLMSLSSTKVPA

SEQ ID NO: 23540 - protein, 36 aa, Artificial Sequence
  Non-cyclic GFR-binding peptide
  MOD_RES (1)..(33)..(34): Xaa is C or S
XRDVVMGPYVKLIIQQKDNFFLMSLSSMKTPTXXPG

SEQ ID NO: 23541 - protein, 39 aa, Artificial Sequence
  Non-cyclic GFR-binding peptide
  MOD_RES (1)..(3)..(37): Xaa is C or S
  MOD_RES (15)..(16)..(17)..(18)..(19): Xaa is A or G
  MOD_RES (20)..(21)..(22)..(23): Xaa is A or G or absent
XEXKNHQLFPYVKLXXXXXXXXXFFLMSLSSEETPVXEL

SEQ ID NO: 23542 - protein, 37 aa, Artificial Sequence
  Non-cyclic GFR-binding peptide
  MOD_RES (33)..(34): Xaa is C or S
  MOD_RES (11)..(12)..(13)..(14)..(15): Xaa is A or G
  MOD_RES (16)..(17)..(18)..(19): Xaa is A or G or absent
KVVMNPYVKLXXXXXXXXXFFLVSLSSLKTPAXXAKP

SEQ ID NO: 23543 - protein, 35 aa, Artificial Sequence
  Non-cyclic GFR-binding peptide
  MOD_RES (1)..(32)..(33): Xaa is C or S
XEEVIMPYVKLLLVRGNDFFLMSLSSTKVPAXXTS

SEQ ID NO: 23544 - protein, 37 aa, Artificial Sequence
  Non-cyclic GFR-binding peptide
  MOD_RES (2)..(35)..(36): Xaa is C or S
  MOD_RES (13)..(14)..(15)..(16)..(17): Xaa is A or G
  MOD_RES (18)..(19)..(20)..(21): Xaa is A or G or absent
GXEEVIMPYVKLXXXXXXXXXFFLMSLSSTKVPAXXT

SEQ ID NO: 23545 - protein, 38 aa, Artificial Sequence
  Non-cyclic GFR-binding peptide
  MOD_RES (35)..(36): Xaa is C or S
  MOD_RES (13)..(14)..(15)..(16)..(17): Xaa is A or G
  MOD_RES (18)..(19)..(20)..(21): Xaa is A or G or absent
EAVSMGEPYVKLXXXXXXXXXFFLVSLSSLKTPVXXAK

SEQ ID NO: 23546 - protein, 34 aa, Artificial Sequence
  Non-cyclic GFR-binding peptide
  MOD_RES (1)..(1): Xaa is C or S
  MOD_RES (13)..(14)..(15)..(16)..(17): Xaa is A or G
  MOD_RES (18)..(19)..(20)..(21): Xaa is A or G or absent
XSRVVMNPYVKLXXXXXXXXXFFLVSLSSLKTPA

SEQ ID NO: 23547 - protein, 37 aa, Artificial Sequence
  Non-cyclic GFR-binding peptide
  MOD_RES (2)..(36)..(37): Xaa is C or S
  MOD_RES (14)..(15)..(16)..(17)..(18): Xaa is A or G
  MOD_RES (19)..(20)..(21)..(22): Xaa is A or G or absent
GXAKVVMNPYVKLXXXXXXXXXFFLVSLSSLKTPAXX

SEQ ID NO: 23548 - protein, 33 aa, Artificial Sequence
  Non-cyclic GFR-binding peptide
  MOD_RES (2)..(2): Xaa is C or S
GXAEVVMDPYVKLVVNNAADFFLISLSSLRAPV

SEQ ID NO: 23549 - protein, 36 aa, Artificial Sequence
  Non-cyclic GFR-binding peptide
  MOD_RES (1)..(3)..(36): Xaa is C or S
  MOD_RES (14)..(15)..(16)..(17)..(18): Xaa is A or G
  MOD_RES (19)..(20)..(21)..(22): Xaa is A or G or absent
XKXSKVIMPYVKLXXXXXXXXXFFLISLSSLDQSVX

SEQ ID NO: 23550 - protein, 35 aa, Artificial Sequence
  Non-cyclic GFR-binding peptide
  MOD_RES (1)..(34)..(35): Xaa is C or S
  MOD_RES (12)..(13)..(14)..(15)..(16): Xaa is A or G
  MOD_RES (17)..(18)..(19)..(20): Xaa is A or G or absent
XSKVIMPYVKLXXXXXXXXXFFLISLSSLDQSVXX

SEQ ID NO: 23551 - protein, 40 aa, Artificial Sequence
  Non-cyclic GFR-binding peptide
  MOD_RES (2)..(4)..(38): Xaa is C or S
RXEXKNHQLFPYVKLHQGQHPKIRFFLMSLSSEETPVXEL

SEQ ID NO: 23552 - protein, 42 aa, Artificial Sequence
  Non-cyclic GFR-binding peptide
  MOD_RES (2)..(4)..(36)..(37): Xaa is C or S
HXGXSRVVMNPYVKLIVNSSDDFFLVSLSSLKTPAXXPKPVH

SEQ ID NO: 23553 - protein, 36 aa, Artificial Sequence
  Non-cyclic GFR-binding peptide
  MOD_RES (1)..(35)..(36): Xaa is C or S
  MOD_RES (13)..(14)..(15)..(16)..(17): Xaa is A or G
  MOD_RES (18)..(19)..(20)..(21): Xaa is A or G or absent
XAKVVMNPYVKLXXXXXXXXXFFLVSLSSLKTPAXX

SEQ ID NO: 23554 - protein, 39 aa, Artificial Sequence
  Non-cyclic GFR-binding peptide
  MOD_RES (2)..(4)..(36)..(37): Xaa is C or S
RXGXAEVVMDPYVKLVVNNAADFFLISLSSLRAPVXXSA

SEQ ID NO: 23555 - protein, 42 aa, Artificial Sequence
  Non-cyclic GFR-binding peptide
  MOD_RES (1)..(3)..(37)..(38): Xaa is C or S
  MOD_RES (15)..(16)..(17)..(18)..(19): Xaa is A or G
  MOD_RES (20)..(21)..(22)..(23): Xaa is A or G or absent
XGXAEVVMDPYVKLXXXXXXXXXFFLISLSSLRAPVXXSAPA

SEQ ID NO: 23556 - protein, 38 aa, Artificial Sequence
  Non-cyclic GFR-binding peptide
  MOD_RES (2)..(4)..(38): Xaa is C or S
  MOD_RES (16)..(17)..(18)..(19)..(20): Xaa is A or G
  MOD_RES (21)..(22)..(23)..(24): Xaa is A or G or absent
HXGXARVVMNPYVKLXXXXXXXXXFFLVSLSSLQTPAX

SEQ ID NO: 23557 - protein, 35 aa, Artificial Sequence
  Non-cyclic GFR-binding peptide
  MOD_RES (34)..(35): Xaa is C or S
  MOD_RES (12)..(13)..(14)..(15)..(16): Xaa is A or G
  MOD_RES (17)..(18)..(19)..(20): Xaa is A or G or absent
ESVAMGPYVKLXXXXXXXXXFFLISLSSLKTPVXX

SEQ ID NO: 23558 - protein, 36 aa, Artificial Sequence
  Non-cyclic GFR-binding peptide
  MOD_RES (2)..(36): Xaa is C or S
  MOD_RES (14)..(15)..(16)..(17)..(18): Xaa is A or G
  MOD_RES (19)..(20)..(21)..(22): Xaa is A or G or absent
GXRDVVMGPYVKLXXXXXXXXXFFLMSLSSMKTPTX

SEQ ID NO: 23559 - protein, 43 aa, Artificial Sequence
  Non-cyclic GFR-binding peptide
  MOD_RES (1)..(3)..(37)..(38): Xaa is C or S
  MOD_RES (15)..(16)..(17)..(18)..(19): Xaa is A or G
  MOD_RES (20)..(21)..(22)..(23): Xaa is A or G or absent
XGXGEVVMEPYVKLXXXXXXXXXFFLMSLSSLETPVXXAKPIS

SEQ ID NO: 23560 - protein, 40 aa, Artificial Sequence
  Non-cyclic GFR-binding peptide
  MOD_RES (1)..(3)..(34)..(35): Xaa is C or S
XKXSKVIMPYVKLIKPTKGIFFLISLSSLDQSVXXPSASA

SEQ ID NO: 23561 - protein, 33 aa, Artificial Sequence
  Non-cyclic GFR-binding peptide
  MOD_RES (1)..(3): Xaa is C or S
XKXSRVIMPYVKLVKPKRGVFFLISLSSLAQPV

SEQ ID NO: 23562 - protein, 35 aa, Artificial Sequence
  Non-cyclic GFR-binding peptide
  MOD_RES (2)..(4): Xaa is C or S
RXGXESVAMGPYVKLYTVVGKDFFLISLSSLKTPV

SEQ ID NO: 23563 - protein, 34 aa, Artificial Sequence
  Non-cyclic GFR-binding peptide
  MOD_RES (32)..(33): Xaa is C or S
GEVVMEPYVKLVVKDYEDFFLMSLSSLETPVXXA

SEQ ID NO: 23564 - protein, 39 aa, Artificial Sequence
  Non-cyclic GFR-binding peptide
  MOD_RES (2)..(34)..(35): Xaa is C or S
GXAKVVMNPYVKLIVNNSSDFFLVSLSSLKTPAXXAKPV

SEQ ID NO: 23565 - protein, 33 aa, Artificial Sequence
  Non-cyclic GFR-binding peptide
  MOD_RES (2)..(2): Xaa is C or S
GXESVAMGPYVKLYTVVGKDFFLISLSSLKTPV

SEQ ID NO: 23566 - protein, 34 aa, Artificial Sequence
  Non-cyclic GFR-binding peptide
  MOD_RES (31)..(32): Xaa is C or S
EVVMDPYVKLVVNNASDFFLISLSSLRTPVXXTP

SEQ ID NO: 23567 - protein, 34 aa, Artificial Sequence
  Non-cyclic GFR-binding peptide
  MOD_RES (1)..(3): Xaa is C or S
XGXGEVVMEPYVKLVVKDYEDFFLMSLSSLETPV

SEQ ID NO: 23568 - protein, 37 aa, Artificial Sequence
  Non-cyclic GFR-binding peptide
  MOD_RES (31)..(31): Xaa is C or S
RVVMNPYVKLIVNSSDDFFLVSLSSLKTPAXTPKTVH

SEQ ID NO: 23569 - protein, 34 aa, Artificial Sequence
  Non-cyclic GFR-binding peptide
  MOD_RES (34)..(34): Xaa is C or S
  MOD_RES (12)..(13)..(14)..(15)..(16): Xaa is A or G
  MOD_RES (17)..(18)..(19)..(20): Xaa is A or G or absent
KNHQLFPYVKLXXXXXXXXXFFLMSLSSEETPVX

SEQ ID NO: 23570 - protein, 39 aa, Artificial Sequence
  Non-cyclic GFR-binding peptide
  MOD_RES (1)..(3): Xaa is C or S
  MOD_RES (16)..(17)..(18)..(19)..(20): Xaa is A or G
  MOD_RES (21)..(22)..(23)..(24): Xaa is A or G or absent
XAXELHEELRPYVKLXXXXXXXXXFFLVSLSSHHVRSPQ

SEQ ID NO: 23571 - protein, 38 aa, Artificial Sequence
  Non-cyclic GFR-binding peptide
  MOD_RES (2)..(4)..(37)..(38): Xaa is C or S
  MOD_RES (15)..(16)..(17)..(18)..(19): Xaa is A or G
  MOD_RES (20)..(21)..(22)..(23): Xaa is A or G or absent
SXKXSKVIMPYVKLXXXXXXXXXFFLISLSSLDQSVXX

SEQ ID NO: 23572 - protein, 35 aa, Artificial Sequence
  Non-cyclic GFR-binding peptide
  MOD_RES (2)..(33)..(34): Xaa is C or S
KXSKVVMPYVKLVKPTRGVFFLISLSSLDQPVXXP

SEQ ID NO: 23573 - protein, 37 aa, Artificial Sequence
  Non-cyclic GFR-binding peptide
  MOD_RES (2)..(36): Xaa is C or S
EXKNHQLFPYVKLHQGQHPKIRFFLMSLSSEETPVXE

SEQ ID NO: 23574 - protein, 39 aa, Artificial Sequence
  Non-cyclic GFR-binding peptide
  MOD_RES (1)..(3)..(34)..(35): Xaa is C or S
XKXSKVIMPYVKLIKPTKGIFFLISLSSLDQSVXXPSAS

SEQ ID NO: 23575 - protein, 37 aa, Artificial Sequence
  Non-cyclic GFR-binding peptide
  MOD_RES (2)..(34)..(35): Xaa is C or S
GXARVVMNPYVKLIVNSSDDFFLVSLSSLQTPAXXPK

SEQ ID NO: 23576 - protein, 36 aa, Artificial Sequence
  Non-cyclic GFR-binding peptide
  MOD_RES (1)..(3)..(36): Xaa is C or S
XGXEAVSMGEPYVKLTPVGMDDFFLVSLSSLKTPVX

SEQ ID NO: 23577 - protein, 41 aa, Artificial Sequence
  Non-cyclic GFR-binding peptide
  MOD_RES (2)..(36): Xaa is C or S
  MOD_RES (14)..(15)..(16)..(17)..(18): Xaa is A or G
  MOD_RES (19)..(20)..(21)..(22): Xaa is A or G or absent
EXKNHQLFPYVKLXXXXXXXXXFFLMSLSSEETPVXELGED

SEQ ID NO: 23578 - protein, 36 aa, Artificial Sequence
  Non-cyclic GFR-binding peptide
  MOD_RES (2)..(2): Xaa is C or S
  MOD_RES (15)..(16)..(17)..(18)..(19): Xaa is A or G
  MOD_RES (20)..(21)..(22)..(23): Xaa is A or G or absent
AXELHEELRPYVKLXXXXXXXXXFFLVSLSSHHVRS

SEQ ID NO: 23579 - protein, 41 aa, Artificial Sequence
  Non-cyclic GFR-binding peptide
  MOD_RES (1)..(3)..(37)..(38): Xaa is C or S
  MOD_RES (15)..(16)..(17)..(18)..(19): Xaa is A or G
  MOD_RES (20)..(21)..(22)..(23): Xaa is A or G or absent
XGXRDVVMGPYVKLXXXXXXXXXFFLMSLSSMKTPTXXPGA

SEQ ID NO: 23580 - protein, 35 aa, Artificial Sequence
  Non-cyclic GFR-binding peptide
  MOD_RES (32)..(33): Xaa is C or S
AKVVMNPYVKLIVNNSSDFFLVSLSSLKTPAXXAK

SEQ ID NO: 23581 - protein, 37 aa, Artificial Sequence
  Non-cyclic GFR-binding peptide
  MOD_RES (34)..(35): Xaa is C or S
  MOD_RES (12)..(13)..(14)..(15)..(16): Xaa is A or G
  MOD_RES (17)..(18)..(19)..(20): Xaa is A or G or absent
AKVVMNPYVKLXXXXXXXXXFFLVSLSSLKTPAXXAK

SEQ ID NO: 23582 - protein, 38 aa, Artificial Sequence
  Non-cyclic GFR-binding peptide
  MOD_RES (33)..(34): Xaa is C or S
  MOD_RES (11)..(12)..(13)..(14)..(15): Xaa is A or G
  MOD_RES (16)..(17)..(18)..(19): Xaa is A or G or absent
SVAMGPYVKLXXXXXXXXXFFLISLSSLKTPVXXAKSA

SEQ ID NO: 23583 - protein, 38 aa, Artificial Sequence
  Non-cyclic GFR-binding peptide
  MOD_RES (32)..(33): Xaa is C or S
SRVVMNPYVKLIVNSSDDFFLVSLSSLKTPAXXPKPVY

SEQ ID NO: 23584 - protein, 33 aa, Artificial Sequence
  Non-cyclic GFR-binding peptide
  MOD_RES (1)..(33): Xaa is C or S
XGEVVMEPYVKLVVKDYEDFFLMSLSSLETPVX

SEQ ID NO: 23585 - protein, 34 aa, Artificial Sequence
  Non-cyclic GFR-binding peptide
  MOD_RES (1)..(34): Xaa is C or S
XEAVSMGEPYVKLTPVGMDDFFLVSLSSLKTPVX

SEQ ID NO: 23586 - protein, 38 aa, Artificial Sequence
  Non-cyclic GFR-binding peptide
  MOD_RES (2)..(35)..(36): Xaa is C or S
GXEAVSMGEPYVKLTPVGMDDFFLVSLSSLKTPVXXAK

SEQ ID NO: 23587 - protein, 36 aa, Artificial Sequence
  Non-cyclic GFR-binding peptide
  MOD_RES (31)..(32): Xaa is C or S
EVVMEPYVKLVVKDYEDFFLMSLSSLETPVXXAKPI

SEQ ID NO: 23588 - protein, 40 aa, Artificial Sequence
  Non-cyclic GFR-binding peptide
  MOD_RES (34)..(34): Xaa is C or S
KNHQLFPYVKLHQGQHPKIRFFLMSLSSEETPVXELGEDN

SEQ ID NO: 23589 - protein, 38 aa, Artificial Sequence
  Non-cyclic GFR-binding peptide
  MOD_RES (2)..(2): Xaa is C or S
  MOD_RES (15)..(16)..(17)..(18)..(19): Xaa is A or G
  MOD_RES (20)..(21)..(22)..(23): Xaa is A or G or absent
AXELHEELRPYVKLXXXXXXXXXFFLVSLSSHHVRSPQ

SEQ ID NO: 23590 - protein, 35 aa, Artificial Sequence
  Non-cyclic GFR-binding peptide
  MOD_RES (2)..(34)..(35): Xaa is C or S
GXGEVVMEPYVKLVVKDYEDFFLMSLSSLETPVXX

SEQ ID NO: 23591 - protein, 33 aa, Artificial Sequence
  Non-cyclic GFR-binding peptide
  MOD_RES (2)..(2): Xaa is C or S
GXSRVVMNPYVKLIVNSSDDFFLVSLSSLKTPA

SEQ ID NO: 23592 - protein, 42 aa, Artificial Sequence
  Non-cyclic GFR-binding peptide
  MOD_RES (1)..(3)..(40): Xaa is C or S
XAXELHEELRPYVKLLKPKKRVYEFFLVSLSSHHVRSPQXKV

SEQ ID NO: 23593 - protein, 42 aa, Artificial Sequence
  Non-cyclic GFR-binding peptide
  MOD_RES (1)..(36)..(37): Xaa is C or S
  MOD_RES (14)..(15)..(16)..(17)..(18): Xaa is A or G
  MOD_RES (19)..(20)..(21)..(22): Xaa is A or G or absent
XEAVSMGEPYVKLXXXXXXXXXFFLVSLSSLKTPVXXAKGVK

SEQ ID NO: 23594 - protein, 40 aa, Artificial Sequence
  Non-cyclic GFR-binding peptide
  MOD_RES (34)..(35): Xaa is C or S
  MOD_RES (12)..(13)..(14)..(15)..(16): Xaa is A or G
  MOD_RES (17)..(18)..(19)..(20): Xaa is A or G or absent
GEVVMEPYVKLXXXXXXXXXFFLMSLSSLETPVXXAKPIS

SEQ ID NO: 23595 - protein, 34 aa, Artificial Sequence
  Non-cyclic GFR-binding peptide
  MOD_RES (1)..(3)..(34): Xaa is C or S
XKXSRVIMPYVKLVKPKRGVFFLISLSSLAQPVX

SEQ ID NO: 23596 - protein, 42 aa, Artificial Sequence
  Non-cyclic GFR-binding peptide
  MOD_RES (1)..(3)..(36)..(37): Xaa is C or S
  MOD_RES (14)..(15)..(16)..(17)..(18): Xaa is A or G
  MOD_RES (19)..(20)..(21)..(22): Xaa is A or G or absent
XKXSKVVMPYVKLXXXXXXXXXFFLISLSSLDQPVXXPSASA

SEQ ID NO: 23597 - protein, 37 aa, Artificial Sequence
  Non-cyclic GFR-binding peptide
  MOD_RES (32)..(33): Xaa is C or S
SEVVMDPYVKLVVNNASDFFLISLSSLRTPVXXTPPT

SEQ ID NO: 23598 - protein, 43 aa, Artificial Sequence
  Non-cyclic GFR-binding peptide
  MOD_RES (1)..(3)..(37)..(38): Xaa is C or S
  MOD_RES (15)..(16)..(17)..(18)..(19): Xaa is A or G
  MOD_RES (20)..(21)..(22)..(23): Xaa is A or G or absent
XGXSRVVMNPYVKLXXXXXXXXXFFLVSLSSLKTPAXXPKPVY

SEQ ID NO: 23599 - protein, 39 aa, Artificial Sequence
  Non-cyclic GFR-binding peptide
  MOD_RES (2)..(36)..(37): Xaa is C or S
  MOD_RES (14)..(15)..(16)..(17)..(18): Xaa is A or G
  MOD_RES (19)..(20)..(21)..(22): Xaa is A or G or absent
GXSRVVMNPYVKLXXXXXXXXXFFLVSLSSLKTPAXXPK

SEQ ID NO: 23600 - protein, 40 aa, Artificial Sequence
  Non-cyclic GFR-binding peptide
  MOD_RES (1)..(3)..(37)..(38): Xaa is C or S
  MOD_RES (15)..(16)..(17)..(18)..(19): Xaa is A or G
  MOD_RES (20)..(21)..(22)..(23): Xaa is A or G or absent
XGXSRVVMNPYVKLXXXXXXXXXFFLVSLSSLKTPAXXPK

SEQ ID NO: 23601 - protein, 35 aa, Artificial Sequence
  Non-cyclic GFR-binding peptide
  MOD_RES (34)..(35): Xaa is C or S
  MOD_RES (12)..(13)..(14)..(15)..(16): Xaa is A or G
  MOD_RES (17)..(18)..(19)..(20): Xaa is A or G or absent
RDVVMGPYVKLXXXXXXXXXFFLMSLSSMKTPTXX

SEQ ID NO: 23602 - protein, 41 aa, Artificial Sequence
  Non-cyclic GFR-binding peptide
  MOD_RES (2)..(36)..(37): Xaa is C or S
  MOD_RES (14)..(15)..(16)..(17)..(18): Xaa is A or G
  MOD_RES (19)..(20)..(21)..(22): Xaa is A or G or absent
GXESVAMGPYVKLXXXXXXXXXFFLISLSSLKTPVXXAKSA

SEQ ID NO: 23603 - protein, 37 aa, Artificial Sequence
  Non-cyclic GFR-binding peptide
  MOD_RES (1)..(3)..(37): Xaa is C or S
  MOD_RES (15)..(16)..(17)..(18)..(19): Xaa is A or G
  MOD_RES (20)..(21)..(22)..(23): Xaa is A or G or absent
XGXGEVVMEPYVKLXXXXXXXXXFFLMSLSSLETPVX

SEQ ID NO: 23604 - protein, 34 aa, Artificial Sequence
  Non-cyclic GFR-binding peptide
  MOD_RES (34)..(34): Xaa is C or S
  MOD_RES (12)..(13)..(14)..(15)..(16): Xaa is A or G
  MOD_RES (17)..(18)..(19)..(20): Xaa is A or G or absent
ESVAMGPYVKLXXXXXXXXXFFLISLSSLKTPVX

SEQ ID NO: 23605 - protein, 37 aa, Artificial Sequence
  Non-cyclic GFR-binding peptide
  MOD_RES (31)..(32): Xaa is C or S
RVVMNPYVKLIVNSSDDFFLVSLSSLKTPAXXPKPVY

SEQ ID NO: 23606 - protein, 40 aa, Artificial Sequence
  Non-cyclic GFR-binding peptide
  MOD_RES (1)..(35)..(36): Xaa is C or S
  MOD_RES (13)..(14)..(15)..(16)..(17): Xaa is A or G
  MOD_RES (18)..(19)..(20)..(21): Xaa is A or G or absent
XGEVVMEPYVKLXXXXXXXXXFFLMSLSSLETPVXXAKPI

SEQ ID NO: 23607 - protein, 40 aa, Artificial Sequence
  Non-cyclic GFR-binding peptide
  MOD_RES (1)..(3)..(34)..(35): Xaa is C or S
XKXSKVVMPYVKLVKPTRGVFFLISLSSLDQPVXXPSASA

SEQ ID NO: 23608 - protein, 38 aa, Artificial Sequence
  Non-cyclic GFR-binding peptide
  MOD_RES (1)..(33)..(34): Xaa is C or S
XRDVVMGPYVKLIIQQKDNFFLMSLSSMKTPTXXPGAS

SEQ ID NO: 23609 - protein, 42 aa, Artificial Sequence
  Non-cyclic GFR-binding peptide
  MOD_RES (2)..(4)..(37)..(38): Xaa is C or S
  MOD_RES (15)..(16)..(17)..(18)..(19): Xaa is A or G
  MOD_RES (20)..(21)..(22)..(23): Xaa is A or G or absent
SXKXSKVVMPYVKLXXXXXXXXXFFLISLSSLDQPVXXPSAS

SEQ ID NO: 23610 - protein, 34 aa, Artificial Sequence
  Non-cyclic GFR-binding peptide
  MOD_RES (1)..(33)..(34): Xaa is C or S
XGEVVMEPYVKLVVKDYEDFFLMSLSSLETPVXX

SEQ ID NO: 23611 - protein, 34 aa, Artificial Sequence
  Non-cyclic GFR-binding peptide
  MOD_RES (2)..(33)..(34): Xaa is C or S
KXSKVIMPYVKLIKPTKGIFFLISLSSLDQSVXX

SEQ ID NO: 23612 - protein, 36 aa, Artificial Sequence
  Non-cyclic GFR-binding peptide
  MOD_RES (1)..(33)..(34): Xaa is C or S
XARVVMNPYVKLIVNSSDDFFLVSLSSLQTPAXXPK

SEQ ID NO: 23613 - protein, 35 aa, Artificial Sequence
  Non-cyclic GFR-binding peptide
  MOD_RES (1)..(1): Xaa is C or S
XELHEELRPYVKLLKPKKRVYEFFLVSLSSHHVRS

SEQ ID NO: 23614 - protein, 33 aa, Artificial Sequence
  Non-cyclic GFR-binding peptide
  MOD_RES (12)..(13)..(14)..(15)..(16): Xaa is A or G
  MOD_RES (17)..(18)..(19)..(20): Xaa is A or G or absent
AKVVMNPYVKLXXXXXXXXXFFLVSLSSLKTPA

SEQ ID NO: 23615 - protein, 36 aa, Artificial Sequence
  Non-cyclic GFR-binding peptide
  MOD_RES (31)..(32): Xaa is C or S
EVVMDPYVKLVVNNASDFFLISLSSLRTPVXXTPPT

SEQ ID NO: 23616 - protein, 36 aa, Artificial Sequence
  Non-cyclic GFR-binding peptide
  MOD_RES (1)..(35): Xaa is C or S
XKNHQLFPYVKLHQGQHPKIRFFLMSLSSEETPVXE

SEQ ID NO: 23617 - protein, 39 aa, Artificial Sequence
  Non-cyclic GFR-binding peptide
  MOD_RES (1)..(3)..(37)..(38): Xaa is C or S
  MOD_RES (15)..(16)..(17)..(18)..(19): Xaa is A or G
  MOD_RES (20)..(21)..(22)..(23): Xaa is A or G or absent
XGXESVAMGPYVKLXXXXXXXXXFFLISLSSLKTPVXXA

SEQ ID NO: 23618 - protein, 43 aa, Artificial Sequence
  Non-cyclic GFR-binding peptide
  MOD_RES (2)..(4)..(38)..(39): Xaa is C or S
  MOD_RES (16)..(17)..(18)..(19)..(20): Xaa is A or G
  MOD_RES (21)..(22)..(23)..(24): Xaa is A or G or absent
RXGXGEVVMEPYVKLXXXXXXXXXFFLMSLSSLETPVXXAKPI

SEQ ID NO: 23619 - protein, 35 aa, Artificial Sequence
  Non-cyclic GFR-binding peptide
  MOD_RES (1)..(3)..(34)..(35): Xaa is C or S
XGXEEVIMPYVKLLLVRGNDFFLMSLSSTKVPAXX

SEQ ID NO: 23620 - protein, 34 aa, Artificial Sequence
  Non-cyclic GFR-binding peptide
LHEELRPYVKLLKPKKRVYEFFLVSLSSHHVRSP

SEQ ID NO: 23621 - protein, 38 aa, Artificial Sequence
  Non-cyclic GFR-binding peptide
  MOD_RES (1)..(3)..(35): Xaa is C or S
XGXSRVVMNPYVKLIVNSSDDFFLVSLSSLKTPAXTPK

SEQ ID NO: 23622 - protein, 30 aa, Artificial Sequence
  Non-cyclic GFR-binding peptide
KVVMNPYVKLIVNNSSDFFLVSLSSLKTPA

SEQ ID NO: 23623 - protein, 36 aa, Artificial Sequence
  Non-cyclic GFR-binding peptide
  MOD_RES (1)..(35)..(36): Xaa is C or S
  MOD_RES (13)..(14)..(15)..(16)..(17): Xaa is A or G
  MOD_RES (18)..(19)..(20)..(21): Xaa is A or G or absent
XARVVMNPYVKLXXXXXXXXXFFLVSLSSLQTPAXX

SEQ ID NO: 23624 - protein, 44 aa, Artificial Sequence
  Non-cyclic GFR-binding peptide
  MOD_RES (2)..(4)..(38)..(39): Xaa is C or S
  MOD_RES (16)..(17)..(18)..(19)..(20): Xaa is A or G
  MOD_RES (21)..(22)..(23)..(24): Xaa is A or G or absent
HXGXARVVMNPYVKLXXXXXXXXXFFLVSLSSLQTPAXXPKPVT

SEQ ID NO: 23625 - protein, 37 aa, Artificial Sequence
  Non-cyclic GFR-binding peptide
  MOD_RES (2)..(4)..(36)..(37): Xaa is C or S
RXGXGEVVMEPYVKLVVKDYEDFFLMSLSSLETPVXX

SEQ ID NO: 23626 - protein, 37 aa, Artificial Sequence
  Non-cyclic GFR-binding peptide
  MOD_RES (2)..(4)..(36)..(37): Xaa is C or S
SXGXRDVVMGPYVKLIIQQKDNFFLMSLSSMKTPTXX

SEQ ID NO: 23627 - protein, 40 aa, Artificial Sequence
  Non-cyclic GFR-binding peptide
  MOD_RES (2)..(4)..(36): Xaa is C or S
HXGXSRVVMNPYVKLIVNSSDDFFLVSLSSLKTPAXTPKT

SEQ ID NO: 23628 - protein, 42 aa, Artificial Sequence
  Non-cyclic GFR-binding peptide
  MOD_RES (2)..(4)..(37)..(38): Xaa is C or S
  MOD_RES (15)..(16)..(17)..(18)..(19): Xaa is A or G
  MOD_RES (20)..(21)..(22)..(23): Xaa is A or G or absent
SXKXSRVIMPYVKLXXXXXXXXXFFLISLSSLAQPVXXPAAS

SEQ ID NO: 23629 - protein, 36 aa, Artificial Sequence
  Non-cyclic GFR-binding peptide
  MOD_RES (33)..(34): Xaa is C or S
  MOD_RES (11)..(12)..(13)..(14)..(15): Xaa is A or G
  MOD_RES (16)..(17)..(18)..(19): Xaa is A or G or absent
RVVMNPYVKLXXXXXXXXXFFLVSLSSLQTPAXXPK

SEQ ID NO: 23630 - protein, 32 aa, Artificial Sequence
  Non-cyclic GFR-binding peptide
  MOD_RES (11)..(12)..(13)..(14)..(15): Xaa is A or G
  MOD_RES (16)..(17)..(18)..(19): Xaa is A or G or absent
RVVMNPYVKLXXXXXXXXXFFLVSLSSLQTPA

SEQ ID NO: 23631 - protein, 32 aa, Artificial Sequence
  Non-cyclic GFR-binding peptide
  MOD_RES (11)..(12)..(13)..(14)..(15): Xaa is A or G
  MOD_RES (16)..(17)..(18)..(19): Xaa is A or G or absent
SRVIMPYVKLXXXXXXXXXFFLISLSSLAQPV

SEQ ID NO: 23632 - protein, 31 aa, Artificial Sequence
  Non-cyclic GFR-binding peptide
SEVVMDPYVKLVVNNASDFFLISLSSLRTPV

SEQ ID NO: 23633 - protein, 39 aa, Artificial Sequence
  Non-cyclic GFR-binding peptide
  MOD_RES (2)..(37)..(38): Xaa is C or S
  MOD_RES (15)..(16)..(17)..(18)..(19): Xaa is A or G
  MOD_RES (20)..(21)..(22)..(23): Xaa is A or G or absent
GXEAVSMGEPYVKLXXXXXXXXXFFLVSLSSLKTPVXXA

SEQ ID NO: 23634 - protein, 38 aa, Artificial Sequence
  Non-cyclic GFR-binding peptide
  MOD_RES (34)..(35): Xaa is C or S
  MOD_RES (12)..(13)..(14)..(15)..(16): Xaa is A or G
  MOD_RES (17)..(18)..(19)..(20): Xaa is A or G or absent
ARVVMNPYVKLXXXXXXXXXFFLVSLSSLQTPAXXPKP

SEQ ID NO: 23635 - protein, 38 aa, Artificial Sequence
  Non-cyclic GFR-binding peptide
  MOD_RES (2)..(36)..(37): Xaa is C or S
  MOD_RES (14)..(15)..(16)..(17)..(18): Xaa is A or G
  MOD_RES (19)..(20)..(21)..(22): Xaa is A or G or absent
GXAKVVMNPYVKLXXXXXXXXXFFLVSLSSLKTPAXXA

SEQ ID NO: 23636 - protein, 36 aa, Artificial Sequence
  Non-cyclic GFR-binding peptide
  MOD_RES (1)..(3)..(35)..(36): Xaa is C or S
XGXAKVVMNPYVKLIVNNSSDFFLVSLSSLKTPAXX

SEQ ID NO: 23637 - protein, 37 aa, Artificial Sequence
  Non-cyclic GFR-binding peptide
  MOD_RES (1)..(3)..(35)..(36): Xaa is C or S
XGXAEVVMDPYVKLVVNNAADFFLISLSSLRAPVXXS

SEQ ID NO: 23638 - protein, 33 aa, Artificial Sequence
  Non-cyclic GFR-binding peptide
  MOD_RES (12)..(13)..(14)..(15)..(16): Xaa is A or G
  MOD_RES (17)..(18)..(19)..(20): Xaa is A or G or absent
KNHQLFPYVKLXXXXXXXXXFFLMSLSSEETPV

SEQ ID NO: 23639 - protein, 36 aa, Artificial Sequence
  Non-cyclic GFR-binding peptide
  MOD_RES (1)..(33)..(34): Xaa is C or S
XAEVVMDPYVKLVVNNAADFFLISLSSLRAPVXXSA

SEQ ID NO: 23640 - protein, 42 aa, Artificial Sequence
  Non-cyclic GFR-binding peptide
  MOD_RES (2)..(4)..(36)..(37): Xaa is C or S
RXGXSEVVMDPYVKLVVNNASDFFLISLSSLRTPVXXTPPTS

SEQ ID NO: 23641 - protein, 43 aa, Artificial Sequence
  Non-cyclic GFR-binding peptide
  MOD_RES (1)..(3)..(37): Xaa is C or S
  MOD_RES (15)..(16)..(17)..(18)..(19): Xaa is A or G
  MOD_RES (20)..(21)..(22)..(23): Xaa is A or G or absent
XEXKNHQLFPYVKLXXXXXXXXXFFLMSLSSEETPVXELGEDN

SEQ ID NO: 23642 - protein, 38 aa, Artificial Sequence
  Non-cyclic GFR-binding peptide
  MOD_RES (1)..(34)..(35): Xaa is C or S
XEAVSMGEPYVKLTPVGMDDFFLVSLSSLKTPVXXAKG

SEQ ID NO: 23643 - protein, 34 aa, Artificial Sequence
  Non-cyclic GFR-binding peptide
  MOD_RES (2)..(34): Xaa is C or S
GXRDVVMGPYVKLIIQQKDNFFLMSLSSMKTPTX

SEQ ID NO: 23644 - protein, 33 aa, Artificial Sequence
  Non-cyclic GFR-binding peptide
LHEELRPYVKLLKPKKRVYEFFLVSLSSHHVRS

SEQ ID NO: 23645 - protein, 41 aa, Artificial Sequence
  Non-cyclic GFR-binding peptide
  MOD_RES (2)..(36)..(37): Xaa is C or S
  MOD_RES (14)..(15)..(16)..(17)..(18): Xaa is A or G
  MOD_RES (19)..(20)..(21)..(22): Xaa is A or G or absent
GXSEVVMDPYVKLXXXXXXXXXFFLISLSSLRTPVXXTPPT

SEQ ID NO: 23646 - protein, 37 aa, Artificial Sequence
  Non-cyclic GFR-binding peptide
  MOD_RES (1)..(34)..(35): Xaa is C or S
  MOD_RES (12)..(13)..(14)..(15)..(16): Xaa is A or G
  MOD_RES (17)..(18)..(19)..(20): Xaa is A or G or absent
XEEVIMPYVKLXXXXXXXXXFFLMSLSSTKVPAXXTS

SEQ ID NO: 23647 - protein, 44 aa, Artificial Sequence
  Non-cyclic GFR-binding peptide
  MOD_RES (2)..(4)..(38)..(39): Xaa is C or S
  MOD_RES (16)..(17)..(18)..(19)..(20): Xaa is A or G
  MOD_RES (21)..(22)..(23)..(24): Xaa is A or G or absent
RXGXGEVVMDPYVKLXXXXXXXXXFFLMSLSSLETPVXXAKPIK

SEQ ID NO: 23648 - protein, 35 aa, Artificial Sequence
  Non-cyclic GFR-binding peptide
  MOD_RES (1)..(3)..(35): Xaa is C or S
XGXSRVVMNPYVKLIVNSSDDFFLVSLSSLKTPAX

SEQ ID NO: 23649 - protein, 40 aa, Artificial Sequence
  Non-cyclic GFR-binding peptide
  MOD_RES (2)..(34)..(35): Xaa is C or S
GXAEVVMDPYVKLVVNNAADFFLISLSSLRAPVXXSAPAA

SEQ ID NO: 23650 - protein, 34 aa, Artificial Sequence
  Non-cyclic GFR-binding peptide
  MOD_RES (2)..(33)..(34): Xaa is C or S
GXEEVIMPYVKLLLVRGNDFFLMSLSSTKVPAXX

SEQ ID NO: 23651 - protein, 33 aa, Artificial Sequence
  Non-cyclic GFR-binding peptide
  MOD_RES (32)..(32): Xaa is C or S
SRVVMNPYVKLIVNSSDDFFLVSLSSLKTPAXT

SEQ ID NO: 23652 - protein, 35 aa, Artificial Sequence
  Non-cyclic GFR-binding peptide
  MOD_RES (1)..(35): Xaa is C or S
  MOD_RES (13)..(14)..(15)..(16)..(17): Xaa is A or G
  MOD_RES (18)..(19)..(20)..(21): Xaa is A or G or absent
XARVVMNPYVKLXXXXXXXXXFFLVSLSSLQTPAX

SEQ ID NO: 23653 - protein, 39 aa, Artificial Sequence
  Non-cyclic GFR-binding peptide
  MOD_RES (1)..(3)..(38)..(39): Xaa is C or S
  MOD_RES (16)..(17)..(18)..(19)..(20): Xaa is A or G
  MOD_RES (21)..(22)..(23)..(24): Xaa is A or G or absent
XGXEAVSMGEPYVKLXXXXXXXXXFFLVSLSSLKTPVXX

SEQ ID NO: 23654 - protein, 33 aa, Artificial Sequence
  Non-cyclic GFR-binding peptide
  MOD_RES (31)..(32): Xaa is C or S
SKVVMPYVKLVKPTRGVFFLISLSSLDQPVXXP

SEQ ID NO: 23655 - protein, 39 aa, Artificial Sequence
  Non-cyclic GFR-binding peptide
  MOD_RES (1)..(33)..(34): Xaa is C or S
XGEVVMEPYVKLVVKDYEDFFLMSLSSLETPVXXAKPIS

SEQ ID NO: 23656 - protein, 42 aa, Artificial Sequence
  Non-cyclic GFR-binding peptide
  MOD_RES (1)..(38): Xaa is C or S
  MOD_RES (14)..(15)..(16)..(17)..(18): Xaa is A or G
  MOD_RES (19)..(20)..(21)..(22): Xaa is A or G or absent
XELHEELRPYVKLXXXXXXXXXFFLVSLSSHHVRSPQXKVSS

SEQ ID NO: 23657 - protein, 36 aa, Artificial Sequence
  Non-cyclic GFR-binding peptide
  MOD_RES (2)..(36): Xaa is C or S
  MOD_RES (14)..(15)..(16)..(17)..(18): Xaa is A or G
  MOD_RES (19)..(20)..(21)..(22): Xaa is A or G or absent
GXGEVVMEPYVKLXXXXXXXXXFFLMSLSSLETPVX

SEQ ID NO: 23658 - protein, 37 aa, Artificial Sequence
  Non-cyclic GFR-binding peptide
  MOD_RES (2)..(33)..(34): Xaa is C or S
GXEEVIMPYVKLLLVRGNDFFLMSLSSTKVPAXXTSP

SEQ ID NO: 23659 - protein, 41 aa, Artificial Sequence
  Non-cyclic GFR-binding peptide
  MOD_RES (2)..(36)..(37): Xaa is C or S
  MOD_RES (14)..(15)..(16)..(17)..(18): Xaa is A or G
  MOD_RES (19)..(20)..(21)..(22): Xaa is A or G or absent
GXGEVVMEPYVKLXXXXXXXXXFFLMSLSSLETPVXXAKPI

SEQ ID NO: 23660 - protein, 36 aa, Artificial Sequence
  Non-cyclic GFR-binding peptide
  MOD_RES (33)..(34): Xaa is C or S
EAVSMGEPYVKLTPVGMDDFFLVSLSSLKTPVXXAK

SEQ ID NO: 23661 - protein, 36 aa, Artificial Sequence
  Non-cyclic GFR-binding peptide
  MOD_RES (2)..(34)..(35): Xaa is C or S
GXSRVVMNPYVKLIVNSSDDFFLVSLSSLKTPAXXP

SEQ ID NO: 23662 - protein, 39 aa, Artificial Sequence
  Non-cyclic GFR-binding peptide
  MOD_RES (1)..(3)..(35)..(36): Xaa is C or S
XGXSRVVMNPYVKLIVNSSDDFFLVSLSSLKTPAXXPKP

SEQ ID NO: 23663 - protein, 36 aa, Artificial Sequence
  Non-cyclic GFR-binding peptide
  MOD_RES (1)..(34)..(35): Xaa is C or S
  MOD_RES (12)..(13)..(14)..(15)..(16): Xaa is A or G
  MOD_RES (17)..(18)..(19)..(20): Xaa is A or G or absent
XSKVVMPYVKLXXXXXXXXXFFLISLSSLDQPVXXP

SEQ ID NO: 23664 - protein, 39 aa, Artificial Sequence
  Non-cyclic GFR-binding peptide
  MOD_RES (2)..(4): Xaa is C or S
AXAXELHEELRPYVKLLKPKKRVYEFFLVSLSSHHVRSP

SEQ ID NO: 23665 - protein, 37 aa, Artificial Sequence
  Non-cyclic GFR-binding peptide
  MOD_RES (33)..(33): Xaa is C or S
  MOD_RES (11)..(12)..(13)..(14)..(15): Xaa is A or G
  MOD_RES (16)..(17)..(18)..(19): Xaa is A or G or absent
NHQLFPYVKLXXXXXXXXXFFLMSLSSEETPVXELGE

SEQ ID NO: 23666 - protein, 32 aa, Artificial Sequence
  Non-cyclic GFR-binding peptide
  MOD_RES (31)..(32): Xaa is C or S
RVVMNPYVKLIVNSSDDFFLVSLSSLQTPAXX

SEQ ID NO: 23667 - protein, 31 aa, Artificial Sequence
  Non-cyclic GFR-binding peptide
  MOD_RES (31)..(31): Xaa is C or S
SVAMGPYVKLYTVVGKDFFLISLSSLKTPVX

SEQ ID NO: 23668 - protein, 36 aa, Artificial Sequence
  Non-cyclic GFR-binding peptide
ELHEELRPYVKLLKPKKRVYEFFLVSLSSHHVRSPQ

SEQ ID NO: 23669 - protein, 34 aa, Artificial Sequence
  Non-cyclic GFR-binding peptide
  MOD_RES (34)..(34): Xaa is C or S
  MOD_RES (12)..(13)..(14)..(15)..(16): Xaa is A or G
  MOD_RES (17)..(18)..(19)..(20): Xaa is A or G or absent
SRVVMNPYVKLXXXXXXXXXFFLVSLSSLKTPAX

SEQ ID NO: 23670 - protein, 36 aa, Artificial Sequence
  Non-cyclic GFR-binding peptide
  MOD_RES (33)..(34): Xaa is C or S
  MOD_RES (11)..(12)..(13)..(14)..(15): Xaa is A or G
  MOD_RES (16)..(17)..(18)..(19): Xaa is A or G or absent
SRVIMPYVKLXXXXXXXXXFFLISLSSLAQPVXXPA

SEQ ID NO: 23671 - protein, 38 aa, Artificial Sequence
  Non-cyclic GFR-binding peptide
  MOD_RES (34)..(35): Xaa is C or S
  MOD_RES (12)..(13)..(14)..(15)..(16): Xaa is A or G
  MOD_RES (17)..(18)..(19)..(20): Xaa is A or G or absent
RDVVMGPYVKLXXXXXXXXXFFLMSLSSMKTPTXXPGA

SEQ ID NO: 23672 - protein, 43 aa, Artificial Sequence
  Non-cyclic GFR-binding peptide
  MOD_RES (2)..(4)..(39)..(40): Xaa is C or S
  MOD_RES (17)..(18)..(19)..(20)..(21): Xaa is A or G
  MOD_RES (22)..(23)..(24)..(25): Xaa is A or G or absent
RXGXEAVSMGEPYVKLXXXXXXXXXFFLVSLSSLKTPVXXAKG

SEQ ID NO: 23673 - protein, 40 aa, Artificial Sequence
  Non-cyclic GFR-binding peptide
  MOD_RES (2)..(34)..(35): Xaa is C or S
GXRDVVMGPYVKLIIQQKDNFFLMSLSSMKTPTXXPGASG

SEQ ID NO: 23674 - protein, 41 aa, Artificial Sequence
  Non-cyclic GFR-binding peptide
  MOD_RES (2)..(35)..(36): Xaa is C or S
  MOD_RES (13)..(14)..(15)..(16)..(17): Xaa is A or G
  MOD_RES (18)..(19)..(20)..(21): Xaa is A or G or absent
KXSKVIMPYVKLXXXXXXXXXFFLISLSSLDQSVXXPSASA

SEQ ID NO: 23675 - protein, 32 aa, Artificial Sequence
  Non-cyclic GFR-binding peptide
  MOD_RES (1)..(1): Xaa is C or S
XSRVVMNPYVKLIVNSSDDFFLVSLSSLKTPA

SEQ ID NO: 23676 - protein, 33 aa, Artificial Sequence
  Non-cyclic GFR-binding peptide
  MOD_RES (32)..(33): Xaa is C or S
AKVVMNPYVKLIVNNSSDFFLVSLSSLKTPAXX

SEQ ID NO: 23677 - protein, 32 aa, Artificial Sequence
  Non-cyclic GFR-binding peptide
  MOD_RES (11)..(12)..(13)..(14)..(15): Xaa is A or G
  MOD_RES (16)..(17)..(18)..(19): Xaa is A or G or absent
EVVMEPYVKLXXXXXXXXXFFLMSLSSLETPV

SEQ ID NO: 23678 - protein, 39 aa, Artificial Sequence
  Non-cyclic GFR-binding peptide
  MOD_RES (34)..(35): Xaa is C or S
  MOD_RES (12)..(13)..(14)..(15)..(16): Xaa is A or G
  MOD_RES (17)..(18)..(19)..(20): Xaa is A or G or absent
ESVAMGPYVKLXXXXXXXXXFFLISLSSLKTPVXXAKSA

SEQ ID NO: 23679 - protein, 36 aa, Artificial Sequence
  Non-cyclic GFR-binding peptide
  MOD_RES (32)..(32): Xaa is C or S
SRVVMNPYVKLIVNSSDDFFLVSLSSLKTPAXTPKT

SEQ ID NO: 23680 - protein, 34 aa, Artificial Sequence
  Non-cyclic GFR-binding peptide
  MOD_RES (33)..(33): Xaa is C or S
NHQLFPYVKLHQGQHPKIRFFLMSLSSEETPVXE

SEQ ID NO: 23681 - protein, 40 aa, Artificial Sequence
  Non-cyclic GFR-binding peptide
  MOD_RES (2)..(36): Xaa is C or S
  MOD_RES (14)..(15)..(16)..(17)..(18): Xaa is A or G
  MOD_RES (19)..(20)..(21)..(22): Xaa is A or G or absent
EXKNHQLFPYVKLXXXXXXXXXFFLMSLSSEETPVXELGE

SEQ ID NO: 23682 - protein, 32 aa, Artificial Sequence
  Non-cyclic GFR-binding peptide
  MOD_RES (31)..(32): Xaa is C or S
EEVIMPYVKLLLVRGNDFFLMSLSSTKVPAXX

SEQ ID NO: 23683 - protein, 40 aa, Artificial Sequence
  Non-cyclic GFR-binding peptide
  MOD_RES (2)..(4)..(38)..(39): Xaa is C or S
  MOD_RES (16)..(17)..(18)..(19)..(20): Xaa is A or G
  MOD_RES (21)..(22)..(23)..(24): Xaa is A or G or absent
RXGXESVAMGPYVKLXXXXXXXXXFFLISLSSLKTPVXXA

SEQ ID NO: 23684 - protein, 36 aa, Artificial Sequence
  Non-cyclic GFR-binding peptide
  MOD_RES (33)..(34): Xaa is C or S
  MOD_RES (11)..(12)..(13)..(14)..(15): Xaa is A or G
  MOD_RES (16)..(17)..(18)..(19): Xaa is A or G or absent
KVVMNPYVKLXXXXXXXXXFFLVSLSSLKTPAXXAK

SEQ ID NO: 23685 - protein, 36 aa, Artificial Sequence
  Non-cyclic GFR-binding peptide
  MOD_RES (2)..(36): Xaa is C or S
  MOD_RES (14)..(15)..(16)..(17)..(18): Xaa is A or G
  MOD_RES (19)..(20)..(21)..(22): Xaa is A or G or absent
GXAEVVMDPYVKLXXXXXXXXXFFLISLSSLRAPVX

SEQ ID NO: 23686 - protein, 37 aa, Artificial Sequence
  Non-cyclic GFR-binding peptide
  MOD_RES (1)..(33)..(34): Xaa is C or S
XRDVVMGPYVKLIIQQKDNFFLMSLSSMKTPTXXPGA

SEQ ID NO: 23687 - protein, 41 aa, Artificial Sequence
  Non-cyclic GFR-binding peptide
  MOD_RES (1)..(3)..(36)..(37): Xaa is C or S
  MOD_RES (14)..(15)..(16)..(17)..(18): Xaa is A or G
  MOD_RES (19)..(20)..(21)..(22): Xaa is A or G or absent
XGXEEVIMPYVKLXXXXXXXXXFFLMSLSSTKVPAXXTSPV

SEQ ID NO: 23688 - protein, 42 aa, Artificial Sequence
  Non-cyclic GFR-binding peptide
  MOD_RES (2)..(4)..(36)..(37): Xaa is C or S
RXGXGEVVMEPYVKLVVKDYEDFFLMSLSSLETPVXXAKPIS

SEQ ID NO: 23689 - protein, 36 aa, Artificial Sequence
  Non-cyclic GFR-binding peptide
  MOD_RES (2)..(4): Xaa is C or S
  MOD_RES (15)..(16)..(17)..(18)..(19): Xaa is A or G
  MOD_RES (20)..(21)..(22)..(23): Xaa is A or G or absent
SXKXSRVIMPYVKLXXXXXXXXXFFLISLSSLAQPV

SEQ ID NO: 23690 - protein, 40 aa, Artificial Sequence
  Non-cyclic GFR-binding peptide
  MOD_RES (2)..(4)..(38)..(39): Xaa is C or S
  MOD_RES (16)..(17)..(18)..(19)..(20): Xaa is A or G
  MOD_RES (21)..(22)..(23)..(24): Xaa is A or G or absent
RXGXSEVVMDPYVKLXXXXXXXXXFFLISLSSLRTPVXXT

SEQ ID NO: 23691 - protein, 39 aa, Artificial Sequence
  Non-cyclic GFR-binding peptide
  MOD_RES (2)..(35)..(36): Xaa is C or S
  MOD_RES (13)..(14)..(15)..(16)..(17): Xaa is A or G
  MOD_RES (18)..(19)..(20)..(21): Xaa is A or G or absent
GXEEVIMPYVKLXXXXXXXXXFFLMSLSSTKVPAXXTSP

SEQ ID NO: 23692 - protein, 38 aa, Artificial Sequence
  Non-cyclic GFR-binding peptide
  MOD_RES (1)..(3)..(37)..(38): Xaa is C or S
  MOD_RES (15)..(16)..(17)..(18)..(19): Xaa is A or G
  MOD_RES (20)..(21)..(22)..(23): Xaa is A or G or absent
XGXRDVVMGPYVKLXXXXXXXXXFFLMSLSSMKTPTXX

SEQ ID NO: 23693 - protein, 34 aa, Artificial Sequence
  Non-cyclic GFR-binding peptide
  MOD_RES (1)..(32)..(33): Xaa is C or S
XSKVIMPYVKLIKPTKGIFFLISLSSLDQSVXXP

SEQ ID NO: 23694 - protein, 34 aa, Artificial Sequence
  Non-cyclic GFR-binding peptide
  MOD_RES (1)..(3)..(34): Xaa is C or S
XGXEEVIMPYVKLLLVRGNDFFLMSLSSTKVPAX

SEQ ID NO: 23695 - protein, 34 aa, Artificial Sequence
  Non-cyclic GFR-binding peptide
  MOD_RES (1)..(1): Xaa is C or S
  MOD_RES (13)..(14)..(15)..(16)..(17): Xaa is A or G
  MOD_RES (18)..(19)..(20)..(21): Xaa is A or G or absent
XESVAMGPYVKLXXXXXXXXXFFLISLSSLKTPV

SEQ ID NO: 23696 - protein, 35 aa, Artificial Sequence
  Non-cyclic GFR-binding peptide
  MOD_RES (31)..(32): Xaa is C or S
SKVIMPYVKLIKPTKGIFFLISLSSLDQSVXXPSA

SEQ ID NO: 23697 - protein, 42 aa, Artificial Sequence
  Non-cyclic GFR-binding peptide
  MOD_RES (2)..(36)..(37): Xaa is C or S
  MOD_RES (14)..(15)..(16)..(17)..(18): Xaa is A or G
  MOD_RES (19)..(20)..(21)..(22): Xaa is A or G or absent
GXSRVVMNPYVKLXXXXXXXXXFFLVSLSSLKTPAXXPKPVY

SEQ ID NO: 23698 - protein, 34 aa, Artificial Sequence
  Non-cyclic GFR-binding peptide
  MOD_RES (32)..(33): Xaa is C or S
ESVAMGPYVKLYTVVGKDFFLISLSSLKTPVXXA

SEQ ID NO: 23699 - protein, 35 aa, Artificial Sequence
  Non-cyclic GFR-binding peptide
  MOD_RES (33)..(34): Xaa is C or S
  MOD_RES (11)..(12)..(13)..(14)..(15): Xaa is A or G
  MOD_RES (16)..(17)..(18)..(19): Xaa is A or G or absent
KVVMNPYVKLXXXXXXXXXFFLVSLSSLKTPAXXA

SEQ ID NO: 23700 - protein, 39 aa, Artificial Sequence
  Non-cyclic GFR-binding peptide
  MOD_RES (2)..(4)..(38): Xaa is C or S
  MOD_RES (16)..(17)..(18)..(19)..(20): Xaa is A or G
  MOD_RES (21)..(22)..(23)..(24): Xaa is A or G or absent
RXEXKNHQLFPYVKLXXXXXXXXXFFLMSLSSEETPVXE

SEQ ID NO: 23701 - protein, 42 aa, Artificial Sequence
  Non-cyclic GFR-binding peptide
  MOD_RES (1)..(3)..(37)..(38): Xaa is C or S
  MOD_RES (15)..(16)..(17)..(18)..(19): Xaa is A or G
  MOD_RES (20)..(21)..(22)..(23): Xaa is A or G or absent
XGXESVAMGPYVKLXXXXXXXXXFFLISLSSLKTPVXXAKSA

SEQ ID NO: 23702 - protein, 33 aa, Artificial Sequence
  Non-cyclic GFR-binding peptide
  MOD_RES (1)..(1): Xaa is C or S
  MOD_RES (12)..(13)..(14)..(15)..(16): Xaa is A or G
  MOD_RES (17)..(18)..(19)..(20): Xaa is A or G or absent
XEEVIMPYVKLXXXXXXXXXFFLMSLSSTKVPA

SEQ ID NO: 23703 - protein, 38 aa, Artificial Sequence
  Non-cyclic GFR-binding peptide
  MOD_RES (34)..(34): Xaa is C or S
  MOD_RES (12)..(13)..(14)..(15)..(16): Xaa is A or G
  MOD_RES (17)..(18)..(19)..(20): Xaa is A or G or absent
KNHQLFPYVKLXXXXXXXXXFFLMSLSSEETPVXELGE

SEQ ID NO: 23704 - protein, 39 aa, Artificial Sequence
  Non-cyclic GFR-binding peptide
  MOD_RES (2)..(4)..(38): Xaa is C or S
RXEXKNHQLFPYVKLHQGQHPKIRFFLMSLSSEETPVXE

SEQ ID NO: 23705 - protein, 37 aa, Artificial Sequence
  Non-cyclic GFR-binding peptide
  MOD_RES (1)..(32)..(33): Xaa is C or S
XSKVIMPYVKLIKPTKGIFFLISLSSLDQSVXXPSAS

SEQ ID NO: 23706 - protein, 39 aa, Artificial Sequence
  Non-cyclic GFR-binding peptide
  MOD_RES (1)..(3)..(35): Xaa is C or S
XGXSRVVMNPYVKLIVNSSDDFFLVSLSSLKTPAXTPKT

SEQ ID NO: 23707 - protein, 38 aa, Artificial Sequence
  Non-cyclic GFR-binding peptide
  MOD_RES (32)..(33): Xaa is C or S
RDVVMGPYVKLIIQQKDNFFLMSLSSMKTPTXXPGASG

SEQ ID NO: 23708 - protein, 32 aa, Artificial Sequence
  Non-cyclic GFR-binding peptide
  MOD_RES (1)..(1): Xaa is C or S
XESVAMGPYVKLYTVVGKDFFLISLSSLKTPV

SEQ ID NO: 23709 - protein, 34 aa, Artificial Sequence
  Non-cyclic GFR-binding peptide
  MOD_RES (1)..(33)..(34): Xaa is C or S
XARVVMNPYVKLIVNSSDDFFLVSLSSLQTPAXX

SEQ ID NO: 23710 - protein, 37 aa, Artificial Sequence
  Non-cyclic GFR-binding peptide
  MOD_RES (33)..(34): Xaa is C or S
  MOD_RES (11)..(12)..(13)..(14)..(15): Xaa is A or G
  MOD_RES (16)..(17)..(18)..(19): Xaa is A or G or absent
RVVMNPYVKLXXXXXXXXXFFLVSLSSLKTPAXXPKP

SEQ ID NO: 23711 - protein, 36 aa, Artificial Sequence
  Non-cyclic GFR-binding peptide
  MOD_RES (32)..(33): Xaa is C or S
SRVVMNPYVKLIVNSSDDFFLVSLSSLKTPAXXPKP

SEQ ID NO: 23712 - protein, 38 aa, Artificial Sequence
  Non-cyclic GFR-binding peptide
  MOD_RES (36)..(36): Xaa is C or S
  MOD_RES (12)..(13)..(14)..(15)..(16): Xaa is A or G
  MOD_RES (17)..(18)..(19)..(20): Xaa is A or G or absent
LHEELRPYVKLXXXXXXXXXFFLVSLSSHHVRSPQXKV

SEQ ID NO: 23713 - protein, 35 aa, Artificial Sequence
  Non-cyclic GFR-binding peptide
  MOD_RES (33)..(34): Xaa is C or S
EAVSMGEPYVKLTPVGMDDFFLVSLSSLKTPVXXA

SEQ ID NO: 23714 - protein, 31 aa, Artificial Sequence
  Non-cyclic GFR-binding peptide
RDVVMGPYVKLIIQQKDNFFLMSLSSMKTPT

SEQ ID NO: 23715 - protein, 35 aa, Artificial Sequence
  Non-cyclic GFR-binding peptide
  MOD_RES (2)..(4)..(35): Xaa is C or S
SXKXSRVIMPYVKLVKPKRGVFFLISLSSLAQPVX

SEQ ID NO: 23716 - protein, 32 aa, Artificial Sequence
  Non-cyclic GFR-binding peptide
  MOD_RES (1)..(1): Xaa is C or S
XSEVVMDPYVKLVVNNASDFFLISLSSLRTPV

SEQ ID NO: 23717 - protein, 38 aa, Artificial Sequence
  Non-cyclic GFR-binding peptide
  MOD_RES (33)..(34): Xaa is C or S
  MOD_RES (11)..(12)..(13)..(14)..(15): Xaa is A or G
  MOD_RES (16)..(17)..(18)..(19): Xaa is A or G or absent
EVVMEPYVKLXXXXXXXXXFFLMSLSSLETPVXXAKPI

SEQ ID NO: 23718 - protein, 40 aa, Artificial Sequence
  Non-cyclic GFR-binding peptide
  MOD_RES (34)..(35): Xaa is C or S
  MOD_RES (12)..(13)..(14)..(15)..(16): Xaa is A or G
  MOD_RES (17)..(18)..(19)..(20): Xaa is A or G or absent
AEVVMDPYVKLXXXXXXXXXFFLISLSSLRAPVXXSAPAA

SEQ ID NO: 23719 - protein, 40 aa, Artificial Sequence
  Non-cyclic GFR-binding peptide
  MOD_RES (1)..(36)..(37): Xaa is C or S
  MOD_RES (14)..(15)..(16)..(17)..(18): Xaa is A or G
  MOD_RES (19)..(20)..(21)..(22): Xaa is A or G or absent
XEAVSMGEPYVKLXXXXXXXXXFFLVSLSSLKTPVXXAKG

SEQ ID NO: 23720 - protein, 40 aa, Artificial Sequence
  Non-cyclic GFR-binding peptide
  MOD_RES (34)..(35): Xaa is C or S
  MOD_RES (12)..(13)..(14)..(15)..(16): Xaa is A or G
  MOD_RES (17)..(18)..(19)..(20): Xaa is A or G or absent
SRVVMNPYVKLXXXXXXXXXFFLVSLSSLKTPAXXPKPVH

SEQ ID NO: 23721 - protein, 38 aa, Artificial Sequence
  Non-cyclic GFR-binding peptide
  MOD_RES (2)..(34)..(35): Xaa is C or S
GXESVAMGPYVKLYTVVGKDFFLISLSSLKTPVXXAKS

SEQ ID NO: 23722 - protein, 35 aa, Artificial Sequence
  Non-cyclic GFR-binding peptide
  MOD_RES (32)..(33): Xaa is C or S
GEVVMEPYVKLVVKDYEDFFLMSLSSLETPVXXAK

SEQ ID NO: 23723 - protein, 36 aa, Artificial Sequence
  Non-cyclic GFR-binding peptide
  MOD_RES (2)..(4)..(35)..(36): Xaa is C or S
LXGXEEVIMPYVKLLLVRGNDFFLMSLSSTKVPAXX

SEQ ID NO: 23724 - protein, 39 aa, Artificial Sequence
  Non-cyclic GFR-binding peptide
  MOD_RES (2)..(4)..(36)..(37): Xaa is C or S
HXGXAKVVMNPYVKLIVNNSSDFFLVSLSSLKTPAXXAK

SEQ ID NO: 23725 - protein, 36 aa, Artificial Sequence
  Non-cyclic GFR-binding peptide
  MOD_RES (1)..(3)..(35)..(36): Xaa is C or S
XGXGEVVMEPYVKLVVKDYEDFFLMSLSSLETPVXX

SEQ ID NO: 23726 - protein, 37 aa, Artificial Sequence
  Non-cyclic GFR-binding peptide
  MOD_RES (1)..(33): Xaa is C or S
XSRVVMNPYVKLIVNSSDDFFLVSLSSLKTPAXTPKT

SEQ ID NO: 23727 - protein, 38 aa, Artificial Sequence
  Non-cyclic GFR-binding peptide
  MOD_RES (1)..(3)..(37)..(38): Xaa is C or S
  MOD_RES (15)..(16)..(17)..(18)..(19): Xaa is A or G
  MOD_RES (20)..(21)..(22)..(23): Xaa is A or G or absent
XGXARVVMNPYVKLXXXXXXXXXFFLVSLSSLQTPAXX

SEQ ID NO: 23728 - protein, 41 aa, Artificial Sequence
  Non-cyclic GFR-binding peptide
  MOD_RES (1)..(35)..(36): Xaa is C or S
  MOD_RES (13)..(14)..(15)..(16)..(17): Xaa is A or G
  MOD_RES (18)..(19)..(20)..(21): Xaa is A or G or absent
XSRVVMNPYVKLXXXXXXXXXFFLVSLSSLKTPAXXPKPVY

SEQ ID NO: 23729 - protein, 34 aa, Artificial Sequence
  Non-cyclic GFR-binding peptide
  MOD_RES (1)..(1): Xaa is C or S
  MOD_RES (13)..(14)..(15)..(16)..(17): Xaa is A or G
  MOD_RES (18)..(19)..(20)..(21): Xaa is A or G or absent
XSEVVMDPYVKLXXXXXXXXXFFLISLSSLRTPV

SEQ ID NO: 23730 - protein, 36 aa, Artificial Sequence
  Non-cyclic GFR-binding peptide
  MOD_RES (2)..(4)..(36): Xaa is C or S
SXGXRDVVMGPYVKLIIQQKDNFFLMSLSSMKTPTX

SEQ ID NO: 23731 - protein, 33 aa, Artificial Sequence
  Non-cyclic GFR-binding peptide
  MOD_RES (1)..(33): Xaa is C or S
XAKVVMNPYVKLIVNNSSDFFLVSLSSLKTPAX

SEQ ID NO: 23732 - protein, 43 aa, Artificial Sequence
  Non-cyclic GFR-binding peptide
  MOD_RES (1)..(3)..(37)..(38): Xaa is C or S
  MOD_RES (15)..(16)..(17)..(18)..(19): Xaa is A or G
  MOD_RES (20)..(21)..(22)..(23): Xaa is A or G or absent
XGXRDVVMGPYVKLXXXXXXXXXFFLMSLSSMKTPTXXPGASG

SEQ ID NO: 23733 - protein, 35 aa, Artificial Sequence
  Non-cyclic GFR-binding peptide
  MOD_RES (2)..(4): Xaa is C or S
RXGXGEVVMEPYVKLVVKDYEDFFLMSLSSLETPV

SEQ ID NO: 23734 - protein, 38 aa, Artificial Sequence
  Non-cyclic GFR-binding peptide
  MOD_RES (2)..(2): Xaa is C or S
AXELHEELRPYVKLLKPKKRVYEFFLVSLSSHHVRSPQ

SEQ ID NO: 23735 - protein, 35 aa, Artificial Sequence
  Non-cyclic GFR-binding peptide
  MOD_RES (35)..(35): Xaa is C or S
  MOD_RES (13)..(14)..(15)..(16)..(17): Xaa is A or G
  MOD_RES (18)..(19)..(20)..(21): Xaa is A or G or absent
EAVSMGEPYVKLXXXXXXXXXFFLVSLSSLKTPVX

SEQ ID NO: 23736 - protein, 38 aa, Artificial Sequence
  Non-cyclic GFR-binding peptide
  MOD_RES (2)..(36): Xaa is C or S
  MOD_RES (14)..(15)..(16)..(17)..(18): Xaa is A or G
  MOD_RES (19)..(20)..(21)..(22): Xaa is A or G or absent
EXKNHQLFPYVKLXXXXXXXXXFFLMSLSSEETPVXEL

SEQ ID NO: 23737 - protein, 36 aa, Artificial Sequence
  Non-cyclic GFR-binding peptide
  MOD_RES (2)..(34)..(35): Xaa is C or S
GXAKVVMNPYVKLIVNNSSDFFLVSLSSLKTPAXXA

SEQ ID NO: 23738 - protein, 38 aa, Artificial Sequence
  Non-cyclic GFR-binding peptide
  MOD_RES (2)..(33)..(34): Xaa is C or S
KXSKVIMPYVKLIKPTKGIFFLISLSSLDQSVXXPSAS

SEQ ID NO: 23739 - protein, 33 aa, Artificial Sequence
  Non-cyclic GFR-binding peptide
  MOD_RES (33)..(33): Xaa is C or S
  MOD_RES (11)..(12)..(13)..(14)..(15): Xaa is A or G
  MOD_RES (16)..(17)..(18)..(19): Xaa is A or G or absent
NHQLFPYVKLXXXXXXXXXFFLMSLSSEETPVX

SEQ ID NO: 23740 - protein, 39 aa, Artificial Sequence
  Non-cyclic GFR-binding peptide
  MOD_RES (2)..(34): Xaa is C or S
GXSRVVMNPYVKLIVNSSDDFFLVSLSSLKTPAXTPKTV

SEQ ID NO: 23741 - protein, 34 aa, Artificial Sequence
  Non-cyclic GFR-binding peptide
  MOD_RES (1)..(33): Xaa is C or S
XSRVVMNPYVKLIVNSSDDFFLVSLSSLKTPAXT

SEQ ID NO: 23742 - protein, 40 aa, Artificial Sequence
  Non-cyclic GFR-binding peptide
  MOD_RES (1)..(38): Xaa is C or S
XELHEELRPYVKLLKPKKRVYEFFLVSLSSHHVRSPQXKV

SEQ ID NO: 23743 - protein, 37 aa, Artificial Sequence
  Non-cyclic GFR-binding peptide
  MOD_RES (2)..(4)..(36): Xaa is C or S
HXGXSRVVMNPYVKLIVNSSDDFFLVSLSSLKTPAXT

SEQ ID NO: 23744 - protein, 40 aa, Artificial Sequence
  Non-cyclic GFR-binding peptide
  MOD_RES (2)..(4)..(36)..(37): Xaa is C or S
SXGXRDVVMGPYVKLIIQQKDNFFLMSLSSMKTPTXXPGA

SEQ ID NO: 23745 - protein, 40 aa, Artificial Sequence
  Non-cyclic GFR-binding peptide
  MOD_RES (35)..(36): Xaa is C or S
  MOD_RES (13)..(14)..(15)..(16)..(17): Xaa is A or G
  MOD_RES (18)..(19)..(20)..(21): Xaa is A or G or absent
EAVSMGEPYVKLXXXXXXXXXFFLVSLSSLKTPVXXAKGV

SEQ ID NO: 23746 - protein, 32 aa, Artificial Sequence
  Non-cyclic GFR-binding peptide
  MOD_RES (11)..(12)..(13)..(14)..(15): Xaa is A or G
  MOD_RES (16)..(17)..(18)..(19): Xaa is A or G or absent
NHQLFPYVKLXXXXXXXXXFFLMSLSSEETPV

SEQ ID NO: 23747 - protein, 35 aa, Artificial Sequence
  Non-cyclic GFR-binding peptide
  MOD_RES (2)..(35): Xaa is C or S
  MOD_RES (13)..(14)..(15)..(16)..(17): Xaa is A or G
  MOD_RES (18)..(19)..(20)..(21): Xaa is A or G or absent
KXSRVIMPYVKLXXXXXXXXXFFLISLSSLAQPVX

SEQ ID NO: 23748 - protein, 37 aa, Artificial Sequence
  Non-cyclic GFR-binding peptide
  MOD_RES (34)..(35): Xaa is C or S
  MOD_RES (12)..(13)..(14)..(15)..(16): Xaa is A or G
  MOD_RES (17)..(18)..(19)..(20): Xaa is A or G or absent
SEVVMDPYVKLXXXXXXXXXFFLISLSSLRTPVXXTP

SEQ ID NO: 23749 - protein, 35 aa, Artificial Sequence
  Non-cyclic GFR-binding peptide
  MOD_RES (33)..(34): Xaa is C or S
  MOD_RES (11)..(12)..(13)..(14)..(15): Xaa is A or G
  MOD_RES (16)..(17)..(18)..(19): Xaa is A or G or absent
EVVMDPYVKLXXXXXXXXXFFLISLSSLRAPVXXS

SEQ ID NO: 23750 - protein, 39 aa, Artificial Sequence
  Non-cyclic GFR-binding peptide
  MOD_RES (33)..(34): Xaa is C or S
EAVSMGEPYVKLTPVGMDDFFLVSLSSLKTPVXXAKGVK

SEQ ID NO: 23751 - protein, 36 aa, Artificial Sequence
  Non-cyclic GFR-binding peptide
  MOD_RES (33)..(34): Xaa is C or S
  MOD_RES (11)..(12)..(13)..(14)..(15): Xaa is A or G
  MOD_RES (16)..(17)..(18)..(19): Xaa is A or G or absent
EEVIMPYVKLXXXXXXXXXFFLMSLSSTKVPAXXTS

SEQ ID NO: 23752 - protein, 35 aa, Artificial Sequence
  Non-cyclic GFR-binding peptide
  MOD_RES (33)..(33): Xaa is C or S
  MOD_RES (11)..(12)..(13)..(14)..(15): Xaa is A or G
  MOD_RES (16)..(17)..(18)..(19): Xaa is A or G or absent
RVVMNPYVKLXXXXXXXXXFFLVSLSSLKTPAXTP

SEQ ID NO: 23753 - protein, 32 aa, Artificial Sequence
  Non-cyclic GFR-binding peptide
  MOD_RES (31)..(32): Xaa is C or S
EVVMEPYVKLVVKDYEDFFLMSLSSLETPVXX

SEQ ID NO: 23754 - protein, 34 aa, Artificial Sequence
  Non-cyclic GFR-binding peptide
  MOD_RES (31)..(32): Xaa is C or S
RVVMNPYVKLIVNSSDDFFLVSLSSLQTPAXXPK

SEQ ID NO: 23755 - protein, 39 aa, Artificial Sequence
  Non-cyclic GFR-binding peptide
  MOD_RES (2)..(4)..(38)..(39): Xaa is C or S
  MOD_RES (16)..(17)..(18)..(19)..(20): Xaa is A or G
  MOD_RES (21)..(22)..(23)..(24): Xaa is A or G or absent
RXGXSEVVMDPYVKLXXXXXXXXXFFLISLSSLRTPVXX

SEQ ID NO: 23756 - protein, 37 aa, Artificial Sequence
  Non-cyclic GFR-binding peptide
  MOD_RES (34)..(35): Xaa is C or S
  MOD_RES (12)..(13)..(14)..(15)..(16): Xaa is A or G
  MOD_RES (17)..(18)..(19)..(20): Xaa is A or G or absent
ESVAMGPYVKLXXXXXXXXXFFLISLSSLKTPVXXAK

SEQ ID NO: 23757 - protein, 44 aa, Artificial Sequence
  Non-cyclic GFR-binding peptide
  MOD_RES (2)..(4)..(38)..(39): Xaa is C or S
  MOD_RES (16)..(17)..(18)..(19)..(20): Xaa is A or G
  MOD_RES (21)..(22)..(23)..(24): Xaa is A or G or absent
RXGXSEVVMDPYVKLXXXXXXXXXFFLISLSSLRTPVXXTPPTS

SEQ ID NO: 23758 - protein, 37 aa, Artificial Sequence
  Non-cyclic GFR-binding peptide
  MOD_RES (2)..(4): Xaa is C or S
  MOD_RES (16)..(17)..(18)..(19)..(20): Xaa is A or G
  MOD_RES (21)..(22)..(23)..(24): Xaa is A or G or absent
RXGXAEVVMDPYVKLXXXXXXXXXFFLISLSSLRAPV

SEQ ID NO: 23759 - protein, 35 aa, Artificial Sequence
  Non-cyclic GFR-binding peptide
  MOD_RES (1)..(3)..(35): Xaa is C or S
XGXRDVVMGPYVKLIIQQKDNFFLMSLSSMKTPTX

SEQ ID NO: 23760 - protein, 31 aa, Artificial Sequence
  Non-cyclic GFR-binding peptide
  MOD_RES (1)..(1): Xaa is C or S
XSKVIMPYVKLIKPTKGIFFLISLSSLDQSV

SEQ ID NO: 23761 - protein, 32 aa, Artificial Sequence
  Non-cyclic GFR-binding peptide
  MOD_RES (2)..(2): Xaa is C or S
KXSKVIMPYVKLIKPTKGIFFLISLSSLDQSV

SEQ ID NO: 23762 - protein, 30 aa, Artificial Sequence; identical to SEQ ID NO: 1819
  Non-cyclic GFR-binding peptide

SEQ ID NO: 23763 - protein, 32 aa, Artificial Sequence
  Non-cyclic GFR-binding peptide
  MOD_RES (32)..(32): Xaa is C or S
AEVVMDPYVKLVVNNAADFFLISLSSLRAPVX

SEQ ID NO: 23764 - protein, 39 aa, Artificial Sequence
  Non-cyclic GFR-binding peptide
  MOD_RES (33)..(34): Xaa is C or S
  MOD_RES (11)..(12)..(13)..(14)..(15): Xaa is A or G
  MOD_RES (16)..(17)..(18)..(19): Xaa is A or G or absent
KVVMNPYVKLXXXXXXXXXFFLVSLSSLKTPAXXAKPVA

SEQ ID NO: 23765 - protein, 36 aa, Artificial Sequence
  Non-cyclic GFR-binding peptide
  MOD_RES (1)..(32)..(33): Xaa is C or S
XSKVVMPYVKLVKPTRGVFFLISLSSLDQPVXXPSA

SEQ ID NO: 23766 - protein, 35 aa, Artificial Sequence
  Non-cyclic GFR-binding peptide
  MOD_RES (1)..(3)..(34)..(35): Xaa is C or S
XKXSKVIMPYVKLIKPTKGIFFLISLSSLDQSVXX

SEQ ID NO: 23767 - protein, 36 aa, Artificial Sequence
  Non-cyclic GFR-binding peptide
  MOD_RES (35)..(35): Xaa is C or S
HEELRPYVKLLKPKKRVYEFFLVSLSSHHVRSPQXK

SEQ ID NO: 23768 - protein, 39 aa, Artificial Sequence
  Non-cyclic GFR-binding peptide
  MOD_RES (37)..(37): Xaa is C or S
  MOD_RES (13)..(14)..(15)..(16)..(17): Xaa is A or G
  MOD_RES (18)..(19)..(20)..(21): Xaa is A or G or absent
ELHEELRPYVKLXXXXXXXXXFFLVSLSSHHVRSPQXKV

SEQ ID NO: 23769 - protein, 37 aa, Artificial Sequence
  Non-cyclic GFR-binding peptide
  MOD_RES (1)..(35)..(36): Xaa is C or S
  MOD_RES (13)..(14)..(15)..(16)..(17): Xaa is A or G
  MOD_RES (18)..(19)..(20)..(21): Xaa is A or G or absent
XGEVVMEPYVKLXXXXXXXXXFFLMSLSSLETPVXXA

SEQ ID NO: 23770 - protein, 38 aa, Artificial Sequence
  Non-cyclic GFR-binding peptide
  MOD_RES (2)..(34)..(35): Xaa is C or S
GXARVVMNPYVKLIVNSSDDFFLVSLSSLQTPAXXPKP

SEQ ID NO: 23771 - protein, 33 aa, Artificial Sequence
  Non-cyclic GFR-binding peptide
  MOD_RES (2)..(33): Xaa is C or S
KXSRVIMPYVKLVKPKRGVFFLISLSSLAQPVX

SEQ ID NO: 23772 - protein, 38 aa, Artificial Sequence
  Non-cyclic GFR-binding peptide
  MOD_RES (2)..(36)..(37): Xaa is C or S
  MOD_RES (14)..(15)..(16)..(17)..(18): Xaa is A or G
  MOD_RES (19)..(20)..(21)..(22): Xaa is A or G or absent
GXARVVMNPYVKLXXXXXXXXXFFLVSLSSLQTPAXXP

SEQ ID NO: 23773 - protein, 37 aa, Artificial Sequence
  Non-cyclic GFR-binding peptide
  MOD_RES (1)..(3)..(37): Xaa is C or S
  MOD_RES (15)..(16)..(17)..(18)..(19): Xaa is A or G
  MOD_RES (20)..(21)..(22)..(23): Xaa is A or G or absent
XGXSRVVMNPYVKLXXXXXXXXXFFLVSLSSLKTPAX

SEQ ID NO: 23774 - protein, 37 aa, Artificial Sequence
  Non-cyclic GFR-binding peptide
  MOD_RES (32)..(33): Xaa is C or S
ARVVMNPYVKLIVNSSDDFFLVSLSSLQTPAXXPKPV

SEQ ID NO: 23775 - protein, 42 aa, Artificial Sequence
  Non-cyclic GFR-binding peptide
  MOD_RES (2)..(4)..(41): Xaa is C or S
AXAXELHEELRPYVKLLKPKKRVYEFFLVSLSSHHVRSPQXK

SEQ ID NO: 23776 - protein, 32 aa, Artificial Sequence
  Non-cyclic GFR-binding peptide
  MOD_RES (2)..(2): Xaa is C or S
KXSKVVMPYVKLVKPTRGVFFLISLSSLDQPV

SEQ ID NO: 23777 - protein, 38 aa, Artificial Sequence
  Non-cyclic GFR-binding peptide
  MOD_RES (2)..(36)..(37): Xaa is C or S
  MOD_RES (14)..(15)..(16)..(17)..(18): Xaa is A or G
  MOD_RES (19)..(20)..(21)..(22): Xaa is A or G or absent
GXAEVVMDPYVKLXXXXXXXXXFFLISLSSLRAPVXXS

SEQ ID NO: 23778 - protein, 34 aa, Artificial Sequence
  Non-cyclic GFR-binding peptide
  MOD_RES (34)..(34): Xaa is C or S
  MOD_RES (12)..(13)..(14)..(15)..(16): Xaa is A or G
  MOD_RES (17)..(18)..(19)..(20): Xaa is A or G or absent
AKVVMNPYVKLXXXXXXXXXFFLVSLSSLKTPAX

SEQ ID NO: 23779 - protein, 40 aa, Artificial Sequence
  Non-cyclic GFR-binding peptide
  MOD_RES (2)..(4)..(36)..(37): Xaa is C or S
RXGXSEVVMDPYVKLVVNNASDFFLISLSSLRTPVXXTPP

SEQ ID NO: 23780 - protein, 43 aa, Artificial Sequence
  Non-cyclic GFR-binding peptide
  MOD_RES (2)..(37)..(38): Xaa is C or S
  MOD_RES (15)..(16)..(17)..(18)..(19): Xaa is A or G
  MOD_RES (20)..(21)..(22)..(23): Xaa is A or G or absent
GXEAVSMGEPYVKLXXXXXXXXXFFLVSLSSLKTPVXXAKGVK

SEQ ID NO: 23781 - protein, 35 aa, Artificial Sequence
  Non-cyclic GFR-binding peptide
  MOD_RES (1)..(35): Xaa is C or S
XKNHQLFPYVKLHQGQHPKIRFFLMSLSSEETPVX

SEQ ID NO: 23782 - protein, 34 aa, Artificial Sequence
  Non-cyclic GFR-binding peptide
  MOD_RES (2)..(34): Xaa is C or S
GXSRVVMNPYVKLIVNSSDDFFLVSLSSLKTPAX

SEQ ID NO: 23783 - protein, 40 aa, Artificial Sequence
  Non-cyclic GFR-binding peptide
  MOD_RES (1)..(35)..(36): Xaa is C or S
  MOD_RES (13)..(14)..(15)..(16)..(17): Xaa is A or G
  MOD_RES (18)..(19)..(20)..(21): Xaa is A or G or absent
XAEVVMDPYVKLXXXXXXXXXFFLISLSSLRAPVXXSAPA

SEQ ID NO: 23784 - protein, 38 aa, Artificial Sequence
  Non-cyclic GFR-binding peptide
  MOD_RES (1)..(3)..(37)..(38): Xaa is C or S
  MOD_RES (15)..(16)..(17)..(18)..(19): Xaa is A or G
  MOD_RES (20)..(21)..(22)..(23): Xaa is A or G or absent
XGXAKVVMNPYVKLXXXXXXXXXFFLVSLSSLKTPAXX

SEQ ID NO: 23785 - protein, 37 aa, Artificial Sequence
  Non-cyclic GFR-binding peptide
  MOD_RES (32)..(33): Xaa is C or S
AKVVMNPYVKLIVNNSSDFFLVSLSSLKTPAXXAKPV

SEQ ID NO: 23786 - protein, 40 aa, Artificial Sequence
  Non-cyclic GFR-binding peptide
  MOD_RES (1)..(3)..(35)..(36): Xaa is C or S
XGXAKVVMNPYVKLIVNNSSDFFLVSLSSLKTPAXXAKPV

SEQ ID NO: 23787 - protein, 44 aa, Artificial Sequence
  Non-cyclic GFR-binding peptide
  MOD_RES (2)..(4)..(38)..(39): Xaa is C or S
  MOD_RES (16)..(17)..(18)..(19)..(20): Xaa is A or G
  MOD_RES (21)..(22)..(23)..(24): Xaa is A or G or absent
RXGXGEVVMEPYVKLXXXXXXXXXFFLMSLSSLETPVXXAKPIS

SEQ ID NO: 23788 - protein, 42 aa, Artificial Sequence
  Non-cyclic GFR-binding peptide
  MOD_RES (1)..(3)..(40): Xaa is C or S
  MOD_RES (16)..(17)..(18)..(19)..(20): Xaa is A or G
  MOD_RES (21)..(22)..(23)..(24): Xaa is A or G or absent
XAXELHEELRPYVKLXXXXXXXXXFFLVSLSSHHVRSPQXKV

SEQ ID NO: 23789 - protein, 33 aa, Artificial Sequence
  Non-cyclic GFR-binding peptide
  MOD_RES (1)..(1): Xaa is C or S
XEAVSMGEPYVKLTPVGMDDFFLVSLSSLKTPV

SEQ ID NO: 23790 - protein, 39 aa, Artificial Sequence
  Non-cyclic GFR-binding peptide
  MOD_RES (36)..(36): Xaa is C or S
LHEELRPYVKLLKPKKRVYEFFLVSLSSHHVRSPQXKVS

SEQ ID NO: 23791 - protein, 36 aa, Artificial Sequence
  Non-cyclic GFR-binding peptide
  MOD_RES (13)..(14)..(15)..(16)..(17): Xaa is A or G
  MOD_RES (18)..(19)..(20)..(21): Xaa is A or G or absent
ELHEELRPYVKLXXXXXXXXXFFLVSLSSHHVRSPQ

SEQ ID NO: 23792 - protein, 36 aa, Artificial Sequence
  Non-cyclic GFR-binding peptide
  MOD_RES (31)..(32): Xaa is C or S
RVVMNPYVKLIVNSSDDFFLVSLSSLQTPAXXPKPV

SEQ ID NO: 23793 - protein, 40 aa, Artificial Sequence
  Non-cyclic GFR-binding peptide
  MOD_RES (2)..(36)..(37): Xaa is C or S
  MOD_RES (14)..(15)..(16)..(17)..(18): Xaa is A or G
  MOD_RES (19)..(20)..(21)..(22): Xaa is A or G or absent
GXARVVMNPYVKLXXXXXXXXXFFLVSLSSLQTPAXXPKP

SEQ ID NO: 23794 - protein, 34 aa, Artificial Sequence
  Non-cyclic GFR-binding peptide
  MOD_RES (1)..(3): Xaa is C or S
XGXARVVMNPYVKLIVNSSDDFFLVSLSSLQTPA

SEQ ID NO: 23795 - protein, 32 aa, Artificial Sequence
  Non-cyclic GFR-binding peptide
  MOD_RES (31)..(32): Xaa is C or S
SVAMGPYVKLYTVVGKDFFLISLSSLKTPVXX

SEQ ID NO: 23796 - protein, 41 aa, Artificial Sequence
  Non-cyclic GFR-binding peptide
  MOD_RES (2)..(37)..(38): Xaa is C or S
  MOD_RES (15)..(16)..(17)..(18)..(19): Xaa is A or G
  MOD_RES (20)..(21)..(22)..(23): Xaa is A or G or absent
GXEAVSMGEPYVKLXXXXXXXXXFFLVSLSSLKTPVXXAKG

SEQ ID NO: 23797 - protein, 39 aa, Artificial Sequence
  Non-cyclic GFR-binding peptide
  MOD_RES (1)..(33)..(34): Xaa is C or S
XSRVVMNPYVKLIVNSSDDFFLVSLSSLKTPAXXPKPVY

SEQ ID NO: 23798 - protein, 32 aa, Artificial Sequence
  Non-cyclic GFR-binding peptide
  MOD_RES (11)..(12)..(13)..(14)..(15): Xaa is A or G
  MOD_RES (16)..(17)..(18)..(19): Xaa is A or G or absent
EVVMDPYVKLXXXXXXXXXFFLISLSSLRTPV

SEQ ID NO: 23799 - protein, 36 aa, Artificial Sequence
  Non-cyclic GFR-binding peptide
  MOD_RES (1)..(36): Xaa is C or S
  MOD_RES (14)..(15)..(16)..(17)..(18): Xaa is A or G
  MOD_RES (19)..(20)..(21)..(22): Xaa is A or G or absent
XEAVSMGEPYVKLXXXXXXXXXFFLVSLSSLKTPVX

SEQ ID NO: 23800 - protein, 37 aa, Artificial Sequence
  Non-cyclic GFR-binding peptide
  MOD_RES (1)..(35): Xaa is C or S
  MOD_RES (13)..(14)..(15)..(16)..(17): Xaa is A or G
  MOD_RES (18)..(19)..(20)..(21): Xaa is A or G or absent
XKNHQLFPYVKLXXXXXXXXXFFLMSLSSEETPVXEL

SEQ ID NO: 23801 - protein, 35 aa, Artificial Sequence
  Non-cyclic GFR-binding peptide
  MOD_RES (31)..(31): Xaa is C or S
RVVMNPYVKLIVNSSDDFFLVSLSSLKTPAXTPKT

SEQ ID NO: 23802 - protein, 38 aa, Artificial Sequence
  Non-cyclic GFR-binding peptide
  MOD_RES (2)..(35)..(36): Xaa is C or S
  MOD_RES (13)..(14)..(15)..(16)..(17): Xaa is A or G
  MOD_RES (18)..(19)..(20)..(21): Xaa is A or G or absent
KXSRVIMPYVKLXXXXXXXXXFFLISLSSLAQPVXXPA

SEQ ID NO: 23803 - protein, 40 aa, Artificial Sequence
  Non-cyclic GFR-binding peptide
  MOD_RES (2)..(4)..(39)..(40): Xaa is C or S
  MOD_RES (17)..(18)..(19)..(20)..(21): Xaa is A or G
  MOD_RES (22)..(23)..(24)..(25): Xaa is A or G or absent
RXGXEAVSMGEPYVKLXXXXXXXXXFFLVSLSSLKTPVXX

SEQ ID NO: 23804 - protein, 33 aa, Artificial Sequence
  Non-cyclic GFR-binding peptide
  MOD_RES (33)..(33): Xaa is C or S
  MOD_RES (11)..(12)..(13)..(14)..(15): Xaa is A or G
  MOD_RES (16)..(17)..(18)..(19): Xaa is A or G or absent
EVVMEPYVKLXXXXXXXXXFFLMSLSSLETPVX

SEQ ID NO: 23805 - protein, 42 aa, Artificial Sequence
  Non-cyclic GFR-binding peptide
  MOD_RES (2)..(36)..(37): Xaa is C or S
  MOD_RES (14)..(15)..(16)..(17)..(18): Xaa is A or G
  MOD_RES (19)..(20)..(21)..(22): Xaa is A or G or absent
GXARVVMNPYVKLXXXXXXXXXFFLVSLSSLQTPAXXPKPVT

SEQ ID NO: 23806 - protein, 40 aa, Artificial Sequence
  Non-cyclic GFR-binding peptide
  MOD_RES (1)..(3)..(35): Xaa is C or S
XGXSRVVMNPYVKLIVNSSDDFFLVSLSSLKTPAXTPKTV

SEQ ID NO: 23807 - protein, 41 aa, Artificial Sequence
  Non-cyclic GFR-binding peptide
  MOD_RES (2)..(39): Xaa is C or S
  MOD_RES (15)..(16)..(17)..(18)..(19): Xaa is A or G
  MOD_RES (20)..(21)..(22)..(23): Xaa is A or G or absent
AXELHEELRPYVKLXXXXXXXXXFFLVSLSSHHVRSPQXKV

SEQ ID NO: 23808 - protein, 40 aa, Artificial Sequence
  Non-cyclic GFR-binding peptide
  MOD_RES (1)..(3)..(34)..(35): Xaa is C or S
XKXSRVIMPYVKLVKPKRGVFFLISLSSLAQPVXXPAASA

SEQ ID NO: 23809 - protein, 41 aa, Artificial Sequence
  Non-cyclic GFR-binding peptide
  MOD_RES (1)..(3)..(37)..(38): Xaa is C or S
  MOD_RES (15)..(16)..(17)..(18)..(19): Xaa is A or G
  MOD_RES (20)..(21)..(22)..(23): Xaa is A or G or absent
XGXAKVVMNPYVKLXXXXXXXXXFFLVSLSSLKTPAXXAKP

SEQ ID NO: 23810 - protein, 34 aa, Artificial Sequence
  Non-cyclic GFR-binding peptide
  MOD_RES (1)..(1): Xaa is C or S
  MOD_RES (13)..(14)..(15)..(16)..(17): Xaa is A or G
  MOD_RES (18)..(19)..(20)..(21): Xaa is A or G or absent
XAEVVMDPYVKLXXXXXXXXXFFLISLSSLRAPV

SEQ ID NO: 23811 - protein, 41 aa, Artificial Sequence
  Non-cyclic GFR-binding peptide
  MOD_RES (2)..(4)..(39)..(40): Xaa is C or S
  MOD_RES (17)..(18)..(19)..(20)..(21): Xaa is A or G
  MOD_RES (22)..(23)..(24)..(25): Xaa is A or G or absent
RXGXEAVSMGEPYVKLXXXXXXXXXFFLVSLSSLKTPVXXA

SEQ ID NO: 23812 - protein, 39 aa, Artificial Sequence
  Non-cyclic GFR-binding peptide
  MOD_RES (1)..(35)..(36): Xaa is C or S
  MOD_RES (13)..(14)..(15)..(16)..(17): Xaa is A or G
  MOD_RES (18)..(19)..(20)..(21): Xaa is A or G or absent
XAKVVMNPYVKLXXXXXXXXXFFLVSLSSLKTPAXXAKP

SEQ ID NO: 23813 - protein, 38 aa, Artificial Sequence
  Non-cyclic GFR-binding peptide
  MOD_RES (2)..(4)..(35)..(36): Xaa is C or S
SXKXSRVIMPYVKLVKPKRGVFFLISLSSLAQPVXXPA

SEQ ID NO: 23814 - protein, 35 aa, Artificial Sequence
  Non-cyclic GFR-binding peptide
  MOD_RES (2)..(34)..(35): Xaa is C or S
GXARVVMNPYVKLIVNSSDDFFLVSLSSLQTPAXX

SEQ ID NO: 23815 - protein, 37 aa, Artificial Sequence
  Non-cyclic GFR-binding peptide
  MOD_RES (2)..(4): Xaa is C or S
  MOD_RES (16)..(17)..(18)..(19)..(20): Xaa is A or G
  MOD_RES (21)..(22)..(23)..(24): Xaa is A or G or absent
RXGXSEVVMDPYVKLXXXXXXXXXFFLISLSSLRTPV

SEQ ID NO: 23816 - protein, 38 aa, Artificial Sequence
  Non-cyclic GFR-binding peptide
  MOD_RES (1)..(3)..(35)..(36): Xaa is C or S
XGXRDVVMGPYVKLIIQQKDNFFLMSLSSMKTPTXXPG

SEQ ID NO: 23817 - protein, 36 aa, Artificial Sequence
  Non-cyclic GFR-binding peptide
  MOD_RES (1)..(3): Xaa is C or S
  MOD_RES (15)..(16)..(17)..(18)..(19): Xaa is A or G
  MOD_RES (20)..(21)..(22)..(23): Xaa is A or G or absent
XGXAKVVMNPYVKLXXXXXXXXXFFLVSLSSLKTPA

SEQ ID NO: 23818 - protein, 36 aa, Artificial Sequence
  Non-cyclic GFR-binding peptide
  MOD_RES (2)..(36): Xaa is C or S
  MOD_RES (14)..(15)..(16)..(17)..(18): Xaa is A or G
  MOD_RES (19)..(20)..(21)..(22): Xaa is A or G or absent
GXARVVMNPYVKLXXXXXXXXXFFLVSLSSLQTPAX

SEQ ID NO: 23819 - protein, 33 aa, Artificial Sequence
  Non-cyclic GFR-binding peptide
  MOD_RES (32)..(33): Xaa is C or S
ARVVMNPYVKLIVNSSDDFFLVSLSSLQTPAXX

SEQ ID NO: 23820 - protein, 37 aa, Artificial Sequence
  Non-cyclic GFR-binding peptide
  MOD_RES (1)..(3)..(36)..(37): Xaa is C or S
  MOD_RES (14)..(15)..(16)..(17)..(18): Xaa is A or G
  MOD_RES (19)..(20)..(21)..(22): Xaa is A or G or absent
XGXEEVIMPYVKLXXXXXXXXXFFLMSLSSTKVPAXX

SEQ ID NO: 23821 - protein, 39 aa, Artificial Sequence
  Non-cyclic GFR-binding peptide
  MOD_RES (34)..(34): Xaa is C or S
KNHQLFPYVKLHQGQHPKIRFFLMSLSSEETPVXELGED

SEQ ID NO: 23822 - protein, 38 aa, Artificial Sequence
  Non-cyclic GFR-binding peptide
  MOD_RES (2)..(4): Xaa is C or S
AXAXELHEELRPYVKLLKPKKRVYEFFLVSLSSHHVRS

SEQ ID NO: 23823 - protein, 36 aa, Artificial Sequence
  Non-cyclic GFR-binding peptide
  MOD_RES (32)..(33): Xaa is C or S
ESVAMGPYVKLYTVVGKDFFLISLSSLKTPVXXAKS

SEQ ID NO: 23824 - protein, 38 aa, Artificial Sequence
  Non-cyclic GFR-binding peptide
  MOD_RES (1)..(38): Xaa is C or S
  MOD_RES (14)..(15)..(16)..(17)..(18): Xaa is A or G
  MOD_RES (19)..(20)..(21)..(22): Xaa is A or G or absent
XELHEELRPYVKLXXXXXXXXXFFLVSLSSHHVRSPQX

SEQ ID NO: 23825 - protein, 33 aa, Artificial Sequence
  Non-cyclic GFR-binding peptide
  MOD_RES (1)..(1): Xaa is C or S
  MOD_RES (12)..(13)..(14)..(15)..(16): Xaa is A or G
  MOD_RES (17)..(18)..(19)..(20): Xaa is A or G or absent
XSKVVMPYVKLXXXXXXXXXFFLISLSSLDQPV

SEQ ID NO: 23826 - protein, 41 aa, Artificial Sequence
  Non-cyclic GFR-binding peptide
  MOD_RES (1)..(3)..(35)..(36): Xaa is C or S
XGXAKVVMNPYVKLIVNNSSDFFLVSLSSLKTPAXXAKPVA

SEQ ID NO: 23827 - protein, 36 aa, Artificial Sequence
  Non-cyclic GFR-binding peptide
  MOD_RES (1)..(33)..(34): Xaa is C or S
XESVAMGPYVKLYTVVGKDFFLISLSSLKTPVXXAK

SEQ ID NO: 23828 - protein, 41 aa, Artificial Sequence
  Non-cyclic GFR-binding peptide
  MOD_RES (1)..(3)..(38)..(39): Xaa is C or S
  MOD_RES (16)..(17)..(18)..(19)..(20): Xaa is A or G
  MOD_RES (21)..(22)..(23)..(24): Xaa is A or G or absent
XGXEAVSMGEPYVKLXXXXXXXXXFFLVSLSSLKTPVXXAK

SEQ ID NO: 23829 - protein, 41 aa, Artificial Sequence
  Non-cyclic GFR-binding peptide
  MOD_RES (2)..(4)..(35)..(36): Xaa is C or S
SXKXSRVIMPYVKLVKPKRGVFFLISLSSLAQPVXXPAASA

SEQ ID NO: 23830 - protein, 38 aa, Artificial Sequence
  Non-cyclic GFR-binding peptide
  MOD_RES (2)..(33)..(34): Xaa is C or S
KXSKVVMPYVKLVKPTRGVFFLISLSSLDQPVXXPSAS

SEQ ID NO: 23831 - protein, 42 aa, Artificial Sequence
  Non-cyclic GFR-binding peptide
  MOD_RES (2)..(4)..(38)..(39): Xaa is C or S
  MOD_RES (16)..(17)..(18)..(19)..(20): Xaa is A or G
  MOD_RES (21)..(22)..(23)..(24): Xaa is A or G or absent
RXGXSEVVMDPYVKLXXXXXXXXXFFLISLSSLRTPVXXTPP

SEQ ID NO: 23832 - protein, 41 aa, Artificial Sequence
  Non-cyclic GFR-binding peptide
  MOD_RES (2)..(35)..(36): Xaa is C or S
  MOD_RES (13)..(14)..(15)..(16)..(17): Xaa is A or G
  MOD_RES (18)..(19)..(20)..(21): Xaa is A or G or absent
KXSKVVMPYVKLXXXXXXXXXFFLISLSSLDQPVXXPSASA

SEQ ID NO: 23833 - protein, 35 aa, Artificial Sequence
  Non-cyclic GFR-binding peptide
  MOD_RES (31)..(32): Xaa is C or S
SRVIMPYVKLVKPKRGVFFLISLSSLAQPVXXPAA

SEQ ID NO: 23834 - protein, 34 aa, Artificial Sequence
  Non-cyclic GFR-binding peptide
  MOD_RES (34)..(34): Xaa is C or S
  MOD_RES (12)..(13)..(14)..(15)..(16): Xaa is A or G
  MOD_RES (17)..(18)..(19)..(20): Xaa is A or G or absent
ARVVMNPYVKLXXXXXXXXXFFLVSLSSLQTPAX

SEQ ID NO: 23835 - protein, 36 aa, Artificial Sequence
  Non-cyclic GFR-binding peptide
  MOD_RES (33)..(33): Xaa is C or S
NHQLFPYVKLHQGQHPKIRFFLMSLSSEETPVXELG

SEQ ID NO: 23836 - protein, 38 aa, Artificial Sequence
  Non-cyclic GFR-binding peptide
  MOD_RES (1)..(35): Xaa is C or S
  MOD_RES (13)..(14)..(15)..(16)..(17): Xaa is A or G
  MOD_RES (18)..(19)..(20)..(21): Xaa is A or G or absent
XKNHQLFPYVKLXXXXXXXXXFFLMSLSSEETPVXELG

SEQ ID NO: 23837 - protein, 34 aa, Artificial Sequence
  Non-cyclic GFR-binding peptide
  MOD_RES (1)..(33)..(34): Xaa is C or S
XESVAMGPYVKLYTVVGKDFFLISLSSLKTPVXX

SEQ ID NO: 23838 - protein, 35 aa, Artificial Sequence
  Non-cyclic GFR-binding peptide
  MOD_RES (1)..(33)..(34): Xaa is C or S
XRDVVMGPYVKLIIQQKDNFFLMSLSSMKTPTXXP

SEQ ID NO: 23839 - protein, 33 aa, Artificial Sequence
  Non-cyclic GFR-binding peptide
  MOD_RES (33)..(33): Xaa is C or S
  MOD_RES (11)..(12)..(13)..(14)..(15): Xaa is A or G
  MOD_RES (16)..(17)..(18)..(19): Xaa is A or G or absent
RVVMNPYVKLXXXXXXXXXFFLVSLSSLQTPAX

SEQ ID NO: 23840 - protein, 37 aa, Artificial Sequence
  Non-cyclic GFR-binding peptide
  MOD_RES (1)..(3): Xaa is C or S
XAXELHEELRPYVKLLKPKKRVYEFFLVSLSSHHVRS

SEQ ID NO: 23841 - protein, 37 aa, Artificial Sequence
  Non-cyclic GFR-binding peptide
  MOD_RES (1)..(35)..(36): Xaa is C or S
  MOD_RES (13)..(14)..(15)..(16)..(17): Xaa is A or G
  MOD_RES (18)..(19)..(20)..(21): Xaa is A or G or absent
XSEVVMDPYVKLXXXXXXXXXFFLISLSSLRTPVXXT

SEQ ID NO: 23842 - protein, 41 aa, Artificial Sequence
  Non-cyclic GFR-binding peptide
  MOD_RES (2)..(4)..(37)..(38): Xaa is C or S
  MOD_RES (15)..(16)..(17)..(18)..(19): Xaa is A or G
  MOD_RES (20)..(21)..(22)..(23): Xaa is A or G or absent
SXKXSKVIMPYVKLXXXXXXXXXFFLISLSSLDQSVXXPSA

SEQ ID NO: 23843 - protein, 40 aa, Artificial Sequence
  Non-cyclic GFR-binding peptide
  MOD_RES (1)..(3)..(37)..(38): Xaa is C or S
  MOD_RES (15)..(16)..(17)..(18)..(19): Xaa is A or G
  MOD_RES (20)..(21)..(22)..(23): Xaa is A or G or absent
XGXRDVVMGPYVKLXXXXXXXXXFFLMSLSSMKTPTXXPG

SEQ ID NO: 23844 - protein, 40 aa, Artificial Sequence
  Non-cyclic GFR-binding peptide
  MOD_RES (1)..(3)..(35)..(36): Xaa is C or S
XGXRDVVMGPYVKLIIQQKDNFFLMSLSSMKTPTXXPGAS

SEQ ID NO: 23845 - protein, 36 aa, Artificial Sequence
  Non-cyclic GFR-binding peptide
  MOD_RES (34)..(35): Xaa is C or S
  MOD_RES (12)..(13)..(14)..(15)..(16): Xaa is A or G
  MOD_RES (17)..(18)..(19)..(20): Xaa is A or G or absent
AEVVMDPYVKLXXXXXXXXXFFLISLSSLRAPVXXS

SEQ ID NO: 23846 - protein, 38 aa, Artificial Sequence
  Non-cyclic GFR-binding peptide
  MOD_RES (1)..(3)..(36)..(37): Xaa is C or S
  MOD_RES (14)..(15)..(16)..(17)..(18): Xaa is A or G
  MOD_RES (19)..(20)..(21)..(22): Xaa is A or G or absent
XKXSKVVMPYVKLXXXXXXXXXFFLISLSSLDQPVXXP

SEQ ID NO: 23847 - protein, 36 aa, Artificial Sequence
  Non-cyclic GFR-binding peptide
  MOD_RES (1)..(3)..(35): Xaa is C or S
XGXSRVVMNPYVKLIVNSSDDFFLVSLSSLKTPAXT

SEQ ID NO: 23848 - protein, 34 aa, Artificial Sequence
  Non-cyclic GFR-binding peptide
  MOD_RES (2)..(4): Xaa is C or S
LXGXEEVIMPYVKLLLVRGNDFFLMSLSSTKVPA

SEQ ID NO: 23849 - protein, 36 aa, Artificial Sequence
  Non-cyclic GFR-binding peptide
  MOD_RES (1)..(33)..(34): Xaa is C or S
XSEVVMDPYVKLVVNNASDFFLISLSSLRTPVXXTP

SEQ ID NO: 23850 - protein, 40 aa, Artificial Sequence
  Non-cyclic GFR-binding peptide
  MOD_RES (2)..(36)..(37): Xaa is C or S
  MOD_RES (14)..(15)..(16)..(17)..(18): Xaa is A or G
  MOD_RES (19)..(20)..(21)..(22): Xaa is A or G or absent
GXRDVVMGPYVKLXXXXXXXXXFFLMSLSSMKTPTXXPGA

SEQ ID NO: 23851 - protein, 35 aa, Artificial Sequence
  Non-cyclic GFR-binding peptide
  MOD_RES (32)..(33): Xaa is C or S
RDVVMGPYVKLIIQQKDNFFLMSLSSMKTPTXXPG

SEQ ID NO: 23852 - protein, 40 aa, Artificial Sequence
  Non-cyclic GFR-binding peptide
  MOD_RES (34)..(34): Xaa is C or S
  MOD_RES (12)..(13)..(14)..(15)..(16): Xaa is A or G
  MOD_RES (17)..(18)..(19)..(20): Xaa is A or G or absent
SRVVMNPYVKLXXXXXXXXXFFLVSLSSLKTPAXTPKTVH

SEQ ID NO: 23853 - protein, 36 aa, Artificial Sequence
  Non-cyclic GFR-binding peptide
  MOD_RES (1)..(3)..(34)..(35): Xaa is C or S
XKXSKVVMPYVKLVKPTRGVFFLISLSSLDQPVXXP

SEQ ID NO: 23854 - protein, 42 aa, Artificial Sequence
  Non-cyclic GFR-binding peptide
  MOD_RES (2)..(4)..(36): Xaa is C or S
HXGXSRVVMNPYVKLIVNSSDDFFLVSLSSLKTPAXTPKTVH

SEQ ID NO: 23855 - protein, 39 aa, Artificial Sequence
  Non-cyclic GFR-binding peptide
  MOD_RES (33)..(34): Xaa is C or S
  MOD_RES (11)..(12)..(13)..(14)..(15): Xaa is A or G
  MOD_RES (16)..(17)..(18)..(19): Xaa is A or G or absent
SKVVMPYVKLXXXXXXXXXFFLISLSSLDQPVXXPSASA

SEQ ID NO: 23856 - protein, 38 aa, Artificial Sequence
  Non-cyclic GFR-binding peptide
  MOD_RES (1)..(33)..(34): Xaa is C or S
XSEVVMDPYVKLVVNNASDFFLISLSSLRTPVXXTPPT

SEQ ID NO: 23857 - protein, 35 aa, Artificial Sequence
  Non-cyclic GFR-binding peptide
LHEELRPYVKLLKPKKRVYEFFLVSLSSHHVRSPQ

SEQ ID NO: 23858 - protein, 35 aa, Artificial Sequence
  Non-cyclic GFR-binding peptide
  MOD_RES (31)..(32): Xaa is C or S
DVVMGPYVKLIIQQKDNFFLMSLSSMKTPTXXPGA

SEQ ID NO: 23859 - protein, 40 aa, Artificial Sequence
  Non-cyclic GFR-binding peptide
  MOD_RES (2)..(4)..(37)..(38): Xaa is C or S
  MOD_RES (15)..(16)..(17)..(18)..(19): Xaa is A or G
  MOD_RES (20)..(21)..(22)..(23): Xaa is A or G or absent
SXKXSKVIMPYVKLXXXXXXXXXFFLISLSSLDQSVXXPS

SEQ ID NO: 23860 - protein, 39 aa, Artificial Sequence
  Non-cyclic GFR-binding peptide
  MOD_RES (1)..(35)..(36): Xaa is C or S
  MOD_RES (13)..(14)..(15)..(16)..(17): Xaa is A or G
  MOD_RES (18)..(19)..(20)..(21): Xaa is A or G or absent
XGEVVMEPYVKLXXXXXXXXXFFLMSLSSLETPVXXAKP

SEQ ID NO: 23861 - protein, 36 aa, Artificial Sequence
  Non-cyclic GFR-binding peptide
  MOD_RES (36)..(36): Xaa is C or S
LHEELRPYVKLLKPKKRVYEFFLVSLSSHHVRSPQX

SEQ ID NO: 23862 - protein, 40 aa, Artificial Sequence
  Non-cyclic GFR-binding peptide
  MOD_RES (2)..(36)..(37): Xaa is C or S
  MOD_RES (14)..(15)..(16)..(17)..(18): Xaa is A or G
  MOD_RES (19)..(20)..(21)..(22): Xaa is A or G or absent
GXAKVVMNPYVKLXXXXXXXXXFFLVSLSSLKTPAXXAKP

SEQ ID NO: 23863 - protein, 38 aa, Artificial Sequence
  Non-cyclic GFR-binding peptide
  MOD_RES (2)..(4)..(36)..(37): Xaa is C or S
RXGXAEVVMDPYVKLVVNNAADFFLISLSSLRAPVXXS

SEQ ID NO: 23864 - protein, 34 aa, Artificial Sequence
  Non-cyclic GFR-binding peptide
  MOD_RES (1)..(34): Xaa is C or S
  MOD_RES (12)..(13)..(14)..(15)..(16): Xaa is A or G
  MOD_RES (17)..(18)..(19)..(20): Xaa is A or G or absent
XEEVIMPYVKLXXXXXXXXXFFLMSLSSTKVPAX

SEQ ID NO: 23865 - protein, 38 aa, Artificial Sequence
  Non-cyclic GFR-binding peptide
  MOD_RES (1)..(34)..(35): Xaa is C or S
  MOD_RES (12)..(13)..(14)..(15)..(16): Xaa is A or G
  MOD_RES (17)..(18)..(19)..(20): Xaa is A or G or absent
XSKVIMPYVKLXXXXXXXXXFFLISLSSLDQSVXXPSA

SEQ ID NO: 23866 - protein, 42 aa, Artificial Sequence
  Non-cyclic GFR-binding peptide
  MOD_RES (2)..(4)..(37)..(38): Xaa is C or S
RXGXEAVSMGEPYVKLTPVGMDDFFLVSLSSLKTPVXXAKGV

SEQ ID NO: 23867 - protein, 35 aa, Artificial Sequence
  Non-cyclic GFR-binding peptide
  MOD_RES (34)..(35): Xaa is C or S
  MOD_RES (12)..(13)..(14)..(15)..(16): Xaa is A or G
  MOD_RES (17)..(18)..(19)..(20): Xaa is A or G or absent
SRVVMNPYVKLXXXXXXXXXFFLVSLSSLKTPAXX

SEQ ID NO: 23868 - protein, 34 aa, Artificial Sequence
  Non-cyclic GFR-binding peptide
  MOD_RES (31)..(32): Xaa is C or S
RVVMNPYVKLIVNSSDDFFLVSLSSLKTPAXXPK

SEQ ID NO: 23869 - protein, 35 aa, Artificial Sequence
  Non-cyclic GFR-binding peptide
  MOD_RES (2)..(4)..(35): Xaa is C or S
SXKXSKVVMPYVKLVKPTRGVFFLISLSSLDQPVX

SEQ ID NO: 23870 - protein, 40 aa, Artificial Sequence
  Non-cyclic GFR-binding peptide
  MOD_RES (2)..(4)..(38)..(39): Xaa is C or S
  MOD_RES (16)..(17)..(18)..(19)..(20): Xaa is A or G
  MOD_RES (21)..(22)..(23)..(24): Xaa is A or G or absent
SXGXRDVVMGPYVKLXXXXXXXXXFFLMSLSSMKTPTXXP

SEQ ID NO: 23871 - protein, 39 aa, Artificial Sequence
  Non-cyclic GFR-binding peptide
  MOD_RES (35)..(36): Xaa is C or S
  MOD_RES (13)..(14)..(15)..(16)..(17): Xaa is A or G
  MOD_RES (18)..(19)..(20)..(21): Xaa is A or G or absent
EAVSMGEPYVKLXXXXXXXXXFFLVSLSSLKTPVXXAKG

SEQ ID NO: 23872 - protein, 39 aa, Artificial Sequence
  Non-cyclic GFR-binding peptide
  MOD_RES (2)..(4)..(36)..(37): Xaa is C or S
RXGXESVAMGPYVKLYTVVGKDFFLISLSSLKTPVXXAK

SEQ ID NO: 23873 - protein, 35 aa, Artificial Sequence
  Non-cyclic GFR-binding peptide
  MOD_RES (31)..(32): Xaa is C or S
KVVMNPYVKLIVNNSSDFFLVSLSSLKTPAXXAKP

SEQ ID NO: 23874 - protein, 39 aa, Artificial Sequence
  Non-cyclic GFR-binding peptide
  MOD_RES (2)..(36): Xaa is C or S
EXKNHQLFPYVKLHQGQHPKIRFFLMSLSSEETPVXELG

SEQ ID NO: 23875 - protein, 44 aa, Artificial Sequence
  Non-cyclic GFR-binding peptide
  MOD_RES (2)..(4)..(38)..(39): Xaa is C or S
  MOD_RES (16)..(17)..(18)..(19)..(20): Xaa is A or G
  MOD_RES (21)..(22)..(23)..(24): Xaa is A or G or absent
HXGXSRVVMNPYVKLXXXXXXXXXFFLVSLSSLKTPAXXPKPVY

SEQ ID NO: 23876 - protein, 40 aa, Artificial Sequence
  Non-cyclic GFR-binding peptide
  MOD_RES (1)..(35)..(36): Xaa is C or S
  MOD_RES (13)..(14)..(15)..(16)..(17): Xaa is A or G
  MOD_RES (18)..(19)..(20)..(21): Xaa is A or G or absent
XAKVVMNPYVKLXXXXXXXXXFFLVSLSSLKTPAXXAKPV

SEQ ID NO: 23877 - protein, 33 aa, Artificial Sequence
  Non-cyclic GFR-binding peptide
  MOD_RES (32)..(33): Xaa is C or S
RDVVMGPYVKLIIQQKDNFFLMSLSSMKTPTXX

SEQ ID NO: 23878 - protein, 35 aa, Artificial Sequence
  Non-cyclic GFR-binding peptide
  MOD_RES (2)..(34)..(35): Xaa is C or S
GXAEVVMDPYVKLVVNNAADFFLISLSSLRAPVXX

SEQ ID NO: 23879 - protein, 39 aa, Artificial Sequence
  Non-cyclic GFR-binding peptide
  MOD_RES (1)..(3)..(37): Xaa is C or S
XEXKNHQLFPYVKLHQGQHPKIRFFLMSLSSEETPVXEL

SEQ ID NO: 23880 - protein, 36 aa, Artificial Sequence
  Non-cyclic GFR-binding peptide
  MOD_RES (1)..(3)..(36): Xaa is C or S
  MOD_RES (14)..(15)..(16)..(17)..(18): Xaa is A or G
  MOD_RES (19)..(20)..(21)..(22): Xaa is A or G or absent
XGXEEVIMPYVKLXXXXXXXXXFFLMSLSSTKVPAX

SEQ ID NO: 23881 - protein, 39 aa, Artificial Sequence
  Non-cyclic GFR-binding peptide
  MOD_RES (1)..(33): Xaa is C or S
XSRVVMNPYVKLIVNSSDDFFLVSLSSLKTPAXTPKTVH

SEQ ID NO: 23882 - protein, 35 aa, Artificial Sequence
  Non-cyclic GFR-binding peptide
  MOD_RES (33)..(34): Xaa is C or S
  MOD_RES (11)..(12)..(13)..(14)..(15): Xaa is A or G
  MOD_RES (16)..(17)..(18)..(19): Xaa is A or G or absent
SRVIMPYVKLXXXXXXXXXFFLISLSSLAQPVXXP

SEQ ID NO: 23883 - protein, 35 aa, Artificial Sequence
  Non-cyclic GFR-binding peptide
  MOD_RES (34)..(35): Xaa is C or S
  MOD_RES (12)..(13)..(14)..(15)..(16): Xaa is A or G
  MOD_RES (17)..(18)..(19)..(20): Xaa is A or G or absent
ARVVMNPYVKLXXXXXXXXXFFLVSLSSLQTPAXX

SEQ ID NO: 23884 - protein, 36 aa, Artificial Sequence
  Non-cyclic GFR-binding peptide
  MOD_RES (2)..(35)..(36): Xaa is C or S
  MOD_RES (13)..(14)..(15)..(16)..(17): Xaa is A or G
  MOD_RES (18)..(19)..(20)..(21): Xaa is A or G or absent
KXSRVIMPYVKLXXXXXXXXXFFLISLSSLAQPVXX

SEQ ID NO: 23885 - protein, 35 aa, Artificial Sequence
  Non-cyclic GFR-binding peptide
  MOD_RES (2)..(4): Xaa is C or S
SXGXRDVVMGPYVKLIIQQKDNFFLMSLSSMKTPT

SEQ ID NO: 23886 - protein, 33 aa, Artificial Sequence
  Non-cyclic GFR-binding peptide
  MOD_RES (1)..(1): Xaa is C or S
  MOD_RES (12)..(13)..(14)..(15)..(16): Xaa is A or G
  MOD_RES (17)..(18)..(19)..(20): Xaa is A or G or absent
XSKVIMPYVKLXXXXXXXXXFFLISLSSLDQSV

SEQ ID NO: 23887 - protein, 41 aa, Artificial Sequence
  Non-cyclic GFR-binding peptide
  MOD_RES (2)..(4)..(37)..(38): Xaa is C or S
  MOD_RES (15)..(16)..(17)..(18)..(19): Xaa is A or G
  MOD_RES (20)..(21)..(22)..(23): Xaa is A or G or absent
LXGXEEVIMPYVKLXXXXXXXXXFFLMSLSSTKVPAXXTSP

SEQ ID NO: 23888 - protein, 34 aa, Artificial Sequence
  Non-cyclic GFR-binding peptide
  MOD_RES (11)..(12)..(13)..(14)..(15): Xaa is A or G
  MOD_RES (16)..(17)..(18)..(19): Xaa is A or G or absent
HEELRPYVKLXXXXXXXXXFFLVSLSSHHVRSPQ

SEQ ID NO: 23889 - protein, 40 aa, Artificial Sequence
  Non-cyclic GFR-binding peptide
  MOD_RES (2)..(34)..(35): Xaa is C or S
GXAKVVMNPYVKLIVNNSSDFFLVSLSSLKTPAXXAKPVA

SEQ ID NO: 23890 - protein, 38 aa, Artificial Sequence
  Non-cyclic GFR-binding peptide
  MOD_RES (34)..(35): Xaa is C or S
  MOD_RES (12)..(13)..(14)..(15)..(16): Xaa is A or G
  MOD_RES (17)..(18)..(19)..(20): Xaa is A or G or absent
GEVVMEPYVKLXXXXXXXXXFFLMSLSSLETPVXXAKP

SEQ ID NO: 23891 - protein, 40 aa, Artificial Sequence
  Non-cyclic GFR-binding peptide
  MOD_RES (2)..(35)..(36): Xaa is C or S
  MOD_RES (13)..(14)..(15)..(16)..(17): Xaa is A or G
  MOD_RES (18)..(19)..(20)..(21): Xaa is A or G or absent
GXEEVIMPYVKLXXXXXXXXXFFLMSLSSTKVPAXXTSPV

SEQ ID NO: 23892 - protein, 37 aa, Artificial Sequence
  Non-cyclic GFR-binding peptide
  MOD_RES (2)..(34)..(35): Xaa is C or S
GXRDVVMGPYVKLIIQQKDNFFLMSLSSMKTPTXXPG

SEQ ID NO: 23893 - protein, 36 aa, Artificial Sequence
  Non-cyclic GFR-binding peptide
  MOD_RES (1)..(34)..(35): Xaa is C or S
  MOD_RES (12)..(13)..(14)..(15)..(16): Xaa is A or G
  MOD_RES (17)..(18)..(19)..(20): Xaa is A or G or absent
XSKVIMPYVKLXXXXXXXXXFFLISLSSLDQSVXXP

SEQ ID NO: 23894 - protein, 36 aa, Artificial Sequence
  Non-cyclic GFR-binding peptide
  MOD_RES (2)..(4)..(36): Xaa is C or S
RXGXGEVVMEPYVKLVVKDYEDFFLMSLSSLETPVX

SEQ ID NO: 23895 - protein, 37 aa, Artificial Sequence
  Non-cyclic GFR-binding peptide
  MOD_RES (33)..(34): Xaa is C or S
  MOD_RES (11)..(12)..(13)..(14)..(15): Xaa is A or G
  MOD_RES (16)..(17)..(18)..(19): Xaa is A or G or absent
EVVMDPYVKLXXXXXXXXXFFLISLSSLRAPVXXSAP

SEQ ID NO: 23896 - protein, 37 aa, Artificial Sequence
  Non-cyclic GFR-binding peptide
  MOD_RES (1)..(35)..(36): Xaa is C or S
  MOD_RES (13)..(14)..(15)..(16)..(17): Xaa is A or G
  MOD_RES (18)..(19)..(20)..(21): Xaa is A or G or absent
XRDVVMGPYVKLXXXXXXXXXFFLMSLSSMKTPTXXP

SEQ ID NO: 23897 - protein, 42 aa, Artificial Sequence
  Non-cyclic GFR-binding peptide
  MOD_RES (2)..(4)..(38): Xaa is C or S
  MOD_RES (16)..(17)..(18)..(19)..(20): Xaa is A or G
  MOD_RES (21)..(22)..(23)..(24): Xaa is A or G or absent
HXGXSRVVMNPYVKLXXXXXXXXXFFLVSLSSLKTPAXTPKT

SEQ ID NO: 23898 - protein, 39 aa, Artificial Sequence
  Non-cyclic GFR-binding peptide
  MOD_RES (1)..(33)..(34): Xaa is C or S
XAEVVMDPYVKLVVNNAADFFLISLSSLRAPVXXSAPAA

SEQ ID NO: 23899 - protein, 37 aa, Artificial Sequence
  Non-cyclic GFR-binding peptide
  MOD_RES (1)..(33)..(34): Xaa is C or S
XGEVVMEPYVKLVVKDYEDFFLMSLSSLETPVXXAKP

SEQ ID NO: 23900 - protein, 40 aa, Artificial Sequence
  Non-cyclic GFR-binding peptide
  MOD_RES (2)..(36)..(37): Xaa is C or S
  MOD_RES (14)..(15)..(16)..(17)..(18): Xaa is A or G
  MOD_RES (19)..(20)..(21)..(22): Xaa is A or G or absent
GXAEVVMDPYVKLXXXXXXXXXFFLISLSSLRAPVXXSAP

SEQ ID NO: 23901 - protein, 39 aa, Artificial Sequence
  Non-cyclic GFR-binding peptide
  MOD_RES (1)..(34)..(35): Xaa is C or S
  MOD_RES (12)..(13)..(14)..(15)..(16): Xaa is A or G
  MOD_RES (17)..(18)..(19)..(20): Xaa is A or G or absent
XSRVIMPYVKLXXXXXXXXXFFLISLSSLAQPVXXPAAS

SEQ ID NO: 23902 - protein, 39 aa, Artificial Sequence
  Non-cyclic GFR-binding peptide
  MOD_RES (2)..(36)..(37): Xaa is C or S
  MOD_RES (14)..(15)..(16)..(17)..(18): Xaa is A or G
  MOD_RES (19)..(20)..(21)..(22): Xaa is A or G or absent
GXGEVVMEPYVKLXXXXXXXXXFFLMSLSSLETPVXXAK

SEQ ID NO: 23903 - protein, 38 aa, Artificial Sequence
  Non-cyclic GFR-binding peptide
  MOD_RES (2)..(4): Xaa is C or S
  MOD_RES (17)..(18)..(19)..(20)..(21): Xaa is A or G
  MOD_RES (22)..(23)..(24)..(25): Xaa is A or G or absent
RXGXEAVSMGEPYVKLXXXXXXXXXFFLVSLSSLKTPV

SEQ ID NO: 23904 - protein, 37 aa, Artificial Sequence
  Non-cyclic GFR-binding peptide
  MOD_RES (1)..(3)..(35)..(36): Xaa is C or S
XGXSRVVMNPYVKLIVNSSDDFFLVSLSSLKTPAXXP

SEQ ID NO: 23905 - protein, 39 aa, Artificial Sequence
  Non-cyclic GFR-binding peptide
  MOD_RES (34)..(35): Xaa is C or S
  MOD_RES (12)..(13)..(14)..(15)..(16): Xaa is A or G
  MOD_RES (17)..(18)..(19)..(20): Xaa is A or G or absent
AEVVMDPYVKLXXXXXXXXXFFLISLSSLRAPVXXSAPA

SEQ ID NO: 23906 - protein, 37 aa, Artificial Sequence
  Non-cyclic GFR-binding peptide
  MOD_RES (34)..(34): Xaa is C or S
KNHQLFPYVKLHQGQHPKIRFFLMSLSSEETPVXELG

SEQ ID NO: 23907 - protein, 39 aa, Artificial Sequence
  Non-cyclic GFR-binding peptide
  MOD_RES (2)..(34)..(35): Xaa is C or S
GXGEVVMEPYVKLVVKDYEDFFLMSLSSLETPVXXAKPI

SEQ ID NO: 23908 - protein, 32 aa, Artificial Sequence
  Non-cyclic GFR-binding peptide
  MOD_RES (11)..(12)..(13)..(14)..(15): Xaa is A or G
  MOD_RES (16)..(17)..(18)..(19): Xaa is A or G or absent
HEELRPYVKLXXXXXXXXXFFLVSLSSHHVRS

SEQ ID NO: 23909 - protein, 35 aa, Artificial Sequence
  Non-cyclic GFR-binding peptide
  MOD_RES (1)..(35): Xaa is C or S
  MOD_RES (13)..(14)..(15)..(16)..(17): Xaa is A or G
  MOD_RES (18)..(19)..(20)..(21): Xaa is A or G or absent
XRDVVMGPYVKLXXXXXXXXXFFLMSLSSMKTPTX

SEQ ID NO: 23910 - protein, 38 aa, Artificial Sequence
  Non-cyclic GFR-binding peptide
  MOD_RES (1)..(3)..(34)..(35): Xaa is C or S
XKXSKVIMPYVKLIKPTKGIFFLISLSSLDQSVXXPSA

SEQ ID NO: 23911 - protein, 35 aa, Artificial Sequence
  Non-cyclic GFR-binding peptide
  MOD_RES (33)..(34): Xaa is C or S
  MOD_RES (11)..(12)..(13)..(14)..(15): Xaa is A or G
  MOD_RES (16)..(17)..(18)..(19): Xaa is A or G or absent
RVVMNPYVKLXXXXXXXXXFFLVSLSSLQTPAXXP

SEQ ID NO: 23912 - protein, 39 aa, Artificial Sequence
  Non-cyclic GFR-binding peptide
  MOD_RES (1)..(35)..(36): Xaa is C or S
  MOD_RES (13)..(14)..(15)..(16)..(17): Xaa is A or G
  MOD_RES (18)..(19)..(20)..(21): Xaa is A or G or absent
XESVAMGPYVKLXXXXXXXXXFFLISLSSLKTPVXXAKS

SEQ ID NO: 23913 - protein, 39 aa, Artificial Sequence
  Non-cyclic GFR-binding peptide
  MOD_RES (2)..(4)..(38)..(39): Xaa is C or S
  MOD_RES (16)..(17)..(18)..(19)..(20): Xaa is A or G
  MOD_RES (21)..(22)..(23)..(24): Xaa is A or G or absent
HXGXSRVVMNPYVKLXXXXXXXXXFFLVSLSSLKTPAXX

SEQ ID NO: 23914 - protein, 37 aa, Artificial Sequence
  Non-cyclic GFR-binding peptide
  MOD_RES (31)..(32): Xaa is C or S
RVVMNPYVKLIVNSSDDFFLVSLSSLKTPAXXPKPVH

SEQ ID NO: 23915 - protein, 38 aa, Artificial Sequence
  Non-cyclic GFR-binding peptide
  MOD_RES (35)..(35): Xaa is C or S
  MOD_RES (11)..(12)..(13)..(14)..(15): Xaa is A or G
  MOD_RES (16)..(17)..(18)..(19): Xaa is A or G or absent
HEELRPYVKLXXXXXXXXXFFLVSLSSHHVRSPQXKVS

SEQ ID NO: 23916 - protein, 30 aa, Artificial Sequence; identical to SEQ ID NO: 1817
  Non-cyclic GFR-binding peptide

SEQ ID NO: 23917 - protein, 37 aa, Artificial Sequence
  Non-cyclic GFR-binding peptide
  MOD_RES (1)..(3)..(35)..(36): Xaa is C or S
XGXRDVVMGPYVKLIIQQKDNFFLMSLSSMKTPTXXP

SEQ ID NO: 23918 - protein, 37 aa, Artificial Sequence
  Non-cyclic GFR-binding peptide
  MOD_RES (1)..(33)..(34): Xaa is C or S
XAKVVMNPYVKLIVNNSSDFFLVSLSSLKTPAXXAKP

SEQ ID NO: 23919 - protein, 33 aa, Artificial Sequence
  Non-cyclic GFR-binding peptide
  MOD_RES (1)..(3): Xaa is C or S
XKXSKVIMPYVKLIKPTKGIFFLISLSSLDQSV

SEQ ID NO: 23920 - protein, 35 aa, Artificial Sequence
  Non-cyclic GFR-binding peptide
  MOD_RES (2)..(2): Xaa is C or S
EXKNHQLFPYVKLHQGQHPKIRFFLMSLSSEETPV

SEQ ID NO: 23921 - protein, 35 aa, Artificial Sequence
  Non-cyclic GFR-binding peptide
  MOD_RES (2)..(33)..(34): Xaa is C or S
KXSKVIMPYVKLIKPTKGIFFLISLSSLDQSVXXP

SEQ ID NO: 23922 - protein, 36 aa, Artificial Sequence
  Non-cyclic GFR-binding peptide
  MOD_RES (34)..(34): Xaa is C or S
  MOD_RES (12)..(13)..(14)..(15)..(16): Xaa is A or G
  MOD_RES (17)..(18)..(19)..(20): Xaa is A or G or absent
SRVVMNPYVKLXXXXXXXXXFFLVSLSSLKTPAXTP

SEQ ID NO: 23923 - protein, 33 aa, Artificial Sequence
  Non-cyclic GFR-binding peptide
  MOD_RES (2)..(2): Xaa is C or S
GXSEVVMDPYVKLVVNNASDFFLISLSSLRTPV

SEQ ID NO: 23924 - protein, 36 aa, Artificial Sequence
  Non-cyclic GFR-binding peptide
  MOD_RES (31)..(32): Xaa is C or S
EEVIMPYVKLLLVRGNDFFLMSLSSTKVPAXXTSPV

SEQ ID NO: 23925 - protein, 41 aa, Artificial Sequence
  Non-cyclic GFR-binding peptide
  MOD_RES (2)..(4)..(36)..(37): Xaa is C or S
SXGXRDVVMGPYVKLIIQQKDNFFLMSLSSMKTPTXXPGAS

SEQ ID NO: 23926 - protein, 37 aa, Artificial Sequence
  Non-cyclic GFR-binding peptide
  MOD_RES (2)..(2): Xaa is C or S
AXELHEELRPYVKLLKPKKRVYEFFLVSLSSHHVRSP

SEQ ID NO: 23927 - protein, 37 aa, Artificial Sequence
  Non-cyclic GFR-binding peptide
  MOD_RES (33)..(34): Xaa is C or S
  MOD_RES (11)..(12)..(13)..(14)..(15): Xaa is A or G
  MOD_RES (16)..(17)..(18)..(19): Xaa is A or G or absent
SKVVMPYVKLXXXXXXXXXFFLISLSSLDQPVXXPSA

SEQ ID NO: 23928 - protein, 35 aa, Artificial Sequence
  Non-cyclic GFR-binding peptide
  MOD_RES (2)..(34)..(35): Xaa is C or S
GXSRVVMNPYVKLIVNSSDDFFLVSLSSLKTPAXX

SEQ ID NO: 23929 - protein, 38 aa, Artificial Sequence
  Non-cyclic GFR-binding peptide
  MOD_RES (1)..(34)..(35): Xaa is C or S
  MOD_RES (12)..(13)..(14)..(15)..(16): Xaa is A or G
  MOD_RES (17)..(18)..(19)..(20): Xaa is A or G or absent
XEEVIMPYVKLXXXXXXXXXFFLMSLSSTKVPAXXTSP

SEQ ID NO: 23930 - protein, 39 aa, Artificial Sequence
  Non-cyclic GFR-binding peptide
  MOD_RES (33)..(34): Xaa is C or S
  MOD_RES (11)..(12)..(13)..(14)..(15): Xaa is A or G
  MOD_RES (16)..(17)..(18)..(19): Xaa is A or G or absent
EVVMDPYVKLXXXXXXXXXFFLISLSSLRAPVXXSAPAA

SEQ ID NO: 23931 - protein, 38 aa, Artificial Sequence
  Non-cyclic GFR-binding peptide
  MOD_RES (1)..(3)..(35)..(36): Xaa is C or S
XGXSEVVMDPYVKLVVNNASDFFLISLSSLRTPVXXTP

SEQ ID NO: 23932 - protein, 36 aa, Artificial Sequence
  Non-cyclic GFR-binding peptide
  MOD_RES (31)..(32): Xaa is C or S
KVVMNPYVKLIVNNSSDFFLVSLSSLKTPAXXAKPV

SEQ ID NO: 23933 - protein, 33 aa, Artificial Sequence
  Non-cyclic GFR-binding peptide
  MOD_RES (32)..(33): Xaa is C or S
GEVVMEPYVKLVVKDYEDFFLMSLSSLETPVXX

SEQ ID NO: 23934 - protein, 39 aa, Artificial Sequence
  Non-cyclic GFR-binding peptide
  MOD_RES (1)..(34)..(35): Xaa is C or S
XEAVSMGEPYVKLTPVGMDDFFLVSLSSLKTPVXXAKGV

SEQ ID NO: 23935 - protein, 43 aa, Artificial Sequence
  Non-cyclic GFR-binding peptide
  MOD_RES (1)..(3)..(40): Xaa is C or S
XAXELHEELRPYVKLLKPKKRVYEFFLVSLSSHHVRSPQXKVS

SEQ ID NO: 23936 - protein, 37 aa, Artificial Sequence
  Non-cyclic GFR-binding peptide
  MOD_RES (1)..(32)..(33): Xaa is C or S
XEEVIMPYVKLLLVRGNDFFLMSLSSTKVPAXXTSPV

SEQ ID NO: 23937 - protein, 40 aa, Artificial Sequence
  Non-cyclic GFR-binding peptide
  MOD_RES (1)..(35)..(36): Xaa is C or S
  MOD_RES (13)..(14)..(15)..(16)..(17): Xaa is A or G
  MOD_RES (18)..(19)..(20)..(21): Xaa is A or G or absent
XRDVVMGPYVKLXXXXXXXXXFFLMSLSSMKTPTXXPGAS

SEQ ID NO: 23938 - protein, 36 aa, Artificial Sequence
  Non-cyclic GFR-binding peptide
  MOD_RES (34)..(35): Xaa is C or S
  MOD_RES (12)..(13)..(14)..(15)..(16): Xaa is A or G
  MOD_RES (17)..(18)..(19)..(20): Xaa is A or G or absent
RDVVMGPYVKLXXXXXXXXXFFLMSLSSMKTPTXXP

SEQ ID NO: 23939 - protein, 34 aa, Artificial Sequence
  Non-cyclic GFR-binding peptide
  MOD_RES (33)..(34): Xaa is C or S
  MOD_RES (11)..(12)..(13)..(14)..(15): Xaa is A or G
  MOD_RES (16)..(17)..(18)..(19): Xaa is A or G or absent
EEVIMPYVKLXXXXXXXXXFFLMSLSSTKVPAXX

SEQ ID NO: 23940 - protein, 36 aa, Artificial Sequence
  Non-cyclic GFR-binding peptide
  MOD_RES (32)..(33): Xaa is C or S
AEVVMDPYVKLVVNNAADFFLISLSSLRAPVXXSAP

SEQ ID NO: 23941 - protein, 34 aa, Artificial Sequence
  Non-cyclic GFR-binding peptide
  MOD_RES (1)..(3): Xaa is C or S
XGXAKVVMNPYVKLIVNNSSDFFLVSLSSLKTPA

SEQ ID NO: 23942 - protein, 43 aa, Artificial Sequence
  Non-cyclic GFR-binding peptide
  MOD_RES (2)..(4)..(37)..(38): Xaa is C or S
  MOD_RES (15)..(16)..(17)..(18)..(19): Xaa is A or G
  MOD_RES (20)..(21)..(22)..(23): Xaa is A or G or absent
SXKXSRVIMPYVKLXXXXXXXXXFFLISLSSLAQPVXXPAASA

SEQ ID NO: 23943 - protein, 34 aa, Artificial Sequence
  Non-cyclic GFR-binding peptide
  MOD_RES (1)..(3)..(34): Xaa is C or S
XKXSKVVMPYVKLVKPTRGVFFLISLSSLDQPVX

SEQ ID NO: 23944 - protein, 37 aa, Artificial Sequence
  Non-cyclic GFR-binding peptide
  MOD_RES (34)..(35): Xaa is C or S
  MOD_RES (12)..(13)..(14)..(15)..(16): Xaa is A or G
  MOD_RES (17)..(18)..(19)..(20): Xaa is A or G or absent
ARVVMNPYVKLXXXXXXXXXFFLVSLSSLQTPAXXPK

SEQ ID NO: 23945 - protein, 39 aa, Artificial Sequence
  Non-cyclic GFR-binding peptide
  MOD_RES (2)..(4)..(35)..(36): Xaa is C or S
SXKXSKVVMPYVKLVKPTRGVFFLISLSSLDQPVXXPSA

SEQ ID NO: 23946 - protein, 40 aa, Artificial Sequence
  Non-cyclic GFR-binding peptide
  MOD_RES (1)..(35): Xaa is C or S
XKNHQLFPYVKLHQGQHPKIRFFLMSLSSEETPVXELGED

SEQ ID NO: 23947 - protein, 36 aa, Artificial Sequence
  Non-cyclic GFR-binding peptide
  MOD_RES (2)..(34)..(35): Xaa is C or S
GXRDVVMGPYVKLIIQQKDNFFLMSLSSMKTPTXXP

SEQ ID NO: 23948 - protein, 41 aa, Artificial Sequence
  Non-cyclic GFR-binding peptide
  MOD_RES (1)..(3)..(36)..(37): Xaa is C or S
XGXEAVSMGEPYVKLTPVGMDDFFLVSLSSLKTPVXXAKGV

SEQ ID NO: 23949 - protein, 34 aa, Artificial Sequence
  Non-cyclic GFR-binding peptide
  MOD_RES (1)..(3)..(34): Xaa is C or S
XKXSKVIMPYVKLIKPTKGIFFLISLSSLDQSVX

SEQ ID NO: 23950 - protein, 42 aa, Artificial Sequence
  Non-cyclic GFR-binding peptide
  MOD_RES (2)..(36): Xaa is C or S
EXKNHQLFPYVKLHQGQHPKIRFFLMSLSSEETPVXELGEDN

SEQ ID NO: 23951 - protein, 38 aa, Artificial Sequence
  Non-cyclic GFR-binding peptide
  MOD_RES (2)..(35)..(36): Xaa is C or S
  MOD_RES (13)..(14)..(15)..(16)..(17): Xaa is A or G
  MOD_RES (18)..(19)..(20)..(21): Xaa is A or G or absent
KXSKVIMPYVKLXXXXXXXXXFFLISLSSLDQSVXXPS

SEQ ID NO: 23952 - protein, 36 aa, Artificial Sequence
  Non-cyclic GFR-binding peptide
  MOD_RES (33)..(34): Xaa is C or S
  MOD_RES (11)..(12)..(13)..(14)..(15): Xaa is A or G
  MOD_RES (16)..(17)..(18)..(19): Xaa is A or G or absent
DVVMGPYVKLXXXXXXXXXFFLMSLSSMKTPTXXPG

SEQ ID NO: 23953 - protein, 41 aa, Artificial Sequence
  Non-cyclic GFR-binding peptide
  MOD_RES (1)..(35)..(36): Xaa is C or S
  MOD_RES (13)..(14)..(15)..(16)..(17): Xaa is A or G
  MOD_RES (18)..(19)..(20)..(21): Xaa is A or G or absent
XSRVVMNPYVKLXXXXXXXXXFFLVSLSSLKTPAXXPKPVH

SEQ ID NO: 23954 - protein, 41 aa, Artificial Sequence
  Non-cyclic GFR-binding peptide
  MOD_RES (1)..(3)..(37)..(38): Xaa is C or S
  MOD_RES (15)..(16)..(17)..(18)..(19): Xaa is A or G
  MOD_RES (20)..(21)..(22)..(23): Xaa is A or G or absent
XGXESVAMGPYVKLXXXXXXXXXFFLISLSSLKTPVXXAKS

SEQ ID NO: 23955 - protein, 34 aa, Artificial Sequence
  Non-cyclic GFR-binding peptide
  MOD_RES (1)..(3): Xaa is C or S
XGXSEVVMDPYVKLVVNNASDFFLISLSSLRTPV

SEQ ID NO: 23956 - protein, 38 aa, Artificial Sequence
  Non-cyclic GFR-binding peptide
  MOD_RES (2)..(36)..(37): Xaa is C or S
  MOD_RES (14)..(15)..(16)..(17)..(18): Xaa is A or G
  MOD_RES (19)..(20)..(21)..(22): Xaa is A or G or absent
GXSEVVMDPYVKLXXXXXXXXXFFLISLSSLRTPVXXT

SEQ ID NO: 23957 - protein, 39 aa, Artificial Sequence
  Non-cyclic GFR-binding peptide
  MOD_RES (1)..(33)..(34): Xaa is C or S
XESVAMGPYVKLYTVVGKDFFLISLSSLKTPVXXAKSAK

SEQ ID NO: 23958 - protein, 35 aa, Artificial Sequence
  Non-cyclic GFR-binding peptide
  MOD_RES (2)..(34)..(35): Xaa is C or S
GXESVAMGPYVKLYTVVGKDFFLISLSSLKTPVXX

SEQ ID NO: 23959 - protein, 41 aa, Artificial Sequence
  Non-cyclic GFR-binding peptide
  MOD_RES (1)..(35)..(36): Xaa is C or S
  MOD_RES (13)..(14)..(15)..(16)..(17): Xaa is A or G
  MOD_RES (18)..(19)..(20)..(21): Xaa is A or G or absent
XAKVVMNPYVKLXXXXXXXXXFFLVSLSSLKTPAXXAKPVA

SEQ ID NO: 23960 - protein, 39 aa, Artificial Sequence
  Non-cyclic GFR-binding peptide
  MOD_RES (1)..(3)..(37): Xaa is C or S
  MOD_RES (15)..(16)..(17)..(18)..(19): Xaa is A or G
  MOD_RES (20)..(21)..(22)..(23): Xaa is A or G or absent
XGXSRVVMNPYVKLXXXXXXXXXFFLVSLSSLKTPAXTP

SEQ ID NO: 23961 - protein, 35 aa, Artificial Sequence
  Non-cyclic GFR-binding peptide
  MOD_RES (2)..(2): Xaa is C or S
  MOD_RES (14)..(15)..(16)..(17)..(18): Xaa is A or G
  MOD_RES (19)..(20)..(21)..(22): Xaa is A or G or absent
GXESVAMGPYVKLXXXXXXXXXFFLISLSSLKTPV

SEQ ID NO: 23962 - protein, 34 aa, Artificial Sequence
  Non-cyclic GFR-binding peptide
  MOD_RES (1)..(1): Xaa is C or S
  MOD_RES (13)..(14)..(15)..(16)..(17): Xaa is A or G
  MOD_RES (18)..(19)..(20)..(21): Xaa is A or G or absent
XARVVMNPYVKLXXXXXXXXXFFLVSLSSLQTPA

SEQ ID NO: 23963 - protein, 34 aa, Artificial Sequence
  Non-cyclic GFR-binding peptide
  MOD_RES (13)..(14)..(15)..(16)..(17): Xaa is A or G
  MOD_RES (18)..(19)..(20)..(21): Xaa is A or G or absent
EAVSMGEPYVKLXXXXXXXXXFFLVSLSSLKTPV

SEQ ID NO: 23964 - protein, 40 aa, Artificial Sequence
  Non-cyclic GFR-binding peptide
  MOD_RES (1)..(35)..(36): Xaa is C or S
  MOD_RES (13)..(14)..(15)..(16)..(17): Xaa is A or G
  MOD_RES (18)..(19)..(20)..(21): Xaa is A or G or absent
XARVVMNPYVKLXXXXXXXXXFFLVSLSSLQTPAXXPKPV

SEQ ID NO: 23965 - protein, 40 aa, Artificial Sequence
  Non-cyclic GFR-binding peptide
  MOD_RES (2)..(4)..(35)..(36): Xaa is C or S
LXGXEEVIMPYVKLLLVRGNDFFLMSLSSTKVPAXXTSPV

SEQ ID NO: 23966 - protein, 37 aa, Artificial Sequence
  Non-cyclic GFR-binding peptide
  MOD_RES (37)..(37): Xaa is C or S
  MOD_RES (13)..(14)..(15)..(16)..(17): Xaa is A or G
  MOD_RES (18)..(19)..(20)..(21): Xaa is A or G or absent
ELHEELRPYVKLXXXXXXXXXFFLVSLSSHHVRSPQX

SEQ ID NO: 23967 - protein, 38 aa, Artificial Sequence
  Non-cyclic GFR-binding peptide
  MOD_RES (1)..(34)..(35): Xaa is C or S
  MOD_RES (12)..(13)..(14)..(15)..(16): Xaa is A or G
  MOD_RES (17)..(18)..(19)..(20): Xaa is A or G or absent
XSKVVMPYVKLXXXXXXXXXFFLISLSSLDQPVXXPSA

SEQ ID NO: 23968 - protein, 41 aa, Artificial Sequence
  Non-cyclic GFR-binding peptide
  MOD_RES (2)..(35)..(36): Xaa is C or S
  MOD_RES (13)..(14)..(15)..(16)..(17): Xaa is A or G
  MOD_RES (18)..(19)..(20)..(21): Xaa is A or G or absent
GXEEVIMPYVKLXXXXXXXXXFFLMSLSSTKVPAXXTSPVR

SEQ ID NO: 23969 - protein, 36 aa, Artificial Sequence
  Non-cyclic GFR-binding peptide
  MOD_RES (1)..(3): Xaa is C or S
  MOD_RES (15)..(16)..(17)..(18)..(19): Xaa is A or G
  MOD_RES (20)..(21)..(22)..(23): Xaa is A or G or absent
XGXARVVMNPYVKLXXXXXXXXXFFLVSLSSLQTPA

SEQ ID NO: 23970 - protein, 42 aa, Artificial Sequence
  Non-cyclic GFR-binding peptide
  MOD_RES (2)..(4)..(38)..(39): Xaa is C or S
  MOD_RES (16)..(17)..(18)..(19)..(20): Xaa is A or G
  MOD_RES (21)..(22)..(23)..(24): Xaa is A or G or absent
HXGXSRVVMNPYVKLXXXXXXXXXFFLVSLSSLKTPAXXPKP

SEQ ID NO: 23971 - protein, 40 aa, Artificial Sequence
  Non-cyclic GFR-binding peptide
  MOD_RES (2)..(4)..(35)..(36): Xaa is C or S
SXKXSKVIMPYVKLIKPTKGIFFLISLSSLDQSVXXPSAS

SEQ ID NO: 23972 - protein, 38 aa, Artificial Sequence
  Non-cyclic GFR-binding peptide
  MOD_RES (2)..(36): Xaa is C or S
  MOD_RES (14)..(15)..(16)..(17)..(18): Xaa is A or G
  MOD_RES (19)..(20)..(21)..(22): Xaa is A or G or absent
GXSRVVMNPYVKLXXXXXXXXXFFLVSLSSLKTPAXTP

SEQ ID NO: 23973 - protein, 33 aa, Artificial Sequence
  Non-cyclic GFR-binding peptide
  MOD_RES (2)..(2): Xaa is C or S
GXRDVVMGPYVKLIIQQKDNFFLMSLSSMKTPT

SEQ ID NO: 23974 - protein, 36 aa, Artificial Sequence
  Non-cyclic GFR-binding peptide
  MOD_RES (1)..(3)..(34)..(35): Xaa is C or S
XGXEEVIMPYVKLLLVRGNDFFLMSLSSTKVPAXXT

SEQ ID NO: 23975 - protein, 31 aa, Artificial Sequence
  Non-cyclic GFR-binding peptide
AKVVMNPYVKLIVNNSSDFFLVSLSSLKTPA

SEQ ID NO: 23976 - protein, 34 aa, Artificial Sequence
  Non-cyclic GFR-binding peptide
  MOD_RES (2)..(33)..(34): Xaa is C or S
KXSKVVMPYVKLVKPTRGVFFLISLSSLDQPVXX

SEQ ID NO: 23977 - protein, 32 aa, Artificial Sequence
  Non-cyclic GFR-binding peptide
  MOD_RES (31)..(32): Xaa is C or S
EVVMDPYVKLVVNNASDFFLISLSSLRTPVXX

SEQ ID NO: 23978 - protein, 37 aa, Artificial Sequence
  Non-cyclic GFR-binding peptide
  MOD_RES (2)..(35)..(36): Xaa is C or S
GXEAVSMGEPYVKLTPVGMDDFFLVSLSSLKTPVXXA

SEQ ID NO: 23979 - protein, 35 aa, Artificial Sequence
  Non-cyclic GFR-binding peptide
  MOD_RES (13)..(14)..(15)..(16)..(17): Xaa is A or G
  MOD_RES (18)..(19)..(20)..(21): Xaa is A or G or absent
ELHEELRPYVKLXXXXXXXXXFFLVSLSSHHVRSP

SEQ ID NO: 23980 - protein, 42 aa, Artificial Sequence
  Non-cyclic GFR-binding peptide
  MOD_RES (1)..(3)..(37)..(38): Xaa is C or S
  MOD_RES (15)..(16)..(17)..(18)..(19): Xaa is A or G
  MOD_RES (20)..(21)..(22)..(23): Xaa is A or G or absent
XGXSRVVMNPYVKLXXXXXXXXXFFLVSLSSLKTPAXXPKPV

SEQ ID NO: 23981 - protein, 38 aa, Artificial Sequence
  Non-cyclic GFR-binding peptide
  MOD_RES (2)..(4)..(38): Xaa is C or S
  MOD_RES (16)..(17)..(18)..(19)..(20): Xaa is A or G
  MOD_RES (21)..(22)..(23)..(24): Xaa is A or G or absent
RXGXSEVVMDPYVKLXXXXXXXXXFFLISLSSLRTPVX

SEQ ID NO: 23982 - protein, 40 aa, Artificial Sequence
  Non-cyclic GFR-binding peptide
  MOD_RES (1)..(35): Xaa is C or S
  MOD_RES (13)..(14)..(15)..(16)..(17): Xaa is A or G
  MOD_RES (18)..(19)..(20)..(21): Xaa is A or G or absent
XSRVVMNPYVKLXXXXXXXXXFFLVSLSSLKTPAXTPKTV

SEQ ID NO: 23983 - protein, 31 aa, Artificial Sequence
  Non-cyclic GFR-binding peptide
  MOD_RES (31)..(31): Xaa is C or S
EVVMDPYVKLVVNNASDFFLISLSSLRTPVX

SEQ ID NO: 23984 - protein, 38 aa, Artificial Sequence
  Non-cyclic GFR-binding peptide
  MOD_RES (1)..(35)..(36): Xaa is C or S
  MOD_RES (13)..(14)..(15)..(16)..(17): Xaa is A or G
  MOD_RES (18)..(19)..(20)..(21): Xaa is A or G or absent
XRDVVMGPYVKLXXXXXXXXXFFLMSLSSMKTPTXXPG

SEQ ID NO: 23985 - protein, 35 aa, Artificial Sequence
  Non-cyclic GFR-binding peptide
  MOD_RES (31)..(32): Xaa is C or S
SKVVMPYVKLVKPTRGVFFLISLSSLDQPVXXPSA

SEQ ID NO: 23986 - protein, 41 aa, Artificial Sequence
  Non-cyclic GFR-binding peptide
  MOD_RES (2)..(4)..(35)..(36): Xaa is C or S
LXGXEEVIMPYVKLLLVRGNDFFLMSLSSTKVPAXXTSPVR

SEQ ID NO: 23987 - protein, 34 aa, Artificial Sequence
  Non-cyclic GFR-binding peptide
  MOD_RES (34)..(34): Xaa is C or S
KNHQLFPYVKLHQGQHPKIRFFLMSLSSEETPVX

SEQ ID NO: 23988 - protein, 36 aa, Artificial Sequence
  Non-cyclic GFR-binding peptide
  MOD_RES (2)..(34)..(35): Xaa is C or S
GXESVAMGPYVKLYTVVGKDFFLISLSSLKTPVXXA

SEQ ID NO: 23989 - protein, 39 aa, Artificial Sequence
  Non-cyclic GFR-binding peptide
  MOD_RES (1)..(3)..(35)..(36): Xaa is C or S
XGXAEVVMDPYVKLVVNNAADFFLISLSSLRAPVXXSAP

SEQ ID NO: 23990 - protein, 41 aa, Artificial Sequence
  Non-cyclic GFR-binding peptide
  MOD_RES (2)..(4)..(38): Xaa is C or S
  MOD_RES (16)..(17)..(18)..(19)..(20): Xaa is A or G
  MOD_RES (21)..(22)..(23)..(24): Xaa is A or G or absent
RXEXKNHQLFPYVKLXXXXXXXXXFFLMSLSSEETPVXELG

SEQ ID NO: 23991 - protein, 37 aa, Artificial Sequence
  Non-cyclic GFR-binding peptide
  MOD_RES (1)..(33)..(34): Xaa is C or S
XSRVVMNPYVKLIVNSSDDFFLVSLSSLKTPAXXPKP

SEQ ID NO: 23992 - protein, 39 aa, Artificial Sequence
  Non-cyclic GFR-binding peptide
  MOD_RES (2)..(4)..(38)..(39): Xaa is C or S
  MOD_RES (16)..(17)..(18)..(19)..(20): Xaa is A or G
  MOD_RES (21)..(22)..(23)..(24): Xaa is A or G or absent
HXGXAKVVMNPYVKLXXXXXXXXXFFLVSLSSLKTPAXX

SEQ ID NO: 23993 - protein, 37 aa, Artificial Sequence
  Non-cyclic GFR-binding peptide
  MOD_RES (2)..(4): Xaa is C or S
  MOD_RES (16)..(17)..(18)..(19)..(20): Xaa is A or G
  MOD_RES (21)..(22)..(23)..(24): Xaa is A or G or absent
HXGXARVVMNPYVKLXXXXXXXXXFFLVSLSSLQTPA

SEQ ID NO: 23994 - protein, 42 aa, Artificial Sequence
  Non-cyclic GFR-binding peptide
  MOD_RES (1)..(3)..(37): Xaa is C or S
  MOD_RES (15)..(16)..(17)..(18)..(19): Xaa is A or G
  MOD_RES (20)..(21)..(22)..(23): Xaa is A or G or absent
XEXKNHQLFPYVKLXXXXXXXXXFFLMSLSSEETPVXELGED

SEQ ID NO: 23995 - protein, 42 aa, Artificial Sequence
  Non-cyclic GFR-binding peptide
  MOD_RES (2)..(4)..(41): Xaa is C or S
  MOD_RES (17)..(18)..(19)..(20)..(21): Xaa is A or G
  MOD_RES (22)..(23)..(24)..(25): Xaa is A or G or absent
AXAXELHEELRPYVKLXXXXXXXXXFFLVSLSSHHVRSPQXK

SEQ ID NO: 23996 - protein, 39 aa, Artificial Sequence
  Non-cyclic GFR-binding peptide
  MOD_RES (2)..(34)..(35): Xaa is C or S
GXARVVMNPYVKLIVNSSDDFFLVSLSSLQTPAXXPKPV

SEQ ID NO: 23997 - protein, 38 aa, Artificial Sequence
  Non-cyclic GFR-binding peptide
  MOD_RES (1)..(35)..(36): Xaa is C or S
  MOD_RES (13)..(14)..(15)..(16)..(17): Xaa is A or G
  MOD_RES (18)..(19)..(20)..(21): Xaa is A or G or absent
XESVAMGPYVKLXXXXXXXXXFFLISLSSLKTPVXXAK

SEQ ID NO: 23998 - protein, 32 aa, Artificial Sequence
  Non-cyclic GFR-binding peptide
  MOD_RES (31)..(31): Xaa is C or S
RVVMNPYVKLIVNSSDDFFLVSLSSLKTPAXT

SEQ ID NO: 23999 - protein, 32 aa, Artificial Sequence
  Non-cyclic GFR-binding peptide
  MOD_RES (32)..(32): Xaa is C or S
SRVVMNPYVKLIVNSSDDFFLVSLSSLKTPAX

SEQ ID NO: 24000 - protein, 39 aa, Artificial Sequence
  Non-cyclic GFR-binding peptide
  MOD_RES (33)..(33): Xaa is C or S
NHQLFPYVKLHQGQHPKIRFFLMSLSSEETPVXELGEDN

SEQ ID NO: 24001 - protein, 42 aa, Artificial Sequence
  Non-cyclic GFR-binding peptide
  MOD_RES (2)..(39): Xaa is C or S
AXELHEELRPYVKLLKPKKRVYEFFLVSLSSHHVRSPQXKVS

SEQ ID NO: 24002 - protein, 38 aa, Artificial Sequence
  Non-cyclic GFR-binding peptide
  MOD_RES (2)..(4)..(36)..(37): Xaa is C or S
HXGXARVVMNPYVKLIVNSSDDFFLVSLSSLQTPAXXP

SEQ ID NO: 24003 - protein, 38 aa, Artificial Sequence
  Non-cyclic GFR-binding peptide
  MOD_RES (1)..(3)..(35)..(36): Xaa is C or S
XGXAEVVMDPYVKLVVNNAADFFLISLSSLRAPVXXSA

SEQ ID NO: 24004 - protein, 42 aa, Artificial Sequence
  Non-cyclic GFR-binding peptide
  MOD_RES (1)..(38): Xaa is C or S
XELHEELRPYVKLLKPKKRVYEFFLVSLSSHHVRSPQXKVSS

SEQ ID NO: 24005 - protein, 36 aa, Artificial Sequence
  Non-cyclic GFR-binding peptide
  MOD_RES (33)..(33): Xaa is C or S
  MOD_RES (11)..(12)..(13)..(14)..(15): Xaa is A or G
  MOD_RES (16)..(17)..(18)..(19): Xaa is A or G or absent
NHQLFPYVKLXXXXXXXXXFFLMSLSSEETPVXELG

SEQ ID NO: 24006 - protein, 40 aa, Artificial Sequence
  Non-cyclic GFR-binding peptide
  MOD_RES (2)..(34)..(35): Xaa is C or S
GXSRVVMNPYVKLIVNSSDDFFLVSLSSLKTPAXXPKPVY

SEQ ID NO: 24007 - protein, 37 aa, Artificial Sequence
  Non-cyclic GFR-binding peptide
  MOD_RES (1)..(33)..(34): Xaa is C or S
XAEVVMDPYVKLVVNNAADFFLISLSSLRAPVXXSAP

SEQ ID NO: 24008 - protein, 35 aa, Artificial Sequence
  Non-cyclic GFR-binding peptide
  MOD_RES (2)..(4)..(35): Xaa is C or S
LXGXEEVIMPYVKLLLVRGNDFFLMSLSSTKVPAX

SEQ ID NO: 24009 - protein, 39 aa, Artificial Sequence
  Non-cyclic GFR-binding peptide
  MOD_RES (2)..(4)..(37)..(38): Xaa is C or S
  MOD_RES (15)..(16)..(17)..(18)..(19): Xaa is A or G
  MOD_RES (20)..(21)..(22)..(23): Xaa is A or G or absent
SXKXSRVIMPYVKLXXXXXXXXXFFLISLSSLAQPVXXP

SEQ ID NO: 24010 - protein, 36 aa, Artificial Sequence
  Non-cyclic GFR-binding peptide
  MOD_RES (34)..(35): Xaa is C or S
  MOD_RES (12)..(13)..(14)..(15)..(16): Xaa is A or G
  MOD_RES (17)..(18)..(19)..(20): Xaa is A or G or absent
ESVAMGPYVKLXXXXXXXXXFFLISLSSLKTPVXXA

SEQ ID NO: 24011 - protein, 35 aa, Artificial Sequence
  Non-cyclic GFR-binding peptide
  MOD_RES (35)..(35): Xaa is C or S
HEELRPYVKLLKPKKRVYEFFLVSLSSHHVRSPQX

SEQ ID NO: 24012 - protein, 40 aa, Artificial Sequence
  Non-cyclic GFR-binding peptide
  MOD_RES (1)..(3)..(37)..(38): Xaa is C or S
  MOD_RES (15)..(16)..(17)..(18)..(19): Xaa is A or G
  MOD_RES (20)..(21)..(22)..(23): Xaa is A or G or absent
XGXAKVVMNPYVKLXXXXXXXXXFFLVSLSSLKTPAXXAK

SEQ ID NO: 24013 - protein, 32 aa, Artificial Sequence
  Non-cyclic GFR-binding peptide
  MOD_RES (31)..(32): Xaa is C or S
RVVMNPYVKLIVNSSDDFFLVSLSSLKTPAXX

SEQ ID NO: 24014 - protein, 37 aa, Artificial Sequence
  Non-cyclic GFR-binding peptide
  MOD_RES (31)..(32): Xaa is C or S
SKVVMPYVKLVKPTRGVFFLISLSSLDQPVXXPSASA

SEQ ID NO: 24015 - protein, 37 aa, Artificial Sequence
  Non-cyclic GFR-binding peptide
  MOD_RES (2)..(4)..(37): Xaa is C or S
  MOD_RES (15)..(16)..(17)..(18)..(19): Xaa is A or G
  MOD_RES (20)..(21)..(22)..(23): Xaa is A or G or absent
SXKXSRVIMPYVKLXXXXXXXXXFFLISLSSLAQPVX

SEQ ID NO: 24016 - protein, 38 aa, Artificial Sequence
  Non-cyclic GFR-binding peptide
  MOD_RES (32)..(33): Xaa is C or S
AKVVMNPYVKLIVNNSSDFFLVSLSSLKTPAXXAKPVA

SEQ ID NO: 24017 - protein, 37 aa, Artificial Sequence
  Non-cyclic GFR-binding peptide
  MOD_RES (33)..(34): Xaa is C or S
  MOD_RES (11)..(12)..(13)..(14)..(15): Xaa is A or G
  MOD_RES (16)..(17)..(18)..(19): Xaa is A or G or absent
SKVIMPYVKLXXXXXXXXXFFLISLSSLDQSVXXPSA

SEQ ID NO: 24018 - protein, 34 aa, Artificial Sequence
  Non-cyclic GFR-binding peptide
  MOD_RES (31)..(32): Xaa is C or S
EVVMDPYVKLVVNNAADFFLISLSSLRAPVXXSA

SEQ ID NO: 24019 - protein, 37 aa, Artificial Sequence
  Non-cyclic GFR-binding peptide
  MOD_RES (2)..(36)..(37): Xaa is C or S
  MOD_RES (14)..(15)..(16)..(17)..(18): Xaa is A or G
  MOD_RES (19)..(20)..(21)..(22): Xaa is A or G or absent
GXESVAMGPYVKLXXXXXXXXXFFLISLSSLKTPVXX

SEQ ID NO: 24020 - protein, 35 aa, Artificial Sequence
  Non-cyclic GFR-binding peptide
  MOD_RES (33)..(34): Xaa is C or S
  MOD_RES (11)..(12)..(13)..(14)..(15): Xaa is A or G
  MOD_RES (16)..(17)..(18)..(19): Xaa is A or G or absent
SKVIMPYVKLXXXXXXXXXFFLISLSSLDQSVXXP

SEQ ID NO: 24021 - protein, 39 aa, Artificial Sequence
  Non-cyclic GFR-binding peptide
  MOD_RES (1)..(3)..(35)..(36): Xaa is C or S
XGXAKVVMNPYVKLIVNNSSDFFLVSLSSLKTPAXXAKP

SEQ ID NO: 24022 - protein, 34 aa, Artificial Sequence
  Non-cyclic GFR-binding peptide
  MOD_RES (32)..(33): Xaa is C or S
AKVVMNPYVKLIVNNSSDFFLVSLSSLKTPAXXA

SEQ ID NO: 24023 - protein, 33 aa, Artificial Sequence
  Non-cyclic GFR-binding peptide
  MOD_RES (33)..(33): Xaa is C or S
  MOD_RES (11)..(12)..(13)..(14)..(15): Xaa is A or G
  MOD_RES (16)..(17)..(18)..(19): Xaa is A or G or absent
EVVMDPYVKLXXXXXXXXXFFLISLSSLRTPVX

SEQ ID NO: 24024 - protein, 37 aa, Artificial Sequence
  Non-cyclic GFR-binding peptide
  MOD_RES (1)..(3)..(37): Xaa is C or S
XEXKNHQLFPYVKLHQGQHPKIRFFLMSLSSEETPVX

SEQ ID NO: 24025 - protein, 39 aa, Artificial Sequence
  Non-cyclic GFR-binding peptide
  MOD_RES (2)..(4)..(36)..(37): Xaa is C or S
SXGXRDVVMGPYVKLIIQQKDNFFLMSLSSMKTPTXXPG

SEQ ID NO: 24026 - protein, 38 aa, Artificial Sequence
  Non-cyclic GFR-binding peptide
  MOD_RES (1)..(3)..(38): Xaa is C or S
  MOD_RES (16)..(17)..(18)..(19)..(20): Xaa is A or G
  MOD_RES (21)..(22)..(23)..(24): Xaa is A or G or absent
XGXEAVSMGEPYVKLXXXXXXXXXFFLVSLSSLKTPVX

SEQ ID NO: 24027 - protein, 37 aa, Artificial Sequence
  Non-cyclic GFR-binding peptide
  MOD_RES (31)..(32): Xaa is C or S
EVVMDPYVKLVVNNASDFFLISLSSLRTPVXXTPPTS

SEQ ID NO: 24028 - protein, 39 aa, Artificial Sequence
  Non-cyclic GFR-binding peptide
  MOD_RES (33)..(34): Xaa is C or S
  MOD_RES (11)..(12)..(13)..(14)..(15): Xaa is A or G
  MOD_RES (16)..(17)..(18)..(19): Xaa is A or G or absent
EEVIMPYVKLXXXXXXXXXFFLMSLSSTKVPAXXTSPVR

SEQ ID NO: 24029 - protein, 35 aa, Artificial Sequence
  Non-cyclic GFR-binding peptide
  MOD_RES (2)..(33)..(34): Xaa is C or S
KXSRVIMPYVKLVKPKRGVFFLISLSSLAQPVXXP

SEQ ID NO: 24030 - protein, 33 aa, Artificial Sequence
  Non-cyclic GFR-binding peptide
  MOD_RES (31)..(31): Xaa is C or S
RVVMNPYVKLIVNSSDDFFLVSLSSLKTPAXTP

SEQ ID NO: 24031 - protein, 42 aa, Artificial Sequence
  Non-cyclic GFR-binding peptide
  MOD_RES (2)..(36)..(37): Xaa is C or S
  MOD_RES (14)..(15)..(16)..(17)..(18): Xaa is A or G
  MOD_RES (19)..(20)..(21)..(22): Xaa is A or G or absent
GXRDVVMGPYVKLXXXXXXXXXFFLMSLSSMKTPTXXPGASG

SEQ ID NO: 24032 - protein, 40 aa, Artificial Sequence
  Non-cyclic GFR-binding peptide
  MOD_RES (1)..(3)..(35)..(36): Xaa is C or S
XGXARVVMNPYVKLIVNSSDDFFLVSLSSLQTPAXXPKPV

SEQ ID NO: 24033 - protein, 36 aa, Artificial Sequence
  Non-cyclic GFR-binding peptide
  MOD_RES (35)..(36): Xaa is C or S
  MOD_RES (13)..(14)..(15)..(16)..(17): Xaa is A or G
  MOD_RES (18)..(19)..(20)..(21): Xaa is A or G or absent
EAVSMGEPYVKLXXXXXXXXXFFLVSLSSLKTPVXX

SEQ ID NO: 24034 - protein, 37 aa, Artificial Sequence
  Non-cyclic GFR-binding peptide
  MOD_RES (2)..(4)..(37): Xaa is C or S
RXGXEAVSMGEPYVKLTPVGMDDFFLVSLSSLKTPVX

SEQ ID NO: 24035 - protein, 39 aa, Artificial Sequence
  Non-cyclic GFR-binding peptide
  MOD_RES (2)..(4)..(36)..(37): Xaa is C or S
HXGXARVVMNPYVKLIVNSSDDFFLVSLSSLQTPAXXPK

SEQ ID NO: 24036 - protein, 33 aa, Artificial Sequence
  Non-cyclic GFR-binding peptide
  MOD_RES (31)..(32): Xaa is C or S
EVVMEPYVKLVVKDYEDFFLMSLSSLETPVXXA

SEQ ID NO: 24037 - protein, 39 aa, Artificial Sequence
  Non-cyclic GFR-binding peptide
  MOD_RES (34)..(35): Xaa is C or S
  MOD_RES (12)..(13)..(14)..(15)..(16): Xaa is A or G
  MOD_RES (17)..(18)..(19)..(20): Xaa is A or G or absent
ARVVMNPYVKLXXXXXXXXXFFLVSLSSLQTPAXXPKPV

SEQ ID NO: 24038 - protein, 35 aa, Artificial Sequence
  Non-cyclic GFR-binding peptide
  MOD_RES (1)..(33): Xaa is C or S
XSRVVMNPYVKLIVNSSDDFFLVSLSSLKTPAXTP

SEQ ID NO: 24039 - protein, 34 aa, Artificial Sequence
  Non-cyclic GFR-binding peptide
HEELRPYVKLLKPKKRVYEFFLVSLSSHHVRSPQ

SEQ ID NO: 24040 - protein, 33 aa, Artificial Sequence
  Non-cyclic GFR-binding peptide
  MOD_RES (12)..(13)..(14)..(15)..(16): Xaa is A or G
  MOD_RES (17)..(18)..(19)..(20): Xaa is A or G or absent
ARVVMNPYVKLXXXXXXXXXFFLVSLSSLQTPA

SEQ ID NO: 24041 - protein, 41 aa, Artificial Sequence
  Non-cyclic GFR-binding peptide
  MOD_RES (1)..(36)..(37): Xaa is C or S
  MOD_RES (14)..(15)..(16)..(17)..(18): Xaa is A or G
  MOD_RES (19)..(20)..(21)..(22): Xaa is A or G or absent
XEAVSMGEPYVKLXXXXXXXXXFFLVSLSSLKTPVXXAKGV

SEQ ID NO: 24042 - protein, 41 aa, Artificial Sequence
  Non-cyclic GFR-binding peptide
  MOD_RES (1)..(3)..(37)..(38): Xaa is C or S
  MOD_RES (15)..(16)..(17)..(18)..(19): Xaa is A or G
  MOD_RES (20)..(21)..(22)..(23): Xaa is A or G or absent
XGXSEVVMDPYVKLXXXXXXXXXFFLISLSSLRTPVXXTPP

SEQ ID NO: 24043 - protein, 34 aa, Artificial Sequence
  Non-cyclic GFR-binding peptide
  MOD_RES (1)..(33)..(34): Xaa is C or S
XSEVVMDPYVKLVVNNASDFFLISLSSLRTPVXX

SEQ ID NO: 24044 - protein, 37 aa, Artificial Sequence
  Non-cyclic GFR-binding peptide
  MOD_RES (1)..(3): Xaa is C or S
  MOD_RES (16)..(17)..(18)..(19)..(20): Xaa is A or G
  MOD_RES (21)..(22)..(23)..(24): Xaa is A or G or absent
XAXELHEELRPYVKLXXXXXXXXXFFLVSLSSHHVRS

SEQ ID NO: 24045 - protein, 35 aa, Artificial Sequence
  Non-cyclic GFR-binding peptide
  MOD_RES (2)..(4): Xaa is C or S
HXGXAKVVMNPYVKLIVNNSSDFFLVSLSSLKTPA

SEQ ID NO: 24046 - protein, 33 aa, Artificial Sequence
  Non-cyclic GFR-binding peptide
  MOD_RES (12)..(13)..(14)..(15)..(16): Xaa is A or G
  MOD_RES (17)..(18)..(19)..(20): Xaa is A or G or absent
AEVVMDPYVKLXXXXXXXXXFFLISLSSLRAPV

SEQ ID NO: 24047 - protein, 40 aa, Artificial Sequence
  Non-cyclic GFR-binding peptide
  MOD_RES (1)..(35)..(36): Xaa is C or S
  MOD_RES (13)..(14)..(15)..(16)..(17): Xaa is A or G
  MOD_RES (18)..(19)..(20)..(21): Xaa is A or G or absent
XSEVVMDPYVKLXXXXXXXXXFFLISLSSLRTPVXXTPPT

SEQ ID NO: 24048 - protein, 34 aa, Artificial Sequence
  Non-cyclic GFR-binding peptide
  MOD_RES (1)..(33)..(34): Xaa is C or S
XAKVVMNPYVKLIVNNSSDFFLVSLSSLKTPAXX

SEQ ID NO: 24049 - protein, 33 aa, Artificial Sequence
  Non-cyclic GFR-binding peptide
  MOD_RES (1)..(3): Xaa is C or S
XGXEEVIMPYVKLLLVRGNDFFLMSLSSTKVPA

SEQ ID NO: 24050 - protein, 33 aa, Artificial Sequence
  Non-cyclic GFR-binding peptide
  MOD_RES (31)..(32): Xaa is C or S
RVVMNPYVKLIVNSSDDFFLVSLSSLKTPAXXP

SEQ ID NO: 24051 - protein, 42 aa, Artificial Sequence
  Non-cyclic GFR-binding peptide
  MOD_RES (1)..(3)..(37): Xaa is C or S
  MOD_RES (15)..(16)..(17)..(18)..(19): Xaa is A or G
  MOD_RES (20)..(21)..(22)..(23): Xaa is A or G or absent
XGXSRVVMNPYVKLXXXXXXXXXFFLVSLSSLKTPAXTPKTV

SEQ ID NO: 24052 - protein, 39 aa, Artificial Sequence
  Non-cyclic GFR-binding peptide
  MOD_RES (35)..(35): Xaa is C or S
HEELRPYVKLLKPKKRVYEFFLVSLSSHHVRSPQXKVSS

SEQ ID NO: 24053 - protein, 33 aa, Artificial Sequence
  Non-cyclic GFR-binding peptide
  MOD_RES (31)..(32): Xaa is C or S
EEVIMPYVKLLLVRGNDFFLMSLSSTKVPAXXT

SEQ ID NO: 24054 - protein, 37 aa, Artificial Sequence
  Non-cyclic GFR-binding peptide
  MOD_RES (33)..(34): Xaa is C or S
EAVSMGEPYVKLTPVGMDDFFLVSLSSLKTPVXXAKG

SEQ ID NO: 24055 - protein, 33 aa, Artificial Sequence
  Non-cyclic GFR-binding peptide
  MOD_RES (32)..(33): Xaa is C or S
ESVAMGPYVKLYTVVGKDFFLISLSSLKTPVXX

SEQ ID NO: 24056 - protein, 41 aa, Artificial Sequence
  Non-cyclic GFR-binding peptide
  MOD_RES (2)..(36)..(37): Xaa is C or S
  MOD_RES (14)..(15)..(16)..(17)..(18): Xaa is A or G
  MOD_RES (19)..(20)..(21)..(22): Xaa is A or G or absent
GXRDVVMGPYVKLXXXXXXXXXFFLMSLSSMKTPTXXPGAS

SEQ ID NO: 24057 - protein, 36 aa, Artificial Sequence
  Non-cyclic GFR-binding peptide
  MOD_RES (33)..(34): Xaa is C or S
  MOD_RES (11)..(12)..(13)..(14)..(15): Xaa is A or G
  MOD_RES (16)..(17)..(18)..(19): Xaa is A or G or absent
SKVVMPYVKLXXXXXXXXXFFLISLSSLDQPVXXPS

SEQ ID NO: 24058 - protein, 37 aa, Artificial Sequence
  Non-cyclic GFR-binding peptide
  MOD_RES (1)..(3)..(34)..(35): Xaa is C or S
XGXEEVIMPYVKLLLVRGNDFFLMSLSSTKVPAXXTS

SEQ ID NO: 24059 - protein, 35 aa, Artificial Sequence
  Non-cyclic GFR-binding peptide
  MOD_RES (1)..(1): Xaa is C or S
  MOD_RES (14)..(15)..(16)..(17)..(18): Xaa is A or G
  MOD_RES (19)..(20)..(21)..(22): Xaa is A or G or absent
XEAVSMGEPYVKLXXXXXXXXXFFLVSLSSLKTPV

SEQ ID NO: 24060 - protein, 37 aa, Artificial Sequence
  Non-cyclic GFR-binding peptide
  MOD_RES (31)..(32): Xaa is C or S
KVVMNPYVKLIVNNSSDFFLVSLSSLKTPAXXAKPVA

SEQ ID NO: 24061 - protein, 38 aa, Artificial Sequence
  Non-cyclic GFR-binding peptide
  MOD_RES (1)..(34)..(35): Xaa is C or S
  MOD_RES (12)..(13)..(14)..(15)..(16): Xaa is A or G
  MOD_RES (17)..(18)..(19)..(20): Xaa is A or G or absent
XSRVIMPYVKLXXXXXXXXXFFLISLSSLAQPVXXPAA

SEQ ID NO: 24062 - protein, 41 aa, Artificial Sequence
  Non-cyclic GFR-binding peptide
  MOD_RES (1)..(35): Xaa is C or S
  MOD_RES (13)..(14)..(15)..(16)..(17): Xaa is A or G
  MOD_RES (18)..(19)..(20)..(21): Xaa is A or G or absent
XKNHQLFPYVKLXXXXXXXXXFFLMSLSSEETPVXELGEDN

SEQ ID NO: 24063 - protein, 38 aa, Artificial Sequence
  Non-cyclic GFR-binding peptide
  MOD_RES (2)..(4)..(36): Xaa is C or S
HXGXSRVVMNPYVKLIVNSSDDFFLVSLSSLKTPAXTP

SEQ ID NO: 24064 - protein, 37 aa, Artificial Sequence
  Non-cyclic GFR-binding peptide
  MOD_RES (2)..(4)..(35)..(36): Xaa is C or S
SXKXSKVVMPYVKLVKPTRGVFFLISLSSLDQPVXXP

SEQ ID NO: 24065 - protein, 30 aa, Artificial Sequence
  Non-cyclic GFR-binding peptide
DVVMGPYVKLIIQQKDNFFLMSLSSMKTPT

SEQ ID NO: 24066 - protein, 37 aa, Artificial Sequence
  Non-cyclic GFR-binding peptide
  MOD_RES (31)..(32): Xaa is C or S
EVVMEPYVKLVVKDYEDFFLMSLSSLETPVXXAKPIS

SEQ ID NO: 24067 - protein, 36 aa, Artificial Sequence
  Non-cyclic GFR-binding peptide
  MOD_RES (2)..(4)..(36): Xaa is C or S
RXGXAEVVMDPYVKLVVNNAADFFLISLSSLRAPVX

SEQ ID NO: 24068 - protein, 36 aa, Artificial Sequence
  Non-cyclic GFR-binding peptide
  MOD_RES (32)..(33): Xaa is C or S
RDVVMGPYVKLIIQQKDNFFLMSLSSMKTPTXXPGA

SEQ ID NO: 24069 - protein, 39 aa, Artificial Sequence
  Non-cyclic GFR-binding peptide
  MOD_RES (2)..(4)..(37)..(38): Xaa is C or S
  MOD_RES (15)..(16)..(17)..(18)..(19): Xaa is A or G
  MOD_RES (20)..(21)..(22)..(23): Xaa is A or G or absent
LXGXEEVIMPYVKLXXXXXXXXXFFLMSLSSTKVPAXXT

SEQ ID NO: 24070 - protein, 37 aa, Artificial Sequence
  Non-cyclic GFR-binding peptide
  MOD_RES (2)..(37): Xaa is C or S
  MOD_RES (15)..(16)..(17)..(18)..(19): Xaa is A or G
  MOD_RES (20)..(21)..(22)..(23): Xaa is A or G or absent
GXEAVSMGEPYVKLXXXXXXXXXFFLVSLSSLKTPVX

SEQ ID NO: 24071 - protein, 32 aa, Artificial Sequence
  Non-cyclic GFR-binding peptide
  MOD_RES (32)..(32): Xaa is C or S
ESVAMGPYVKLYTVVGKDFFLISLSSLKTPVX

SEQ ID NO: 24072 - protein, 38 aa, Artificial Sequence
  Non-cyclic GFR-binding peptide
  MOD_RES (2)..(4)..(35)..(36): Xaa is C or S
SXKXSKVIMPYVKLIKPTKGIFFLISLSSLDQSVXXPS

SEQ ID NO: 24073 - protein, 36 aa, Artificial Sequence
  Non-cyclic GFR-binding peptide
  MOD_RES (2)..(2): Xaa is C or S
  MOD_RES (15)..(16)..(17)..(18)..(19): Xaa is A or G
  MOD_RES (20)..(21)..(22)..(23): Xaa is A or G or absent
GXEAVSMGEPYVKLXXXXXXXXXFFLVSLSSLKTPV

SEQ ID NO: 24074 - protein, 43 aa, Artificial Sequence
  Non-cyclic GFR-binding peptide
  MOD_RES (2)..(4)..(38)..(39): Xaa is C or S
  MOD_RES (16)..(17)..(18)..(19)..(20): Xaa is A or G
  MOD_RES (21)..(22)..(23)..(24): Xaa is A or G or absent
HXGXSRVVMNPYVKLXXXXXXXXXFFLVSLSSLKTPAXXPKPV

SEQ ID NO: 24075 - protein, 36 aa, Artificial Sequence
  Non-cyclic GFR-binding peptide
  MOD_RES (34)..(35): Xaa is C or S
  MOD_RES (12)..(13)..(14)..(15)..(16): Xaa is A or G
  MOD_RES (17)..(18)..(19)..(20): Xaa is A or G or absent
SEVVMDPYVKLXXXXXXXXXFFLISLSSLRTPVXXT

SEQ ID NO: 24076 - protein, 35 aa, Artificial Sequence
  Non-cyclic GFR-binding peptide
  MOD_RES (1)..(3): Xaa is C or S
  MOD_RES (14)..(15)..(16)..(17)..(18): Xaa is A or G
  MOD_RES (19)..(20)..(21)..(22): Xaa is A or G or absent
XGXEEVIMPYVKLXXXXXXXXXFFLMSLSSTKVPA

SEQ ID NO: 24077 - protein, 35 aa, Artificial Sequence
  Non-cyclic GFR-binding peptide
  MOD_RES (2)..(2): Xaa is C or S
  MOD_RES (14)..(15)..(16)..(17)..(18): Xaa is A or G
  MOD_RES (19)..(20)..(21)..(22): Xaa is A or G or absent
GXARVVMNPYVKLXXXXXXXXXFFLVSLSSLQTPA

SEQ ID NO: 24078 - protein, 33 aa, Artificial Sequence
  Non-cyclic GFR-binding peptide
  MOD_RES (1)..(1): Xaa is C or S
  MOD_RES (12)..(13)..(14)..(15)..(16): Xaa is A or G
  MOD_RES (17)..(18)..(19)..(20): Xaa is A or G or absent
XSRVIMPYVKLXXXXXXXXXFFLISLSSLAQPV

SEQ ID NO: 24079 - protein, 36 aa, Artificial Sequence
  Non-cyclic GFR-binding peptide
  MOD_RES (1)..(3)..(35)..(36): Xaa is C or S
XGXSRVVMNPYVKLIVNSSDDFFLVSLSSLKTPAXX

SEQ ID NO: 24080 - protein, 44 aa, Artificial Sequence
  Non-cyclic GFR-binding peptide
  MOD_RES (1)..(3)..(40): Xaa is C or S
XAXELHEELRPYVKLLKPKKRVYEFFLVSLSSHHVRSPQXKVSS

SEQ ID NO: 24081 - protein, 38 aa, Artificial Sequence
  Non-cyclic GFR-binding peptide
  MOD_RES (2)..(33)..(34): Xaa is C or S
GXEEVIMPYVKLLLVRGNDFFLMSLSSTKVPAXXTSPV

SEQ ID NO: 24082 - protein, 34 aa, Artificial Sequence
  Non-cyclic GFR-binding peptide
  MOD_RES (1)..(33)..(34): Xaa is C or S
XSRVVMNPYVKLIVNSSDDFFLVSLSSLKTPAXX

SEQ ID NO: 24083 - protein, 41 aa, Artificial Sequence
  Non-cyclic GFR-binding peptide
  MOD_RES (2)..(4)..(38)..(39): Xaa is C or S
  MOD_RES (16)..(17)..(18)..(19)..(20): Xaa is A or G
  MOD_RES (21)..(22)..(23)..(24): Xaa is A or G or absent
RXGXGEVVMEPYVKLXXXXXXXXXFFLMSLSSLETPVXXAK

SEQ ID NO: 24084 - protein, 39 aa, Artificial Sequence
  Non-cyclic GFR-binding peptide
  MOD_RES (1)..(35): Xaa is C or S
XKNHQLFPYVKLHQGQHPKIRFFLMSLSSEETPVXELGE

SEQ ID NO: 24085 - protein, 31 aa, Artificial Sequence
  Non-cyclic GFR-binding peptide
  MOD_RES (31)..(31): Xaa is C or S
EVVMEPYVKLVVKDYEDFFLMSLSSLETPVX

SEQ ID NO: 24086 - protein, 38 aa, Artificial Sequence
  Non-cyclic GFR-binding peptide
  MOD_RES (1)..(35): Xaa is C or S
XKNHQLFPYVKLHQGQHPKIRFFLMSLSSEETPVXELG

SEQ ID NO: 24087 - protein, 34 aa, Artificial Sequence
  Non-cyclic GFR-binding peptide
  MOD_RES (2)..(34): Xaa is C or S
GXESVAMGPYVKLYTVVGKDFFLISLSSLKTPVX

SEQ ID NO: 24088 - protein, 40 aa, Artificial Sequence
  Non-cyclic GFR-binding peptide
  MOD_RES (1)..(3)..(38)..(39): Xaa is C or S
  MOD_RES (16)..(17)..(18)..(19)..(20): Xaa is A or G
  MOD_RES (21)..(22)..(23)..(24): Xaa is A or G or absent
XGXEAVSMGEPYVKLXXXXXXXXXFFLVSLSSLKTPVXXA

SEQ ID NO: 24089 - protein, 41 aa, Artificial Sequence
  Non-cyclic GFR-binding peptide
  MOD_RES (37)..(37): Xaa is C or S
  MOD_RES (13)..(14)..(15)..(16)..(17): Xaa is A or G
  MOD_RES (18)..(19)..(20)..(21): Xaa is A or G or absent
ELHEELRPYVKLXXXXXXXXXFFLVSLSSHHVRSPQXKVSS

SEQ ID NO: 24090 - protein, 39 aa, Artificial Sequence
  Non-cyclic GFR-binding peptide
  MOD_RES (2)..(36)..(37): Xaa is C or S
  MOD_RES (14)..(15)..(16)..(17)..(18): Xaa is A or G
  MOD_RES (19)..(20)..(21)..(22): Xaa is A or G or absent
GXSEVVMDPYVKLXXXXXXXXXFFLISLSSLRTPVXXTP

SEQ ID NO: 24091 - protein, 34 aa, Artificial Sequence
  Non-cyclic GFR-binding peptide
  MOD_RES (33)..(34): Xaa is C or S
  MOD_RES (11)..(12)..(13)..(14)..(15): Xaa is A or G
  MOD_RES (16)..(17)..(18)..(19): Xaa is A or G or absent
EVVMDPYVKLXXXXXXXXXFFLISLSSLRTPVXX

SEQ ID NO: 24092 - protein, 35 aa, Artificial Sequence
  Non-cyclic GFR-binding peptide
  MOD_RES (2)..(4): Xaa is C or S
HXGXARVVMNPYVKLIVNSSDDFFLVSLSSLQTPA

SEQ ID NO: 24093 - protein, 35 aa, Artificial Sequence
  Non-cyclic GFR-binding peptide
  MOD_RES (34)..(34): Xaa is C or S
  MOD_RES (12)..(13)..(14)..(15)..(16): Xaa is A or G
  MOD_RES (17)..(18)..(19)..(20): Xaa is A or G or absent
SRVVMNPYVKLXXXXXXXXXFFLVSLSSLKTPAXT

SEQ ID NO: 24094 - protein, 36 aa, Artificial Sequence
  Non-cyclic GFR-binding peptide
  MOD_RES (2)..(4)..(35)..(36): Xaa is C or S
SXKXSKVIMPYVKLIKPTKGIFFLISLSSLDQSVXX

SEQ ID NO: 24095 - protein, 38 aa, Artificial Sequence
  Non-cyclic GFR-binding peptide
  MOD_RES (1)..(33)..(34): Xaa is C or S
XAEVVMDPYVKLVVNNAADFFLISLSSLRAPVXXSAPA

SEQ ID NO: 24096 - protein, 35 aa, Artificial Sequence
  Non-cyclic GFR-binding peptide
  MOD_RES (34)..(34): Xaa is C or S
  MOD_RES (12)..(13)..(14)..(15)..(16): Xaa is A or G
  MOD_RES (17)..(18)..(19)..(20): Xaa is A or G or absent
KNHQLFPYVKLXXXXXXXXXFFLMSLSSEETPVXE

SEQ ID NO: 24097 - protein, 36 aa, Artificial Sequence
  Non-cyclic GFR-binding peptide
  MOD_RES (33)..(34): Xaa is C or S
  MOD_RES (11)..(12)..(13)..(14)..(15): Xaa is A or G
  MOD_RES (16)..(17)..(18)..(19): Xaa is A or G or absent
RVVMNPYVKLXXXXXXXXXFFLVSLSSLKTPAXXPK

SEQ ID NO: 24098 - protein, 38 aa, Artificial Sequence
  Non-cyclic GFR-binding peptide
  MOD_RES (1)..(35)..(36): Xaa is C or S
  MOD_RES (13)..(14)..(15)..(16)..(17): Xaa is A or G
  MOD_RES (18)..(19)..(20)..(21): Xaa is A or G or absent
XARVVMNPYVKLXXXXXXXXXFFLVSLSSLQTPAXXPK

SEQ ID NO: 24099 - protein, 37 aa, Artificial Sequence
  Non-cyclic GFR-binding peptide
  MOD_RES (31)..(32): Xaa is C or S
DVVMGPYVKLIIQQKDNFFLMSLSSMKTPTXXPGASG

SEQ ID NO: 24100 - protein, 34 aa, Artificial Sequence
  Non-cyclic GFR-binding peptide
  MOD_RES (33)..(34): Xaa is C or S
  MOD_RES (11)..(12)..(13)..(14)..(15): Xaa is A or G
  MOD_RES (16)..(17)..(18)..(19): Xaa is A or G or absent
RVVMNPYVKLXXXXXXXXXFFLVSLSSLQTPAXX

SEQ ID NO: 24101 - protein, 35 aa, Artificial Sequence
  Non-cyclic GFR-binding peptide
  MOD_RES (1)..(33)..(34): Xaa is C or S
XSRVVMNPYVKLIVNSSDDFFLVSLSSLKTPAXXP

SEQ ID NO: 24102 - protein, 39 aa, Artificial Sequence
  Non-cyclic GFR-binding peptide
  MOD_RES (34)..(35): Xaa is C or S
  MOD_RES (12)..(13)..(14)..(15)..(16): Xaa is A or G
  MOD_RES (17)..(18)..(19)..(20): Xaa is A or G or absent
SEVVMDPYVKLXXXXXXXXXFFLISLSSLRTPVXXTPPT

SEQ ID NO: 24103 - protein, 35 aa, Artificial Sequence
  Non-cyclic GFR-binding peptide
  MOD_RES (1)..(32)..(33): Xaa is C or S
XSKVVMPYVKLVKPTRGVFFLISLSSLDQPVXXPS

SEQ ID NO: 24104 - protein, 38 aa, Artificial Sequence
  Non-cyclic GFR-binding peptide
  MOD_RES (2)..(4)..(38): Xaa is C or S
  MOD_RES (16)..(17)..(18)..(19)..(20): Xaa is A or G
  MOD_RES (21)..(22)..(23)..(24): Xaa is A or G or absent
HXGXSRVVMNPYVKLXXXXXXXXXFFLVSLSSLKTPAX

SEQ ID NO: 24105 - protein, 37 aa, Artificial Sequence
  Non-cyclic GFR-binding peptide
  MOD_RES (32)..(33): Xaa is C or S
RDVVMGPYVKLIIQQKDNFFLMSLSSMKTPTXXPGAS

SEQ ID NO: 24106 - protein, 43 aa, Artificial Sequence
  Non-cyclic GFR-binding peptide
  MOD_RES (2)..(4)..(37)..(38): Xaa is C or S
  MOD_RES (15)..(16)..(17)..(18)..(19): Xaa is A or G
  MOD_RES (20)..(21)..(22)..(23): Xaa is A or G or absent
SXKXSKVVMPYVKLXXXXXXXXXFFLISLSSLDQPVXXPSASA

SEQ ID NO: 24107 - protein, 36 aa, Artificial Sequence
  Non-cyclic GFR-binding peptide
  MOD_RES (33)..(34): Xaa is C or S
  MOD_RES (11)..(12)..(13)..(14)..(15): Xaa is A or G
  MOD_RES (16)..(17)..(18)..(19): Xaa is A or G or absent
SKVIMPYVKLXXXXXXXXXFFLISLSSLDQSVXXPS

SEQ ID NO: 24108 - protein, 35 aa, Artificial Sequence
  Non-cyclic GFR-binding peptide
  MOD_RES (33)..(34): Xaa is C or S
  MOD_RES (11)..(12)..(13)..(14)..(15): Xaa is A or G
  MOD_RES (16)..(17)..(18)..(19): Xaa is A or G or absent
SKVVMPYVKLXXXXXXXXXFFLISLSSLDQPVXXP

SEQ ID NO: 24109 - protein, 35 aa, Artificial Sequence
  Non-cyclic GFR-binding peptide
  MOD_RES (32)..(32): Xaa is C or S
SRVVMNPYVKLIVNSSDDFFLVSLSSLKTPAXTPK

SEQ ID NO: 24110 - protein, 36 aa, Artificial Sequence
  Non-cyclic GFR-binding peptide
  MOD_RES (1)..(3)..(35)..(36): Xaa is C or S
XGXARVVMNPYVKLIVNSSDDFFLVSLSSLQTPAXX

SEQ ID NO: 24111 - protein, 35 aa, Artificial Sequence
  Non-cyclic GFR-binding peptide
  MOD_RES (1)..(35): Xaa is C or S
  MOD_RES (13)..(14)..(15)..(16)..(17): Xaa is A or G
  MOD_RES (18)..(19)..(20)..(21): Xaa is A or G or absent
XSEVVMDPYVKLXXXXXXXXXFFLISLSSLRTPVX

SEQ ID NO: 24112 - protein, 37 aa, Artificial Sequence
  Non-cyclic GFR-binding peptide
  MOD_RES (2)..(4): Xaa is C or S
  MOD_RES (16)..(17)..(18)..(19)..(20): Xaa is A or G
  MOD_RES (21)..(22)..(23)..(24): Xaa is A or G or absent
RXGXGEVVMEPYVKLXXXXXXXXXFFLMSLSSLETPV

SEQ ID NO: 24113 - protein, 37 aa, Artificial Sequence
  Non-cyclic GFR-binding peptide
  MOD_RES (1)..(3)..(35)..(36): Xaa is C or S
XGXGEVVMEPYVKLVVKDYEDFFLMSLSSLETPVXXA

SEQ ID NO: 24114 - protein, 38 aa, Artificial Sequence
  Non-cyclic GFR-binding peptide
  MOD_RES (1)..(33)..(34): Xaa is C or S
XGEVVMEPYVKLVVKDYEDFFLMSLSSLETPVXXAKPI

SEQ ID NO: 24115 - protein, 34 aa, Artificial Sequence
  Non-cyclic GFR-binding peptide
  MOD_RES (2)..(34): Xaa is C or S
GXGEVVMEPYVKLVVKDYEDFFLMSLSSLETPVX

SEQ ID NO: 24116 - protein, 36 aa, Artificial Sequence
  Non-cyclic GFR-binding peptide
  MOD_RES (2)..(4)..(35)..(36): Xaa is C or S
SXKXSRVIMPYVKLVKPKRGVFFLISLSSLAQPVXX

SEQ ID NO: 24117 - protein, 35 aa, Artificial Sequence
  Non-cyclic GFR-binding peptide
  MOD_RES (1)..(3)..(35): Xaa is C or S
XGXESVAMGPYVKLYTVVGKDFFLISLSSLKTPVX

SEQ ID NO: 24118 - protein, 37 aa, Artificial Sequence
  Non-cyclic GFR-binding peptide
  MOD_RES (1)..(3)..(35)..(36): Xaa is C or S
XGXESVAMGPYVKLYTVVGKDFFLISLSSLKTPVXXA

SEQ ID NO: 24119 - protein, 43 aa, Artificial Sequence
  Non-cyclic GFR-binding peptide
  MOD_RES (1)..(3)..(40): Xaa is C or S
  MOD_RES (16)..(17)..(18)..(19)..(20): Xaa is A or G
  MOD_RES (21)..(22)..(23)..(24): Xaa is A or G or absent
XAXELHEELRPYVKLXXXXXXXXXFFLVSLSSHHVRSPQXKVS

SEQ ID NO: 24120 - protein, 36 aa, Artificial Sequence
  Non-cyclic GFR-binding peptide
  MOD_RES (2)..(33)..(34): Xaa is C or S
KXSRVIMPYVKLVKPKRGVFFLISLSSLAQPVXXPA

SEQ ID NO: 24121 - protein, 35 aa, Artificial Sequence
  Non-cyclic GFR-binding peptide
  MOD_RES (1)..(3)..(35): Xaa is C or S
XGXGEVVMEPYVKLVVKDYEDFFLMSLSSLETPVX

SEQ ID NO: 24122 - protein, 32 aa, Artificial Sequence
  Non-cyclic GFR-binding peptide
  MOD_RES (11)..(12)..(13)..(14)..(15): Xaa is A or G
  MOD_RES (16)..(17)..(18)..(19): Xaa is A or G or absent
KVVMNPYVKLXXXXXXXXXFFLVSLSSLKTPA

SEQ ID NO: 24123 - protein, 35 aa, Artificial Sequence
  Non-cyclic GFR-binding peptide
  MOD_RES (31)..(32): Xaa is C or S
EVVMEPYVKLVVKDYEDFFLMSLSSLETPVXXAKP

SEQ ID NO: 24124 - protein, 35 aa, Artificial Sequence
  Non-cyclic GFR-binding peptide
  MOD_RES (31)..(32): Xaa is C or S
RVVMNPYVKLIVNSSDDFFLVSLSSLQTPAXXPKP

SEQ ID NO: 24125 - protein, 40 aa, Artificial Sequence
  Non-cyclic GFR-binding peptide
  MOD_RES (1)..(3)..(37)..(38): Xaa is C or S
  MOD_RES (15)..(16)..(17)..(18)..(19): Xaa is A or G
  MOD_RES (20)..(21)..(22)..(23): Xaa is A or G or absent
XGXESVAMGPYVKLXXXXXXXXXFFLISLSSLKTPVXXAK

SEQ ID NO: 24126 - protein, 36 aa, Artificial Sequence
  Non-cyclic GFR-binding peptide
  MOD_RES (32)..(33): Xaa is C or S
SEVVMDPYVKLVVNNASDFFLISLSSLRTPVXXTPP

SEQ ID NO: 24127 - protein, 44 aa, Artificial Sequence
  Non-cyclic GFR-binding peptide
  MOD_RES (2)..(4)..(38): Xaa is C or S
  MOD_RES (16)..(17)..(18)..(19)..(20): Xaa is A or G
  MOD_RES (21)..(22)..(23)..(24): Xaa is A or G or absent
RXEXKNHQLFPYVKLXXXXXXXXXFFLMSLSSEETPVXELGEDN

SEQ ID NO: 24128 - protein, 37 aa, Artificial Sequence
  Non-cyclic GFR-binding peptide
  MOD_RES (2)..(4)..(36)..(37): Xaa is C or S
HXGXSRVVMNPYVKLIVNSSDDFFLVSLSSLKTPAXX

SEQ ID NO: 24129 - protein, 32 aa, Artificial Sequence
  Non-cyclic GFR-binding peptide
  MOD_RES (11)..(12)..(13)..(14)..(15): Xaa is A or G
  MOD_RES (16)..(17)..(18)..(19): Xaa is A or G or absent
EEVIMPYVKLXXXXXXXXXFFLMSLSSTKVPA

SEQ ID NO: 24130 - protein, 40 aa, Artificial Sequence
  Non-cyclic GFR-binding peptide
  MOD_RES (34)..(35): Xaa is C or S
  MOD_RES (12)..(13)..(14)..(15)..(16): Xaa is A or G
  MOD_RES (17)..(18)..(19)..(20): Xaa is A or G or absent
ARVVMNPYVKLXXXXXXXXXFFLVSLSSLQTPAXXPKPVT

SEQ ID NO: 24131 - protein, 39 aa, Artificial Sequence
  Non-cyclic GFR-binding peptide
  MOD_RES (1)..(35)..(36): Xaa is C or S
  MOD_RES (13)..(14)..(15)..(16)..(17): Xaa is A or G
  MOD_RES (18)..(19)..(20)..(21): Xaa is A or G or absent
XSRVVMNPYVKLXXXXXXXXXFFLVSLSSLKTPAXXPKP

SEQ ID NO: 24132 - protein, 34 aa, Artificial Sequence
  Non-cyclic GFR-binding peptide
  MOD_RES (1)..(34): Xaa is C or S
  MOD_RES (12)..(13)..(14)..(15)..(16): Xaa is A or G
  MOD_RES (17)..(18)..(19)..(20): Xaa is A or G or absent
XSKVIMPYVKLXXXXXXXXXFFLISLSSLDQSVX

SEQ ID NO: 24133 - protein, 40 aa, Artificial Sequence
  Non-cyclic GFR-binding peptide
  MOD_RES (2)..(35)..(36): Xaa is C or S
  MOD_RES (13)..(14)..(15)..(16)..(17): Xaa is A or G
  MOD_RES (18)..(19)..(20)..(21): Xaa is A or G or absent
KXSRVIMPYVKLXXXXXXXXXFFLISLSSLAQPVXXPAAS

SEQ ID NO: 24134 - protein, 36 aa, Artificial Sequence
  Non-cyclic GFR-binding peptide
  MOD_RES (1)..(3): Xaa is C or S
  MOD_RES (15)..(16)..(17)..(18)..(19): Xaa is A or G
  MOD_RES (20)..(21)..(22)..(23): Xaa is A or G or absent
XGXSRVVMNPYVKLXXXXXXXXXFFLVSLSSLKTPA

SEQ ID NO: 24135 - protein, 34 aa, Artificial Sequence
  Non-cyclic GFR-binding peptide
  MOD_RES (33)..(33): Xaa is C or S
  MOD_RES (11)..(12)..(13)..(14)..(15): Xaa is A or G
  MOD_RES (16)..(17)..(18)..(19): Xaa is A or G or absent
NHQLFPYVKLXXXXXXXXXFFLMSLSSEETPVXE

SEQ ID NO: 24136 - protein, 41 aa, Artificial Sequence
  Non-cyclic GFR-binding peptide
  MOD_RES (2)..(4)..(38)..(39): Xaa is C or S
  MOD_RES (16)..(17)..(18)..(19)..(20): Xaa is A or G
  MOD_RES (21)..(22)..(23)..(24): Xaa is A or G or absent
HXGXARVVMNPYVKLXXXXXXXXXFFLVSLSSLQTPAXXPK

SEQ ID NO: 24137 - protein, 39 aa, Artificial Sequence
  Non-cyclic GFR-binding peptide
  MOD_RES (2)..(36)..(37): Xaa is C or S
  MOD_RES (14)..(15)..(16)..(17)..(18): Xaa is A or G
  MOD_RES (19)..(20)..(21)..(22): Xaa is A or G or absent
GXRDVVMGPYVKLXXXXXXXXXFFLMSLSSMKTPTXXPG

SEQ ID NO: 24138 - protein, 40 aa, Artificial Sequence
  Non-cyclic GFR-binding peptide
  MOD_RES (2)..(35)..(36): Xaa is C or S
  MOD_RES (13)..(14)..(15)..(16)..(17): Xaa is A or G
  MOD_RES (18)..(19)..(20)..(21): Xaa is A or G or absent
KXSKVIMPYVKLXXXXXXXXXFFLISLSSLDQSVXXPSAS

SEQ ID NO: 24139 - protein, 34 aa, Artificial Sequence
  Non-cyclic GFR-binding peptide
  MOD_RES (2)..(2): Xaa is C or S
  MOD_RES (13)..(14)..(15)..(16)..(17): Xaa is A or G
  MOD_RES (18)..(19)..(20)..(21): Xaa is A or G or absent
KXSRVIMPYVKLXXXXXXXXXFFLISLSSLAQPV

SEQ ID NO: 24140 - protein, 37 aa, Artificial Sequence
  Non-cyclic GFR-binding peptide
  MOD_RES (1)..(32)..(33): Xaa is C or S
XSRVIMPYVKLVKPKRGVFFLISLSSLAQPVXXPAAS

SEQ ID NO: 24141 - protein, 32 aa, Artificial Sequence
  Non-cyclic GFR-binding peptide
  MOD_RES (11)..(12)..(13)..(14)..(15): Xaa is A or G
  MOD_RES (16)..(17)..(18)..(19): Xaa is A or G or absent
RVVMNPYVKLXXXXXXXXXFFLVSLSSLKTPA

SEQ ID NO: 24142 - protein, 33 aa, Artificial Sequence
  Non-cyclic GFR-binding peptide
  MOD_RES (33)..(33): Xaa is C or S
  MOD_RES (11)..(12)..(13)..(14)..(15): Xaa is A or G
  MOD_RES (16)..(17)..(18)..(19): Xaa is A or G or absent
KVVMNPYVKLXXXXXXXXXFFLVSLSSLKTPAX

SEQ ID NO: 24143 - protein, 37 aa, Artificial Sequence
  Non-cyclic GFR-binding peptide
  MOD_RES (2)..(4)..(36)..(37): Xaa is C or S
RXGXSEVVMDPYVKLVVNNASDFFLISLSSLRTPVXX

SEQ ID NO: 24144 - protein, 33 aa, Artificial Sequence
  Non-cyclic GFR-binding peptide
  MOD_RES (33)..(33): Xaa is C or S
  MOD_RES (11)..(12)..(13)..(14)..(15): Xaa is A or G
  MOD_RES (16)..(17)..(18)..(19): Xaa is A or G or absent
RVVMNPYVKLXXXXXXXXXFFLVSLSSLKTPAX

SEQ ID NO: 24145 - protein, 36 aa, Artificial Sequence
  Non-cyclic GFR-binding peptide
  MOD_RES (2)..(33)..(34): Xaa is C or S
GXEEVIMPYVKLLLVRGNDFFLMSLSSTKVPAXXTS

SEQ ID NO: 24146 - protein, 35 aa, Artificial Sequence
  Non-cyclic GFR-binding peptide
  MOD_RES (31)..(32): Xaa is C or S
RVVMNPYVKLIVNSSDDFFLVSLSSLKTPAXXPKP

SEQ ID NO: 24147 - protein, 41 aa, Artificial Sequence
  Non-cyclic GFR-binding peptide
  MOD_RES (2)..(4)..(36)..(37): Xaa is C or S
HXGXARVVMNPYVKLIVNSSDDFFLVSLSSLQTPAXXPKPV

SEQ ID NO: 24148 - protein, 35 aa, Artificial Sequence
  Non-cyclic GFR-binding peptide
  MOD_RES (1)..(3): Xaa is C or S
  MOD_RES (14)..(15)..(16)..(17)..(18): Xaa is A or G
  MOD_RES (19)..(20)..(21)..(22): Xaa is A or G or absent
XKXSRVIMPYVKLXXXXXXXXXFFLISLSSLAQPV

SEQ ID NO: 24149 - protein, 39 aa, Artificial Sequence
  Non-cyclic GFR-binding peptide
  MOD_RES (2)..(36)..(37): Xaa is C or S
  MOD_RES (14)..(15)..(16)..(17)..(18): Xaa is A or G
  MOD_RES (19)..(20)..(21)..(22): Xaa is A or G or absent
GXAKVVMNPYVKLXXXXXXXXXFFLVSLSSLKTPAXXAK

SEQ ID NO: 24150 - protein, 37 aa, Artificial Sequence
  Non-cyclic GFR-binding peptide
  MOD_RES (35)..(35): Xaa is C or S
  MOD_RES (11)..(12)..(13)..(14)..(15): Xaa is A or G
  MOD_RES (16)..(17)..(18)..(19): Xaa is A or G or absent
HEELRPYVKLXXXXXXXXXFFLVSLSSHHVRSPQXKV

SEQ ID NO: 24151 - protein, 33 aa, Artificial Sequence
  Non-cyclic GFR-binding peptide
HEELRPYVKLLKPKKRVYEFFLVSLSSHHVRSP

SEQ ID NO: 24152 - protein, 38 aa, Artificial Sequence
  Non-cyclic GFR-binding peptide
  MOD_RES (33)..(34): Xaa is C or S
EAVSMGEPYVKLTPVGMDDFFLVSLSSLKTPVXXAKGV

SEQ ID NO: 24153 - protein, 38 aa, Artificial Sequence
  Non-cyclic GFR-binding peptide
  MOD_RES (1)..(32)..(33): Xaa is C or S
XSRVIMPYVKLVKPKRGVFFLISLSSLAQPVXXPAASA

SEQ ID NO: 24154 - protein, 38 aa, Artificial Sequence
  Non-cyclic GFR-binding peptide
  MOD_RES (1)..(3)..(37)..(38): Xaa is C or S
  MOD_RES (15)..(16)..(17)..(18)..(19): Xaa is A or G
  MOD_RES (20)..(21)..(22)..(23): Xaa is A or G or absent
XGXSEVVMDPYVKLXXXXXXXXXFFLISLSSLRTPVXX

SEQ ID NO: 24155 - protein, 40 aa, Artificial Sequence
  Non-cyclic GFR-binding peptide
  MOD_RES (2)..(36)..(37): Xaa is C or S
  MOD_RES (14)..(15)..(16)..(17)..(18): Xaa is A or G
  MOD_RES (19)..(20)..(21)..(22): Xaa is A or G or absent
GXSEVVMDPYVKLXXXXXXXXXFFLISLSSLRTPVXXTPP

SEQ ID NO: 24156 - protein, 38 aa, Artificial Sequence
  Non-cyclic GFR-binding peptide
  MOD_RES (2)..(35)..(36): Xaa is C or S
  MOD_RES (13)..(14)..(15)..(16)..(17): Xaa is A or G
  MOD_RES (18)..(19)..(20)..(21): Xaa is A or G or absent
KXSKVVMPYVKLXXXXXXXXXFFLISLSSLDQPVXXPS

SEQ ID NO: 24157 - protein, 37 aa, Artificial Sequence
  Non-cyclic GFR-binding peptide
  MOD_RES (1)..(3)..(34)..(35): Xaa is C or S
XKXSKVIMPYVKLIKPTKGIFFLISLSSLDQSVXXPS

SEQ ID NO: 24158 - protein, 39 aa, Artificial Sequence
  Non-cyclic GFR-binding peptide
  MOD_RES (1)..(34)..(35): Xaa is C or S
  MOD_RES (12)..(13)..(14)..(15)..(16): Xaa is A or G
  MOD_RES (17)..(18)..(19)..(20): Xaa is A or G or absent
XSKVIMPYVKLXXXXXXXXXFFLISLSSLDQSVXXPSAS

SEQ ID NO: 24159 - protein, 44 aa, Artificial Sequence
  Non-cyclic GFR-binding peptide
  MOD_RES (2)..(4)..(38): Xaa is C or S
  MOD_RES (16)..(17)..(18)..(19)..(20): Xaa is A or G
  MOD_RES (21)..(22)..(23)..(24): Xaa is A or G or absent
HXGXSRVVMNPYVKLXXXXXXXXXFFLVSLSSLKTPAXTPKTVH

SEQ ID NO: 24160 - protein, 39 aa, Artificial Sequence
  Non-cyclic GFR-binding peptide
  MOD_RES (2)..(4)..(36)..(37): Xaa is C or S
RXGXSEVVMDPYVKLVVNNASDFFLISLSSLRTPVXXTP

SEQ ID NO: 24161 - protein, 36 aa, Artificial Sequence
  Non-cyclic GFR-binding peptide
  MOD_RES (1)..(1): Xaa is C or S
  MOD_RES (14)..(15)..(16)..(17)..(18): Xaa is A or G
  MOD_RES (19)..(20)..(21)..(22): Xaa is A or G or absent
XELHEELRPYVKLXXXXXXXXXFFLVSLSSHHVRSP

SEQ ID NO: 24162 - protein, 39 aa, Artificial Sequence
  Non-cyclic GFR-binding peptide
  MOD_RES (2)..(33)..(34): Xaa is C or S
KXSRVIMPYVKLVKPKRGVFFLISLSSLAQPVXXPAASA

SEQ ID NO: 24163 - protein, 40 aa, Artificial Sequence
  Non-cyclic GFR-binding peptide
  MOD_RES (2)..(34)..(35): Xaa is C or S
GXARVVMNPYVKLIVNSSDDFFLVSLSSLQTPAXXPKPVT

SEQ ID NO: 24164 - protein, 37 aa, Artificial Sequence
  Non-cyclic GFR-binding peptide
  MOD_RES (1)..(3)..(37): Xaa is C or S
  MOD_RES (15)..(16)..(17)..(18)..(19): Xaa is A or G
  MOD_RES (20)..(21)..(22)..(23): Xaa is A or G or absent
XEXKNHQLFPYVKLXXXXXXXXXFFLMSLSSEETPVX

SEQ ID NO: 24165 - protein, 39 aa, Artificial Sequence
  Non-cyclic GFR-binding peptide
  MOD_RES (33)..(33): Xaa is C or S
  MOD_RES (11)..(12)..(13)..(14)..(15): Xaa is A or G
  MOD_RES (16)..(17)..(18)..(19): Xaa is A or G or absent
RVVMNPYVKLXXXXXXXXXFFLVSLSSLKTPAXTPKTVH

SEQ ID NO: 24166 - protein, 38 aa, Artificial Sequence
  Non-cyclic GFR-binding peptide
  MOD_RES (1)..(3)..(37): Xaa is C or S
  MOD_RES (15)..(16)..(17)..(18)..(19): Xaa is A or G
  MOD_RES (20)..(21)..(22)..(23): Xaa is A or G or absent
XEXKNHQLFPYVKLXXXXXXXXXFFLMSLSSEETPVXE

SEQ ID NO: 24167 - protein, 35 aa, Artificial Sequence
  Non-cyclic GFR-binding peptide
  MOD_RES (1)..(3)..(35): Xaa is C or S
XGXAEVVMDPYVKLVVNNAADFFLISLSSLRAPVX

SEQ ID NO: 24168 - protein, 32 aa, Artificial Sequence
  Non-cyclic GFR-binding peptide
EAVSMGEPYVKLTPVGMDDFFLVSLSSLKTPV

SEQ ID NO: 24169 - protein, 37 aa, Artificial Sequence
  Non-cyclic GFR-binding peptide
  MOD_RES (33)..(33): Xaa is C or S
NHQLFPYVKLHQGQHPKIRFFLMSLSSEETPVXELGE

SEQ ID NO: 24170 - protein, 41 aa, Artificial Sequence
  Non-cyclic GFR-binding peptide
  MOD_RES (1)..(3)..(35): Xaa is C or S
XGXSRVVMNPYVKLIVNSSDDFFLVSLSSLKTPAXTPKTVH

SEQ ID NO: 24171 - protein, 41 aa, Artificial Sequence
  Non-cyclic GFR-binding peptide
  MOD_RES (1)..(3)..(35)..(36): Xaa is C or S
XGXSRVVMNPYVKLIVNSSDDFFLVSLSSLKTPAXXPKPVH

SEQ ID NO: 24172 - protein, 33 aa, Artificial Sequence
  Non-cyclic GFR-binding peptide
  MOD_RES (33)..(33): Xaa is C or S
  MOD_RES (11)..(12)..(13)..(14)..(15): Xaa is A or G
  MOD_RES (16)..(17)..(18)..(19): Xaa is A or G or absent
EEVIMPYVKLXXXXXXXXXFFLMSLSSTKVPAX

SEQ ID NO: 24173 - protein, 36 aa, Artificial Sequence
  Non-cyclic GFR-binding peptide
  MOD_RES (2)..(34)..(35): Xaa is C or S
GXARVVMNPYVKLIVNSSDDFFLVSLSSLQTPAXXP

SEQ ID NO: 24174 - protein, 33 aa, Artificial Sequence
  Non-cyclic GFR-binding peptide
  MOD_RES (12)..(13)..(14)..(15)..(16): Xaa is A or G
  MOD_RES (17)..(18)..(19)..(20): Xaa is A or G or absent
LHEELRPYVKLXXXXXXXXXFFLVSLSSHHVRS

SEQ ID NO: 24175 - protein, 42 aa, Artificial Sequence
  Non-cyclic GFR-binding peptide
  MOD_RES (2)..(4)..(38)..(39): Xaa is C or S
  MOD_RES (16)..(17)..(18)..(19)..(20): Xaa is A or G
  MOD_RES (21)..(22)..(23)..(24): Xaa is A or G or absent
HXGXAKVVMNPYVKLXXXXXXXXXFFLVSLSSLKTPAXXAKP

SEQ ID NO: 24176 - protein, 39 aa, Artificial Sequence
  Non-cyclic GFR-binding peptide
  MOD_RES (1)..(3)..(37)..(38): Xaa is C or S
  MOD_RES (15)..(16)..(17)..(18)..(19): Xaa is A or G
  MOD_RES (20)..(21)..(22)..(23): Xaa is A or G or absent
XGXGEVVMEPYVKLXXXXXXXXXFFLMSLSSLETPVXXA

SEQ ID NO: 24177 - protein, 34 aa, Artificial Sequence
  Non-cyclic GFR-binding peptide
  MOD_RES (31)..(32): Xaa is C or S
KVVMNPYVKLIVNNSSDFFLVSLSSLKTPAXXAK

SEQ ID NO: 24178 - protein, 42 aa, Artificial Sequence
  Non-cyclic GFR-binding peptide
  MOD_RES (2)..(36)..(37): Xaa is C or S
  MOD_RES (14)..(15)..(16)..(17)..(18): Xaa is A or G
  MOD_RES (19)..(20)..(21)..(22): Xaa is A or G or absent
GXESVAMGPYVKLXXXXXXXXXFFLISLSSLKTPVXXAKSAK

SEQ ID NO: 24179 - protein, 37 aa, Artificial Sequence
  Non-cyclic GFR-binding peptide
  MOD_RES (35)..(36): Xaa is C or S
  MOD_RES (13)..(14)..(15)..(16)..(17): Xaa is A or G
  MOD_RES (18)..(19)..(20)..(21): Xaa is A or G or absent
EAVSMGEPYVKLXXXXXXXXXFFLVSLSSLKTPVXXA

SEQ ID NO: 24180 - protein, 43 aa, Artificial Sequence
  Non-cyclic GFR-binding peptide
  MOD_RES (2)..(4)..(37)..(38): Xaa is C or S
  MOD_RES (15)..(16)..(17)..(18)..(19): Xaa is A or G
  MOD_RES (20)..(21)..(22)..(23): Xaa is A or G or absent
SXKXSKVIMPYVKLXXXXXXXXXFFLISLSSLDQSVXXPSASA

SEQ ID NO: 24181 - protein, 36 aa, Artificial Sequence
  Non-cyclic GFR-binding peptide
  MOD_RES (2)..(34)..(35): Xaa is C or S
GXAEVVMDPYVKLVVNNAADFFLISLSSLRAPVXXS

SEQ ID NO: 24182 - protein, 41 aa, Artificial Sequence
  Non-cyclic GFR-binding peptide
  MOD_RES (1)..(3)..(37): Xaa is C or S
XEXKNHQLFPYVKLHQGQHPKIRFFLMSLSSEETPVXELGE

SEQ ID NO: 24183 - protein, 37 aa, Artificial Sequence
  Non-cyclic GFR-binding peptide
  MOD_RES (1)..(35)..(36): Xaa is C or S
  MOD_RES (13)..(14)..(15)..(16)..(17): Xaa is A or G
  MOD_RES (18)..(19)..(20)..(21): Xaa is A or G or absent
XESVAMGPYVKLXXXXXXXXXFFLISLSSLKTPVXXA

SEQ ID NO: 24184 - protein, 38 aa, Artificial Sequence
  Non-cyclic GFR-binding peptide
  MOD_RES (2)..(35)..(36): Xaa is C or S
  MOD_RES (13)..(14)..(15)..(16)..(17): Xaa is A or G
  MOD_RES (18)..(19)..(20)..(21): Xaa is A or G or absent
GXEEVIMPYVKLXXXXXXXXXFFLMSLSSTKVPAXXTS

SEQ ID NO: 24185 - protein, 43 aa, Artificial Sequence
  Non-cyclic GFR-binding peptide
  MOD_RES (2)..(4)..(38)..(39): Xaa is C or S
  MOD_RES (16)..(17)..(18)..(19)..(20): Xaa is A or G
  MOD_RES (21)..(22)..(23)..(24): Xaa is A or G or absent
RXGXESVAMGPYVKLXXXXXXXXXFFLISLSSLKTPVXXAKSA

SEQ ID NO: 24186 - protein, 37 aa, Artificial Sequence
  Non-cyclic GFR-binding peptide
  MOD_RES (1)..(3)..(37): Xaa is C or S
  MOD_RES (15)..(16)..(17)..(18)..(19): Xaa is A or G
  MOD_RES (20)..(21)..(22)..(23): Xaa is A or G or absent
XGXESVAMGPYVKLXXXXXXXXXFFLISLSSLKTPVX

SEQ ID NO: 24187 - protein, 33 aa, Artificial Sequence
  Non-cyclic GFR-binding peptide
  MOD_RES (1)..(32)..(33): Xaa is C or S
XSKVVMPYVKLVKPTRGVFFLISLSSLDQPVXX

SEQ ID NO: 24188 - protein, 42 aa, Artificial Sequence
  Non-cyclic GFR-binding peptide
  MOD_RES (2)..(4)..(36)..(37): Xaa is C or S
HXGXAKVVMNPYVKLIVNNSSDFFLVSLSSLKTPAXXAKPVA

SEQ ID NO: 24189 - protein, 40 aa, Artificial Sequence
  Non-cyclic GFR-binding peptide
  MOD_RES (2)..(34): Xaa is C or S
GXSRVVMNPYVKLIVNSSDDFFLVSLSSLKTPAXTPKTVH

SEQ ID NO: 24190 - protein, 39 aa, Artificial Sequence
  Non-cyclic GFR-binding peptide
  MOD_RES (33)..(34): Xaa is C or S
  MOD_RES (11)..(12)..(13)..(14)..(15): Xaa is A or G
  MOD_RES (16)..(17)..(18)..(19): Xaa is A or G or absent
SRVIMPYVKLXXXXXXXXXFFLISLSSLAQPVXXPAASA

SEQ ID NO: 24191 - protein, 36 aa, Artificial Sequence
  Non-cyclic GFR-binding peptide
  MOD_RES (1)..(3)..(35)..(36): Xaa is C or S
XGXSEVVMDPYVKLVVNNASDFFLISLSSLRTPVXX

SEQ ID NO: 24192 - protein, 38 aa, Artificial Sequence
  Non-cyclic GFR-binding peptide
  MOD_RES (1)..(33)..(34): Xaa is C or S
XESVAMGPYVKLYTVVGKDFFLISLSSLKTPVXXAKSA

SEQ ID NO: 24193 - protein, 40 aa, Artificial Sequence
  Non-cyclic GFR-binding peptide
  MOD_RES (37)..(37): Xaa is C or S
  MOD_RES (13)..(14)..(15)..(16)..(17): Xaa is A or G
  MOD_RES (18)..(19)..(20)..(21): Xaa is A or G or absent
ELHEELRPYVKLXXXXXXXXXFFLVSLSSHHVRSPQXKVS

SEQ ID NO: 24194 - protein, 40 aa, Artificial Sequence
  Non-cyclic GFR-binding peptide
  MOD_RES (2)..(34)..(35): Xaa is C or S
GXSEVVMDPYVKLVVNNASDFFLISLSSLRTPVXXTPPTS

SEQ ID NO: 24195 - protein, 37 aa, Artificial Sequence
  Non-cyclic GFR-binding peptide
  MOD_RES (2)..(4): Xaa is C or S
  MOD_RES (16)..(17)..(18)..(19)..(20): Xaa is A or G
  MOD_RES (21)..(22)..(23)..(24): Xaa is A or G or absent
RXEXKNHQLFPYVKLXXXXXXXXXFFLMSLSSEETPV

SEQ ID NO: 24196 - protein, 41 aa, Artificial Sequence
  Non-cyclic GFR-binding peptide
  MOD_RES (1)..(3)..(40): Xaa is C or S
XAXELHEELRPYVKLLKPKKRVYEFFLVSLSSHHVRSPQXK

SEQ ID NO: 24197 - protein, 40 aa, Artificial Sequence
  Non-cyclic GFR-binding peptide
  MOD_RES (2)..(34)..(35): Xaa is C or S
GXGEVVMEPYVKLVVKDYEDFFLMSLSSLETPVXXAKPIS

SEQ ID NO: 24198 - protein, 37 aa, Artificial Sequence
  Non-cyclic GFR-binding peptide
  MOD_RES (33)..(34): Xaa is C or S
  MOD_RES (11)..(12)..(13)..(14)..(15): Xaa is A or G
  MOD_RES (16)..(17)..(18)..(19): Xaa is A or G or absent
EEVIMPYVKLXXXXXXXXXFFLMSLSSTKVPAXXTSP

SEQ ID NO: 24199 - protein, 32 aa, Artificial Sequence
  Non-cyclic GFR-binding peptide
  MOD_RES (11)..(12)..(13)..(14)..(15): Xaa is A or G
  MOD_RES (16)..(17)..(18)..(19): Xaa is A or G or absent
DVVMGPYVKLXXXXXXXXXFFLMSLSSMKTPT

SEQ ID NO: 24200 - protein, 41 aa, Artificial Sequence
  Non-cyclic GFR-binding peptide
  MOD_RES (37)..(37): Xaa is C or S
ELHEELRPYVKLLKPKKRVYEFFLVSLSSHHVRSPQXKVSS

SEQ ID NO: 24201 - protein, 43 aa, Artificial Sequence
  Non-cyclic GFR-binding peptide
  MOD_RES (1)..(3)..(37)..(38): Xaa is C or S
  MOD_RES (15)..(16)..(17)..(18)..(19): Xaa is A or G
  MOD_RES (20)..(21)..(22)..(23): Xaa is A or G or absent
XGXSRVVMNPYVKLXXXXXXXXXFFLVSLSSLKTPAXXPKPVH

SEQ ID NO: 24202 - protein, 43 aa, Artificial Sequence
  Non-cyclic GFR-binding peptide
  MOD_RES (1)..(3)..(37)..(38): Xaa is C or S
  MOD_RES (15)..(16)..(17)..(18)..(19): Xaa is A or G
  MOD_RES (20)..(21)..(22)..(23): Xaa is A or G or absent
XGXESVAMGPYVKLXXXXXXXXXFFLISLSSLKTPVXXAKSAK

SEQ ID NO: 24203 - protein, 44 aa, Artificial Sequence
  Non-cyclic GFR-binding peptide
  MOD_RES (2)..(4)..(41): Xaa is C or S
AXAXELHEELRPYVKLLKPKKRVYEFFLVSLSSHHVRSPQXKVS

SEQ ID NO: 24204 - protein, 37 aa, Artificial Sequence
  Non-cyclic GFR-binding peptide
  MOD_RES (1)..(3)..(37): Xaa is C or S
  MOD_RES (15)..(16)..(17)..(18)..(19): Xaa is A or G
  MOD_RES (20)..(21)..(22)..(23): Xaa is A or G or absent
XGXAEVVMDPYVKLXXXXXXXXXFFLISLSSLRAPVX

SEQ ID NO: 24205 - protein, 42 aa, Artificial Sequence
  Non-cyclic GFR-binding peptide
  MOD_RES (2)..(4)..(36)..(37): Xaa is C or S
HXGXARVVMNPYVKLIVNSSDDFFLVSLSSLQTPAXXPKPVT

SEQ ID NO: 24206 - protein, 40 aa, Artificial Sequence
  Non-cyclic GFR-binding peptide
  MOD_RES (1)..(3)..(37): Xaa is C or S
  MOD_RES (15)..(16)..(17)..(18)..(19): Xaa is A or G
  MOD_RES (20)..(21)..(22)..(23): Xaa is A or G or absent
XGXSRVVMNPYVKLXXXXXXXXXFFLVSLSSLKTPAXTPK

SEQ ID NO: 24207 - protein, 40 aa, Artificial Sequence
  Non-cyclic GFR-binding peptide
  MOD_RES (2)..(34)..(35): Xaa is C or S
GXSRVVMNPYVKLIVNSSDDFFLVSLSSLKTPAXXPKPVH

SEQ ID NO: 24208 - protein, 40 aa, Artificial Sequence
  Non-cyclic GFR-binding peptide
  MOD_RES (2)..(4)..(35)..(36): Xaa is C or S
SXKXSRVIMPYVKLVKPKRGVFFLISLSSLAQPVXXPAAS

SEQ ID NO: 24209 - protein, 37 aa, Artificial Sequence
  Non-cyclic GFR-binding peptide
  MOD_RES (2)..(4)..(36)..(37): Xaa is C or S
RXGXESVAMGPYVKLYTVVGKDFFLISLSSLKTPVXX

SEQ ID NO: 24210 - protein, 37 aa, Artificial Sequence
  Non-cyclic GFR-binding peptide
  MOD_RES (36)..(36): Xaa is C or S
LHEELRPYVKLLKPKKRVYEFFLVSLSSHHVRSPQXK

SEQ ID NO: 24211 - protein, 43 aa, Artificial Sequence
  Non-cyclic GFR-binding peptide
  MOD_RES (2)..(4)..(41): Xaa is C or S
  MOD_RES (17)..(18)..(19)..(20)..(21): Xaa is A or G
  MOD_RES (22)..(23)..(24)..(25): Xaa is A or G or absent
AXAXELHEELRPYVKLXXXXXXXXXFFLVSLSSHHVRSPQXKV

SEQ ID NO: 24212 - protein, 38 aa, Artificial Sequence
  Non-cyclic GFR-binding peptide
  MOD_RES (2)..(4)..(38): Xaa is C or S
  MOD_RES (16)..(17)..(18)..(19)..(20): Xaa is A or G
  MOD_RES (21)..(22)..(23)..(24): Xaa is A or G or absent
RXGXAEVVMDPYVKLXXXXXXXXXFFLISLSSLRAPVX

SEQ ID NO: 24213 - protein, 40 aa, Artificial Sequence
  Non-cyclic GFR-binding peptide
  MOD_RES (1)..(34)..(35): Xaa is C or S
  MOD_RES (12)..(13)..(14)..(15)..(16): Xaa is A or G
  MOD_RES (17)..(18)..(19)..(20): Xaa is A or G or absent
XSKVVMPYVKLXXXXXXXXXFFLISLSSLDQPVXXPSASA

SEQ ID NO: 24214 - protein, 37 aa, Artificial Sequence
  Non-cyclic GFR-binding peptide
  MOD_RES (1)..(35)..(36): Xaa is C or S
  MOD_RES (13)..(14)..(15)..(16)..(17): Xaa is A or G
  MOD_RES (18)..(19)..(20)..(21): Xaa is A or G or absent
XAKVVMNPYVKLXXXXXXXXXFFLVSLSSLKTPAXXA

SEQ ID NO: 24215 - protein, 34 aa, Artificial Sequence
  Non-cyclic GFR-binding peptide
  MOD_RES (32)..(33): Xaa is C or S
AEVVMDPYVKLVVNNAADFFLISLSSLRAPVXXS

SEQ ID NO: 24216 - protein, 41 aa, Artificial Sequence
  Non-cyclic GFR-binding peptide
  MOD_RES (2)..(4)..(38)..(39): Xaa is C or S
  MOD_RES (16)..(17)..(18)..(19)..(20): Xaa is A or G
  MOD_RES (21)..(22)..(23)..(24): Xaa is A or G or absent
SXGXRDVVMGPYVKLXXXXXXXXXFFLMSLSSMKTPTXXPG

SEQ ID NO: 24217 - protein, 37 aa, Artificial Sequence
  Non-cyclic GFR-binding peptide
  MOD_RES (1)..(3)..(35)..(36): Xaa is C or S
XGXAKVVMNPYVKLIVNNSSDFFLVSLSSLKTPAXXA

SEQ ID NO: 24218 - protein, 35 aa, Artificial Sequence
  Non-cyclic GFR-binding peptide
ELHEELRPYVKLLKPKKRVYEFFLVSLSSHHVRSP

SEQ ID NO: 24219 - protein, 42 aa, Artificial Sequence
  Non-cyclic GFR-binding peptide
  MOD_RES (2)..(4)..(36)..(37): Xaa is C or S
RXGXESVAMGPYVKLYTVVGKDFFLISLSSLKTPVXXAKSAK

SEQ ID NO: 24220 - protein, 38 aa, Artificial Sequence
  Non-cyclic GFR-binding peptide
  MOD_RES (2)..(36)..(37): Xaa is C or S
  MOD_RES (14)..(15)..(16)..(17)..(18): Xaa is A or G
  MOD_RES (19)..(20)..(21)..(22): Xaa is A or G or absent
GXESVAMGPYVKLXXXXXXXXXFFLISLSSLKTPVXXA

SEQ ID NO: 24221 - protein, 37 aa, Artificial Sequence
  Non-cyclic GFR-binding peptide
  MOD_RES (34)..(34): Xaa is C or S
  MOD_RES (12)..(13)..(14)..(15)..(16): Xaa is A or G
  MOD_RES (17)..(18)..(19)..(20): Xaa is A or G or absent
SRVVMNPYVKLXXXXXXXXXFFLVSLSSLKTPAXTPK

SEQ ID NO: 24222 - protein, 39 aa, Artificial Sequence
  Non-cyclic GFR-binding peptide
  MOD_RES (1)..(3)..(37)..(38): Xaa is C or S
  MOD_RES (15)..(16)..(17)..(18)..(19): Xaa is A or G
  MOD_RES (20)..(21)..(22)..(23): Xaa is A or G or absent
XGXSEVVMDPYVKLXXXXXXXXXFFLISLSSLRTPVXXT

SEQ ID NO: 24223 - protein, 37 aa, Artificial Sequence
  Non-cyclic GFR-binding peptide
  MOD_RES (1)..(3)..(37): Xaa is C or S
  MOD_RES (15)..(16)..(17)..(18)..(19): Xaa is A or G
  MOD_RES (20)..(21)..(22)..(23): Xaa is A or G or absent
XGXAKVVMNPYVKLXXXXXXXXXFFLVSLSSLKTPAX

SEQ ID NO: 24224 - protein, 37 aa, Artificial Sequence
  Non-cyclic GFR-binding peptide
  MOD_RES (32)..(33): Xaa is C or S
SRVVMNPYVKLIVNSSDDFFLVSLSSLKTPAXXPKPV

SEQ ID NO: 24225 - protein, 39 aa, Artificial Sequence
  Non-cyclic GFR-binding peptide
  MOD_RES (1)..(35): Xaa is C or S
  MOD_RES (13)..(14)..(15)..(16)..(17): Xaa is A or G
  MOD_RES (18)..(19)..(20)..(21): Xaa is A or G or absent
XKNHQLFPYVKLXXXXXXXXXFFLMSLSSEETPVXELGE

SEQ ID NO: 24226 - protein, 34 aa, Artificial Sequence
  Non-cyclic GFR-binding peptide
  MOD_RES (33)..(34): Xaa is C or S
  MOD_RES (11)..(12)..(13)..(14)..(15): Xaa is A or G
  MOD_RES (16)..(17)..(18)..(19): Xaa is A or G or absent
EVVMEPYVKLXXXXXXXXXFFLMSLSSLETPVXX

SEQ ID NO: 24227 - protein, 39 aa, Artificial Sequence
  Non-cyclic GFR-binding peptide
  MOD_RES (2)..(35)..(36): Xaa is C or S
GXEAVSMGEPYVKLTPVGMDDFFLVSLSSLKTPVXXAKG

SEQ ID NO: 24228 - protein, 40 aa, Artificial Sequence
  Non-cyclic GFR-binding peptide
  MOD_RES (34)..(34): Xaa is C or S
  MOD_RES (12)..(13)..(14)..(15)..(16): Xaa is A or G
  MOD_RES (17)..(18)..(19)..(20): Xaa is A or G or absent
KNHQLFPYVKLXXXXXXXXXFFLMSLSSEETPVXELGEDN

SEQ ID NO: 24229 - protein, 42 aa, Artificial Sequence
  Non-cyclic GFR-binding peptide
  MOD_RES (2)..(39): Xaa is C or S
  MOD_RES (15)..(16)..(17)..(18)..(19): Xaa is A or G
  MOD_RES (20)..(21)..(22)..(23): Xaa is A or G or absent
AXELHEELRPYVKLXXXXXXXXXFFLVSLSSHHVRSPQXKVS

SEQ ID NO: 24230 - protein, 37 aa, Artificial Sequence
  Non-cyclic GFR-binding peptide
  MOD_RES (1)..(3)..(36)..(37): Xaa is C or S
XGXEAVSMGEPYVKLTPVGMDDFFLVSLSSLKTPVXX

SEQ ID NO: 24231 - protein, 39 aa, Artificial Sequence
  Non-cyclic GFR-binding peptide
  MOD_RES (1)..(36)..(37): Xaa is C or S
  MOD_RES (14)..(15)..(16)..(17)..(18): Xaa is A or G
  MOD_RES (19)..(20)..(21)..(22): Xaa is A or G or absent
XEAVSMGEPYVKLXXXXXXXXXFFLVSLSSLKTPVXXAK

SEQ ID NO: 24232 - protein, 39 aa, Artificial Sequence
  Non-cyclic GFR-binding peptide
  MOD_RES (1)..(3)..(37)..(38): Xaa is C or S
  MOD_RES (15)..(16)..(17)..(18)..(19): Xaa is A or G
  MOD_RES (20)..(21)..(22)..(23): Xaa is A or G or absent
XGXAEVVMDPYVKLXXXXXXXXXFFLISLSSLRAPVXXS

SEQ ID NO: 24233 - protein, 32 aa, Artificial Sequence
  Non-cyclic GFR-binding peptide
  MOD_RES (31)..(32): Xaa is C or S
KVVMNPYVKLIVNNSSDFFLVSLSSLKTPAXX

SEQ ID NO: 24234 - protein, 34 aa, Artificial Sequence
  Non-cyclic GFR-binding peptide
  MOD_RES (33)..(34): Xaa is C or S
  MOD_RES (11)..(12)..(13)..(14)..(15): Xaa is A or G
  MOD_RES (16)..(17)..(18)..(19): Xaa is A or G or absent
SKVVMPYVKLXXXXXXXXXFFLISLSSLDQPVXX

SEQ ID NO: 24235 - protein, 36 aa, Artificial Sequence
  Non-cyclic GFR-binding peptide
  MOD_RES (31)..(32): Xaa is C or S
RVVMNPYVKLIVNSSDDFFLVSLSSLKTPAXXPKPV

SEQ ID NO: 24236 - protein, 35 aa, Artificial Sequence
  Non-cyclic GFR-binding peptide
  MOD_RES (2)..(2): Xaa is C or S
  MOD_RES (14)..(15)..(16)..(17)..(18): Xaa is A or G
  MOD_RES (19)..(20)..(21)..(22): Xaa is A or G or absent
EXKNHQLFPYVKLXXXXXXXXXFFLMSLSSEETPV

SEQ ID NO: 24237 - protein, 39 aa, Artificial Sequence
  Non-cyclic GFR-binding peptide
  MOD_RES (2)..(35)..(36): Xaa is C or S
  MOD_RES (13)..(14)..(15)..(16)..(17): Xaa is A or G
  MOD_RES (18)..(19)..(20)..(21): Xaa is A or G or absent
KXSRVIMPYVKLXXXXXXXXXFFLISLSSLAQPVXXPAA

SEQ ID NO: 24238 - protein, 38 aa, Artificial Sequence
  Non-cyclic GFR-binding peptide
  MOD_RES (32)..(33): Xaa is C or S
SEVVMDPYVKLVVNNASDFFLISLSSLRTPVXXTPPTS

SEQ ID NO: 24239 - protein, 35 aa, Artificial Sequence
  Non-cyclic GFR-binding peptide
  MOD_RES (33)..(33): Xaa is C or S
  MOD_RES (11)..(12)..(13)..(14)..(15): Xaa is A or G
  MOD_RES (16)..(17)..(18)..(19): Xaa is A or G or absent
NHQLFPYVKLXXXXXXXXXFFLMSLSSEETPVXEL

SEQ ID NO: 24240 - protein, 39 aa, Artificial Sequence
  Non-cyclic GFR-binding peptide
  MOD_RES (33)..(34): Xaa is C or S
  MOD_RES (11)..(12)..(13)..(14)..(15): Xaa is A or G
  MOD_RES (16)..(17)..(18)..(19): Xaa is A or G or absent
EVVMDPYVKLXXXXXXXXXFFLISLSSLRTPVXXTPPTS

SEQ ID NO: 24241 - protein, 43 aa, Artificial Sequence
  Non-cyclic GFR-binding peptide
  MOD_RES (2)..(39): Xaa is C or S
  MOD_RES (15)..(16)..(17)..(18)..(19): Xaa is A or G
  MOD_RES (20)..(21)..(22)..(23): Xaa is A or G or absent
AXELHEELRPYVKLXXXXXXXXXFFLVSLSSHHVRSPQXKVSS

SEQ ID NO: 24242 - protein, 40 aa, Artificial Sequence
  Non-cyclic GFR-binding peptide
  MOD_RES (2)..(4)..(36)..(37): Xaa is C or S
RXGXAEVVMDPYVKLVVNNAADFFLISLSSLRAPVXXSAP

SEQ ID NO: 24243 - protein, 44 aa, Artificial Sequence
  Non-cyclic GFR-binding peptide
  MOD_RES (2)..(4)..(38)..(39): Xaa is C or S
  MOD_RES (16)..(17)..(18)..(19)..(20): Xaa is A or G
  MOD_RES (21)..(22)..(23)..(24): Xaa is A or G or absent
RXGXAEVVMDPYVKLXXXXXXXXXFFLISLSSLRAPVXXSAPAA

SEQ ID NO: 24244 - protein, 35 aa, Artificial Sequence
  Non-cyclic GFR-binding peptide
  MOD_RES (1)..(33)..(34): Xaa is C or S
XAEVVMDPYVKLVVNNAADFFLISLSSLRAPVXXS

SEQ ID NO: 24245 - protein, 37 aa, Artificial Sequence
  Non-cyclic GFR-binding peptide
  MOD_RES (1)..(35): Xaa is C or S
  MOD_RES (13)..(14)..(15)..(16)..(17): Xaa is A or G
  MOD_RES (18)..(19)..(20)..(21): Xaa is A or G or absent
XSRVVMNPYVKLXXXXXXXXXFFLVSLSSLKTPAXTP

SEQ ID NO: 24246 - protein, 38 aa, Artificial Sequence
  Non-cyclic GFR-binding peptide
  MOD_RES (33)..(33): Xaa is C or S
NHQLFPYVKLHQGQHPKIRFFLMSLSSEETPVXELGED

SEQ ID NO: 24247 - protein, 43 aa, Artificial Sequence
  Non-cyclic GFR-binding peptide
  MOD_RES (2)..(4)..(38)..(39): Xaa is C or S
  MOD_RES (16)..(17)..(18)..(19)..(20): Xaa is A or G
  MOD_RES (21)..(22)..(23)..(24): Xaa is A or G or absent
HXGXAKVVMNPYVKLXXXXXXXXXFFLVSLSSLKTPAXXAKPV

SEQ ID NO: 24248 - protein, 40 aa, Artificial Sequence
  Non-cyclic GFR-binding peptide
  MOD_RES (1)..(3)..(35)..(36): Xaa is C or S
XGXSRVVMNPYVKLIVNSSDDFFLVSLSSLKTPAXXPKPV

SEQ ID NO: 24249 - protein, 36 aa, Artificial Sequence
  Non-cyclic GFR-binding peptide
  MOD_RES (31)..(32): Xaa is C or S
DVVMGPYVKLIIQQKDNFFLMSLSSMKTPTXXPGAS

SEQ ID NO: 24250 - protein, 31 aa, Artificial Sequence
  Non-cyclic GFR-binding peptide
  MOD_RES (31)..(31): Xaa is C or S
RVVMNPYVKLIVNSSDDFFLVSLSSLQTPAX

SEQ ID NO: 24251 - protein, 37 aa, Artificial Sequence
  Non-cyclic GFR-binding peptide
  MOD_RES (2)..(34)..(35): Xaa is C or S
GXGEVVMEPYVKLVVKDYEDFFLMSLSSLETPVXXAK

SEQ ID NO: 24252 - protein, 39 aa, Artificial Sequence
  Non-cyclic GFR-binding peptide
  MOD_RES (1)..(3)..(35)..(36): Xaa is C or S
XGXARVVMNPYVKLIVNSSDDFFLVSLSSLQTPAXXPKP

SEQ ID NO: 24253 - protein, 35 aa, Artificial Sequence
  Non-cyclic GFR-binding peptide
  MOD_RES (32)..(33): Xaa is C or S
SRVVMNPYVKLIVNSSDDFFLVSLSSLKTPAXXPK

SEQ ID NO: 24254 - protein, 42 aa, Artificial Sequence
  Non-cyclic GFR-binding peptide
  MOD_RES (1)..(3)..(36)..(37): Xaa is C or S
XGXEAVSMGEPYVKLTPVGMDDFFLVSLSSLKTPVXXAKGVK

SEQ ID NO: 24255 - protein, 33 aa, Artificial Sequence
  Non-cyclic GFR-binding peptide
  MOD_RES (33)..(33): Xaa is C or S
  MOD_RES (11)..(12)..(13)..(14)..(15): Xaa is A or G
  MOD_RES (16)..(17)..(18)..(19): Xaa is A or G or absent
DVVMGPYVKLXXXXXXXXXFFLMSLSSMKTPTX

SEQ ID NO: 24256 - protein, 35 aa, Artificial Sequence
  Non-cyclic GFR-binding peptide
  MOD_RES (2)..(34)..(35): Xaa is C or S
GXSEVVMDPYVKLVVNNASDFFLISLSSLRTPVXX

SEQ ID NO: 24257 - protein, 36 aa, Artificial Sequence
  Non-cyclic GFR-binding peptide
  MOD_RES (34)..(35): Xaa is C or S
  MOD_RES (12)..(13)..(14)..(15)..(16): Xaa is A or G
  MOD_RES (17)..(18)..(19)..(20): Xaa is A or G or absent
ARVVMNPYVKLXXXXXXXXXFFLVSLSSLQTPAXXP

SEQ ID NO: 24258 - protein, 38 aa, Artificial Sequence
  Non-cyclic GFR-binding peptide
  MOD_RES (32)..(33): Xaa is C or S
ARVVMNPYVKLIVNSSDDFFLVSLSSLQTPAXXPKPVT

SEQ ID NO: 24259 - protein, 36 aa, Artificial Sequence
  Non-cyclic GFR-binding peptide
  MOD_RES (33)..(34): Xaa is C or S
  MOD_RES (11)..(12)..(13)..(14)..(15): Xaa is A or G
  MOD_RES (16)..(17)..(18)..(19): Xaa is A or G or absent
EVVMDPYVKLXXXXXXXXXFFLISLSSLRAPVXXSA

SEQ ID NO: 24260 - protein, 33 aa, Artificial Sequence
  Non-cyclic GFR-binding peptide
  MOD_RES (31)..(32): Xaa is C or S
RVVMNPYVKLIVNSSDDFFLVSLSSLQTPAXXP

SEQ ID NO: 24261 - protein, 39 aa, Artificial Sequence
  Non-cyclic GFR-binding peptide
  MOD_RES (2)..(4)..(38)..(39): Xaa is C or S
  MOD_RES (16)..(17)..(18)..(19)..(20): Xaa is A or G
  MOD_RES (21)..(22)..(23)..(24): Xaa is A or G or absent
RXGXESVAMGPYVKLXXXXXXXXXFFLISLSSLKTPVXX

SEQ ID NO: 24262 - protein, 36 aa, Artificial Sequence
  Non-cyclic GFR-binding peptide
  MOD_RES (2)..(4)..(36): Xaa is C or S
HXGXARVVMNPYVKLIVNSSDDFFLVSLSSLQTPAX

SEQ ID NO: 24263 - protein, 34 aa, Artificial Sequence
  Non-cyclic GFR-binding peptide
  MOD_RES (34)..(34): Xaa is C or S
  MOD_RES (12)..(13)..(14)..(15)..(16): Xaa is A or G
  MOD_RES (17)..(18)..(19)..(20): Xaa is A or G or absent
AEVVMDPYVKLXXXXXXXXXFFLISLSSLRAPVX

SEQ ID NO: 24264 - protein, 39 aa, Artificial Sequence
  Non-cyclic GFR-binding peptide
  MOD_RES (1)..(33)..(34): Xaa is C or S
XRDVVMGPYVKLIIQQKDNFFLMSLSSMKTPTXXPGASG

SEQ ID NO: 24265 - protein, 37 aa, Artificial Sequence
  Non-cyclic GFR-binding peptide
  MOD_RES (2)..(34)..(35): Xaa is C or S
GXAKVVMNPYVKLIVNNSSDFFLVSLSSLKTPAXXAK

SEQ ID NO: 24266 - protein, 30 aa, Artificial Sequence; identical to SEQ ID NO: 1814
  Non-cyclic GFR-binding peptide

SEQ ID NO: 24267 - protein, 40 aa, Artificial Sequence
  Non-cyclic GFR-binding peptide
  MOD_RES (2)..(4)..(38)..(39): Xaa is C or S
  MOD_RES (16)..(17)..(18)..(19)..(20): Xaa is A or G
  MOD_RES (21)..(22)..(23)..(24): Xaa is A or G or absent
HXGXAKVVMNPYVKLXXXXXXXXXFFLVSLSSLKTPAXXA

SEQ ID NO: 24268 - protein, 36 aa, Artificial Sequence
  Non-cyclic GFR-binding peptide
  MOD_RES (2)..(4)..(36): Xaa is C or S
HXGXAKVVMNPYVKLIVNNSSDFFLVSLSSLKTPAX

SEQ ID NO: 24269 - protein, 39 aa, Artificial Sequence
  Non-cyclic GFR-binding peptide
  MOD_RES (2)..(36): Xaa is C or S
  MOD_RES (14)..(15)..(16)..(17)..(18): Xaa is A or G
  MOD_RES (19)..(20)..(21)..(22): Xaa is A or G or absent
GXSRVVMNPYVKLXXXXXXXXXFFLVSLSSLKTPAXTPK

SEQ ID NO: 24270 - protein, 34 aa, Artificial Sequence
  Non-cyclic GFR-binding peptide
  MOD_RES (34)..(34): Xaa is C or S
  MOD_RES (12)..(13)..(14)..(15)..(16): Xaa is A or G
  MOD_RES (17)..(18)..(19)..(20): Xaa is A or G or absent
GEVVMEPYVKLXXXXXXXXXFFLMSLSSLETPVX

SEQ ID NO: 24271 - protein, 38 aa, Artificial Sequence
  Non-cyclic GFR-binding peptide
  MOD_RES (34)..(35): Xaa is C or S
  MOD_RES (12)..(13)..(14)..(15)..(16): Xaa is A or G
  MOD_RES (17)..(18)..(19)..(20): Xaa is A or G or absent
SEVVMDPYVKLXXXXXXXXXFFLISLSSLRTPVXXTPP

SEQ ID NO: 24272 - protein, 41 aa, Artificial Sequence
  Non-cyclic GFR-binding peptide
  MOD_RES (2)..(4)..(38): Xaa is C or S
RXEXKNHQLFPYVKLHQGQHPKIRFFLMSLSSEETPVXELG

SEQ ID NO: 24273 - protein, 38 aa, Artificial Sequence
  Non-cyclic GFR-binding peptide
  MOD_RES (1)..(3)..(35)..(36): Xaa is C or S
XGXARVVMNPYVKLIVNSSDDFFLVSLSSLQTPAXXPK

SEQ ID NO: 24274 - protein, 37 aa, Artificial Sequence
  Non-cyclic GFR-binding peptide
  MOD_RES (32)..(33): Xaa is C or S
GEVVMEPYVKLVVKDYEDFFLMSLSSLETPVXXAKPI

SEQ ID NO: 24275 - protein, 41 aa, Artificial Sequence
  Non-cyclic GFR-binding peptide
  MOD_RES (1)..(3)..(35)..(36): Xaa is C or S
XGXARVVMNPYVKLIVNSSDDFFLVSLSSLQTPAXXPKPVT

SEQ ID NO: 24276 - protein, 34 aa, Artificial Sequence
  Non-cyclic GFR-binding peptide
  MOD_RES (33)..(34): Xaa is C or S
  MOD_RES (11)..(12)..(13)..(14)..(15): Xaa is A or G
  MOD_RES (16)..(17)..(18)..(19): Xaa is A or G or absent
SRVIMPYVKLXXXXXXXXXFFLISLSSLAQPVXX

SEQ ID NO: 24277 - protein, 44 aa, Artificial Sequence
  Non-cyclic GFR-binding peptide
  MOD_RES (2)..(4)..(38): Xaa is C or S
RXEXKNHQLFPYVKLHQGQHPKIRFFLMSLSSEETPVXELGEDN

SEQ ID NO: 24278 - protein, 35 aa, Artificial Sequence
  Non-cyclic GFR-binding peptide
  MOD_RES (1)..(34)..(35): Xaa is C or S
  MOD_RES (12)..(13)..(14)..(15)..(16): Xaa is A or G
  MOD_RES (17)..(18)..(19)..(20): Xaa is A or G or absent
XSKVVMPYVKLXXXXXXXXXFFLISLSSLDQPVXX

SEQ ID NO: 24279 - protein, 39 aa, Artificial Sequence
  Non-cyclic GFR-binding peptide
  MOD_RES (2)..(35)..(36): Xaa is C or S
  MOD_RES (13)..(14)..(15)..(16)..(17): Xaa is A or G
  MOD_RES (18)..(19)..(20)..(21): Xaa is A or G or absent
KXSKVVMPYVKLXXXXXXXXXFFLISLSSLDQPVXXPSA

SEQ ID NO: 24280 - protein, 42 aa, Artificial Sequence
  Non-cyclic GFR-binding peptide
  MOD_RES (2)..(4)..(38)..(39): Xaa is C or S
  MOD_RES (16)..(17)..(18)..(19)..(20): Xaa is A or G
  MOD_RES (21)..(22)..(23)..(24): Xaa is A or G or absent
RXGXAEVVMDPYVKLXXXXXXXXXFFLISLSSLRAPVXXSAP

SEQ ID NO: 24281 - protein, 35 aa, Artificial Sequence
  Non-cyclic GFR-binding peptide
  MOD_RES (34)..(35): Xaa is C or S
  MOD_RES (12)..(13)..(14)..(15)..(16): Xaa is A or G
  MOD_RES (17)..(18)..(19)..(20): Xaa is A or G or absent
GEVVMEPYVKLXXXXXXXXXFFLMSLSSLETPVXX

SEQ ID NO: 24282 - protein, 35 aa, Artificial Sequence
  Non-cyclic GFR-binding peptide
  MOD_RES (2)..(34)..(35): Xaa is C or S
GXRDVVMGPYVKLIIQQKDNFFLMSLSSMKTPTXX

SEQ ID NO: 24283 - protein, 37 aa, Artificial Sequence
  Non-cyclic GFR-binding peptide
  MOD_RES (2)..(33)..(34): Xaa is C or S
KXSKVIMPYVKLIKPTKGIFFLISLSSLDQSVXXPSA

SEQ ID NO: 24284 - protein, 40 aa, Artificial Sequence
  Non-cyclic GFR-binding peptide
  MOD_RES (1)..(34)..(35): Xaa is C or S
  MOD_RES (12)..(13)..(14)..(15)..(16): Xaa is A or G
  MOD_RES (17)..(18)..(19)..(20): Xaa is A or G or absent
XSRVIMPYVKLXXXXXXXXXFFLISLSSLAQPVXXPAASA

SEQ ID NO: 24285 - protein, 33 aa, Artificial Sequence
  Non-cyclic GFR-binding peptide
  MOD_RES (33)..(33): Xaa is C or S
EAVSMGEPYVKLTPVGMDDFFLVSLSSLKTPVX

SEQ ID NO: 24286 - protein, 35 aa, Artificial Sequence
  Non-cyclic GFR-binding peptide
  MOD_RES (33)..(34): Xaa is C or S
  MOD_RES (11)..(12)..(13)..(14)..(15): Xaa is A or G
  MOD_RES (16)..(17)..(18)..(19): Xaa is A or G or absent
EVVMEPYVKLXXXXXXXXXFFLMSLSSLETPVXXA

SEQ ID NO: 24287 - protein, 39 aa, Artificial Sequence
  Non-cyclic GFR-binding peptide
  MOD_RES (2)..(39): Xaa is C or S
AXELHEELRPYVKLLKPKKRVYEFFLVSLSSHHVRSPQX

SEQ ID NO: 24288 - protein, 35 aa, Artificial Sequence
  Non-cyclic GFR-binding peptide
  MOD_RES (32)..(33): Xaa is C or S
ARVVMNPYVKLIVNSSDDFFLVSLSSLQTPAXXPK

SEQ ID NO: 24289 - protein, 38 aa, Artificial Sequence
  Non-cyclic GFR-binding peptide
  MOD_RES (33)..(33): Xaa is C or S
  MOD_RES (11)..(12)..(13)..(14)..(15): Xaa is A or G
  MOD_RES (16)..(17)..(18)..(19): Xaa is A or G or absent
RVVMNPYVKLXXXXXXXXXFFLVSLSSLKTPAXTPKTV

SEQ ID NO: 24290 - protein, 35 aa, Artificial Sequence
  Non-cyclic GFR-binding peptide
  MOD_RES (1)..(33)..(34): Xaa is C or S
XSEVVMDPYVKLVVNNASDFFLISLSSLRTPVXXT

SEQ ID NO: 24291 - protein, 40 aa, Artificial Sequence
  Non-cyclic GFR-binding peptide
  MOD_RES (1)..(3)..(37)..(38): Xaa is C or S
  MOD_RES (15)..(16)..(17)..(18)..(19): Xaa is A or G
  MOD_RES (20)..(21)..(22)..(23): Xaa is A or G or absent
XGXAEVVMDPYVKLXXXXXXXXXFFLISLSSLRAPVXXSA

SEQ ID NO: 24292 - protein, 32 aa, Artificial Sequence
  Non-cyclic GFR-binding peptide
  MOD_RES (1)..(32): Xaa is C or S
XEEVIMPYVKLLLVRGNDFFLMSLSSTKVPAX

SEQ ID NO: 24293 - protein, 37 aa, Artificial Sequence
  Non-cyclic GFR-binding peptide
  MOD_RES (2)..(4): Xaa is C or S
RXEXKNHQLFPYVKLHQGQHPKIRFFLMSLSSEETPV

SEQ ID NO: 24294 - protein, 31 aa, Artificial Sequence
  Non-cyclic GFR-binding peptide
  MOD_RES (1)..(1): Xaa is C or S
XEEVIMPYVKLLLVRGNDFFLMSLSSTKVPA

SEQ ID NO: 24295 - protein, 40 aa, Artificial Sequence
  Non-cyclic GFR-binding peptide
  MOD_RES (1)..(35)..(36): Xaa is C or S
  MOD_RES (13)..(14)..(15)..(16)..(17): Xaa is A or G
  MOD_RES (18)..(19)..(20)..(21): Xaa is A or G or absent
XESVAMGPYVKLXXXXXXXXXFFLISLSSLKTPVXXAKSA

SEQ ID NO: 24296 - protein, 33 aa, Artificial Sequence
  Non-cyclic GFR-binding peptide
  MOD_RES (1)..(32)..(33): Xaa is C or S
XSKVIMPYVKLIKPTKGIFFLISLSSLDQSVXX

SEQ ID NO: 24297 - protein, 37 aa, Artificial Sequence
  Non-cyclic GFR-binding peptide
  MOD_RES (2)..(4)..(35)..(36): Xaa is C or S
SXKXSRVIMPYVKLVKPKRGVFFLISLSSLAQPVXXP

SEQ ID NO: 24298 - protein, 36 aa, Artificial Sequence
  Non-cyclic GFR-binding peptide
  MOD_RES (1)..(3)..(36): Xaa is C or S
  MOD_RES (14)..(15)..(16)..(17)..(18): Xaa is A or G
  MOD_RES (19)..(20)..(21)..(22): Xaa is A or G or absent
XKXSRVIMPYVKLXXXXXXXXXFFLISLSSLAQPVX

SEQ ID NO: 24299 - protein, 35 aa, Artificial Sequence
  Non-cyclic GFR-binding peptide
  MOD_RES (32)..(33): Xaa is C or S
AEVVMDPYVKLVVNNAADFFLISLSSLRAPVXXSA

SEQ ID NO: 24300 - protein, 38 aa, Artificial Sequence
  Non-cyclic GFR-binding peptide
  MOD_RES (32)..(33): Xaa is C or S
SRVVMNPYVKLIVNSSDDFFLVSLSSLKTPAXXPKPVH

SEQ ID NO: 24301 - protein, 41 aa, Artificial Sequence
  Non-cyclic GFR-binding peptide
  MOD_RES (1)..(3)..(37)..(38): Xaa is C or S
  MOD_RES (15)..(16)..(17)..(18)..(19): Xaa is A or G
  MOD_RES (20)..(21)..(22)..(23): Xaa is A or G or absent
XGXARVVMNPYVKLXXXXXXXXXFFLVSLSSLQTPAXXPKP

SEQ ID NO: 24302 - protein, 42 aa, Artificial Sequence
  Non-cyclic GFR-binding peptide
  MOD_RES (2)..(4)..(36)..(37): Xaa is C or S
HXGXSRVVMNPYVKLIVNSSDDFFLVSLSSLKTPAXXPKPVY

SEQ ID NO: 24303 - protein, 35 aa, Artificial Sequence
  Non-cyclic GFR-binding peptide
  MOD_RES (33)..(33): Xaa is C or S
NHQLFPYVKLHQGQHPKIRFFLMSLSSEETPVXEL

SEQ ID NO: 24304 - protein, 40 aa, Artificial Sequence
  Non-cyclic GFR-binding peptide
  MOD_RES (2)..(4)..(36)..(37): Xaa is C or S
HXGXSRVVMNPYVKLIVNSSDDFFLVSLSSLKTPAXXPKP

SEQ ID NO: 24305 - protein, 39 aa, Artificial Sequence
  Non-cyclic GFR-binding peptide
  MOD_RES (2)..(4): Xaa is C or S
  MOD_RES (17)..(18)..(19)..(20)..(21): Xaa is A or G
  MOD_RES (22)..(23)..(24)..(25): Xaa is A or G or absent
AXAXELHEELRPYVKLXXXXXXXXXFFLVSLSSHHVRSP

SEQ ID NO: 24306 - protein, 39 aa, Artificial Sequence
  Non-cyclic GFR-binding peptide
  MOD_RES (1)..(34)..(35): Xaa is C or S
  MOD_RES (12)..(13)..(14)..(15)..(16): Xaa is A or G
  MOD_RES (17)..(18)..(19)..(20): Xaa is A or G or absent
XEEVIMPYVKLXXXXXXXXXFFLMSLSSTKVPAXXTSPV

SEQ ID NO: 24307 - protein, 40 aa, Artificial Sequence
  Non-cyclic GFR-binding peptide
  MOD_RES (2)..(4)..(37)..(38): Xaa is C or S
  MOD_RES (15)..(16)..(17)..(18)..(19): Xaa is A or G
  MOD_RES (20)..(21)..(22)..(23): Xaa is A or G or absent
SXKXSRVIMPYVKLXXXXXXXXXFFLISLSSLAQPVXXPA

SEQ ID NO: 24308 - protein, 34 aa, Artificial Sequence
  Non-cyclic GFR-binding peptide
  MOD_RES (1)..(32)..(33): Xaa is C or S
XSRVIMPYVKLVKPKRGVFFLISLSSLAQPVXXP

SEQ ID NO: 24309 - protein, 38 aa, Artificial Sequence
  Non-cyclic GFR-binding peptide
  MOD_RES (2)..(4)..(37)..(38): Xaa is C or S
  MOD_RES (15)..(16)..(17)..(18)..(19): Xaa is A or G
  MOD_RES (20)..(21)..(22)..(23): Xaa is A or G or absent
SXKXSRVIMPYVKLXXXXXXXXXFFLISLSSLAQPVXX

SEQ ID NO: 24310 - protein, 35 aa, Artificial Sequence
  Non-cyclic GFR-binding peptide
  MOD_RES (32)..(33): Xaa is C or S
ESVAMGPYVKLYTVVGKDFFLISLSSLKTPVXXAK

SEQ ID NO: 24311 - protein, 39 aa, Artificial Sequence
  Non-cyclic GFR-binding peptide
  MOD_RES (33)..(33): Xaa is C or S
  MOD_RES (11)..(12)..(13)..(14)..(15): Xaa is A or G
  MOD_RES (16)..(17)..(18)..(19): Xaa is A or G or absent
NHQLFPYVKLXXXXXXXXXFFLMSLSSEETPVXELGEDN

SEQ ID NO: 24312 - protein, 38 aa, Artificial Sequence
  Non-cyclic GFR-binding peptide
  MOD_RES (1)..(3)..(36)..(37): Xaa is C or S
  MOD_RES (14)..(15)..(16)..(17)..(18): Xaa is A or G
  MOD_RES (19)..(20)..(21)..(22): Xaa is A or G or absent
XKXSRVIMPYVKLXXXXXXXXXFFLISLSSLAQPVXXP

SEQ ID NO: 24313 - protein, 40 aa, Artificial Sequence
  Non-cyclic GFR-binding peptide
  MOD_RES (1)..(3)..(37): Xaa is C or S
XEXKNHQLFPYVKLHQGQHPKIRFFLMSLSSEETPVXELG

SEQ ID NO: 24314 - protein, 40 aa, Artificial Sequence
  Non-cyclic GFR-binding peptide
  MOD_RES (4)..(5)..(38)..(40): Xaa is C or S
GKAXXVPTKLSSLSVLFFDDMGVPTLKVYPEGMSVAEXGX

SEQ ID NO: 24315 - protein, 33 aa, Artificial Sequence
  Non-cyclic GFR-binding peptide
  MOD_RES (14)..(15)..(16)..(17)..(18): Xaa is A or G
  MOD_RES (19)..(20)..(21)..(22): Xaa is A or G or absent
VPTELSSLSMLFFXXXXXXXXXLKVYPEMVVEG

SEQ ID NO: 24316 - protein, 38 aa, Artificial Sequence
  Non-cyclic GFR-binding peptide
  MOD_RES (3)..(4)..(35)..(37): Xaa is C or S
SPXXVPQDLSSLSILFFVGRTPKVLKVYPMVVKSXKXS

SEQ ID NO: 24317 - protein, 41 aa, Artificial Sequence
  Non-cyclic GFR-binding peptide
  MOD_RES (6)..(7)..(39)..(41): Xaa is C or S
YVPKPXXAPTKLSSLSVLFFDDSSNVILKVYPNMVVRSXGX

SEQ ID NO: 24318 - protein, 43 aa, Artificial Sequence
  Non-cyclic GFR-binding peptide
  MOD_RES (5)..(6)..(40)..(42): Xaa is C or S
  MOD_RES (20)..(21)..(22)..(23)..(24): Xaa is A or G
  MOD_RES (25)..(26)..(27)..(28): Xaa is A or G or absent
APASXXVPARLSSLSILFFXXXXXXXXXLKVYPDMVVEAXGXR

SEQ ID NO: 24319 - protein, 32 aa, Artificial Sequence
  Non-cyclic GFR-binding peptide
  MOD_RES (32)..(32): Xaa is C or S
APTKLSSLSVLFFDSSNNVILKVYPNMVVKAX

SEQ ID NO: 24320 - protein, 37 aa, Artificial Sequence
  Non-cyclic GFR-binding peptide
  MOD_RES (3)..(4)..(35)..(37): Xaa is C or S
SPXXVPQDLSSLSILFFVGRTPKVLKVYPMVVKSXKX

SEQ ID NO: 24321 - protein, 31 aa, Artificial Sequence
  Non-cyclic GFR-binding peptide
  MOD_RES (1)..(1): Xaa is C or S
XAPTKLSSLSVLFFDSSNNVILKVYPNMVVK

SEQ ID NO: 24322 - protein, 35 aa, Artificial Sequence
  Non-cyclic GFR-binding peptide
  MOD_RES (34)..(34): Xaa is C or S
  MOD_RES (14)..(15)..(16)..(17)..(18): Xaa is A or G
  MOD_RES (19)..(20)..(21)..(22): Xaa is A or G or absent
TPTKMSSLSMLFFXXXXXXXXXLKVYPGMVVDRXG

SEQ ID NO: 24323 - protein, 40 aa, Artificial Sequence
  Non-cyclic GFR-binding peptide
  MOD_RES (6)..(40): Xaa is C or S
  MOD_RES (20)..(21)..(22)..(23)..(24): Xaa is A or G
  MOD_RES (25)..(26)..(27)..(28): Xaa is A or G or absent
DEGLEXVPTEESSLSMLFFXXXXXXXXXLKVYPFLQHNKX

SEQ ID NO: 24324 - protein, 34 aa, Artificial Sequence
  Non-cyclic GFR-binding peptide
  MOD_RES (1)..(2): Xaa is C or S
  MOD_RES (16)..(17)..(18)..(19)..(20): Xaa is A or G
  MOD_RES (21)..(22)..(23)..(24): Xaa is A or G or absent
XXVSQDLSSLSILFFXXXXXXXXXLKVYPMIVKS

SEQ ID NO: 24325 - protein, 32 aa, Artificial Sequence
  Non-cyclic GFR-binding peptide
  MOD_RES (32)..(32): Xaa is C or S
VPTELSSLSMLFFDEYDKVVLKVYPEMVVEGX

SEQ ID NO: 24326 - protein, 34 aa, Artificial Sequence
  Non-cyclic GFR-binding peptide
  MOD_RES (1)..(2)..(34): Xaa is C or S
XXVPARLSSLSILFFDAANNVVLKVYPDMVVEAX

SEQ ID NO: 24327 - protein, 40 aa, Artificial Sequence
  Non-cyclic GFR-binding peptide
  MOD_RES (5)..(39): Xaa is C or S
  MOD_RES (19)..(20)..(21)..(22)..(23): Xaa is A or G
  MOD_RES (24)..(25)..(26)..(27): Xaa is A or G or absent
TKPTXAPTKLSSLSVLFFXXXXXXXXXLKVYPNMVVRSXG

SEQ ID NO: 24328 - protein, 33 aa, Artificial Sequence
  Non-cyclic GFR-binding peptide
  MOD_RES (1)..(32): Xaa is C or S
XVSQDLSSLSILFFIGKTPKILKVYPMIVKSXK

SEQ ID NO: 24329 - protein, 34 aa, Artificial Sequence
  Non-cyclic GFR-binding peptide
  MOD_RES (34)..(34): Xaa is C or S
  MOD_RES (14)..(15)..(16)..(17)..(18): Xaa is A or G
  MOD_RES (19)..(20)..(21)..(22): Xaa is A or G or absent
VPTELSSLSMLFFXXXXXXXXXLKVYPEMVVEGX

SEQ ID NO: 24330 - protein, 41 aa, Artificial Sequence
  Non-cyclic GFR-binding peptide
  MOD_RES (4)..(5)..(38)..(40): Xaa is C or S
GKAXXVPTKLSSLSVLFFDDMGVPTLKVYPEGMSVAEXGXR

SEQ ID NO: 24331 - protein, 36 aa, Artificial Sequence
  Non-cyclic GFR-binding peptide
  MOD_RES (2)..(3)..(36): Xaa is C or S
AXXVPTKLSSLSVLFFDDMGVPTLKVYPEGMSVAEX

SEQ ID NO: 24332 - protein, 40 aa, Artificial Sequence
  Non-cyclic GFR-binding peptide
  MOD_RES (37)..(39): Xaa is C or S
QPSRVHHSSLSVLFFEYVRKKPKLLKVYPRLEEHLEXAXA

SEQ ID NO: 24333 - protein, 41 aa, Artificial Sequence
  Non-cyclic GFR-binding peptide
  MOD_RES (5)..(6)..(39)..(41): Xaa is C or S
  MOD_RES (20)..(21)..(22)..(23)..(24): Xaa is A or G
  MOD_RES (25)..(26)..(27)..(28): Xaa is A or G or absent
SAAPXXVPQALSSLSILFFXXXXXXXXXLKVYPMIVRSXKX

SEQ ID NO: 24334 - protein, 36 aa, Artificial Sequence
  Non-cyclic GFR-binding peptide
  MOD_RES (1)..(35): Xaa is C or S
XVPTEESSLSMLFFRIKPHQGQHLKVYPFLQHNKXE

SEQ ID NO: 24335 - protein, 38 aa, Artificial Sequence
  Non-cyclic GFR-binding peptide
  MOD_RES (6)..(38): Xaa is C or S
VTKPTXAPTKLSSLSVLFFDDSSNVILKVYPNMVVRSX

SEQ ID NO: 24336 - protein, 36 aa, Artificial Sequence
  Non-cyclic GFR-binding peptide
  MOD_RES (4)..(5): Xaa is C or S
PKPXXAPTQLSSLSVLFFDDSSNVILKVYPNMVVRA

SEQ ID NO: 24337 - protein, 39 aa, Artificial Sequence
  Non-cyclic GFR-binding peptide
  MOD_RES (2)..(3)..(37)..(39): Xaa is C or S
  MOD_RES (17)..(18)..(19)..(20)..(21): Xaa is A or G
  MOD_RES (22)..(23)..(24)..(25): Xaa is A or G or absent
AXXAPTKLSSLSVLFFXXXXXXXXXLKVYPNMVVKAXGX

SEQ ID NO: 24338 - protein, 35 aa, Artificial Sequence
  Non-cyclic GFR-binding peptide
  MOD_RES (1)..(2): Xaa is C or S
  MOD_RES (16)..(17)..(18)..(19)..(20): Xaa is A or G
  MOD_RES (21)..(22)..(23)..(24): Xaa is A or G or absent
XXVPARLSSLSILFFXXXXXXXXXLKVYPDMVVEA

SEQ ID NO: 24339 - protein, 39 aa, Artificial Sequence
  Non-cyclic GFR-binding peptide
  MOD_RES (1)..(2)..(36)..(38): Xaa is C or S
  MOD_RES (16)..(17)..(18)..(19)..(20): Xaa is A or G
  MOD_RES (21)..(22)..(23)..(24): Xaa is A or G or absent
XXAPTQLSSLSVLFFXXXXXXXXXLKVYPNMVVRAXGXH

SEQ ID NO: 24340 - protein, 34 aa, Artificial Sequence
  Non-cyclic GFR-binding peptide
  MOD_RES (33)..(33): Xaa is C or S
  MOD_RES (14)..(15)..(16)..(17)..(18): Xaa is A or G
  MOD_RES (19)..(20)..(21)..(22): Xaa is A or G or absent
VPQDLSSLSILFFXXXXXXXXXLKVYPMVVKSXK

SEQ ID NO: 24341 - protein, 41 aa, Artificial Sequence
  Non-cyclic GFR-binding peptide
  MOD_RES (5)..(6)..(38)..(40): Xaa is C or S
VPKAXXAPTKLSSLSVLFFDSSNNVILKVYPNMVVKAXGXH

SEQ ID NO: 24342 - protein, 39 aa, Artificial Sequence
  Non-cyclic GFR-binding peptide
  MOD_RES (2)..(3)..(37)..(39): Xaa is C or S
  MOD_RES (17)..(18)..(19)..(20)..(21): Xaa is A or G
  MOD_RES (22)..(23)..(24)..(25): Xaa is A or G or absent
PXXTPTKMSSLSMLFFXXXXXXXXXLKVYPGMVVDRXGX

SEQ ID NO: 24343 - protein, 40 aa, Artificial Sequence
  Non-cyclic GFR-binding peptide
  MOD_RES (6)..(7): Xaa is C or S
  MOD_RES (21)..(22)..(23)..(24)..(25): Xaa is A or G
  MOD_RES (26)..(27)..(28)..(29): Xaa is A or G or absent
STPPTXXVPTRLSSLSILFFXXXXXXXXXLKVYPDMVVES

SEQ ID NO: 24344 - protein, 39 aa, Artificial Sequence
  Non-cyclic GFR-binding peptide
  MOD_RES (5)..(6)..(37)..(39): Xaa is C or S
VPSTXXAPVKTSSLSMLFFDNGRVLLLKVYPMIVEEXGX

SEQ ID NO: 24345 - protein, 33 aa, Artificial Sequence
  Non-cyclic GFR-binding peptide
  MOD_RES (1)..(33): Xaa is C or S
XVPTRLSSLSILFFDSANNVVLKVYPDMVVESX

SEQ ID NO: 24346 - protein, 33 aa, Artificial Sequence
  Non-cyclic GFR-binding peptide
  MOD_RES (2)..(3): Xaa is C or S
SXXVPARLSSLSILFFDAANNVVLKVYPDMVVE

SEQ ID NO: 24347 - protein, 40 aa, Artificial Sequence
  Non-cyclic GFR-binding peptide
  MOD_RES (4)..(5)..(37)..(39): Xaa is C or S
PKPXXAPTQLSSLSVLFFDDSSNVILKVYPNMVVRAXGXH

SEQ ID NO: 24348 - protein, 44 aa, Artificial Sequence
  Non-cyclic GFR-binding peptide
  MOD_RES (6)..(7)..(41)..(43): Xaa is C or S
  MOD_RES (21)..(22)..(23)..(24)..(25): Xaa is A or G
  MOD_RES (26)..(27)..(28)..(29): Xaa is A or G or absent
KASKAXXVPTKLSSLSILFFXXXXXXXXXLKVYPGMAVSEXGXR

SEQ ID NO: 24349 - protein, 40 aa, Artificial Sequence
  Non-cyclic GFR-binding peptide
  MOD_RES (6)..(7)..(38)..(40): Xaa is C or S
RVPSTXXAPVKTSSLSMLFFDNGRVLLLKVYPMIVEEXGX

SEQ ID NO: 24350 - protein, 36 aa, Artificial Sequence
  Non-cyclic GFR-binding peptide
  MOD_RES (5)..(6): Xaa is C or S
ASKAXXVPTKLSSLSILFFDKGVVTYLKVYPGMAVS

SEQ ID NO: 24351 - protein, 34 aa, Artificial Sequence
  Non-cyclic GFR-binding peptide
  MOD_RES (2)..(3): Xaa is C or S
PXXTPTKMSSLSMLFFNDKQQIILKVYPGMVVDR

SEQ ID NO: 24352 - protein, 37 aa, Artificial Sequence
  Non-cyclic GFR-binding peptide
  MOD_RES (1)..(35)..(37): Xaa is C or S
  MOD_RES (15)..(16)..(17)..(18)..(19): Xaa is A or G
  MOD_RES (20)..(21)..(22)..(23): Xaa is A or G or absent
XAPTQLSSLSVLFFXXXXXXXXXLKVYPNMVVRAXGX

SEQ ID NO: 24353 - protein, 36 aa, Artificial Sequence
  Non-cyclic GFR-binding peptide
  MOD_RES (1)..(1): Xaa is C or S
  MOD_RES (17)..(18)..(19)..(20)..(21): Xaa is A or G
  MOD_RES (22)..(23)..(24)..(25): Xaa is A or G or absent
XQPSRVHHSSLSVLFFXXXXXXXXXLKVYPRLEEHL

SEQ ID NO: 24354 - protein, 38 aa, Artificial Sequence
  Non-cyclic GFR-binding peptide
  MOD_RES (1)..(35)..(37): Xaa is C or S
  MOD_RES (15)..(16)..(17)..(18)..(19): Xaa is A or G
  MOD_RES (20)..(21)..(22)..(23): Xaa is A or G or absent
XAPTKLSSLSVLFFXXXXXXXXXLKVYPNMVVKAXGXH

SEQ ID NO: 24355 - protein, 38 aa, Artificial Sequence
  Non-cyclic GFR-binding peptide
  MOD_RES (36)..(38): Xaa is C or S
  MOD_RES (15)..(16)..(17)..(18)..(19): Xaa is A or G
  MOD_RES (20)..(21)..(22)..(23): Xaa is A or G or absent
PSRVHHSSLSVLFFXXXXXXXXXLKVYPRLEEHLEXAX

SEQ ID NO: 24356 - protein, 34 aa, Artificial Sequence
  Non-cyclic GFR-binding peptide
  MOD_RES (1)..(33): Xaa is C or S
XVPARLSSLSILFFDAANNVVLKVYPDMVVEAXG

SEQ ID NO: 24357 - protein, 39 aa, Artificial Sequence
  Non-cyclic GFR-binding peptide
  MOD_RES (4)..(5)..(39): Xaa is C or S
  MOD_RES (19)..(20)..(21)..(22)..(23): Xaa is A or G
  MOD_RES (24)..(25)..(26)..(27): Xaa is A or G or absent
AGPXXTPTKMSSLSMLFFXXXXXXXXXLKVYPGMVVDRX

SEQ ID NO: 24358 - protein, 34 aa, Artificial Sequence
  Non-cyclic GFR-binding peptide
  MOD_RES (4)..(4): Xaa is C or S
KPTXAPTKLSSLSVLFFDDSSNVILKVYPNMVVR

SEQ ID NO: 24359 - protein, 45 aa, Artificial Sequence
  Non-cyclic GFR-binding peptide
  MOD_RES (5)..(42)..(44): Xaa is C or S
  MOD_RES (21)..(22)..(23)..(24)..(25): Xaa is A or G
  MOD_RES (26)..(27)..(28)..(29): Xaa is A or G or absent
SSVKXQPSRVHHSSLSVLFFXXXXXXXXXLKVYPRLEEHLEXAXA

SEQ ID NO: 24360 - protein, 33 aa, Artificial Sequence
  Non-cyclic GFR-binding peptide
  MOD_RES (1)..(2): Xaa is C or S
XXVPARLSSLSILFFDAANNVVLKVYPDMVVEA

SEQ ID NO: 24361 - protein, 34 aa, Artificial Sequence
  Non-cyclic GFR-binding peptide
  MOD_RES (3)..(3): Xaa is C or S
PTXAPTKLSSLSVLFFDDSSNVILKVYPNMVVRS

SEQ ID NO: 24362 - protein, 34 aa, Artificial Sequence
  Non-cyclic GFR-binding peptide
  MOD_RES (32)..(34): Xaa is C or S
VPTKLSSLSILFFDKGVVTYLKVYPGMAVSEXGX

SEQ ID NO: 24363 - protein, 33 aa, Artificial Sequence
  Non-cyclic GFR-binding peptide
  MOD_RES (32)..(32): Xaa is C or S
APTQLSSLSVLFFDDSSNVILKVYPNMVVRAXG

SEQ ID NO: 24364 - protein, 41 aa, Artificial Sequence
  Non-cyclic GFR-binding peptide
  MOD_RES (5)..(6)..(40): Xaa is C or S
  MOD_RES (20)..(21)..(22)..(23)..(24): Xaa is A or G
  MOD_RES (25)..(26)..(27)..(28): Xaa is A or G or absent
VPKPXXAPTQLSSLSVLFFXXXXXXXXXLKVYPNMVVRAXG

SEQ ID NO: 24365 - protein, 36 aa, Artificial Sequence
  Non-cyclic GFR-binding peptide
  MOD_RES (1)..(35): Xaa is C or S
  MOD_RES (15)..(16)..(17)..(18)..(19): Xaa is A or G
  MOD_RES (20)..(21)..(22)..(23): Xaa is A or G or absent
XAPTKLSSLSVLFFXXXXXXXXXLKVYPNMVVRSXG

SEQ ID NO: 24366 - protein, 32 aa, Artificial Sequence
  Non-cyclic GFR-binding peptide
  MOD_RES (1)..(1): Xaa is C or S
XTPTKMSSLSMLFFNDKQQIILKVYPGMVVDR

SEQ ID NO: 24367 - protein, 38 aa, Artificial Sequence
  Non-cyclic GFR-binding peptide
  MOD_RES (6)..(7): Xaa is C or S
KASKAXXVPTKLSSLSILFFDKGVVTYLKVYPGMAVSE

SEQ ID NO: 24368 - protein, 39 aa, Artificial Sequence
  Non-cyclic GFR-binding peptide
  MOD_RES (5)..(6)..(37)..(39): Xaa is C or S
SASPXXVPQDLSSLSILFFVGRTPKVLKVYPMVVKSXKX

SEQ ID NO: 24369 - protein, 37 aa, Artificial Sequence
  Non-cyclic GFR-binding peptide
  MOD_RES (2)..(2): Xaa is C or S
  MOD_RES (18)..(19)..(20)..(21)..(22): Xaa is A or G
  MOD_RES (23)..(24)..(25)..(26): Xaa is A or G or absent
KXQPSRVHHSSLSVLFFXXXXXXXXXLKVYPRLEEHL

SEQ ID NO: 24370 - protein, 38 aa, Artificial Sequence
  Non-cyclic GFR-binding peptide
  MOD_RES (6)..(6): Xaa is C or S
  MOD_RES (20)..(21)..(22)..(23)..(24): Xaa is A or G
  MOD_RES (25)..(26)..(27)..(28): Xaa is A or G or absent
DEGLEXVPTEESSLSMLFFXXXXXXXXXLKVYPFLQHN

SEQ ID NO: 24371 - protein, 39 aa, Artificial Sequence
  Non-cyclic GFR-binding peptide
  MOD_RES (6)..(7)..(39): Xaa is C or S
TVPKPXXAPTQLSSLSVLFFDDSSNVILKVYPNMVVRAX

SEQ ID NO: 24372 - protein, 39 aa, Artificial Sequence
  Non-cyclic GFR-binding peptide
  MOD_RES (5)..(6): Xaa is C or S
  MOD_RES (20)..(21)..(22)..(23)..(24): Xaa is A or G
  MOD_RES (25)..(26)..(27)..(28): Xaa is A or G or absent
VPKAXXAPTKLSSLSVLFFXXXXXXXXXLKVYPNMVVKA

SEQ ID NO: 24373 - protein, 36 aa, Artificial Sequence
  Non-cyclic GFR-binding peptide
  MOD_RES (3)..(3): Xaa is C or S
  MOD_RES (17)..(18)..(19)..(20)..(21): Xaa is A or G
  MOD_RES (22)..(23)..(24)..(25): Xaa is A or G or absent
LEXVPTEESSLSMLFFXXXXXXXXXLKVYPFLQHNK

SEQ ID NO: 24374 - protein, 34 aa, Artificial Sequence
  Non-cyclic GFR-binding peptide
  MOD_RES (3)..(4): Xaa is C or S
APXXVPQALSSLSILFFVGRKPKVLKVYPMIVRS

SEQ ID NO: 24375 - protein, 30 aa, Artificial Sequence; identical to SEQ ID NO: 757
  Non-cyclic GFR-binding peptide

SEQ ID NO: 24376 - protein, 38 aa, Artificial Sequence
  Non-cyclic GFR-binding peptide
  MOD_RES (1)..(2)..(36)..(38): Xaa is C or S
  MOD_RES (16)..(17)..(18)..(19)..(20): Xaa is A or G
  MOD_RES (21)..(22)..(23)..(24): Xaa is A or G or absent
XXVPTELSSLSMLFFXXXXXXXXXLKVYPEMVVEGXGX

SEQ ID NO: 24377 - protein, 40 aa, Artificial Sequence
  Non-cyclic GFR-binding peptide
  MOD_RES (6)..(7): Xaa is C or S
  MOD_RES (21)..(22)..(23)..(24)..(25): Xaa is A or G
  MOD_RES (26)..(27)..(28)..(29): Xaa is A or G or absent
YVPKPXXAPTKLSSLSVLFFXXXXXXXXXLKVYPNMVVRS

SEQ ID NO: 24378 - protein, 43 aa, Artificial Sequence
  Non-cyclic GFR-binding peptide
  MOD_RES (6)..(7)..(40)..(42): Xaa is C or S
KVGKAXXVPTKLSSLSVLFFDDMGVPTLKVYPEGMSVAEXGXR

SEQ ID NO: 24379 - protein, 39 aa, Artificial Sequence
  Non-cyclic GFR-binding peptide
  MOD_RES (4)..(5)..(37)..(39): Xaa is C or S
SKAXXVPTKLSSLSILFFDKGVVTYLKVYPGMAVSEXGX

SEQ ID NO: 24380 - protein, 39 aa, Artificial Sequence
  Non-cyclic GFR-binding peptide
  MOD_RES (6)..(7): Xaa is C or S
  MOD_RES (21)..(22)..(23)..(24)..(25): Xaa is A or G
  MOD_RES (26)..(27)..(28)..(29): Xaa is A or G or absent
YVPKPXXAPTKLSSLSVLFFXXXXXXXXXLKVYPNMVVR

SEQ ID NO: 24381 - protein, 35 aa, Artificial Sequence
  Non-cyclic GFR-binding peptide
  MOD_RES (4)..(5): Xaa is C or S
PASXXVPARLSSLSILFFDAANNVVLKVYPDMVVE

SEQ ID NO: 24382 - protein, 35 aa, Artificial Sequence
  Non-cyclic GFR-binding peptide
  MOD_RES (4)..(5): Xaa is C or S
PPTXXVPTRLSSLSILFFDSANNVVLKVYPDMVVE

SEQ ID NO: 24383 - protein, 41 aa, Artificial Sequence
  Non-cyclic GFR-binding peptide
  MOD_RES (4)..(5)..(39)..(41): Xaa is C or S
  MOD_RES (19)..(20)..(21)..(22)..(23): Xaa is A or G
  MOD_RES (24)..(25)..(26)..(27): Xaa is A or G or absent
PASXXVPARLSSLSILFFXXXXXXXXXLKVYPDMVVEAXGX

SEQ ID NO: 24384 - protein, 37 aa, Artificial Sequence
  Non-cyclic GFR-binding peptide
  MOD_RES (1)..(2)..(35)..(37): Xaa is C or S
  MOD_RES (16)..(17)..(18)..(19)..(20): Xaa is A or G
  MOD_RES (21)..(22)..(23)..(24): Xaa is A or G or absent
XXVSQDLSSLSILFFXXXXXXXXXLKVYPMIVKSXKX

SEQ ID NO: 24385 - protein, 37 aa, Artificial Sequence
  Non-cyclic GFR-binding peptide
  MOD_RES (2)..(3)..(34)..(36): Xaa is C or S
TXXAPVKTSSLSMLFFDNGRVLLLKVYPMIVEEXGXL

SEQ ID NO: 24386 - protein, 40 aa, Artificial Sequence
  Non-cyclic GFR-binding peptide
  MOD_RES (5)..(6)..(37)..(39): Xaa is C or S
SASPXXVPQDLSSLSILFFVGRTPKVLKVYPMVVKSXKXS

SEQ ID NO: 24387 - protein, 33 aa, Artificial Sequence
  Non-cyclic GFR-binding peptide
  MOD_RES (1)..(1): Xaa is C or S
  MOD_RES (15)..(16)..(17)..(18)..(19): Xaa is A or G
  MOD_RES (20)..(21)..(22)..(23): Xaa is A or G or absent
XVPQDLSSLSILFFXXXXXXXXXLKVYPMVVKS

SEQ ID NO: 24388 - protein, 38 aa, Artificial Sequence
  Non-cyclic GFR-binding peptide
  MOD_RES (3)..(4)..(38): Xaa is C or S
  MOD_RES (18)..(19)..(20)..(21)..(22): Xaa is A or G
  MOD_RES (23)..(24)..(25)..(26): Xaa is A or G or absent
KPXXAPTKLSSLSVLFFXXXXXXXXXLKVYPNMVVRSX

SEQ ID NO: 24389 - protein, 39 aa, Artificial Sequence
  Non-cyclic GFR-binding peptide
  MOD_RES (1)..(38): Xaa is C or S
  MOD_RES (17)..(18)..(19)..(20)..(21): Xaa is A or G
  MOD_RES (22)..(23)..(24)..(25): Xaa is A or G or absent
XQPSRVHHSSLSVLFFXXXXXXXXXLKVYPRLEEHLEXA

SEQ ID NO: 24390 - protein, 39 aa, Artificial Sequence
  Non-cyclic GFR-binding peptide
  MOD_RES (6)..(7): Xaa is C or S
  MOD_RES (21)..(22)..(23)..(24)..(25): Xaa is A or G
  MOD_RES (26)..(27)..(28)..(29): Xaa is A or G or absent
SIPKAXXVPTELSSLSMLFFXXXXXXXXXLKVYPEMVVE

SEQ ID NO: 24391 - protein, 42 aa, Artificial Sequence
  Non-cyclic GFR-binding peptide
  MOD_RES (4)..(5)..(40)..(42): Xaa is C or S
  MOD_RES (19)..(20)..(21)..(22)..(23): Xaa is A or G
  MOD_RES (24)..(25)..(26)..(27): Xaa is A or G or absent
GKAXXVPTKLSSLSVLFFXXXXXXXXXLKVYPEGMSVAEXGX

SEQ ID NO: 24392 - protein, 38 aa, Artificial Sequence
  Non-cyclic GFR-binding peptide
  MOD_RES (1)..(2)..(36)..(38): Xaa is C or S
  MOD_RES (16)..(17)..(18)..(19)..(20): Xaa is A or G
  MOD_RES (21)..(22)..(23)..(24): Xaa is A or G or absent
XXAPTKLSSLSVLFFXXXXXXXXXLKVYPNMVVRSXGX

SEQ ID NO: 24393 - protein, 33 aa, Artificial Sequence
  Non-cyclic GFR-binding peptide
  MOD_RES (32)..(32): Xaa is C or S
APTKLSSLSVLFFDSSNNVILKVYPNMVVKAXG

SEQ ID NO: 24394 - protein, 34 aa, Artificial Sequence
  Non-cyclic GFR-binding peptide
  MOD_RES (3)..(4): Xaa is C or S
KAXXVPTELSSLSMLFFDEYDKVVLKVYPEMVVE

SEQ ID NO: 24395 - protein, 35 aa, Artificial Sequence
  Non-cyclic GFR-binding peptide
  MOD_RES (1)..(2)..(35): Xaa is C or S
  MOD_RES (16)..(17)..(18)..(19)..(20): Xaa is A or G
  MOD_RES (21)..(22)..(23)..(24): Xaa is A or G or absent
XXVPQALSSLSILFFXXXXXXXXXLKVYPMIVRSX

SEQ ID NO: 24396 - protein, 40 aa, Artificial Sequence
  Non-cyclic GFR-binding peptide
  MOD_RES (4)..(5)..(39): Xaa is C or S
  MOD_RES (19)..(20)..(21)..(22)..(23): Xaa is A or G
  MOD_RES (24)..(25)..(26)..(27): Xaa is A or G or absent
PKPXXAPTKLSSLSVLFFXXXXXXXXXLKVYPNMVVRSXG

SEQ ID NO: 24397 - protein, 40 aa, Artificial Sequence
  Non-cyclic GFR-binding peptide
  MOD_RES (6)..(7): Xaa is C or S
  MOD_RES (21)..(22)..(23)..(24)..(25): Xaa is A or G
  MOD_RES (26)..(27)..(28)..(29): Xaa is A or G or absent
GSAGPXXTPTKMSSLSMLFFXXXXXXXXXLKVYPGMVVDR

SEQ ID NO: 24398 - protein, 35 aa, Artificial Sequence
  Non-cyclic GFR-binding peptide
  MOD_RES (33)..(35): Xaa is C or S
  MOD_RES (14)..(15)..(16)..(17)..(18): Xaa is A or G
  MOD_RES (19)..(20)..(21)..(22): Xaa is A or G or absent
VPQDLSSLSILFFXXXXXXXXXLKVYPMVVKSXKX

SEQ ID NO: 24399 - protein, 43 aa, Artificial Sequence
  Non-cyclic GFR-binding peptide
  MOD_RES (6)..(7)..(41)..(43): Xaa is C or S
  MOD_RES (21)..(22)..(23)..(24)..(25): Xaa is A or G
  MOD_RES (26)..(27)..(28)..(29): Xaa is A or G or absent
TVPKPXXAPTQLSSLSVLFFXXXXXXXXXLKVYPNMVVRAXGX

SEQ ID NO: 24400 - protein, 40 aa, Artificial Sequence
  Non-cyclic GFR-binding peptide
  MOD_RES (3)..(4)..(37)..(39): Xaa is C or S
KAXXVPTKLSSLSVLFFDDMGVPTLKVYPEGMSVAEXGXR

SEQ ID NO: 24401 - protein, 36 aa, Artificial Sequence
  Non-cyclic GFR-binding peptide
  MOD_RES (34)..(36): Xaa is C or S
  MOD_RES (14)..(15)..(16)..(17)..(18): Xaa is A or G
  MOD_RES (19)..(20)..(21)..(22): Xaa is A or G or absent
VPTRLSSLSILFFXXXXXXXXXLKVYPDMVVESXGX

SEQ ID NO: 24402 - protein, 42 aa, Artificial Sequence
  Non-cyclic GFR-binding peptide
  MOD_RES (5)..(6)..(40)..(42): Xaa is C or S
  MOD_RES (20)..(21)..(22)..(23)..(24): Xaa is A or G
  MOD_RES (25)..(26)..(27)..(28): Xaa is A or G or absent
VPKAXXAPTKLSSLSVLFFXXXXXXXXXLKVYPNMVVKAXGX

SEQ ID NO: 24403 - protein, 43 aa, Artificial Sequence
  Non-cyclic GFR-binding peptide
  MOD_RES (7)..(41)..(43): Xaa is C or S
  MOD_RES (21)..(22)..(23)..(24)..(25): Xaa is A or G
  MOD_RES (26)..(27)..(28)..(29): Xaa is A or G or absent
HVTKPTXAPTKLSSLSVLFFXXXXXXXXXLKVYPNMVVRSXGX

SEQ ID NO: 24404 - protein, 36 aa, Artificial Sequence
  Non-cyclic GFR-binding peptide
  MOD_RES (4)..(5)..(36): Xaa is C or S
ASPXXVSQDLSSLSILFFIGKTPKILKVYPMIVKSX

SEQ ID NO: 24405 - protein, 36 aa, Artificial Sequence
  Non-cyclic GFR-binding peptide
  MOD_RES (1)..(34)..(36): Xaa is C or S
  MOD_RES (15)..(16)..(17)..(18)..(19): Xaa is A or G
  MOD_RES (20)..(21)..(22)..(23): Xaa is A or G or absent
XVPQDLSSLSILFFXXXXXXXXXLKVYPMVVKSXKX

SEQ ID NO: 24406 - protein, 37 aa, Artificial Sequence
  Non-cyclic GFR-binding peptide
  MOD_RES (4)..(5): Xaa is C or S
  MOD_RES (19)..(20)..(21)..(22)..(23): Xaa is A or G
  MOD_RES (24)..(25)..(26)..(27): Xaa is A or G or absent
SKAXXVPTKLSSLSILFFXXXXXXXXXLKVYPGMAVS

SEQ ID NO: 24407 - protein, 41 aa, Artificial Sequence
  Non-cyclic GFR-binding peptide
  MOD_RES (5)..(6)..(38)..(40): Xaa is C or S
TPPTXXVPTRLSSLSILFFDSANNVVLKVYPDMVVESXGXR

SEQ ID NO: 24408 - protein, 37 aa, Artificial Sequence
  Non-cyclic GFR-binding peptide
  MOD_RES (1)..(2)..(36): Xaa is C or S
  MOD_RES (16)..(17)..(18)..(19)..(20): Xaa is A or G
  MOD_RES (21)..(22)..(23)..(24): Xaa is A or G or absent
XXTPTKMSSLSMLFFXXXXXXXXXLKVYPGMVVDRXG

SEQ ID NO: 24409 - protein, 41 aa, Artificial Sequence
  Non-cyclic GFR-binding peptide
  MOD_RES (4)..(41): Xaa is C or S
  MOD_RES (20)..(21)..(22)..(23)..(24): Xaa is A or G
  MOD_RES (25)..(26)..(27)..(28): Xaa is A or G or absent
SVKXQPSRVHHSSLSVLFFXXXXXXXXXLKVYPRLEEHLEX

SEQ ID NO: 24410 - protein, 34 aa, Artificial Sequence
  Non-cyclic GFR-binding peptide
  MOD_RES (31)..(33): Xaa is C or S
VPQDLSSLSILFFVGRTPKVLKVYPMVVKSXKXS

SEQ ID NO: 24411 - protein, 34 aa, Artificial Sequence
  Non-cyclic GFR-binding peptide
  MOD_RES (1)..(33): Xaa is C or S
XAPTKLSSLSVLFFDSSNNVILKVYPNMVVKAXG

SEQ ID NO: 24412 - protein, 34 aa, Artificial Sequence
  Non-cyclic GFR-binding peptide
  MOD_RES (2)..(3)..(34): Xaa is C or S
TXXAPVKTSSLSMLFFDNGRVLLLKVYPMIVEEX

SEQ ID NO: 24413 - protein, 37 aa, Artificial Sequence
  Non-cyclic GFR-binding peptide
  MOD_RES (6)..(7): Xaa is C or S
ASASPXXVSQDLSSLSILFFIGKTPKILKVYPMIVKS

SEQ ID NO: 24414 - protein, 38 aa, Artificial Sequence
  Non-cyclic GFR-binding peptide
  MOD_RES (5)..(6)..(38): Xaa is C or S
VPKPXXAPTKLSSLSVLFFDDSSNVILKVYPNMVVRSX

SEQ ID NO: 24415 - protein, 37 aa, Artificial Sequence
  Non-cyclic GFR-binding peptide
  MOD_RES (1)..(2)..(36): Xaa is C or S
  MOD_RES (16)..(17)..(18)..(19)..(20): Xaa is A or G
  MOD_RES (21)..(22)..(23)..(24): Xaa is A or G or absent
XXVPTRLSSLSILFFXXXXXXXXXLKVYPDMVVESXG

SEQ ID NO: 24416 - protein, 38 aa, Artificial Sequence
  Non-cyclic GFR-binding peptide
  MOD_RES (3)..(3): Xaa is C or S
VKXQPSRVHHSSLSVLFFEYVRKKPKLLKVYPRLEEHL

SEQ ID NO: 24417 - protein, 38 aa, Artificial Sequence
  Non-cyclic GFR-binding peptide
  MOD_RES (2)..(2): Xaa is C or S
KXQPSRVHHSSLSVLFFEYVRKKPKLLKVYPRLEEHLE

SEQ ID NO: 24418 - protein, 34 aa, Artificial Sequence
  Non-cyclic GFR-binding peptide
  MOD_RES (34)..(34): Xaa is C or S
  MOD_RES (14)..(15)..(16)..(17)..(18): Xaa is A or G
  MOD_RES (19)..(20)..(21)..(22): Xaa is A or G or absent
APTKLSSLSVLFFXXXXXXXXXLKVYPNMVVKAX

SEQ ID NO: 24419 - protein, 41 aa, Artificial Sequence
  Non-cyclic GFR-binding peptide
  MOD_RES (6)..(7): Xaa is C or S
  MOD_RES (21)..(22)..(23)..(24)..(25): Xaa is A or G
  MOD_RES (26)..(27)..(28)..(29): Xaa is A or G or absent
KVGKAXXVPTKLSSLSVLFFXXXXXXXXXLKVYPEGMSVAE

SEQ ID NO: 24420 - protein, 36 aa, Artificial Sequence
  Non-cyclic GFR-binding peptide
  MOD_RES (1)..(2)..(34)..(36): Xaa is C or S
XXVPTKLSSLSILFFDKGVVTYLKVYPGMAVSEXGX

SEQ ID NO: 24421 - protein, 36 aa, Artificial Sequence
  Non-cyclic GFR-binding peptide
  MOD_RES (2)..(2): Xaa is C or S
  MOD_RES (18)..(19)..(20)..(21)..(22): Xaa is A or G
  MOD_RES (23)..(24)..(25)..(26): Xaa is A or G or absent
KXQPSRVHHSSLSVLFFXXXXXXXXXLKVYPRLEEH

SEQ ID NO: 24422 - protein, 40 aa, Artificial Sequence
  Non-cyclic GFR-binding peptide
  MOD_RES (5)..(6)..(38)..(40): Xaa is C or S
TPPTXXVPTRLSSLSILFFDSANNVVLKVYPDMVVESXGX

SEQ ID NO: 24423 - protein, 34 aa, Artificial Sequence
  Non-cyclic GFR-binding peptide
  MOD_RES (1)..(33): Xaa is C or S
XAPTQLSSLSVLFFDDSSNVILKVYPNMVVRAXG

SEQ ID NO: 24424 - protein, 40 aa, Artificial Sequence
  Non-cyclic GFR-binding peptide
  MOD_RES (1)..(38)..(40): Xaa is C or S
  MOD_RES (17)..(18)..(19)..(20)..(21): Xaa is A or G
  MOD_RES (22)..(23)..(24)..(25): Xaa is A or G or absent
XQPSRVHHSSLSVLFFXXXXXXXXXLKVYPRLEEHLEXAX

SEQ ID NO: 24425 - protein, 37 aa, Artificial Sequence
  Non-cyclic GFR-binding peptide
  MOD_RES (34)..(36): Xaa is C or S
  MOD_RES (14)..(15)..(16)..(17)..(18): Xaa is A or G
  MOD_RES (19)..(20)..(21)..(22): Xaa is A or G or absent
TPTKMSSLSMLFFXXXXXXXXXLKVYPGMVVDRXGXS

SEQ ID NO: 24426 - protein, 40 aa, Artificial Sequence
  Non-cyclic GFR-binding peptide
  MOD_RES (4)..(5)..(38)..(40): Xaa is C or S
  MOD_RES (19)..(20)..(21)..(22)..(23): Xaa is A or G
  MOD_RES (24)..(25)..(26)..(27): Xaa is A or G or absent
ASPXXVPQDLSSLSILFFXXXXXXXXXLKVYPMVVKSXKX

SEQ ID NO: 24427 - protein, 32 aa, Artificial Sequence
  Non-cyclic GFR-binding peptide
  MOD_RES (1)..(1): Xaa is C or S
XAPTKLSSLSVLFFDSSNNVILKVYPNMVVKA

SEQ ID NO: 24428 - protein, 36 aa, Artificial Sequence
  Non-cyclic GFR-binding peptide
  MOD_RES (1)..(35): Xaa is C or S
  MOD_RES (15)..(16)..(17)..(18)..(19): Xaa is A or G
  MOD_RES (20)..(21)..(22)..(23): Xaa is A or G or absent
XVPTKLSSLSILFFXXXXXXXXXLKVYPGMAVSEXG

SEQ ID NO: 24429 - protein, 39 aa, Artificial Sequence
  Non-cyclic GFR-binding peptide
  MOD_RES (4)..(5)..(38): Xaa is C or S
  MOD_RES (19)..(20)..(21)..(22)..(23): Xaa is A or G
  MOD_RES (24)..(25)..(26)..(27): Xaa is A or G or absent
ASPXXVSQDLSSLSILFFXXXXXXXXXLKVYPMIVKSXK

SEQ ID NO: 24430 - protein, 35 aa, Artificial Sequence
  Non-cyclic GFR-binding peptide
  MOD_RES (1)..(33)..(35): Xaa is C or S
XAPTQLSSLSVLFFDDSSNVILKVYPNMVVRAXGX

SEQ ID NO: 24431 - protein, 42 aa, Artificial Sequence
  Non-cyclic GFR-binding peptide
  MOD_RES (6)..(7)..(39)..(41): Xaa is C or S
AAPASXXVPARLSSLSILFFDAANNVVLKVYPDMVVEAXGXR

SEQ ID NO: 24432 - protein, 35 aa, Artificial Sequence
  Non-cyclic GFR-binding peptide
  MOD_RES (3)..(4)..(35): Xaa is C or S
SPXXVSQDLSSLSILFFIGKTPKILKVYPMIVKSX

SEQ ID NO: 24433 - protein, 40 aa, Artificial Sequence
  Non-cyclic GFR-binding peptide
  MOD_RES (5)..(6)..(38)..(40): Xaa is C or S
APASXXVPARLSSLSILFFDAANNVVLKVYPDMVVEAXGX

SEQ ID NO: 24434 - protein, 37 aa, Artificial Sequence
  Non-cyclic GFR-binding peptide
  MOD_RES (4)..(5): Xaa is C or S
  MOD_RES (19)..(20)..(21)..(22)..(23): Xaa is A or G
  MOD_RES (24)..(25)..(26)..(27): Xaa is A or G or absent
PKAXXVPTELSSLSMLFFXXXXXXXXXLKVYPEMVVE

SEQ ID NO: 24435 - protein, 33 aa, Artificial Sequence
  Non-cyclic GFR-binding peptide
  MOD_RES (1)..(1): Xaa is C or S
XVPTEESSLSMLFFRIKPHQGQHLKVYPFLQHN

SEQ ID NO: 24436 - protein, 34 aa, Artificial Sequence
  Non-cyclic GFR-binding peptide
SRVHHSSLSVLFFEYVRKKPKLLKVYPRLEEHLE

SEQ ID NO: 24437 - protein, 36 aa, Artificial Sequence
  Non-cyclic GFR-binding peptide
  MOD_RES (33)..(35): Xaa is C or S
  MOD_RES (14)..(15)..(16)..(17)..(18): Xaa is A or G
  MOD_RES (19)..(20)..(21)..(22): Xaa is A or G or absent
APVKTSSLSMLFFXXXXXXXXXLKVYPMIVEEXGXL

SEQ ID NO: 24438 - protein, 30 aa, Artificial Sequence; identical to SEQ ID NO: 760
  Non-cyclic GFR-binding peptide

SEQ ID NO: 24439 - protein, 39 aa, Artificial Sequence
  Non-cyclic GFR-binding peptide
  MOD_RES (1)..(36)..(38): Xaa is C or S
  MOD_RES (15)..(16)..(17)..(18)..(19): Xaa is A or G
  MOD_RES (20)..(21)..(22)..(23): Xaa is A or G or absent
XVPTKLSSLSVLFFXXXXXXXXXLKVYPEGMSVAEXGXR

SEQ ID NO: 24440 - protein, 37 aa, Artificial Sequence
  Non-cyclic GFR-binding peptide
  MOD_RES (4)..(5)..(37): Xaa is C or S
SKAXXVPTKLSSLSILFFDKGVVTYLKVYPGMAVSEX

SEQ ID NO: 24441 - protein, 40 aa, Artificial Sequence
  Non-cyclic GFR-binding peptide
  MOD_RES (4)..(4): Xaa is C or S
SVKXQPSRVHHSSLSVLFFEYVRKKPKLLKVYPRLEEHLE

SEQ ID NO: 24442 - protein, 31 aa, Artificial Sequence
  Non-cyclic GFR-binding peptide
  MOD_RES (31)..(31): Xaa is C or S
VPQDLSSLSILFFVGRTPKVLKVYPMVVKSX

SEQ ID NO: 24443 - protein, 39 aa, Artificial Sequence
  Non-cyclic GFR-binding peptide
  MOD_RES (3)..(4)..(37)..(39): Xaa is C or S
  MOD_RES (18)..(19)..(20)..(21)..(22): Xaa is A or G
  MOD_RES (23)..(24)..(25)..(26): Xaa is A or G or absent
SPXXVSQDLSSLSILFFXXXXXXXXXLKVYPMIVKSXKX

SEQ ID NO: 24444 - protein, 39 aa, Artificial Sequence
  Non-cyclic GFR-binding peptide
  MOD_RES (5)..(6): Xaa is C or S
  MOD_RES (20)..(21)..(22)..(23)..(24): Xaa is A or G
  MOD_RES (25)..(26)..(27)..(28): Xaa is A or G or absent
SAGPXXTPTKMSSLSMLFFXXXXXXXXXLKVYPGMVVDR

SEQ ID NO: 24445 - protein, 41 aa, Artificial Sequence
  Non-cyclic GFR-binding peptide
  MOD_RES (4)..(5)..(39)..(41): Xaa is C or S
  MOD_RES (19)..(20)..(21)..(22)..(23): Xaa is A or G
  MOD_RES (24)..(25)..(26)..(27): Xaa is A or G or absent
PKPXXAPTKLSSLSVLFFXXXXXXXXXLKVYPNMVVRSXGX

SEQ ID NO: 24446 - protein, 32 aa, Artificial Sequence
  Non-cyclic GFR-binding peptide
SRVHHSSLSVLFFEYVRKKPKLLKVYPRLEEH

SEQ ID NO: 24447 - protein, 38 aa, Artificial Sequence
  Non-cyclic GFR-binding peptide
  MOD_RES (1)..(35)..(37): Xaa is C or S
  MOD_RES (15)..(16)..(17)..(18)..(19): Xaa is A or G
  MOD_RES (20)..(21)..(22)..(23): Xaa is A or G or absent
XVPTKLSSLSILFFXXXXXXXXXLKVYPGMAVSEXGXR

SEQ ID NO: 24448 - protein, 38 aa, Artificial Sequence
  Non-cyclic GFR-binding peptide
  MOD_RES (2)..(3)..(38): Xaa is C or S
  MOD_RES (17)..(18)..(19)..(20)..(21): Xaa is A or G
  MOD_RES (22)..(23)..(24)..(25): Xaa is A or G or absent
AXXVPTKLSSLSVLFFXXXXXXXXXLKVYPEGMSVAEX

SEQ ID NO: 24449 - protein, 38 aa, Artificial Sequence
  Non-cyclic GFR-binding peptide
  MOD_RES (5)..(6): Xaa is C or S
  MOD_RES (20)..(21)..(22)..(23)..(24): Xaa is A or G
  MOD_RES (25)..(26)..(27)..(28): Xaa is A or G or absent
SAAPXXVPQALSSLSILFFXXXXXXXXXLKVYPMIVRS

SEQ ID NO: 24450 - protein, 41 aa, Artificial Sequence
  Non-cyclic GFR-binding peptide
  MOD_RES (6)..(7)..(39)..(41): Xaa is C or S
KASKAXXVPTKLSSLSILFFDKGVVTYLKVYPGMAVSEXGX

SEQ ID NO: 24451 - protein, 39 aa, Artificial Sequence
  Non-cyclic GFR-binding peptide
  MOD_RES (4)..(5)..(36)..(38): Xaa is C or S
AAPXXVPQALSSLSILFFVGRKPKVLKVYPMIVRSXKXS

SEQ ID NO: 24452 - protein, 39 aa, Artificial Sequence
  Non-cyclic GFR-binding peptide
  MOD_RES (5)..(6)..(38): Xaa is C or S
VPKPXXAPTKLSSLSVLFFDDSSNVILKVYPNMVVRSXG

SEQ ID NO: 24453 - protein, 41 aa, Artificial Sequence
  Non-cyclic GFR-binding peptide
  MOD_RES (5)..(39)..(41): Xaa is C or S
  MOD_RES (19)..(20)..(21)..(22)..(23): Xaa is A or G
  MOD_RES (24)..(25)..(26)..(27): Xaa is A or G or absent
TKPTXAPTKLSSLSVLFFXXXXXXXXXLKVYPNMVVRSXGX

SEQ ID NO: 24454 - protein, 42 aa, Artificial Sequence
  Non-cyclic GFR-binding peptide
  MOD_RES (4)..(5)..(39)..(41): Xaa is C or S
  MOD_RES (19)..(20)..(21)..(22)..(23): Xaa is A or G
  MOD_RES (24)..(25)..(26)..(27): Xaa is A or G or absent
PKAXXVPTELSSLSMLFFXXXXXXXXXLKVYPEMVVEGXGXR

SEQ ID NO: 24455 - protein, 41 aa, Artificial Sequence
  Non-cyclic GFR-binding peptide
  MOD_RES (3)..(4)..(38)..(40): Xaa is C or S
  MOD_RES (18)..(19)..(20)..(21)..(22): Xaa is A or G
  MOD_RES (23)..(24)..(25)..(26): Xaa is A or G or absent
ASXXVPARLSSLSILFFXXXXXXXXXLKVYPDMVVEAXGXR

SEQ ID NO: 24456 - protein, 38 aa, Artificial Sequence
  Non-cyclic GFR-binding peptide
  MOD_RES (2)..(36)..(38): Xaa is C or S
  MOD_RES (16)..(17)..(18)..(19)..(20): Xaa is A or G
  MOD_RES (21)..(22)..(23)..(24): Xaa is A or G or absent
TXAPTKLSSLSVLFFXXXXXXXXXLKVYPNMVVRSXGX

SEQ ID NO: 24457 - protein, 39 aa, Artificial Sequence
  Non-cyclic GFR-binding peptide
  MOD_RES (4)..(5)..(39): Xaa is C or S
  MOD_RES (19)..(20)..(21)..(22)..(23): Xaa is A or G
  MOD_RES (24)..(25)..(26)..(27): Xaa is A or G or absent
PPTXXVPTRLSSLSILFFXXXXXXXXXLKVYPDMVVESX

SEQ ID NO: 24458 - protein, 34 aa, Artificial Sequence
  Non-cyclic GFR-binding peptide
  MOD_RES (3)..(4): Xaa is C or S
GPXXTPTKMSSLSMLFFNDKQQIILKVYPGMVVD

SEQ ID NO: 24459 - protein, 41 aa, Artificial Sequence
  Non-cyclic GFR-binding peptide
  MOD_RES (5)..(6)..(38)..(40): Xaa is C or S
IPKAXXVPTELSSLSMLFFDEYDKVVLKVYPEMVVEGXGXR

SEQ ID NO: 24460 - protein, 37 aa, Artificial Sequence
  Non-cyclic GFR-binding peptide
  MOD_RES (1)..(35)..(37): Xaa is C or S
  MOD_RES (15)..(16)..(17)..(18)..(19): Xaa is A or G
  MOD_RES (20)..(21)..(22)..(23): Xaa is A or G or absent
XTPTKMSSLSMLFFXXXXXXXXXLKVYPGMVVDRXGX

SEQ ID NO: 24461 - protein, 35 aa, Artificial Sequence
  Non-cyclic GFR-binding peptide
  MOD_RES (2)..(2): Xaa is C or S
EXVPTEESSLSMLFFRIKPHQGQHLKVYPFLQHNK

SEQ ID NO: 24462 - protein, 38 aa, Artificial Sequence
  Non-cyclic GFR-binding peptide
  MOD_RES (4)..(5)..(36)..(38): Xaa is C or S
PSTXXAPVKTSSLSMLFFDNGRVLLLKVYPMIVEEXGX

SEQ ID NO: 24463 - protein, 38 aa, Artificial Sequence
  Non-cyclic GFR-binding peptide
  MOD_RES (6)..(7)..(38): Xaa is C or S
RVPSTXXAPVKTSSLSMLFFDNGRVLLLKVYPMIVEEX

SEQ ID NO: 24464 - protein, 32 aa, Artificial Sequence
  Non-cyclic GFR-binding peptide
  MOD_RES (14)..(15)..(16)..(17)..(18): Xaa is A or G
  MOD_RES (19)..(20)..(21)..(22): Xaa is A or G or absent
VPTKLSSLSILFFXXXXXXXXXLKVYPGMAVS

SEQ ID NO: 24465 - protein, 41 aa, Artificial Sequence
  Non-cyclic GFR-binding peptide
  MOD_RES (4)..(5)..(38)..(40): Xaa is C or S
  MOD_RES (19)..(20)..(21)..(22)..(23): Xaa is A or G
  MOD_RES (24)..(25)..(26)..(27): Xaa is A or G or absent
AAPXXVPQALSSLSILFFXXXXXXXXXLKVYPMIVRSXKXS

SEQ ID NO: 24466 - protein, 39 aa, Artificial Sequence
  Non-cyclic GFR-binding peptide
  MOD_RES (1)..(2)..(36)..(38): Xaa is C or S
  MOD_RES (16)..(17)..(18)..(19)..(20): Xaa is A or G
  MOD_RES (21)..(22)..(23)..(24): Xaa is A or G or absent
XXVPTELSSLSMLFFXXXXXXXXXLKVYPEMVVEGXGXR

SEQ ID NO: 24467 - protein, 36 aa, Artificial Sequence
  Non-cyclic GFR-binding peptide
  MOD_RES (1)..(2)..(33)..(35): Xaa is C or S
XXVPQDLSSLSILFFVGRTPKVLKVYPMVVKSXKXS

SEQ ID NO: 24468 - protein, 40 aa, Artificial Sequence
  Non-cyclic GFR-binding peptide
  MOD_RES (4)..(5)..(39): Xaa is C or S
  MOD_RES (19)..(20)..(21)..(22)..(23): Xaa is A or G
  MOD_RES (24)..(25)..(26)..(27): Xaa is A or G or absent
PKAXXVPTELSSLSMLFFXXXXXXXXXLKVYPEMVVEGXG

SEQ ID NO: 24469 - protein, 37 aa, Artificial Sequence
  Non-cyclic GFR-binding peptide
  MOD_RES (2)..(3)..(35)..(37): Xaa is C or S
TXXVPTRLSSLSILFFDSANNVVLKVYPDMVVESXGX

SEQ ID NO: 24470 - protein, 35 aa, Artificial Sequence
  Non-cyclic GFR-binding peptide
  MOD_RES (1)..(34): Xaa is C or S
  MOD_RES (15)..(16)..(17)..(18)..(19): Xaa is A or G
  MOD_RES (20)..(21)..(22)..(23): Xaa is A or G or absent
XVSQDLSSLSILFFXXXXXXXXXLKVYPMIVKSXK

SEQ ID NO: 24471 - protein, 31 aa, Artificial Sequence
  Non-cyclic GFR-binding peptide
  MOD_RES (1)..(1): Xaa is C or S
XVPARLSSLSILFFDAANNVVLKVYPDMVVE

SEQ ID NO: 24472 - protein, 41 aa, Artificial Sequence
  Non-cyclic GFR-binding peptide
  MOD_RES (6)..(7)..(38)..(40): Xaa is C or S
ASASPXXVPQDLSSLSILFFVGRTPKVLKVYPMVVKSXKXS

SEQ ID NO: 24473 - protein, 35 aa, Artificial Sequence
  Non-cyclic GFR-binding peptide
  MOD_RES (33)..(35): Xaa is C or S
  MOD_RES (14)..(15)..(16)..(17)..(18): Xaa is A or G
  MOD_RES (19)..(20)..(21)..(22): Xaa is A or G or absent
VSQDLSSLSILFFXXXXXXXXXLKVYPMIVKSXKX

SEQ ID NO: 24474 - protein, 33 aa, Artificial Sequence
  Non-cyclic GFR-binding peptide
  MOD_RES (1)..(1): Xaa is C or S
  MOD_RES (15)..(16)..(17)..(18)..(19): Xaa is A or G
  MOD_RES (20)..(21)..(22)..(23): Xaa is A or G or absent
XVSQDLSSLSILFFXXXXXXXXXLKVYPMIVKS

SEQ ID NO: 24475 - protein, 36 aa, Artificial Sequence
  Non-cyclic GFR-binding peptide
  MOD_RES (3)..(4)..(36): Xaa is C or S
KAXXVPTELSSLSMLFFDEYDKVVLKVYPEMVVEGX

SEQ ID NO: 24476 - protein, 36 aa, Artificial Sequence
  Non-cyclic GFR-binding peptide
  MOD_RES (5)..(6): Xaa is C or S
SAAPXXVPQALSSLSILFFVGRKPKVLKVYPMIVRS

SEQ ID NO: 24477 - protein, 35 aa, Artificial Sequence
  Non-cyclic GFR-binding peptide
  MOD_RES (1)..(2)..(35): Xaa is C or S
XXVPTKLSSLSVLFFDDMGVPTLKVYPEGMSVAEX

SEQ ID NO: 24478 - protein, 35 aa, Artificial Sequence
  Non-cyclic GFR-binding peptide
  MOD_RES (34)..(34): Xaa is C or S
  MOD_RES (14)..(15)..(16)..(17)..(18): Xaa is A or G
  MOD_RES (19)..(20)..(21)..(22): Xaa is A or G or absent
VPTRLSSLSILFFXXXXXXXXXLKVYPDMVVESXG

SEQ ID NO: 24479 - protein, 42 aa, Artificial Sequence
  Non-cyclic GFR-binding peptide
  MOD_RES (3)..(4)..(39)..(41): Xaa is C or S
  MOD_RES (18)..(19)..(20)..(21)..(22): Xaa is A or G
  MOD_RES (23)..(24)..(25)..(26): Xaa is A or G or absent
KAXXVPTKLSSLSVLFFXXXXXXXXXLKVYPEGMSVAEXGXR

SEQ ID NO: 24480 - protein, 38 aa, Artificial Sequence
  Non-cyclic GFR-binding peptide
  MOD_RES (2)..(3)..(35)..(37): Xaa is C or S
AXXVPTKLSSLSILFFDKGVVTYLKVYPGMAVSEXGXR

SEQ ID NO: 24481 - protein, 41 aa, Artificial Sequence
  Non-cyclic GFR-binding peptide
  MOD_RES (5)..(6)..(39)..(41): Xaa is C or S
  MOD_RES (20)..(21)..(22)..(23)..(24): Xaa is A or G
  MOD_RES (25)..(26)..(27)..(28): Xaa is A or G or absent
SASPXXVSQDLSSLSILFFXXXXXXXXXLKVYPMIVKSXKX

SEQ ID NO: 24482 - protein, 44 aa, Artificial Sequence
  Non-cyclic GFR-binding peptide
  MOD_RES (6)..(7)..(42)..(44): Xaa is C or S
  MOD_RES (21)..(22)..(23)..(24)..(25): Xaa is A or G
  MOD_RES (26)..(27)..(28)..(29): Xaa is A or G or absent
KVGKAXXVPTKLSSLSVLFFXXXXXXXXXLKVYPEGMSVAEXGX

SEQ ID NO: 24483 - protein, 43 aa, Artificial Sequence
  Non-cyclic GFR-binding peptide
  MOD_RES (5)..(42): Xaa is C or S
SSVKXQPSRVHHSSLSVLFFEYVRKKPKLLKVYPRLEEHLEXA

SEQ ID NO: 24484 - protein, 34 aa, Artificial Sequence
  Non-cyclic GFR-binding peptide
  MOD_RES (1)..(2)..(34): Xaa is C or S
XXTPTKMSSLSMLFFNDKQQIILKVYPGMVVDRX

SEQ ID NO: 24485 - protein, 36 aa, Artificial Sequence
  Non-cyclic GFR-binding peptide
  MOD_RES (3)..(4)..(36): Xaa is C or S
KPXXAPTKLSSLSVLFFDDSSNVILKVYPNMVVRSX

SEQ ID NO: 24486 - protein, 36 aa, Artificial Sequence
  Non-cyclic GFR-binding peptide
  MOD_RES (2)..(3)..(36): Xaa is C or S
  MOD_RES (17)..(18)..(19)..(20)..(21): Xaa is A or G
  MOD_RES (22)..(23)..(24)..(25): Xaa is A or G or absent
TXXAPVKTSSLSMLFFXXXXXXXXXLKVYPMIVEEX

SEQ ID NO: 24487 - protein, 38 aa, Artificial Sequence
  Non-cyclic GFR-binding peptide
  MOD_RES (3)..(4)..(36)..(38): Xaa is C or S
KPXXAPTKLSSLSVLFFDDSSNVILKVYPNMVVRSXGX

SEQ ID NO: 24488 - protein, 45 aa, Artificial Sequence
  Non-cyclic GFR-binding peptide
  MOD_RES (6)..(7)..(42)..(44): Xaa is C or S
  MOD_RES (21)..(22)..(23)..(24)..(25): Xaa is A or G
  MOD_RES (26)..(27)..(28)..(29): Xaa is A or G or absent
KVGKAXXVPTKLSSLSVLFFXXXXXXXXXLKVYPEGMSVAEXGXR

SEQ ID NO: 24489 - protein, 42 aa, Artificial Sequence
  Non-cyclic GFR-binding peptide
  MOD_RES (6)..(7)..(41): Xaa is C or S
  MOD_RES (21)..(22)..(23)..(24)..(25): Xaa is A or G
  MOD_RES (26)..(27)..(28)..(29): Xaa is A or G or absent
AVPKAXXAPTKLSSLSVLFFXXXXXXXXXLKVYPNMVVKAXG

SEQ ID NO: 24490 - protein, 44 aa, Artificial Sequence
  Non-cyclic GFR-binding peptide
  MOD_RES (5)..(6)..(41)..(43): Xaa is C or S
  MOD_RES (20)..(21)..(22)..(23)..(24): Xaa is A or G
  MOD_RES (25)..(26)..(27)..(28): Xaa is A or G or absent
VGKAXXVPTKLSSLSVLFFXXXXXXXXXLKVYPEGMSVAEXGXR

SEQ ID NO: 24491 - protein, 38 aa, Artificial Sequence
  Non-cyclic GFR-binding peptide
  MOD_RES (35)..(37): Xaa is C or S
  MOD_RES (14)..(15)..(16)..(17)..(18): Xaa is A or G
  MOD_RES (19)..(20)..(21)..(22): Xaa is A or G or absent
SRVHHSSLSVLFFXXXXXXXXXLKVYPRLEEHLEXAXA

SEQ ID NO: 24492 - protein, 35 aa, Artificial Sequence
  Non-cyclic GFR-binding peptide
  MOD_RES (1)..(2)..(33)..(35): Xaa is C or S
XXVPQALSSLSILFFVGRKPKVLKVYPMIVRSXKX

SEQ ID NO: 24493 - protein, 39 aa, Artificial Sequence
  Non-cyclic GFR-binding peptide
  MOD_RES (37)..(39): Xaa is C or S
QPSRVHHSSLSVLFFEYVRKKPKLLKVYPRLEEHLEXAX

SEQ ID NO: 24494 - protein, 42 aa, Artificial Sequence
  Non-cyclic GFR-binding peptide
  MOD_RES (5)..(6)..(41): Xaa is C or S
  MOD_RES (20)..(21)..(22)..(23)..(24): Xaa is A or G
  MOD_RES (25)..(26)..(27)..(28): Xaa is A or G or absent
VGKAXXVPTKLSSLSVLFFXXXXXXXXXLKVYPEGMSVAEXG

SEQ ID NO: 24495 - protein, 37 aa, Artificial Sequence
  Non-cyclic GFR-binding peptide
  MOD_RES (3)..(35)..(37): Xaa is C or S
PTXAPTKLSSLSVLFFDDSSNVILKVYPNMVVRSXGX

SEQ ID NO: 24496 - protein, 35 aa, Artificial Sequence
  Non-cyclic GFR-binding peptide
  MOD_RES (1)..(2): Xaa is C or S
  MOD_RES (16)..(17)..(18)..(19)..(20): Xaa is A or G
  MOD_RES (21)..(22)..(23)..(24): Xaa is A or G or absent
XXVPTRLSSLSILFFXXXXXXXXXLKVYPDMVVES

SEQ ID NO: 24497 - protein, 44 aa, Artificial Sequence
  Non-cyclic GFR-binding peptide
  MOD_RES (6)..(7)..(41)..(43): Xaa is C or S
  MOD_RES (21)..(22)..(23)..(24)..(25): Xaa is A or G
  MOD_RES (26)..(27)..(28)..(29): Xaa is A or G or absent
GSAGPXXTPTKMSSLSMLFFXXXXXXXXXLKVYPGMVVDRXGXS

SEQ ID NO: 24498 - protein, 37 aa, Artificial Sequence
  Non-cyclic GFR-binding peptide
  MOD_RES (4)..(36): Xaa is C or S
KPTXAPTKLSSLSVLFFDDSSNVILKVYPNMVVRSXG

SEQ ID NO: 24499 - protein, 42 aa, Artificial Sequence
  Non-cyclic GFR-binding peptide
  MOD_RES (7)..(41): Xaa is C or S
  MOD_RES (21)..(22)..(23)..(24)..(25): Xaa is A or G
  MOD_RES (26)..(27)..(28)..(29): Xaa is A or G or absent
HVTKPTXAPTKLSSLSVLFFXXXXXXXXXLKVYPNMVVRSXG

SEQ ID NO: 24500 - protein, 42 aa, Artificial Sequence
  Non-cyclic GFR-binding peptide
  MOD_RES (5)..(6)..(40)..(42): Xaa is C or S
  MOD_RES (20)..(21)..(22)..(23)..(24): Xaa is A or G
  MOD_RES (25)..(26)..(27)..(28): Xaa is A or G or absent
VPKPXXAPTQLSSLSVLFFXXXXXXXXXLKVYPNMVVRAXGX

SEQ ID NO: 24501 - protein, 38 aa, Artificial Sequence
  Non-cyclic GFR-binding peptide
  MOD_RES (4)..(5)..(36)..(38): Xaa is C or S
AAPXXVPQALSSLSILFFVGRKPKVLKVYPMIVRSXKX

SEQ ID NO: 24502 - protein, 37 aa, Artificial Sequence
  Non-cyclic GFR-binding peptide
  MOD_RES (37)..(37): Xaa is C or S
QPSRVHHSSLSVLFFEYVRKKPKLLKVYPRLEEHLEX

SEQ ID NO: 24503 - protein, 39 aa, Artificial Sequence
  Non-cyclic GFR-binding peptide
  MOD_RES (6)..(6): Xaa is C or S
  MOD_RES (20)..(21)..(22)..(23)..(24): Xaa is A or G
  MOD_RES (25)..(26)..(27)..(28): Xaa is A or G or absent
DEGLEXVPTEESSLSMLFFXXXXXXXXXLKVYPFLQHNK

SEQ ID NO: 24504 - protein, 35 aa, Artificial Sequence
  Non-cyclic GFR-binding peptide
  MOD_RES (1)..(32)..(34): Xaa is C or S
XVSQDLSSLSILFFIGKTPKILKVYPMIVKSXKXS

SEQ ID NO: 24505 - protein, 36 aa, Artificial Sequence
  Non-cyclic GFR-binding peptide
  MOD_RES (3)..(4): Xaa is C or S
  MOD_RES (18)..(19)..(20)..(21)..(22): Xaa is A or G
  MOD_RES (23)..(24)..(25)..(26): Xaa is A or G or absent
PTXXVPTRLSSLSILFFXXXXXXXXXLKVYPDMVVE

SEQ ID NO: 24506 - protein, 38 aa, Artificial Sequence
  Non-cyclic GFR-binding peptide
  MOD_RES (5)..(6): Xaa is C or S
  MOD_RES (20)..(21)..(22)..(23)..(24): Xaa is A or G
  MOD_RES (25)..(26)..(27)..(28): Xaa is A or G or absent
VPKPXXAPTKLSSLSVLFFXXXXXXXXXLKVYPNMVVR

SEQ ID NO: 24507 - protein, 40 aa, Artificial Sequence
  Non-cyclic GFR-binding peptide
  MOD_RES (3)..(4)..(37)..(39): Xaa is C or S
  MOD_RES (18)..(19)..(20)..(21)..(22): Xaa is A or G
  MOD_RES (23)..(24)..(25)..(26): Xaa is A or G or absent
SPXXVPQDLSSLSILFFXXXXXXXXXLKVYPMVVKSXKXS

SEQ ID NO: 24508 - protein, 39 aa, Artificial Sequence
  Non-cyclic GFR-binding peptide
  MOD_RES (2)..(39): Xaa is C or S
  MOD_RES (18)..(19)..(20)..(21)..(22): Xaa is A or G
  MOD_RES (23)..(24)..(25)..(26): Xaa is A or G or absent
KXQPSRVHHSSLSVLFFXXXXXXXXXLKVYPRLEEHLEX

SEQ ID NO: 24509 - protein, 43 aa, Artificial Sequence
  Non-cyclic GFR-binding peptide
  MOD_RES (5)..(6)..(40)..(42): Xaa is C or S
  MOD_RES (20)..(21)..(22)..(23)..(24): Xaa is A or G
  MOD_RES (25)..(26)..(27)..(28): Xaa is A or G or absent
VPKPXXAPTQLSSLSVLFFXXXXXXXXXLKVYPNMVVRAXGXH

SEQ ID NO: 24510 - protein, 43 aa, Artificial Sequence
  Non-cyclic GFR-binding peptide
  MOD_RES (6)..(7)..(41)..(43): Xaa is C or S
  MOD_RES (21)..(22)..(23)..(24)..(25): Xaa is A or G
  MOD_RES (26)..(27)..(28)..(29): Xaa is A or G or absent
AAPASXXVPARLSSLSILFFXXXXXXXXXLKVYPDMVVEAXGX

SEQ ID NO: 24511 - protein, 33 aa, Artificial Sequence
  Non-cyclic GFR-binding peptide
  MOD_RES (2)..(3): Xaa is C or S
AXXAPTKLSSLSVLFFDSSNNVILKVYPNMVVK

SEQ ID NO: 24512 - protein, 35 aa, Artificial Sequence
  Non-cyclic GFR-binding peptide
  MOD_RES (34)..(34): Xaa is C or S
  MOD_RES (14)..(15)..(16)..(17)..(18): Xaa is A or G
  MOD_RES (19)..(20)..(21)..(22): Xaa is A or G or absent
APTKLSSLSVLFFXXXXXXXXXLKVYPNMVVKAXG

SEQ ID NO: 24513 - protein, 35 aa, Artificial Sequence
  Non-cyclic GFR-binding peptide
  MOD_RES (1)..(35): Xaa is C or S
  MOD_RES (15)..(16)..(17)..(18)..(19): Xaa is A or G
  MOD_RES (20)..(21)..(22)..(23): Xaa is A or G or absent
XVPTEESSLSMLFFXXXXXXXXXLKVYPFLQHNKX

SEQ ID NO: 24514 - protein, 36 aa, Artificial Sequence
  Non-cyclic GFR-binding peptide
  MOD_RES (34)..(36): Xaa is C or S
VPTEESSLSMLFFRIKPHQGQHLKVYPFLQHNKXEX

SEQ ID NO: 24515 - protein, 38 aa, Artificial Sequence
  Non-cyclic GFR-binding peptide
  MOD_RES (5)..(6): Xaa is C or S
  MOD_RES (20)..(21)..(22)..(23)..(24): Xaa is A or G
  MOD_RES (25)..(26)..(27)..(28): Xaa is A or G or absent
VPSTXXAPVKTSSLSMLFFXXXXXXXXXLKVYPMIVEE

SEQ ID NO: 24516 - protein, 38 aa, Artificial Sequence
  Non-cyclic GFR-binding peptide
  MOD_RES (4)..(5)..(37): Xaa is C or S
PKAXXVPTELSSLSMLFFDEYDKVVLKVYPEMVVEGXG

SEQ ID NO: 24517 - protein, 34 aa, Artificial Sequence
  Non-cyclic GFR-binding peptide
  MOD_RES (2)..(3): Xaa is C or S
TXXVPTRLSSLSILFFDSANNVVLKVYPDMVVES

SEQ ID NO: 24518 - protein, 33 aa, Artificial Sequence
  Non-cyclic GFR-binding peptide
  MOD_RES (14)..(15)..(16)..(17)..(18): Xaa is A or G
  MOD_RES (19)..(20)..(21)..(22): Xaa is A or G or absent
TPTKMSSLSMLFFXXXXXXXXXLKVYPGMVVDR

SEQ ID NO: 24519 - protein, 38 aa, Artificial Sequence
  Non-cyclic GFR-binding peptide
  MOD_RES (6)..(7)..(38): Xaa is C or S
ASASPXXVSQDLSSLSILFFIGKTPKILKVYPMIVKSX

SEQ ID NO: 24520 - protein, 34 aa, Artificial Sequence
  Non-cyclic GFR-binding peptide
  MOD_RES (32)..(34): Xaa is C or S
VPARLSSLSILFFDAANNVVLKVYPDMVVEAXGX

SEQ ID NO: 24521 - protein, 43 aa, Artificial Sequence
  Non-cyclic GFR-binding peptide
  MOD_RES (6)..(7)..(41)..(43): Xaa is C or S
  MOD_RES (21)..(22)..(23)..(24)..(25): Xaa is A or G
  MOD_RES (26)..(27)..(28)..(29): Xaa is A or G or absent
STPPTXXVPTRLSSLSILFFXXXXXXXXXLKVYPDMVVESXGX

SEQ ID NO: 24522 - protein, 36 aa, Artificial Sequence
  Non-cyclic GFR-binding peptide
  MOD_RES (2)..(3): Xaa is C or S
  MOD_RES (17)..(18)..(19)..(20)..(21): Xaa is A or G
  MOD_RES (22)..(23)..(24)..(25): Xaa is A or G or absent
AXXVPTELSSLSMLFFXXXXXXXXXLKVYPEMVVEG

SEQ ID NO: 24523 - protein, 38 aa, Artificial Sequence
  Non-cyclic GFR-binding peptide
  MOD_RES (1)..(2)..(35)..(37): Xaa is C or S
  MOD_RES (16)..(17)..(18)..(19)..(20): Xaa is A or G
  MOD_RES (21)..(22)..(23)..(24): Xaa is A or G or absent
XXAPVKTSSLSMLFFXXXXXXXXXLKVYPMIVEEXGXL

SEQ ID NO: 24524 - protein, 41 aa, Artificial Sequence
  Non-cyclic GFR-binding peptide
  MOD_RES (5)..(6)..(38)..(40): Xaa is C or S
ASKAXXVPTKLSSLSILFFDKGVVTYLKVYPGMAVSEXGXR

SEQ ID NO: 24525 - protein, 40 aa, Artificial Sequence
  Non-cyclic GFR-binding peptide
  MOD_RES (4)..(5)..(38)..(40): Xaa is C or S
  MOD_RES (19)..(20)..(21)..(22)..(23): Xaa is A or G
  MOD_RES (24)..(25)..(26)..(27): Xaa is A or G or absent
AAPXXVPQALSSLSILFFXXXXXXXXXLKVYPMIVRSXKX

SEQ ID NO: 24526 - protein, 36 aa, Artificial Sequence
  Non-cyclic GFR-binding peptide
  MOD_RES (2)..(3)..(35): Xaa is C or S
TXXVPTRLSSLSILFFDSANNVVLKVYPDMVVESXG

SEQ ID NO: 24527 - protein, 36 aa, Artificial Sequence
  Non-cyclic GFR-binding peptide
  MOD_RES (1)..(33)..(35): Xaa is C or S
XVPTRLSSLSILFFDSANNVVLKVYPDMVVESXGXR

SEQ ID NO: 24528 - protein, 37 aa, Artificial Sequence
  Non-cyclic GFR-binding peptide
  MOD_RES (4)..(5)..(37): Xaa is C or S
PPTXXVPTRLSSLSILFFDSANNVVLKVYPDMVVESX

SEQ ID NO: 24529 - protein, 34 aa, Artificial Sequence
  Non-cyclic GFR-binding peptide
  MOD_RES (33)..(33): Xaa is C or S
VPTKLSSLSVLFFDDMGVPTLKVYPEGMSVAEXG

SEQ ID NO: 24530 - protein, 33 aa, Artificial Sequence
  Non-cyclic GFR-binding peptide
  MOD_RES (31)..(33): Xaa is C or S
VPQDLSSLSILFFVGRTPKVLKVYPMVVKSXKX

SEQ ID NO: 24531 - protein, 41 aa, Artificial Sequence
  Non-cyclic GFR-binding peptide
  MOD_RES (5)..(6)..(40): Xaa is C or S
  MOD_RES (20)..(21)..(22)..(23)..(24): Xaa is A or G
  MOD_RES (25)..(26)..(27)..(28): Xaa is A or G or absent
APASXXVPARLSSLSILFFXXXXXXXXXLKVYPDMVVEAXG

SEQ ID NO: 24532 - protein, 38 aa, Artificial Sequence
  Non-cyclic GFR-binding peptide
  MOD_RES (1)..(2)..(36)..(38): Xaa is C or S
  MOD_RES (16)..(17)..(18)..(19)..(20): Xaa is A or G
  MOD_RES (21)..(22)..(23)..(24): Xaa is A or G or absent
XXVPARLSSLSILFFXXXXXXXXXLKVYPDMVVEAXGX

SEQ ID NO: 24533 - protein, 35 aa, Artificial Sequence
  Non-cyclic GFR-binding peptide
  MOD_RES (35)..(35): Xaa is C or S
  MOD_RES (14)..(15)..(16)..(17)..(18): Xaa is A or G
  MOD_RES (19)..(20)..(21)..(22): Xaa is A or G or absent
SRVHHSSLSVLFFXXXXXXXXXLKVYPRLEEHLEX

SEQ ID NO: 24534 - protein, 34 aa, Artificial Sequence
  Non-cyclic GFR-binding peptide
  MOD_RES (3)..(4): Xaa is C or S
SPXXVPQDLSSLSILFFVGRTPKVLKVYPMVVKS

SEQ ID NO: 24535 - protein, 38 aa, Artificial Sequence
  Non-cyclic GFR-binding peptide
  MOD_RES (36)..(38): Xaa is C or S
PSRVHHSSLSVLFFEYVRKKPKLLKVYPRLEEHLEXAX

SEQ ID NO: 24536 - protein, 42 aa, Artificial Sequence
  Non-cyclic GFR-binding peptide
  MOD_RES (6)..(40)..(42): Xaa is C or S
DEGLEXVPTEESSLSMLFFRIKPHQGQHLKVYPFLQHNKXEX

SEQ ID NO: 24537 - protein, 33 aa, Artificial Sequence
  Non-cyclic GFR-binding peptide
  MOD_RES (1)..(2)..(33): Xaa is C or S
XXVPQALSSLSILFFVGRKPKVLKVYPMIVRSX

SEQ ID NO: 24538 - protein, 36 aa, Artificial Sequence
  Non-cyclic GFR-binding peptide
  MOD_RES (36)..(36): Xaa is C or S
PSRVHHSSLSVLFFEYVRKKPKLLKVYPRLEEHLEX

SEQ ID NO: 24539 - protein, 38 aa, Artificial Sequence
  Non-cyclic GFR-binding peptide
  MOD_RES (4)..(5)..(37): Xaa is C or S
PASXXVPARLSSLSILFFDAANNVVLKVYPDMVVEAXG

SEQ ID NO: 24540 - protein, 38 aa, Artificial Sequence
  Non-cyclic GFR-binding peptide
  MOD_RES (2)..(3)..(36)..(38): Xaa is C or S
AXXVPTKLSSLSVLFFDDMGVPTLKVYPEGMSVAEXGX

SEQ ID NO: 24541 - protein, 38 aa, Artificial Sequence
  Non-cyclic GFR-binding peptide
  MOD_RES (1)..(35)..(37): Xaa is C or S
  MOD_RES (15)..(16)..(17)..(18)..(19): Xaa is A or G
  MOD_RES (20)..(21)..(22)..(23): Xaa is A or G or absent
XTPTKMSSLSMLFFXXXXXXXXXLKVYPGMVVDRXGXS

SEQ ID NO: 24542 - protein, 43 aa, Artificial Sequence
  Non-cyclic GFR-binding peptide
  MOD_RES (6)..(40)..(42): Xaa is C or S
  MOD_RES (20)..(21)..(22)..(23)..(24): Xaa is A or G
  MOD_RES (25)..(26)..(27)..(28): Xaa is A or G or absent
DEGLEXVPTEESSLSMLFFXXXXXXXXXLKVYPFLQHNKXEXR

SEQ ID NO: 24543 - protein, 36 aa, Artificial Sequence
  Non-cyclic GFR-binding peptide
  MOD_RES (5)..(6): Xaa is C or S
SASPXXVSQDLSSLSILFFIGKTPKILKVYPMIVKS

SEQ ID NO: 24544 - protein, 37 aa, Artificial Sequence
  Non-cyclic GFR-binding peptide
  MOD_RES (36)..(36): Xaa is C or S
  MOD_RES (15)..(16)..(17)..(18)..(19): Xaa is A or G
  MOD_RES (20)..(21)..(22)..(23): Xaa is A or G or absent
PSRVHHSSLSVLFFXXXXXXXXXLKVYPRLEEHLEXA

SEQ ID NO: 24545 - protein, 42 aa, Artificial Sequence
  Non-cyclic GFR-binding peptide
  MOD_RES (6)..(7)..(40)..(42): Xaa is C or S
  MOD_RES (21)..(22)..(23)..(24)..(25): Xaa is A or G
  MOD_RES (26)..(27)..(28)..(29): Xaa is A or G or absent
ASAAPXXVPQALSSLSILFFXXXXXXXXXLKVYPMIVRSXKX

SEQ ID NO: 24546 - protein, 33 aa, Artificial Sequence
  Non-cyclic GFR-binding peptide
  MOD_RES (1)..(33): Xaa is C or S
XAPTKLSSLSVLFFDDSSNVILKVYPNMVVRSX

SEQ ID NO: 24547 - protein, 33 aa, Artificial Sequence
  Non-cyclic GFR-binding peptide
  MOD_RES (1)..(33): Xaa is C or S
XVPTKLSSLSILFFDKGVVTYLKVYPGMAVSEX

SEQ ID NO: 24548 - protein, 34 aa, Artificial Sequence
  Non-cyclic GFR-binding peptide
  MOD_RES (3)..(4): Xaa is C or S
SPXXVSQDLSSLSILFFIGKTPKILKVYPMIVKS

SEQ ID NO: 24549 - protein, 36 aa, Artificial Sequence
  Non-cyclic GFR-binding peptide
  MOD_RES (5)..(6): Xaa is C or S
SASPXXVPQDLSSLSILFFVGRTPKVLKVYPMVVKS

SEQ ID NO: 24550 - protein, 37 aa, Artificial Sequence
  Non-cyclic GFR-binding peptide
  MOD_RES (6)..(7): Xaa is C or S
ASAAPXXVPQALSSLSILFFVGRKPKVLKVYPMIVRS

SEQ ID NO: 24551 - protein, 41 aa, Artificial Sequence
  Non-cyclic GFR-binding peptide
  MOD_RES (4)..(5)..(38)..(40): Xaa is C or S
  MOD_RES (19)..(20)..(21)..(22)..(23): Xaa is A or G
  MOD_RES (24)..(25)..(26)..(27): Xaa is A or G or absent
ASPXXVPQDLSSLSILFFXXXXXXXXXLKVYPMVVKSXKXS

SEQ ID NO: 24552 - protein, 35 aa, Artificial Sequence
  Non-cyclic GFR-binding peptide
  MOD_RES (2)..(3)..(35): Xaa is C or S
AXXVPTELSSLSMLFFDEYDKVVLKVYPEMVVEGX

SEQ ID NO: 24553 - protein, 34 aa, Artificial Sequence
  Non-cyclic GFR-binding peptide
  MOD_RES (1)..(2): Xaa is C or S
  MOD_RES (16)..(17)..(18)..(19)..(20): Xaa is A or G
  MOD_RES (21)..(22)..(23)..(24): Xaa is A or G or absent
XXAPTKLSSLSVLFFXXXXXXXXXLKVYPNMVVR

SEQ ID NO: 24554 - protein, 32 aa, Artificial Sequence
  Non-cyclic GFR-binding peptide
  MOD_RES (1)..(1): Xaa is C or S
XVPTELSSLSMLFFDEYDKVVLKVYPEMVVEG

SEQ ID NO: 24555 - protein, 42 aa, Artificial Sequence
  Non-cyclic GFR-binding peptide
  MOD_RES (5)..(6)..(40)..(42): Xaa is C or S
  MOD_RES (20)..(21)..(22)..(23)..(24): Xaa is A or G
  MOD_RES (25)..(26)..(27)..(28): Xaa is A or G or absent
SAGPXXTPTKMSSLSMLFFXXXXXXXXXLKVYPGMVVDRXGX

SEQ ID NO: 24556 - protein, 34 aa, Artificial Sequence
  Non-cyclic GFR-binding peptide
  MOD_RES (1)..(2): Xaa is C or S
  MOD_RES (16)..(17)..(18)..(19)..(20): Xaa is A or G
  MOD_RES (21)..(22)..(23)..(24): Xaa is A or G or absent
XXAPTKLSSLSVLFFXXXXXXXXXLKVYPNMVVK

SEQ ID NO: 24557 - protein, 31 aa, Artificial Sequence
  Non-cyclic GFR-binding peptide
  MOD_RES (1)..(1): Xaa is C or S
XAPTKLSSLSVLFFDDSSNVILKVYPNMVVR

SEQ ID NO: 24558 - protein, 38 aa, Artificial Sequence
  Non-cyclic GFR-binding peptide
  MOD_RES (2)..(3)..(37): Xaa is C or S
  MOD_RES (17)..(18)..(19)..(20)..(21): Xaa is A or G
  MOD_RES (22)..(23)..(24)..(25): Xaa is A or G or absent
PXXTPTKMSSLSMLFFXXXXXXXXXLKVYPGMVVDRXG

SEQ ID NO: 24559 - protein, 40 aa, Artificial Sequence
  Non-cyclic GFR-binding peptide
  MOD_RES (3)..(37)..(39): Xaa is C or S
  MOD_RES (17)..(18)..(19)..(20)..(21): Xaa is A or G
  MOD_RES (22)..(23)..(24)..(25): Xaa is A or G or absent
PTXAPTKLSSLSVLFFXXXXXXXXXLKVYPNMVVRSXGXH

SEQ ID NO: 24560 - protein, 38 aa, Artificial Sequence
  Non-cyclic GFR-binding peptide
  MOD_RES (2)..(3)..(35)..(37): Xaa is C or S
TXXVPTRLSSLSILFFDSANNVVLKVYPDMVVESXGXR

SEQ ID NO: 24561 - protein, 42 aa, Artificial Sequence
  Non-cyclic GFR-binding peptide
  MOD_RES (5)..(39)..(41): Xaa is C or S
EGLEXVPTEESSLSMLFFRIKPHQGQHLKVYPFLQHNKXEXR

SEQ ID NO: 24562 - protein, 40 aa, Artificial Sequence
  Non-cyclic GFR-binding peptide
  MOD_RES (4)..(5)..(38)..(40): Xaa is C or S
  MOD_RES (19)..(20)..(21)..(22)..(23): Xaa is A or G
  MOD_RES (24)..(25)..(26)..(27): Xaa is A or G or absent
ASPXXVSQDLSSLSILFFXXXXXXXXXLKVYPMIVKSXKX

SEQ ID NO: 24563 - protein, 37 aa, Artificial Sequence
  Non-cyclic GFR-binding peptide
  MOD_RES (3)..(37): Xaa is C or S
LEXVPTEESSLSMLFFRIKPHQGQHLKVYPFLQHNKX

SEQ ID NO: 24564 - protein, 44 aa, Artificial Sequence
  Non-cyclic GFR-binding peptide
  MOD_RES (4)..(41)..(43): Xaa is C or S
  MOD_RES (20)..(21)..(22)..(23)..(24): Xaa is A or G
  MOD_RES (25)..(26)..(27)..(28): Xaa is A or G or absent
SVKXQPSRVHHSSLSVLFFXXXXXXXXXLKVYPRLEEHLEXAXA

SEQ ID NO: 24565 - protein, 39 aa, Artificial Sequence
  Non-cyclic GFR-binding peptide
  MOD_RES (3)..(4)..(38): Xaa is C or S
  MOD_RES (18)..(19)..(20)..(21)..(22): Xaa is A or G
  MOD_RES (23)..(24)..(25)..(26): Xaa is A or G or absent
KPXXAPTQLSSLSVLFFXXXXXXXXXLKVYPNMVVRAXG

SEQ ID NO: 24566 - protein, 31 aa, Artificial Sequence
  Non-cyclic GFR-binding peptide
VPTKLSSLSILFFDKGVVTYLKVYPGMAVSE

SEQ ID NO: 24567 - protein, 34 aa, Artificial Sequence
  Non-cyclic GFR-binding peptide
  MOD_RES (15)..(16)..(17)..(18)..(19): Xaa is A or G
  MOD_RES (20)..(21)..(22)..(23): Xaa is A or G or absent
PSRVHHSSLSVLFFXXXXXXXXXLKVYPRLEEHL

SEQ ID NO: 24568 - protein, 30 aa, Artificial Sequence
  Non-cyclic GFR-binding peptide
APVKTSSLSMLFFDNGRVLLLKVYPMIVEE

SEQ ID NO: 24569 - protein, 36 aa, Artificial Sequence
  Non-cyclic GFR-binding peptide
  MOD_RES (3)..(4): Xaa is C or S
  MOD_RES (18)..(19)..(20)..(21)..(22): Xaa is A or G
  MOD_RES (23)..(24)..(25)..(26): Xaa is A or G or absent
KAXXVPTKLSSLSILFFXXXXXXXXXLKVYPGMAVS

SEQ ID NO: 24570 - protein, 32 aa, Artificial Sequence
  Non-cyclic GFR-binding peptide
  MOD_RES (1)..(32): Xaa is C or S
XVPQDLSSLSILFFVGRTPKVLKVYPMVVKSX

SEQ ID NO: 24571 - protein, 42 aa, Artificial Sequence
  Non-cyclic GFR-binding peptide
  MOD_RES (5)..(6)..(39)..(41): Xaa is C or S
  MOD_RES (20)..(21)..(22)..(23)..(24): Xaa is A or G
  MOD_RES (25)..(26)..(27)..(28): Xaa is A or G or absent
VPSTXXAPVKTSSLSMLFFXXXXXXXXXLKVYPMIVEEXGXL

SEQ ID NO: 24572 - protein, 35 aa, Artificial Sequence
  Non-cyclic GFR-binding peptide
  MOD_RES (34)..(34): Xaa is C or S
  MOD_RES (14)..(15)..(16)..(17)..(18): Xaa is A or G
  MOD_RES (19)..(20)..(21)..(22): Xaa is A or G or absent
VPTELSSLSMLFFXXXXXXXXXLKVYPEMVVEGXG

SEQ ID NO: 24573 - protein, 40 aa, Artificial Sequence
  Non-cyclic GFR-binding peptide
  MOD_RES (5)..(6)..(38)..(40): Xaa is C or S
ASKAXXVPTKLSSLSILFFDKGVVTYLKVYPGMAVSEXGX

SEQ ID NO: 24574 - protein, 36 aa, Artificial Sequence
  Non-cyclic GFR-binding peptide
  MOD_RES (1)..(2)..(36): Xaa is C or S
  MOD_RES (16)..(17)..(18)..(19)..(20): Xaa is A or G
  MOD_RES (21)..(22)..(23)..(24): Xaa is A or G or absent
XXVPARLSSLSILFFXXXXXXXXXLKVYPDMVVEAX

SEQ ID NO: 24575 - protein, 36 aa, Artificial Sequence
  Non-cyclic GFR-binding peptide
  MOD_RES (1)..(2)..(34)..(36): Xaa is C or S
XXVPARLSSLSILFFDAANNVVLKVYPDMVVEAXGX

SEQ ID NO: 24576 - protein, 40 aa, Artificial Sequence
  Non-cyclic GFR-binding peptide
  MOD_RES (5)..(6)..(38)..(40): Xaa is C or S
IPKAXXVPTELSSLSMLFFDEYDKVVLKVYPEMVVEGXGX

SEQ ID NO: 24577 - protein, 38 aa, Artificial Sequence
  Non-cyclic GFR-binding peptide
  MOD_RES (5)..(5): Xaa is C or S
EGLEXVPTEESSLSMLFFRIKPHQGQHLKVYPFLQHNK

SEQ ID NO: 24578 - protein, 33 aa, Artificial Sequence
  Non-cyclic GFR-binding peptide
  MOD_RES (1)..(2): Xaa is C or S
XXAPTKLSSLSVLFFDDSSNVILKVYPNMVVRS

SEQ ID NO: 24579 - protein, 42 aa, Artificial Sequence
  Non-cyclic GFR-binding peptide
  MOD_RES (4)..(5)..(39)..(41): Xaa is C or S
  MOD_RES (19)..(20)..(21)..(22)..(23): Xaa is A or G
  MOD_RES (24)..(25)..(26)..(27): Xaa is A or G or absent
PKPXXAPTQLSSLSVLFFXXXXXXXXXLKVYPNMVVRAXGXH

SEQ ID NO: 24580 - protein, 37 aa, Artificial Sequence
  Non-cyclic GFR-binding peptide
  MOD_RES (34)..(36): Xaa is C or S
  MOD_RES (14)..(15)..(16)..(17)..(18): Xaa is A or G
  MOD_RES (19)..(20)..(21)..(22): Xaa is A or G or absent
VPTKLSSLSILFFXXXXXXXXXLKVYPGMAVSEXGXR

SEQ ID NO: 24581 - protein, 39 aa, Artificial Sequence
  Non-cyclic GFR-binding peptide
  MOD_RES (5)..(6)..(38): Xaa is C or S
TPPTXXVPTRLSSLSILFFDSANNVVLKVYPDMVVESXG

SEQ ID NO: 24582 - protein, 42 aa, Artificial Sequence
  Non-cyclic GFR-binding peptide
  MOD_RES (6)..(7)..(40)..(42): Xaa is C or S
  MOD_RES (21)..(22)..(23)..(24)..(25): Xaa is A or G
  MOD_RES (26)..(27)..(28)..(29): Xaa is A or G or absent
ASASPXXVSQDLSSLSILFFXXXXXXXXXLKVYPMIVKSXKX

SEQ ID NO: 24583 - protein, 38 aa, Artificial Sequence
  Non-cyclic GFR-binding peptide
  MOD_RES (2)..(3)..(37): Xaa is C or S
  MOD_RES (17)..(18)..(19)..(20)..(21): Xaa is A or G
  MOD_RES (22)..(23)..(24)..(25): Xaa is A or G or absent
PXXAPTKLSSLSVLFFXXXXXXXXXLKVYPNMVVRSXG

SEQ ID NO: 24584 - protein, 39 aa, Artificial Sequence
  Non-cyclic GFR-binding peptide
  MOD_RES (1)..(2)..(36)..(38): Xaa is C or S
  MOD_RES (16)..(17)..(18)..(19)..(20): Xaa is A or G
  MOD_RES (21)..(22)..(23)..(24): Xaa is A or G or absent
XXTPTKMSSLSMLFFXXXXXXXXXLKVYPGMVVDRXGXS

SEQ ID NO: 24585 - protein, 37 aa, Artificial Sequence
  Non-cyclic GFR-binding peptide
  MOD_RES (1)..(2)..(36): Xaa is C or S
  MOD_RES (16)..(17)..(18)..(19)..(20): Xaa is A or G
  MOD_RES (21)..(22)..(23)..(24): Xaa is A or G or absent
XXVPARLSSLSILFFXXXXXXXXXLKVYPDMVVEAXG

SEQ ID NO: 24586 - protein, 41 aa, Artificial Sequence
  Non-cyclic GFR-binding peptide
  MOD_RES (4)..(38)..(40): Xaa is C or S
  MOD_RES (18)..(19)..(20)..(21)..(22): Xaa is A or G
  MOD_RES (23)..(24)..(25)..(26): Xaa is A or G or absent
KPTXAPTKLSSLSVLFFXXXXXXXXXLKVYPNMVVRSXGXH

SEQ ID NO: 24587 - protein, 35 aa, Artificial Sequence
  Non-cyclic GFR-binding peptide
  MOD_RES (1)..(2)..(35): Xaa is C or S
  MOD_RES (16)..(17)..(18)..(19)..(20): Xaa is A or G
  MOD_RES (21)..(22)..(23)..(24): Xaa is A or G or absent
XXAPVKTSSLSMLFFXXXXXXXXXLKVYPMIVEEX

SEQ ID NO: 24588 - protein, 35 aa, Artificial Sequence
  Non-cyclic GFR-binding peptide
  MOD_RES (4)..(5): Xaa is C or S
PSTXXAPVKTSSLSMLFFDNGRVLLLKVYPMIVEE

SEQ ID NO: 24589 - protein, 41 aa, Artificial Sequence
  Non-cyclic GFR-binding peptide
  MOD_RES (7)..(41): Xaa is C or S
  MOD_RES (21)..(22)..(23)..(24)..(25): Xaa is A or G
  MOD_RES (26)..(27)..(28)..(29): Xaa is A or G or absent
HVTKPTXAPTKLSSLSVLFFXXXXXXXXXLKVYPNMVVRSX

SEQ ID NO: 24590 - protein, 41 aa, Artificial Sequence
  Non-cyclic GFR-binding peptide
  MOD_RES (6)..(7)..(41): Xaa is C or S
  MOD_RES (21)..(22)..(23)..(24)..(25): Xaa is A or G
  MOD_RES (26)..(27)..(28)..(29): Xaa is A or G or absent
GSAGPXXTPTKMSSLSMLFFXXXXXXXXXLKVYPGMVVDRX

SEQ ID NO: 24591 - protein, 35 aa, Artificial Sequence
  Non-cyclic GFR-binding peptide
  MOD_RES (2)..(3)..(34): Xaa is C or S
TXXAPVKTSSLSMLFFDNGRVLLLKVYPMIVEEXG

SEQ ID NO: 24592 - protein, 38 aa, Artificial Sequence
  Non-cyclic GFR-binding peptide
  MOD_RES (4)..(5)..(37): Xaa is C or S
AGPXXTPTKMSSLSMLFFNDKQQIILKVYPGMVVDRXG

SEQ ID NO: 24593 - protein, 36 aa, Artificial Sequence
  Non-cyclic GFR-binding peptide
  MOD_RES (34)..(36): Xaa is C or S
  MOD_RES (14)..(15)..(16)..(17)..(18): Xaa is A or G
  MOD_RES (19)..(20)..(21)..(22): Xaa is A or G or absent
VPTKLSSLSILFFXXXXXXXXXLKVYPGMAVSEXGX

SEQ ID NO: 24594 - protein, 41 aa, Artificial Sequence
  Non-cyclic GFR-binding peptide
  MOD_RES (6)..(40): Xaa is C or S
DEGLEXVPTEESSLSMLFFRIKPHQGQHLKVYPFLQHNKXE

SEQ ID NO: 24595 - protein, 37 aa, Artificial Sequence
  Non-cyclic GFR-binding peptide
  MOD_RES (4)..(4): Xaa is C or S
  MOD_RES (18)..(19)..(20)..(21)..(22): Xaa is A or G
  MOD_RES (23)..(24)..(25)..(26): Xaa is A or G or absent
GLEXVPTEESSLSMLFFXXXXXXXXXLKVYPFLQHNK

SEQ ID NO: 24596 - protein, 37 aa, Artificial Sequence
  Non-cyclic GFR-binding peptide
  MOD_RES (3)..(4)..(36): Xaa is C or S
PTXXVPTRLSSLSILFFDSANNVVLKVYPDMVVESXG

SEQ ID NO: 24597 - protein, 39 aa, Artificial Sequence
  Non-cyclic GFR-binding peptide
  MOD_RES (5)..(6)..(37)..(39): Xaa is C or S
SAAPXXVPQALSSLSILFFVGRKPKVLKVYPMIVRSXKX

SEQ ID NO: 24598 - protein, 36 aa, Artificial Sequence
  Non-cyclic GFR-binding peptide
  MOD_RES (4)..(5)..(36): Xaa is C or S
PSTXXAPVKTSSLSMLFFDNGRVLLLKVYPMIVEEX

SEQ ID NO: 24599 - protein, 37 aa, Artificial Sequence
  Non-cyclic GFR-binding peptide
  MOD_RES (3)..(4)..(37): Xaa is C or S
  MOD_RES (18)..(19)..(20)..(21)..(22): Xaa is A or G
  MOD_RES (23)..(24)..(25)..(26): Xaa is A or G or absent
SPXXVSQDLSSLSILFFXXXXXXXXXLKVYPMIVKSX

SEQ ID NO: 24600 - protein, 41 aa, Artificial Sequence
  Non-cyclic GFR-binding peptide
  MOD_RES (5)..(6)..(39)..(41): Xaa is C or S
  MOD_RES (20)..(21)..(22)..(23)..(24): Xaa is A or G
  MOD_RES (25)..(26)..(27)..(28): Xaa is A or G or absent
SASPXXVPQDLSSLSILFFXXXXXXXXXLKVYPMVVKSXKX

SEQ ID NO: 24601 - protein, 36 aa, Artificial Sequence
  Non-cyclic GFR-binding peptide
  MOD_RES (3)..(4)..(35): Xaa is C or S
SPXXVPQDLSSLSILFFVGRTPKVLKVYPMVVKSXK

SEQ ID NO: 24602 - protein, 39 aa, Artificial Sequence
  Non-cyclic GFR-binding peptide
  MOD_RES (2)..(3)..(36)..(38): Xaa is C or S
AXXVPTKLSSLSVLFFDDMGVPTLKVYPEGMSVAEXGXR

SEQ ID NO: 24603 - protein, 35 aa, Artificial Sequence
  Non-cyclic GFR-binding peptide
  MOD_RES (4)..(5): Xaa is C or S
SKAXXVPTKLSSLSILFFDKGVVTYLKVYPGMAVS

SEQ ID NO: 24604 - protein, 38 aa, Artificial Sequence
  Non-cyclic GFR-binding peptide
  MOD_RES (5)..(6)..(37): Xaa is C or S
SAAPXXVPQALSSLSILFFVGRKPKVLKVYPMIVRSXK

SEQ ID NO: 24605 - protein, 34 aa, Artificial Sequence
  Non-cyclic GFR-binding peptide
  MOD_RES (3)..(4): Xaa is C or S
KAXXVPTKLSSLSILFFDKGVVTYLKVYPGMAVS

SEQ ID NO: 24606 - protein, 36 aa, Artificial Sequence
  Non-cyclic GFR-binding peptide
  MOD_RES (1)..(2)..(35): Xaa is C or S
XXVPTKLSSLSVLFFDDMGVPTLKVYPEGMSVAEXG

SEQ ID NO: 24607 - protein, 36 aa, Artificial Sequence
  Non-cyclic GFR-binding peptide
  MOD_RES (4)..(5)..(36): Xaa is C or S
AAPXXVPQALSSLSILFFVGRKPKVLKVYPMIVRSX

SEQ ID NO: 24608 - protein, 38 aa, Artificial Sequence
  Non-cyclic GFR-binding peptide
  MOD_RES (4)..(5): Xaa is C or S
  MOD_RES (19)..(20)..(21)..(22)..(23): Xaa is A or G
  MOD_RES (24)..(25)..(26)..(27): Xaa is A or G or absent
SKAXXVPTKLSSLSILFFXXXXXXXXXLKVYPGMAVSE

SEQ ID NO: 24609 - protein, 35 aa, Artificial Sequence
  Non-cyclic GFR-binding peptide
  MOD_RES (1)..(35): Xaa is C or S
  MOD_RES (15)..(16)..(17)..(18)..(19): Xaa is A or G
  MOD_RES (20)..(21)..(22)..(23): Xaa is A or G or absent
XVPARLSSLSILFFXXXXXXXXXLKVYPDMVVEAX

SEQ ID NO: 24610 - protein, 41 aa, Artificial Sequence
  Non-cyclic GFR-binding peptide
  MOD_RES (6)..(7)..(40): Xaa is C or S
  MOD_RES (21)..(22)..(23)..(24)..(25): Xaa is A or G
  MOD_RES (26)..(27)..(28)..(29): Xaa is A or G or absent
ASAAPXXVPQALSSLSILFFXXXXXXXXXLKVYPMIVRSXK

SEQ ID NO: 24611 - protein, 35 aa, Artificial Sequence
  Non-cyclic GFR-binding peptide
  MOD_RES (1)..(34): Xaa is C or S
XVPTKLSSLSVLFFDDMGVPTLKVYPEGMSVAEXG

SEQ ID NO: 24612 - protein, 38 aa, Artificial Sequence
  Non-cyclic GFR-binding peptide
  MOD_RES (2)..(3)..(35)..(37): Xaa is C or S
AXXAPTKLSSLSVLFFDSSNNVILKVYPNMVVKAXGXH

SEQ ID NO: 24613 - protein, 34 aa, Artificial Sequence
  Non-cyclic GFR-binding peptide
  MOD_RES (34)..(34): Xaa is C or S
  MOD_RES (14)..(15)..(16)..(17)..(18): Xaa is A or G
  MOD_RES (19)..(20)..(21)..(22): Xaa is A or G or absent
TPTKMSSLSMLFFXXXXXXXXXLKVYPGMVVDRX

SEQ ID NO: 24614 - protein, 33 aa, Artificial Sequence
  Non-cyclic GFR-binding peptide
VPTEESSLSMLFFRIKPHQGQHLKVYPFLQHNK

SEQ ID NO: 24615 - protein, 41 aa, Artificial Sequence
  Non-cyclic GFR-binding peptide
  MOD_RES (7)..(41): Xaa is C or S
NDEGLEXVPTEESSLSMLFFRIKPHQGQHLKVYPFLQHNKX

SEQ ID NO: 24616 - protein, 37 aa, Artificial Sequence
  Non-cyclic GFR-binding peptide
  MOD_RES (3)..(4)..(37): Xaa is C or S
  MOD_RES (18)..(19)..(20)..(21)..(22): Xaa is A or G
  MOD_RES (23)..(24)..(25)..(26): Xaa is A or G or absent
APXXVPQALSSLSILFFXXXXXXXXXLKVYPMIVRSX

SEQ ID NO: 24617 - protein, 39 aa, Artificial Sequence
  Non-cyclic GFR-binding peptide
  MOD_RES (6)..(7)..(38): Xaa is C or S
ASASPXXVPQDLSSLSILFFVGRTPKVLKVYPMVVKSXK

SEQ ID NO: 24618 - protein, 36 aa, Artificial Sequence
  Non-cyclic GFR-binding peptide
  MOD_RES (2)..(36): Xaa is C or S
  MOD_RES (16)..(17)..(18)..(19)..(20): Xaa is A or G
  MOD_RES (21)..(22)..(23)..(24): Xaa is A or G or absent
TXAPTKLSSLSVLFFXXXXXXXXXLKVYPNMVVRSX

SEQ ID NO: 24619 - protein, 36 aa, Artificial Sequence
  Non-cyclic GFR-binding peptide
  MOD_RES (4)..(5): Xaa is C or S
PKAXXVPTELSSLSMLFFDEYDKVVLKVYPEMVVEG

SEQ ID NO: 24620 - protein, 37 aa, Artificial Sequence
  Non-cyclic GFR-binding peptide
  MOD_RES (6)..(7): Xaa is C or S
TVPKPXXAPTQLSSLSVLFFDDSSNVILKVYPNMVVR

SEQ ID NO: 24621 - protein, 30 aa, Artificial Sequence
  Non-cyclic GFR-binding peptide
APTQLSSLSVLFFDDSSNVILKVYPNMVVR

SEQ ID NO: 24622 - protein, 32 aa, Artificial Sequence
  Non-cyclic GFR-binding peptide
  MOD_RES (1)..(2): Xaa is C or S
XXVPQDLSSLSILFFVGRTPKVLKVYPMVVKS

SEQ ID NO: 24623 - protein, 36 aa, Artificial Sequence
  Non-cyclic GFR-binding peptide
  MOD_RES (6)..(6): Xaa is C or S
VTKPTXAPTKLSSLSVLFFDDSSNVILKVYPNMVVR

SEQ ID NO: 24624 - protein, 33 aa, Artificial Sequence
  Non-cyclic GFR-binding peptide
  MOD_RES (32)..(32): Xaa is C or S
VPTELSSLSMLFFDEYDKVVLKVYPEMVVEGXG

SEQ ID NO: 24625 - protein, 39 aa, Artificial Sequence
  Non-cyclic GFR-binding peptide
  MOD_RES (3)..(4)..(38): Xaa is C or S
  MOD_RES (18)..(19)..(20)..(21)..(22): Xaa is A or G
  MOD_RES (23)..(24)..(25)..(26): Xaa is A or G or absent
ASXXVPARLSSLSILFFXXXXXXXXXLKVYPDMVVEAXG

SEQ ID NO: 24626 - protein, 36 aa, Artificial Sequence
  Non-cyclic GFR-binding peptide
  MOD_RES (1)..(2)..(35): Xaa is C or S
  MOD_RES (16)..(17)..(18)..(19)..(20): Xaa is A or G
  MOD_RES (21)..(22)..(23)..(24): Xaa is A or G or absent
XXVSQDLSSLSILFFXXXXXXXXXLKVYPMIVKSXK

SEQ ID NO: 24627 - protein, 39 aa, Artificial Sequence
  Non-cyclic GFR-binding peptide
  MOD_RES (3)..(4)..(37)..(39): Xaa is C or S
  MOD_RES (18)..(19)..(20)..(21)..(22): Xaa is A or G
  MOD_RES (23)..(24)..(25)..(26): Xaa is A or G or absent
APXXVPQALSSLSILFFXXXXXXXXXLKVYPMIVRSXKX

SEQ ID NO: 24628 - protein, 39 aa, Artificial Sequence
  Non-cyclic GFR-binding peptide
  MOD_RES (6)..(7)..(39): Xaa is C or S
STPPTXXVPTRLSSLSILFFDSANNVVLKVYPDMVVESX

SEQ ID NO: 24629 - protein, 38 aa, Artificial Sequence
  Non-cyclic GFR-binding peptide
  MOD_RES (4)..(5)..(37): Xaa is C or S
PKAXXAPTKLSSLSVLFFDSSNNVILKVYPNMVVKAXG

SEQ ID NO: 24630 - protein, 35 aa, Artificial Sequence
  Non-cyclic GFR-binding peptide
  MOD_RES (2)..(3)..(35): Xaa is C or S
PXXAPTQLSSLSVLFFDDSSNVILKVYPNMVVRAX

SEQ ID NO: 24631 - protein, 34 aa, Artificial Sequence
  Non-cyclic GFR-binding peptide
  MOD_RES (1)..(2): Xaa is C or S
  MOD_RES (16)..(17)..(18)..(19)..(20): Xaa is A or G
  MOD_RES (21)..(22)..(23)..(24): Xaa is A or G or absent
XXVPARLSSLSILFFXXXXXXXXXLKVYPDMVVE

SEQ ID NO: 24632 - protein, 38 aa, Artificial Sequence
  Non-cyclic GFR-binding peptide
  MOD_RES (6)..(7): Xaa is C or S
AAPASXXVPARLSSLSILFFDAANNVVLKVYPDMVVEA

SEQ ID NO: 24633 - protein, 32 aa, Artificial Sequence
  Non-cyclic GFR-binding peptide
  MOD_RES (1)..(1): Xaa is C or S
XAPTQLSSLSVLFFDDSSNVILKVYPNMVVRA

SEQ ID NO: 24634 - protein, 37 aa, Artificial Sequence
  Non-cyclic GFR-binding peptide
  MOD_RES (2)..(3)..(34)..(36): Xaa is C or S
PXXVSQDLSSLSILFFIGKTPKILKVYPMIVKSXKXS

SEQ ID NO: 24635 - protein, 43 aa, Artificial Sequence
  Non-cyclic GFR-binding peptide
  MOD_RES (3)..(40)..(42): Xaa is C or S
VKXQPSRVHHSSLSVLFFEYVRKKPKLLKVYPRLEEHLEXAXA

SEQ ID NO: 24636 - protein, 39 aa, Artificial Sequence
  Non-cyclic GFR-binding peptide
  MOD_RES (6)..(7): Xaa is C or S
  MOD_RES (21)..(22)..(23)..(24)..(25): Xaa is A or G
  MOD_RES (26)..(27)..(28)..(29): Xaa is A or G or absent
KASKAXXVPTKLSSLSILFFXXXXXXXXXLKVYPGMAVS

SEQ ID NO: 24637 - protein, 37 aa, Artificial Sequence
  Non-cyclic GFR-binding peptide
  MOD_RES (1)..(34)..(36): Xaa is C or S
  MOD_RES (15)..(16)..(17)..(18)..(19): Xaa is A or G
  MOD_RES (20)..(21)..(22)..(23): Xaa is A or G or absent
XVSQDLSSLSILFFXXXXXXXXXLKVYPMIVKSXKXS

SEQ ID NO: 24638 - protein, 36 aa, Artificial Sequence
  Non-cyclic GFR-binding peptide
  MOD_RES (1)..(2)..(36): Xaa is C or S
  MOD_RES (16)..(17)..(18)..(19)..(20): Xaa is A or G
  MOD_RES (21)..(22)..(23)..(24): Xaa is A or G or absent
XXVPTRLSSLSILFFXXXXXXXXXLKVYPDMVVESX

SEQ ID NO: 24639 - protein, 40 aa, Artificial Sequence
  Non-cyclic GFR-binding peptide
  MOD_RES (2)..(3)..(37)..(39): Xaa is C or S
  MOD_RES (17)..(18)..(19)..(20)..(21): Xaa is A or G
  MOD_RES (22)..(23)..(24)..(25): Xaa is A or G or absent
PXXAPTKLSSLSVLFFXXXXXXXXXLKVYPNMVVRSXGXH

SEQ ID NO: 24640 - protein, 38 aa, Artificial Sequence
  Non-cyclic GFR-binding peptide
  MOD_RES (5)..(6): Xaa is C or S
  MOD_RES (20)..(21)..(22)..(23)..(24): Xaa is A or G
  MOD_RES (25)..(26)..(27)..(28): Xaa is A or G or absent
VPKPXXAPTQLSSLSVLFFXXXXXXXXXLKVYPNMVVR

SEQ ID NO: 24641 - protein, 33 aa, Artificial Sequence
  Non-cyclic GFR-binding peptide
  MOD_RES (1)..(32): Xaa is C or S
XVPQDLSSLSILFFVGRTPKVLKVYPMVVKSXK

SEQ ID NO: 24642 - protein, 38 aa, Artificial Sequence
  Non-cyclic GFR-binding peptide
  MOD_RES (1)..(35)..(37): Xaa is C or S
  MOD_RES (15)..(16)..(17)..(18)..(19): Xaa is A or G
  MOD_RES (20)..(21)..(22)..(23): Xaa is A or G or absent
XVPTELSSLSMLFFXXXXXXXXXLKVYPEMVVEGXGXR

SEQ ID NO: 24643 - protein, 42 aa, Artificial Sequence
  Non-cyclic GFR-binding peptide
  MOD_RES (6)..(7)..(41): Xaa is C or S
  MOD_RES (21)..(22)..(23)..(24)..(25): Xaa is A or G
  MOD_RES (26)..(27)..(28)..(29): Xaa is A or G or absent
HVPKPXXAPTKLSSLSVLFFXXXXXXXXXLKVYPNMVVRSXG

SEQ ID NO: 24644 - protein, 44 aa, Artificial Sequence
  Non-cyclic GFR-binding peptide
  MOD_RES (6)..(7)..(41)..(43): Xaa is C or S
  MOD_RES (21)..(22)..(23)..(24)..(25): Xaa is A or G
  MOD_RES (26)..(27)..(28)..(29): Xaa is A or G or absent
HVPKPXXAPTKLSSLSVLFFXXXXXXXXXLKVYPNMVVRSXGXH

SEQ ID NO: 24645 - protein, 41 aa, Artificial Sequence
  Non-cyclic GFR-binding peptide
  MOD_RES (6)..(7)..(41): Xaa is C or S
  MOD_RES (21)..(22)..(23)..(24)..(25): Xaa is A or G
  MOD_RES (26)..(27)..(28)..(29): Xaa is A or G or absent
SIPKAXXVPTELSSLSMLFFXXXXXXXXXLKVYPEMVVEGX

SEQ ID NO: 24646 - protein, 41 aa, Artificial Sequence
  Non-cyclic GFR-binding peptide
  MOD_RES (6)..(7)..(41): Xaa is C or S
  MOD_RES (21)..(22)..(23)..(24)..(25): Xaa is A or G
  MOD_RES (26)..(27)..(28)..(29): Xaa is A or G or absent
TVPKPXXAPTQLSSLSVLFFXXXXXXXXXLKVYPNMVVRAX

SEQ ID NO: 24647 - protein, 31 aa, Artificial Sequence
  Non-cyclic GFR-binding peptide
  MOD_RES (1)..(1): Xaa is C or S
XVPQDLSSLSILFFVGRTPKVLKVYPMVVKS

SEQ ID NO: 24648 - protein, 40 aa, Artificial Sequence
  Non-cyclic GFR-binding peptide
  MOD_RES (5)..(6)..(39): Xaa is C or S
  MOD_RES (20)..(21)..(22)..(23)..(24): Xaa is A or G
  MOD_RES (25)..(26)..(27)..(28): Xaa is A or G or absent
SASPXXVPQDLSSLSILFFXXXXXXXXXLKVYPMVVKSXK

SEQ ID NO: 24649 - protein, 41 aa, Artificial Sequence
  Non-cyclic GFR-binding peptide
  MOD_RES (6)..(7)..(39)..(41): Xaa is C or S
SIPKAXXVPTELSSLSMLFFDEYDKVVLKVYPEMVVEGXGX

SEQ ID NO: 24650 - protein, 39 aa, Artificial Sequence
  Non-cyclic GFR-binding peptide
  MOD_RES (3)..(4)..(36)..(38): Xaa is C or S
KAXXVPTELSSLSMLFFDEYDKVVLKVYPEMVVEGXGXR

SEQ ID NO: 24651 - protein, 40 aa, Artificial Sequence
  Non-cyclic GFR-binding peptide
  MOD_RES (6)..(7): Xaa is C or S
  MOD_RES (21)..(22)..(23)..(24)..(25): Xaa is A or G
  MOD_RES (26)..(27)..(28)..(29): Xaa is A or G or absent
AVPKAXXAPTKLSSLSVLFFXXXXXXXXXLKVYPNMVVKA

SEQ ID NO: 24652 - protein, 39 aa, Artificial Sequence
  Non-cyclic GFR-binding peptide
  MOD_RES (2)..(3)..(37)..(39): Xaa is C or S
  MOD_RES (17)..(18)..(19)..(20)..(21): Xaa is A or G
  MOD_RES (22)..(23)..(24)..(25): Xaa is A or G or absent
PXXAPTQLSSLSVLFFXXXXXXXXXLKVYPNMVVRAXGX

SEQ ID NO: 24653 - protein, 37 aa, Artificial Sequence
  Non-cyclic GFR-binding peptide
  MOD_RES (5)..(6): Xaa is C or S
APASXXVPARLSSLSILFFDAANNVVLKVYPDMVVEA

SEQ ID NO: 24654 - protein, 38 aa, Artificial Sequence
  Non-cyclic GFR-binding peptide
  MOD_RES (1)..(2)..(36)..(38): Xaa is C or S
  MOD_RES (16)..(17)..(18)..(19)..(20): Xaa is A or G
  MOD_RES (21)..(22)..(23)..(24): Xaa is A or G or absent
XXVPTKLSSLSILFFXXXXXXXXXLKVYPGMAVSEXGX

SEQ ID NO: 24655 - protein, 36 aa, Artificial Sequence
  Non-cyclic GFR-binding peptide
  MOD_RES (3)..(4)..(36): Xaa is C or S
KAXXAPTKLSSLSVLFFDSSNNVILKVYPNMVVKAX

SEQ ID NO: 24656 - protein, 40 aa, Artificial Sequence
  Non-cyclic GFR-binding peptide
  MOD_RES (1)..(38)..(40): Xaa is C or S
XQPSRVHHSSLSVLFFEYVRKKPKLLKVYPRLEEHLEXAX

SEQ ID NO: 24657 - protein, 40 aa, Artificial Sequence
  Non-cyclic GFR-binding peptide
  MOD_RES (4)..(5)..(38)..(40): Xaa is C or S
  MOD_RES (19)..(20)..(21)..(22)..(23): Xaa is A or G
  MOD_RES (24)..(25)..(26)..(27): Xaa is A or G or absent
PSTXXAPVKTSSLSMLFFXXXXXXXXXLKVYPMIVEEXGX

SEQ ID NO: 24658 - protein, 35 aa, Artificial Sequence
  Non-cyclic GFR-binding peptide
  MOD_RES (1)..(35): Xaa is C or S
  MOD_RES (15)..(16)..(17)..(18)..(19): Xaa is A or G
  MOD_RES (20)..(21)..(22)..(23): Xaa is A or G or absent
XVPTELSSLSMLFFXXXXXXXXXLKVYPEMVVEGX

SEQ ID NO: 24659 - protein, 37 aa, Artificial Sequence
  Non-cyclic GFR-binding peptide
  MOD_RES (2)..(3)..(36): Xaa is C or S
  MOD_RES (17)..(18)..(19)..(20)..(21): Xaa is A or G
  MOD_RES (22)..(23)..(24)..(25): Xaa is A or G or absent
PXXVPQALSSLSILFFXXXXXXXXXLKVYPMIVRSXK

SEQ ID NO: 24660 - protein, 36 aa, Artificial Sequence
  Non-cyclic GFR-binding peptide
  MOD_RES (2)..(3): Xaa is C or S
  MOD_RES (17)..(18)..(19)..(20)..(21): Xaa is A or G
  MOD_RES (22)..(23)..(24)..(25): Xaa is A or G or absent
AXXAPTKLSSLSVLFFXXXXXXXXXLKVYPNMVVKA

SEQ ID NO: 24661 - protein, 39 aa, Artificial Sequence
  Non-cyclic GFR-binding peptide
  MOD_RES (4)..(5)..(37)..(39): Xaa is C or S
PPTXXVPTRLSSLSILFFDSANNVVLKVYPDMVVESXGX

SEQ ID NO: 24662 - protein, 41 aa, Artificial Sequence
  Non-cyclic GFR-binding peptide
  MOD_RES (5)..(6)..(38)..(40): Xaa is C or S
APASXXVPARLSSLSILFFDAANNVVLKVYPDMVVEAXGXR

SEQ ID NO: 24663 - protein, 43 aa, Artificial Sequence
  Non-cyclic GFR-binding peptide
  MOD_RES (6)..(40)..(42): Xaa is C or S
DEGLEXVPTEESSLSMLFFRIKPHQGQHLKVYPFLQHNKXEXR

SEQ ID NO: 24664 - protein, 35 aa, Artificial Sequence
  Non-cyclic GFR-binding peptide
  MOD_RES (2)..(34): Xaa is C or S
TXAPTKLSSLSVLFFDDSSNVILKVYPNMVVRSXG

SEQ ID NO: 24665 - protein, 37 aa, Artificial Sequence
  Non-cyclic GFR-binding peptide
  MOD_RES (4)..(5): Xaa is C or S
  MOD_RES (19)..(20)..(21)..(22)..(23): Xaa is A or G
  MOD_RES (24)..(25)..(26)..(27): Xaa is A or G or absent
AGPXXTPTKMSSLSMLFFXXXXXXXXXLKVYPGMVVD

SEQ ID NO: 24666 - protein, 41 aa, Artificial Sequence
  Non-cyclic GFR-binding peptide
  MOD_RES (6)..(40): Xaa is C or S
  MOD_RES (20)..(21)..(22)..(23)..(24): Xaa is A or G
  MOD_RES (25)..(26)..(27)..(28): Xaa is A or G or absent
VTKPTXAPTKLSSLSVLFFXXXXXXXXXLKVYPNMVVRSXG

SEQ ID NO: 24667 - protein, 36 aa, Artificial Sequence
  Non-cyclic GFR-binding peptide
  MOD_RES (1)..(33)..(35): Xaa is C or S
XAPTKLSSLSVLFFDDSSNVILKVYPNMVVRSXGXH

SEQ ID NO: 24668 - protein, 38 aa, Artificial Sequence
  Non-cyclic GFR-binding peptide
  MOD_RES (2)..(3)..(35)..(37): Xaa is C or S
PXXAPTKLSSLSVLFFDDSSNVILKVYPNMVVRSXGXH

SEQ ID NO: 24669 - protein, 41 aa, Artificial Sequence
  Non-cyclic GFR-binding peptide
  MOD_RES (5)..(39)..(41): Xaa is C or S
  MOD_RES (19)..(20)..(21)..(22)..(23): Xaa is A or G
  MOD_RES (24)..(25)..(26)..(27): Xaa is A or G or absent
EGLEXVPTEESSLSMLFFXXXXXXXXXLKVYPFLQHNKXEX

SEQ ID NO: 24670 - protein, 34 aa, Artificial Sequence
  Non-cyclic GFR-binding peptide
  MOD_RES (32)..(34): Xaa is C or S
APTKLSSLSVLFFDDSSNVILKVYPNMVVRSXGX

SEQ ID NO: 24671 - protein, 37 aa, Artificial Sequence
  Non-cyclic GFR-binding peptide
  MOD_RES (1)..(2)..(34)..(36): Xaa is C or S
XXVPARLSSLSILFFDAANNVVLKVYPDMVVEAXGXR

SEQ ID NO: 24672 - protein, 37 aa, Artificial Sequence
  Non-cyclic GFR-binding peptide
  MOD_RES (3)..(4)..(36): Xaa is C or S
KAXXVPTKLSSLSILFFDKGVVTYLKVYPGMAVSEXG

SEQ ID NO: 24673 - protein, 36 aa, Artificial Sequence
  Non-cyclic GFR-binding peptide
  MOD_RES (34)..(36): Xaa is C or S
  MOD_RES (14)..(15)..(16)..(17)..(18): Xaa is A or G
  MOD_RES (19)..(20)..(21)..(22): Xaa is A or G or absent
VPTELSSLSMLFFXXXXXXXXXLKVYPEMVVEGXGX

SEQ ID NO: 24674 - protein, 37 aa, Artificial Sequence
  Non-cyclic GFR-binding peptide
  MOD_RES (1)..(2)..(35)..(37): Xaa is C or S
  MOD_RES (16)..(17)..(18)..(19)..(20): Xaa is A or G
  MOD_RES (21)..(22)..(23)..(24): Xaa is A or G or absent
XXVPQDLSSLSILFFXXXXXXXXXLKVYPMVVKSXKX

SEQ ID NO: 24675 - protein, 34 aa, Artificial Sequence
  Non-cyclic GFR-binding peptide
  MOD_RES (2)..(2): Xaa is C or S
  MOD_RES (16)..(17)..(18)..(19)..(20): Xaa is A or G
  MOD_RES (21)..(22)..(23)..(24): Xaa is A or G or absent
TXAPTKLSSLSVLFFXXXXXXXXXLKVYPNMVVR

SEQ ID NO: 24676 - protein, 39 aa, Artificial Sequence
  Non-cyclic GFR-binding peptide
  MOD_RES (6)..(7)..(38): Xaa is C or S
RVPSTXXAPVKTSSLSMLFFDNGRVLLLKVYPMIVEEXG

SEQ ID NO: 24677 - protein, 38 aa, Artificial Sequence
  Non-cyclic GFR-binding peptide
  MOD_RES (5)..(6)..(38): Xaa is C or S
VPKAXXAPTKLSSLSVLFFDSSNNVILKVYPNMVVKAX

SEQ ID NO: 24678 - protein, 39 aa, Artificial Sequence
  Non-cyclic GFR-binding peptide
  MOD_RES (3)..(4)..(37)..(39): Xaa is C or S
  MOD_RES (18)..(19)..(20)..(21)..(22): Xaa is A or G
  MOD_RES (23)..(24)..(25)..(26): Xaa is A or G or absent
STXXAPVKTSSLSMLFFXXXXXXXXXLKVYPMIVEEXGX

SEQ ID NO: 24679 - protein, 39 aa, Artificial Sequence
  Non-cyclic GFR-binding peptide
  MOD_RES (4)..(4): Xaa is C or S
  MOD_RES (20)..(21)..(22)..(23)..(24): Xaa is A or G
  MOD_RES (25)..(26)..(27)..(28): Xaa is A or G or absent
SVKXQPSRVHHSSLSVLFFXXXXXXXXXLKVYPRLEEHL

SEQ ID NO: 24680 - protein, 41 aa, Artificial Sequence
  Non-cyclic GFR-binding peptide
  MOD_RES (6)..(7)..(40): Xaa is C or S
KVGKAXXVPTKLSSLSVLFFDDMGVPTLKVYPEGMSVAEXG

SEQ ID NO: 24681 - protein, 37 aa, Artificial Sequence
  Non-cyclic GFR-binding peptide
  MOD_RES (34)..(36): Xaa is C or S
  MOD_RES (14)..(15)..(16)..(17)..(18): Xaa is A or G
  MOD_RES (19)..(20)..(21)..(22): Xaa is A or G or absent
APTKLSSLSVLFFXXXXXXXXXLKVYPNMVVKAXGXH

SEQ ID NO: 24682 - protein, 34 aa, Artificial Sequence
  Non-cyclic GFR-binding peptide
  MOD_RES (31)..(33): Xaa is C or S
VSQDLSSLSILFFIGKTPKILKVYPMIVKSXKXS

SEQ ID NO: 24683 - protein, 43 aa, Artificial Sequence
  Non-cyclic GFR-binding peptide
  MOD_RES (5)..(6)..(41)..(43): Xaa is C or S
  MOD_RES (20)..(21)..(22)..(23)..(24): Xaa is A or G
  MOD_RES (25)..(26)..(27)..(28): Xaa is A or G or absent
VGKAXXVPTKLSSLSVLFFXXXXXXXXXLKVYPEGMSVAEXGX

SEQ ID NO: 24684 - protein, 41 aa, Artificial Sequence
  Non-cyclic GFR-binding peptide
  MOD_RES (1)..(38)..(40): Xaa is C or S
  MOD_RES (17)..(18)..(19)..(20)..(21): Xaa is A or G
  MOD_RES (22)..(23)..(24)..(25): Xaa is A or G or absent
XQPSRVHHSSLSVLFFXXXXXXXXXLKVYPRLEEHLEXAXA

SEQ ID NO: 24685 - protein, 42 aa, Artificial Sequence
  Non-cyclic GFR-binding peptide
  MOD_RES (5)..(6)..(40)..(42): Xaa is C or S
  MOD_RES (20)..(21)..(22)..(23)..(24): Xaa is A or G
  MOD_RES (25)..(26)..(27)..(28): Xaa is A or G or absent
TPPTXXVPTRLSSLSILFFXXXXXXXXXLKVYPDMVVESXGX

SEQ ID NO: 24686 - protein, 41 aa, Artificial Sequence
  Non-cyclic GFR-binding peptide
  MOD_RES (3)..(40): Xaa is C or S
VKXQPSRVHHSSLSVLFFEYVRKKPKLLKVYPRLEEHLEXA

SEQ ID NO: 24687 - protein, 32 aa, Artificial Sequence
  Non-cyclic GFR-binding peptide
  MOD_RES (1)..(1): Xaa is C or S
XVPTRLSSLSILFFDSANNVVLKVYPDMVVES

SEQ ID NO: 24688 - protein, 34 aa, Artificial Sequence
  Non-cyclic GFR-binding peptide
  MOD_RES (32)..(34): Xaa is C or S
TPTKMSSLSMLFFNDKQQIILKVYPGMVVDRXGX

SEQ ID NO: 24689 - protein, 39 aa, Artificial Sequence
  Non-cyclic GFR-binding peptide
  MOD_RES (3)..(4)..(38): Xaa is C or S
  MOD_RES (18)..(19)..(20)..(21)..(22): Xaa is A or G
  MOD_RES (23)..(24)..(25)..(26): Xaa is A or G or absent
KAXXVPTKLSSLSILFFXXXXXXXXXLKVYPGMAVSEXG

SEQ ID NO: 24690 - protein, 30 aa, Artificial Sequence; identical to SEQ ID NO: 763
  Non-cyclic GFR-binding peptide

SEQ ID NO: 24691 - protein, 40 aa, Artificial Sequence
  Non-cyclic GFR-binding peptide
  MOD_RES (2)..(3)..(37)..(39): Xaa is C or S
  MOD_RES (17)..(18)..(19)..(20)..(21): Xaa is A or G
  MOD_RES (22)..(23)..(24)..(25): Xaa is A or G or absent
SXXVPARLSSLSILFFXXXXXXXXXLKVYPDMVVEAXGXR

SEQ ID NO: 24692 - protein, 36 aa, Artificial Sequence
  Non-cyclic GFR-binding peptide
  MOD_RES (1)..(35): Xaa is C or S
  MOD_RES (15)..(16)..(17)..(18)..(19): Xaa is A or G
  MOD_RES (20)..(21)..(22)..(23): Xaa is A or G or absent
XAPTKLSSLSVLFFXXXXXXXXXLKVYPNMVVKAXG

SEQ ID NO: 24693 - protein, 37 aa, Artificial Sequence
  Non-cyclic GFR-binding peptide
  MOD_RES (4)..(5)..(36): Xaa is C or S
ASPXXVPQDLSSLSILFFVGRTPKVLKVYPMVVKSXK

SEQ ID NO: 24694 - protein, 42 aa, Artificial Sequence
  Non-cyclic GFR-binding peptide
  MOD_RES (4)..(5)..(39)..(41): Xaa is C or S
  MOD_RES (19)..(20)..(21)..(22)..(23): Xaa is A or G
  MOD_RES (24)..(25)..(26)..(27): Xaa is A or G or absent
SKAXXVPTKLSSLSILFFXXXXXXXXXLKVYPGMAVSEXGXR

SEQ ID NO: 24695 - protein, 41 aa, Artificial Sequence
  Non-cyclic GFR-binding peptide
  MOD_RES (5)..(6)..(40): Xaa is C or S
  MOD_RES (20)..(21)..(22)..(23)..(24): Xaa is A or G
  MOD_RES (25)..(26)..(27)..(28): Xaa is A or G or absent
VPKAXXAPTKLSSLSVLFFXXXXXXXXXLKVYPNMVVKAXG

SEQ ID NO: 24696 - protein, 34 aa, Artificial Sequence
  Non-cyclic GFR-binding peptide
  MOD_RES (2)..(3)..(34): Xaa is C or S
PXXVPQDLSSLSILFFVGRTPKVLKVYPMVVKSX

SEQ ID NO: 24697 - protein, 36 aa, Artificial Sequence
  Non-cyclic GFR-binding peptide
  MOD_RES (4)..(5): Xaa is C or S
PKAXXAPTKLSSLSVLFFDSSNNVILKVYPNMVVKA

SEQ ID NO: 24698 - protein, 37 aa, Artificial Sequence
  Non-cyclic GFR-binding peptide
  MOD_RES (3)..(4)..(37): Xaa is C or S
  MOD_RES (18)..(19)..(20)..(21)..(22): Xaa is A or G
  MOD_RES (23)..(24)..(25)..(26): Xaa is A or G or absent
SPXXVPQDLSSLSILFFXXXXXXXXXLKVYPMVVKSX

SEQ ID NO: 24699 - protein, 32 aa, Artificial Sequence
  Non-cyclic GFR-binding peptide
  MOD_RES (31)..(31): Xaa is C or S
VPQALSSLSILFFVGRKPKVLKVYPMIVRSXK

SEQ ID NO: 24700 - protein, 42 aa, Artificial Sequence
  Non-cyclic GFR-binding peptide
  MOD_RES (4)..(5)..(39)..(41): Xaa is C or S
  MOD_RES (19)..(20)..(21)..(22)..(23): Xaa is A or G
  MOD_RES (24)..(25)..(26)..(27): Xaa is A or G or absent
AGPXXTPTKMSSLSMLFFXXXXXXXXXLKVYPGMVVDRXGXS

SEQ ID NO: 24701 - protein, 38 aa, Artificial Sequence
  Non-cyclic GFR-binding peptide
  MOD_RES (3)..(4)..(36)..(38): Xaa is C or S
KAXXAPTKLSSLSVLFFDSSNNVILKVYPNMVVKAXGX

SEQ ID NO: 24702 - protein, 38 aa, Artificial Sequence
  Non-cyclic GFR-binding peptide
  MOD_RES (2)..(36)..(38): Xaa is C or S
EXVPTEESSLSMLFFRIKPHQGQHLKVYPFLQHNKXEX

SEQ ID NO: 24703 - protein, 40 aa, Artificial Sequence
  Non-cyclic GFR-binding peptide
  MOD_RES (4)..(38)..(40): Xaa is C or S
  MOD_RES (18)..(19)..(20)..(21)..(22): Xaa is A or G
  MOD_RES (23)..(24)..(25)..(26): Xaa is A or G or absent
GLEXVPTEESSLSMLFFXXXXXXXXXLKVYPFLQHNKXEX

SEQ ID NO: 24704 - protein, 37 aa, Artificial Sequence
  Non-cyclic GFR-binding peptide
  MOD_RES (2)..(3)..(37): Xaa is C or S
  MOD_RES (17)..(18)..(19)..(20)..(21): Xaa is A or G
  MOD_RES (22)..(23)..(24)..(25): Xaa is A or G or absent
SXXVPARLSSLSILFFXXXXXXXXXLKVYPDMVVEAX

SEQ ID NO: 24705 - protein, 34 aa, Artificial Sequence
  Non-cyclic GFR-binding peptide
  MOD_RES (14)..(15)..(16)..(17)..(18): Xaa is A or G
  MOD_RES (19)..(20)..(21)..(22): Xaa is A or G or absent
SRVHHSSLSVLFFXXXXXXXXXLKVYPRLEEHLE

SEQ ID NO: 24706 - protein, 40 aa, Artificial Sequence
  Non-cyclic GFR-binding peptide
  MOD_RES (4)..(5)..(37)..(39): Xaa is C or S
PKAXXVPTELSSLSMLFFDEYDKVVLKVYPEMVVEGXGXR

SEQ ID NO: 24707 - protein, 40 aa, Artificial Sequence
  Non-cyclic GFR-binding peptide
  MOD_RES (3)..(4)..(39): Xaa is C or S
  MOD_RES (18)..(19)..(20)..(21)..(22): Xaa is A or G
  MOD_RES (23)..(24)..(25)..(26): Xaa is A or G or absent
KAXXVPTKLSSLSVLFFXXXXXXXXXLKVYPEGMSVAEXG

SEQ ID NO: 24708 - protein, 38 aa, Artificial Sequence
  Non-cyclic GFR-binding peptide
  MOD_RES (3)..(4)..(38): Xaa is C or S
  MOD_RES (18)..(19)..(20)..(21)..(22): Xaa is A or G
  MOD_RES (23)..(24)..(25)..(26): Xaa is A or G or absent
ASXXVPARLSSLSILFFXXXXXXXXXLKVYPDMVVEAX

SEQ ID NO: 24709 - protein, 38 aa, Artificial Sequence
  Non-cyclic GFR-binding peptide
  MOD_RES (5)..(6): Xaa is C or S
  MOD_RES (20)..(21)..(22)..(23)..(24): Xaa is A or G
  MOD_RES (25)..(26)..(27)..(28): Xaa is A or G or absent
APASXXVPARLSSLSILFFXXXXXXXXXLKVYPDMVVE

SEQ ID NO: 24710 - protein, 44 aa, Artificial Sequence
  Non-cyclic GFR-binding peptide
  MOD_RES (5)..(42)..(44): Xaa is C or S
  MOD_RES (21)..(22)..(23)..(24)..(25): Xaa is A or G
  MOD_RES (26)..(27)..(28)..(29): Xaa is A or G or absent
SSVKXQPSRVHHSSLSVLFFXXXXXXXXXLKVYPRLEEHLEXAX

SEQ ID NO: 24711 - protein, 38 aa, Artificial Sequence
  Non-cyclic GFR-binding peptide
  MOD_RES (4)..(5)..(36)..(38): Xaa is C or S
ASPXXVPQDLSSLSILFFVGRTPKVLKVYPMVVKSXKX

SEQ ID NO: 24712 - protein, 33 aa, Artificial Sequence
  Non-cyclic GFR-binding peptide
  MOD_RES (14)..(15)..(16)..(17)..(18): Xaa is A or G
  MOD_RES (19)..(20)..(21)..(22): Xaa is A or G or absent
VPTRLSSLSILFFXXXXXXXXXLKVYPDMVVES

SEQ ID NO: 24713 - protein, 37 aa, Artificial Sequence
  Non-cyclic GFR-binding peptide
  MOD_RES (5)..(6): Xaa is C or S
ASKAXXVPTKLSSLSILFFDKGVVTYLKVYPGMAVSE

SEQ ID NO: 24714 - protein, 34 aa, Artificial Sequence
  Non-cyclic GFR-binding peptide
  MOD_RES (31)..(33): Xaa is C or S
VPQALSSLSILFFVGRKPKVLKVYPMIVRSXKXS

SEQ ID NO: 24715 - protein, 38 aa, Artificial Sequence
  Non-cyclic GFR-binding peptide
  MOD_RES (1)..(35)..(37): Xaa is C or S
XVPTEESSLSMLFFRIKPHQGQHLKVYPFLQHNKXEXR

SEQ ID NO: 24716 - protein, 39 aa, Artificial Sequence
  Non-cyclic GFR-binding peptide
  MOD_RES (6)..(7): Xaa is C or S
  MOD_RES (21)..(22)..(23)..(24)..(25): Xaa is A or G
  MOD_RES (26)..(27)..(28)..(29): Xaa is A or G or absent
ASASPXXVSQDLSSLSILFFXXXXXXXXXLKVYPMIVKS

SEQ ID NO: 24717 - protein, 38 aa, Artificial Sequence
  Non-cyclic GFR-binding peptide
  MOD_RES (4)..(5): Xaa is C or S
  MOD_RES (19)..(20)..(21)..(22)..(23): Xaa is A or G
  MOD_RES (24)..(25)..(26)..(27): Xaa is A or G or absent
PKAXXAPTKLSSLSVLFFXXXXXXXXXLKVYPNMVVKA

SEQ ID NO: 24718 - protein, 36 aa, Artificial Sequence
  Non-cyclic GFR-binding peptide
  MOD_RES (4)..(36): Xaa is C or S
KPTXAPTKLSSLSVLFFDDSSNVILKVYPNMVVRSX

SEQ ID NO: 24719 - protein, 35 aa, Artificial Sequence
  Non-cyclic GFR-binding peptide
  MOD_RES (1)..(35): Xaa is C or S
  MOD_RES (15)..(16)..(17)..(18)..(19): Xaa is A or G
  MOD_RES (20)..(21)..(22)..(23): Xaa is A or G or absent
XVPTKLSSLSILFFXXXXXXXXXLKVYPGMAVSEX

SEQ ID NO: 24720 - protein, 37 aa, Artificial Sequence
  Non-cyclic GFR-binding peptide
  MOD_RES (3)..(3): Xaa is C or S
VKXQPSRVHHSSLSVLFFEYVRKKPKLLKVYPRLEEH

SEQ ID NO: 24721 - protein, 40 aa, Artificial Sequence
  Non-cyclic GFR-binding peptide
  MOD_RES (5)..(5): Xaa is C or S
  MOD_RES (21)..(22)..(23)..(24)..(25): Xaa is A or G
  MOD_RES (26)..(27)..(28)..(29): Xaa is A or G or absent
SSVKXQPSRVHHSSLSVLFFXXXXXXXXXLKVYPRLEEHL

SEQ ID NO: 24722 - protein, 31 aa, Artificial Sequence
  Non-cyclic GFR-binding peptide
  MOD_RES (1)..(1): Xaa is C or S
XTPTKMSSLSMLFFNDKQQIILKVYPGMVVD

SEQ ID NO: 24723 - protein, 37 aa, Artificial Sequence
  Non-cyclic GFR-binding peptide
  MOD_RES (3)..(4)..(36): Xaa is C or S
KPXXAPTKLSSLSVLFFDDSSNVILKVYPNMVVRSXG

SEQ ID NO: 24724 - protein, 37 aa, Artificial Sequence
  Non-cyclic GFR-binding peptide
  MOD_RES (4)..(5): Xaa is C or S
  MOD_RES (19)..(20)..(21)..(22)..(23): Xaa is A or G
  MOD_RES (24)..(25)..(26)..(27): Xaa is A or G or absent
PKPXXAPTQLSSLSVLFFXXXXXXXXXLKVYPNMVVR

SEQ ID NO: 24725 - protein, 38 aa, Artificial Sequence
  Non-cyclic GFR-binding peptide
  MOD_RES (5)..(6): Xaa is C or S
  MOD_RES (20)..(21)..(22)..(23)..(24): Xaa is A or G
  MOD_RES (25)..(26)..(27)..(28): Xaa is A or G or absent
SASPXXVPQDLSSLSILFFXXXXXXXXXLKVYPMVVKS

SEQ ID NO: 24726 - protein, 40 aa, Artificial Sequence
  Non-cyclic GFR-binding peptide
  MOD_RES (4)..(5)..(39): Xaa is C or S
  MOD_RES (19)..(20)..(21)..(22)..(23): Xaa is A or G
  MOD_RES (24)..(25)..(26)..(27): Xaa is A or G or absent
SKAXXVPTKLSSLSILFFXXXXXXXXXLKVYPGMAVSEXG

SEQ ID NO: 24727 - protein, 38 aa, Artificial Sequence
  Non-cyclic GFR-binding peptide
  MOD_RES (1)..(2)..(35)..(37): Xaa is C or S
XXVPTKLSSLSVLFFDDMGVPTLKVYPEGMSVAEXGXR

SEQ ID NO: 24728 - protein, 38 aa, Artificial Sequence
  Non-cyclic GFR-binding peptide
  MOD_RES (4)..(5): Xaa is C or S
  MOD_RES (19)..(20)..(21)..(22)..(23): Xaa is A or G
  MOD_RES (24)..(25)..(26)..(27): Xaa is A or G or absent
PASXXVPARLSSLSILFFXXXXXXXXXLKVYPDMVVEA

SEQ ID NO: 24729 - protein, 33 aa, Artificial Sequence
  Non-cyclic GFR-binding peptide
  MOD_RES (2)..(3): Xaa is C or S
PXXVSQDLSSLSILFFIGKTPKILKVYPMIVKS

SEQ ID NO: 24730 - protein, 33 aa, Artificial Sequence
  Non-cyclic GFR-binding peptide
  MOD_RES (15)..(16)..(17)..(18)..(19): Xaa is A or G
  MOD_RES (20)..(21)..(22)..(23): Xaa is A or G or absent
PSRVHHSSLSVLFFXXXXXXXXXLKVYPRLEEH

SEQ ID NO: 24731 - protein, 39 aa, Artificial Sequence
  Non-cyclic GFR-binding peptide
  MOD_RES (5)..(6)..(39): Xaa is C or S
  MOD_RES (20)..(21)..(22)..(23)..(24): Xaa is A or G
  MOD_RES (25)..(26)..(27)..(28): Xaa is A or G or absent
SASPXXVPQDLSSLSILFFXXXXXXXXXLKVYPMVVKSX

SEQ ID NO: 24732 - protein, 43 aa, Artificial Sequence
  Non-cyclic GFR-binding peptide
  MOD_RES (5)..(6)..(40)..(42): Xaa is C or S
  MOD_RES (20)..(21)..(22)..(23)..(24): Xaa is A or G
  MOD_RES (25)..(26)..(27)..(28): Xaa is A or G or absent
SAGPXXTPTKMSSLSMLFFXXXXXXXXXLKVYPGMVVDRXGXS

SEQ ID NO: 24733 - protein, 42 aa, Artificial Sequence
  Non-cyclic GFR-binding peptide
  MOD_RES (6)..(7)..(39)..(41): Xaa is C or S
GSAGPXXTPTKMSSLSMLFFNDKQQIILKVYPGMVVDRXGXS

SEQ ID NO: 24734 - protein, 36 aa, Artificial Sequence
  Non-cyclic GFR-binding peptide
  MOD_RES (1)..(35): Xaa is C or S
  MOD_RES (15)..(16)..(17)..(18)..(19): Xaa is A or G
  MOD_RES (20)..(21)..(22)..(23): Xaa is A or G or absent
XVPTEESSLSMLFFXXXXXXXXXLKVYPFLQHNKXE

SEQ ID NO: 24735 - protein, 40 aa, Artificial Sequence
  Non-cyclic GFR-binding peptide
  MOD_RES (2)..(3)..(37)..(39): Xaa is C or S
  MOD_RES (17)..(18)..(19)..(20)..(21): Xaa is A or G
  MOD_RES (22)..(23)..(24)..(25): Xaa is A or G or absent
AXXVPTELSSLSMLFFXXXXXXXXXLKVYPEMVVEGXGXR

SEQ ID NO: 24736 - protein, 37 aa, Artificial Sequence
  Non-cyclic GFR-binding peptide
  MOD_RES (2)..(3)..(35)..(37): Xaa is C or S
PXXAPTQLSSLSVLFFDDSSNVILKVYPNMVVRAXGX

SEQ ID NO: 24737 - protein, 35 aa, Artificial Sequence
  Non-cyclic GFR-binding peptide
  MOD_RES (1)..(35): Xaa is C or S
  MOD_RES (15)..(16)..(17)..(18)..(19): Xaa is A or G
  MOD_RES (20)..(21)..(22)..(23): Xaa is A or G or absent
XAPTKLSSLSVLFFXXXXXXXXXLKVYPNMVVKAX

SEQ ID NO: 24738 - protein, 37 aa, Artificial Sequence
  Non-cyclic GFR-binding peptide
  MOD_RES (6)..(7): Xaa is C or S
AAPASXXVPARLSSLSILFFDAANNVVLKVYPDMVVE

SEQ ID NO: 24739 - protein, 36 aa, Artificial Sequence
  Non-cyclic GFR-binding peptide
  MOD_RES (1)..(2)..(36): Xaa is C or S
  MOD_RES (16)..(17)..(18)..(19)..(20): Xaa is A or G
  MOD_RES (21)..(22)..(23)..(24): Xaa is A or G or absent
XXVPTKLSSLSILFFXXXXXXXXXLKVYPGMAVSEX

SEQ ID NO: 24740 - protein, 38 aa, Artificial Sequence
  Non-cyclic GFR-binding peptide
  MOD_RES (2)..(3)..(35)..(37): Xaa is C or S
AXXVPTELSSLSMLFFDEYDKVVLKVYPEMVVEGXGXR

SEQ ID NO: 24741 - protein, 37 aa, Artificial Sequence
  Non-cyclic GFR-binding peptide
  MOD_RES (1)..(35)..(37): Xaa is C or S
  MOD_RES (15)..(16)..(17)..(18)..(19): Xaa is A or G
  MOD_RES (20)..(21)..(22)..(23): Xaa is A or G or absent
XVPTRLSSLSILFFXXXXXXXXXLKVYPDMVVESXGX

SEQ ID NO: 24742 - protein, 41 aa, Artificial Sequence
  Non-cyclic GFR-binding peptide
  MOD_RES (6)..(7)..(41): Xaa is C or S
  MOD_RES (21)..(22)..(23)..(24)..(25): Xaa is A or G
  MOD_RES (26)..(27)..(28)..(29): Xaa is A or G or absent
KASKAXXVPTKLSSLSILFFXXXXXXXXXLKVYPGMAVSEX

SEQ ID NO: 24743 - protein, 43 aa, Artificial Sequence
  Non-cyclic GFR-binding peptide
  MOD_RES (6)..(40)..(42): Xaa is C or S
  MOD_RES (20)..(21)..(22)..(23)..(24): Xaa is A or G
  MOD_RES (25)..(26)..(27)..(28): Xaa is A or G or absent
VTKPTXAPTKLSSLSVLFFXXXXXXXXXLKVYPNMVVRSXGXH

SEQ ID NO: 24744 - protein, 40 aa, Artificial Sequence
  Non-cyclic GFR-binding peptide
  MOD_RES (3)..(4)..(38)..(40): Xaa is C or S
  MOD_RES (18)..(19)..(20)..(21)..(22): Xaa is A or G
  MOD_RES (23)..(24)..(25)..(26): Xaa is A or G or absent
KPXXAPTQLSSLSVLFFXXXXXXXXXLKVYPNMVVRAXGX

SEQ ID NO: 24745 - protein, 34 aa, Artificial Sequence
  Non-cyclic GFR-binding peptide
  MOD_RES (1)..(2): Xaa is C or S
  MOD_RES (16)..(17)..(18)..(19)..(20): Xaa is A or G
  MOD_RES (21)..(22)..(23)..(24): Xaa is A or G or absent
XXVPTKLSSLSILFFXXXXXXXXXLKVYPGMAVS

SEQ ID NO: 24746 - protein, 41 aa, Artificial Sequence
  Non-cyclic GFR-binding peptide
  MOD_RES (6)..(7)..(41): Xaa is C or S
  MOD_RES (21)..(22)..(23)..(24)..(25): Xaa is A or G
  MOD_RES (26)..(27)..(28)..(29): Xaa is A or G or absent
STPPTXXVPTRLSSLSILFFXXXXXXXXXLKVYPDMVVESX

SEQ ID NO: 24747 - protein, 32 aa, Artificial Sequence
  Non-cyclic GFR-binding peptide
  MOD_RES (1)..(32): Xaa is C or S
XVSQDLSSLSILFFIGKTPKILKVYPMIVKSX

SEQ ID NO: 24748 - protein, 36 aa, Artificial Sequence
  Non-cyclic GFR-binding peptide
  MOD_RES (1)..(35): Xaa is C or S
  MOD_RES (15)..(16)..(17)..(18)..(19): Xaa is A or G
  MOD_RES (20)..(21)..(22)..(23): Xaa is A or G or absent
XVPTRLSSLSILFFXXXXXXXXXLKVYPDMVVESXG

SEQ ID NO: 24749 - protein, 37 aa, Artificial Sequence
  Non-cyclic GFR-binding peptide
  MOD_RES (2)..(3)..(37): Xaa is C or S
  MOD_RES (17)..(18)..(19)..(20)..(21): Xaa is A or G
  MOD_RES (22)..(23)..(24)..(25): Xaa is A or G or absent
PXXAPTQLSSLSVLFFXXXXXXXXXLKVYPNMVVRAX

SEQ ID NO: 24750 - protein, 37 aa, Artificial Sequence
  Non-cyclic GFR-binding peptide
  MOD_RES (35)..(37): Xaa is C or S
  MOD_RES (14)..(15)..(16)..(17)..(18): Xaa is A or G
  MOD_RES (19)..(20)..(21)..(22): Xaa is A or G or absent
VPTKLSSLSVLFFXXXXXXXXXLKVYPEGMSVAEXGX

SEQ ID NO: 24751 - protein, 38 aa, Artificial Sequence
  Non-cyclic GFR-binding peptide
  MOD_RES (5)..(6): Xaa is C or S
  MOD_RES (20)..(21)..(22)..(23)..(24): Xaa is A or G
  MOD_RES (25)..(26)..(27)..(28): Xaa is A or G or absent
SAGPXXTPTKMSSLSMLFFXXXXXXXXXLKVYPGMVVD

SEQ ID NO: 24752 - protein, 32 aa, Artificial Sequence
  Non-cyclic GFR-binding peptide
  MOD_RES (1)..(2): Xaa is C or S
XXVPARLSSLSILFFDAANNVVLKVYPDMVVE

SEQ ID NO: 24753 - protein, 37 aa, Artificial Sequence
  Non-cyclic GFR-binding peptide
  MOD_RES (4)..(5)..(36): Xaa is C or S
AAPXXVPQALSSLSILFFVGRKPKVLKVYPMIVRSXK

SEQ ID NO: 24754 - protein, 41 aa, Artificial Sequence
  Non-cyclic GFR-binding peptide
  MOD_RES (4)..(5)..(39)..(41): Xaa is C or S
  MOD_RES (19)..(20)..(21)..(22)..(23): Xaa is A or G
  MOD_RES (24)..(25)..(26)..(27): Xaa is A or G or absent
PKAXXVPTELSSLSMLFFXXXXXXXXXLKVYPEMVVEGXGX

SEQ ID NO: 24755 - protein, 35 aa, Artificial Sequence
  Non-cyclic GFR-binding peptide
  MOD_RES (32)..(34): Xaa is C or S
APTKLSSLSVLFFDDSSNVILKVYPNMVVRSXGXH

SEQ ID NO: 24756 - protein, 32 aa, Artificial Sequence
  Non-cyclic GFR-binding peptide
  MOD_RES (32)..(32): Xaa is C or S
VPARLSSLSILFFDAANNVVLKVYPDMVVEAX

SEQ ID NO: 24757 - protein, 36 aa, Artificial Sequence
  Non-cyclic GFR-binding peptide
  MOD_RES (1)..(2)..(36): Xaa is C or S
  MOD_RES (16)..(17)..(18)..(19)..(20): Xaa is A or G
  MOD_RES (21)..(22)..(23)..(24): Xaa is A or G or absent
XXVPTELSSLSMLFFXXXXXXXXXLKVYPEMVVEGX

SEQ ID NO: 24758 - protein, 31 aa, Artificial Sequence
  Non-cyclic GFR-binding peptide
APTQLSSLSVLFFDDSSNVILKVYPNMVVRA

SEQ ID NO: 24759 - protein, 33 aa, Artificial Sequence
  Non-cyclic GFR-binding peptide
  MOD_RES (2)..(3): Xaa is C or S
PXXVPQALSSLSILFFVGRKPKVLKVYPMIVRS

SEQ ID NO: 24760 - protein, 39 aa, Artificial Sequence
  Non-cyclic GFR-binding peptide
  MOD_RES (5)..(6): Xaa is C or S
  MOD_RES (20)..(21)..(22)..(23)..(24): Xaa is A or G
  MOD_RES (25)..(26)..(27)..(28): Xaa is A or G or absent
IPKAXXVPTELSSLSMLFFXXXXXXXXXLKVYPEMVVEG

SEQ ID NO: 24761 - protein, 37 aa, Artificial Sequence
  Non-cyclic GFR-binding peptide
  MOD_RES (1)..(2)..(35)..(37): Xaa is C or S
  MOD_RES (16)..(17)..(18)..(19)..(20): Xaa is A or G
  MOD_RES (21)..(22)..(23)..(24): Xaa is A or G or absent
XXVPQALSSLSILFFXXXXXXXXXLKVYPMIVRSXKX

SEQ ID NO: 24762 - protein, 37 aa, Artificial Sequence
  Non-cyclic GFR-binding peptide
  MOD_RES (2)..(36): Xaa is C or S
  MOD_RES (16)..(17)..(18)..(19)..(20): Xaa is A or G
  MOD_RES (21)..(22)..(23)..(24): Xaa is A or G or absent
EXVPTEESSLSMLFFXXXXXXXXXLKVYPFLQHNKXE

SEQ ID NO: 24763 - protein, 41 aa, Artificial Sequence
  Non-cyclic GFR-binding peptide
  MOD_RES (2)..(39)..(41): Xaa is C or S
  MOD_RES (18)..(19)..(20)..(21)..(22): Xaa is A or G
  MOD_RES (23)..(24)..(25)..(26): Xaa is A or G or absent
KXQPSRVHHSSLSVLFFXXXXXXXXXLKVYPRLEEHLEXAX

SEQ ID NO: 24764 - protein, 37 aa, Artificial Sequence
  Non-cyclic GFR-binding peptide
  MOD_RES (2)..(36): Xaa is C or S
  MOD_RES (16)..(17)..(18)..(19)..(20): Xaa is A or G
  MOD_RES (21)..(22)..(23)..(24): Xaa is A or G or absent
TXAPTKLSSLSVLFFXXXXXXXXXLKVYPNMVVRSXG

SEQ ID NO: 24765 - protein, 36 aa, Artificial Sequence
  Non-cyclic GFR-binding peptide
  MOD_RES (3)..(4)..(35): Xaa is C or S
SPXXVSQDLSSLSILFFIGKTPKILKVYPMIVKSXK

SEQ ID NO: 24766 - protein, 35 aa, Artificial Sequence
  Non-cyclic GFR-binding peptide
  MOD_RES (16)..(17)..(18)..(19)..(20): Xaa is A or G
  MOD_RES (21)..(22)..(23)..(24): Xaa is A or G or absent
QPSRVHHSSLSVLFFXXXXXXXXXLKVYPRLEEHL

SEQ ID NO: 24767 - protein, 40 aa, Artificial Sequence
  Non-cyclic GFR-binding peptide
  MOD_RES (2)..(3)..(37)..(39): Xaa is C or S
  MOD_RES (17)..(18)..(19)..(20)..(21): Xaa is A or G
  MOD_RES (22)..(23)..(24)..(25): Xaa is A or G or absent
PXXAPTQLSSLSVLFFXXXXXXXXXLKVYPNMVVRAXGXH

SEQ ID NO: 24768 - protein, 33 aa, Artificial Sequence
  Non-cyclic GFR-binding peptide
  MOD_RES (1)..(32): Xaa is C or S
XAPVKTSSLSMLFFDNGRVLLLKVYPMIVEEXG

SEQ ID NO: 24769 - protein, 36 aa, Artificial Sequence
  Non-cyclic GFR-binding peptide
  MOD_RES (2)..(3)..(34)..(36): Xaa is C or S
PXXVSQDLSSLSILFFIGKTPKILKVYPMIVKSXKX

SEQ ID NO: 24770 - protein, 39 aa, Artificial Sequence
  Non-cyclic GFR-binding peptide
  MOD_RES (6)..(7)..(39): Xaa is C or S
AVPKAXXAPTKLSSLSVLFFDSSNNVILKVYPNMVVKAX

SEQ ID NO: 24771 - protein, 33 aa, Artificial Sequence
  Non-cyclic GFR-binding peptide
  MOD_RES (1)..(33): Xaa is C or S
XAPTQLSSLSVLFFDDSSNVILKVYPNMVVRAX

SEQ ID NO: 24772 - protein, 35 aa, Artificial Sequence
  Non-cyclic GFR-binding peptide
  MOD_RES (32)..(34): Xaa is C or S
VPARLSSLSILFFDAANNVVLKVYPDMVVEAXGXR

SEQ ID NO: 24773 - protein, 34 aa, Artificial Sequence
  Non-cyclic GFR-binding peptide
  MOD_RES (1)..(34): Xaa is C or S
  MOD_RES (15)..(16)..(17)..(18)..(19): Xaa is A or G
  MOD_RES (20)..(21)..(22)..(23): Xaa is A or G or absent
XVPQALSSLSILFFXXXXXXXXXLKVYPMIVRSX

SEQ ID NO: 24774 - protein, 39 aa, Artificial Sequence
  Non-cyclic GFR-binding peptide
  MOD_RES (2)..(3)..(36)..(38): Xaa is C or S
  MOD_RES (17)..(18)..(19)..(20)..(21): Xaa is A or G
  MOD_RES (22)..(23)..(24)..(25): Xaa is A or G or absent
PXXVSQDLSSLSILFFXXXXXXXXXLKVYPMIVKSXKXS

SEQ ID NO: 24775 - protein, 39 aa, Artificial Sequence
  Non-cyclic GFR-binding peptide
  MOD_RES (4)..(5)..(36)..(38): Xaa is C or S
PSTXXAPVKTSSLSMLFFDNGRVLLLKVYPMIVEEXGXL

SEQ ID NO: 24776 - protein, 35 aa, Artificial Sequence
  Non-cyclic GFR-binding peptide
  MOD_RES (3)..(4): Xaa is C or S
PTXXVPTRLSSLSILFFDSANNVVLKVYPDMVVES

SEQ ID NO: 24777 - protein, 36 aa, Artificial Sequence
  Non-cyclic GFR-binding peptide
  MOD_RES (2)..(3)..(34)..(36): Xaa is C or S
PXXVPQALSSLSILFFVGRKPKVLKVYPMIVRSXKX

SEQ ID NO: 24778 - protein, 38 aa, Artificial Sequence
  Non-cyclic GFR-binding peptide
  MOD_RES (4)..(5)..(37): Xaa is C or S
PPTXXVPTRLSSLSILFFDSANNVVLKVYPDMVVESXG

SEQ ID NO: 24779 - protein, 42 aa, Artificial Sequence
  Non-cyclic GFR-binding peptide
  MOD_RES (5)..(39)..(41): Xaa is C or S
  MOD_RES (19)..(20)..(21)..(22)..(23): Xaa is A or G
  MOD_RES (24)..(25)..(26)..(27): Xaa is A or G or absent
EGLEXVPTEESSLSMLFFXXXXXXXXXLKVYPFLQHNKXEXR

SEQ ID NO: 24780 - protein, 42 aa, Artificial Sequence
  Non-cyclic GFR-binding peptide
  MOD_RES (5)..(6)..(39)..(41): Xaa is C or S
  MOD_RES (20)..(21)..(22)..(23)..(24): Xaa is A or G
  MOD_RES (25)..(26)..(27)..(28): Xaa is A or G or absent
SASPXXVSQDLSSLSILFFXXXXXXXXXLKVYPMIVKSXKXS

SEQ ID NO: 24781 - protein, 37 aa, Artificial Sequence
  Non-cyclic GFR-binding peptide
  MOD_RES (3)..(4)..(36): Xaa is C or S
ASXXVPARLSSLSILFFDAANNVVLKVYPDMVVEAXG

SEQ ID NO: 24782 - protein, 37 aa, Artificial Sequence
  Non-cyclic GFR-binding peptide
  MOD_RES (5)..(6)..(37): Xaa is C or S
SASPXXVPQDLSSLSILFFVGRTPKVLKVYPMVVKSX

SEQ ID NO: 24783 - protein, 34 aa, Artificial Sequence
  Non-cyclic GFR-binding peptide
  MOD_RES (2)..(3): Xaa is C or S
PXXAPTQLSSLSVLFFDDSSNVILKVYPNMVVRA

SEQ ID NO: 24784 - protein, 36 aa, Artificial Sequence
  Non-cyclic GFR-binding peptide
  MOD_RES (3)..(35): Xaa is C or S
PTXAPTKLSSLSVLFFDDSSNVILKVYPNMVVRSXG

SEQ ID NO: 24785 - protein, 38 aa, Artificial Sequence
  Non-cyclic GFR-binding peptide
  MOD_RES (3)..(4)..(38): Xaa is C or S
  MOD_RES (18)..(19)..(20)..(21)..(22): Xaa is A or G
  MOD_RES (23)..(24)..(25)..(26): Xaa is A or G or absent
PTXXVPTRLSSLSILFFXXXXXXXXXLKVYPDMVVESX

SEQ ID NO: 24786 - protein, 39 aa, Artificial Sequence
  Non-cyclic GFR-binding peptide
  MOD_RES (4)..(5)..(37)..(39): Xaa is C or S
AGPXXTPTKMSSLSMLFFNDKQQIILKVYPGMVVDRXGX

SEQ ID NO: 24787 - protein, 40 aa, Artificial Sequence
  Non-cyclic GFR-binding peptide
  MOD_RES (2)..(39): Xaa is C or S
KXQPSRVHHSSLSVLFFEYVRKKPKLLKVYPRLEEHLEXA

SEQ ID NO: 24788 - protein, 38 aa, Artificial Sequence
  Non-cyclic GFR-binding peptide
  MOD_RES (5)..(5): Xaa is C or S
  MOD_RES (19)..(20)..(21)..(22)..(23): Xaa is A or G
  MOD_RES (24)..(25)..(26)..(27): Xaa is A or G or absent
TKPTXAPTKLSSLSVLFFXXXXXXXXXLKVYPNMVVRS

SEQ ID NO: 24789 - protein, 38 aa, Artificial Sequence
  Non-cyclic GFR-binding peptide
  MOD_RES (3)..(4)..(38): Xaa is C or S
  MOD_RES (18)..(19)..(20)..(21)..(22): Xaa is A or G
  MOD_RES (23)..(24)..(25)..(26): Xaa is A or G or absent
KAXXAPTKLSSLSVLFFXXXXXXXXXLKVYPNMVVKAX

SEQ ID NO: 24790 - protein, 38 aa, Artificial Sequence
  Non-cyclic GFR-binding peptide
  MOD_RES (2)..(3)..(36)..(38): Xaa is C or S
  MOD_RES (17)..(18)..(19)..(20)..(21): Xaa is A or G
  MOD_RES (22)..(23)..(24)..(25): Xaa is A or G or absent
TXXAPVKTSSLSMLFFXXXXXXXXXLKVYPMIVEEXGX

SEQ ID NO: 24791 - protein, 41 aa, Artificial Sequence
  Non-cyclic GFR-binding peptide
  MOD_RES (3)..(4)..(38)..(40): Xaa is C or S
  MOD_RES (18)..(19)..(20)..(21)..(22): Xaa is A or G
  MOD_RES (23)..(24)..(25)..(26): Xaa is A or G or absent
KPXXAPTKLSSLSVLFFXXXXXXXXXLKVYPNMVVRSXGXH

SEQ ID NO: 24792 - protein, 31 aa, Artificial Sequence
  Non-cyclic GFR-binding peptide
VPTELSSLSMLFFDEYDKVVLKVYPEMVVEG

SEQ ID NO: 24793 - protein, 45 aa, Artificial Sequence
  Non-cyclic GFR-binding peptide
  MOD_RES (5)..(42)..(44): Xaa is C or S
SSVKXQPSRVHHSSLSVLFFEYVRKKPKLLKVYPRLEEHLEXAXA

SEQ ID NO: 24794 - protein, 40 aa, Artificial Sequence
  Non-cyclic GFR-binding peptide
  MOD_RES (5)..(6)..(40): Xaa is C or S
  MOD_RES (20)..(21)..(22)..(23)..(24): Xaa is A or G
  MOD_RES (25)..(26)..(27)..(28): Xaa is A or G or absent
VPKPXXAPTKLSSLSVLFFXXXXXXXXXLKVYPNMVVRSX

SEQ ID NO: 24795 - protein, 37 aa, Artificial Sequence
  Non-cyclic GFR-binding peptide
  MOD_RES (1)..(2)..(36): Xaa is C or S
  MOD_RES (16)..(17)..(18)..(19)..(20): Xaa is A or G
  MOD_RES (21)..(22)..(23)..(24): Xaa is A or G or absent
XXAPTKLSSLSVLFFXXXXXXXXXLKVYPNMVVRSXG

SEQ ID NO: 24796 - protein, 35 aa, Artificial Sequence
  Non-cyclic GFR-binding peptide
  MOD_RES (2)..(3): Xaa is C or S
  MOD_RES (17)..(18)..(19)..(20)..(21): Xaa is A or G
  MOD_RES (22)..(23)..(24)..(25): Xaa is A or G or absent
TXXAPVKTSSLSMLFFXXXXXXXXXLKVYPMIVEE

SEQ ID NO: 24797 - protein, 39 aa, Artificial Sequence
  Non-cyclic GFR-binding peptide
  MOD_RES (4)..(5)..(39): Xaa is C or S
  MOD_RES (19)..(20)..(21)..(22)..(23): Xaa is A or G
  MOD_RES (24)..(25)..(26)..(27): Xaa is A or G or absent
PKPXXAPTQLSSLSVLFFXXXXXXXXXLKVYPNMVVRAX

SEQ ID NO: 24798 - protein, 40 aa, Artificial Sequence
  Non-cyclic GFR-binding peptide
  MOD_RES (3)..(4)..(37)..(39): Xaa is C or S
  MOD_RES (18)..(19)..(20)..(21)..(22): Xaa is A or G
  MOD_RES (23)..(24)..(25)..(26): Xaa is A or G or absent
STXXAPVKTSSLSMLFFXXXXXXXXXLKVYPMIVEEXGXL

SEQ ID NO: 24799 - protein, 39 aa, Artificial Sequence
  Non-cyclic GFR-binding peptide
  MOD_RES (6)..(7)..(38): Xaa is C or S
ASASPXXVSQDLSSLSILFFIGKTPKILKVYPMIVKSXK

SEQ ID NO: 24800 - protein, 36 aa, Artificial Sequence
  Non-cyclic GFR-binding peptide
  MOD_RES (3)..(3): Xaa is C or S
LEXVPTEESSLSMLFFRIKPHQGQHLKVYPFLQHNK

SEQ ID NO: 24801 - protein, 34 aa, Artificial Sequence
  Non-cyclic GFR-binding peptide
  MOD_RES (34)..(34): Xaa is C or S
VPTEESSLSMLFFRIKPHQGQHLKVYPFLQHNKX

SEQ ID NO: 24802 - protein, 39 aa, Artificial Sequence
  Non-cyclic GFR-binding peptide
  MOD_RES (5)..(6)..(38): Xaa is C or S
SAGPXXTPTKMSSLSMLFFNDKQQIILKVYPGMVVDRXG

SEQ ID NO: 24803 - protein, 37 aa, Artificial Sequence
  Non-cyclic GFR-binding peptide
  MOD_RES (1)..(2)..(36): Xaa is C or S
  MOD_RES (16)..(17)..(18)..(19)..(20): Xaa is A or G
  MOD_RES (21)..(22)..(23)..(24): Xaa is A or G or absent
XXVPTELSSLSMLFFXXXXXXXXXLKVYPEMVVEGXG

SEQ ID NO: 24804 - protein, 42 aa, Artificial Sequence
  Non-cyclic GFR-binding peptide
  MOD_RES (6)..(7)..(39)..(41): Xaa is C or S
KIPKAXXVPTELSSLSMLFFDENEKVVLKVYPDMVVEGXGXR

SEQ ID NO: 24805 - protein, 33 aa, Artificial Sequence
  Non-cyclic GFR-binding peptide
  MOD_RES (1)..(33): Xaa is C or S
XVPARLSSLSILFFDAANNVVLKVYPDMVVEAX

SEQ ID NO: 24806 - protein, 32 aa, Artificial Sequence
  Non-cyclic GFR-binding peptide
  MOD_RES (1)..(2): Xaa is C or S
XXVPQALSSLSILFFVGRKPKVLKVYPMIVRS

SEQ ID NO: 24807 - protein, 37 aa, Artificial Sequence
  Non-cyclic GFR-binding peptide
  MOD_RES (6)..(7): Xaa is C or S
KASKAXXVPTKLSSLSILFFDKGVVTYLKVYPGMAVS

SEQ ID NO: 24808 - protein, 38 aa, Artificial Sequence
  Non-cyclic GFR-binding peptide
  MOD_RES (5)..(37): Xaa is C or S
TKPTXAPTKLSSLSVLFFDDSSNVILKVYPNMVVRSXG

SEQ ID NO: 24809 - protein, 40 aa, Artificial Sequence
  Non-cyclic GFR-binding peptide
  MOD_RES (4)..(5)..(37)..(39): Xaa is C or S
PKAXXAPTKLSSLSVLFFDSSNNVILKVYPNMVVKAXGXH

SEQ ID NO: 24810 - protein, 36 aa, Artificial Sequence
  Non-cyclic GFR-binding peptide
  MOD_RES (1)..(2)..(34)..(36): Xaa is C or S
XXTPTKMSSLSMLFFNDKQQIILKVYPGMVVDRXGX

SEQ ID NO: 24811 - protein, 36 aa, Artificial Sequence
  Non-cyclic GFR-binding peptide
  MOD_RES (1)..(2)..(36): Xaa is C or S
  MOD_RES (16)..(17)..(18)..(19)..(20): Xaa is A or G
  MOD_RES (21)..(22)..(23)..(24): Xaa is A or G or absent
XXTPTKMSSLSMLFFXXXXXXXXXLKVYPGMVVDRX

SEQ ID NO: 24812 - protein, 40 aa, Artificial Sequence
  Non-cyclic GFR-binding peptide
  MOD_RES (2)..(39): Xaa is C or S
  MOD_RES (18)..(19)..(20)..(21)..(22): Xaa is A or G
  MOD_RES (23)..(24)..(25)..(26): Xaa is A or G or absent
KXQPSRVHHSSLSVLFFXXXXXXXXXLKVYPRLEEHLEXA

SEQ ID NO: 24813 - protein, 36 aa, Artificial Sequence
  Non-cyclic GFR-binding peptide
  MOD_RES (2)..(3)..(36): Xaa is C or S
  MOD_RES (17)..(18)..(19)..(20)..(21): Xaa is A or G
  MOD_RES (22)..(23)..(24)..(25): Xaa is A or G or absent
PXXVPQALSSLSILFFXXXXXXXXXLKVYPMIVRSX

SEQ ID NO: 24814 - protein, 32 aa, Artificial Sequence
  Non-cyclic GFR-binding peptide
  MOD_RES (14)..(15)..(16)..(17)..(18): Xaa is A or G
  MOD_RES (19)..(20)..(21)..(22): Xaa is A or G or absent
VSQDLSSLSILFFXXXXXXXXXLKVYPMIVKS

SEQ ID NO: 24815 - protein, 36 aa, Artificial Sequence
  Non-cyclic GFR-binding peptide
  MOD_RES (4)..(4): Xaa is C or S
  MOD_RES (18)..(19)..(20)..(21)..(22): Xaa is A or G
  MOD_RES (23)..(24)..(25)..(26): Xaa is A or G or absent
KPTXAPTKLSSLSVLFFXXXXXXXXXLKVYPNMVVR

SEQ ID NO: 24816 - protein, 39 aa, Artificial Sequence
  Non-cyclic GFR-binding peptide
  MOD_RES (5)..(6)..(38): Xaa is C or S
ASKAXXVPTKLSSLSILFFDKGVVTYLKVYPGMAVSEXG

SEQ ID NO: 24817 - protein, 38 aa, Artificial Sequence
  Non-cyclic GFR-binding peptide
  MOD_RES (4)..(4): Xaa is C or S
SVKXQPSRVHHSSLSVLFFEYVRKKPKLLKVYPRLEEH

SEQ ID NO: 24818 - protein, 39 aa, Artificial Sequence
  Non-cyclic GFR-binding peptide
  MOD_RES (6)..(7): Xaa is C or S
  MOD_RES (21)..(22)..(23)..(24)..(25): Xaa is A or G
  MOD_RES (26)..(27)..(28)..(29): Xaa is A or G or absent
TVPKPXXAPTQLSSLSVLFFXXXXXXXXXLKVYPNMVVR

SEQ ID NO: 24819 - protein, 39 aa, Artificial Sequence
  Non-cyclic GFR-binding peptide
  MOD_RES (4)..(5)..(39): Xaa is C or S
  MOD_RES (19)..(20)..(21)..(22)..(23): Xaa is A or G
  MOD_RES (24)..(25)..(26)..(27): Xaa is A or G or absent
PASXXVPARLSSLSILFFXXXXXXXXXLKVYPDMVVEAX

SEQ ID NO: 24820 - protein, 31 aa, Artificial Sequence
  Non-cyclic GFR-binding peptide
APTKLSSLSVLFFDDSSNVILKVYPNMVVRS

SEQ ID NO: 24821 - protein, 35 aa, Artificial Sequence
  Non-cyclic GFR-binding peptide
  MOD_RES (33)..(35): Xaa is C or S
VPTKLSSLSVLFFDDMGVPTLKVYPEGMSVAEXGX

SEQ ID NO: 24822 - protein, 41 aa, Artificial Sequence
  Non-cyclic GFR-binding peptide
  MOD_RES (3)..(4)..(38)..(40): Xaa is C or S
  MOD_RES (18)..(19)..(20)..(21)..(22): Xaa is A or G
  MOD_RES (23)..(24)..(25)..(26): Xaa is A or G or absent
PTXXVPTRLSSLSILFFXXXXXXXXXLKVYPDMVVESXGXR

SEQ ID NO: 24823 - protein, 35 aa, Artificial Sequence
  Non-cyclic GFR-binding peptide
  MOD_RES (1)..(33)..(35): Xaa is C or S
XAPTKLSSLSVLFFDSSNNVILKVYPNMVVKAXGX

SEQ ID NO: 24824 - protein, 41 aa, Artificial Sequence
  Non-cyclic GFR-binding peptide
  MOD_RES (6)..(7)..(38)..(40): Xaa is C or S
ASASPXXVSQDLSSLSILFFIGKTPKILKVYPMIVKSXKXS

SEQ ID NO: 24825 - protein, 39 aa, Artificial Sequence
  Non-cyclic GFR-binding peptide
  MOD_RES (2)..(3)..(36)..(38): Xaa is C or S
  MOD_RES (17)..(18)..(19)..(20)..(21): Xaa is A or G
  MOD_RES (22)..(23)..(24)..(25): Xaa is A or G or absent
PXXVPQDLSSLSILFFXXXXXXXXXLKVYPMVVKSXKXS

SEQ ID NO: 24826 - protein, 34 aa, Artificial Sequence
  Non-cyclic GFR-binding peptide
  MOD_RES (1)..(1): Xaa is C or S
  MOD_RES (15)..(16)..(17)..(18)..(19): Xaa is A or G
  MOD_RES (20)..(21)..(22)..(23): Xaa is A or G or absent
XVPTRLSSLSILFFXXXXXXXXXLKVYPDMVVES

SEQ ID NO: 24827 - protein, 31 aa, Artificial Sequence
  Non-cyclic GFR-binding peptide
  MOD_RES (31)..(31): Xaa is C or S
VPQALSSLSILFFVGRKPKVLKVYPMIVRSX

SEQ ID NO: 24828 - protein, 38 aa, Artificial Sequence
  Non-cyclic GFR-binding peptide
  MOD_RES (6)..(7): Xaa is C or S
SIPKAXXVPTELSSLSMLFFDEYDKVVLKVYPEMVVEG

SEQ ID NO: 24829 - protein, 38 aa, Artificial Sequence
  Non-cyclic GFR-binding peptide
  MOD_RES (1)..(35)..(37): Xaa is C or S
  MOD_RES (15)..(16)..(17)..(18)..(19): Xaa is A or G
  MOD_RES (20)..(21)..(22)..(23): Xaa is A or G or absent
XVPTEESSLSMLFFXXXXXXXXXLKVYPFLQHNKXEXR

SEQ ID NO: 24830 - protein, 36 aa, Artificial Sequence
  Non-cyclic GFR-binding peptide
  MOD_RES (2)..(3): Xaa is C or S
  MOD_RES (17)..(18)..(19)..(20)..(21): Xaa is A or G
  MOD_RES (22)..(23)..(24)..(25): Xaa is A or G or absent
PXXAPTKLSSLSVLFFXXXXXXXXXLKVYPNMVVRS

SEQ ID NO: 24831 - protein, 33 aa, Artificial Sequence
  Non-cyclic GFR-binding peptide
  MOD_RES (1)..(33): Xaa is C or S
XTPTKMSSLSMLFFNDKQQIILKVYPGMVVDRX

SEQ ID NO: 24832 - protein, 33 aa, Artificial Sequence
  Non-cyclic GFR-binding peptide
  MOD_RES (1)..(1): Xaa is C or S
  MOD_RES (15)..(16)..(17)..(18)..(19): Xaa is A or G
  MOD_RES (20)..(21)..(22)..(23): Xaa is A or G or absent
XVPTKLSSLSILFFXXXXXXXXXLKVYPGMAVS

SEQ ID NO: 24833 - protein, 35 aa, Artificial Sequence
  Non-cyclic GFR-binding peptide
  MOD_RES (34)..(34): Xaa is C or S
  MOD_RES (14)..(15)..(16)..(17)..(18): Xaa is A or G
  MOD_RES (19)..(20)..(21)..(22): Xaa is A or G or absent
APTKLSSLSVLFFXXXXXXXXXLKVYPNMVVRSXG

SEQ ID NO: 24834 - protein, 33 aa, Artificial Sequence
  Non-cyclic GFR-binding peptide
  MOD_RES (2)..(3): Xaa is C or S
TXXVPTRLSSLSILFFDSANNVVLKVYPDMVVE

SEQ ID NO: 24835 - protein, 37 aa, Artificial Sequence
  Non-cyclic GFR-binding peptide
  MOD_RES (3)..(4)..(37): Xaa is C or S
KAXXVPTKLSSLSVLFFDDMGVPTLKVYPEGMSVAEX

SEQ ID NO: 24836 - protein, 37 aa, Artificial Sequence
  Non-cyclic GFR-binding peptide
  MOD_RES (2)..(3)..(36): Xaa is C or S
  MOD_RES (17)..(18)..(19)..(20)..(21): Xaa is A or G
  MOD_RES (22)..(23)..(24)..(25): Xaa is A or G or absent
PXXVSQDLSSLSILFFXXXXXXXXXLKVYPMIVKSXK

SEQ ID NO: 24837 - protein, 32 aa, Artificial Sequence
  Non-cyclic GFR-binding peptide
  MOD_RES (1)..(32): Xaa is C or S
XVPQALSSLSILFFVGRKPKVLKVYPMIVRSX

SEQ ID NO: 24838 - protein, 36 aa, Artificial Sequence
  Non-cyclic GFR-binding peptide
  MOD_RES (34)..(36): Xaa is C or S
  MOD_RES (14)..(15)..(16)..(17)..(18): Xaa is A or G
  MOD_RES (19)..(20)..(21)..(22): Xaa is A or G or absent
VPARLSSLSILFFXXXXXXXXXLKVYPDMVVEAXGX

SEQ ID NO: 24839 - protein, 34 aa, Artificial Sequence
  Non-cyclic GFR-binding peptide
  MOD_RES (1)..(2): Xaa is C or S
XXVPTKLSSLSVLFFDDMGVPTLKVYPEGMSVAE

SEQ ID NO: 24840 - protein, 39 aa, Artificial Sequence
  Non-cyclic GFR-binding peptide
  MOD_RES (5)..(5): Xaa is C or S
  MOD_RES (21)..(22)..(23)..(24)..(25): Xaa is A or G
  MOD_RES (26)..(27)..(28)..(29): Xaa is A or G or absent
SSVKXQPSRVHHSSLSVLFFXXXXXXXXXLKVYPRLEEH

SEQ ID NO: 24841 - protein, 37 aa, Artificial Sequence
  Non-cyclic GFR-binding peptide
  MOD_RES (1)..(2)..(37): Xaa is C or S
  MOD_RES (16)..(17)..(18)..(19)..(20): Xaa is A or G
  MOD_RES (21)..(22)..(23)..(24): Xaa is A or G or absent
XXVPTKLSSLSVLFFXXXXXXXXXLKVYPEGMSVAEX

SEQ ID NO: 24842 - protein, 38 aa, Artificial Sequence
  Non-cyclic GFR-binding peptide
  MOD_RES (5)..(6): Xaa is C or S
  MOD_RES (20)..(21)..(22)..(23)..(24): Xaa is A or G
  MOD_RES (25)..(26)..(27)..(28): Xaa is A or G or absent
SASPXXVSQDLSSLSILFFXXXXXXXXXLKVYPMIVKS

SEQ ID NO: 24843 - protein, 32 aa, Artificial Sequence
  Non-cyclic GFR-binding peptide
VPTEESSLSMLFFRIKPHQGQHLKVYPFLQHN

SEQ ID NO: 24844 - protein, 37 aa, Artificial Sequence
  Non-cyclic GFR-binding peptide
  MOD_RES (1)..(34)..(36): Xaa is C or S
  MOD_RES (15)..(16)..(17)..(18)..(19): Xaa is A or G
  MOD_RES (20)..(21)..(22)..(23): Xaa is A or G or absent
XVPQDLSSLSILFFXXXXXXXXXLKVYPMVVKSXKXS

SEQ ID NO: 24845 - protein, 34 aa, Artificial Sequence
  Non-cyclic GFR-binding peptide
  MOD_RES (2)..(3): Xaa is C or S
PXXAPTKLSSLSVLFFDDSSNVILKVYPNMVVRS

SEQ ID NO: 24846 - protein, 37 aa, Artificial Sequence
  Non-cyclic GFR-binding peptide
  MOD_RES (6)..(6): Xaa is C or S
VTKPTXAPTKLSSLSVLFFDDSSNVILKVYPNMVVRS

SEQ ID NO: 24847 - protein, 35 aa, Artificial Sequence
  Non-cyclic GFR-binding peptide
  MOD_RES (3)..(4)..(35): Xaa is C or S
APXXVPQALSSLSILFFVGRKPKVLKVYPMIVRSX

SEQ ID NO: 24848 - protein, 36 aa, Artificial Sequence
  Non-cyclic GFR-binding peptide
  MOD_RES (1)..(2)..(36): Xaa is C or S
  MOD_RES (16)..(17)..(18)..(19)..(20): Xaa is A or G
  MOD_RES (21)..(22)..(23)..(24): Xaa is A or G or absent
XXAPTKLSSLSVLFFXXXXXXXXXLKVYPNMVVRSX

SEQ ID NO: 24849 - protein, 40 aa, Artificial Sequence
  Non-cyclic GFR-binding peptide
  MOD_RES (3)..(4)..(38)..(40): Xaa is C or S
  MOD_RES (18)..(19)..(20)..(21)..(22): Xaa is A or G
  MOD_RES (23)..(24)..(25)..(26): Xaa is A or G or absent
KAXXVPTELSSLSMLFFXXXXXXXXXLKVYPEMVVEGXGX

SEQ ID NO: 24850 - protein, 34 aa, Artificial Sequence
  Non-cyclic GFR-binding peptide
  MOD_RES (34)..(34): Xaa is C or S
  MOD_RES (14)..(15)..(16)..(17)..(18): Xaa is A or G
  MOD_RES (19)..(20)..(21)..(22): Xaa is A or G or absent
VPTEESSLSMLFFXXXXXXXXXLKVYPFLQHNKX

SEQ ID NO: 24851 - protein, 38 aa, Artificial Sequence
  Non-cyclic GFR-binding peptide
  MOD_RES (1)..(2)..(37): Xaa is C or S
  MOD_RES (16)..(17)..(18)..(19)..(20): Xaa is A or G
  MOD_RES (21)..(22)..(23)..(24): Xaa is A or G or absent
XXVPTKLSSLSVLFFXXXXXXXXXLKVYPEGMSVAEXG

SEQ ID NO: 24852 - protein, 35 aa, Artificial Sequence
  Non-cyclic GFR-binding peptide
  MOD_RES (2)..(3): Xaa is C or S
  MOD_RES (17)..(18)..(19)..(20)..(21): Xaa is A or G
  MOD_RES (22)..(23)..(24)..(25): Xaa is A or G or absent
PXXTPTKMSSLSMLFFXXXXXXXXXLKVYPGMVVD

SEQ ID NO: 24853 - protein, 41 aa, Artificial Sequence
  Non-cyclic GFR-binding peptide
  MOD_RES (6)..(38)..(40): Xaa is C or S
VTKPTXAPTKLSSLSVLFFDDSSNVILKVYPNMVVRSXGXH

SEQ ID NO: 24854 - protein, 32 aa, Artificial Sequence
  Non-cyclic GFR-binding peptide
  MOD_RES (1)..(2): Xaa is C or S
XXVSQDLSSLSILFFIGKTPKILKVYPMIVKS

SEQ ID NO: 24855 - protein, 36 aa, Artificial Sequence
  Non-cyclic GFR-binding peptide
  MOD_RES (1)..(2)..(35): Xaa is C or S
  MOD_RES (16)..(17)..(18)..(19)..(20): Xaa is A or G
  MOD_RES (21)..(22)..(23)..(24): Xaa is A or G or absent
XXVPQDLSSLSILFFXXXXXXXXXLKVYPMVVKSXK

SEQ ID NO: 24856 - protein, 35 aa, Artificial Sequence
  Non-cyclic GFR-binding peptide
  MOD_RES (2)..(3): Xaa is C or S
  MOD_RES (17)..(18)..(19)..(20)..(21): Xaa is A or G
  MOD_RES (22)..(23)..(24)..(25): Xaa is A or G or absent
AXXVPTKLSSLSILFFXXXXXXXXXLKVYPGMAVS

SEQ ID NO: 24857 - protein, 35 aa, Artificial Sequence
  Non-cyclic GFR-binding peptide
  MOD_RES (1)..(2): Xaa is C or S
  MOD_RES (16)..(17)..(18)..(19)..(20): Xaa is A or G
  MOD_RES (21)..(22)..(23)..(24): Xaa is A or G or absent
XXAPTKLSSLSVLFFXXXXXXXXXLKVYPNMVVKA

SEQ ID NO: 24858 - protein, 33 aa, Artificial Sequence
  Non-cyclic GFR-binding peptide
  MOD_RES (1)..(1): Xaa is C or S
  MOD_RES (15)..(16)..(17)..(18)..(19): Xaa is A or G
  MOD_RES (20)..(21)..(22)..(23): Xaa is A or G or absent
XVPARLSSLSILFFXXXXXXXXXLKVYPDMVVE

SEQ ID NO: 24859 - protein, 40 aa, Artificial Sequence
  Non-cyclic GFR-binding peptide
  MOD_RES (3)..(40): Xaa is C or S
  MOD_RES (19)..(20)..(21)..(22)..(23): Xaa is A or G
  MOD_RES (24)..(25)..(26)..(27): Xaa is A or G or absent
VKXQPSRVHHSSLSVLFFXXXXXXXXXLKVYPRLEEHLEX

SEQ ID NO: 24860 - protein, 38 aa, Artificial Sequence
  Non-cyclic GFR-binding peptide
  MOD_RES (5)..(6): Xaa is C or S
  MOD_RES (20)..(21)..(22)..(23)..(24): Xaa is A or G
  MOD_RES (25)..(26)..(27)..(28): Xaa is A or G or absent
TPPTXXVPTRLSSLSILFFXXXXXXXXXLKVYPDMVVE

SEQ ID NO: 24861 - protein, 33 aa, Artificial Sequence
  Non-cyclic GFR-binding peptide
  MOD_RES (1)..(1): Xaa is C or S
  MOD_RES (15)..(16)..(17)..(18)..(19): Xaa is A or G
  MOD_RES (20)..(21)..(22)..(23): Xaa is A or G or absent
XVPQALSSLSILFFXXXXXXXXXLKVYPMIVRS

SEQ ID NO: 24862 - protein, 40 aa, Artificial Sequence
  Non-cyclic GFR-binding peptide
  MOD_RES (3)..(37)..(39): Xaa is C or S
  MOD_RES (17)..(18)..(19)..(20)..(21): Xaa is A or G
  MOD_RES (22)..(23)..(24)..(25): Xaa is A or G or absent
LEXVPTEESSLSMLFFXXXXXXXXXLKVYPFLQHNKXEXR

SEQ ID NO: 24863 - protein, 39 aa, Artificial Sequence
  Non-cyclic GFR-binding peptide
  MOD_RES (2)..(39): Xaa is C or S
KXQPSRVHHSSLSVLFFEYVRKKPKLLKVYPRLEEHLEX

SEQ ID NO: 24864 - protein, 39 aa, Artificial Sequence
  Non-cyclic GFR-binding peptide
  MOD_RES (6)..(7)..(39): Xaa is C or S
HVPKPXXAPTKLSSLSVLFFDDSSNVILKVYPNMVVRSX

SEQ ID NO: 24865 - protein, 34 aa, Artificial Sequence
  Non-cyclic GFR-binding peptide
  MOD_RES (1)..(2)..(33): Xaa is C or S
XXVPQALSSLSILFFVGRKPKVLKVYPMIVRSXK

SEQ ID NO: 24866 - protein, 41 aa, Artificial Sequence
  Non-cyclic GFR-binding peptide
  MOD_RES (5)..(6)..(40): Xaa is C or S
  MOD_RES (20)..(21)..(22)..(23)..(24): Xaa is A or G
  MOD_RES (25)..(26)..(27)..(28): Xaa is A or G or absent
VPKPXXAPTKLSSLSVLFFXXXXXXXXXLKVYPNMVVRSXG

SEQ ID NO: 24867 - protein, 43 aa, Artificial Sequence
  Non-cyclic GFR-binding peptide
  MOD_RES (5)..(6)..(40)..(42): Xaa is C or S
  MOD_RES (20)..(21)..(22)..(23)..(24): Xaa is A or G
  MOD_RES (25)..(26)..(27)..(28): Xaa is A or G or absent
TPPTXXVPTRLSSLSILFFXXXXXXXXXLKVYPDMVVESXGXR

SEQ ID NO: 24868 - protein, 36 aa, Artificial Sequence
  Non-cyclic GFR-binding peptide
  MOD_RES (3)..(4): Xaa is C or S
  MOD_RES (18)..(19)..(20)..(21)..(22): Xaa is A or G
  MOD_RES (23)..(24)..(25)..(26): Xaa is A or G or absent
KAXXVPTELSSLSMLFFXXXXXXXXXLKVYPEMVVE

SEQ ID NO: 24869 - protein, 31 aa, Artificial Sequence
  Non-cyclic GFR-binding peptide
  MOD_RES (1)..(1): Xaa is C or S
XVSQDLSSLSILFFIGKTPKILKVYPMIVKS

SEQ ID NO: 24870 - protein, 36 aa, Artificial Sequence
  Non-cyclic GFR-binding peptide
  MOD_RES (34)..(36): Xaa is C or S
  MOD_RES (14)..(15)..(16)..(17)..(18): Xaa is A or G
  MOD_RES (19)..(20)..(21)..(22): Xaa is A or G or absent
VPTEESSLSMLFFXXXXXXXXXLKVYPFLQHNKXEX

SEQ ID NO: 24871 - protein, 42 aa, Artificial Sequence
  Non-cyclic GFR-binding peptide
  MOD_RES (5)..(6)..(40)..(42): Xaa is C or S
  MOD_RES (20)..(21)..(22)..(23)..(24): Xaa is A or G
  MOD_RES (25)..(26)..(27)..(28): Xaa is A or G or absent
IPKAXXVPTELSSLSMLFFXXXXXXXXXLKVYPEMVVEGXGX

SEQ ID NO: 24872 - protein, 35 aa, Artificial Sequence
  Non-cyclic GFR-binding peptide
  MOD_RES (1)..(2)..(33)..(35): Xaa is C or S
XXVPQDLSSLSILFFVGRTPKVLKVYPMVVKSXKX

SEQ ID NO: 24873 - protein, 39 aa, Artificial Sequence
  Non-cyclic GFR-binding peptide
  MOD_RES (6)..(6): Xaa is C or S
  MOD_RES (20)..(21)..(22)..(23)..(24): Xaa is A or G
  MOD_RES (25)..(26)..(27)..(28): Xaa is A or G or absent
VTKPTXAPTKLSSLSVLFFXXXXXXXXXLKVYPNMVVRS

SEQ ID NO: 24874 - protein, 36 aa, Artificial Sequence
  Non-cyclic GFR-binding peptide
  MOD_RES (1)..(33)..(35): Xaa is C or S
XVPTKLSSLSILFFDKGVVTYLKVYPGMAVSEXGXR

SEQ ID NO: 24875 - protein, 33 aa, Artificial Sequence
  Non-cyclic GFR-binding peptide
  MOD_RES (1)..(2): Xaa is C or S
XXVPTRLSSLSILFFDSANNVVLKVYPDMVVES

SEQ ID NO: 24876 - protein, 42 aa, Artificial Sequence
  Non-cyclic GFR-binding peptide
  MOD_RES (6)..(7)..(40)..(42): Xaa is C or S
  MOD_RES (21)..(22)..(23)..(24)..(25): Xaa is A or G
  MOD_RES (26)..(27)..(28)..(29): Xaa is A or G or absent
RVPSTXXAPVKTSSLSMLFFXXXXXXXXXLKVYPMIVEEXGX

SEQ ID NO: 24877 - protein, 38 aa, Artificial Sequence
  Non-cyclic GFR-binding peptide
  MOD_RES (3)..(4)..(38): Xaa is C or S
  MOD_RES (18)..(19)..(20)..(21)..(22): Xaa is A or G
  MOD_RES (23)..(24)..(25)..(26): Xaa is A or G or absent
KAXXVPTELSSLSMLFFXXXXXXXXXLKVYPEMVVEGX

SEQ ID NO: 24878 - protein, 37 aa, Artificial Sequence
  Non-cyclic GFR-binding peptide
  MOD_RES (37)..(37): Xaa is C or S
  MOD_RES (16)..(17)..(18)..(19)..(20): Xaa is A or G
  MOD_RES (21)..(22)..(23)..(24): Xaa is A or G or absent
QPSRVHHSSLSVLFFXXXXXXXXXLKVYPRLEEHLEX

SEQ ID NO: 24879 - protein, 40 aa, Artificial Sequence
  Non-cyclic GFR-binding peptide
  MOD_RES (37)..(39): Xaa is C or S
  MOD_RES (16)..(17)..(18)..(19)..(20): Xaa is A or G
  MOD_RES (21)..(22)..(23)..(24): Xaa is A or G or absent
QPSRVHHSSLSVLFFXXXXXXXXXLKVYPRLEEHLEXAXA

SEQ ID NO: 24880 - protein, 37 aa, Artificial Sequence
  Non-cyclic GFR-binding peptide
  MOD_RES (3)..(4): Xaa is C or S
  MOD_RES (18)..(19)..(20)..(21)..(22): Xaa is A or G
  MOD_RES (23)..(24)..(25)..(26): Xaa is A or G or absent
GPXXTPTKMSSLSMLFFXXXXXXXXXLKVYPGMVVDR

SEQ ID NO: 24881 - protein, 38 aa, Artificial Sequence
  Non-cyclic GFR-binding peptide
  MOD_RES (3)..(4)..(35)..(37): Xaa is C or S
STXXAPVKTSSLSMLFFDNGRVLLLKVYPMIVEEXGXL

SEQ ID NO: 24882 - protein, 35 aa, Artificial Sequence
  Non-cyclic GFR-binding peptide
  MOD_RES (1)..(33)..(35): Xaa is C or S
XVPTRLSSLSILFFDSANNVVLKVYPDMVVESXGX

SEQ ID NO: 24883 - protein, 35 aa, Artificial Sequence
  Non-cyclic GFR-binding peptide
  MOD_RES (1)..(1): Xaa is C or S
  MOD_RES (17)..(18)..(19)..(20)..(21): Xaa is A or G
  MOD_RES (22)..(23)..(24)..(25): Xaa is A or G or absent
XQPSRVHHSSLSVLFFXXXXXXXXXLKVYPRLEEH

SEQ ID NO: 24884 - protein, 38 aa, Artificial Sequence
  Non-cyclic GFR-binding peptide
  MOD_RES (2)..(3)..(37): Xaa is C or S
  MOD_RES (17)..(18)..(19)..(20)..(21): Xaa is A or G
  MOD_RES (22)..(23)..(24)..(25): Xaa is A or G or absent
AXXVPTELSSLSMLFFXXXXXXXXXLKVYPEMVVEGXG

SEQ ID NO: 24885 - protein, 37 aa, Artificial Sequence
  Non-cyclic GFR-binding peptide
  MOD_RES (5)..(5): Xaa is C or S
  MOD_RES (19)..(20)..(21)..(22)..(23): Xaa is A or G
  MOD_RES (24)..(25)..(26)..(27): Xaa is A or G or absent
TKPTXAPTKLSSLSVLFFXXXXXXXXXLKVYPNMVVR

SEQ ID NO: 24886 - protein, 36 aa, Artificial Sequence
  Non-cyclic GFR-binding peptide
  MOD_RES (33)..(35): Xaa is C or S
  MOD_RES (14)..(15)..(16)..(17)..(18): Xaa is A or G
  MOD_RES (19)..(20)..(21)..(22): Xaa is A or G or absent
VPQDLSSLSILFFXXXXXXXXXLKVYPMVVKSXKXS

SEQ ID NO: 24887 - protein, 38 aa, Artificial Sequence
  Non-cyclic GFR-binding peptide
  MOD_RES (4)..(5)..(37): Xaa is C or S
PKPXXAPTKLSSLSVLFFDDSSNVILKVYPNMVVRSXG

SEQ ID NO: 24888 - protein, 39 aa, Artificial Sequence
  Non-cyclic GFR-binding peptide
  MOD_RES (3)..(4)..(37)..(39): Xaa is C or S
  MOD_RES (18)..(19)..(20)..(21)..(22): Xaa is A or G
  MOD_RES (23)..(24)..(25)..(26): Xaa is A or G or absent
SPXXVPQDLSSLSILFFXXXXXXXXXLKVYPMVVKSXKX

SEQ ID NO: 24889 - protein, 36 aa, Artificial Sequence
  Non-cyclic GFR-binding peptide
  MOD_RES (34)..(36): Xaa is C or S
  MOD_RES (14)..(15)..(16)..(17)..(18): Xaa is A or G
  MOD_RES (19)..(20)..(21)..(22): Xaa is A or G or absent
TPTKMSSLSMLFFXXXXXXXXXLKVYPGMVVDRXGX

SEQ ID NO: 24890 - protein, 37 aa, Artificial Sequence
  Non-cyclic GFR-binding peptide
  MOD_RES (3)..(4): Xaa is C or S
  MOD_RES (18)..(19)..(20)..(21)..(22): Xaa is A or G
  MOD_RES (23)..(24)..(25)..(26): Xaa is A or G or absent
KPXXAPTKLSSLSVLFFXXXXXXXXXLKVYPNMVVRS

SEQ ID NO: 24891 - protein, 42 aa, Artificial Sequence
  Non-cyclic GFR-binding peptide
  MOD_RES (6)..(7)..(41): Xaa is C or S
  MOD_RES (21)..(22)..(23)..(24)..(25): Xaa is A or G
  MOD_RES (26)..(27)..(28)..(29): Xaa is A or G or absent
STPPTXXVPTRLSSLSILFFXXXXXXXXXLKVYPDMVVESXG

SEQ ID NO: 24892 - protein, 43 aa, Artificial Sequence
  Non-cyclic GFR-binding peptide
  MOD_RES (6)..(7)..(40)..(42): Xaa is C or S
  MOD_RES (21)..(22)..(23)..(24)..(25): Xaa is A or G
  MOD_RES (26)..(27)..(28)..(29): Xaa is A or G or absent
RVPSTXXAPVKTSSLSMLFFXXXXXXXXXLKVYPMIVEEXGXL

SEQ ID NO: 24893 - protein, 38 aa, Artificial Sequence
  Non-cyclic GFR-binding peptide
  MOD_RES (2)..(3)..(35)..(37): Xaa is C or S
PXXTPTKMSSLSMLFFNDKQQIILKVYPGMVVDRXGXS

SEQ ID NO: 24894 - protein, 36 aa, Artificial Sequence
  Non-cyclic GFR-binding peptide
  MOD_RES (5)..(6): Xaa is C or S
APASXXVPARLSSLSILFFDAANNVVLKVYPDMVVE

SEQ ID NO: 24895 - protein, 35 aa, Artificial Sequence
  Non-cyclic GFR-binding peptide
  MOD_RES (34)..(34): Xaa is C or S
  MOD_RES (14)..(15)..(16)..(17)..(18): Xaa is A or G
  MOD_RES (19)..(20)..(21)..(22): Xaa is A or G or absent
VPARLSSLSILFFXXXXXXXXXLKVYPDMVVEAXG

SEQ ID NO: 24896 - protein, 33 aa, Artificial Sequence
  Non-cyclic GFR-binding peptide
  MOD_RES (14)..(15)..(16)..(17)..(18): Xaa is A or G
  MOD_RES (19)..(20)..(21)..(22): Xaa is A or G or absent
APTKLSSLSVLFFXXXXXXXXXLKVYPNMVVRS

SEQ ID NO: 24897 - protein, 40 aa, Artificial Sequence
  Non-cyclic GFR-binding peptide
  MOD_RES (6)..(7)..(40): Xaa is C or S
  MOD_RES (21)..(22)..(23)..(24)..(25): Xaa is A or G
  MOD_RES (26)..(27)..(28)..(29): Xaa is A or G or absent
ASASPXXVSQDLSSLSILFFXXXXXXXXXLKVYPMIVKSX

SEQ ID NO: 24898 - protein, 39 aa, Artificial Sequence
  Non-cyclic GFR-binding peptide
  MOD_RES (2)..(36)..(38): Xaa is C or S
  MOD_RES (16)..(17)..(18)..(19)..(20): Xaa is A or G
  MOD_RES (21)..(22)..(23)..(24): Xaa is A or G or absent
TXAPTKLSSLSVLFFXXXXXXXXXLKVYPNMVVRSXGXH

SEQ ID NO: 24899 - protein, 39 aa, Artificial Sequence
  Non-cyclic GFR-binding peptide
  MOD_RES (1)..(2)..(36)..(38): Xaa is C or S
  MOD_RES (16)..(17)..(18)..(19)..(20): Xaa is A or G
  MOD_RES (21)..(22)..(23)..(24): Xaa is A or G or absent
XXVPARLSSLSILFFXXXXXXXXXLKVYPDMVVEAXGXR

SEQ ID NO: 24900 - protein, 38 aa, Artificial Sequence
  Non-cyclic GFR-binding peptide
  MOD_RES (5)..(6): Xaa is C or S
  MOD_RES (20)..(21)..(22)..(23)..(24): Xaa is A or G
  MOD_RES (25)..(26)..(27)..(28): Xaa is A or G or absent
VPKAXXAPTKLSSLSVLFFXXXXXXXXXLKVYPNMVVK

SEQ ID NO: 24901 - protein, 34 aa, Artificial Sequence
  Non-cyclic GFR-binding peptide
  MOD_RES (1)..(33): Xaa is C or S
XVPTRLSSLSILFFDSANNVVLKVYPDMVVESXG

SEQ ID NO: 24902 - protein, 37 aa, Artificial Sequence
  Non-cyclic GFR-binding peptide
  MOD_RES (2)..(3)..(37): Xaa is C or S
  MOD_RES (17)..(18)..(19)..(20)..(21): Xaa is A or G
  MOD_RES (22)..(23)..(24)..(25): Xaa is A or G or absent
PXXAPTKLSSLSVLFFXXXXXXXXXLKVYPNMVVRSX

SEQ ID NO: 24903 - protein, 38 aa, Artificial Sequence
  Non-cyclic GFR-binding peptide
  MOD_RES (1)..(38): Xaa is C or S
XQPSRVHHSSLSVLFFEYVRKKPKLLKVYPRLEEHLEX

SEQ ID NO: 24904 - protein, 43 aa, Artificial Sequence
  Non-cyclic GFR-binding peptide
  MOD_RES (7)..(41)..(43): Xaa is C or S
NDEGLEXVPTEESSLSMLFFRIKPHQGQHLKVYPFLQHNKXEX

SEQ ID NO: 24905 - protein, 40 aa, Artificial Sequence
  Non-cyclic GFR-binding peptide
  MOD_RES (5)..(6)..(39): Xaa is C or S
VGKAXXVPTKLSSLSVLFFDDMGVPTLKVYPEGMSVAEXG

SEQ ID NO: 24906 - protein, 32 aa, Artificial Sequence
  Non-cyclic GFR-binding peptide
  MOD_RES (14)..(15)..(16)..(17)..(18): Xaa is A or G
  MOD_RES (19)..(20)..(21)..(22): Xaa is A or G or absent
VPARLSSLSILFFXXXXXXXXXLKVYPDMVVE

SEQ ID NO: 24907 - protein, 40 aa, Artificial Sequence
  Non-cyclic GFR-binding peptide
  MOD_RES (6)..(7): Xaa is C or S
  MOD_RES (21)..(22)..(23)..(24)..(25): Xaa is A or G
  MOD_RES (26)..(27)..(28)..(29): Xaa is A or G or absent
KASKAXXVPTKLSSLSILFFXXXXXXXXXLKVYPGMAVSE

SEQ ID NO: 24908 - protein, 35 aa, Artificial Sequence
  Non-cyclic GFR-binding peptide
  MOD_RES (1)..(35): Xaa is C or S
  MOD_RES (15)..(16)..(17)..(18)..(19): Xaa is A or G
  MOD_RES (20)..(21)..(22)..(23): Xaa is A or G or absent
XAPTKLSSLSVLFFXXXXXXXXXLKVYPNMVVRSX

SEQ ID NO: 24909 - protein, 37 aa, Artificial Sequence
  Non-cyclic GFR-binding peptide
  MOD_RES (4)..(5): Xaa is C or S
  MOD_RES (19)..(20)..(21)..(22)..(23): Xaa is A or G
  MOD_RES (24)..(25)..(26)..(27): Xaa is A or G or absent
PPTXXVPTRLSSLSILFFXXXXXXXXXLKVYPDMVVE

SEQ ID NO: 24910 - protein, 40 aa, Artificial Sequence
  Non-cyclic GFR-binding peptide
  MOD_RES (5)..(5): Xaa is C or S
SSVKXQPSRVHHSSLSVLFFEYVRKKPKLLKVYPRLEEHL

SEQ ID NO: 24911 - protein, 33 aa, Artificial Sequence
  Non-cyclic GFR-binding peptide
  MOD_RES (14)..(15)..(16)..(17)..(18): Xaa is A or G
  MOD_RES (19)..(20)..(21)..(22): Xaa is A or G or absent
VPTKLSSLSILFFXXXXXXXXXLKVYPGMAVSE

SEQ ID NO: 24912 - protein, 37 aa, Artificial Sequence
  Non-cyclic GFR-binding peptide
  MOD_RES (1)..(1): Xaa is C or S
XQPSRVHHSSLSVLFFEYVRKKPKLLKVYPRLEEHLE

SEQ ID NO: 24913 - protein, 37 aa, Artificial Sequence
  Non-cyclic GFR-binding peptide
  MOD_RES (3)..(4)..(35)..(37): Xaa is C or S
APXXVPQALSSLSILFFVGRKPKVLKVYPMIVRSXKX

SEQ ID NO: 24914 - protein, 39 aa, Artificial Sequence
  Non-cyclic GFR-binding peptide
  MOD_RES (4)..(36)..(38): Xaa is C or S
KPTXAPTKLSSLSVLFFDDSSNVILKVYPNMVVRSXGXH

SEQ ID NO: 24915 - protein, 37 aa, Artificial Sequence
  Non-cyclic GFR-binding peptide
  MOD_RES (34)..(36): Xaa is C or S
  MOD_RES (14)..(15)..(16)..(17)..(18): Xaa is A or G
  MOD_RES (19)..(20)..(21)..(22): Xaa is A or G or absent
APTKLSSLSVLFFXXXXXXXXXLKVYPNMVVRSXGXH

SEQ ID NO: 24916 - protein, 35 aa, Artificial Sequence
  Non-cyclic GFR-binding peptide
  MOD_RES (32)..(34): Xaa is C or S
VPTRLSSLSILFFDSANNVVLKVYPDMVVESXGXR

SEQ ID NO: 24917 - protein, 32 aa, Artificial Sequence
  Non-cyclic GFR-binding peptide
  MOD_RES (1)..(2): Xaa is C or S
XXTPTKMSSLSMLFFNDKQQIILKVYPGMVVD

SEQ ID NO: 24918 - protein, 39 aa, Artificial Sequence
  Non-cyclic GFR-binding peptide
  MOD_RES (3)..(4)..(37)..(39): Xaa is C or S
KAXXVPTKLSSLSVLFFDDMGVPTLKVYPEGMSVAEXGX

SEQ ID NO: 24919 - protein, 34 aa, Artificial Sequence
  Non-cyclic GFR-binding peptide
  MOD_RES (1)..(34): Xaa is C or S
  MOD_RES (15)..(16)..(17)..(18)..(19): Xaa is A or G
  MOD_RES (20)..(21)..(22)..(23): Xaa is A or G or absent
XVPQDLSSLSILFFXXXXXXXXXLKVYPMVVKSX

SEQ ID NO: 24920 - protein, 41 aa, Artificial Sequence
  Non-cyclic GFR-binding peptide
  MOD_RES (6)..(7)..(39)..(41): Xaa is C or S
GSAGPXXTPTKMSSLSMLFFNDKQQIILKVYPGMVVDRXGX

SEQ ID NO: 24921 - protein, 35 aa, Artificial Sequence
  Non-cyclic GFR-binding peptide
  MOD_RES (2)..(3): Xaa is C or S
  MOD_RES (17)..(18)..(19)..(20)..(21): Xaa is A or G
  MOD_RES (22)..(23)..(24)..(25): Xaa is A or G or absent
TXXVPTRLSSLSILFFXXXXXXXXXLKVYPDMVVE

SEQ ID NO: 24922 - protein, 32 aa, Artificial Sequence
  Non-cyclic GFR-binding peptide
  MOD_RES (32)..(32): Xaa is C or S
TPTKMSSLSMLFFNDKQQIILKVYPGMVVDRX

SEQ ID NO: 24923 - protein, 33 aa, Artificial Sequence
  Non-cyclic GFR-binding peptide
  MOD_RES (1)..(2)..(33): Xaa is C or S
XXAPVKTSSLSMLFFDNGRVLLLKVYPMIVEEX

SEQ ID NO: 24924 - protein, 39 aa, Artificial Sequence
  Non-cyclic GFR-binding peptide
  MOD_RES (5)..(39): Xaa is C or S
  MOD_RES (19)..(20)..(21)..(22)..(23): Xaa is A or G
  MOD_RES (24)..(25)..(26)..(27): Xaa is A or G or absent
TKPTXAPTKLSSLSVLFFXXXXXXXXXLKVYPNMVVRSX

SEQ ID NO: 24925 - protein, 37 aa, Artificial Sequence
  Non-cyclic GFR-binding peptide
  MOD_RES (6)..(7): Xaa is C or S
RVPSTXXAPVKTSSLSMLFFDNGRVLLLKVYPMIVEE

SEQ ID NO: 24926 - protein, 35 aa, Artificial Sequence
  Non-cyclic GFR-binding peptide
  MOD_RES (1)..(34): Xaa is C or S
  MOD_RES (15)..(16)..(17)..(18)..(19): Xaa is A or G
  MOD_RES (20)..(21)..(22)..(23): Xaa is A or G or absent
XAPVKTSSLSMLFFXXXXXXXXXLKVYPMIVEEXG

SEQ ID NO: 24927 - protein, 41 aa, Artificial Sequence
  Non-cyclic GFR-binding peptide
  MOD_RES (3)..(4)..(38)..(40): Xaa is C or S
  MOD_RES (18)..(19)..(20)..(21)..(22): Xaa is A or G
  MOD_RES (23)..(24)..(25)..(26): Xaa is A or G or absent
KAXXAPTKLSSLSVLFFXXXXXXXXXLKVYPNMVVKAXGXH

SEQ ID NO: 24928 - protein, 40 aa, Artificial Sequence
  Non-cyclic GFR-binding peptide
  MOD_RES (3)..(4)..(38)..(40): Xaa is C or S
  MOD_RES (18)..(19)..(20)..(21)..(22): Xaa is A or G
  MOD_RES (23)..(24)..(25)..(26): Xaa is A or G or absent
PTXXVPTRLSSLSILFFXXXXXXXXXLKVYPDMVVESXGX

SEQ ID NO: 24929 - protein, 44 aa, Artificial Sequence
  Non-cyclic GFR-binding peptide
  MOD_RES (6)..(7)..(41)..(43): Xaa is C or S
  MOD_RES (21)..(22)..(23)..(24)..(25): Xaa is A or G
  MOD_RES (26)..(27)..(28)..(29): Xaa is A or G or absent
AVPKAXXAPTKLSSLSVLFFXXXXXXXXXLKVYPNMVVKAXGXH

SEQ ID NO: 24930 - protein, 39 aa, Artificial Sequence
  Non-cyclic GFR-binding peptide
  MOD_RES (4)..(5)..(36)..(38): Xaa is C or S
ASPXXVSQDLSSLSILFFIGKTPKILKVYPMIVKSXKXS

SEQ ID NO: 24931 - protein, 37 aa, Artificial Sequence
  Non-cyclic GFR-binding peptide
  MOD_RES (4)..(5): Xaa is C or S
  MOD_RES (19)..(20)..(21)..(22)..(23): Xaa is A or G
  MOD_RES (24)..(25)..(26)..(27): Xaa is A or G or absent
AAPXXVPQALSSLSILFFXXXXXXXXXLKVYPMIVRS

SEQ ID NO: 24932 - protein, 30 aa, Artificial Sequence
  Non-cyclic GFR-binding peptide
APTKLSSLSVLFFDDSSNVILKVYPNMVVR

SEQ ID NO: 24933 - protein, 43 aa, Artificial Sequence
  Non-cyclic GFR-binding peptide
  MOD_RES (6)..(7)..(41)..(43): Xaa is C or S
  MOD_RES (21)..(22)..(23)..(24)..(25): Xaa is A or G
  MOD_RES (26)..(27)..(28)..(29): Xaa is A or G or absent
AVPKAXXAPTKLSSLSVLFFXXXXXXXXXLKVYPNMVVKAXGX

SEQ ID NO: 24934 - protein, 40 aa, Artificial Sequence
  Non-cyclic GFR-binding peptide
  MOD_RES (4)..(5)..(37)..(39): Xaa is C or S
SKAXXVPTKLSSLSILFFDKGVVTYLKVYPGMAVSEXGXR

SEQ ID NO: 24935 - protein, 33 aa, Artificial Sequence
  Non-cyclic GFR-binding peptide
  MOD_RES (2)..(3): Xaa is C or S
PXXTPTKMSSLSMLFFNDKQQIILKVYPGMVVD

SEQ ID NO: 24936 - protein, 38 aa, Artificial Sequence
  Non-cyclic GFR-binding peptide
  MOD_RES (2)..(3)..(36)..(38): Xaa is C or S
  MOD_RES (17)..(18)..(19)..(20)..(21): Xaa is A or G
  MOD_RES (22)..(23)..(24)..(25): Xaa is A or G or absent
PXXVSQDLSSLSILFFXXXXXXXXXLKVYPMIVKSXKX

SEQ ID NO: 24937 - protein, 35 aa, Artificial Sequence
  Non-cyclic GFR-binding peptide
  MOD_RES (2)..(3): Xaa is C or S
  MOD_RES (17)..(18)..(19)..(20)..(21): Xaa is A or G
  MOD_RES (22)..(23)..(24)..(25): Xaa is A or G or absent
PXXAPTKLSSLSVLFFXXXXXXXXXLKVYPNMVVR

SEQ ID NO: 24938 - protein, 34 aa, Artificial Sequence
  Non-cyclic GFR-binding peptide
  MOD_RES (3)..(4): Xaa is C or S
STXXAPVKTSSLSMLFFDNGRVLLLKVYPMIVEE

SEQ ID NO: 24939 - protein, 36 aa, Artificial Sequence
  Non-cyclic GFR-binding peptide
  MOD_RES (33)..(35): Xaa is C or S
  MOD_RES (14)..(15)..(16)..(17)..(18): Xaa is A or G
  MOD_RES (19)..(20)..(21)..(22): Xaa is A or G or absent
VSQDLSSLSILFFXXXXXXXXXLKVYPMIVKSXKXS

SEQ ID NO: 24940 - protein, 36 aa, Artificial Sequence
  Non-cyclic GFR-binding peptide
  MOD_RES (2)..(3)..(35): Xaa is C or S
AXXVPTELSSLSMLFFDEYDKVVLKVYPEMVVEGXG

SEQ ID NO: 24941 - protein, 34 aa, Artificial Sequence
  Non-cyclic GFR-binding peptide
  MOD_RES (1)..(2): Xaa is C or S
  MOD_RES (16)..(17)..(18)..(19)..(20): Xaa is A or G
  MOD_RES (21)..(22)..(23)..(24): Xaa is A or G or absent
XXTPTKMSSLSMLFFXXXXXXXXXLKVYPGMVVD

SEQ ID NO: 24942 - protein, 37 aa, Artificial Sequence
  Non-cyclic GFR-binding peptide
  MOD_RES (1)..(2)..(34)..(36): Xaa is C or S
XXAPTKLSSLSVLFFDSSNNVILKVYPNMVVKAXGXH

SEQ ID NO: 24943 - protein, 40 aa, Artificial Sequence
  Non-cyclic GFR-binding peptide
  MOD_RES (6)..(7)..(39): Xaa is C or S
KASKAXXVPTKLSSLSILFFDKGVVTYLKVYPGMAVSEXG

SEQ ID NO: 24944 - protein, 42 aa, Artificial Sequence
  Non-cyclic GFR-binding peptide
  MOD_RES (7)..(41): Xaa is C or S
  MOD_RES (21)..(22)..(23)..(24)..(25): Xaa is A or G
  MOD_RES (26)..(27)..(28)..(29): Xaa is A or G or absent
NDEGLEXVPTEESSLSMLFFXXXXXXXXXLKVYPFLQHNKXE

SEQ ID NO: 24945 - protein, 36 aa, Artificial Sequence
  Non-cyclic GFR-binding peptide
  MOD_RES (1)..(2)..(35): Xaa is C or S
  MOD_RES (16)..(17)..(18)..(19)..(20): Xaa is A or G
  MOD_RES (21)..(22)..(23)..(24): Xaa is A or G or absent
XXAPVKTSSLSMLFFXXXXXXXXXLKVYPMIVEEXG

SEQ ID NO: 24946 - protein, 37 aa, Artificial Sequence
  Non-cyclic GFR-binding peptide
  MOD_RES (1)..(2)..(36): Xaa is C or S
  MOD_RES (16)..(17)..(18)..(19)..(20): Xaa is A or G
  MOD_RES (21)..(22)..(23)..(24): Xaa is A or G or absent
XXAPTQLSSLSVLFFXXXXXXXXXLKVYPNMVVRAXG

SEQ ID NO: 24947 - protein, 32 aa, Artificial Sequence
  Non-cyclic GFR-binding peptide
  MOD_RES (14)..(15)..(16)..(17)..(18): Xaa is A or G
  MOD_RES (19)..(20)..(21)..(22): Xaa is A or G or absent
VPQDLSSLSILFFXXXXXXXXXLKVYPMVVKS

SEQ ID NO: 24948 - protein, 39 aa, Artificial Sequence
  Non-cyclic GFR-binding peptide
  MOD_RES (4)..(38): Xaa is C or S
  MOD_RES (18)..(19)..(20)..(21)..(22): Xaa is A or G
  MOD_RES (23)..(24)..(25)..(26): Xaa is A or G or absent
GLEXVPTEESSLSMLFFXXXXXXXXXLKVYPFLQHNKXE

SEQ ID NO: 24949 - protein, 38 aa, Artificial Sequence
  Non-cyclic GFR-binding peptide
  MOD_RES (5)..(6)..(38): Xaa is C or S
VPKPXXAPTQLSSLSVLFFDDSSNVILKVYPNMVVRAX

SEQ ID NO: 24950 - protein, 37 aa, Artificial Sequence
  Non-cyclic GFR-binding peptide
  MOD_RES (1)..(34)..(36): Xaa is C or S
  MOD_RES (15)..(16)..(17)..(18)..(19): Xaa is A or G
  MOD_RES (20)..(21)..(22)..(23): Xaa is A or G or absent
XAPVKTSSLSMLFFXXXXXXXXXLKVYPMIVEEXGXL

SEQ ID NO: 24951 - protein, 34 aa, Artificial Sequence
  Non-cyclic GFR-binding peptide
  MOD_RES (33)..(33): Xaa is C or S
  MOD_RES (14)..(15)..(16)..(17)..(18): Xaa is A or G
  MOD_RES (19)..(20)..(21)..(22): Xaa is A or G or absent
VSQDLSSLSILFFXXXXXXXXXLKVYPMIVKSXK

SEQ ID NO: 24952 - protein, 38 aa, Artificial Sequence
  Non-cyclic GFR-binding peptide
  MOD_RES (4)..(38): Xaa is C or S
  MOD_RES (18)..(19)..(20)..(21)..(22): Xaa is A or G
  MOD_RES (23)..(24)..(25)..(26): Xaa is A or G or absent
KPTXAPTKLSSLSVLFFXXXXXXXXXLKVYPNMVVRSX

SEQ ID NO: 24953 - protein, 31 aa, Artificial Sequence
  Non-cyclic GFR-binding peptide
  MOD_RES (1)..(1): Xaa is C or S
XAPVKTSSLSMLFFDNGRVLLLKVYPMIVEE

SEQ ID NO: 24954 - protein, 38 aa, Artificial Sequence
  Non-cyclic GFR-binding peptide
  MOD_RES (2)..(2): Xaa is C or S
  MOD_RES (18)..(19)..(20)..(21)..(22): Xaa is A or G
  MOD_RES (23)..(24)..(25)..(26): Xaa is A or G or absent
KXQPSRVHHSSLSVLFFXXXXXXXXXLKVYPRLEEHLE

SEQ ID NO: 24955 - protein, 41 aa, Artificial Sequence
  Non-cyclic GFR-binding peptide
  MOD_RES (6)..(7)..(39)..(41): Xaa is C or S
STPPTXXVPTRLSSLSILFFDSANNVVLKVYPDMVVESXGX

SEQ ID NO: 24956 - protein, 39 aa, Artificial Sequence
  Non-cyclic GFR-binding peptide
  MOD_RES (6)..(7): Xaa is C or S
  MOD_RES (21)..(22)..(23)..(24)..(25): Xaa is A or G
  MOD_RES (26)..(27)..(28)..(29): Xaa is A or G or absent
GSAGPXXTPTKMSSLSMLFFXXXXXXXXXLKVYPGMVVD

SEQ ID NO: 24957 - protein, 31 aa, Artificial Sequence
  Non-cyclic GFR-binding peptide
  MOD_RES (1)..(1): Xaa is C or S
XVPQALSSLSILFFVGRKPKVLKVYPMIVRS

SEQ ID NO: 24958 - protein, 41 aa, Artificial Sequence
  Non-cyclic GFR-binding peptide
  MOD_RES (6)..(7)..(41): Xaa is C or S
  MOD_RES (21)..(22)..(23)..(24)..(25): Xaa is A or G
  MOD_RES (26)..(27)..(28)..(29): Xaa is A or G or absent
AAPASXXVPARLSSLSILFFXXXXXXXXXLKVYPDMVVEAX

SEQ ID NO: 24959 - protein, 42 aa, Artificial Sequence
  Non-cyclic GFR-binding peptide
  MOD_RES (6)..(7)..(41): Xaa is C or S
  MOD_RES (21)..(22)..(23)..(24)..(25): Xaa is A or G
  MOD_RES (26)..(27)..(28)..(29): Xaa is A or G or absent
SIPKAXXVPTELSSLSMLFFXXXXXXXXXLKVYPEMVVEGXG

SEQ ID NO: 24960 - protein, 39 aa, Artificial Sequence
  Non-cyclic GFR-binding peptide
  MOD_RES (5)..(6)..(38): Xaa is C or S
APASXXVPARLSSLSILFFDAANNVVLKVYPDMVVEAXG

SEQ ID NO: 24961 - protein, 39 aa, Artificial Sequence
  Non-cyclic GFR-binding peptide
  MOD_RES (4)..(5)..(37)..(39): Xaa is C or S
PKAXXVPTELSSLSMLFFDEYDKVVLKVYPEMVVEGXGX

SEQ ID NO: 24962 - protein, 40 aa, Artificial Sequence
  Non-cyclic GFR-binding peptide
  MOD_RES (6)..(7)..(40): Xaa is C or S
  MOD_RES (21)..(22)..(23)..(24)..(25): Xaa is A or G
  MOD_RES (26)..(27)..(28)..(29): Xaa is A or G or absent
RVPSTXXAPVKTSSLSMLFFXXXXXXXXXLKVYPMIVEEX

SEQ ID NO: 24963 - protein, 38 aa, Artificial Sequence
  Non-cyclic GFR-binding peptide
  MOD_RES (6)..(7)..(38): Xaa is C or S
ASASPXXVPQDLSSLSILFFVGRTPKVLKVYPMVVKSX

SEQ ID NO: 24964 - protein, 39 aa, Artificial Sequence
  Non-cyclic GFR-binding peptide
  MOD_RES (5)..(6): Xaa is C or S
  MOD_RES (20)..(21)..(22)..(23)..(24): Xaa is A or G
  MOD_RES (25)..(26)..(27)..(28): Xaa is A or G or absent
VPKPXXAPTKLSSLSVLFFXXXXXXXXXLKVYPNMVVRS

SEQ ID NO: 24965 - protein, 38 aa, Artificial Sequence
  Non-cyclic GFR-binding peptide
  MOD_RES (1)..(2)..(35)..(37): Xaa is C or S
  MOD_RES (16)..(17)..(18)..(19)..(20): Xaa is A or G
  MOD_RES (21)..(22)..(23)..(24): Xaa is A or G or absent
XXVPQDLSSLSILFFXXXXXXXXXLKVYPMVVKSXKXS

SEQ ID NO: 24966 - protein, 39 aa, Artificial Sequence
  Non-cyclic GFR-binding peptide
  MOD_RES (3)..(3): Xaa is C or S
VKXQPSRVHHSSLSVLFFEYVRKKPKLLKVYPRLEEHLE

SEQ ID NO: 24967 - protein, 34 aa, Artificial Sequence
  Non-cyclic GFR-binding peptide
  MOD_RES (33)..(33): Xaa is C or S
  MOD_RES (14)..(15)..(16)..(17)..(18): Xaa is A or G
  MOD_RES (19)..(20)..(21)..(22): Xaa is A or G or absent
APVKTSSLSMLFFXXXXXXXXXLKVYPMIVEEXG

SEQ ID NO: 24968 - protein, 38 aa, Artificial Sequence
  Non-cyclic GFR-binding peptide
  MOD_RES (7)..(7): Xaa is C or S
HVTKPTXAPTKLSSLSVLFFDDSSNVILKVYPNMVVRS

SEQ ID NO: 24969 - protein, 35 aa, Artificial Sequence
  Non-cyclic GFR-binding peptide
  MOD_RES (2)..(3)..(35): Xaa is C or S
AXXAPTKLSSLSVLFFDSSNNVILKVYPNMVVKAX

SEQ ID NO: 24970 - protein, 42 aa, Artificial Sequence
  Non-cyclic GFR-binding peptide
  MOD_RES (6)..(7)..(41): Xaa is C or S
  MOD_RES (21)..(22)..(23)..(24)..(25): Xaa is A or G
  MOD_RES (26)..(27)..(28)..(29): Xaa is A or G or absent
AAPASXXVPARLSSLSILFFXXXXXXXXXLKVYPDMVVEAXG

SEQ ID NO: 24971 - protein, 37 aa, Artificial Sequence
  Non-cyclic GFR-binding peptide
  MOD_RES (4)..(5)..(37): Xaa is C or S
PKPXXAPTQLSSLSVLFFDDSSNVILKVYPNMVVRAX

SEQ ID NO: 24972 - protein, 36 aa, Artificial Sequence
  Non-cyclic GFR-binding peptide
  MOD_RES (35)..(35): Xaa is C or S
SRVHHSSLSVLFFEYVRKKPKLLKVYPRLEEHLEXA

SEQ ID NO: 24973 - protein, 32 aa, Artificial Sequence
  Non-cyclic GFR-binding peptide
  MOD_RES (32)..(32): Xaa is C or S
APTQLSSLSVLFFDDSSNVILKVYPNMVVRAX

SEQ ID NO: 24974 - protein, 37 aa, Artificial Sequence
  Non-cyclic GFR-binding peptide
  MOD_RES (1)..(2)..(34)..(36): Xaa is C or S
XXAPTQLSSLSVLFFDDSSNVILKVYPNMVVRAXGXH

SEQ ID NO: 24975 - protein, 38 aa, Artificial Sequence
  Non-cyclic GFR-binding peptide
  MOD_RES (4)..(5): Xaa is C or S
  MOD_RES (19)..(20)..(21)..(22)..(23): Xaa is A or G
  MOD_RES (24)..(25)..(26)..(27): Xaa is A or G or absent
PKPXXAPTKLSSLSVLFFXXXXXXXXXLKVYPNMVVRS

SEQ ID NO: 24976 - protein, 35 aa, Artificial Sequence
  Non-cyclic GFR-binding peptide
  MOD_RES (1)..(2)..(34): Xaa is C or S
XXAPTKLSSLSVLFFDSSNNVILKVYPNMVVKAXG

SEQ ID NO: 24977 - protein, 34 aa, Artificial Sequence
  Non-cyclic GFR-binding peptide
  MOD_RES (1)..(1): Xaa is C or S
  MOD_RES (15)..(16)..(17)..(18)..(19): Xaa is A or G
  MOD_RES (20)..(21)..(22)..(23): Xaa is A or G or absent
XTPTKMSSLSMLFFXXXXXXXXXLKVYPGMVVDR

SEQ ID NO: 24978 - protein, 33 aa, Artificial Sequence
  Non-cyclic GFR-binding peptide
  MOD_RES (2)..(3): Xaa is C or S
AXXVPTKLSSLSILFFDKGVVTYLKVYPGMAVS

SEQ ID NO: 24979 - protein, 31 aa, Artificial Sequence
  Non-cyclic GFR-binding peptide
VPARLSSLSILFFDAANNVVLKVYPDMVVEA

SEQ ID NO: 24980 - protein, 41 aa, Artificial Sequence
  Non-cyclic GFR-binding peptide
  MOD_RES (6)..(7)..(39)..(41): Xaa is C or S
AAPASXXVPARLSSLSILFFDAANNVVLKVYPDMVVEAXGX

SEQ ID NO: 24981 - protein, 41 aa, Artificial Sequence
  Non-cyclic GFR-binding peptide
  MOD_RES (4)..(41): Xaa is C or S
SVKXQPSRVHHSSLSVLFFEYVRKKPKLLKVYPRLEEHLEX

SEQ ID NO: 24982 - protein, 39 aa, Artificial Sequence
  Non-cyclic GFR-binding peptide
  MOD_RES (6)..(7): Xaa is C or S
  MOD_RES (21)..(22)..(23)..(24)..(25): Xaa is A or G
  MOD_RES (26)..(27)..(28)..(29): Xaa is A or G or absent
HVPKPXXAPTKLSSLSVLFFXXXXXXXXXLKVYPNMVVR

SEQ ID NO: 24983 - protein, 38 aa, Artificial Sequence
  Non-cyclic GFR-binding peptide
  MOD_RES (3)..(4)..(36)..(38): Xaa is C or S
KAXXVPTKLSSLSILFFDKGVVTYLKVYPGMAVSEXGX

SEQ ID NO: 24984 - protein, 36 aa, Artificial Sequence
  Non-cyclic GFR-binding peptide
  MOD_RES (2)..(36): Xaa is C or S
  MOD_RES (16)..(17)..(18)..(19)..(20): Xaa is A or G
  MOD_RES (21)..(22)..(23)..(24): Xaa is A or G or absent
EXVPTEESSLSMLFFXXXXXXXXXLKVYPFLQHNKX

SEQ ID NO: 24985 - protein, 41 aa, Artificial Sequence
  Non-cyclic GFR-binding peptide
  MOD_RES (1)..(38)..(40): Xaa is C or S
XQPSRVHHSSLSVLFFEYVRKKPKLLKVYPRLEEHLEXAXA

SEQ ID NO: 24986 - protein, 41 aa, Artificial Sequence
  Non-cyclic GFR-binding peptide
  MOD_RES (3)..(4)..(38)..(40): Xaa is C or S
  MOD_RES (18)..(19)..(20)..(21)..(22): Xaa is A or G
  MOD_RES (23)..(24)..(25)..(26): Xaa is A or G or absent
KAXXVPTKLSSLSILFFXXXXXXXXXLKVYPGMAVSEXGXR

SEQ ID NO: 24987 - protein, 38 aa, Artificial Sequence
  Non-cyclic GFR-binding peptide
  MOD_RES (3)..(4)..(36)..(38): Xaa is C or S
KAXXVPTELSSLSMLFFDEYDKVVLKVYPEMVVEGXGX

SEQ ID NO: 24988 - protein, 35 aa, Artificial Sequence
  Non-cyclic GFR-binding peptide
  MOD_RES (2)..(3)..(35): Xaa is C or S
AXXVPTKLSSLSILFFDKGVVTYLKVYPGMAVSEX

SEQ ID NO: 24989 - protein, 30 aa, Artificial Sequence
  Non-cyclic GFR-binding peptide
VPTELSSLSMLFFDEYDKVVLKVYPEMVVE

SEQ ID NO: 24990 - protein, 40 aa, Artificial Sequence
  Non-cyclic GFR-binding peptide
  MOD_RES (6)..(7)..(40): Xaa is C or S
KVGKAXXVPTKLSSLSVLFFDDMGVPTLKVYPEGMSVAEX

SEQ ID NO: 24991 - protein, 36 aa, Artificial Sequence
  Non-cyclic GFR-binding peptide
  MOD_RES (33)..(35): Xaa is C or S
VPTKLSSLSVLFFDDMGVPTLKVYPEGMSVAEXGXR

SEQ ID NO: 24992 - protein, 39 aa, Artificial Sequence
  Non-cyclic GFR-binding peptide
  MOD_RES (3)..(4)..(36)..(38): Xaa is C or S
KPXXAPTKLSSLSVLFFDDSSNVILKVYPNMVVRSXGXH

SEQ ID NO: 24993 - protein, 35 aa, Artificial Sequence
  Non-cyclic GFR-binding peptide
  MOD_RES (1)..(34): Xaa is C or S
  MOD_RES (15)..(16)..(17)..(18)..(19): Xaa is A or G
  MOD_RES (20)..(21)..(22)..(23): Xaa is A or G or absent
XVPQDLSSLSILFFXXXXXXXXXLKVYPMVVKSXK

SEQ ID NO: 24994 - protein, 38 aa, Artificial Sequence
  Non-cyclic GFR-binding peptide
  MOD_RES (3)..(37): Xaa is C or S
LEXVPTEESSLSMLFFRIKPHQGQHLKVYPFLQHNKXE

SEQ ID NO: 24995 - protein, 37 aa, Artificial Sequence
  Non-cyclic GFR-binding peptide
  MOD_RES (2)..(3)..(36): Xaa is C or S
  MOD_RES (17)..(18)..(19)..(20)..(21): Xaa is A or G
  MOD_RES (22)..(23)..(24)..(25): Xaa is A or G or absent
PXXVPQDLSSLSILFFXXXXXXXXXLKVYPMVVKSXK

SEQ ID NO: 24996 - protein, 32 aa, Artificial Sequence
  Non-cyclic GFR-binding peptide
  MOD_RES (31)..(31): Xaa is C or S
APVKTSSLSMLFFDNGRVLLLKVYPMIVEEXG

SEQ ID NO: 24997 - protein, 36 aa, Artificial Sequence
  Non-cyclic GFR-binding peptide
  MOD_RES (3)..(4)..(36): Xaa is C or S
GPXXTPTKMSSLSMLFFNDKQQIILKVYPGMVVDRX

SEQ ID NO: 24998 - protein, 39 aa, Artificial Sequence
  Non-cyclic GFR-binding peptide
  MOD_RES (3)..(37)..(39): Xaa is C or S
  MOD_RES (17)..(18)..(19)..(20)..(21): Xaa is A or G
  MOD_RES (22)..(23)..(24)..(25): Xaa is A or G or absent
LEXVPTEESSLSMLFFXXXXXXXXXLKVYPFLQHNKXEX

SEQ ID NO: 24999 - protein, 37 aa, Artificial Sequence
  Non-cyclic GFR-binding peptide
  MOD_RES (4)..(5): Xaa is C or S
  MOD_RES (19)..(20)..(21)..(22)..(23): Xaa is A or G
  MOD_RES (24)..(25)..(26)..(27): Xaa is A or G or absent
PKAXXAPTKLSSLSVLFFXXXXXXXXXLKVYPNMVVK

SEQ ID NO: 25000 - protein, 35 aa, Artificial Sequence
  Non-cyclic GFR-binding peptide
  MOD_RES (3)..(4)..(35): Xaa is C or S
STXXAPVKTSSLSMLFFDNGRVLLLKVYPMIVEEX

SEQ ID NO: 25001 - protein, 37 aa, Artificial Sequence
  Non-cyclic GFR-binding peptide
  MOD_RES (2)..(3)..(36): Xaa is C or S
  MOD_RES (17)..(18)..(19)..(20)..(21): Xaa is A or G
  MOD_RES (22)..(23)..(24)..(25): Xaa is A or G or absent
TXXAPVKTSSLSMLFFXXXXXXXXXLKVYPMIVEEXG

SEQ ID NO: 25002 - protein, 38 aa, Artificial Sequence
  Non-cyclic GFR-binding peptide
  MOD_RES (3)..(4): Xaa is C or S
  MOD_RES (18)..(19)..(20)..(21)..(22): Xaa is A or G
  MOD_RES (23)..(24)..(25)..(26): Xaa is A or G or absent
KAXXVPTKLSSLSVLFFXXXXXXXXXLKVYPEGMSVAE

SEQ ID NO: 25003 - protein, 34 aa, Artificial Sequence
  Non-cyclic GFR-binding peptide
  MOD_RES (34)..(34): Xaa is C or S
  MOD_RES (14)..(15)..(16)..(17)..(18): Xaa is A or G
  MOD_RES (19)..(20)..(21)..(22): Xaa is A or G or absent
APTKLSSLSVLFFXXXXXXXXXLKVYPNMVVRSX

SEQ ID NO: 25004 - protein, 37 aa, Artificial Sequence
  Non-cyclic GFR-binding peptide
  MOD_RES (1)..(2)..(36): Xaa is C or S
  MOD_RES (16)..(17)..(18)..(19)..(20): Xaa is A or G
  MOD_RES (21)..(22)..(23)..(24): Xaa is A or G or absent
XXAPTKLSSLSVLFFXXXXXXXXXLKVYPNMVVKAXG

SEQ ID NO: 25005 - protein, 33 aa, Artificial Sequence
  Non-cyclic GFR-binding peptide
  MOD_RES (32)..(32): Xaa is C or S
VPARLSSLSILFFDAANNVVLKVYPDMVVEAXG

SEQ ID NO: 25006 - protein, 36 aa, Artificial Sequence
  Non-cyclic GFR-binding peptide
  MOD_RES (1)..(34)..(36): Xaa is C or S
  MOD_RES (15)..(16)..(17)..(18)..(19): Xaa is A or G
  MOD_RES (20)..(21)..(22)..(23): Xaa is A or G or absent
XVSQDLSSLSILFFXXXXXXXXXLKVYPMIVKSXKX

SEQ ID NO: 25007 - protein, 35 aa, Artificial Sequence
  Non-cyclic GFR-binding peptide
  MOD_RES (1)..(2)..(35): Xaa is C or S
  MOD_RES (16)..(17)..(18)..(19)..(20): Xaa is A or G
  MOD_RES (21)..(22)..(23)..(24): Xaa is A or G or absent
XXVSQDLSSLSILFFXXXXXXXXXLKVYPMIVKSX

SEQ ID NO: 25008 - protein, 40 aa, Artificial Sequence
  Non-cyclic GFR-binding peptide
  MOD_RES (3)..(37)..(39): Xaa is C or S
LEXVPTEESSLSMLFFRIKPHQGQHLKVYPFLQHNKXEXR

SEQ ID NO: 25009 - protein, 42 aa, Artificial Sequence
  Non-cyclic GFR-binding peptide
  MOD_RES (6)..(7)..(39)..(41): Xaa is C or S
HVPKPXXAPTKLSSLSVLFFDDSSNVILKVYPNMVVRSXGXH

SEQ ID NO: 25010 - protein, 36 aa, Artificial Sequence
  Non-cyclic GFR-binding peptide
  MOD_RES (1)..(2)..(36): Xaa is C or S
  MOD_RES (16)..(17)..(18)..(19)..(20): Xaa is A or G
  MOD_RES (21)..(22)..(23)..(24): Xaa is A or G or absent
XXAPTKLSSLSVLFFXXXXXXXXXLKVYPNMVVKAX

SEQ ID NO: 25011 - protein, 39 aa, Artificial Sequence
  Non-cyclic GFR-binding peptide
  MOD_RES (3)..(4)..(36)..(38): Xaa is C or S
ASXXVPARLSSLSILFFDAANNVVLKVYPDMVVEAXGXR

SEQ ID NO: 25012 - protein, 42 aa, Artificial Sequence
  Non-cyclic GFR-binding peptide
  MOD_RES (5)..(6)..(40)..(42): Xaa is C or S
  MOD_RES (20)..(21)..(22)..(23)..(24): Xaa is A or G
  MOD_RES (25)..(26)..(27)..(28): Xaa is A or G or absent
APASXXVPARLSSLSILFFXXXXXXXXXLKVYPDMVVEAXGX

SEQ ID NO: 25013 - protein, 38 aa, Artificial Sequence
  Non-cyclic GFR-binding peptide
  MOD_RES (1)..(35)..(37): Xaa is C or S
  MOD_RES (15)..(16)..(17)..(18)..(19): Xaa is A or G
  MOD_RES (20)..(21)..(22)..(23): Xaa is A or G or absent
XAPTQLSSLSVLFFXXXXXXXXXLKVYPNMVVRAXGXH

SEQ ID NO: 25014 - protein, 35 aa, Artificial Sequence
  Non-cyclic GFR-binding peptide
  MOD_RES (1)..(2): Xaa is C or S
  MOD_RES (16)..(17)..(18)..(19)..(20): Xaa is A or G
  MOD_RES (21)..(22)..(23)..(24): Xaa is A or G or absent
XXVPTKLSSLSILFFXXXXXXXXXLKVYPGMAVSE

SEQ ID NO: 25015 - protein, 36 aa, Artificial Sequence
  Non-cyclic GFR-binding peptide
  MOD_RES (1)..(35): Xaa is C or S
  MOD_RES (15)..(16)..(17)..(18)..(19): Xaa is A or G
  MOD_RES (20)..(21)..(22)..(23): Xaa is A or G or absent
XTPTKMSSLSMLFFXXXXXXXXXLKVYPGMVVDRXG

SEQ ID NO: 25016 - protein, 43 aa, Artificial Sequence
  Non-cyclic GFR-binding peptide
  MOD_RES (6)..(7)..(41)..(43): Xaa is C or S
  MOD_RES (21)..(22)..(23)..(24)..(25): Xaa is A or G
  MOD_RES (26)..(27)..(28)..(29): Xaa is A or G or absent
SIPKAXXVPTELSSLSMLFFXXXXXXXXXLKVYPEMVVEGXGX

SEQ ID NO: 25017 - protein, 40 aa, Artificial Sequence
  Non-cyclic GFR-binding peptide
  MOD_RES (6)..(7)..(38)..(40): Xaa is C or S
ASASPXXVSQDLSSLSILFFIGKTPKILKVYPMIVKSXKX

SEQ ID NO: 25018 - protein, 33 aa, Artificial Sequence
  Non-cyclic GFR-binding peptide
  MOD_RES (31)..(33): Xaa is C or S
VPQALSSLSILFFVGRKPKVLKVYPMIVRSXKX

SEQ ID NO: 25019 - protein, 35 aa, Artificial Sequence
  Non-cyclic GFR-binding peptide
  MOD_RES (32)..(34): Xaa is C or S
VPTKLSSLSILFFDKGVVTYLKVYPGMAVSEXGXR

SEQ ID NO: 25020 - protein, 34 aa, Artificial Sequence
  Non-cyclic GFR-binding peptide
  MOD_RES (2)..(3): Xaa is C or S
AXXVPTELSSLSMLFFDEYDKVVLKVYPEMVVEG

SEQ ID NO: 25021 - protein, 39 aa, Artificial Sequence
  Non-cyclic GFR-binding peptide
  MOD_RES (5)..(6)..(38): Xaa is C or S
VPKAXXAPTKLSSLSVLFFDSSNNVILKVYPNMVVKAXG

SEQ ID NO: 25022 - protein, 33 aa, Artificial Sequence
  Non-cyclic GFR-binding peptide
  MOD_RES (32)..(32): Xaa is C or S
VPTKLSSLSILFFDKGVVTYLKVYPGMAVSEXG

SEQ ID NO: 25023 - protein, 34 aa, Artificial Sequence
  Non-cyclic GFR-binding peptide
  MOD_RES (3)..(4): Xaa is C or S
PTXXVPTRLSSLSILFFDSANNVVLKVYPDMVVE

SEQ ID NO: 25024 - protein, 34 aa, Artificial Sequence
  Non-cyclic GFR-binding peptide
  MOD_RES (32)..(34): Xaa is C or S
VPTELSSLSMLFFDEYDKVVLKVYPEMVVEGXGX

SEQ ID NO: 25025 - protein, 37 aa, Artificial Sequence
  Non-cyclic GFR-binding peptide
  MOD_RES (7)..(7): Xaa is C or S
HVTKPTXAPTKLSSLSVLFFDDSSNVILKVYPNMVVR

SEQ ID NO: 25026 - protein, 34 aa, Artificial Sequence
  Non-cyclic GFR-binding peptide
  MOD_RES (1)..(1): Xaa is C or S
  MOD_RES (15)..(16)..(17)..(18)..(19): Xaa is A or G
  MOD_RES (20)..(21)..(22)..(23): Xaa is A or G or absent
XVPTEESSLSMLFFXXXXXXXXXLKVYPFLQHNK

SEQ ID NO: 25027 - protein, 39 aa, Artificial Sequence
  Non-cyclic GFR-binding peptide
  MOD_RES (37)..(39): Xaa is C or S
  MOD_RES (16)..(17)..(18)..(19)..(20): Xaa is A or G
  MOD_RES (21)..(22)..(23)..(24): Xaa is A or G or absent
QPSRVHHSSLSVLFFXXXXXXXXXLKVYPRLEEHLEXAX

SEQ ID NO: 25028 - protein, 38 aa, Artificial Sequence
  Non-cyclic GFR-binding peptide
  MOD_RES (1)..(2)..(35)..(37): Xaa is C or S
  MOD_RES (16)..(17)..(18)..(19)..(20): Xaa is A or G
  MOD_RES (21)..(22)..(23)..(24): Xaa is A or G or absent
XXVSQDLSSLSILFFXXXXXXXXXLKVYPMIVKSXKXS

SEQ ID NO: 25029 - protein, 35 aa, Artificial Sequence
  Non-cyclic GFR-binding peptide
  MOD_RES (2)..(3)..(34): Xaa is C or S
PXXVPQDLSSLSILFFVGRTPKVLKVYPMVVKSXK

SEQ ID NO: 25030 - protein, 37 aa, Artificial Sequence
  Non-cyclic GFR-binding peptide
  MOD_RES (2)..(36): Xaa is C or S
EXVPTEESSLSMLFFRIKPHQGQHLKVYPFLQHNKXE

SEQ ID NO: 25031 - protein, 39 aa, Artificial Sequence
  Non-cyclic GFR-binding peptide
  MOD_RES (5)..(6)..(37)..(39): Xaa is C or S
SASPXXVSQDLSSLSILFFIGKTPKILKVYPMIVKSXKX

SEQ ID NO: 25032 - protein, 37 aa, Artificial Sequence
  Non-cyclic GFR-binding peptide
  MOD_RES (3)..(4)..(36): Xaa is C or S
KPXXAPTQLSSLSVLFFDDSSNVILKVYPNMVVRAXG

SEQ ID NO: 25033 - protein, 36 aa, Artificial Sequence
  Non-cyclic GFR-binding peptide
  MOD_RES (1)..(34)..(36): Xaa is C or S
XVPTKLSSLSVLFFDDMGVPTLKVYPEGMSVAEXGX

SEQ ID NO: 25034 - protein, 41 aa, Artificial Sequence
  Non-cyclic GFR-binding peptide
  MOD_RES (6)..(40): Xaa is C or S
  MOD_RES (20)..(21)..(22)..(23)..(24): Xaa is A or G
  MOD_RES (25)..(26)..(27)..(28): Xaa is A or G or absent
DEGLEXVPTEESSLSMLFFXXXXXXXXXLKVYPFLQHNKXE

SEQ ID NO: 25035 - protein, 36 aa, Artificial Sequence
  Non-cyclic GFR-binding peptide
  MOD_RES (35)..(35): Xaa is C or S
  MOD_RES (14)..(15)..(16)..(17)..(18): Xaa is A or G
  MOD_RES (19)..(20)..(21)..(22): Xaa is A or G or absent
SRVHHSSLSVLFFXXXXXXXXXLKVYPRLEEHLEXA

SEQ ID NO: 25036 - protein, 41 aa, Artificial Sequence
  Non-cyclic GFR-binding peptide
  MOD_RES (4)..(5)..(39)..(41): Xaa is C or S
  MOD_RES (19)..(20)..(21)..(22)..(23): Xaa is A or G
  MOD_RES (24)..(25)..(26)..(27): Xaa is A or G or absent
AGPXXTPTKMSSLSMLFFXXXXXXXXXLKVYPGMVVDRXGX

SEQ ID NO: 25037 - protein, 35 aa, Artificial Sequence
  Non-cyclic GFR-binding peptide
  MOD_RES (3)..(4): Xaa is C or S
KAXXAPTKLSSLSVLFFDSSNNVILKVYPNMVVKA

SEQ ID NO: 25038 - protein, 37 aa, Artificial Sequence
  Non-cyclic GFR-binding peptide
  MOD_RES (3)..(4): Xaa is C or S
  MOD_RES (18)..(19)..(20)..(21)..(22): Xaa is A or G
  MOD_RES (23)..(24)..(25)..(26): Xaa is A or G or absent
KAXXAPTKLSSLSVLFFXXXXXXXXXLKVYPNMVVKA

SEQ ID NO: 25039 - protein, 38 aa, Artificial Sequence
  Non-cyclic GFR-binding peptide
  MOD_RES (5)..(6): Xaa is C or S
  MOD_RES (20)..(21)..(22)..(23)..(24): Xaa is A or G
  MOD_RES (25)..(26)..(27)..(28): Xaa is A or G or absent
ASKAXXVPTKLSSLSILFFXXXXXXXXXLKVYPGMAVS

SEQ ID NO: 25040 - protein, 38 aa, Artificial Sequence
  Non-cyclic GFR-binding peptide
  MOD_RES (6)..(7): Xaa is C or S
YVPKPXXAPTKLSSLSVLFFDDSSNVILKVYPNMVVRS

SEQ ID NO: 25041 - protein, 33 aa, Artificial Sequence
  Non-cyclic GFR-binding peptide
  MOD_RES (1)..(33): Xaa is C or S
XVPTELSSLSMLFFDEYDKVVLKVYPEMVVEGX

SEQ ID NO: 25042 - protein, 34 aa, Artificial Sequence
  Non-cyclic GFR-binding peptide
  MOD_RES (1)..(34): Xaa is C or S
XVPTKLSSLSVLFFDDMGVPTLKVYPEGMSVAEX

SEQ ID NO: 25043 - protein, 38 aa, Artificial Sequence
  Non-cyclic GFR-binding peptide
  MOD_RES (3)..(4)..(37): Xaa is C or S
KAXXVPTKLSSLSVLFFDDMGVPTLKVYPEGMSVAEXG

SEQ ID NO: 25044 - protein, 36 aa, Artificial Sequence
  Non-cyclic GFR-binding peptide
  MOD_RES (5)..(6): Xaa is C or S
IPKAXXVPTELSSLSMLFFDEYDKVVLKVYPEMVVE

SEQ ID NO: 25045 - protein, 40 aa, Artificial Sequence
  Non-cyclic GFR-binding peptide
  MOD_RES (7)..(7): Xaa is C or S
NDEGLEXVPTEESSLSMLFFRIKPHQGQHLKVYPFLQHNK

SEQ ID NO: 25046 - protein, 38 aa, Artificial Sequence
  Non-cyclic GFR-binding peptide
  MOD_RES (37)..(37): Xaa is C or S
  MOD_RES (16)..(17)..(18)..(19)..(20): Xaa is A or G
  MOD_RES (21)..(22)..(23)..(24): Xaa is A or G or absent
QPSRVHHSSLSVLFFXXXXXXXXXLKVYPRLEEHLEXA

SEQ ID NO: 25047 - protein, 35 aa, Artificial Sequence
  Non-cyclic GFR-binding peptide
  MOD_RES (1)..(2)..(34): Xaa is C or S
XXVPTELSSLSMLFFDEYDKVVLKVYPEMVVEGXG

SEQ ID NO: 25048 - protein, 33 aa, Artificial Sequence
  Non-cyclic GFR-binding peptide
  MOD_RES (32)..(32): Xaa is C or S
APTKLSSLSVLFFDDSSNVILKVYPNMVVRSXG

SEQ ID NO: 25049 - protein, 42 aa, Artificial Sequence
  Non-cyclic GFR-binding peptide
  MOD_RES (3)..(40)..(42): Xaa is C or S
VKXQPSRVHHSSLSVLFFEYVRKKPKLLKVYPRLEEHLEXAX

SEQ ID NO: 25050 - protein, 42 aa, Artificial Sequence
  Non-cyclic GFR-binding peptide
  MOD_RES (6)..(7)..(42): Xaa is C or S
  MOD_RES (21)..(22)..(23)..(24)..(25): Xaa is A or G
  MOD_RES (26)..(27)..(28)..(29): Xaa is A or G or absent
KVGKAXXVPTKLSSLSVLFFXXXXXXXXXLKVYPEGMSVAEX

SEQ ID NO: 25051 - protein, 40 aa, Artificial Sequence
  Non-cyclic GFR-binding peptide
  MOD_RES (6)..(7): Xaa is C or S
  MOD_RES (21)..(22)..(23)..(24)..(25): Xaa is A or G
  MOD_RES (26)..(27)..(28)..(29): Xaa is A or G or absent
SIPKAXXVPTELSSLSMLFFXXXXXXXXXLKVYPEMVVEG

SEQ ID NO: 25052 - protein, 34 aa, Artificial Sequence
  Non-cyclic GFR-binding peptide
  MOD_RES (1)..(32)..(34): Xaa is C or S
XVPQALSSLSILFFVGRKPKVLKVYPMIVRSXKX

SEQ ID NO: 25053 - protein, 42 aa, Artificial Sequence
  Non-cyclic GFR-binding peptide
  MOD_RES (6)..(7)..(40)..(42): Xaa is C or S
  MOD_RES (21)..(22)..(23)..(24)..(25): Xaa is A or G
  MOD_RES (26)..(27)..(28)..(29): Xaa is A or G or absent
ASASPXXVPQDLSSLSILFFXXXXXXXXXLKVYPMVVKSXKX

SEQ ID NO: 25054 - protein, 37 aa, Artificial Sequence
  Non-cyclic GFR-binding peptide
  MOD_RES (5)..(6): Xaa is C or S
TPPTXXVPTRLSSLSILFFDSANNVVLKVYPDMVVES

SEQ ID NO: 25055 - protein, 43 aa, Artificial Sequence
  Non-cyclic GFR-binding peptide
  MOD_RES (6)..(7)..(41)..(43): Xaa is C or S
  MOD_RES (21)..(22)..(23)..(24)..(25): Xaa is A or G
  MOD_RES (26)..(27)..(28)..(29): Xaa is A or G or absent
YVPKPXXAPTKLSSLSVLFFXXXXXXXXXLKVYPNMVVRSXGX

SEQ ID NO: 25056 - protein, 39 aa, Artificial Sequence
  Non-cyclic GFR-binding peptide
  MOD_RES (3)..(4)..(38): Xaa is C or S
  MOD_RES (18)..(19)..(20)..(21)..(22): Xaa is A or G
  MOD_RES (23)..(24)..(25)..(26): Xaa is A or G or absent
KPXXAPTKLSSLSVLFFXXXXXXXXXLKVYPNMVVRSXG

SEQ ID NO: 25057 - protein, 40 aa, Artificial Sequence
  Non-cyclic GFR-binding peptide
  MOD_RES (3)..(4)..(38)..(40): Xaa is C or S
  MOD_RES (18)..(19)..(20)..(21)..(22): Xaa is A or G
  MOD_RES (23)..(24)..(25)..(26): Xaa is A or G or absent
KPXXAPTKLSSLSVLFFXXXXXXXXXLKVYPNMVVRSXGX

SEQ ID NO: 25058 - protein, 35 aa, Artificial Sequence
  Non-cyclic GFR-binding peptide
  MOD_RES (1)..(2): Xaa is C or S
  MOD_RES (16)..(17)..(18)..(19)..(20): Xaa is A or G
  MOD_RES (21)..(22)..(23)..(24): Xaa is A or G or absent
XXTPTKMSSLSMLFFXXXXXXXXXLKVYPGMVVDR

SEQ ID NO: 25059 - protein, 41 aa, Artificial Sequence
  Non-cyclic GFR-binding peptide
  MOD_RES (5)..(6)..(40): Xaa is C or S
  MOD_RES (20)..(21)..(22)..(23)..(24): Xaa is A or G
  MOD_RES (25)..(26)..(27)..(28): Xaa is A or G or absent
ASKAXXVPTKLSSLSILFFXXXXXXXXXLKVYPGMAVSEXG

SEQ ID NO: 25060 - protein, 37 aa, Artificial Sequence
  Non-cyclic GFR-binding peptide
  MOD_RES (1)..(35)..(37): Xaa is C or S
  MOD_RES (15)..(16)..(17)..(18)..(19): Xaa is A or G
  MOD_RES (20)..(21)..(22)..(23): Xaa is A or G or absent
XVPTELSSLSMLFFXXXXXXXXXLKVYPEMVVEGXGX

SEQ ID NO: 25061 - protein, 34 aa, Artificial Sequence
  Non-cyclic GFR-binding peptide
  MOD_RES (1)..(1): Xaa is C or S
  MOD_RES (15)..(16)..(17)..(18)..(19): Xaa is A or G
  MOD_RES (20)..(21)..(22)..(23): Xaa is A or G or absent
XVPTKLSSLSILFFXXXXXXXXXLKVYPGMAVSE

SEQ ID NO: 25062 - protein, 37 aa, Artificial Sequence
  Non-cyclic GFR-binding peptide
  MOD_RES (6)..(7): Xaa is C or S
YVPKPXXAPTKLSSLSVLFFDDSSNVILKVYPNMVVR

SEQ ID NO: 25063 - protein, 40 aa, Artificial Sequence
  Non-cyclic GFR-binding peptide
  MOD_RES (5)..(6)..(40): Xaa is C or S
  MOD_RES (20)..(21)..(22)..(23)..(24): Xaa is A or G
  MOD_RES (25)..(26)..(27)..(28): Xaa is A or G or absent
IPKAXXVPTELSSLSMLFFXXXXXXXXXLKVYPEMVVEGX

SEQ ID NO: 25064 - protein, 40 aa, Artificial Sequence
  Non-cyclic GFR-binding peptide
  MOD_RES (6)..(7)..(38)..(40): Xaa is C or S
ASASPXXVPQDLSSLSILFFVGRTPKVLKVYPMVVKSXKX

SEQ ID NO: 25065 - protein, 38 aa, Artificial Sequence
  Non-cyclic GFR-binding peptide
  MOD_RES (5)..(6)..(38): Xaa is C or S
SAGPXXTPTKMSSLSMLFFNDKQQIILKVYPGMVVDRX

SEQ ID NO: 25066 - protein, 42 aa, Artificial Sequence
  Non-cyclic GFR-binding peptide
  MOD_RES (5)..(6)..(39)..(41): Xaa is C or S
  MOD_RES (20)..(21)..(22)..(23)..(24): Xaa is A or G
  MOD_RES (25)..(26)..(27)..(28): Xaa is A or G or absent
SASPXXVPQDLSSLSILFFXXXXXXXXXLKVYPMVVKSXKXS

SEQ ID NO: 25067 - protein, 34 aa, Artificial Sequence
  Non-cyclic GFR-binding peptide
  MOD_RES (1)..(2)..(34): Xaa is C or S
XXVPTELSSLSMLFFDEYDKVVLKVYPEMVVEGX

SEQ ID NO: 25068 - protein, 34 aa, Artificial Sequence
  Non-cyclic GFR-binding peptide
  MOD_RES (1)..(2)..(33): Xaa is C or S
XXVSQDLSSLSILFFIGKTPKILKVYPMIVKSXK

SEQ ID NO: 25069 - protein, 36 aa, Artificial Sequence
  Non-cyclic GFR-binding peptide
  MOD_RES (3)..(4)..(36): Xaa is C or S
KPXXAPTQLSSLSVLFFDDSSNVILKVYPNMVVRAX

SEQ ID NO: 25070 - protein, 35 aa, Artificial Sequence
  Non-cyclic GFR-binding peptide
  MOD_RES (35)..(35): Xaa is C or S
SRVHHSSLSVLFFEYVRKKPKLLKVYPRLEEHLEX

SEQ ID NO: 25071 - protein, 33 aa, Artificial Sequence
  Non-cyclic GFR-binding peptide
  MOD_RES (14)..(15)..(16)..(17)..(18): Xaa is A or G
  MOD_RES (19)..(20)..(21)..(22): Xaa is A or G or absent
APTKLSSLSVLFFXXXXXXXXXLKVYPNMVVKA

SEQ ID NO: 25072 - protein, 36 aa, Artificial Sequence
  Non-cyclic GFR-binding peptide
  MOD_RES (5)..(6): Xaa is C or S
TPPTXXVPTRLSSLSILFFDSANNVVLKVYPDMVVE

SEQ ID NO: 25073 - protein, 36 aa, Artificial Sequence
  Non-cyclic GFR-binding peptide
  MOD_RES (2)..(36): Xaa is C or S
EXVPTEESSLSMLFFRIKPHQGQHLKVYPFLQHNKX

SEQ ID NO: 25074 - protein, 39 aa, Artificial Sequence
  Non-cyclic GFR-binding peptide
  MOD_RES (2)..(3)..(37)..(39): Xaa is C or S
  MOD_RES (17)..(18)..(19)..(20)..(21): Xaa is A or G
  MOD_RES (22)..(23)..(24)..(25): Xaa is A or G or absent
AXXVPTKLSSLSILFFXXXXXXXXXLKVYPGMAVSEXGX

SEQ ID NO: 25075 - protein, 43 aa, Artificial Sequence
  Non-cyclic GFR-binding peptide
  MOD_RES (5)..(6)..(40)..(42): Xaa is C or S
  MOD_RES (20)..(21)..(22)..(23)..(24): Xaa is A or G
  MOD_RES (25)..(26)..(27)..(28): Xaa is A or G or absent
IPKAXXVPTELSSLSMLFFXXXXXXXXXLKVYPEMVVEGXGXR

SEQ ID NO: 25076 - protein, 35 aa, Artificial Sequence
  Non-cyclic GFR-binding peptide
  MOD_RES (1)..(2)..(33)..(35): Xaa is C or S
XXAPVKTSSLSMLFFDNGRVLLLKVYPMIVEEXGX

SEQ ID NO: 25077 - protein, 34 aa, Artificial Sequence
  Non-cyclic GFR-binding peptide
PSRVHHSSLSVLFFEYVRKKPKLLKVYPRLEEHL

SEQ ID NO: 25078 - protein, 38 aa, Artificial Sequence
  Non-cyclic GFR-binding peptide
  MOD_RES (4)..(36)..(38): Xaa is C or S
KPTXAPTKLSSLSVLFFDDSSNVILKVYPNMVVRSXGX

SEQ ID NO: 25079 - protein, 30 aa, Artificial Sequence
  Non-cyclic GFR-binding peptide
APTKLSSLSVLFFDSSNNVILKVYPNMVVK

SEQ ID NO: 25080 - protein, 36 aa, Artificial Sequence
  Non-cyclic GFR-binding peptide
  MOD_RES (1)..(2)..(36): Xaa is C or S
  MOD_RES (16)..(17)..(18)..(19)..(20): Xaa is A or G
  MOD_RES (21)..(22)..(23)..(24): Xaa is A or G or absent
XXAPTQLSSLSVLFFXXXXXXXXXLKVYPNMVVRAX

SEQ ID NO: 25081 - protein, 44 aa, Artificial Sequence
  Non-cyclic GFR-binding peptide
  MOD_RES (6)..(7)..(41)..(43): Xaa is C or S
  MOD_RES (21)..(22)..(23)..(24)..(25): Xaa is A or G
  MOD_RES (26)..(27)..(28)..(29): Xaa is A or G or absent
TVPKPXXAPTQLSSLSVLFFXXXXXXXXXLKVYPNMVVRAXGXH

SEQ ID NO: 25082 - protein, 37 aa, Artificial Sequence
  Non-cyclic GFR-binding peptide
  MOD_RES (1)..(2)..(34)..(36): Xaa is C or S
XXVPTELSSLSMLFFDEYDKVVLKVYPEMVVEGXGXR

SEQ ID NO: 25083 - protein, 37 aa, Artificial Sequence
  Non-cyclic GFR-binding peptide
  MOD_RES (1)..(2)..(34)..(36): Xaa is C or S
XXTPTKMSSLSMLFFNDKQQIILKVYPGMVVDRXGXS

SEQ ID NO: 25084 - protein, 40 aa, Artificial Sequence
  Non-cyclic GFR-binding peptide
  MOD_RES (5)..(37)..(39): Xaa is C or S
TKPTXAPTKLSSLSVLFFDDSSNVILKVYPNMVVRSXGXH

SEQ ID NO: 25085 - protein, 42 aa, Artificial Sequence
  Non-cyclic GFR-binding peptide
  MOD_RES (5)..(6)..(39)..(41): Xaa is C or S
  MOD_RES (20)..(21)..(22)..(23)..(24): Xaa is A or G
  MOD_RES (25)..(26)..(27)..(28): Xaa is A or G or absent
SAAPXXVPQALSSLSILFFXXXXXXXXXLKVYPMIVRSXKXS

SEQ ID NO: 25086 - protein, 36 aa, Artificial Sequence
  Non-cyclic GFR-binding peptide
  MOD_RES (3)..(4): Xaa is C or S
  MOD_RES (18)..(19)..(20)..(21)..(22): Xaa is A or G
  MOD_RES (23)..(24)..(25)..(26): Xaa is A or G or absent
KPXXAPTQLSSLSVLFFXXXXXXXXXLKVYPNMVVR

SEQ ID NO: 25087 - protein, 32 aa, Artificial Sequence
  Non-cyclic GFR-binding peptide
  MOD_RES (14)..(15)..(16)..(17)..(18): Xaa is A or G
  MOD_RES (19)..(20)..(21)..(22): Xaa is A or G or absent
APTQLSSLSVLFFXXXXXXXXXLKVYPNMVVR

SEQ ID NO: 25088 - protein, 32 aa, Artificial Sequence
  Non-cyclic GFR-binding peptide
  MOD_RES (14)..(15)..(16)..(17)..(18): Xaa is A or G
  MOD_RES (19)..(20)..(21)..(22): Xaa is A or G or absent
VPQALSSLSILFFXXXXXXXXXLKVYPMIVRS

SEQ ID NO: 25089 - protein, 31 aa, Artificial Sequence
  Non-cyclic GFR-binding peptide
VPTRLSSLSILFFDSANNVVLKVYPDMVVES

SEQ ID NO: 25090 - protein, 39 aa, Artificial Sequence
  Non-cyclic GFR-binding peptide
  MOD_RES (2)..(3)..(38): Xaa is C or S
  MOD_RES (17)..(18)..(19)..(20)..(21): Xaa is A or G
  MOD_RES (22)..(23)..(24)..(25): Xaa is A or G or absent
AXXVPTKLSSLSVLFFXXXXXXXXXLKVYPEGMSVAEXG

SEQ ID NO: 25091 - protein, 38 aa, Artificial Sequence
  Non-cyclic GFR-binding peptide
  MOD_RES (4)..(5): Xaa is C or S
  MOD_RES (19)..(20)..(21)..(22)..(23): Xaa is A or G
  MOD_RES (24)..(25)..(26)..(27): Xaa is A or G or absent
PKPXXAPTQLSSLSVLFFXXXXXXXXXLKVYPNMVVRA

SEQ ID NO: 25092 - protein, 38 aa, Artificial Sequence
  Non-cyclic GFR-binding peptide
  MOD_RES (2)..(3)..(37): Xaa is C or S
  MOD_RES (17)..(18)..(19)..(20)..(21): Xaa is A or G
  MOD_RES (22)..(23)..(24)..(25): Xaa is A or G or absent
AXXAPTKLSSLSVLFFXXXXXXXXXLKVYPNMVVKAXG

SEQ ID NO: 25093 - protein, 36 aa, Artificial Sequence
  Non-cyclic GFR-binding peptide
  MOD_RES (1)..(2)..(34)..(36): Xaa is C or S
XXAPTKLSSLSVLFFDSSNNVILKVYPNMVVKAXGX

SEQ ID NO: 25094 - protein, 37 aa, Artificial Sequence
  Non-cyclic GFR-binding peptide
  MOD_RES (2)..(3)..(35)..(37): Xaa is C or S
SXXVPARLSSLSILFFDAANNVVLKVYPDMVVEAXGX

SEQ ID NO: 25095 - protein, 33 aa, Artificial Sequence
  Non-cyclic GFR-binding peptide
  MOD_RES (14)..(15)..(16)..(17)..(18): Xaa is A or G
  MOD_RES (19)..(20)..(21)..(22): Xaa is A or G or absent
VPTEESSLSMLFFXXXXXXXXXLKVYPFLQHNK

SEQ ID NO: 25096 - protein, 36 aa, Artificial Sequence
  Non-cyclic GFR-binding peptide
  MOD_RES (3)..(4)..(36): Xaa is C or S
ASXXVPARLSSLSILFFDAANNVVLKVYPDMVVEAX

SEQ ID NO: 25097 - protein, 42 aa, Artificial Sequence
  Non-cyclic GFR-binding peptide
  MOD_RES (6)..(7)..(39)..(41): Xaa is C or S
STPPTXXVPTRLSSLSILFFDSANNVVLKVYPDMVVESXGXR

SEQ ID NO: 25098 - protein, 43 aa, Artificial Sequence
  Non-cyclic GFR-binding peptide
  MOD_RES (7)..(41)..(43): Xaa is C or S
  MOD_RES (21)..(22)..(23)..(24)..(25): Xaa is A or G
  MOD_RES (26)..(27)..(28)..(29): Xaa is A or G or absent
NDEGLEXVPTEESSLSMLFFXXXXXXXXXLKVYPFLQHNKXEX

SEQ ID NO: 25099 - protein, 38 aa, Artificial Sequence
  Non-cyclic GFR-binding peptide
  MOD_RES (4)..(5)..(38): Xaa is C or S
GKAXXVPTKLSSLSVLFFDDMGVPTLKVYPEGMSVAEX

SEQ ID NO: 25100 - protein, 34 aa, Artificial Sequence
  Non-cyclic GFR-binding peptide
  MOD_RES (1)..(33): Xaa is C or S
XTPTKMSSLSMLFFNDKQQIILKVYPGMVVDRXG

SEQ ID NO: 25101 - protein, 33 aa, Artificial Sequence
  Non-cyclic GFR-binding peptide
SRVHHSSLSVLFFEYVRKKPKLLKVYPRLEEHL

SEQ ID NO: 25102 - protein, 41 aa, Artificial Sequence
  Non-cyclic GFR-binding peptide
  MOD_RES (5)..(6)..(40): Xaa is C or S
  MOD_RES (20)..(21)..(22)..(23)..(24): Xaa is A or G
  MOD_RES (25)..(26)..(27)..(28): Xaa is A or G or absent
TPPTXXVPTRLSSLSILFFXXXXXXXXXLKVYPDMVVESXG

SEQ ID NO: 25103 - protein, 37 aa, Artificial Sequence
  Non-cyclic GFR-binding peptide
  MOD_RES (3)..(4)..(37): Xaa is C or S
  MOD_RES (18)..(19)..(20)..(21)..(22): Xaa is A or G
  MOD_RES (23)..(24)..(25)..(26): Xaa is A or G or absent
STXXAPVKTSSLSMLFFXXXXXXXXXLKVYPMIVEEX

SEQ ID NO: 25104 - protein, 44 aa, Artificial Sequence
  Non-cyclic GFR-binding peptide
  MOD_RES (6)..(7)..(41)..(43): Xaa is C or S
  MOD_RES (21)..(22)..(23)..(24)..(25): Xaa is A or G
  MOD_RES (26)..(27)..(28)..(29): Xaa is A or G or absent
KIPKAXXVPTELSSLSMLFFXXXXXXXXXLKVYPDMVVEGXGXR

SEQ ID NO: 25105 - protein, 37 aa, Artificial Sequence
  Non-cyclic GFR-binding peptide
  MOD_RES (3)..(4): Xaa is C or S
  MOD_RES (18)..(19)..(20)..(21)..(22): Xaa is A or G
  MOD_RES (23)..(24)..(25)..(26): Xaa is A or G or absent
ASXXVPARLSSLSILFFXXXXXXXXXLKVYPDMVVEA

SEQ ID NO: 25106 - protein, 35 aa, Artificial Sequence
  Non-cyclic GFR-binding peptide
  MOD_RES (1)..(33)..(35): Xaa is C or S
XAPTKLSSLSVLFFDDSSNVILKVYPNMVVRSXGX

SEQ ID NO: 25107 - protein, 40 aa, Artificial Sequence
  Non-cyclic GFR-binding peptide
  MOD_RES (6)..(7)..(39): Xaa is C or S
AAPASXXVPARLSSLSILFFDAANNVVLKVYPDMVVEAXG

SEQ ID NO: 25108 - protein, 34 aa, Artificial Sequence
  Non-cyclic GFR-binding peptide
  MOD_RES (1)..(2)..(33): Xaa is C or S
XXAPVKTSSLSMLFFDNGRVLLLKVYPMIVEEXG

SEQ ID NO: 25109 - protein, 33 aa, Artificial Sequence
  Non-cyclic GFR-binding peptide
  MOD_RES (2)..(2): Xaa is C or S
TXAPTKLSSLSVLFFDDSSNVILKVYPNMVVRS

SEQ ID NO: 25110 - protein, 35 aa, Artificial Sequence
  Non-cyclic GFR-binding peptide
  MOD_RES (1)..(35): Xaa is C or S
  MOD_RES (15)..(16)..(17)..(18)..(19): Xaa is A or G
  MOD_RES (20)..(21)..(22)..(23): Xaa is A or G or absent
XAPTQLSSLSVLFFXXXXXXXXXLKVYPNMVVRAX

SEQ ID NO: 25111 - protein, 39 aa, Artificial Sequence
  Non-cyclic GFR-binding peptide
  MOD_RES (1)..(2)..(37)..(39): Xaa is C or S
  MOD_RES (16)..(17)..(18)..(19)..(20): Xaa is A or G
  MOD_RES (21)..(22)..(23)..(24): Xaa is A or G or absent
XXVPTKLSSLSVLFFXXXXXXXXXLKVYPEGMSVAEXGX

SEQ ID NO: 25112 - protein, 33 aa, Artificial Sequence
  Non-cyclic GFR-binding peptide
  MOD_RES (2)..(3): Xaa is C or S
PXXVPQDLSSLSILFFVGRTPKVLKVYPMVVKS

SEQ ID NO: 25113 - protein, 39 aa, Artificial Sequence
  Non-cyclic GFR-binding peptide
  MOD_RES (6)..(7)..(39): Xaa is C or S
SIPKAXXVPTELSSLSMLFFDEYDKVVLKVYPEMVVEGX

SEQ ID NO: 25114 - protein, 42 aa, Artificial Sequence
  Non-cyclic GFR-binding peptide
  MOD_RES (5)..(42): Xaa is C or S
  MOD_RES (21)..(22)..(23)..(24)..(25): Xaa is A or G
  MOD_RES (26)..(27)..(28)..(29): Xaa is A or G or absent
SSVKXQPSRVHHSSLSVLFFXXXXXXXXXLKVYPRLEEHLEX

SEQ ID NO: 25115 - protein, 36 aa, Artificial Sequence
  Non-cyclic GFR-binding peptide
  MOD_RES (1)..(35): Xaa is C or S
  MOD_RES (15)..(16)..(17)..(18)..(19): Xaa is A or G
  MOD_RES (20)..(21)..(22)..(23): Xaa is A or G or absent
XVPTELSSLSMLFFXXXXXXXXXLKVYPEMVVEGXG

SEQ ID NO: 25116 - protein, 37 aa, Artificial Sequence
  Non-cyclic GFR-binding peptide
  MOD_RES (4)..(5)..(36): Xaa is C or S
PSTXXAPVKTSSLSMLFFDNGRVLLLKVYPMIVEEXG

SEQ ID NO: 25117 - protein, 41 aa, Artificial Sequence
  Non-cyclic GFR-binding peptide
  MOD_RES (5)..(6)..(40): Xaa is C or S
  MOD_RES (20)..(21)..(22)..(23)..(24): Xaa is A or G
  MOD_RES (25)..(26)..(27)..(28): Xaa is A or G or absent
IPKAXXVPTELSSLSMLFFXXXXXXXXXLKVYPEMVVEGXG

SEQ ID NO: 25118 - protein, 36 aa, Artificial Sequence
  Non-cyclic GFR-binding peptide
  MOD_RES (3)..(4): Xaa is C or S
KAXXVPTKLSSLSVLFFDDMGVPTLKVYPEGMSVAE

SEQ ID NO: 25119 - protein, 36 aa, Artificial Sequence
  Non-cyclic GFR-binding peptide
  MOD_RES (2)..(3)..(35): Xaa is C or S
PXXAPTKLSSLSVLFFDDSSNVILKVYPNMVVRSXG

SEQ ID NO: 25120 - protein, 39 aa, Artificial Sequence
  Non-cyclic GFR-binding peptide
  MOD_RES (4)..(5)..(37)..(39): Xaa is C or S
PKPXXAPTKLSSLSVLFFDDSSNVILKVYPNMVVRSXGX

SEQ ID NO: 25121 - protein, 36 aa, Artificial Sequence
  Non-cyclic GFR-binding peptide
  MOD_RES (2)..(3)..(36): Xaa is C or S
  MOD_RES (17)..(18)..(19)..(20)..(21): Xaa is A or G
  MOD_RES (22)..(23)..(24)..(25): Xaa is A or G or absent
PXXVPQDLSSLSILFFXXXXXXXXXLKVYPMVVKSX

SEQ ID NO: 25122 - protein, 39 aa, Artificial Sequence
  Non-cyclic GFR-binding peptide
  MOD_RES (36)..(38): Xaa is C or S
PSRVHHSSLSVLFFEYVRKKPKLLKVYPRLEEHLEXAXA

SEQ ID NO: 25123 - protein, 37 aa, Artificial Sequence
  Non-cyclic GFR-binding peptide
  MOD_RES (5)..(5): Xaa is C or S
  MOD_RES (19)..(20)..(21)..(22)..(23): Xaa is A or G
  MOD_RES (24)..(25)..(26)..(27): Xaa is A or G or absent
EGLEXVPTEESSLSMLFFXXXXXXXXXLKVYPFLQHN

SEQ ID NO: 25124 - protein, 32 aa, Artificial Sequence
  Non-cyclic GFR-binding peptide
  MOD_RES (1)..(2): Xaa is C or S
XXAPTQLSSLSVLFFDDSSNVILKVYPNMVVR

SEQ ID NO: 25125 - protein, 31 aa, Artificial Sequence
  Non-cyclic GFR-binding peptide
  MOD_RES (1)..(1): Xaa is C or S
XVPTKLSSLSILFFDKGVVTYLKVYPGMAVS

SEQ ID NO: 25126 - protein, 36 aa, Artificial Sequence
  Non-cyclic GFR-binding peptide
QPSRVHHSSLSVLFFEYVRKKPKLLKVYPRLEEHLE

SEQ ID NO: 25127 - protein, 34 aa, Artificial Sequence
  Non-cyclic GFR-binding peptide
  MOD_RES (1)..(1): Xaa is C or S
  MOD_RES (15)..(16)..(17)..(18)..(19): Xaa is A or G
  MOD_RES (20)..(21)..(22)..(23): Xaa is A or G or absent
XAPTKLSSLSVLFFXXXXXXXXXLKVYPNMVVRS

SEQ ID NO: 25128 - protein, 36 aa, Artificial Sequence
  Non-cyclic GFR-binding peptide
  MOD_RES (3)..(4): Xaa is C or S
  MOD_RES (18)..(19)..(20)..(21)..(22): Xaa is A or G
  MOD_RES (23)..(24)..(25)..(26): Xaa is A or G or absent
APXXVPQALSSLSILFFXXXXXXXXXLKVYPMIVRS

SEQ ID NO: 25129 - protein, 38 aa, Artificial Sequence
  Non-cyclic GFR-binding peptide
  MOD_RES (4)..(5): Xaa is C or S
  MOD_RES (19)..(20)..(21)..(22)..(23): Xaa is A or G
  MOD_RES (24)..(25)..(26)..(27): Xaa is A or G or absent
AGPXXTPTKMSSLSMLFFXXXXXXXXXLKVYPGMVVDR

SEQ ID NO: 25130 - protein, 43 aa, Artificial Sequence
  Non-cyclic GFR-binding peptide
  MOD_RES (4)..(5)..(40)..(42): Xaa is C or S
  MOD_RES (19)..(20)..(21)..(22)..(23): Xaa is A or G
  MOD_RES (24)..(25)..(26)..(27): Xaa is A or G or absent
GKAXXVPTKLSSLSVLFFXXXXXXXXXLKVYPEGMSVAEXGXR

SEQ ID NO: 25131 - protein, 40 aa, Artificial Sequence
  Non-cyclic GFR-binding peptide
  MOD_RES (6)..(7)..(39): Xaa is C or S
GSAGPXXTPTKMSSLSMLFFNDKQQIILKVYPGMVVDRXG

SEQ ID NO: 25132 - protein, 41 aa, Artificial Sequence
  Non-cyclic GFR-binding peptide
  MOD_RES (6)..(7)..(40): Xaa is C or S
  MOD_RES (21)..(22)..(23)..(24)..(25): Xaa is A or G
  MOD_RES (26)..(27)..(28)..(29): Xaa is A or G or absent
ASASPXXVSQDLSSLSILFFXXXXXXXXXLKVYPMIVKSXK

SEQ ID NO: 25133 - protein, 32 aa, Artificial Sequence
  Non-cyclic GFR-binding peptide
  MOD_RES (32)..(32): Xaa is C or S
APTKLSSLSVLFFDDSSNVILKVYPNMVVRSX

SEQ ID NO: 25134 - protein, 33 aa, Artificial Sequence
  Non-cyclic GFR-binding peptide
  MOD_RES (1)..(2): Xaa is C or S
XXAPTKLSSLSVLFFDSSNNVILKVYPNMVVKA

SEQ ID NO: 25135 - protein, 32 aa, Artificial Sequence
  Non-cyclic GFR-binding peptide
  MOD_RES (14)..(15)..(16)..(17)..(18): Xaa is A or G
  MOD_RES (19)..(20)..(21)..(22): Xaa is A or G or absent
VPTELSSLSMLFFXXXXXXXXXLKVYPEMVVE

SEQ ID NO: 25136 - protein, 39 aa, Artificial Sequence
  Non-cyclic GFR-binding peptide
  MOD_RES (5)..(6): Xaa is C or S
  MOD_RES (20)..(21)..(22)..(23)..(24): Xaa is A or G
  MOD_RES (25)..(26)..(27)..(28): Xaa is A or G or absent
ASKAXXVPTKLSSLSILFFXXXXXXXXXLKVYPGMAVSE

SEQ ID NO: 25137 - protein, 36 aa, Artificial Sequence
  Non-cyclic GFR-binding peptide
  MOD_RES (5)..(5): Xaa is C or S
TKPTXAPTKLSSLSVLFFDDSSNVILKVYPNMVVRS

SEQ ID NO: 25138 - protein, 34 aa, Artificial Sequence
  Non-cyclic GFR-binding peptide
  MOD_RES (2)..(2): Xaa is C or S
EXVPTEESSLSMLFFRIKPHQGQHLKVYPFLQHN

SEQ ID NO: 25139 - protein, 40 aa, Artificial Sequence
  Non-cyclic GFR-binding peptide
  MOD_RES (5)..(39): Xaa is C or S
  MOD_RES (19)..(20)..(21)..(22)..(23): Xaa is A or G
  MOD_RES (24)..(25)..(26)..(27): Xaa is A or G or absent
EGLEXVPTEESSLSMLFFXXXXXXXXXLKVYPFLQHNKXE

SEQ ID NO: 25140 - protein, 32 aa, Artificial Sequence
  Non-cyclic GFR-binding peptide
  MOD_RES (1)..(2): Xaa is C or S
XXAPVKTSSLSMLFFDNGRVLLLKVYPMIVEE

SEQ ID NO: 25141 - protein, 40 aa, Artificial Sequence
  Non-cyclic GFR-binding peptide
  MOD_RES (2)..(3)..(37)..(39): Xaa is C or S
  MOD_RES (17)..(18)..(19)..(20)..(21): Xaa is A or G
  MOD_RES (22)..(23)..(24)..(25): Xaa is A or G or absent
AXXVPTKLSSLSILFFXXXXXXXXXLKVYPGMAVSEXGXR

SEQ ID NO: 25142 - protein, 36 aa, Artificial Sequence
  Non-cyclic GFR-binding peptide
  MOD_RES (3)..(4): Xaa is C or S
  MOD_RES (18)..(19)..(20)..(21)..(22): Xaa is A or G
  MOD_RES (23)..(24)..(25)..(26): Xaa is A or G or absent
KAXXAPTKLSSLSVLFFXXXXXXXXXLKVYPNMVVK

SEQ ID NO: 25143 - protein, 36 aa, Artificial Sequence
  Non-cyclic GFR-binding peptide
  MOD_RES (1)..(35): Xaa is C or S
  MOD_RES (15)..(16)..(17)..(18)..(19): Xaa is A or G
  MOD_RES (20)..(21)..(22)..(23): Xaa is A or G or absent
XVPARLSSLSILFFXXXXXXXXXLKVYPDMVVEAXG

SEQ ID NO: 25144 - protein, 37 aa, Artificial Sequence
  Non-cyclic GFR-binding peptide
  MOD_RES (4)..(5)..(37): Xaa is C or S
AGPXXTPTKMSSLSMLFFNDKQQIILKVYPGMVVDRX

SEQ ID NO: 25145 - protein, 41 aa, Artificial Sequence
  Non-cyclic GFR-binding peptide
  MOD_RES (5)..(6)..(39)..(41): Xaa is C or S
  MOD_RES (20)..(21)..(22)..(23)..(24): Xaa is A or G
  MOD_RES (25)..(26)..(27)..(28): Xaa is A or G or absent
VPSTXXAPVKTSSLSMLFFXXXXXXXXXLKVYPMIVEEXGX

SEQ ID NO: 25146 - protein, 42 aa, Artificial Sequence
  Non-cyclic GFR-binding peptide
  MOD_RES (6)..(7)..(39)..(41): Xaa is C or S
SIPKAXXVPTELSSLSMLFFDEYDKVVLKVYPEMVVEGXGXR

SEQ ID NO: 25147 - protein, 36 aa, Artificial Sequence
  Non-cyclic GFR-binding peptide
  MOD_RES (33)..(35): Xaa is C or S
  MOD_RES (14)..(15)..(16)..(17)..(18): Xaa is A or G
  MOD_RES (19)..(20)..(21)..(22): Xaa is A or G or absent
VPQALSSLSILFFXXXXXXXXXLKVYPMIVRSXKXS

SEQ ID NO: 25148 - protein, 40 aa, Artificial Sequence
  Non-cyclic GFR-binding peptide
  MOD_RES (2)..(3)..(37)..(39): Xaa is C or S
  MOD_RES (17)..(18)..(19)..(20)..(21): Xaa is A or G
  MOD_RES (22)..(23)..(24)..(25): Xaa is A or G or absent
TXXVPTRLSSLSILFFXXXXXXXXXLKVYPDMVVESXGXR

SEQ ID NO: 25149 - protein, 39 aa, Artificial Sequence
  Non-cyclic GFR-binding peptide
  MOD_RES (4)..(5)..(38): Xaa is C or S
  MOD_RES (19)..(20)..(21)..(22)..(23): Xaa is A or G
  MOD_RES (24)..(25)..(26)..(27): Xaa is A or G or absent
PSTXXAPVKTSSLSMLFFXXXXXXXXXLKVYPMIVEEXG

SEQ ID NO: 25150 - protein, 38 aa, Artificial Sequence
  Non-cyclic GFR-binding peptide
  MOD_RES (1)..(2)..(36)..(38): Xaa is C or S
  MOD_RES (16)..(17)..(18)..(19)..(20): Xaa is A or G
  MOD_RES (21)..(22)..(23)..(24): Xaa is A or G or absent
XXTPTKMSSLSMLFFXXXXXXXXXLKVYPGMVVDRXGX

SEQ ID NO: 25151 - protein, 34 aa, Artificial Sequence
  Non-cyclic GFR-binding peptide
  MOD_RES (2)..(3)..(34): Xaa is C or S
PXXVSQDLSSLSILFFIGKTPKILKVYPMIVKSX

SEQ ID NO: 25152 - protein, 34 aa, Artificial Sequence
  Non-cyclic GFR-binding peptide
  MOD_RES (1)..(32)..(34): Xaa is C or S
XAPVKTSSLSMLFFDNGRVLLLKVYPMIVEEXGX

SEQ ID NO: 25153 - protein, 34 aa, Artificial Sequence
  Non-cyclic GFR-binding peptide
  MOD_RES (34)..(34): Xaa is C or S
  MOD_RES (14)..(15)..(16)..(17)..(18): Xaa is A or G
  MOD_RES (19)..(20)..(21)..(22): Xaa is A or G or absent
VPTKLSSLSILFFXXXXXXXXXLKVYPGMAVSEX

SEQ ID NO: 25154 - protein, 35 aa, Artificial Sequence
  Non-cyclic GFR-binding peptide
  MOD_RES (4)..(5): Xaa is C or S
ASPXXVSQDLSSLSILFFIGKTPKILKVYPMIVKS

SEQ ID NO: 25155 - protein, 42 aa, Artificial Sequence
  Non-cyclic GFR-binding peptide
  MOD_RES (6)..(7)..(41): Xaa is C or S
  MOD_RES (21)..(22)..(23)..(24)..(25): Xaa is A or G
  MOD_RES (26)..(27)..(28)..(29): Xaa is A or G or absent
YVPKPXXAPTKLSSLSVLFFXXXXXXXXXLKVYPNMVVRSXG

SEQ ID NO: 25156 - protein, 34 aa, Artificial Sequence
  Non-cyclic GFR-binding peptide
  MOD_RES (2)..(3): Xaa is C or S
AXXVPTKLSSLSILFFDKGVVTYLKVYPGMAVSE

SEQ ID NO: 25157 - protein, 35 aa, Artificial Sequence
  Non-cyclic GFR-binding peptide
  MOD_RES (2)..(3): Xaa is C or S
  MOD_RES (17)..(18)..(19)..(20)..(21): Xaa is A or G
  MOD_RES (22)..(23)..(24)..(25): Xaa is A or G or absent
AXXAPTKLSSLSVLFFXXXXXXXXXLKVYPNMVVK

SEQ ID NO: 25158 - protein, 39 aa, Artificial Sequence
  Non-cyclic GFR-binding peptide
  MOD_RES (2)..(36)..(38): Xaa is C or S
  MOD_RES (16)..(17)..(18)..(19)..(20): Xaa is A or G
  MOD_RES (21)..(22)..(23)..(24): Xaa is A or G or absent
EXVPTEESSLSMLFFXXXXXXXXXLKVYPFLQHNKXEXR

SEQ ID NO: 25159 - protein, 42 aa, Artificial Sequence
  Non-cyclic GFR-binding peptide
  MOD_RES (5)..(6)..(40)..(42): Xaa is C or S
  MOD_RES (20)..(21)..(22)..(23)..(24): Xaa is A or G
  MOD_RES (25)..(26)..(27)..(28): Xaa is A or G or absent
ASKAXXVPTKLSSLSILFFXXXXXXXXXLKVYPGMAVSEXGX

SEQ ID NO: 25160 - protein, 33 aa, Artificial Sequence
  Non-cyclic GFR-binding peptide
  MOD_RES (33)..(33): Xaa is C or S
  MOD_RES (14)..(15)..(16)..(17)..(18): Xaa is A or G
  MOD_RES (19)..(20)..(21)..(22): Xaa is A or G or absent
APVKTSSLSMLFFXXXXXXXXXLKVYPMIVEEX

SEQ ID NO: 25161 - protein, 38 aa, Artificial Sequence
  Non-cyclic GFR-binding peptide
  MOD_RES (5)..(5): Xaa is C or S
  MOD_RES (19)..(20)..(21)..(22)..(23): Xaa is A or G
  MOD_RES (24)..(25)..(26)..(27): Xaa is A or G or absent
EGLEXVPTEESSLSMLFFXXXXXXXXXLKVYPFLQHNK

SEQ ID NO: 25162 - protein, 39 aa, Artificial Sequence
  Non-cyclic GFR-binding peptide
  MOD_RES (2)..(36)..(38): Xaa is C or S
EXVPTEESSLSMLFFRIKPHQGQHLKVYPFLQHNKXEXR

SEQ ID NO: 25163 - protein, 37 aa, Artificial Sequence
  Non-cyclic GFR-binding peptide
  MOD_RES (5)..(6)..(37): Xaa is C or S
SASPXXVSQDLSSLSILFFIGKTPKILKVYPMIVKSX

SEQ ID NO: 25164 - protein, 39 aa, Artificial Sequence
  Non-cyclic GFR-binding peptide
  MOD_RES (5)..(37)..(39): Xaa is C or S
TKPTXAPTKLSSLSVLFFDDSSNVILKVYPNMVVRSXGX

SEQ ID NO: 25165 - protein, 38 aa, Artificial Sequence
  Non-cyclic GFR-binding peptide
  MOD_RES (6)..(7): Xaa is C or S
GSAGPXXTPTKMSSLSMLFFNDKQQIILKVYPGMVVDR

SEQ ID NO: 25166 - protein, 32 aa, Artificial Sequence
  Non-cyclic GFR-binding peptide
  MOD_RES (32)..(32): Xaa is C or S
VPTKLSSLSILFFDKGVVTYLKVYPGMAVSEX

SEQ ID NO: 25167 - protein, 34 aa, Artificial Sequence
  Non-cyclic GFR-binding peptide
  MOD_RES (1)..(2)..(34): Xaa is C or S
XXAPTQLSSLSVLFFDDSSNVILKVYPNMVVRAX

SEQ ID NO: 25168 - protein, 37 aa, Artificial Sequence
  Non-cyclic GFR-binding peptide
  MOD_RES (4)..(5): Xaa is C or S
  MOD_RES (19)..(20)..(21)..(22)..(23): Xaa is A or G
  MOD_RES (24)..(25)..(26)..(27): Xaa is A or G or absent
PKPXXAPTKLSSLSVLFFXXXXXXXXXLKVYPNMVVR

SEQ ID NO: 25169 - protein, 36 aa, Artificial Sequence
  Non-cyclic GFR-binding peptide
  MOD_RES (4)..(5): Xaa is C or S
PKPXXAPTKLSSLSVLFFDDSSNVILKVYPNMVVRS

SEQ ID NO: 25170 - protein, 38 aa, Artificial Sequence
  Non-cyclic GFR-binding peptide
  MOD_RES (3)..(3): Xaa is C or S
  MOD_RES (19)..(20)..(21)..(22)..(23): Xaa is A or G
  MOD_RES (24)..(25)..(26)..(27): Xaa is A or G or absent
VKXQPSRVHHSSLSVLFFXXXXXXXXXLKVYPRLEEHL

SEQ ID NO: 25171 - protein, 35 aa, Artificial Sequence
  Non-cyclic GFR-binding peptide
  MOD_RES (2)..(3): Xaa is C or S
AXXVPTKLSSLSVLFFDDMGVPTLKVYPEGMSVAE

SEQ ID NO: 25172 - protein, 31 aa, Artificial Sequence
  Non-cyclic GFR-binding peptide
TPTKMSSLSMLFFNDKQQIILKVYPGMVVDR

SEQ ID NO: 25173 - protein, 35 aa, Artificial Sequence
  Non-cyclic GFR-binding peptide
  MOD_RES (1)..(32)..(34): Xaa is C or S
XVPQALSSLSILFFVGRKPKVLKVYPMIVRSXKXS

SEQ ID NO: 25174 - protein, 32 aa, Artificial Sequence
  Non-cyclic GFR-binding peptide
  MOD_RES (32)..(32): Xaa is C or S
VPTRLSSLSILFFDSANNVVLKVYPDMVVESX

SEQ ID NO: 25175 - protein, 38 aa, Artificial Sequence
  Non-cyclic GFR-binding peptide
  MOD_RES (5)..(6): Xaa is C or S
  MOD_RES (20)..(21)..(22)..(23)..(24): Xaa is A or G
  MOD_RES (25)..(26)..(27)..(28): Xaa is A or G or absent
IPKAXXVPTELSSLSMLFFXXXXXXXXXLKVYPEMVVE

SEQ ID NO: 25176 - protein, 40 aa, Artificial Sequence
  Non-cyclic GFR-binding peptide
  MOD_RES (6)..(7): Xaa is C or S
  MOD_RES (21)..(22)..(23)..(24)..(25): Xaa is A or G
  MOD_RES (26)..(27)..(28)..(29): Xaa is A or G or absent
AAPASXXVPARLSSLSILFFXXXXXXXXXLKVYPDMVVEA

SEQ ID NO: 25177 - protein, 40 aa, Artificial Sequence
  Non-cyclic GFR-binding peptide
  MOD_RES (4)..(5)..(40): Xaa is C or S
  MOD_RES (19)..(20)..(21)..(22)..(23): Xaa is A or G
  MOD_RES (24)..(25)..(26)..(27): Xaa is A or G or absent
GKAXXVPTKLSSLSVLFFXXXXXXXXXLKVYPEGMSVAEX

SEQ ID NO: 25178 - protein, 40 aa, Artificial Sequence
  Non-cyclic GFR-binding peptide
  MOD_RES (6)..(7): Xaa is C or S
  MOD_RES (21)..(22)..(23)..(24)..(25): Xaa is A or G
  MOD_RES (26)..(27)..(28)..(29): Xaa is A or G or absent
HVPKPXXAPTKLSSLSVLFFXXXXXXXXXLKVYPNMVVRS

SEQ ID NO: 25179 - protein, 38 aa, Artificial Sequence
  Non-cyclic GFR-binding peptide
  MOD_RES (4)..(5)..(37): Xaa is C or S
SKAXXVPTKLSSLSILFFDKGVVTYLKVYPGMAVSEXG

SEQ ID NO: 25180 - protein, 35 aa, Artificial Sequence
  Non-cyclic GFR-binding peptide
  MOD_RES (3)..(4): Xaa is C or S
KAXXVPTELSSLSMLFFDEYDKVVLKVYPEMVVEG

SEQ ID NO: 25181 - protein, 36 aa, Artificial Sequence
  Non-cyclic GFR-binding peptide
  MOD_RES (1)..(2)..(33)..(35): Xaa is C or S
XXAPVKTSSLSMLFFDNGRVLLLKVYPMIVEEXGXL

SEQ ID NO: 25182 - protein, 39 aa, Artificial Sequence
  Non-cyclic GFR-binding peptide
  MOD_RES (3)..(4)..(36)..(38): Xaa is C or S
KAXXAPTKLSSLSVLFFDSSNNVILKVYPNMVVKAXGXH

SEQ ID NO: 25183 - protein, 36 aa, Artificial Sequence
  Non-cyclic GFR-binding peptide
  MOD_RES (1)..(2)..(34)..(36): Xaa is C or S
XXVPTELSSLSMLFFDEYDKVVLKVYPEMVVEGXGX

SEQ ID NO: 25184 - protein, 37 aa, Artificial Sequence
  Non-cyclic GFR-binding peptide
  MOD_RES (5)..(37): Xaa is C or S
TKPTXAPTKLSSLSVLFFDDSSNVILKVYPNMVVRSX

SEQ ID NO: 25185 - protein, 38 aa, Artificial Sequence
  Non-cyclic GFR-binding peptide
  MOD_RES (1)..(2)..(36)..(38): Xaa is C or S
  MOD_RES (16)..(17)..(18)..(19)..(20): Xaa is A or G
  MOD_RES (21)..(22)..(23)..(24): Xaa is A or G or absent
XXAPTQLSSLSVLFFXXXXXXXXXLKVYPNMVVRAXGX

SEQ ID NO: 25186 - protein, 41 aa, Artificial Sequence
  Non-cyclic GFR-binding peptide
  MOD_RES (6)..(7)..(41): Xaa is C or S
  MOD_RES (21)..(22)..(23)..(24)..(25): Xaa is A or G
  MOD_RES (26)..(27)..(28)..(29): Xaa is A or G or absent
YVPKPXXAPTKLSSLSVLFFXXXXXXXXXLKVYPNMVVRSX

SEQ ID NO: 25187 - protein, 34 aa, Artificial Sequence
  Non-cyclic GFR-binding peptide
  MOD_RES (34)..(34): Xaa is C or S
  MOD_RES (14)..(15)..(16)..(17)..(18): Xaa is A or G
  MOD_RES (19)..(20)..(21)..(22): Xaa is A or G or absent
VPTRLSSLSILFFXXXXXXXXXLKVYPDMVVESX

SEQ ID NO: 25188 - protein, 36 aa, Artificial Sequence
  Non-cyclic GFR-binding peptide
  MOD_RES (1)..(33)..(35): Xaa is C or S
XTPTKMSSLSMLFFNDKQQIILKVYPGMVVDRXGXS

SEQ ID NO: 25189 - protein, 33 aa, Artificial Sequence
  Non-cyclic GFR-binding peptide
  MOD_RES (1)..(33): Xaa is C or S
XAPTKLSSLSVLFFDSSNNVILKVYPNMVVKAX

SEQ ID NO: 25190 - protein, 43 aa, Artificial Sequence
  Non-cyclic GFR-binding peptide
  MOD_RES (6)..(7)..(41)..(43): Xaa is C or S
  MOD_RES (21)..(22)..(23)..(24)..(25): Xaa is A or G
  MOD_RES (26)..(27)..(28)..(29): Xaa is A or G or absent
GSAGPXXTPTKMSSLSMLFFXXXXXXXXXLKVYPGMVVDRXGX

SEQ ID NO: 25191 - protein, 35 aa, Artificial Sequence
  Non-cyclic GFR-binding peptide
  MOD_RES (32)..(34): Xaa is C or S
VPTELSSLSMLFFDEYDKVVLKVYPEMVVEGXGXR

SEQ ID NO: 25192 - protein, 38 aa, Artificial Sequence
  Non-cyclic GFR-binding peptide
  MOD_RES (37)..(37): Xaa is C or S
QPSRVHHSSLSVLFFEYVRKKPKLLKVYPRLEEHLEXA

SEQ ID NO: 25193 - protein, 35 aa, Artificial Sequence
  Non-cyclic GFR-binding peptide
  MOD_RES (1)..(1): Xaa is C or S
  MOD_RES (15)..(16)..(17)..(18)..(19): Xaa is A or G
  MOD_RES (20)..(21)..(22)..(23): Xaa is A or G or absent
XVPTKLSSLSVLFFXXXXXXXXXLKVYPEGMSVAE

SEQ ID NO: 25194 - protein, 38 aa, Artificial Sequence
  Non-cyclic GFR-binding peptide
  MOD_RES (3)..(37): Xaa is C or S
  MOD_RES (17)..(18)..(19)..(20)..(21): Xaa is A or G
  MOD_RES (22)..(23)..(24)..(25): Xaa is A or G or absent
LEXVPTEESSLSMLFFXXXXXXXXXLKVYPFLQHNKXE

SEQ ID NO: 25195 - protein, 36 aa, Artificial Sequence
  Non-cyclic GFR-binding peptide
  MOD_RES (2)..(3)..(35): Xaa is C or S
AXXAPTKLSSLSVLFFDSSNNVILKVYPNMVVKAXG

SEQ ID NO: 25196 - protein, 38 aa, Artificial Sequence
  Non-cyclic GFR-binding peptide
  MOD_RES (5)..(6)..(37): Xaa is C or S
SASPXXVSQDLSSLSILFFIGKTPKILKVYPMIVKSXK

SEQ ID NO: 25197 - protein, 33 aa, Artificial Sequence
  Non-cyclic GFR-binding peptide
  MOD_RES (1)..(1): Xaa is C or S
  MOD_RES (15)..(16)..(17)..(18)..(19): Xaa is A or G
  MOD_RES (20)..(21)..(22)..(23): Xaa is A or G or absent
XVPTEESSLSMLFFXXXXXXXXXLKVYPFLQHN

SEQ ID NO: 25198 - protein, 39 aa, Artificial Sequence
  Non-cyclic GFR-binding peptide
  MOD_RES (6)..(38): Xaa is C or S
VTKPTXAPTKLSSLSVLFFDDSSNVILKVYPNMVVRSXG

SEQ ID NO: 25199 - protein, 34 aa, Artificial Sequence
  Non-cyclic GFR-binding peptide
  MOD_RES (2)..(34): Xaa is C or S
TXAPTKLSSLSVLFFDDSSNVILKVYPNMVVRSX

SEQ ID NO: 25200 - protein, 40 aa, Artificial Sequence
  Non-cyclic GFR-binding peptide
  MOD_RES (3)..(40): Xaa is C or S
VKXQPSRVHHSSLSVLFFEYVRKKPKLLKVYPRLEEHLEX

SEQ ID NO: 25201 - protein, 37 aa, Artificial Sequence
  Non-cyclic GFR-binding peptide
  MOD_RES (2)..(34)..(36): Xaa is C or S
TXAPTKLSSLSVLFFDDSSNVILKVYPNMVVRSXGXH

SEQ ID NO: 25202 - protein, 40 aa, Artificial Sequence
  Non-cyclic GFR-binding peptide
  MOD_RES (4)..(5)..(37)..(39): Xaa is C or S
AGPXXTPTKMSSLSMLFFNDKQQIILKVYPGMVVDRXGXS

SEQ ID NO: 25203 - protein, 40 aa, Artificial Sequence
  Non-cyclic GFR-binding peptide
  MOD_RES (5)..(6): Xaa is C or S
  MOD_RES (20)..(21)..(22)..(23)..(24): Xaa is A or G
  MOD_RES (25)..(26)..(27)..(28): Xaa is A or G or absent
VGKAXXVPTKLSSLSVLFFXXXXXXXXXLKVYPEGMSVAE

SEQ ID NO: 25204 - protein, 32 aa, Artificial Sequence
  Non-cyclic GFR-binding peptide
  MOD_RES (14)..(15)..(16)..(17)..(18): Xaa is A or G
  MOD_RES (19)..(20)..(21)..(22): Xaa is A or G or absent
VPTEESSLSMLFFXXXXXXXXXLKVYPFLQHN

SEQ ID NO: 25205 - protein, 35 aa, Artificial Sequence
  Non-cyclic GFR-binding peptide
  MOD_RES (1)..(34): Xaa is C or S
  MOD_RES (15)..(16)..(17)..(18)..(19): Xaa is A or G
  MOD_RES (20)..(21)..(22)..(23): Xaa is A or G or absent
XVPQALSSLSILFFXXXXXXXXXLKVYPMIVRSXK

SEQ ID NO: 25206 - protein, 37 aa, Artificial Sequence
  Non-cyclic GFR-binding peptide
  MOD_RES (3)..(4): Xaa is C or S
  MOD_RES (18)..(19)..(20)..(21)..(22): Xaa is A or G
  MOD_RES (23)..(24)..(25)..(26): Xaa is A or G or absent
PTXXVPTRLSSLSILFFXXXXXXXXXLKVYPDMVVES

SEQ ID NO: 25207 - protein, 35 aa, Artificial Sequence
  Non-cyclic GFR-binding peptide
  MOD_RES (2)..(3): Xaa is C or S
  MOD_RES (17)..(18)..(19)..(20)..(21): Xaa is A or G
  MOD_RES (22)..(23)..(24)..(25): Xaa is A or G or absent
SXXVPARLSSLSILFFXXXXXXXXXLKVYPDMVVE

SEQ ID NO: 25208 - protein, 39 aa, Artificial Sequence
  Non-cyclic GFR-binding peptide
  MOD_RES (6)..(7): Xaa is C or S
KVGKAXXVPTKLSSLSVLFFDDMGVPTLKVYPEGMSVAE

SEQ ID NO: 25209 - protein, 36 aa, Artificial Sequence
  Non-cyclic GFR-binding peptide
  MOD_RES (3)..(4): Xaa is C or S
  MOD_RES (18)..(19)..(20)..(21)..(22): Xaa is A or G
  MOD_RES (23)..(24)..(25)..(26): Xaa is A or G or absent
STXXAPVKTSSLSMLFFXXXXXXXXXLKVYPMIVEE

SEQ ID NO: 25210 - protein, 35 aa, Artificial Sequence
  Non-cyclic GFR-binding peptide
  MOD_RES (3)..(3): Xaa is C or S
  MOD_RES (17)..(18)..(19)..(20)..(21): Xaa is A or G
  MOD_RES (22)..(23)..(24)..(25): Xaa is A or G or absent
PTXAPTKLSSLSVLFFXXXXXXXXXLKVYPNMVVR

SEQ ID NO: 25211 - protein, 32 aa, Artificial Sequence
  Non-cyclic GFR-binding peptide
  MOD_RES (1)..(2): Xaa is C or S
XXVPTELSSLSMLFFDEYDKVVLKVYPEMVVE

SEQ ID NO: 25212 - protein, 34 aa, Artificial Sequence
  Non-cyclic GFR-binding peptide
  MOD_RES (3)..(4): Xaa is C or S
KPXXAPTQLSSLSVLFFDDSSNVILKVYPNMVVR

SEQ ID NO: 25213 - protein, 39 aa, Artificial Sequence
  Non-cyclic GFR-binding peptide
  MOD_RES (1)..(2)..(36)..(38): Xaa is C or S
  MOD_RES (16)..(17)..(18)..(19)..(20): Xaa is A or G
  MOD_RES (21)..(22)..(23)..(24): Xaa is A or G or absent
XXVPTRLSSLSILFFXXXXXXXXXLKVYPDMVVESXGXR

SEQ ID NO: 25214 - protein, 37 aa, Artificial Sequence
  Non-cyclic GFR-binding peptide
  MOD_RES (3)..(4): Xaa is C or S
  MOD_RES (18)..(19)..(20)..(21)..(22): Xaa is A or G
  MOD_RES (23)..(24)..(25)..(26): Xaa is A or G or absent
KAXXVPTKLSSLSILFFXXXXXXXXXLKVYPGMAVSE

SEQ ID NO: 25215 - protein, 44 aa, Artificial Sequence
  Non-cyclic GFR-binding peptide
  MOD_RES (6)..(7)..(41)..(43): Xaa is C or S
  MOD_RES (21)..(22)..(23)..(24)..(25): Xaa is A or G
  MOD_RES (26)..(27)..(28)..(29): Xaa is A or G or absent
STPPTXXVPTRLSSLSILFFXXXXXXXXXLKVYPDMVVESXGXR

SEQ ID NO: 25216 - protein, 37 aa, Artificial Sequence
  Non-cyclic GFR-binding peptide
  MOD_RES (34)..(36): Xaa is C or S
  MOD_RES (14)..(15)..(16)..(17)..(18): Xaa is A or G
  MOD_RES (19)..(20)..(21)..(22): Xaa is A or G or absent
VPARLSSLSILFFXXXXXXXXXLKVYPDMVVEAXGXR

SEQ ID NO: 25217 - protein, 35 aa, Artificial Sequence
  Non-cyclic GFR-binding peptide
  MOD_RES (1)..(33)..(35): Xaa is C or S
XTPTKMSSLSMLFFNDKQQIILKVYPGMVVDRXGX

SEQ ID NO: 25218 - protein, 31 aa, Artificial Sequence
  Non-cyclic GFR-binding peptide
  MOD_RES (31)..(31): Xaa is C or S
VSQDLSSLSILFFIGKTPKILKVYPMIVKSX

SEQ ID NO: 25219 - protein, 32 aa, Artificial Sequence
  Non-cyclic GFR-binding peptide
  MOD_RES (31)..(31): Xaa is C or S
VSQDLSSLSILFFIGKTPKILKVYPMIVKSXK

SEQ ID NO: 25220 - protein, 30 aa, Artificial Sequence; identical to SEQ ID NO: 764
  Non-cyclic GFR-binding peptide

SEQ ID NO: 25221 - protein, 32 aa, Artificial Sequence
  Non-cyclic GFR-binding peptide
  MOD_RES (1)..(1): Xaa is C or S
XVPARLSSLSILFFDAANNVVLKVYPDMVVEA

SEQ ID NO: 25222 - protein, 39 aa, Artificial Sequence
  Non-cyclic GFR-binding peptide
  MOD_RES (6)..(7): Xaa is C or S
  MOD_RES (21)..(22)..(23)..(24)..(25): Xaa is A or G
  MOD_RES (26)..(27)..(28)..(29): Xaa is A or G or absent
AVPKAXXAPTKLSSLSVLFFXXXXXXXXXLKVYPNMVVK

SEQ ID NO: 25223 - protein, 39 aa, Artificial Sequence
  Non-cyclic GFR-binding peptide
  MOD_RES (2)..(3)..(37)..(39): Xaa is C or S
  MOD_RES (17)..(18)..(19)..(20)..(21): Xaa is A or G
  MOD_RES (22)..(23)..(24)..(25): Xaa is A or G or absent
PXXAPTKLSSLSVLFFXXXXXXXXXLKVYPNMVVRSXGX

SEQ ID NO: 25224 - protein, 36 aa, Artificial Sequence
  Non-cyclic GFR-binding peptide
  MOD_RES (4)..(5)..(36): Xaa is C or S
ASPXXVPQDLSSLSILFFVGRTPKVLKVYPMVVKSX

SEQ ID NO: 25225 - protein, 35 aa, Artificial Sequence
  Non-cyclic GFR-binding peptide
  MOD_RES (1)..(2)..(33)..(35): Xaa is C or S
XXVSQDLSSLSILFFIGKTPKILKVYPMIVKSXKX

SEQ ID NO: 25226 - protein, 36 aa, Artificial Sequence
  Non-cyclic GFR-binding peptide
  MOD_RES (2)..(2): Xaa is C or S
KXQPSRVHHSSLSVLFFEYVRKKPKLLKVYPRLEEH

SEQ ID NO: 25227 - protein, 39 aa, Artificial Sequence
  Non-cyclic GFR-binding peptide
  MOD_RES (3)..(3): Xaa is C or S
  MOD_RES (19)..(20)..(21)..(22)..(23): Xaa is A or G
  MOD_RES (24)..(25)..(26)..(27): Xaa is A or G or absent
VKXQPSRVHHSSLSVLFFXXXXXXXXXLKVYPRLEEHLE

SEQ ID NO: 25228 - protein, 37 aa, Artificial Sequence
  Non-cyclic GFR-binding peptide
  MOD_RES (2)..(3)..(37): Xaa is C or S
  MOD_RES (17)..(18)..(19)..(20)..(21): Xaa is A or G
  MOD_RES (22)..(23)..(24)..(25): Xaa is A or G or absent
AXXVPTELSSLSMLFFXXXXXXXXXLKVYPEMVVEGX

SEQ ID NO: 25229 - protein, 38 aa, Artificial Sequence
  Non-cyclic GFR-binding peptide
  MOD_RES (4)..(5)..(37): Xaa is C or S
PKPXXAPTQLSSLSVLFFDDSSNVILKVYPNMVVRAXG

SEQ ID NO: 25230 - protein, 33 aa, Artificial Sequence
  Non-cyclic GFR-binding peptide
  MOD_RES (1)..(32): Xaa is C or S
XVPQALSSLSILFFVGRKPKVLKVYPMIVRSXK

SEQ ID NO: 25231 - protein, 38 aa, Artificial Sequence
  Non-cyclic GFR-binding peptide
  MOD_RES (2)..(3)..(37): Xaa is C or S
  MOD_RES (17)..(18)..(19)..(20)..(21): Xaa is A or G
  MOD_RES (22)..(23)..(24)..(25): Xaa is A or G or absent
PXXAPTQLSSLSVLFFXXXXXXXXXLKVYPNMVVRAXG

SEQ ID NO: 25232 - protein, 37 aa, Artificial Sequence
  Non-cyclic GFR-binding peptide
  MOD_RES (1)..(35)..(37): Xaa is C or S
  MOD_RES (15)..(16)..(17)..(18)..(19): Xaa is A or G
  MOD_RES (20)..(21)..(22)..(23): Xaa is A or G or absent
XAPTKLSSLSVLFFXXXXXXXXXLKVYPNMVVRSXGX

SEQ ID NO: 25233 - protein, 37 aa, Artificial Sequence
  Non-cyclic GFR-binding peptide
  MOD_RES (5)..(6): Xaa is C or S
VPKPXXAPTQLSSLSVLFFDDSSNVILKVYPNMVVRA

SEQ ID NO: 25234 - protein, 42 aa, Artificial Sequence
  Non-cyclic GFR-binding peptide
  MOD_RES (2)..(39)..(41): Xaa is C or S
KXQPSRVHHSSLSVLFFEYVRKKPKLLKVYPRLEEHLEXAXA

SEQ ID NO: 25235 - protein, 32 aa, Artificial Sequence
  Non-cyclic GFR-binding peptide
  MOD_RES (31)..(31): Xaa is C or S
VPQDLSSLSILFFVGRTPKVLKVYPMVVKSXK

SEQ ID NO: 25236 - protein, 38 aa, Artificial Sequence
  Non-cyclic GFR-binding peptide
  MOD_RES (2)..(3)..(37): Xaa is C or S
  MOD_RES (17)..(18)..(19)..(20)..(21): Xaa is A or G
  MOD_RES (22)..(23)..(24)..(25): Xaa is A or G or absent
SXXVPARLSSLSILFFXXXXXXXXXLKVYPDMVVEAXG

SEQ ID NO: 25237 - protein, 34 aa, Artificial Sequence
  Non-cyclic GFR-binding peptide
  MOD_RES (1)..(1): Xaa is C or S
  MOD_RES (15)..(16)..(17)..(18)..(19): Xaa is A or G
  MOD_RES (20)..(21)..(22)..(23): Xaa is A or G or absent
XAPTKLSSLSVLFFXXXXXXXXXLKVYPNMVVKA

SEQ ID NO: 25238 - protein, 40 aa, Artificial Sequence
  Non-cyclic GFR-binding peptide
  MOD_RES (4)..(5)..(37)..(39): Xaa is C or S
PPTXXVPTRLSSLSILFFDSANNVVLKVYPDMVVESXGXR

SEQ ID NO: 25239 - protein, 43 aa, Artificial Sequence
  Non-cyclic GFR-binding peptide
  MOD_RES (6)..(7)..(42): Xaa is C or S
  MOD_RES (21)..(22)..(23)..(24)..(25): Xaa is A or G
  MOD_RES (26)..(27)..(28)..(29): Xaa is A or G or absent
KVGKAXXVPTKLSSLSVLFFXXXXXXXXXLKVYPEGMSVAEXG

SEQ ID NO: 25240 - protein, 35 aa, Artificial Sequence
  Non-cyclic GFR-binding peptide
  MOD_RES (1)..(35): Xaa is C or S
XVPTEESSLSMLFFRIKPHQGQHLKVYPFLQHNKX

SEQ ID NO: 25241 - protein, 34 aa, Artificial Sequence
  Non-cyclic GFR-binding peptide
  MOD_RES (1)..(33): Xaa is C or S
XAPTKLSSLSVLFFDDSSNVILKVYPNMVVRSXG

SEQ ID NO: 25242 - protein, 40 aa, Artificial Sequence
  Non-cyclic GFR-binding peptide
  MOD_RES (5)..(6)..(40): Xaa is C or S
  MOD_RES (20)..(21)..(22)..(23)..(24): Xaa is A or G
  MOD_RES (25)..(26)..(27)..(28): Xaa is A or G or absent
APASXXVPARLSSLSILFFXXXXXXXXXLKVYPDMVVEAX

SEQ ID NO: 25243 - protein, 38 aa, Artificial Sequence
  Non-cyclic GFR-binding peptide
  MOD_RES (1)..(2)..(36)..(38): Xaa is C or S
  MOD_RES (16)..(17)..(18)..(19)..(20): Xaa is A or G
  MOD_RES (21)..(22)..(23)..(24): Xaa is A or G or absent
XXAPTKLSSLSVLFFXXXXXXXXXLKVYPNMVVKAXGX

SEQ ID NO: 25244 - protein, 37 aa, Artificial Sequence
  Non-cyclic GFR-binding peptide
  MOD_RES (5)..(6): Xaa is C or S
VPKAXXAPTKLSSLSVLFFDSSNNVILKVYPNMVVKA

SEQ ID NO: 25245 - protein, 40 aa, Artificial Sequence
  Non-cyclic GFR-binding peptide
  MOD_RES (5)..(6)..(38)..(40): Xaa is C or S
VPKAXXAPTKLSSLSVLFFDSSNNVILKVYPNMVVKAXGX

SEQ ID NO: 25246 - protein, 44 aa, Artificial Sequence
  Non-cyclic GFR-binding peptide
  MOD_RES (6)..(7)..(41)..(43): Xaa is C or S
  MOD_RES (21)..(22)..(23)..(24)..(25): Xaa is A or G
  MOD_RES (26)..(27)..(28)..(29): Xaa is A or G or absent
SIPKAXXVPTELSSLSMLFFXXXXXXXXXLKVYPEMVVEGXGXR

SEQ ID NO: 25247 - protein, 42 aa, Artificial Sequence
  Non-cyclic GFR-binding peptide
  MOD_RES (3)..(40)..(42): Xaa is C or S
  MOD_RES (19)..(20)..(21)..(22)..(23): Xaa is A or G
  MOD_RES (24)..(25)..(26)..(27): Xaa is A or G or absent
VKXQPSRVHHSSLSVLFFXXXXXXXXXLKVYPRLEEHLEXAX

SEQ ID NO: 25248 - protein, 33 aa, Artificial Sequence
  Non-cyclic GFR-binding peptide
  MOD_RES (33)..(33): Xaa is C or S
VPTKLSSLSVLFFDDMGVPTLKVYPEGMSVAEX

SEQ ID NO: 25249 - protein, 39 aa, Artificial Sequence
  Non-cyclic GFR-binding peptide
  MOD_RES (4)..(4): Xaa is C or S
SVKXQPSRVHHSSLSVLFFEYVRKKPKLLKVYPRLEEHL

SEQ ID NO: 25250 - protein, 36 aa, Artificial Sequence
  Non-cyclic GFR-binding peptide
  MOD_RES (16)..(17)..(18)..(19)..(20): Xaa is A or G
  MOD_RES (21)..(22)..(23)..(24): Xaa is A or G or absent
QPSRVHHSSLSVLFFXXXXXXXXXLKVYPRLEEHLE

SEQ ID NO: 25251 - protein, 36 aa, Artificial Sequence
  Non-cyclic GFR-binding peptide
  MOD_RES (5)..(6): Xaa is C or S
VPKPXXAPTQLSSLSVLFFDDSSNVILKVYPNMVVR

SEQ ID NO: 25252 - protein, 40 aa, Artificial Sequence
  Non-cyclic GFR-binding peptide
  MOD_RES (4)..(5)..(39): Xaa is C or S
  MOD_RES (19)..(20)..(21)..(22)..(23): Xaa is A or G
  MOD_RES (24)..(25)..(26)..(27): Xaa is A or G or absent
PKPXXAPTQLSSLSVLFFXXXXXXXXXLKVYPNMVVRAXG

SEQ ID NO: 25253 - protein, 34 aa, Artificial Sequence
  Non-cyclic GFR-binding peptide
  MOD_RES (32)..(34): Xaa is C or S
APTQLSSLSVLFFDDSSNVILKVYPNMVVRAXGX

SEQ ID NO: 25254 - protein, 32 aa, Artificial Sequence
  Non-cyclic GFR-binding peptide
  MOD_RES (1)..(2): Xaa is C or S
XXVPTKLSSLSILFFDKGVVTYLKVYPGMAVS

SEQ ID NO: 25255 - protein, 41 aa, Artificial Sequence
  Non-cyclic GFR-binding peptide
  MOD_RES (4)..(5)..(40): Xaa is C or S
  MOD_RES (19)..(20)..(21)..(22)..(23): Xaa is A or G
  MOD_RES (24)..(25)..(26)..(27): Xaa is A or G or absent
GKAXXVPTKLSSLSVLFFXXXXXXXXXLKVYPEGMSVAEXG

SEQ ID NO: 25256 - protein, 39 aa, Artificial Sequence
  Non-cyclic GFR-binding peptide
  MOD_RES (6)..(7)..(39): Xaa is C or S
YVPKPXXAPTKLSSLSVLFFDDSSNVILKVYPNMVVRSX

SEQ ID NO: 25257 - protein, 32 aa, Artificial Sequence
  Non-cyclic GFR-binding peptide
  MOD_RES (14)..(15)..(16)..(17)..(18): Xaa is A or G
  MOD_RES (19)..(20)..(21)..(22): Xaa is A or G or absent
VPTRLSSLSILFFXXXXXXXXXLKVYPDMVVE

SEQ ID NO: 25258 - protein, 36 aa, Artificial Sequence
  Non-cyclic GFR-binding peptide
  MOD_RES (1)..(36): Xaa is C or S
  MOD_RES (15)..(16)..(17)..(18)..(19): Xaa is A or G
  MOD_RES (20)..(21)..(22)..(23): Xaa is A or G or absent
XVPTKLSSLSVLFFXXXXXXXXXLKVYPEGMSVAEX

SEQ ID NO: 25259 - protein, 37 aa, Artificial Sequence
  Non-cyclic GFR-binding peptide
  MOD_RES (3)..(37): Xaa is C or S
  MOD_RES (17)..(18)..(19)..(20)..(21): Xaa is A or G
  MOD_RES (22)..(23)..(24)..(25): Xaa is A or G or absent
LEXVPTEESSLSMLFFXXXXXXXXXLKVYPFLQHNKX

SEQ ID NO: 25260 - protein, 35 aa, Artificial Sequence
  Non-cyclic GFR-binding peptide
  MOD_RES (5)..(5): Xaa is C or S
TKPTXAPTKLSSLSVLFFDDSSNVILKVYPNMVVR

SEQ ID NO: 25261 - protein, 38 aa, Artificial Sequence
  Non-cyclic GFR-binding peptide
  MOD_RES (3)..(4)..(37): Xaa is C or S
  MOD_RES (18)..(19)..(20)..(21)..(22): Xaa is A or G
  MOD_RES (23)..(24)..(25)..(26): Xaa is A or G or absent
APXXVPQALSSLSILFFXXXXXXXXXLKVYPMIVRSXK

SEQ ID NO: 25262 - protein, 40 aa, Artificial Sequence
  Non-cyclic GFR-binding peptide
  MOD_RES (1)..(2)..(37)..(39): Xaa is C or S
  MOD_RES (16)..(17)..(18)..(19)..(20): Xaa is A or G
  MOD_RES (21)..(22)..(23)..(24): Xaa is A or G or absent
XXVPTKLSSLSVLFFXXXXXXXXXLKVYPEGMSVAEXGXR

SEQ ID NO: 25263 - protein, 33 aa, Artificial Sequence
  Non-cyclic GFR-binding peptide
  MOD_RES (1)..(1): Xaa is C or S
  MOD_RES (15)..(16)..(17)..(18)..(19): Xaa is A or G
  MOD_RES (20)..(21)..(22)..(23): Xaa is A or G or absent
XVPTELSSLSMLFFXXXXXXXXXLKVYPEMVVE

SEQ ID NO: 25264 - protein, 42 aa, Artificial Sequence
  Non-cyclic GFR-binding peptide
  MOD_RES (6)..(7)..(41): Xaa is C or S
  MOD_RES (21)..(22)..(23)..(24)..(25): Xaa is A or G
  MOD_RES (26)..(27)..(28)..(29): Xaa is A or G or absent
TVPKPXXAPTQLSSLSVLFFXXXXXXXXXLKVYPNMVVRAXG

SEQ ID NO: 25265 - protein, 40 aa, Artificial Sequence
  Non-cyclic GFR-binding peptide
  MOD_RES (6)..(38)..(40): Xaa is C or S
VTKPTXAPTKLSSLSVLFFDDSSNVILKVYPNMVVRSXGX

SEQ ID NO: 25266 - protein, 41 aa, Artificial Sequence
  Non-cyclic GFR-binding peptide
  MOD_RES (3)..(40): Xaa is C or S
  MOD_RES (19)..(20)..(21)..(22)..(23): Xaa is A or G
  MOD_RES (24)..(25)..(26)..(27): Xaa is A or G or absent
VKXQPSRVHHSSLSVLFFXXXXXXXXXLKVYPRLEEHLEXA

SEQ ID NO: 25267 - protein, 40 aa, Artificial Sequence
  Non-cyclic GFR-binding peptide
  MOD_RES (6)..(7)..(38)..(40): Xaa is C or S
ASAAPXXVPQALSSLSILFFVGRKPKVLKVYPMIVRSXKX

SEQ ID NO: 25268 - protein, 41 aa, Artificial Sequence
  Non-cyclic GFR-binding peptide
  MOD_RES (4)..(5)..(39)..(41): Xaa is C or S
  MOD_RES (19)..(20)..(21)..(22)..(23): Xaa is A or G
  MOD_RES (24)..(25)..(26)..(27): Xaa is A or G or absent
PKAXXAPTKLSSLSVLFFXXXXXXXXXLKVYPNMVVKAXGX

SEQ ID NO: 25269 - protein, 34 aa, Artificial Sequence
  Non-cyclic GFR-binding peptide
  MOD_RES (34)..(34): Xaa is C or S
  MOD_RES (14)..(15)..(16)..(17)..(18): Xaa is A or G
  MOD_RES (19)..(20)..(21)..(22): Xaa is A or G or absent
VPARLSSLSILFFXXXXXXXXXLKVYPDMVVEAX

SEQ ID NO: 25270 - protein, 41 aa, Artificial Sequence
  Non-cyclic GFR-binding peptide
  MOD_RES (2)..(3)..(38)..(40): Xaa is C or S
  MOD_RES (17)..(18)..(19)..(20)..(21): Xaa is A or G
  MOD_RES (22)..(23)..(24)..(25): Xaa is A or G or absent
AXXVPTKLSSLSVLFFXXXXXXXXXLKVYPEGMSVAEXGXR

SEQ ID NO: 25271 - protein, 39 aa, Artificial Sequence
  Non-cyclic GFR-binding peptide
  MOD_RES (4)..(5)..(39): Xaa is C or S
  MOD_RES (19)..(20)..(21)..(22)..(23): Xaa is A or G
  MOD_RES (24)..(25)..(26)..(27): Xaa is A or G or absent
PKAXXAPTKLSSLSVLFFXXXXXXXXXLKVYPNMVVKAX

SEQ ID NO: 25272 - protein, 38 aa, Artificial Sequence
  Non-cyclic GFR-binding peptide
  MOD_RES (3)..(4)..(35)..(37): Xaa is C or S
APXXVPQALSSLSILFFVGRKPKVLKVYPMIVRSXKXS

SEQ ID NO: 25273 - protein, 35 aa, Artificial Sequence
  Non-cyclic GFR-binding peptide
  MOD_RES (1)..(2)..(34): Xaa is C or S
XXAPTQLSSLSVLFFDDSSNVILKVYPNMVVRAXG

SEQ ID NO: 25274 - protein, 37 aa, Artificial Sequence
  Non-cyclic GFR-binding peptide
  MOD_RES (34)..(36): Xaa is C or S
  MOD_RES (14)..(15)..(16)..(17)..(18): Xaa is A or G
  MOD_RES (19)..(20)..(21)..(22): Xaa is A or G or absent
VPTRLSSLSILFFXXXXXXXXXLKVYPDMVVESXGXR

SEQ ID NO: 25275 - protein, 38 aa, Artificial Sequence
  Non-cyclic GFR-binding peptide
  MOD_RES (3)..(4)..(36)..(38): Xaa is C or S
GPXXTPTKMSSLSMLFFNDKQQIILKVYPGMVVDRXGX

SEQ ID NO: 25276 - protein, 36 aa, Artificial Sequence
  Non-cyclic GFR-binding peptide
  MOD_RES (34)..(36): Xaa is C or S
  MOD_RES (14)..(15)..(16)..(17)..(18): Xaa is A or G
  MOD_RES (19)..(20)..(21)..(22): Xaa is A or G or absent
APTKLSSLSVLFFXXXXXXXXXLKVYPNMVVKAXGX

SEQ ID NO: 25277 - protein, 36 aa, Artificial Sequence
  Non-cyclic GFR-binding peptide
  MOD_RES (1)..(35): Xaa is C or S
  MOD_RES (15)..(16)..(17)..(18)..(19): Xaa is A or G
  MOD_RES (20)..(21)..(22)..(23): Xaa is A or G or absent
XAPTQLSSLSVLFFXXXXXXXXXLKVYPNMVVRAXG

SEQ ID NO: 25278 - protein, 33 aa, Artificial Sequence
  Non-cyclic GFR-binding peptide
  MOD_RES (1)..(2): Xaa is C or S
XXAPTQLSSLSVLFFDDSSNVILKVYPNMVVRA

SEQ ID NO: 25279 - protein, 37 aa, Artificial Sequence
  Non-cyclic GFR-binding peptide
  MOD_RES (1)..(2)..(35)..(37): Xaa is C or S
  MOD_RES (16)..(17)..(18)..(19)..(20): Xaa is A or G
  MOD_RES (21)..(22)..(23)..(24): Xaa is A or G or absent
XXAPVKTSSLSMLFFXXXXXXXXXLKVYPMIVEEXGX

SEQ ID NO: 25280 - protein, 39 aa, Artificial Sequence
  Non-cyclic GFR-binding peptide
  MOD_RES (6)..(6): Xaa is C or S
DEGLEXVPTEESSLSMLFFRIKPHQGQHLKVYPFLQHNK

SEQ ID NO: 25281 - protein, 38 aa, Artificial Sequence
  Non-cyclic GFR-binding peptide
  MOD_RES (35)..(37): Xaa is C or S
SRVHHSSLSVLFFEYVRKKPKLLKVYPRLEEHLEXAXA

SEQ ID NO: 25282 - protein, 36 aa, Artificial Sequence
  Non-cyclic GFR-binding peptide
  MOD_RES (4)..(5): Xaa is C or S
SKAXXVPTKLSSLSILFFDKGVVTYLKVYPGMAVSE

SEQ ID NO: 25283 - protein, 38 aa, Artificial Sequence
  Non-cyclic GFR-binding peptide
  MOD_RES (1)..(38): Xaa is C or S
  MOD_RES (17)..(18)..(19)..(20)..(21): Xaa is A or G
  MOD_RES (22)..(23)..(24)..(25): Xaa is A or G or absent
XQPSRVHHSSLSVLFFXXXXXXXXXLKVYPRLEEHLEX

SEQ ID NO: 25284 - protein, 33 aa, Artificial Sequence
  Non-cyclic GFR-binding peptide
  MOD_RES (33)..(33): Xaa is C or S
  MOD_RES (14)..(15)..(16)..(17)..(18): Xaa is A or G
  MOD_RES (19)..(20)..(21)..(22): Xaa is A or G or absent
VPQDLSSLSILFFXXXXXXXXXLKVYPMVVKSX

SEQ ID NO: 25285 - protein, 41 aa, Artificial Sequence
  Non-cyclic GFR-binding peptide
  MOD_RES (6)..(7)..(39)..(41): Xaa is C or S
AVPKAXXAPTKLSSLSVLFFDSSNNVILKVYPNMVVKAXGX

SEQ ID NO: 25286 - protein, 36 aa, Artificial Sequence
  Non-cyclic GFR-binding peptide
  MOD_RES (3)..(4)..(36): Xaa is C or S
KAXXVPTKLSSLSILFFDKGVVTYLKVYPGMAVSEX

SEQ ID NO: 25287 - protein, 41 aa, Artificial Sequence
  Non-cyclic GFR-binding peptide
  MOD_RES (3)..(4)..(39)..(41): Xaa is C or S
  MOD_RES (18)..(19)..(20)..(21)..(22): Xaa is A or G
  MOD_RES (23)..(24)..(25)..(26): Xaa is A or G or absent
KAXXVPTKLSSLSVLFFXXXXXXXXXLKVYPEGMSVAEXGX

SEQ ID NO: 25288 - protein, 41 aa, Artificial Sequence
  Non-cyclic GFR-binding peptide
  MOD_RES (6)..(7)..(38)..(40): Xaa is C or S
ASAAPXXVPQALSSLSILFFVGRKPKVLKVYPMIVRSXKXS

SEQ ID NO: 25289 - protein, 38 aa, Artificial Sequence
  Non-cyclic GFR-binding peptide
  MOD_RES (5)..(6)..(37): Xaa is C or S
SASPXXVPQDLSSLSILFFVGRTPKVLKVYPMVVKSXK

SEQ ID NO: 25290 - protein, 42 aa, Artificial Sequence
  Non-cyclic GFR-binding peptide
  MOD_RES (4)..(5)..(39)..(41): Xaa is C or S
  MOD_RES (19)..(20)..(21)..(22)..(23): Xaa is A or G
  MOD_RES (24)..(25)..(26)..(27): Xaa is A or G or absent
PPTXXVPTRLSSLSILFFXXXXXXXXXLKVYPDMVVESXGXR

SEQ ID NO: 25291 - protein, 41 aa, Artificial Sequence
  Non-cyclic GFR-binding peptide
  MOD_RES (6)..(7)..(40): Xaa is C or S
  MOD_RES (21)..(22)..(23)..(24)..(25): Xaa is A or G
  MOD_RES (26)..(27)..(28)..(29): Xaa is A or G or absent
ASASPXXVPQDLSSLSILFFXXXXXXXXXLKVYPMVVKSXK

SEQ ID NO: 25292 - protein, 35 aa, Artificial Sequence
  Non-cyclic GFR-binding peptide
  MOD_RES (4)..(5): Xaa is C or S
AAPXXVPQALSSLSILFFVGRKPKVLKVYPMIVRS

SEQ ID NO: 25293 - protein, 34 aa, Artificial Sequence
  Non-cyclic GFR-binding peptide
  MOD_RES (1)..(1): Xaa is C or S
  MOD_RES (15)..(16)..(17)..(18)..(19): Xaa is A or G
  MOD_RES (20)..(21)..(22)..(23): Xaa is A or G or absent
XAPTQLSSLSVLFFXXXXXXXXXLKVYPNMVVRA

SEQ ID NO: 25294 - protein, 36 aa, Artificial Sequence
  Non-cyclic GFR-binding peptide
  MOD_RES (4)..(4): Xaa is C or S
GLEXVPTEESSLSMLFFRIKPHQGQHLKVYPFLQHN

SEQ ID NO: 25295 - protein, 38 aa, Artificial Sequence
  Non-cyclic GFR-binding peptide
  MOD_RES (4)..(38): Xaa is C or S
  MOD_RES (18)..(19)..(20)..(21)..(22): Xaa is A or G
  MOD_RES (23)..(24)..(25)..(26): Xaa is A or G or absent
GLEXVPTEESSLSMLFFXXXXXXXXXLKVYPFLQHNKX

SEQ ID NO: 25296 - protein, 34 aa, Artificial Sequence
  Non-cyclic GFR-binding peptide
  MOD_RES (1)..(2)..(34): Xaa is C or S
XXVPTKLSSLSILFFDKGVVTYLKVYPGMAVSEX

SEQ ID NO: 25297 - protein, 35 aa, Artificial Sequence
  Non-cyclic GFR-binding peptide
  MOD_RES (2)..(3)..(35): Xaa is C or S
PXXTPTKMSSLSMLFFNDKQQIILKVYPGMVVDRX

SEQ ID NO: 25298 - protein, 33 aa, Artificial Sequence
  Non-cyclic GFR-binding peptide
  MOD_RES (1)..(1): Xaa is C or S
  MOD_RES (15)..(16)..(17)..(18)..(19): Xaa is A or G
  MOD_RES (20)..(21)..(22)..(23): Xaa is A or G or absent
XAPTQLSSLSVLFFXXXXXXXXXLKVYPNMVVR

SEQ ID NO: 25299 - protein, 37 aa, Artificial Sequence
  Non-cyclic GFR-binding peptide
  MOD_RES (35)..(37): Xaa is C or S
SRVHHSSLSVLFFEYVRKKPKLLKVYPRLEEHLEXAX

SEQ ID NO: 25300 - protein, 37 aa, Artificial Sequence
  Non-cyclic GFR-binding peptide
  MOD_RES (2)..(3)..(37): Xaa is C or S
  MOD_RES (17)..(18)..(19)..(20)..(21): Xaa is A or G
  MOD_RES (22)..(23)..(24)..(25): Xaa is A or G or absent
TXXVPTRLSSLSILFFXXXXXXXXXLKVYPDMVVESX

SEQ ID NO: 25301 - protein, 41 aa, Artificial Sequence
  Non-cyclic GFR-binding peptide
  MOD_RES (4)..(5)..(38)..(40): Xaa is C or S
  MOD_RES (19)..(20)..(21)..(22)..(23): Xaa is A or G
  MOD_RES (24)..(25)..(26)..(27): Xaa is A or G or absent
ASPXXVSQDLSSLSILFFXXXXXXXXXLKVYPMIVKSXKXS

SEQ ID NO: 25302 - protein, 40 aa, Artificial Sequence
  Non-cyclic GFR-binding peptide
  MOD_RES (3)..(4)..(38)..(40): Xaa is C or S
  MOD_RES (18)..(19)..(20)..(21)..(22): Xaa is A or G
  MOD_RES (23)..(24)..(25)..(26): Xaa is A or G or absent
GPXXTPTKMSSLSMLFFXXXXXXXXXLKVYPGMVVDRXGX

SEQ ID NO: 25303 - protein, 40 aa, Artificial Sequence
  Non-cyclic GFR-binding peptide
  MOD_RES (5)..(6)..(38)..(40): Xaa is C or S
SAGPXXTPTKMSSLSMLFFNDKQQIILKVYPGMVVDRXGX

SEQ ID NO: 25304 - protein, 36 aa, Artificial Sequence
  Non-cyclic GFR-binding peptide
  MOD_RES (2)..(3): Xaa is C or S
  MOD_RES (17)..(18)..(19)..(20)..(21): Xaa is A or G
  MOD_RES (22)..(23)..(24)..(25): Xaa is A or G or absent
SXXVPARLSSLSILFFXXXXXXXXXLKVYPDMVVEA

SEQ ID NO: 25305 - protein, 38 aa, Artificial Sequence
  Non-cyclic GFR-binding peptide
  MOD_RES (2)..(3)..(36)..(38): Xaa is C or S
  MOD_RES (17)..(18)..(19)..(20)..(21): Xaa is A or G
  MOD_RES (22)..(23)..(24)..(25): Xaa is A or G or absent
PXXVPQDLSSLSILFFXXXXXXXXXLKVYPMVVKSXKX

SEQ ID NO: 25306 - protein, 36 aa, Artificial Sequence
  Non-cyclic GFR-binding peptide
  MOD_RES (2)..(34)..(36): Xaa is C or S
TXAPTKLSSLSVLFFDDSSNVILKVYPNMVVRSXGX

SEQ ID NO: 25307 - protein, 34 aa, Artificial Sequence
  Non-cyclic GFR-binding peptide
  MOD_RES (31)..(33): Xaa is C or S
APVKTSSLSMLFFDNGRVLLLKVYPMIVEEXGXL

SEQ ID NO: 25308 - protein, 36 aa, Artificial Sequence
  Non-cyclic GFR-binding peptide
  MOD_RES (3)..(4)..(36): Xaa is C or S
PTXXVPTRLSSLSILFFDSANNVVLKVYPDMVVESX

SEQ ID NO: 25309 - protein, 40 aa, Artificial Sequence
  Non-cyclic GFR-binding peptide
  MOD_RES (4)..(5)..(39): Xaa is C or S
  MOD_RES (19)..(20)..(21)..(22)..(23): Xaa is A or G
  MOD_RES (24)..(25)..(26)..(27): Xaa is A or G or absent
AGPXXTPTKMSSLSMLFFXXXXXXXXXLKVYPGMVVDRXG

SEQ ID NO: 25310 - protein, 35 aa, Artificial Sequence
  Non-cyclic GFR-binding peptide
  MOD_RES (3)..(4): Xaa is C or S
GPXXTPTKMSSLSMLFFNDKQQIILKVYPGMVVDR

SEQ ID NO: 25311 - protein, 40 aa, Artificial Sequence
  Non-cyclic GFR-binding peptide
  MOD_RES (7)..(7): Xaa is C or S
  MOD_RES (21)..(22)..(23)..(24)..(25): Xaa is A or G
  MOD_RES (26)..(27)..(28)..(29): Xaa is A or G or absent
HVTKPTXAPTKLSSLSVLFFXXXXXXXXXLKVYPNMVVRS

SEQ ID NO: 25312 - protein, 36 aa, Artificial Sequence
  Non-cyclic GFR-binding peptide
  MOD_RES (2)..(3)..(34)..(36): Xaa is C or S
PXXVPQDLSSLSILFFVGRTPKVLKVYPMVVKSXKX

SEQ ID NO: 25313 - protein, 42 aa, Artificial Sequence
  Non-cyclic GFR-binding peptide
  MOD_RES (7)..(39)..(41): Xaa is C or S
HVTKPTXAPTKLSSLSVLFFDDSSNVILKVYPNMVVRSXGXH

SEQ ID NO: 25314 - protein, 39 aa, Artificial Sequence
  Non-cyclic GFR-binding peptide
  MOD_RES (6)..(7): Xaa is C or S
  MOD_RES (21)..(22)..(23)..(24)..(25): Xaa is A or G
  MOD_RES (26)..(27)..(28)..(29): Xaa is A or G or absent
ASASPXXVPQDLSSLSILFFXXXXXXXXXLKVYPMVVKS

SEQ ID NO: 25315 - protein, 38 aa, Artificial Sequence
  Non-cyclic GFR-binding peptide
  MOD_RES (5)..(6)..(38): Xaa is C or S
TPPTXXVPTRLSSLSILFFDSANNVVLKVYPDMVVESX

SEQ ID NO: 25316 - protein, 35 aa, Artificial Sequence
  Non-cyclic GFR-binding peptide
QPSRVHHSSLSVLFFEYVRKKPKLLKVYPRLEEHL

SEQ ID NO: 25317 - protein, 35 aa, Artificial Sequence
  Non-cyclic GFR-binding peptide
  MOD_RES (4)..(5): Xaa is C or S
AGPXXTPTKMSSLSMLFFNDKQQIILKVYPGMVVD

SEQ ID NO: 25318 - protein, 40 aa, Artificial Sequence
  Non-cyclic GFR-binding peptide
  MOD_RES (3)..(4)..(37)..(39): Xaa is C or S
  MOD_RES (18)..(19)..(20)..(21)..(22): Xaa is A or G
  MOD_RES (23)..(24)..(25)..(26): Xaa is A or G or absent
SPXXVSQDLSSLSILFFXXXXXXXXXLKVYPMIVKSXKXS

SEQ ID NO: 25319 - protein, 39 aa, Artificial Sequence
  Non-cyclic GFR-binding peptide
  MOD_RES (4)..(5)..(39): Xaa is C or S
  MOD_RES (19)..(20)..(21)..(22)..(23): Xaa is A or G
  MOD_RES (24)..(25)..(26)..(27): Xaa is A or G or absent
PKAXXVPTELSSLSMLFFXXXXXXXXXLKVYPEMVVEGX

SEQ ID NO: 25320 - protein, 36 aa, Artificial Sequence
  Non-cyclic GFR-binding peptide
  MOD_RES (1)..(1): Xaa is C or S
XQPSRVHHSSLSVLFFEYVRKKPKLLKVYPRLEEHL

SEQ ID NO: 25321 - protein, 40 aa, Artificial Sequence
  Non-cyclic GFR-binding peptide
  MOD_RES (4)..(5)..(39): Xaa is C or S
  MOD_RES (19)..(20)..(21)..(22)..(23): Xaa is A or G
  MOD_RES (24)..(25)..(26)..(27): Xaa is A or G or absent
PKAXXAPTKLSSLSVLFFXXXXXXXXXLKVYPNMVVKAXG

SEQ ID NO: 25322 - protein, 38 aa, Artificial Sequence
  Non-cyclic GFR-binding peptide
  MOD_RES (2)..(3)..(35)..(37): Xaa is C or S
SXXVPARLSSLSILFFDAANNVVLKVYPDMVVEAXGXR

SEQ ID NO: 25323 - protein, 34 aa, Artificial Sequence
  Non-cyclic GFR-binding peptide
  MOD_RES (1)..(34): Xaa is C or S
  MOD_RES (15)..(16)..(17)..(18)..(19): Xaa is A or G
  MOD_RES (20)..(21)..(22)..(23): Xaa is A or G or absent
XAPVKTSSLSMLFFXXXXXXXXXLKVYPMIVEEX

SEQ ID NO: 25324 - protein, 38 aa, Artificial Sequence
  Non-cyclic GFR-binding peptide
  MOD_RES (4)..(5)..(38): Xaa is C or S
  MOD_RES (19)..(20)..(21)..(22)..(23): Xaa is A or G
  MOD_RES (24)..(25)..(26)..(27): Xaa is A or G or absent
ASPXXVSQDLSSLSILFFXXXXXXXXXLKVYPMIVKSX

SEQ ID NO: 25325 - protein, 42 aa, Artificial Sequence
  Non-cyclic GFR-binding peptide
  MOD_RES (5)..(6)..(39)..(41): Xaa is C or S
VGKAXXVPTKLSSLSVLFFDDMGVPTLKVYPEGMSVAEXGXR

SEQ ID NO: 25326 - protein, 35 aa, Artificial Sequence
  Non-cyclic GFR-binding peptide
  MOD_RES (1)..(2): Xaa is C or S
  MOD_RES (16)..(17)..(18)..(19)..(20): Xaa is A or G
  MOD_RES (21)..(22)..(23)..(24): Xaa is A or G or absent
XXAPTKLSSLSVLFFXXXXXXXXXLKVYPNMVVRS

SEQ ID NO: 25327 - protein, 34 aa, Artificial Sequence
  Non-cyclic GFR-binding peptide
  MOD_RES (3)..(4): Xaa is C or S
KPXXAPTKLSSLSVLFFDDSSNVILKVYPNMVVR

SEQ ID NO: 25328 - protein, 35 aa, Artificial Sequence
  Non-cyclic GFR-binding peptide
  MOD_RES (1)..(32)..(34): Xaa is C or S
XVPQDLSSLSILFFVGRTPKVLKVYPMVVKSXKXS

SEQ ID NO: 25329 - protein, 40 aa, Artificial Sequence
  Non-cyclic GFR-binding peptide
  MOD_RES (2)..(3)..(37)..(39): Xaa is C or S
  MOD_RES (17)..(18)..(19)..(20)..(21): Xaa is A or G
  MOD_RES (22)..(23)..(24)..(25): Xaa is A or G or absent
PXXTPTKMSSLSMLFFXXXXXXXXXLKVYPGMVVDRXGXS

SEQ ID NO: 25330 - protein, 39 aa, Artificial Sequence
  Non-cyclic GFR-binding peptide
  MOD_RES (4)..(5): Xaa is C or S
  MOD_RES (19)..(20)..(21)..(22)..(23): Xaa is A or G
  MOD_RES (24)..(25)..(26)..(27): Xaa is A or G or absent
GKAXXVPTKLSSLSVLFFXXXXXXXXXLKVYPEGMSVAE

SEQ ID NO: 25331 - protein, 39 aa, Artificial Sequence
  Non-cyclic GFR-binding peptide
  MOD_RES (3)..(4)..(36)..(38): Xaa is C or S
KAXXVPTKLSSLSILFFDKGVVTYLKVYPGMAVSEXGXR

SEQ ID NO: 25332 - protein, 35 aa, Artificial Sequence
  Non-cyclic GFR-binding peptide
  MOD_RES (4)..(5): Xaa is C or S
PKAXXAPTKLSSLSVLFFDSSNNVILKVYPNMVVK

SEQ ID NO: 25333 - protein, 39 aa, Artificial Sequence
  Non-cyclic GFR-binding peptide
  MOD_RES (4)..(38): Xaa is C or S
GLEXVPTEESSLSMLFFRIKPHQGQHLKVYPFLQHNKXE

SEQ ID NO: 25334 - protein, 44 aa, Artificial Sequence
  Non-cyclic GFR-binding peptide
  MOD_RES (6)..(7)..(41)..(43): Xaa is C or S
  MOD_RES (21)..(22)..(23)..(24)..(25): Xaa is A or G
  MOD_RES (26)..(27)..(28)..(29): Xaa is A or G or absent
YVPKPXXAPTKLSSLSVLFFXXXXXXXXXLKVYPNMVVRSXGXH

SEQ ID NO: 25335 - protein, 40 aa, Artificial Sequence
  Non-cyclic GFR-binding peptide
  MOD_RES (5)..(6)..(40): Xaa is C or S
  MOD_RES (20)..(21)..(22)..(23)..(24): Xaa is A or G
  MOD_RES (25)..(26)..(27)..(28): Xaa is A or G or absent
VPKAXXAPTKLSSLSVLFFXXXXXXXXXLKVYPNMVVKAX

SEQ ID NO: 25336 - protein, 33 aa, Artificial Sequence
  Non-cyclic GFR-binding peptide
  MOD_RES (1)..(2): Xaa is C or S
XXTPTKMSSLSMLFFNDKQQIILKVYPGMVVDR

SEQ ID NO: 25337 - protein, 35 aa, Artificial Sequence
  Non-cyclic GFR-binding peptide
  MOD_RES (1)..(2)..(34): Xaa is C or S
XXVPARLSSLSILFFDAANNVVLKVYPDMVVEAXG

SEQ ID NO: 25338 - protein, 39 aa, Artificial Sequence
  Non-cyclic GFR-binding peptide
  MOD_RES (3)..(37)..(39): Xaa is C or S
LEXVPTEESSLSMLFFRIKPHQGQHLKVYPFLQHNKXEX

SEQ ID NO: 25339 - protein, 36 aa, Artificial Sequence
  Non-cyclic GFR-binding peptide
  MOD_RES (1)..(34)..(36): Xaa is C or S
  MOD_RES (15)..(16)..(17)..(18)..(19): Xaa is A or G
  MOD_RES (20)..(21)..(22)..(23): Xaa is A or G or absent
XAPVKTSSLSMLFFXXXXXXXXXLKVYPMIVEEXGX

SEQ ID NO: 25340 - protein, 39 aa, Artificial Sequence
  Non-cyclic GFR-binding peptide
  MOD_RES (7)..(39): Xaa is C or S
HVTKPTXAPTKLSSLSVLFFDDSSNVILKVYPNMVVRSX

SEQ ID NO: 25341 - protein, 35 aa, Artificial Sequence
  Non-cyclic GFR-binding peptide
  MOD_RES (2)..(3): Xaa is C or S
  MOD_RES (17)..(18)..(19)..(20)..(21): Xaa is A or G
  MOD_RES (22)..(23)..(24)..(25): Xaa is A or G or absent
PXXVPQALSSLSILFFXXXXXXXXXLKVYPMIVRS

SEQ ID NO: 25342 - protein, 35 aa, Artificial Sequence
  Non-cyclic GFR-binding peptide
  MOD_RES (1)..(2): Xaa is C or S
  MOD_RES (16)..(17)..(18)..(19)..(20): Xaa is A or G
  MOD_RES (21)..(22)..(23)..(24): Xaa is A or G or absent
XXAPTQLSSLSVLFFXXXXXXXXXLKVYPNMVVRA

SEQ ID NO: 25343 - protein, 36 aa, Artificial Sequence
  Non-cyclic GFR-binding peptide
  MOD_RES (1)..(2)..(35): Xaa is C or S
  MOD_RES (16)..(17)..(18)..(19)..(20): Xaa is A or G
  MOD_RES (21)..(22)..(23)..(24): Xaa is A or G or absent
XXVPQALSSLSILFFXXXXXXXXXLKVYPMIVRSXK

SEQ ID NO: 25344 - protein, 35 aa, Artificial Sequence
  Non-cyclic GFR-binding peptide
  MOD_RES (32)..(34): Xaa is C or S
TPTKMSSLSMLFFNDKQQIILKVYPGMVVDRXGXS

SEQ ID NO: 25345 - protein, 33 aa, Artificial Sequence
  Non-cyclic GFR-binding peptide
  MOD_RES (33)..(33): Xaa is C or S
  MOD_RES (14)..(15)..(16)..(17)..(18): Xaa is A or G
  MOD_RES (19)..(20)..(21)..(22): Xaa is A or G or absent
VSQDLSSLSILFFXXXXXXXXXLKVYPMIVKSX

SEQ ID NO: 25346 - protein, 41 aa, Artificial Sequence
  Non-cyclic GFR-binding peptide
  MOD_RES (4)..(5)..(38)..(40): Xaa is C or S
  MOD_RES (19)..(20)..(21)..(22)..(23): Xaa is A or G
  MOD_RES (24)..(25)..(26)..(27): Xaa is A or G or absent
PSTXXAPVKTSSLSMLFFXXXXXXXXXLKVYPMIVEEXGXL

SEQ ID NO: 25347 - protein, 34 aa, Artificial Sequence
  Non-cyclic GFR-binding peptide
  MOD_RES (16)..(17)..(18)..(19)..(20): Xaa is A or G
  MOD_RES (21)..(22)..(23)..(24): Xaa is A or G or absent
QPSRVHHSSLSVLFFXXXXXXXXXLKVYPRLEEH

SEQ ID NO: 25348 - protein, 40 aa, Artificial Sequence
  Non-cyclic GFR-binding peptide
  MOD_RES (6)..(7)..(39): Xaa is C or S
AVPKAXXAPTKLSSLSVLFFDSSNNVILKVYPNMVVKAXG

SEQ ID NO: 25349 - protein, 38 aa, Artificial Sequence
  Non-cyclic GFR-binding peptide
  MOD_RES (4)..(5): Xaa is C or S
  MOD_RES (19)..(20)..(21)..(22)..(23): Xaa is A or G
  MOD_RES (24)..(25)..(26)..(27): Xaa is A or G or absent
PKAXXVPTELSSLSMLFFXXXXXXXXXLKVYPEMVVEG

SEQ ID NO: 25350 - protein, 40 aa, Artificial Sequence
  Non-cyclic GFR-binding peptide
  MOD_RES (5)..(6)..(39): Xaa is C or S
  MOD_RES (20)..(21)..(22)..(23)..(24): Xaa is A or G
  MOD_RES (25)..(26)..(27)..(28): Xaa is A or G or absent
VPSTXXAPVKTSSLSMLFFXXXXXXXXXLKVYPMIVEEXG

SEQ ID NO: 25351 - protein, 37 aa, Artificial Sequence
  Non-cyclic GFR-binding peptide
  MOD_RES (3)..(4)..(36): Xaa is C or S
GPXXTPTKMSSLSMLFFNDKQQIILKVYPGMVVDRXG

SEQ ID NO: 25352 - protein, 36 aa, Artificial Sequence
  Non-cyclic GFR-binding peptide
  MOD_RES (2)..(3)..(36): Xaa is C or S
  MOD_RES (17)..(18)..(19)..(20)..(21): Xaa is A or G
  MOD_RES (22)..(23)..(24)..(25): Xaa is A or G or absent
PXXVSQDLSSLSILFFXXXXXXXXXLKVYPMIVKSX

SEQ ID NO: 25353 - protein, 36 aa, Artificial Sequence
  Non-cyclic GFR-binding peptide
  MOD_RES (1)..(33)..(35): Xaa is C or S
XVPTELSSLSMLFFDEYDKVVLKVYPEMVVEGXGXR

SEQ ID NO: 25354 - protein, 37 aa, Artificial Sequence
  Non-cyclic GFR-binding peptide
  MOD_RES (4)..(5): Xaa is C or S
  MOD_RES (19)..(20)..(21)..(22)..(23): Xaa is A or G
  MOD_RES (24)..(25)..(26)..(27): Xaa is A or G or absent
PASXXVPARLSSLSILFFXXXXXXXXXLKVYPDMVVE

SEQ ID NO: 25355 - protein, 37 aa, Artificial Sequence
  Non-cyclic GFR-binding peptide
  MOD_RES (2)..(3)..(37): Xaa is C or S
  MOD_RES (17)..(18)..(19)..(20)..(21): Xaa is A or G
  MOD_RES (22)..(23)..(24)..(25): Xaa is A or G or absent
PXXTPTKMSSLSMLFFXXXXXXXXXLKVYPGMVVDRX

SEQ ID NO: 25356 - protein, 42 aa, Artificial Sequence
  Non-cyclic GFR-binding peptide
  MOD_RES (5)..(39)..(41): Xaa is C or S
  MOD_RES (19)..(20)..(21)..(22)..(23): Xaa is A or G
  MOD_RES (24)..(25)..(26)..(27): Xaa is A or G or absent
TKPTXAPTKLSSLSVLFFXXXXXXXXXLKVYPNMVVRSXGXH

SEQ ID NO: 25357 - protein, 39 aa, Artificial Sequence
  Non-cyclic GFR-binding peptide
  MOD_RES (6)..(7)..(39): Xaa is C or S
AAPASXXVPARLSSLSILFFDAANNVVLKVYPDMVVEAX

SEQ ID NO: 25358 - protein, 37 aa, Artificial Sequence
  Non-cyclic GFR-binding peptide
  MOD_RES (4)..(5)..(37): Xaa is C or S
PKAXXVPTELSSLSMLFFDEYDKVVLKVYPEMVVEGX

SEQ ID NO: 25359 - protein, 40 aa, Artificial Sequence
  Non-cyclic GFR-binding peptide
  MOD_RES (4)..(5)..(39): Xaa is C or S
  MOD_RES (19)..(20)..(21)..(22)..(23): Xaa is A or G
  MOD_RES (24)..(25)..(26)..(27): Xaa is A or G or absent
PASXXVPARLSSLSILFFXXXXXXXXXLKVYPDMVVEAXG

SEQ ID NO: 25360 - protein, 39 aa, Artificial Sequence
  Non-cyclic GFR-binding peptide
  MOD_RES (5)..(6)..(39): Xaa is C or S
  MOD_RES (20)..(21)..(22)..(23)..(24): Xaa is A or G
  MOD_RES (25)..(26)..(27)..(28): Xaa is A or G or absent
SAAPXXVPQALSSLSILFFXXXXXXXXXLKVYPMIVRSX

SEQ ID NO: 25361 - protein, 39 aa, Artificial Sequence
  Non-cyclic GFR-binding peptide
  MOD_RES (3)..(4)..(38): Xaa is C or S
  MOD_RES (18)..(19)..(20)..(21)..(22): Xaa is A or G
  MOD_RES (23)..(24)..(25)..(26): Xaa is A or G or absent
KAXXVPTELSSLSMLFFXXXXXXXXXLKVYPEMVVEGXG

SEQ ID NO: 25362 - protein, 38 aa, Artificial Sequence
  Non-cyclic GFR-binding peptide
  MOD_RES (35)..(37): Xaa is C or S
  MOD_RES (14)..(15)..(16)..(17)..(18): Xaa is A or G
  MOD_RES (19)..(20)..(21)..(22): Xaa is A or G or absent
VPTKLSSLSVLFFXXXXXXXXXLKVYPEGMSVAEXGXR

SEQ ID NO: 25363 - protein, 37 aa, Artificial Sequence
  Non-cyclic GFR-binding peptide
  MOD_RES (2)..(3)..(35)..(37): Xaa is C or S
PXXAPTKLSSLSVLFFDDSSNVILKVYPNMVVRSXGX

SEQ ID NO: 25364 - protein, 39 aa, Artificial Sequence
  Non-cyclic GFR-binding peptide
  MOD_RES (5)..(6): Xaa is C or S
  MOD_RES (20)..(21)..(22)..(23)..(24): Xaa is A or G
  MOD_RES (25)..(26)..(27)..(28): Xaa is A or G or absent
APASXXVPARLSSLSILFFXXXXXXXXXLKVYPDMVVEA

SEQ ID NO: 25365 - protein, 37 aa, Artificial Sequence
  Non-cyclic GFR-binding peptide
  MOD_RES (4)..(4): Xaa is C or S
GLEXVPTEESSLSMLFFRIKPHQGQHLKVYPFLQHNK

SEQ ID NO: 25366 - protein, 39 aa, Artificial Sequence
  Non-cyclic GFR-binding peptide
  MOD_RES (5)..(6)..(38): Xaa is C or S
IPKAXXVPTELSSLSMLFFDEYDKVVLKVYPEMVVEGXG

SEQ ID NO: 25367 - protein, 32 aa, Artificial Sequence
  Non-cyclic GFR-binding peptide
  MOD_RES (14)..(15)..(16)..(17)..(18): Xaa is A or G
  MOD_RES (19)..(20)..(21)..(22): Xaa is A or G or absent
SRVHHSSLSVLFFXXXXXXXXXLKVYPRLEEH

SEQ ID NO: 25368 - protein, 35 aa, Artificial Sequence
  Non-cyclic GFR-binding peptide
  MOD_RES (1)..(35): Xaa is C or S
  MOD_RES (15)..(16)..(17)..(18)..(19): Xaa is A or G
  MOD_RES (20)..(21)..(22)..(23): Xaa is A or G or absent
XTPTKMSSLSMLFFXXXXXXXXXLKVYPGMVVDRX

SEQ ID NO: 25369 - protein, 38 aa, Artificial Sequence
  Non-cyclic GFR-binding peptide
  MOD_RES (4)..(5)..(36)..(38): Xaa is C or S
ASPXXVSQDLSSLSILFFIGKTPKILKVYPMIVKSXKX

SEQ ID NO: 25370 - protein, 35 aa, Artificial Sequence
  Non-cyclic GFR-binding peptide
  MOD_RES (2)..(3): Xaa is C or S
  MOD_RES (17)..(18)..(19)..(20)..(21): Xaa is A or G
  MOD_RES (22)..(23)..(24)..(25): Xaa is A or G or absent
PXXAPTQLSSLSVLFFXXXXXXXXXLKVYPNMVVR

SEQ ID NO: 25371 - protein, 39 aa, Artificial Sequence
  Non-cyclic GFR-binding peptide
  MOD_RES (4)..(5)..(39): Xaa is C or S
  MOD_RES (19)..(20)..(21)..(22)..(23): Xaa is A or G
  MOD_RES (24)..(25)..(26)..(27): Xaa is A or G or absent
SKAXXVPTKLSSLSILFFXXXXXXXXXLKVYPGMAVSEX

SEQ ID NO: 25372 - protein, 39 aa, Artificial Sequence
  Non-cyclic GFR-binding peptide
  MOD_RES (1)..(2)..(36)..(38): Xaa is C or S
  MOD_RES (16)..(17)..(18)..(19)..(20): Xaa is A or G
  MOD_RES (21)..(22)..(23)..(24): Xaa is A or G or absent
XXAPTKLSSLSVLFFXXXXXXXXXLKVYPNMVVRSXGXH

SEQ ID NO: 25373 - protein, 37 aa, Artificial Sequence
  Non-cyclic GFR-binding peptide
  MOD_RES (6)..(7): Xaa is C or S
HVPKPXXAPTKLSSLSVLFFDDSSNVILKVYPNMVVR

SEQ ID NO: 25374 - protein, 38 aa, Artificial Sequence
  Non-cyclic GFR-binding peptide
  MOD_RES (4)..(4): Xaa is C or S
  MOD_RES (20)..(21)..(22)..(23)..(24): Xaa is A or G
  MOD_RES (25)..(26)..(27)..(28): Xaa is A or G or absent
SVKXQPSRVHHSSLSVLFFXXXXXXXXXLKVYPRLEEH

SEQ ID NO: 25375 - protein, 30 aa, Artificial Sequence; identical to SEQ ID NO: 762
  Non-cyclic GFR-binding peptide

SEQ ID NO: 25376 - protein, 37 aa, Artificial Sequence
  Non-cyclic GFR-binding peptide
  MOD_RES (2)..(3)..(35)..(37): Xaa is C or S
PXXTPTKMSSLSMLFFNDKQQIILKVYPGMVVDRXGX

SEQ ID NO: 25377 - protein, 37 aa, Artificial Sequence
  Non-cyclic GFR-binding peptide
  MOD_RES (4)..(5)..(37): Xaa is C or S
PKAXXAPTKLSSLSVLFFDSSNNVILKVYPNMVVKAX

SEQ ID NO: 25378 - protein, 33 aa, Artificial Sequence
  Non-cyclic GFR-binding peptide
  MOD_RES (31)..(33): Xaa is C or S
VSQDLSSLSILFFIGKTPKILKVYPMIVKSXKX

SEQ ID NO: 25379 - protein, 35 aa, Artificial Sequence
  Non-cyclic GFR-binding peptide
  MOD_RES (34)..(34): Xaa is C or S
VPTEESSLSMLFFRIKPHQGQHLKVYPFLQHNKXE

SEQ ID NO: 25380 - protein, 35 aa, Artificial Sequence
  Non-cyclic GFR-binding peptide
  MOD_RES (2)..(3)..(34): Xaa is C or S
PXXVSQDLSSLSILFFIGKTPKILKVYPMIVKSXK

SEQ ID NO: 25381 - protein, 36 aa, Artificial Sequence
  Non-cyclic GFR-binding peptide
  MOD_RES (3)..(3): Xaa is C or S
  MOD_RES (17)..(18)..(19)..(20)..(21): Xaa is A or G
  MOD_RES (22)..(23)..(24)..(25): Xaa is A or G or absent
PTXAPTKLSSLSVLFFXXXXXXXXXLKVYPNMVVRS

SEQ ID NO: 25382 - protein, 33 aa, Artificial Sequence
  Non-cyclic GFR-binding peptide
  MOD_RES (32)..(32): Xaa is C or S
VPTRLSSLSILFFDSANNVVLKVYPDMVVESXG

SEQ ID NO: 25383 - protein, 36 aa, Artificial Sequence
  Non-cyclic GFR-binding peptide
  MOD_RES (5)..(6): Xaa is C or S
VPSTXXAPVKTSSLSMLFFDNGRVLLLKVYPMIVEE

SEQ ID NO: 25384 - protein, 41 aa, Artificial Sequence
  Non-cyclic GFR-binding peptide
  MOD_RES (5)..(6)..(38)..(40): Xaa is C or S
SAGPXXTPTKMSSLSMLFFNDKQQIILKVYPGMVVDRXGXS

SEQ ID NO: 25385 - protein, 37 aa, Artificial Sequence
  Non-cyclic GFR-binding peptide
  MOD_RES (36)..(36): Xaa is C or S
PSRVHHSSLSVLFFEYVRKKPKLLKVYPRLEEHLEXA

SEQ ID NO: 25386 - protein, 37 aa, Artificial Sequence
  Non-cyclic GFR-binding peptide
  MOD_RES (4)..(5): Xaa is C or S
  MOD_RES (19)..(20)..(21)..(22)..(23): Xaa is A or G
  MOD_RES (24)..(25)..(26)..(27): Xaa is A or G or absent
ASPXXVPQDLSSLSILFFXXXXXXXXXLKVYPMVVKS

SEQ ID NO: 25387 - protein, 35 aa, Artificial Sequence
  Non-cyclic GFR-binding peptide
  MOD_RES (1)..(2)..(34): Xaa is C or S
XXAPTKLSSLSVLFFDDSSNVILKVYPNMVVRSXG

SEQ ID NO: 25388 - protein, 38 aa, Artificial Sequence
  Non-cyclic GFR-binding peptide
  MOD_RES (4)..(5)..(38): Xaa is C or S
  MOD_RES (19)..(20)..(21)..(22)..(23): Xaa is A or G
  MOD_RES (24)..(25)..(26)..(27): Xaa is A or G or absent
PSTXXAPVKTSSLSMLFFXXXXXXXXXLKVYPMIVEEX

SEQ ID NO: 25389 - protein, 39 aa, Artificial Sequence
  Non-cyclic GFR-binding peptide
  MOD_RES (6)..(7): Xaa is C or S
  MOD_RES (21)..(22)..(23)..(24)..(25): Xaa is A or G
  MOD_RES (26)..(27)..(28)..(29): Xaa is A or G or absent
AAPASXXVPARLSSLSILFFXXXXXXXXXLKVYPDMVVE

SEQ ID NO: 25390 - protein, 38 aa, Artificial Sequence
  Non-cyclic GFR-binding peptide
  MOD_RES (3)..(4)..(36)..(38): Xaa is C or S
PTXXVPTRLSSLSILFFDSANNVVLKVYPDMVVESXGX

SEQ ID NO: 25391 - protein, 36 aa, Artificial Sequence
  Non-cyclic GFR-binding peptide
  MOD_RES (5)..(6): Xaa is C or S
VPKAXXAPTKLSSLSVLFFDSSNNVILKVYPNMVVK

SEQ ID NO: 25392 - protein, 33 aa, Artificial Sequence
  Non-cyclic GFR-binding peptide
  MOD_RES (1)..(2): Xaa is C or S
XXVPTELSSLSMLFFDEYDKVVLKVYPEMVVEG

SEQ ID NO: 25393 - protein, 39 aa, Artificial Sequence
  Non-cyclic GFR-binding peptide
  MOD_RES (5)..(6)..(39): Xaa is C or S
VGKAXXVPTKLSSLSVLFFDDMGVPTLKVYPEGMSVAEX

SEQ ID NO: 25394 - protein, 43 aa, Artificial Sequence
  Non-cyclic GFR-binding peptide
  MOD_RES (4)..(41)..(43): Xaa is C or S
SVKXQPSRVHHSSLSVLFFEYVRKKPKLLKVYPRLEEHLEXAX

SEQ ID NO: 25395 - protein, 37 aa, Artificial Sequence
  Non-cyclic GFR-binding peptide
  MOD_RES (5)..(6)..(37): Xaa is C or S
VPSTXXAPVKTSSLSMLFFDNGRVLLLKVYPMIVEEX

SEQ ID NO: 25396 - protein, 40 aa, Artificial Sequence
  Non-cyclic GFR-binding peptide
  MOD_RES (5)..(6)..(40): Xaa is C or S
  MOD_RES (20)..(21)..(22)..(23)..(24): Xaa is A or G
  MOD_RES (25)..(26)..(27)..(28): Xaa is A or G or absent
SAGPXXTPTKMSSLSMLFFXXXXXXXXXLKVYPGMVVDRX

SEQ ID NO: 25397 - protein, 36 aa, Artificial Sequence
  Non-cyclic GFR-binding peptide
  MOD_RES (2)..(3): Xaa is C or S
  MOD_RES (17)..(18)..(19)..(20)..(21): Xaa is A or G
  MOD_RES (22)..(23)..(24)..(25): Xaa is A or G or absent
PXXTPTKMSSLSMLFFXXXXXXXXXLKVYPGMVVDR

SEQ ID NO: 25398 - protein, 34 aa, Artificial Sequence
  Non-cyclic GFR-binding peptide
  MOD_RES (1)..(2): Xaa is C or S
  MOD_RES (16)..(17)..(18)..(19)..(20): Xaa is A or G
  MOD_RES (21)..(22)..(23)..(24): Xaa is A or G or absent
XXAPVKTSSLSMLFFXXXXXXXXXLKVYPMIVEE

SEQ ID NO: 25399 - protein, 36 aa, Artificial Sequence
  Non-cyclic GFR-binding peptide
  MOD_RES (4)..(5): Xaa is C or S
PASXXVPARLSSLSILFFDAANNVVLKVYPDMVVEA

SEQ ID NO: 25400 - protein, 34 aa, Artificial Sequence
  Non-cyclic GFR-binding peptide
  MOD_RES (32)..(34): Xaa is C or S
APTKLSSLSVLFFDSSNNVILKVYPNMVVKAXGX

SEQ ID NO: 25401 - protein, 43 aa, Artificial Sequence
  Non-cyclic GFR-binding peptide
  MOD_RES (6)..(7)..(40)..(42): Xaa is C or S
  MOD_RES (21)..(22)..(23)..(24)..(25): Xaa is A or G
  MOD_RES (26)..(27)..(28)..(29): Xaa is A or G or absent
ASAAPXXVPQALSSLSILFFXXXXXXXXXLKVYPMIVRSXKXS

SEQ ID NO: 25402 - protein, 34 aa, Artificial Sequence
  Non-cyclic GFR-binding peptide
  MOD_RES (1)..(32)..(34): Xaa is C or S
XVPQDLSSLSILFFVGRTPKVLKVYPMVVKSXKX

SEQ ID NO: 25403 - protein, 37 aa, Artificial Sequence
  Non-cyclic GFR-binding peptide
  MOD_RES (3)..(4): Xaa is C or S
  MOD_RES (18)..(19)..(20)..(21)..(22): Xaa is A or G
  MOD_RES (23)..(24)..(25)..(26): Xaa is A or G or absent
KPXXAPTQLSSLSVLFFXXXXXXXXXLKVYPNMVVRA

SEQ ID NO: 25404 - protein, 39 aa, Artificial Sequence
  Non-cyclic GFR-binding peptide
  MOD_RES (4)..(5)..(36)..(38): Xaa is C or S
ASPXXVPQDLSSLSILFFVGRTPKVLKVYPMVVKSXKXS

SEQ ID NO: 25405 - protein, 40 aa, Artificial Sequence
  Non-cyclic GFR-binding peptide
  MOD_RES (6)..(40): Xaa is C or S
DEGLEXVPTEESSLSMLFFRIKPHQGQHLKVYPFLQHNKX

SEQ ID NO: 25406 - protein, 36 aa, Artificial Sequence
  Non-cyclic GFR-binding peptide
  MOD_RES (2)..(3)..(35): Xaa is C or S
PXXTPTKMSSLSMLFFNDKQQIILKVYPGMVVDRXG

SEQ ID NO: 25407 - protein, 41 aa, Artificial Sequence
  Non-cyclic GFR-binding peptide
  MOD_RES (5)..(6)..(39)..(41): Xaa is C or S
VGKAXXVPTKLSSLSVLFFDDMGVPTLKVYPEGMSVAEXGX

SEQ ID NO: 25408 - protein, 34 aa, Artificial Sequence
  Non-cyclic GFR-binding peptide
  MOD_RES (1)..(32)..(34): Xaa is C or S
XVSQDLSSLSILFFIGKTPKILKVYPMIVKSXKX

SEQ ID NO: 25409 - protein, 42 aa, Artificial Sequence
  Non-cyclic GFR-binding peptide
  MOD_RES (7)..(41): Xaa is C or S
NDEGLEXVPTEESSLSMLFFRIKPHQGQHLKVYPFLQHNKXE

SEQ ID NO: 25410 - protein, 38 aa, Artificial Sequence
  Non-cyclic GFR-binding peptide
  MOD_RES (3)..(4)..(37): Xaa is C or S
  MOD_RES (18)..(19)..(20)..(21)..(22): Xaa is A or G
  MOD_RES (23)..(24)..(25)..(26): Xaa is A or G or absent
SPXXVSQDLSSLSILFFXXXXXXXXXLKVYPMIVKSXK

SEQ ID NO: 25411 - protein, 36 aa, Artificial Sequence
  Non-cyclic GFR-binding peptide
  MOD_RES (3)..(4): Xaa is C or S
  MOD_RES (18)..(19)..(20)..(21)..(22): Xaa is A or G
  MOD_RES (23)..(24)..(25)..(26): Xaa is A or G or absent
GPXXTPTKMSSLSMLFFXXXXXXXXXLKVYPGMVVD

SEQ ID NO: 25412 - protein, 41 aa, Artificial Sequence
  Non-cyclic GFR-binding peptide
  MOD_RES (6)..(7)..(41): Xaa is C or S
  MOD_RES (21)..(22)..(23)..(24)..(25): Xaa is A or G
  MOD_RES (26)..(27)..(28)..(29): Xaa is A or G or absent
HVPKPXXAPTKLSSLSVLFFXXXXXXXXXLKVYPNMVVRSX

SEQ ID NO: 25413 - protein, 41 aa, Artificial Sequence
  Non-cyclic GFR-binding peptide
  MOD_RES (4)..(5)..(39)..(41): Xaa is C or S
  MOD_RES (19)..(20)..(21)..(22)..(23): Xaa is A or G
  MOD_RES (24)..(25)..(26)..(27): Xaa is A or G or absent
SKAXXVPTKLSSLSILFFXXXXXXXXXLKVYPGMAVSEXGX

SEQ ID NO: 25414 - protein, 34 aa, Artificial Sequence
  Non-cyclic GFR-binding peptide
  MOD_RES (32)..(34): Xaa is C or S
VPTRLSSLSILFFDSANNVVLKVYPDMVVESXGX

SEQ ID NO: 25415 - protein, 38 aa, Artificial Sequence
  Non-cyclic GFR-binding peptide
  MOD_RES (2)..(3)..(37): Xaa is C or S
  MOD_RES (17)..(18)..(19)..(20)..(21): Xaa is A or G
  MOD_RES (22)..(23)..(24)..(25): Xaa is A or G or absent
TXXVPTRLSSLSILFFXXXXXXXXXLKVYPDMVVESXG

SEQ ID NO: 25416 - protein, 39 aa, Artificial Sequence
  Non-cyclic GFR-binding peptide
  MOD_RES (6)..(7)..(39): Xaa is C or S
KASKAXXVPTKLSSLSILFFDKGVVTYLKVYPGMAVSEX

SEQ ID NO: 25417 - protein, 35 aa, Artificial Sequence
  Non-cyclic GFR-binding peptide
  MOD_RES (1)..(2)..(34): Xaa is C or S
XXVPTKLSSLSILFFDKGVVTYLKVYPGMAVSEXG

SEQ ID NO: 25418 - protein, 41 aa, Artificial Sequence
  Non-cyclic GFR-binding peptide
  MOD_RES (6)..(7)..(41): Xaa is C or S
  MOD_RES (21)..(22)..(23)..(24)..(25): Xaa is A or G
  MOD_RES (26)..(27)..(28)..(29): Xaa is A or G or absent
AVPKAXXAPTKLSSLSVLFFXXXXXXXXXLKVYPNMVVKAX

SEQ ID NO: 25419 - protein, 39 aa, Artificial Sequence
  Non-cyclic GFR-binding peptide
  MOD_RES (3)..(37)..(39): Xaa is C or S
  MOD_RES (17)..(18)..(19)..(20)..(21): Xaa is A or G
  MOD_RES (22)..(23)..(24)..(25): Xaa is A or G or absent
PTXAPTKLSSLSVLFFXXXXXXXXXLKVYPNMVVRSXGX

SEQ ID NO: 25420 - protein, 35 aa, Artificial Sequence
  Non-cyclic GFR-binding peptide
  MOD_RES (34)..(34): Xaa is C or S
  MOD_RES (14)..(15)..(16)..(17)..(18): Xaa is A or G
  MOD_RES (19)..(20)..(21)..(22): Xaa is A or G or absent
VPTKLSSLSILFFXXXXXXXXXLKVYPGMAVSEXG

SEQ ID NO: 25421 - protein, 34 aa, Artificial Sequence
  Non-cyclic GFR-binding peptide
  MOD_RES (34)..(34): Xaa is C or S
  MOD_RES (14)..(15)..(16)..(17)..(18): Xaa is A or G
  MOD_RES (19)..(20)..(21)..(22): Xaa is A or G or absent
APTQLSSLSVLFFXXXXXXXXXLKVYPNMVVRAX

SEQ ID NO: 25422 - protein, 34 aa, Artificial Sequence
  Non-cyclic GFR-binding peptide
  MOD_RES (14)..(15)..(16)..(17)..(18): Xaa is A or G
  MOD_RES (19)..(20)..(21)..(22): Xaa is A or G or absent
VPTKLSSLSVLFFXXXXXXXXXLKVYPEGMSVAE

SEQ ID NO: 25423 - protein, 40 aa, Artificial Sequence
  Non-cyclic GFR-binding peptide
  MOD_RES (5)..(6)..(40): Xaa is C or S
  MOD_RES (20)..(21)..(22)..(23)..(24): Xaa is A or G
  MOD_RES (25)..(26)..(27)..(28): Xaa is A or G or absent
VPKPXXAPTQLSSLSVLFFXXXXXXXXXLKVYPNMVVRAX

SEQ ID NO: 25424 - protein, 40 aa, Artificial Sequence
  Non-cyclic GFR-binding peptide
  MOD_RES (5)..(6)..(37)..(39): Xaa is C or S
VPSTXXAPVKTSSLSMLFFDNGRVLLLKVYPMIVEEXGXL

SEQ ID NO: 25425 - protein, 37 aa, Artificial Sequence
  Non-cyclic GFR-binding peptide
  MOD_RES (1)..(1): Xaa is C or S
  MOD_RES (17)..(18)..(19)..(20)..(21): Xaa is A or G
  MOD_RES (22)..(23)..(24)..(25): Xaa is A or G or absent
XQPSRVHHSSLSVLFFXXXXXXXXXLKVYPRLEEHLE

SEQ ID NO: 25426 - protein, 38 aa, Artificial Sequence
  Non-cyclic GFR-binding peptide
  MOD_RES (4)..(5)..(38): Xaa is C or S
  MOD_RES (19)..(20)..(21)..(22)..(23): Xaa is A or G
  MOD_RES (24)..(25)..(26)..(27): Xaa is A or G or absent
ASPXXVPQDLSSLSILFFXXXXXXXXXLKVYPMVVKSX

SEQ ID NO: 25427 - protein, 41 aa, Artificial Sequence
  Non-cyclic GFR-binding peptide
  MOD_RES (6)..(7)..(40): Xaa is C or S
  MOD_RES (21)..(22)..(23)..(24)..(25): Xaa is A or G
  MOD_RES (26)..(27)..(28)..(29): Xaa is A or G or absent
RVPSTXXAPVKTSSLSMLFFXXXXXXXXXLKVYPMIVEEXG

SEQ ID NO: 25428 - protein, 36 aa, Artificial Sequence
  Non-cyclic GFR-binding peptide
  MOD_RES (34)..(36): Xaa is C or S
  MOD_RES (14)..(15)..(16)..(17)..(18): Xaa is A or G
  MOD_RES (19)..(20)..(21)..(22): Xaa is A or G or absent
APTQLSSLSVLFFXXXXXXXXXLKVYPNMVVRAXGX

SEQ ID NO: 25429 - protein, 42 aa, Artificial Sequence
  Non-cyclic GFR-binding peptide
  MOD_RES (4)..(5)..(39)..(41): Xaa is C or S
  MOD_RES (19)..(20)..(21)..(22)..(23): Xaa is A or G
  MOD_RES (24)..(25)..(26)..(27): Xaa is A or G or absent
PKPXXAPTKLSSLSVLFFXXXXXXXXXLKVYPNMVVRSXGXH

SEQ ID NO: 25430 - protein, 40 aa, Artificial Sequence
  Non-cyclic GFR-binding peptide
  MOD_RES (5)..(6)..(37)..(39): Xaa is C or S
SASPXXVSQDLSSLSILFFIGKTPKILKVYPMIVKSXKXS

SEQ ID NO: 25431 - protein, 38 aa, Artificial Sequence
  Non-cyclic GFR-binding peptide
  MOD_RES (3)..(37): Xaa is C or S
  MOD_RES (17)..(18)..(19)..(20)..(21): Xaa is A or G
  MOD_RES (22)..(23)..(24)..(25): Xaa is A or G or absent
PTXAPTKLSSLSVLFFXXXXXXXXXLKVYPNMVVRSXG

SEQ ID NO: 25432 - protein, 33 aa, Artificial Sequence
  Non-cyclic GFR-binding peptide
  MOD_RES (32)..(32): Xaa is C or S
TPTKMSSLSMLFFNDKQQIILKVYPGMVVDRXG

SEQ ID NO: 25433 - protein, 36 aa, Artificial Sequence
  Non-cyclic GFR-binding peptide
  MOD_RES (2)..(3)..(34)..(36): Xaa is C or S
TXXAPVKTSSLSMLFFDNGRVLLLKVYPMIVEEXGX

SEQ ID NO: 25434 - protein, 31 aa, Artificial Sequence
  Non-cyclic GFR-binding peptide
APTKLSSLSVLFFDSSNNVILKVYPNMVVKA

SEQ ID NO: 25435 - protein, 34 aa, Artificial Sequence
  Non-cyclic GFR-binding peptide
  MOD_RES (1)..(2)..(33): Xaa is C or S
XXVPQDLSSLSILFFVGRTPKVLKVYPMVVKSXK

SEQ ID NO: 25436 - protein, 32 aa, Artificial Sequence
  Non-cyclic GFR-binding peptide
  MOD_RES (1)..(2): Xaa is C or S
XXVPTRLSSLSILFFDSANNVVLKVYPDMVVE

SEQ ID NO: 25437 - protein, 37 aa, Artificial Sequence
  Non-cyclic GFR-binding peptide
  MOD_RES (2)..(3)..(36): Xaa is C or S
AXXVPTKLSSLSVLFFDDMGVPTLKVYPEGMSVAEXG

SEQ ID NO: 25438 - protein, 35 aa, Artificial Sequence
  Non-cyclic GFR-binding peptide
  MOD_RES (15)..(16)..(17)..(18)..(19): Xaa is A or G
  MOD_RES (20)..(21)..(22)..(23): Xaa is A or G or absent
PSRVHHSSLSVLFFXXXXXXXXXLKVYPRLEEHLE

SEQ ID NO: 25439 - protein, 42 aa, Artificial Sequence
  Non-cyclic GFR-binding peptide
  MOD_RES (5)..(6)..(40)..(42): Xaa is C or S
  MOD_RES (20)..(21)..(22)..(23)..(24): Xaa is A or G
  MOD_RES (25)..(26)..(27)..(28): Xaa is A or G or absent
VPKPXXAPTKLSSLSVLFFXXXXXXXXXLKVYPNMVVRSXGX

SEQ ID NO: 25440 - protein, 38 aa, Artificial Sequence
  Non-cyclic GFR-binding peptide
  MOD_RES (1)..(35)..(37): Xaa is C or S
  MOD_RES (15)..(16)..(17)..(18)..(19): Xaa is A or G
  MOD_RES (20)..(21)..(22)..(23): Xaa is A or G or absent
XVPTRLSSLSILFFXXXXXXXXXLKVYPDMVVESXGXR

SEQ ID NO: 25441 - protein, 40 aa, Artificial Sequence
  Non-cyclic GFR-binding peptide
  MOD_RES (6)..(40): Xaa is C or S
  MOD_RES (20)..(21)..(22)..(23)..(24): Xaa is A or G
  MOD_RES (25)..(26)..(27)..(28): Xaa is A or G or absent
VTKPTXAPTKLSSLSVLFFXXXXXXXXXLKVYPNMVVRSX

SEQ ID NO: 25442 - protein, 31 aa, Artificial Sequence
  Non-cyclic GFR-binding peptide
  MOD_RES (1)..(1): Xaa is C or S
XVPTRLSSLSILFFDSANNVVLKVYPDMVVE

SEQ ID NO: 25443 - protein, 38 aa, Artificial Sequence
  Non-cyclic GFR-binding peptide
  MOD_RES (3)..(4)..(38): Xaa is C or S
  MOD_RES (18)..(19)..(20)..(21)..(22): Xaa is A or G
  MOD_RES (23)..(24)..(25)..(26): Xaa is A or G or absent
GPXXTPTKMSSLSMLFFXXXXXXXXXLKVYPGMVVDRX

SEQ ID NO: 25444 - protein, 35 aa, Artificial Sequence
  Non-cyclic GFR-binding peptide
  MOD_RES (4)..(5): Xaa is C or S
ASPXXVPQDLSSLSILFFVGRTPKVLKVYPMVVKS

SEQ ID NO: 25445 - protein, 41 aa, Artificial Sequence
  Non-cyclic GFR-binding peptide
  MOD_RES (6)..(7)..(38)..(40): Xaa is C or S
RVPSTXXAPVKTSSLSMLFFDNGRVLLLKVYPMIVEEXGXL

SEQ ID NO: 25446 - protein, 34 aa, Artificial Sequence
  Non-cyclic GFR-binding peptide
  MOD_RES (1)..(1): Xaa is C or S
XVPTEESSLSMLFFRIKPHQGQHLKVYPFLQHNK

SEQ ID NO: 25447 - protein, 36 aa, Artificial Sequence
  Non-cyclic GFR-binding peptide
  MOD_RES (2)..(3)..(35): Xaa is C or S
AXXVPTKLSSLSILFFDKGVVTYLKVYPGMAVSEXG

SEQ ID NO: 25448 - protein, 39 aa, Artificial Sequence
  Non-cyclic GFR-binding peptide
  MOD_RES (4)..(5)..(37)..(39): Xaa is C or S
PASXXVPARLSSLSILFFDAANNVVLKVYPDMVVEAXGX

SEQ ID NO: 25449 - protein, 41 aa, Artificial Sequence
  Non-cyclic GFR-binding peptide
  MOD_RES (4)..(38)..(40): Xaa is C or S
  MOD_RES (18)..(19)..(20)..(21)..(22): Xaa is A or G
  MOD_RES (23)..(24)..(25)..(26): Xaa is A or G or absent
GLEXVPTEESSLSMLFFXXXXXXXXXLKVYPFLQHNKXEXR

SEQ ID NO: 25450 - protein, 37 aa, Artificial Sequence
  Non-cyclic GFR-binding peptide
  MOD_RES (4)..(5)..(37): Xaa is C or S
PKPXXAPTKLSSLSVLFFDDSSNVILKVYPNMVVRSX

SEQ ID NO: 25451 - protein, 39 aa, Artificial Sequence
  Non-cyclic GFR-binding peptide
  MOD_RES (1)..(2)..(36)..(38): Xaa is C or S
  MOD_RES (16)..(17)..(18)..(19)..(20): Xaa is A or G
  MOD_RES (21)..(22)..(23)..(24): Xaa is A or G or absent
XXAPTKLSSLSVLFFXXXXXXXXXLKVYPNMVVKAXGXH

SEQ ID NO: 25452 - protein, 37 aa, Artificial Sequence
  Non-cyclic GFR-binding peptide
  MOD_RES (34)..(36): Xaa is C or S
  MOD_RES (14)..(15)..(16)..(17)..(18): Xaa is A or G
  MOD_RES (19)..(20)..(21)..(22): Xaa is A or G or absent
APTQLSSLSVLFFXXXXXXXXXLKVYPNMVVRAXGXH

SEQ ID NO: 25453 - protein, 42 aa, Artificial Sequence
  Non-cyclic GFR-binding peptide
  MOD_RES (6)..(40)..(42): Xaa is C or S
  MOD_RES (20)..(21)..(22)..(23)..(24): Xaa is A or G
  MOD_RES (25)..(26)..(27)..(28): Xaa is A or G or absent
DEGLEXVPTEESSLSMLFFXXXXXXXXXLKVYPFLQHNKXEX

SEQ ID NO: 25454 - protein, 42 aa, Artificial Sequence
  Non-cyclic GFR-binding peptide
  MOD_RES (2)..(39)..(41): Xaa is C or S
  MOD_RES (18)..(19)..(20)..(21)..(22): Xaa is A or G
  MOD_RES (23)..(24)..(25)..(26): Xaa is A or G or absent
KXQPSRVHHSSLSVLFFXXXXXXXXXLKVYPRLEEHLEXAXA

SEQ ID NO: 25455 - protein, 39 aa, Artificial Sequence
  Non-cyclic GFR-binding peptide
  MOD_RES (5)..(6)..(38): Xaa is C or S
VPKPXXAPTQLSSLSVLFFDDSSNVILKVYPNMVVRAXG

SEQ ID NO: 25456 - protein, 38 aa, Artificial Sequence
  Non-cyclic GFR-binding peptide
  MOD_RES (3)..(4)..(38): Xaa is C or S
  MOD_RES (18)..(19)..(20)..(21)..(22): Xaa is A or G
  MOD_RES (23)..(24)..(25)..(26): Xaa is A or G or absent
KAXXVPTKLSSLSILFFXXXXXXXXXLKVYPGMAVSEX

SEQ ID NO: 25457 - protein, 32 aa, Artificial Sequence
  Non-cyclic GFR-binding peptide
  MOD_RES (2)..(2): Xaa is C or S
TXAPTKLSSLSVLFFDDSSNVILKVYPNMVVR

SEQ ID NO: 25458 - protein, 32 aa, Artificial Sequence
  Non-cyclic GFR-binding peptide
  MOD_RES (1)..(1): Xaa is C or S
XAPTKLSSLSVLFFDDSSNVILKVYPNMVVRS

SEQ ID NO: 25459 - protein, 39 aa, Artificial Sequence
  Non-cyclic GFR-binding peptide
  MOD_RES (7)..(7): Xaa is C or S
NDEGLEXVPTEESSLSMLFFRIKPHQGQHLKVYPFLQHN

SEQ ID NO: 25460 - protein, 38 aa, Artificial Sequence
  Non-cyclic GFR-binding peptide
  MOD_RES (2)..(3)..(35)..(37): Xaa is C or S
PXXAPTQLSSLSVLFFDDSSNVILKVYPNMVVRAXGXH

SEQ ID NO: 25461 - protein, 38 aa, Artificial Sequence
  Non-cyclic GFR-binding peptide
  MOD_RES (3)..(4)..(36)..(38): Xaa is C or S
ASXXVPARLSSLSILFFDAANNVVLKVYPDMVVEAXGX

SEQ ID NO: 25462 - protein, 42 aa, Artificial Sequence
  Non-cyclic GFR-binding peptide
  MOD_RES (5)..(42): Xaa is C or S
SSVKXQPSRVHHSSLSVLFFEYVRKKPKLLKVYPRLEEHLEX

SEQ ID NO: 25463 - protein, 36 aa, Artificial Sequence
  Non-cyclic GFR-binding peptide
  MOD_RES (4)..(4): Xaa is C or S
  MOD_RES (18)..(19)..(20)..(21)..(22): Xaa is A or G
  MOD_RES (23)..(24)..(25)..(26): Xaa is A or G or absent
GLEXVPTEESSLSMLFFXXXXXXXXXLKVYPFLQHN

SEQ ID NO: 25464 - protein, 40 aa, Artificial Sequence
  Non-cyclic GFR-binding peptide
  MOD_RES (6)..(7)..(39): Xaa is C or S
YVPKPXXAPTKLSSLSVLFFDDSSNVILKVYPNMVVRSXG

SEQ ID NO: 25465 - protein, 37 aa, Artificial Sequence
  Non-cyclic GFR-binding peptide
  MOD_RES (4)..(5)..(37): Xaa is C or S
PASXXVPARLSSLSILFFDAANNVVLKVYPDMVVEAX

SEQ ID NO: 25466 - protein, 35 aa, Artificial Sequence
  Non-cyclic GFR-binding peptide
  MOD_RES (1)..(32)..(34): Xaa is C or S
XAPVKTSSLSMLFFDNGRVLLLKVYPMIVEEXGXL

SEQ ID NO: 25467 - protein, 39 aa, Artificial Sequence
  Non-cyclic GFR-binding peptide
  MOD_RES (2)..(3)..(36)..(38): Xaa is C or S
  MOD_RES (17)..(18)..(19)..(20)..(21): Xaa is A or G
  MOD_RES (22)..(23)..(24)..(25): Xaa is A or G or absent
PXXVPQALSSLSILFFXXXXXXXXXLKVYPMIVRSXKXS

SEQ ID NO: 25468 - protein, 36 aa, Artificial Sequence
  Non-cyclic GFR-binding peptide
  MOD_RES (2)..(3): Xaa is C or S
  MOD_RES (17)..(18)..(19)..(20)..(21): Xaa is A or G
  MOD_RES (22)..(23)..(24)..(25): Xaa is A or G or absent
AXXVPTKLSSLSILFFXXXXXXXXXLKVYPGMAVSE

SEQ ID NO: 25469 - protein, 35 aa, Artificial Sequence
  Non-cyclic GFR-binding peptide
  MOD_RES (1)..(1): Xaa is C or S
XQPSRVHHSSLSVLFFEYVRKKPKLLKVYPRLEEH

SEQ ID NO: 25470 - protein, 40 aa, Artificial Sequence
  Non-cyclic GFR-binding peptide
  MOD_RES (3)..(4)..(38)..(40): Xaa is C or S
  MOD_RES (18)..(19)..(20)..(21)..(22): Xaa is A or G
  MOD_RES (23)..(24)..(25)..(26): Xaa is A or G or absent
KAXXAPTKLSSLSVLFFXXXXXXXXXLKVYPNMVVKAXGX

SEQ ID NO: 25471 - protein, 32 aa, Artificial Sequence
  Non-cyclic GFR-binding peptide
  MOD_RES (1)..(2): Xaa is C or S
XXAPTKLSSLSVLFFDDSSNVILKVYPNMVVR

SEQ ID NO: 25472 - protein, 37 aa, Artificial Sequence
  Non-cyclic GFR-binding peptide
  MOD_RES (6)..(7): Xaa is C or S
ASASPXXVPQDLSSLSILFFVGRTPKVLKVYPMVVKS

SEQ ID NO: 25473 - protein, 37 aa, Artificial Sequence
  Non-cyclic GFR-binding peptide
  MOD_RES (1)..(34)..(36): Xaa is C or S
  MOD_RES (15)..(16)..(17)..(18)..(19): Xaa is A or G
  MOD_RES (20)..(21)..(22)..(23): Xaa is A or G or absent
XVPQALSSLSILFFXXXXXXXXXLKVYPMIVRSXKXS

SEQ ID NO: 25474 - protein, 38 aa, Artificial Sequence
  Non-cyclic GFR-binding peptide
  MOD_RES (6)..(7): Xaa is C or S
AVPKAXXAPTKLSSLSVLFFDSSNNVILKVYPNMVVKA

SEQ ID NO: 25475 - protein, 37 aa, Artificial Sequence
  Non-cyclic GFR-binding peptide
  MOD_RES (4)..(5): Xaa is C or S
  MOD_RES (19)..(20)..(21)..(22)..(23): Xaa is A or G
  MOD_RES (24)..(25)..(26)..(27): Xaa is A or G or absent
ASPXXVSQDLSSLSILFFXXXXXXXXXLKVYPMIVKS

SEQ ID NO: 25476 - protein, 34 aa, Artificial Sequence
  Non-cyclic GFR-binding peptide
  MOD_RES (3)..(4): Xaa is C or S
ASXXVPARLSSLSILFFDAANNVVLKVYPDMVVE

SEQ ID NO: 25477 - protein, 37 aa, Artificial Sequence
  Non-cyclic GFR-binding peptide
  MOD_RES (1)..(2)..(36): Xaa is C or S
  MOD_RES (16)..(17)..(18)..(19)..(20): Xaa is A or G
  MOD_RES (21)..(22)..(23)..(24): Xaa is A or G or absent
XXVPTKLSSLSILFFXXXXXXXXXLKVYPGMAVSEXG

SEQ ID NO: 25478 - protein, 35 aa, Artificial Sequence
  Non-cyclic GFR-binding peptide
  MOD_RES (2)..(3): Xaa is C or S
  MOD_RES (17)..(18)..(19)..(20)..(21): Xaa is A or G
  MOD_RES (22)..(23)..(24)..(25): Xaa is A or G or absent
PXXVSQDLSSLSILFFXXXXXXXXXLKVYPMIVKS

SEQ ID NO: 25479 - protein, 39 aa, Artificial Sequence
  Non-cyclic GFR-binding peptide
  MOD_RES (4)..(5)..(37)..(39): Xaa is C or S
PKAXXAPTKLSSLSVLFFDSSNNVILKVYPNMVVKAXGX

SEQ ID NO: 25480 - protein, 34 aa, Artificial Sequence
  Non-cyclic GFR-binding peptide
  MOD_RES (2)..(3): Xaa is C or S
AXXAPTKLSSLSVLFFDSSNNVILKVYPNMVVKA

SEQ ID NO: 25481 - protein, 33 aa, Artificial Sequence
  Non-cyclic GFR-binding peptide
  MOD_RES (1)..(1): Xaa is C or S
  MOD_RES (15)..(16)..(17)..(18)..(19): Xaa is A or G
  MOD_RES (20)..(21)..(22)..(23): Xaa is A or G or absent
XVPTRLSSLSILFFXXXXXXXXXLKVYPDMVVE

SEQ ID NO: 25482 - protein, 37 aa, Artificial Sequence
  Non-cyclic GFR-binding peptide
  MOD_RES (1)..(35)..(37): Xaa is C or S
XVPTEESSLSMLFFRIKPHQGQHLKVYPFLQHNKXEX

SEQ ID NO: 25483 - protein, 39 aa, Artificial Sequence
  Non-cyclic GFR-binding peptide
  MOD_RES (3)..(4)..(36)..(38): Xaa is C or S
GPXXTPTKMSSLSMLFFNDKQQIILKVYPGMVVDRXGXS

SEQ ID NO: 25484 - protein, 38 aa, Artificial Sequence
  Non-cyclic GFR-binding peptide
  MOD_RES (1)..(36)..(38): Xaa is C or S
  MOD_RES (15)..(16)..(17)..(18)..(19): Xaa is A or G
  MOD_RES (20)..(21)..(22)..(23): Xaa is A or G or absent
XVPTKLSSLSVLFFXXXXXXXXXLKVYPEGMSVAEXGX

SEQ ID NO: 25485 - protein, 37 aa, Artificial Sequence
  Non-cyclic GFR-binding peptide
  MOD_RES (6)..(7): Xaa is C or S
STPPTXXVPTRLSSLSILFFDSANNVVLKVYPDMVVE

SEQ ID NO: 25486 - protein, 39 aa, Artificial Sequence
  Non-cyclic GFR-binding peptide
  MOD_RES (6)..(7): Xaa is C or S
  MOD_RES (21)..(22)..(23)..(24)..(25): Xaa is A or G
  MOD_RES (26)..(27)..(28)..(29): Xaa is A or G or absent
RVPSTXXAPVKTSSLSMLFFXXXXXXXXXLKVYPMIVEE

SEQ ID NO: 25487 - protein, 35 aa, Artificial Sequence
  Non-cyclic GFR-binding peptide
  MOD_RES (2)..(3)..(34): Xaa is C or S
PXXVPQALSSLSILFFVGRKPKVLKVYPMIVRSXK

SEQ ID NO: 25488 - protein, 33 aa, Artificial Sequence
  Non-cyclic GFR-binding peptide
  MOD_RES (3)..(3): Xaa is C or S
PTXAPTKLSSLSVLFFDDSSNVILKVYPNMVVR

SEQ ID NO: 25489 - protein, 42 aa, Artificial Sequence
  Non-cyclic GFR-binding peptide
  MOD_RES (6)..(7)..(41): Xaa is C or S
  MOD_RES (21)..(22)..(23)..(24)..(25): Xaa is A or G
  MOD_RES (26)..(27)..(28)..(29): Xaa is A or G or absent
GSAGPXXTPTKMSSLSMLFFXXXXXXXXXLKVYPGMVVDRXG

SEQ ID NO: 25490 - protein, 40 aa, Artificial Sequence
  Non-cyclic GFR-binding peptide
  MOD_RES (5)..(6)..(38)..(40): Xaa is C or S
VPKPXXAPTQLSSLSVLFFDDSSNVILKVYPNMVVRAXGX

SEQ ID NO: 25491 - protein, 36 aa, Artificial Sequence
  Non-cyclic GFR-binding peptide
  MOD_RES (1)..(2): Xaa is C or S
  MOD_RES (16)..(17)..(18)..(19)..(20): Xaa is A or G
  MOD_RES (21)..(22)..(23)..(24): Xaa is A or G or absent
XXVPTKLSSLSVLFFXXXXXXXXXLKVYPEGMSVAE

SEQ ID NO: 25492 - protein, 37 aa, Artificial Sequence
  Non-cyclic GFR-binding peptide
  MOD_RES (1)..(34)..(36): Xaa is C or S
XVPTKLSSLSVLFFDDMGVPTLKVYPEGMSVAEXGXR

SEQ ID NO: 25493 - protein, 39 aa, Artificial Sequence
  Non-cyclic GFR-binding peptide
  MOD_RES (3)..(4)..(36)..(38): Xaa is C or S
KPXXAPTQLSSLSVLFFDDSSNVILKVYPNMVVRAXGXH

SEQ ID NO: 25494 - protein, 33 aa, Artificial Sequence
  Non-cyclic GFR-binding peptide
  MOD_RES (2)..(3): Xaa is C or S
AXXVPTELSSLSMLFFDEYDKVVLKVYPEMVVE

SEQ ID NO: 25495 - protein, 39 aa, Artificial Sequence
  Non-cyclic GFR-binding peptide
  MOD_RES (5)..(6): Xaa is C or S
  MOD_RES (20)..(21)..(22)..(23)..(24): Xaa is A or G
  MOD_RES (25)..(26)..(27)..(28): Xaa is A or G or absent
VPKPXXAPTQLSSLSVLFFXXXXXXXXXLKVYPNMVVRA

SEQ ID NO: 25496 - protein, 35 aa, Artificial Sequence
  Non-cyclic GFR-binding peptide
  MOD_RES (3)..(35): Xaa is C or S
PTXAPTKLSSLSVLFFDDSSNVILKVYPNMVVRSX

SEQ ID NO: 25497 - protein, 34 aa, Artificial Sequence
  Non-cyclic GFR-binding peptide
QPSRVHHSSLSVLFFEYVRKKPKLLKVYPRLEEH

SEQ ID NO: 25498 - protein, 33 aa, Artificial Sequence
  Non-cyclic GFR-binding peptide
  MOD_RES (14)..(15)..(16)..(17)..(18): Xaa is A or G
  MOD_RES (19)..(20)..(21)..(22): Xaa is A or G or absent
APTQLSSLSVLFFXXXXXXXXXLKVYPNMVVRA

SEQ ID NO: 25499 - protein, 41 aa, Artificial Sequence
  Non-cyclic GFR-binding peptide
  MOD_RES (5)..(6)..(41): Xaa is C or S
  MOD_RES (20)..(21)..(22)..(23)..(24): Xaa is A or G
  MOD_RES (25)..(26)..(27)..(28): Xaa is A or G or absent
VGKAXXVPTKLSSLSVLFFXXXXXXXXXLKVYPEGMSVAEX

SEQ ID NO: 25500 - protein, 41 aa, Artificial Sequence
  Non-cyclic GFR-binding peptide
  MOD_RES (4)..(5)..(39)..(41): Xaa is C or S
  MOD_RES (19)..(20)..(21)..(22)..(23): Xaa is A or G
  MOD_RES (24)..(25)..(26)..(27): Xaa is A or G or absent
PPTXXVPTRLSSLSILFFXXXXXXXXXLKVYPDMVVESXGX

SEQ ID NO: 25501 - protein, 34 aa, Artificial Sequence
  Non-cyclic GFR-binding peptide
  MOD_RES (1)..(2)..(34): Xaa is C or S
XXVPTRLSSLSILFFDSANNVVLKVYPDMVVESX

SEQ ID NO: 25502 - protein, 37 aa, Artificial Sequence
  Non-cyclic GFR-binding peptide
  MOD_RES (35)..(37): Xaa is C or S
  MOD_RES (14)..(15)..(16)..(17)..(18): Xaa is A or G
  MOD_RES (19)..(20)..(21)..(22): Xaa is A or G or absent
SRVHHSSLSVLFFXXXXXXXXXLKVYPRLEEHLEXAX

SEQ ID NO: 25503 - protein, 35 aa, Artificial Sequence
  Non-cyclic GFR-binding peptide
  MOD_RES (32)..(34): Xaa is C or S
APTKLSSLSVLFFDSSNNVILKVYPNMVVKAXGXH

SEQ ID NO: 25504 - protein, 33 aa, Artificial Sequence
  Non-cyclic GFR-binding peptide
  MOD_RES (14)..(15)..(16)..(17)..(18): Xaa is A or G
  MOD_RES (19)..(20)..(21)..(22): Xaa is A or G or absent
VPARLSSLSILFFXXXXXXXXXLKVYPDMVVEA

SEQ ID NO: 25505 - protein, 40 aa, Artificial Sequence
  Non-cyclic GFR-binding peptide
  MOD_RES (5)..(6)..(40): Xaa is C or S
  MOD_RES (20)..(21)..(22)..(23)..(24): Xaa is A or G
  MOD_RES (25)..(26)..(27)..(28): Xaa is A or G or absent
TPPTXXVPTRLSSLSILFFXXXXXXXXXLKVYPDMVVESX

SEQ ID NO: 25506 - protein, 34 aa, Artificial Sequence
  Non-cyclic GFR-binding peptide
  MOD_RES (1)..(2)..(34): Xaa is C or S
XXAPTKLSSLSVLFFDSSNNVILKVYPNMVVKAX

SEQ ID NO: 25507 - protein, 33 aa, Artificial Sequence
  Non-cyclic GFR-binding peptide
  MOD_RES (31)..(33): Xaa is C or S
APVKTSSLSMLFFDNGRVLLLKVYPMIVEEXGX

SEQ ID NO: 25508 - protein, 33 aa, Artificial Sequence
  Non-cyclic GFR-binding peptide
  MOD_RES (2)..(3): Xaa is C or S
PXXAPTKLSSLSVLFFDDSSNVILKVYPNMVVR

SEQ ID NO: 25509 - protein, 42 aa, Artificial Sequence
  Non-cyclic GFR-binding peptide
  MOD_RES (6)..(40)..(42): Xaa is C or S
  MOD_RES (20)..(21)..(22)..(23)..(24): Xaa is A or G
  MOD_RES (25)..(26)..(27)..(28): Xaa is A or G or absent
VTKPTXAPTKLSSLSVLFFXXXXXXXXXLKVYPNMVVRSXGX

SEQ ID NO: 25510 - protein, 39 aa, Artificial Sequence
  Non-cyclic GFR-binding peptide
  MOD_RES (5)..(5): Xaa is C or S
SSVKXQPSRVHHSSLSVLFFEYVRKKPKLLKVYPRLEEH

SEQ ID NO: 25511 - protein, 33 aa, Artificial Sequence
  Non-cyclic GFR-binding peptide
  MOD_RES (2)..(3): Xaa is C or S
TXXAPVKTSSLSMLFFDNGRVLLLKVYPMIVEE

SEQ ID NO: 25512 - protein, 37 aa, Artificial Sequence
  Non-cyclic GFR-binding peptide
  MOD_RES (4)..(5): Xaa is C or S
GKAXXVPTKLSSLSVLFFDDMGVPTLKVYPEGMSVAE

SEQ ID NO: 25513 - protein, 33 aa, Artificial Sequence
  Non-cyclic GFR-binding peptide
  MOD_RES (1)..(2): Xaa is C or S
XXVPTKLSSLSILFFDKGVVTYLKVYPGMAVSE

SEQ ID NO: 25514 - protein, 41 aa, Artificial Sequence
  Non-cyclic GFR-binding peptide
  MOD_RES (5)..(6)..(40): Xaa is C or S
  MOD_RES (20)..(21)..(22)..(23)..(24): Xaa is A or G
  MOD_RES (25)..(26)..(27)..(28): Xaa is A or G or absent
SAGPXXTPTKMSSLSMLFFXXXXXXXXXLKVYPGMVVDRXG

SEQ ID NO: 25515 - protein, 36 aa, Artificial Sequence
  Non-cyclic GFR-binding peptide
  MOD_RES (3)..(4): Xaa is C or S
  MOD_RES (18)..(19)..(20)..(21)..(22): Xaa is A or G
  MOD_RES (23)..(24)..(25)..(26): Xaa is A or G or absent
SPXXVPQDLSSLSILFFXXXXXXXXXLKVYPMVVKS

SEQ ID NO: 25516 - protein, 37 aa, Artificial Sequence
  Non-cyclic GFR-binding peptide
  MOD_RES (3)..(4)..(35)..(37): Xaa is C or S
STXXAPVKTSSLSMLFFDNGRVLLLKVYPMIVEEXGX

SEQ ID NO: 25517 - protein, 35 aa, Artificial Sequence
  Non-cyclic GFR-binding peptide
  MOD_RES (35)..(35): Xaa is C or S
  MOD_RES (14)..(15)..(16)..(17)..(18): Xaa is A or G
  MOD_RES (19)..(20)..(21)..(22): Xaa is A or G or absent
VPTKLSSLSVLFFXXXXXXXXXLKVYPEGMSVAEX

SEQ ID NO: 25518 - protein, 37 aa, Artificial Sequence
  Non-cyclic GFR-binding peptide
  MOD_RES (6)..(7): Xaa is C or S
AVPKAXXAPTKLSSLSVLFFDSSNNVILKVYPNMVVK

SEQ ID NO: 25519 - protein, 38 aa, Artificial Sequence
  Non-cyclic GFR-binding peptide
  MOD_RES (4)..(5)..(38): Xaa is C or S
  MOD_RES (19)..(20)..(21)..(22)..(23): Xaa is A or G
  MOD_RES (24)..(25)..(26)..(27): Xaa is A or G or absent
AAPXXVPQALSSLSILFFXXXXXXXXXLKVYPMIVRSX

SEQ ID NO: 25520 - protein, 41 aa, Artificial Sequence
  Non-cyclic GFR-binding peptide
  MOD_RES (7)..(41): Xaa is C or S
  MOD_RES (21)..(22)..(23)..(24)..(25): Xaa is A or G
  MOD_RES (26)..(27)..(28)..(29): Xaa is A or G or absent
NDEGLEXVPTEESSLSMLFFXXXXXXXXXLKVYPFLQHNKX

SEQ ID NO: 25521 - protein, 38 aa, Artificial Sequence
  Non-cyclic GFR-binding peptide
  MOD_RES (3)..(35)..(37): Xaa is C or S
PTXAPTKLSSLSVLFFDDSSNVILKVYPNMVVRSXGXH

SEQ ID NO: 25522 - protein, 37 aa, Artificial Sequence
  Non-cyclic GFR-binding peptide
  MOD_RES (2)..(3)..(34)..(36): Xaa is C or S
PXXVPQDLSSLSILFFVGRTPKVLKVYPMVVKSXKXS

SEQ ID NO: 25523 - protein, 30 aa, Artificial Sequence
  Non-cyclic GFR-binding peptide
TPTKMSSLSMLFFNDKQQIILKVYPGMVVD

SEQ ID NO: 25524 - protein, 37 aa, Artificial Sequence
  Non-cyclic GFR-binding peptide
  MOD_RES (6)..(7): Xaa is C or S
SIPKAXXVPTELSSLSMLFFDEYDKVVLKVYPEMVVE

SEQ ID NO: 25525 - protein, 36 aa, Artificial Sequence
  Non-cyclic GFR-binding peptide
  MOD_RES (1)..(33)..(35): Xaa is C or S
XVPARLSSLSILFFDAANNVVLKVYPDMVVEAXGXR

SEQ ID NO: 25526 - protein, 36 aa, Artificial Sequence
  Non-cyclic GFR-binding peptide
  MOD_RES (4)..(5): Xaa is C or S
AGPXXTPTKMSSLSMLFFNDKQQIILKVYPGMVVDR

SEQ ID NO: 25527 - protein, 39 aa, Artificial Sequence
  Non-cyclic GFR-binding peptide
  MOD_RES (2)..(3)..(36)..(38): Xaa is C or S
  MOD_RES (17)..(18)..(19)..(20)..(21): Xaa is A or G
  MOD_RES (22)..(23)..(24)..(25): Xaa is A or G or absent
TXXAPVKTSSLSMLFFXXXXXXXXXLKVYPMIVEEXGXL

SEQ ID NO: 25528 - protein, 37 aa, Artificial Sequence
  Non-cyclic GFR-binding peptide
  MOD_RES (1)..(36): Xaa is C or S
  MOD_RES (15)..(16)..(17)..(18)..(19): Xaa is A or G
  MOD_RES (20)..(21)..(22)..(23): Xaa is A or G or absent
XVPTKLSSLSVLFFXXXXXXXXXLKVYPEGMSVAEXG

SEQ ID NO: 25529 - protein, 32 aa, Artificial Sequence
  Non-cyclic GFR-binding peptide
  MOD_RES (1)..(1): Xaa is C or S
XVPTKLSSLSILFFDKGVVTYLKVYPGMAVSE

SEQ ID NO: 25530 - protein, 38 aa, Artificial Sequence
  Non-cyclic GFR-binding peptide
  MOD_RES (3)..(4)..(35)..(37): Xaa is C or S
SPXXVSQDLSSLSILFFIGKTPKILKVYPMIVKSXKXS

SEQ ID NO: 25531 - protein, 36 aa, Artificial Sequence
  Non-cyclic GFR-binding peptide
  MOD_RES (35)..(35): Xaa is C or S
  MOD_RES (14)..(15)..(16)..(17)..(18): Xaa is A or G
  MOD_RES (19)..(20)..(21)..(22): Xaa is A or G or absent
VPTKLSSLSVLFFXXXXXXXXXLKVYPEGMSVAEXG

SEQ ID NO: 25532 - protein, 43 aa, Artificial Sequence
  Non-cyclic GFR-binding peptide
  MOD_RES (5)..(6)..(40)..(42): Xaa is C or S
  MOD_RES (20)..(21)..(22)..(23)..(24): Xaa is A or G
  MOD_RES (25)..(26)..(27)..(28): Xaa is A or G or absent
VPKPXXAPTKLSSLSVLFFXXXXXXXXXLKVYPNMVVRSXGXH

SEQ ID NO: 25533 - protein, 36 aa, Artificial Sequence
  Non-cyclic GFR-binding peptide
  MOD_RES (2)..(3): Xaa is C or S
  MOD_RES (17)..(18)..(19)..(20)..(21): Xaa is A or G
  MOD_RES (22)..(23)..(24)..(25): Xaa is A or G or absent
TXXVPTRLSSLSILFFXXXXXXXXXLKVYPDMVVES

SEQ ID NO: 25534 - protein, 35 aa, Artificial Sequence
  Non-cyclic GFR-binding peptide
  MOD_RES (33)..(35): Xaa is C or S
  MOD_RES (14)..(15)..(16)..(17)..(18): Xaa is A or G
  MOD_RES (19)..(20)..(21)..(22): Xaa is A or G or absent
APVKTSSLSMLFFXXXXXXXXXLKVYPMIVEEXGX

SEQ ID NO: 25535 - protein, 35 aa, Artificial Sequence
  Non-cyclic GFR-binding peptide
  MOD_RES (34)..(34): Xaa is C or S
  MOD_RES (14)..(15)..(16)..(17)..(18): Xaa is A or G
  MOD_RES (19)..(20)..(21)..(22): Xaa is A or G or absent
APTQLSSLSVLFFXXXXXXXXXLKVYPNMVVRAXG

SEQ ID NO: 25536 - protein, 33 aa, Artificial Sequence
  Non-cyclic GFR-binding peptide
  MOD_RES (33)..(33): Xaa is C or S
  MOD_RES (14)..(15)..(16)..(17)..(18): Xaa is A or G
  MOD_RES (19)..(20)..(21)..(22): Xaa is A or G or absent
VPQALSSLSILFFXXXXXXXXXLKVYPMIVRSX

SEQ ID NO: 25537 - protein, 36 aa, Artificial Sequence
  Non-cyclic GFR-binding peptide
  MOD_RES (1)..(2)..(34)..(36): Xaa is C or S
XXAPTKLSSLSVLFFDDSSNVILKVYPNMVVRSXGX

SEQ ID NO: 25538 - protein, 44 aa, Artificial Sequence
  Non-cyclic GFR-binding peptide
  MOD_RES (5)..(42)..(44): Xaa is C or S
SSVKXQPSRVHHSSLSVLFFEYVRKKPKLLKVYPRLEEHLEXAX

SEQ ID NO: 25539 - protein, 38 aa, Artificial Sequence
  Non-cyclic GFR-binding peptide
  MOD_RES (5)..(6)..(37): Xaa is C or S
VPSTXXAPVKTSSLSMLFFDNGRVLLLKVYPMIVEEXG

SEQ ID NO: 25540 - protein, 34 aa, Artificial Sequence
  Non-cyclic GFR-binding peptide
  MOD_RES (1)..(2)..(34): Xaa is C or S
XXAPTKLSSLSVLFFDDSSNVILKVYPNMVVRSX

SEQ ID NO: 25541 - protein, 41 aa, Artificial Sequence
  Non-cyclic GFR-binding peptide
  MOD_RES (3)..(4)..(38)..(40): Xaa is C or S
  MOD_RES (18)..(19)..(20)..(21)..(22): Xaa is A or G
  MOD_RES (23)..(24)..(25)..(26): Xaa is A or G or absent
KAXXVPTELSSLSMLFFXXXXXXXXXLKVYPEMVVEGXGXR

SEQ ID NO: 25542 - protein, 39 aa, Artificial Sequence
  Non-cyclic GFR-binding peptide
  MOD_RES (5)..(39): Xaa is C or S
EGLEXVPTEESSLSMLFFRIKPHQGQHLKVYPFLQHNKX

SEQ ID NO: 25543 - protein, 31 aa, Artificial Sequence
  Non-cyclic GFR-binding peptide
  MOD_RES (1)..(1): Xaa is C or S
XVPTELSSLSMLFFDEYDKVVLKVYPEMVVE

SEQ ID NO: 25544 - protein, 38 aa, Artificial Sequence
  Non-cyclic GFR-binding peptide
  MOD_RES (4)..(38): Xaa is C or S
GLEXVPTEESSLSMLFFRIKPHQGQHLKVYPFLQHNKX

SEQ ID NO: 25545 - protein, 34 aa, Artificial Sequence
  Non-cyclic GFR-binding peptide
  MOD_RES (1)..(33): Xaa is C or S
XVPTKLSSLSILFFDKGVVTYLKVYPGMAVSEXG

SEQ ID NO: 25546 - protein, 40 aa, Artificial Sequence
  Non-cyclic GFR-binding peptide
  MOD_RES (2)..(3)..(38)..(40): Xaa is C or S
  MOD_RES (17)..(18)..(19)..(20)..(21): Xaa is A or G
  MOD_RES (22)..(23)..(24)..(25): Xaa is A or G or absent
AXXVPTKLSSLSVLFFXXXXXXXXXLKVYPEGMSVAEXGX

SEQ ID NO: 25547 - protein, 41 aa, Artificial Sequence
  Non-cyclic GFR-binding peptide
  MOD_RES (5)..(5): Xaa is C or S
  MOD_RES (21)..(22)..(23)..(24)..(25): Xaa is A or G
  MOD_RES (26)..(27)..(28)..(29): Xaa is A or G or absent
SSVKXQPSRVHHSSLSVLFFXXXXXXXXXLKVYPRLEEHLE

SEQ ID NO: 25548 - protein, 39 aa, Artificial Sequence
  Non-cyclic GFR-binding peptide
  MOD_RES (3)..(4)..(38): Xaa is C or S
  MOD_RES (18)..(19)..(20)..(21)..(22): Xaa is A or G
  MOD_RES (23)..(24)..(25)..(26): Xaa is A or G or absent
PTXXVPTRLSSLSILFFXXXXXXXXXLKVYPDMVVESXG

SEQ ID NO: 25549 - protein, 34 aa, Artificial Sequence
  Non-cyclic GFR-binding peptide
  MOD_RES (1)..(2): Xaa is C or S
  MOD_RES (16)..(17)..(18)..(19)..(20): Xaa is A or G
  MOD_RES (21)..(22)..(23)..(24): Xaa is A or G or absent
XXVPTRLSSLSILFFXXXXXXXXXLKVYPDMVVE

SEQ ID NO: 25550 - protein, 35 aa, Artificial Sequence
  Non-cyclic GFR-binding peptide
  MOD_RES (32)..(34): Xaa is C or S
APTQLSSLSVLFFDDSSNVILKVYPNMVVRAXGXH

SEQ ID NO: 25551 - protein, 35 aa, Artificial Sequence
  Non-cyclic GFR-binding peptide
  MOD_RES (2)..(2): Xaa is C or S
  MOD_RES (16)..(17)..(18)..(19)..(20): Xaa is A or G
  MOD_RES (21)..(22)..(23)..(24): Xaa is A or G or absent
TXAPTKLSSLSVLFFXXXXXXXXXLKVYPNMVVRS

SEQ ID NO: 25552 - protein, 36 aa, Artificial Sequence
  Non-cyclic GFR-binding peptide
  MOD_RES (1)..(2)..(33)..(35): Xaa is C or S
XXVSQDLSSLSILFFIGKTPKILKVYPMIVKSXKXS

SEQ ID NO: 25553 - protein, 38 aa, Artificial Sequence
  Non-cyclic GFR-binding peptide
  MOD_RES (5)..(6)..(38): Xaa is C or S
APASXXVPARLSSLSILFFDAANNVVLKVYPDMVVEAX

SEQ ID NO: 25554 - protein, 35 aa, Artificial Sequence
  Non-cyclic GFR-binding peptide
  MOD_RES (2)..(2): Xaa is C or S
  MOD_RES (16)..(17)..(18)..(19)..(20): Xaa is A or G
  MOD_RES (21)..(22)..(23)..(24): Xaa is A or G or absent
EXVPTEESSLSMLFFXXXXXXXXXLKVYPFLQHNK

SEQ ID NO: 25555 - protein, 36 aa, Artificial Sequence
  Non-cyclic GFR-binding peptide
  MOD_RES (3)..(4): Xaa is C or S
  MOD_RES (18)..(19)..(20)..(21)..(22): Xaa is A or G
  MOD_RES (23)..(24)..(25)..(26): Xaa is A or G or absent
KPXXAPTKLSSLSVLFFXXXXXXXXXLKVYPNMVVR

SEQ ID NO: 25556 - protein, 38 aa, Artificial Sequence
  Non-cyclic GFR-binding peptide
  MOD_RES (3)..(4)..(38): Xaa is C or S
  MOD_RES (18)..(19)..(20)..(21)..(22): Xaa is A or G
  MOD_RES (23)..(24)..(25)..(26): Xaa is A or G or absent
KPXXAPTQLSSLSVLFFXXXXXXXXXLKVYPNMVVRAX

SEQ ID NO: 25557 - protein, 37 aa, Artificial Sequence
  Non-cyclic GFR-binding peptide
  MOD_RES (6)..(7): Xaa is C or S
GSAGPXXTPTKMSSLSMLFFNDKQQIILKVYPGMVVD

SEQ ID NO: 25558 - protein, 34 aa, Artificial Sequence
  Non-cyclic GFR-binding peptide
  MOD_RES (1)..(2): Xaa is C or S
  MOD_RES (16)..(17)..(18)..(19)..(20): Xaa is A or G
  MOD_RES (21)..(22)..(23)..(24): Xaa is A or G or absent
XXAPTQLSSLSVLFFXXXXXXXXXLKVYPNMVVR

SEQ ID NO: 25559 - protein, 35 aa, Artificial Sequence
  Non-cyclic GFR-binding peptide
  MOD_RES (2)..(3)..(35): Xaa is C or S
PXXAPTKLSSLSVLFFDDSSNVILKVYPNMVVRSX

SEQ ID NO: 25560 - protein, 39 aa, Artificial Sequence
  Non-cyclic GFR-binding peptide
  MOD_RES (5)..(6): Xaa is C or S
  MOD_RES (20)..(21)..(22)..(23)..(24): Xaa is A or G
  MOD_RES (25)..(26)..(27)..(28): Xaa is A or G or absent
TPPTXXVPTRLSSLSILFFXXXXXXXXXLKVYPDMVVES

SEQ ID NO: 25561 - protein, 35 aa, Artificial Sequence
  Non-cyclic GFR-binding peptide
  MOD_RES (3)..(4)..(35): Xaa is C or S
SPXXVPQDLSSLSILFFVGRTPKVLKVYPMVVKSX

SEQ ID NO: 25562 - protein, 38 aa, Artificial Sequence
  Non-cyclic GFR-binding peptide
  MOD_RES (1)..(35)..(37): Xaa is C or S
  MOD_RES (15)..(16)..(17)..(18)..(19): Xaa is A or G
  MOD_RES (20)..(21)..(22)..(23): Xaa is A or G or absent
XAPTKLSSLSVLFFXXXXXXXXXLKVYPNMVVRSXGXH

SEQ ID NO: 25563 - protein, 37 aa, Artificial Sequence
  Non-cyclic GFR-binding peptide
  MOD_RES (5)..(6): Xaa is C or S
SAGPXXTPTKMSSLSMLFFNDKQQIILKVYPGMVVDR

SEQ ID NO: 25564 - protein, 43 aa, Artificial Sequence
  Non-cyclic GFR-binding peptide
  MOD_RES (6)..(7)..(40)..(42): Xaa is C or S
  MOD_RES (21)..(22)..(23)..(24)..(25): Xaa is A or G
  MOD_RES (26)..(27)..(28)..(29): Xaa is A or G or absent
ASASPXXVPQDLSSLSILFFXXXXXXXXXLKVYPMVVKSXKXS

SEQ ID NO: 25565 - protein, 36 aa, Artificial Sequence
  Non-cyclic GFR-binding peptide
  MOD_RES (3)..(4): Xaa is C or S
  MOD_RES (18)..(19)..(20)..(21)..(22): Xaa is A or G
  MOD_RES (23)..(24)..(25)..(26): Xaa is A or G or absent
SPXXVSQDLSSLSILFFXXXXXXXXXLKVYPMIVKS

SEQ ID NO: 25566 - protein, 35 aa, Artificial Sequence
  Non-cyclic GFR-binding peptide
  MOD_RES (2)..(3): Xaa is C or S
  MOD_RES (17)..(18)..(19)..(20)..(21): Xaa is A or G
  MOD_RES (22)..(23)..(24)..(25): Xaa is A or G or absent
PXXVPQDLSSLSILFFXXXXXXXXXLKVYPMVVKS

SEQ ID NO: 25567 - protein, 35 aa, Artificial Sequence
  Non-cyclic GFR-binding peptide
  MOD_RES (4)..(4): Xaa is C or S
KPTXAPTKLSSLSVLFFDDSSNVILKVYPNMVVRS

SEQ ID NO: 25568 - protein, 36 aa, Artificial Sequence
  Non-cyclic GFR-binding peptide
  MOD_RES (1)..(2)..(34)..(36): Xaa is C or S
XXAPTQLSSLSVLFFDDSSNVILKVYPNMVVRAXGX

SEQ ID NO: 25569 - protein, 35 aa, Artificial Sequence
  Non-cyclic GFR-binding peptide
  MOD_RES (1)..(35): Xaa is C or S
  MOD_RES (15)..(16)..(17)..(18)..(19): Xaa is A or G
  MOD_RES (20)..(21)..(22)..(23): Xaa is A or G or absent
XVPTRLSSLSILFFXXXXXXXXXLKVYPDMVVESX

SEQ ID NO: 25570 - protein, 37 aa, Artificial Sequence
  Non-cyclic GFR-binding peptide
  MOD_RES (34)..(36): Xaa is C or S
  MOD_RES (14)..(15)..(16)..(17)..(18): Xaa is A or G
  MOD_RES (19)..(20)..(21)..(22): Xaa is A or G or absent
VPTELSSLSMLFFXXXXXXXXXLKVYPEMVVEGXGXR

SEQ ID NO: 25571 - protein, 37 aa, Artificial Sequence
  Non-cyclic GFR-binding peptide
  MOD_RES (2)..(3)..(35)..(37): Xaa is C or S
AXXVPTELSSLSMLFFDEYDKVVLKVYPEMVVEGXGX

SEQ ID NO: 25572 - protein, 38 aa, Artificial Sequence
  Non-cyclic GFR-binding peptide
  MOD_RES (5)..(6)..(38): Xaa is C or S
IPKAXXVPTELSSLSMLFFDEYDKVVLKVYPEMVVEGX

SEQ ID NO: 25573 - protein, 34 aa, Artificial Sequence
  Non-cyclic GFR-binding peptide
  MOD_RES (1)..(33): Xaa is C or S
XVPTELSSLSMLFFDEYDKVVLKVYPEMVVEGXG

SEQ ID NO: 25574 - protein, 36 aa, Artificial Sequence
  Non-cyclic GFR-binding peptide
  MOD_RES (1)..(2)..(33)..(35): Xaa is C or S
XXVPQALSSLSILFFVGRKPKVLKVYPMIVRSXKXS

SEQ ID NO: 25575 - protein, 35 aa, Artificial Sequence
  Non-cyclic GFR-binding peptide
  MOD_RES (1)..(33)..(35): Xaa is C or S
XVPTKLSSLSILFFDKGVVTYLKVYPGMAVSEXGX

SEQ ID NO: 25576 - protein, 37 aa, Artificial Sequence
  Non-cyclic GFR-binding peptide
  MOD_RES (2)..(3)..(35)..(37): Xaa is C or S
AXXVPTKLSSLSILFFDKGVVTYLKVYPGMAVSEXGX

SEQ ID NO: 25577 - protein, 43 aa, Artificial Sequence
  Non-cyclic GFR-binding peptide
  MOD_RES (4)..(41)..(43): Xaa is C or S
  MOD_RES (20)..(21)..(22)..(23)..(24): Xaa is A or G
  MOD_RES (25)..(26)..(27)..(28): Xaa is A or G or absent
SVKXQPSRVHHSSLSVLFFXXXXXXXXXLKVYPRLEEHLEXAX

SEQ ID NO: 25578 - protein, 36 aa, Artificial Sequence
  Non-cyclic GFR-binding peptide
  MOD_RES (3)..(4)..(35): Xaa is C or S
APXXVPQALSSLSILFFVGRKPKVLKVYPMIVRSXK

SEQ ID NO: 25579 - protein, 35 aa, Artificial Sequence
  Non-cyclic GFR-binding peptide
  MOD_RES (1)..(33)..(35): Xaa is C or S
XVPTELSSLSMLFFDEYDKVVLKVYPEMVVEGXGX

SEQ ID NO: 25580 - protein, 32 aa, Artificial Sequence
  Non-cyclic GFR-binding peptide
  MOD_RES (14)..(15)..(16)..(17)..(18): Xaa is A or G
  MOD_RES (19)..(20)..(21)..(22): Xaa is A or G or absent
APTKLSSLSVLFFXXXXXXXXXLKVYPNMVVK

SEQ ID NO: 25581 - protein, 35 aa, Artificial Sequence
  Non-cyclic GFR-binding peptide
  MOD_RES (4)..(5): Xaa is C or S
PKAXXVPTELSSLSMLFFDEYDKVVLKVYPEMVVE

SEQ ID NO: 25582 - protein, 35 aa, Artificial Sequence
  Non-cyclic GFR-binding peptide
  MOD_RES (4)..(5): Xaa is C or S
PKPXXAPTQLSSLSVLFFDDSSNVILKVYPNMVVR

SEQ ID NO: 25583 - protein, 40 aa, Artificial Sequence
  Non-cyclic GFR-binding peptide
  MOD_RES (3)..(4)..(38)..(40): Xaa is C or S
  MOD_RES (18)..(19)..(20)..(21)..(22): Xaa is A or G
  MOD_RES (23)..(24)..(25)..(26): Xaa is A or G or absent
KAXXVPTKLSSLSILFFXXXXXXXXXLKVYPGMAVSEXGX

SEQ ID NO: 25584 - protein, 36 aa, Artificial Sequence
  Non-cyclic GFR-binding peptide
  MOD_RES (4)..(5): Xaa is C or S
PPTXXVPTRLSSLSILFFDSANNVVLKVYPDMVVES

SEQ ID NO: 25585 - protein, 44 aa, Artificial Sequence
  Non-cyclic GFR-binding peptide
  MOD_RES (7)..(41)..(43): Xaa is C or S
  MOD_RES (21)..(22)..(23)..(24)..(25): Xaa is A or G
  MOD_RES (26)..(27)..(28)..(29): Xaa is A or G or absent
NDEGLEXVPTEESSLSMLFFXXXXXXXXXLKVYPFLQHNKXEXR

SEQ ID NO: 25586 - protein, 37 aa, Artificial Sequence
  Non-cyclic GFR-binding peptide
  MOD_RES (1)..(2)..(34)..(36): Xaa is C or S
XXAPTKLSSLSVLFFDDSSNVILKVYPNMVVRSXGXH

SEQ ID NO: 25587 - protein, 32 aa, Artificial Sequence
  Non-cyclic GFR-binding peptide
  MOD_RES (14)..(15)..(16)..(17)..(18): Xaa is A or G
  MOD_RES (19)..(20)..(21)..(22): Xaa is A or G or absent
APVKTSSLSMLFFXXXXXXXXXLKVYPMIVEE

SEQ ID NO: 25588 - protein, 40 aa, Artificial Sequence
  Non-cyclic GFR-binding peptide
  MOD_RES (6)..(7): Xaa is C or S
  MOD_RES (21)..(22)..(23)..(24)..(25): Xaa is A or G
  MOD_RES (26)..(27)..(28)..(29): Xaa is A or G or absent
TVPKPXXAPTQLSSLSVLFFXXXXXXXXXLKVYPNMVVRA

SEQ ID NO: 25589 - protein, 39 aa, Artificial Sequence
  Non-cyclic GFR-binding peptide
  MOD_RES (4)..(5)..(39): Xaa is C or S
  MOD_RES (19)..(20)..(21)..(22)..(23): Xaa is A or G
  MOD_RES (24)..(25)..(26)..(27): Xaa is A or G or absent
PKPXXAPTKLSSLSVLFFXXXXXXXXXLKVYPNMVVRSX

SEQ ID NO: 25590 - protein, 34 aa, Artificial Sequence
  Non-cyclic GFR-binding peptide
  MOD_RES (1)..(34): Xaa is C or S
  MOD_RES (15)..(16)..(17)..(18)..(19): Xaa is A or G
  MOD_RES (20)..(21)..(22)..(23): Xaa is A or G or absent
XVSQDLSSLSILFFXXXXXXXXXLKVYPMIVKSX

SEQ ID NO: 25591 - protein, 40 aa, Artificial Sequence
  Non-cyclic GFR-binding peptide
  MOD_RES (5)..(6)..(39): Xaa is C or S
  MOD_RES (20)..(21)..(22)..(23)..(24): Xaa is A or G
  MOD_RES (25)..(26)..(27)..(28): Xaa is A or G or absent
SAAPXXVPQALSSLSILFFXXXXXXXXXLKVYPMIVRSXK

SEQ ID NO: 25592 - protein, 36 aa, Artificial Sequence
  Non-cyclic GFR-binding peptide
  MOD_RES (34)..(36): Xaa is C or S
  MOD_RES (14)..(15)..(16)..(17)..(18): Xaa is A or G
  MOD_RES (19)..(20)..(21)..(22): Xaa is A or G or absent
APTKLSSLSVLFFXXXXXXXXXLKVYPNMVVRSXGX

SEQ ID NO: 25593 - protein, 34 aa, Artificial Sequence
  Non-cyclic GFR-binding peptide
  MOD_RES (2)..(2): Xaa is C or S
  MOD_RES (16)..(17)..(18)..(19)..(20): Xaa is A or G
  MOD_RES (21)..(22)..(23)..(24): Xaa is A or G or absent
EXVPTEESSLSMLFFXXXXXXXXXLKVYPFLQHN

SEQ ID NO: 25594 - protein, 41 aa, Artificial Sequence
  Non-cyclic GFR-binding peptide
  MOD_RES (3)..(4)..(38)..(40): Xaa is C or S
  MOD_RES (18)..(19)..(20)..(21)..(22): Xaa is A or G
  MOD_RES (23)..(24)..(25)..(26): Xaa is A or G or absent
KPXXAPTQLSSLSVLFFXXXXXXXXXLKVYPNMVVRAXGXH

SEQ ID NO: 25595 - protein, 39 aa, Artificial Sequence
  Non-cyclic GFR-binding peptide
  MOD_RES (3)..(4)..(38): Xaa is C or S
  MOD_RES (18)..(19)..(20)..(21)..(22): Xaa is A or G
  MOD_RES (23)..(24)..(25)..(26): Xaa is A or G or absent
GPXXTPTKMSSLSMLFFXXXXXXXXXLKVYPGMVVDRXG

SEQ ID NO: 25596 - protein, 40 aa, Artificial Sequence
  Non-cyclic GFR-binding peptide
  MOD_RES (5)..(6)..(39): Xaa is C or S
  MOD_RES (20)..(21)..(22)..(23)..(24): Xaa is A or G
  MOD_RES (25)..(26)..(27)..(28): Xaa is A or G or absent
SASPXXVSQDLSSLSILFFXXXXXXXXXLKVYPMIVKSXK

SEQ ID NO: 25597 - protein, 34 aa, Artificial Sequence
  Non-cyclic GFR-binding peptide
  MOD_RES (33)..(33): Xaa is C or S
  MOD_RES (14)..(15)..(16)..(17)..(18): Xaa is A or G
  MOD_RES (19)..(20)..(21)..(22): Xaa is A or G or absent
VPQALSSLSILFFXXXXXXXXXLKVYPMIVRSXK

SEQ ID NO: 25598 - protein, 37 aa, Artificial Sequence
  Non-cyclic GFR-binding peptide
  MOD_RES (5)..(6)..(37): Xaa is C or S
SAAPXXVPQALSSLSILFFVGRKPKVLKVYPMIVRSX

SEQ ID NO: 25599 - protein, 32 aa, Artificial Sequence
  Non-cyclic GFR-binding peptide
  MOD_RES (14)..(15)..(16)..(17)..(18): Xaa is A or G
  MOD_RES (19)..(20)..(21)..(22): Xaa is A or G or absent
APTKLSSLSVLFFXXXXXXXXXLKVYPNMVVR

SEQ ID NO: 25600 - protein, 33 aa, Artificial Sequence
  Non-cyclic GFR-binding peptide
  MOD_RES (1)..(1): Xaa is C or S
  MOD_RES (15)..(16)..(17)..(18)..(19): Xaa is A or G
  MOD_RES (20)..(21)..(22)..(23): Xaa is A or G or absent
XAPTKLSSLSVLFFXXXXXXXXXLKVYPNMVVK

SEQ ID NO: 25601 - protein, 37 aa, Artificial Sequence
  Non-cyclic GFR-binding peptide
  MOD_RES (1)..(2)..(34)..(36): Xaa is C or S
XXVPTRLSSLSILFFDSANNVVLKVYPDMVVESXGXR

SEQ ID NO: 25602 - protein, 33 aa, Artificial Sequence
  Non-cyclic GFR-binding peptide
  MOD_RES (1)..(1): Xaa is C or S
  MOD_RES (15)..(16)..(17)..(18)..(19): Xaa is A or G
  MOD_RES (20)..(21)..(22)..(23): Xaa is A or G or absent
XAPTKLSSLSVLFFXXXXXXXXXLKVYPNMVVR

SEQ ID NO: 25603 - protein, 36 aa, Artificial Sequence
  Non-cyclic GFR-binding peptide
  MOD_RES (3)..(4)..(35): Xaa is C or S
STXXAPVKTSSLSMLFFDNGRVLLLKVYPMIVEEXG

SEQ ID NO: 25604 - protein, 35 aa, Artificial Sequence
  Non-cyclic GFR-binding peptide
  MOD_RES (4)..(5): Xaa is C or S
PKPXXAPTKLSSLSVLFFDDSSNVILKVYPNMVVR

SEQ ID NO: 25605 - protein, 41 aa, Artificial Sequence
  Non-cyclic GFR-binding peptide
  MOD_RES (5)..(6)..(38)..(40): Xaa is C or S
VPKPXXAPTQLSSLSVLFFDDSSNVILKVYPNMVVRAXGXH

SEQ ID NO: 25606 - protein, 35 aa, Artificial Sequence
  Non-cyclic GFR-binding peptide
  MOD_RES (33)..(35): Xaa is C or S
  MOD_RES (14)..(15)..(16)..(17)..(18): Xaa is A or G
  MOD_RES (19)..(20)..(21)..(22): Xaa is A or G or absent
VPQALSSLSILFFXXXXXXXXXLKVYPMIVRSXKX

SEQ ID NO: 25607 - protein, 39 aa, Artificial Sequence
  Non-cyclic GFR-binding peptide
  MOD_RES (3)..(4)..(38): Xaa is C or S
  MOD_RES (18)..(19)..(20)..(21)..(22): Xaa is A or G
  MOD_RES (23)..(24)..(25)..(26): Xaa is A or G or absent
KAXXAPTKLSSLSVLFFXXXXXXXXXLKVYPNMVVKAXG

SEQ ID NO: 25608 - protein, 37 aa, Artificial Sequence
  Non-cyclic GFR-binding peptide
  MOD_RES (3)..(3): Xaa is C or S
  MOD_RES (19)..(20)..(21)..(22)..(23): Xaa is A or G
  MOD_RES (24)..(25)..(26)..(27): Xaa is A or G or absent
VKXQPSRVHHSSLSVLFFXXXXXXXXXLKVYPRLEEH

SEQ ID NO: 25609 - protein, 33 aa, Artificial Sequence
  Non-cyclic GFR-binding peptide
PSRVHHSSLSVLFFEYVRKKPKLLKVYPRLEEH

SEQ ID NO: 25610 - protein, 38 aa, Artificial Sequence
  Non-cyclic GFR-binding peptide
  MOD_RES (5)..(6): Xaa is C or S
VGKAXXVPTKLSSLSVLFFDDMGVPTLKVYPEGMSVAE

SEQ ID NO: 25611 - protein, 38 aa, Artificial Sequence
  Non-cyclic GFR-binding peptide
  MOD_RES (6)..(7)..(38): Xaa is C or S
ASAAPXXVPQALSSLSILFFVGRKPKVLKVYPMIVRSX

SEQ ID NO: 25612 - protein, 38 aa, Artificial Sequence
  Non-cyclic GFR-binding peptide
  MOD_RES (1)..(2)..(36)..(38): Xaa is C or S
  MOD_RES (16)..(17)..(18)..(19)..(20): Xaa is A or G
  MOD_RES (21)..(22)..(23)..(24): Xaa is A or G or absent
XXVPTRLSSLSILFFXXXXXXXXXLKVYPDMVVESXGX

SEQ ID NO: 25613 - protein, 40 aa, Artificial Sequence
  Non-cyclic GFR-binding peptide
  MOD_RES (4)..(5)..(39): Xaa is C or S
  MOD_RES (19)..(20)..(21)..(22)..(23): Xaa is A or G
  MOD_RES (24)..(25)..(26)..(27): Xaa is A or G or absent
PPTXXVPTRLSSLSILFFXXXXXXXXXLKVYPDMVVESXG

SEQ ID NO: 25614 - protein, 38 aa, Artificial Sequence
  Non-cyclic GFR-binding peptide
  MOD_RES (3)..(4)..(37): Xaa is C or S
  MOD_RES (18)..(19)..(20)..(21)..(22): Xaa is A or G
  MOD_RES (23)..(24)..(25)..(26): Xaa is A or G or absent
SPXXVPQDLSSLSILFFXXXXXXXXXLKVYPMVVKSXK

SEQ ID NO: 25615 - protein, 37 aa, Artificial Sequence
  Non-cyclic GFR-binding peptide
  MOD_RES (3)..(4)..(35)..(37): Xaa is C or S
SPXXVSQDLSSLSILFFIGKTPKILKVYPMIVKSXKX

SEQ ID NO: 25616 - protein, 39 aa, Artificial Sequence
  Non-cyclic GFR-binding peptide
  MOD_RES (5)..(6)..(39): Xaa is C or S
  MOD_RES (20)..(21)..(22)..(23)..(24): Xaa is A or G
  MOD_RES (25)..(26)..(27)..(28): Xaa is A or G or absent
SASPXXVSQDLSSLSILFFXXXXXXXXXLKVYPMIVKSX

SEQ ID NO: 25617 - protein, 44 aa, Artificial Sequence
  Non-cyclic GFR-binding peptide
  MOD_RES (7)..(41)..(43): Xaa is C or S
  MOD_RES (21)..(22)..(23)..(24)..(25): Xaa is A or G
  MOD_RES (26)..(27)..(28)..(29): Xaa is A or G or absent
HVTKPTXAPTKLSSLSVLFFXXXXXXXXXLKVYPNMVVRSXGXH

SEQ ID NO: 25618 - protein, 39 aa, Artificial Sequence
  Non-cyclic GFR-binding peptide
  MOD_RES (3)..(4)..(36)..(38): Xaa is C or S
PTXXVPTRLSSLSILFFDSANNVVLKVYPDMVVESXGXR

SEQ ID NO: 25619 - protein, 36 aa, Artificial Sequence
  Non-cyclic GFR-binding peptide
  MOD_RES (36)..(36): Xaa is C or S
  MOD_RES (15)..(16)..(17)..(18)..(19): Xaa is A or G
  MOD_RES (20)..(21)..(22)..(23): Xaa is A or G or absent
PSRVHHSSLSVLFFXXXXXXXXXLKVYPRLEEHLEX

SEQ ID NO: 25620 - protein, 39 aa, Artificial Sequence
  Non-cyclic GFR-binding peptide
  MOD_RES (6)..(7)..(38): Xaa is C or S
ASAAPXXVPQALSSLSILFFVGRKPKVLKVYPMIVRSXK

SEQ ID NO: 25621 - protein, 37 aa, Artificial Sequence
  Non-cyclic GFR-binding peptide
  MOD_RES (1)..(35)..(37): Xaa is C or S
  MOD_RES (15)..(16)..(17)..(18)..(19): Xaa is A or G
  MOD_RES (20)..(21)..(22)..(23): Xaa is A or G or absent
XVPTEESSLSMLFFXXXXXXXXXLKVYPFLQHNKXEX

SEQ ID NO: 25622 - protein, 39 aa, Artificial Sequence
  Non-cyclic GFR-binding peptide
  MOD_RES (7)..(7): Xaa is C or S
  MOD_RES (21)..(22)..(23)..(24)..(25): Xaa is A or G
  MOD_RES (26)..(27)..(28)..(29): Xaa is A or G or absent
HVTKPTXAPTKLSSLSVLFFXXXXXXXXXLKVYPNMVVR

SEQ ID NO: 25623 - protein, 38 aa, Artificial Sequence
  Non-cyclic GFR-binding peptide
  MOD_RES (2)..(36)..(38): Xaa is C or S
  MOD_RES (16)..(17)..(18)..(19)..(20): Xaa is A or G
  MOD_RES (21)..(22)..(23)..(24): Xaa is A or G or absent
EXVPTEESSLSMLFFXXXXXXXXXLKVYPFLQHNKXEX

SEQ ID NO: 25624 - protein, 35 aa, Artificial Sequence
  Non-cyclic GFR-binding peptide
  MOD_RES (1)..(33)..(35): Xaa is C or S
XVPARLSSLSILFFDAANNVVLKVYPDMVVEAXGX

SEQ ID NO: 25625 - protein, 32 aa, Artificial Sequence
  Non-cyclic GFR-binding peptide
VPTKLSSLSVLFFDDMGVPTLKVYPEGMSVAE

SEQ ID NO: 25626 - protein, 37 aa, Artificial Sequence
  Non-cyclic GFR-binding peptide
  MOD_RES (5)..(5): Xaa is C or S
EGLEXVPTEESSLSMLFFRIKPHQGQHLKVYPFLQHN

SEQ ID NO: 25627 - protein, 41 aa, Artificial Sequence
  Non-cyclic GFR-binding peptide
  MOD_RES (7)..(39)..(41): Xaa is C or S
HVTKPTXAPTKLSSLSVLFFDDSSNVILKVYPNMVVRSXGX

SEQ ID NO: 25628 - protein, 41 aa, Artificial Sequence
  Non-cyclic GFR-binding peptide
  MOD_RES (6)..(7)..(39)..(41): Xaa is C or S
HVPKPXXAPTKLSSLSVLFFDDSSNVILKVYPNMVVRSXGX

SEQ ID NO: 25629 - protein, 33 aa, Artificial Sequence
  Non-cyclic GFR-binding peptide
  MOD_RES (1)..(1): Xaa is C or S
  MOD_RES (15)..(16)..(17)..(18)..(19): Xaa is A or G
  MOD_RES (20)..(21)..(22)..(23): Xaa is A or G or absent
XAPVKTSSLSMLFFXXXXXXXXXLKVYPMIVEE

SEQ ID NO: 25630 - protein, 36 aa, Artificial Sequence
  Non-cyclic GFR-binding peptide
  MOD_RES (2)..(3)..(35): Xaa is C or S
PXXAPTQLSSLSVLFFDDSSNVILKVYPNMVVRAXG

SEQ ID NO: 25631 - protein, 33 aa, Artificial Sequence
  Non-cyclic GFR-binding peptide
  MOD_RES (14)..(15)..(16)..(17)..(18): Xaa is A or G
  MOD_RES (19)..(20)..(21)..(22): Xaa is A or G or absent
SRVHHSSLSVLFFXXXXXXXXXLKVYPRLEEHL

SEQ ID NO: 25632 - protein, 42 aa, Artificial Sequence
  Non-cyclic GFR-binding peptide
  MOD_RES (4)..(5)..(39)..(41): Xaa is C or S
  MOD_RES (19)..(20)..(21)..(22)..(23): Xaa is A or G
  MOD_RES (24)..(25)..(26)..(27): Xaa is A or G or absent
PKAXXAPTKLSSLSVLFFXXXXXXXXXLKVYPNMVVKAXGXH

SEQ ID NO: 25633 - protein, 39 aa, Artificial Sequence
  Non-cyclic GFR-binding peptide
  MOD_RES (2)..(3)..(37)..(39): Xaa is C or S
  MOD_RES (17)..(18)..(19)..(20)..(21): Xaa is A or G
  MOD_RES (22)..(23)..(24)..(25): Xaa is A or G or absent
AXXVPTELSSLSMLFFXXXXXXXXXLKVYPEMVVEGXGX

SEQ ID NO: 25634 - protein, 34 aa, Artificial Sequence
  Non-cyclic GFR-binding peptide
  MOD_RES (3)..(4): Xaa is C or S
KAXXAPTKLSSLSVLFFDSSNNVILKVYPNMVVK

SEQ ID NO: 25635 - protein, 42 aa, Artificial Sequence
  Non-cyclic GFR-binding peptide
  MOD_RES (6)..(7)..(41): Xaa is C or S
  MOD_RES (21)..(22)..(23)..(24)..(25): Xaa is A or G
  MOD_RES (26)..(27)..(28)..(29): Xaa is A or G or absent
KASKAXXVPTKLSSLSILFFXXXXXXXXXLKVYPGMAVSEXG

SEQ ID NO: 25636 - protein, 37 aa, Artificial Sequence
  Non-cyclic GFR-binding peptide
  MOD_RES (2)..(3): Xaa is C or S
  MOD_RES (17)..(18)..(19)..(20)..(21): Xaa is A or G
  MOD_RES (22)..(23)..(24)..(25): Xaa is A or G or absent
AXXVPTKLSSLSVLFFXXXXXXXXXLKVYPEGMSVAE

SEQ ID NO: 25637 - protein, 43 aa, Artificial Sequence
  Non-cyclic GFR-binding peptide
  MOD_RES (6)..(7)..(40)..(42): Xaa is C or S
  MOD_RES (21)..(22)..(23)..(24)..(25): Xaa is A or G
  MOD_RES (26)..(27)..(28)..(29): Xaa is A or G or absent
ASASPXXVSQDLSSLSILFFXXXXXXXXXLKVYPMIVKSXKXS

SEQ ID NO: 25638 - protein, 36 aa, Artificial Sequence
  Non-cyclic GFR-binding peptide
  MOD_RES (2)..(3)..(35): Xaa is C or S
SXXVPARLSSLSILFFDAANNVVLKVYPDMVVEAXG

SEQ ID NO: 25639 - protein, 41 aa, Artificial Sequence
  Non-cyclic GFR-binding peptide
  MOD_RES (5)..(39)..(41): Xaa is C or S
EGLEXVPTEESSLSMLFFRIKPHQGQHLKVYPFLQHNKXEX

SEQ ID NO: 25640 - protein, 37 aa, Artificial Sequence
  Non-cyclic GFR-binding peptide
  MOD_RES (2)..(3)..(37): Xaa is C or S
  MOD_RES (17)..(18)..(19)..(20)..(21): Xaa is A or G
  MOD_RES (22)..(23)..(24)..(25): Xaa is A or G or absent
AXXVPTKLSSLSILFFXXXXXXXXXLKVYPGMAVSEX

SEQ ID NO: 25641 - protein, 38 aa, Artificial Sequence
  Non-cyclic GFR-binding peptide
  MOD_RES (3)..(4)..(37): Xaa is C or S
  MOD_RES (18)..(19)..(20)..(21)..(22): Xaa is A or G
  MOD_RES (23)..(24)..(25)..(26): Xaa is A or G or absent
STXXAPVKTSSLSMLFFXXXXXXXXXLKVYPMIVEEXG

SEQ ID NO: 25642 - protein, 43 aa, Artificial Sequence
  Non-cyclic GFR-binding peptide
  MOD_RES (5)..(6)..(40)..(42): Xaa is C or S
  MOD_RES (20)..(21)..(22)..(23)..(24): Xaa is A or G
  MOD_RES (25)..(26)..(27)..(28): Xaa is A or G or absent
ASKAXXVPTKLSSLSILFFXXXXXXXXXLKVYPGMAVSEXGXR

SEQ ID NO: 25643 - protein, 37 aa, Artificial Sequence
  Non-cyclic GFR-binding peptide
  MOD_RES (1)..(35)..(37): Xaa is C or S
  MOD_RES (15)..(16)..(17)..(18)..(19): Xaa is A or G
  MOD_RES (20)..(21)..(22)..(23): Xaa is A or G or absent
XVPTKLSSLSILFFXXXXXXXXXLKVYPGMAVSEXGX

SEQ ID NO: 25644 - protein, 33 aa, Artificial Sequence
  Non-cyclic GFR-binding peptide
  MOD_RES (1)..(2)..(33): Xaa is C or S
XXVPQDLSSLSILFFVGRTPKVLKVYPMVVKSX

SEQ ID NO: 25645 - protein, 42 aa, Artificial Sequence
  Non-cyclic GFR-binding peptide
  MOD_RES (6)..(7)..(39)..(41): Xaa is C or S
AVPKAXXAPTKLSSLSVLFFDSSNNVILKVYPNMVVKAXGXH

SEQ ID NO: 25646 - protein, 40 aa, Artificial Sequence
  Non-cyclic GFR-binding peptide
  MOD_RES (7)..(39): Xaa is C or S
HVTKPTXAPTKLSSLSVLFFDDSSNVILKVYPNMVVRSXG

SEQ ID NO: 25647 - protein, 39 aa, Artificial Sequence
  Non-cyclic GFR-binding peptide
  MOD_RES (6)..(7): Xaa is C or S
  MOD_RES (21)..(22)..(23)..(24)..(25): Xaa is A or G
  MOD_RES (26)..(27)..(28)..(29): Xaa is A or G or absent
ASAAPXXVPQALSSLSILFFXXXXXXXXXLKVYPMIVRS

SEQ ID NO: 25648 - protein, 36 aa, Artificial Sequence
  Non-cyclic GFR-binding peptide
  MOD_RES (1)..(2)..(34)..(36): Xaa is C or S
XXVPTRLSSLSILFFDSANNVVLKVYPDMVVESXGX

SEQ ID NO: 25649 - protein, 38 aa, Artificial Sequence
  Non-cyclic GFR-binding peptide
  MOD_RES (5)..(6)..(38): Xaa is C or S
ASKAXXVPTKLSSLSILFFDKGVVTYLKVYPGMAVSEX

SEQ ID NO: 25650 - protein, 40 aa, Artificial Sequence
  Non-cyclic GFR-binding peptide
  MOD_RES (4)..(4): Xaa is C or S
  MOD_RES (20)..(21)..(22)..(23)..(24): Xaa is A or G
  MOD_RES (25)..(26)..(27)..(28): Xaa is A or G or absent
SVKXQPSRVHHSSLSVLFFXXXXXXXXXLKVYPRLEEHLE

SEQ ID NO: 25651 - protein, 40 aa, Artificial Sequence
  Non-cyclic GFR-binding peptide
  MOD_RES (6)..(7)..(39): Xaa is C or S
STPPTXXVPTRLSSLSILFFDSANNVVLKVYPDMVVESXG

SEQ ID NO: 25652 - protein, 37 aa, Artificial Sequence
  Non-cyclic GFR-binding peptide
  MOD_RES (34)..(36): Xaa is C or S
  MOD_RES (14)..(15)..(16)..(17)..(18): Xaa is A or G
  MOD_RES (19)..(20)..(21)..(22): Xaa is A or G or absent
VPTEESSLSMLFFXXXXXXXXXLKVYPFLQHNKXEXR

SEQ ID NO: 25653 - protein, 41 aa, Artificial Sequence
  Non-cyclic GFR-binding peptide
  MOD_RES (2)..(39)..(41): Xaa is C or S
KXQPSRVHHSSLSVLFFEYVRKKPKLLKVYPRLEEHLEXAX

SEQ ID NO: 25654 - protein, 40 aa, Artificial Sequence
  Non-cyclic GFR-binding peptide
  MOD_RES (6)..(7)..(39): Xaa is C or S
SIPKAXXVPTELSSLSMLFFDEYDKVVLKVYPEMVVEGXG

SEQ ID NO: 25655 - protein, 37 aa, Artificial Sequence
  Non-cyclic GFR-binding peptide
  MOD_RES (4)..(5): Xaa is C or S
  MOD_RES (19)..(20)..(21)..(22)..(23): Xaa is A or G
  MOD_RES (24)..(25)..(26)..(27): Xaa is A or G or absent
PSTXXAPVKTSSLSMLFFXXXXXXXXXLKVYPMIVEE

SEQ ID NO: 25656 - protein, 32 aa, Artificial Sequence
  Non-cyclic GFR-binding peptide
  MOD_RES (14)..(15)..(16)..(17)..(18): Xaa is A or G
  MOD_RES (19)..(20)..(21)..(22): Xaa is A or G or absent
TPTKMSSLSMLFFXXXXXXXXXLKVYPGMVVD

SEQ ID NO: 25657 - protein, 41 aa, Artificial Sequence
  Non-cyclic GFR-binding peptide
  MOD_RES (5)..(5): Xaa is C or S
SSVKXQPSRVHHSSLSVLFFEYVRKKPKLLKVYPRLEEHLE

SEQ ID NO: 25658 - protein, 43 aa, Artificial Sequence
  Non-cyclic GFR-binding peptide
  MOD_RES (6)..(7)..(41)..(43): Xaa is C or S
  MOD_RES (21)..(22)..(23)..(24)..(25): Xaa is A or G
  MOD_RES (26)..(27)..(28)..(29): Xaa is A or G or absent
HVPKPXXAPTKLSSLSVLFFXXXXXXXXXLKVYPNMVVRSXGX

SEQ ID NO: 25659 - protein, 43 aa, Artificial Sequence
  Non-cyclic GFR-binding peptide
  MOD_RES (6)..(7)..(41)..(43): Xaa is C or S
  MOD_RES (21)..(22)..(23)..(24)..(25): Xaa is A or G
  MOD_RES (26)..(27)..(28)..(29): Xaa is A or G or absent
KASKAXXVPTKLSSLSILFFXXXXXXXXXLKVYPGMAVSEXGX

SEQ ID NO: 25660 - protein, 44 aa, Artificial Sequence
  Non-cyclic GFR-binding peptide
  MOD_RES (4)..(41)..(43): Xaa is C or S
SVKXQPSRVHHSSLSVLFFEYVRKKPKLLKVYPRLEEHLEXAXA

SEQ ID NO: 25661 - protein, 37 aa, Artificial Sequence
  Non-cyclic GFR-binding peptide
  MOD_RES (1)..(35)..(37): Xaa is C or S
  MOD_RES (15)..(16)..(17)..(18)..(19): Xaa is A or G
  MOD_RES (20)..(21)..(22)..(23): Xaa is A or G or absent
XVPARLSSLSILFFXXXXXXXXXLKVYPDMVVEAXGX

SEQ ID NO: 25662 - protein, 42 aa, Artificial Sequence
  Non-cyclic GFR-binding peptide
  MOD_RES (6)..(7)..(39)..(41): Xaa is C or S
TVPKPXXAPTQLSSLSVLFFDDSSNVILKVYPNMVVRAXGXH

SEQ ID NO: 25663 - protein, 40 aa, Artificial Sequence
  Non-cyclic GFR-binding peptide
  MOD_RES (4)..(38)..(40): Xaa is C or S
  MOD_RES (18)..(19)..(20)..(21)..(22): Xaa is A or G
  MOD_RES (23)..(24)..(25)..(26): Xaa is A or G or absent
KPTXAPTKLSSLSVLFFXXXXXXXXXLKVYPNMVVRSXGX

SEQ ID NO: 25664 - protein, 40 aa, Artificial Sequence
  Non-cyclic GFR-binding peptide
  MOD_RES (6)..(7)..(39): Xaa is C or S
HVPKPXXAPTKLSSLSVLFFDDSSNVILKVYPNMVVRSXG

SEQ ID NO: 25665 - protein, 40 aa, Artificial Sequence
  Non-cyclic GFR-binding peptide
  MOD_RES (5)..(6)..(37)..(39): Xaa is C or S
SAAPXXVPQALSSLSILFFVGRKPKVLKVYPMIVRSXKXS

SEQ ID NO: 25666 - protein, 37 aa, Artificial Sequence
  Non-cyclic GFR-binding peptide
  MOD_RES (1)..(2)..(34)..(36): Xaa is C or S
XXVPTKLSSLSILFFDKGVVTYLKVYPGMAVSEXGXR

SEQ ID NO: 25667 - protein, 37 aa, Artificial Sequence
  Non-cyclic GFR-binding peptide
  MOD_RES (2)..(2): Xaa is C or S
KXQPSRVHHSSLSVLFFEYVRKKPKLLKVYPRLEEHL

SEQ ID NO: 25668 - protein, 43 aa, Artificial Sequence
  Non-cyclic GFR-binding peptide
  MOD_RES (3)..(40)..(42): Xaa is C or S
  MOD_RES (19)..(20)..(21)..(22)..(23): Xaa is A or G
  MOD_RES (24)..(25)..(26)..(27): Xaa is A or G or absent
VKXQPSRVHHSSLSVLFFXXXXXXXXXLKVYPRLEEHLEXAXA

SEQ ID NO: 25669 - protein, 38 aa, Artificial Sequence
  Non-cyclic GFR-binding peptide
  MOD_RES (1)..(35)..(37): Xaa is C or S
  MOD_RES (15)..(16)..(17)..(18)..(19): Xaa is A or G
  MOD_RES (20)..(21)..(22)..(23): Xaa is A or G or absent
XVPARLSSLSILFFXXXXXXXXXLKVYPDMVVEAXGXR

SEQ ID NO: 25670 - protein, 40 aa, Artificial Sequence
  Non-cyclic GFR-binding peptide
  MOD_RES (6)..(7)..(40): Xaa is C or S
  MOD_RES (21)..(22)..(23)..(24)..(25): Xaa is A or G
  MOD_RES (26)..(27)..(28)..(29): Xaa is A or G or absent
ASASPXXVPQDLSSLSILFFXXXXXXXXXLKVYPMVVKSX

SEQ ID NO: 25671 - protein, 37 aa, Artificial Sequence
  Non-cyclic GFR-binding peptide
  MOD_RES (2)..(3)..(37): Xaa is C or S
  MOD_RES (17)..(18)..(19)..(20)..(21): Xaa is A or G
  MOD_RES (22)..(23)..(24)..(25): Xaa is A or G or absent
AXXAPTKLSSLSVLFFXXXXXXXXXLKVYPNMVVKAX

SEQ ID NO: 25672 - protein, 34 aa, Artificial Sequence
  Non-cyclic GFR-binding peptide
  MOD_RES (2)..(3): Xaa is C or S
SXXVPARLSSLSILFFDAANNVVLKVYPDMVVEA

SEQ ID NO: 25673 - protein, 41 aa, Artificial Sequence
  Non-cyclic GFR-binding peptide
  MOD_RES (3)..(4)..(38)..(40): Xaa is C or S
  MOD_RES (18)..(19)..(20)..(21)..(22): Xaa is A or G
  MOD_RES (23)..(24)..(25)..(26): Xaa is A or G or absent
GPXXTPTKMSSLSMLFFXXXXXXXXXLKVYPGMVVDRXGXS

SEQ ID NO: 25674 - protein, 37 aa, Artificial Sequence
  Non-cyclic GFR-binding peptide
  MOD_RES (2)..(3)..(35)..(37): Xaa is C or S
AXXAPTKLSSLSVLFFDSSNNVILKVYPNMVVKAXGX

SEQ ID NO: 25675 - protein, 35 aa, Artificial Sequence
  Non-cyclic GFR-binding peptide
PSRVHHSSLSVLFFEYVRKKPKLLKVYPRLEEHLE

SEQ ID NO: 25676 - protein, 42 aa, Artificial Sequence
  Non-cyclic GFR-binding peptide
  MOD_RES (6)..(7)..(39)..(41): Xaa is C or S
KASKAXXVPTKLSSLSILFFDKGVVTYLKVYPGMAVSEXGXR

SEQ ID NO: 25677 - protein, 38 aa, Artificial Sequence
  Non-cyclic GFR-binding peptide
  MOD_RES (2)..(3)..(37): Xaa is C or S
  MOD_RES (17)..(18)..(19)..(20)..(21): Xaa is A or G
  MOD_RES (22)..(23)..(24)..(25): Xaa is A or G or absent
AXXVPTKLSSLSILFFXXXXXXXXXLKVYPGMAVSEXG

SEQ ID NO: 25678 - protein, 37 aa, Artificial Sequence
  Non-cyclic GFR-binding peptide
  MOD_RES (4)..(4): Xaa is C or S
  MOD_RES (18)..(19)..(20)..(21)..(22): Xaa is A or G
  MOD_RES (23)..(24)..(25)..(26): Xaa is A or G or absent
KPTXAPTKLSSLSVLFFXXXXXXXXXLKVYPNMVVRS

SEQ ID NO: 25679 - protein, 39 aa, Artificial Sequence
  Non-cyclic GFR-binding peptide
  MOD_RES (2)..(3)..(37)..(39): Xaa is C or S
  MOD_RES (17)..(18)..(19)..(20)..(21): Xaa is A or G
  MOD_RES (22)..(23)..(24)..(25): Xaa is A or G or absent
TXXVPTRLSSLSILFFXXXXXXXXXLKVYPDMVVESXGX

SEQ ID NO: 25680 - protein, 37 aa, Artificial Sequence
  Non-cyclic GFR-binding peptide
  MOD_RES (1)..(35)..(37): Xaa is C or S
  MOD_RES (15)..(16)..(17)..(18)..(19): Xaa is A or G
  MOD_RES (20)..(21)..(22)..(23): Xaa is A or G or absent
XAPTKLSSLSVLFFXXXXXXXXXLKVYPNMVVKAXGX

SEQ ID NO: 25681 - protein, 37 aa, Artificial Sequence
  Non-cyclic GFR-binding peptide
  MOD_RES (5)..(6): Xaa is C or S
VPKPXXAPTKLSSLSVLFFDDSSNVILKVYPNMVVRS

SEQ ID NO: 25682 - protein, 39 aa, Artificial Sequence
  Non-cyclic GFR-binding peptide
  MOD_RES (5)..(39): Xaa is C or S
  MOD_RES (19)..(20)..(21)..(22)..(23): Xaa is A or G
  MOD_RES (24)..(25)..(26)..(27): Xaa is A or G or absent
EGLEXVPTEESSLSMLFFXXXXXXXXXLKVYPFLQHNKX

SEQ ID NO: 25683 - protein, 34 aa, Artificial Sequence
  Non-cyclic GFR-binding peptide
  MOD_RES (1)..(2): Xaa is C or S
  MOD_RES (16)..(17)..(18)..(19)..(20): Xaa is A or G
  MOD_RES (21)..(22)..(23)..(24): Xaa is A or G or absent
XXVPTELSSLSMLFFXXXXXXXXXLKVYPEMVVE

SEQ ID NO: 25684 - protein, 39 aa, Artificial Sequence
  Non-cyclic GFR-binding peptide
  MOD_RES (4)..(5)..(38): Xaa is C or S
GKAXXVPTKLSSLSVLFFDDMGVPTLKVYPEGMSVAEXG

SEQ ID NO: 25685 - protein, 40 aa, Artificial Sequence
  Non-cyclic GFR-binding peptide
  MOD_RES (7)..(7): Xaa is C or S
  MOD_RES (21)..(22)..(23)..(24)..(25): Xaa is A or G
  MOD_RES (26)..(27)..(28)..(29): Xaa is A or G or absent
NDEGLEXVPTEESSLSMLFFXXXXXXXXXLKVYPFLQHNK

SEQ ID NO: 25686 - protein, 42 aa, Artificial Sequence
  Non-cyclic GFR-binding peptide
  MOD_RES (4)..(41): Xaa is C or S
  MOD_RES (20)..(21)..(22)..(23)..(24): Xaa is A or G
  MOD_RES (25)..(26)..(27)..(28): Xaa is A or G or absent
SVKXQPSRVHHSSLSVLFFXXXXXXXXXLKVYPRLEEHLEXA

SEQ ID NO: 25687 - protein, 37 aa, Artificial Sequence
  Non-cyclic GFR-binding peptide
  MOD_RES (1)..(2)..(35)..(37): Xaa is C or S
XXVPTKLSSLSVLFFDDMGVPTLKVYPEGMSVAEXGX

SEQ ID NO: 25688 - protein, 39 aa, Artificial Sequence
  Non-cyclic GFR-binding peptide
  MOD_RES (3)..(4)..(39): Xaa is C or S
  MOD_RES (18)..(19)..(20)..(21)..(22): Xaa is A or G
  MOD_RES (23)..(24)..(25)..(26): Xaa is A or G or absent
KAXXVPTKLSSLSVLFFXXXXXXXXXLKVYPEGMSVAEX

SEQ ID NO: 25689 - protein, 39 aa, Artificial Sequence
  Non-cyclic GFR-binding peptide
  MOD_RES (2)..(3)..(37)..(39): Xaa is C or S
  MOD_RES (17)..(18)..(19)..(20)..(21): Xaa is A or G
  MOD_RES (22)..(23)..(24)..(25): Xaa is A or G or absent
SXXVPARLSSLSILFFXXXXXXXXXLKVYPDMVVEAXGX

SEQ ID NO: 25690 - protein, 32 aa, Artificial Sequence
  Non-cyclic GFR-binding peptide
  MOD_RES (1)..(2): Xaa is C or S
XXAPTKLSSLSVLFFDSSNNVILKVYPNMVVK

SEQ ID NO: 25691 - protein, 34 aa, Artificial Sequence
  Non-cyclic GFR-binding peptide
  MOD_RES (1)..(2): Xaa is C or S
  MOD_RES (16)..(17)..(18)..(19)..(20): Xaa is A or G
  MOD_RES (21)..(22)..(23)..(24): Xaa is A or G or absent
XXVPQDLSSLSILFFXXXXXXXXXLKVYPMVVKS

SEQ ID NO: 25692 - protein, 36 aa, Artificial Sequence
  Non-cyclic GFR-binding peptide
  MOD_RES (5)..(6): Xaa is C or S
VPKPXXAPTKLSSLSVLFFDDSSNVILKVYPNMVVR

SEQ ID NO: 25693 - protein, 35 aa, Artificial Sequence
  Non-cyclic GFR-binding peptide
  MOD_RES (34)..(34): Xaa is C or S
  MOD_RES (14)..(15)..(16)..(17)..(18): Xaa is A or G
  MOD_RES (19)..(20)..(21)..(22): Xaa is A or G or absent
VPTEESSLSMLFFXXXXXXXXXLKVYPFLQHNKXE

SEQ ID NO: 25694 - protein, 39 aa, Artificial Sequence
  Non-cyclic GFR-binding peptide
  MOD_RES (4)..(5)..(38): Xaa is C or S
  MOD_RES (19)..(20)..(21)..(22)..(23): Xaa is A or G
  MOD_RES (24)..(25)..(26)..(27): Xaa is A or G or absent
AAPXXVPQALSSLSILFFXXXXXXXXXLKVYPMIVRSXK

SEQ ID NO: 25695 - protein, 38 aa, Artificial Sequence
  Non-cyclic GFR-binding peptide
  MOD_RES (6)..(7): Xaa is C or S
STPPTXXVPTRLSSLSILFFDSANNVVLKVYPDMVVES

SEQ ID NO: 25696 - protein, 35 aa, Artificial Sequence
  Non-cyclic GFR-binding peptide
  MOD_RES (3)..(3): Xaa is C or S
  MOD_RES (17)..(18)..(19)..(20)..(21): Xaa is A or G
  MOD_RES (22)..(23)..(24)..(25): Xaa is A or G or absent
LEXVPTEESSLSMLFFXXXXXXXXXLKVYPFLQHN

SEQ ID NO: 25697 - protein, 39 aa, Artificial Sequence
  Non-cyclic GFR-binding peptide
  MOD_RES (6)..(7): Xaa is C or S
  MOD_RES (21)..(22)..(23)..(24)..(25): Xaa is A or G
  MOD_RES (26)..(27)..(28)..(29): Xaa is A or G or absent
STPPTXXVPTRLSSLSILFFXXXXXXXXXLKVYPDMVVE

SEQ ID NO: 25698 - protein, 43 aa, Artificial Sequence
  Non-cyclic GFR-binding peptide
  MOD_RES (5)..(42): Xaa is C or S
  MOD_RES (21)..(22)..(23)..(24)..(25): Xaa is A or G
  MOD_RES (26)..(27)..(28)..(29): Xaa is A or G or absent
SSVKXQPSRVHHSSLSVLFFXXXXXXXXXLKVYPRLEEHLEXA

SEQ ID NO: 25699 - protein, 40 aa, Artificial Sequence
  Non-cyclic GFR-binding peptide
  MOD_RES (4)..(5)..(37)..(39): Xaa is C or S
PASXXVPARLSSLSILFFDAANNVVLKVYPDMVVEAXGXR

SEQ ID NO: 25700 - protein, 44 aa, Artificial Sequence
  Non-cyclic GFR-binding peptide
  MOD_RES (6)..(7)..(41)..(43): Xaa is C or S
  MOD_RES (21)..(22)..(23)..(24)..(25): Xaa is A or G
  MOD_RES (26)..(27)..(28)..(29): Xaa is A or G or absent
AAPASXXVPARLSSLSILFFXXXXXXXXXLKVYPDMVVEAXGXR

SEQ ID NO: 25701 - protein, 35 aa, Artificial Sequence
  Non-cyclic GFR-binding peptide
  MOD_RES (2)..(3)..(35): Xaa is C or S
SXXVPARLSSLSILFFDAANNVVLKVYPDMVVEAX

SEQ ID NO: 25702 - protein, 37 aa, Artificial Sequence
  Non-cyclic GFR-binding peptide
  MOD_RES (3)..(37): Xaa is C or S
  MOD_RES (17)..(18)..(19)..(20)..(21): Xaa is A or G
  MOD_RES (22)..(23)..(24)..(25): Xaa is A or G or absent
PTXAPTKLSSLSVLFFXXXXXXXXXLKVYPNMVVRSX

SEQ ID NO: 25703 - protein, 38 aa, Artificial Sequence
  Non-cyclic GFR-binding peptide
  MOD_RES (6)..(6): Xaa is C or S
DEGLEXVPTEESSLSMLFFRIKPHQGQHLKVYPFLQHN

SEQ ID NO: 25704 - protein, 43 aa, Artificial Sequence
  Non-cyclic GFR-binding peptide
  MOD_RES (5)..(6)..(40)..(42): Xaa is C or S
  MOD_RES (20)..(21)..(22)..(23)..(24): Xaa is A or G
  MOD_RES (25)..(26)..(27)..(28): Xaa is A or G or absent
VPKAXXAPTKLSSLSVLFFXXXXXXXXXLKVYPNMVVKAXGXH

SEQ ID NO: 25705 - protein, 40 aa, Artificial Sequence
  Non-cyclic GFR-binding peptide
  MOD_RES (5)..(6)..(38)..(40): Xaa is C or S
VPKPXXAPTKLSSLSVLFFDDSSNVILKVYPNMVVRSXGX

SEQ ID NO: 25706 - protein, 36 aa, Artificial Sequence
  Non-cyclic GFR-binding peptide
  MOD_RES (5)..(6): Xaa is C or S
SAGPXXTPTKMSSLSMLFFNDKQQIILKVYPGMVVD

SEQ ID NO: 25707 - protein, 31 aa, Artificial Sequence
  Non-cyclic GFR-binding peptide
  MOD_RES (1)..(1): Xaa is C or S
XAPTQLSSLSVLFFDDSSNVILKVYPNMVVR

SEQ ID NO: 25708 - protein, 37 aa, Artificial Sequence
  Non-cyclic GFR-binding peptide
  MOD_RES (3)..(4)..(36): Xaa is C or S
KAXXVPTELSSLSMLFFDEYDKVVLKVYPEMVVEGXG

SEQ ID NO: 25709 - protein, 39 aa, Artificial Sequence
  Non-cyclic GFR-binding peptide
  MOD_RES (4)..(5)..(37)..(39): Xaa is C or S
PKPXXAPTQLSSLSVLFFDDSSNVILKVYPNMVVRAXGX

SEQ ID NO: 25710 - protein, 35 aa, Artificial Sequence
  Non-cyclic GFR-binding peptide
  MOD_RES (3)..(4): Xaa is C or S
KPXXAPTKLSSLSVLFFDDSSNVILKVYPNMVVRS

SEQ ID NO: 25711 - protein, 42 aa, Artificial Sequence
  Non-cyclic GFR-binding peptide
  MOD_RES (6)..(7)..(40)..(42): Xaa is C or S
KVGKAXXVPTKLSSLSVLFFDDMGVPTLKVYPEGMSVAEXGX

SEQ ID NO: 25712 - protein, 33 aa, Artificial Sequence
  Non-cyclic GFR-binding peptide
  MOD_RES (1)..(1): Xaa is C or S
  MOD_RES (15)..(16)..(17)..(18)..(19): Xaa is A or G
  MOD_RES (20)..(21)..(22)..(23): Xaa is A or G or absent
XTPTKMSSLSMLFFXXXXXXXXXLKVYPGMVVD

SEQ ID NO: 25713 - protein, 35 aa, Artificial Sequence
  Non-cyclic GFR-binding peptide
  MOD_RES (1)..(2)..(34): Xaa is C or S
XXVPTRLSSLSILFFDSANNVVLKVYPDMVVESXG

SEQ ID NO: 25714 - protein, 36 aa, Artificial Sequence
  Non-cyclic GFR-binding peptide
  MOD_RES (2)..(3): Xaa is C or S
  MOD_RES (17)..(18)..(19)..(20)..(21): Xaa is A or G
  MOD_RES (22)..(23)..(24)..(25): Xaa is A or G or absent
PXXAPTQLSSLSVLFFXXXXXXXXXLKVYPNMVVRA

SEQ ID NO: 25715 - protein, 38 aa, Artificial Sequence
  Non-cyclic GFR-binding peptide
  MOD_RES (6)..(7): Xaa is C or S
TVPKPXXAPTQLSSLSVLFFDDSSNVILKVYPNMVVRA

SEQ ID NO: 25716 - protein, 36 aa, Artificial Sequence
  Non-cyclic GFR-binding peptide
  MOD_RES (3)..(4): Xaa is C or S
  MOD_RES (18)..(19)..(20)..(21)..(22): Xaa is A or G
  MOD_RES (23)..(24)..(25)..(26): Xaa is A or G or absent
ASXXVPARLSSLSILFFXXXXXXXXXLKVYPDMVVE

SEQ ID NO: 25717 - protein, 33 aa, Artificial Sequence
  Non-cyclic GFR-binding peptide
  MOD_RES (2)..(3): Xaa is C or S
PXXAPTQLSSLSVLFFDDSSNVILKVYPNMVVR

SEQ ID NO: 25718 - protein, 39 aa, Artificial Sequence
  Non-cyclic GFR-binding peptide
  MOD_RES (1)..(2)..(36)..(38): Xaa is C or S
  MOD_RES (16)..(17)..(18)..(19)..(20): Xaa is A or G
  MOD_RES (21)..(22)..(23)..(24): Xaa is A or G or absent
XXVPTKLSSLSILFFXXXXXXXXXLKVYPGMAVSEXGXR

SEQ ID NO: 25719 - protein, 36 aa, Artificial Sequence
  Non-cyclic GFR-binding peptide
  MOD_RES (1)..(33)..(35): Xaa is C or S
XAPTQLSSLSVLFFDDSSNVILKVYPNMVVRAXGXH

SEQ ID NO: 25720 - protein, 34 aa, Artificial Sequence
  Non-cyclic GFR-binding peptide
  MOD_RES (1)..(1): Xaa is C or S
  MOD_RES (15)..(16)..(17)..(18)..(19): Xaa is A or G
  MOD_RES (20)..(21)..(22)..(23): Xaa is A or G or absent
XVPARLSSLSILFFXXXXXXXXXLKVYPDMVVEA

SEQ ID NO: 25721 - protein, 39 aa, Artificial Sequence
  Non-cyclic GFR-binding peptide
  MOD_RES (6)..(7)..(39): Xaa is C or S
GSAGPXXTPTKMSSLSMLFFNDKQQIILKVYPGMVVDRX

SEQ ID NO: 25722 - protein, 37 aa, Artificial Sequence
  Non-cyclic GFR-binding peptide
  MOD_RES (3)..(4)..(36): Xaa is C or S
KAXXAPTKLSSLSVLFFDSSNNVILKVYPNMVVKAXG

SEQ ID NO: 25723 - protein, 30 aa, Artificial Sequence; identical to SEQ ID NO: 759
  Non-cyclic GFR-binding peptide

SEQ ID NO: 25724 - protein, 40 aa, Artificial Sequence
  Non-cyclic GFR-binding peptide
  MOD_RES (2)..(3)..(37)..(39): Xaa is C or S
  MOD_RES (17)..(18)..(19)..(20)..(21): Xaa is A or G
  MOD_RES (22)..(23)..(24)..(25): Xaa is A or G or absent
AXXAPTKLSSLSVLFFXXXXXXXXXLKVYPNMVVKAXGXH

SEQ ID NO: 25725 - protein, 36 aa, Artificial Sequence
  Non-cyclic GFR-binding peptide
  MOD_RES (1)..(33)..(35): Xaa is C or S
XAPTKLSSLSVLFFDSSNNVILKVYPNMVVKAXGXH

SEQ ID NO: 25726 - protein, 39 aa, Artificial Sequence
  Non-cyclic GFR-binding peptide
  MOD_RES (4)..(38): Xaa is C or S
  MOD_RES (18)..(19)..(20)..(21)..(22): Xaa is A or G
  MOD_RES (23)..(24)..(25)..(26): Xaa is A or G or absent
KPTXAPTKLSSLSVLFFXXXXXXXXXLKVYPNMVVRSXG

SEQ ID NO: 25727 - protein, 34 aa, Artificial Sequence
  Non-cyclic GFR-binding peptide
  MOD_RES (1)..(1): Xaa is C or S
  MOD_RES (15)..(16)..(17)..(18)..(19): Xaa is A or G
  MOD_RES (20)..(21)..(22)..(23): Xaa is A or G or absent
XVPTELSSLSMLFFXXXXXXXXXLKVYPEMVVEG

SEQ ID NO: 25728 - protein, 38 aa, Artificial Sequence
  Non-cyclic GFR-binding peptide
  MOD_RES (4)..(5): Xaa is C or S
  MOD_RES (19)..(20)..(21)..(22)..(23): Xaa is A or G
  MOD_RES (24)..(25)..(26)..(27): Xaa is A or G or absent
PPTXXVPTRLSSLSILFFXXXXXXXXXLKVYPDMVVES

SEQ ID NO: 25729 - protein, 41 aa, Artificial Sequence
  Non-cyclic GFR-binding peptide
  MOD_RES (4)..(38)..(40): Xaa is C or S
GLEXVPTEESSLSMLFFRIKPHQGQHLKVYPFLQHNKXEXR

SEQ ID NO: 25730 - protein, 38 aa, Artificial Sequence
  Non-cyclic GFR-binding peptide
  MOD_RES (3)..(4)..(36)..(38): Xaa is C or S
KPXXAPTQLSSLSVLFFDDSSNVILKVYPNMVVRAXGX

SEQ ID NO: 25731 - protein, 37 aa, Artificial Sequence
  Non-cyclic GFR-binding peptide
  MOD_RES (5)..(6): Xaa is C or S
IPKAXXVPTELSSLSMLFFDEYDKVVLKVYPEMVVEG

SEQ ID NO: 25732 - protein, 41 aa, Artificial Sequence
  Non-cyclic GFR-binding peptide
  MOD_RES (6)..(7)..(39)..(41): Xaa is C or S
TVPKPXXAPTQLSSLSVLFFDDSSNVILKVYPNMVVRAXGX

SEQ ID NO: 25733 - protein, 34 aa, Artificial Sequence
  Non-cyclic GFR-binding peptide
  MOD_RES (1)..(2): Xaa is C or S
  MOD_RES (16)..(17)..(18)..(19)..(20): Xaa is A or G
  MOD_RES (21)..(22)..(23)..(24): Xaa is A or G or absent
XXVPQALSSLSILFFXXXXXXXXXLKVYPMIVRS

SEQ ID NO: 25734 - protein, 44 aa, Artificial Sequence
  Non-cyclic GFR-binding peptide
  MOD_RES (7)..(41)..(43): Xaa is C or S
NDEGLEXVPTEESSLSMLFFRIKPHQGQHLKVYPFLQHNKXEXR

SEQ ID NO: 25735 - protein, 35 aa, Artificial Sequence
  Non-cyclic GFR-binding peptide
  MOD_RES (1)..(2)..(35): Xaa is C or S
  MOD_RES (16)..(17)..(18)..(19)..(20): Xaa is A or G
  MOD_RES (21)..(22)..(23)..(24): Xaa is A or G or absent
XXVPQDLSSLSILFFXXXXXXXXXLKVYPMVVKSX

SEQ ID NO: 25736 - protein, 39 aa, Artificial Sequence
  Non-cyclic GFR-binding peptide
  MOD_RES (4)..(5)..(38): Xaa is C or S
  MOD_RES (19)..(20)..(21)..(22)..(23): Xaa is A or G
  MOD_RES (24)..(25)..(26)..(27): Xaa is A or G or absent
ASPXXVPQDLSSLSILFFXXXXXXXXXLKVYPMVVKSXK

SEQ ID NO: 25737 - protein, 42 aa, Artificial Sequence
  Non-cyclic GFR-binding peptide
  MOD_RES (4)..(5)..(39)..(41): Xaa is C or S
  MOD_RES (19)..(20)..(21)..(22)..(23): Xaa is A or G
  MOD_RES (24)..(25)..(26)..(27): Xaa is A or G or absent
PASXXVPARLSSLSILFFXXXXXXXXXLKVYPDMVVEAXGXR

SEQ ID NO: 25738 - protein, 35 aa, Artificial Sequence
  Non-cyclic GFR-binding peptide
  MOD_RES (1)..(2): Xaa is C or S
  MOD_RES (16)..(17)..(18)..(19)..(20): Xaa is A or G
  MOD_RES (21)..(22)..(23)..(24): Xaa is A or G or absent
XXVPTELSSLSMLFFXXXXXXXXXLKVYPEMVVEG

SEQ ID NO: 25739 - protein, 35 aa, Artificial Sequence
  Non-cyclic GFR-binding peptide
  MOD_RES (1)..(2)..(34): Xaa is C or S
XXTPTKMSSLSMLFFNDKQQIILKVYPGMVVDRXG

SEQ ID NO: 25740 - protein, 37 aa, Artificial Sequence
  Non-cyclic GFR-binding peptide
  MOD_RES (4)..(5)..(36): Xaa is C or S
ASPXXVSQDLSSLSILFFIGKTPKILKVYPMIVKSXK

SEQ ID NO: 25741 - protein, 40 aa, Artificial Sequence
  Non-cyclic GFR-binding peptide
  MOD_RES (6)..(7)..(40): Xaa is C or S
  MOD_RES (21)..(22)..(23)..(24)..(25): Xaa is A or G
  MOD_RES (26)..(27)..(28)..(29): Xaa is A or G or absent
ASAAPXXVPQALSSLSILFFXXXXXXXXXLKVYPMIVRSX

SEQ ID NO: 25742 - protein, 33 aa, Artificial Sequence
  Non-cyclic GFR-binding peptide
  MOD_RES (1)..(1): Xaa is C or S
XVPTKLSSLSVLFFDDMGVPTLKVYPEGMSVAE

SEQ ID NO: 25743 - protein, 35 aa, Artificial Sequence
  Non-cyclic GFR-binding peptide
  MOD_RES (2)..(3): Xaa is C or S
  MOD_RES (17)..(18)..(19)..(20)..(21): Xaa is A or G
  MOD_RES (22)..(23)..(24)..(25): Xaa is A or G or absent
AXXVPTELSSLSMLFFXXXXXXXXXLKVYPEMVVE

SEQ ID NO: 25744 - protein, 39 aa, Artificial Sequence
  Non-cyclic GFR-binding peptide
  MOD_RES (1)..(38): Xaa is C or S
XQPSRVHHSSLSVLFFEYVRKKPKLLKVYPRLEEHLEXA

SEQ ID NO: 25745 - protein, 35 aa, Artificial Sequence
  Non-cyclic GFR-binding peptide
  MOD_RES (3)..(4): Xaa is C or S
KPXXAPTQLSSLSVLFFDDSSNVILKVYPNMVVRA

SEQ ID NO: 25746 - protein, 38 aa, Artificial Sequence
  Non-cyclic GFR-binding peptide
  MOD_RES (6)..(6): Xaa is C or S
  MOD_RES (20)..(21)..(22)..(23)..(24): Xaa is A or G
  MOD_RES (25)..(26)..(27)..(28): Xaa is A or G or absent
VTKPTXAPTKLSSLSVLFFXXXXXXXXXLKVYPNMVVR

SEQ ID NO: 25747 - protein, 35 aa, Artificial Sequence
  Non-cyclic GFR-binding peptide
  MOD_RES (2)..(3)..(35): Xaa is C or S
TXXVPTRLSSLSILFFDSANNVVLKVYPDMVVESX

SEQ ID NO: 25748 - protein, 40 aa, Artificial Sequence
  Non-cyclic GFR-binding peptide
  MOD_RES (3)..(4)..(38)..(40): Xaa is C or S
  MOD_RES (18)..(19)..(20)..(21)..(22): Xaa is A or G
  MOD_RES (23)..(24)..(25)..(26): Xaa is A or G or absent
ASXXVPARLSSLSILFFXXXXXXXXXLKVYPDMVVEAXGX

SEQ ID NO: 25749 - protein, 32 aa, Artificial Sequence
  Non-cyclic GFR-binding peptide
  MOD_RES (1)..(32): Xaa is C or S
XAPVKTSSLSMLFFDNGRVLLLKVYPMIVEEX

SEQ ID NO: 25750 - protein, 37 aa, Artificial Sequence
  Non-cyclic GFR-binding peptide
  MOD_RES (34)..(36): Xaa is C or S
VPTEESSLSMLFFRIKPHQGQHLKVYPFLQHNKXEXR

SEQ ID NO: 25751 - protein, 31 aa, Artificial Sequence
  Non-cyclic GFR-binding peptide
  MOD_RES (31)..(31): Xaa is C or S
APVKTSSLSMLFFDNGRVLLLKVYPMIVEEX

SEQ ID NO: 25752 - protein, 40 aa, Artificial Sequence
  Non-cyclic GFR-binding peptide
  MOD_RES (5)..(6)..(40): Xaa is C or S
  MOD_RES (20)..(21)..(22)..(23)..(24): Xaa is A or G
  MOD_RES (25)..(26)..(27)..(28): Xaa is A or G or absent
ASKAXXVPTKLSSLSILFFXXXXXXXXXLKVYPGMAVSEX

SEQ ID NO: 25753 - protein, 33 aa, Artificial Sequence
  Non-cyclic GFR-binding peptide
  MOD_RES (1)..(2)..(33): Xaa is C or S
XXVSQDLSSLSILFFIGKTPKILKVYPMIVKSX

SEQ ID NO: 25754 - protein, 37 aa, Artificial Sequence
  Non-cyclic GFR-binding peptide
  MOD_RES (2)..(3)..(34)..(36): Xaa is C or S
PXXVPQALSSLSILFFVGRKPKVLKVYPMIVRSXKXS

SEQ ID NO: 25755 - protein, 36 aa, Artificial Sequence
  Non-cyclic GFR-binding peptide
  MOD_RES (1)..(34)..(36): Xaa is C or S
  MOD_RES (15)..(16)..(17)..(18)..(19): Xaa is A or G
  MOD_RES (20)..(21)..(22)..(23): Xaa is A or G or absent
XVPQALSSLSILFFXXXXXXXXXLKVYPMIVRSXKX

SEQ ID NO: 25756 - protein, 35 aa, Artificial Sequence
  Non-cyclic GFR-binding peptide
  MOD_RES (3)..(4): Xaa is C or S
ASXXVPARLSSLSILFFDAANNVVLKVYPDMVVEA

SEQ ID NO: 25757 - protein, 38 aa, Artificial Sequence
  Non-cyclic GFR-binding peptide
  MOD_RES (6)..(7): Xaa is C or S
HVPKPXXAPTKLSSLSVLFFDDSSNVILKVYPNMVVRS

SEQ ID NO: 25758 - protein, 41 aa, Artificial Sequence
  Non-cyclic GFR-binding peptide
  MOD_RES (4)..(5)..(39)..(41): Xaa is C or S
  MOD_RES (19)..(20)..(21)..(22)..(23): Xaa is A or G
  MOD_RES (24)..(25)..(26)..(27): Xaa is A or G or absent
PKPXXAPTQLSSLSVLFFXXXXXXXXXLKVYPNMVVRAXGX

SEQ ID NO: 25759 - protein, 42 aa, Artificial Sequence
  Non-cyclic GFR-binding peptide
  MOD_RES (6)..(7)..(39)..(41): Xaa is C or S
YVPKPXXAPTKLSSLSVLFFDDSSNVILKVYPNMVVRSXGXH

SEQ ID NO: 25760 - protein, 35 aa, Artificial Sequence
  Non-cyclic GFR-binding peptide
  MOD_RES (3)..(3): Xaa is C or S
LEXVPTEESSLSMLFFRIKPHQGQHLKVYPFLQHN

SEQ ID NO: 25761 - protein, 40 aa, Artificial Sequence
  Non-cyclic GFR-binding peptide
  MOD_RES (4)..(5)..(37)..(39): Xaa is C or S
PKPXXAPTKLSSLSVLFFDDSSNVILKVYPNMVVRSXGXH

SEQ ID NO: 25762 - protein, 39 aa, Artificial Sequence
  Non-cyclic GFR-binding peptide
  MOD_RES (36)..(38): Xaa is C or S
  MOD_RES (15)..(16)..(17)..(18)..(19): Xaa is A or G
  MOD_RES (20)..(21)..(22)..(23): Xaa is A or G or absent
PSRVHHSSLSVLFFXXXXXXXXXLKVYPRLEEHLEXAXA

SEQ ID NO: 25763 - protein, 39 aa, Artificial Sequence
  Non-cyclic GFR-binding peptide
  MOD_RES (5)..(6)..(39): Xaa is C or S
  MOD_RES (20)..(21)..(22)..(23)..(24): Xaa is A or G
  MOD_RES (25)..(26)..(27)..(28): Xaa is A or G or absent
VPSTXXAPVKTSSLSMLFFXXXXXXXXXLKVYPMIVEEX

SEQ ID NO: 25764 - protein, 40 aa, Artificial Sequence
  Non-cyclic GFR-binding peptide
  MOD_RES (3)..(4)..(37)..(39): Xaa is C or S
  MOD_RES (18)..(19)..(20)..(21)..(22): Xaa is A or G
  MOD_RES (23)..(24)..(25)..(26): Xaa is A or G or absent
APXXVPQALSSLSILFFXXXXXXXXXLKVYPMIVRSXKXS

SEQ ID NO: 25765 - protein, 34 aa, Artificial Sequence
  Non-cyclic GFR-binding peptide
  MOD_RES (2)..(3)..(34): Xaa is C or S
PXXVPQALSSLSILFFVGRKPKVLKVYPMIVRSX

SEQ ID NO: 25766 - protein, 38 aa, Artificial Sequence
  Non-cyclic GFR-binding peptide
  MOD_RES (1)..(2)..(35)..(37): Xaa is C or S
  MOD_RES (16)..(17)..(18)..(19)..(20): Xaa is A or G
  MOD_RES (21)..(22)..(23)..(24): Xaa is A or G or absent
XXVPQALSSLSILFFXXXXXXXXXLKVYPMIVRSXKXS

SEQ ID NO: 25767 - protein, 35 aa, Artificial Sequence
  Non-cyclic GFR-binding peptide
  MOD_RES (3)..(4): Xaa is C or S
KAXXVPTKLSSLSILFFDKGVVTYLKVYPGMAVSE

SEQ ID NO: 25768 - protein, 39 aa, Artificial Sequence
  Non-cyclic GFR-binding peptide
  MOD_RES (7)..(7): Xaa is C or S
  MOD_RES (21)..(22)..(23)..(24)..(25): Xaa is A or G
  MOD_RES (26)..(27)..(28)..(29): Xaa is A or G or absent
NDEGLEXVPTEESSLSMLFFXXXXXXXXXLKVYPFLQHN

SEQ ID NO: 25769 - protein, 38 aa, Artificial Sequence
  Non-cyclic GFR-binding peptide
  MOD_RES (2)..(3)..(36)..(38): Xaa is C or S
  MOD_RES (17)..(18)..(19)..(20)..(21): Xaa is A or G
  MOD_RES (22)..(23)..(24)..(25): Xaa is A or G or absent
PXXVPQALSSLSILFFXXXXXXXXXLKVYPMIVRSXKX

SEQ ID NO: 25770 - protein, 40 aa, Artificial Sequence
  Non-cyclic GFR-binding peptide
  MOD_RES (4)..(38)..(40): Xaa is C or S
GLEXVPTEESSLSMLFFRIKPHQGQHLKVYPFLQHNKXEX

SEQ ID NO: 25771 - protein, 41 aa, Artificial Sequence
  Non-cyclic GFR-binding peptide
  MOD_RES (2)..(39): Xaa is C or S
AXELHEELRNSLQELKPKKRVYEYYLVTLPEHHVRSPQXKV

SEQ ID NO: 25772 - protein, 34 aa, Artificial Sequence
  Non-cyclic GFR-binding peptide
  MOD_RES (1)..(33)..(34): Xaa is C or S
XGEVVMEVQVEKVVKDYEDVKAMKVSRLETPVXX

SEQ ID NO: 25773 - protein, 35 aa, Artificial Sequence
  Non-cyclic GFR-binding peptide
  MOD_RES (2)..(34)..(35): Xaa is C or S
GXGEVVMEVQVEKVVKDYEDVKAMKVSRLETPVXX

SEQ ID NO: 25774 - protein, 36 aa, Artificial Sequence
  Non-cyclic GFR-binding peptide
  MOD_RES (35)..(35): Xaa is C or S
  MOD_RES (11)..(12)..(13)..(14)..(15): Xaa is A or G
  MOD_RES (16)..(17)..(18)..(19): Xaa is A or G or absent
HDELTNSLQEXXXXXXXXXYYLVTLPELQVQTPRXQ

SEQ ID NO: 25775 - protein, 39 aa, Artificial Sequence
  Non-cyclic GFR-binding peptide
  MOD_RES (1)..(3)..(35)..(36): Xaa is C or S
XGXSRVVMNVQVEKIVNSSDDVKAVKVSRLKTPAXXPKP

SEQ ID NO: 25776 - protein, 34 aa, Artificial Sequence
  Non-cyclic GFR-binding peptide
  MOD_RES (1)..(3)..(34): Xaa is C or S
XKXSRVIMVQVEKVKPKRGVVKAIKVSRLAQPVX

SEQ ID NO: 25777 - protein, 38 aa, Artificial Sequence
  Non-cyclic GFR-binding peptide
  MOD_RES (2)..(4)..(38): Xaa is C or S
  MOD_RES (16)..(17)..(18)..(19)..(20): Xaa is A or G
  MOD_RES (21)..(22)..(23)..(24): Xaa is A or G or absent
RXEXKNHQLFNSLQEXXXXXXXXXYYLMTLPEEETPVX

SEQ ID NO: 25778 - protein, 38 aa, Artificial Sequence
  Non-cyclic GFR-binding peptide
  MOD_RES (2)..(4)..(36): Xaa is C or S
HXGXSRVVMNSMEGIIVNSSDDMIQVTINSLKTPAXTP

SEQ ID NO: 25779 - protein, 41 aa, Artificial Sequence
  Non-cyclic GFR-binding peptide
  MOD_RES (2)..(4)..(38): Xaa is C or S
RXEXKNHQLFNSLQEHQGQHPKIRYYVMPLPEEETPVXELG

SEQ ID NO: 25780 - protein, 42 aa, Artificial Sequence
  Non-cyclic GFR-binding peptide
  MOD_RES (1)..(3)..(37)..(38): Xaa is C or S
  MOD_RES (15)..(16)..(17)..(18)..(19): Xaa is A or G
  MOD_RES (20)..(21)..(22)..(23): Xaa is A or G or absent
XGXARVVMNVQVEKXXXXXXXXXVKAVKVSRLQTPAXXPKPV

SEQ ID NO: 25781 - protein, 36 aa, Artificial Sequence
  Non-cyclic GFR-binding peptide
  MOD_RES (2)..(4): Xaa is C or S
  MOD_RES (15)..(16)..(17)..(18)..(19): Xaa is A or G
  MOD_RES (20)..(21)..(22)..(23): Xaa is A or G or absent
SXKXSKVIMVTAKKXXXXXXXXXIKRIQVPRLDQSV

SEQ ID NO: 25782 - protein, 38 aa, Artificial Sequence
  Non-cyclic GFR-binding peptide
  MOD_RES (1)..(3)..(37): Xaa is C or S
XEXKNHQLFNSLQEHQGQHPKIRYYVMPLPEEETPVXE

SEQ ID NO: 25783 - protein, 39 aa, Artificial Sequence
  Non-cyclic GFR-binding peptide
  MOD_RES (1)..(35): Xaa is C or S
  MOD_RES (13)..(14)..(15)..(16)..(17): Xaa is A or G
  MOD_RES (18)..(19)..(20)..(21): Xaa is A or G or absent
XSRVVMNSMEGIXXXXXXXXXMIQVTINSLKTPAXTPKT

SEQ ID NO: 25784 - protein, 40 aa, Artificial Sequence
  Non-cyclic GFR-binding peptide
  MOD_RES (2)..(34)..(35): Xaa is C or S
GXGEVVMEVTAKKVVKDYEDIKRMQVPRLETPVXXAKPIS

SEQ ID NO: 25785 - protein, 33 aa, Artificial Sequence
  Non-cyclic GFR-binding peptide
  MOD_RES (33)..(33): Xaa is C or S
  MOD_RES (11)..(12)..(13)..(14)..(15): Xaa is A or G
  MOD_RES (16)..(17)..(18)..(19): Xaa is A or G or absent
RVVMNSMEGIXXXXXXXXXMIQVTINSLQTPAX

SEQ ID NO: 25786 - protein, 36 aa, Artificial Sequence
  Non-cyclic GFR-binding peptide
  MOD_RES (2)..(33)..(34): Xaa is C or S
KXSKVIMVQVEKIKPTKGIVKAIKVSRLDQSVXXPS

SEQ ID NO: 25787 - protein, 43 aa, Artificial Sequence
  Non-cyclic GFR-binding peptide
  MOD_RES (1)..(3)..(40): Xaa is C or S
  MOD_RES (16)..(17)..(18)..(19)..(20): Xaa is A or G
  MOD_RES (21)..(22)..(23)..(24): Xaa is A or G or absent
XAXELHEELRNSLQEXXXXXXXXXYYVVPLPEHHVRSPQXKVS

SEQ ID NO: 25788 - protein, 35 aa, Artificial Sequence
  Non-cyclic GFR-binding peptide
  MOD_RES (12)..(13)..(14)..(15)..(16): Xaa is A or G
  MOD_RES (17)..(18)..(19)..(20): Xaa is A or G or absent
LHDELTNSLQEXXXXXXXXXYYLVTLPELQVQTPR

SEQ ID NO: 25789 - protein, 42 aa, Artificial Sequence
  Non-cyclic GFR-binding peptide
  MOD_RES (1)..(3)..(40): Xaa is C or S
  MOD_RES (16)..(17)..(18)..(19)..(20): Xaa is A or G
  MOD_RES (21)..(22)..(23)..(24): Xaa is A or G or absent
XKXALHDELTNSLQEXXXXXXXXXYYLVTLPELQVQTPRXQV

SEQ ID NO: 25790 - protein, 34 aa, Artificial Sequence
  Non-cyclic GFR-binding peptide
  MOD_RES (33)..(34): Xaa is C or S
  MOD_RES (11)..(12)..(13)..(14)..(15): Xaa is A or G
  MOD_RES (16)..(17)..(18)..(19): Xaa is A or G or absent
RVVMNVQVEKXXXXXXXXXVKAVKVSRLKTPAXX

SEQ ID NO: 25791 - protein, 35 aa, Artificial Sequence
  Non-cyclic GFR-binding peptide
  MOD_RES (2)..(4): Xaa is C or S
RXGXGEVVMDVQVEKVVKENEDVKAMKVSRLETPV

SEQ ID NO: 25792 - protein, 30 aa, Artificial Sequence
  Non-cyclic GFR-binding peptide
SKVVMVTAKKVKPTRGVIKRIQVPRLDQPV

SEQ ID NO: 25793 - protein, 38 aa, Artificial Sequence
  Non-cyclic GFR-binding peptide
  MOD_RES (34)..(34): Xaa is C or S
  MOD_RES (12)..(13)..(14)..(15)..(16): Xaa is A or G
  MOD_RES (17)..(18)..(19)..(20): Xaa is A or G or absent
KNHQLFNSLQEXXXXXXXXXYYVMPLPEEETPVXELGE

SEQ ID NO: 25794 - protein, 39 aa, Artificial Sequence
  Non-cyclic GFR-binding peptide
  MOD_RES (33)..(33): Xaa is C or S
  MOD_RES (11)..(12)..(13)..(14)..(15): Xaa is A or G
  MOD_RES (16)..(17)..(18)..(19): Xaa is A or G or absent
NHQLFNSLQEXXXXXXXXXYYVMPLPEEETPVXELGEDN

SEQ ID NO: 25795 - protein, 40 aa, Artificial Sequence
  Non-cyclic GFR-binding peptide
  MOD_RES (1)..(3)..(35): Xaa is C or S
XGXSRVVMNVTAKKIVNSSDDIKRVQVPRLKTPAXTPKTV

SEQ ID NO: 25796 - protein, 33 aa, Artificial Sequence
  Non-cyclic GFR-binding peptide
  MOD_RES (1)..(32)..(33): Xaa is C or S
XSKVIMVQVEKIKPTKGIVKAIKVSRLDQSVXX

SEQ ID NO: 25797 - protein, 39 aa, Artificial Sequence
  Non-cyclic GFR-binding peptide
  MOD_RES (2)..(33)..(34): Xaa is C or S
KXSKVIMVQVEKIKPTKGIVKAIKVSRLDQSVXXPSASA

SEQ ID NO: 25798 - protein, 38 aa, Artificial Sequence
  Non-cyclic GFR-binding peptide
  MOD_RES (34)..(35): Xaa is C or S
  MOD_RES (12)..(13)..(14)..(15)..(16): Xaa is A or G
  MOD_RES (17)..(18)..(19)..(20): Xaa is A or G or absent
SRVVMNSMEGIXXXXXXXXXMIQVTINSLKTPAXXPKP

SEQ ID NO: 25799 - protein, 39 aa, Artificial Sequence
  Non-cyclic GFR-binding peptide
  MOD_RES (2)..(4)..(36)..(37): Xaa is C or S
HXGXSRVVMNSMEGIIVNSSDDMIQVTINSLKTPAXXPK

SEQ ID NO: 25800 - protein, 40 aa, Artificial Sequence
  Non-cyclic GFR-binding peptide
  MOD_RES (1)..(35)..(36): Xaa is C or S
  MOD_RES (13)..(14)..(15)..(16)..(17): Xaa is A or G
  MOD_RES (18)..(19)..(20)..(21): Xaa is A or G or absent
XGEVVMDVQVEKXXXXXXXXXVKAMKVSRLETPVXXAKPI

SEQ ID NO: 25801 - protein, 31 aa, Artificial Sequence
  Non-cyclic GFR-binding peptide
  MOD_RES (31)..(31): Xaa is C or S
RVVMNVQVEKIVNSSDDVKAVKVSRLKTPAX

SEQ ID NO: 25802 - protein, 40 aa, Artificial Sequence
  Non-cyclic GFR-binding peptide
  MOD_RES (1)..(3)..(37)..(38): Xaa is C or S
  MOD_RES (15)..(16)..(17)..(18)..(19): Xaa is A or G
  MOD_RES (20)..(21)..(22)..(23): Xaa is A or G or absent
XGXGEVVMDVQVEKXXXXXXXXXVKAMKVSRLETPVXXAK

SEQ ID NO: 25803 - protein, 41 aa, Artificial Sequence
  Non-cyclic GFR-binding peptide
  MOD_RES (2)..(36)..(37): Xaa is C or S
  MOD_RES (14)..(15)..(16)..(17)..(18): Xaa is A or G
  MOD_RES (19)..(20)..(21)..(22): Xaa is A or G or absent
GXGEVVMDSMEGIXXXXXXXXXMIQMTINSLETPVXXAKPI

SEQ ID NO: 25804 - protein, 33 aa, Artificial Sequence
  Non-cyclic GFR-binding peptide
  MOD_RES (1)..(33): Xaa is C or S
XSRVVMNSMEGIIVNSSDDMIQVTINSLKTPAX

SEQ ID NO: 25805 - protein, 36 aa, Artificial Sequence
  Non-cyclic GFR-binding peptide
  MOD_RES (13)..(14)..(15)..(16)..(17): Xaa is A or G
  MOD_RES (18)..(19)..(20)..(21): Xaa is A or G or absent
ELHEELRNSLQEXXXXXXXXXYYLVTLPEHHVRSPQ

SEQ ID NO: 25806 - protein, 37 aa, Artificial Sequence
  Non-cyclic GFR-binding peptide
  MOD_RES (36)..(36): Xaa is C or S
  MOD_RES (12)..(13)..(14)..(15)..(16): Xaa is A or G
  MOD_RES (17)..(18)..(19)..(20): Xaa is A or G or absent
LHDELTNSLQEXXXXXXXXXYYLVTLPELQVQTPRXQ

SEQ ID NO: 25807 - protein, 37 aa, Artificial Sequence
  Non-cyclic GFR-binding peptide
  MOD_RES (34)..(35): Xaa is C or S
  MOD_RES (12)..(13)..(14)..(15)..(16): Xaa is A or G
  MOD_RES (17)..(18)..(19)..(20): Xaa is A or G or absent
SRVVMNVTAKKXXXXXXXXXIKRVQVPRLKTPAXXPK

SEQ ID NO: 25808 - protein, 36 aa, Artificial Sequence
  Non-cyclic GFR-binding peptide
  MOD_RES (2)..(34)..(35): Xaa is C or S
GXARVVMNVTAKKIVNSSDDIKRVQVPRLQTPAXXP

SEQ ID NO: 25809 - protein, 32 aa, Artificial Sequence
  Non-cyclic GFR-binding peptide
  MOD_RES (1)..(1): Xaa is C or S
XGEVVMDVQVEKVVKENEDVKAMKVSRLETPV

SEQ ID NO: 25810 - protein, 36 aa, Artificial Sequence
  Non-cyclic GFR-binding peptide
  MOD_RES (32)..(33): Xaa is C or S
GEVVMEVQVEKVVKDYEDVKAMKVSRLETPVXXAKP

SEQ ID NO: 25811 - protein, 40 aa, Artificial Sequence
  Non-cyclic GFR-binding peptide
  MOD_RES (1)..(35): Xaa is C or S
  MOD_RES (13)..(14)..(15)..(16)..(17): Xaa is A or G
  MOD_RES (18)..(19)..(20)..(21): Xaa is A or G or absent
XSRVVMNVQVEKXXXXXXXXXVKAVKVSRLKTPAXTPKTV

SEQ ID NO: 25812 - protein, 42 aa, Artificial Sequence
  Non-cyclic GFR-binding peptide
  MOD_RES (1)..(3)..(37): Xaa is C or S
  MOD_RES (15)..(16)..(17)..(18)..(19): Xaa is A or G
  MOD_RES (20)..(21)..(22)..(23): Xaa is A or G or absent
XEXKNHQLFNSLQEXXXXXXXXXYYVMPLPEEETPVXELGED

SEQ ID NO: 25813 - protein, 42 aa, Artificial Sequence
  Non-cyclic GFR-binding peptide
  MOD_RES (1)..(3)..(37)..(38): Xaa is C or S
  MOD_RES (15)..(16)..(17)..(18)..(19): Xaa is A or G
  MOD_RES (20)..(21)..(22)..(23): Xaa is A or G or absent
XGXSRVVMNSMEGIXXXXXXXXXMIQVTINSLKTPAXXPKPV

SEQ ID NO: 25814 - protein, 33 aa, Artificial Sequence
  Non-cyclic GFR-binding peptide
  MOD_RES (2)..(2): Xaa is C or S
GXGEVVMESMEGIVVKDYEDMIQMTINSLETPV

SEQ ID NO: 25815 - protein, 38 aa, Artificial Sequence
  Non-cyclic GFR-binding peptide
  MOD_RES (2)..(35)..(36): Xaa is C or S
  MOD_RES (13)..(14)..(15)..(16)..(17): Xaa is A or G
  MOD_RES (18)..(19)..(20)..(21): Xaa is A or G or absent
KXSKVIMVTAKKXXXXXXXXXIKRIQVPRLDQSVXXPS

SEQ ID NO: 25816 - protein, 43 aa, Artificial Sequence
  Non-cyclic GFR-binding peptide
  MOD_RES (1)..(3)..(37)..(38): Xaa is C or S
  MOD_RES (15)..(16)..(17)..(18)..(19): Xaa is A or G
  MOD_RES (20)..(21)..(22)..(23): Xaa is A or G or absent
XGXGEVVMDVQVEKXXXXXXXXXVKAMKVSRLETPVXXAKPIK

SEQ ID NO: 25817 - protein, 37 aa, Artificial Sequence
  Non-cyclic GFR-binding peptide
  MOD_RES (1)..(35)..(36): Xaa is C or S
  MOD_RES (13)..(14)..(15)..(16)..(17): Xaa is A or G
  MOD_RES (18)..(19)..(20)..(21): Xaa is A or G or absent
XSRVVMNSMEGIXXXXXXXXXMIQVTINSLKTPAXXP

SEQ ID NO: 25818 - protein, 33 aa, Artificial Sequence
  Non-cyclic GFR-binding peptide
  MOD_RES (1)..(3): Xaa is C or S
XKXSRVIMVTAKKVKPKRGVIKRIQVPRLAQPV

SEQ ID NO: 25819 - protein, 41 aa, Artificial Sequence
  Non-cyclic GFR-binding peptide
  MOD_RES (37)..(37): Xaa is C or S
ELHEELRNSLQELKPKKRVYEYYVVPLPEHHVRSPQXKVSS

SEQ ID NO: 25820 - protein, 43 aa, Artificial Sequence
  Non-cyclic GFR-binding peptide
  MOD_RES (1)..(3)..(37): Xaa is C or S
  MOD_RES (15)..(16)..(17)..(18)..(19): Xaa is A or G
  MOD_RES (20)..(21)..(22)..(23): Xaa is A or G or absent
XGXSRVVMNVQVEKXXXXXXXXXVKAVKVSRLKTPAXTPKTVH

SEQ ID NO: 25821 - protein, 38 aa, Artificial Sequence
  Non-cyclic GFR-binding peptide
  MOD_RES (36)..(36): Xaa is C or S
  MOD_RES (12)..(13)..(14)..(15)..(16): Xaa is A or G
  MOD_RES (17)..(18)..(19)..(20): Xaa is A or G or absent
LHEELRNSLQEXXXXXXXXXYYVVPLPEHHVRSPQXKV

SEQ ID NO: 25822 - protein, 40 aa, Artificial Sequence
  Non-cyclic GFR-binding peptide
  MOD_RES (1)..(3)..(37): Xaa is C or S
XEXKNHQLFNSLQEHQGQHPKIRYYLMTLPEEETPVXELG

SEQ ID NO: 25823 - protein, 34 aa, Artificial Sequence
  Non-cyclic GFR-binding peptide
  MOD_RES (33)..(34): Xaa is C or S
  MOD_RES (11)..(12)..(13)..(14)..(15): Xaa is A or G
  MOD_RES (16)..(17)..(18)..(19): Xaa is A or G or absent
EVVMESMEGIXXXXXXXXXMIQMTINSLETPVXX

SEQ ID NO: 25824 - protein, 35 aa, Artificial Sequence
  Non-cyclic GFR-binding peptide
  MOD_RES (1)..(3)..(34)..(35): Xaa is C or S
XKXSRVIMVQVEKVKPKRGVVKAIKVSRLAQPVXX

SEQ ID NO: 25825 - protein, 38 aa, Artificial Sequence
  Non-cyclic GFR-binding peptide
  MOD_RES (1)..(3)..(34)..(35): Xaa is C or S
XKXSKVIMSMEGIIKPTKGIMIQITINSLDQSVXXPSA

SEQ ID NO: 25826 - protein, 34 aa, Artificial Sequence
  Non-cyclic GFR-binding peptide
  MOD_RES (2)..(2): Xaa is C or S
  MOD_RES (13)..(14)..(15)..(16)..(17): Xaa is A or G
  MOD_RES (18)..(19)..(20)..(21): Xaa is A or G or absent
KXSRVIMSMEGIXXXXXXXXXMIQITINSLAQPV

SEQ ID NO: 25827 - protein, 37 aa, Artificial Sequence
  Non-cyclic GFR-binding peptide
  MOD_RES (32)..(32): Xaa is C or S
SRVVMNVTAKKIVNSSDDIKRVQVPRLKTPAXTPKTV

SEQ ID NO: 25828 - protein, 34 aa, Artificial Sequence
  Non-cyclic GFR-binding peptide
  MOD_RES (32)..(33): Xaa is C or S
GEVVMEVTAKKVVKDYEDIKRMQVPRLETPVXXA

SEQ ID NO: 25829 - protein, 35 aa, Artificial Sequence
  Non-cyclic GFR-binding peptide
  MOD_RES (34)..(35): Xaa is C or S
  MOD_RES (12)..(13)..(14)..(15)..(16): Xaa is A or G
  MOD_RES (17)..(18)..(19)..(20): Xaa is A or G or absent
ARVVMNSMEGIXXXXXXXXXMIQVTINSLQTPAXX

SEQ ID NO: 25830 - protein, 35 aa, Artificial Sequence
  Non-cyclic GFR-binding peptide
  MOD_RES (2)..(35): Xaa is C or S
  MOD_RES (13)..(14)..(15)..(16)..(17): Xaa is A or G
  MOD_RES (18)..(19)..(20)..(21): Xaa is A or G or absent
KXSRVIMVQVEKXXXXXXXXXVKAIKVSRLAQPVX

SEQ ID NO: 25831 - protein, 37 aa, Artificial Sequence
  Non-cyclic GFR-binding peptide
  MOD_RES (2)..(36): Xaa is C or S
EXKNHQLFNSLQEHQGQHPKIRYYLMTLPEEETPVXE

SEQ ID NO: 25832 - protein, 40 aa, Artificial Sequence
  Non-cyclic GFR-binding peptide
  MOD_RES (2)..(4)..(38)..(39): Xaa is C or S
  MOD_RES (16)..(17)..(18)..(19)..(20): Xaa is A or G
  MOD_RES (21)..(22)..(23)..(24): Xaa is A or G or absent
HXGXSRVVMNVTAKKXXXXXXXXXIKRVQVPRLKTPAXXP

SEQ ID NO: 25833 - protein, 41 aa, Artificial Sequence
  Non-cyclic GFR-binding peptide
  MOD_RES (2)..(39): Xaa is C or S
KXALHDELTNSLQEFIPKKRVIEYYLVTLPELQVQTPRXQV

SEQ ID NO: 25834 - protein, 39 aa, Artificial Sequence
  Non-cyclic GFR-binding peptide
  MOD_RES (1)..(3)..(35)..(36): Xaa is C or S
XGXGEVVMDVTAKKVVKENEDIKRMQVPRLETPVXXAKP

SEQ ID NO: 25835 - protein, 38 aa, Artificial Sequence
  Non-cyclic GFR-binding peptide
  MOD_RES (1)..(32)..(33): Xaa is C or S
XSKVVMVTAKKVKPTRGVIKRIQVPRLDQPVXXPSASA

SEQ ID NO: 25836 - protein, 40 aa, Artificial Sequence
  Non-cyclic GFR-binding peptide
  MOD_RES (2)..(4)..(38)..(39): Xaa is C or S
  MOD_RES (16)..(17)..(18)..(19)..(20): Xaa is A or G
  MOD_RES (21)..(22)..(23)..(24): Xaa is A or G or absent
HXGXSRVVMNVQVEKXXXXXXXXXVKAVKVSRLKTPAXXP

SEQ ID NO: 25837 - protein, 40 aa, Artificial Sequence
  Non-cyclic GFR-binding peptide
  MOD_RES (2)..(4)..(36): Xaa is C or S
HXGXSRVVMNVQVEKIVNSSDDVKAVKVSRLKTPAXTPKT

SEQ ID NO: 25838 - protein, 37 aa, Artificial Sequence
  Non-cyclic GFR-binding peptide
  MOD_RES (33)..(34): Xaa is C or S
  MOD_RES (11)..(12)..(13)..(14)..(15): Xaa is A or G
  MOD_RES (16)..(17)..(18)..(19): Xaa is A or G or absent
SRVIMSMEGIXXXXXXXXXMIQITINSLAQPVXXPAA

SEQ ID NO: 25839 - protein, 34 aa, Artificial Sequence
  Non-cyclic GFR-binding peptide
  MOD_RES (31)..(31): Xaa is C or S
RVVMNSMEGIIVNSSDDMIQVTINSLKTPAXTPK

SEQ ID NO: 25840 - protein, 44 aa, Artificial Sequence
  Non-cyclic GFR-binding peptide
  MOD_RES (1)..(3)..(40): Xaa is C or S
XAXELHEELRNSLQELKPKKRVYEYYLVTLPEHHVRSPQXKVSS

SEQ ID NO: 25841 - protein, 40 aa, Artificial Sequence
  Non-cyclic GFR-binding peptide
  MOD_RES (1)..(3)..(34)..(35): Xaa is C or S
XKXSKVVMVTAKKVKPTRGVIKRIQVPRLDQPVXXPSASA

SEQ ID NO: 25842 - protein, 38 aa, Artificial Sequence
  Non-cyclic GFR-binding peptide
  MOD_RES (35)..(35): Xaa is C or S
  MOD_RES (11)..(12)..(13)..(14)..(15): Xaa is A or G
  MOD_RES (16)..(17)..(18)..(19): Xaa is A or G or absent
HEELRNSLQEXXXXXXXXXYYVVPLPEHHVRSPQXKVS

SEQ ID NO: 25843 - protein, 36 aa, Artificial Sequence
  Non-cyclic GFR-binding peptide
  MOD_RES (2)..(35)..(36): Xaa is C or S
  MOD_RES (13)..(14)..(15)..(16)..(17): Xaa is A or G
  MOD_RES (18)..(19)..(20)..(21): Xaa is A or G or absent
KXSRVIMVQVEKXXXXXXXXXVKAIKVSRLAQPVXX

SEQ ID NO: 25844 - protein, 40 aa, Artificial Sequence
  Non-cyclic GFR-binding peptide
  MOD_RES (2)..(34)..(35): Xaa is C or S
GXGEVVMDVQVEKVVKENEDVKAMKVSRLETPVXXAKPIK

SEQ ID NO: 25845 - protein, 37 aa, Artificial Sequence
  Non-cyclic GFR-binding peptide
  MOD_RES (1)..(3)..(37): Xaa is C or S
  MOD_RES (15)..(16)..(17)..(18)..(19): Xaa is A or G
  MOD_RES (20)..(21)..(22)..(23): Xaa is A or G or absent
XGXSRVVMNSMEGIXXXXXXXXXMIQVTINSLKTPAX

SEQ ID NO: 25846 - protein, 39 aa, Artificial Sequence
  Non-cyclic GFR-binding peptide
  MOD_RES (2)..(4)..(35)..(36): Xaa is C or S
SXKXSKVVMVTAKKVKPTRGVIKRIQVPRLDQPVXXPSA

SEQ ID NO: 25847 - protein, 37 aa, Artificial Sequence
  Non-cyclic GFR-binding peptide
  MOD_RES (2)..(4)..(36): Xaa is C or S
HXGXSRVVMNVQVEKIVNSSDDVKAVKVSRLKTPAXT

SEQ ID NO: 25848 - protein, 35 aa, Artificial Sequence
  Non-cyclic GFR-binding peptide
  MOD_RES (31)..(32): Xaa is C or S
EVVMDSMEGIVVKENEDMIQMTINSLETPVXXAKP

SEQ ID NO: 25849 - protein, 34 aa, Artificial Sequence
  Non-cyclic GFR-binding peptide
  MOD_RES (33)..(34): Xaa is C or S
  MOD_RES (11)..(12)..(13)..(14)..(15): Xaa is A or G
  MOD_RES (16)..(17)..(18)..(19): Xaa is A or G or absent
SRVIMSMEGIXXXXXXXXXMIQITINSLAQPVXX

SEQ ID NO: 25850 - protein, 35 aa, Artificial Sequence
  Non-cyclic GFR-binding peptide
  MOD_RES (2)..(4)..(35): Xaa is C or S
SXKXSKVIMSMEGIIKPTKGIMIQITINSLDQSVX

SEQ ID NO: 25851 - protein, 37 aa, Artificial Sequence
  Non-cyclic GFR-binding peptide
  MOD_RES (2)..(33)..(34): Xaa is C or S
KXSKVIMSMEGIIKPTKGIMIQITINSLDQSVXXPSA

SEQ ID NO: 25852 - protein, 37 aa, Artificial Sequence
  Non-cyclic GFR-binding peptide
  MOD_RES (33)..(33): Xaa is C or S
  MOD_RES (11)..(12)..(13)..(14)..(15): Xaa is A or G
  MOD_RES (16)..(17)..(18)..(19): Xaa is A or G or absent
NHQLFNSLQEXXXXXXXXXYYLMTLPEEETPVXELGE

SEQ ID NO: 25853 - protein, 32 aa, Artificial Sequence
  Non-cyclic GFR-binding peptide
  MOD_RES (32)..(32): Xaa is C or S
ARVVMNVTAKKIVNSSDDIKRVQVPRLQTPAX

SEQ ID NO: 25854 - protein, 40 aa, Artificial Sequence
  Non-cyclic GFR-binding peptide
  MOD_RES (1)..(3)..(40): Xaa is C or S
XAXELHEELRNSLQELKPKKRVYEYYVVPLPEHHVRSPQX

SEQ ID NO: 25855 - protein, 36 aa, Artificial Sequence
  Non-cyclic GFR-binding peptide
  MOD_RES (2)..(2): Xaa is C or S
KXALHDELTNSLQEFIPKKRVIEYYLVTLPELQVQT

SEQ ID NO: 25856 - protein, 37 aa, Artificial Sequence
  Non-cyclic GFR-binding peptide
  MOD_RES (37)..(37): Xaa is C or S
ELHEELRNSLQELKPKKRVYEYYVVPLPEHHVRSPQX

SEQ ID NO: 25857 - protein, 35 aa, Artificial Sequence
  Non-cyclic GFR-binding peptide
  MOD_RES (1)..(33)..(34): Xaa is C or S
XSRVVMNVTAKKIVNSSDDIKRVQVPRLKTPAXXP

SEQ ID NO: 25858 - protein, 38 aa, Artificial Sequence
  Non-cyclic GFR-binding peptide
  MOD_RES (35)..(35): Xaa is C or S
  MOD_RES (11)..(12)..(13)..(14)..(15): Xaa is A or G
  MOD_RES (16)..(17)..(18)..(19): Xaa is A or G or absent
HDELTNSLQEXXXXXXXXXYYVVPLPELQVQTPRXQVN

SEQ ID NO: 25859 - protein, 40 aa, Artificial Sequence
  Non-cyclic GFR-binding peptide
  MOD_RES (36)..(36): Xaa is C or S
  MOD_RES (12)..(13)..(14)..(15)..(16): Xaa is A or G
  MOD_RES (17)..(18)..(19)..(20): Xaa is A or G or absent
LHEELRNSLQEXXXXXXXXXYYLVTLPEHHVRSPQXKVSS

SEQ ID NO: 25860 - protein, 31 aa, Artificial Sequence
  Non-cyclic GFR-binding peptide
ARVVMNSMEGIIVNSSDDMIQVTINSLQTPA

SEQ ID NO: 25861 - protein, 42 aa, Artificial Sequence
  Non-cyclic GFR-binding peptide
  MOD_RES (2)..(4)..(38): Xaa is C or S
RXEXKNHQLFNSLQEHQGQHPKIRYYVMPLPEEETPVXELGE

SEQ ID NO: 25862 - protein, 40 aa, Artificial Sequence
  Non-cyclic GFR-binding peptide
  MOD_RES (2)..(4): Xaa is C or S
  MOD_RES (17)..(18)..(19)..(20)..(21): Xaa is A or G
  MOD_RES (22)..(23)..(24)..(25): Xaa is A or G or absent
AXAXELHEELRNSLQEXXXXXXXXXYYLVTLPEHHVRSPQ

SEQ ID NO: 25863 - protein, 40 aa, Artificial Sequence
  Non-cyclic GFR-binding peptide
  MOD_RES (1)..(34)..(35): Xaa is C or S
  MOD_RES (12)..(13)..(14)..(15)..(16): Xaa is A or G
  MOD_RES (17)..(18)..(19)..(20): Xaa is A or G or absent
XSKVIMVQVEKXXXXXXXXXVKAIKVSRLDQSVXXPSASA

SEQ ID NO: 25864 - protein, 39 aa, Artificial Sequence
  Non-cyclic GFR-binding peptide
  MOD_RES (2)..(4)..(38)..(39): Xaa is C or S
  MOD_RES (16)..(17)..(18)..(19)..(20): Xaa is A or G
  MOD_RES (21)..(22)..(23)..(24): Xaa is A or G or absent
HXGXARVVMNSMEGIXXXXXXXXXMIQVTINSLQTPAXX

SEQ ID NO: 25865 - protein, 40 aa, Artificial Sequence
  Non-cyclic GFR-binding peptide
  MOD_RES (37)..(37): Xaa is C or S
  MOD_RES (13)..(14)..(15)..(16)..(17): Xaa is A or G
  MOD_RES (18)..(19)..(20)..(21): Xaa is A or G or absent
ELHEELRNSLQEXXXXXXXXXYYVVPLPEHHVRSPQXKVS

SEQ ID NO: 25866 - protein, 42 aa, Artificial Sequence
  Non-cyclic GFR-binding peptide
  MOD_RES (1)..(38): Xaa is C or S
  MOD_RES (14)..(15)..(16)..(17)..(18): Xaa is A or G
  MOD_RES (19)..(20)..(21)..(22): Xaa is A or G or absent
XELHEELRNSLQEXXXXXXXXXYYLVTLPEHHVRSPQXKVSS

SEQ ID NO: 25867 - protein, 34 aa, Artificial Sequence
  Non-cyclic GFR-binding peptide
  MOD_RES (1)..(3)..(34): Xaa is C or S
XKXSKVIMSMEGIIKPTKGIMIQITINSLDQSVX

SEQ ID NO: 25868 - protein, 39 aa, Artificial Sequence
  Non-cyclic GFR-binding peptide
  MOD_RES (2)..(36): Xaa is C or S
  MOD_RES (14)..(15)..(16)..(17)..(18): Xaa is A or G
  MOD_RES (19)..(20)..(21)..(22): Xaa is A or G or absent
EXKNHQLFNSLQEXXXXXXXXXYYVMPLPEEETPVXELG

SEQ ID NO: 25869 - protein, 35 aa, Artificial Sequence
  Non-cyclic GFR-binding peptide
  MOD_RES (2)..(2): Xaa is C or S
  MOD_RES (14)..(15)..(16)..(17)..(18): Xaa is A or G
  MOD_RES (19)..(20)..(21)..(22): Xaa is A or G or absent
GXGEVVMESMEGIXXXXXXXXXMIQMTINSLETPV

SEQ ID NO: 25870 - protein, 35 aa, Artificial Sequence
  Non-cyclic GFR-binding peptide
  MOD_RES (33)..(34): Xaa is C or S
  MOD_RES (11)..(12)..(13)..(14)..(15): Xaa is A or G
  MOD_RES (16)..(17)..(18)..(19): Xaa is A or G or absent
SKVVMVTAKKXXXXXXXXXIKRIQVPRLDQPVXXP

SEQ ID NO: 25871 - protein, 40 aa, Artificial Sequence
  Non-cyclic GFR-binding peptide
  MOD_RES (2)..(34)..(35): Xaa is C or S
GXSRVVMNSMEGIIVNSSDDMIQVTINSLKTPAXXPKPVY

SEQ ID NO: 25872 - protein, 40 aa, Artificial Sequence
  Non-cyclic GFR-binding peptide
  MOD_RES (1)..(3)..(34)..(35): Xaa is C or S
XKXSKVIMVQVEKIKPTKGIVKAIKVSRLDQSVXXPSASA

SEQ ID NO: 25873 - protein, 35 aa, Artificial Sequence
  Non-cyclic GFR-binding peptide
  MOD_RES (34)..(35): Xaa is C or S
  MOD_RES (12)..(13)..(14)..(15)..(16): Xaa is A or G
  MOD_RES (17)..(18)..(19)..(20): Xaa is A or G or absent
SRVVMNSMEGIXXXXXXXXXMIQVTINSLKTPAXX

SEQ ID NO: 25874 - protein, 34 aa, Artificial Sequence
  Non-cyclic GFR-binding peptide
  MOD_RES (31)..(32): Xaa is C or S
SRVIMSMEGIVKPKRGVMIQITINSLAQPVXXPA

SEQ ID NO: 25875 - protein, 39 aa, Artificial Sequence
  Non-cyclic GFR-binding peptide
  MOD_RES (1)..(3)..(37)..(38): Xaa is C or S
  MOD_RES (15)..(16)..(17)..(18)..(19): Xaa is A or G
  MOD_RES (20)..(21)..(22)..(23): Xaa is A or G or absent
XGXSRVVMNSMEGIXXXXXXXXXMIQVTINSLKTPAXXP

SEQ ID NO: 25876 - protein, 40 aa, Artificial Sequence
  Non-cyclic GFR-binding peptide
  MOD_RES (1)..(35)..(36): Xaa is C or S
  MOD_RES (13)..(14)..(15)..(16)..(17): Xaa is A or G
  MOD_RES (18)..(19)..(20)..(21): Xaa is A or G or absent
XSRVVMNSMEGIXXXXXXXXXMIQVTINSLKTPAXXPKPV

SEQ ID NO: 25877 - protein, 35 aa, Artificial Sequence
  Non-cyclic GFR-binding peptide
  MOD_RES (33)..(34): Xaa is C or S
  MOD_RES (11)..(12)..(13)..(14)..(15): Xaa is A or G
  MOD_RES (16)..(17)..(18)..(19): Xaa is A or G or absent
SKVVMVQVEKXXXXXXXXXVKAIKVSRLDQPVXXP

SEQ ID NO: 25878 - protein, 42 aa, Artificial Sequence
  Non-cyclic GFR-binding peptide
  MOD_RES (1)..(3)..(37)..(38): Xaa is C or S
  MOD_RES (15)..(16)..(17)..(18)..(19): Xaa is A or G
  MOD_RES (20)..(21)..(22)..(23): Xaa is A or G or absent
XGXARVVMNVTAKKXXXXXXXXXIKRVQVPRLQTPAXXPKPV

SEQ ID NO: 25879 - protein, 32 aa, Artificial Sequence
  Non-cyclic GFR-binding peptide
  MOD_RES (31)..(32): Xaa is C or S
RVVMNVTAKKIVNSSDDIKRVQVPRLQTPAXX

SEQ ID NO: 25880 - protein, 42 aa, Artificial Sequence
  Non-cyclic GFR-binding peptide
  MOD_RES (2)..(4)..(38)..(39): Xaa is C or S
  MOD_RES (16)..(17)..(18)..(19)..(20): Xaa is A or G
  MOD_RES (21)..(22)..(23)..(24): Xaa is A or G or absent
HXGXARVVMNVTAKKXXXXXXXXXIKRVQVPRLQTPAXXPKP

SEQ ID NO: 25881 - protein, 37 aa, Artificial Sequence
  Non-cyclic GFR-binding peptide
  MOD_RES (2)..(35)..(36): Xaa is C or S
  MOD_RES (13)..(14)..(15)..(16)..(17): Xaa is A or G
  MOD_RES (18)..(19)..(20)..(21): Xaa is A or G or absent
KXSKVIMSMEGIXXXXXXXXXMIQITINSLDQSVXXP

SEQ ID NO: 25882 - protein, 34 aa, Artificial Sequence
  Non-cyclic GFR-binding peptide
  MOD_RES (2)..(33)..(34): Xaa is C or S
KXSRVIMVTAKKVKPKRGVIKRIQVPRLAQPVXX

SEQ ID NO: 25883 - protein, 38 aa, Artificial Sequence
  Non-cyclic GFR-binding peptide
  MOD_RES (33)..(34): Xaa is C or S
  MOD_RES (11)..(12)..(13)..(14)..(15): Xaa is A or G
  MOD_RES (16)..(17)..(18)..(19): Xaa is A or G or absent
SKVVMSMEGIXXXXXXXXXMIQITINSLDQPVXXPSAS

SEQ ID NO: 25884 - protein, 40 aa, Artificial Sequence
  Non-cyclic GFR-binding peptide
  MOD_RES (1)..(3)..(37)..(38): Xaa is C or S
  MOD_RES (15)..(16)..(17)..(18)..(19): Xaa is A or G
  MOD_RES (20)..(21)..(22)..(23): Xaa is A or G or absent
XGXGEVVMDVTAKKXXXXXXXXXIKRMQVPRLETPVXXAK

SEQ ID NO: 25885 - protein, 35 aa, Artificial Sequence
  Non-cyclic GFR-binding peptide
  MOD_RES (1)..(32)..(33): Xaa is C or S
XSRVIMVQVEKVKPKRGVVKAIKVSRLAQPVXXPA

SEQ ID NO: 25886 - protein, 32 aa, Artificial Sequence
  Non-cyclic GFR-binding peptide
  MOD_RES (11)..(12)..(13)..(14)..(15): Xaa is A or G
  MOD_RES (16)..(17)..(18)..(19): Xaa is A or G or absent
RVVMNVTAKKXXXXXXXXXIKRVQVPRLKTPA

SEQ ID NO: 25887 - protein, 38 aa, Artificial Sequence
  Non-cyclic GFR-binding peptide
  MOD_RES (1)..(3)..(37): Xaa is C or S
  MOD_RES (15)..(16)..(17)..(18)..(19): Xaa is A or G
  MOD_RES (20)..(21)..(22)..(23): Xaa is A or G or absent
XGXSRVVMNVTAKKXXXXXXXXXIKRVQVPRLKTPAXT

SEQ ID NO: 25888 - protein, 38 aa, Artificial Sequence
  Non-cyclic GFR-binding peptide
  MOD_RES (1)..(38): Xaa is C or S
XELHEELRNSLQELKPKKRVYEYYVVPLPEHHVRSPQX

SEQ ID NO: 25889 - protein, 37 aa, Artificial Sequence
  Non-cyclic GFR-binding peptide
  MOD_RES (2)..(4): Xaa is C or S
  MOD_RES (16)..(17)..(18)..(19)..(20): Xaa is A or G
  MOD_RES (21)..(22)..(23)..(24): Xaa is A or G or absent
RXEXKNHQLFNSLQEXXXXXXXXXYYLMTLPEEETPV

SEQ ID NO: 25890 - protein, 39 aa, Artificial Sequence
  Non-cyclic GFR-binding peptide
  MOD_RES (1)..(3)..(34)..(35): Xaa is C or S
XKXSKVVMVQVEKVKPTRGVVKAIKVSRLDQPVXXPSAS

SEQ ID NO: 25891 - protein, 38 aa, Artificial Sequence
  Non-cyclic GFR-binding peptide
  MOD_RES (37)..(37): Xaa is C or S
  MOD_RES (13)..(14)..(15)..(16)..(17): Xaa is A or G
  MOD_RES (18)..(19)..(20)..(21): Xaa is A or G or absent
ELHEELRNSLQEXXXXXXXXXYYVVPLPEHHVRSPQXK

SEQ ID NO: 25892 - protein, 34 aa, Artificial Sequence
  Non-cyclic GFR-binding peptide
  MOD_RES (31)..(31): Xaa is C or S
RVVMNVQVEKIVNSSDDVKAVKVSRLKTPAXTPK

SEQ ID NO: 25893 - protein, 39 aa, Artificial Sequence
  Non-cyclic GFR-binding peptide
  MOD_RES (1)..(35): Xaa is C or S
XKNHQLFNSLQEHQGQHPKIRYYLMTLPEEETPVXELGE

SEQ ID NO: 25894 - protein, 38 aa, Artificial Sequence
  Non-cyclic GFR-binding peptide
  MOD_RES (1)..(3)..(35)..(36): Xaa is C or S
XGXARVVMNVQVEKIVNSSDDVKAVKVSRLQTPAXXPK

SEQ ID NO: 25895 - protein, 41 aa, Artificial Sequence
  Non-cyclic GFR-binding peptide
  MOD_RES (1)..(3)..(40): Xaa is C or S
XAXELHEELRNSLQELKPKKRVYEYYLVTLPEHHVRSPQXK

SEQ ID NO: 25896 - protein, 40 aa, Artificial Sequence
  Non-cyclic GFR-binding peptide
  MOD_RES (1)..(3)..(35): Xaa is C or S
XGXSRVVMNVQVEKIVNSSDDVKAVKVSRLKTPAXTPKTV

SEQ ID NO: 25897 - protein, 36 aa, Artificial Sequence
  Non-cyclic GFR-binding peptide
  MOD_RES (2)..(4): Xaa is C or S
  MOD_RES (15)..(16)..(17)..(18)..(19): Xaa is A or G
  MOD_RES (20)..(21)..(22)..(23): Xaa is A or G or absent
SXKXSKVIMVQVEKXXXXXXXXXVKAIKVSRLDQSV

SEQ ID NO: 25898 - protein, 37 aa, Artificial Sequence
  Non-cyclic GFR-binding peptide
  MOD_RES (34)..(35): Xaa is C or S
  MOD_RES (12)..(13)..(14)..(15)..(16): Xaa is A or G
  MOD_RES (17)..(18)..(19)..(20): Xaa is A or G or absent
GEVVMDSMEGIXXXXXXXXXMIQMTINSLETPVXXAK

SEQ ID NO: 25899 - protein, 37 aa, Artificial Sequence
  Non-cyclic GFR-binding peptide
  MOD_RES (34)..(35): Xaa is C or S
  MOD_RES (12)..(13)..(14)..(15)..(16): Xaa is A or G
  MOD_RES (17)..(18)..(19)..(20): Xaa is A or G or absent
GEVVMEVQVEKXXXXXXXXXVKAMKVSRLETPVXXAK

SEQ ID NO: 25900 - protein, 33 aa, Artificial Sequence
  Non-cyclic GFR-binding peptide
LHEELRNSLQELKPKKRVYEYYVVPLPEHHVRS

SEQ ID NO: 25901 - protein, 42 aa, Artificial Sequence
  Non-cyclic GFR-binding peptide
  MOD_RES (2)..(36)..(37): Xaa is C or S
  MOD_RES (14)..(15)..(16)..(17)..(18): Xaa is A or G
  MOD_RES (19)..(20)..(21)..(22): Xaa is A or G or absent
GXGEVVMEVTAKKXXXXXXXXXIKRMQVPRLETPVXXAKPIS

SEQ ID NO: 25902 - protein, 38 aa, Artificial Sequence
  Non-cyclic GFR-binding peptide
  MOD_RES (2)..(36)..(37): Xaa is C or S
  MOD_RES (14)..(15)..(16)..(17)..(18): Xaa is A or G
  MOD_RES (19)..(20)..(21)..(22): Xaa is A or G or absent
GXGEVVMEVTAKKXXXXXXXXXIKRMQVPRLETPVXXA

SEQ ID NO: 25903 - protein, 42 aa, Artificial Sequence
  Non-cyclic GFR-binding peptide
  MOD_RES (2)..(4)..(38)..(39): Xaa is C or S
  MOD_RES (16)..(17)..(18)..(19)..(20): Xaa is A or G
  MOD_RES (21)..(22)..(23)..(24): Xaa is A or G or absent
HXGXARVVMNSMEGIXXXXXXXXXMIQVTINSLQTPAXXPKP

SEQ ID NO: 25904 - protein, 35 aa, Artificial Sequence
  Non-cyclic GFR-binding peptide
  MOD_RES (31)..(32): Xaa is C or S
SKVIMVTAKKIKPTKGIIKRIQVPRLDQSVXXPSA

SEQ ID NO: 25905 - protein, 37 aa, Artificial Sequence
  Non-cyclic GFR-binding peptide
  MOD_RES (2)..(36)..(37): Xaa is C or S
  MOD_RES (14)..(15)..(16)..(17)..(18): Xaa is A or G
  MOD_RES (19)..(20)..(21)..(22): Xaa is A or G or absent
GXSRVVMNVQVEKXXXXXXXXXVKAVKVSRLKTPAXX

SEQ ID NO: 25906 - protein, 32 aa, Artificial Sequence
  Non-cyclic GFR-binding peptide
  MOD_RES (31)..(32): Xaa is C or S
SKVVMVQVEKVKPTRGVVKAIKVSRLDQPVXX

SEQ ID NO: 25907 - protein, 35 aa, Artificial Sequence
  Non-cyclic GFR-binding peptide
  MOD_RES (2)..(4): Xaa is C or S
RXGXGEVVMEVTAKKVVKDYEDIKRMQVPRLETPV

SEQ ID NO: 25908 - protein, 42 aa, Artificial Sequence
  Non-cyclic GFR-binding peptide
  MOD_RES (1)..(3)..(36)..(37): Xaa is C or S
  MOD_RES (14)..(15)..(16)..(17)..(18): Xaa is A or G
  MOD_RES (19)..(20)..(21)..(22): Xaa is A or G or absent
XKXSKVVMVQVEKXXXXXXXXXVKAIKVSRLDQPVXXPSASA

SEQ ID NO: 25909 - protein, 37 aa, Artificial Sequence
  Non-cyclic GFR-binding peptide
  MOD_RES (2)..(4): Xaa is C or S
  MOD_RES (16)..(17)..(18)..(19)..(20): Xaa is A or G
  MOD_RES (21)..(22)..(23)..(24): Xaa is A or G or absent
HXGXARVVMNVTAKKXXXXXXXXXIKRVQVPRLQTPA

SEQ ID NO: 25910 - protein, 34 aa, Artificial Sequence
  Non-cyclic GFR-binding peptide
  MOD_RES (1)..(3): Xaa is C or S
XGXSRVVMNSMEGIIVNSSDDMIQVTINSLKTPA

SEQ ID NO: 25911 - protein, 39 aa, Artificial Sequence
  Non-cyclic GFR-binding peptide
  MOD_RES (1)..(35)..(36): Xaa is C or S
  MOD_RES (13)..(14)..(15)..(16)..(17): Xaa is A or G
  MOD_RES (18)..(19)..(20)..(21): Xaa is A or G or absent
XARVVMNVTAKKXXXXXXXXXIKRVQVPRLQTPAXXPKP

SEQ ID NO: 25912 - protein, 31 aa, Artificial Sequence
  Non-cyclic GFR-binding peptide
  MOD_RES (1)..(1): Xaa is C or S
XSRVIMVQVEKVKPKRGVVKAIKVSRLAQPV

SEQ ID NO: 25913 - protein, 37 aa, Artificial Sequence
  Non-cyclic GFR-binding peptide
  MOD_RES (2)..(4)..(36)..(37): Xaa is C or S
RXGXGEVVMEVTAKKVVKDYEDIKRMQVPRLETPVXX

SEQ ID NO: 25914 - protein, 32 aa, Artificial Sequence
  Non-cyclic GFR-binding peptide
  MOD_RES (11)..(12)..(13)..(14)..(15): Xaa is A or G
  MOD_RES (16)..(17)..(18)..(19): Xaa is A or G or absent
SKVIMVTAKKXXXXXXXXXIKRIQVPRLDQSV

SEQ ID NO: 25915 - protein, 35 aa, Artificial Sequence
  Non-cyclic GFR-binding peptide
  MOD_RES (2)..(34): Xaa is C or S
GXSRVVMNVTAKKIVNSSDDIKRVQVPRLKTPAXT

SEQ ID NO: 25916 - protein, 35 aa, Artificial Sequence
  Non-cyclic GFR-binding peptide
  MOD_RES (2)..(2): Xaa is C or S
  MOD_RES (14)..(15)..(16)..(17)..(18): Xaa is A or G
  MOD_RES (19)..(20)..(21)..(22): Xaa is A or G or absent
GXGEVVMDVTAKKXXXXXXXXXIKRMQVPRLETPV

SEQ ID NO: 25917 - protein, 36 aa, Artificial Sequence
  Non-cyclic GFR-binding peptide
  MOD_RES (34)..(35): Xaa is C or S
  MOD_RES (12)..(13)..(14)..(15)..(16): Xaa is A or G
  MOD_RES (17)..(18)..(19)..(20): Xaa is A or G or absent
GEVVMDVTAKKXXXXXXXXXIKRMQVPRLETPVXXA

SEQ ID NO: 25918 - protein, 39 aa, Artificial Sequence
  Non-cyclic GFR-binding peptide
  MOD_RES (1)..(34)..(35): Xaa is C or S
  MOD_RES (12)..(13)..(14)..(15)..(16): Xaa is A or G
  MOD_RES (17)..(18)..(19)..(20): Xaa is A or G or absent
XSRVIMVQVEKXXXXXXXXXVKAIKVSRLAQPVXXPAAS

SEQ ID NO: 25919 - protein, 34 aa, Artificial Sequence
  Non-cyclic GFR-binding peptide
  MOD_RES (31)..(32): Xaa is C or S
SKVVMVQVEKVKPTRGVVKAIKVSRLDQPVXXPS

SEQ ID NO: 25920 - protein, 40 aa, Artificial Sequence
  Non-cyclic GFR-binding peptide
  MOD_RES (2)..(36): Xaa is C or S
  MOD_RES (14)..(15)..(16)..(17)..(18): Xaa is A or G
  MOD_RES (19)..(20)..(21)..(22): Xaa is A or G or absent
EXKNHQLFNSLQEXXXXXXXXXYYLMTLPEEETPVXELGE

SEQ ID NO: 25921 - protein, 38 aa, Artificial Sequence
  Non-cyclic GFR-binding peptide
  MOD_RES (1)..(3)..(37): Xaa is C or S
  MOD_RES (15)..(16)..(17)..(18)..(19): Xaa is A or G
  MOD_RES (20)..(21)..(22)..(23): Xaa is A or G or absent
XEXKNHQLFNSLQEXXXXXXXXXYYLMTLPEEETPVXE

SEQ ID NO: 25922 - protein, 36 aa, Artificial Sequence
  Non-cyclic GFR-binding peptide
  MOD_RES (33)..(34): Xaa is C or S
  MOD_RES (11)..(12)..(13)..(14)..(15): Xaa is A or G
  MOD_RES (16)..(17)..(18)..(19): Xaa is A or G or absent
RVVMNSMEGIXXXXXXXXXMIQVTINSLKTPAXXPK

SEQ ID NO: 25923 - protein, 33 aa, Artificial Sequence
  Non-cyclic GFR-binding peptide
  MOD_RES (12)..(13)..(14)..(15)..(16): Xaa is A or G
  MOD_RES (17)..(18)..(19)..(20): Xaa is A or G or absent
GEVVMEVQVEKXXXXXXXXXVKAMKVSRLETPV

SEQ ID NO: 25924 - protein, 32 aa, Artificial Sequence
  Non-cyclic GFR-binding peptide
  MOD_RES (11)..(12)..(13)..(14)..(15): Xaa is A or G
  MOD_RES (16)..(17)..(18)..(19): Xaa is A or G or absent
SKVIMVQVEKXXXXXXXXXVKAIKVSRLDQSV

SEQ ID NO: 25925 - protein, 37 aa, Artificial Sequence
  Non-cyclic GFR-binding peptide
  MOD_RES (2)..(2): Xaa is C or S
  MOD_RES (15)..(16)..(17)..(18)..(19): Xaa is A or G
  MOD_RES (20)..(21)..(22)..(23): Xaa is A or G or absent
AXELHEELRNSLQEXXXXXXXXXYYLVTLPEHHVRSP

SEQ ID NO: 25926 - protein, 38 aa, Artificial Sequence
  Non-cyclic GFR-binding peptide
  MOD_RES (33)..(33): Xaa is C or S
NHQLFNSLQEHQGQHPKIRYYVMPLPEEETPVXELGED

SEQ ID NO: 25927 - protein, 34 aa, Artificial Sequence
  Non-cyclic GFR-binding peptide
  MOD_RES (1)..(34): Xaa is C or S
  MOD_RES (12)..(13)..(14)..(15)..(16): Xaa is A or G
  MOD_RES (17)..(18)..(19)..(20): Xaa is A or G or absent
XSKVVMSMEGIXXXXXXXXXMIQITINSLDQPVX

SEQ ID NO: 25928 - protein, 39 aa, Artificial Sequence
  Non-cyclic GFR-binding peptide
  MOD_RES (2)..(4)..(38): Xaa is C or S
RXEXKNHQLFNSLQEHQGQHPKIRYYLMTLPEEETPVXE

SEQ ID NO: 25929 - protein, 38 aa, Artificial Sequence
  Non-cyclic GFR-binding peptide
  MOD_RES (1)..(33)..(34): Xaa is C or S
XGEVVMEVTAKKVVKDYEDIKRMQVPRLETPVXXAKPI

SEQ ID NO: 25930 - protein, 40 aa, Artificial Sequence
  Non-cyclic GFR-binding peptide
  MOD_RES (1)..(3)..(35)..(36): Xaa is C or S
XGXARVVMNVTAKKIVNSSDDIKRVQVPRLQTPAXXPKPV

SEQ ID NO: 25931 - protein, 34 aa, Artificial Sequence
  Non-cyclic GFR-binding peptide
  MOD_RES (13)..(14)..(15)..(16)..(17): Xaa is A or G
  MOD_RES (18)..(19)..(20)..(21): Xaa is A or G or absent
ELHEELRNSLQEXXXXXXXXXYYVVPLPEHHVRS

SEQ ID NO: 25932 - protein, 37 aa, Artificial Sequence
  Non-cyclic GFR-binding peptide
  MOD_RES (34)..(35): Xaa is C or S
  MOD_RES (12)..(13)..(14)..(15)..(16): Xaa is A or G
  MOD_RES (17)..(18)..(19)..(20): Xaa is A or G or absent
ARVVMNVTAKKXXXXXXXXXIKRVQVPRLQTPAXXPK

SEQ ID NO: 25933 - protein, 33 aa, Artificial Sequence
  Non-cyclic GFR-binding peptide
  MOD_RES (31)..(32): Xaa is C or S
RVVMNSMEGIIVNSSDDMIQVTINSLQTPAXXP

SEQ ID NO: 25934 - protein, 32 aa, Artificial Sequence
  Non-cyclic GFR-binding peptide
  MOD_RES (11)..(12)..(13)..(14)..(15): Xaa is A or G
  MOD_RES (16)..(17)..(18)..(19): Xaa is A or G or absent
EVVMDVQVEKXXXXXXXXXVKAMKVSRLETPV

SEQ ID NO: 25935 - protein, 38 aa, Artificial Sequence
  Non-cyclic GFR-binding peptide
  MOD_RES (2)..(35)..(36): Xaa is C or S
  MOD_RES (13)..(14)..(15)..(16)..(17): Xaa is A or G
  MOD_RES (18)..(19)..(20)..(21): Xaa is A or G or absent
KXSRVIMSMEGIXXXXXXXXXMIQITINSLAQPVXXPA

SEQ ID NO: 25936 - protein, 35 aa, Artificial Sequence
  Non-cyclic GFR-binding peptide
  MOD_RES (32)..(33): Xaa is C or S
GEVVMDSMEGIVVKENEDMIQMTINSLETPVXXAK

SEQ ID NO: 25937 - protein, 39 aa, Artificial Sequence
  Non-cyclic GFR-binding peptide
  MOD_RES (2)..(36)..(37): Xaa is C or S
  MOD_RES (14)..(15)..(16)..(17)..(18): Xaa is A or G
  MOD_RES (19)..(20)..(21)..(22): Xaa is A or G or absent
GXARVVMNSMEGIXXXXXXXXXMIQVTINSLQTPAXXPK

SEQ ID NO: 25938 - protein, 35 aa, Artificial Sequence
  Non-cyclic GFR-binding peptide
  MOD_RES (2)..(33)..(34): Xaa is C or S
KXSKVVMVQVEKVKPTRGVVKAIKVSRLDQPVXXP

SEQ ID NO: 25939 - protein, 34 aa, Artificial Sequence
  Non-cyclic GFR-binding peptide
  MOD_RES (34)..(34): Xaa is C or S
  MOD_RES (12)..(13)..(14)..(15)..(16): Xaa is A or G
  MOD_RES (17)..(18)..(19)..(20): Xaa is A or G or absent
GEVVMESMEGIXXXXXXXXXMIQMTINSLETPVX

SEQ ID NO: 25940 - protein, 36 aa, Artificial Sequence
  Non-cyclic GFR-binding peptide
  MOD_RES (33)..(33): Xaa is C or S
NHQLFNSLQEHQGQHPKIRYYLMTLPEEETPVXELG

SEQ ID NO: 25941 - protein, 35 aa, Artificial Sequence
  Non-cyclic GFR-binding peptide
  MOD_RES (2)..(33)..(34): Xaa is C or S
KXSKVIMVQVEKIKPTKGIVKAIKVSRLDQSVXXP

SEQ ID NO: 25942 - protein, 30 aa, Artificial Sequence
  Non-cyclic GFR-binding peptide
SKVIMVQVEKIKPTKGIVKAIKVSRLDQSV

SEQ ID NO: 25943 - protein, 40 aa, Artificial Sequence
  Non-cyclic GFR-binding peptide
  MOD_RES (1)..(3)..(37)..(38): Xaa is C or S
  MOD_RES (15)..(16)..(17)..(18)..(19): Xaa is A or G
  MOD_RES (20)..(21)..(22)..(23): Xaa is A or G or absent
XGXGEVVMEVTAKKXXXXXXXXXIKRMQVPRLETPVXXAK

SEQ ID NO: 25944 - protein, 35 aa, Artificial Sequence
  Non-cyclic GFR-binding peptide
  MOD_RES (2)..(2): Xaa is C or S
  MOD_RES (14)..(15)..(16)..(17)..(18): Xaa is A or G
  MOD_RES (19)..(20)..(21)..(22): Xaa is A or G or absent
GXSRVVMNVTAKKXXXXXXXXXIKRVQVPRLKTPA

SEQ ID NO: 25945 - protein, 43 aa, Artificial Sequence
  Non-cyclic GFR-binding peptide
  MOD_RES (1)..(3)..(37)..(38): Xaa is C or S
  MOD_RES (15)..(16)..(17)..(18)..(19): Xaa is A or G
  MOD_RES (20)..(21)..(22)..(23): Xaa is A or G or absent
XGXGEVVMDVTAKKXXXXXXXXXIKRMQVPRLETPVXXAKPIK

SEQ ID NO: 25946 - protein, 37 aa, Artificial Sequence
  Non-cyclic GFR-binding peptide
  MOD_RES (31)..(32): Xaa is C or S
RVVMNVQVEKIVNSSDDVKAVKVSRLKTPAXXPKPVY

SEQ ID NO: 25947 - protein, 34 aa, Artificial Sequence
  Non-cyclic GFR-binding peptide
  MOD_RES (1)..(3)..(34): Xaa is C or S
XKXSKVVMSMEGIVKPTRGVMIQITINSLDQPVX

SEQ ID NO: 25948 - protein, 33 aa, Artificial Sequence
  Non-cyclic GFR-binding peptide
  MOD_RES (1)..(32)..(33): Xaa is C or S
XSKVIMSMEGIIKPTKGIMIQITINSLDQSVXX

SEQ ID NO: 25949 - protein, 39 aa, Artificial Sequence
  Non-cyclic GFR-binding peptide
  MOD_RES (35)..(35): Xaa is C or S
  MOD_RES (11)..(12)..(13)..(14)..(15): Xaa is A or G
  MOD_RES (16)..(17)..(18)..(19): Xaa is A or G or absent
HDELTNSLQEXXXXXXXXXYYVVPLPELQVQTPRXQVNR

SEQ ID NO: 25950 - protein, 37 aa, Artificial Sequence
  Non-cyclic GFR-binding peptide
  MOD_RES (1)..(35): Xaa is C or S
  MOD_RES (13)..(14)..(15)..(16)..(17): Xaa is A or G
  MOD_RES (18)..(19)..(20)..(21): Xaa is A or G or absent
XSRVVMNVQVEKXXXXXXXXXVKAVKVSRLKTPAXTP

SEQ ID NO: 25951 - protein, 35 aa, Artificial Sequence
  Non-cyclic GFR-binding peptide
  MOD_RES (1)..(34)..(35): Xaa is C or S
  MOD_RES (12)..(13)..(14)..(15)..(16): Xaa is A or G
  MOD_RES (17)..(18)..(19)..(20): Xaa is A or G or absent
XSKVIMVQVEKXXXXXXXXXVKAIKVSRLDQSVXX

SEQ ID NO: 25952 - protein, 40 aa, Artificial Sequence
  Non-cyclic GFR-binding peptide
  MOD_RES (1)..(38): Xaa is C or S
XALHDELTNSLQEFIPKKRVIEYYVVPLPELQVQTPRXQV

SEQ ID NO: 25953 - protein, 36 aa, Artificial Sequence
  Non-cyclic GFR-binding peptide
  MOD_RES (33)..(34): Xaa is C or S
  MOD_RES (11)..(12)..(13)..(14)..(15): Xaa is A or G
  MOD_RES (16)..(17)..(18)..(19): Xaa is A or G or absent
SRVIMSMEGIXXXXXXXXXMIQITINSLAQPVXXPA

SEQ ID NO: 25954 - protein, 38 aa, Artificial Sequence
  Non-cyclic GFR-binding peptide
  MOD_RES (2)..(35)..(36): Xaa is C or S
  MOD_RES (13)..(14)..(15)..(16)..(17): Xaa is A or G
  MOD_RES (18)..(19)..(20)..(21): Xaa is A or G or absent
KXSKVVMVTAKKXXXXXXXXXIKRIQVPRLDQPVXXPS

SEQ ID NO: 25955 - protein, 37 aa, Artificial Sequence
  Non-cyclic GFR-binding peptide
  MOD_RES (2)..(33)..(34): Xaa is C or S
KXSKVVMSMEGIVKPTRGVMIQITINSLDQPVXXPSA

SEQ ID NO: 25956 - protein, 38 aa, Artificial Sequence
  Non-cyclic GFR-binding peptide
  MOD_RES (1)..(3)..(37)..(38): Xaa is C or S
  MOD_RES (15)..(16)..(17)..(18)..(19): Xaa is A or G
  MOD_RES (20)..(21)..(22)..(23): Xaa is A or G or absent
XGXARVVMNSMEGIXXXXXXXXXMIQVTINSLQTPAXX

SEQ ID NO: 25957 - protein, 39 aa, Artificial Sequence
  Non-cyclic GFR-binding peptide
  MOD_RES (1)..(35)..(36): Xaa is C or S
  MOD_RES (13)..(14)..(15)..(16)..(17): Xaa is A or G
  MOD_RES (18)..(19)..(20)..(21): Xaa is A or G or absent
XARVVMNVQVEKXXXXXXXXXVKAVKVSRLQTPAXXPKP

SEQ ID NO: 25958 - protein, 41 aa, Artificial Sequence
  Non-cyclic GFR-binding peptide
  MOD_RES (2)..(39): Xaa is C or S
KXALHDELTNSLQEFIPKKRVIEYYVVPLPELQVQTPRXQV

SEQ ID NO: 25959 - protein, 36 aa, Artificial Sequence
  Non-cyclic GFR-binding peptide
  MOD_RES (33)..(34): Xaa is C or S
  MOD_RES (11)..(12)..(13)..(14)..(15): Xaa is A or G
  MOD_RES (16)..(17)..(18)..(19): Xaa is A or G or absent
EVVMDSMEGIXXXXXXXXXMIQMTINSLETPVXXAK

SEQ ID NO: 25960 - protein, 39 aa, Artificial Sequence
  Non-cyclic GFR-binding peptide
  MOD_RES (33)..(34): Xaa is C or S
  MOD_RES (11)..(12)..(13)..(14)..(15): Xaa is A or G
  MOD_RES (16)..(17)..(18)..(19): Xaa is A or G or absent
RVVMNVQVEKXXXXXXXXXVKAVKVSRLKTPAXXPKPVY

SEQ ID NO: 25961 - protein, 35 aa, Artificial Sequence
  Non-cyclic GFR-binding peptide
  MOD_RES (1)..(1): Xaa is C or S
XALHDELTNSLQEFIPKKRVIEYYVVPLPELQVQT

SEQ ID NO: 25962 - protein, 39 aa, Artificial Sequence
  Non-cyclic GFR-binding peptide
  MOD_RES (2)..(34)..(35): Xaa is C or S
GXGEVVMDSMEGIVVKENEDMIQMTINSLETPVXXAKPI

SEQ ID NO: 25963 - protein, 37 aa, Artificial Sequence
  Non-cyclic GFR-binding peptide
  MOD_RES (2)..(35)..(36): Xaa is C or S
  MOD_RES (13)..(14)..(15)..(16)..(17): Xaa is A or G
  MOD_RES (18)..(19)..(20)..(21): Xaa is A or G or absent
KXSKVVMVQVEKXXXXXXXXXVKAIKVSRLDQPVXXP

SEQ ID NO: 25964 - protein, 40 aa, Artificial Sequence
  Non-cyclic GFR-binding peptide
  MOD_RES (2)..(4): Xaa is C or S
EXKXALHDELTNSLQEFIPKKRVIEYYVVPLPELQVQTPR

SEQ ID NO: 25965 - protein, 33 aa, Artificial Sequence
  Non-cyclic GFR-binding peptide
  MOD_RES (32)..(33): Xaa is C or S
GEVVMDSMEGIVVKENEDMIQMTINSLETPVXX

SEQ ID NO: 25966 - protein, 39 aa, Artificial Sequence
  Non-cyclic GFR-binding peptide
  MOD_RES (2)..(35)..(36): Xaa is C or S
  MOD_RES (13)..(14)..(15)..(16)..(17): Xaa is A or G
  MOD_RES (18)..(19)..(20)..(21): Xaa is A or G or absent
KXSRVIMVTAKKXXXXXXXXXIKRIQVPRLAQPVXXPAA

SEQ ID NO: 25967 - protein, 34 aa, Artificial Sequence
  Non-cyclic GFR-binding peptide
  MOD_RES (1)..(32)..(33): Xaa is C or S
XSKVVMVQVEKVKPTRGVVKAIKVSRLDQPVXXP

SEQ ID NO: 25968 - protein, 36 aa, Artificial Sequence
  Non-cyclic GFR-binding peptide
  MOD_RES (1)..(35)..(36): Xaa is C or S
  MOD_RES (13)..(14)..(15)..(16)..(17): Xaa is A or G
  MOD_RES (18)..(19)..(20)..(21): Xaa is A or G or absent
XARVVMNSMEGIXXXXXXXXXMIQVTINSLQTPAXX

SEQ ID NO: 25969 - protein, 39 aa, Artificial Sequence
  Non-cyclic GFR-binding peptide
  MOD_RES (36)..(36): Xaa is C or S
  MOD_RES (12)..(13)..(14)..(15)..(16): Xaa is A or G
  MOD_RES (17)..(18)..(19)..(20): Xaa is A or G or absent
LHDELTNSLQEXXXXXXXXXYYLVTLPELQVQTPRXQVN

SEQ ID NO: 25970 - protein, 39 aa, Artificial Sequence
  Non-cyclic GFR-binding peptide
  MOD_RES (34)..(35): Xaa is C or S
  MOD_RES (12)..(13)..(14)..(15)..(16): Xaa is A or G
  MOD_RES (17)..(18)..(19)..(20): Xaa is A or G or absent
GEVVMDVQVEKXXXXXXXXXVKAMKVSRLETPVXXAKPI

SEQ ID NO: 25971 - protein, 31 aa, Artificial Sequence
  Non-cyclic GFR-binding peptide
  MOD_RES (31)..(31): Xaa is C or S
RVVMNSMEGIIVNSSDDMIQVTINSLKTPAX

SEQ ID NO: 25972 - protein, 35 aa, Artificial Sequence
  Non-cyclic GFR-binding peptide
  MOD_RES (1)..(35): Xaa is C or S
  MOD_RES (13)..(14)..(15)..(16)..(17): Xaa is A or G
  MOD_RES (18)..(19)..(20)..(21): Xaa is A or G or absent
XARVVMNSMEGIXXXXXXXXXMIQVTINSLQTPAX

SEQ ID NO: 25973 - protein, 37 aa, Artificial Sequence
  Non-cyclic GFR-binding peptide
  MOD_RES (1)..(1): Xaa is C or S
  MOD_RES (14)..(15)..(16)..(17)..(18): Xaa is A or G
  MOD_RES (19)..(20)..(21)..(22): Xaa is A or G or absent
XELHEELRNSLQEXXXXXXXXXYYLVTLPEHHVRSPQ

SEQ ID NO: 25974 - protein, 39 aa, Artificial Sequence
  Non-cyclic GFR-binding peptide
  MOD_RES (1)..(3)..(37)..(38): Xaa is C or S
  MOD_RES (15)..(16)..(17)..(18)..(19): Xaa is A or G
  MOD_RES (20)..(21)..(22)..(23): Xaa is A or G or absent
XGXARVVMNVTAKKXXXXXXXXXIKRVQVPRLQTPAXXP

SEQ ID NO: 25975 - protein, 40 aa, Artificial Sequence
  Non-cyclic GFR-binding peptide
  MOD_RES (2)..(36)..(37): Xaa is C or S
  MOD_RES (14)..(15)..(16)..(17)..(18): Xaa is A or G
  MOD_RES (19)..(20)..(21)..(22): Xaa is A or G or absent
GXGEVVMDVTAKKXXXXXXXXXIKRMQVPRLETPVXXAKP

SEQ ID NO: 25976 - protein, 39 aa, Artificial Sequence
  Non-cyclic GFR-binding peptide
  MOD_RES (2)..(4)..(38)..(39): Xaa is C or S
  MOD_RES (16)..(17)..(18)..(19)..(20): Xaa is A or G
  MOD_RES (21)..(22)..(23)..(24): Xaa is A or G or absent
HXGXARVVMNVQVEKXXXXXXXXXVKAVKVSRLQTPAXX

SEQ ID NO: 25977 - protein, 33 aa, Artificial Sequence
  Non-cyclic GFR-binding peptide
  MOD_RES (33)..(33): Xaa is C or S
  MOD_RES (11)..(12)..(13)..(14)..(15): Xaa is A or G
  MOD_RES (16)..(17)..(18)..(19): Xaa is A or G or absent
SKVVMVQVEKXXXXXXXXXVKAIKVSRLDQPVX

SEQ ID NO: 25978 - protein, 40 aa, Artificial Sequence
  Non-cyclic GFR-binding peptide
  MOD_RES (34)..(35): Xaa is C or S
  MOD_RES (12)..(13)..(14)..(15)..(16): Xaa is A or G
  MOD_RES (17)..(18)..(19)..(20): Xaa is A or G or absent
ARVVMNVQVEKXXXXXXXXXVKAVKVSRLQTPAXXPKPVT

SEQ ID NO: 25979 - protein, 39 aa, Artificial Sequence
  Non-cyclic GFR-binding peptide
  MOD_RES (2)..(36)..(37): Xaa is C or S
  MOD_RES (14)..(15)..(16)..(17)..(18): Xaa is A or G
  MOD_RES (19)..(20)..(21)..(22): Xaa is A or G or absent
GXSRVVMNVQVEKXXXXXXXXXVKAVKVSRLKTPAXXPK

SEQ ID NO: 25980 - protein, 42 aa, Artificial Sequence
  Non-cyclic GFR-binding peptide
  MOD_RES (2)..(4)..(36): Xaa is C or S
HXGXSRVVMNVQVEKIVNSSDDVKAVKVSRLKTPAXTPKTVH

SEQ ID NO: 25981 - protein, 35 aa, Artificial Sequence
  Non-cyclic GFR-binding peptide
  MOD_RES (35)..(35): Xaa is C or S
HDELTNSLQEFIPKKRVIEYYLVTLPELQVQTPRX

SEQ ID NO: 25982 - protein, 42 aa, Artificial Sequence
  Non-cyclic GFR-binding peptide
  MOD_RES (2)..(36)..(37): Xaa is C or S
  MOD_RES (14)..(15)..(16)..(17)..(18): Xaa is A or G
  MOD_RES (19)..(20)..(21)..(22): Xaa is A or G or absent
GXSRVVMNVQVEKXXXXXXXXXVKAVKVSRLKTPAXXPKPVY

SEQ ID NO: 25983 - protein, 40 aa, Artificial Sequence
  Non-cyclic GFR-binding peptide
  MOD_RES (2)..(4)..(37)..(38): Xaa is C or S
  MOD_RES (15)..(16)..(17)..(18)..(19): Xaa is A or G
  MOD_RES (20)..(21)..(22)..(23): Xaa is A or G or absent
SXKXSKVVMVQVEKXXXXXXXXXVKAIKVSRLDQPVXXPS

SEQ ID NO: 25984 - protein, 40 aa, Artificial Sequence
  Non-cyclic GFR-binding peptide
  MOD_RES (37)..(37): Xaa is C or S
ALHDELTNSLQEFIPKKRVIEYYVVPLPELQVQTPRXQVN

SEQ ID NO: 25985 - protein, 33 aa, Artificial Sequence
  Non-cyclic GFR-binding peptide
  MOD_RES (1)..(32)..(33): Xaa is C or S
XSRVIMVQVEKVKPKRGVVKAIKVSRLAQPVXX

SEQ ID NO: 25986 - protein, 38 aa, Artificial Sequence
  Non-cyclic GFR-binding peptide
  MOD_RES (2)..(4)..(35)..(36): Xaa is C or S
SXKXSKVVMSMEGIVKPTRGVMIQITINSLDQPVXXPS

SEQ ID NO: 25987 - protein, 34 aa, Artificial Sequence
  Non-cyclic GFR-binding peptide
  MOD_RES (1)..(1): Xaa is C or S
  MOD_RES (13)..(14)..(15)..(16)..(17): Xaa is A or G
  MOD_RES (18)..(19)..(20)..(21): Xaa is A or G or absent
XARVVMNSMEGIXXXXXXXXXMIQVTINSLQTPA

SEQ ID NO: 25988 - protein, 39 aa, Artificial Sequence
  Non-cyclic GFR-binding peptide
  MOD_RES (1)..(3)..(37): Xaa is C or S
  MOD_RES (15)..(16)..(17)..(18)..(19): Xaa is A or G
  MOD_RES (20)..(21)..(22)..(23): Xaa is A or G or absent
XGXSRVVMNSMEGIXXXXXXXXXMIQVTINSLKTPAXTP

SEQ ID NO: 25989 - protein, 38 aa, Artificial Sequence
  Non-cyclic GFR-binding peptide
  MOD_RES (33)..(34): Xaa is C or S
  MOD_RES (11)..(12)..(13)..(14)..(15): Xaa is A or G
  MOD_RES (16)..(17)..(18)..(19): Xaa is A or G or absent
EVVMESMEGIXXXXXXXXXMIQMTINSLETPVXXAKPI

SEQ ID NO: 25990 - protein, 39 aa, Artificial Sequence
  Non-cyclic GFR-binding peptide
  MOD_RES (1)..(3)..(37): Xaa is C or S
XEXKNHQLFNSLQEHQGQHPKIRYYLMTLPEEETPVXEL

SEQ ID NO: 25991 - protein, 32 aa, Artificial Sequence
  Non-cyclic GFR-binding peptide
  MOD_RES (2)..(2): Xaa is C or S
KXSRVIMSMEGIVKPKRGVMIQITINSLAQPV

SEQ ID NO: 25992 - protein, 40 aa, Artificial Sequence
  Non-cyclic GFR-binding peptide
  MOD_RES (1)..(3)..(40): Xaa is C or S
XAXELHEELRNSLQELKPKKRVYEYYLVTLPEHHVRSPQX

SEQ ID NO: 25993 - protein, 38 aa, Artificial Sequence
  Non-cyclic GFR-binding peptide
  MOD_RES (1)..(33): Xaa is C or S
XSRVVMNSMEGIIVNSSDDMIQVTINSLKTPAXTPKTV

SEQ ID NO: 25994 - protein, 43 aa, Artificial Sequence
  Non-cyclic GFR-binding peptide
  MOD_RES (2)..(4)..(38)..(39): Xaa is C or S
  MOD_RES (16)..(17)..(18)..(19)..(20): Xaa is A or G
  MOD_RES (21)..(22)..(23)..(24): Xaa is A or G or absent
HXGXARVVMNSMEGIXXXXXXXXXMIQVTINSLQTPAXXPKPV

SEQ ID NO: 25995 - protein, 37 aa, Artificial Sequence
  Non-cyclic GFR-binding peptide
  MOD_RES (34)..(34): Xaa is C or S
KNHQLFNSLQEHQGQHPKIRYYVMPLPEEETPVXELG

SEQ ID NO: 25996 - protein, 40 aa, Artificial Sequence
  Non-cyclic GFR-binding peptide
  MOD_RES (1)..(3)..(35)..(36): Xaa is C or S
XGXGEVVMDSMEGIVVKENEDMIQMTINSLETPVXXAKPI

SEQ ID NO: 25997 - protein, 43 aa, Artificial Sequence
  Non-cyclic GFR-binding peptide
  MOD_RES (1)..(3)..(37)..(38): Xaa is C or S
  MOD_RES (15)..(16)..(17)..(18)..(19): Xaa is A or G
  MOD_RES (20)..(21)..(22)..(23): Xaa is A or G or absent
XGXARVVMNVTAKKXXXXXXXXXIKRVQVPRLQTPAXXPKPVT

SEQ ID NO: 25998 - protein, 32 aa, Artificial Sequence
  Non-cyclic GFR-binding peptide
  MOD_RES (1)..(1): Xaa is C or S
XARVVMNVQVEKIVNSSDDVKAVKVSRLQTPA

SEQ ID NO: 25999 - protein, 38 aa, Artificial Sequence
  Non-cyclic GFR-binding peptide
  MOD_RES (32)..(33): Xaa is C or S
GEVVMDVQVEKVVKENEDVKAMKVSRLETPVXXAKPIK

SEQ ID NO: 26000 - protein, 41 aa, Artificial Sequence
  Non-cyclic GFR-binding peptide
  MOD_RES (1)..(35): Xaa is C or S
  MOD_RES (13)..(14)..(15)..(16)..(17): Xaa is A or G
  MOD_RES (18)..(19)..(20)..(21): Xaa is A or G or absent
XKNHQLFNSLQEXXXXXXXXXYYVMPLPEEETPVXELGEDN

SEQ ID NO: 26001 - protein, 34 aa, Artificial Sequence
  Non-cyclic GFR-binding peptide
  MOD_RES (33)..(34): Xaa is C or S
  MOD_RES (11)..(12)..(13)..(14)..(15): Xaa is A or G
  MOD_RES (16)..(17)..(18)..(19): Xaa is A or G or absent
RVVMNVTAKKXXXXXXXXXIKRVQVPRLQTPAXX

SEQ ID NO: 26002 - protein, 40 aa, Artificial Sequence
  Non-cyclic GFR-binding peptide
  MOD_RES (2)..(34): Xaa is C or S
GXSRVVMNVQVEKIVNSSDDVKAVKVSRLKTPAXTPKTVH

SEQ ID NO: 26003 - protein, 36 aa, Artificial Sequence
  Non-cyclic GFR-binding peptide
  MOD_RES (1)..(3)..(35)..(36): Xaa is C or S
XGXGEVVMEVQVEKVVKDYEDVKAMKVSRLETPVXX

SEQ ID NO: 26004 - protein, 38 aa, Artificial Sequence
  Non-cyclic GFR-binding peptide
  MOD_RES (32)..(33): Xaa is C or S
SRVVMNVTAKKIVNSSDDIKRVQVPRLKTPAXXPKPVY

SEQ ID NO: 26005 - protein, 38 aa, Artificial Sequence
  Non-cyclic GFR-binding peptide
  MOD_RES (2)..(4)..(36): Xaa is C or S
HXGXSRVVMNVQVEKIVNSSDDVKAVKVSRLKTPAXTP

SEQ ID NO: 26006 - protein, 33 aa, Artificial Sequence
  Non-cyclic GFR-binding peptide
  MOD_RES (12)..(13)..(14)..(15)..(16): Xaa is A or G
  MOD_RES (17)..(18)..(19)..(20): Xaa is A or G or absent
SRVVMNVQVEKXXXXXXXXXVKAVKVSRLKTPA

SEQ ID NO: 26007 - protein, 36 aa, Artificial Sequence
  Non-cyclic GFR-binding peptide
  MOD_RES (2)..(34)..(35): Xaa is C or S
GXSRVVMNVQVEKIVNSSDDVKAVKVSRLKTPAXXP

SEQ ID NO: 26008 - protein, 38 aa, Artificial Sequence
  Non-cyclic GFR-binding peptide
  MOD_RES (35)..(35): Xaa is C or S
  MOD_RES (11)..(12)..(13)..(14)..(15): Xaa is A or G
  MOD_RES (16)..(17)..(18)..(19): Xaa is A or G or absent
HEELRNSLQEXXXXXXXXXYYLVTLPEHHVRSPQXKVS

SEQ ID NO: 26009 - protein, 39 aa, Artificial Sequence
  Non-cyclic GFR-binding peptide
  MOD_RES (2)..(4)..(35)..(36): Xaa is C or S
SXKXSRVIMSMEGIVKPKRGVMIQITINSLAQPVXXPAA

SEQ ID NO: 26010 - protein, 36 aa, Artificial Sequence
  Non-cyclic GFR-binding peptide
  MOD_RES (2)..(34)..(35): Xaa is C or S
GXGEVVMEVQVEKVVKDYEDVKAMKVSRLETPVXXA

SEQ ID NO: 26011 - protein, 38 aa, Artificial Sequence
  Non-cyclic GFR-binding peptide
  MOD_RES (1)..(3)..(36)..(37): Xaa is C or S
  MOD_RES (14)..(15)..(16)..(17)..(18): Xaa is A or G
  MOD_RES (19)..(20)..(21)..(22): Xaa is A or G or absent
XKXSKVVMVQVEKXXXXXXXXXVKAIKVSRLDQPVXXP

SEQ ID NO: 26012 - protein, 36 aa, Artificial Sequence
  Non-cyclic GFR-binding peptide
  MOD_RES (13)..(14)..(15)..(16)..(17): Xaa is A or G
  MOD_RES (18)..(19)..(20)..(21): Xaa is A or G or absent
ALHDELTNSLQEXXXXXXXXXYYLVTLPELQVQTPR

SEQ ID NO: 26013 - protein, 39 aa, Artificial Sequence
  Non-cyclic GFR-binding peptide
  MOD_RES (2)..(34)..(35): Xaa is C or S
GXSRVVMNVTAKKIVNSSDDIKRVQVPRLKTPAXXPKPV

SEQ ID NO: 26014 - protein, 39 aa, Artificial Sequence
  Non-cyclic GFR-binding peptide
  MOD_RES (33)..(34): Xaa is C or S
  MOD_RES (11)..(12)..(13)..(14)..(15): Xaa is A or G
  MOD_RES (16)..(17)..(18)..(19): Xaa is A or G or absent
EVVMDVTAKKXXXXXXXXXIKRMQVPRLETPVXXAKPIK

SEQ ID NO: 26015 - protein, 36 aa, Artificial Sequence
  Non-cyclic GFR-binding peptide
  MOD_RES (2)..(36): Xaa is C or S
  MOD_RES (14)..(15)..(16)..(17)..(18): Xaa is A or G
  MOD_RES (19)..(20)..(21)..(22): Xaa is A or G or absent
GXGEVVMDSMEGIXXXXXXXXXMIQMTINSLETPVX

SEQ ID NO: 26016 - protein, 43 aa, Artificial Sequence
  Non-cyclic GFR-binding peptide
  MOD_RES (2)..(39): Xaa is C or S
KXALHDELTNSLQEFIPKKRVIEYYLVTLPELQVQTPRXQVNR

SEQ ID NO: 26017 - protein, 36 aa, Artificial Sequence
  Non-cyclic GFR-binding peptide
  MOD_RES (1)..(32)..(33): Xaa is C or S
XSRVIMSMEGIVKPKRGVMIQITINSLAQPVXXPAA

SEQ ID NO: 26018 - protein, 37 aa, Artificial Sequence
  Non-cyclic GFR-binding peptide
  MOD_RES (2)..(4)..(36)..(37): Xaa is C or S
RXGXGEVVMDVQVEKVVKENEDVKAMKVSRLETPVXX

SEQ ID NO: 26019 - protein, 34 aa, Artificial Sequence
  Non-cyclic GFR-binding peptide
  MOD_RES (31)..(32): Xaa is C or S
SRVIMVQVEKVKPKRGVVKAIKVSRLAQPVXXPA

SEQ ID NO: 26020 - protein, 33 aa, Artificial Sequence
  Non-cyclic GFR-binding peptide
  MOD_RES (1)..(32)..(33): Xaa is C or S
XSRVIMSMEGIVKPKRGVMIQITINSLAQPVXX

SEQ ID NO: 26021 - protein, 39 aa, Artificial Sequence
  Non-cyclic GFR-binding peptide
  MOD_RES (33)..(34): Xaa is C or S
  MOD_RES (11)..(12)..(13)..(14)..(15): Xaa is A or G
  MOD_RES (16)..(17)..(18)..(19): Xaa is A or G or absent
SRVIMVTAKKXXXXXXXXXIKRIQVPRLAQPVXXPAASA

SEQ ID NO: 26022 - protein, 33 aa, Artificial Sequence
  Non-cyclic GFR-binding peptide
  MOD_RES (31)..(32): Xaa is C or S
EVVMDVTAKKVVKENEDIKRMQVPRLETPVXXA

SEQ ID NO: 26023 - protein, 40 aa, Artificial Sequence
  Non-cyclic GFR-binding peptide
  MOD_RES (1)..(3)..(37)..(38): Xaa is C or S
  MOD_RES (15)..(16)..(17)..(18)..(19): Xaa is A or G
  MOD_RES (20)..(21)..(22)..(23): Xaa is A or G or absent
XGXARVVMNSMEGIXXXXXXXXXMIQVTINSLQTPAXXPK

SEQ ID NO: 26024 - protein, 41 aa, Artificial Sequence
  Non-cyclic GFR-binding peptide
  MOD_RES (1)..(3)..(35)..(36): Xaa is C or S
XGXARVVMNSMEGIIVNSSDDMIQVTINSLQTPAXXPKPVT

SEQ ID NO: 26025 - protein, 37 aa, Artificial Sequence
  Non-cyclic GFR-binding peptide
  MOD_RES (1)..(35)..(36): Xaa is C or S
  MOD_RES (13)..(14)..(15)..(16)..(17): Xaa is A or G
  MOD_RES (18)..(19)..(20)..(21): Xaa is A or G or absent
XSRVVMNVQVEKXXXXXXXXXVKAVKVSRLKTPAXXP

SEQ ID NO: 26026 - protein, 45 aa, Artificial Sequence
  Non-cyclic GFR-binding peptide
  MOD_RES (2)..(4)..(41): Xaa is C or S
EXKXALHDELTNSLQEFIPKKRVIEYYVVPLPELQVQTPRXQVNR

SEQ ID NO: 26027 - protein, 36 aa, Artificial Sequence
  Non-cyclic GFR-binding peptide
  MOD_RES (1)..(32)..(33): Xaa is C or S
XSRVIMVQVEKVKPKRGVVKAIKVSRLAQPVXXPAA

SEQ ID NO: 26028 - protein, 34 aa, Artificial Sequence
  Non-cyclic GFR-binding peptide
  MOD_RES (2)..(4): Xaa is C or S
SXKXSKVVMSMEGIVKPTRGVMIQITINSLDQPV

SEQ ID NO: 26029 - protein, 33 aa, Artificial Sequence
  Non-cyclic GFR-binding peptide
  MOD_RES (2)..(2): Xaa is C or S
GXSRVVMNVQVEKIVNSSDDVKAVKVSRLKTPA

SEQ ID NO: 26030 - protein, 39 aa, Artificial Sequence
  Non-cyclic GFR-binding peptide
  MOD_RES (2)..(4)..(36)..(37): Xaa is C or S
RXGXGEVVMEVTAKKVVKDYEDIKRMQVPRLETPVXXAK

SEQ ID NO: 26031 - protein, 40 aa, Artificial Sequence
  Non-cyclic GFR-binding peptide
  MOD_RES (34)..(35): Xaa is C or S
  MOD_RES (12)..(13)..(14)..(15)..(16): Xaa is A or G
  MOD_RES (17)..(18)..(19)..(20): Xaa is A or G or absent
ARVVMNVTAKKXXXXXXXXXIKRVQVPRLQTPAXXPKPVT

SEQ ID NO: 26032 - protein, 33 aa, Artificial Sequence
  Non-cyclic GFR-binding peptide
  MOD_RES (33)..(33): Xaa is C or S
  MOD_RES (11)..(12)..(13)..(14)..(15): Xaa is A or G
  MOD_RES (16)..(17)..(18)..(19): Xaa is A or G or absent
NHQLFNSLQEXXXXXXXXXYYVMPLPEEETPVX

SEQ ID NO: 26033 - protein, 37 aa, Artificial Sequence
  Non-cyclic GFR-binding peptide
  MOD_RES (1)..(3)..(37): Xaa is C or S
  MOD_RES (15)..(16)..(17)..(18)..(19): Xaa is A or G
  MOD_RES (20)..(21)..(22)..(23): Xaa is A or G or absent
XGXARVVMNVQVEKXXXXXXXXXVKAVKVSRLQTPAX

SEQ ID NO: 26034 - protein, 40 aa, Artificial Sequence
  Non-cyclic GFR-binding peptide
  MOD_RES (1)..(35): Xaa is C or S
XKNHQLFNSLQEHQGQHPKIRYYVMPLPEEETPVXELGED

SEQ ID NO: 26035 - protein, 37 aa, Artificial Sequence
  Non-cyclic GFR-binding peptide
  MOD_RES (1)..(35)..(36): Xaa is C or S
  MOD_RES (13)..(14)..(15)..(16)..(17): Xaa is A or G
  MOD_RES (18)..(19)..(20)..(21): Xaa is A or G or absent
XGEVVMDVTAKKXXXXXXXXXIKRMQVPRLETPVXXA

SEQ ID NO: 26036 - protein, 42 aa, Artificial Sequence
  Non-cyclic GFR-binding peptide
  MOD_RES (2)..(4)..(38)..(39): Xaa is C or S
  MOD_RES (16)..(17)..(18)..(19)..(20): Xaa is A or G
  MOD_RES (21)..(22)..(23)..(24): Xaa is A or G or absent
HXGXARVVMNVQVEKXXXXXXXXXVKAVKVSRLQTPAXXPKP

SEQ ID NO: 26037 - protein, 41 aa, Artificial Sequence
  Non-cyclic GFR-binding peptide
  MOD_RES (2)..(4)..(36)..(37): Xaa is C or S
HXGXARVVMNSMEGIIVNSSDDMIQVTINSLQTPAXXPKPV

SEQ ID NO: 26038 - protein, 31 aa, Artificial Sequence
  Non-cyclic GFR-binding peptide
  MOD_RES (1)..(1): Xaa is C or S
XSRVIMSMEGIVKPKRGVMIQITINSLAQPV

SEQ ID NO: 26039 - protein, 36 aa, Artificial Sequence
  Non-cyclic GFR-binding peptide
  MOD_RES (2)..(35)..(36): Xaa is C or S
  MOD_RES (13)..(14)..(15)..(16)..(17): Xaa is A or G
  MOD_RES (18)..(19)..(20)..(21): Xaa is A or G or absent
KXSRVIMSMEGIXXXXXXXXXMIQITINSLAQPVXX

SEQ ID NO: 26040 - protein, 39 aa, Artificial Sequence
  Non-cyclic GFR-binding peptide
  MOD_RES (2)..(4)..(35)..(36): Xaa is C or S
SXKXSKVVMVQVEKVKPTRGVVKAIKVSRLDQPVXXPSA

SEQ ID NO: 26041 - protein, 35 aa, Artificial Sequence
  Non-cyclic GFR-binding peptide
  MOD_RES (1)..(3)..(35): Xaa is C or S
XGXGEVVMDSMEGIVVKENEDMIQMTINSLETPVX

SEQ ID NO: 26042 - protein, 38 aa, Artificial Sequence
  Non-cyclic GFR-binding peptide
  MOD_RES (2)..(36)..(37): Xaa is C or S
  MOD_RES (14)..(15)..(16)..(17)..(18): Xaa is A or G
  MOD_RES (19)..(20)..(21)..(22): Xaa is A or G or absent
GXARVVMNVQVEKXXXXXXXXXVKAVKVSRLQTPAXXP

SEQ ID NO: 26043 - protein, 36 aa, Artificial Sequence
  Non-cyclic GFR-binding peptide
  MOD_RES (2)..(33)..(34): Xaa is C or S
KXSKVVMVQVEKVKPTRGVVKAIKVSRLDQPVXXPS

SEQ ID NO: 26044 - protein, 37 aa, Artificial Sequence
  Non-cyclic GFR-binding peptide
  MOD_RES (2)..(2): Xaa is C or S
  MOD_RES (15)..(16)..(17)..(18)..(19): Xaa is A or G
  MOD_RES (20)..(21)..(22)..(23): Xaa is A or G or absent
AXELHEELRNSLQEXXXXXXXXXYYVVPLPEHHVRSP

SEQ ID NO: 26045 - protein, 37 aa, Artificial Sequence
  Non-cyclic GFR-binding peptide
  MOD_RES (1)..(34)..(35): Xaa is C or S
  MOD_RES (12)..(13)..(14)..(15)..(16): Xaa is A or G
  MOD_RES (17)..(18)..(19)..(20): Xaa is A or G or absent
XSKVVMVTAKKXXXXXXXXXIKRIQVPRLDQPVXXPS

SEQ ID NO: 26046 - protein, 37 aa, Artificial Sequence
  Non-cyclic GFR-binding peptide
  MOD_RES (1)..(3)..(35)..(36): Xaa is C or S
XGXSRVVMNVTAKKIVNSSDDIKRVQVPRLKTPAXXP

SEQ ID NO: 26047 - protein, 41 aa, Artificial Sequence
  Non-cyclic GFR-binding peptide
  MOD_RES (2)..(4)..(41): Xaa is C or S
AXAXELHEELRNSLQELKPKKRVYEYYVVPLPEHHVRSPQX

SEQ ID NO: 26048 - protein, 38 aa, Artificial Sequence
  Non-cyclic GFR-binding peptide
  MOD_RES (1)..(3)..(36)..(37): Xaa is C or S
  MOD_RES (14)..(15)..(16)..(17)..(18): Xaa is A or G
  MOD_RES (19)..(20)..(21)..(22): Xaa is A or G or absent
XKXSRVIMSMEGIXXXXXXXXXMIQITINSLAQPVXXP

SEQ ID NO: 26049 - protein, 36 aa, Artificial Sequence
  Non-cyclic GFR-binding peptide
  MOD_RES (33)..(34): Xaa is C or S
  MOD_RES (11)..(12)..(13)..(14)..(15): Xaa is A or G
  MOD_RES (16)..(17)..(18)..(19): Xaa is A or G or absent
RVVMNSMEGIXXXXXXXXXMIQVTINSLQTPAXXPK

SEQ ID NO: 26050 - protein, 34 aa, Artificial Sequence
  Non-cyclic GFR-binding peptide
  MOD_RES (32)..(33): Xaa is C or S
GEVVMDVTAKKVVKENEDIKRMQVPRLETPVXXA

SEQ ID NO: 26051 - protein, 40 aa, Artificial Sequence
  Non-cyclic GFR-binding peptide
  MOD_RES (36)..(36): Xaa is C or S
  MOD_RES (12)..(13)..(14)..(15)..(16): Xaa is A or G
  MOD_RES (17)..(18)..(19)..(20): Xaa is A or G or absent
LHDELTNSLQEXXXXXXXXXYYLVTLPELQVQTPRXQVNR

SEQ ID NO: 26052 - protein, 32 aa, Artificial Sequence
  Non-cyclic GFR-binding peptide
  MOD_RES (32)..(32): Xaa is C or S
SRVVMNSMEGIIVNSSDDMIQVTINSLKTPAX

SEQ ID NO: 26053 - protein, 39 aa, Artificial Sequence
  Non-cyclic GFR-binding peptide
  MOD_RES (2)..(35)..(36): Xaa is C or S
  MOD_RES (13)..(14)..(15)..(16)..(17): Xaa is A or G
  MOD_RES (18)..(19)..(20)..(21): Xaa is A or G or absent
KXSRVIMVQVEKXXXXXXXXXVKAIKVSRLAQPVXXPAA

SEQ ID NO: 26054 - protein, 36 aa, Artificial Sequence
  Non-cyclic GFR-binding peptide
  MOD_RES (2)..(4)..(36): Xaa is C or S
RXGXGEVVMEVTAKKVVKDYEDIKRMQVPRLETPVX

SEQ ID NO: 26055 - protein, 34 aa, Artificial Sequence
  Non-cyclic GFR-binding peptide
  MOD_RES (2)..(34): Xaa is C or S
GXGEVVMEVTAKKVVKDYEDIKRMQVPRLETPVX

SEQ ID NO: 26056 - protein, 35 aa, Artificial Sequence
  Non-cyclic GFR-binding peptide
  MOD_RES (1)..(33)..(34): Xaa is C or S
XARVVMNSMEGIIVNSSDDMIQVTINSLQTPAXXP

SEQ ID NO: 26057 - protein, 40 aa, Artificial Sequence
  Non-cyclic GFR-binding peptide
  MOD_RES (36)..(36): Xaa is C or S
LHDELTNSLQEFIPKKRVIEYYVVPLPELQVQTPRXQVNR

SEQ ID NO: 26058 - protein, 35 aa, Artificial Sequence
  Non-cyclic GFR-binding peptide
  MOD_RES (31)..(32): Xaa is C or S
RVVMNSMEGIIVNSSDDMIQVTINSLKTPAXXPKP

SEQ ID NO: 26059 - protein, 40 aa, Artificial Sequence
  Non-cyclic GFR-binding peptide
  MOD_RES (1)..(3)..(36)..(37): Xaa is C or S
  MOD_RES (14)..(15)..(16)..(17)..(18): Xaa is A or G
  MOD_RES (19)..(20)..(21)..(22): Xaa is A or G or absent
XKXSKVVMSMEGIXXXXXXXXXMIQITINSLDQPVXXPSA

SEQ ID NO: 26060 - protein, 35 aa, Artificial Sequence
  Non-cyclic GFR-binding peptide
  MOD_RES (1)..(3)..(34)..(35): Xaa is C or S
XKXSKVIMSMEGIIKPTKGIMIQITINSLDQSVXX

SEQ ID NO: 26061 - protein, 36 aa, Artificial Sequence
  Non-cyclic GFR-binding peptide
  MOD_RES (2)..(36): Xaa is C or S
  MOD_RES (14)..(15)..(16)..(17)..(18): Xaa is A or G
  MOD_RES (19)..(20)..(21)..(22): Xaa is A or G or absent
GXARVVMNVTAKKXXXXXXXXXIKRVQVPRLQTPAX

SEQ ID NO: 26062 - protein, 43 aa, Artificial Sequence
  Non-cyclic GFR-binding peptide
  MOD_RES (2)..(4)..(38)..(39): Xaa is C or S
  MOD_RES (16)..(17)..(18)..(19)..(20): Xaa is A or G
  MOD_RES (21)..(22)..(23)..(24): Xaa is A or G or absent
HXGXSRVVMNVQVEKXXXXXXXXXVKAVKVSRLKTPAXXPKPV

SEQ ID NO: 26063 - protein, 36 aa, Artificial Sequence
  Non-cyclic GFR-binding peptide
  MOD_RES (35)..(35): Xaa is C or S
  MOD_RES (11)..(12)..(13)..(14)..(15): Xaa is A or G
  MOD_RES (16)..(17)..(18)..(19): Xaa is A or G or absent
HDELTNSLQEXXXXXXXXXYYVVPLPELQVQTPRXQ

SEQ ID NO: 26064 - protein, 40 aa, Artificial Sequence
  Non-cyclic GFR-binding peptide
  MOD_RES (2)..(4)..(35)..(36): Xaa is C or S
SXKXSKVVMSMEGIVKPTRGVMIQITINSLDQPVXXPSAS

SEQ ID NO: 26065 - protein, 38 aa, Artificial Sequence
  Non-cyclic GFR-binding peptide
  MOD_RES (1)..(35)..(36): Xaa is C or S
  MOD_RES (13)..(14)..(15)..(16)..(17): Xaa is A or G
  MOD_RES (18)..(19)..(20)..(21): Xaa is A or G or absent
XGEVVMDSMEGIXXXXXXXXXMIQMTINSLETPVXXAK

SEQ ID NO: 26066 - protein, 41 aa, Artificial Sequence
  Non-cyclic GFR-binding peptide
  MOD_RES (1)..(35)..(36): Xaa is C or S
  MOD_RES (13)..(14)..(15)..(16)..(17): Xaa is A or G
  MOD_RES (18)..(19)..(20)..(21): Xaa is A or G or absent
XGEVVMDSMEGIXXXXXXXXXMIQMTINSLETPVXXAKPIK

SEQ ID NO: 26067 - protein, 35 aa, Artificial Sequence
  Non-cyclic GFR-binding peptide
  MOD_RES (1)..(1): Xaa is C or S
  MOD_RES (14)..(15)..(16)..(17)..(18): Xaa is A or G
  MOD_RES (19)..(20)..(21)..(22): Xaa is A or G or absent
XALHDELTNSLQEXXXXXXXXXYYVVPLPELQVQT

SEQ ID NO: 26068 - protein, 36 aa, Artificial Sequence
  Non-cyclic GFR-binding peptide
  MOD_RES (1)..(33)..(34): Xaa is C or S
XGEVVMDVQVEKVVKENEDVKAMKVSRLETPVXXAK

SEQ ID NO: 26069 - protein, 32 aa, Artificial Sequence
  Non-cyclic GFR-binding peptide
  MOD_RES (1)..(1): Xaa is C or S
XGEVVMEVQVEKVVKDYEDVKAMKVSRLETPV

SEQ ID NO: 26070 - protein, 35 aa, Artificial Sequence
  Non-cyclic GFR-binding peptide
  MOD_RES (1)..(3)..(34)..(35): Xaa is C or S
XKXSKVVMSMEGIVKPTRGVMIQITINSLDQPVXX

SEQ ID NO: 26071 - protein, 39 aa, Artificial Sequence
  Non-cyclic GFR-binding peptide
  MOD_RES (2)..(35)..(36): Xaa is C or S
  MOD_RES (13)..(14)..(15)..(16)..(17): Xaa is A or G
  MOD_RES (18)..(19)..(20)..(21): Xaa is A or G or absent
KXSKVIMVTAKKXXXXXXXXXIKRIQVPRLDQSVXXPSA

SEQ ID NO: 26072 - protein, 37 aa, Artificial Sequence
  Non-cyclic GFR-binding peptide
  MOD_RES (1)..(33)..(34): Xaa is C or S
XGEVVMESMEGIVVKDYEDMIQMTINSLETPVXXAKP

SEQ ID NO: 26073 - protein, 35 aa, Artificial Sequence
  Non-cyclic GFR-binding peptide
  MOD_RES (1)..(32)..(33): Xaa is C or S
XSRVIMSMEGIVKPKRGVMIQITINSLAQPVXXPA

SEQ ID NO: 26074 - protein, 36 aa, Artificial Sequence
  Non-cyclic GFR-binding peptide
  MOD_RES (2)..(4)..(36): Xaa is C or S
RXGXGEVVMDVQVEKVVKENEDVKAMKVSRLETPVX

SEQ ID NO: 26075 - protein, 38 aa, Artificial Sequence
  Non-cyclic GFR-binding peptide
  MOD_RES (2)..(33)..(34): Xaa is C or S
KXSKVVMVQVEKVKPTRGVVKAIKVSRLDQPVXXPSAS

SEQ ID NO: 26076 - protein, 41 aa, Artificial Sequence
  Non-cyclic GFR-binding peptide
  MOD_RES (2)..(4)..(37)..(38): Xaa is C or S
  MOD_RES (15)..(16)..(17)..(18)..(19): Xaa is A or G
  MOD_RES (20)..(21)..(22)..(23): Xaa is A or G or absent
SXKXSKVVMVTAKKXXXXXXXXXIKRIQVPRLDQPVXXPSA

SEQ ID NO: 26077 - protein, 35 aa, Artificial Sequence
  Non-cyclic GFR-binding peptide
  MOD_RES (33)..(34): Xaa is C or S
  MOD_RES (11)..(12)..(13)..(14)..(15): Xaa is A or G
  MOD_RES (16)..(17)..(18)..(19): Xaa is A or G or absent
EVVMDSMEGIXXXXXXXXXMIQMTINSLETPVXXA

SEQ ID NO: 26078 - protein, 38 aa, Artificial Sequence
  Non-cyclic GFR-binding peptide
  MOD_RES (2)..(36): Xaa is C or S
  MOD_RES (14)..(15)..(16)..(17)..(18): Xaa is A or G
  MOD_RES (19)..(20)..(21)..(22): Xaa is A or G or absent
EXKNHQLFNSLQEXXXXXXXXXYYLMTLPEEETPVXEL

SEQ ID NO: 26079 - protein, 34 aa, Artificial Sequence
  Non-cyclic GFR-binding peptide
  MOD_RES (33)..(34): Xaa is C or S
  MOD_RES (11)..(12)..(13)..(14)..(15): Xaa is A or G
  MOD_RES (16)..(17)..(18)..(19): Xaa is A or G or absent
SKVIMVTAKKXXXXXXXXXIKRIQVPRLDQSVXX

SEQ ID NO: 26080 - protein, 36 aa, Artificial Sequence
  Non-cyclic GFR-binding peptide
  MOD_RES (36)..(36): Xaa is C or S
LHDELTNSLQEFIPKKRVIEYYVVPLPELQVQTPRX

SEQ ID NO: 26081 - protein, 33 aa, Artificial Sequence
  Non-cyclic GFR-binding peptide
  MOD_RES (33)..(33): Xaa is C or S
  MOD_RES (11)..(12)..(13)..(14)..(15): Xaa is A or G
  MOD_RES (16)..(17)..(18)..(19): Xaa is A or G or absent
NHQLFNSLQEXXXXXXXXXYYLMTLPEEETPVX

SEQ ID NO: 26082 - protein, 37 aa, Artificial Sequence
  Non-cyclic GFR-binding peptide
  MOD_RES (1)..(35): Xaa is C or S
  MOD_RES (13)..(14)..(15)..(16)..(17): Xaa is A or G
  MOD_RES (18)..(19)..(20)..(21): Xaa is A or G or absent
XKNHQLFNSLQEXXXXXXXXXYYVMPLPEEETPVXEL

SEQ ID NO: 26083 - protein, 35 aa, Artificial Sequence
  Non-cyclic GFR-binding peptide
  MOD_RES (32)..(33): Xaa is C or S
SRVVMNVQVEKIVNSSDDVKAVKVSRLKTPAXXPK

SEQ ID NO: 26084 - protein, 41 aa, Artificial Sequence
  Non-cyclic GFR-binding peptide
  MOD_RES (2)..(36)..(37): Xaa is C or S
  MOD_RES (14)..(15)..(16)..(17)..(18): Xaa is A or G
  MOD_RES (19)..(20)..(21)..(22): Xaa is A or G or absent
GXSRVVMNSMEGIXXXXXXXXXMIQVTINSLKTPAXXPKPV

SEQ ID NO: 26085 - protein, 35 aa, Artificial Sequence
  Non-cyclic GFR-binding peptide
  MOD_RES (31)..(32): Xaa is C or S
RVVMNVQVEKIVNSSDDVKAVKVSRLKTPAXXPKP

SEQ ID NO: 26086 - protein, 35 aa, Artificial Sequence
  Non-cyclic GFR-binding peptide
  MOD_RES (31)..(32): Xaa is C or S
SRVIMVTAKKVKPKRGVIKRIQVPRLAQPVXXPAA

SEQ ID NO: 26087 - protein, 34 aa, Artificial Sequence
  Non-cyclic GFR-binding peptide
  MOD_RES (33)..(34): Xaa is C or S
  MOD_RES (11)..(12)..(13)..(14)..(15): Xaa is A or G
  MOD_RES (16)..(17)..(18)..(19): Xaa is A or G or absent
EVVMDVQVEKXXXXXXXXXVKAMKVSRLETPVXX

SEQ ID NO: 26088 - protein, 37 aa, Artificial Sequence
  Non-cyclic GFR-binding peptide
  MOD_RES (1)..(33)..(34): Xaa is C or S
XGEVVMDSMEGIVVKENEDMIQMTINSLETPVXXAKP

SEQ ID NO: 26089 - protein, 39 aa, Artificial Sequence
  Non-cyclic GFR-binding peptide
  MOD_RES (1)..(3)..(35)..(36): Xaa is C or S
XGXGEVVMESMEGIVVKDYEDMIQMTINSLETPVXXAKP

SEQ ID NO: 26090 - protein, 38 aa, Artificial Sequence
  Non-cyclic GFR-binding peptide
  MOD_RES (2)..(4)..(36)..(37): Xaa is C or S
HXGXSRVVMNVTAKKIVNSSDDIKRVQVPRLKTPAXXP

SEQ ID NO: 26091 - protein, 43 aa, Artificial Sequence
  Non-cyclic GFR-binding peptide
  MOD_RES (2)..(4)..(38)..(39): Xaa is C or S
  MOD_RES (16)..(17)..(18)..(19)..(20): Xaa is A or G
  MOD_RES (21)..(22)..(23)..(24): Xaa is A or G or absent
RXGXGEVVMDVQVEKXXXXXXXXXVKAMKVSRLETPVXXAKPI

SEQ ID NO: 26092 - protein, 37 aa, Artificial Sequence
  Non-cyclic GFR-binding peptide
  MOD_RES (1)..(3): Xaa is C or S
  MOD_RES (16)..(17)..(18)..(19)..(20): Xaa is A or G
  MOD_RES (21)..(22)..(23)..(24): Xaa is A or G or absent
XAXELHEELRNSLQEXXXXXXXXXYYVVPLPEHHVRS

SEQ ID NO: 26093 - protein, 43 aa, Artificial Sequence
  Non-cyclic GFR-binding peptide
  MOD_RES (2)..(39): Xaa is C or S
  MOD_RES (15)..(16)..(17)..(18)..(19): Xaa is A or G
  MOD_RES (20)..(21)..(22)..(23): Xaa is A or G or absent
AXELHEELRNSLQEXXXXXXXXXYYLVTLPEHHVRSPQXKVSS

SEQ ID NO: 26094 - protein, 35 aa, Artificial Sequence
  Non-cyclic GFR-binding peptide
  MOD_RES (34)..(35): Xaa is C or S
  MOD_RES (12)..(13)..(14)..(15)..(16): Xaa is A or G
  MOD_RES (17)..(18)..(19)..(20): Xaa is A or G or absent
GEVVMEVQVEKXXXXXXXXXVKAMKVSRLETPVXX

SEQ ID NO: 26095 - protein, 36 aa, Artificial Sequence
  Non-cyclic GFR-binding peptide
  MOD_RES (2)..(2): Xaa is C or S
AXELHEELRNSLQELKPKKRVYEYYLVTLPEHHVRS

SEQ ID NO: 26096 - protein, 41 aa, Artificial Sequence
  Non-cyclic GFR-binding peptide
  MOD_RES (2)..(39): Xaa is C or S
AXELHEELRNSLQELKPKKRVYEYYVVPLPEHHVRSPQXKV

SEQ ID NO: 26097 - protein, 35 aa, Artificial Sequence
  Non-cyclic GFR-binding peptide
  MOD_RES (31)..(31): Xaa is C or S
RVVMNVTAKKIVNSSDDIKRVQVPRLKTPAXTPKT

SEQ ID NO: 26098 - protein, 36 aa, Artificial Sequence
  Non-cyclic GFR-binding peptide
  MOD_RES (36)..(36): Xaa is C or S
  MOD_RES (12)..(13)..(14)..(15)..(16): Xaa is A or G
  MOD_RES (17)..(18)..(19)..(20): Xaa is A or G or absent
LHDELTNSLQEXXXXXXXXXYYLVTLPELQVQTPRX

SEQ ID NO: 26099 - protein, 34 aa, Artificial Sequence
  Non-cyclic GFR-binding peptide
  MOD_RES (2)..(2): Xaa is C or S
  MOD_RES (13)..(14)..(15)..(16)..(17): Xaa is A or G
  MOD_RES (18)..(19)..(20)..(21): Xaa is A or G or absent
KXSKVIMVTAKKXXXXXXXXXIKRIQVPRLDQSV

SEQ ID NO: 26100 - protein, 35 aa, Artificial Sequence
  Non-cyclic GFR-binding peptide
  MOD_RES (33)..(34): Xaa is C or S
  MOD_RES (11)..(12)..(13)..(14)..(15): Xaa is A or G
  MOD_RES (16)..(17)..(18)..(19): Xaa is A or G or absent
RVVMNSMEGIXXXXXXXXXMIQVTINSLKTPAXXP

SEQ ID NO: 26101 - protein, 41 aa, Artificial Sequence
  Non-cyclic GFR-binding peptide
  MOD_RES (1)..(35)..(36): Xaa is C or S
  MOD_RES (13)..(14)..(15)..(16)..(17): Xaa is A or G
  MOD_RES (18)..(19)..(20)..(21): Xaa is A or G or absent
XSRVVMNSMEGIXXXXXXXXXMIQVTINSLKTPAXXPKPVY

SEQ ID NO: 26102 - protein, 38 aa, Artificial Sequence
  Non-cyclic GFR-binding peptide
  MOD_RES (32)..(32): Xaa is C or S
SRVVMNVTAKKIVNSSDDIKRVQVPRLKTPAXTPKTVH

SEQ ID NO: 26103 - protein, 39 aa, Artificial Sequence
  Non-cyclic GFR-binding peptide
  MOD_RES (2)..(4)..(37)..(38): Xaa is C or S
  MOD_RES (15)..(16)..(17)..(18)..(19): Xaa is A or G
  MOD_RES (20)..(21)..(22)..(23): Xaa is A or G or absent
SXKXSKVVMSMEGIXXXXXXXXXMIQITINSLDQPVXXP

SEQ ID NO: 26104 - protein, 40 aa, Artificial Sequence
  Non-cyclic GFR-binding peptide
  MOD_RES (2)..(4)..(36)..(37): Xaa is C or S
HXGXSRVVMNSMEGIIVNSSDDMIQVTINSLKTPAXXPKP

SEQ ID NO: 26105 - protein, 34 aa, Artificial Sequence
  Non-cyclic GFR-binding peptide
  MOD_RES (13)..(14)..(15)..(16)..(17): Xaa is A or G
  MOD_RES (18)..(19)..(20)..(21): Xaa is A or G or absent
ALHDELTNSLQEXXXXXXXXXYYLVTLPELQVQT

SEQ ID NO: 26106 - protein, 36 aa, Artificial Sequence
  Non-cyclic GFR-binding peptide
  MOD_RES (36)..(36): Xaa is C or S
  MOD_RES (12)..(13)..(14)..(15)..(16): Xaa is A or G
  MOD_RES (17)..(18)..(19)..(20): Xaa is A or G or absent
LHEELRNSLQEXXXXXXXXXYYLVTLPEHHVRSPQX

SEQ ID NO: 26107 - protein, 37 aa, Artificial Sequence
  Non-cyclic GFR-binding peptide
  MOD_RES (1)..(34)..(35): Xaa is C or S
  MOD_RES (12)..(13)..(14)..(15)..(16): Xaa is A or G
  MOD_RES (17)..(18)..(19)..(20): Xaa is A or G or absent
XSRVIMVTAKKXXXXXXXXXIKRIQVPRLAQPVXXPA

SEQ ID NO: 26108 - protein, 40 aa, Artificial Sequence
  Non-cyclic GFR-binding peptide
  MOD_RES (2)..(39): Xaa is C or S
  MOD_RES (15)..(16)..(17)..(18)..(19): Xaa is A or G
  MOD_RES (20)..(21)..(22)..(23): Xaa is A or G or absent
KXALHDELTNSLQEXXXXXXXXXYYVVPLPELQVQTPRXQ

SEQ ID NO: 26109 - protein, 38 aa, Artificial Sequence
  Non-cyclic GFR-binding peptide
  MOD_RES (33)..(34): Xaa is C or S
  MOD_RES (11)..(12)..(13)..(14)..(15): Xaa is A or G
  MOD_RES (16)..(17)..(18)..(19): Xaa is A or G or absent
EVVMDVTAKKXXXXXXXXXIKRMQVPRLETPVXXAKPI

SEQ ID NO: 26110 - protein, 37 aa, Artificial Sequence
  Non-cyclic GFR-binding peptide
  MOD_RES (34)..(35): Xaa is C or S
  MOD_RES (12)..(13)..(14)..(15)..(16): Xaa is A or G
  MOD_RES (17)..(18)..(19)..(20): Xaa is A or G or absent
ARVVMNVQVEKXXXXXXXXXVKAVKVSRLQTPAXXPK

SEQ ID NO: 26111 - protein, 38 aa, Artificial Sequence
  Non-cyclic GFR-binding peptide
  MOD_RES (36)..(36): Xaa is C or S
LHDELTNSLQEFIPKKRVIEYYLVTLPELQVQTPRXQV

SEQ ID NO: 26112 - protein, 39 aa, Artificial Sequence
  Non-cyclic GFR-binding peptide
  MOD_RES (35)..(35): Xaa is C or S
  MOD_RES (11)..(12)..(13)..(14)..(15): Xaa is A or G
  MOD_RES (16)..(17)..(18)..(19): Xaa is A or G or absent
HEELRNSLQEXXXXXXXXXYYLVTLPEHHVRSPQXKVSS

SEQ ID NO: 26113 - protein, 33 aa, Artificial Sequence
  Non-cyclic GFR-binding peptide
  MOD_RES (12)..(13)..(14)..(15)..(16): Xaa is A or G
  MOD_RES (17)..(18)..(19)..(20): Xaa is A or G or absent
ARVVMNVQVEKXXXXXXXXXVKAVKVSRLQTPA

SEQ ID NO: 26114 - protein, 40 aa, Artificial Sequence
  Non-cyclic GFR-binding peptide
  MOD_RES (1)..(3)..(34)..(35): Xaa is C or S
XKXSKVVMVQVEKVKPTRGVVKAIKVSRLDQPVXXPSASA

SEQ ID NO: 26115 - protein, 36 aa, Artificial Sequence
  Non-cyclic GFR-binding peptide
  MOD_RES (2)..(36): Xaa is C or S
  MOD_RES (14)..(15)..(16)..(17)..(18): Xaa is A or G
  MOD_RES (19)..(20)..(21)..(22): Xaa is A or G or absent
GXGEVVMESMEGIXXXXXXXXXMIQMTINSLETPVX

SEQ ID NO: 26116 - protein, 40 aa, Artificial Sequence
  Non-cyclic GFR-binding peptide
  MOD_RES (2)..(36): Xaa is C or S
  MOD_RES (14)..(15)..(16)..(17)..(18): Xaa is A or G
  MOD_RES (19)..(20)..(21)..(22): Xaa is A or G or absent
GXSRVVMNVTAKKXXXXXXXXXIKRVQVPRLKTPAXTPKT

SEQ ID NO: 26117 - protein, 38 aa, Artificial Sequence
  Non-cyclic GFR-binding peptide
  MOD_RES (33)..(33): Xaa is C or S
NHQLFNSLQEHQGQHPKIRYYLMTLPEEETPVXELGED

SEQ ID NO: 26118 - protein, 35 aa, Artificial Sequence
  Non-cyclic GFR-binding peptide
  MOD_RES (2)..(4)..(35): Xaa is C or S
SXKXSKVVMSMEGIVKPTRGVMIQITINSLDQPVX

SEQ ID NO: 26119 - protein, 34 aa, Artificial Sequence
  Non-cyclic GFR-binding peptide
  MOD_RES (2)..(2): Xaa is C or S
  MOD_RES (13)..(14)..(15)..(16)..(17): Xaa is A or G
  MOD_RES (18)..(19)..(20)..(21): Xaa is A or G or absent
KXSKVVMVTAKKXXXXXXXXXIKRIQVPRLDQPV

SEQ ID NO: 26120 - protein, 37 aa, Artificial Sequence
  Non-cyclic GFR-binding peptide
  MOD_RES (34)..(34): Xaa is C or S
  MOD_RES (12)..(13)..(14)..(15)..(16): Xaa is A or G
  MOD_RES (17)..(18)..(19)..(20): Xaa is A or G or absent
SRVVMNVTAKKXXXXXXXXXIKRVQVPRLKTPAXTPK

SEQ ID NO: 26121 - protein, 41 aa, Artificial Sequence
  Non-cyclic GFR-binding peptide
  MOD_RES (1)..(35)..(36): Xaa is C or S
  MOD_RES (13)..(14)..(15)..(16)..(17): Xaa is A or G
  MOD_RES (18)..(19)..(20)..(21): Xaa is A or G or absent
XGEVVMDVQVEKXXXXXXXXXVKAMKVSRLETPVXXAKPIK

SEQ ID NO: 26122 - protein, 36 aa, Artificial Sequence
  Non-cyclic GFR-binding peptide
  MOD_RES (1)..(35)..(36): Xaa is C or S
  MOD_RES (13)..(14)..(15)..(16)..(17): Xaa is A or G
  MOD_RES (18)..(19)..(20)..(21): Xaa is A or G or absent
XARVVMNVTAKKXXXXXXXXXIKRVQVPRLQTPAXX

SEQ ID NO: 26123 - protein, 38 aa, Artificial Sequence
  Non-cyclic GFR-binding peptide
  MOD_RES (1)..(32)..(33): Xaa is C or S
XSKVIMVQVEKIKPTKGIVKAIKVSRLDQSVXXPSASA

SEQ ID NO: 26124 - protein, 39 aa, Artificial Sequence
  Non-cyclic GFR-binding peptide
  MOD_RES (34)..(34): Xaa is C or S
  MOD_RES (12)..(13)..(14)..(15)..(16): Xaa is A or G
  MOD_RES (17)..(18)..(19)..(20): Xaa is A or G or absent
KNHQLFNSLQEXXXXXXXXXYYLMTLPEEETPVXELGED

SEQ ID NO: 26125 - protein, 41 aa, Artificial Sequence
  Non-cyclic GFR-binding peptide
  MOD_RES (2)..(4)..(37)..(38): Xaa is C or S
  MOD_RES (15)..(16)..(17)..(18)..(19): Xaa is A or G
  MOD_RES (20)..(21)..(22)..(23): Xaa is A or G or absent
SXKXSKVIMSMEGIXXXXXXXXXMIQITINSLDQSVXXPSA

SEQ ID NO: 26126 - protein, 33 aa, Artificial Sequence
  Non-cyclic GFR-binding peptide
  MOD_RES (32)..(33): Xaa is C or S
GEVVMESMEGIVVKDYEDMIQMTINSLETPVXX

SEQ ID NO: 26127 - protein, 37 aa, Artificial Sequence
  Non-cyclic GFR-binding peptide
  MOD_RES (37)..(37): Xaa is C or S
ALHDELTNSLQEFIPKKRVIEYYLVTLPELQVQTPRX

SEQ ID NO: 26128 - protein, 43 aa, Artificial Sequence
  Non-cyclic GFR-binding peptide
  MOD_RES (1)..(3)..(37)..(38): Xaa is C or S
  MOD_RES (15)..(16)..(17)..(18)..(19): Xaa is A or G
  MOD_RES (20)..(21)..(22)..(23): Xaa is A or G or absent
XGXSRVVMNVQVEKXXXXXXXXXVKAVKVSRLKTPAXXPKPVY

SEQ ID NO: 26129 - protein, 35 aa, Artificial Sequence
  Non-cyclic GFR-binding peptide
  MOD_RES (31)..(32): Xaa is C or S
RVVMNVTAKKIVNSSDDIKRVQVPRLKTPAXXPKP

SEQ ID NO: 26130 - protein, 35 aa, Artificial Sequence
  Non-cyclic GFR-binding peptide
  MOD_RES (2)..(4): Xaa is C or S
HXGXARVVMNVQVEKIVNSSDDVKAVKVSRLQTPA

SEQ ID NO: 26131 - protein, 45 aa, Artificial Sequence
  Non-cyclic GFR-binding peptide
  MOD_RES (2)..(4)..(41): Xaa is C or S
  MOD_RES (17)..(18)..(19)..(20)..(21): Xaa is A or G
  MOD_RES (22)..(23)..(24)..(25): Xaa is A or G or absent
EXKXALHDELTNSLQEXXXXXXXXXYYVVPLPELQVQTPRXQVNR

SEQ ID NO: 26132 - protein, 39 aa, Artificial Sequence
  Non-cyclic GFR-binding peptide
  MOD_RES (1)..(3)..(36)..(37): Xaa is C or S
  MOD_RES (14)..(15)..(16)..(17)..(18): Xaa is A or G
  MOD_RES (19)..(20)..(21)..(22): Xaa is A or G or absent
XKXSKVVMSMEGIXXXXXXXXXMIQITINSLDQPVXXPS

SEQ ID NO: 26133 - protein, 34 aa, Artificial Sequence
  Non-cyclic GFR-binding peptide
  MOD_RES (1)..(3): Xaa is C or S
XGXGEVVMDVTAKKVVKENEDIKRMQVPRLETPV

SEQ ID NO: 26134 - protein, 35 aa, Artificial Sequence
  Non-cyclic GFR-binding peptide
  MOD_RES (1)..(35): Xaa is C or S
  MOD_RES (13)..(14)..(15)..(16)..(17): Xaa is A or G
  MOD_RES (18)..(19)..(20)..(21): Xaa is A or G or absent
XARVVMNVTAKKXXXXXXXXXIKRVQVPRLQTPAX

SEQ ID NO: 26135 - protein, 40 aa, Artificial Sequence
  Non-cyclic GFR-binding peptide
  MOD_RES (2)..(4)..(37)..(38): Xaa is C or S
  MOD_RES (15)..(16)..(17)..(18)..(19): Xaa is A or G
  MOD_RES (20)..(21)..(22)..(23): Xaa is A or G or absent
SXKXSKVIMSMEGIXXXXXXXXXMIQITINSLDQSVXXPS

SEQ ID NO: 26136 - protein, 43 aa, Artificial Sequence
  Non-cyclic GFR-binding peptide
  MOD_RES (1)..(3)..(40): Xaa is C or S
  MOD_RES (16)..(17)..(18)..(19)..(20): Xaa is A or G
  MOD_RES (21)..(22)..(23)..(24): Xaa is A or G or absent
XKXALHDELTNSLQEXXXXXXXXXYYLVTLPELQVQTPRXQVN

SEQ ID NO: 26137 - protein, 40 aa, Artificial Sequence
  Non-cyclic GFR-binding peptide
  MOD_RES (2)..(36): Xaa is C or S
  MOD_RES (14)..(15)..(16)..(17)..(18): Xaa is A or G
  MOD_RES (19)..(20)..(21)..(22): Xaa is A or G or absent
GXSRVVMNSMEGIXXXXXXXXXMIQVTINSLKTPAXTPKT

SEQ ID NO: 26138 - protein, 42 aa, Artificial Sequence
  Non-cyclic GFR-binding peptide
  MOD_RES (2)..(4)..(37)..(38): Xaa is C or S
  MOD_RES (15)..(16)..(17)..(18)..(19): Xaa is A or G
  MOD_RES (20)..(21)..(22)..(23): Xaa is A or G or absent
SXKXSKVVMSMEGIXXXXXXXXXMIQITINSLDQPVXXPSAS

SEQ ID NO: 26139 - protein, 43 aa, Artificial Sequence
  Non-cyclic GFR-binding peptide
  MOD_RES (1)..(3)..(37): Xaa is C or S
  MOD_RES (15)..(16)..(17)..(18)..(19): Xaa is A or G
  MOD_RES (20)..(21)..(22)..(23): Xaa is A or G or absent
XEXKNHQLFNSLQEXXXXXXXXXYYVMPLPEEETPVXELGEDN

SEQ ID NO: 26140 - protein, 39 aa, Artificial Sequence
  Non-cyclic GFR-binding peptide
  MOD_RES (2)..(4)..(35)..(36): Xaa is C or S
SXKXSKVIMVTAKKIKPTKGIIKRIQVPRLDQSVXXPSA

SEQ ID NO: 26141 - protein, 33 aa, Artificial Sequence
  Non-cyclic GFR-binding peptide
  MOD_RES (32)..(32): Xaa is C or S
SRVVMNVTAKKIVNSSDDIKRVQVPRLKTPAXT

SEQ ID NO: 26142 - protein, 31 aa, Artificial Sequence
  Non-cyclic GFR-binding peptide
  MOD_RES (31)..(31): Xaa is C or S
EVVMEVQVEKVVKDYEDVKAMKVSRLETPVX

SEQ ID NO: 26143 - protein, 38 aa, Artificial Sequence
  Non-cyclic GFR-binding peptide
  MOD_RES (2)..(4)..(37)..(38): Xaa is C or S
  MOD_RES (15)..(16)..(17)..(18)..(19): Xaa is A or G
  MOD_RES (20)..(21)..(22)..(23): Xaa is A or G or absent
SXKXSKVIMVQVEKXXXXXXXXXVKAIKVSRLDQSVXX

SEQ ID NO: 26144 - protein, 39 aa, Artificial Sequence
  Non-cyclic GFR-binding peptide
  MOD_RES (33)..(34): Xaa is C or S
  MOD_RES (11)..(12)..(13)..(14)..(15): Xaa is A or G
  MOD_RES (16)..(17)..(18)..(19): Xaa is A or G or absent
RVVMNVTAKKXXXXXXXXXIKRVQVPRLKTPAXXPKPVY

SEQ ID NO: 26145 - protein, 35 aa, Artificial Sequence
  Non-cyclic GFR-binding peptide
  MOD_RES (35)..(35): Xaa is C or S
HDELTNSLQEFIPKKRVIEYYVVPLPELQVQTPRX

SEQ ID NO: 26146 - protein, 34 aa, Artificial Sequence
  Non-cyclic GFR-binding peptide
  MOD_RES (31)..(32): Xaa is C or S
SKVIMVQVEKIKPTKGIVKAIKVSRLDQSVXXPS

SEQ ID NO: 26147 - protein, 44 aa, Artificial Sequence
  Non-cyclic GFR-binding peptide
  MOD_RES (1)..(3)..(40): Xaa is C or S
  MOD_RES (16)..(17)..(18)..(19)..(20): Xaa is A or G
  MOD_RES (21)..(22)..(23)..(24): Xaa is A or G or absent
XKXALHDELTNSLQEXXXXXXXXXYYLVTLPELQVQTPRXQVNR

SEQ ID NO: 26148 - protein, 40 aa, Artificial Sequence
  Non-cyclic GFR-binding peptide
  MOD_RES (1)..(3)..(37)..(38): Xaa is C or S
  MOD_RES (15)..(16)..(17)..(18)..(19): Xaa is A or G
  MOD_RES (20)..(21)..(22)..(23): Xaa is A or G or absent
XGXSRVVMNSMEGIXXXXXXXXXMIQVTINSLKTPAXXPK

SEQ ID NO: 26149 - protein, 41 aa, Artificial Sequence
  Non-cyclic GFR-binding peptide
  MOD_RES (2)..(36): Xaa is C or S
  MOD_RES (14)..(15)..(16)..(17)..(18): Xaa is A or G
  MOD_RES (19)..(20)..(21)..(22): Xaa is A or G or absent
GXSRVVMNVQVEKXXXXXXXXXVKAVKVSRLKTPAXTPKTV

SEQ ID NO: 26150 - protein, 38 aa, Artificial Sequence
  Non-cyclic GFR-binding peptide
  MOD_RES (1)..(3): Xaa is C or S
XAXELHEELRNSLQELKPKKRVYEYYLVTLPEHHVRSP

SEQ ID NO: 26151 - protein, 35 aa, Artificial Sequence
  Non-cyclic GFR-binding peptide
  MOD_RES (34)..(34): Xaa is C or S
  MOD_RES (12)..(13)..(14)..(15)..(16): Xaa is A or G
  MOD_RES (17)..(18)..(19)..(20): Xaa is A or G or absent
SRVVMNSMEGIXXXXXXXXXMIQVTINSLKTPAXT

SEQ ID NO: 26152 - protein, 41 aa, Artificial Sequence
  Non-cyclic GFR-binding peptide
  MOD_RES (1)..(3)..(36)..(37): Xaa is C or S
  MOD_RES (14)..(15)..(16)..(17)..(18): Xaa is A or G
  MOD_RES (19)..(20)..(21)..(22): Xaa is A or G or absent
XKXSKVVMVQVEKXXXXXXXXXVKAIKVSRLDQPVXXPSAS

SEQ ID NO: 26153 - protein, 38 aa, Artificial Sequence
  Non-cyclic GFR-binding peptide
  MOD_RES (2)..(4)..(38): Xaa is C or S
  MOD_RES (16)..(17)..(18)..(19)..(20): Xaa is A or G
  MOD_RES (21)..(22)..(23)..(24): Xaa is A or G or absent
HXGXARVVMNSMEGIXXXXXXXXXMIQVTINSLQTPAX

SEQ ID NO: 26154 - protein, 36 aa, Artificial Sequence
  Non-cyclic GFR-binding peptide
  MOD_RES (2)..(4)..(36): Xaa is C or S
HXGXARVVMNVQVEKIVNSSDDVKAVKVSRLQTPAX

SEQ ID NO: 26155 - protein, 39 aa, Artificial Sequence
  Non-cyclic GFR-binding peptide
  MOD_RES (33)..(33): Xaa is C or S
  MOD_RES (11)..(12)..(13)..(14)..(15): Xaa is A or G
  MOD_RES (16)..(17)..(18)..(19): Xaa is A or G or absent
RVVMNSMEGIXXXXXXXXXMIQVTINSLKTPAXTPKTVH

SEQ ID NO: 26156 - protein, 35 aa, Artificial Sequence
  Non-cyclic GFR-binding peptide
  MOD_RES (1)..(33)..(34): Xaa is C or S
XSRVVMNSMEGIIVNSSDDMIQVTINSLKTPAXXP

SEQ ID NO: 26157 - protein, 39 aa, Artificial Sequence
  Non-cyclic GFR-binding peptide
  MOD_RES (37)..(37): Xaa is C or S
ALHDELTNSLQEFIPKKRVIEYYVVPLPELQVQTPRXQV

SEQ ID NO: 26158 - protein, 40 aa, Artificial Sequence
  Non-cyclic GFR-binding peptide
  MOD_RES (2)..(4)..(36)..(37): Xaa is C or S
HXGXARVVMNSMEGIIVNSSDDMIQVTINSLQTPAXXPKP

SEQ ID NO: 26159 - protein, 37 aa, Artificial Sequence
  Non-cyclic GFR-binding peptide
  MOD_RES (2)..(35)..(36): Xaa is C or S
  MOD_RES (13)..(14)..(15)..(16)..(17): Xaa is A or G
  MOD_RES (18)..(19)..(20)..(21): Xaa is A or G or absent
KXSKVIMVQVEKXXXXXXXXXVKAIKVSRLDQSVXXP

SEQ ID NO: 26160 - protein, 42 aa, Artificial Sequence
  Non-cyclic GFR-binding peptide
  MOD_RES (2)..(4)..(41): Xaa is C or S
  MOD_RES (17)..(18)..(19)..(20)..(21): Xaa is A or G
  MOD_RES (22)..(23)..(24)..(25): Xaa is A or G or absent
EXKXALHDELTNSLQEXXXXXXXXXYYVVPLPELQVQTPRXQ

SEQ ID NO: 26161 - protein, 35 aa, Artificial Sequence
  Non-cyclic GFR-binding peptide
  MOD_RES (1)..(3)..(34)..(35): Xaa is C or S
XKXSKVIMVTAKKIKPTKGIIKRIQVPRLDQSVXX

SEQ ID NO: 26162 - protein, 35 aa, Artificial Sequence
  Non-cyclic GFR-binding peptide
  MOD_RES (32)..(33): Xaa is C or S
ARVVMNVTAKKIVNSSDDIKRVQVPRLQTPAXXPK

SEQ ID NO: 26163 - protein, 36 aa, Artificial Sequence
  Non-cyclic GFR-binding peptide
ELHEELRNSLQELKPKKRVYEYYVVPLPEHHVRSPQ

SEQ ID NO: 26164 - protein, 37 aa, Artificial Sequence
  Non-cyclic GFR-binding peptide
  MOD_RES (2)..(36)..(37): Xaa is C or S
  MOD_RES (14)..(15)..(16)..(17)..(18): Xaa is A or G
  MOD_RES (19)..(20)..(21)..(22): Xaa is A or G or absent
GXGEVVMDVQVEKXXXXXXXXXVKAMKVSRLETPVXX

SEQ ID NO: 26165 - protein, 41 aa, Artificial Sequence
  Non-cyclic GFR-binding peptide
  MOD_RES (1)..(38): Xaa is C or S
  MOD_RES (14)..(15)..(16)..(17)..(18): Xaa is A or G
  MOD_RES (19)..(20)..(21)..(22): Xaa is A or G or absent
XELHEELRNSLQEXXXXXXXXXYYVVPLPEHHVRSPQXKVS

SEQ ID NO: 26166 - protein, 37 aa, Artificial Sequence
  Non-cyclic GFR-binding peptide
  MOD_RES (33)..(34): Xaa is C or S
  MOD_RES (11)..(12)..(13)..(14)..(15): Xaa is A or G
  MOD_RES (16)..(17)..(18)..(19): Xaa is A or G or absent
EVVMEVTAKKXXXXXXXXXIKRMQVPRLETPVXXAKP

SEQ ID NO: 26167 - protein, 39 aa, Artificial Sequence
  Non-cyclic GFR-binding peptide
  MOD_RES (1)..(3): Xaa is C or S
XAXELHEELRNSLQELKPKKRVYEYYVVPLPEHHVRSPQ

SEQ ID NO: 26168 - protein, 35 aa, Artificial Sequence
  Non-cyclic GFR-binding peptide
  MOD_RES (1)..(3)..(34)..(35): Xaa is C or S
XKXSRVIMVTAKKVKPKRGVIKRIQVPRLAQPVXX

SEQ ID NO: 26169 - protein, 40 aa, Artificial Sequence
  Non-cyclic GFR-binding peptide
  MOD_RES (1)..(35): Xaa is C or S
  MOD_RES (13)..(14)..(15)..(16)..(17): Xaa is A or G
  MOD_RES (18)..(19)..(20)..(21): Xaa is A or G or absent
XSRVVMNSMEGIXXXXXXXXXMIQVTINSLKTPAXTPKTV

SEQ ID NO: 26170 - protein, 35 aa, Artificial Sequence
  Non-cyclic GFR-binding peptide
  MOD_RES (1)..(33)..(34): Xaa is C or S
XGEVVMESMEGIVVKDYEDMIQMTINSLETPVXXA

SEQ ID NO: 26171 - protein, 38 aa, Artificial Sequence
  Non-cyclic GFR-binding peptide
  MOD_RES (1)..(3)..(34)..(35): Xaa is C or S
XKXSRVIMVTAKKVKPKRGVIKRIQVPRLAQPVXXPAA

SEQ ID NO: 26172 - protein, 39 aa, Artificial Sequence
  Non-cyclic GFR-binding peptide
  MOD_RES (2)..(4)..(36)..(37): Xaa is C or S
RXGXGEVVMDVQVEKVVKENEDVKAMKVSRLETPVXXAK

SEQ ID NO: 26173 - protein, 42 aa, Artificial Sequence
  Non-cyclic GFR-binding peptide
  MOD_RES (2)..(4)..(41): Xaa is C or S
AXAXELHEELRNSLQELKPKKRVYEYYLVTLPEHHVRSPQXK

SEQ ID NO: 26174 - protein, 34 aa, Artificial Sequence
  Non-cyclic GFR-binding peptide
  MOD_RES (34)..(34): Xaa is C or S
  MOD_RES (12)..(13)..(14)..(15)..(16): Xaa is A or G
  MOD_RES (17)..(18)..(19)..(20): Xaa is A or G or absent
ARVVMNSMEGIXXXXXXXXXMIQVTINSLQTPAX

SEQ ID NO: 26175 - protein, 34 aa, Artificial Sequence
  Non-cyclic GFR-binding peptide
  MOD_RES (1)..(3)..(34): Xaa is C or S
XKXSRVIMVTAKKVKPKRGVIKRIQVPRLAQPVX

SEQ ID NO: 26176 - protein, 39 aa, Artificial Sequence
  Non-cyclic GFR-binding peptide
  MOD_RES (34)..(35): Xaa is C or S
  MOD_RES (12)..(13)..(14)..(15)..(16): Xaa is A or G
  MOD_RES (17)..(18)..(19)..(20): Xaa is A or G or absent
ARVVMNVQVEKXXXXXXXXXVKAVKVSRLQTPAXXPKPV

SEQ ID NO: 26177 - protein, 37 aa, Artificial Sequence
  Non-cyclic GFR-binding peptide
  MOD_RES (32)..(32): Xaa is C or S
SRVVMNVQVEKIVNSSDDVKAVKVSRLKTPAXTPKTV

SEQ ID NO: 26178 - protein, 38 aa, Artificial Sequence
  Non-cyclic GFR-binding peptide
  MOD_RES (2)..(2): Xaa is C or S
  MOD_RES (15)..(16)..(17)..(18)..(19): Xaa is A or G
  MOD_RES (20)..(21)..(22)..(23): Xaa is A or G or absent
AXELHEELRNSLQEXXXXXXXXXYYLVTLPEHHVRSPQ

SEQ ID NO: 26179 - protein, 39 aa, Artificial Sequence
  Non-cyclic GFR-binding peptide
  MOD_RES (1)..(33)..(34): Xaa is C or S
XARVVMNVQVEKIVNSSDDVKAVKVSRLQTPAXXPKPVT

SEQ ID NO: 26180 - protein, 40 aa, Artificial Sequence
  Non-cyclic GFR-binding peptide
  MOD_RES (1)..(34)..(35): Xaa is C or S
  MOD_RES (12)..(13)..(14)..(15)..(16): Xaa is A or G
  MOD_RES (17)..(18)..(19)..(20): Xaa is A or G or absent
XSKVVMSMEGIXXXXXXXXXMIQITINSLDQPVXXPSASA

SEQ ID NO: 26181 - protein, 32 aa, Artificial Sequence
  Non-cyclic GFR-binding peptide
  MOD_RES (1)..(1): Xaa is C or S
XSRVVMNVQVEKIVNSSDDVKAVKVSRLKTPA

SEQ ID NO: 26182 - protein, 43 aa, Artificial Sequence
  Non-cyclic GFR-binding peptide
  MOD_RES (2)..(4)..(38)..(39): Xaa is C or S
  MOD_RES (16)..(17)..(18)..(19)..(20): Xaa is A or G
  MOD_RES (21)..(22)..(23)..(24): Xaa is A or G or absent
HXGXARVVMNVTAKKXXXXXXXXXIKRVQVPRLQTPAXXPKPV

SEQ ID NO: 26183 - protein, 39 aa, Artificial Sequence
  Non-cyclic GFR-binding peptide
  MOD_RES (1)..(33)..(34): Xaa is C or S
XGEVVMEVQVEKVVKDYEDVKAMKVSRLETPVXXAKPIS

SEQ ID NO: 26184 - protein, 39 aa, Artificial Sequence
  Non-cyclic GFR-binding peptide
  MOD_RES (33)..(33): Xaa is C or S
NHQLFNSLQEHQGQHPKIRYYLMTLPEEETPVXELGEDN

SEQ ID NO: 26185 - protein, 39 aa, Artificial Sequence
  Non-cyclic GFR-binding peptide
  MOD_RES (33)..(34): Xaa is C or S
  MOD_RES (11)..(12)..(13)..(14)..(15): Xaa is A or G
  MOD_RES (16)..(17)..(18)..(19): Xaa is A or G or absent
SRVIMVQVEKXXXXXXXXXVKAIKVSRLAQPVXXPAASA

SEQ ID NO: 26186 - protein, 34 aa, Artificial Sequence
  Non-cyclic GFR-binding peptide
  MOD_RES (1)..(1): Xaa is C or S
  MOD_RES (13)..(14)..(15)..(16)..(17): Xaa is A or G
  MOD_RES (18)..(19)..(20)..(21): Xaa is A or G or absent
XGEVVMEVTAKKXXXXXXXXXIKRMQVPRLETPV

SEQ ID NO: 26187 - protein, 31 aa, Artificial Sequence
  Non-cyclic GFR-binding peptide
ARVVMNVQVEKIVNSSDDVKAVKVSRLQTPA

SEQ ID NO: 26188 - protein, 34 aa, Artificial Sequence
  Non-cyclic GFR-binding peptide
  MOD_RES (33)..(34): Xaa is C or S
  MOD_RES (11)..(12)..(13)..(14)..(15): Xaa is A or G
  MOD_RES (16)..(17)..(18)..(19): Xaa is A or G or absent
RVVMNVQVEKXXXXXXXXXVKAVKVSRLQTPAXX

SEQ ID NO: 26189 - protein, 36 aa, Artificial Sequence
  Non-cyclic GFR-binding peptide
  MOD_RES (2)..(34)..(35): Xaa is C or S
GXGEVVMDVQVEKVVKENEDVKAMKVSRLETPVXXA

SEQ ID NO: 26190 - protein, 38 aa, Artificial Sequence
  Non-cyclic GFR-binding peptide
  MOD_RES (34)..(34): Xaa is C or S
  MOD_RES (12)..(13)..(14)..(15)..(16): Xaa is A or G
  MOD_RES (17)..(18)..(19)..(20): Xaa is A or G or absent
SRVVMNVQVEKXXXXXXXXXVKAVKVSRLKTPAXTPKT

SEQ ID NO: 26191 - protein, 43 aa, Artificial Sequence
  Non-cyclic GFR-binding peptide
  MOD_RES (2)..(4)..(38)..(39): Xaa is C or S
  MOD_RES (16)..(17)..(18)..(19)..(20): Xaa is A or G
  MOD_RES (21)..(22)..(23)..(24): Xaa is A or G or absent
HXGXARVVMNVQVEKXXXXXXXXXVKAVKVSRLQTPAXXPKPV

SEQ ID NO: 26192 - protein, 43 aa, Artificial Sequence
  Non-cyclic GFR-binding peptide
  MOD_RES (1)..(3)..(37)..(38): Xaa is C or S
  MOD_RES (15)..(16)..(17)..(18)..(19): Xaa is A or G
  MOD_RES (20)..(21)..(22)..(23): Xaa is A or G or absent
XGXGEVVMESMEGIXXXXXXXXXMIQMTINSLETPVXXAKPIS

SEQ ID NO: 26193 - protein, 43 aa, Artificial Sequence
  Non-cyclic GFR-binding peptide
  MOD_RES (1)..(3)..(37)..(38): Xaa is C or S
  MOD_RES (15)..(16)..(17)..(18)..(19): Xaa is A or G
  MOD_RES (20)..(21)..(22)..(23): Xaa is A or G or absent
XGXGEVVMEVQVEKXXXXXXXXXVKAMKVSRLETPVXXAKPIS

SEQ ID NO: 26194 - protein, 37 aa, Artificial Sequence
  Non-cyclic GFR-binding peptide
  MOD_RES (2)..(4): Xaa is C or S
  MOD_RES (16)..(17)..(18)..(19)..(20): Xaa is A or G
  MOD_RES (21)..(22)..(23)..(24): Xaa is A or G or absent
RXEXKNHQLFNSLQEXXXXXXXXXYYVMPLPEEETPV

SEQ ID NO: 26195 - protein, 35 aa, Artificial Sequence
  Non-cyclic GFR-binding peptide
  MOD_RES (33)..(34): Xaa is C or S
  MOD_RES (11)..(12)..(13)..(14)..(15): Xaa is A or G
  MOD_RES (16)..(17)..(18)..(19): Xaa is A or G or absent
RVVMNSMEGIXXXXXXXXXMIQVTINSLQTPAXXP

SEQ ID NO: 26196 - protein, 34 aa, Artificial Sequence
  Non-cyclic GFR-binding peptide
  MOD_RES (33)..(33): Xaa is C or S
  MOD_RES (11)..(12)..(13)..(14)..(15): Xaa is A or G
  MOD_RES (16)..(17)..(18)..(19): Xaa is A or G or absent
RVVMNVTAKKXXXXXXXXXIKRVQVPRLKTPAXT

SEQ ID NO: 26197 - protein, 40 aa, Artificial Sequence
  Non-cyclic GFR-binding peptide
  MOD_RES (2)..(4)..(35)..(36): Xaa is C or S
SXKXSKVIMVQVEKIKPTKGIVKAIKVSRLDQSVXXPSAS

SEQ ID NO: 26198 - protein, 41 aa, Artificial Sequence
  Non-cyclic GFR-binding peptide
  MOD_RES (2)..(4)..(37)..(38): Xaa is C or S
  MOD_RES (15)..(16)..(17)..(18)..(19): Xaa is A or G
  MOD_RES (20)..(21)..(22)..(23): Xaa is A or G or absent
SXKXSKVVMSMEGIXXXXXXXXXMIQITINSLDQPVXXPSA

SEQ ID NO: 26199 - protein, 36 aa, Artificial Sequence
  Non-cyclic GFR-binding peptide
  MOD_RES (31)..(32): Xaa is C or S
RVVMNVTAKKIVNSSDDIKRVQVPRLQTPAXXPKPV

SEQ ID NO: 26200 - protein, 32 aa, Artificial Sequence
  Non-cyclic GFR-binding peptide
  MOD_RES (31)..(32): Xaa is C or S
EVVMDSMEGIVVKENEDMIQMTINSLETPVXX

SEQ ID NO: 26201 - protein, 36 aa, Artificial Sequence
  Non-cyclic GFR-binding peptide
  MOD_RES (33)..(33): Xaa is C or S
  MOD_RES (11)..(12)..(13)..(14)..(15): Xaa is A or G
  MOD_RES (16)..(17)..(18)..(19): Xaa is A or G or absent
NHQLFNSLQEXXXXXXXXXYYLMTLPEEETPVXELG

SEQ ID NO: 26202 - protein, 43 aa, Artificial Sequence
  Non-cyclic GFR-binding peptide
  MOD_RES (2)..(39): Xaa is C or S
AXELHEELRNSLQELKPKKRVYEYYLVTLPEHHVRSPQXKVSS

SEQ ID NO: 26203 - protein, 37 aa, Artificial Sequence
  Non-cyclic GFR-binding peptide
  MOD_RES (2)..(4)..(37): Xaa is C or S
  MOD_RES (15)..(16)..(17)..(18)..(19): Xaa is A or G
  MOD_RES (20)..(21)..(22)..(23): Xaa is A or G or absent
SXKXSKVVMSMEGIXXXXXXXXXMIQITINSLDQPVX

SEQ ID NO: 26204 - protein, 41 aa, Artificial Sequence
  Non-cyclic GFR-binding peptide
  MOD_RES (1)..(3)..(40): Xaa is C or S
XAXELHEELRNSLQELKPKKRVYEYYVVPLPEHHVRSPQXK

SEQ ID NO: 26205 - protein, 36 aa, Artificial Sequence
  Non-cyclic GFR-binding peptide
  MOD_RES (32)..(33): Xaa is C or S
SRVVMNVTAKKIVNSSDDIKRVQVPRLKTPAXXPKP

SEQ ID NO: 26206 - protein, 33 aa, Artificial Sequence
  Non-cyclic GFR-binding peptide
  MOD_RES (12)..(13)..(14)..(15)..(16): Xaa is A or G
  MOD_RES (17)..(18)..(19)..(20): Xaa is A or G or absent
ARVVMNSMEGIXXXXXXXXXMIQVTINSLQTPA

SEQ ID NO: 26207 - protein, 36 aa, Artificial Sequence
  Non-cyclic GFR-binding peptide
  MOD_RES (1)..(32)..(33): Xaa is C or S
XSKVIMVTAKKIKPTKGIIKRIQVPRLDQSVXXPSA

SEQ ID NO: 26208 - protein, 41 aa, Artificial Sequence
  Non-cyclic GFR-binding peptide
  MOD_RES (1)..(35): Xaa is C or S
  MOD_RES (13)..(14)..(15)..(16)..(17): Xaa is A or G
  MOD_RES (18)..(19)..(20)..(21): Xaa is A or G or absent
XKNHQLFNSLQEXXXXXXXXXYYLMTLPEEETPVXELGEDN

SEQ ID NO: 26209 - protein, 36 aa, Artificial Sequence
  Non-cyclic GFR-binding peptide
  MOD_RES (2)..(36): Xaa is C or S
  MOD_RES (14)..(15)..(16)..(17)..(18): Xaa is A or G
  MOD_RES (19)..(20)..(21)..(22): Xaa is A or G or absent
GXSRVVMNSMEGIXXXXXXXXXMIQVTINSLKTPAX

SEQ ID NO: 26210 - protein, 42 aa, Artificial Sequence
  Non-cyclic GFR-binding peptide
  MOD_RES (1)..(38): Xaa is C or S
XELHEELRNSLQELKPKKRVYEYYLVTLPEHHVRSPQXKVSS

SEQ ID NO: 26211 - protein, 37 aa, Artificial Sequence
  Non-cyclic GFR-binding peptide
  MOD_RES (2)..(36)..(37): Xaa is C or S
  MOD_RES (14)..(15)..(16)..(17)..(18): Xaa is A or G
  MOD_RES (19)..(20)..(21)..(22): Xaa is A or G or absent
GXARVVMNVQVEKXXXXXXXXXVKAVKVSRLQTPAXX

SEQ ID NO: 26212 - protein, 34 aa, Artificial Sequence
  Non-cyclic GFR-binding peptide
  MOD_RES (31)..(32): Xaa is C or S
RVVMNVTAKKIVNSSDDIKRVQVPRLQTPAXXPK

SEQ ID NO: 26213 - protein, 35 aa, Artificial Sequence
  Non-cyclic GFR-binding peptide
  MOD_RES (33)..(33): Xaa is C or S
  MOD_RES (11)..(12)..(13)..(14)..(15): Xaa is A or G
  MOD_RES (16)..(17)..(18)..(19): Xaa is A or G or absent
RVVMNVTAKKXXXXXXXXXIKRVQVPRLKTPAXTP

SEQ ID NO: 26214 - protein, 39 aa, Artificial Sequence
  Non-cyclic GFR-binding peptide
  MOD_RES (33)..(34): Xaa is C or S
  MOD_RES (11)..(12)..(13)..(14)..(15): Xaa is A or G
  MOD_RES (16)..(17)..(18)..(19): Xaa is A or G or absent
EVVMESMEGIXXXXXXXXXMIQMTINSLETPVXXAKPIS

SEQ ID NO: 26215 - protein, 35 aa, Artificial Sequence
  Non-cyclic GFR-binding peptide
  MOD_RES (32)..(33): Xaa is C or S
SRVVMNVTAKKIVNSSDDIKRVQVPRLKTPAXXPK

SEQ ID NO: 26216 - protein, 33 aa, Artificial Sequence
  Non-cyclic GFR-binding peptide
  MOD_RES (31)..(32): Xaa is C or S
RVVMNVTAKKIVNSSDDIKRVQVPRLKTPAXXP

SEQ ID NO: 26217 - protein, 35 aa, Artificial Sequence
  Non-cyclic GFR-binding peptide
  MOD_RES (1)..(1): Xaa is C or S
XELHEELRNSLQELKPKKRVYEYYLVTLPEHHVRS

SEQ ID NO: 26218 - protein, 33 aa, Artificial Sequence
  Non-cyclic GFR-binding peptide
  MOD_RES (1)..(1): Xaa is C or S
  MOD_RES (12)..(13)..(14)..(15)..(16): Xaa is A or G
  MOD_RES (17)..(18)..(19)..(20): Xaa is A or G or absent
XSRVIMSMEGIXXXXXXXXXMIQITINSLAQPV

SEQ ID NO: 26219 - protein, 38 aa, Artificial Sequence
  Non-cyclic GFR-binding peptide
  MOD_RES (1)..(38): Xaa is C or S
  MOD_RES (14)..(15)..(16)..(17)..(18): Xaa is A or G
  MOD_RES (19)..(20)..(21)..(22): Xaa is A or G or absent
XELHEELRNSLQEXXXXXXXXXYYVVPLPEHHVRSPQX

SEQ ID NO: 26220 - protein, 34 aa, Artificial Sequence
  Non-cyclic GFR-binding peptide
  MOD_RES (1)..(1): Xaa is C or S
  MOD_RES (13)..(14)..(15)..(16)..(17): Xaa is A or G
  MOD_RES (18)..(19)..(20)..(21): Xaa is A or G or absent
XSRVVMNVTAKKXXXXXXXXXIKRVQVPRLKTPA

SEQ ID NO: 26221 - protein, 43 aa, Artificial Sequence
  Non-cyclic GFR-binding peptide
  MOD_RES (2)..(4)..(37)..(38): Xaa is C or S
  MOD_RES (15)..(16)..(17)..(18)..(19): Xaa is A or G
  MOD_RES (20)..(21)..(22)..(23): Xaa is A or G or absent
SXKXSRVIMVQVEKXXXXXXXXXVKAIKVSRLAQPVXXPAASA

SEQ ID NO: 26222 - protein, 35 aa, Artificial Sequence
  Non-cyclic GFR-binding peptide
  MOD_RES (34)..(35): Xaa is C or S
  MOD_RES (12)..(13)..(14)..(15)..(16): Xaa is A or G
  MOD_RES (17)..(18)..(19)..(20): Xaa is A or G or absent
GEVVMESMEGIXXXXXXXXXMIQMTINSLETPVXX

SEQ ID NO: 26223 - protein, 36 aa, Artificial Sequence
  Non-cyclic GFR-binding peptide
  MOD_RES (1)..(3)..(35)..(36): Xaa is C or S
XGXARVVMNVQVEKIVNSSDDVKAVKVSRLQTPAXX

SEQ ID NO: 26224 - protein, 42 aa, Artificial Sequence
  Non-cyclic GFR-binding peptide
  MOD_RES (2)..(4)..(36)..(37): Xaa is C or S
HXGXARVVMNVQVEKIVNSSDDVKAVKVSRLQTPAXXPKPVT

SEQ ID NO: 26225 - protein, 31 aa, Artificial Sequence
  Non-cyclic GFR-binding peptide
  MOD_RES (31)..(31): Xaa is C or S
RVVMNVTAKKIVNSSDDIKRVQVPRLKTPAX

SEQ ID NO: 26226 - protein, 33 aa, Artificial Sequence
  Non-cyclic GFR-binding peptide
  MOD_RES (1)..(3): Xaa is C or S
XKXSRVIMVQVEKVKPKRGVVKAIKVSRLAQPV

SEQ ID NO: 26227 - protein, 39 aa, Artificial Sequence
  Non-cyclic GFR-binding peptide
  MOD_RES (34)..(35): Xaa is C or S
  MOD_RES (12)..(13)..(14)..(15)..(16): Xaa is A or G
  MOD_RES (17)..(18)..(19)..(20): Xaa is A or G or absent
GEVVMDVTAKKXXXXXXXXXIKRMQVPRLETPVXXAKPI

SEQ ID NO: 26228 - protein, 37 aa, Artificial Sequence
  Non-cyclic GFR-binding peptide
  MOD_RES (31)..(32): Xaa is C or S
EVVMDVTAKKVVKENEDIKRMQVPRLETPVXXAKPIK

SEQ ID NO: 26229 - protein, 39 aa, Artificial Sequence
  Non-cyclic GFR-binding peptide
  MOD_RES (2)..(4)..(36)..(37): Xaa is C or S
HXGXARVVMNVTAKKIVNSSDDIKRVQVPRLQTPAXXPK

SEQ ID NO: 26230 - protein, 37 aa, Artificial Sequence
  Non-cyclic GFR-binding peptide
  MOD_RES (31)..(32): Xaa is C or S
RVVMNSMEGIIVNSSDDMIQVTINSLKTPAXXPKPVY

SEQ ID NO: 26231 - protein, 31 aa, Artificial Sequence
  Non-cyclic GFR-binding peptide
  MOD_RES (1)..(1): Xaa is C or S
XSKVIMVQVEKIKPTKGIVKAIKVSRLDQSV

SEQ ID NO: 26232 - protein, 37 aa, Artificial Sequence
  Non-cyclic GFR-binding peptide
  MOD_RES (1)..(32)..(33): Xaa is C or S
XSKVIMVQVEKIKPTKGIVKAIKVSRLDQSVXXPSAS

SEQ ID NO: 26233 - protein, 38 aa, Artificial Sequence
  Non-cyclic GFR-binding peptide
  MOD_RES (1)..(33): Xaa is C or S
XSRVVMNVTAKKIVNSSDDIKRVQVPRLKTPAXTPKTV

SEQ ID NO: 26234 - protein, 41 aa, Artificial Sequence
  Non-cyclic GFR-binding peptide
  MOD_RES (2)..(4)..(35)..(36): Xaa is C or S
SXKXSKVIMVTAKKIKPTKGIIKRIQVPRLDQSVXXPSASA

SEQ ID NO: 26235 - protein, 37 aa, Artificial Sequence
  Non-cyclic GFR-binding peptide
  MOD_RES (1)..(3)..(35)..(36): Xaa is C or S
XGXSRVVMNVQVEKIVNSSDDVKAVKVSRLKTPAXXP

SEQ ID NO: 26236 - protein, 33 aa, Artificial Sequence
  Non-cyclic GFR-binding peptide
  MOD_RES (1)..(3): Xaa is C or S
XKXSKVVMSMEGIVKPTRGVMIQITINSLDQPV

SEQ ID NO: 26237 - protein, 35 aa, Artificial Sequence
  Non-cyclic GFR-binding peptide
  MOD_RES (35)..(35): Xaa is C or S
HEELRNSLQELKPKKRVYEYYLVTLPEHHVRSPQX

SEQ ID NO: 26238 - protein, 43 aa, Artificial Sequence
  Non-cyclic GFR-binding peptide
  MOD_RES (1)..(3)..(40): Xaa is C or S
  MOD_RES (16)..(17)..(18)..(19)..(20): Xaa is A or G
  MOD_RES (21)..(22)..(23)..(24): Xaa is A or G or absent
XAXELHEELRNSLQEXXXXXXXXXYYLVTLPEHHVRSPQXKVS

SEQ ID NO: 26239 - protein, 37 aa, Artificial Sequence
  Non-cyclic GFR-binding peptide
  MOD_RES (33)..(33): Xaa is C or S
  MOD_RES (11)..(12)..(13)..(14)..(15): Xaa is A or G
  MOD_RES (16)..(17)..(18)..(19): Xaa is A or G or absent
RVVMNSMEGIXXXXXXXXXMIQVTINSLKTPAXTPKT

SEQ ID NO: 26240 - protein, 37 aa, Artificial Sequence
  Non-cyclic GFR-binding peptide
  MOD_RES (36)..(36): Xaa is C or S
  MOD_RES (12)..(13)..(14)..(15)..(16): Xaa is A or G
  MOD_RES (17)..(18)..(19)..(20): Xaa is A or G or absent
LHEELRNSLQEXXXXXXXXXYYLVTLPEHHVRSPQXK

SEQ ID NO: 26241 - protein, 35 aa, Artificial Sequence
  Non-cyclic GFR-binding peptide
  MOD_RES (2)..(35): Xaa is C or S
  MOD_RES (13)..(14)..(15)..(16)..(17): Xaa is A or G
  MOD_RES (18)..(19)..(20)..(21): Xaa is A or G or absent
KXSRVIMVTAKKXXXXXXXXXIKRIQVPRLAQPVX

SEQ ID NO: 26242 - protein, 38 aa, Artificial Sequence
  Non-cyclic GFR-binding peptide
  MOD_RES (2)..(36): Xaa is C or S
  MOD_RES (14)..(15)..(16)..(17)..(18): Xaa is A or G
  MOD_RES (19)..(20)..(21)..(22): Xaa is A or G or absent
GXSRVVMNVQVEKXXXXXXXXXVKAVKVSRLKTPAXTP

SEQ ID NO: 26243 - protein, 40 aa, Artificial Sequence
  Non-cyclic GFR-binding peptide
  MOD_RES (2)..(4)..(38)..(39): Xaa is C or S
  MOD_RES (16)..(17)..(18)..(19)..(20): Xaa is A or G
  MOD_RES (21)..(22)..(23)..(24): Xaa is A or G or absent
HXGXSRVVMNSMEGIXXXXXXXXXMIQVTINSLKTPAXXP

SEQ ID NO: 26244 - protein, 31 aa, Artificial Sequence
  Non-cyclic GFR-binding peptide
  MOD_RES (31)..(31): Xaa is C or S
SRVIMSMEGIVKPKRGVMIQITINSLAQPVX

SEQ ID NO: 26245 - protein, 43 aa, Artificial Sequence
  Non-cyclic GFR-binding peptide
  MOD_RES (2)..(4)..(38)..(39): Xaa is C or S
  MOD_RES (16)..(17)..(18)..(19)..(20): Xaa is A or G
  MOD_RES (21)..(22)..(23)..(24): Xaa is A or G or absent
HXGXSRVVMNSMEGIXXXXXXXXXMIQVTINSLKTPAXXPKPV

SEQ ID NO: 26246 - protein, 40 aa, Artificial Sequence
  Non-cyclic GFR-binding peptide
  MOD_RES (2)..(4)..(37)..(38): Xaa is C or S
  MOD_RES (15)..(16)..(17)..(18)..(19): Xaa is A or G
  MOD_RES (20)..(21)..(22)..(23): Xaa is A or G or absent
SXKXSKVVMSMEGIXXXXXXXXXMIQITINSLDQPVXXPS

SEQ ID NO: 26247 - protein, 38 aa, Artificial Sequence
  Non-cyclic GFR-binding peptide
  MOD_RES (1)..(34)..(35): Xaa is C or S
  MOD_RES (12)..(13)..(14)..(15)..(16): Xaa is A or G
  MOD_RES (17)..(18)..(19)..(20): Xaa is A or G or absent
XSKVIMVQVEKXXXXXXXXXVKAIKVSRLDQSVXXPSA

SEQ ID NO: 26248 - protein, 33 aa, Artificial Sequence
  Non-cyclic GFR-binding peptide
  MOD_RES (1)..(32)..(33): Xaa is C or S
XSKVVMVTAKKVKPTRGVIKRIQVPRLDQPVXX

SEQ ID NO: 26249 - protein, 32 aa, Artificial Sequence
  Non-cyclic GFR-binding peptide
  MOD_RES (2)..(2): Xaa is C or S
KXSKVVMVTAKKVKPTRGVIKRIQVPRLDQPV

SEQ ID NO: 26250 - protein, 39 aa, Artificial Sequence
  Non-cyclic GFR-binding peptide
  MOD_RES (1)..(3)..(37)..(38): Xaa is C or S
  MOD_RES (15)..(16)..(17)..(18)..(19): Xaa is A or G
  MOD_RES (20)..(21)..(22)..(23): Xaa is A or G or absent
XGXGEVVMDVQVEKXXXXXXXXXVKAMKVSRLETPVXXA

SEQ ID NO: 26251 - protein, 39 aa, Artificial Sequence
  Non-cyclic GFR-binding peptide
  MOD_RES (37)..(37): Xaa is C or S
ELHEELRNSLQELKPKKRVYEYYLVTLPEHHVRSPQXKV

SEQ ID NO: 26252 - protein, 40 aa, Artificial Sequence
  Non-cyclic GFR-binding peptide
  MOD_RES (2)..(34)..(35): Xaa is C or S
GXARVVMNVTAKKIVNSSDDIKRVQVPRLQTPAXXPKPVT

SEQ ID NO: 26253 - protein, 37 aa, Artificial Sequence
  Non-cyclic GFR-binding peptide
  MOD_RES (1)..(3)..(34)..(35): Xaa is C or S
XKXSRVIMVQVEKVKPKRGVVKAIKVSRLAQPVXXPA

SEQ ID NO: 26254 - protein, 37 aa, Artificial Sequence
  Non-cyclic GFR-binding peptide
  MOD_RES (1)..(33): Xaa is C or S
XSRVVMNSMEGIIVNSSDDMIQVTINSLKTPAXTPKT

SEQ ID NO: 26255 - protein, 30 aa, Artificial Sequence
  Non-cyclic GFR-binding peptide
EVVMDVTAKKVVKENEDIKRMQVPRLETPV

SEQ ID NO: 26256 - protein, 38 aa, Artificial Sequence
  Non-cyclic GFR-binding peptide
  MOD_RES (2)..(4): Xaa is C or S
AXAXELHEELRNSLQELKPKKRVYEYYVVPLPEHHVRS

SEQ ID NO: 26257 - protein, 42 aa, Artificial Sequence
  Non-cyclic GFR-binding peptide
  MOD_RES (1)..(38): Xaa is C or S
  MOD_RES (14)..(15)..(16)..(17)..(18): Xaa is A or G
  MOD_RES (19)..(20)..(21)..(22): Xaa is A or G or absent
XALHDELTNSLQEXXXXXXXXXYYLVTLPELQVQTPRXQVNR

SEQ ID NO: 26258 - protein, 40 aa, Artificial Sequence
  Non-cyclic GFR-binding peptide
  MOD_RES (2)..(4)..(37)..(38): Xaa is C or S
  MOD_RES (15)..(16)..(17)..(18)..(19): Xaa is A or G
  MOD_RES (20)..(21)..(22)..(23): Xaa is A or G or absent
SXKXSKVVMVTAKKXXXXXXXXXIKRIQVPRLDQPVXXPS

SEQ ID NO: 26259 - protein, 34 aa, Artificial Sequence
  Non-cyclic GFR-binding peptide
  MOD_RES (1)..(33)..(34): Xaa is C or S
XSRVVMNSMEGIIVNSSDDMIQVTINSLKTPAXX

SEQ ID NO: 26260 - protein, 39 aa, Artificial Sequence
  Non-cyclic GFR-binding peptide
  MOD_RES (1)..(35)..(36): Xaa is C or S
  MOD_RES (13)..(14)..(15)..(16)..(17): Xaa is A or G
  MOD_RES (18)..(19)..(20)..(21): Xaa is A or G or absent
XARVVMNSMEGIXXXXXXXXXMIQVTINSLQTPAXXPKP

SEQ ID NO: 26261 - protein, 39 aa, Artificial Sequence
  Non-cyclic GFR-binding peptide
  MOD_RES (1)..(34)..(35): Xaa is C or S
  MOD_RES (12)..(13)..(14)..(15)..(16): Xaa is A or G
  MOD_RES (17)..(18)..(19)..(20): Xaa is A or G or absent
XSKVIMVTAKKXXXXXXXXXIKRIQVPRLDQSVXXPSAS

SEQ ID NO: 26262 - protein, 40 aa, Artificial Sequence
  Non-cyclic GFR-binding peptide
  MOD_RES (1)..(3)..(40): Xaa is C or S
XKXALHDELTNSLQEFIPKKRVIEYYLVTLPELQVQTPRX

SEQ ID NO: 26263 - protein, 37 aa, Artificial Sequence
  Non-cyclic GFR-binding peptide
  MOD_RES (31)..(32): Xaa is C or S
RVVMNSMEGIIVNSSDDMIQVTINSLQTPAXXPKPVT

SEQ ID NO: 26264 - protein, 36 aa, Artificial Sequence
  Non-cyclic GFR-binding peptide
  MOD_RES (1)..(1): Xaa is C or S
XALHDELTNSLQEFIPKKRVIEYYLVTLPELQVQTP

SEQ ID NO: 26265 - protein, 32 aa, Artificial Sequence
  Non-cyclic GFR-binding peptide
  MOD_RES (1)..(32): Xaa is C or S
XSKVVMVQVEKVKPTRGVVKAIKVSRLDQPVX

SEQ ID NO: 26266 - protein, 33 aa, Artificial Sequence
  Non-cyclic GFR-binding peptide
  MOD_RES (12)..(13)..(14)..(15)..(16): Xaa is A or G
  MOD_RES (17)..(18)..(19)..(20): Xaa is A or G or absent
GEVVMDSMEGIXXXXXXXXXMIQMTINSLETPV

SEQ ID NO: 26267 - protein, 37 aa, Artificial Sequence
  Non-cyclic GFR-binding peptide
  MOD_RES (2)..(34)..(35): Xaa is C or S
GXGEVVMEVTAKKVVKDYEDIKRMQVPRLETPVXXAK

SEQ ID NO: 26268 - protein, 36 aa, Artificial Sequence
  Non-cyclic GFR-binding peptide
  MOD_RES (34)..(34): Xaa is C or S
  MOD_RES (12)..(13)..(14)..(15)..(16): Xaa is A or G
  MOD_RES (17)..(18)..(19)..(20): Xaa is A or G or absent
KNHQLFNSLQEXXXXXXXXXYYLMTLPEEETPVXEL

SEQ ID NO: 26269 - protein, 38 aa, Artificial Sequence
  Non-cyclic GFR-binding peptide
  MOD_RES (2)..(35)..(36): Xaa is C or S
  MOD_RES (13)..(14)..(15)..(16)..(17): Xaa is A or G
  MOD_RES (18)..(19)..(20)..(21): Xaa is A or G or absent
KXSRVIMVTAKKXXXXXXXXXIKRIQVPRLAQPVXXPA

SEQ ID NO: 26270 - protein, 39 aa, Artificial Sequence
  Non-cyclic GFR-binding peptide
  MOD_RES (2)..(36): Xaa is C or S
  MOD_RES (14)..(15)..(16)..(17)..(18): Xaa is A or G
  MOD_RES (19)..(20)..(21)..(22): Xaa is A or G or absent
GXSRVVMNSMEGIXXXXXXXXXMIQVTINSLKTPAXTPK

SEQ ID NO: 26271 - protein, 38 aa, Artificial Sequence
  Non-cyclic GFR-binding peptide
  MOD_RES (2)..(36): Xaa is C or S
EXKNHQLFNSLQEHQGQHPKIRYYLMTLPEEETPVXEL

SEQ ID NO: 26272 - protein, 39 aa, Artificial Sequence
  Non-cyclic GFR-binding peptide
  MOD_RES (2)..(4)..(38)..(39): Xaa is C or S
  MOD_RES (16)..(17)..(18)..(19)..(20): Xaa is A or G
  MOD_RES (21)..(22)..(23)..(24): Xaa is A or G or absent
HXGXSRVVMNVTAKKXXXXXXXXXIKRVQVPRLKTPAXX

SEQ ID NO: 26273 - protein, 35 aa, Artificial Sequence
  Non-cyclic GFR-binding peptide
LHEELRNSLQELKPKKRVYEYYLVTLPEHHVRSPQ

SEQ ID NO: 26274 - protein, 43 aa, Artificial Sequence
  Non-cyclic GFR-binding peptide
  MOD_RES (2)..(4)..(38)..(39): Xaa is C or S
  MOD_RES (16)..(17)..(18)..(19)..(20): Xaa is A or G
  MOD_RES (21)..(22)..(23)..(24): Xaa is A or G or absent
RXGXGEVVMDVTAKKXXXXXXXXXIKRMQVPRLETPVXXAKPI

SEQ ID NO: 26275 - protein, 39 aa, Artificial Sequence
  Non-cyclic GFR-binding peptide
  MOD_RES (1)..(3)..(34)..(35): Xaa is C or S
XKXSKVIMVQVEKIKPTKGIVKAIKVSRLDQSVXXPSAS

SEQ ID NO: 26276 - protein, 41 aa, Artificial Sequence
  Non-cyclic GFR-binding peptide
  MOD_RES (1)..(3)..(37): Xaa is C or S
XEXKNHQLFNSLQEHQGQHPKIRYYLMTLPEEETPVXELGE

SEQ ID NO: 26277 - protein, 35 aa, Artificial Sequence
  Non-cyclic GFR-binding peptide
  MOD_RES (32)..(33): Xaa is C or S
GEVVMDVQVEKVVKENEDVKAMKVSRLETPVXXAK

SEQ ID NO: 26278 - protein, 43 aa, Artificial Sequence
  Non-cyclic GFR-binding peptide
  MOD_RES (2)..(4)..(41): Xaa is C or S
EXKXALHDELTNSLQEFIPKKRVIEYYLVTLPELQVQTPRXQV

SEQ ID NO: 26279 - protein, 32 aa, Artificial Sequence
  Non-cyclic GFR-binding peptide
  MOD_RES (11)..(12)..(13)..(14)..(15): Xaa is A or G
  MOD_RES (16)..(17)..(18)..(19): Xaa is A or G or absent
EVVMDVTAKKXXXXXXXXXIKRMQVPRLETPV

SEQ ID NO: 26280 - protein, 36 aa, Artificial Sequence
  Non-cyclic GFR-binding peptide
  MOD_RES (2)..(36): Xaa is C or S
EXKNHQLFNSLQEHQGQHPKIRYYVMPLPEEETPVX

SEQ ID NO: 26281 - protein, 40 aa, Artificial Sequence
  Non-cyclic GFR-binding peptide
  MOD_RES (1)..(35)..(36): Xaa is C or S
  MOD_RES (13)..(14)..(15)..(16)..(17): Xaa is A or G
  MOD_RES (18)..(19)..(20)..(21): Xaa is A or G or absent
XGEVVMDVTAKKXXXXXXXXXIKRMQVPRLETPVXXAKPI

SEQ ID NO: 26282 - protein, 36 aa, Artificial Sequence
  Non-cyclic GFR-binding peptide
  MOD_RES (33)..(33): Xaa is C or S
NHQLFNSLQEHQGQHPKIRYYVMPLPEEETPVXELG

SEQ ID NO: 26283 - protein, 39 aa, Artificial Sequence
  Non-cyclic GFR-binding peptide
  MOD_RES (33)..(34): Xaa is C or S
  MOD_RES (11)..(12)..(13)..(14)..(15): Xaa is A or G
  MOD_RES (16)..(17)..(18)..(19): Xaa is A or G or absent
SKVIMVQVEKXXXXXXXXXVKAIKVSRLDQSVXXPSASA

SEQ ID NO: 26284 - protein, 39 aa, Artificial Sequence
  Non-cyclic GFR-binding peptide
  MOD_RES (2)..(34)..(35): Xaa is C or S
GXGEVVMESMEGIVVKDYEDMIQMTINSLETPVXXAKPI

SEQ ID NO: 26285 - protein, 38 aa, Artificial Sequence
  Non-cyclic GFR-binding peptide
  MOD_RES (33)..(34): Xaa is C or S
  MOD_RES (11)..(12)..(13)..(14)..(15): Xaa is A or G
  MOD_RES (16)..(17)..(18)..(19): Xaa is A or G or absent
SKVIMVQVEKXXXXXXXXXVKAIKVSRLDQSVXXPSAS

SEQ ID NO: 26286 - protein, 37 aa, Artificial Sequence
  Non-cyclic GFR-binding peptide
  MOD_RES (2)..(2): Xaa is C or S
KXALHDELTNSLQEFIPKKRVIEYYVVPLPELQVQTP

SEQ ID NO: 26287 - protein, 38 aa, Artificial Sequence
  Non-cyclic GFR-binding peptide
  MOD_RES (2)..(4)..(35)..(36): Xaa is C or S
SXKXSKVIMVQVEKIKPTKGIVKAIKVSRLDQSVXXPS

SEQ ID NO: 26288 - protein, 30 aa, Artificial Sequence; identical to SEQ ID NO: 2155
  Non-cyclic GFR-binding peptide

SEQ ID NO: 26289 - protein, 39 aa, Artificial Sequence
  Non-cyclic GFR-binding peptide
  MOD_RES (2)..(39): Xaa is C or S
  MOD_RES (15)..(16)..(17)..(18)..(19): Xaa is A or G
  MOD_RES (20)..(21)..(22)..(23): Xaa is A or G or absent
KXALHDELTNSLQEXXXXXXXXXYYVVPLPELQVQTPRX

SEQ ID NO: 26290 - protein, 38 aa, Artificial Sequence
  Non-cyclic GFR-binding peptide
  MOD_RES (1)..(3)..(35): Xaa is C or S
XGXSRVVMNSMEGIIVNSSDDMIQVTINSLKTPAXTPK

SEQ ID NO: 26291 - protein, 36 aa, Artificial Sequence
  Non-cyclic GFR-binding peptide
  MOD_RES (2)..(2): Xaa is C or S
AXELHEELRNSLQELKPKKRVYEYYVVPLPEHHVRS

SEQ ID NO: 26292 - protein, 38 aa, Artificial Sequence
  Non-cyclic GFR-binding peptide
  MOD_RES (1)..(33)..(34): Xaa is C or S
XGEVVMESMEGIVVKDYEDMIQMTINSLETPVXXAKPI

SEQ ID NO: 26293 - protein, 40 aa, Artificial Sequence
  Non-cyclic GFR-binding peptide
  MOD_RES (34)..(35): Xaa is C or S
  MOD_RES (12)..(13)..(14)..(15)..(16): Xaa is A or G
  MOD_RES (17)..(18)..(19)..(20): Xaa is A or G or absent
SRVVMNSMEGIXXXXXXXXXMIQVTINSLKTPAXXPKPVY

SEQ ID NO: 26294 - protein, 40 aa, Artificial Sequence
  Non-cyclic GFR-binding peptide
  MOD_RES (2)..(4)..(38)..(39): Xaa is C or S
  MOD_RES (16)..(17)..(18)..(19)..(20): Xaa is A or G
  MOD_RES (21)..(22)..(23)..(24): Xaa is A or G or absent
HXGXARVVMNVTAKKXXXXXXXXXIKRVQVPRLQTPAXXP

SEQ ID NO: 26295 - protein, 32 aa, Artificial Sequence
  Non-cyclic GFR-binding peptide
HDELTNSLQEFIPKKRVIEYYVVPLPELQVQT

SEQ ID NO: 26296 - protein, 36 aa, Artificial Sequence
  Non-cyclic GFR-binding peptide
  MOD_RES (1)..(3)..(36): Xaa is C or S
  MOD_RES (14)..(15)..(16)..(17)..(18): Xaa is A or G
  MOD_RES (19)..(20)..(21)..(22): Xaa is A or G or absent
XKXSKVVMSMEGIXXXXXXXXXMIQITINSLDQPVX

SEQ ID NO: 26297 - protein, 38 aa, Artificial Sequence
  Non-cyclic GFR-binding peptide
  MOD_RES (33)..(34): Xaa is C or S
  MOD_RES (11)..(12)..(13)..(14)..(15): Xaa is A or G
  MOD_RES (16)..(17)..(18)..(19): Xaa is A or G or absent
SKVIMVTAKKXXXXXXXXXIKRIQVPRLDQSVXXPSAS

SEQ ID NO: 26298 - protein, 32 aa, Artificial Sequence
  Non-cyclic GFR-binding peptide
  MOD_RES (31)..(32): Xaa is C or S
RVVMNVQVEKIVNSSDDVKAVKVSRLQTPAXX

SEQ ID NO: 26299 - protein, 41 aa, Artificial Sequence
  Non-cyclic GFR-binding peptide
  MOD_RES (1)..(38): Xaa is C or S
XELHEELRNSLQELKPKKRVYEYYLVTLPEHHVRSPQXKVS

SEQ ID NO: 26300 - protein, 35 aa, Artificial Sequence
  Non-cyclic GFR-binding peptide
  MOD_RES (31)..(32): Xaa is C or S
SKVIMVQVEKIKPTKGIVKAIKVSRLDQSVXXPSA

SEQ ID NO: 26301 - protein, 33 aa, Artificial Sequence
  Non-cyclic GFR-binding peptide
  MOD_RES (32)..(33): Xaa is C or S
SRVVMNVQVEKIVNSSDDVKAVKVSRLKTPAXX

SEQ ID NO: 26302 - protein, 41 aa, Artificial Sequence
  Non-cyclic GFR-binding peptide
  MOD_RES (2)..(36): Xaa is C or S
EXKNHQLFNSLQEHQGQHPKIRYYVMPLPEEETPVXELGED

SEQ ID NO: 26303 - protein, 34 aa, Artificial Sequence
  Non-cyclic GFR-binding peptide
  MOD_RES (2)..(34): Xaa is C or S
GXARVVMNSMEGIIVNSSDDMIQVTINSLQTPAX

SEQ ID NO: 26304 - protein, 36 aa, Artificial Sequence
  Non-cyclic GFR-binding peptide
  MOD_RES (1)..(34)..(35): Xaa is C or S
  MOD_RES (12)..(13)..(14)..(15)..(16): Xaa is A or G
  MOD_RES (17)..(18)..(19)..(20): Xaa is A or G or absent
XSKVVMVQVEKXXXXXXXXXVKAIKVSRLDQPVXXP

SEQ ID NO: 26305 - protein, 38 aa, Artificial Sequence
  Non-cyclic GFR-binding peptide
  MOD_RES (1)..(32)..(33): Xaa is C or S
XSKVVMVQVEKVKPTRGVVKAIKVSRLDQPVXXPSASA

SEQ ID NO: 26306 - protein, 41 aa, Artificial Sequence
  Non-cyclic GFR-binding peptide
  MOD_RES (1)..(35)..(36): Xaa is C or S
  MOD_RES (13)..(14)..(15)..(16)..(17): Xaa is A or G
  MOD_RES (18)..(19)..(20)..(21): Xaa is A or G or absent
XSRVVMNVQVEKXXXXXXXXXVKAVKVSRLKTPAXXPKPVY

SEQ ID NO: 26307 - protein, 35 aa, Artificial Sequence
  Non-cyclic GFR-binding peptide
  MOD_RES (2)..(34)..(35): Xaa is C or S
GXGEVVMDVQVEKVVKENEDVKAMKVSRLETPVXX

SEQ ID NO: 26308 - protein, 39 aa, Artificial Sequence
  Non-cyclic GFR-binding peptide
  MOD_RES (34)..(35): Xaa is C or S
  MOD_RES (12)..(13)..(14)..(15)..(16): Xaa is A or G
  MOD_RES (17)..(18)..(19)..(20): Xaa is A or G or absent
ARVVMNVTAKKXXXXXXXXXIKRVQVPRLQTPAXXPKPV

SEQ ID NO: 26309 - protein, 40 aa, Artificial Sequence
  Non-cyclic GFR-binding peptide
  MOD_RES (1)..(35)..(36): Xaa is C or S
  MOD_RES (13)..(14)..(15)..(16)..(17): Xaa is A or G
  MOD_RES (18)..(19)..(20)..(21): Xaa is A or G or absent
XGEVVMESMEGIXXXXXXXXXMIQMTINSLETPVXXAKPI

SEQ ID NO: 26310 - protein, 34 aa, Artificial Sequence
  Non-cyclic GFR-binding peptide
  MOD_RES (2)..(4): Xaa is C or S
SXKXSRVIMVTAKKVKPKRGVIKRIQVPRLAQPV

SEQ ID NO: 26311 - protein, 38 aa, Artificial Sequence
  Non-cyclic GFR-binding peptide
  MOD_RES (33)..(34): Xaa is C or S
  MOD_RES (11)..(12)..(13)..(14)..(15): Xaa is A or G
  MOD_RES (16)..(17)..(18)..(19): Xaa is A or G or absent
EVVMDVQVEKXXXXXXXXXVKAMKVSRLETPVXXAKPI

SEQ ID NO: 26312 - protein, 42 aa, Artificial Sequence
  Non-cyclic GFR-binding peptide
  MOD_RES (2)..(39): Xaa is C or S
  MOD_RES (15)..(16)..(17)..(18)..(19): Xaa is A or G
  MOD_RES (20)..(21)..(22)..(23): Xaa is A or G or absent
KXALHDELTNSLQEXXXXXXXXXYYLVTLPELQVQTPRXQVN

SEQ ID NO: 26313 - protein, 34 aa, Artificial Sequence
  Non-cyclic GFR-binding peptide
  MOD_RES (1)..(34): Xaa is C or S
  MOD_RES (12)..(13)..(14)..(15)..(16): Xaa is A or G
  MOD_RES (17)..(18)..(19)..(20): Xaa is A or G or absent
XSRVIMVQVEKXXXXXXXXXVKAIKVSRLAQPVX

SEQ ID NO: 26314 - protein, 33 aa, Artificial Sequence
  Non-cyclic GFR-binding peptide
  MOD_RES (31)..(32): Xaa is C or S
EVVMEVTAKKVVKDYEDIKRMQVPRLETPVXXA

SEQ ID NO: 26315 - protein, 35 aa, Artificial Sequence
  Non-cyclic GFR-binding peptide
  MOD_RES (31)..(32): Xaa is C or S
EVVMEVQVEKVVKDYEDVKAMKVSRLETPVXXAKP

SEQ ID NO: 26316 - protein, 33 aa, Artificial Sequence
  Non-cyclic GFR-binding peptide
  MOD_RES (32)..(33): Xaa is C or S
GEVVMDVQVEKVVKENEDVKAMKVSRLETPVXX

SEQ ID NO: 26317 - protein, 40 aa, Artificial Sequence
  Non-cyclic GFR-binding peptide
  MOD_RES (1)..(3)..(37)..(38): Xaa is C or S
  MOD_RES (15)..(16)..(17)..(18)..(19): Xaa is A or G
  MOD_RES (20)..(21)..(22)..(23): Xaa is A or G or absent
XGXGEVVMEVQVEKXXXXXXXXXVKAMKVSRLETPVXXAK

SEQ ID NO: 26318 - protein, 33 aa, Artificial Sequence
  Non-cyclic GFR-binding peptide
  MOD_RES (1)..(3): Xaa is C or S
XKXSKVIMSMEGIIKPTKGIMIQITINSLDQSV

SEQ ID NO: 26319 - protein, 36 aa, Artificial Sequence
  Non-cyclic GFR-binding peptide
  MOD_RES (1)..(3)..(36): Xaa is C or S
  MOD_RES (14)..(15)..(16)..(17)..(18): Xaa is A or G
  MOD_RES (19)..(20)..(21)..(22): Xaa is A or G or absent
XKXSKVIMVQVEKXXXXXXXXXVKAIKVSRLDQSVX

SEQ ID NO: 26320 - protein, 40 aa, Artificial Sequence
  Non-cyclic GFR-binding peptide
  MOD_RES (1)..(3)..(34)..(35): Xaa is C or S
XKXSKVIMVTAKKIKPTKGIIKRIQVPRLDQSVXXPSASA

SEQ ID NO: 26321 - protein, 41 aa, Artificial Sequence
  Non-cyclic GFR-binding peptide
  MOD_RES (2)..(4)..(36)..(37): Xaa is C or S
HXGXARVVMNVQVEKIVNSSDDVKAVKVSRLQTPAXXPKPV

SEQ ID NO: 26322 - protein, 39 aa, Artificial Sequence
  Non-cyclic GFR-binding peptide
  MOD_RES (1)..(3): Xaa is C or S
XKXALHDELTNSLQEFIPKKRVIEYYVVPLPELQVQTPR

SEQ ID NO: 26323 - protein, 37 aa, Artificial Sequence
  Non-cyclic GFR-binding peptide
  MOD_RES (1)..(3): Xaa is C or S
  MOD_RES (16)..(17)..(18)..(19)..(20): Xaa is A or G
  MOD_RES (21)..(22)..(23)..(24): Xaa is A or G or absent
XAXELHEELRNSLQEXXXXXXXXXYYLVTLPEHHVRS

SEQ ID NO: 26324 - protein, 34 aa, Artificial Sequence
  Non-cyclic GFR-binding peptide
  MOD_RES (33)..(34): Xaa is C or S
  MOD_RES (11)..(12)..(13)..(14)..(15): Xaa is A or G
  MOD_RES (16)..(17)..(18)..(19): Xaa is A or G or absent
RVVMNVTAKKXXXXXXXXXIKRVQVPRLKTPAXX

SEQ ID NO: 26325 - protein, 35 aa, Artificial Sequence
  Non-cyclic GFR-binding peptide
  MOD_RES (1)..(3)..(35): Xaa is C or S
XGXSRVVMNSMEGIIVNSSDDMIQVTINSLKTPAX

SEQ ID NO: 26326 - protein, 39 aa, Artificial Sequence
  Non-cyclic GFR-binding peptide
  MOD_RES (33)..(33): Xaa is C or S
  MOD_RES (11)..(12)..(13)..(14)..(15): Xaa is A or G
  MOD_RES (16)..(17)..(18)..(19): Xaa is A or G or absent
NHQLFNSLQEXXXXXXXXXYYLMTLPEEETPVXELGEDN

SEQ ID NO: 26327 - protein, 35 aa, Artificial Sequence
  Non-cyclic GFR-binding peptide
  MOD_RES (35)..(35): Xaa is C or S
HEELRNSLQELKPKKRVYEYYVVPLPEHHVRSPQX

SEQ ID NO: 26328 - protein, 38 aa, Artificial Sequence
  Non-cyclic GFR-binding peptide
  MOD_RES (2)..(4)..(36)..(37): Xaa is C or S
RXGXGEVVMDSMEGIVVKENEDMIQMTINSLETPVXXA

SEQ ID NO: 26329 - protein, 39 aa, Artificial Sequence
  Non-cyclic GFR-binding peptide
  MOD_RES (37)..(37): Xaa is C or S
  MOD_RES (13)..(14)..(15)..(16)..(17): Xaa is A or G
  MOD_RES (18)..(19)..(20)..(21): Xaa is A or G or absent
ALHDELTNSLQEXXXXXXXXXYYVVPLPELQVQTPRXQV

SEQ ID NO: 26330 - protein, 38 aa, Artificial Sequence
  Non-cyclic GFR-binding peptide
  MOD_RES (2)..(34)..(35): Xaa is C or S
GXGEVVMEVTAKKVVKDYEDIKRMQVPRLETPVXXAKP

SEQ ID NO: 26331 - protein, 42 aa, Artificial Sequence
  Non-cyclic GFR-binding peptide
  MOD_RES (2)..(4)..(36)..(37): Xaa is C or S
HXGXARVVMNSMEGIIVNSSDDMIQVTINSLQTPAXXPKPVT

SEQ ID NO: 26332 - protein, 38 aa, Artificial Sequence
  Non-cyclic GFR-binding peptide
  MOD_RES (2)..(4)..(38): Xaa is C or S
  MOD_RES (16)..(17)..(18)..(19)..(20): Xaa is A or G
  MOD_RES (21)..(22)..(23)..(24): Xaa is A or G or absent
HXGXARVVMNVTAKKXXXXXXXXXIKRVQVPRLQTPAX

SEQ ID NO: 26333 - protein, 36 aa, Artificial Sequence
  Non-cyclic GFR-binding peptide
  MOD_RES (2)..(4)..(36): Xaa is C or S
HXGXARVVMNSMEGIIVNSSDDMIQVTINSLQTPAX

SEQ ID NO: 26334 - protein, 37 aa, Artificial Sequence
  Non-cyclic GFR-binding peptide
  MOD_RES (1)..(3)..(35)..(36): Xaa is C or S
XGXARVVMNSMEGIIVNSSDDMIQVTINSLQTPAXXP

SEQ ID NO: 26335 - protein, 40 aa, Artificial Sequence
  Non-cyclic GFR-binding peptide
  MOD_RES (34)..(35): Xaa is C or S
  MOD_RES (12)..(13)..(14)..(15)..(16): Xaa is A or G
  MOD_RES (17)..(18)..(19)..(20): Xaa is A or G or absent
SRVVMNVTAKKXXXXXXXXXIKRVQVPRLKTPAXXPKPVY

SEQ ID NO: 26336 - protein, 34 aa, Artificial Sequence
  Non-cyclic GFR-binding peptide
  MOD_RES (12)..(13)..(14)..(15)..(16): Xaa is A or G
  MOD_RES (17)..(18)..(19)..(20): Xaa is A or G or absent
LHDELTNSLQEXXXXXXXXXYYLVTLPELQVQTP

SEQ ID NO: 26337 - protein, 38 aa, Artificial Sequence
  Non-cyclic GFR-binding peptide
  MOD_RES (2)..(4)..(38): Xaa is C or S
  MOD_RES (16)..(17)..(18)..(19)..(20): Xaa is A or G
  MOD_RES (21)..(22)..(23)..(24): Xaa is A or G or absent
HXGXARVVMNVQVEKXXXXXXXXXVKAVKVSRLQTPAX

SEQ ID NO: 26338 - protein, 36 aa, Artificial Sequence
  Non-cyclic GFR-binding peptide
  MOD_RES (36)..(36): Xaa is C or S
LHEELRNSLQELKPKKRVYEYYLVTLPEHHVRSPQX

SEQ ID NO: 26339 - protein, 35 aa, Artificial Sequence
  Non-cyclic GFR-binding peptide
  MOD_RES (1)..(3): Xaa is C or S
  MOD_RES (14)..(15)..(16)..(17)..(18): Xaa is A or G
  MOD_RES (19)..(20)..(21)..(22): Xaa is A or G or absent
XKXSKVVMSMEGIXXXXXXXXXMIQITINSLDQPV

SEQ ID NO: 26340 - protein, 35 aa, Artificial Sequence
  Non-cyclic GFR-binding peptide
  MOD_RES (1)..(1): Xaa is C or S
  MOD_RES (14)..(15)..(16)..(17)..(18): Xaa is A or G
  MOD_RES (19)..(20)..(21)..(22): Xaa is A or G or absent
XELHEELRNSLQEXXXXXXXXXYYVVPLPEHHVRS

SEQ ID NO: 26341 - protein, 37 aa, Artificial Sequence
  Non-cyclic GFR-binding peptide
  MOD_RES (1)..(3)..(37): Xaa is C or S
  MOD_RES (15)..(16)..(17)..(18)..(19): Xaa is A or G
  MOD_RES (20)..(21)..(22)..(23): Xaa is A or G or absent
XGXARVVMNVTAKKXXXXXXXXXIKRVQVPRLQTPAX

SEQ ID NO: 26342 - protein, 41 aa, Artificial Sequence
  Non-cyclic GFR-binding peptide
  MOD_RES (2)..(36)..(37): Xaa is C or S
  MOD_RES (14)..(15)..(16)..(17)..(18): Xaa is A or G
  MOD_RES (19)..(20)..(21)..(22): Xaa is A or G or absent
GXGEVVMEVQVEKXXXXXXXXXVKAMKVSRLETPVXXAKPI

SEQ ID NO: 26343 - protein, 38 aa, Artificial Sequence
  Non-cyclic GFR-binding peptide
  MOD_RES (2)..(4): Xaa is C or S
EXKXALHDELTNSLQEFIPKKRVIEYYVVPLPELQVQT

SEQ ID NO: 26344 - protein, 38 aa, Artificial Sequence
  Non-cyclic GFR-binding peptide
  MOD_RES (34)..(35): Xaa is C or S
  MOD_RES (12)..(13)..(14)..(15)..(16): Xaa is A or G
  MOD_RES (17)..(18)..(19)..(20): Xaa is A or G or absent
GEVVMDVTAKKXXXXXXXXXIKRMQVPRLETPVXXAKP

SEQ ID NO: 26345 - protein, 38 aa, Artificial Sequence
  Non-cyclic GFR-binding peptide
  MOD_RES (2)..(33)..(34): Xaa is C or S
KXSRVIMVQVEKVKPKRGVVKAIKVSRLAQPVXXPAAS

SEQ ID NO: 26346 - protein, 31 aa, Artificial Sequence
  Non-cyclic GFR-binding peptide
  MOD_RES (31)..(31): Xaa is C or S
EVVMEVTAKKVVKDYEDIKRMQVPRLETPVX

SEQ ID NO: 26347 - protein, 35 aa, Artificial Sequence
  Non-cyclic GFR-binding peptide
  MOD_RES (33)..(34): Xaa is C or S
  MOD_RES (11)..(12)..(13)..(14)..(15): Xaa is A or G
  MOD_RES (16)..(17)..(18)..(19): Xaa is A or G or absent
SRVIMVTAKKXXXXXXXXXIKRIQVPRLAQPVXXP

SEQ ID NO: 26348 - protein, 37 aa, Artificial Sequence
  Non-cyclic GFR-binding peptide
  MOD_RES (2)..(4)..(36)..(37): Xaa is C or S
RXGXGEVVMDSMEGIVVKENEDMIQMTINSLETPVXX

SEQ ID NO: 26349 - protein, 32 aa, Artificial Sequence
  Non-cyclic GFR-binding peptide
  MOD_RES (32)..(32): Xaa is C or S
ARVVMNVQVEKIVNSSDDVKAVKVSRLQTPAX

SEQ ID NO: 26350 - protein, 39 aa, Artificial Sequence
  Non-cyclic GFR-binding peptide
  MOD_RES (2)..(39): Xaa is C or S
  MOD_RES (15)..(16)..(17)..(18)..(19): Xaa is A or G
  MOD_RES (20)..(21)..(22)..(23): Xaa is A or G or absent
KXALHDELTNSLQEXXXXXXXXXYYLVTLPELQVQTPRX

SEQ ID NO: 26351 - protein, 38 aa, Artificial Sequence
  Non-cyclic GFR-binding peptide
  MOD_RES (2)..(2): Xaa is C or S
  MOD_RES (15)..(16)..(17)..(18)..(19): Xaa is A or G
  MOD_RES (20)..(21)..(22)..(23): Xaa is A or G or absent
AXELHEELRNSLQEXXXXXXXXXYYVVPLPEHHVRSPQ

SEQ ID NO: 26352 - protein, 42 aa, Artificial Sequence
  Non-cyclic GFR-binding peptide
  MOD_RES (2)..(36): Xaa is C or S
EXKNHQLFNSLQEHQGQHPKIRYYLMTLPEEETPVXELGEDN

SEQ ID NO: 26353 - protein, 41 aa, Artificial Sequence
  Non-cyclic GFR-binding peptide
  MOD_RES (2)..(4)..(35)..(36): Xaa is C or S
SXKXSKVVMSMEGIVKPTRGVMIQITINSLDQPVXXPSASA

SEQ ID NO: 26354 - protein, 35 aa, Artificial Sequence
  Non-cyclic GFR-binding peptide
  MOD_RES (32)..(32): Xaa is C or S
SRVVMNVTAKKIVNSSDDIKRVQVPRLKTPAXTPK

SEQ ID NO: 26355 - protein, 38 aa, Artificial Sequence
  Non-cyclic GFR-binding peptide
  MOD_RES (2)..(4)..(36)..(37): Xaa is C or S
HXGXARVVMNVTAKKIVNSSDDIKRVQVPRLQTPAXXP

SEQ ID NO: 26356 - protein, 35 aa, Artificial Sequence
  Non-cyclic GFR-binding peptide
  MOD_RES (2)..(4)..(35): Xaa is C or S
SXKXSRVIMVQVEKVKPKRGVVKAIKVSRLAQPVX

SEQ ID NO: 26357 - protein, 40 aa, Artificial Sequence
  Non-cyclic GFR-binding peptide
  MOD_RES (2)..(36): Xaa is C or S
EXKNHQLFNSLQEHQGQHPKIRYYLMTLPEEETPVXELGE

SEQ ID NO: 26358 - protein, 35 aa, Artificial Sequence
  Non-cyclic GFR-binding peptide
  MOD_RES (1)..(3): Xaa is C or S
  MOD_RES (14)..(15)..(16)..(17)..(18): Xaa is A or G
  MOD_RES (19)..(20)..(21)..(22): Xaa is A or G or absent
XKXSRVIMSMEGIXXXXXXXXXMIQITINSLAQPV

SEQ ID NO: 26359 - protein, 32 aa, Artificial Sequence
  Non-cyclic GFR-binding peptide
  MOD_RES (1)..(32): Xaa is C or S
XSKVVMSMEGIVKPTRGVMIQITINSLDQPVX

SEQ ID NO: 26360 - protein, 37 aa, Artificial Sequence
  Non-cyclic GFR-binding peptide
  MOD_RES (1)..(3)..(37): Xaa is C or S
  MOD_RES (15)..(16)..(17)..(18)..(19): Xaa is A or G
  MOD_RES (20)..(21)..(22)..(23): Xaa is A or G or absent
XGXGEVVMESMEGIXXXXXXXXXMIQMTINSLETPVX

SEQ ID NO: 26361 - protein, 38 aa, Artificial Sequence
  Non-cyclic GFR-binding peptide
  MOD_RES (34)..(35): Xaa is C or S
  MOD_RES (12)..(13)..(14)..(15)..(16): Xaa is A or G
  MOD_RES (17)..(18)..(19)..(20): Xaa is A or G or absent
ARVVMNSMEGIXXXXXXXXXMIQVTINSLQTPAXXPKP

SEQ ID NO: 26362 - protein, 38 aa, Artificial Sequence
  Non-cyclic GFR-binding peptide
  MOD_RES (1)..(35)..(36): Xaa is C or S
  MOD_RES (13)..(14)..(15)..(16)..(17): Xaa is A or G
  MOD_RES (18)..(19)..(20)..(21): Xaa is A or G or absent
XGEVVMESMEGIXXXXXXXXXMIQMTINSLETPVXXAK

SEQ ID NO: 26363 - protein, 38 aa, Artificial Sequence
  Non-cyclic GFR-binding peptide
  MOD_RES (32)..(33): Xaa is C or S
GEVVMDSMEGIVVKENEDMIQMTINSLETPVXXAKPIK

SEQ ID NO: 26364 - protein, 42 aa, Artificial Sequence
  Non-cyclic GFR-binding peptide
  MOD_RES (2)..(36): Xaa is C or S
  MOD_RES (14)..(15)..(16)..(17)..(18): Xaa is A or G
  MOD_RES (19)..(20)..(21)..(22): Xaa is A or G or absent
EXKNHQLFNSLQEXXXXXXXXXYYLMTLPEEETPVXELGEDN

SEQ ID NO: 26365 - protein, 38 aa, Artificial Sequence
  Non-cyclic GFR-binding peptide
  MOD_RES (1)..(34)..(35): Xaa is C or S
  MOD_RES (12)..(13)..(14)..(15)..(16): Xaa is A or G
  MOD_RES (17)..(18)..(19)..(20): Xaa is A or G or absent
XSRVIMSMEGIXXXXXXXXXMIQITINSLAQPVXXPAA

SEQ ID NO: 26366 - protein, 37 aa, Artificial Sequence
  Non-cyclic GFR-binding peptide
  MOD_RES (1)..(1): Xaa is C or S
  MOD_RES (14)..(15)..(16)..(17)..(18): Xaa is A or G
  MOD_RES (19)..(20)..(21)..(22): Xaa is A or G or absent
XALHDELTNSLQEXXXXXXXXXYYLVTLPELQVQTPR

SEQ ID NO: 26367 - protein, 37 aa, Artificial Sequence
  Non-cyclic GFR-binding peptide
  MOD_RES (33)..(34): Xaa is C or S
  MOD_RES (11)..(12)..(13)..(14)..(15): Xaa is A or G
  MOD_RES (16)..(17)..(18)..(19): Xaa is A or G or absent
EVVMEVQVEKXXXXXXXXXVKAMKVSRLETPVXXAKP

SEQ ID NO: 26368 - protein, 39 aa, Artificial Sequence
  Non-cyclic GFR-binding peptide
  MOD_RES (33)..(33): Xaa is C or S
NHQLFNSLQEHQGQHPKIRYYVMPLPEEETPVXELGEDN

SEQ ID NO: 26369 - protein, 37 aa, Artificial Sequence
  Non-cyclic GFR-binding peptide
  MOD_RES (1)..(3)..(37): Xaa is C or S
XEXKNHQLFNSLQEHQGQHPKIRYYLMTLPEEETPVX

SEQ ID NO: 26370 - protein, 40 aa, Artificial Sequence
  Non-cyclic GFR-binding peptide
  MOD_RES (2)..(4)..(35)..(36): Xaa is C or S
SXKXSKVIMSMEGIIKPTKGIMIQITINSLDQSVXXPSAS

SEQ ID NO: 26371 - protein, 33 aa, Artificial Sequence
  Non-cyclic GFR-binding peptide
  MOD_RES (31)..(32): Xaa is C or S
RVVMNVQVEKIVNSSDDVKAVKVSRLQTPAXXP

SEQ ID NO: 26372 - protein, 39 aa, Artificial Sequence
  Non-cyclic GFR-binding peptide
  MOD_RES (1)..(3)..(37)..(38): Xaa is C or S
  MOD_RES (15)..(16)..(17)..(18)..(19): Xaa is A or G
  MOD_RES (20)..(21)..(22)..(23): Xaa is A or G or absent
XGXARVVMNVQVEKXXXXXXXXXVKAVKVSRLQTPAXXP

SEQ ID NO: 26373 - protein, 36 aa, Artificial Sequence
  Non-cyclic GFR-binding peptide
  MOD_RES (33)..(33): Xaa is C or S
  MOD_RES (11)..(12)..(13)..(14)..(15): Xaa is A or G
  MOD_RES (16)..(17)..(18)..(19): Xaa is A or G or absent
NHQLFNSLQEXXXXXXXXXYYVMPLPEEETPVXELG

SEQ ID NO: 26374 - protein, 37 aa, Artificial Sequence
  Non-cyclic GFR-binding peptide
  MOD_RES (1)..(3)..(37): Xaa is C or S
  MOD_RES (15)..(16)..(17)..(18)..(19): Xaa is A or G
  MOD_RES (20)..(21)..(22)..(23): Xaa is A or G or absent
XGXARVVMNSMEGIXXXXXXXXXMIQVTINSLQTPAX

SEQ ID NO: 26375 - protein, 41 aa, Artificial Sequence
  Non-cyclic GFR-binding peptide
  MOD_RES (2)..(4)..(37)..(38): Xaa is C or S
  MOD_RES (15)..(16)..(17)..(18)..(19): Xaa is A or G
  MOD_RES (20)..(21)..(22)..(23): Xaa is A or G or absent
SXKXSKVVMVQVEKXXXXXXXXXVKAIKVSRLDQPVXXPSA

SEQ ID NO: 26376 - protein, 32 aa, Artificial Sequence
  Non-cyclic GFR-binding peptide
  MOD_RES (31)..(32): Xaa is C or S
SKVVMSMEGIVKPTRGVMIQITINSLDQPVXX

SEQ ID NO: 26377 - protein, 43 aa, Artificial Sequence
  Non-cyclic GFR-binding peptide
  MOD_RES (2)..(4)..(38): Xaa is C or S
RXEXKNHQLFNSLQEHQGQHPKIRYYVMPLPEEETPVXELGED

SEQ ID NO: 26378 - protein, 33 aa, Artificial Sequence
  Non-cyclic GFR-binding peptide
  MOD_RES (31)..(31): Xaa is C or S
RVVMNVTAKKIVNSSDDIKRVQVPRLKTPAXTP

SEQ ID NO: 26379 - protein, 35 aa, Artificial Sequence
  Non-cyclic GFR-binding peptide
  MOD_RES (31)..(31): Xaa is C or S
RVVMNSMEGIIVNSSDDMIQVTINSLKTPAXTPKT

SEQ ID NO: 26380 - protein, 37 aa, Artificial Sequence
  Non-cyclic GFR-binding peptide
  MOD_RES (33)..(33): Xaa is C or S
  MOD_RES (11)..(12)..(13)..(14)..(15): Xaa is A or G
  MOD_RES (16)..(17)..(18)..(19): Xaa is A or G or absent
NHQLFNSLQEXXXXXXXXXYYVMPLPEEETPVXELGE

SEQ ID NO: 26381 - protein, 37 aa, Artificial Sequence
  Non-cyclic GFR-binding peptide
  MOD_RES (1)..(3)..(36)..(37): Xaa is C or S
  MOD_RES (14)..(15)..(16)..(17)..(18): Xaa is A or G
  MOD_RES (19)..(20)..(21)..(22): Xaa is A or G or absent
XKXSKVIMVTAKKXXXXXXXXXIKRIQVPRLDQSVXX

SEQ ID NO: 26382 - protein, 44 aa, Artificial Sequence
  Non-cyclic GFR-binding peptide
  MOD_RES (2)..(4)..(38)..(39): Xaa is C or S
  MOD_RES (16)..(17)..(18)..(19)..(20): Xaa is A or G
  MOD_RES (21)..(22)..(23)..(24): Xaa is A or G or absent
RXGXGEVVMEVQVEKXXXXXXXXXVKAMKVSRLETPVXXAKPIS

SEQ ID NO: 26383 - protein, 36 aa, Artificial Sequence
  Non-cyclic GFR-binding peptide
  MOD_RES (2)..(34)..(35): Xaa is C or S
GXGEVVMDVTAKKVVKENEDIKRMQVPRLETPVXXA

SEQ ID NO: 26384 - protein, 35 aa, Artificial Sequence
  Non-cyclic GFR-binding peptide
  MOD_RES (1)..(34)..(35): Xaa is C or S
  MOD_RES (12)..(13)..(14)..(15)..(16): Xaa is A or G
  MOD_RES (17)..(18)..(19)..(20): Xaa is A or G or absent
XSRVIMVTAKKXXXXXXXXXIKRIQVPRLAQPVXX

SEQ ID NO: 26385 - protein, 41 aa, Artificial Sequence
  Non-cyclic GFR-binding peptide
  MOD_RES (1)..(35)..(36): Xaa is C or S
  MOD_RES (13)..(14)..(15)..(16)..(17): Xaa is A or G
  MOD_RES (18)..(19)..(20)..(21): Xaa is A or G or absent
XGEVVMEVTAKKXXXXXXXXXIKRMQVPRLETPVXXAKPIS

SEQ ID NO: 26386 - protein, 41 aa, Artificial Sequence
  Non-cyclic GFR-binding peptide
  MOD_RES (1)..(3)..(40): Xaa is C or S
  MOD_RES (16)..(17)..(18)..(19)..(20): Xaa is A or G
  MOD_RES (21)..(22)..(23)..(24): Xaa is A or G or absent
XKXALHDELTNSLQEXXXXXXXXXYYVVPLPELQVQTPRXQ

SEQ ID NO: 26387 - protein, 34 aa, Artificial Sequence
  Non-cyclic GFR-binding peptide
  MOD_RES (33)..(33): Xaa is C or S
  MOD_RES (11)..(12)..(13)..(14)..(15): Xaa is A or G
  MOD_RES (16)..(17)..(18)..(19): Xaa is A or G or absent
RVVMNVQVEKXXXXXXXXXVKAVKVSRLKTPAXT

SEQ ID NO: 26388 - protein, 38 aa, Artificial Sequence
  Non-cyclic GFR-binding peptide
  MOD_RES (2)..(4)..(36)..(37): Xaa is C or S
RXGXGEVVMDVQVEKVVKENEDVKAMKVSRLETPVXXA

SEQ ID NO: 26389 - protein, 36 aa, Artificial Sequence
  Non-cyclic GFR-binding peptide
  MOD_RES (1)..(34)..(35): Xaa is C or S
  MOD_RES (12)..(13)..(14)..(15)..(16): Xaa is A or G
  MOD_RES (17)..(18)..(19)..(20): Xaa is A or G or absent
XSKVIMSMEGIXXXXXXXXXMIQITINSLDQSVXXP

SEQ ID NO: 26390 - protein, 40 aa, Artificial Sequence
  Non-cyclic GFR-binding peptide
  MOD_RES (1)..(3)..(35)..(36): Xaa is C or S
XGXARVVMNVQVEKIVNSSDDVKAVKVSRLQTPAXXPKPV

SEQ ID NO: 26391 - protein, 37 aa, Artificial Sequence
  Non-cyclic GFR-binding peptide
  MOD_RES (35)..(35): Xaa is C or S
  MOD_RES (11)..(12)..(13)..(14)..(15): Xaa is A or G
  MOD_RES (16)..(17)..(18)..(19): Xaa is A or G or absent
HEELRNSLQEXXXXXXXXXYYVVPLPEHHVRSPQXKV

SEQ ID NO: 26392 - protein, 36 aa, Artificial Sequence
  Non-cyclic GFR-binding peptide
  MOD_RES (2)..(34)..(35): Xaa is C or S
GXSRVVMNVTAKKIVNSSDDIKRVQVPRLKTPAXXP

SEQ ID NO: 26393 - protein, 33 aa, Artificial Sequence
  Non-cyclic GFR-binding peptide
  MOD_RES (31)..(32): Xaa is C or S
EVVMEVQVEKVVKDYEDVKAMKVSRLETPVXXA

SEQ ID NO: 26394 - protein, 32 aa, Artificial Sequence
  Non-cyclic GFR-binding peptide
  MOD_RES (31)..(32): Xaa is C or S
SKVIMSMEGIIKPTKGIMIQITINSLDQSVXX

SEQ ID NO: 26395 - protein, 43 aa, Artificial Sequence
  Non-cyclic GFR-binding peptide
  MOD_RES (1)..(3)..(37)..(38): Xaa is C or S
  MOD_RES (15)..(16)..(17)..(18)..(19): Xaa is A or G
  MOD_RES (20)..(21)..(22)..(23): Xaa is A or G or absent
XGXGEVVMEVTAKKXXXXXXXXXIKRMQVPRLETPVXXAKPIS

SEQ ID NO: 26396 - protein, 39 aa, Artificial Sequence
  Non-cyclic GFR-binding peptide
  MOD_RES (2)..(36): Xaa is C or S
EXKNHQLFNSLQEHQGQHPKIRYYVMPLPEEETPVXELG

SEQ ID NO: 26397 - protein, 37 aa, Artificial Sequence
  Non-cyclic GFR-binding peptide
  MOD_RES (1)..(34)..(35): Xaa is C or S
  MOD_RES (12)..(13)..(14)..(15)..(16): Xaa is A or G
  MOD_RES (17)..(18)..(19)..(20): Xaa is A or G or absent
XSRVIMSMEGIXXXXXXXXXMIQITINSLAQPVXXPA

SEQ ID NO: 26398 - protein, 36 aa, Artificial Sequence
  Non-cyclic GFR-binding peptide
  MOD_RES (32)..(33): Xaa is C or S
GEVVMEVTAKKVVKDYEDIKRMQVPRLETPVXXAKP

SEQ ID NO: 26399 - protein, 39 aa, Artificial Sequence
  Non-cyclic GFR-binding peptide
  MOD_RES (2)..(36): Xaa is C or S
  MOD_RES (14)..(15)..(16)..(17)..(18): Xaa is A or G
  MOD_RES (19)..(20)..(21)..(22): Xaa is A or G or absent
GXSRVVMNVTAKKXXXXXXXXXIKRVQVPRLKTPAXTPK

SEQ ID NO: 26400 - protein, 38 aa, Artificial Sequence
  Non-cyclic GFR-binding peptide
  MOD_RES (1)..(33)..(34): Xaa is C or S
XSRVVMNVQVEKIVNSSDDVKAVKVSRLKTPAXXPKPV

SEQ ID NO: 26401 - protein, 32 aa, Artificial Sequence
  Non-cyclic GFR-binding peptide
  MOD_RES (1)..(1): Xaa is C or S
XSRVVMNSMEGIIVNSSDDMIQVTINSLKTPA

SEQ ID NO: 26402 - protein, 36 aa, Artificial Sequence
  Non-cyclic GFR-binding peptide
  MOD_RES (2)..(35)..(36): Xaa is C or S
  MOD_RES (13)..(14)..(15)..(16)..(17): Xaa is A or G
  MOD_RES (18)..(19)..(20)..(21): Xaa is A or G or absent
KXSRVIMVTAKKXXXXXXXXXIKRIQVPRLAQPVXX

SEQ ID NO: 26403 - protein, 37 aa, Artificial Sequence
  Non-cyclic GFR-binding peptide
  MOD_RES (33)..(33): Xaa is C or S
NHQLFNSLQEHQGQHPKIRYYLMTLPEEETPVXELGE

SEQ ID NO: 26404 - protein, 35 aa, Artificial Sequence
  Non-cyclic GFR-binding peptide
  MOD_RES (1)..(3)..(35): Xaa is C or S
XGXGEVVMDVQVEKVVKENEDVKAMKVSRLETPVX

SEQ ID NO: 26405 - protein, 35 aa, Artificial Sequence
  Non-cyclic GFR-binding peptide
  MOD_RES (1)..(32)..(33): Xaa is C or S
XSKVIMVTAKKIKPTKGIIKRIQVPRLDQSVXXPS

SEQ ID NO: 26406 - protein, 38 aa, Artificial Sequence
  Non-cyclic GFR-binding peptide
  MOD_RES (37)..(37): Xaa is C or S
  MOD_RES (13)..(14)..(15)..(16)..(17): Xaa is A or G
  MOD_RES (18)..(19)..(20)..(21): Xaa is A or G or absent
ELHEELRNSLQEXXXXXXXXXYYLVTLPEHHVRSPQXK

SEQ ID NO: 26407 - protein, 39 aa, Artificial Sequence
  Non-cyclic GFR-binding peptide
  MOD_RES (1)..(33)..(34): Xaa is C or S
XGEVVMESMEGIVVKDYEDMIQMTINSLETPVXXAKPIS

SEQ ID NO: 26408 - protein, 40 aa, Artificial Sequence
  Non-cyclic GFR-binding peptide
  MOD_RES (34)..(35): Xaa is C or S
  MOD_RES (12)..(13)..(14)..(15)..(16): Xaa is A or G
  MOD_RES (17)..(18)..(19)..(20): Xaa is A or G or absent
SRVVMNVQVEKXXXXXXXXXVKAVKVSRLKTPAXXPKPVY

SEQ ID NO: 26409 - protein, 43 aa, Artificial Sequence
  Non-cyclic GFR-binding peptide
  MOD_RES (2)..(39): Xaa is C or S
KXALHDELTNSLQEFIPKKRVIEYYVVPLPELQVQTPRXQVNR

SEQ ID NO: 26410 - protein, 41 aa, Artificial Sequence
  Non-cyclic GFR-binding peptide
  MOD_RES (2)..(4)..(38): Xaa is C or S
RXEXKNHQLFNSLQEHQGQHPKIRYYLMTLPEEETPVXELG

SEQ ID NO: 26411 - protein, 39 aa, Artificial Sequence
  Non-cyclic GFR-binding peptide
  MOD_RES (33)..(34): Xaa is C or S
  MOD_RES (11)..(12)..(13)..(14)..(15): Xaa is A or G
  MOD_RES (16)..(17)..(18)..(19): Xaa is A or G or absent
SKVVMVTAKKXXXXXXXXXIKRIQVPRLDQPVXXPSASA

SEQ ID NO: 26412 - protein, 39 aa, Artificial Sequence
  Non-cyclic GFR-binding peptide
  MOD_RES (1)..(3)..(34)..(35): Xaa is C or S
XKXSKVIMVTAKKIKPTKGIIKRIQVPRLDQSVXXPSAS

SEQ ID NO: 26413 - protein, 33 aa, Artificial Sequence
  Non-cyclic GFR-binding peptide
KNHQLFNSLQEHQGQHPKIRYYLMTLPEEETPV

SEQ ID NO: 26414 - protein, 43 aa, Artificial Sequence
  Non-cyclic GFR-binding peptide
  MOD_RES (1)..(3)..(37)..(38): Xaa is C or S
  MOD_RES (15)..(16)..(17)..(18)..(19): Xaa is A or G
  MOD_RES (20)..(21)..(22)..(23): Xaa is A or G or absent
XGXARVVMNVQVEKXXXXXXXXXVKAVKVSRLQTPAXXPKPVT

SEQ ID NO: 26415 - protein, 38 aa, Artificial Sequence
  Non-cyclic GFR-binding peptide
  MOD_RES (1)..(3)..(36)..(37): Xaa is C or S
  MOD_RES (14)..(15)..(16)..(17)..(18): Xaa is A or G
  MOD_RES (19)..(20)..(21)..(22): Xaa is A or G or absent
XKXSKVVMSMEGIXXXXXXXXXMIQITINSLDQPVXXP

SEQ ID NO: 26416 - protein, 39 aa, Artificial Sequence
  Non-cyclic GFR-binding peptide
  MOD_RES (2)..(4): Xaa is C or S
AXAXELHEELRNSLQELKPKKRVYEYYVVPLPEHHVRSP

SEQ ID NO: 26417 - protein, 35 aa, Artificial Sequence
  Non-cyclic GFR-binding peptide
  MOD_RES (1)..(3)..(35): Xaa is C or S
XGXARVVMNVTAKKIVNSSDDIKRVQVPRLQTPAX

SEQ ID NO: 26418 - protein, 37 aa, Artificial Sequence
  Non-cyclic GFR-binding peptide
  MOD_RES (2)..(35)..(36): Xaa is C or S
  MOD_RES (13)..(14)..(15)..(16)..(17): Xaa is A or G
  MOD_RES (18)..(19)..(20)..(21): Xaa is A or G or absent
KXSKVVMSMEGIXXXXXXXXXMIQITINSLDQPVXXP

SEQ ID NO: 26419 - protein, 32 aa, Artificial Sequence
  Non-cyclic GFR-binding peptide
  MOD_RES (32)..(32): Xaa is C or S
SRVVMNVQVEKIVNSSDDVKAVKVSRLKTPAX

SEQ ID NO: 26420 - protein, 37 aa, Artificial Sequence
  Non-cyclic GFR-binding peptide
  MOD_RES (35)..(35): Xaa is C or S
  MOD_RES (11)..(12)..(13)..(14)..(15): Xaa is A or G
  MOD_RES (16)..(17)..(18)..(19): Xaa is A or G or absent
HEELRNSLQEXXXXXXXXXYYLVTLPEHHVRSPQXKV

SEQ ID NO: 26421 - protein, 40 aa, Artificial Sequence
  Non-cyclic GFR-binding peptide
  MOD_RES (2)..(36)..(37): Xaa is C or S
  MOD_RES (14)..(15)..(16)..(17)..(18): Xaa is A or G
  MOD_RES (19)..(20)..(21)..(22): Xaa is A or G or absent
GXARVVMNVQVEKXXXXXXXXXVKAVKVSRLQTPAXXPKP

SEQ ID NO: 26422 - protein, 36 aa, Artificial Sequence
  Non-cyclic GFR-binding peptide
  MOD_RES (1)..(3)..(35)..(36): Xaa is C or S
XGXSRVVMNVQVEKIVNSSDDVKAVKVSRLKTPAXX

SEQ ID NO: 26423 - protein, 34 aa, Artificial Sequence
  Non-cyclic GFR-binding peptide
  MOD_RES (2)..(34): Xaa is C or S
GXSRVVMNSMEGIIVNSSDDMIQVTINSLKTPAX

SEQ ID NO: 26424 - protein, 42 aa, Artificial Sequence
  Non-cyclic GFR-binding peptide
  MOD_RES (2)..(36)..(37): Xaa is C or S
  MOD_RES (14)..(15)..(16)..(17)..(18): Xaa is A or G
  MOD_RES (19)..(20)..(21)..(22): Xaa is A or G or absent
GXARVVMNVQVEKXXXXXXXXXVKAVKVSRLQTPAXXPKPVT

SEQ ID NO: 26425 - protein, 39 aa, Artificial Sequence
  Non-cyclic GFR-binding peptide
  MOD_RES (1)..(38): Xaa is C or S
XALHDELTNSLQEFIPKKRVIEYYVVPLPELQVQTPRXQ

SEQ ID NO: 26426 - protein, 31 aa, Artificial Sequence
  Non-cyclic GFR-binding peptide
  MOD_RES (1)..(1): Xaa is C or S
XSKVIMSMEGIIKPTKGIMIQITINSLDQSV

SEQ ID NO: 26427 - protein, 37 aa, Artificial Sequence
  Non-cyclic GFR-binding peptide
  MOD_RES (1)..(35)..(36): Xaa is C or S
  MOD_RES (13)..(14)..(15)..(16)..(17): Xaa is A or G
  MOD_RES (18)..(19)..(20)..(21): Xaa is A or G or absent
XGEVVMEVQVEKXXXXXXXXXVKAMKVSRLETPVXXA

SEQ ID NO: 26428 - protein, 44 aa, Artificial Sequence
  Non-cyclic GFR-binding peptide
  MOD_RES (2)..(4)..(41): Xaa is C or S
EXKXALHDELTNSLQEFIPKKRVIEYYVVPLPELQVQTPRXQVN

SEQ ID NO: 26429 - protein, 36 aa, Artificial Sequence
  Non-cyclic GFR-binding peptide
  MOD_RES (1)..(3)..(36): Xaa is C or S
  MOD_RES (14)..(15)..(16)..(17)..(18): Xaa is A or G
  MOD_RES (19)..(20)..(21)..(22): Xaa is A or G or absent
XKXSRVIMVTAKKXXXXXXXXXIKRIQVPRLAQPVX

SEQ ID NO: 26430 - protein, 32 aa, Artificial Sequence
  Non-cyclic GFR-binding peptide
  MOD_RES (31)..(31): Xaa is C or S
RVVMNVQVEKIVNSSDDVKAVKVSRLKTPAXT

SEQ ID NO: 26431 - protein, 39 aa, Artificial Sequence
  Non-cyclic GFR-binding peptide
  MOD_RES (1)..(3)..(34)..(35): Xaa is C or S
XKXSKVVMVTAKKVKPTRGVIKRIQVPRLDQPVXXPSAS

SEQ ID NO: 26432 - protein, 45 aa, Artificial Sequence
  Non-cyclic GFR-binding peptide
  MOD_RES (2)..(4)..(41): Xaa is C or S
  MOD_RES (17)..(18)..(19)..(20)..(21): Xaa is A or G
  MOD_RES (22)..(23)..(24)..(25): Xaa is A or G or absent
AXAXELHEELRNSLQEXXXXXXXXXYYVVPLPEHHVRSPQXKVSS

SEQ ID NO: 26433 - protein, 38 aa, Artificial Sequence
  Non-cyclic GFR-binding peptide
  MOD_RES (1)..(34)..(35): Xaa is C or S
  MOD_RES (12)..(13)..(14)..(15)..(16): Xaa is A or G
  MOD_RES (17)..(18)..(19)..(20): Xaa is A or G or absent
XSKVVMSMEGIXXXXXXXXXMIQITINSLDQPVXXPSA

SEQ ID NO: 26434 - protein, 36 aa, Artificial Sequence
  Non-cyclic GFR-binding peptide
  MOD_RES (1)..(35): Xaa is C or S
  MOD_RES (13)..(14)..(15)..(16)..(17): Xaa is A or G
  MOD_RES (18)..(19)..(20)..(21): Xaa is A or G or absent
XKNHQLFNSLQEXXXXXXXXXYYVMPLPEEETPVXE

SEQ ID NO: 26435 - protein, 37 aa, Artificial Sequence
  Non-cyclic GFR-binding peptide
  MOD_RES (1)..(3)..(34)..(35): Xaa is C or S
XKXSRVIMVTAKKVKPKRGVIKRIQVPRLAQPVXXPA

SEQ ID NO: 26436 - protein, 40 aa, Artificial Sequence
  Non-cyclic GFR-binding peptide
  MOD_RES (2)..(4)..(36)..(37): Xaa is C or S
HXGXSRVVMNVQVEKIVNSSDDVKAVKVSRLKTPAXXPKP

SEQ ID NO: 26437 - protein, 39 aa, Artificial Sequence
  Non-cyclic GFR-binding peptide
  MOD_RES (36)..(36): Xaa is C or S
  MOD_RES (12)..(13)..(14)..(15)..(16): Xaa is A or G
  MOD_RES (17)..(18)..(19)..(20): Xaa is A or G or absent
LHEELRNSLQEXXXXXXXXXYYLVTLPEHHVRSPQXKVS

SEQ ID NO: 26438 - protein, 37 aa, Artificial Sequence
  Non-cyclic GFR-binding peptide
  MOD_RES (33)..(33): Xaa is C or S
NHQLFNSLQEHQGQHPKIRYYVMPLPEEETPVXELGE

SEQ ID NO: 26439 - protein, 37 aa, Artificial Sequence
  Non-cyclic GFR-binding peptide
  MOD_RES (1)..(3): Xaa is C or S
  MOD_RES (16)..(17)..(18)..(19)..(20): Xaa is A or G
  MOD_RES (21)..(22)..(23)..(24): Xaa is A or G or absent
XKXALHDELTNSLQEXXXXXXXXXYYLVTLPELQVQT

SEQ ID NO: 26440 - protein, 37 aa, Artificial Sequence
  Non-cyclic GFR-binding peptide
  MOD_RES (1)..(33)..(34): Xaa is C or S
XSRVVMNSMEGIIVNSSDDMIQVTINSLKTPAXXPKP

SEQ ID NO: 26441 - protein, 35 aa, Artificial Sequence
  Non-cyclic GFR-binding peptide
  MOD_RES (2)..(34)..(35): Xaa is C or S
GXGEVVMDVTAKKVVKENEDIKRMQVPRLETPVXX

SEQ ID NO: 26442 - protein, 38 aa, Artificial Sequence
  Non-cyclic GFR-binding peptide
  MOD_RES (1)..(3)..(37): Xaa is C or S
  MOD_RES (15)..(16)..(17)..(18)..(19): Xaa is A or G
  MOD_RES (20)..(21)..(22)..(23): Xaa is A or G or absent
XGXSRVVMNVQVEKXXXXXXXXXVKAVKVSRLKTPAXT

SEQ ID NO: 26443 - protein, 34 aa, Artificial Sequence
  Non-cyclic GFR-binding peptide
  MOD_RES (31)..(31): Xaa is C or S
RVVMNVTAKKIVNSSDDIKRVQVPRLKTPAXTPK

SEQ ID NO: 26444 - protein, 35 aa, Artificial Sequence
  Non-cyclic GFR-binding peptide
  MOD_RES (34)..(34): Xaa is C or S
  MOD_RES (12)..(13)..(14)..(15)..(16): Xaa is A or G
  MOD_RES (17)..(18)..(19)..(20): Xaa is A or G or absent
KNHQLFNSLQEXXXXXXXXXYYVMPLPEEETPVXE

SEQ ID NO: 26445 - protein, 37 aa, Artificial Sequence
  Non-cyclic GFR-binding peptide
  MOD_RES (2)..(4)..(35)..(36): Xaa is C or S
SXKXSKVVMVQVEKVKPTRGVVKAIKVSRLDQPVXXP

SEQ ID NO: 26446 - protein, 36 aa, Artificial Sequence
  Non-cyclic GFR-binding peptide
  MOD_RES (32)..(33): Xaa is C or S
GEVVMDVTAKKVVKENEDIKRMQVPRLETPVXXAKP

SEQ ID NO: 26447 - protein, 38 aa, Artificial Sequence
  Non-cyclic GFR-binding peptide
  MOD_RES (1)..(3): Xaa is C or S
XKXALHDELTNSLQEFIPKKRVIEYYVVPLPELQVQTP

SEQ ID NO: 26448 - protein, 36 aa, Artificial Sequence
  Non-cyclic GFR-binding peptide
  MOD_RES (32)..(32): Xaa is C or S
SRVVMNSMEGIIVNSSDDMIQVTINSLKTPAXTPKT

SEQ ID NO: 26449 - protein, 39 aa, Artificial Sequence
  Non-cyclic GFR-binding peptide
  MOD_RES (1)..(3)..(37)..(38): Xaa is C or S
  MOD_RES (15)..(16)..(17)..(18)..(19): Xaa is A or G
  MOD_RES (20)..(21)..(22)..(23): Xaa is A or G or absent
XGXGEVVMDVTAKKXXXXXXXXXIKRMQVPRLETPVXXA

SEQ ID NO: 26450 - protein, 43 aa, Artificial Sequence
  Non-cyclic GFR-binding peptide
  MOD_RES (2)..(4)..(41): Xaa is C or S
  MOD_RES (17)..(18)..(19)..(20)..(21): Xaa is A or G
  MOD_RES (22)..(23)..(24)..(25): Xaa is A or G or absent
AXAXELHEELRNSLQEXXXXXXXXXYYLVTLPEHHVRSPQXKV

SEQ ID NO: 26451 - protein, 36 aa, Artificial Sequence
  Non-cyclic GFR-binding peptide
  MOD_RES (1)..(33)..(34): Xaa is C or S
XSRVVMNVQVEKIVNSSDDVKAVKVSRLKTPAXXPK

SEQ ID NO: 26452 - protein, 43 aa, Artificial Sequence
  Non-cyclic GFR-binding peptide
  MOD_RES (1)..(3)..(37)..(38): Xaa is C or S
  MOD_RES (15)..(16)..(17)..(18)..(19): Xaa is A or G
  MOD_RES (20)..(21)..(22)..(23): Xaa is A or G or absent
XGXSRVVMNVTAKKXXXXXXXXXIKRVQVPRLKTPAXXPKPVY

SEQ ID NO: 26453 - protein, 33 aa, Artificial Sequence
  Non-cyclic GFR-binding peptide
  MOD_RES (11)..(12)..(13)..(14)..(15): Xaa is A or G
  MOD_RES (16)..(17)..(18)..(19): Xaa is A or G or absent
HDELTNSLQEXXXXXXXXXYYVVPLPELQVQTP

SEQ ID NO: 26454 - protein, 37 aa, Artificial Sequence
  Non-cyclic GFR-binding peptide
  MOD_RES (1)..(35): Xaa is C or S
  MOD_RES (13)..(14)..(15)..(16)..(17): Xaa is A or G
  MOD_RES (18)..(19)..(20)..(21): Xaa is A or G or absent
XKNHQLFNSLQEXXXXXXXXXYYLMTLPEEETPVXEL

SEQ ID NO: 26455 - protein, 34 aa, Artificial Sequence
  Non-cyclic GFR-binding peptide
  MOD_RES (2)..(2): Xaa is C or S
  MOD_RES (13)..(14)..(15)..(16)..(17): Xaa is A or G
  MOD_RES (18)..(19)..(20)..(21): Xaa is A or G or absent
KXSKVIMSMEGIXXXXXXXXXMIQITINSLDQSV

SEQ ID NO: 26456 - protein, 35 aa, Artificial Sequence
  Non-cyclic GFR-binding peptide
  MOD_RES (33)..(34): Xaa is C or S
  MOD_RES (11)..(12)..(13)..(14)..(15): Xaa is A or G
  MOD_RES (16)..(17)..(18)..(19): Xaa is A or G or absent
SKVIMSMEGIXXXXXXXXXMIQITINSLDQSVXXP

SEQ ID NO: 26457 - protein, 34 aa, Artificial Sequence
  Non-cyclic GFR-binding peptide
  MOD_RES (34)..(34): Xaa is C or S
KNHQLFNSLQEHQGQHPKIRYYVMPLPEEETPVX

SEQ ID NO: 26458 - protein, 32 aa, Artificial Sequence
  Non-cyclic GFR-binding peptide
HDELTNSLQEFIPKKRVIEYYLVTLPELQVQT

SEQ ID NO: 26459 - protein, 38 aa, Artificial Sequence
  Non-cyclic GFR-binding peptide
  MOD_RES (2)..(4)..(37)..(38): Xaa is C or S
  MOD_RES (15)..(16)..(17)..(18)..(19): Xaa is A or G
  MOD_RES (20)..(21)..(22)..(23): Xaa is A or G or absent
SXKXSKVIMVTAKKXXXXXXXXXIKRIQVPRLDQSVXX

SEQ ID NO: 26460 - protein, 30 aa, Artificial Sequence
  Non-cyclic GFR-binding peptide
EVVMDVQVEKVVKENEDVKAMKVSRLETPV

SEQ ID NO: 26461 - protein, 38 aa, Artificial Sequence
  Non-cyclic GFR-binding peptide
  MOD_RES (1)..(35)..(36): Xaa is C or S
  MOD_RES (13)..(14)..(15)..(16)..(17): Xaa is A or G
  MOD_RES (18)..(19)..(20)..(21): Xaa is A or G or absent
XGEVVMDVTAKKXXXXXXXXXIKRMQVPRLETPVXXAK

SEQ ID NO: 26462 - protein, 33 aa, Artificial Sequence
  Non-cyclic GFR-binding peptide
  MOD_RES (11)..(12)..(13)..(14)..(15): Xaa is A or G
  MOD_RES (16)..(17)..(18)..(19): Xaa is A or G or absent
HDELTNSLQEXXXXXXXXXYYLVTLPELQVQTP

SEQ ID NO: 26463 - protein, 36 aa, Artificial Sequence
  Non-cyclic GFR-binding peptide
  MOD_RES (2)..(36): Xaa is C or S
  MOD_RES (14)..(15)..(16)..(17)..(18): Xaa is A or G
  MOD_RES (19)..(20)..(21)..(22): Xaa is A or G or absent
GXSRVVMNVTAKKXXXXXXXXXIKRVQVPRLKTPAX

SEQ ID NO: 26464 - protein, 35 aa, Artificial Sequence
  Non-cyclic GFR-binding peptide
  MOD_RES (2)..(33)..(34): Xaa is C or S
KXSRVIMVQVEKVKPKRGVVKAIKVSRLAQPVXXP

SEQ ID NO: 26465 - protein, 38 aa, Artificial Sequence
  Non-cyclic GFR-binding peptide
  MOD_RES (1)..(3)..(34)..(35): Xaa is C or S
XKXSRVIMVQVEKVKPKRGVVKAIKVSRLAQPVXXPAA

SEQ ID NO: 26466 - protein, 41 aa, Artificial Sequence
  Non-cyclic GFR-binding peptide
  MOD_RES (1)..(3)..(35)..(36): Xaa is C or S
XGXSRVVMNVQVEKIVNSSDDVKAVKVSRLKTPAXXPKPVY

SEQ ID NO: 26467 - protein, 37 aa, Artificial Sequence
  Non-cyclic GFR-binding peptide
  MOD_RES (34)..(35): Xaa is C or S
  MOD_RES (12)..(13)..(14)..(15)..(16): Xaa is A or G
  MOD_RES (17)..(18)..(19)..(20): Xaa is A or G or absent
GEVVMDVQVEKXXXXXXXXXVKAMKVSRLETPVXXAK

SEQ ID NO: 26468 - protein, 37 aa, Artificial Sequence
  Non-cyclic GFR-binding peptide
  MOD_RES (2)..(2): Xaa is C or S
KXALHDELTNSLQEFIPKKRVIEYYLVTLPELQVQTP

SEQ ID NO: 26469 - protein, 35 aa, Artificial Sequence
  Non-cyclic GFR-binding peptide
  MOD_RES (1)..(35): Xaa is C or S
  MOD_RES (13)..(14)..(15)..(16)..(17): Xaa is A or G
  MOD_RES (18)..(19)..(20)..(21): Xaa is A or G or absent
XKNHQLFNSLQEXXXXXXXXXYYVMPLPEEETPVX

SEQ ID NO: 26470 - protein, 34 aa, Artificial Sequence
  Non-cyclic GFR-binding peptide
  MOD_RES (1)..(33)..(34): Xaa is C or S
XSRVVMNVTAKKIVNSSDDIKRVQVPRLKTPAXX

SEQ ID NO: 26471 - protein, 40 aa, Artificial Sequence
  Non-cyclic GFR-binding peptide
  MOD_RES (34)..(35): Xaa is C or S
  MOD_RES (12)..(13)..(14)..(15)..(16): Xaa is A or G
  MOD_RES (17)..(18)..(19)..(20): Xaa is A or G or absent
GEVVMEVQVEKXXXXXXXXXVKAMKVSRLETPVXXAKPIS

SEQ ID NO: 26472 - protein, 42 aa, Artificial Sequence
  Non-cyclic GFR-binding peptide
  MOD_RES (1)..(38): Xaa is C or S
  MOD_RES (14)..(15)..(16)..(17)..(18): Xaa is A or G
  MOD_RES (19)..(20)..(21)..(22): Xaa is A or G or absent
XALHDELTNSLQEXXXXXXXXXYYVVPLPELQVQTPRXQVNR

SEQ ID NO: 26473 - protein, 35 aa, Artificial Sequence
  Non-cyclic GFR-binding peptide
  MOD_RES (2)..(2): Xaa is C or S
  MOD_RES (14)..(15)..(16)..(17)..(18): Xaa is A or G
  MOD_RES (19)..(20)..(21)..(22): Xaa is A or G or absent
GXGEVVMEVQVEKXXXXXXXXXVKAMKVSRLETPV

SEQ ID NO: 26474 - protein, 37 aa, Artificial Sequence
  Non-cyclic GFR-binding peptide
  MOD_RES (1)..(3)..(37): Xaa is C or S
  MOD_RES (15)..(16)..(17)..(18)..(19): Xaa is A or G
  MOD_RES (20)..(21)..(22)..(23): Xaa is A or G or absent
XGXSRVVMNVQVEKXXXXXXXXXVKAVKVSRLKTPAX

SEQ ID NO: 26475 - protein, 40 aa, Artificial Sequence
  Non-cyclic GFR-binding peptide
  MOD_RES (1)..(38): Xaa is C or S
  MOD_RES (14)..(15)..(16)..(17)..(18): Xaa is A or G
  MOD_RES (19)..(20)..(21)..(22): Xaa is A or G or absent
XELHEELRNSLQEXXXXXXXXXYYVVPLPEHHVRSPQXKV

SEQ ID NO: 26476 - protein, 36 aa, Artificial Sequence
  Non-cyclic GFR-binding peptide
  MOD_RES (32)..(32): Xaa is C or S
SRVVMNVQVEKIVNSSDDVKAVKVSRLKTPAXTPKT

SEQ ID NO: 26477 - protein, 30 aa, Artificial Sequence; identical to SEQ ID NO: 2194
  Non-cyclic GFR-binding peptide

SEQ ID NO: 26478 - protein, 40 aa, Artificial Sequence
  Non-cyclic GFR-binding peptide
  MOD_RES (1)..(3)..(35)..(36): Xaa is C or S
XGXGEVVMDVQVEKVVKENEDVKAMKVSRLETPVXXAKPI

SEQ ID NO: 26479 - protein, 36 aa, Artificial Sequence
  Non-cyclic GFR-binding peptide
  MOD_RES (33)..(34): Xaa is C or S
  MOD_RES (11)..(12)..(13)..(14)..(15): Xaa is A or G
  MOD_RES (16)..(17)..(18)..(19): Xaa is A or G or absent
SKVIMSMEGIXXXXXXXXXMIQITINSLDQSVXXPS

SEQ ID NO: 26480 - protein, 38 aa, Artificial Sequence
  Non-cyclic GFR-binding peptide
  MOD_RES (1)..(3)..(35)..(36): Xaa is C or S
XGXSRVVMNVQVEKIVNSSDDVKAVKVSRLKTPAXXPK

SEQ ID NO: 26481 - protein, 38 aa, Artificial Sequence
  Non-cyclic GFR-binding peptide
  MOD_RES (2)..(2): Xaa is C or S
AXELHEELRNSLQELKPKKRVYEYYVVPLPEHHVRSPQ

SEQ ID NO: 26482 - protein, 38 aa, Artificial Sequence
  Non-cyclic GFR-binding peptide
  MOD_RES (2)..(34)..(35): Xaa is C or S
GXGEVVMEVQVEKVVKDYEDVKAMKVSRLETPVXXAKP

SEQ ID NO: 26483 - protein, 40 aa, Artificial Sequence
  Non-cyclic GFR-binding peptide
  MOD_RES (1)..(35)..(36): Xaa is C or S
  MOD_RES (13)..(14)..(15)..(16)..(17): Xaa is A or G
  MOD_RES (18)..(19)..(20)..(21): Xaa is A or G or absent
XGEVVMEVTAKKXXXXXXXXXIKRMQVPRLETPVXXAKPI

SEQ ID NO: 26484 - protein, 39 aa, Artificial Sequence
  Non-cyclic GFR-binding peptide
  MOD_RES (2)..(34)..(35): Xaa is C or S
GXGEVVMDVQVEKVVKENEDVKAMKVSRLETPVXXAKPI

SEQ ID NO: 26485 - protein, 40 aa, Artificial Sequence
  Non-cyclic GFR-binding peptide
  MOD_RES (2)..(4)..(35)..(36): Xaa is C or S
SXKXSKVVMVQVEKVKPTRGVVKAIKVSRLDQPVXXPSAS

SEQ ID NO: 26486 - protein, 44 aa, Artificial Sequence
  Non-cyclic GFR-binding peptide
  MOD_RES (2)..(4)..(38): Xaa is C or S
  MOD_RES (16)..(17)..(18)..(19)..(20): Xaa is A or G
  MOD_RES (21)..(22)..(23)..(24): Xaa is A or G or absent
RXEXKNHQLFNSLQEXXXXXXXXXYYVMPLPEEETPVXELGEDN

SEQ ID NO: 26487 - protein, 36 aa, Artificial Sequence
  Non-cyclic GFR-binding peptide
  MOD_RES (1)..(3)..(35)..(36): Xaa is C or S
XGXGEVVMDSMEGIVVKENEDMIQMTINSLETPVXX

SEQ ID NO: 26488 - protein, 38 aa, Artificial Sequence
  Non-cyclic GFR-binding peptide
  MOD_RES (2)..(35)..(36): Xaa is C or S
  MOD_RES (13)..(14)..(15)..(16)..(17): Xaa is A or G
  MOD_RES (18)..(19)..(20)..(21): Xaa is A or G or absent
KXSKVVMSMEGIXXXXXXXXXMIQITINSLDQPVXXPS

SEQ ID NO: 26489 - protein, 40 aa, Artificial Sequence
  Non-cyclic GFR-binding peptide
  MOD_RES (2)..(34): Xaa is C or S
GXSRVVMNVTAKKIVNSSDDIKRVQVPRLKTPAXTPKTVH

SEQ ID NO: 26490 - protein, 32 aa, Artificial Sequence
  Non-cyclic GFR-binding peptide
  MOD_RES (31)..(32): Xaa is C or S
RVVMNSMEGIIVNSSDDMIQVTINSLQTPAXX

SEQ ID NO: 26491 - protein, 39 aa, Artificial Sequence
  Non-cyclic GFR-binding peptide
  MOD_RES (2)..(39): Xaa is C or S
KXALHDELTNSLQEFIPKKRVIEYYLVTLPELQVQTPRX

SEQ ID NO: 26492 - protein, 39 aa, Artificial Sequence
  Non-cyclic GFR-binding peptide
  MOD_RES (2)..(4)..(36)..(37): Xaa is C or S
HXGXARVVMNSMEGIIVNSSDDMIQVTINSLQTPAXXPK

SEQ ID NO: 26493 - protein, 37 aa, Artificial Sequence
  Non-cyclic GFR-binding peptide
  MOD_RES (1)..(33)..(34): Xaa is C or S
XGEVVMEVTAKKVVKDYEDIKRMQVPRLETPVXXAKP

SEQ ID NO: 26494 - protein, 36 aa, Artificial Sequence
  Non-cyclic GFR-binding peptide
  MOD_RES (33)..(33): Xaa is C or S
  MOD_RES (11)..(12)..(13)..(14)..(15): Xaa is A or G
  MOD_RES (16)..(17)..(18)..(19): Xaa is A or G or absent
RVVMNSMEGIXXXXXXXXXMIQVTINSLKTPAXTPK

SEQ ID NO: 26495 - protein, 37 aa, Artificial Sequence
  Non-cyclic GFR-binding peptide
  MOD_RES (2)..(36): Xaa is C or S
  MOD_RES (14)..(15)..(16)..(17)..(18): Xaa is A or G
  MOD_RES (19)..(20)..(21)..(22): Xaa is A or G or absent
GXSRVVMNVTAKKXXXXXXXXXIKRVQVPRLKTPAXT

SEQ ID NO: 26496 - protein, 38 aa, Artificial Sequence
  Non-cyclic GFR-binding peptide
  MOD_RES (2)..(34): Xaa is C or S
GXSRVVMNSMEGIIVNSSDDMIQVTINSLKTPAXTPKT

SEQ ID NO: 26497 - protein, 38 aa, Artificial Sequence
  Non-cyclic GFR-binding peptide
  MOD_RES (2)..(4)..(35)..(36): Xaa is C or S
SXKXSRVIMSMEGIVKPKRGVMIQITINSLAQPVXXPA

SEQ ID NO: 26498 - protein, 37 aa, Artificial Sequence
  Non-cyclic GFR-binding peptide
  MOD_RES (2)..(36)..(37): Xaa is C or S
  MOD_RES (14)..(15)..(16)..(17)..(18): Xaa is A or G
  MOD_RES (19)..(20)..(21)..(22): Xaa is A or G or absent
GXSRVVMNSMEGIXXXXXXXXXMIQVTINSLKTPAXX

SEQ ID NO: 26499 - protein, 39 aa, Artificial Sequence
  Non-cyclic GFR-binding peptide
  MOD_RES (1)..(3)..(36)..(37): Xaa is C or S
  MOD_RES (14)..(15)..(16)..(17)..(18): Xaa is A or G
  MOD_RES (19)..(20)..(21)..(22): Xaa is A or G or absent
XKXSRVIMVTAKKXXXXXXXXXIKRIQVPRLAQPVXXPA

SEQ ID NO: 26500 - protein, 38 aa, Artificial Sequence
  Non-cyclic GFR-binding peptide
  MOD_RES (2)..(34)..(35): Xaa is C or S
GXGEVVMDVTAKKVVKENEDIKRMQVPRLETPVXXAKP

SEQ ID NO: 26501 - protein, 39 aa, Artificial Sequence
  Non-cyclic GFR-binding peptide
  MOD_RES (2)..(4): Xaa is C or S
  MOD_RES (17)..(18)..(19)..(20)..(21): Xaa is A or G
  MOD_RES (22)..(23)..(24)..(25): Xaa is A or G or absent
EXKXALHDELTNSLQEXXXXXXXXXYYLVTLPELQVQTP

SEQ ID NO: 26502 - protein, 43 aa, Artificial Sequence
  Non-cyclic GFR-binding peptide
  MOD_RES (2)..(4)..(38)..(39): Xaa is C or S
  MOD_RES (16)..(17)..(18)..(19)..(20): Xaa is A or G
  MOD_RES (21)..(22)..(23)..(24): Xaa is A or G or absent
RXGXGEVVMESMEGIXXXXXXXXXMIQMTINSLETPVXXAKPI

SEQ ID NO: 26503 - protein, 42 aa, Artificial Sequence
  Non-cyclic GFR-binding peptide
  MOD_RES (2)..(4)..(36)..(37): Xaa is C or S
HXGXSRVVMNVQVEKIVNSSDDVKAVKVSRLKTPAXXPKPVY

SEQ ID NO: 26504 - protein, 35 aa, Artificial Sequence
  Non-cyclic GFR-binding peptide
  MOD_RES (31)..(32): Xaa is C or S
SKVIMSMEGIIKPTKGIMIQITINSLDQSVXXPSA

SEQ ID NO: 26505 - protein, 43 aa, Artificial Sequence
  Non-cyclic GFR-binding peptide
  MOD_RES (2)..(4)..(41): Xaa is C or S
AXAXELHEELRNSLQELKPKKRVYEYYLVTLPEHHVRSPQXKV

SEQ ID NO: 26506 - protein, 34 aa, Artificial Sequence
  Non-cyclic GFR-binding peptide
  MOD_RES (31)..(32): Xaa is C or S
RVVMNVQVEKIVNSSDDVKAVKVSRLQTPAXXPK

SEQ ID NO: 26507 - protein, 35 aa, Artificial Sequence
  Non-cyclic GFR-binding peptide
  MOD_RES (1)..(3)..(34)..(35): Xaa is C or S
XKXSKVIMVQVEKIKPTKGIVKAIKVSRLDQSVXX

SEQ ID NO: 26508 - protein, 40 aa, Artificial Sequence
  Non-cyclic GFR-binding peptide
  MOD_RES (2)..(39): Xaa is C or S
  MOD_RES (15)..(16)..(17)..(18)..(19): Xaa is A or G
  MOD_RES (20)..(21)..(22)..(23): Xaa is A or G or absent
AXELHEELRNSLQEXXXXXXXXXYYLVTLPEHHVRSPQXK

SEQ ID NO: 26509 - protein, 42 aa, Artificial Sequence
  Non-cyclic GFR-binding peptide
  MOD_RES (2)..(4)..(37)..(38): Xaa is C or S
  MOD_RES (15)..(16)..(17)..(18)..(19): Xaa is A or G
  MOD_RES (20)..(21)..(22)..(23): Xaa is A or G or absent
SXKXSRVIMVQVEKXXXXXXXXXVKAIKVSRLAQPVXXPAAS

SEQ ID NO: 26510 - protein, 37 aa, Artificial Sequence
  Non-cyclic GFR-binding peptide
  MOD_RES (1)..(33)..(34): Xaa is C or S
XGEVVMEVQVEKVVKDYEDVKAMKVSRLETPVXXAKP

SEQ ID NO: 26511 - protein, 34 aa, Artificial Sequence
  Non-cyclic GFR-binding peptide
  MOD_RES (32)..(33): Xaa is C or S
SRVVMNVTAKKIVNSSDDIKRVQVPRLKTPAXXP

SEQ ID NO: 26512 - protein, 43 aa, Artificial Sequence
  Non-cyclic GFR-binding peptide
  MOD_RES (1)..(3)..(37)..(38): Xaa is C or S
  MOD_RES (15)..(16)..(17)..(18)..(19): Xaa is A or G
  MOD_RES (20)..(21)..(22)..(23): Xaa is A or G or absent
XGXGEVVMDSMEGIXXXXXXXXXMIQMTINSLETPVXXAKPIK

SEQ ID NO: 26513 - protein, 41 aa, Artificial Sequence
  Non-cyclic GFR-binding peptide
  MOD_RES (1)..(3)..(37): Xaa is C or S
  MOD_RES (15)..(16)..(17)..(18)..(19): Xaa is A or G
  MOD_RES (20)..(21)..(22)..(23): Xaa is A or G or absent
XGXSRVVMNSMEGIXXXXXXXXXMIQVTINSLKTPAXTPKT

SEQ ID NO: 26514 - protein, 36 aa, Artificial Sequence
  Non-cyclic GFR-binding peptide
  MOD_RES (31)..(32): Xaa is C or S
RVVMNVQVEKIVNSSDDVKAVKVSRLQTPAXXPKPV

SEQ ID NO: 26515 - protein, 42 aa, Artificial Sequence
  Non-cyclic GFR-binding peptide
  MOD_RES (1)..(38): Xaa is C or S
XALHDELTNSLQEFIPKKRVIEYYVVPLPELQVQTPRXQVNR

SEQ ID NO: 26516 - protein, 33 aa, Artificial Sequence
  Non-cyclic GFR-binding peptide
  MOD_RES (33)..(33): Xaa is C or S
NHQLFNSLQEHQGQHPKIRYYVMPLPEEETPVX

SEQ ID NO: 26517 - protein, 37 aa, Artificial Sequence
  Non-cyclic GFR-binding peptide
  MOD_RES (2)..(36)..(37): Xaa is C or S
  MOD_RES (14)..(15)..(16)..(17)..(18): Xaa is A or G
  MOD_RES (19)..(20)..(21)..(22): Xaa is A or G or absent
GXGEVVMEVQVEKXXXXXXXXXVKAMKVSRLETPVXX

SEQ ID NO: 26518 - protein, 33 aa, Artificial Sequence
  Non-cyclic GFR-binding peptide
LHDELTNSLQEFIPKKRVIEYYLVTLPELQVQT

SEQ ID NO: 26519 - protein, 35 aa, Artificial Sequence
  Non-cyclic GFR-binding peptide
  MOD_RES (33)..(34): Xaa is C or S
  MOD_RES (11)..(12)..(13)..(14)..(15): Xaa is A or G
  MOD_RES (16)..(17)..(18)..(19): Xaa is A or G or absent
SRVIMVQVEKXXXXXXXXXVKAIKVSRLAQPVXXP

SEQ ID NO: 26520 - protein, 40 aa, Artificial Sequence
  Non-cyclic GFR-binding peptide
  MOD_RES (37)..(37): Xaa is C or S
  MOD_RES (13)..(14)..(15)..(16)..(17): Xaa is A or G
  MOD_RES (18)..(19)..(20)..(21): Xaa is A or G or absent
ELHEELRNSLQEXXXXXXXXXYYLVTLPEHHVRSPQXKVS

SEQ ID NO: 26521 - protein, 39 aa, Artificial Sequence
  Non-cyclic GFR-binding peptide
  MOD_RES (2)..(4)..(38): Xaa is C or S
  MOD_RES (16)..(17)..(18)..(19)..(20): Xaa is A or G
  MOD_RES (21)..(22)..(23)..(24): Xaa is A or G or absent
HXGXSRVVMNVQVEKXXXXXXXXXVKAVKVSRLKTPAXT

SEQ ID NO: 26522 - protein, 39 aa, Artificial Sequence
  Non-cyclic GFR-binding peptide
  MOD_RES (1)..(3)..(35)..(36): Xaa is C or S
XGXARVVMNVQVEKIVNSSDDVKAVKVSRLQTPAXXPKP

SEQ ID NO: 26523 - protein, 39 aa, Artificial Sequence
  Non-cyclic GFR-binding peptide
  MOD_RES (2)..(4): Xaa is C or S
EXKXALHDELTNSLQEFIPKKRVIEYYVVPLPELQVQTP

SEQ ID NO: 26524 - protein, 34 aa, Artificial Sequence
  Non-cyclic GFR-binding peptide
  MOD_RES (2)..(33)..(34): Xaa is C or S
KXSKVVMVTAKKVKPTRGVIKRIQVPRLDQPVXX

SEQ ID NO: 26525 - protein, 35 aa, Artificial Sequence
  Non-cyclic GFR-binding peptide
  MOD_RES (1)..(32)..(33): Xaa is C or S
XSKVVMSMEGIVKPTRGVMIQITINSLDQPVXXPS

SEQ ID NO: 26526 - protein, 41 aa, Artificial Sequence
  Non-cyclic GFR-binding peptide
  MOD_RES (1)..(3)..(37)..(38): Xaa is C or S
  MOD_RES (15)..(16)..(17)..(18)..(19): Xaa is A or G
  MOD_RES (20)..(21)..(22)..(23): Xaa is A or G or absent
XGXGEVVMDVTAKKXXXXXXXXXIKRMQVPRLETPVXXAKP

SEQ ID NO: 26527 - protein, 41 aa, Artificial Sequence
  Non-cyclic GFR-binding peptide
  MOD_RES (2)..(4)..(38)..(39): Xaa is C or S
  MOD_RES (16)..(17)..(18)..(19)..(20): Xaa is A or G
  MOD_RES (21)..(22)..(23)..(24): Xaa is A or G or absent
RXGXGEVVMDVTAKKXXXXXXXXXIKRMQVPRLETPVXXAK

SEQ ID NO: 26528 - protein, 37 aa, Artificial Sequence
  Non-cyclic GFR-binding peptide
  MOD_RES (1)..(33)..(34): Xaa is C or S
XSRVVMNVQVEKIVNSSDDVKAVKVSRLKTPAXXPKP

SEQ ID NO: 26529 - protein, 34 aa, Artificial Sequence
  Non-cyclic GFR-binding peptide
  MOD_RES (1)..(33)..(34): Xaa is C or S
XSRVVMNVQVEKIVNSSDDVKAVKVSRLKTPAXX

SEQ ID NO: 26530 - protein, 32 aa, Artificial Sequence
  Non-cyclic GFR-binding peptide
  MOD_RES (32)..(32): Xaa is C or S
GEVVMDSMEGIVVKENEDMIQMTINSLETPVX

SEQ ID NO: 26531 - protein, 38 aa, Artificial Sequence
  Non-cyclic GFR-binding peptide
  MOD_RES (1)..(35)..(36): Xaa is C or S
  MOD_RES (13)..(14)..(15)..(16)..(17): Xaa is A or G
  MOD_RES (18)..(19)..(20)..(21): Xaa is A or G or absent
XGEVVMEVTAKKXXXXXXXXXIKRMQVPRLETPVXXAK

SEQ ID NO: 26532 - protein, 36 aa, Artificial Sequence
  Non-cyclic GFR-binding peptide
  MOD_RES (32)..(33): Xaa is C or S
SRVVMNVQVEKIVNSSDDVKAVKVSRLKTPAXXPKP

SEQ ID NO: 26533 - protein, 39 aa, Artificial Sequence
  Non-cyclic GFR-binding peptide
  MOD_RES (1)..(35)..(36): Xaa is C or S
  MOD_RES (13)..(14)..(15)..(16)..(17): Xaa is A or G
  MOD_RES (18)..(19)..(20)..(21): Xaa is A or G or absent
XGEVVMDSMEGIXXXXXXXXXMIQMTINSLETPVXXAKP

SEQ ID NO: 26534 - protein, 44 aa, Artificial Sequence
  Non-cyclic GFR-binding peptide
  MOD_RES (2)..(4)..(41): Xaa is C or S
EXKXALHDELTNSLQEFIPKKRVIEYYLVTLPELQVQTPRXQVN

SEQ ID NO: 26535 - protein, 33 aa, Artificial Sequence
  Non-cyclic GFR-binding peptide
  MOD_RES (31)..(32): Xaa is C or S
RVVMNVTAKKIVNSSDDIKRVQVPRLQTPAXXP

SEQ ID NO: 26536 - protein, 38 aa, Artificial Sequence
  Non-cyclic GFR-binding peptide
  MOD_RES (33)..(33): Xaa is C or S
  MOD_RES (11)..(12)..(13)..(14)..(15): Xaa is A or G
  MOD_RES (16)..(17)..(18)..(19): Xaa is A or G or absent
RVVMNVTAKKXXXXXXXXXIKRVQVPRLKTPAXTPKTV

SEQ ID NO: 26537 - protein, 34 aa, Artificial Sequence
  Non-cyclic GFR-binding peptide
  MOD_RES (1)..(33)..(34): Xaa is C or S
XGEVVMDSMEGIVVKENEDMIQMTINSLETPVXX

SEQ ID NO: 26538 - protein, 38 aa, Artificial Sequence
  Non-cyclic GFR-binding peptide
  MOD_RES (34)..(35): Xaa is C or S
  MOD_RES (12)..(13)..(14)..(15)..(16): Xaa is A or G
  MOD_RES (17)..(18)..(19)..(20): Xaa is A or G or absent
ARVVMNVQVEKXXXXXXXXXVKAVKVSRLQTPAXXPKP

SEQ ID NO: 26539 - protein, 39 aa, Artificial Sequence
  Non-cyclic GFR-binding peptide
  MOD_RES (2)..(4): Xaa is C or S
  MOD_RES (17)..(18)..(19)..(20)..(21): Xaa is A or G
  MOD_RES (22)..(23)..(24)..(25): Xaa is A or G or absent
AXAXELHEELRNSLQEXXXXXXXXXYYLVTLPEHHVRSP

SEQ ID NO: 26540 - protein, 35 aa, Artificial Sequence
  Non-cyclic GFR-binding peptide
  MOD_RES (1)..(3)..(35): Xaa is C or S
XGXGEVVMEVTAKKVVKDYEDIKRMQVPRLETPVX

SEQ ID NO: 26541 - protein, 39 aa, Artificial Sequence
  Non-cyclic GFR-binding peptide
  MOD_RES (1)..(3)..(37)..(38): Xaa is C or S
  MOD_RES (15)..(16)..(17)..(18)..(19): Xaa is A or G
  MOD_RES (20)..(21)..(22)..(23): Xaa is A or G or absent
XGXSRVVMNVQVEKXXXXXXXXXVKAVKVSRLKTPAXXP

SEQ ID NO: 26542 - protein, 42 aa, Artificial Sequence
  Non-cyclic GFR-binding peptide
  MOD_RES (1)..(3)..(37)..(38): Xaa is C or S
  MOD_RES (15)..(16)..(17)..(18)..(19): Xaa is A or G
  MOD_RES (20)..(21)..(22)..(23): Xaa is A or G or absent
XGXARVVMNSMEGIXXXXXXXXXMIQVTINSLQTPAXXPKPV

SEQ ID NO: 26543 - protein, 39 aa, Artificial Sequence
  Non-cyclic GFR-binding peptide
  MOD_RES (36)..(36): Xaa is C or S
LHDELTNSLQEFIPKKRVIEYYVVPLPELQVQTPRXQVN

SEQ ID NO: 26544 - protein, 36 aa, Artificial Sequence
  Non-cyclic GFR-binding peptide
  MOD_RES (2)..(34)..(35): Xaa is C or S
GXGEVVMESMEGIVVKDYEDMIQMTINSLETPVXXA

SEQ ID NO: 26545 - protein, 37 aa, Artificial Sequence
  Non-cyclic GFR-binding peptide
  MOD_RES (33)..(34): Xaa is C or S
  MOD_RES (11)..(12)..(13)..(14)..(15): Xaa is A or G
  MOD_RES (16)..(17)..(18)..(19): Xaa is A or G or absent
SKVIMVTAKKXXXXXXXXXIKRIQVPRLDQSVXXPSA

SEQ ID NO: 26546 - protein, 36 aa, Artificial Sequence
  Non-cyclic GFR-binding peptide
  MOD_RES (34)..(35): Xaa is C or S
  MOD_RES (12)..(13)..(14)..(15)..(16): Xaa is A or G
  MOD_RES (17)..(18)..(19)..(20): Xaa is A or G or absent
ARVVMNSMEGIXXXXXXXXXMIQVTINSLQTPAXXP

SEQ ID NO: 26547 - protein, 35 aa, Artificial Sequence
  Non-cyclic GFR-binding peptide
  MOD_RES (1)..(3)..(34)..(35): Xaa is C or S
XKXSKVVMVTAKKVKPTRGVIKRIQVPRLDQPVXX

SEQ ID NO: 26548 - protein, 34 aa, Artificial Sequence
  Non-cyclic GFR-binding peptide
  MOD_RES (31)..(32): Xaa is C or S
SKVIMVTAKKIKPTKGIIKRIQVPRLDQSVXXPS

SEQ ID NO: 26549 - protein, 39 aa, Artificial Sequence
  Non-cyclic GFR-binding peptide
  MOD_RES (1)..(3)..(36)..(37): Xaa is C or S
  MOD_RES (14)..(15)..(16)..(17)..(18): Xaa is A or G
  MOD_RES (19)..(20)..(21)..(22): Xaa is A or G or absent
XKXSKVIMVTAKKXXXXXXXXXIKRIQVPRLDQSVXXPS

SEQ ID NO: 26550 - protein, 40 aa, Artificial Sequence
  Non-cyclic GFR-binding peptide
  MOD_RES (2)..(35)..(36): Xaa is C or S
  MOD_RES (13)..(14)..(15)..(16)..(17): Xaa is A or G
  MOD_RES (18)..(19)..(20)..(21): Xaa is A or G or absent
KXSKVVMSMEGIXXXXXXXXXMIQITINSLDQPVXXPSAS

SEQ ID NO: 26551 - protein, 38 aa, Artificial Sequence
  Non-cyclic GFR-binding peptide
  MOD_RES (1)..(34)..(35): Xaa is C or S
  MOD_RES (12)..(13)..(14)..(15)..(16): Xaa is A or G
  MOD_RES (17)..(18)..(19)..(20): Xaa is A or G or absent
XSKVIMVTAKKXXXXXXXXXIKRIQVPRLDQSVXXPSA

SEQ ID NO: 26552 - protein, 36 aa, Artificial Sequence
  Non-cyclic GFR-binding peptide
  MOD_RES (1)..(3)..(35)..(36): Xaa is C or S
XGXARVVMNSMEGIIVNSSDDMIQVTINSLQTPAXX

SEQ ID NO: 26553 - protein, 42 aa, Artificial Sequence
  Non-cyclic GFR-binding peptide
  MOD_RES (2)..(39): Xaa is C or S
AXELHEELRNSLQELKPKKRVYEYYLVTLPEHHVRSPQXKVS

SEQ ID NO: 26554 - protein, 39 aa, Artificial Sequence
  Non-cyclic GFR-binding peptide
  MOD_RES (34)..(34): Xaa is C or S
  MOD_RES (12)..(13)..(14)..(15)..(16): Xaa is A or G
  MOD_RES (17)..(18)..(19)..(20): Xaa is A or G or absent
KNHQLFNSLQEXXXXXXXXXYYVMPLPEEETPVXELGED

SEQ ID NO: 26555 - protein, 35 aa, Artificial Sequence
  Non-cyclic GFR-binding peptide
  MOD_RES (34)..(35): Xaa is C or S
  MOD_RES (12)..(13)..(14)..(15)..(16): Xaa is A or G
  MOD_RES (17)..(18)..(19)..(20): Xaa is A or G or absent
ARVVMNVQVEKXXXXXXXXXVKAVKVSRLQTPAXX

SEQ ID NO: 26556 - protein, 40 aa, Artificial Sequence
  Non-cyclic GFR-binding peptide
  MOD_RES (2)..(4)..(36)..(37): Xaa is C or S
HXGXARVVMNVQVEKIVNSSDDVKAVKVSRLQTPAXXPKP

SEQ ID NO: 26557 - protein, 34 aa, Artificial Sequence
  Non-cyclic GFR-binding peptide
  MOD_RES (2)..(34): Xaa is C or S
GXARVVMNVQVEKIVNSSDDVKAVKVSRLQTPAX

SEQ ID NO: 26558 - protein, 37 aa, Artificial Sequence
  Non-cyclic GFR-binding peptide
  MOD_RES (1)..(3)..(35): Xaa is C or S
XGXSRVVMNVTAKKIVNSSDDIKRVQVPRLKTPAXTP

SEQ ID NO: 26559 - protein, 35 aa, Artificial Sequence
  Non-cyclic GFR-binding peptide
  MOD_RES (1)..(1): Xaa is C or S
  MOD_RES (14)..(15)..(16)..(17)..(18): Xaa is A or G
  MOD_RES (19)..(20)..(21)..(22): Xaa is A or G or absent
XELHEELRNSLQEXXXXXXXXXYYLVTLPEHHVRS

SEQ ID NO: 26560 - protein, 41 aa, Artificial Sequence
  Non-cyclic GFR-binding peptide
  MOD_RES (1)..(3)..(35)..(36): Xaa is C or S
XGXARVVMNVTAKKIVNSSDDIKRVQVPRLQTPAXXPKPVT

SEQ ID NO: 26561 - protein, 36 aa, Artificial Sequence
  Non-cyclic GFR-binding peptide
  MOD_RES (31)..(32): Xaa is C or S
EVVMDSMEGIVVKENEDMIQMTINSLETPVXXAKPI

SEQ ID NO: 26562 - protein, 40 aa, Artificial Sequence
  Non-cyclic GFR-binding peptide
  MOD_RES (2)..(4)..(38)..(39): Xaa is C or S
  MOD_RES (16)..(17)..(18)..(19)..(20): Xaa is A or G
  MOD_RES (21)..(22)..(23)..(24): Xaa is A or G or absent
RXGXGEVVMDVTAKKXXXXXXXXXIKRMQVPRLETPVXXA

SEQ ID NO: 26563 - protein, 41 aa, Artificial Sequence
  Non-cyclic GFR-binding peptide
  MOD_RES (2)..(39): Xaa is C or S
  MOD_RES (15)..(16)..(17)..(18)..(19): Xaa is A or G
  MOD_RES (20)..(21)..(22)..(23): Xaa is A or G or absent
AXELHEELRNSLQEXXXXXXXXXYYVVPLPEHHVRSPQXKV

SEQ ID NO: 26564 - protein, 37 aa, Artificial Sequence
  Non-cyclic GFR-binding peptide
  MOD_RES (2)..(35)..(36): Xaa is C or S
  MOD_RES (13)..(14)..(15)..(16)..(17): Xaa is A or G
  MOD_RES (18)..(19)..(20)..(21): Xaa is A or G or absent
KXSKVIMVTAKKXXXXXXXXXIKRIQVPRLDQSVXXP

SEQ ID NO: 26565 - protein, 34 aa, Artificial Sequence
  Non-cyclic GFR-binding peptide
  MOD_RES (1)..(3)..(34): Xaa is C or S
XKXSRVIMSMEGIVKPKRGVMIQITINSLAQPVX

SEQ ID NO: 26566 - protein, 39 aa, Artificial Sequence
  Non-cyclic GFR-binding peptide
  MOD_RES (2)..(34)..(35): Xaa is C or S
GXARVVMNSMEGIIVNSSDDMIQVTINSLQTPAXXPKPV

SEQ ID NO: 26567 - protein, 42 aa, Artificial Sequence
  Non-cyclic GFR-binding peptide
  MOD_RES (1)..(3)..(36)..(37): Xaa is C or S
  MOD_RES (14)..(15)..(16)..(17)..(18): Xaa is A or G
  MOD_RES (19)..(20)..(21)..(22): Xaa is A or G or absent
XKXSKVIMVTAKKXXXXXXXXXIKRIQVPRLDQSVXXPSASA

SEQ ID NO: 26568 - protein, 36 aa, Artificial Sequence
  Non-cyclic GFR-binding peptide
  MOD_RES (1)..(34)..(35): Xaa is C or S
  MOD_RES (12)..(13)..(14)..(15)..(16): Xaa is A or G
  MOD_RES (17)..(18)..(19)..(20): Xaa is A or G or absent
XSRVIMSMEGIXXXXXXXXXMIQITINSLAQPVXXP

SEQ ID NO: 26569 - protein, 44 aa, Artificial Sequence
  Non-cyclic GFR-binding peptide
  MOD_RES (2)..(4)..(41): Xaa is C or S
AXAXELHEELRNSLQELKPKKRVYEYYLVTLPEHHVRSPQXKVS

SEQ ID NO: 26570 - protein, 40 aa, Artificial Sequence
  Non-cyclic GFR-binding peptide
  MOD_RES (1)..(3)..(37)..(38): Xaa is C or S
  MOD_RES (15)..(16)..(17)..(18)..(19): Xaa is A or G
  MOD_RES (20)..(21)..(22)..(23): Xaa is A or G or absent
XGXGEVVMDSMEGIXXXXXXXXXMIQMTINSLETPVXXAK

SEQ ID NO: 26571 - protein, 33 aa, Artificial Sequence
  Non-cyclic GFR-binding peptide
  MOD_RES (33)..(33): Xaa is C or S
  MOD_RES (11)..(12)..(13)..(14)..(15): Xaa is A or G
  MOD_RES (16)..(17)..(18)..(19): Xaa is A or G or absent
EVVMDSMEGIXXXXXXXXXMIQMTINSLETPVX

SEQ ID NO: 26572 - protein, 40 aa, Artificial Sequence
  Non-cyclic GFR-binding peptide
  MOD_RES (1)..(3)..(35)..(36): Xaa is C or S
XGXGEVVMEVQVEKVVKDYEDVKAMKVSRLETPVXXAKPI

SEQ ID NO: 26573 - protein, 34 aa, Artificial Sequence
  Non-cyclic GFR-binding peptide
  MOD_RES (13)..(14)..(15)..(16)..(17): Xaa is A or G
  MOD_RES (18)..(19)..(20)..(21): Xaa is A or G or absent
ELHEELRNSLQEXXXXXXXXXYYLVTLPEHHVRS

SEQ ID NO: 26574 - protein, 42 aa, Artificial Sequence
  Non-cyclic GFR-binding peptide
  MOD_RES (2)..(36)..(37): Xaa is C or S
  MOD_RES (14)..(15)..(16)..(17)..(18): Xaa is A or G
  MOD_RES (19)..(20)..(21)..(22): Xaa is A or G or absent
GXGEVVMDVTAKKXXXXXXXXXIKRMQVPRLETPVXXAKPIK

SEQ ID NO: 26575 - protein, 35 aa, Artificial Sequence
  Non-cyclic GFR-binding peptide
  MOD_RES (1)..(35): Xaa is C or S
  MOD_RES (13)..(14)..(15)..(16)..(17): Xaa is A or G
  MOD_RES (18)..(19)..(20)..(21): Xaa is A or G or absent
XSRVVMNVQVEKXXXXXXXXXVKAVKVSRLKTPAX

SEQ ID NO: 26576 - protein, 35 aa, Artificial Sequence
  Non-cyclic GFR-binding peptide
  MOD_RES (2)..(33)..(34): Xaa is C or S
KXSRVIMVTAKKVKPKRGVIKRIQVPRLAQPVXXP

SEQ ID NO: 26577 - protein, 35 aa, Artificial Sequence
  Non-cyclic GFR-binding peptide
  MOD_RES (13)..(14)..(15)..(16)..(17): Xaa is A or G
  MOD_RES (18)..(19)..(20)..(21): Xaa is A or G or absent
ELHEELRNSLQEXXXXXXXXXYYVVPLPEHHVRSP

SEQ ID NO: 26578 - protein, 39 aa, Artificial Sequence
  Non-cyclic GFR-binding peptide
  MOD_RES (1)..(3): Xaa is C or S
XAXELHEELRNSLQELKPKKRVYEYYLVTLPEHHVRSPQ

SEQ ID NO: 26579 - protein, 42 aa, Artificial Sequence
  Non-cyclic GFR-binding peptide
  MOD_RES (1)..(3)..(36)..(37): Xaa is C or S
  MOD_RES (14)..(15)..(16)..(17)..(18): Xaa is A or G
  MOD_RES (19)..(20)..(21)..(22): Xaa is A or G or absent
XKXSRVIMVTAKKXXXXXXXXXIKRIQVPRLAQPVXXPAASA

SEQ ID NO: 26580 - protein, 36 aa, Artificial Sequence
  Non-cyclic GFR-binding peptide
  MOD_RES (1)..(33): Xaa is C or S
XSRVVMNVTAKKIVNSSDDIKRVQVPRLKTPAXTPK

SEQ ID NO: 26581 - protein, 41 aa, Artificial Sequence
  Non-cyclic GFR-binding peptide
  MOD_RES (2)..(4)..(36)..(37): Xaa is C or S
RXGXGEVVMDSMEGIVVKENEDMIQMTINSLETPVXXAKPI

SEQ ID NO: 26582 - protein, 39 aa, Artificial Sequence
  Non-cyclic GFR-binding peptide
  MOD_RES (2)..(4): Xaa is C or S
  MOD_RES (17)..(18)..(19)..(20)..(21): Xaa is A or G
  MOD_RES (22)..(23)..(24)..(25): Xaa is A or G or absent
EXKXALHDELTNSLQEXXXXXXXXXYYVVPLPELQVQTP

SEQ ID NO: 26583 - protein, 35 aa, Artificial Sequence
  Non-cyclic GFR-binding peptide
  MOD_RES (1)..(3)..(35): Xaa is C or S
XGXGEVVMDVTAKKVVKENEDIKRMQVPRLETPVX

SEQ ID NO: 26584 - protein, 42 aa, Artificial Sequence
  Non-cyclic GFR-binding peptide
  MOD_RES (2)..(4)..(38): Xaa is C or S
  MOD_RES (16)..(17)..(18)..(19)..(20): Xaa is A or G
  MOD_RES (21)..(22)..(23)..(24): Xaa is A or G or absent
HXGXSRVVMNSMEGIXXXXXXXXXMIQVTINSLKTPAXTPKT

SEQ ID NO: 26585 - protein, 35 aa, Artificial Sequence
  Non-cyclic GFR-binding peptide
  MOD_RES (33)..(33): Xaa is C or S
  MOD_RES (11)..(12)..(13)..(14)..(15): Xaa is A or G
  MOD_RES (16)..(17)..(18)..(19): Xaa is A or G or absent
RVVMNVQVEKXXXXXXXXXVKAVKVSRLKTPAXTP

SEQ ID NO: 26586 - protein, 39 aa, Artificial Sequence
  Non-cyclic GFR-binding peptide
  MOD_RES (1)..(35): Xaa is C or S
  MOD_RES (13)..(14)..(15)..(16)..(17): Xaa is A or G
  MOD_RES (18)..(19)..(20)..(21): Xaa is A or G or absent
XKNHQLFNSLQEXXXXXXXXXYYLMTLPEEETPVXELGE

SEQ ID NO: 26587 - protein, 37 aa, Artificial Sequence
  Non-cyclic GFR-binding peptide
  MOD_RES (1)..(3)..(37): Xaa is C or S
  MOD_RES (15)..(16)..(17)..(18)..(19): Xaa is A or G
  MOD_RES (20)..(21)..(22)..(23): Xaa is A or G or absent
XGXGEVVMEVQVEKXXXXXXXXXVKAMKVSRLETPVX

SEQ ID NO: 26588 - protein, 35 aa, Artificial Sequence
  Non-cyclic GFR-binding peptide
  MOD_RES (31)..(32): Xaa is C or S
SRVIMVQVEKVKPKRGVVKAIKVSRLAQPVXXPAA

SEQ ID NO: 26589 - protein, 42 aa, Artificial Sequence
  Non-cyclic GFR-binding peptide
  MOD_RES (2)..(36)..(37): Xaa is C or S
  MOD_RES (14)..(15)..(16)..(17)..(18): Xaa is A or G
  MOD_RES (19)..(20)..(21)..(22): Xaa is A or G or absent
GXGEVVMESMEGIXXXXXXXXXMIQMTINSLETPVXXAKPIS

SEQ ID NO: 26590 - protein, 35 aa, Artificial Sequence
  Non-cyclic GFR-binding peptide
  MOD_RES (2)..(34)..(35): Xaa is C or S
GXSRVVMNSMEGIIVNSSDDMIQVTINSLKTPAXX

SEQ ID NO: 26591 - protein, 39 aa, Artificial Sequence
  Non-cyclic GFR-binding peptide
  MOD_RES (2)..(4)..(35)..(36): Xaa is C or S
SXKXSRVIMVQVEKVKPKRGVVKAIKVSRLAQPVXXPAA

SEQ ID NO: 26592 - protein, 40 aa, Artificial Sequence
  Non-cyclic GFR-binding peptide
  MOD_RES (1)..(3)..(36)..(37): Xaa is C or S
  MOD_RES (14)..(15)..(16)..(17)..(18): Xaa is A or G
  MOD_RES (19)..(20)..(21)..(22): Xaa is A or G or absent
XKXSRVIMVQVEKXXXXXXXXXVKAIKVSRLAQPVXXPAA

SEQ ID NO: 26593 - protein, 37 aa, Artificial Sequence
  Non-cyclic GFR-binding peptide
  MOD_RES (33)..(34): Xaa is C or S
  MOD_RES (11)..(12)..(13)..(14)..(15): Xaa is A or G
  MOD_RES (16)..(17)..(18)..(19): Xaa is A or G or absent
RVVMNVTAKKXXXXXXXXXIKRVQVPRLQTPAXXPKP

SEQ ID NO: 26594 - protein, 35 aa, Artificial Sequence
  Non-cyclic GFR-binding peptide
  MOD_RES (1)..(33): Xaa is C or S
XSRVVMNVQVEKIVNSSDDVKAVKVSRLKTPAXTP

SEQ ID NO: 26595 - protein, 32 aa, Artificial Sequence
  Non-cyclic GFR-binding peptide
  MOD_RES (11)..(12)..(13)..(14)..(15): Xaa is A or G
  MOD_RES (16)..(17)..(18)..(19): Xaa is A or G or absent
EVVMEVQVEKXXXXXXXXXVKAMKVSRLETPV

SEQ ID NO: 26596 - protein, 35 aa, Artificial Sequence
  Non-cyclic GFR-binding peptide
  MOD_RES (2)..(35): Xaa is C or S
  MOD_RES (13)..(14)..(15)..(16)..(17): Xaa is A or G
  MOD_RES (18)..(19)..(20)..(21): Xaa is A or G or absent
KXSKVVMVTAKKXXXXXXXXXIKRIQVPRLDQPVX

SEQ ID NO: 26597 - protein, 36 aa, Artificial Sequence
  Non-cyclic GFR-binding peptide
  MOD_RES (2)..(34): Xaa is C or S
GXSRVVMNVTAKKIVNSSDDIKRVQVPRLKTPAXTP

SEQ ID NO: 26598 - protein, 34 aa, Artificial Sequence
  Non-cyclic GFR-binding peptide
  MOD_RES (1)..(1): Xaa is C or S
  MOD_RES (13)..(14)..(15)..(16)..(17): Xaa is A or G
  MOD_RES (18)..(19)..(20)..(21): Xaa is A or G or absent
XGEVVMDVTAKKXXXXXXXXXIKRMQVPRLETPV

SEQ ID NO: 26599 - protein, 36 aa, Artificial Sequence
  Non-cyclic GFR-binding peptide
  MOD_RES (2)..(36): Xaa is C or S
  MOD_RES (14)..(15)..(16)..(17)..(18): Xaa is A or G
  MOD_RES (19)..(20)..(21)..(22): Xaa is A or G or absent
GXARVVMNSMEGIXXXXXXXXXMIQVTINSLQTPAX

SEQ ID NO: 26600 - protein, 34 aa, Artificial Sequence
  Non-cyclic GFR-binding peptide
  MOD_RES (1)..(34): Xaa is C or S
  MOD_RES (12)..(13)..(14)..(15)..(16): Xaa is A or G
  MOD_RES (17)..(18)..(19)..(20): Xaa is A or G or absent
XSKVIMVTAKKXXXXXXXXXIKRIQVPRLDQSVX

SEQ ID NO: 26601 - protein, 37 aa, Artificial Sequence
  Non-cyclic GFR-binding peptide
  MOD_RES (2)..(36)..(37): Xaa is C or S
  MOD_RES (14)..(15)..(16)..(17)..(18): Xaa is A or G
  MOD_RES (19)..(20)..(21)..(22): Xaa is A or G or absent
GXGEVVMEVTAKKXXXXXXXXXIKRMQVPRLETPVXX

SEQ ID NO: 26602 - protein, 33 aa, Artificial Sequence
  Non-cyclic GFR-binding peptide
  MOD_RES (1)..(33): Xaa is C or S
XARVVMNVTAKKIVNSSDDIKRVQVPRLQTPAX

SEQ ID NO: 26603 - protein, 35 aa, Artificial Sequence
  Non-cyclic GFR-binding peptide
  MOD_RES (1)..(33)..(34): Xaa is C or S
XGEVVMDSMEGIVVKENEDMIQMTINSLETPVXXA

SEQ ID NO: 26604 - protein, 42 aa, Artificial Sequence
  Non-cyclic GFR-binding peptide
  MOD_RES (1)..(3)..(40): Xaa is C or S
  MOD_RES (16)..(17)..(18)..(19)..(20): Xaa is A or G
  MOD_RES (21)..(22)..(23)..(24): Xaa is A or G or absent
XAXELHEELRNSLQEXXXXXXXXXYYVVPLPEHHVRSPQXKV

SEQ ID NO: 26605 - protein, 37 aa, Artificial Sequence
  Non-cyclic GFR-binding peptide
  MOD_RES (32)..(33): Xaa is C or S
ARVVMNVQVEKIVNSSDDVKAVKVSRLQTPAXXPKPV

SEQ ID NO: 26606 - protein, 36 aa, Artificial Sequence
  Non-cyclic GFR-binding peptide
  MOD_RES (36)..(36): Xaa is C or S
  MOD_RES (12)..(13)..(14)..(15)..(16): Xaa is A or G
  MOD_RES (17)..(18)..(19)..(20): Xaa is A or G or absent
LHEELRNSLQEXXXXXXXXXYYVVPLPEHHVRSPQX

SEQ ID NO: 26607 - protein, 36 aa, Artificial Sequence
  Non-cyclic GFR-binding peptide
  MOD_RES (2)..(34)..(35): Xaa is C or S
GXARVVMNVQVEKIVNSSDDVKAVKVSRLQTPAXXP

SEQ ID NO: 26608 - protein, 38 aa, Artificial Sequence
  Non-cyclic GFR-binding peptide
  MOD_RES (2)..(4)..(38): Xaa is C or S
  MOD_RES (16)..(17)..(18)..(19)..(20): Xaa is A or G
  MOD_RES (21)..(22)..(23)..(24): Xaa is A or G or absent
HXGXSRVVMNVQVEKXXXXXXXXXVKAVKVSRLKTPAX

SEQ ID NO: 26609 - protein, 42 aa, Artificial Sequence
  Non-cyclic GFR-binding peptide
  MOD_RES (2)..(4)..(37)..(38): Xaa is C or S
  MOD_RES (15)..(16)..(17)..(18)..(19): Xaa is A or G
  MOD_RES (20)..(21)..(22)..(23): Xaa is A or G or absent
SXKXSRVIMVTAKKXXXXXXXXXIKRIQVPRLAQPVXXPAAS

SEQ ID NO: 26610 - protein, 36 aa, Artificial Sequence
  Non-cyclic GFR-binding peptide
ALHDELTNSLQEFIPKKRVIEYYVVPLPELQVQTPR

SEQ ID NO: 26611 - protein, 33 aa, Artificial Sequence
  Non-cyclic GFR-binding peptide
  MOD_RES (1)..(33): Xaa is C or S
XGEVVMDVQVEKVVKENEDVKAMKVSRLETPVX

SEQ ID NO: 26612 - protein, 40 aa, Artificial Sequence
  Non-cyclic GFR-binding peptide
  MOD_RES (1)..(3)..(36)..(37): Xaa is C or S
  MOD_RES (14)..(15)..(16)..(17)..(18): Xaa is A or G
  MOD_RES (19)..(20)..(21)..(22): Xaa is A or G or absent
XKXSKVIMVQVEKXXXXXXXXXVKAIKVSRLDQSVXXPSA

SEQ ID NO: 26613 - protein, 37 aa, Artificial Sequence
  Non-cyclic GFR-binding peptide
  MOD_RES (2)..(34)..(35): Xaa is C or S
GXSRVVMNVTAKKIVNSSDDIKRVQVPRLKTPAXXPK

SEQ ID NO: 26614 - protein, 43 aa, Artificial Sequence
  Non-cyclic GFR-binding peptide
  MOD_RES (2)..(4)..(37)..(38): Xaa is C or S
  MOD_RES (15)..(16)..(17)..(18)..(19): Xaa is A or G
  MOD_RES (20)..(21)..(22)..(23): Xaa is A or G or absent
SXKXSKVIMVTAKKXXXXXXXXXIKRIQVPRLDQSVXXPSASA

SEQ ID NO: 26615 - protein, 39 aa, Artificial Sequence
  Non-cyclic GFR-binding peptide
  MOD_RES (1)..(38): Xaa is C or S
XELHEELRNSLQELKPKKRVYEYYVVPLPEHHVRSPQXK

SEQ ID NO: 26616 - protein, 38 aa, Artificial Sequence
  Non-cyclic GFR-binding peptide
  MOD_RES (1)..(3)..(37): Xaa is C or S
  MOD_RES (15)..(16)..(17)..(18)..(19): Xaa is A or G
  MOD_RES (20)..(21)..(22)..(23): Xaa is A or G or absent
XEXKNHQLFNSLQEXXXXXXXXXYYVMPLPEEETPVXE

SEQ ID NO: 26617 - protein, 41 aa, Artificial Sequence
  Non-cyclic GFR-binding peptide
  MOD_RES (2)..(4)..(36)..(37): Xaa is C or S
HXGXSRVVMNVQVEKIVNSSDDVKAVKVSRLKTPAXXPKPV

SEQ ID NO: 26618 - protein, 35 aa, Artificial Sequence
  Non-cyclic GFR-binding peptide
  MOD_RES (1)..(3)..(35): Xaa is C or S
XGXARVVMNVQVEKIVNSSDDVKAVKVSRLQTPAX

SEQ ID NO: 26619 - protein, 32 aa, Artificial Sequence
  Non-cyclic GFR-binding peptide
  MOD_RES (11)..(12)..(13)..(14)..(15): Xaa is A or G
  MOD_RES (16)..(17)..(18)..(19): Xaa is A or G or absent
SRVIMVQVEKXXXXXXXXXVKAIKVSRLAQPV

SEQ ID NO: 26620 - protein, 42 aa, Artificial Sequence
  Non-cyclic GFR-binding peptide
  MOD_RES (1)..(3)..(37)..(38): Xaa is C or S
  MOD_RES (15)..(16)..(17)..(18)..(19): Xaa is A or G
  MOD_RES (20)..(21)..(22)..(23): Xaa is A or G or absent
XGXGEVVMDVTAKKXXXXXXXXXIKRMQVPRLETPVXXAKPI

SEQ ID NO: 26621 - protein, 40 aa, Artificial Sequence
  Non-cyclic GFR-binding peptide
  MOD_RES (2)..(4)..(38): Xaa is C or S
  MOD_RES (16)..(17)..(18)..(19)..(20): Xaa is A or G
  MOD_RES (21)..(22)..(23)..(24): Xaa is A or G or absent
RXEXKNHQLFNSLQEXXXXXXXXXYYVMPLPEEETPVXEL

SEQ ID NO: 26622 - protein, 39 aa, Artificial Sequence
  Non-cyclic GFR-binding peptide
  MOD_RES (1)..(3)..(36)..(37): Xaa is C or S
  MOD_RES (14)..(15)..(16)..(17)..(18): Xaa is A or G
  MOD_RES (19)..(20)..(21)..(22): Xaa is A or G or absent
XKXSKVVMVTAKKXXXXXXXXXIKRIQVPRLDQPVXXPS

SEQ ID NO: 26623 - protein, 38 aa, Artificial Sequence
  Non-cyclic GFR-binding peptide
  MOD_RES (2)..(4)..(35)..(36): Xaa is C or S
SXKXSKVIMSMEGIIKPTKGIMIQITINSLDQSVXXPS

SEQ ID NO: 26624 - protein, 41 aa, Artificial Sequence
  Non-cyclic GFR-binding peptide
  MOD_RES (37)..(37): Xaa is C or S
  MOD_RES (13)..(14)..(15)..(16)..(17): Xaa is A or G
  MOD_RES (18)..(19)..(20)..(21): Xaa is A or G or absent
ALHDELTNSLQEXXXXXXXXXYYLVTLPELQVQTPRXQVNR

SEQ ID NO: 26625 - protein, 39 aa, Artificial Sequence
  Non-cyclic GFR-binding peptide
  MOD_RES (1)..(3)..(37)..(38): Xaa is C or S
  MOD_RES (15)..(16)..(17)..(18)..(19): Xaa is A or G
  MOD_RES (20)..(21)..(22)..(23): Xaa is A or G or absent
XGXSRVVMNVTAKKXXXXXXXXXIKRVQVPRLKTPAXXP

SEQ ID NO: 26626 - protein, 34 aa, Artificial Sequence
  Non-cyclic GFR-binding peptide
  MOD_RES (1)..(1): Xaa is C or S
XKNHQLFNSLQEHQGQHPKIRYYLMTLPEEETPV

SEQ ID NO: 26627 - protein, 41 aa, Artificial Sequence
  Non-cyclic GFR-binding peptide
  MOD_RES (1)..(3)..(37)..(38): Xaa is C or S
  MOD_RES (15)..(16)..(17)..(18)..(19): Xaa is A or G
  MOD_RES (20)..(21)..(22)..(23): Xaa is A or G or absent
XGXGEVVMDVQVEKXXXXXXXXXVKAMKVSRLETPVXXAKP

SEQ ID NO: 26628 - protein, 32 aa, Artificial Sequence
  Non-cyclic GFR-binding peptide
  MOD_RES (1)..(1): Xaa is C or S
XARVVMNSMEGIIVNSSDDMIQVTINSLQTPA

SEQ ID NO: 26629 - protein, 39 aa, Artificial Sequence
  Non-cyclic GFR-binding peptide
  MOD_RES (1)..(33)..(34): Xaa is C or S
XSRVVMNSMEGIIVNSSDDMIQVTINSLKTPAXXPKPVY

SEQ ID NO: 26630 - protein, 38 aa, Artificial Sequence
  Non-cyclic GFR-binding peptide
  MOD_RES (2)..(4)..(36)..(37): Xaa is C or S
HXGXSRVVMNSMEGIIVNSSDDMIQVTINSLKTPAXXP

SEQ ID NO: 26631 - protein, 39 aa, Artificial Sequence
  Non-cyclic GFR-binding peptide
  MOD_RES (2)..(36)..(37): Xaa is C or S
  MOD_RES (14)..(15)..(16)..(17)..(18): Xaa is A or G
  MOD_RES (19)..(20)..(21)..(22): Xaa is A or G or absent
GXGEVVMDVTAKKXXXXXXXXXIKRMQVPRLETPVXXAK

SEQ ID NO: 26632 - protein, 34 aa, Artificial Sequence
  Non-cyclic GFR-binding peptide
ALHDELTNSLQEFIPKKRVIEYYLVTLPELQVQT

SEQ ID NO: 26633 - protein, 40 aa, Artificial Sequence
  Non-cyclic GFR-binding peptide
  MOD_RES (34)..(34): Xaa is C or S
  MOD_RES (12)..(13)..(14)..(15)..(16): Xaa is A or G
  MOD_RES (17)..(18)..(19)..(20): Xaa is A or G or absent
KNHQLFNSLQEXXXXXXXXXYYVMPLPEEETPVXELGEDN

SEQ ID NO: 26634 - protein, 36 aa, Artificial Sequence
  Non-cyclic GFR-binding peptide
  MOD_RES (2)..(4): Xaa is C or S
  MOD_RES (15)..(16)..(17)..(18)..(19): Xaa is A or G
  MOD_RES (20)..(21)..(22)..(23): Xaa is A or G or absent
SXKXSKVVMVTAKKXXXXXXXXXIKRIQVPRLDQPV

SEQ ID NO: 26635 - protein, 41 aa, Artificial Sequence
  Non-cyclic GFR-binding peptide
  MOD_RES (2)..(36): Xaa is C or S
  MOD_RES (14)..(15)..(16)..(17)..(18): Xaa is A or G
  MOD_RES (19)..(20)..(21)..(22): Xaa is A or G or absent
EXKNHQLFNSLQEXXXXXXXXXYYVMPLPEEETPVXELGED

SEQ ID NO: 26636 - protein, 33 aa, Artificial Sequence
  Non-cyclic GFR-binding peptide
  MOD_RES (32)..(33): Xaa is C or S
SRVVMNSMEGIIVNSSDDMIQVTINSLKTPAXX

SEQ ID NO: 26637 - protein, 39 aa, Artificial Sequence
  Non-cyclic GFR-binding peptide
  MOD_RES (2)..(35)..(36): Xaa is C or S
  MOD_RES (13)..(14)..(15)..(16)..(17): Xaa is A or G
  MOD_RES (18)..(19)..(20)..(21): Xaa is A or G or absent
KXSKVIMVQVEKXXXXXXXXXVKAIKVSRLDQSVXXPSA

SEQ ID NO: 26638 - protein, 40 aa, Artificial Sequence
  Non-cyclic GFR-binding peptide
  MOD_RES (1)..(34)..(35): Xaa is C or S
  MOD_RES (12)..(13)..(14)..(15)..(16): Xaa is A or G
  MOD_RES (17)..(18)..(19)..(20): Xaa is A or G or absent
XSRVIMVQVEKXXXXXXXXXVKAIKVSRLAQPVXXPAASA

SEQ ID NO: 26639 - protein, 35 aa, Artificial Sequence
  Non-cyclic GFR-binding peptide
LHDELTNSLQEFIPKKRVIEYYVVPLPELQVQTPR

SEQ ID NO: 26640 - protein, 33 aa, Artificial Sequence
  Non-cyclic GFR-binding peptide
  MOD_RES (33)..(33): Xaa is C or S
NHQLFNSLQEHQGQHPKIRYYLMTLPEEETPVX

SEQ ID NO: 26641 - protein, 36 aa, Artificial Sequence
  Non-cyclic GFR-binding peptide
  MOD_RES (1)..(32)..(33): Xaa is C or S
XSKVVMVQVEKVKPTRGVVKAIKVSRLDQPVXXPSA

SEQ ID NO: 26642 - protein, 34 aa, Artificial Sequence
  Non-cyclic GFR-binding peptide
  MOD_RES (31)..(32): Xaa is C or S
RVVMNSMEGIIVNSSDDMIQVTINSLQTPAXXPK

SEQ ID NO: 26643 - protein, 40 aa, Artificial Sequence
  Non-cyclic GFR-binding peptide
  MOD_RES (36)..(36): Xaa is C or S
LHEELRNSLQELKPKKRVYEYYLVTLPEHHVRSPQXKVSS

SEQ ID NO: 26644 - protein, 37 aa, Artificial Sequence
  Non-cyclic GFR-binding peptide
  MOD_RES (1)..(33): Xaa is C or S
XSRVVMNVTAKKIVNSSDDIKRVQVPRLKTPAXTPKT

SEQ ID NO: 26645 - protein, 35 aa, Artificial Sequence
  Non-cyclic GFR-binding peptide
  MOD_RES (1)..(35): Xaa is C or S
XKNHQLFNSLQEHQGQHPKIRYYLMTLPEEETPVX

SEQ ID NO: 26646 - protein, 35 aa, Artificial Sequence
  Non-cyclic GFR-binding peptide
  MOD_RES (33)..(34): Xaa is C or S
  MOD_RES (11)..(12)..(13)..(14)..(15): Xaa is A or G
  MOD_RES (16)..(17)..(18)..(19): Xaa is A or G or absent
EVVMESMEGIXXXXXXXXXMIQMTINSLETPVXXA

SEQ ID NO: 26647 - protein, 38 aa, Artificial Sequence
  Non-cyclic GFR-binding peptide
  MOD_RES (33)..(34): Xaa is C or S
  MOD_RES (11)..(12)..(13)..(14)..(15): Xaa is A or G
  MOD_RES (16)..(17)..(18)..(19): Xaa is A or G or absent
EVVMDSMEGIXXXXXXXXXMIQMTINSLETPVXXAKPI

SEQ ID NO: 26648 - protein, 35 aa, Artificial Sequence
  Non-cyclic GFR-binding peptide
  MOD_RES (1)..(3): Xaa is C or S
  MOD_RES (14)..(15)..(16)..(17)..(18): Xaa is A or G
  MOD_RES (19)..(20)..(21)..(22): Xaa is A or G or absent
XKXSKVVMVTAKKXXXXXXXXXIKRIQVPRLDQPV

SEQ ID NO: 26649 - protein, 43 aa, Artificial Sequence
  Non-cyclic GFR-binding peptide
  MOD_RES (2)..(4)..(41): Xaa is C or S
EXKXALHDELTNSLQEFIPKKRVIEYYVVPLPELQVQTPRXQV

SEQ ID NO: 26650 - protein, 38 aa, Artificial Sequence
  Non-cyclic GFR-binding peptide
  MOD_RES (32)..(33): Xaa is C or S
SRVVMNVQVEKIVNSSDDVKAVKVSRLKTPAXXPKPVY

SEQ ID NO: 26651 - protein, 33 aa, Artificial Sequence
  Non-cyclic GFR-binding peptide
  MOD_RES (33)..(33): Xaa is C or S
  MOD_RES (11)..(12)..(13)..(14)..(15): Xaa is A or G
  MOD_RES (16)..(17)..(18)..(19): Xaa is A or G or absent
SKVVMSMEGIXXXXXXXXXMIQITINSLDQPVX

SEQ ID NO: 26652 - protein, 38 aa, Artificial Sequence
  Non-cyclic GFR-binding peptide
  MOD_RES (33)..(33): Xaa is C or S
  MOD_RES (11)..(12)..(13)..(14)..(15): Xaa is A or G
  MOD_RES (16)..(17)..(18)..(19): Xaa is A or G or absent
RVVMNVQVEKXXXXXXXXXVKAVKVSRLKTPAXTPKTV

SEQ ID NO: 26653 - protein, 42 aa, Artificial Sequence
  Non-cyclic GFR-binding peptide
  MOD_RES (1)..(3)..(37): Xaa is C or S
  MOD_RES (15)..(16)..(17)..(18)..(19): Xaa is A or G
  MOD_RES (20)..(21)..(22)..(23): Xaa is A or G or absent
XGXSRVVMNVTAKKXXXXXXXXXIKRVQVPRLKTPAXTPKTV

SEQ ID NO: 26654 - protein, 35 aa, Artificial Sequence
  Non-cyclic GFR-binding peptide
  MOD_RES (1)..(3): Xaa is C or S
  MOD_RES (14)..(15)..(16)..(17)..(18): Xaa is A or G
  MOD_RES (19)..(20)..(21)..(22): Xaa is A or G or absent
XKXSKVIMVQVEKXXXXXXXXXVKAIKVSRLDQSV

SEQ ID NO: 26655 - protein, 37 aa, Artificial Sequence
  Non-cyclic GFR-binding peptide
  MOD_RES (2)..(34)..(35): Xaa is C or S
GXGEVVMEVQVEKVVKDYEDVKAMKVSRLETPVXXAK

SEQ ID NO: 26656 - protein, 37 aa, Artificial Sequence
  Non-cyclic GFR-binding peptide
  MOD_RES (36)..(36): Xaa is C or S
LHDELTNSLQEFIPKKRVIEYYVVPLPELQVQTPRXQ

SEQ ID NO: 26657 - protein, 32 aa, Artificial Sequence
  Non-cyclic GFR-binding peptide
NHQLFNSLQEHQGQHPKIRYYVMPLPEEETPV

SEQ ID NO: 26658 - protein, 34 aa, Artificial Sequence
  Non-cyclic GFR-binding peptide
  MOD_RES (1)..(33)..(34): Xaa is C or S
XARVVMNVTAKKIVNSSDDIKRVQVPRLQTPAXX

SEQ ID NO: 26659 - protein, 41 aa, Artificial Sequence
  Non-cyclic GFR-binding peptide
  MOD_RES (1)..(38): Xaa is C or S
  MOD_RES (14)..(15)..(16)..(17)..(18): Xaa is A or G
  MOD_RES (19)..(20)..(21)..(22): Xaa is A or G or absent
XELHEELRNSLQEXXXXXXXXXYYLVTLPEHHVRSPQXKVS

SEQ ID NO: 26660 - protein, 35 aa, Artificial Sequence
  Non-cyclic GFR-binding peptide
  MOD_RES (1)..(3): Xaa is C or S
  MOD_RES (14)..(15)..(16)..(17)..(18): Xaa is A or G
  MOD_RES (19)..(20)..(21)..(22): Xaa is A or G or absent
XKXSRVIMVTAKKXXXXXXXXXIKRIQVPRLAQPV

SEQ ID NO: 26661 - protein, 39 aa, Artificial Sequence
  Non-cyclic GFR-binding peptide
  MOD_RES (1)..(38): Xaa is C or S
  MOD_RES (14)..(15)..(16)..(17)..(18): Xaa is A or G
  MOD_RES (19)..(20)..(21)..(22): Xaa is A or G or absent
XALHDELTNSLQEXXXXXXXXXYYVVPLPELQVQTPRXQ

SEQ ID NO: 26662 - protein, 32 aa, Artificial Sequence
  Non-cyclic GFR-binding peptide
  MOD_RES (31)..(32): Xaa is C or S
SKVIMVTAKKIKPTKGIIKRIQVPRLDQSVXX

SEQ ID NO: 26663 - protein, 33 aa, Artificial Sequence
  Non-cyclic GFR-binding peptide
  MOD_RES (1)..(3): Xaa is C or S
XKXSRVIMSMEGIVKPKRGVMIQITINSLAQPV

SEQ ID NO: 26664 - protein, 38 aa, Artificial Sequence
  Non-cyclic GFR-binding peptide
  MOD_RES (32)..(33): Xaa is C or S
GEVVMEVQVEKVVKDYEDVKAMKVSRLETPVXXAKPIS

SEQ ID NO: 26665 - protein, 40 aa, Artificial Sequence
  Non-cyclic GFR-binding peptide
  MOD_RES (1)..(3)..(37)..(38): Xaa is C or S
  MOD_RES (15)..(16)..(17)..(18)..(19): Xaa is A or G
  MOD_RES (20)..(21)..(22)..(23): Xaa is A or G or absent
XGXARVVMNVTAKKXXXXXXXXXIKRVQVPRLQTPAXXPK

SEQ ID NO: 26666 - protein, 38 aa, Artificial Sequence
  Non-cyclic GFR-binding peptide
  MOD_RES (32)..(32): Xaa is C or S
SRVVMNVQVEKIVNSSDDVKAVKVSRLKTPAXTPKTVH

SEQ ID NO: 26667 - protein, 37 aa, Artificial Sequence
  Non-cyclic GFR-binding peptide
  MOD_RES (1)..(35)..(36): Xaa is C or S
  MOD_RES (13)..(14)..(15)..(16)..(17): Xaa is A or G
  MOD_RES (18)..(19)..(20)..(21): Xaa is A or G or absent
XSRVVMNVTAKKXXXXXXXXXIKRVQVPRLKTPAXXP

SEQ ID NO: 26668 - protein, 38 aa, Artificial Sequence
  Non-cyclic GFR-binding peptide
  MOD_RES (1)..(3)..(37): Xaa is C or S
XEXKNHQLFNSLQEHQGQHPKIRYYLMTLPEEETPVXE

SEQ ID NO: 26669 - protein, 40 aa, Artificial Sequence
  Non-cyclic GFR-binding peptide
  MOD_RES (1)..(3)..(37): Xaa is C or S
  MOD_RES (15)..(16)..(17)..(18)..(19): Xaa is A or G
  MOD_RES (20)..(21)..(22)..(23): Xaa is A or G or absent
XEXKNHQLFNSLQEXXXXXXXXXYYLMTLPEEETPVXELG

SEQ ID NO: 26670 - protein, 38 aa, Artificial Sequence
  Non-cyclic GFR-binding peptide
  MOD_RES (1)..(3)..(37)..(38): Xaa is C or S
  MOD_RES (15)..(16)..(17)..(18)..(19): Xaa is A or G
  MOD_RES (20)..(21)..(22)..(23): Xaa is A or G or absent
XGXGEVVMESMEGIXXXXXXXXXMIQMTINSLETPVXX

SEQ ID NO: 26671 - protein, 36 aa, Artificial Sequence
  Non-cyclic GFR-binding peptide
  MOD_RES (1)..(3): Xaa is C or S
XEXKNHQLFNSLQEHQGQHPKIRYYLMTLPEEETPV

SEQ ID NO: 26672 - protein, 38 aa, Artificial Sequence
  Non-cyclic GFR-binding peptide
  MOD_RES (2)..(4): Xaa is C or S
AXAXELHEELRNSLQELKPKKRVYEYYLVTLPEHHVRS

SEQ ID NO: 26673 - protein, 31 aa, Artificial Sequence
  Non-cyclic GFR-binding peptide
  MOD_RES (1)..(1): Xaa is C or S
XSKVVMVTAKKVKPTRGVIKRIQVPRLDQPV

SEQ ID NO: 26674 - protein, 41 aa, Artificial Sequence
  Non-cyclic GFR-binding peptide
  MOD_RES (2)..(4)..(36)..(37): Xaa is C or S
RXGXGEVVMDVQVEKVVKENEDVKAMKVSRLETPVXXAKPI

SEQ ID NO: 26675 - protein, 39 aa, Artificial Sequence
  Non-cyclic GFR-binding peptide
  MOD_RES (33)..(34): Xaa is C or S
  MOD_RES (11)..(12)..(13)..(14)..(15): Xaa is A or G
  MOD_RES (16)..(17)..(18)..(19): Xaa is A or G or absent
RVVMNSMEGIXXXXXXXXXMIQVTINSLKTPAXXPKPVY

SEQ ID NO: 26676 - protein, 43 aa, Artificial Sequence
  Non-cyclic GFR-binding peptide
  MOD_RES (1)..(3)..(37)..(38): Xaa is C or S
  MOD_RES (15)..(16)..(17)..(18)..(19): Xaa is A or G
  MOD_RES (20)..(21)..(22)..(23): Xaa is A or G or absent
XGXARVVMNSMEGIXXXXXXXXXMIQVTINSLQTPAXXPKPVT

SEQ ID NO: 26677 - protein, 32 aa, Artificial Sequence
  Non-cyclic GFR-binding peptide
  MOD_RES (1)..(32): Xaa is C or S
XSKVIMVTAKKIKPTKGIIKRIQVPRLDQSVX

SEQ ID NO: 26678 - protein, 34 aa, Artificial Sequence
  Non-cyclic GFR-binding peptide
  MOD_RES (1)..(33): Xaa is C or S
XSRVVMNSMEGIIVNSSDDMIQVTINSLKTPAXT

SEQ ID NO: 26679 - protein, 35 aa, Artificial Sequence
  Non-cyclic GFR-binding peptide
  MOD_RES (2)..(4): Xaa is C or S
HXGXARVVMNSMEGIIVNSSDDMIQVTINSLQTPA

SEQ ID NO: 26680 - protein, 44 aa, Artificial Sequence
  Non-cyclic GFR-binding peptide
  MOD_RES (2)..(4)..(38): Xaa is C or S
  MOD_RES (16)..(17)..(18)..(19)..(20): Xaa is A or G
  MOD_RES (21)..(22)..(23)..(24): Xaa is A or G or absent
HXGXSRVVMNVTAKKXXXXXXXXXIKRVQVPRLKTPAXTPKTVH

SEQ ID NO: 26681 - protein, 40 aa, Artificial Sequence
  Non-cyclic GFR-binding peptide
  MOD_RES (2)..(34)..(35): Xaa is C or S
GXGEVVMEVQVEKVVKDYEDVKAMKVSRLETPVXXAKPIS

SEQ ID NO: 26682 - protein, 31 aa, Artificial Sequence
  Non-cyclic GFR-binding peptide
  MOD_RES (31)..(31): Xaa is C or S
EVVMDSMEGIVVKENEDMIQMTINSLETPVX

SEQ ID NO: 26683 - protein, 38 aa, Artificial Sequence
  Non-cyclic GFR-binding peptide
  MOD_RES (1)..(38): Xaa is C or S
XALHDELTNSLQEFIPKKRVIEYYLVTLPELQVQTPRX

SEQ ID NO: 26684 - protein, 39 aa, Artificial Sequence
  Non-cyclic GFR-binding peptide
  MOD_RES (1)..(34)..(35): Xaa is C or S
  MOD_RES (12)..(13)..(14)..(15)..(16): Xaa is A or G
  MOD_RES (17)..(18)..(19)..(20): Xaa is A or G or absent
XSKVVMVQVEKXXXXXXXXXVKAIKVSRLDQPVXXPSAS

SEQ ID NO: 26685 - protein, 38 aa, Artificial Sequence
  Non-cyclic GFR-binding peptide
  MOD_RES (34)..(35): Xaa is C or S
  MOD_RES (12)..(13)..(14)..(15)..(16): Xaa is A or G
  MOD_RES (17)..(18)..(19)..(20): Xaa is A or G or absent
SRVVMNVQVEKXXXXXXXXXVKAVKVSRLKTPAXXPKP

SEQ ID NO: 26686 - protein, 34 aa, Artificial Sequence
  Non-cyclic GFR-binding peptide
  MOD_RES (1)..(33): Xaa is C or S
XSRVVMNVTAKKIVNSSDDIKRVQVPRLKTPAXT

SEQ ID NO: 26687 - protein, 37 aa, Artificial Sequence
  Non-cyclic GFR-binding peptide
  MOD_RES (31)..(32): Xaa is C or S
RVVMNVTAKKIVNSSDDIKRVQVPRLQTPAXXPKPVT

SEQ ID NO: 26688 - protein, 42 aa, Artificial Sequence
  Non-cyclic GFR-binding peptide
  MOD_RES (2)..(4)..(38)..(39): Xaa is C or S
  MOD_RES (16)..(17)..(18)..(19)..(20): Xaa is A or G
  MOD_RES (21)..(22)..(23)..(24): Xaa is A or G or absent
HXGXSRVVMNVTAKKXXXXXXXXXIKRVQVPRLKTPAXXPKP

SEQ ID NO: 26689 - protein, 42 aa, Artificial Sequence
  Non-cyclic GFR-binding peptide
  MOD_RES (2)..(4)..(38): Xaa is C or S
  MOD_RES (16)..(17)..(18)..(19)..(20): Xaa is A or G
  MOD_RES (21)..(22)..(23)..(24): Xaa is A or G or absent
HXGXSRVVMNVQVEKXXXXXXXXXVKAVKVSRLKTPAXTPKT

SEQ ID NO: 26690 - protein, 37 aa, Artificial Sequence
  Non-cyclic GFR-binding peptide
  MOD_RES (2)..(4)..(36)..(37): Xaa is C or S
HXGXARVVMNSMEGIIVNSSDDMIQVTINSLQTPAXX

SEQ ID NO: 26691 - protein, 38 aa, Artificial Sequence
  Non-cyclic GFR-binding peptide
  MOD_RES (1)..(38): Xaa is C or S
  MOD_RES (14)..(15)..(16)..(17)..(18): Xaa is A or G
  MOD_RES (19)..(20)..(21)..(22): Xaa is A or G or absent
XALHDELTNSLQEXXXXXXXXXYYVVPLPELQVQTPRX

SEQ ID NO: 26692 - protein, 44 aa, Artificial Sequence
  Non-cyclic GFR-binding peptide
  MOD_RES (2)..(4)..(38): Xaa is C or S
  MOD_RES (16)..(17)..(18)..(19)..(20): Xaa is A or G
  MOD_RES (21)..(22)..(23)..(24): Xaa is A or G or absent
RXEXKNHQLFNSLQEXXXXXXXXXYYLMTLPEEETPVXELGEDN

SEQ ID NO: 26693 - protein, 39 aa, Artificial Sequence
  Non-cyclic GFR-binding peptide
  MOD_RES (1)..(3): Xaa is C or S
  MOD_RES (16)..(17)..(18)..(19)..(20): Xaa is A or G
  MOD_RES (21)..(22)..(23)..(24): Xaa is A or G or absent
XAXELHEELRNSLQEXXXXXXXXXYYVVPLPEHHVRSPQ

SEQ ID NO: 26694 - protein, 40 aa, Artificial Sequence
  Non-cyclic GFR-binding peptide
  MOD_RES (2)..(4)..(35)..(36): Xaa is C or S
SXKXSKVIMVTAKKIKPTKGIIKRIQVPRLDQSVXXPSAS

SEQ ID NO: 26695 - protein, 36 aa, Artificial Sequence
  Non-cyclic GFR-binding peptide
  MOD_RES (34)..(35): Xaa is C or S
  MOD_RES (12)..(13)..(14)..(15)..(16): Xaa is A or G
  MOD_RES (17)..(18)..(19)..(20): Xaa is A or G or absent
SRVVMNSMEGIXXXXXXXXXMIQVTINSLKTPAXXP

SEQ ID NO: 26696 - protein, 35 aa, Artificial Sequence
  Non-cyclic GFR-binding peptide
  MOD_RES (2)..(4)..(35): Xaa is C or S
SXKXSKVIMVQVEKIKPTKGIVKAIKVSRLDQSVX

SEQ ID NO: 26697 - protein, 37 aa, Artificial Sequence
  Non-cyclic GFR-binding peptide
  MOD_RES (2)..(2): Xaa is C or S
AXELHEELRNSLQELKPKKRVYEYYVVPLPEHHVRSP

SEQ ID NO: 26698 - protein, 41 aa, Artificial Sequence
  Non-cyclic GFR-binding peptide
  MOD_RES (2)..(4)..(36)..(37): Xaa is C or S
RXGXGEVVMEVTAKKVVKDYEDIKRMQVPRLETPVXXAKPI

SEQ ID NO: 26699 - protein, 39 aa, Artificial Sequence
  Non-cyclic GFR-binding peptide
  MOD_RES (2)..(36): Xaa is C or S
  MOD_RES (14)..(15)..(16)..(17)..(18): Xaa is A or G
  MOD_RES (19)..(20)..(21)..(22): Xaa is A or G or absent
GXSRVVMNVQVEKXXXXXXXXXVKAVKVSRLKTPAXTPK

SEQ ID NO: 26700 - protein, 34 aa, Artificial Sequence
  Non-cyclic GFR-binding peptide
  MOD_RES (1)..(33): Xaa is C or S
XSRVVMNVQVEKIVNSSDDVKAVKVSRLKTPAXT

SEQ ID NO: 26701 - protein, 37 aa, Artificial Sequence
  Non-cyclic GFR-binding peptide
  MOD_RES (32)..(33): Xaa is C or S
ARVVMNVTAKKIVNSSDDIKRVQVPRLQTPAXXPKPV

SEQ ID NO: 26702 - protein, 34 aa, Artificial Sequence
  Non-cyclic GFR-binding peptide
  MOD_RES (2)..(4): Xaa is C or S
SXKXSKVIMVTAKKIKPTKGIIKRIQVPRLDQSV

SEQ ID NO: 26703 - protein, 34 aa, Artificial Sequence
  Non-cyclic GFR-binding peptide
  MOD_RES (1)..(34): Xaa is C or S
  MOD_RES (12)..(13)..(14)..(15)..(16): Xaa is A or G
  MOD_RES (17)..(18)..(19)..(20): Xaa is A or G or absent
XSRVIMSMEGIXXXXXXXXXMIQITINSLAQPVX

SEQ ID NO: 26704 - protein, 37 aa, Artificial Sequence
  Non-cyclic GFR-binding peptide
  MOD_RES (35)..(35): Xaa is C or S
  MOD_RES (11)..(12)..(13)..(14)..(15): Xaa is A or G
  MOD_RES (16)..(17)..(18)..(19): Xaa is A or G or absent
HDELTNSLQEXXXXXXXXXYYVVPLPELQVQTPRXQV

SEQ ID NO: 26705 - protein, 39 aa, Artificial Sequence
  Non-cyclic GFR-binding peptide
  MOD_RES (35)..(35): Xaa is C or S
HEELRNSLQELKPKKRVYEYYLVTLPEHHVRSPQXKVSS

SEQ ID NO: 26706 - protein, 39 aa, Artificial Sequence
  Non-cyclic GFR-binding peptide
  MOD_RES (33)..(34): Xaa is C or S
  MOD_RES (11)..(12)..(13)..(14)..(15): Xaa is A or G
  MOD_RES (16)..(17)..(18)..(19): Xaa is A or G or absent
SKVIMSMEGIXXXXXXXXXMIQITINSLDQSVXXPSASA

SEQ ID NO: 26707 - protein, 39 aa, Artificial Sequence
  Non-cyclic GFR-binding peptide
  MOD_RES (1)..(33)..(34): Xaa is C or S
XGEVVMDVQVEKVVKENEDVKAMKVSRLETPVXXAKPIK

SEQ ID NO: 26708 - protein, 35 aa, Artificial Sequence
  Non-cyclic GFR-binding peptide
  MOD_RES (2)..(2): Xaa is C or S
  MOD_RES (14)..(15)..(16)..(17)..(18): Xaa is A or G
  MOD_RES (19)..(20)..(21)..(22): Xaa is A or G or absent
GXGEVVMDSMEGIXXXXXXXXXMIQMTINSLETPV

SEQ ID NO: 26709 - protein, 34 aa, Artificial Sequence
  Non-cyclic GFR-binding peptide
  MOD_RES (1)..(1): Xaa is C or S
  MOD_RES (13)..(14)..(15)..(16)..(17): Xaa is A or G
  MOD_RES (18)..(19)..(20)..(21): Xaa is A or G or absent
XGEVVMESMEGIXXXXXXXXXMIQMTINSLETPV

SEQ ID NO: 26710 - protein, 39 aa, Artificial Sequence
  Non-cyclic GFR-binding peptide
  MOD_RES (2)..(36)..(37): Xaa is C or S
  MOD_RES (14)..(15)..(16)..(17)..(18): Xaa is A or G
  MOD_RES (19)..(20)..(21)..(22): Xaa is A or G or absent
GXARVVMNVTAKKXXXXXXXXXIKRVQVPRLQTPAXXPK

SEQ ID NO: 26711 - protein, 39 aa, Artificial Sequence
  Non-cyclic GFR-binding peptide
  MOD_RES (2)..(33)..(34): Xaa is C or S
KXSRVIMVTAKKVKPKRGVIKRIQVPRLAQPVXXPAASA

SEQ ID NO: 26712 - protein, 34 aa, Artificial Sequence
  Non-cyclic GFR-binding peptide
  MOD_RES (2)..(33)..(34): Xaa is C or S
KXSRVIMSMEGIVKPKRGVMIQITINSLAQPVXX

SEQ ID NO: 26713 - protein, 37 aa, Artificial Sequence
  Non-cyclic GFR-binding peptide
  MOD_RES (31)..(32): Xaa is C or S
SKVIMVTAKKIKPTKGIIKRIQVPRLDQSVXXPSASA

SEQ ID NO: 26714 - protein, 35 aa, Artificial Sequence
  Non-cyclic GFR-binding peptide
  MOD_RES (1)..(34)..(35): Xaa is C or S
  MOD_RES (12)..(13)..(14)..(15)..(16): Xaa is A or G
  MOD_RES (17)..(18)..(19)..(20): Xaa is A or G or absent
XSKVIMSMEGIXXXXXXXXXMIQITINSLDQSVXX

SEQ ID NO: 26715 - protein, 40 aa, Artificial Sequence
  Non-cyclic GFR-binding peptide
  MOD_RES (2)..(4)..(36)..(37): Xaa is C or S
RXGXGEVVMEVQVEKVVKDYEDVKAMKVSRLETPVXXAKP

SEQ ID NO: 26716 - protein, 40 aa, Artificial Sequence
  Non-cyclic GFR-binding peptide
  MOD_RES (1)..(3)..(35)..(36): Xaa is C or S
XGXSRVVMNSMEGIIVNSSDDMIQVTINSLKTPAXXPKPV

SEQ ID NO: 26717 - protein, 41 aa, Artificial Sequence
  Non-cyclic GFR-binding peptide
  MOD_RES (1)..(35)..(36): Xaa is C or S
  MOD_RES (13)..(14)..(15)..(16)..(17): Xaa is A or G
  MOD_RES (18)..(19)..(20)..(21): Xaa is A or G or absent
XGEVVMESMEGIXXXXXXXXXMIQMTINSLETPVXXAKPIS

SEQ ID NO: 26718 - protein, 37 aa, Artificial Sequence
  Non-cyclic GFR-binding peptide
  MOD_RES (1)..(3)..(35)..(36): Xaa is C or S
XGXGEVVMEVQVEKVVKDYEDVKAMKVSRLETPVXXA

SEQ ID NO: 26719 - protein, 38 aa, Artificial Sequence
  Non-cyclic GFR-binding peptide
  MOD_RES (2)..(4)..(38): Xaa is C or S
  MOD_RES (16)..(17)..(18)..(19)..(20): Xaa is A or G
  MOD_RES (21)..(22)..(23)..(24): Xaa is A or G or absent
HXGXSRVVMNSMEGIXXXXXXXXXMIQVTINSLKTPAX

SEQ ID NO: 26720 - protein, 40 aa, Artificial Sequence
  Non-cyclic GFR-binding peptide
  MOD_RES (34)..(34): Xaa is C or S
KNHQLFNSLQEHQGQHPKIRYYLMTLPEEETPVXELGEDN

SEQ ID NO: 26721 - protein, 37 aa, Artificial Sequence
  Non-cyclic GFR-binding peptide
  MOD_RES (1)..(3)..(36)..(37): Xaa is C or S
  MOD_RES (14)..(15)..(16)..(17)..(18): Xaa is A or G
  MOD_RES (19)..(20)..(21)..(22): Xaa is A or G or absent
XKXSKVVMVTAKKXXXXXXXXXIKRIQVPRLDQPVXX

SEQ ID NO: 26722 - protein, 37 aa, Artificial Sequence
  Non-cyclic GFR-binding peptide
  MOD_RES (2)..(4)..(37): Xaa is C or S
  MOD_RES (15)..(16)..(17)..(18)..(19): Xaa is A or G
  MOD_RES (20)..(21)..(22)..(23): Xaa is A or G or absent
SXKXSRVIMSMEGIXXXXXXXXXMIQITINSLAQPVX

SEQ ID NO: 26723 - protein, 30 aa, Artificial Sequence
  Non-cyclic GFR-binding peptide
SKVVMVQVEKVKPTRGVVKAIKVSRLDQPV

SEQ ID NO: 26724 - protein, 36 aa, Artificial Sequence
  Non-cyclic GFR-binding peptide
  MOD_RES (1)..(1): Xaa is C or S
  MOD_RES (14)..(15)..(16)..(17)..(18): Xaa is A or G
  MOD_RES (19)..(20)..(21)..(22): Xaa is A or G or absent
XELHEELRNSLQEXXXXXXXXXYYLVTLPEHHVRSP

SEQ ID NO: 26725 - protein, 38 aa, Artificial Sequence
  Non-cyclic GFR-binding peptide
  MOD_RES (32)..(33): Xaa is C or S
ARVVMNVTAKKIVNSSDDIKRVQVPRLQTPAXXPKPVT

SEQ ID NO: 26726 - protein, 33 aa, Artificial Sequence
  Non-cyclic GFR-binding peptide
  MOD_RES (31)..(31): Xaa is C or S
RVVMNVQVEKIVNSSDDVKAVKVSRLKTPAXTP

SEQ ID NO: 26727 - protein, 36 aa, Artificial Sequence
  Non-cyclic GFR-binding peptide
  MOD_RES (1)..(3): Xaa is C or S
  MOD_RES (15)..(16)..(17)..(18)..(19): Xaa is A or G
  MOD_RES (20)..(21)..(22)..(23): Xaa is A or G or absent
XGXGEVVMEVTAKKXXXXXXXXXIKRMQVPRLETPV

SEQ ID NO: 26728 - protein, 40 aa, Artificial Sequence
  Non-cyclic GFR-binding peptide
  MOD_RES (34)..(35): Xaa is C or S
  MOD_RES (12)..(13)..(14)..(15)..(16): Xaa is A or G
  MOD_RES (17)..(18)..(19)..(20): Xaa is A or G or absent
ARVVMNSMEGIXXXXXXXXXMIQVTINSLQTPAXXPKPVT

SEQ ID NO: 26729 - protein, 38 aa, Artificial Sequence
  Non-cyclic GFR-binding peptide
  MOD_RES (1)..(3)..(35)..(36): Xaa is C or S
XGXGEVVMESMEGIVVKDYEDMIQMTINSLETPVXXAK

SEQ ID NO: 26730 - protein, 33 aa, Artificial Sequence
  Non-cyclic GFR-binding peptide
  MOD_RES (2)..(33): Xaa is C or S
KXSRVIMSMEGIVKPKRGVMIQITINSLAQPVX

SEQ ID NO: 26731 - protein, 40 aa, Artificial Sequence
  Non-cyclic GFR-binding peptide
  MOD_RES (2)..(4)..(36)..(37): Xaa is C or S
RXGXGEVVMDVTAKKVVKENEDIKRMQVPRLETPVXXAKP

SEQ ID NO: 26732 - protein, 39 aa, Artificial Sequence
  Non-cyclic GFR-binding peptide
  MOD_RES (2)..(4)..(35)..(36): Xaa is C or S
SXKXSRVIMVTAKKVKPKRGVIKRIQVPRLAQPVXXPAA

SEQ ID NO: 26733 - protein, 39 aa, Artificial Sequence
  Non-cyclic GFR-binding peptide
  MOD_RES (1)..(3): Xaa is C or S
XKXALHDELTNSLQEFIPKKRVIEYYLVTLPELQVQTPR

SEQ ID NO: 26734 - protein, 34 aa, Artificial Sequence
  Non-cyclic GFR-binding peptide
  MOD_RES (33)..(34): Xaa is C or S
  MOD_RES (11)..(12)..(13)..(14)..(15): Xaa is A or G
  MOD_RES (16)..(17)..(18)..(19): Xaa is A or G or absent
SKVVMSMEGIXXXXXXXXXMIQITINSLDQPVXX

SEQ ID NO: 26735 - protein, 43 aa, Artificial Sequence
  Non-cyclic GFR-binding peptide
  MOD_RES (2)..(4)..(38): Xaa is C or S
RXEXKNHQLFNSLQEHQGQHPKIRYYLMTLPEEETPVXELGED

SEQ ID NO: 26736 - protein, 41 aa, Artificial Sequence
  Non-cyclic GFR-binding peptide
  MOD_RES (2)..(4)..(35)..(36): Xaa is C or S
SXKXSKVIMSMEGIIKPTKGIMIQITINSLDQSVXXPSASA

SEQ ID NO: 26737 - protein, 36 aa, Artificial Sequence
  Non-cyclic GFR-binding peptide
  MOD_RES (2)..(4)..(35)..(36): Xaa is C or S
SXKXSKVIMSMEGIIKPTKGIMIQITINSLDQSVXX

SEQ ID NO: 26738 - protein, 42 aa, Artificial Sequence
  Non-cyclic GFR-binding peptide
  MOD_RES (2)..(36): Xaa is C or S
  MOD_RES (14)..(15)..(16)..(17)..(18): Xaa is A or G
  MOD_RES (19)..(20)..(21)..(22): Xaa is A or G or absent
GXSRVVMNSMEGIXXXXXXXXXMIQVTINSLKTPAXTPKTVH

SEQ ID NO: 26739 - protein, 36 aa, Artificial Sequence
  Non-cyclic GFR-binding peptide
  MOD_RES (13)..(14)..(15)..(16)..(17): Xaa is A or G
  MOD_RES (18)..(19)..(20)..(21): Xaa is A or G or absent
ELHEELRNSLQEXXXXXXXXXYYVVPLPEHHVRSPQ

SEQ ID NO: 26740 - protein, 44 aa, Artificial Sequence
  Non-cyclic GFR-binding peptide
  MOD_RES (2)..(4)..(41): Xaa is C or S
  MOD_RES (17)..(18)..(19)..(20)..(21): Xaa is A or G
  MOD_RES (22)..(23)..(24)..(25): Xaa is A or G or absent
EXKXALHDELTNSLQEXXXXXXXXXYYVVPLPELQVQTPRXQVN

SEQ ID NO: 26741 - protein, 42 aa, Artificial Sequence
  Non-cyclic GFR-binding peptide
  MOD_RES (2)..(36)..(37): Xaa is C or S
  MOD_RES (14)..(15)..(16)..(17)..(18): Xaa is A or G
  MOD_RES (19)..(20)..(21)..(22): Xaa is A or G or absent
GXSRVVMNSMEGIXXXXXXXXXMIQVTINSLKTPAXXPKPVY

SEQ ID NO: 26742 - protein, 37 aa, Artificial Sequence
  Non-cyclic GFR-binding peptide
  MOD_RES (2)..(2): Xaa is C or S
  MOD_RES (15)..(16)..(17)..(18)..(19): Xaa is A or G
  MOD_RES (20)..(21)..(22)..(23): Xaa is A or G or absent
KXALHDELTNSLQEXXXXXXXXXYYLVTLPELQVQTP

SEQ ID NO: 26743 - protein, 38 aa, Artificial Sequence
  Non-cyclic GFR-binding peptide
  MOD_RES (37)..(37): Xaa is C or S
ELHEELRNSLQELKPKKRVYEYYLVTLPEHHVRSPQXK

SEQ ID NO: 26744 - protein, 40 aa, Artificial Sequence
  Non-cyclic GFR-binding peptide
  MOD_RES (1)..(3)..(36)..(37): Xaa is C or S
  MOD_RES (14)..(15)..(16)..(17)..(18): Xaa is A or G
  MOD_RES (19)..(20)..(21)..(22): Xaa is A or G or absent
XKXSRVIMVTAKKXXXXXXXXXIKRIQVPRLAQPVXXPAA

SEQ ID NO: 26745 - protein, 33 aa, Artificial Sequence
  Non-cyclic GFR-binding peptide
  MOD_RES (1)..(33): Xaa is C or S
XGEVVMDVTAKKVVKENEDIKRMQVPRLETPVX

SEQ ID NO: 26746 - protein, 42 aa, Artificial Sequence
  Non-cyclic GFR-binding peptide
  MOD_RES (2)..(39): Xaa is C or S
KXALHDELTNSLQEFIPKKRVIEYYVVPLPELQVQTPRXQVN

SEQ ID NO: 26747 - protein, 38 aa, Artificial Sequence
  Non-cyclic GFR-binding peptide
  MOD_RES (1)..(3)..(37)..(38): Xaa is C or S
  MOD_RES (15)..(16)..(17)..(18)..(19): Xaa is A or G
  MOD_RES (20)..(21)..(22)..(23): Xaa is A or G or absent
XGXSRVVMNSMEGIXXXXXXXXXMIQVTINSLKTPAXX

SEQ ID NO: 26748 - protein, 34 aa, Artificial Sequence
  Non-cyclic GFR-binding peptide
  MOD_RES (34)..(34): Xaa is C or S
  MOD_RES (12)..(13)..(14)..(15)..(16): Xaa is A or G
  MOD_RES (17)..(18)..(19)..(20): Xaa is A or G or absent
GEVVMDVTAKKXXXXXXXXXIKRMQVPRLETPVX

SEQ ID NO: 26749 - protein, 41 aa, Artificial Sequence
  Non-cyclic GFR-binding peptide
  MOD_RES (1)..(3)..(37)..(38): Xaa is C or S
  MOD_RES (15)..(16)..(17)..(18)..(19): Xaa is A or G
  MOD_RES (20)..(21)..(22)..(23): Xaa is A or G or absent
XGXGEVVMEVTAKKXXXXXXXXXIKRMQVPRLETPVXXAKP

SEQ ID NO: 26750 - protein, 36 aa, Artificial Sequence
  Non-cyclic GFR-binding peptide
  MOD_RES (1)..(35)..(36): Xaa is C or S
  MOD_RES (13)..(14)..(15)..(16)..(17): Xaa is A or G
  MOD_RES (18)..(19)..(20)..(21): Xaa is A or G or absent
XSRVVMNVTAKKXXXXXXXXXIKRVQVPRLKTPAXX

SEQ ID NO: 26751 - protein, 35 aa, Artificial Sequence
  Non-cyclic GFR-binding peptide
  MOD_RES (12)..(13)..(14)..(15)..(16): Xaa is A or G
  MOD_RES (17)..(18)..(19)..(20): Xaa is A or G or absent
LHEELRNSLQEXXXXXXXXXYYLVTLPEHHVRSPQ

SEQ ID NO: 26752 - protein, 36 aa, Artificial Sequence
  Non-cyclic GFR-binding peptide
  MOD_RES (2)..(4)..(36): Xaa is C or S
HXGXSRVVMNVTAKKIVNSSDDIKRVQVPRLKTPAX

SEQ ID NO: 26753 - protein, 38 aa, Artificial Sequence
  Non-cyclic GFR-binding peptide
  MOD_RES (1)..(34)..(35): Xaa is C or S
  MOD_RES (12)..(13)..(14)..(15)..(16): Xaa is A or G
  MOD_RES (17)..(18)..(19)..(20): Xaa is A or G or absent
XSKVVMVTAKKXXXXXXXXXIKRIQVPRLDQPVXXPSA

SEQ ID NO: 26754 - protein, 35 aa, Artificial Sequence
  Non-cyclic GFR-binding peptide
  MOD_RES (2)..(2): Xaa is C or S
  MOD_RES (14)..(15)..(16)..(17)..(18): Xaa is A or G
  MOD_RES (19)..(20)..(21)..(22): Xaa is A or G or absent
GXARVVMNVQVEKXXXXXXXXXVKAVKVSRLQTPA

SEQ ID NO: 26755 - protein, 33 aa, Artificial Sequence
  Non-cyclic GFR-binding peptide
  MOD_RES (12)..(13)..(14)..(15)..(16): Xaa is A or G
  MOD_RES (17)..(18)..(19)..(20): Xaa is A or G or absent
GEVVMESMEGIXXXXXXXXXMIQMTINSLETPV

SEQ ID NO: 26756 - protein, 35 aa, Artificial Sequence
  Non-cyclic GFR-binding peptide
  MOD_RES (2)..(35): Xaa is C or S
  MOD_RES (13)..(14)..(15)..(16)..(17): Xaa is A or G
  MOD_RES (18)..(19)..(20)..(21): Xaa is A or G or absent
KXSKVIMVQVEKXXXXXXXXXVKAIKVSRLDQSVX

SEQ ID NO: 26757 - protein, 30 aa, Artificial Sequence; identical to SEQ ID NO: 2214
  Non-cyclic GFR-binding peptide

SEQ ID NO: 26758 - protein, 39 aa, Artificial Sequence
  Non-cyclic GFR-binding peptide
  MOD_RES (33)..(33): Xaa is C or S
  MOD_RES (11)..(12)..(13)..(14)..(15): Xaa is A or G
  MOD_RES (16)..(17)..(18)..(19): Xaa is A or G or absent
RVVMNVTAKKXXXXXXXXXIKRVQVPRLKTPAXTPKTVH

SEQ ID NO: 26759 - protein, 39 aa, Artificial Sequence
  Non-cyclic GFR-binding peptide
  MOD_RES (33)..(33): Xaa is C or S
  MOD_RES (11)..(12)..(13)..(14)..(15): Xaa is A or G
  MOD_RES (16)..(17)..(18)..(19): Xaa is A or G or absent
RVVMNVQVEKXXXXXXXXXVKAVKVSRLKTPAXTPKTVH

SEQ ID NO: 26760 - protein, 36 aa, Artificial Sequence
  Non-cyclic GFR-binding peptide
  MOD_RES (2)..(36): Xaa is C or S
  MOD_RES (14)..(15)..(16)..(17)..(18): Xaa is A or G
  MOD_RES (19)..(20)..(21)..(22): Xaa is A or G or absent
EXKNHQLFNSLQEXXXXXXXXXYYVMPLPEEETPVX

SEQ ID NO: 26761 - protein, 38 aa, Artificial Sequence
  Non-cyclic GFR-binding peptide
  MOD_RES (36)..(36): Xaa is C or S
  MOD_RES (12)..(13)..(14)..(15)..(16): Xaa is A or G
  MOD_RES (17)..(18)..(19)..(20): Xaa is A or G or absent
LHDELTNSLQEXXXXXXXXXYYLVTLPELQVQTPRXQV

SEQ ID NO: 26762 - protein, 35 aa, Artificial Sequence
  Non-cyclic GFR-binding peptide
  MOD_RES (32)..(33): Xaa is C or S
GEVVMDVTAKKVVKENEDIKRMQVPRLETPVXXAK

SEQ ID NO: 26763 - protein, 40 aa, Artificial Sequence
  Non-cyclic GFR-binding peptide
  MOD_RES (34)..(34): Xaa is C or S
  MOD_RES (12)..(13)..(14)..(15)..(16): Xaa is A or G
  MOD_RES (17)..(18)..(19)..(20): Xaa is A or G or absent
KNHQLFNSLQEXXXXXXXXXYYLMTLPEEETPVXELGEDN

SEQ ID NO: 26764 - protein, 41 aa, Artificial Sequence
  Non-cyclic GFR-binding peptide
  MOD_RES (1)..(38): Xaa is C or S
XALHDELTNSLQEFIPKKRVIEYYLVTLPELQVQTPRXQVN

SEQ ID NO: 26765 - protein, 38 aa, Artificial Sequence
  Non-cyclic GFR-binding peptide
  MOD_RES (1)..(33)..(34): Xaa is C or S
XARVVMNVTAKKIVNSSDDIKRVQVPRLQTPAXXPKPV

SEQ ID NO: 26766 - protein, 33 aa, Artificial Sequence
  Non-cyclic GFR-binding peptide
  MOD_RES (2)..(2): Xaa is C or S
GXGEVVMDSMEGIVVKENEDMIQMTINSLETPV

SEQ ID NO: 26767 - protein, 41 aa, Artificial Sequence
  Non-cyclic GFR-binding peptide
  MOD_RES (2)..(36)..(37): Xaa is C or S
  MOD_RES (14)..(15)..(16)..(17)..(18): Xaa is A or G
  MOD_RES (19)..(20)..(21)..(22): Xaa is A or G or absent
GXGEVVMDVTAKKXXXXXXXXXIKRMQVPRLETPVXXAKPI

SEQ ID NO: 26768 - protein, 36 aa, Artificial Sequence
  Non-cyclic GFR-binding peptide
  MOD_RES (1)..(3): Xaa is C or S
XEXKNHQLFNSLQEHQGQHPKIRYYVMPLPEEETPV

SEQ ID NO: 26769 - protein, 40 aa, Artificial Sequence
  Non-cyclic GFR-binding peptide
  MOD_RES (1)..(34)..(35): Xaa is C or S
  MOD_RES (12)..(13)..(14)..(15)..(16): Xaa is A or G
  MOD_RES (17)..(18)..(19)..(20): Xaa is A or G or absent
XSRVIMSMEGIXXXXXXXXXMIQITINSLAQPVXXPAASA

SEQ ID NO: 26770 - protein, 38 aa, Artificial Sequence
  Non-cyclic GFR-binding peptide
  MOD_RES (35)..(35): Xaa is C or S
HEELRNSLQELKPKKRVYEYYLVTLPEHHVRSPQXKVS

SEQ ID NO: 26771 - protein, 36 aa, Artificial Sequence
  Non-cyclic GFR-binding peptide
  MOD_RES (1)..(3)..(35): Xaa is C or S
XGXSRVVMNVTAKKIVNSSDDIKRVQVPRLKTPAXT

SEQ ID NO: 26772 - protein, 37 aa, Artificial Sequence
  Non-cyclic GFR-binding peptide
  MOD_RES (1)..(32)..(33): Xaa is C or S
XSRVIMSMEGIVKPKRGVMIQITINSLAQPVXXPAAS

SEQ ID NO: 26773 - protein, 37 aa, Artificial Sequence
  Non-cyclic GFR-binding peptide
  MOD_RES (34)..(35): Xaa is C or S
  MOD_RES (12)..(13)..(14)..(15)..(16): Xaa is A or G
  MOD_RES (17)..(18)..(19)..(20): Xaa is A or G or absent
GEVVMEVTAKKXXXXXXXXXIKRMQVPRLETPVXXAK

SEQ ID NO: 26774 - protein, 40 aa, Artificial Sequence
  Non-cyclic GFR-binding peptide
  MOD_RES (1)..(3)..(36)..(37): Xaa is C or S
  MOD_RES (14)..(15)..(16)..(17)..(18): Xaa is A or G
  MOD_RES (19)..(20)..(21)..(22): Xaa is A or G or absent
XKXSKVIMVTAKKXXXXXXXXXIKRIQVPRLDQSVXXPSA

SEQ ID NO: 26775 - protein, 38 aa, Artificial Sequence
  Non-cyclic GFR-binding peptide
  MOD_RES (35)..(35): Xaa is C or S
HEELRNSLQELKPKKRVYEYYVVPLPEHHVRSPQXKVS

SEQ ID NO: 26776 - protein, 40 aa, Artificial Sequence
  Non-cyclic GFR-binding peptide
  MOD_RES (2)..(34)..(35): Xaa is C or S
GXARVVMNVQVEKIVNSSDDVKAVKVSRLQTPAXXPKPVT

SEQ ID NO: 26777 - protein, 37 aa, Artificial Sequence
  Non-cyclic GFR-binding peptide
  MOD_RES (1)..(3)..(37): Xaa is C or S
  MOD_RES (15)..(16)..(17)..(18)..(19): Xaa is A or G
  MOD_RES (20)..(21)..(22)..(23): Xaa is A or G or absent
XEXKNHQLFNSLQEXXXXXXXXXYYVMPLPEEETPVX

SEQ ID NO: 26778 - protein, 36 aa, Artificial Sequence
  Non-cyclic GFR-binding peptide
  MOD_RES (2)..(35)..(36): Xaa is C or S
  MOD_RES (13)..(14)..(15)..(16)..(17): Xaa is A or G
  MOD_RES (18)..(19)..(20)..(21): Xaa is A or G or absent
KXSKVVMVQVEKXXXXXXXXXVKAIKVSRLDQPVXX

SEQ ID NO: 26779 - protein, 33 aa, Artificial Sequence
  Non-cyclic GFR-binding peptide
  MOD_RES (2)..(33): Xaa is C or S
KXSRVIMVQVEKVKPKRGVVKAIKVSRLAQPVX

SEQ ID NO: 26780 - protein, 40 aa, Artificial Sequence
  Non-cyclic GFR-binding peptide
  MOD_RES (37)..(37): Xaa is C or S
  MOD_RES (13)..(14)..(15)..(16)..(17): Xaa is A or G
  MOD_RES (18)..(19)..(20)..(21): Xaa is A or G or absent
ALHDELTNSLQEXXXXXXXXXYYLVTLPELQVQTPRXQVN

SEQ ID NO: 26781 - protein, 38 aa, Artificial Sequence
  Non-cyclic GFR-binding peptide
  MOD_RES (2)..(4)..(36)..(37): Xaa is C or S
HXGXSRVVMNVQVEKIVNSSDDVKAVKVSRLKTPAXXP

SEQ ID NO: 26782 - protein, 39 aa, Artificial Sequence
  Non-cyclic GFR-binding peptide
  MOD_RES (35)..(35): Xaa is C or S
  MOD_RES (11)..(12)..(13)..(14)..(15): Xaa is A or G
  MOD_RES (16)..(17)..(18)..(19): Xaa is A or G or absent
HEELRNSLQEXXXXXXXXXYYVVPLPEHHVRSPQXKVSS

SEQ ID NO: 26783 - protein, 34 aa, Artificial Sequence
  Non-cyclic GFR-binding peptide
  MOD_RES (33)..(34): Xaa is C or S
  MOD_RES (11)..(12)..(13)..(14)..(15): Xaa is A or G
  MOD_RES (16)..(17)..(18)..(19): Xaa is A or G or absent
EVVMDVTAKKXXXXXXXXXIKRMQVPRLETPVXX

SEQ ID NO: 26784 - protein, 40 aa, Artificial Sequence
  Non-cyclic GFR-binding peptide
  MOD_RES (1)..(3)..(34)..(35): Xaa is C or S
XKXSRVIMVQVEKVKPKRGVVKAIKVSRLAQPVXXPAASA

SEQ ID NO: 26785 - protein, 36 aa, Artificial Sequence
  Non-cyclic GFR-binding peptide
  MOD_RES (13)..(14)..(15)..(16)..(17): Xaa is A or G
  MOD_RES (18)..(19)..(20)..(21): Xaa is A or G or absent
ALHDELTNSLQEXXXXXXXXXYYVVPLPELQVQTPR

SEQ ID NO: 26786 - protein, 38 aa, Artificial Sequence
  Non-cyclic GFR-binding peptide
  MOD_RES (2)..(4): Xaa is C or S
  MOD_RES (17)..(18)..(19)..(20)..(21): Xaa is A or G
  MOD_RES (22)..(23)..(24)..(25): Xaa is A or G or absent
EXKXALHDELTNSLQEXXXXXXXXXYYVVPLPELQVQT

SEQ ID NO: 26787 - protein, 41 aa, Artificial Sequence
  Non-cyclic GFR-binding peptide
  MOD_RES (37)..(37): Xaa is C or S
ALHDELTNSLQEFIPKKRVIEYYLVTLPELQVQTPRXQVNR

SEQ ID NO: 26788 - protein, 37 aa, Artificial Sequence
  Non-cyclic GFR-binding peptide
  MOD_RES (33)..(34): Xaa is C or S
  MOD_RES (11)..(12)..(13)..(14)..(15): Xaa is A or G
  MOD_RES (16)..(17)..(18)..(19): Xaa is A or G or absent
SRVIMVQVEKXXXXXXXXXVKAIKVSRLAQPVXXPAA

SEQ ID NO: 26789 - protein, 32 aa, Artificial Sequence
  Non-cyclic GFR-binding peptide
  MOD_RES (31)..(32): Xaa is C or S
SKVVMVTAKKVKPTRGVIKRIQVPRLDQPVXX

SEQ ID NO: 26790 - protein, 36 aa, Artificial Sequence
  Non-cyclic GFR-binding peptide
  MOD_RES (1)..(34)..(35): Xaa is C or S
  MOD_RES (12)..(13)..(14)..(15)..(16): Xaa is A or G
  MOD_RES (17)..(18)..(19)..(20): Xaa is A or G or absent
XSKVIMVTAKKXXXXXXXXXIKRIQVPRLDQSVXXP

SEQ ID NO: 26791 - protein, 31 aa, Artificial Sequence
  Non-cyclic GFR-binding peptide
  MOD_RES (31)..(31): Xaa is C or S
SKVVMVTAKKVKPTRGVIKRIQVPRLDQPVX

SEQ ID NO: 26792 - protein, 36 aa, Artificial Sequence
  Non-cyclic GFR-binding peptide
  MOD_RES (1)..(33)..(34): Xaa is C or S
XGEVVMEVQVEKVVKDYEDVKAMKVSRLETPVXXAK

SEQ ID NO: 26793 - protein, 42 aa, Artificial Sequence
  Non-cyclic GFR-binding peptide
  MOD_RES (2)..(4)..(38)..(39): Xaa is C or S
  MOD_RES (16)..(17)..(18)..(19)..(20): Xaa is A or G
  MOD_RES (21)..(22)..(23)..(24): Xaa is A or G or absent
RXGXGEVVMDVTAKKXXXXXXXXXIKRMQVPRLETPVXXAKP

SEQ ID NO: 26794 - protein, 38 aa, Artificial Sequence
  Non-cyclic GFR-binding peptide
  MOD_RES (34)..(35): Xaa is C or S
  MOD_RES (12)..(13)..(14)..(15)..(16): Xaa is A or G
  MOD_RES (17)..(18)..(19)..(20): Xaa is A or G or absent
SRVVMNVTAKKXXXXXXXXXIKRVQVPRLKTPAXXPKP

SEQ ID NO: 26795 - protein, 37 aa, Artificial Sequence
  Non-cyclic GFR-binding peptide
  MOD_RES (2)..(34)..(35): Xaa is C or S
GXARVVMNVTAKKIVNSSDDIKRVQVPRLQTPAXXPK

SEQ ID NO: 26796 - protein, 36 aa, Artificial Sequence
  Non-cyclic GFR-binding peptide
  MOD_RES (1)..(3): Xaa is C or S
  MOD_RES (15)..(16)..(17)..(18)..(19): Xaa is A or G
  MOD_RES (20)..(21)..(22)..(23): Xaa is A or G or absent
XGXSRVVMNSMEGIXXXXXXXXXMIQVTINSLKTPA

SEQ ID NO: 26797 - protein, 41 aa, Artificial Sequence
  Non-cyclic GFR-binding peptide
  MOD_RES (2)..(35)..(36): Xaa is C or S
  MOD_RES (13)..(14)..(15)..(16)..(17): Xaa is A or G
  MOD_RES (18)..(19)..(20)..(21): Xaa is A or G or absent
KXSKVIMVTAKKXXXXXXXXXIKRIQVPRLDQSVXXPSASA

SEQ ID NO: 26798 - protein, 41 aa, Artificial Sequence
  Non-cyclic GFR-binding peptide
  MOD_RES (1)..(3)..(35): Xaa is C or S
XGXSRVVMNSMEGIIVNSSDDMIQVTINSLKTPAXTPKTVH

SEQ ID NO: 26799 - protein, 37 aa, Artificial Sequence
  Non-cyclic GFR-binding peptide
  MOD_RES (1)..(3)..(35)..(36): Xaa is C or S
XGXGEVVMDVQVEKVVKENEDVKAMKVSRLETPVXXA

SEQ ID NO: 26800 - protein, 34 aa, Artificial Sequence
  Non-cyclic GFR-binding peptide
  MOD_RES (1)..(3): Xaa is C or S
XGXARVVMNVTAKKIVNSSDDIKRVQVPRLQTPA

SEQ ID NO: 26801 - protein, 36 aa, Artificial Sequence
  Non-cyclic GFR-binding peptide
  MOD_RES (2)..(33)..(34): Xaa is C or S
KXSKVVMSMEGIVKPTRGVMIQITINSLDQPVXXPS

SEQ ID NO: 26802 - protein, 38 aa, Artificial Sequence
  Non-cyclic GFR-binding peptide
  MOD_RES (37)..(37): Xaa is C or S
  MOD_RES (13)..(14)..(15)..(16)..(17): Xaa is A or G
  MOD_RES (18)..(19)..(20)..(21): Xaa is A or G or absent
ALHDELTNSLQEXXXXXXXXXYYLVTLPELQVQTPRXQ

SEQ ID NO: 26803 - protein, 40 aa, Artificial Sequence
  Non-cyclic GFR-binding peptide
  MOD_RES (1)..(3)..(37): Xaa is C or S
  MOD_RES (15)..(16)..(17)..(18)..(19): Xaa is A or G
  MOD_RES (20)..(21)..(22)..(23): Xaa is A or G or absent
XEXKNHQLFNSLQEXXXXXXXXXYYVMPLPEEETPVXELG

SEQ ID NO: 26804 - protein, 41 aa, Artificial Sequence
  Non-cyclic GFR-binding peptide
  MOD_RES (1)..(3)..(37)..(38): Xaa is C or S
  MOD_RES (15)..(16)..(17)..(18)..(19): Xaa is A or G
  MOD_RES (20)..(21)..(22)..(23): Xaa is A or G or absent
XGXARVVMNVTAKKXXXXXXXXXIKRVQVPRLQTPAXXPKP

SEQ ID NO: 26805 - protein, 41 aa, Artificial Sequence
  Non-cyclic GFR-binding peptide
  MOD_RES (1)..(3)..(37)..(38): Xaa is C or S
  MOD_RES (15)..(16)..(17)..(18)..(19): Xaa is A or G
  MOD_RES (20)..(21)..(22)..(23): Xaa is A or G or absent
XGXGEVVMEVQVEKXXXXXXXXXVKAMKVSRLETPVXXAKP

SEQ ID NO: 26806 - protein, 39 aa, Artificial Sequence
  Non-cyclic GFR-binding peptide
  MOD_RES (2)..(4): Xaa is C or S
AXAXELHEELRNSLQELKPKKRVYEYYLVTLPEHHVRSP

SEQ ID NO: 26807 - protein, 33 aa, Artificial Sequence
  Non-cyclic GFR-binding peptide
  MOD_RES (33)..(33): Xaa is C or S
  MOD_RES (11)..(12)..(13)..(14)..(15): Xaa is A or G
  MOD_RES (16)..(17)..(18)..(19): Xaa is A or G or absent
SRVIMVQVEKXXXXXXXXXVKAIKVSRLAQPVX

SEQ ID NO: 26808 - protein, 40 aa, Artificial Sequence
  Non-cyclic GFR-binding peptide
  MOD_RES (37)..(37): Xaa is C or S
  MOD_RES (13)..(14)..(15)..(16)..(17): Xaa is A or G
  MOD_RES (18)..(19)..(20)..(21): Xaa is A or G or absent
ALHDELTNSLQEXXXXXXXXXYYVVPLPELQVQTPRXQVN

SEQ ID NO: 26809 - protein, 37 aa, Artificial Sequence
  Non-cyclic GFR-binding peptide
  MOD_RES (1)..(3)..(37): Xaa is C or S
  MOD_RES (15)..(16)..(17)..(18)..(19): Xaa is A or G
  MOD_RES (20)..(21)..(22)..(23): Xaa is A or G or absent
XGXGEVVMDVTAKKXXXXXXXXXIKRMQVPRLETPVX

SEQ ID NO: 26810 - protein, 35 aa, Artificial Sequence
  Non-cyclic GFR-binding peptide
  MOD_RES (32)..(33): Xaa is C or S
ARVVMNSMEGIIVNSSDDMIQVTINSLQTPAXXPK

SEQ ID NO: 26811 - protein, 37 aa, Artificial Sequence
  Non-cyclic GFR-binding peptide
  MOD_RES (1)..(3)..(36)..(37): Xaa is C or S
  MOD_RES (14)..(15)..(16)..(17)..(18): Xaa is A or G
  MOD_RES (19)..(20)..(21)..(22): Xaa is A or G or absent
XKXSKVVMVQVEKXXXXXXXXXVKAIKVSRLDQPVXX

SEQ ID NO: 26812 - protein, 32 aa, Artificial Sequence
  Non-cyclic GFR-binding peptide
  MOD_RES (11)..(12)..(13)..(14)..(15): Xaa is A or G
  MOD_RES (16)..(17)..(18)..(19): Xaa is A or G or absent
SKVVMSMEGIXXXXXXXXXMIQITINSLDQPV

SEQ ID NO: 26813 - protein, 38 aa, Artificial Sequence
  Non-cyclic GFR-binding peptide
  MOD_RES (1)..(3)..(36)..(37): Xaa is C or S
  MOD_RES (14)..(15)..(16)..(17)..(18): Xaa is A or G
  MOD_RES (19)..(20)..(21)..(22): Xaa is A or G or absent
XKXSKVIMVTAKKXXXXXXXXXIKRIQVPRLDQSVXXP

SEQ ID NO: 26814 - protein, 37 aa, Artificial Sequence
  Non-cyclic GFR-binding peptide
  MOD_RES (1)..(34)..(35): Xaa is C or S
  MOD_RES (12)..(13)..(14)..(15)..(16): Xaa is A or G
  MOD_RES (17)..(18)..(19)..(20): Xaa is A or G or absent
XSKVVMVQVEKXXXXXXXXXVKAIKVSRLDQPVXXPS

SEQ ID NO: 26815 - protein, 40 aa, Artificial Sequence
  Non-cyclic GFR-binding peptide
  MOD_RES (1)..(34)..(35): Xaa is C or S
  MOD_RES (12)..(13)..(14)..(15)..(16): Xaa is A or G
  MOD_RES (17)..(18)..(19)..(20): Xaa is A or G or absent
XSKVIMSMEGIXXXXXXXXXMIQITINSLDQSVXXPSASA

SEQ ID NO: 26816 - protein, 40 aa, Artificial Sequence
  Non-cyclic GFR-binding peptide
  MOD_RES (1)..(35)..(36): Xaa is C or S
  MOD_RES (13)..(14)..(15)..(16)..(17): Xaa is A or G
  MOD_RES (18)..(19)..(20)..(21): Xaa is A or G or absent
XSRVVMNVQVEKXXXXXXXXXVKAVKVSRLKTPAXXPKPV

SEQ ID NO: 26817 - protein, 37 aa, Artificial Sequence
  Non-cyclic GFR-binding peptide
  MOD_RES (31)..(32): Xaa is C or S
RVVMNVTAKKIVNSSDDIKRVQVPRLKTPAXXPKPVY

SEQ ID NO: 26818 - protein, 39 aa, Artificial Sequence
  Non-cyclic GFR-binding peptide
  MOD_RES (2)..(35)..(36): Xaa is C or S
  MOD_RES (13)..(14)..(15)..(16)..(17): Xaa is A or G
  MOD_RES (18)..(19)..(20)..(21): Xaa is A or G or absent
KXSKVVMSMEGIXXXXXXXXXMIQITINSLDQPVXXPSA

SEQ ID NO: 26819 - protein, 34 aa, Artificial Sequence
  Non-cyclic GFR-binding peptide
  MOD_RES (2)..(2): Xaa is C or S
  MOD_RES (13)..(14)..(15)..(16)..(17): Xaa is A or G
  MOD_RES (18)..(19)..(20)..(21): Xaa is A or G or absent
KXSKVIMVQVEKXXXXXXXXXVKAIKVSRLDQSV

SEQ ID NO: 26820 - protein, 40 aa, Artificial Sequence
  Non-cyclic GFR-binding peptide
  MOD_RES (2)..(4)..(35)..(36): Xaa is C or S
SXKXSRVIMVTAKKVKPKRGVIKRIQVPRLAQPVXXPAAS

SEQ ID NO: 26821 - protein, 40 aa, Artificial Sequence
  Non-cyclic GFR-binding peptide
  MOD_RES (2)..(4): Xaa is C or S
AXAXELHEELRNSLQELKPKKRVYEYYLVTLPEHHVRSPQ

SEQ ID NO: 26822 - protein, 37 aa, Artificial Sequence
  Non-cyclic GFR-binding peptide
  MOD_RES (2)..(34): Xaa is C or S
GXSRVVMNSMEGIIVNSSDDMIQVTINSLKTPAXTPK

SEQ ID NO: 26823 - protein, 42 aa, Artificial Sequence
  Non-cyclic GFR-binding peptide
  MOD_RES (2)..(39): Xaa is C or S
  MOD_RES (15)..(16)..(17)..(18)..(19): Xaa is A or G
  MOD_RES (20)..(21)..(22)..(23): Xaa is A or G or absent
KXALHDELTNSLQEXXXXXXXXXYYVVPLPELQVQTPRXQVN

SEQ ID NO: 26824 - protein, 41 aa, Artificial Sequence
  Non-cyclic GFR-binding peptide
  MOD_RES (2)..(4)..(35)..(36): Xaa is C or S
SXKXSKVIMVQVEKIKPTKGIVKAIKVSRLDQSVXXPSASA

SEQ ID NO: 26825 - protein, 33 aa, Artificial Sequence
  Non-cyclic GFR-binding peptide
  MOD_RES (12)..(13)..(14)..(15)..(16): Xaa is A or G
  MOD_RES (17)..(18)..(19)..(20): Xaa is A or G or absent
KNHQLFNSLQEXXXXXXXXXYYLMTLPEEETPV

SEQ ID NO: 26826 - protein, 37 aa, Artificial Sequence
  Non-cyclic GFR-binding peptide
  MOD_RES (33)..(34): Xaa is C or S
  MOD_RES (11)..(12)..(13)..(14)..(15): Xaa is A or G
  MOD_RES (16)..(17)..(18)..(19): Xaa is A or G or absent
RVVMNSMEGIXXXXXXXXXMIQVTINSLKTPAXXPKP

SEQ ID NO: 26827 - protein, 40 aa, Artificial Sequence
  Non-cyclic GFR-binding peptide
  MOD_RES (2)..(4)..(38): Xaa is C or S
RXEXKNHQLFNSLQEHQGQHPKIRYYLMTLPEEETPVXEL

SEQ ID NO: 26828 - protein, 38 aa, Artificial Sequence
  Non-cyclic GFR-binding peptide
  MOD_RES (33)..(34): Xaa is C or S
  MOD_RES (11)..(12)..(13)..(14)..(15): Xaa is A or G
  MOD_RES (16)..(17)..(18)..(19): Xaa is A or G or absent
RVVMNVTAKKXXXXXXXXXIKRVQVPRLKTPAXXPKPV

SEQ ID NO: 26829 - protein, 41 aa, Artificial Sequence
  Non-cyclic GFR-binding peptide
  MOD_RES (1)..(3)..(37)..(38): Xaa is C or S
  MOD_RES (15)..(16)..(17)..(18)..(19): Xaa is A or G
  MOD_RES (20)..(21)..(22)..(23): Xaa is A or G or absent
XGXARVVMNSMEGIXXXXXXXXXMIQVTINSLQTPAXXPKP

SEQ ID NO: 26830 - protein, 31 aa, Artificial Sequence
  Non-cyclic GFR-binding peptide
  MOD_RES (1)..(1): Xaa is C or S
XSKVIMVTAKKIKPTKGIIKRIQVPRLDQSV

SEQ ID NO: 26831 - protein, 37 aa, Artificial Sequence
  Non-cyclic GFR-binding peptide
  MOD_RES (1)..(35)..(36): Xaa is C or S
  MOD_RES (13)..(14)..(15)..(16)..(17): Xaa is A or G
  MOD_RES (18)..(19)..(20)..(21): Xaa is A or G or absent
XGEVVMESMEGIXXXXXXXXXMIQMTINSLETPVXXA

SEQ ID NO: 26832 - protein, 30 aa, Artificial Sequence
  Non-cyclic GFR-binding peptide
SKVIMVTAKKIKPTKGIIKRIQVPRLDQSV

SEQ ID NO: 26833 - protein, 39 aa, Artificial Sequence
  Non-cyclic GFR-binding peptide
  MOD_RES (1)..(3)..(36)..(37): Xaa is C or S
  MOD_RES (14)..(15)..(16)..(17)..(18): Xaa is A or G
  MOD_RES (19)..(20)..(21)..(22): Xaa is A or G or absent
XKXSRVIMVQVEKXXXXXXXXXVKAIKVSRLAQPVXXPA

SEQ ID NO: 26834 - protein, 30 aa, Artificial Sequence; identical to SEQ ID NO: 2195
  Non-cyclic GFR-binding peptide

SEQ ID NO: 26835 - protein, 33 aa, Artificial Sequence
  Non-cyclic GFR-binding peptide
  MOD_RES (32)..(33): Xaa is C or S
GEVVMEVTAKKVVKDYEDIKRMQVPRLETPVXX

SEQ ID NO: 26836 - protein, 38 aa, Artificial Sequence
  Non-cyclic GFR-binding peptide
  MOD_RES (1)..(35): Xaa is C or S
XKNHQLFNSLQEHQGQHPKIRYYVMPLPEEETPVXELG

SEQ ID NO: 26837 - protein, 33 aa, Artificial Sequence
  Non-cyclic GFR-binding peptide
  MOD_RES (1)..(33): Xaa is C or S
XGEVVMDSMEGIVVKENEDMIQMTINSLETPVX

SEQ ID NO: 26838 - protein, 39 aa, Artificial Sequence
  Non-cyclic GFR-binding peptide
  MOD_RES (1)..(33)..(34): Xaa is C or S
XARVVMNVTAKKIVNSSDDIKRVQVPRLQTPAXXPKPVT

SEQ ID NO: 26839 - protein, 42 aa, Artificial Sequence
  Non-cyclic GFR-binding peptide
  MOD_RES (2)..(4)..(36)..(37): Xaa is C or S
RXGXGEVVMESMEGIVVKDYEDMIQMTINSLETPVXXAKPIS

SEQ ID NO: 26840 - protein, 37 aa, Artificial Sequence
  Non-cyclic GFR-binding peptide
  MOD_RES (31)..(32): Xaa is C or S
RVVMNVQVEKIVNSSDDVKAVKVSRLQTPAXXPKPVT

SEQ ID NO: 26841 - protein, 40 aa, Artificial Sequence
  Non-cyclic GFR-binding peptide
  MOD_RES (1)..(35)..(36): Xaa is C or S
  MOD_RES (13)..(14)..(15)..(16)..(17): Xaa is A or G
  MOD_RES (18)..(19)..(20)..(21): Xaa is A or G or absent
XARVVMNSMEGIXXXXXXXXXMIQVTINSLQTPAXXPKPV

SEQ ID NO: 26842 - protein, 34 aa, Artificial Sequence
  Non-cyclic GFR-binding peptide
  MOD_RES (31)..(32): Xaa is C or S
SKVVMVTAKKVKPTRGVIKRIQVPRLDQPVXXPS

SEQ ID NO: 26843 - protein, 41 aa, Artificial Sequence
  Non-cyclic GFR-binding peptide
  MOD_RES (37)..(37): Xaa is C or S
ALHDELTNSLQEFIPKKRVIEYYVVPLPELQVQTPRXQVNR

SEQ ID NO: 26844 - protein, 39 aa, Artificial Sequence
  Non-cyclic GFR-binding peptide
  MOD_RES (1)..(3)..(36)..(37): Xaa is C or S
  MOD_RES (14)..(15)..(16)..(17)..(18): Xaa is A or G
  MOD_RES (19)..(20)..(21)..(22): Xaa is A or G or absent
XKXSKVIMVQVEKXXXXXXXXXVKAIKVSRLDQSVXXPS

SEQ ID NO: 26845 - protein, 32 aa, Artificial Sequence
  Non-cyclic GFR-binding peptide
  MOD_RES (1)..(1): Xaa is C or S
XSRVVMNVTAKKIVNSSDDIKRVQVPRLKTPA

SEQ ID NO: 26846 - protein, 32 aa, Artificial Sequence
  Non-cyclic GFR-binding peptide
NHQLFNSLQEHQGQHPKIRYYLMTLPEEETPV

SEQ ID NO: 26847 - protein, 36 aa, Artificial Sequence
  Non-cyclic GFR-binding peptide
  MOD_RES (32)..(33): Xaa is C or S
GEVVMESMEGIVVKDYEDMIQMTINSLETPVXXAKP

SEQ ID NO: 26848 - protein, 38 aa, Artificial Sequence
  Non-cyclic GFR-binding peptide
  MOD_RES (2)..(36): Xaa is C or S
  MOD_RES (14)..(15)..(16)..(17)..(18): Xaa is A or G
  MOD_RES (19)..(20)..(21)..(22): Xaa is A or G or absent
GXSRVVMNVTAKKXXXXXXXXXIKRVQVPRLKTPAXTP

SEQ ID NO: 26849 - protein, 39 aa, Artificial Sequence
  Non-cyclic GFR-binding peptide
  MOD_RES (2)..(36)..(37): Xaa is C or S
  MOD_RES (14)..(15)..(16)..(17)..(18): Xaa is A or G
  MOD_RES (19)..(20)..(21)..(22): Xaa is A or G or absent
GXGEVVMEVTAKKXXXXXXXXXIKRMQVPRLETPVXXAK

SEQ ID NO: 26850 - protein, 36 aa, Artificial Sequence
  Non-cyclic GFR-binding peptide
  MOD_RES (31)..(31): Xaa is C or S
RVVMNSMEGIIVNSSDDMIQVTINSLKTPAXTPKTV

SEQ ID NO: 26851 - protein, 40 aa, Artificial Sequence
  Non-cyclic GFR-binding peptide
  MOD_RES (2)..(4)..(36): Xaa is C or S
HXGXSRVVMNSMEGIIVNSSDDMIQVTINSLKTPAXTPKT

SEQ ID NO: 26852 - protein, 39 aa, Artificial Sequence
  Non-cyclic GFR-binding peptide
  MOD_RES (1)..(35): Xaa is C or S
XKNHQLFNSLQEHQGQHPKIRYYVMPLPEEETPVXELGE

SEQ ID NO: 26853 - protein, 40 aa, Artificial Sequence
  Non-cyclic GFR-binding peptide
  MOD_RES (2)..(4): Xaa is C or S
  MOD_RES (17)..(18)..(19)..(20)..(21): Xaa is A or G
  MOD_RES (22)..(23)..(24)..(25): Xaa is A or G or absent
EXKXALHDELTNSLQEXXXXXXXXXYYVVPLPELQVQTPR

SEQ ID NO: 26854 - protein, 34 aa, Artificial Sequence
  Non-cyclic GFR-binding peptide
  MOD_RES (1)..(32)..(33): Xaa is C or S
XSKVIMVQVEKIKPTKGIVKAIKVSRLDQSVXXP

SEQ ID NO: 26855 - protein, 42 aa, Artificial Sequence
  Non-cyclic GFR-binding peptide
  MOD_RES (2)..(4)..(41): Xaa is C or S
EXKXALHDELTNSLQEFIPKKRVIEYYVVPLPELQVQTPRXQ

SEQ ID NO: 26856 - protein, 37 aa, Artificial Sequence
  Non-cyclic GFR-binding peptide
  MOD_RES (2)..(36): Xaa is C or S
  MOD_RES (14)..(15)..(16)..(17)..(18): Xaa is A or G
  MOD_RES (19)..(20)..(21)..(22): Xaa is A or G or absent
EXKNHQLFNSLQEXXXXXXXXXYYLMTLPEEETPVXE

SEQ ID NO: 26857 - protein, 35 aa, Artificial Sequence
  Non-cyclic GFR-binding peptide
  MOD_RES (1)..(35): Xaa is C or S
  MOD_RES (13)..(14)..(15)..(16)..(17): Xaa is A or G
  MOD_RES (18)..(19)..(20)..(21): Xaa is A or G or absent
XGEVVMDVTAKKXXXXXXXXXIKRMQVPRLETPVX

SEQ ID NO: 26858 - protein, 43 aa, Artificial Sequence
  Non-cyclic GFR-binding peptide
  MOD_RES (2)..(4)..(38): Xaa is C or S
  MOD_RES (16)..(17)..(18)..(19)..(20): Xaa is A or G
  MOD_RES (21)..(22)..(23)..(24): Xaa is A or G or absent
HXGXSRVVMNSMEGIXXXXXXXXXMIQVTINSLKTPAXTPKTV

SEQ ID NO: 26859 - protein, 38 aa, Artificial Sequence
  Non-cyclic GFR-binding peptide
  MOD_RES (2)..(36)..(37): Xaa is C or S
  MOD_RES (14)..(15)..(16)..(17)..(18): Xaa is A or G
  MOD_RES (19)..(20)..(21)..(22): Xaa is A or G or absent
GXGEVVMDVTAKKXXXXXXXXXIKRMQVPRLETPVXXA

SEQ ID NO: 26860 - protein, 36 aa, Artificial Sequence
  Non-cyclic GFR-binding peptide
  MOD_RES (1)..(32)..(33): Xaa is C or S
XSKVIMVQVEKIKPTKGIVKAIKVSRLDQSVXXPSA

SEQ ID NO: 26861 - protein, 34 aa, Artificial Sequence
  Non-cyclic GFR-binding peptide
  MOD_RES (13)..(14)..(15)..(16)..(17): Xaa is A or G
  MOD_RES (18)..(19)..(20)..(21): Xaa is A or G or absent
ALHDELTNSLQEXXXXXXXXXYYVVPLPELQVQT

SEQ ID NO: 26862 - protein, 36 aa, Artificial Sequence
  Non-cyclic GFR-binding peptide
  MOD_RES (2)..(4)..(35)..(36): Xaa is C or S
SXKXSKVVMVTAKKVKPTRGVIKRIQVPRLDQPVXX

SEQ ID NO: 26863 - protein, 35 aa, Artificial Sequence
  Non-cyclic GFR-binding peptide
  MOD_RES (2)..(4)..(35): Xaa is C or S
SXKXSRVIMVTAKKVKPKRGVIKRIQVPRLAQPVX

SEQ ID NO: 26864 - protein, 39 aa, Artificial Sequence
  Non-cyclic GFR-binding peptide
  MOD_RES (2)..(4)..(38): Xaa is C or S
RXEXKNHQLFNSLQEHQGQHPKIRYYVMPLPEEETPVXE

SEQ ID NO: 26865 - protein, 41 aa, Artificial Sequence
  Non-cyclic GFR-binding peptide
  MOD_RES (2)..(4)..(38)..(39): Xaa is C or S
  MOD_RES (16)..(17)..(18)..(19)..(20): Xaa is A or G
  MOD_RES (21)..(22)..(23)..(24): Xaa is A or G or absent
HXGXARVVMNVQVEKXXXXXXXXXVKAVKVSRLQTPAXXPK

SEQ ID NO: 26866 - protein, 39 aa, Artificial Sequence
  Non-cyclic GFR-binding peptide
  MOD_RES (33)..(34): Xaa is C or S
  MOD_RES (11)..(12)..(13)..(14)..(15): Xaa is A or G
  MOD_RES (16)..(17)..(18)..(19): Xaa is A or G or absent
EVVMDVQVEKXXXXXXXXXVKAMKVSRLETPVXXAKPIK

SEQ ID NO: 26867 - protein, 33 aa, Artificial Sequence
  Non-cyclic GFR-binding peptide
LHDELTNSLQEFIPKKRVIEYYVVPLPELQVQT

SEQ ID NO: 26868 - protein, 38 aa, Artificial Sequence
  Non-cyclic GFR-binding peptide
  MOD_RES (1)..(35): Xaa is C or S
  MOD_RES (13)..(14)..(15)..(16)..(17): Xaa is A or G
  MOD_RES (18)..(19)..(20)..(21): Xaa is A or G or absent
XSRVVMNVQVEKXXXXXXXXXVKAVKVSRLKTPAXTPK

SEQ ID NO: 26869 - protein, 39 aa, Artificial Sequence
  Non-cyclic GFR-binding peptide
  MOD_RES (1)..(33)..(34): Xaa is C or S
XGEVVMEVTAKKVVKDYEDIKRMQVPRLETPVXXAKPIS

SEQ ID NO: 26870 - protein, 38 aa, Artificial Sequence
  Non-cyclic GFR-binding peptide
  MOD_RES (1)..(35): Xaa is C or S
  MOD_RES (13)..(14)..(15)..(16)..(17): Xaa is A or G
  MOD_RES (18)..(19)..(20)..(21): Xaa is A or G or absent
XKNHQLFNSLQEXXXXXXXXXYYVMPLPEEETPVXELG

SEQ ID NO: 26871 - protein, 34 aa, Artificial Sequence
  Non-cyclic GFR-binding peptide
  MOD_RES (31)..(32): Xaa is C or S
RVVMNVQVEKIVNSSDDVKAVKVSRLKTPAXXPK

SEQ ID NO: 26872 - protein, 42 aa, Artificial Sequence
  Non-cyclic GFR-binding peptide
  MOD_RES (2)..(4)..(36)..(37): Xaa is C or S
RXGXGEVVMDVTAKKVVKENEDIKRMQVPRLETPVXXAKPIK

SEQ ID NO: 26873 - protein, 41 aa, Artificial Sequence
  Non-cyclic GFR-binding peptide
  MOD_RES (2)..(36)..(37): Xaa is C or S
  MOD_RES (14)..(15)..(16)..(17)..(18): Xaa is A or G
  MOD_RES (19)..(20)..(21)..(22): Xaa is A or G or absent
GXARVVMNVTAKKXXXXXXXXXIKRVQVPRLQTPAXXPKPV

SEQ ID NO: 26874 - protein, 32 aa, Artificial Sequence
  Non-cyclic GFR-binding peptide
  MOD_RES (1)..(1): Xaa is C or S
XGEVVMDSMEGIVVKENEDMIQMTINSLETPV

SEQ ID NO: 26875 - protein, 41 aa, Artificial Sequence
  Non-cyclic GFR-binding peptide
  MOD_RES (2)..(36): Xaa is C or S
  MOD_RES (14)..(15)..(16)..(17)..(18): Xaa is A or G
  MOD_RES (19)..(20)..(21)..(22): Xaa is A or G or absent
GXSRVVMNVTAKKXXXXXXXXXIKRVQVPRLKTPAXTPKTV

SEQ ID NO: 26876 - protein, 37 aa, Artificial Sequence
  Non-cyclic GFR-binding peptide
  MOD_RES (2)..(4)..(35)..(36): Xaa is C or S
SXKXSRVIMSMEGIVKPKRGVMIQITINSLAQPVXXP

SEQ ID NO: 26877 - protein, 34 aa, Artificial Sequence
  Non-cyclic GFR-binding peptide
  MOD_RES (32)..(33): Xaa is C or S
GEVVMEVQVEKVVKDYEDVKAMKVSRLETPVXXA

SEQ ID NO: 26878 - protein, 40 aa, Artificial Sequence
  Non-cyclic GFR-binding peptide
  MOD_RES (1)..(3)..(37)..(38): Xaa is C or S
  MOD_RES (15)..(16)..(17)..(18)..(19): Xaa is A or G
  MOD_RES (20)..(21)..(22)..(23): Xaa is A or G or absent
XGXARVVMNVQVEKXXXXXXXXXVKAVKVSRLQTPAXXPK

SEQ ID NO: 26879 - protein, 39 aa, Artificial Sequence
  Non-cyclic GFR-binding peptide
  MOD_RES (35)..(35): Xaa is C or S
  MOD_RES (11)..(12)..(13)..(14)..(15): Xaa is A or G
  MOD_RES (16)..(17)..(18)..(19): Xaa is A or G or absent
HDELTNSLQEXXXXXXXXXYYLVTLPELQVQTPRXQVNR

SEQ ID NO: 26880 - protein, 37 aa, Artificial Sequence
  Non-cyclic GFR-binding peptide
  MOD_RES (2)..(4)..(37): Xaa is C or S
  MOD_RES (15)..(16)..(17)..(18)..(19): Xaa is A or G
  MOD_RES (20)..(21)..(22)..(23): Xaa is A or G or absent
SXKXSKVVMVQVEKXXXXXXXXXVKAIKVSRLDQPVX

SEQ ID NO: 26881 - protein, 40 aa, Artificial Sequence
  Non-cyclic GFR-binding peptide
  MOD_RES (1)..(3)..(34)..(35): Xaa is C or S
XKXSRVIMVTAKKVKPKRGVIKRIQVPRLAQPVXXPAASA

SEQ ID NO: 26882 - protein, 37 aa, Artificial Sequence
  Non-cyclic GFR-binding peptide
  MOD_RES (1)..(3)..(36)..(37): Xaa is C or S
  MOD_RES (14)..(15)..(16)..(17)..(18): Xaa is A or G
  MOD_RES (19)..(20)..(21)..(22): Xaa is A or G or absent
XKXSKVIMVQVEKXXXXXXXXXVKAIKVSRLDQSVXX

SEQ ID NO: 26883 - protein, 38 aa, Artificial Sequence
  Non-cyclic GFR-binding peptide
  MOD_RES (32)..(33): Xaa is C or S
GEVVMDVTAKKVVKENEDIKRMQVPRLETPVXXAKPIK

SEQ ID NO: 26884 - protein, 36 aa, Artificial Sequence
  Non-cyclic GFR-binding peptide
ELHEELRNSLQELKPKKRVYEYYLVTLPEHHVRSPQ

SEQ ID NO: 26885 - protein, 33 aa, Artificial Sequence
  Non-cyclic GFR-binding peptide
  MOD_RES (33)..(33): Xaa is C or S
  MOD_RES (11)..(12)..(13)..(14)..(15): Xaa is A or G
  MOD_RES (16)..(17)..(18)..(19): Xaa is A or G or absent
SKVIMVTAKKXXXXXXXXXIKRIQVPRLDQSVX

SEQ ID NO: 26886 - protein, 39 aa, Artificial Sequence
  Non-cyclic GFR-binding peptide
  MOD_RES (1)..(3)..(35)..(36): Xaa is C or S
XGXARVVMNSMEGIIVNSSDDMIQVTINSLQTPAXXPKP

SEQ ID NO: 26887 - protein, 34 aa, Artificial Sequence
  Non-cyclic GFR-binding peptide
  MOD_RES (2)..(34): Xaa is C or S
GXGEVVMDSMEGIVVKENEDMIQMTINSLETPVX

SEQ ID NO: 26888 - protein, 38 aa, Artificial Sequence
  Non-cyclic GFR-binding peptide
  MOD_RES (36)..(36): Xaa is C or S
LHEELRNSLQELKPKKRVYEYYLVTLPEHHVRSPQXKV

SEQ ID NO: 26889 - protein, 33 aa, Artificial Sequence
  Non-cyclic GFR-binding peptide
  MOD_RES (2)..(2): Xaa is C or S
GXSRVVMNSMEGIIVNSSDDMIQVTINSLKTPA

SEQ ID NO: 26890 - protein, 38 aa, Artificial Sequence
  Non-cyclic GFR-binding peptide
  MOD_RES (1)..(3)..(35)..(36): Xaa is C or S
XGXARVVMNSMEGIIVNSSDDMIQVTINSLQTPAXXPK

SEQ ID NO: 26891 - protein, 40 aa, Artificial Sequence
  Non-cyclic GFR-binding peptide
  MOD_RES (34)..(34): Xaa is C or S
  MOD_RES (12)..(13)..(14)..(15)..(16): Xaa is A or G
  MOD_RES (17)..(18)..(19)..(20): Xaa is A or G or absent
SRVVMNVTAKKXXXXXXXXXIKRVQVPRLKTPAXTPKTVH

SEQ ID NO: 26892 - protein, 41 aa, Artificial Sequence
  Non-cyclic GFR-binding peptide
  MOD_RES (1)..(3)..(35)..(36): Xaa is C or S
XGXGEVVMEVTAKKVVKDYEDIKRMQVPRLETPVXXAKPIS

SEQ ID NO: 26893 - protein, 31 aa, Artificial Sequence
  Non-cyclic GFR-binding peptide
  MOD_RES (31)..(31): Xaa is C or S
SKVVMVQVEKVKPTRGVVKAIKVSRLDQPVX

SEQ ID NO: 26894 - protein, 40 aa, Artificial Sequence
  Non-cyclic GFR-binding peptide
  MOD_RES (2)..(4)..(37)..(38): Xaa is C or S
  MOD_RES (15)..(16)..(17)..(18)..(19): Xaa is A or G
  MOD_RES (20)..(21)..(22)..(23): Xaa is A or G or absent
SXKXSKVIMVQVEKXXXXXXXXXVKAIKVSRLDQSVXXPS

SEQ ID NO: 26895 - protein, 38 aa, Artificial Sequence
  Non-cyclic GFR-binding peptide
  MOD_RES (2)..(35)..(36): Xaa is C or S
  MOD_RES (13)..(14)..(15)..(16)..(17): Xaa is A or G
  MOD_RES (18)..(19)..(20)..(21): Xaa is A or G or absent
KXSRVIMVQVEKXXXXXXXXXVKAIKVSRLAQPVXXPA

SEQ ID NO: 26896 - protein, 38 aa, Artificial Sequence
  Non-cyclic GFR-binding peptide
  MOD_RES (2)..(34)..(35): Xaa is C or S
GXSRVVMNVQVEKIVNSSDDVKAVKVSRLKTPAXXPKP

SEQ ID NO: 26897 - protein, 38 aa, Artificial Sequence
  Non-cyclic GFR-binding peptide
  MOD_RES (2)..(4)..(38): Xaa is C or S
  MOD_RES (16)..(17)..(18)..(19)..(20): Xaa is A or G
  MOD_RES (21)..(22)..(23)..(24): Xaa is A or G or absent
RXGXGEVVMESMEGIXXXXXXXXXMIQMTINSLETPVX

SEQ ID NO: 26898 - protein, 33 aa, Artificial Sequence
  Non-cyclic GFR-binding peptide
  MOD_RES (31)..(32): Xaa is C or S
EVVMESMEGIVVKDYEDMIQMTINSLETPVXXA

SEQ ID NO: 26899 - protein, 40 aa, Artificial Sequence
  Non-cyclic GFR-binding peptide
  MOD_RES (36)..(36): Xaa is C or S
  MOD_RES (12)..(13)..(14)..(15)..(16): Xaa is A or G
  MOD_RES (17)..(18)..(19)..(20): Xaa is A or G or absent
LHEELRNSLQEXXXXXXXXXYYVVPLPEHHVRSPQXKVSS

SEQ ID NO: 26900 - protein, 35 aa, Artificial Sequence
  Non-cyclic GFR-binding peptide
  MOD_RES (1)..(3): Xaa is C or S
  MOD_RES (14)..(15)..(16)..(17)..(18): Xaa is A or G
  MOD_RES (19)..(20)..(21)..(22): Xaa is A or G or absent
XKXSKVIMVTAKKXXXXXXXXXIKRIQVPRLDQSV

SEQ ID NO: 26901 - protein, 35 aa, Artificial Sequence
  Non-cyclic GFR-binding peptide
  MOD_RES (2)..(35): Xaa is C or S
  MOD_RES (13)..(14)..(15)..(16)..(17): Xaa is A or G
  MOD_RES (18)..(19)..(20)..(21): Xaa is A or G or absent
KXSRVIMSMEGIXXXXXXXXXMIQITINSLAQPVX

SEQ ID NO: 26902 - protein, 39 aa, Artificial Sequence
  Non-cyclic GFR-binding peptide
  MOD_RES (35)..(35): Xaa is C or S
HDELTNSLQEFIPKKRVIEYYLVTLPELQVQTPRXQVNR

SEQ ID NO: 26903 - protein, 37 aa, Artificial Sequence
  Non-cyclic GFR-binding peptide
  MOD_RES (2)..(4)..(36): Xaa is C or S
HXGXSRVVMNVTAKKIVNSSDDIKRVQVPRLKTPAXT

SEQ ID NO: 26904 - protein, 38 aa, Artificial Sequence
  Non-cyclic GFR-binding peptide
  MOD_RES (1)..(33)..(34): Xaa is C or S
XARVVMNVQVEKIVNSSDDVKAVKVSRLQTPAXXPKPV

SEQ ID NO: 26905 - protein, 39 aa, Artificial Sequence
  Non-cyclic GFR-binding peptide
  MOD_RES (2)..(4)..(35)..(36): Xaa is C or S
SXKXSKVIMVQVEKIKPTKGIVKAIKVSRLDQSVXXPSA

SEQ ID NO: 26906 - protein, 39 aa, Artificial Sequence
  Non-cyclic GFR-binding peptide
  MOD_RES (1)..(33)..(34): Xaa is C or S
XSRVVMNVQVEKIVNSSDDVKAVKVSRLKTPAXXPKPVY

SEQ ID NO: 26907 - protein, 39 aa, Artificial Sequence
  Non-cyclic GFR-binding peptide
  MOD_RES (1)..(3)..(37): Xaa is C or S
XEXKNHQLFNSLQEHQGQHPKIRYYVMPLPEEETPVXEL

SEQ ID NO: 26908 - protein, 38 aa, Artificial Sequence
  Non-cyclic GFR-binding peptide
  MOD_RES (36)..(36): Xaa is C or S
  MOD_RES (12)..(13)..(14)..(15)..(16): Xaa is A or G
  MOD_RES (17)..(18)..(19)..(20): Xaa is A or G or absent
LHDELTNSLQEXXXXXXXXXYYVVPLPELQVQTPRXQV

SEQ ID NO: 26909 - protein, 39 aa, Artificial Sequence
  Non-cyclic GFR-binding peptide
  MOD_RES (1)..(34)..(35): Xaa is C or S
  MOD_RES (12)..(13)..(14)..(15)..(16): Xaa is A or G
  MOD_RES (17)..(18)..(19)..(20): Xaa is A or G or absent
XSKVVMVTAKKXXXXXXXXXIKRIQVPRLDQPVXXPSAS

SEQ ID NO: 26910 - protein, 35 aa, Artificial Sequence
  Non-cyclic GFR-binding peptide
  MOD_RES (2)..(34)..(35): Xaa is C or S
GXARVVMNSMEGIIVNSSDDMIQVTINSLQTPAXX

SEQ ID NO: 26911 - protein, 32 aa, Artificial Sequence
  Non-cyclic GFR-binding peptide
  MOD_RES (11)..(12)..(13)..(14)..(15): Xaa is A or G
  MOD_RES (16)..(17)..(18)..(19): Xaa is A or G or absent
EVVMEVTAKKXXXXXXXXXIKRMQVPRLETPV

SEQ ID NO: 26912 - protein, 37 aa, Artificial Sequence
  Non-cyclic GFR-binding peptide
  MOD_RES (1)..(35): Xaa is C or S
  MOD_RES (13)..(14)..(15)..(16)..(17): Xaa is A or G
  MOD_RES (18)..(19)..(20)..(21): Xaa is A or G or absent
XSRVVMNSMEGIXXXXXXXXXMIQVTINSLKTPAXTP

SEQ ID NO: 26913 - protein, 37 aa, Artificial Sequence
  Non-cyclic GFR-binding peptide
  MOD_RES (2)..(4)..(35)..(36): Xaa is C or S
SXKXSKVVMVTAKKVKPTRGVIKRIQVPRLDQPVXXP

SEQ ID NO: 26914 - protein, 32 aa, Artificial Sequence
  Non-cyclic GFR-binding peptide
  MOD_RES (11)..(12)..(13)..(14)..(15): Xaa is A or G
  MOD_RES (16)..(17)..(18)..(19): Xaa is A or G or absent
RVVMNVQVEKXXXXXXXXXVKAVKVSRLKTPA

SEQ ID NO: 26915 - protein, 34 aa, Artificial Sequence
  Non-cyclic GFR-binding peptide
  MOD_RES (1)..(33)..(34): Xaa is C or S
XGEVVMDVQVEKVVKENEDVKAMKVSRLETPVXX

SEQ ID NO: 26916 - protein, 39 aa, Artificial Sequence
  Non-cyclic GFR-binding peptide
  MOD_RES (1)..(35): Xaa is C or S
  MOD_RES (13)..(14)..(15)..(16)..(17): Xaa is A or G
  MOD_RES (18)..(19)..(20)..(21): Xaa is A or G or absent
XKNHQLFNSLQEXXXXXXXXXYYVMPLPEEETPVXELGE

SEQ ID NO: 26917 - protein, 36 aa, Artificial Sequence
  Non-cyclic GFR-binding peptide
  MOD_RES (1)..(34)..(35): Xaa is C or S
  MOD_RES (12)..(13)..(14)..(15)..(16): Xaa is A or G
  MOD_RES (17)..(18)..(19)..(20): Xaa is A or G or absent
XSKVIMVQVEKXXXXXXXXXVKAIKVSRLDQSVXXP

SEQ ID NO: 26918 - protein, 41 aa, Artificial Sequence
  Non-cyclic GFR-binding peptide
  MOD_RES (1)..(3)..(37)..(38): Xaa is C or S
  MOD_RES (15)..(16)..(17)..(18)..(19): Xaa is A or G
  MOD_RES (20)..(21)..(22)..(23): Xaa is A or G or absent
XGXARVVMNVQVEKXXXXXXXXXVKAVKVSRLQTPAXXPKP

SEQ ID NO: 26919 - protein, 37 aa, Artificial Sequence
  Non-cyclic GFR-binding peptide
  MOD_RES (1)..(3)..(37): Xaa is C or S
  MOD_RES (15)..(16)..(17)..(18)..(19): Xaa is A or G
  MOD_RES (20)..(21)..(22)..(23): Xaa is A or G or absent
XGXGEVVMDVQVEKXXXXXXXXXVKAMKVSRLETPVX

SEQ ID NO: 26920 - protein, 39 aa, Artificial Sequence
  Non-cyclic GFR-binding peptide
  MOD_RES (34)..(35): Xaa is C or S
  MOD_RES (12)..(13)..(14)..(15)..(16): Xaa is A or G
  MOD_RES (17)..(18)..(19)..(20): Xaa is A or G or absent
GEVVMEVQVEKXXXXXXXXXVKAMKVSRLETPVXXAKPI

SEQ ID NO: 26921 - protein, 37 aa, Artificial Sequence
  Non-cyclic GFR-binding peptide
  MOD_RES (35)..(35): Xaa is C or S
HDELTNSLQEFIPKKRVIEYYVVPLPELQVQTPRXQV

SEQ ID NO: 26922 - protein, 37 aa, Artificial Sequence
  Non-cyclic GFR-binding peptide
  MOD_RES (1)..(3)..(36)..(37): Xaa is C or S
  MOD_RES (14)..(15)..(16)..(17)..(18): Xaa is A or G
  MOD_RES (19)..(20)..(21)..(22): Xaa is A or G or absent
XKXSRVIMVTAKKXXXXXXXXXIKRIQVPRLAQPVXX

SEQ ID NO: 26923 - protein, 40 aa, Artificial Sequence
  Non-cyclic GFR-binding peptide
  MOD_RES (1)..(3)..(35)..(36): Xaa is C or S
XGXGEVVMESMEGIVVKDYEDMIQMTINSLETPVXXAKPI

SEQ ID NO: 26924 - protein, 42 aa, Artificial Sequence
  Non-cyclic GFR-binding peptide
  MOD_RES (2)..(4)..(38): Xaa is C or S
RXEXKNHQLFNSLQEHQGQHPKIRYYLMTLPEEETPVXELGE

SEQ ID NO: 26925 - protein, 35 aa, Artificial Sequence
  Non-cyclic GFR-binding peptide
  MOD_RES (32)..(32): Xaa is C or S
SRVVMNVQVEKIVNSSDDVKAVKVSRLKTPAXTPK

SEQ ID NO: 26926 - protein, 38 aa, Artificial Sequence
  Non-cyclic GFR-binding peptide
  MOD_RES (34)..(34): Xaa is C or S
  MOD_RES (12)..(13)..(14)..(15)..(16): Xaa is A or G
  MOD_RES (17)..(18)..(19)..(20): Xaa is A or G or absent
SRVVMNSMEGIXXXXXXXXXMIQVTINSLKTPAXTPKT

SEQ ID NO: 26927 - protein, 40 aa, Artificial Sequence
  Non-cyclic GFR-binding peptide
  MOD_RES (2)..(36)..(37): Xaa is C or S
  MOD_RES (14)..(15)..(16)..(17)..(18): Xaa is A or G
  MOD_RES (19)..(20)..(21)..(22): Xaa is A or G or absent
GXSRVVMNSMEGIXXXXXXXXXMIQVTINSLKTPAXXPKP

SEQ ID NO: 26928 - protein, 41 aa, Artificial Sequence
  Non-cyclic GFR-binding peptide
  MOD_RES (1)..(3)..(40): Xaa is C or S
  MOD_RES (16)..(17)..(18)..(19)..(20): Xaa is A or G
  MOD_RES (21)..(22)..(23)..(24): Xaa is A or G or absent
XKXALHDELTNSLQEXXXXXXXXXYYLVTLPELQVQTPRXQ

SEQ ID NO: 26929 - protein, 43 aa, Artificial Sequence
  Non-cyclic GFR-binding peptide
  MOD_RES (2)..(39): Xaa is C or S
AXELHEELRNSLQELKPKKRVYEYYVVPLPEHHVRSPQXKVSS

SEQ ID NO: 26930 - protein, 35 aa, Artificial Sequence
  Non-cyclic GFR-binding peptide
  MOD_RES (12)..(13)..(14)..(15)..(16): Xaa is A or G
  MOD_RES (17)..(18)..(19)..(20): Xaa is A or G or absent
LHEELRNSLQEXXXXXXXXXYYVVPLPEHHVRSPQ

SEQ ID NO: 26931 - protein, 31 aa, Artificial Sequence
  Non-cyclic GFR-binding peptide
  MOD_RES (31)..(31): Xaa is C or S
RVVMNSMEGIIVNSSDDMIQVTINSLQTPAX

SEQ ID NO: 26932 - protein, 38 aa, Artificial Sequence
  Non-cyclic GFR-binding peptide
  MOD_RES (2)..(4)..(38): Xaa is C or S
  MOD_RES (16)..(17)..(18)..(19)..(20): Xaa is A or G
  MOD_RES (21)..(22)..(23)..(24): Xaa is A or G or absent
RXEXKNHQLFNSLQEXXXXXXXXXYYVMPLPEEETPVX

SEQ ID NO: 26933 - protein, 41 aa, Artificial Sequence
  Non-cyclic GFR-binding peptide
  MOD_RES (2)..(4)..(38)..(39): Xaa is C or S
  MOD_RES (16)..(17)..(18)..(19)..(20): Xaa is A or G
  MOD_RES (21)..(22)..(23)..(24): Xaa is A or G or absent
RXGXGEVVMEVQVEKXXXXXXXXXVKAMKVSRLETPVXXAK

SEQ ID NO: 26934 - protein, 38 aa, Artificial Sequence
  Non-cyclic GFR-binding peptide
  MOD_RES (1)..(33)..(34): Xaa is C or S
XSRVVMNVTAKKIVNSSDDIKRVQVPRLKTPAXXPKPV

SEQ ID NO: 26935 - protein, 40 aa, Artificial Sequence
  Non-cyclic GFR-binding peptide
  MOD_RES (2)..(4): Xaa is C or S
AXAXELHEELRNSLQELKPKKRVYEYYVVPLPEHHVRSPQ

SEQ ID NO: 26936 - protein, 33 aa, Artificial Sequence
  Non-cyclic GFR-binding peptide
  MOD_RES (2)..(33): Xaa is C or S
KXSRVIMVTAKKVKPKRGVIKRIQVPRLAQPVX

SEQ ID NO: 26937 - protein, 35 aa, Artificial Sequence
  Non-cyclic GFR-binding peptide
  MOD_RES (32)..(33): Xaa is C or S
GEVVMESMEGIVVKDYEDMIQMTINSLETPVXXAK

SEQ ID NO: 26938 - protein, 37 aa, Artificial Sequence
  Non-cyclic GFR-binding peptide
  MOD_RES (2)..(35)..(36): Xaa is C or S
  MOD_RES (13)..(14)..(15)..(16)..(17): Xaa is A or G
  MOD_RES (18)..(19)..(20)..(21): Xaa is A or G or absent
KXSRVIMVQVEKXXXXXXXXXVKAIKVSRLAQPVXXP

SEQ ID NO: 26939 - protein, 38 aa, Artificial Sequence
  Non-cyclic GFR-binding peptide
  MOD_RES (2)..(36)..(37): Xaa is C or S
  MOD_RES (14)..(15)..(16)..(17)..(18): Xaa is A or G
  MOD_RES (19)..(20)..(21)..(22): Xaa is A or G or absent
GXARVVMNVTAKKXXXXXXXXXIKRVQVPRLQTPAXXP

SEQ ID NO: 26940 - protein, 37 aa, Artificial Sequence
  Non-cyclic GFR-binding peptide
  MOD_RES (1)..(1): Xaa is C or S
XELHEELRNSLQELKPKKRVYEYYVVPLPEHHVRSPQ

SEQ ID NO: 26941 - protein, 36 aa, Artificial Sequence
  Non-cyclic GFR-binding peptide
  MOD_RES (1)..(3): Xaa is C or S
  MOD_RES (15)..(16)..(17)..(18)..(19): Xaa is A or G
  MOD_RES (20)..(21)..(22)..(23): Xaa is A or G or absent
XGXSRVVMNVTAKKXXXXXXXXXIKRVQVPRLKTPA

SEQ ID NO: 26942 - protein, 38 aa, Artificial Sequence
  Non-cyclic GFR-binding peptide
  MOD_RES (2)..(4): Xaa is C or S
EXKXALHDELTNSLQEFIPKKRVIEYYLVTLPELQVQT

SEQ ID NO: 26943 - protein, 33 aa, Artificial Sequence
  Non-cyclic GFR-binding peptide
  MOD_RES (33)..(33): Xaa is C or S
  MOD_RES (11)..(12)..(13)..(14)..(15): Xaa is A or G
  MOD_RES (16)..(17)..(18)..(19): Xaa is A or G or absent
EVVMEVQVEKXXXXXXXXXVKAMKVSRLETPVX

SEQ ID NO: 26944 - protein, 36 aa, Artificial Sequence
  Non-cyclic GFR-binding peptide
  MOD_RES (33)..(34): Xaa is C or S
  MOD_RES (11)..(12)..(13)..(14)..(15): Xaa is A or G
  MOD_RES (16)..(17)..(18)..(19): Xaa is A or G or absent
EVVMESMEGIXXXXXXXXXMIQMTINSLETPVXXAK

SEQ ID NO: 26945 - protein, 39 aa, Artificial Sequence
  Non-cyclic GFR-binding peptide
  MOD_RES (35)..(35): Xaa is C or S
HDELTNSLQEFIPKKRVIEYYVVPLPELQVQTPRXQVNR

SEQ ID NO: 26946 - protein, 39 aa, Artificial Sequence
  Non-cyclic GFR-binding peptide
  MOD_RES (1)..(3)..(35)..(36): Xaa is C or S
XGXSRVVMNSMEGIIVNSSDDMIQVTINSLKTPAXXPKP

SEQ ID NO: 26947 - protein, 33 aa, Artificial Sequence
  Non-cyclic GFR-binding peptide
  MOD_RES (33)..(33): Xaa is C or S
  MOD_RES (11)..(12)..(13)..(14)..(15): Xaa is A or G
  MOD_RES (16)..(17)..(18)..(19): Xaa is A or G or absent
EVVMEVTAKKXXXXXXXXXIKRMQVPRLETPVX

SEQ ID NO: 26948 - protein, 31 aa, Artificial Sequence
  Non-cyclic GFR-binding peptide
  MOD_RES (31)..(31): Xaa is C or S
SKVIMVTAKKIKPTKGIIKRIQVPRLDQSVX

SEQ ID NO: 26949 - protein, 40 aa, Artificial Sequence
  Non-cyclic GFR-binding peptide
  MOD_RES (2)..(36): Xaa is C or S
  MOD_RES (14)..(15)..(16)..(17)..(18): Xaa is A or G
  MOD_RES (19)..(20)..(21)..(22): Xaa is A or G or absent
GXSRVVMNVQVEKXXXXXXXXXVKAVKVSRLKTPAXTPKT

SEQ ID NO: 26950 - protein, 36 aa, Artificial Sequence
  Non-cyclic GFR-binding peptide
  MOD_RES (2)..(35)..(36): Xaa is C or S
  MOD_RES (13)..(14)..(15)..(16)..(17): Xaa is A or G
  MOD_RES (18)..(19)..(20)..(21): Xaa is A or G or absent
KXSKVIMVTAKKXXXXXXXXXIKRIQVPRLDQSVXX

SEQ ID NO: 26951 - protein, 37 aa, Artificial Sequence
  Non-cyclic GFR-binding peptide
  MOD_RES (33)..(34): Xaa is C or S
  MOD_RES (11)..(12)..(13)..(14)..(15): Xaa is A or G
  MOD_RES (16)..(17)..(18)..(19): Xaa is A or G or absent
RVVMNVQVEKXXXXXXXXXVKAVKVSRLQTPAXXPKP

SEQ ID NO: 26952 - protein, 32 aa, Artificial Sequence
  Non-cyclic GFR-binding peptide
  MOD_RES (11)..(12)..(13)..(14)..(15): Xaa is A or G
  MOD_RES (16)..(17)..(18)..(19): Xaa is A or G or absent
SRVIMVTAKKXXXXXXXXXIKRIQVPRLAQPV

SEQ ID NO: 26953 - protein, 37 aa, Artificial Sequence
  Non-cyclic GFR-binding peptide
  MOD_RES (1)..(3): Xaa is C or S
XAXELHEELRNSLQELKPKKRVYEYYVVPLPEHHVRS

SEQ ID NO: 26954 - protein, 36 aa, Artificial Sequence
  Non-cyclic GFR-binding peptide
  MOD_RES (1)..(33)..(34): Xaa is C or S
XGEVVMEVTAKKVVKDYEDIKRMQVPRLETPVXXAK

SEQ ID NO: 26955 - protein, 39 aa, Artificial Sequence
  Non-cyclic GFR-binding peptide
  MOD_RES (2)..(36)..(37): Xaa is C or S
  MOD_RES (14)..(15)..(16)..(17)..(18): Xaa is A or G
  MOD_RES (19)..(20)..(21)..(22): Xaa is A or G or absent
GXSRVVMNSMEGIXXXXXXXXXMIQVTINSLKTPAXXPK

SEQ ID NO: 26956 - protein, 41 aa, Artificial Sequence
  Non-cyclic GFR-binding peptide
  MOD_RES (1)..(3)..(36)..(37): Xaa is C or S
  MOD_RES (14)..(15)..(16)..(17)..(18): Xaa is A or G
  MOD_RES (19)..(20)..(21)..(22): Xaa is A or G or absent
XKXSKVIMSMEGIXXXXXXXXXMIQITINSLDQSVXXPSAS

SEQ ID NO: 26957 - protein, 38 aa, Artificial Sequence
  Non-cyclic GFR-binding peptide
  MOD_RES (1)..(34)..(35): Xaa is C or S
  MOD_RES (12)..(13)..(14)..(15)..(16): Xaa is A or G
  MOD_RES (17)..(18)..(19)..(20): Xaa is A or G or absent
XSKVVMVQVEKXXXXXXXXXVKAIKVSRLDQPVXXPSA

SEQ ID NO: 26958 - protein, 40 aa, Artificial Sequence
  Non-cyclic GFR-binding peptide
  MOD_RES (2)..(4)..(36)..(37): Xaa is C or S
RXGXGEVVMESMEGIVVKDYEDMIQMTINSLETPVXXAKP

SEQ ID NO: 26959 - protein, 34 aa, Artificial Sequence
  Non-cyclic GFR-binding peptide
  MOD_RES (1)..(1): Xaa is C or S
  MOD_RES (13)..(14)..(15)..(16)..(17): Xaa is A or G
  MOD_RES (18)..(19)..(20)..(21): Xaa is A or G or absent
XSRVVMNVQVEKXXXXXXXXXVKAVKVSRLKTPA

SEQ ID NO: 26960 - protein, 37 aa, Artificial Sequence
  Non-cyclic GFR-binding peptide
  MOD_RES (2)..(4): Xaa is C or S
  MOD_RES (16)..(17)..(18)..(19)..(20): Xaa is A or G
  MOD_RES (21)..(22)..(23)..(24): Xaa is A or G or absent
HXGXARVVMNSMEGIXXXXXXXXXMIQVTINSLQTPA

SEQ ID NO: 26961 - protein, 42 aa, Artificial Sequence
  Non-cyclic GFR-binding peptide
  MOD_RES (1)..(3)..(37): Xaa is C or S
  MOD_RES (15)..(16)..(17)..(18)..(19): Xaa is A or G
  MOD_RES (20)..(21)..(22)..(23): Xaa is A or G or absent
XGXSRVVMNSMEGIXXXXXXXXXMIQVTINSLKTPAXTPKTV

SEQ ID NO: 26962 - protein, 39 aa, Artificial Sequence
  Non-cyclic GFR-binding peptide
  MOD_RES (2)..(34): Xaa is C or S
GXSRVVMNVQVEKIVNSSDDVKAVKVSRLKTPAXTPKTV

SEQ ID NO: 26963 - protein, 37 aa, Artificial Sequence
  Non-cyclic GFR-binding peptide
  MOD_RES (34)..(35): Xaa is C or S
  MOD_RES (12)..(13)..(14)..(15)..(16): Xaa is A or G
  MOD_RES (17)..(18)..(19)..(20): Xaa is A or G or absent
SRVVMNVQVEKXXXXXXXXXVKAVKVSRLKTPAXXPK

SEQ ID NO: 26964 - protein, 38 aa, Artificial Sequence
  Non-cyclic GFR-binding peptide
  MOD_RES (2)..(35)..(36): Xaa is C or S
  MOD_RES (13)..(14)..(15)..(16)..(17): Xaa is A or G
  MOD_RES (18)..(19)..(20)..(21): Xaa is A or G or absent
KXSKVIMVQVEKXXXXXXXXXVKAIKVSRLDQSVXXPS

SEQ ID NO: 26965 - protein, 40 aa, Artificial Sequence
  Non-cyclic GFR-binding peptide
  MOD_RES (34)..(35): Xaa is C or S
  MOD_RES (12)..(13)..(14)..(15)..(16): Xaa is A or G
  MOD_RES (17)..(18)..(19)..(20): Xaa is A or G or absent
GEVVMDVQVEKXXXXXXXXXVKAMKVSRLETPVXXAKPIK

SEQ ID NO: 26966 - protein, 35 aa, Artificial Sequence
  Non-cyclic GFR-binding peptide
  MOD_RES (2)..(4): Xaa is C or S
HXGXSRVVMNVQVEKIVNSSDDVKAVKVSRLKTPA

SEQ ID NO: 26967 - protein, 39 aa, Artificial Sequence
  Non-cyclic GFR-binding peptide
  MOD_RES (2)..(39): Xaa is C or S
  MOD_RES (15)..(16)..(17)..(18)..(19): Xaa is A or G
  MOD_RES (20)..(21)..(22)..(23): Xaa is A or G or absent
AXELHEELRNSLQEXXXXXXXXXYYLVTLPEHHVRSPQX

SEQ ID NO: 26968 - protein, 37 aa, Artificial Sequence
  Non-cyclic GFR-binding peptide
  MOD_RES (31)..(31): Xaa is C or S
RVVMNVQVEKIVNSSDDVKAVKVSRLKTPAXTPKTVH

SEQ ID NO: 26969 - protein, 37 aa, Artificial Sequence
  Non-cyclic GFR-binding peptide
  MOD_RES (1)..(1): Xaa is C or S
XALHDELTNSLQEFIPKKRVIEYYVVPLPELQVQTPR

SEQ ID NO: 26970 - protein, 40 aa, Artificial Sequence
  Non-cyclic GFR-binding peptide
  MOD_RES (2)..(36)..(37): Xaa is C or S
  MOD_RES (14)..(15)..(16)..(17)..(18): Xaa is A or G
  MOD_RES (19)..(20)..(21)..(22): Xaa is A or G or absent
GXGEVVMEVTAKKXXXXXXXXXIKRMQVPRLETPVXXAKP

SEQ ID NO: 26971 - protein, 39 aa, Artificial Sequence
  Non-cyclic GFR-binding peptide
  MOD_RES (1)..(35): Xaa is C or S
  MOD_RES (13)..(14)..(15)..(16)..(17): Xaa is A or G
  MOD_RES (18)..(19)..(20)..(21): Xaa is A or G or absent
XSRVVMNVQVEKXXXXXXXXXVKAVKVSRLKTPAXTPKT

SEQ ID NO: 26972 - protein, 38 aa, Artificial Sequence
  Non-cyclic GFR-binding peptide
  MOD_RES (37)..(37): Xaa is C or S
ALHDELTNSLQEFIPKKRVIEYYLVTLPELQVQTPRXQ

SEQ ID NO: 26973 - protein, 37 aa, Artificial Sequence
  Non-cyclic GFR-binding peptide
  MOD_RES (33)..(34): Xaa is C or S
  MOD_RES (11)..(12)..(13)..(14)..(15): Xaa is A or G
  MOD_RES (16)..(17)..(18)..(19): Xaa is A or G or absent
EVVMDSMEGIXXXXXXXXXMIQMTINSLETPVXXAKP

SEQ ID NO: 26974 - protein, 34 aa, Artificial Sequence
  Non-cyclic GFR-binding peptide
  MOD_RES (1)..(32)..(33): Xaa is C or S
XSRVIMSMEGIVKPKRGVMIQITINSLAQPVXXP

SEQ ID NO: 26975 - protein, 36 aa, Artificial Sequence
  Non-cyclic GFR-binding peptide
  MOD_RES (2)..(36): Xaa is C or S
  MOD_RES (14)..(15)..(16)..(17)..(18): Xaa is A or G
  MOD_RES (19)..(20)..(21)..(22): Xaa is A or G or absent
GXSRVVMNVQVEKXXXXXXXXXVKAVKVSRLKTPAX

SEQ ID NO: 26976 - protein, 37 aa, Artificial Sequence
  Non-cyclic GFR-binding peptide
  MOD_RES (32)..(33): Xaa is C or S
SRVVMNSMEGIIVNSSDDMIQVTINSLKTPAXXPKPV

SEQ ID NO: 26977 - protein, 35 aa, Artificial Sequence
  Non-cyclic GFR-binding peptide
  MOD_RES (31)..(32): Xaa is C or S
RVVMNSMEGIIVNSSDDMIQVTINSLQTPAXXPKP

SEQ ID NO: 26978 - protein, 38 aa, Artificial Sequence
  Non-cyclic GFR-binding peptide
  MOD_RES (2)..(2): Xaa is C or S
KXALHDELTNSLQEFIPKKRVIEYYVVPLPELQVQTPR

SEQ ID NO: 26979 - protein, 34 aa, Artificial Sequence
  Non-cyclic GFR-binding peptide
  MOD_RES (34)..(34): Xaa is C or S
  MOD_RES (12)..(13)..(14)..(15)..(16): Xaa is A or G
  MOD_RES (17)..(18)..(19)..(20): Xaa is A or G or absent
SRVVMNSMEGIXXXXXXXXXMIQVTINSLKTPAX

SEQ ID NO: 26980 - protein, 37 aa, Artificial Sequence
  Non-cyclic GFR-binding peptide
  MOD_RES (2)..(36)..(37): Xaa is C or S
  MOD_RES (14)..(15)..(16)..(17)..(18): Xaa is A or G
  MOD_RES (19)..(20)..(21)..(22): Xaa is A or G or absent
GXARVVMNVTAKKXXXXXXXXXIKRVQVPRLQTPAXX

SEQ ID NO: 26981 - protein, 40 aa, Artificial Sequence
  Non-cyclic GFR-binding peptide
  MOD_RES (2)..(34)..(35): Xaa is C or S
GXGEVVMDVTAKKVVKENEDIKRMQVPRLETPVXXAKPIK

SEQ ID NO: 26982 - protein, 42 aa, Artificial Sequence
  Non-cyclic GFR-binding peptide
  MOD_RES (2)..(36)..(37): Xaa is C or S
  MOD_RES (14)..(15)..(16)..(17)..(18): Xaa is A or G
  MOD_RES (19)..(20)..(21)..(22): Xaa is A or G or absent
GXGEVVMDVQVEKXXXXXXXXXVKAMKVSRLETPVXXAKPIK

SEQ ID NO: 26983 - protein, 39 aa, Artificial Sequence
  Non-cyclic GFR-binding peptide
  MOD_RES (2)..(4)..(38)..(39): Xaa is C or S
  MOD_RES (16)..(17)..(18)..(19)..(20): Xaa is A or G
  MOD_RES (21)..(22)..(23)..(24): Xaa is A or G or absent
RXGXGEVVMDVTAKKXXXXXXXXXIKRMQVPRLETPVXX

SEQ ID NO: 26984 - protein, 41 aa, Artificial Sequence
  Non-cyclic GFR-binding peptide
  MOD_RES (1)..(3)..(40): Xaa is C or S
XKXALHDELTNSLQEFIPKKRVIEYYLVTLPELQVQTPRXQ

SEQ ID NO: 26985 - protein, 33 aa, Artificial Sequence
  Non-cyclic GFR-binding peptide
  MOD_RES (32)..(33): Xaa is C or S
ARVVMNVTAKKIVNSSDDIKRVQVPRLQTPAXX

SEQ ID NO: 26986 - protein, 37 aa, Artificial Sequence
  Non-cyclic GFR-binding peptide
  MOD_RES (2)..(36)..(37): Xaa is C or S
  MOD_RES (14)..(15)..(16)..(17)..(18): Xaa is A or G
  MOD_RES (19)..(20)..(21)..(22): Xaa is A or G or absent
GXGEVVMDVTAKKXXXXXXXXXIKRMQVPRLETPVXX

SEQ ID NO: 26987 - protein, 35 aa, Artificial Sequence
  Non-cyclic GFR-binding peptide
  MOD_RES (1)..(33)..(34): Xaa is C or S
XARVVMNVTAKKIVNSSDDIKRVQVPRLQTPAXXP

SEQ ID NO: 26988 - protein, 39 aa, Artificial Sequence
  Non-cyclic GFR-binding peptide
  MOD_RES (34)..(35): Xaa is C or S
  MOD_RES (12)..(13)..(14)..(15)..(16): Xaa is A or G
  MOD_RES (17)..(18)..(19)..(20): Xaa is A or G or absent
GEVVMEVTAKKXXXXXXXXXIKRMQVPRLETPVXXAKPI

SEQ ID NO: 26989 - protein, 38 aa, Artificial Sequence
  Non-cyclic GFR-binding peptide
  MOD_RES (2)..(4): Xaa is C or S
  MOD_RES (17)..(18)..(19)..(20)..(21): Xaa is A or G
  MOD_RES (22)..(23)..(24)..(25): Xaa is A or G or absent
EXKXALHDELTNSLQEXXXXXXXXXYYLVTLPELQVQT

SEQ ID NO: 26990 - protein, 33 aa, Artificial Sequence
  Non-cyclic GFR-binding peptide
  MOD_RES (1)..(33): Xaa is C or S
XARVVMNSMEGIIVNSSDDMIQVTINSLQTPAX

SEQ ID NO: 26991 - protein, 35 aa, Artificial Sequence
  Non-cyclic GFR-binding peptide
  MOD_RES (1)..(33)..(34): Xaa is C or S
XGEVVMDVTAKKVVKENEDIKRMQVPRLETPVXXA

SEQ ID NO: 26992 - protein, 40 aa, Artificial Sequence
  Non-cyclic GFR-binding peptide
  MOD_RES (2)..(35)..(36): Xaa is C or S
  MOD_RES (13)..(14)..(15)..(16)..(17): Xaa is A or G
  MOD_RES (18)..(19)..(20)..(21): Xaa is A or G or absent
KXSRVIMVTAKKXXXXXXXXXIKRIQVPRLAQPVXXPAAS

SEQ ID NO: 26993 - protein, 44 aa, Artificial Sequence
  Non-cyclic GFR-binding peptide
  MOD_RES (1)..(3)..(40): Xaa is C or S
XAXELHEELRNSLQELKPKKRVYEYYVVPLPEHHVRSPQXKVSS

SEQ ID NO: 26994 - protein, 40 aa, Artificial Sequence
  Non-cyclic GFR-binding peptide
  MOD_RES (34)..(34): Xaa is C or S
  MOD_RES (12)..(13)..(14)..(15)..(16): Xaa is A or G
  MOD_RES (17)..(18)..(19)..(20): Xaa is A or G or absent
SRVVMNVQVEKXXXXXXXXXVKAVKVSRLKTPAXTPKTVH

SEQ ID NO: 26995 - protein, 35 aa, Artificial Sequence
  Non-cyclic GFR-binding peptide
  MOD_RES (2)..(2): Xaa is C or S
  MOD_RES (14)..(15)..(16)..(17)..(18): Xaa is A or G
  MOD_RES (19)..(20)..(21)..(22): Xaa is A or G or absent
EXKNHQLFNSLQEXXXXXXXXXYYLMTLPEEETPV

SEQ ID NO: 26996 - protein, 43 aa, Artificial Sequence
  Non-cyclic GFR-binding peptide
  MOD_RES (1)..(3)..(40): Xaa is C or S
XAXELHEELRNSLQELKPKKRVYEYYVVPLPEHHVRSPQXKVS

SEQ ID NO: 26997 - protein, 35 aa, Artificial Sequence
  Non-cyclic GFR-binding peptide
  MOD_RES (2)..(34)..(35): Xaa is C or S
GXGEVVMEVTAKKVVKDYEDIKRMQVPRLETPVXX

SEQ ID NO: 26998 - protein, 37 aa, Artificial Sequence
  Non-cyclic GFR-binding peptide
  MOD_RES (2)..(4): Xaa is C or S
  MOD_RES (16)..(17)..(18)..(19)..(20): Xaa is A or G
  MOD_RES (21)..(22)..(23)..(24): Xaa is A or G or absent
RXGXGEVVMDVTAKKXXXXXXXXXIKRMQVPRLETPV

SEQ ID NO: 26999 - protein, 40 aa, Artificial Sequence
  Non-cyclic GFR-binding peptide
  MOD_RES (2)..(39): Xaa is C or S
  MOD_RES (15)..(16)..(17)..(18)..(19): Xaa is A or G
  MOD_RES (20)..(21)..(22)..(23): Xaa is A or G or absent
KXALHDELTNSLQEXXXXXXXXXYYLVTLPELQVQTPRXQ

SEQ ID NO: 27000 - protein, 37 aa, Artificial Sequence
  Non-cyclic GFR-binding peptide
  MOD_RES (35)..(35): Xaa is C or S
HDELTNSLQEFIPKKRVIEYYLVTLPELQVQTPRXQV

SEQ ID NO: 27001 - protein, 38 aa, Artificial Sequence
  Non-cyclic GFR-binding peptide
  MOD_RES (33)..(34): Xaa is C or S
  MOD_RES (11)..(12)..(13)..(14)..(15): Xaa is A or G
  MOD_RES (16)..(17)..(18)..(19): Xaa is A or G or absent
RVVMNVQVEKXXXXXXXXXVKAVKVSRLKTPAXXPKPV

SEQ ID NO: 27002 - protein, 42 aa, Artificial Sequence
  Non-cyclic GFR-binding peptide
  MOD_RES (1)..(3)..(37)..(38): Xaa is C or S
  MOD_RES (15)..(16)..(17)..(18)..(19): Xaa is A or G
  MOD_RES (20)..(21)..(22)..(23): Xaa is A or G or absent
XGXGEVVMDSMEGIXXXXXXXXXMIQMTINSLETPVXXAKPI

SEQ ID NO: 27003 - protein, 43 aa, Artificial Sequence
  Non-cyclic GFR-binding peptide
  MOD_RES (1)..(3)..(37): Xaa is C or S
XEXKNHQLFNSLQEHQGQHPKIRYYVMPLPEEETPVXELGEDN

SEQ ID NO: 27004 - protein, 42 aa, Artificial Sequence
  Non-cyclic GFR-binding peptide
  MOD_RES (2)..(39): Xaa is C or S
  MOD_RES (15)..(16)..(17)..(18)..(19): Xaa is A or G
  MOD_RES (20)..(21)..(22)..(23): Xaa is A or G or absent
AXELHEELRNSLQEXXXXXXXXXYYVVPLPEHHVRSPQXKVS

SEQ ID NO: 27005 - protein, 40 aa, Artificial Sequence
  Non-cyclic GFR-binding peptide
  MOD_RES (37)..(37): Xaa is C or S
ALHDELTNSLQEFIPKKRVIEYYLVTLPELQVQTPRXQVN

SEQ ID NO: 27006 - protein, 41 aa, Artificial Sequence
  Non-cyclic GFR-binding peptide
  MOD_RES (1)..(35): Xaa is C or S
  MOD_RES (13)..(14)..(15)..(16)..(17): Xaa is A or G
  MOD_RES (18)..(19)..(20)..(21): Xaa is A or G or absent
XSRVVMNVTAKKXXXXXXXXXIKRVQVPRLKTPAXTPKTVH

SEQ ID NO: 27007 - protein, 42 aa, Artificial Sequence
  Non-cyclic GFR-binding peptide
  MOD_RES (1)..(3)..(36)..(37): Xaa is C or S
  MOD_RES (14)..(15)..(16)..(17)..(18): Xaa is A or G
  MOD_RES (19)..(20)..(21)..(22): Xaa is A or G or absent
XKXSKVVMVTAKKXXXXXXXXXIKRIQVPRLDQPVXXPSASA

SEQ ID NO: 27008 - protein, 33 aa, Artificial Sequence
  Non-cyclic GFR-binding peptide
  MOD_RES (1)..(32)..(33): Xaa is C or S
XSKVVMVQVEKVKPTRGVVKAIKVSRLDQPVXX

SEQ ID NO: 27009 - protein, 38 aa, Artificial Sequence
  Non-cyclic GFR-binding peptide
  MOD_RES (2)..(34)..(35): Xaa is C or S
GXGEVVMDVQVEKVVKENEDVKAMKVSRLETPVXXAKP

SEQ ID NO: 27010 - protein, 35 aa, Artificial Sequence
  Non-cyclic GFR-binding peptide
  MOD_RES (1)..(32)..(33): Xaa is C or S
XSRVIMVTAKKVKPKRGVIKRIQVPRLAQPVXXPA

SEQ ID NO: 27011 - protein, 32 aa, Artificial Sequence
  Non-cyclic GFR-binding peptide
  MOD_RES (2)..(2): Xaa is C or S
KXSRVIMVTAKKVKPKRGVIKRIQVPRLAQPV

SEQ ID NO: 27012 - protein, 38 aa, Artificial Sequence
  Non-cyclic GFR-binding peptide
  MOD_RES (2)..(4)..(35)..(36): Xaa is C or S
SXKXSKVVMVTAKKVKPTRGVIKRIQVPRLDQPVXXPS

SEQ ID NO: 27013 - protein, 34 aa, Artificial Sequence
  Non-cyclic GFR-binding peptide
  MOD_RES (1)..(33)..(34): Xaa is C or S
XARVVMNVQVEKIVNSSDDVKAVKVSRLQTPAXX

SEQ ID NO: 27014 - protein, 33 aa, Artificial Sequence
  Non-cyclic GFR-binding peptide
  MOD_RES (31)..(32): Xaa is C or S
SRVIMVTAKKVKPKRGVIKRIQVPRLAQPVXXP

SEQ ID NO: 27015 - protein, 39 aa, Artificial Sequence
  Non-cyclic GFR-binding peptide
  MOD_RES (2)..(4)..(36)..(37): Xaa is C or S
HXGXSRVVMNVQVEKIVNSSDDVKAVKVSRLKTPAXXPK

SEQ ID NO: 27016 - protein, 30 aa, Artificial Sequence; identical to SEQ ID NO: 2153
  Non-cyclic GFR-binding peptide

SEQ ID NO: 27017 - protein, 41 aa, Artificial Sequence
  Non-cyclic GFR-binding peptide
  MOD_RES (1)..(3)..(36)..(37): Xaa is C or S
  MOD_RES (14)..(15)..(16)..(17)..(18): Xaa is A or G
  MOD_RES (19)..(20)..(21)..(22): Xaa is A or G or absent
XKXSRVIMSMEGIXXXXXXXXXMIQITINSLAQPVXXPAAS

SEQ ID NO: 27018 - protein, 42 aa, Artificial Sequence
  Non-cyclic GFR-binding peptide
  MOD_RES (1)..(3)..(40): Xaa is C or S
XAXELHEELRNSLQELKPKKRVYEYYLVTLPEHHVRSPQXKV

SEQ ID NO: 27019 - protein, 40 aa, Artificial Sequence
  Non-cyclic GFR-binding peptide
  MOD_RES (1)..(35): Xaa is C or S
  MOD_RES (13)..(14)..(15)..(16)..(17): Xaa is A or G
  MOD_RES (18)..(19)..(20)..(21): Xaa is A or G or absent
XSRVVMNVTAKKXXXXXXXXXIKRVQVPRLKTPAXTPKTV

SEQ ID NO: 27020 - protein, 36 aa, Artificial Sequence
  Non-cyclic GFR-binding peptide
  MOD_RES (32)..(33): Xaa is C or S
GEVVMDVQVEKVVKENEDVKAMKVSRLETPVXXAKP

SEQ ID NO: 27021 - protein, 40 aa, Artificial Sequence
  Non-cyclic GFR-binding peptide
  MOD_RES (34)..(35): Xaa is C or S
  MOD_RES (12)..(13)..(14)..(15)..(16): Xaa is A or G
  MOD_RES (17)..(18)..(19)..(20): Xaa is A or G or absent
GEVVMEVTAKKXXXXXXXXXIKRMQVPRLETPVXXAKPIS

SEQ ID NO: 27022 - protein, 44 aa, Artificial Sequence
  Non-cyclic GFR-binding peptide
  MOD_RES (2)..(4)..(41): Xaa is C or S
  MOD_RES (17)..(18)..(19)..(20)..(21): Xaa is A or G
  MOD_RES (22)..(23)..(24)..(25): Xaa is A or G or absent
EXKXALHDELTNSLQEXXXXXXXXXYYLVTLPELQVQTPRXQVN

SEQ ID NO: 27023 - protein, 38 aa, Artificial Sequence
  Non-cyclic GFR-binding peptide
  MOD_RES (1)..(3)..(35)..(36): Xaa is C or S
XGXGEVVMDVQVEKVVKENEDVKAMKVSRLETPVXXAK

SEQ ID NO: 27024 - protein, 38 aa, Artificial Sequence
  Non-cyclic GFR-binding peptide
  MOD_RES (1)..(3)..(35)..(36): Xaa is C or S
XGXGEVVMEVQVEKVVKDYEDVKAMKVSRLETPVXXAK

SEQ ID NO: 27025 - protein, 40 aa, Artificial Sequence
  Non-cyclic GFR-binding peptide
  MOD_RES (1)..(3)..(36)..(37): Xaa is C or S
  MOD_RES (14)..(15)..(16)..(17)..(18): Xaa is A or G
  MOD_RES (19)..(20)..(21)..(22): Xaa is A or G or absent
XKXSKVVMVTAKKXXXXXXXXXIKRIQVPRLDQPVXXPSA

SEQ ID NO: 27026 - protein, 40 aa, Artificial Sequence
  Non-cyclic GFR-binding peptide
  MOD_RES (34)..(34): Xaa is C or S
KNHQLFNSLQEHQGQHPKIRYYVMPLPEEETPVXELGEDN

SEQ ID NO: 27027 - protein, 33 aa, Artificial Sequence
  Non-cyclic GFR-binding peptide
  MOD_RES (2)..(2): Xaa is C or S
GXARVVMNSMEGIIVNSSDDMIQVTINSLQTPA

SEQ ID NO: 27028 - protein, 42 aa, Artificial Sequence
  Non-cyclic GFR-binding peptide
  MOD_RES (2)..(36)..(37): Xaa is C or S
  MOD_RES (14)..(15)..(16)..(17)..(18): Xaa is A or G
  MOD_RES (19)..(20)..(21)..(22): Xaa is A or G or absent
GXARVVMNSMEGIXXXXXXXXXMIQVTINSLQTPAXXPKPVT

SEQ ID NO: 27029 - protein, 39 aa, Artificial Sequence
  Non-cyclic GFR-binding peptide
  MOD_RES (33)..(34): Xaa is C or S
  MOD_RES (11)..(12)..(13)..(14)..(15): Xaa is A or G
  MOD_RES (16)..(17)..(18)..(19): Xaa is A or G or absent
RVVMNSMEGIXXXXXXXXXMIQVTINSLQTPAXXPKPVT

SEQ ID NO: 27030 - protein, 36 aa, Artificial Sequence
  Non-cyclic GFR-binding peptide
  MOD_RES (2)..(4)..(35)..(36): Xaa is C or S
SXKXSRVIMSMEGIVKPKRGVMIQITINSLAQPVXX

SEQ ID NO: 27031 - protein, 34 aa, Artificial Sequence
  Non-cyclic GFR-binding peptide
  MOD_RES (34)..(34): Xaa is C or S
  MOD_RES (12)..(13)..(14)..(15)..(16): Xaa is A or G
  MOD_RES (17)..(18)..(19)..(20): Xaa is A or G or absent
KNHQLFNSLQEXXXXXXXXXYYVMPLPEEETPVX

SEQ ID NO: 27032 - protein, 42 aa, Artificial Sequence
  Non-cyclic GFR-binding peptide
  MOD_RES (1)..(3)..(40): Xaa is C or S
  MOD_RES (16)..(17)..(18)..(19)..(20): Xaa is A or G
  MOD_RES (21)..(22)..(23)..(24): Xaa is A or G or absent
XKXALHDELTNSLQEXXXXXXXXXYYVVPLPELQVQTPRXQV

SEQ ID NO: 27033 - protein, 38 aa, Artificial Sequence
  Non-cyclic GFR-binding peptide
  MOD_RES (1)..(35)..(36): Xaa is C or S
  MOD_RES (13)..(14)..(15)..(16)..(17): Xaa is A or G
  MOD_RES (18)..(19)..(20)..(21): Xaa is A or G or absent
XSRVVMNVQVEKXXXXXXXXXVKAVKVSRLKTPAXXPK

SEQ ID NO: 27034 - protein, 44 aa, Artificial Sequence
  Non-cyclic GFR-binding peptide
  MOD_RES (2)..(4)..(38)..(39): Xaa is C or S
  MOD_RES (16)..(17)..(18)..(19)..(20): Xaa is A or G
  MOD_RES (21)..(22)..(23)..(24): Xaa is A or G or absent
RXGXGEVVMDVTAKKXXXXXXXXXIKRMQVPRLETPVXXAKPIK

SEQ ID NO: 27035 - protein, 35 aa, Artificial Sequence
  Non-cyclic GFR-binding peptide
  MOD_RES (2)..(2): Xaa is C or S
EXKNHQLFNSLQEHQGQHPKIRYYLMTLPEEETPV

SEQ ID NO: 27036 - protein, 36 aa, Artificial Sequence
  Non-cyclic GFR-binding peptide
  MOD_RES (1)..(34)..(35): Xaa is C or S
  MOD_RES (12)..(13)..(14)..(15)..(16): Xaa is A or G
  MOD_RES (17)..(18)..(19)..(20): Xaa is A or G or absent
XSKVVMSMEGIXXXXXXXXXMIQITINSLDQPVXXP

SEQ ID NO: 27037 - protein, 38 aa, Artificial Sequence
  Non-cyclic GFR-binding peptide
  MOD_RES (2)..(34)..(35): Xaa is C or S
GXARVVMNVTAKKIVNSSDDIKRVQVPRLQTPAXXPKP

SEQ ID NO: 27038 - protein, 34 aa, Artificial Sequence
  Non-cyclic GFR-binding peptide
ALHDELTNSLQEFIPKKRVIEYYVVPLPELQVQT

SEQ ID NO: 27039 - protein, 41 aa, Artificial Sequence
  Non-cyclic GFR-binding peptide
  MOD_RES (37)..(37): Xaa is C or S
  MOD_RES (13)..(14)..(15)..(16)..(17): Xaa is A or G
  MOD_RES (18)..(19)..(20)..(21): Xaa is A or G or absent
ALHDELTNSLQEXXXXXXXXXYYVVPLPELQVQTPRXQVNR

SEQ ID NO: 27040 - protein, 36 aa, Artificial Sequence
  Non-cyclic GFR-binding peptide
  MOD_RES (1)..(35)..(36): Xaa is C or S
  MOD_RES (13)..(14)..(15)..(16)..(17): Xaa is A or G
  MOD_RES (18)..(19)..(20)..(21): Xaa is A or G or absent
XARVVMNVQVEKXXXXXXXXXVKAVKVSRLQTPAXX

SEQ ID NO: 27041 - protein, 43 aa, Artificial Sequence
  Non-cyclic GFR-binding peptide
  MOD_RES (1)..(3)..(37): Xaa is C or S
  MOD_RES (15)..(16)..(17)..(18)..(19): Xaa is A or G
  MOD_RES (20)..(21)..(22)..(23): Xaa is A or G or absent
XGXSRVVMNVTAKKXXXXXXXXXIKRVQVPRLKTPAXTPKTVH

SEQ ID NO: 27042 - protein, 36 aa, Artificial Sequence
  Non-cyclic GFR-binding peptide
  MOD_RES (1)..(35)..(36): Xaa is C or S
  MOD_RES (13)..(14)..(15)..(16)..(17): Xaa is A or G
  MOD_RES (18)..(19)..(20)..(21): Xaa is A or G or absent
XGEVVMEVQVEKXXXXXXXXXVKAMKVSRLETPVXX

SEQ ID NO: 27043 - protein, 43 aa, Artificial Sequence
  Non-cyclic GFR-binding peptide
  MOD_RES (2)..(4)..(37)..(38): Xaa is C or S
  MOD_RES (15)..(16)..(17)..(18)..(19): Xaa is A or G
  MOD_RES (20)..(21)..(22)..(23): Xaa is A or G or absent
SXKXSKVIMVQVEKXXXXXXXXXVKAIKVSRLDQSVXXPSASA

SEQ ID NO: 27044 - protein, 37 aa, Artificial Sequence
  Non-cyclic GFR-binding peptide
  MOD_RES (31)..(32): Xaa is C or S
SKVIMVQVEKIKPTKGIVKAIKVSRLDQSVXXPSASA

SEQ ID NO: 27045 - protein, 38 aa, Artificial Sequence
  Non-cyclic GFR-binding peptide
  MOD_RES (1)..(3)..(35)..(36): Xaa is C or S
XGXSRVVMNSMEGIIVNSSDDMIQVTINSLKTPAXXPK

SEQ ID NO: 27046 - protein, 37 aa, Artificial Sequence
  Non-cyclic GFR-binding peptide
  MOD_RES (33)..(34): Xaa is C or S
  MOD_RES (11)..(12)..(13)..(14)..(15): Xaa is A or G
  MOD_RES (16)..(17)..(18)..(19): Xaa is A or G or absent
SKVIMVQVEKXXXXXXXXXVKAIKVSRLDQSVXXPSA

SEQ ID NO: 27047 - protein, 43 aa, Artificial Sequence
  Non-cyclic GFR-binding peptide
  MOD_RES (2)..(4)..(38)..(39): Xaa is C or S
  MOD_RES (16)..(17)..(18)..(19)..(20): Xaa is A or G
  MOD_RES (21)..(22)..(23)..(24): Xaa is A or G or absent
RXGXGEVVMEVQVEKXXXXXXXXXVKAMKVSRLETPVXXAKPI

SEQ ID NO: 27048 - protein, 42 aa, Artificial Sequence
  Non-cyclic GFR-binding peptide
  MOD_RES (1)..(3)..(36)..(37): Xaa is C or S
  MOD_RES (14)..(15)..(16)..(17)..(18): Xaa is A or G
  MOD_RES (19)..(20)..(21)..(22): Xaa is A or G or absent
XKXSKVIMVQVEKXXXXXXXXXVKAIKVSRLDQSVXXPSASA

SEQ ID NO: 27049 - protein, 41 aa, Artificial Sequence
  Non-cyclic GFR-binding peptide
  MOD_RES (1)..(35)..(36): Xaa is C or S
  MOD_RES (13)..(14)..(15)..(16)..(17): Xaa is A or G
  MOD_RES (18)..(19)..(20)..(21): Xaa is A or G or absent
XARVVMNVTAKKXXXXXXXXXIKRVQVPRLQTPAXXPKPVT

SEQ ID NO: 27050 - protein, 37 aa, Artificial Sequence
  Non-cyclic GFR-binding peptide
  MOD_RES (34)..(34): Xaa is C or S
KNHQLFNSLQEHQGQHPKIRYYLMTLPEEETPVXELG

SEQ ID NO: 27051 - protein, 33 aa, Artificial Sequence
  Non-cyclic GFR-binding peptide
  MOD_RES (12)..(13)..(14)..(15)..(16): Xaa is A or G
  MOD_RES (17)..(18)..(19)..(20): Xaa is A or G or absent
KNHQLFNSLQEXXXXXXXXXYYVMPLPEEETPV

SEQ ID NO: 27052 - protein, 40 aa, Artificial Sequence
  Non-cyclic GFR-binding peptide
  MOD_RES (2)..(35)..(36): Xaa is C or S
  MOD_RES (13)..(14)..(15)..(16)..(17): Xaa is A or G
  MOD_RES (18)..(19)..(20)..(21): Xaa is A or G or absent
KXSKVIMVTAKKXXXXXXXXXIKRIQVPRLDQSVXXPSAS

SEQ ID NO: 27053 - protein, 33 aa, Artificial Sequence
  Non-cyclic GFR-binding peptide
  MOD_RES (1)..(33): Xaa is C or S
XARVVMNVQVEKIVNSSDDVKAVKVSRLQTPAX

SEQ ID NO: 27054 - protein, 30 aa, Artificial Sequence
  Non-cyclic GFR-binding peptide
SRVIMSMEGIVKPKRGVMIQITINSLAQPV

SEQ ID NO: 27055 - protein, 33 aa, Artificial Sequence
  Non-cyclic GFR-binding peptide
  MOD_RES (32)..(32): Xaa is C or S
SRVVMNVQVEKIVNSSDDVKAVKVSRLKTPAXT

SEQ ID NO: 27056 - protein, 36 aa, Artificial Sequence
  Non-cyclic GFR-binding peptide
  MOD_RES (2)..(33)..(34): Xaa is C or S
KXSKVIMSMEGIIKPTKGIMIQITINSLDQSVXXPS

SEQ ID NO: 27057 - protein, 37 aa, Artificial Sequence
  Non-cyclic GFR-binding peptide
  MOD_RES (32)..(33): Xaa is C or S
GEVVMDSMEGIVVKENEDMIQMTINSLETPVXXAKPI

SEQ ID NO: 27058 - protein, 37 aa, Artificial Sequence
  Non-cyclic GFR-binding peptide
  MOD_RES (31)..(31): Xaa is C or S
RVVMNVTAKKIVNSSDDIKRVQVPRLKTPAXTPKTVH

SEQ ID NO: 27059 - protein, 42 aa, Artificial Sequence
  Non-cyclic GFR-binding peptide
  MOD_RES (1)..(3)..(37): Xaa is C or S
  MOD_RES (15)..(16)..(17)..(18)..(19): Xaa is A or G
  MOD_RES (20)..(21)..(22)..(23): Xaa is A or G or absent
XGXSRVVMNVQVEKXXXXXXXXXVKAVKVSRLKTPAXTPKTV

SEQ ID NO: 27060 - protein, 33 aa, Artificial Sequence
  Non-cyclic GFR-binding peptide
  MOD_RES (31)..(32): Xaa is C or S
EVVMDVQVEKVVKENEDVKAMKVSRLETPVXXA

SEQ ID NO: 27061 - protein, 33 aa, Artificial Sequence
  Non-cyclic GFR-binding peptide
  MOD_RES (31)..(32): Xaa is C or S
SRVIMVQVEKVKPKRGVVKAIKVSRLAQPVXXP

SEQ ID NO: 27062 - protein, 35 aa, Artificial Sequence
  Non-cyclic GFR-binding peptide
  MOD_RES (2)..(4): Xaa is C or S
HXGXSRVVMNSMEGIIVNSSDDMIQVTINSLKTPA

SEQ ID NO: 27063 - protein, 38 aa, Artificial Sequence
  Non-cyclic GFR-binding peptide
  MOD_RES (1)..(35): Xaa is C or S
XKNHQLFNSLQEHQGQHPKIRYYLMTLPEEETPVXELG

SEQ ID NO: 27064 - protein, 32 aa, Artificial Sequence
  Non-cyclic GFR-binding peptide
  MOD_RES (31)..(32): Xaa is C or S
SKVIMVQVEKIKPTKGIVKAIKVSRLDQSVXX

SEQ ID NO: 27065 - protein, 36 aa, Artificial Sequence
  Non-cyclic GFR-binding peptide
  MOD_RES (35)..(35): Xaa is C or S
HEELRNSLQELKPKKRVYEYYVVPLPEHHVRSPQXK

SEQ ID NO: 27066 - protein, 36 aa, Artificial Sequence
  Non-cyclic GFR-binding peptide
  MOD_RES (33)..(34): Xaa is C or S
  MOD_RES (11)..(12)..(13)..(14)..(15): Xaa is A or G
  MOD_RES (16)..(17)..(18)..(19): Xaa is A or G or absent
SKVVMVTAKKXXXXXXXXXIKRIQVPRLDQPVXXPS

SEQ ID NO: 27067 - protein, 38 aa, Artificial Sequence
  Non-cyclic GFR-binding peptide
  MOD_RES (2)..(2): Xaa is C or S
  MOD_RES (15)..(16)..(17)..(18)..(19): Xaa is A or G
  MOD_RES (20)..(21)..(22)..(23): Xaa is A or G or absent
KXALHDELTNSLQEXXXXXXXXXYYVVPLPELQVQTPR

SEQ ID NO: 27068 - protein, 38 aa, Artificial Sequence
  Non-cyclic GFR-binding peptide
  MOD_RES (1)..(3): Xaa is C or S
XAXELHEELRNSLQELKPKKRVYEYYVVPLPEHHVRSP

SEQ ID NO: 27069 - protein, 36 aa, Artificial Sequence
  Non-cyclic GFR-binding peptide
ALHDELTNSLQEFIPKKRVIEYYLVTLPELQVQTPR

SEQ ID NO: 27070 - protein, 33 aa, Artificial Sequence
  Non-cyclic GFR-binding peptide
  MOD_RES (1)..(33): Xaa is C or S
XSRVVMNVTAKKIVNSSDDIKRVQVPRLKTPAX

SEQ ID NO: 27071 - protein, 33 aa, Artificial Sequence
  Non-cyclic GFR-binding peptide
  MOD_RES (1)..(1): Xaa is C or S
  MOD_RES (12)..(13)..(14)..(15)..(16): Xaa is A or G
  MOD_RES (17)..(18)..(19)..(20): Xaa is A or G or absent
XSKVIMSMEGIXXXXXXXXXMIQITINSLDQSV

SEQ ID NO: 27072 - protein, 38 aa, Artificial Sequence
  Non-cyclic GFR-binding peptide
  MOD_RES (36)..(36): Xaa is C or S
  MOD_RES (12)..(13)..(14)..(15)..(16): Xaa is A or G
  MOD_RES (17)..(18)..(19)..(20): Xaa is A or G or absent
LHEELRNSLQEXXXXXXXXXYYLVTLPEHHVRSPQXKV

SEQ ID NO: 27073 - protein, 35 aa, Artificial Sequence
  Non-cyclic GFR-binding peptide
ELHEELRNSLQELKPKKRVYEYYLVTLPEHHVRSP

SEQ ID NO: 27074 - protein, 31 aa, Artificial Sequence
  Non-cyclic GFR-binding peptide
SRVVMNVTAKKIVNSSDDIKRVQVPRLKTPA

SEQ ID NO: 27075 - protein, 38 aa, Artificial Sequence
  Non-cyclic GFR-binding peptide
  MOD_RES (34)..(35): Xaa is C or S
  MOD_RES (12)..(13)..(14)..(15)..(16): Xaa is A or G
  MOD_RES (17)..(18)..(19)..(20): Xaa is A or G or absent
GEVVMEVQVEKXXXXXXXXXVKAMKVSRLETPVXXAKP

SEQ ID NO: 27076 - protein, 38 aa, Artificial Sequence
  Non-cyclic GFR-binding peptide
  MOD_RES (1)..(35): Xaa is C or S
  MOD_RES (13)..(14)..(15)..(16)..(17): Xaa is A or G
  MOD_RES (18)..(19)..(20)..(21): Xaa is A or G or absent
XKNHQLFNSLQEXXXXXXXXXYYLMTLPEEETPVXELG

SEQ ID NO: 27077 - protein, 42 aa, Artificial Sequence
  Non-cyclic GFR-binding peptide
  MOD_RES (2)..(4)..(36)..(37): Xaa is C or S
RXGXGEVVMEVQVEKVVKDYEDVKAMKVSRLETPVXXAKPIS

SEQ ID NO: 27078 - protein, 38 aa, Artificial Sequence
  Non-cyclic GFR-binding peptide
  MOD_RES (2)..(34)..(35): Xaa is C or S
GXSRVVMNVTAKKIVNSSDDIKRVQVPRLKTPAXXPKP

SEQ ID NO: 27079 - protein, 38 aa, Artificial Sequence
  Non-cyclic GFR-binding peptide
  MOD_RES (2)..(33)..(34): Xaa is C or S
KXSRVIMVTAKKVKPKRGVIKRIQVPRLAQPVXXPAAS

SEQ ID NO: 27080 - protein, 41 aa, Artificial Sequence
  Non-cyclic GFR-binding peptide
  MOD_RES (1)..(3)..(40): Xaa is C or S
  MOD_RES (16)..(17)..(18)..(19)..(20): Xaa is A or G
  MOD_RES (21)..(22)..(23)..(24): Xaa is A or G or absent
XAXELHEELRNSLQEXXXXXXXXXYYLVTLPEHHVRSPQXK

SEQ ID NO: 27081 - protein, 36 aa, Artificial Sequence
  Non-cyclic GFR-binding peptide
  MOD_RES (34)..(35): Xaa is C or S
  MOD_RES (12)..(13)..(14)..(15)..(16): Xaa is A or G
  MOD_RES (17)..(18)..(19)..(20): Xaa is A or G or absent
GEVVMESMEGIXXXXXXXXXMIQMTINSLETPVXXA

SEQ ID NO: 27082 - protein, 36 aa, Artificial Sequence
  Non-cyclic GFR-binding peptide
  MOD_RES (35)..(35): Xaa is C or S
HEELRNSLQELKPKKRVYEYYLVTLPEHHVRSPQXK

SEQ ID NO: 27083 - protein, 40 aa, Artificial Sequence
  Non-cyclic GFR-binding peptide
  MOD_RES (36)..(36): Xaa is C or S
LHEELRNSLQELKPKKRVYEYYVVPLPEHHVRSPQXKVSS

SEQ ID NO: 27084 - protein, 38 aa, Artificial Sequence
  Non-cyclic GFR-binding peptide
  MOD_RES (1)..(35)..(36): Xaa is C or S
  MOD_RES (13)..(14)..(15)..(16)..(17): Xaa is A or G
  MOD_RES (18)..(19)..(20)..(21): Xaa is A or G or absent
XGEVVMDVQVEKXXXXXXXXXVKAMKVSRLETPVXXAK

SEQ ID NO: 27085 - protein, 39 aa, Artificial Sequence
  Non-cyclic GFR-binding peptide
  MOD_RES (1)..(3)..(35)..(36): Xaa is C or S
XGXGEVVMDVQVEKVVKENEDVKAMKVSRLETPVXXAKP

SEQ ID NO: 27086 - protein, 36 aa, Artificial Sequence
  Non-cyclic GFR-binding peptide
  MOD_RES (33)..(34): Xaa is C or S
  MOD_RES (11)..(12)..(13)..(14)..(15): Xaa is A or G
  MOD_RES (16)..(17)..(18)..(19): Xaa is A or G or absent
SKVVMVQVEKXXXXXXXXXVKAIKVSRLDQPVXXPS

SEQ ID NO: 27087 - protein, 36 aa, Artificial Sequence
  Non-cyclic GFR-binding peptide
  MOD_RES (1)..(3)..(35)..(36): Xaa is C or S
XGXGEVVMESMEGIVVKDYEDMIQMTINSLETPVXX

SEQ ID NO: 27088 - protein, 37 aa, Artificial Sequence
  Non-cyclic GFR-binding peptide
  MOD_RES (2)..(4)..(36)..(37): Xaa is C or S
HXGXARVVMNVQVEKIVNSSDDVKAVKVSRLQTPAXX

SEQ ID NO: 27089 - protein, 37 aa, Artificial Sequence
  Non-cyclic GFR-binding peptide
  MOD_RES (33)..(34): Xaa is C or S
  MOD_RES (11)..(12)..(13)..(14)..(15): Xaa is A or G
  MOD_RES (16)..(17)..(18)..(19): Xaa is A or G or absent
SKVVMSMEGIXXXXXXXXXMIQITINSLDQPVXXPSA

SEQ ID NO: 27090 - protein, 36 aa, Artificial Sequence
  Non-cyclic GFR-binding peptide
  MOD_RES (1)..(33): Xaa is C or S
XSRVVMNVQVEKIVNSSDDVKAVKVSRLKTPAXTPK

SEQ ID NO: 27091 - protein, 38 aa, Artificial Sequence
  Non-cyclic GFR-binding peptide
  MOD_RES (1)..(35)..(36): Xaa is C or S
  MOD_RES (13)..(14)..(15)..(16)..(17): Xaa is A or G
  MOD_RES (18)..(19)..(20)..(21): Xaa is A or G or absent
XARVVMNSMEGIXXXXXXXXXMIQVTINSLQTPAXXPK

SEQ ID NO: 27092 - protein, 39 aa, Artificial Sequence
  Non-cyclic GFR-binding peptide
  MOD_RES (2)..(39): Xaa is C or S
AXELHEELRNSLQELKPKKRVYEYYVVPLPEHHVRSPQX

SEQ ID NO: 27093 - protein, 36 aa, Artificial Sequence
  Non-cyclic GFR-binding peptide
  MOD_RES (1)..(35)..(36): Xaa is C or S
  MOD_RES (13)..(14)..(15)..(16)..(17): Xaa is A or G
  MOD_RES (18)..(19)..(20)..(21): Xaa is A or G or absent
XGEVVMDSMEGIXXXXXXXXXMIQMTINSLETPVXX

SEQ ID NO: 27094 - protein, 43 aa, Artificial Sequence
  Non-cyclic GFR-binding peptide
  MOD_RES (1)..(3)..(37): Xaa is C or S
  MOD_RES (15)..(16)..(17)..(18)..(19): Xaa is A or G
  MOD_RES (20)..(21)..(22)..(23): Xaa is A or G or absent
XGXSRVVMNSMEGIXXXXXXXXXMIQVTINSLKTPAXTPKTVH

SEQ ID NO: 27095 - protein, 33 aa, Artificial Sequence
  Non-cyclic GFR-binding peptide
  MOD_RES (12)..(13)..(14)..(15)..(16): Xaa is A or G
  MOD_RES (17)..(18)..(19)..(20): Xaa is A or G or absent
SRVVMNSMEGIXXXXXXXXXMIQVTINSLKTPA

SEQ ID NO: 27096 - protein, 41 aa, Artificial Sequence
  Non-cyclic GFR-binding peptide
  MOD_RES (2)..(4)..(36)..(37): Xaa is C or S
HXGXSRVVMNSMEGIIVNSSDDMIQVTINSLKTPAXXPKPV

SEQ ID NO: 27097 - protein, 41 aa, Artificial Sequence
  Non-cyclic GFR-binding peptide
  MOD_RES (2)..(36)..(37): Xaa is C or S
  MOD_RES (14)..(15)..(16)..(17)..(18): Xaa is A or G
  MOD_RES (19)..(20)..(21)..(22): Xaa is A or G or absent
GXGEVVMEVTAKKXXXXXXXXXIKRMQVPRLETPVXXAKPI

SEQ ID NO: 27098 - protein, 35 aa, Artificial Sequence
  Non-cyclic GFR-binding peptide
  MOD_RES (1)..(33): Xaa is C or S
XSRVVMNVTAKKIVNSSDDIKRVQVPRLKTPAXTP

SEQ ID NO: 27099 - protein, 37 aa, Artificial Sequence
  Non-cyclic GFR-binding peptide
  MOD_RES (36)..(36): Xaa is C or S
LHDELTNSLQEFIPKKRVIEYYLVTLPELQVQTPRXQ

SEQ ID NO: 27100 - protein, 32 aa, Artificial Sequence
  Non-cyclic GFR-binding peptide
  MOD_RES (11)..(12)..(13)..(14)..(15): Xaa is A or G
  MOD_RES (16)..(17)..(18)..(19): Xaa is A or G or absent
RVVMNSMEGIXXXXXXXXXMIQVTINSLQTPA

SEQ ID NO: 27101 - protein, 37 aa, Artificial Sequence
  Non-cyclic GFR-binding peptide
  MOD_RES (1)..(3)..(35)..(36): Xaa is C or S
XGXGEVVMESMEGIVVKDYEDMIQMTINSLETPVXXA

SEQ ID NO: 27102 - protein, 42 aa, Artificial Sequence
  Non-cyclic GFR-binding peptide
  MOD_RES (1)..(3)..(37)..(38): Xaa is C or S
  MOD_RES (15)..(16)..(17)..(18)..(19): Xaa is A or G
  MOD_RES (20)..(21)..(22)..(23): Xaa is A or G or absent
XGXGEVVMDVQVEKXXXXXXXXXVKAMKVSRLETPVXXAKPI

SEQ ID NO: 27103 - protein, 41 aa, Artificial Sequence
  Non-cyclic GFR-binding peptide
  MOD_RES (1)..(35)..(36): Xaa is C or S
  MOD_RES (13)..(14)..(15)..(16)..(17): Xaa is A or G
  MOD_RES (18)..(19)..(20)..(21): Xaa is A or G or absent
XGEVVMDVTAKKXXXXXXXXXIKRMQVPRLETPVXXAKPIK

SEQ ID NO: 27104 - protein, 39 aa, Artificial Sequence
  Non-cyclic GFR-binding peptide
  MOD_RES (2)..(4)..(36): Xaa is C or S
HXGXSRVVMNVTAKKIVNSSDDIKRVQVPRLKTPAXTPK

SEQ ID NO: 27105 - protein, 37 aa, Artificial Sequence
  Non-cyclic GFR-binding peptide
  MOD_RES (1)..(3)..(37): Xaa is C or S
  MOD_RES (15)..(16)..(17)..(18)..(19): Xaa is A or G
  MOD_RES (20)..(21)..(22)..(23): Xaa is A or G or absent
XGXGEVVMDSMEGIXXXXXXXXXMIQMTINSLETPVX

SEQ ID NO: 27106 - protein, 37 aa, Artificial Sequence
  Non-cyclic GFR-binding peptide
  MOD_RES (1)..(35)..(36): Xaa is C or S
  MOD_RES (13)..(14)..(15)..(16)..(17): Xaa is A or G
  MOD_RES (18)..(19)..(20)..(21): Xaa is A or G or absent
XARVVMNVQVEKXXXXXXXXXVKAVKVSRLQTPAXXP

SEQ ID NO: 27107 - protein, 37 aa, Artificial Sequence
  Non-cyclic GFR-binding peptide
  MOD_RES (2)..(4): Xaa is C or S
  MOD_RES (16)..(17)..(18)..(19)..(20): Xaa is A or G
  MOD_RES (21)..(22)..(23)..(24): Xaa is A or G or absent
HXGXARVVMNVQVEKXXXXXXXXXVKAVKVSRLQTPA

SEQ ID NO: 27108 - protein, 32 aa, Artificial Sequence
  Non-cyclic GFR-binding peptide
  MOD_RES (31)..(31): Xaa is C or S
RVVMNSMEGIIVNSSDDMIQVTINSLKTPAXT

SEQ ID NO: 27109 - protein, 43 aa, Artificial Sequence
  Non-cyclic GFR-binding peptide
  MOD_RES (1)..(3)..(37): Xaa is C or S
XEXKNHQLFNSLQEHQGQHPKIRYYLMTLPEEETPVXELGEDN

SEQ ID NO: 27110 - protein, 39 aa, Artificial Sequence
  Non-cyclic GFR-binding peptide
  MOD_RES (2)..(4): Xaa is C or S
EXKXALHDELTNSLQEFIPKKRVIEYYLVTLPELQVQTP

SEQ ID NO: 27111 - protein, 42 aa, Artificial Sequence
  Non-cyclic GFR-binding peptide
  MOD_RES (1)..(3)..(36)..(37): Xaa is C or S
  MOD_RES (14)..(15)..(16)..(17)..(18): Xaa is A or G
  MOD_RES (19)..(20)..(21)..(22): Xaa is A or G or absent
XKXSRVIMVQVEKXXXXXXXXXVKAIKVSRLAQPVXXPAASA

SEQ ID NO: 27112 - protein, 38 aa, Artificial Sequence
  Non-cyclic GFR-binding peptide
  MOD_RES (33)..(34): Xaa is C or S
  MOD_RES (11)..(12)..(13)..(14)..(15): Xaa is A or G
  MOD_RES (16)..(17)..(18)..(19): Xaa is A or G or absent
RVVMNSMEGIXXXXXXXXXMIQVTINSLQTPAXXPKPV

SEQ ID NO: 27113 - protein, 36 aa, Artificial Sequence
  Non-cyclic GFR-binding peptide
  MOD_RES (1)..(1): Xaa is C or S
  MOD_RES (14)..(15)..(16)..(17)..(18): Xaa is A or G
  MOD_RES (19)..(20)..(21)..(22): Xaa is A or G or absent
XALHDELTNSLQEXXXXXXXXXYYVVPLPELQVQTP

SEQ ID NO: 27114 - protein, 37 aa, Artificial Sequence
  Non-cyclic GFR-binding peptide
  MOD_RES (1)..(3)..(35)..(36): Xaa is C or S
XGXGEVVMDSMEGIVVKENEDMIQMTINSLETPVXXA

SEQ ID NO: 27115 - protein, 40 aa, Artificial Sequence
  Non-cyclic GFR-binding peptide
  MOD_RES (34)..(35): Xaa is C or S
  MOD_RES (12)..(13)..(14)..(15)..(16): Xaa is A or G
  MOD_RES (17)..(18)..(19)..(20): Xaa is A or G or absent
GEVVMDVTAKKXXXXXXXXXIKRMQVPRLETPVXXAKPIK

SEQ ID NO: 27116 - protein, 41 aa, Artificial Sequence
  Non-cyclic GFR-binding peptide
  MOD_RES (37)..(37): Xaa is C or S
  MOD_RES (13)..(14)..(15)..(16)..(17): Xaa is A or G
  MOD_RES (18)..(19)..(20)..(21): Xaa is A or G or absent
ELHEELRNSLQEXXXXXXXXXYYLVTLPEHHVRSPQXKVSS

SEQ ID NO: 27117 - protein, 39 aa, Artificial Sequence
  Non-cyclic GFR-binding peptide
  MOD_RES (34)..(35): Xaa is C or S
  MOD_RES (12)..(13)..(14)..(15)..(16): Xaa is A or G
  MOD_RES (17)..(18)..(19)..(20): Xaa is A or G or absent
SRVVMNSMEGIXXXXXXXXXMIQVTINSLKTPAXXPKPV

SEQ ID NO: 27118 - protein, 35 aa, Artificial Sequence
  Non-cyclic GFR-binding peptide
  MOD_RES (31)..(32): Xaa is C or S
SKVVMSMEGIVKPTRGVMIQITINSLDQPVXXPSA

SEQ ID NO: 27119 - protein, 41 aa, Artificial Sequence
  Non-cyclic GFR-binding peptide
  MOD_RES (2)..(35)..(36): Xaa is C or S
  MOD_RES (13)..(14)..(15)..(16)..(17): Xaa is A or G
  MOD_RES (18)..(19)..(20)..(21): Xaa is A or G or absent
KXSRVIMVTAKKXXXXXXXXXIKRIQVPRLAQPVXXPAASA

SEQ ID NO: 27120 - protein, 31 aa, Artificial Sequence
  Non-cyclic GFR-binding peptide
  MOD_RES (31)..(31): Xaa is C or S
SKVIMVQVEKIKPTKGIVKAIKVSRLDQSVX

SEQ ID NO: 27121 - protein, 34 aa, Artificial Sequence
  Non-cyclic GFR-binding peptide
  MOD_RES (1)..(33)..(34): Xaa is C or S
XARVVMNSMEGIIVNSSDDMIQVTINSLQTPAXX

SEQ ID NO: 27122 - protein, 35 aa, Artificial Sequence
  Non-cyclic GFR-binding peptide
  MOD_RES (2)..(34): Xaa is C or S
GXSRVVMNVQVEKIVNSSDDVKAVKVSRLKTPAXT

SEQ ID NO: 27123 - protein, 39 aa, Artificial Sequence
  Non-cyclic GFR-binding peptide
  MOD_RES (1)..(3)..(35)..(36): Xaa is C or S
XGXGEVVMEVQVEKVVKDYEDVKAMKVSRLETPVXXAKP

SEQ ID NO: 27124 - protein, 38 aa, Artificial Sequence
  Non-cyclic GFR-binding peptide
  MOD_RES (36)..(36): Xaa is C or S
LHEELRNSLQELKPKKRVYEYYVVPLPEHHVRSPQXKV

SEQ ID NO: 27125 - protein, 34 aa, Artificial Sequence
  Non-cyclic GFR-binding peptide
  MOD_RES (1)..(34): Xaa is C or S
  MOD_RES (12)..(13)..(14)..(15)..(16): Xaa is A or G
  MOD_RES (17)..(18)..(19)..(20): Xaa is A or G or absent
XSKVIMVQVEKXXXXXXXXXVKAIKVSRLDQSVX

SEQ ID NO: 27126 - protein, 37 aa, Artificial Sequence
  Non-cyclic GFR-binding peptide
  MOD_RES (2)..(34)..(35): Xaa is C or S
GXGEVVMDVTAKKVVKENEDIKRMQVPRLETPVXXAK

SEQ ID NO: 27127 - protein, 41 aa, Artificial Sequence
  Non-cyclic GFR-binding peptide
  MOD_RES (2)..(4)..(36): Xaa is C or S
HXGXSRVVMNSMEGIIVNSSDDMIQVTINSLKTPAXTPKTV

SEQ ID NO: 27128 - protein, 39 aa, Artificial Sequence
  Non-cyclic GFR-binding peptide
  MOD_RES (2)..(34): Xaa is C or S
GXSRVVMNVTAKKIVNSSDDIKRVQVPRLKTPAXTPKTV

SEQ ID NO: 27129 - protein, 35 aa, Artificial Sequence
  Non-cyclic GFR-binding peptide
  MOD_RES (2)..(4): Xaa is C or S
RXGXGEVVMDSMEGIVVKENEDMIQMTINSLETPV

SEQ ID NO: 27130 - protein, 30 aa, Artificial Sequence; identical to SEQ ID NO: 2213
  Non-cyclic GFR-binding peptide

SEQ ID NO: 27131 - protein, 38 aa, Artificial Sequence
  Non-cyclic GFR-binding peptide
  MOD_RES (2)..(4)..(36)..(37): Xaa is C or S
RXGXGEVVMEVTAKKVVKDYEDIKRMQVPRLETPVXXA

SEQ ID NO: 27132 - protein, 36 aa, Artificial Sequence
  Non-cyclic GFR-binding peptide
  MOD_RES (1)..(33): Xaa is C or S
XSRVVMNSMEGIIVNSSDDMIQVTINSLKTPAXTPK

SEQ ID NO: 27133 - protein, 34 aa, Artificial Sequence
  Non-cyclic GFR-binding peptide
  MOD_RES (2)..(4): Xaa is C or S
SXKXSKVVMVQVEKVKPTRGVVKAIKVSRLDQPV

SEQ ID NO: 27134 - protein, 41 aa, Artificial Sequence
  Non-cyclic GFR-binding peptide
  MOD_RES (2)..(4)..(38)..(39): Xaa is C or S
  MOD_RES (16)..(17)..(18)..(19)..(20): Xaa is A or G
  MOD_RES (21)..(22)..(23)..(24): Xaa is A or G or absent
RXGXGEVVMESMEGIXXXXXXXXXMIQMTINSLETPVXXAK

SEQ ID NO: 27135 - protein, 37 aa, Artificial Sequence
  Non-cyclic GFR-binding peptide
  MOD_RES (2)..(4): Xaa is C or S
  MOD_RES (16)..(17)..(18)..(19)..(20): Xaa is A or G
  MOD_RES (21)..(22)..(23)..(24): Xaa is A or G or absent
RXGXGEVVMEVQVEKXXXXXXXXXVKAMKVSRLETPV

SEQ ID NO: 27136 - protein, 39 aa, Artificial Sequence
  Non-cyclic GFR-binding peptide
  MOD_RES (2)..(33)..(34): Xaa is C or S
KXSKVIMVTAKKIKPTKGIIKRIQVPRLDQSVXXPSASA

SEQ ID NO: 27137 - protein, 37 aa, Artificial Sequence
  Non-cyclic GFR-binding peptide
  MOD_RES (31)..(32): Xaa is C or S
SKVIMSMEGIIKPTKGIMIQITINSLDQSVXXPSASA

SEQ ID NO: 27138 - protein, 37 aa, Artificial Sequence
  Non-cyclic GFR-binding peptide
  MOD_RES (2)..(4): Xaa is C or S
  MOD_RES (16)..(17)..(18)..(19)..(20): Xaa is A or G
  MOD_RES (21)..(22)..(23)..(24): Xaa is A or G or absent
RXGXGEVVMDSMEGIXXXXXXXXXMIQMTINSLETPV

SEQ ID NO: 27139 - protein, 38 aa, Artificial Sequence
  Non-cyclic GFR-binding peptide
  MOD_RES (33)..(34): Xaa is C or S
  MOD_RES (11)..(12)..(13)..(14)..(15): Xaa is A or G
  MOD_RES (16)..(17)..(18)..(19): Xaa is A or G or absent
SKVIMSMEGIXXXXXXXXXMIQITINSLDQSVXXPSAS

SEQ ID NO: 27140 - protein, 32 aa, Artificial Sequence
  Non-cyclic GFR-binding peptide
  MOD_RES (11)..(12)..(13)..(14)..(15): Xaa is A or G
  MOD_RES (16)..(17)..(18)..(19): Xaa is A or G or absent
SKVVMVQVEKXXXXXXXXXVKAIKVSRLDQPV

SEQ ID NO: 27141 - protein, 36 aa, Artificial Sequence
  Non-cyclic GFR-binding peptide
  MOD_RES (33)..(34): Xaa is C or S
  MOD_RES (11)..(12)..(13)..(14)..(15): Xaa is A or G
  MOD_RES (16)..(17)..(18)..(19): Xaa is A or G or absent
EVVMDVTAKKXXXXXXXXXIKRMQVPRLETPVXXAK

SEQ ID NO: 27142 - protein, 37 aa, Artificial Sequence
  Non-cyclic GFR-binding peptide
  MOD_RES (1)..(3)..(37): Xaa is C or S
XEXKNHQLFNSLQEHQGQHPKIRYYVMPLPEEETPVX

SEQ ID NO: 27143 - protein, 35 aa, Artificial Sequence
  Non-cyclic GFR-binding peptide
  MOD_RES (1)..(1): Xaa is C or S
  MOD_RES (14)..(15)..(16)..(17)..(18): Xaa is A or G
  MOD_RES (19)..(20)..(21)..(22): Xaa is A or G or absent
XALHDELTNSLQEXXXXXXXXXYYLVTLPELQVQT

SEQ ID NO: 27144 - protein, 41 aa, Artificial Sequence
  Non-cyclic GFR-binding peptide
  MOD_RES (1)..(3)..(35): Xaa is C or S
XGXSRVVMNVTAKKIVNSSDDIKRVQVPRLKTPAXTPKTVH

SEQ ID NO: 27145 - protein, 36 aa, Artificial Sequence
  Non-cyclic GFR-binding peptide
  MOD_RES (31)..(32): Xaa is C or S
RVVMNVTAKKIVNSSDDIKRVQVPRLKTPAXXPKPV

SEQ ID NO: 27146 - protein, 37 aa, Artificial Sequence
  Non-cyclic GFR-binding peptide
  MOD_RES (1)..(35)..(36): Xaa is C or S
  MOD_RES (13)..(14)..(15)..(16)..(17): Xaa is A or G
  MOD_RES (18)..(19)..(20)..(21): Xaa is A or G or absent
XARVVMNVTAKKXXXXXXXXXIKRVQVPRLQTPAXXP

SEQ ID NO: 27147 - protein, 40 aa, Artificial Sequence
  Non-cyclic GFR-binding peptide
  MOD_RES (36)..(36): Xaa is C or S
LHDELTNSLQEFIPKKRVIEYYLVTLPELQVQTPRXQVNR

SEQ ID NO: 27148 - protein, 39 aa, Artificial Sequence
  Non-cyclic GFR-binding peptide
  MOD_RES (1)..(35)..(36): Xaa is C or S
  MOD_RES (13)..(14)..(15)..(16)..(17): Xaa is A or G
  MOD_RES (18)..(19)..(20)..(21): Xaa is A or G or absent
XGEVVMEVQVEKXXXXXXXXXVKAMKVSRLETPVXXAKP

SEQ ID NO: 27149 - protein, 40 aa, Artificial Sequence
  Non-cyclic GFR-binding peptide
  MOD_RES (2)..(4)..(38): Xaa is C or S
  MOD_RES (16)..(17)..(18)..(19)..(20): Xaa is A or G
  MOD_RES (21)..(22)..(23)..(24): Xaa is A or G or absent
HXGXSRVVMNVTAKKXXXXXXXXXIKRVQVPRLKTPAXTP

SEQ ID NO: 27150 - protein, 32 aa, Artificial Sequence
  Non-cyclic GFR-binding peptide
  MOD_RES (11)..(12)..(13)..(14)..(15): Xaa is A or G
  MOD_RES (16)..(17)..(18)..(19): Xaa is A or G or absent
HEELRNSLQEXXXXXXXXXYYLVTLPEHHVRS

SEQ ID NO: 27151 - protein, 37 aa, Artificial Sequence
  Non-cyclic GFR-binding peptide
  MOD_RES (1)..(3): Xaa is C or S
XAXELHEELRNSLQELKPKKRVYEYYLVTLPEHHVRS

SEQ ID NO: 27152 - protein, 32 aa, Artificial Sequence
  Non-cyclic GFR-binding peptide
  MOD_RES (1)..(32): Xaa is C or S
XSKVIMSMEGIIKPTKGIMIQITINSLDQSVX

SEQ ID NO: 27153 - protein, 34 aa, Artificial Sequence
  Non-cyclic GFR-binding peptide
  MOD_RES (32)..(33): Xaa is C or S
SRVVMNSMEGIIVNSSDDMIQVTINSLKTPAXXP

SEQ ID NO: 27154 - protein, 32 aa, Artificial Sequence
  Non-cyclic GFR-binding peptide
  MOD_RES (1)..(1): Xaa is C or S
XGEVVMDVTAKKVVKENEDIKRMQVPRLETPV

SEQ ID NO: 27155 - protein, 37 aa, Artificial Sequence
  Non-cyclic GFR-binding peptide
  MOD_RES (2)..(36): Xaa is C or S
  MOD_RES (14)..(15)..(16)..(17)..(18): Xaa is A or G
  MOD_RES (19)..(20)..(21)..(22): Xaa is A or G or absent
GXSRVVMNSMEGIXXXXXXXXXMIQVTINSLKTPAXT

SEQ ID NO: 27156 - protein, 32 aa, Artificial Sequence
  Non-cyclic GFR-binding peptide
  MOD_RES (32)..(32): Xaa is C or S
GEVVMDVTAKKVVKENEDIKRMQVPRLETPVX

SEQ ID NO: 27157 - protein, 36 aa, Artificial Sequence
  Non-cyclic GFR-binding peptide
  MOD_RES (36)..(36): Xaa is C or S
  MOD_RES (12)..(13)..(14)..(15)..(16): Xaa is A or G
  MOD_RES (17)..(18)..(19)..(20): Xaa is A or G or absent
LHDELTNSLQEXXXXXXXXXYYVVPLPELQVQTPRX

SEQ ID NO: 27158 - protein, 40 aa, Artificial Sequence
  Non-cyclic GFR-binding peptide
  MOD_RES (1)..(38): Xaa is C or S
  MOD_RES (14)..(15)..(16)..(17)..(18): Xaa is A or G
  MOD_RES (19)..(20)..(21)..(22): Xaa is A or G or absent
XALHDELTNSLQEXXXXXXXXXYYLVTLPELQVQTPRXQV

SEQ ID NO: 27159 - protein, 34 aa, Artificial Sequence
  Non-cyclic GFR-binding peptide
  MOD_RES (34)..(34): Xaa is C or S
  MOD_RES (12)..(13)..(14)..(15)..(16): Xaa is A or G
  MOD_RES (17)..(18)..(19)..(20): Xaa is A or G or absent
GEVVMDVQVEKXXXXXXXXXVKAMKVSRLETPVX

SEQ ID NO: 27160 - protein, 34 aa, Artificial Sequence
  Non-cyclic GFR-binding peptide
  MOD_RES (32)..(33): Xaa is C or S
ARVVMNVTAKKIVNSSDDIKRVQVPRLQTPAXXP

SEQ ID NO: 27161 - protein, 37 aa, Artificial Sequence
  Non-cyclic GFR-binding peptide
  MOD_RES (2)..(4): Xaa is C or S
  MOD_RES (16)..(17)..(18)..(19)..(20): Xaa is A or G
  MOD_RES (21)..(22)..(23)..(24): Xaa is A or G or absent
RXGXGEVVMEVTAKKXXXXXXXXXIKRMQVPRLETPV

SEQ ID NO: 27162 - protein, 40 aa, Artificial Sequence
  Non-cyclic GFR-binding peptide
  MOD_RES (2)..(4)..(37)..(38): Xaa is C or S
  MOD_RES (15)..(16)..(17)..(18)..(19): Xaa is A or G
  MOD_RES (20)..(21)..(22)..(23): Xaa is A or G or absent
SXKXSRVIMVQVEKXXXXXXXXXVKAIKVSRLAQPVXXPA

SEQ ID NO: 27163 - protein, 35 aa, Artificial Sequence
  Non-cyclic GFR-binding peptide
  MOD_RES (2)..(4)..(35): Xaa is C or S
SXKXSKVVMVTAKKVKPTRGVIKRIQVPRLDQPVX

SEQ ID NO: 27164 - protein, 34 aa, Artificial Sequence
  Non-cyclic GFR-binding peptide
  MOD_RES (1)..(33)..(34): Xaa is C or S
XGEVVMEVTAKKVVKDYEDIKRMQVPRLETPVXX

SEQ ID NO: 27165 - protein, 39 aa, Artificial Sequence
  Non-cyclic GFR-binding peptide
  MOD_RES (34)..(34): Xaa is C or S
  MOD_RES (12)..(13)..(14)..(15)..(16): Xaa is A or G
  MOD_RES (17)..(18)..(19)..(20): Xaa is A or G or absent
SRVVMNVTAKKXXXXXXXXXIKRVQVPRLKTPAXTPKTV

SEQ ID NO: 27166 - protein, 40 aa, Artificial Sequence
  Non-cyclic GFR-binding peptide
  MOD_RES (1)..(3)..(40): Xaa is C or S
  MOD_RES (16)..(17)..(18)..(19)..(20): Xaa is A or G
  MOD_RES (21)..(22)..(23)..(24): Xaa is A or G or absent
XKXALHDELTNSLQEXXXXXXXXXYYLVTLPELQVQTPRX

SEQ ID NO: 27167 - protein, 36 aa, Artificial Sequence
  Non-cyclic GFR-binding peptide
  MOD_RES (35)..(35): Xaa is C or S
HDELTNSLQEFIPKKRVIEYYVVPLPELQVQTPRXQ

SEQ ID NO: 27168 - protein, 40 aa, Artificial Sequence
  Non-cyclic GFR-binding peptide
  MOD_RES (2)..(4)..(38): Xaa is C or S
  MOD_RES (16)..(17)..(18)..(19)..(20): Xaa is A or G
  MOD_RES (21)..(22)..(23)..(24): Xaa is A or G or absent
HXGXSRVVMNVQVEKXXXXXXXXXVKAVKVSRLKTPAXTP

SEQ ID NO: 27169 - protein, 38 aa, Artificial Sequence
  Non-cyclic GFR-binding peptide
  MOD_RES (1)..(3)..(37)..(38): Xaa is C or S
  MOD_RES (15)..(16)..(17)..(18)..(19): Xaa is A or G
  MOD_RES (20)..(21)..(22)..(23): Xaa is A or G or absent
XGXSRVVMNVQVEKXXXXXXXXXVKAVKVSRLKTPAXX

SEQ ID NO: 27170 - protein, 36 aa, Artificial Sequence
  Non-cyclic GFR-binding peptide
  MOD_RES (1)..(33)..(34): Xaa is C or S
XGEVVMESMEGIVVKDYEDMIQMTINSLETPVXXAK

SEQ ID NO: 27171 - protein, 39 aa, Artificial Sequence
  Non-cyclic GFR-binding peptide
  MOD_RES (2)..(4)..(35)..(36): Xaa is C or S
SXKXSKVIMSMEGIIKPTKGIMIQITINSLDQSVXXPSA

SEQ ID NO: 27172 - protein, 37 aa, Artificial Sequence
  Non-cyclic GFR-binding peptide
  MOD_RES (1)..(3): Xaa is C or S
XKXALHDELTNSLQEFIPKKRVIEYYLVTLPELQVQT

SEQ ID NO: 27173 - protein, 34 aa, Artificial Sequence
  Non-cyclic GFR-binding peptide
  MOD_RES (1)..(34): Xaa is C or S
  MOD_RES (12)..(13)..(14)..(15)..(16): Xaa is A or G
  MOD_RES (17)..(18)..(19)..(20): Xaa is A or G or absent
XSKVIMSMEGIXXXXXXXXXMIQITINSLDQSVX

SEQ ID NO: 27174 - protein, 37 aa, Artificial Sequence
  Non-cyclic GFR-binding peptide
  MOD_RES (1)..(3)..(36)..(37): Xaa is C or S
  MOD_RES (14)..(15)..(16)..(17)..(18): Xaa is A or G
  MOD_RES (19)..(20)..(21)..(22): Xaa is A or G or absent
XKXSRVIMVQVEKXXXXXXXXXVKAIKVSRLAQPVXX

SEQ ID NO: 27175 - protein, 33 aa, Artificial Sequence
  Non-cyclic GFR-binding peptide
  MOD_RES (1)..(1): Xaa is C or S
  MOD_RES (12)..(13)..(14)..(15)..(16): Xaa is A or G
  MOD_RES (17)..(18)..(19)..(20): Xaa is A or G or absent
XSKVVMSMEGIXXXXXXXXXMIQITINSLDQPV

SEQ ID NO: 27176 - protein, 42 aa, Artificial Sequence
  Non-cyclic GFR-binding peptide
  MOD_RES (2)..(36)..(37): Xaa is C or S
  MOD_RES (14)..(15)..(16)..(17)..(18): Xaa is A or G
  MOD_RES (19)..(20)..(21)..(22): Xaa is A or G or absent
GXGEVVMEVQVEKXXXXXXXXXVKAMKVSRLETPVXXAKPIS

SEQ ID NO: 27177 - protein, 40 aa, Artificial Sequence
  Non-cyclic GFR-binding peptide
  MOD_RES (2)..(35)..(36): Xaa is C or S
  MOD_RES (13)..(14)..(15)..(16)..(17): Xaa is A or G
  MOD_RES (18)..(19)..(20)..(21): Xaa is A or G or absent
KXSRVIMSMEGIXXXXXXXXXMIQITINSLAQPVXXPAAS

SEQ ID NO: 27178 - protein, 36 aa, Artificial Sequence
  Non-cyclic GFR-binding peptide
  MOD_RES (2)..(33)..(34): Xaa is C or S
KXSKVIMVTAKKIKPTKGIIKRIQVPRLDQSVXXPS

SEQ ID NO: 27179 - protein, 42 aa, Artificial Sequence
  Non-cyclic GFR-binding peptide
  MOD_RES (2)..(4)..(36): Xaa is C or S
HXGXSRVVMNVTAKKIVNSSDDIKRVQVPRLKTPAXTPKTVH

SEQ ID NO: 27180 - protein, 44 aa, Artificial Sequence
  Non-cyclic GFR-binding peptide
  MOD_RES (1)..(3)..(40): Xaa is C or S
  MOD_RES (16)..(17)..(18)..(19)..(20): Xaa is A or G
  MOD_RES (21)..(22)..(23)..(24): Xaa is A or G or absent
XAXELHEELRNSLQEXXXXXXXXXYYVVPLPEHHVRSPQXKVSS

SEQ ID NO: 27181 - protein, 35 aa, Artificial Sequence
  Non-cyclic GFR-binding peptide
  MOD_RES (1)..(3)..(35): Xaa is C or S
XGXSRVVMNVQVEKIVNSSDDVKAVKVSRLKTPAX

SEQ ID NO: 27182 - protein, 37 aa, Artificial Sequence
  Non-cyclic GFR-binding peptide
  MOD_RES (2)..(36)..(37): Xaa is C or S
  MOD_RES (14)..(15)..(16)..(17)..(18): Xaa is A or G
  MOD_RES (19)..(20)..(21)..(22): Xaa is A or G or absent
GXSRVVMNVTAKKXXXXXXXXXIKRVQVPRLKTPAXX

SEQ ID NO: 27183 - protein, 38 aa, Artificial Sequence
  Non-cyclic GFR-binding peptide
  MOD_RES (2)..(34)..(35): Xaa is C or S
GXARVVMNVQVEKIVNSSDDVKAVKVSRLQTPAXXPKP

SEQ ID NO: 27184 - protein, 37 aa, Artificial Sequence
  Non-cyclic GFR-binding peptide
  MOD_RES (1)..(3)..(37): Xaa is C or S
  MOD_RES (15)..(16)..(17)..(18)..(19): Xaa is A or G
  MOD_RES (20)..(21)..(22)..(23): Xaa is A or G or absent
XEXKNHQLFNSLQEXXXXXXXXXYYLMTLPEEETPVX

SEQ ID NO: 27185 - protein, 40 aa, Artificial Sequence
  Non-cyclic GFR-binding peptide
  MOD_RES (2)..(34)..(35): Xaa is C or S
GXGEVVMESMEGIVVKDYEDMIQMTINSLETPVXXAKPIS

SEQ ID NO: 27186 - protein, 37 aa, Artificial Sequence
  Non-cyclic GFR-binding peptide
  MOD_RES (32)..(33): Xaa is C or S
GEVVMDVTAKKVVKENEDIKRMQVPRLETPVXXAKPI

SEQ ID NO: 27187 - protein, 36 aa, Artificial Sequence
  Non-cyclic GFR-binding peptide
  MOD_RES (2)..(4): Xaa is C or S
  MOD_RES (15)..(16)..(17)..(18)..(19): Xaa is A or G
  MOD_RES (20)..(21)..(22)..(23): Xaa is A or G or absent
SXKXSRVIMSMEGIXXXXXXXXXMIQITINSLAQPV

SEQ ID NO: 27188 - protein, 39 aa, Artificial Sequence
  Non-cyclic GFR-binding peptide
  MOD_RES (1)..(3)..(35): Xaa is C or S
XGXSRVVMNVQVEKIVNSSDDVKAVKVSRLKTPAXTPKT

SEQ ID NO: 27189 - protein, 33 aa, Artificial Sequence
  Non-cyclic GFR-binding peptide
  MOD_RES (33)..(33): Xaa is C or S
  MOD_RES (11)..(12)..(13)..(14)..(15): Xaa is A or G
  MOD_RES (16)..(17)..(18)..(19): Xaa is A or G or absent
EVVMESMEGIXXXXXXXXXMIQMTINSLETPVX

SEQ ID NO: 27190 - protein, 35 aa, Artificial Sequence
  Non-cyclic GFR-binding peptide
  MOD_RES (1)..(33)..(34): Xaa is C or S
XSRVVMNVQVEKIVNSSDDVKAVKVSRLKTPAXXP

SEQ ID NO: 27191 - protein, 38 aa, Artificial Sequence
  Non-cyclic GFR-binding peptide
  MOD_RES (33)..(34): Xaa is C or S
  MOD_RES (11)..(12)..(13)..(14)..(15): Xaa is A or G
  MOD_RES (16)..(17)..(18)..(19): Xaa is A or G or absent
RVVMNVTAKKXXXXXXXXXIKRVQVPRLQTPAXXPKPV

SEQ ID NO: 27192 - protein, 35 aa, Artificial Sequence
  Non-cyclic GFR-binding peptide
  MOD_RES (1)..(1): Xaa is C or S
XALHDELTNSLQEFIPKKRVIEYYLVTLPELQVQT

SEQ ID NO: 27193 - protein, 40 aa, Artificial Sequence
  Non-cyclic GFR-binding peptide
  MOD_RES (1)..(38): Xaa is C or S
XALHDELTNSLQEFIPKKRVIEYYLVTLPELQVQTPRXQV

SEQ ID NO: 27194 - protein, 38 aa, Artificial Sequence
  Non-cyclic GFR-binding peptide
  MOD_RES (32)..(33): Xaa is C or S
ARVVMNSMEGIIVNSSDDMIQVTINSLQTPAXXPKPVT

SEQ ID NO: 27195 - protein, 38 aa, Artificial Sequence
  Non-cyclic GFR-binding peptide
  MOD_RES (34)..(35): Xaa is C or S
  MOD_RES (12)..(13)..(14)..(15)..(16): Xaa is A or G
  MOD_RES (17)..(18)..(19)..(20): Xaa is A or G or absent
GEVVMEVTAKKXXXXXXXXXIKRMQVPRLETPVXXAKP

SEQ ID NO: 27196 - protein, 33 aa, Artificial Sequence
  Non-cyclic GFR-binding peptide
  MOD_RES (2)..(33): Xaa is C or S
KXSKVVMSMEGIVKPTRGVMIQITINSLDQPVX

SEQ ID NO: 27197 - protein, 38 aa, Artificial Sequence
  Non-cyclic GFR-binding peptide
  MOD_RES (1)..(3)..(35): Xaa is C or S
XGXSRVVMNVQVEKIVNSSDDVKAVKVSRLKTPAXTPK

SEQ ID NO: 27198 - protein, 37 aa, Artificial Sequence
  Non-cyclic GFR-binding peptide
  MOD_RES (1)..(32)..(33): Xaa is C or S
XSKVVMVQVEKVKPTRGVVKAIKVSRLDQPVXXPSAS

SEQ ID NO: 27199 - protein, 35 aa, Artificial Sequence
  Non-cyclic GFR-binding peptide
  MOD_RES (33)..(34): Xaa is C or S
  MOD_RES (11)..(12)..(13)..(14)..(15): Xaa is A or G
  MOD_RES (16)..(17)..(18)..(19): Xaa is A or G or absent
EVVMDVTAKKXXXXXXXXXIKRMQVPRLETPVXXA

SEQ ID NO: 27200 - protein, 35 aa, Artificial Sequence
  Non-cyclic GFR-binding peptide
  MOD_RES (33)..(33): Xaa is C or S
  MOD_RES (11)..(12)..(13)..(14)..(15): Xaa is A or G
  MOD_RES (16)..(17)..(18)..(19): Xaa is A or G or absent
NHQLFNSLQEXXXXXXXXXYYLMTLPEEETPVXEL

SEQ ID NO: 27201 - protein, 32 aa, Artificial Sequence
  Non-cyclic GFR-binding peptide
  MOD_RES (1)..(32): Xaa is C or S
XSKVIMVQVEKIKPTKGIVKAIKVSRLDQSVX

SEQ ID NO: 27202 - protein, 37 aa, Artificial Sequence
  Non-cyclic GFR-binding peptide
  MOD_RES (2)..(4): Xaa is C or S
RXEXKNHQLFNSLQEHQGQHPKIRYYLMTLPEEETPV

SEQ ID NO: 27203 - protein, 34 aa, Artificial Sequence
  Non-cyclic GFR-binding peptide
  MOD_RES (31)..(32): Xaa is C or S
RVVMNVTAKKIVNSSDDIKRVQVPRLKTPAXXPK

SEQ ID NO: 27204 - protein, 37 aa, Artificial Sequence
  Non-cyclic GFR-binding peptide
  MOD_RES (2)..(4)..(36)..(37): Xaa is C or S
HXGXARVVMNVTAKKIVNSSDDIKRVQVPRLQTPAXX

SEQ ID NO: 27205 - protein, 33 aa, Artificial Sequence
  Non-cyclic GFR-binding peptide
  MOD_RES (33)..(33): Xaa is C or S
  MOD_RES (11)..(12)..(13)..(14)..(15): Xaa is A or G
  MOD_RES (16)..(17)..(18)..(19): Xaa is A or G or absent
SRVIMSMEGIXXXXXXXXXMIQITINSLAQPVX

SEQ ID NO: 27206 - protein, 40 aa, Artificial Sequence
  Non-cyclic GFR-binding peptide
  MOD_RES (2)..(36)..(37): Xaa is C or S
  MOD_RES (14)..(15)..(16)..(17)..(18): Xaa is A or G
  MOD_RES (19)..(20)..(21)..(22): Xaa is A or G or absent
GXGEVVMDVQVEKXXXXXXXXXVKAMKVSRLETPVXXAKP

SEQ ID NO: 27207 - protein, 36 aa, Artificial Sequence
  Non-cyclic GFR-binding peptide
  MOD_RES (2)..(4)..(35)..(36): Xaa is C or S
SXKXSKVVMSMEGIVKPTRGVMIQITINSLDQPVXX

SEQ ID NO: 27208 - protein, 42 aa, Artificial Sequence
  Non-cyclic GFR-binding peptide
  MOD_RES (1)..(38): Xaa is C or S
XELHEELRNSLQELKPKKRVYEYYVVPLPEHHVRSPQXKVSS

SEQ ID NO: 27209 - protein, 42 aa, Artificial Sequence
  Non-cyclic GFR-binding peptide
  MOD_RES (2)..(4)..(38): Xaa is C or S
  MOD_RES (16)..(17)..(18)..(19)..(20): Xaa is A or G
  MOD_RES (21)..(22)..(23)..(24): Xaa is A or G or absent
RXEXKNHQLFNSLQEXXXXXXXXXYYVMPLPEEETPVXELGE

SEQ ID NO: 27210 - protein, 33 aa, Artificial Sequence
  Non-cyclic GFR-binding peptide
  MOD_RES (2)..(2): Xaa is C or S
GXGEVVMEVTAKKVVKDYEDIKRMQVPRLETPV

SEQ ID NO: 27211 - protein, 43 aa, Artificial Sequence
  Non-cyclic GFR-binding peptide
  MOD_RES (1)..(3)..(40): Xaa is C or S
XAXELHEELRNSLQELKPKKRVYEYYLVTLPEHHVRSPQXKVS

SEQ ID NO: 27212 - protein, 40 aa, Artificial Sequence
  Non-cyclic GFR-binding peptide
  MOD_RES (1)..(3)..(36)..(37): Xaa is C or S
  MOD_RES (14)..(15)..(16)..(17)..(18): Xaa is A or G
  MOD_RES (19)..(20)..(21)..(22): Xaa is A or G or absent
XKXSRVIMSMEGIXXXXXXXXXMIQITINSLAQPVXXPAA

SEQ ID NO: 27213 - protein, 41 aa, Artificial Sequence
  Non-cyclic GFR-binding peptide
  MOD_RES (1)..(3)..(37): Xaa is C or S
  MOD_RES (15)..(16)..(17)..(18)..(19): Xaa is A or G
  MOD_RES (20)..(21)..(22)..(23): Xaa is A or G or absent
XGXSRVVMNVQVEKXXXXXXXXXVKAVKVSRLKTPAXTPKT

SEQ ID NO: 27214 - protein, 38 aa, Artificial Sequence
  Non-cyclic GFR-binding peptide
  MOD_RES (1)..(3): Xaa is C or S
  MOD_RES (16)..(17)..(18)..(19)..(20): Xaa is A or G
  MOD_RES (21)..(22)..(23)..(24): Xaa is A or G or absent
XKXALHDELTNSLQEXXXXXXXXXYYLVTLPELQVQTP

SEQ ID NO: 27215 - protein, 36 aa, Artificial Sequence
  Non-cyclic GFR-binding peptide
  MOD_RES (2)..(34)..(35): Xaa is C or S
GXARVVMNSMEGIIVNSSDDMIQVTINSLQTPAXXP

SEQ ID NO: 27216 - protein, 41 aa, Artificial Sequence
  Non-cyclic GFR-binding peptide
  MOD_RES (2)..(4)..(37)..(38): Xaa is C or S
  MOD_RES (15)..(16)..(17)..(18)..(19): Xaa is A or G
  MOD_RES (20)..(21)..(22)..(23): Xaa is A or G or absent
SXKXSRVIMVQVEKXXXXXXXXXVKAIKVSRLAQPVXXPAA

SEQ ID NO: 27217 - protein, 34 aa, Artificial Sequence
  Non-cyclic GFR-binding peptide
  MOD_RES (33)..(33): Xaa is C or S
NHQLFNSLQEHQGQHPKIRYYLMTLPEEETPVXE

SEQ ID NO: 27218 - protein, 42 aa, Artificial Sequence
  Non-cyclic GFR-binding peptide
  MOD_RES (2)..(4)..(36)..(37): Xaa is C or S
RXGXGEVVMDSMEGIVVKENEDMIQMTINSLETPVXXAKPIK

SEQ ID NO: 27219 - protein, 37 aa, Artificial Sequence
  Non-cyclic GFR-binding peptide
  MOD_RES (2)..(4)..(35)..(36): Xaa is C or S
SXKXSRVIMVTAKKVKPKRGVIKRIQVPRLAQPVXXP

SEQ ID NO: 27220 - protein, 34 aa, Artificial Sequence
  Non-cyclic GFR-binding peptide
  MOD_RES (34)..(34): Xaa is C or S
  MOD_RES (12)..(13)..(14)..(15)..(16): Xaa is A or G
  MOD_RES (17)..(18)..(19)..(20): Xaa is A or G or absent
ARVVMNVTAKKXXXXXXXXXIKRVQVPRLQTPAX

SEQ ID NO: 27221 - protein, 39 aa, Artificial Sequence
  Non-cyclic GFR-binding peptide
  MOD_RES (36)..(36): Xaa is C or S
LHEELRNSLQELKPKKRVYEYYVVPLPEHHVRSPQXKVS

SEQ ID NO: 27222 - protein, 36 aa, Artificial Sequence
  Non-cyclic GFR-binding peptide
  MOD_RES (1)..(33)..(34): Xaa is C or S
XARVVMNSMEGIIVNSSDDMIQVTINSLQTPAXXPK

SEQ ID NO: 27223 - protein, 42 aa, Artificial Sequence
  Non-cyclic GFR-binding peptide
  MOD_RES (2)..(4)..(38)..(39): Xaa is C or S
  MOD_RES (16)..(17)..(18)..(19)..(20): Xaa is A or G
  MOD_RES (21)..(22)..(23)..(24): Xaa is A or G or absent
RXGXGEVVMESMEGIXXXXXXXXXMIQMTINSLETPVXXAKP

SEQ ID NO: 27224 - protein, 31 aa, Artificial Sequence
  Non-cyclic GFR-binding peptide
  MOD_RES (31)..(31): Xaa is C or S
SKVVMSMEGIVKPTRGVMIQITINSLDQPVX

SEQ ID NO: 27225 - protein, 38 aa, Artificial Sequence
  Non-cyclic GFR-binding peptide
  MOD_RES (1)..(34)..(35): Xaa is C or S
  MOD_RES (12)..(13)..(14)..(15)..(16): Xaa is A or G
  MOD_RES (17)..(18)..(19)..(20): Xaa is A or G or absent
XSKVIMSMEGIXXXXXXXXXMIQITINSLDQSVXXPSA

SEQ ID NO: 27226 - protein, 37 aa, Artificial Sequence
  Non-cyclic GFR-binding peptide
  MOD_RES (1)..(32)..(33): Xaa is C or S
XSKVVMSMEGIVKPTRGVMIQITINSLDQPVXXPSAS

SEQ ID NO: 27227 - protein, 39 aa, Artificial Sequence
  Non-cyclic GFR-binding peptide
  MOD_RES (1)..(35)..(36): Xaa is C or S
  MOD_RES (13)..(14)..(15)..(16)..(17): Xaa is A or G
  MOD_RES (18)..(19)..(20)..(21): Xaa is A or G or absent
XSRVVMNSMEGIXXXXXXXXXMIQVTINSLKTPAXXPKP

SEQ ID NO: 27228 - protein, 35 aa, Artificial Sequence
  Non-cyclic GFR-binding peptide
  MOD_RES (33)..(34): Xaa is C or S
  MOD_RES (11)..(12)..(13)..(14)..(15): Xaa is A or G
  MOD_RES (16)..(17)..(18)..(19): Xaa is A or G or absent
SKVIMVTAKKXXXXXXXXXIKRIQVPRLDQSVXXP

SEQ ID NO: 27229 - protein, 42 aa, Artificial Sequence
  Non-cyclic GFR-binding peptide
  MOD_RES (2)..(36)..(37): Xaa is C or S
  MOD_RES (14)..(15)..(16)..(17)..(18): Xaa is A or G
  MOD_RES (19)..(20)..(21)..(22): Xaa is A or G or absent
GXGEVVMDSMEGIXXXXXXXXXMIQMTINSLETPVXXAKPIK

SEQ ID NO: 27230 - protein, 41 aa, Artificial Sequence
  Non-cyclic GFR-binding peptide
  MOD_RES (1)..(3)..(35)..(36): Xaa is C or S
XGXGEVVMDSMEGIVVKENEDMIQMTINSLETPVXXAKPIK

SEQ ID NO: 27231 - protein, 43 aa, Artificial Sequence
  Non-cyclic GFR-binding peptide
  MOD_RES (2)..(4)..(37)..(38): Xaa is C or S
  MOD_RES (15)..(16)..(17)..(18)..(19): Xaa is A or G
  MOD_RES (20)..(21)..(22)..(23): Xaa is A or G or absent
SXKXSKVIMSMEGIXXXXXXXXXMIQITINSLDQSVXXPSASA

SEQ ID NO: 27232 - protein, 36 aa, Artificial Sequence
  Non-cyclic GFR-binding peptide
  MOD_RES (31)..(32): Xaa is C or S
EVVMEVQVEKVVKDYEDVKAMKVSRLETPVXXAKPI

SEQ ID NO: 27233 - protein, 33 aa, Artificial Sequence
  Non-cyclic GFR-binding peptide
  MOD_RES (33)..(33): Xaa is C or S
  MOD_RES (11)..(12)..(13)..(14)..(15): Xaa is A or G
  MOD_RES (16)..(17)..(18)..(19): Xaa is A or G or absent
SKVIMVQVEKXXXXXXXXXVKAIKVSRLDQSVX

SEQ ID NO: 27234 - protein, 39 aa, Artificial Sequence
  Non-cyclic GFR-binding peptide
  MOD_RES (1)..(3)..(35): Xaa is C or S
XGXSRVVMNVTAKKIVNSSDDIKRVQVPRLKTPAXTPKT

SEQ ID NO: 27235 - protein, 44 aa, Artificial Sequence
  Non-cyclic GFR-binding peptide
  MOD_RES (1)..(3)..(40): Xaa is C or S
XKXALHDELTNSLQEFIPKKRVIEYYLVTLPELQVQTPRXQVNR

SEQ ID NO: 27236 - protein, 35 aa, Artificial Sequence
  Non-cyclic GFR-binding peptide
  MOD_RES (31)..(32): Xaa is C or S
RVVMNVTAKKIVNSSDDIKRVQVPRLQTPAXXPKP

SEQ ID NO: 27237 - protein, 38 aa, Artificial Sequence
  Non-cyclic GFR-binding peptide
  MOD_RES (1)..(3)..(36)..(37): Xaa is C or S
  MOD_RES (14)..(15)..(16)..(17)..(18): Xaa is A or G
  MOD_RES (19)..(20)..(21)..(22): Xaa is A or G or absent
XKXSKVIMVQVEKXXXXXXXXXVKAIKVSRLDQSVXXP

SEQ ID NO: 27238 - protein, 36 aa, Artificial Sequence
  Non-cyclic GFR-binding peptide
  MOD_RES (2)..(2): Xaa is C or S
  MOD_RES (15)..(16)..(17)..(18)..(19): Xaa is A or G
  MOD_RES (20)..(21)..(22)..(23): Xaa is A or G or absent
KXALHDELTNSLQEXXXXXXXXXYYLVTLPELQVQT

SEQ ID NO: 27239 - protein, 41 aa, Artificial Sequence
  Non-cyclic GFR-binding peptide
  MOD_RES (2)..(35)..(36): Xaa is C or S
  MOD_RES (13)..(14)..(15)..(16)..(17): Xaa is A or G
  MOD_RES (18)..(19)..(20)..(21): Xaa is A or G or absent
KXSKVVMVQVEKXXXXXXXXXVKAIKVSRLDQPVXXPSASA

SEQ ID NO: 27240 - protein, 39 aa, Artificial Sequence
  Non-cyclic GFR-binding peptide
  MOD_RES (2)..(4)..(36)..(37): Xaa is C or S
RXGXGEVVMDVTAKKVVKENEDIKRMQVPRLETPVXXAK

SEQ ID NO: 27241 - protein, 37 aa, Artificial Sequence
  Non-cyclic GFR-binding peptide
  MOD_RES (2)..(35)..(36): Xaa is C or S
  MOD_RES (13)..(14)..(15)..(16)..(17): Xaa is A or G
  MOD_RES (18)..(19)..(20)..(21): Xaa is A or G or absent
KXSRVIMVTAKKXXXXXXXXXIKRIQVPRLAQPVXXP

SEQ ID NO: 27242 - protein, 35 aa, Artificial Sequence
  Non-cyclic GFR-binding peptide
  MOD_RES (34)..(34): Xaa is C or S
  MOD_RES (12)..(13)..(14)..(15)..(16): Xaa is A or G
  MOD_RES (17)..(18)..(19)..(20): Xaa is A or G or absent
KNHQLFNSLQEXXXXXXXXXYYLMTLPEEETPVXE

SEQ ID NO: 27243 - protein, 37 aa, Artificial Sequence
  Non-cyclic GFR-binding peptide
  MOD_RES (2)..(36): Xaa is C or S
  MOD_RES (14)..(15)..(16)..(17)..(18): Xaa is A or G
  MOD_RES (19)..(20)..(21)..(22): Xaa is A or G or absent
EXKNHQLFNSLQEXXXXXXXXXYYVMPLPEEETPVXE

SEQ ID NO: 27244 - protein, 40 aa, Artificial Sequence
  Non-cyclic GFR-binding peptide
  MOD_RES (34)..(34): Xaa is C or S
  MOD_RES (12)..(13)..(14)..(15)..(16): Xaa is A or G
  MOD_RES (17)..(18)..(19)..(20): Xaa is A or G or absent
SRVVMNSMEGIXXXXXXXXXMIQVTINSLKTPAXTPKTVH

SEQ ID NO: 27245 - protein, 40 aa, Artificial Sequence
  Non-cyclic GFR-binding peptide
  MOD_RES (2)..(39): Xaa is C or S
AXELHEELRNSLQELKPKKRVYEYYLVTLPEHHVRSPQXK

SEQ ID NO: 27246 - protein, 32 aa, Artificial Sequence
  Non-cyclic GFR-binding peptide
  MOD_RES (1)..(32): Xaa is C or S
XSRVIMVQVEKVKPKRGVVKAIKVSRLAQPVX

SEQ ID NO: 27247 - protein, 34 aa, Artificial Sequence
  Non-cyclic GFR-binding peptide
LHEELRNSLQELKPKKRVYEYYVVPLPEHHVRSP

SEQ ID NO: 27248 - protein, 40 aa, Artificial Sequence
  Non-cyclic GFR-binding peptide
  MOD_RES (1)..(34)..(35): Xaa is C or S
  MOD_RES (12)..(13)..(14)..(15)..(16): Xaa is A or G
  MOD_RES (17)..(18)..(19)..(20): Xaa is A or G or absent
XSKVVMVQVEKXXXXXXXXXVKAIKVSRLDQPVXXPSASA

SEQ ID NO: 27249 - protein, 42 aa, Artificial Sequence
  Non-cyclic GFR-binding peptide
  MOD_RES (2)..(4)..(37)..(38): Xaa is C or S
  MOD_RES (15)..(16)..(17)..(18)..(19): Xaa is A or G
  MOD_RES (20)..(21)..(22)..(23): Xaa is A or G or absent
SXKXSRVIMSMEGIXXXXXXXXXMIQITINSLAQPVXXPAAS

SEQ ID NO: 27250 - protein, 40 aa, Artificial Sequence
  Non-cyclic GFR-binding peptide
  MOD_RES (1)..(35)..(36): Xaa is C or S
  MOD_RES (13)..(14)..(15)..(16)..(17): Xaa is A or G
  MOD_RES (18)..(19)..(20)..(21): Xaa is A or G or absent
XARVVMNVQVEKXXXXXXXXXVKAVKVSRLQTPAXXPKPV

SEQ ID NO: 27251 - protein, 38 aa, Artificial Sequence
  Non-cyclic GFR-binding peptide
  MOD_RES (1)..(32)..(33): Xaa is C or S
XSRVIMVQVEKVKPKRGVVKAIKVSRLAQPVXXPAASA

SEQ ID NO: 27252 - protein, 42 aa, Artificial Sequence
  Non-cyclic GFR-binding peptide
  MOD_RES (2)..(36): Xaa is C or S
  MOD_RES (14)..(15)..(16)..(17)..(18): Xaa is A or G
  MOD_RES (19)..(20)..(21)..(22): Xaa is A or G or absent
EXKNHQLFNSLQEXXXXXXXXXYYVMPLPEEETPVXELGEDN

SEQ ID NO: 27253 - protein, 36 aa, Artificial Sequence
  Non-cyclic GFR-binding peptide
  MOD_RES (1)..(3)..(36): Xaa is C or S
  MOD_RES (14)..(15)..(16)..(17)..(18): Xaa is A or G
  MOD_RES (19)..(20)..(21)..(22): Xaa is A or G or absent
XKXSRVIMVQVEKXXXXXXXXXVKAIKVSRLAQPVX

SEQ ID NO: 27254 - protein, 35 aa, Artificial Sequence
  Non-cyclic GFR-binding peptide
  MOD_RES (1)..(35): Xaa is C or S
  MOD_RES (13)..(14)..(15)..(16)..(17): Xaa is A or G
  MOD_RES (18)..(19)..(20)..(21): Xaa is A or G or absent
XGEVVMDVQVEKXXXXXXXXXVKAMKVSRLETPVX

SEQ ID NO: 27255 - protein, 34 aa, Artificial Sequence
  Non-cyclic GFR-binding peptide
HDELTNSLQEFIPKKRVIEYYLVTLPELQVQTPR

SEQ ID NO: 27256 - protein, 32 aa, Artificial Sequence
  Non-cyclic GFR-binding peptide
  MOD_RES (31)..(32): Xaa is C or S
EVVMEVTAKKVVKDYEDIKRMQVPRLETPVXX

SEQ ID NO: 27257 - protein, 40 aa, Artificial Sequence
  Non-cyclic GFR-binding peptide
  MOD_RES (2)..(4): Xaa is C or S
  MOD_RES (17)..(18)..(19)..(20)..(21): Xaa is A or G
  MOD_RES (22)..(23)..(24)..(25): Xaa is A or G or absent
AXAXELHEELRNSLQEXXXXXXXXXYYVVPLPEHHVRSPQ

SEQ ID NO: 27258 - protein, 36 aa, Artificial Sequence
  Non-cyclic GFR-binding peptide
  MOD_RES (1)..(33)..(34): Xaa is C or S
XGEVVMDVTAKKVVKENEDIKRMQVPRLETPVXXAK

SEQ ID NO: 27259 - protein, 31 aa, Artificial Sequence
  Non-cyclic GFR-binding peptide
GEVVMDSMEGIVVKENEDMIQMTINSLETPV

SEQ ID NO: 27260 - protein, 33 aa, Artificial Sequence
  Non-cyclic GFR-binding peptide
  MOD_RES (12)..(13)..(14)..(15)..(16): Xaa is A or G
  MOD_RES (17)..(18)..(19)..(20): Xaa is A or G or absent
GEVVMDVTAKKXXXXXXXXXIKRMQVPRLETPV

SEQ ID NO: 27261 - protein, 41 aa, Artificial Sequence
  Non-cyclic GFR-binding peptide
  MOD_RES (2)..(4)..(38): Xaa is C or S
  MOD_RES (16)..(17)..(18)..(19)..(20): Xaa is A or G
  MOD_RES (21)..(22)..(23)..(24): Xaa is A or G or absent
RXEXKNHQLFNSLQEXXXXXXXXXYYLMTLPEEETPVXELG

SEQ ID NO: 27262 - protein, 41 aa, Artificial Sequence
  Non-cyclic GFR-binding peptide
  MOD_RES (2)..(4)..(37)..(38): Xaa is C or S
  MOD_RES (15)..(16)..(17)..(18)..(19): Xaa is A or G
  MOD_RES (20)..(21)..(22)..(23): Xaa is A or G or absent
SXKXSRVIMVTAKKXXXXXXXXXIKRIQVPRLAQPVXXPAA

SEQ ID NO: 27263 - protein, 36 aa, Artificial Sequence
  Non-cyclic GFR-binding peptide
  MOD_RES (2)..(33)..(34): Xaa is C or S
KXSKVVMVTAKKVKPTRGVIKRIQVPRLDQPVXXPS

SEQ ID NO: 27264 - protein, 32 aa, Artificial Sequence
  Non-cyclic GFR-binding peptide
  MOD_RES (11)..(12)..(13)..(14)..(15): Xaa is A or G
  MOD_RES (16)..(17)..(18)..(19): Xaa is A or G or absent
RVVMNSMEGIXXXXXXXXXMIQVTINSLKTPA

SEQ ID NO: 27265 - protein, 33 aa, Artificial Sequence
  Non-cyclic GFR-binding peptide
  MOD_RES (33)..(33): Xaa is C or S
  MOD_RES (11)..(12)..(13)..(14)..(15): Xaa is A or G
  MOD_RES (16)..(17)..(18)..(19): Xaa is A or G or absent
RVVMNVQVEKXXXXXXXXXVKAVKVSRLKTPAX

SEQ ID NO: 27266 - protein, 37 aa, Artificial Sequence
  Non-cyclic GFR-binding peptide
  MOD_RES (33)..(33): Xaa is C or S
  MOD_RES (11)..(12)..(13)..(14)..(15): Xaa is A or G
  MOD_RES (16)..(17)..(18)..(19): Xaa is A or G or absent
RVVMNVTAKKXXXXXXXXXIKRVQVPRLKTPAXTPKT

SEQ ID NO: 27267 - protein, 37 aa, Artificial Sequence
  Non-cyclic GFR-binding peptide
  MOD_RES (33)..(33): Xaa is C or S
  MOD_RES (11)..(12)..(13)..(14)..(15): Xaa is A or G
  MOD_RES (16)..(17)..(18)..(19): Xaa is A or G or absent
RVVMNVQVEKXXXXXXXXXVKAVKVSRLKTPAXTPKT

SEQ ID NO: 27268 - protein, 38 aa, Artificial Sequence
  Non-cyclic GFR-binding peptide
  MOD_RES (2)..(4)..(36)..(37): Xaa is C or S
HXGXARVVMNSMEGIIVNSSDDMIQVTINSLQTPAXXP

SEQ ID NO: 27269 - protein, 36 aa, Artificial Sequence
  Non-cyclic GFR-binding peptide
  MOD_RES (2)..(4): Xaa is C or S
  MOD_RES (15)..(16)..(17)..(18)..(19): Xaa is A or G
  MOD_RES (20)..(21)..(22)..(23): Xaa is A or G or absent
SXKXSKVVMSMEGIXXXXXXXXXMIQITINSLDQPV

SEQ ID NO: 27270 - protein, 31 aa, Artificial Sequence
  Non-cyclic GFR-binding peptide
GEVVMESMEGIVVKDYEDMIQMTINSLETPV

SEQ ID NO: 27271 - protein, 38 aa, Artificial Sequence
  Non-cyclic GFR-binding peptide
  MOD_RES (2)..(4)..(38): Xaa is C or S
  MOD_RES (16)..(17)..(18)..(19)..(20): Xaa is A or G
  MOD_RES (21)..(22)..(23)..(24): Xaa is A or G or absent
RXGXGEVVMEVTAKKXXXXXXXXXIKRMQVPRLETPVX

SEQ ID NO: 27272 - protein, 43 aa, Artificial Sequence
  Non-cyclic GFR-binding peptide
  MOD_RES (2)..(4)..(38): Xaa is C or S
  MOD_RES (16)..(17)..(18)..(19)..(20): Xaa is A or G
  MOD_RES (21)..(22)..(23)..(24): Xaa is A or G or absent
HXGXSRVVMNVTAKKXXXXXXXXXIKRVQVPRLKTPAXTPKTV

SEQ ID NO: 27273 - protein, 41 aa, Artificial Sequence
  Non-cyclic GFR-binding peptide
  MOD_RES (1)..(3)..(37): Xaa is C or S
  MOD_RES (15)..(16)..(17)..(18)..(19): Xaa is A or G
  MOD_RES (20)..(21)..(22)..(23): Xaa is A or G or absent
XGXSRVVMNVTAKKXXXXXXXXXIKRVQVPRLKTPAXTPKT

SEQ ID NO: 27274 - protein, 39 aa, Artificial Sequence
  Non-cyclic GFR-binding peptide
  MOD_RES (1)..(33)..(34): Xaa is C or S
XARVVMNSMEGIIVNSSDDMIQVTINSLQTPAXXPKPVT

SEQ ID NO: 27275 - protein, 43 aa, Artificial Sequence
  Non-cyclic GFR-binding peptide
  MOD_RES (2)..(4)..(37)..(38): Xaa is C or S
  MOD_RES (15)..(16)..(17)..(18)..(19): Xaa is A or G
  MOD_RES (20)..(21)..(22)..(23): Xaa is A or G or absent
SXKXSKVVMVTAKKXXXXXXXXXIKRIQVPRLDQPVXXPSASA

SEQ ID NO: 27276 - protein, 36 aa, Artificial Sequence
  Non-cyclic GFR-binding peptide
  MOD_RES (36)..(36): Xaa is C or S
LHDELTNSLQEFIPKKRVIEYYLVTLPELQVQTPRX

SEQ ID NO: 27277 - protein, 40 aa, Artificial Sequence
  Non-cyclic GFR-binding peptide
  MOD_RES (2)..(4): Xaa is C or S
EXKXALHDELTNSLQEFIPKKRVIEYYLVTLPELQVQTPR

SEQ ID NO: 27278 - protein, 33 aa, Artificial Sequence
  Non-cyclic GFR-binding peptide
  MOD_RES (33)..(33): Xaa is C or S
  MOD_RES (11)..(12)..(13)..(14)..(15): Xaa is A or G
  MOD_RES (16)..(17)..(18)..(19): Xaa is A or G or absent
RVVMNVTAKKXXXXXXXXXIKRVQVPRLKTPAX

SEQ ID NO: 27279 - protein, 37 aa, Artificial Sequence
  Non-cyclic GFR-binding peptide
  MOD_RES (2)..(4)..(36)..(37): Xaa is C or S
RXGXGEVVMEVQVEKVVKDYEDVKAMKVSRLETPVXX

SEQ ID NO: 27280 - protein, 42 aa, Artificial Sequence
  Non-cyclic GFR-binding peptide
  MOD_RES (2)..(39): Xaa is C or S
  MOD_RES (15)..(16)..(17)..(18)..(19): Xaa is A or G
  MOD_RES (20)..(21)..(22)..(23): Xaa is A or G or absent
AXELHEELRNSLQEXXXXXXXXXYYLVTLPEHHVRSPQXKVS

SEQ ID NO: 27281 - protein, 34 aa, Artificial Sequence
  Non-cyclic GFR-binding peptide
  MOD_RES (33)..(34): Xaa is C or S
  MOD_RES (11)..(12)..(13)..(14)..(15): Xaa is A or G
  MOD_RES (16)..(17)..(18)..(19): Xaa is A or G or absent
RVVMNSMEGIXXXXXXXXXMIQVTINSLQTPAXX

SEQ ID NO: 27282 - protein, 32 aa, Artificial Sequence
  Non-cyclic GFR-binding peptide
  MOD_RES (31)..(32): Xaa is C or S
SRVIMVTAKKVKPKRGVIKRIQVPRLAQPVXX

SEQ ID NO: 27283 - protein, 40 aa, Artificial Sequence
  Non-cyclic GFR-binding peptide
  MOD_RES (2)..(39): Xaa is C or S
KXALHDELTNSLQEFIPKKRVIEYYLVTLPELQVQTPRXQ

SEQ ID NO: 27284 - protein, 41 aa, Artificial Sequence
  Non-cyclic GFR-binding peptide
  MOD_RES (2)..(4)..(38): Xaa is C or S
  MOD_RES (16)..(17)..(18)..(19)..(20): Xaa is A or G
  MOD_RES (21)..(22)..(23)..(24): Xaa is A or G or absent
HXGXSRVVMNSMEGIXXXXXXXXXMIQVTINSLKTPAXTPK

SEQ ID NO: 27285 - protein, 40 aa, Artificial Sequence
  Non-cyclic GFR-binding peptide
  MOD_RES (2)..(34)..(35): Xaa is C or S
GXSRVVMNVTAKKIVNSSDDIKRVQVPRLKTPAXXPKPVY

SEQ ID NO: 27286 - protein, 38 aa, Artificial Sequence
  Non-cyclic GFR-binding peptide
  MOD_RES (2)..(4)..(36)..(37): Xaa is C or S
RXGXGEVVMESMEGIVVKDYEDMIQMTINSLETPVXXA

SEQ ID NO: 27287 - protein, 37 aa, Artificial Sequence
  Non-cyclic GFR-binding peptide
  MOD_RES (1)..(1): Xaa is C or S
  MOD_RES (14)..(15)..(16)..(17)..(18): Xaa is A or G
  MOD_RES (19)..(20)..(21)..(22): Xaa is A or G or absent
XELHEELRNSLQEXXXXXXXXXYYVVPLPEHHVRSPQ

SEQ ID NO: 27288 - protein, 38 aa, Artificial Sequence
  Non-cyclic GFR-binding peptide
  MOD_RES (2)..(4)..(38): Xaa is C or S
  MOD_RES (16)..(17)..(18)..(19)..(20): Xaa is A or G
  MOD_RES (21)..(22)..(23)..(24): Xaa is A or G or absent
RXGXGEVVMDVQVEKXXXXXXXXXVKAMKVSRLETPVX

SEQ ID NO: 27289 - protein, 39 aa, Artificial Sequence
  Non-cyclic GFR-binding peptide
  MOD_RES (33)..(34): Xaa is C or S
  MOD_RES (11)..(12)..(13)..(14)..(15): Xaa is A or G
  MOD_RES (16)..(17)..(18)..(19): Xaa is A or G or absent
SRVIMSMEGIXXXXXXXXXMIQITINSLAQPVXXPAASA

SEQ ID NO: 27290 - protein, 35 aa, Artificial Sequence
  Non-cyclic GFR-binding peptide
  MOD_RES (2)..(4)..(35): Xaa is C or S
SXKXSKVVMVQVEKVKPTRGVVKAIKVSRLDQPVX

SEQ ID NO: 27291 - protein, 37 aa, Artificial Sequence
  Non-cyclic GFR-binding peptide
  MOD_RES (2)..(33)..(34): Xaa is C or S
KXSRVIMVTAKKVKPKRGVIKRIQVPRLAQPVXXPAA

SEQ ID NO: 27292 - protein, 36 aa, Artificial Sequence
  Non-cyclic GFR-binding peptide
  MOD_RES (2)..(36): Xaa is C or S
  MOD_RES (14)..(15)..(16)..(17)..(18): Xaa is A or G
  MOD_RES (19)..(20)..(21)..(22): Xaa is A or G or absent
GXARVVMNVQVEKXXXXXXXXXVKAVKVSRLQTPAX

SEQ ID NO: 27293 - protein, 40 aa, Artificial Sequence
  Non-cyclic GFR-binding peptide
  MOD_RES (2)..(36)..(37): Xaa is C or S
  MOD_RES (14)..(15)..(16)..(17)..(18): Xaa is A or G
  MOD_RES (19)..(20)..(21)..(22): Xaa is A or G or absent
GXARVVMNVTAKKXXXXXXXXXIKRVQVPRLQTPAXXPKP

SEQ ID NO: 27294 - protein, 34 aa, Artificial Sequence
  Non-cyclic GFR-binding peptide
  MOD_RES (1)..(1): Xaa is C or S
  MOD_RES (13)..(14)..(15)..(16)..(17): Xaa is A or G
  MOD_RES (18)..(19)..(20)..(21): Xaa is A or G or absent
XGEVVMDSMEGIXXXXXXXXXMIQMTINSLETPV

SEQ ID NO: 27295 - protein, 34 aa, Artificial Sequence
  Non-cyclic GFR-binding peptide
  MOD_RES (31)..(32): Xaa is C or S
EVVMDVQVEKVVKENEDVKAMKVSRLETPVXXAK

SEQ ID NO: 27296 - protein, 41 aa, Artificial Sequence
  Non-cyclic GFR-binding peptide
  MOD_RES (2)..(4)..(38)..(39): Xaa is C or S
  MOD_RES (16)..(17)..(18)..(19)..(20): Xaa is A or G
  MOD_RES (21)..(22)..(23)..(24): Xaa is A or G or absent
HXGXSRVVMNVTAKKXXXXXXXXXIKRVQVPRLKTPAXXPK

SEQ ID NO: 27297 - protein, 38 aa, Artificial Sequence
  Non-cyclic GFR-binding peptide
  MOD_RES (2)..(33)..(34): Xaa is C or S
KXSRVIMSMEGIVKPKRGVMIQITINSLAQPVXXPAAS

SEQ ID NO: 27298 - protein, 34 aa, Artificial Sequence
  Non-cyclic GFR-binding peptide
  MOD_RES (11)..(12)..(13)..(14)..(15): Xaa is A or G
  MOD_RES (16)..(17)..(18)..(19): Xaa is A or G or absent
HEELRNSLQEXXXXXXXXXYYVVPLPEHHVRSPQ

SEQ ID NO: 27299 - protein, 36 aa, Artificial Sequence
  Non-cyclic GFR-binding peptide
  MOD_RES (2)..(4)..(36): Xaa is C or S
HXGXSRVVMNSMEGIIVNSSDDMIQVTINSLKTPAX

SEQ ID NO: 27300 - protein, 43 aa, Artificial Sequence
  Non-cyclic GFR-binding peptide
  MOD_RES (1)..(3)..(40): Xaa is C or S
XKXALHDELTNSLQEFIPKKRVIEYYVVPLPELQVQTPRXQVN

SEQ ID NO: 27301 - protein, 42 aa, Artificial Sequence
  Non-cyclic GFR-binding peptide
  MOD_RES (2)..(36)..(37): Xaa is C or S
  MOD_RES (14)..(15)..(16)..(17)..(18): Xaa is A or G
  MOD_RES (19)..(20)..(21)..(22): Xaa is A or G or absent
GXARVVMNVTAKKXXXXXXXXXIKRVQVPRLQTPAXXPKPVT

SEQ ID NO: 27302 - protein, 35 aa, Artificial Sequence
  Non-cyclic GFR-binding peptide
ALHDELTNSLQEFIPKKRVIEYYLVTLPELQVQTP

SEQ ID NO: 27303 - protein, 38 aa, Artificial Sequence
  Non-cyclic GFR-binding peptide
  MOD_RES (1)..(33)..(34): Xaa is C or S
XARVVMNSMEGIIVNSSDDMIQVTINSLQTPAXXPKPV

SEQ ID NO: 27304 - protein, 35 aa, Artificial Sequence
  Non-cyclic GFR-binding peptide
  MOD_RES (2)..(34): Xaa is C or S
GXSRVVMNSMEGIIVNSSDDMIQVTINSLKTPAXT

SEQ ID NO: 27305 - protein, 39 aa, Artificial Sequence
  Non-cyclic GFR-binding peptide
  MOD_RES (1)..(3)..(35)..(36): Xaa is C or S
XGXGEVVMEVTAKKVVKDYEDIKRMQVPRLETPVXXAKP

SEQ ID NO: 27306 - protein, 35 aa, Artificial Sequence
  Non-cyclic GFR-binding peptide
  MOD_RES (1)..(3): Xaa is C or S
  MOD_RES (14)..(15)..(16)..(17)..(18): Xaa is A or G
  MOD_RES (19)..(20)..(21)..(22): Xaa is A or G or absent
XKXSKVIMSMEGIXXXXXXXXXMIQITINSLDQSV

SEQ ID NO: 27307 - protein, 37 aa, Artificial Sequence
  Non-cyclic GFR-binding peptide
  MOD_RES (37)..(37): Xaa is C or S
  MOD_RES (13)..(14)..(15)..(16)..(17): Xaa is A or G
  MOD_RES (18)..(19)..(20)..(21): Xaa is A or G or absent
ALHDELTNSLQEXXXXXXXXXYYVVPLPELQVQTPRX

SEQ ID NO: 27308 - protein, 36 aa, Artificial Sequence
  Non-cyclic GFR-binding peptide
  MOD_RES (1)..(35): Xaa is C or S
  MOD_RES (13)..(14)..(15)..(16)..(17): Xaa is A or G
  MOD_RES (18)..(19)..(20)..(21): Xaa is A or G or absent
XSRVVMNVTAKKXXXXXXXXXIKRVQVPRLKTPAXT

SEQ ID NO: 27309 - protein, 34 aa, Artificial Sequence
  Non-cyclic GFR-binding peptide
  MOD_RES (1)..(1): Xaa is C or S
  MOD_RES (13)..(14)..(15)..(16)..(17): Xaa is A or G
  MOD_RES (18)..(19)..(20)..(21): Xaa is A or G or absent
XKNHQLFNSLQEXXXXXXXXXYYLMTLPEEETPV

SEQ ID NO: 27310 - protein, 37 aa, Artificial Sequence
  Non-cyclic GFR-binding peptide
  MOD_RES (2)..(34)..(35): Xaa is C or S
GXGEVVMDVQVEKVVKENEDVKAMKVSRLETPVXXAK

SEQ ID NO: 27311 - protein, 39 aa, Artificial Sequence
  Non-cyclic GFR-binding peptide
  MOD_RES (1)..(3)..(34)..(35): Xaa is C or S
XKXSRVIMVTAKKVKPKRGVIKRIQVPRLAQPVXXPAAS

SEQ ID NO: 27312 - protein, 38 aa, Artificial Sequence
  Non-cyclic GFR-binding peptide
  MOD_RES (2)..(4)..(38): Xaa is C or S
RXEXKNHQLFNSLQEHQGQHPKIRYYLMTLPEEETPVX

SEQ ID NO: 27313 - protein, 36 aa, Artificial Sequence
  Non-cyclic GFR-binding peptide
  MOD_RES (34)..(34): Xaa is C or S
  MOD_RES (12)..(13)..(14)..(15)..(16): Xaa is A or G
  MOD_RES (17)..(18)..(19)..(20): Xaa is A or G or absent
SRVVMNSMEGIXXXXXXXXXMIQVTINSLKTPAXTP

SEQ ID NO: 27314 - protein, 39 aa, Artificial Sequence
  Non-cyclic GFR-binding peptide
  MOD_RES (1)..(3): Xaa is C or S
  MOD_RES (16)..(17)..(18)..(19)..(20): Xaa is A or G
  MOD_RES (21)..(22)..(23)..(24): Xaa is A or G or absent
XKXALHDELTNSLQEXXXXXXXXXYYVVPLPELQVQTPR

SEQ ID NO: 27315 - protein, 39 aa, Artificial Sequence
  Non-cyclic GFR-binding peptide
  MOD_RES (33)..(34): Xaa is C or S
  MOD_RES (11)..(12)..(13)..(14)..(15): Xaa is A or G
  MOD_RES (16)..(17)..(18)..(19): Xaa is A or G or absent
EVVMDSMEGIXXXXXXXXXMIQMTINSLETPVXXAKPIK

SEQ ID NO: 27316 - protein, 36 aa, Artificial Sequence
  Non-cyclic GFR-binding peptide
  MOD_RES (31)..(31): Xaa is C or S
RVVMNVQVEKIVNSSDDVKAVKVSRLKTPAXTPKTV

SEQ ID NO: 27317 - protein, 40 aa, Artificial Sequence
  Non-cyclic GFR-binding peptide
  MOD_RES (36)..(36): Xaa is C or S
  MOD_RES (12)..(13)..(14)..(15)..(16): Xaa is A or G
  MOD_RES (17)..(18)..(19)..(20): Xaa is A or G or absent
LHDELTNSLQEXXXXXXXXXYYVVPLPELQVQTPRXQVNR

SEQ ID NO: 27318 - protein, 39 aa, Artificial Sequence
  Non-cyclic GFR-binding peptide
  MOD_RES (2)..(36): Xaa is C or S
  MOD_RES (14)..(15)..(16)..(17)..(18): Xaa is A or G
  MOD_RES (19)..(20)..(21)..(22): Xaa is A or G or absent
EXKNHQLFNSLQEXXXXXXXXXYYLMTLPEEETPVXELG

SEQ ID NO: 27319 - protein, 42 aa, Artificial Sequence
  Non-cyclic GFR-binding peptide
  MOD_RES (2)..(4)..(38)..(39): Xaa is C or S
  MOD_RES (16)..(17)..(18)..(19)..(20): Xaa is A or G
  MOD_RES (21)..(22)..(23)..(24): Xaa is A or G or absent
RXGXGEVVMDSMEGIXXXXXXXXXMIQMTINSLETPVXXAKP

SEQ ID NO: 27320 - protein, 36 aa, Artificial Sequence
  Non-cyclic GFR-binding peptide
  MOD_RES (31)..(32): Xaa is C or S
EVVMDVTAKKVVKENEDIKRMQVPRLETPVXXAKPI

SEQ ID NO: 27321 - protein, 35 aa, Artificial Sequence
  Non-cyclic GFR-binding peptide
  MOD_RES (1)..(35): Xaa is C or S
XKNHQLFNSLQEHQGQHPKIRYYVMPLPEEETPVX

SEQ ID NO: 27322 - protein, 38 aa, Artificial Sequence
  Non-cyclic GFR-binding peptide
  MOD_RES (2)..(36)..(37): Xaa is C or S
  MOD_RES (14)..(15)..(16)..(17)..(18): Xaa is A or G
  MOD_RES (19)..(20)..(21)..(22): Xaa is A or G or absent
GXGEVVMEVQVEKXXXXXXXXXVKAMKVSRLETPVXXA

SEQ ID NO: 27323 - protein, 40 aa, Artificial Sequence
  Non-cyclic GFR-binding peptide
  MOD_RES (2)..(4)..(35)..(36): Xaa is C or S
SXKXSRVIMVQVEKVKPKRGVVKAIKVSRLAQPVXXPAAS

SEQ ID NO: 27324 - protein, 36 aa, Artificial Sequence
  Non-cyclic GFR-binding peptide
  MOD_RES (1)..(34)..(35): Xaa is C or S
  MOD_RES (12)..(13)..(14)..(15)..(16): Xaa is A or G
  MOD_RES (17)..(18)..(19)..(20): Xaa is A or G or absent
XSRVIMVTAKKXXXXXXXXXIKRIQVPRLAQPVXXP

SEQ ID NO: 27325 - protein, 38 aa, Artificial Sequence
  Non-cyclic GFR-binding peptide
  MOD_RES (2)..(36)..(37): Xaa is C or S
  MOD_RES (14)..(15)..(16)..(17)..(18): Xaa is A or G
  MOD_RES (19)..(20)..(21)..(22): Xaa is A or G or absent
GXSRVVMNVTAKKXXXXXXXXXIKRVQVPRLKTPAXXP

SEQ ID NO: 27326 - protein, 42 aa, Artificial Sequence
  Non-cyclic GFR-binding peptide
  MOD_RES (2)..(4)..(41): Xaa is C or S
AXAXELHEELRNSLQELKPKKRVYEYYVVPLPEHHVRSPQXK

SEQ ID NO: 27327 - protein, 35 aa, Artificial Sequence
  Non-cyclic GFR-binding peptide
  MOD_RES (1)..(34)..(35): Xaa is C or S
  MOD_RES (12)..(13)..(14)..(15)..(16): Xaa is A or G
  MOD_RES (17)..(18)..(19)..(20): Xaa is A or G or absent
XSKVVMVQVEKXXXXXXXXXVKAIKVSRLDQPVXX

SEQ ID NO: 27328 - protein, 33 aa, Artificial Sequence
  Non-cyclic GFR-binding peptide
  MOD_RES (1)..(3): Xaa is C or S
XKXSKVVMVQVEKVKPTRGVVKAIKVSRLDQPV

SEQ ID NO: 27329 - protein, 32 aa, Artificial Sequence
  Non-cyclic GFR-binding peptide
  MOD_RES (11)..(12)..(13)..(14)..(15): Xaa is A or G
  MOD_RES (16)..(17)..(18)..(19): Xaa is A or G or absent
NHQLFNSLQEXXXXXXXXXYYLMTLPEEETPV

SEQ ID NO: 27330 - protein, 41 aa, Artificial Sequence
  Non-cyclic GFR-binding peptide
  MOD_RES (1)..(3)..(35)..(36): Xaa is C or S
XGXSRVVMNSMEGIIVNSSDDMIQVTINSLKTPAXXPKPVY

SEQ ID NO: 27331 - protein, 32 aa, Artificial Sequence
  Non-cyclic GFR-binding peptide
  MOD_RES (11)..(12)..(13)..(14)..(15): Xaa is A or G
  MOD_RES (16)..(17)..(18)..(19): Xaa is A or G or absent
SKVVMVTAKKXXXXXXXXXIKRIQVPRLDQPV

SEQ ID NO: 27332 - protein, 34 aa, Artificial Sequence
  Non-cyclic GFR-binding peptide
  MOD_RES (2)..(4): Xaa is C or S
SXKXSRVIMSMEGIVKPKRGVMIQITINSLAQPV

SEQ ID NO: 27333 - protein, 38 aa, Artificial Sequence
  Non-cyclic GFR-binding peptide
  MOD_RES (1)..(3)..(37)..(38): Xaa is C or S
  MOD_RES (15)..(16)..(17)..(18)..(19): Xaa is A or G
  MOD_RES (20)..(21)..(22)..(23): Xaa is A or G or absent
XGXGEVVMEVTAKKXXXXXXXXXIKRMQVPRLETPVXX

SEQ ID NO: 27334 - protein, 35 aa, Artificial Sequence
  Non-cyclic GFR-binding peptide
  MOD_RES (1)..(33): Xaa is C or S
XSRVVMNSMEGIIVNSSDDMIQVTINSLKTPAXTP

SEQ ID NO: 27335 - protein, 36 aa, Artificial Sequence
  Non-cyclic GFR-binding peptide
  MOD_RES (1)..(35)..(36): Xaa is C or S
  MOD_RES (13)..(14)..(15)..(16)..(17): Xaa is A or G
  MOD_RES (18)..(19)..(20)..(21): Xaa is A or G or absent
XGEVVMESMEGIXXXXXXXXXMIQMTINSLETPVXX

SEQ ID NO: 27336 - protein, 34 aa, Artificial Sequence
  Non-cyclic GFR-binding peptide
  MOD_RES (33)..(33): Xaa is C or S
NHQLFNSLQEHQGQHPKIRYYVMPLPEEETPVXE

SEQ ID NO: 27337 - protein, 37 aa, Artificial Sequence
  Non-cyclic GFR-binding peptide
  MOD_RES (2)..(4): Xaa is C or S
RXEXKNHQLFNSLQEHQGQHPKIRYYVMPLPEEETPV

SEQ ID NO: 27338 - protein, 35 aa, Artificial Sequence
  Non-cyclic GFR-binding peptide
  MOD_RES (34)..(35): Xaa is C or S
  MOD_RES (12)..(13)..(14)..(15)..(16): Xaa is A or G
  MOD_RES (17)..(18)..(19)..(20): Xaa is A or G or absent
GEVVMDVTAKKXXXXXXXXXIKRMQVPRLETPVXX

SEQ ID NO: 27339 - protein, 37 aa, Artificial Sequence
  Non-cyclic GFR-binding peptide
  MOD_RES (2)..(34)..(35): Xaa is C or S
GXARVVMNVQVEKIVNSSDDVKAVKVSRLQTPAXXPK

SEQ ID NO: 27340 - protein, 32 aa, Artificial Sequence
  Non-cyclic GFR-binding peptide
  MOD_RES (32)..(32): Xaa is C or S
GEVVMEVTAKKVVKDYEDIKRMQVPRLETPVX

SEQ ID NO: 27341 - protein, 41 aa, Artificial Sequence
  Non-cyclic GFR-binding peptide
  MOD_RES (2)..(4)..(38)..(39): Xaa is C or S
  MOD_RES (16)..(17)..(18)..(19)..(20): Xaa is A or G
  MOD_RES (21)..(22)..(23)..(24): Xaa is A or G or absent
HXGXARVVMNSMEGIXXXXXXXXXMIQVTINSLQTPAXXPK

SEQ ID NO: 27342 - protein, 37 aa, Artificial Sequence
  Non-cyclic GFR-binding peptide
  MOD_RES (32)..(33): Xaa is C or S
SRVVMNVQVEKIVNSSDDVKAVKVSRLKTPAXXPKPV

SEQ ID NO: 27343 - protein, 34 aa, Artificial Sequence
  Non-cyclic GFR-binding peptide
  MOD_RES (33)..(34): Xaa is C or S
  MOD_RES (11)..(12)..(13)..(14)..(15): Xaa is A or G
  MOD_RES (16)..(17)..(18)..(19): Xaa is A or G or absent
EVVMEVTAKKXXXXXXXXXIKRMQVPRLETPVXX

SEQ ID NO: 27344 - protein, 41 aa, Artificial Sequence
  Non-cyclic GFR-binding peptide
  MOD_RES (2)..(4)..(35)..(36): Xaa is C or S
SXKXSRVIMVQVEKVKPKRGVVKAIKVSRLAQPVXXPAASA

SEQ ID NO: 27345 - protein, 35 aa, Artificial Sequence
  Non-cyclic GFR-binding peptide
  MOD_RES (1)..(35): Xaa is C or S
  MOD_RES (13)..(14)..(15)..(16)..(17): Xaa is A or G
  MOD_RES (18)..(19)..(20)..(21): Xaa is A or G or absent
XKNHQLFNSLQEXXXXXXXXXYYLMTLPEEETPVX

SEQ ID NO: 27346 - protein, 37 aa, Artificial Sequence
  Non-cyclic GFR-binding peptide
  MOD_RES (1)..(3)..(36)..(37): Xaa is C or S
  MOD_RES (14)..(15)..(16)..(17)..(18): Xaa is A or G
  MOD_RES (19)..(20)..(21)..(22): Xaa is A or G or absent
XKXSKVIMSMEGIXXXXXXXXXMIQITINSLDQSVXX

SEQ ID NO: 27347 - protein, 34 aa, Artificial Sequence
  Non-cyclic GFR-binding peptide
  MOD_RES (34)..(34): Xaa is C or S
  MOD_RES (12)..(13)..(14)..(15)..(16): Xaa is A or G
  MOD_RES (17)..(18)..(19)..(20): Xaa is A or G or absent
KNHQLFNSLQEXXXXXXXXXYYLMTLPEEETPVX

SEQ ID NO: 27348 - protein, 36 aa, Artificial Sequence
  Non-cyclic GFR-binding peptide
  MOD_RES (1)..(35): Xaa is C or S
XKNHQLFNSLQEHQGQHPKIRYYLMTLPEEETPVXE

SEQ ID NO: 27349 - protein, 36 aa, Artificial Sequence
  Non-cyclic GFR-binding peptide
  MOD_RES (33)..(34): Xaa is C or S
  MOD_RES (11)..(12)..(13)..(14)..(15): Xaa is A or G
  MOD_RES (16)..(17)..(18)..(19): Xaa is A or G or absent
RVVMNVTAKKXXXXXXXXXIKRVQVPRLKTPAXXPK

SEQ ID NO: 27350 - protein, 39 aa, Artificial Sequence
  Non-cyclic GFR-binding peptide
  MOD_RES (2)..(34)..(35): Xaa is C or S
GXSRVVMNSMEGIIVNSSDDMIQVTINSLKTPAXXPKPV

SEQ ID NO: 27351 - protein, 32 aa, Artificial Sequence
  Non-cyclic GFR-binding peptide
  MOD_RES (31)..(32): Xaa is C or S
RVVMNVQVEKIVNSSDDVKAVKVSRLKTPAXX

SEQ ID NO: 27352 - protein, 35 aa, Artificial Sequence
  Non-cyclic GFR-binding peptide
  MOD_RES (1)..(35): Xaa is C or S
  MOD_RES (13)..(14)..(15)..(16)..(17): Xaa is A or G
  MOD_RES (18)..(19)..(20)..(21): Xaa is A or G or absent
XGEVVMESMEGIXXXXXXXXXMIQMTINSLETPVX

SEQ ID NO: 27353 - protein, 35 aa, Artificial Sequence
  Non-cyclic GFR-binding peptide
  MOD_RES (13)..(14)..(15)..(16)..(17): Xaa is A or G
  MOD_RES (18)..(19)..(20)..(21): Xaa is A or G or absent
ELHEELRNSLQEXXXXXXXXXYYLVTLPEHHVRSP

SEQ ID NO: 27354 - protein, 36 aa, Artificial Sequence
  Non-cyclic GFR-binding peptide
  MOD_RES (34)..(35): Xaa is C or S
  MOD_RES (12)..(13)..(14)..(15)..(16): Xaa is A or G
  MOD_RES (17)..(18)..(19)..(20): Xaa is A or G or absent
SRVVMNVQVEKXXXXXXXXXVKAVKVSRLKTPAXXP

SEQ ID NO: 27355 - protein, 40 aa, Artificial Sequence
  Non-cyclic GFR-binding peptide
  MOD_RES (1)..(38): Xaa is C or S
XELHEELRNSLQELKPKKRVYEYYLVTLPEHHVRSPQXKV

SEQ ID NO: 27356 - protein, 38 aa, Artificial Sequence
  Non-cyclic GFR-binding peptide
  MOD_RES (1)..(34)..(35): Xaa is C or S
  MOD_RES (12)..(13)..(14)..(15)..(16): Xaa is A or G
  MOD_RES (17)..(18)..(19)..(20): Xaa is A or G or absent
XSRVIMVTAKKXXXXXXXXXIKRIQVPRLAQPVXXPAA

SEQ ID NO: 27357 - protein, 37 aa, Artificial Sequence
  Non-cyclic GFR-binding peptide
  MOD_RES (31)..(32): Xaa is C or S
SKVVMVTAKKVKPTRGVIKRIQVPRLDQPVXXPSASA

SEQ ID NO: 27358 - protein, 42 aa, Artificial Sequence
  Non-cyclic GFR-binding peptide
  MOD_RES (2)..(4)..(38)..(39): Xaa is C or S
  MOD_RES (16)..(17)..(18)..(19)..(20): Xaa is A or G
  MOD_RES (21)..(22)..(23)..(24): Xaa is A or G or absent
RXGXGEVVMEVTAKKXXXXXXXXXIKRMQVPRLETPVXXAKP

SEQ ID NO: 27359 - protein, 37 aa, Artificial Sequence
  Non-cyclic GFR-binding peptide
  MOD_RES (2)..(4)..(37): Xaa is C or S
  MOD_RES (15)..(16)..(17)..(18)..(19): Xaa is A or G
  MOD_RES (20)..(21)..(22)..(23): Xaa is A or G or absent
SXKXSRVIMVTAKKXXXXXXXXXIKRIQVPRLAQPVX

SEQ ID NO: 27360 - protein, 38 aa, Artificial Sequence
  Non-cyclic GFR-binding peptide
  MOD_RES (2)..(4)..(35)..(36): Xaa is C or S
SXKXSRVIMVQVEKVKPKRGVVKAIKVSRLAQPVXXPA

SEQ ID NO: 27361 - protein, 37 aa, Artificial Sequence
  Non-cyclic GFR-binding peptide
  MOD_RES (31)..(32): Xaa is C or S
SKVVMVQVEKVKPTRGVVKAIKVSRLDQPVXXPSASA

SEQ ID NO: 27362 - protein, 32 aa, Artificial Sequence
  Non-cyclic GFR-binding peptide
  MOD_RES (1)..(1): Xaa is C or S
XGEVVMESMEGIVVKDYEDMIQMTINSLETPV

SEQ ID NO: 27363 - protein, 35 aa, Artificial Sequence
  Non-cyclic GFR-binding peptide
  MOD_RES (33)..(34): Xaa is C or S
  MOD_RES (11)..(12)..(13)..(14)..(15): Xaa is A or G
  MOD_RES (16)..(17)..(18)..(19): Xaa is A or G or absent
EVVMDVQVEKXXXXXXXXXVKAMKVSRLETPVXXA

SEQ ID NO: 27364 - protein, 32 aa, Artificial Sequence
  Non-cyclic GFR-binding peptide
  MOD_RES (1)..(32): Xaa is C or S
XSRVIMSMEGIVKPKRGVMIQITINSLAQPVX

SEQ ID NO: 27365 - protein, 42 aa, Artificial Sequence
  Non-cyclic GFR-binding peptide
  MOD_RES (1)..(3)..(40): Xaa is C or S
XKXALHDELTNSLQEFIPKKRVIEYYVVPLPELQVQTPRXQV

SEQ ID NO: 27366 - protein, 41 aa, Artificial Sequence
  Non-cyclic GFR-binding peptide
  MOD_RES (1)..(3)..(40): Xaa is C or S
  MOD_RES (16)..(17)..(18)..(19)..(20): Xaa is A or G
  MOD_RES (21)..(22)..(23)..(24): Xaa is A or G or absent
XAXELHEELRNSLQEXXXXXXXXXYYVVPLPEHHVRSPQXK

SEQ ID NO: 27367 - protein, 36 aa, Artificial Sequence
  Non-cyclic GFR-binding peptide
  MOD_RES (33)..(34): Xaa is C or S
  MOD_RES (11)..(12)..(13)..(14)..(15): Xaa is A or G
  MOD_RES (16)..(17)..(18)..(19): Xaa is A or G or absent
EVVMDVQVEKXXXXXXXXXVKAMKVSRLETPVXXAK

SEQ ID NO: 27368 - protein, 37 aa, Artificial Sequence
  Non-cyclic GFR-binding peptide
  MOD_RES (31)..(32): Xaa is C or S
SRVIMSMEGIVKPKRGVMIQITINSLAQPVXXPAASA

SEQ ID NO: 27369 - protein, 41 aa, Artificial Sequence
  Non-cyclic GFR-binding peptide
  MOD_RES (2)..(4)..(38): Xaa is C or S
  MOD_RES (16)..(17)..(18)..(19)..(20): Xaa is A or G
  MOD_RES (21)..(22)..(23)..(24): Xaa is A or G or absent
RXEXKNHQLFNSLQEXXXXXXXXXYYVMPLPEEETPVXELG

SEQ ID NO: 27370 - protein, 32 aa, Artificial Sequence
  Non-cyclic GFR-binding peptide
  MOD_RES (11)..(12)..(13)..(14)..(15): Xaa is A or G
  MOD_RES (16)..(17)..(18)..(19): Xaa is A or G or absent
HEELRNSLQEXXXXXXXXXYYVVPLPEHHVRS

SEQ ID NO: 27371 - protein, 40 aa, Artificial Sequence
  Non-cyclic GFR-binding peptide
  MOD_RES (1)..(3)..(40): Xaa is C or S
  MOD_RES (16)..(17)..(18)..(19)..(20): Xaa is A or G
  MOD_RES (21)..(22)..(23)..(24): Xaa is A or G or absent
XAXELHEELRNSLQEXXXXXXXXXYYVVPLPEHHVRSPQX

SEQ ID NO: 27372 - protein, 39 aa, Artificial Sequence
  Non-cyclic GFR-binding peptide
  MOD_RES (2)..(36)..(37): Xaa is C or S
  MOD_RES (14)..(15)..(16)..(17)..(18): Xaa is A or G
  MOD_RES (19)..(20)..(21)..(22): Xaa is A or G or absent
GXGEVVMDSMEGIXXXXXXXXXMIQMTINSLETPVXXAK

SEQ ID NO: 27373 - protein, 36 aa, Artificial Sequence
  Non-cyclic GFR-binding peptide
  MOD_RES (31)..(32): Xaa is C or S
SKVVMSMEGIVKPTRGVMIQITINSLDQPVXXPSAS

SEQ ID NO: 27374 - protein, 36 aa, Artificial Sequence
  Non-cyclic GFR-binding peptide
  MOD_RES (34)..(35): Xaa is C or S
  MOD_RES (12)..(13)..(14)..(15)..(16): Xaa is A or G
  MOD_RES (17)..(18)..(19)..(20): Xaa is A or G or absent
SRVVMNVTAKKXXXXXXXXXIKRVQVPRLKTPAXXP

SEQ ID NO: 27375 - protein, 38 aa, Artificial Sequence
  Non-cyclic GFR-binding peptide
  MOD_RES (1)..(3): Xaa is C or S
  MOD_RES (16)..(17)..(18)..(19)..(20): Xaa is A or G
  MOD_RES (21)..(22)..(23)..(24): Xaa is A or G or absent
XAXELHEELRNSLQEXXXXXXXXXYYVVPLPEHHVRSP

SEQ ID NO: 27376 - protein, 35 aa, Artificial Sequence
  Non-cyclic GFR-binding peptide
  MOD_RES (1)..(33)..(34): Xaa is C or S
XARVVMNVQVEKIVNSSDDVKAVKVSRLQTPAXXP

SEQ ID NO: 27377 - protein, 36 aa, Artificial Sequence
  Non-cyclic GFR-binding peptide
  MOD_RES (1)..(3)..(34)..(35): Xaa is C or S
XKXSKVVMSMEGIVKPTRGVMIQITINSLDQPVXXP

SEQ ID NO: 27378 - protein, 38 aa, Artificial Sequence
  Non-cyclic GFR-binding peptide
  MOD_RES (1)..(3)..(37)..(38): Xaa is C or S
  MOD_RES (15)..(16)..(17)..(18)..(19): Xaa is A or G
  MOD_RES (20)..(21)..(22)..(23): Xaa is A or G or absent
XGXSRVVMNVTAKKXXXXXXXXXIKRVQVPRLKTPAXX

SEQ ID NO: 27379 - protein, 38 aa, Artificial Sequence
  Non-cyclic GFR-binding peptide
  MOD_RES (33)..(34): Xaa is C or S
  MOD_RES (11)..(12)..(13)..(14)..(15): Xaa is A or G
  MOD_RES (16)..(17)..(18)..(19): Xaa is A or G or absent
SRVIMVQVEKXXXXXXXXXVKAIKVSRLAQPVXXPAAS

SEQ ID NO: 27380 - protein, 35 aa, Artificial Sequence
  Non-cyclic GFR-binding peptide
  MOD_RES (33)..(34): Xaa is C or S
  MOD_RES (11)..(12)..(13)..(14)..(15): Xaa is A or G
  MOD_RES (16)..(17)..(18)..(19): Xaa is A or G or absent
RVVMNVTAKKXXXXXXXXXIKRVQVPRLKTPAXXP

SEQ ID NO: 27381 - protein, 37 aa, Artificial Sequence
  Non-cyclic GFR-binding peptide
  MOD_RES (1)..(34)..(35): Xaa is C or S
  MOD_RES (12)..(13)..(14)..(15)..(16): Xaa is A or G
  MOD_RES (17)..(18)..(19)..(20): Xaa is A or G or absent
XSKVIMVTAKKXXXXXXXXXIKRIQVPRLDQSVXXPS

SEQ ID NO: 27382 - protein, 34 aa, Artificial Sequence
  Non-cyclic GFR-binding peptide
  MOD_RES (31)..(32): Xaa is C or S
EVVMEVQVEKVVKDYEDVKAMKVSRLETPVXXAK

SEQ ID NO: 27383 - protein, 34 aa, Artificial Sequence
  Non-cyclic GFR-binding peptide
  MOD_RES (2)..(33)..(34): Xaa is C or S
KXSKVVMSMEGIVKPTRGVMIQITINSLDQPVXX

SEQ ID NO: 27384 - protein, 44 aa, Artificial Sequence
  Non-cyclic GFR-binding peptide
  MOD_RES (1)..(3)..(40): Xaa is C or S
  MOD_RES (16)..(17)..(18)..(19)..(20): Xaa is A or G
  MOD_RES (21)..(22)..(23)..(24): Xaa is A or G or absent
XAXELHEELRNSLQEXXXXXXXXXYYLVTLPEHHVRSPQXKVSS

SEQ ID NO: 27385 - protein, 37 aa, Artificial Sequence
  Non-cyclic GFR-binding peptide
  MOD_RES (2)..(4): Xaa is C or S
  MOD_RES (16)..(17)..(18)..(19)..(20): Xaa is A or G
  MOD_RES (21)..(22)..(23)..(24): Xaa is A or G or absent
RXGXGEVVMESMEGIXXXXXXXXXMIQMTINSLETPV

SEQ ID NO: 27386 - protein, 36 aa, Artificial Sequence
  Non-cyclic GFR-binding peptide
  MOD_RES (31)..(32): Xaa is C or S
SRVIMVQVEKVKPKRGVVKAIKVSRLAQPVXXPAAS

SEQ ID NO: 27387 - protein, 36 aa, Artificial Sequence
  Non-cyclic GFR-binding peptide
  MOD_RES (2)..(4)..(35)..(36): Xaa is C or S
SXKXSRVIMVQVEKVKPKRGVVKAIKVSRLAQPVXX

SEQ ID NO: 27388 - protein, 38 aa, Artificial Sequence
  Non-cyclic GFR-binding peptide
  MOD_RES (1)..(3)..(36)..(37): Xaa is C or S
  MOD_RES (14)..(15)..(16)..(17)..(18): Xaa is A or G
  MOD_RES (19)..(20)..(21)..(22): Xaa is A or G or absent
XKXSKVVMVTAKKXXXXXXXXXIKRIQVPRLDQPVXXP

SEQ ID NO: 27389 - protein, 39 aa, Artificial Sequence
  Non-cyclic GFR-binding peptide
  MOD_RES (1)..(3)..(34)..(35): Xaa is C or S
XKXSRVIMVQVEKVKPKRGVVKAIKVSRLAQPVXXPAAS

SEQ ID NO: 27390 - protein, 41 aa, Artificial Sequence
  Non-cyclic GFR-binding peptide
  MOD_RES (1)..(3)..(37)..(38): Xaa is C or S
  MOD_RES (15)..(16)..(17)..(18)..(19): Xaa is A or G
  MOD_RES (20)..(21)..(22)..(23): Xaa is A or G or absent
XGXGEVVMDSMEGIXXXXXXXXXMIQMTINSLETPVXXAKP

SEQ ID NO: 27391 - protein, 33 aa, Artificial Sequence
  Non-cyclic GFR-binding peptide
  MOD_RES (2)..(33): Xaa is C or S
KXSKVIMVTAKKIKPTKGIIKRIQVPRLDQSVX

SEQ ID NO: 27392 - protein, 45 aa, Artificial Sequence
  Non-cyclic GFR-binding peptide
  MOD_RES (2)..(4)..(41): Xaa is C or S
  MOD_RES (17)..(18)..(19)..(20)..(21): Xaa is A or G
  MOD_RES (22)..(23)..(24)..(25): Xaa is A or G or absent
EXKXALHDELTNSLQEXXXXXXXXXYYLVTLPELQVQTPRXQVNR

SEQ ID NO: 27393 - protein, 36 aa, Artificial Sequence
  Non-cyclic GFR-binding peptide
  MOD_RES (1)..(3): Xaa is C or S
  MOD_RES (15)..(16)..(17)..(18)..(19): Xaa is A or G
  MOD_RES (20)..(21)..(22)..(23): Xaa is A or G or absent
XGXGEVVMDSMEGIXXXXXXXXXMIQMTINSLETPV

SEQ ID NO: 27394 - protein, 35 aa, Artificial Sequence
  Non-cyclic GFR-binding peptide
  MOD_RES (1)..(32)..(33): Xaa is C or S
XSKVIMSMEGIIKPTKGIMIQITINSLDQSVXXPS

SEQ ID NO: 27395 - protein, 36 aa, Artificial Sequence
  Non-cyclic GFR-binding peptide
  MOD_RES (31)..(32): Xaa is C or S
SRVIMSMEGIVKPKRGVMIQITINSLAQPVXXPAAS

SEQ ID NO: 27396 - protein, 34 aa, Artificial Sequence
  Non-cyclic GFR-binding peptide
  MOD_RES (1)..(32)..(33): Xaa is C or S
XSKVIMVTAKKIKPTKGIIKRIQVPRLDQSVXXP

SEQ ID NO: 27397 - protein, 34 aa, Artificial Sequence
  Non-cyclic GFR-binding peptide
  MOD_RES (32)..(33): Xaa is C or S
ARVVMNVQVEKIVNSSDDVKAVKVSRLQTPAXXP

SEQ ID NO: 27398 - protein, 36 aa, Artificial Sequence
  Non-cyclic GFR-binding peptide
  MOD_RES (1)..(3)..(35)..(36): Xaa is C or S
XGXSRVVMNSMEGIIVNSSDDMIQVTINSLKTPAXX

SEQ ID NO: 27399 - protein, 36 aa, Artificial Sequence
  Non-cyclic GFR-binding peptide
  MOD_RES (1)..(35)..(36): Xaa is C or S
  MOD_RES (13)..(14)..(15)..(16)..(17): Xaa is A or G
  MOD_RES (18)..(19)..(20)..(21): Xaa is A or G or absent
XGEVVMDVTAKKXXXXXXXXXIKRMQVPRLETPVXX

SEQ ID NO: 27400 - protein, 39 aa, Artificial Sequence
  Non-cyclic GFR-binding peptide
  MOD_RES (37)..(37): Xaa is C or S
ELHEELRNSLQELKPKKRVYEYYVVPLPEHHVRSPQXKV

SEQ ID NO: 27401 - protein, 39 aa, Artificial Sequence
  Non-cyclic GFR-binding peptide
  MOD_RES (2)..(34)..(35): Xaa is C or S
GXARVVMNVQVEKIVNSSDDVKAVKVSRLQTPAXXPKPV

SEQ ID NO: 27402 - protein, 41 aa, Artificial Sequence
  Non-cyclic GFR-binding peptide
  MOD_RES (1)..(3)..(37)..(38): Xaa is C or S
  MOD_RES (15)..(16)..(17)..(18)..(19): Xaa is A or G
  MOD_RES (20)..(21)..(22)..(23): Xaa is A or G or absent
XGXGEVVMESMEGIXXXXXXXXXMIQMTINSLETPVXXAKP

SEQ ID NO: 27403 - protein, 40 aa, Artificial Sequence
  Non-cyclic GFR-binding peptide
  MOD_RES (2)..(39): Xaa is C or S
KXALHDELTNSLQEFIPKKRVIEYYVVPLPELQVQTPRXQ

SEQ ID NO: 27404 - protein, 37 aa, Artificial Sequence
  Non-cyclic GFR-binding peptide
  MOD_RES (2)..(36): Xaa is C or S
EXKNHQLFNSLQEHQGQHPKIRYYVMPLPEEETPVXE

SEQ ID NO: 27405 - protein, 36 aa, Artificial Sequence
  Non-cyclic GFR-binding peptide
  MOD_RES (1)..(3): Xaa is C or S
  MOD_RES (15)..(16)..(17)..(18)..(19): Xaa is A or G
  MOD_RES (20)..(21)..(22)..(23): Xaa is A or G or absent
XGXGEVVMESMEGIXXXXXXXXXMIQMTINSLETPV

SEQ ID NO: 27406 - protein, 37 aa, Artificial Sequence
  Non-cyclic GFR-binding peptide
  MOD_RES (32)..(33): Xaa is C or S
GEVVMDVQVEKVVKENEDVKAMKVSRLETPVXXAKPI

SEQ ID NO: 27407 - protein, 36 aa, Artificial Sequence
  Non-cyclic GFR-binding peptide
  MOD_RES (1)..(3)..(36): Xaa is C or S
  MOD_RES (14)..(15)..(16)..(17)..(18): Xaa is A or G
  MOD_RES (19)..(20)..(21)..(22): Xaa is A or G or absent
XKXSKVIMSMEGIXXXXXXXXXMIQITINSLDQSVX

SEQ ID NO: 27408 - protein, 38 aa, Artificial Sequence
  Non-cyclic GFR-binding peptide
  MOD_RES (2)..(4)..(38): Xaa is C or S
  MOD_RES (16)..(17)..(18)..(19)..(20): Xaa is A or G
  MOD_RES (21)..(22)..(23)..(24): Xaa is A or G or absent
RXGXGEVVMDSMEGIXXXXXXXXXMIQMTINSLETPVX

SEQ ID NO: 27409 - protein, 38 aa, Artificial Sequence
  Non-cyclic GFR-binding peptide
  MOD_RES (2)..(4)..(38): Xaa is C or S
  MOD_RES (16)..(17)..(18)..(19)..(20): Xaa is A or G
  MOD_RES (21)..(22)..(23)..(24): Xaa is A or G or absent
RXGXGEVVMEVQVEKXXXXXXXXXVKAMKVSRLETPVX

SEQ ID NO: 27410 - protein, 38 aa, Artificial Sequence
  Non-cyclic GFR-binding peptide
  MOD_RES (1)..(38): Xaa is C or S
XELHEELRNSLQELKPKKRVYEYYLVTLPEHHVRSPQX

SEQ ID NO: 27411 - protein, 34 aa, Artificial Sequence
  Non-cyclic GFR-binding peptide
  MOD_RES (2)..(34): Xaa is C or S
GXGEVVMESMEGIVVKDYEDMIQMTINSLETPVX

SEQ ID NO: 27412 - protein, 37 aa, Artificial Sequence
  Non-cyclic GFR-binding peptide
  MOD_RES (31)..(32): Xaa is C or S
EVVMEVTAKKVVKDYEDIKRMQVPRLETPVXXAKPIS

SEQ ID NO: 27413 - protein, 42 aa, Artificial Sequence
  Non-cyclic GFR-binding peptide
  MOD_RES (2)..(36)..(37): Xaa is C or S
  MOD_RES (14)..(15)..(16)..(17)..(18): Xaa is A or G
  MOD_RES (19)..(20)..(21)..(22): Xaa is A or G or absent
GXSRVVMNVTAKKXXXXXXXXXIKRVQVPRLKTPAXXPKPVY

SEQ ID NO: 27414 - protein, 43 aa, Artificial Sequence
  Non-cyclic GFR-binding peptide
  MOD_RES (2)..(4)..(38): Xaa is C or S
  MOD_RES (16)..(17)..(18)..(19)..(20): Xaa is A or G
  MOD_RES (21)..(22)..(23)..(24): Xaa is A or G or absent
HXGXSRVVMNVQVEKXXXXXXXXXVKAVKVSRLKTPAXTPKTV

SEQ ID NO: 27415 - protein, 37 aa, Artificial Sequence
  Non-cyclic GFR-binding peptide
  MOD_RES (2)..(4)..(35)..(36): Xaa is C or S
SXKXSKVVMSMEGIVKPTRGVMIQITINSLDQPVXXP

SEQ ID NO: 27416 - protein, 38 aa, Artificial Sequence
  Non-cyclic GFR-binding peptide
  MOD_RES (1)..(3): Xaa is C or S
  MOD_RES (16)..(17)..(18)..(19)..(20): Xaa is A or G
  MOD_RES (21)..(22)..(23)..(24): Xaa is A or G or absent
XKXALHDELTNSLQEXXXXXXXXXYYVVPLPELQVQTP

SEQ ID NO: 27417 - protein, 37 aa, Artificial Sequence
  Non-cyclic GFR-binding peptide
  MOD_RES (2)..(34)..(35): Xaa is C or S
GXSRVVMNVQVEKIVNSSDDVKAVKVSRLKTPAXXPK

SEQ ID NO: 27418 - protein, 34 aa, Artificial Sequence
  Non-cyclic GFR-binding peptide
HEELRNSLQELKPKKRVYEYYLVTLPEHHVRSPQ

SEQ ID NO: 27419 - protein, 38 aa, Artificial Sequence
  Non-cyclic GFR-binding peptide
  MOD_RES (2)..(4)..(38): Xaa is C or S
RXEXKNHQLFNSLQEHQGQHPKIRYYVMPLPEEETPVX

SEQ ID NO: 27420 - protein, 41 aa, Artificial Sequence
  Non-cyclic GFR-binding peptide
  MOD_RES (2)..(39): Xaa is C or S
  MOD_RES (15)..(16)..(17)..(18)..(19): Xaa is A or G
  MOD_RES (20)..(21)..(22)..(23): Xaa is A or G or absent
KXALHDELTNSLQEXXXXXXXXXYYVVPLPELQVQTPRXQV

SEQ ID NO: 27421 - protein, 33 aa, Artificial Sequence
  Non-cyclic GFR-binding peptide
HDELTNSLQEFIPKKRVIEYYLVTLPELQVQTP

SEQ ID NO: 27422 - protein, 39 aa, Artificial Sequence
  Non-cyclic GFR-binding peptide
  MOD_RES (1)..(33)..(34): Xaa is C or S
XGEVVMDSMEGIVVKENEDMIQMTINSLETPVXXAKPIK

SEQ ID NO: 27423 - protein, 36 aa, Artificial Sequence
  Non-cyclic GFR-binding peptide
  MOD_RES (34)..(35): Xaa is C or S
  MOD_RES (12)..(13)..(14)..(15)..(16): Xaa is A or G
  MOD_RES (17)..(18)..(19)..(20): Xaa is A or G or absent
ARVVMNVQVEKXXXXXXXXXVKAVKVSRLQTPAXXP

SEQ ID NO: 27424 - protein, 32 aa, Artificial Sequence
  Non-cyclic GFR-binding peptide
  MOD_RES (1)..(1): Xaa is C or S
XARVVMNVTAKKIVNSSDDIKRVQVPRLQTPA

SEQ ID NO: 27425 - protein, 33 aa, Artificial Sequence
  Non-cyclic GFR-binding peptide
HDELTNSLQEFIPKKRVIEYYVVPLPELQVQTP

SEQ ID NO: 27426 - protein, 34 aa, Artificial Sequence
  Non-cyclic GFR-binding peptide
  MOD_RES (1)..(3): Xaa is C or S
XGXSRVVMNVTAKKIVNSSDDIKRVQVPRLKTPA

SEQ ID NO: 27427 - protein, 36 aa, Artificial Sequence
  Non-cyclic GFR-binding peptide
  MOD_RES (1)..(3): Xaa is C or S
  MOD_RES (15)..(16)..(17)..(18)..(19): Xaa is A or G
  MOD_RES (20)..(21)..(22)..(23): Xaa is A or G or absent
XGXSRVVMNVQVEKXXXXXXXXXVKAVKVSRLKTPA

SEQ ID NO: 27428 - protein, 37 aa, Artificial Sequence
  Non-cyclic GFR-binding peptide
  MOD_RES (37)..(37): Xaa is C or S
ALHDELTNSLQEFIPKKRVIEYYVVPLPELQVQTPRX

SEQ ID NO: 27429 - protein, 34 aa, Artificial Sequence
  Non-cyclic GFR-binding peptide
  MOD_RES (2)..(33)..(34): Xaa is C or S
KXSRVIMVQVEKVKPKRGVVKAIKVSRLAQPVXX

SEQ ID NO: 27430 - protein, 36 aa, Artificial Sequence
  Non-cyclic GFR-binding peptide
  MOD_RES (31)..(32): Xaa is C or S
SKVVMVQVEKVKPTRGVVKAIKVSRLDQPVXXPSAS

SEQ ID NO: 27431 - protein, 37 aa, Artificial Sequence
  Non-cyclic GFR-binding peptide
  MOD_RES (31)..(32): Xaa is C or S
SRVIMVQVEKVKPKRGVVKAIKVSRLAQPVXXPAASA

SEQ ID NO: 27432 - protein, 35 aa, Artificial Sequence
  Non-cyclic GFR-binding peptide
  MOD_RES (2)..(33)..(34): Xaa is C or S
KXSKVVMVTAKKVKPTRGVIKRIQVPRLDQPVXXP

SEQ ID NO: 27433 - protein, 44 aa, Artificial Sequence
  Non-cyclic GFR-binding peptide
  MOD_RES (2)..(4)..(38)..(39): Xaa is C or S
  MOD_RES (16)..(17)..(18)..(19)..(20): Xaa is A or G
  MOD_RES (21)..(22)..(23)..(24): Xaa is A or G or absent
HXGXSRVVMNVTAKKXXXXXXXXXIKRVQVPRLKTPAXXPKPVY

SEQ ID NO: 27434 - protein, 37 aa, Artificial Sequence
  Non-cyclic GFR-binding peptide
  MOD_RES (2)..(36)..(37): Xaa is C or S
  MOD_RES (14)..(15)..(16)..(17)..(18): Xaa is A or G
  MOD_RES (19)..(20)..(21)..(22): Xaa is A or G or absent
GXGEVVMESMEGIXXXXXXXXXMIQMTINSLETPVXX

SEQ ID NO: 27435 - protein, 36 aa, Artificial Sequence
  Non-cyclic GFR-binding peptide
  MOD_RES (2)..(4)..(36): Xaa is C or S
RXGXGEVVMEVQVEKVVKDYEDVKAMKVSRLETPVX

SEQ ID NO: 27436 - protein, 34 aa, Artificial Sequence
  Non-cyclic GFR-binding peptide
  MOD_RES (1)..(3): Xaa is C or S
XGXARVVMNVQVEKIVNSSDDVKAVKVSRLQTPA

SEQ ID NO: 27437 - protein, 35 aa, Artificial Sequence
  Non-cyclic GFR-binding peptide
  MOD_RES (2)..(2): Xaa is C or S
  MOD_RES (14)..(15)..(16)..(17)..(18): Xaa is A or G
  MOD_RES (19)..(20)..(21)..(22): Xaa is A or G or absent
GXARVVMNSMEGIXXXXXXXXXMIQVTINSLQTPA

SEQ ID NO: 27438 - protein, 37 aa, Artificial Sequence
  Non-cyclic GFR-binding peptide
  MOD_RES (32)..(33): Xaa is C or S
SRVVMNVTAKKIVNSSDDIKRVQVPRLKTPAXXPKPV

SEQ ID NO: 27439 - protein, 38 aa, Artificial Sequence
  Non-cyclic GFR-binding peptide
  MOD_RES (1)..(33): Xaa is C or S
XSRVVMNVQVEKIVNSSDDVKAVKVSRLKTPAXTPKTV

SEQ ID NO: 27440 - protein, 34 aa, Artificial Sequence
  Non-cyclic GFR-binding peptide
  MOD_RES (33)..(34): Xaa is C or S
  MOD_RES (11)..(12)..(13)..(14)..(15): Xaa is A or G
  MOD_RES (16)..(17)..(18)..(19): Xaa is A or G or absent
SRVIMVQVEKXXXXXXXXXVKAIKVSRLAQPVXX

SEQ ID NO: 27441 - protein, 32 aa, Artificial Sequence
  Non-cyclic GFR-binding peptide
  MOD_RES (11)..(12)..(13)..(14)..(15): Xaa is A or G
  MOD_RES (16)..(17)..(18)..(19): Xaa is A or G or absent
NHQLFNSLQEXXXXXXXXXYYVMPLPEEETPV

SEQ ID NO: 27442 - protein, 36 aa, Artificial Sequence
  Non-cyclic GFR-binding peptide
  MOD_RES (2)..(34): Xaa is C or S
GXSRVVMNVQVEKIVNSSDDVKAVKVSRLKTPAXTP

SEQ ID NO: 27443 - protein, 39 aa, Artificial Sequence
  Non-cyclic GFR-binding peptide
  MOD_RES (1)..(38): Xaa is C or S
  MOD_RES (14)..(15)..(16)..(17)..(18): Xaa is A or G
  MOD_RES (19)..(20)..(21)..(22): Xaa is A or G or absent
XALHDELTNSLQEXXXXXXXXXYYLVTLPELQVQTPRXQ

SEQ ID NO: 27444 - protein, 37 aa, Artificial Sequence
  Non-cyclic GFR-binding peptide
  MOD_RES (2)..(4)..(37): Xaa is C or S
  MOD_RES (15)..(16)..(17)..(18)..(19): Xaa is A or G
  MOD_RES (20)..(21)..(22)..(23): Xaa is A or G or absent
SXKXSKVIMSMEGIXXXXXXXXXMIQITINSLDQSVX

SEQ ID NO: 27445 - protein, 37 aa, Artificial Sequence
  Non-cyclic GFR-binding peptide
  MOD_RES (32)..(33): Xaa is C or S
GEVVMEVQVEKVVKDYEDVKAMKVSRLETPVXXAKPI

SEQ ID NO: 27446 - protein, 39 aa, Artificial Sequence
  Non-cyclic GFR-binding peptide
  MOD_RES (2)..(34)..(35): Xaa is C or S
GXGEVVMDVTAKKVVKENEDIKRMQVPRLETPVXXAKPI

SEQ ID NO: 27447 - protein, 41 aa, Artificial Sequence
  Non-cyclic GFR-binding peptide
  MOD_RES (2)..(35)..(36): Xaa is C or S
  MOD_RES (13)..(14)..(15)..(16)..(17): Xaa is A or G
  MOD_RES (18)..(19)..(20)..(21): Xaa is A or G or absent
KXSRVIMSMEGIXXXXXXXXXMIQITINSLAQPVXXPAASA

SEQ ID NO: 27448 - protein, 36 aa, Artificial Sequence
  Non-cyclic GFR-binding peptide
  MOD_RES (31)..(31): Xaa is C or S
RVVMNVTAKKIVNSSDDIKRVQVPRLKTPAXTPKTV

SEQ ID NO: 27449 - protein, 38 aa, Artificial Sequence
  Non-cyclic GFR-binding peptide
  MOD_RES (36)..(36): Xaa is C or S
LHDELTNSLQEFIPKKRVIEYYVVPLPELQVQTPRXQV

SEQ ID NO: 27450 - protein, 36 aa, Artificial Sequence
  Non-cyclic GFR-binding peptide
  MOD_RES (36)..(36): Xaa is C or S
LHEELRNSLQELKPKKRVYEYYVVPLPEHHVRSPQX

SEQ ID NO: 27451 - protein, 35 aa, Artificial Sequence
  Non-cyclic GFR-binding peptide
LHEELRNSLQELKPKKRVYEYYVVPLPEHHVRSPQ

SEQ ID NO: 27452 - protein, 36 aa, Artificial Sequence
  Non-cyclic GFR-binding peptide
  MOD_RES (1)..(35)..(36): Xaa is C or S
  MOD_RES (13)..(14)..(15)..(16)..(17): Xaa is A or G
  MOD_RES (18)..(19)..(20)..(21): Xaa is A or G or absent
XGEVVMDVQVEKXXXXXXXXXVKAMKVSRLETPVXX

SEQ ID NO: 27453 - protein, 34 aa, Artificial Sequence
  Non-cyclic GFR-binding peptide
  MOD_RES (31)..(32): Xaa is C or S
EVVMESMEGIVVKDYEDMIQMTINSLETPVXXAK

SEQ ID NO: 27454 - protein, 39 aa, Artificial Sequence
  Non-cyclic GFR-binding peptide
  MOD_RES (2)..(4)..(38)..(39): Xaa is C or S
  MOD_RES (16)..(17)..(18)..(19)..(20): Xaa is A or G
  MOD_RES (21)..(22)..(23)..(24): Xaa is A or G or absent
RXGXGEVVMEVTAKKXXXXXXXXXIKRMQVPRLETPVXX

SEQ ID NO: 27455 - protein, 40 aa, Artificial Sequence
  Non-cyclic GFR-binding peptide
  MOD_RES (1)..(3)..(35)..(36): Xaa is C or S
XGXARVVMNSMEGIIVNSSDDMIQVTINSLQTPAXXPKPV

SEQ ID NO: 27456 - protein, 33 aa, Artificial Sequence
  Non-cyclic GFR-binding peptide
  MOD_RES (1)..(33): Xaa is C or S
XGEVVMEVTAKKVVKDYEDIKRMQVPRLETPVX

SEQ ID NO: 27457 - protein, 43 aa, Artificial Sequence
  Non-cyclic GFR-binding peptide
  MOD_RES (2)..(4)..(37)..(38): Xaa is C or S
  MOD_RES (15)..(16)..(17)..(18)..(19): Xaa is A or G
  MOD_RES (20)..(21)..(22)..(23): Xaa is A or G or absent
SXKXSRVIMSMEGIXXXXXXXXXMIQITINSLAQPVXXPAASA

SEQ ID NO: 27458 - protein, 36 aa, Artificial Sequence
  Non-cyclic GFR-binding peptide
  MOD_RES (1)..(3)..(34)..(35): Xaa is C or S
XKXSKVIMVTAKKIKPTKGIIKRIQVPRLDQSVXXP

SEQ ID NO: 27459 - protein, 43 aa, Artificial Sequence
  Non-cyclic GFR-binding peptide
  MOD_RES (1)..(3)..(37): Xaa is C or S
  MOD_RES (15)..(16)..(17)..(18)..(19): Xaa is A or G
  MOD_RES (20)..(21)..(22)..(23): Xaa is A or G or absent
XEXKNHQLFNSLQEXXXXXXXXXYYLMTLPEEETPVXELGEDN

SEQ ID NO: 27460 - protein, 36 aa, Artificial Sequence
  Non-cyclic GFR-binding peptide
  MOD_RES (1)..(1): Xaa is C or S
  MOD_RES (14)..(15)..(16)..(17)..(18): Xaa is A or G
  MOD_RES (19)..(20)..(21)..(22): Xaa is A or G or absent
XELHEELRNSLQEXXXXXXXXXYYVVPLPEHHVRSP

SEQ ID NO: 27461 - protein, 36 aa, Artificial Sequence
  Non-cyclic GFR-binding peptide
  MOD_RES (32)..(33): Xaa is C or S
ARVVMNSMEGIIVNSSDDMIQVTINSLQTPAXXPKP

SEQ ID NO: 27462 - protein, 40 aa, Artificial Sequence
  Non-cyclic GFR-binding peptide
  MOD_RES (1)..(3)..(40): Xaa is C or S
  MOD_RES (16)..(17)..(18)..(19)..(20): Xaa is A or G
  MOD_RES (21)..(22)..(23)..(24): Xaa is A or G or absent
XKXALHDELTNSLQEXXXXXXXXXYYVVPLPELQVQTPRX

SEQ ID NO: 27463 - protein, 32 aa, Artificial Sequence
  Non-cyclic GFR-binding peptide
  MOD_RES (11)..(12)..(13)..(14)..(15): Xaa is A or G
  MOD_RES (16)..(17)..(18)..(19): Xaa is A or G or absent
HDELTNSLQEXXXXXXXXXYYLVTLPELQVQT

SEQ ID NO: 27464 - protein, 35 aa, Artificial Sequence
  Non-cyclic GFR-binding peptide
  MOD_RES (1)..(3): Xaa is C or S
  MOD_RES (14)..(15)..(16)..(17)..(18): Xaa is A or G
  MOD_RES (19)..(20)..(21)..(22): Xaa is A or G or absent
XKXSRVIMVQVEKXXXXXXXXXVKAIKVSRLAQPV

SEQ ID NO: 27465 - protein, 36 aa, Artificial Sequence
  Non-cyclic GFR-binding peptide
  MOD_RES (1)..(3)..(34)..(35): Xaa is C or S
XKXSKVVMVTAKKVKPTRGVIKRIQVPRLDQPVXXP

SEQ ID NO: 27466 - protein, 34 aa, Artificial Sequence
  Non-cyclic GFR-binding peptide
  MOD_RES (33)..(34): Xaa is C or S
  MOD_RES (11)..(12)..(13)..(14)..(15): Xaa is A or G
  MOD_RES (16)..(17)..(18)..(19): Xaa is A or G or absent
SRVIMVTAKKXXXXXXXXXIKRIQVPRLAQPVXX

SEQ ID NO: 27467 - protein, 38 aa, Artificial Sequence
  Non-cyclic GFR-binding peptide
  MOD_RES (1)..(32)..(33): Xaa is C or S
XSRVIMSMEGIVKPKRGVMIQITINSLAQPVXXPAASA

SEQ ID NO: 27468 - protein, 32 aa, Artificial Sequence
  Non-cyclic GFR-binding peptide
  MOD_RES (11)..(12)..(13)..(14)..(15): Xaa is A or G
  MOD_RES (16)..(17)..(18)..(19): Xaa is A or G or absent
HDELTNSLQEXXXXXXXXXYYVVPLPELQVQT

SEQ ID NO: 27469 - protein, 35 aa, Artificial Sequence
  Non-cyclic GFR-binding peptide
  MOD_RES (2)..(2): Xaa is C or S
  MOD_RES (14)..(15)..(16)..(17)..(18): Xaa is A or G
  MOD_RES (19)..(20)..(21)..(22): Xaa is A or G or absent
GXGEVVMDVQVEKXXXXXXXXXVKAMKVSRLETPV

SEQ ID NO: 27470 - protein, 41 aa, Artificial Sequence
  Non-cyclic GFR-binding peptide
  MOD_RES (2)..(4)..(38)..(39): Xaa is C or S
  MOD_RES (16)..(17)..(18)..(19)..(20): Xaa is A or G
  MOD_RES (21)..(22)..(23)..(24): Xaa is A or G or absent
HXGXSRVVMNVQVEKXXXXXXXXXVKAVKVSRLKTPAXXPK

SEQ ID NO: 27471 - protein, 36 aa, Artificial Sequence
  Non-cyclic GFR-binding peptide
  MOD_RES (1)..(3)..(35)..(36): Xaa is C or S
XGXGEVVMDVQVEKVVKENEDVKAMKVSRLETPVXX

SEQ ID NO: 27472 - protein, 36 aa, Artificial Sequence
  Non-cyclic GFR-binding peptide
  MOD_RES (1)..(3): Xaa is C or S
  MOD_RES (15)..(16)..(17)..(18)..(19): Xaa is A or G
  MOD_RES (20)..(21)..(22)..(23): Xaa is A or G or absent
XGXARVVMNVTAKKXXXXXXXXXIKRVQVPRLQTPA

SEQ ID NO: 27473 - protein, 33 aa, Artificial Sequence
  Non-cyclic GFR-binding peptide
  MOD_RES (31)..(32): Xaa is C or S
SKVVMVTAKKVKPTRGVIKRIQVPRLDQPVXXP

SEQ ID NO: 27474 - protein, 38 aa, Artificial Sequence
  Non-cyclic GFR-binding peptide
  MOD_RES (1)..(35)..(36): Xaa is C or S
  MOD_RES (13)..(14)..(15)..(16)..(17): Xaa is A or G
  MOD_RES (18)..(19)..(20)..(21): Xaa is A or G or absent
XARVVMNVQVEKXXXXXXXXXVKAVKVSRLQTPAXXPK

SEQ ID NO: 27475 - protein, 34 aa, Artificial Sequence
  Non-cyclic GFR-binding peptide
  MOD_RES (32)..(32): Xaa is C or S
SRVVMNSMEGIIVNSSDDMIQVTINSLKTPAXTP

SEQ ID NO: 27476 - protein, 37 aa, Artificial Sequence
  Non-cyclic GFR-binding peptide
  MOD_RES (33)..(34): Xaa is C or S
  MOD_RES (11)..(12)..(13)..(14)..(15): Xaa is A or G
  MOD_RES (16)..(17)..(18)..(19): Xaa is A or G or absent
SRVIMVTAKKXXXXXXXXXIKRIQVPRLAQPVXXPAA

SEQ ID NO: 27477 - protein, 36 aa, Artificial Sequence
  Non-cyclic GFR-binding peptide
  MOD_RES (2)..(4)..(36): Xaa is C or S
RXGXGEVVMDVTAKKVVKENEDIKRMQVPRLETPVX

SEQ ID NO: 27478 - protein, 39 aa, Artificial Sequence
  Non-cyclic GFR-binding peptide
  MOD_RES (2)..(4)..(38): Xaa is C or S
  MOD_RES (16)..(17)..(18)..(19)..(20): Xaa is A or G
  MOD_RES (21)..(22)..(23)..(24): Xaa is A or G or absent
RXEXKNHQLFNSLQEXXXXXXXXXYYLMTLPEEETPVXE

SEQ ID NO: 27479 - protein, 41 aa, Artificial Sequence
  Non-cyclic GFR-binding peptide
  MOD_RES (2)..(35)..(36): Xaa is C or S
  MOD_RES (13)..(14)..(15)..(16)..(17): Xaa is A or G
  MOD_RES (18)..(19)..(20)..(21): Xaa is A or G or absent
KXSKVIMSMEGIXXXXXXXXXMIQITINSLDQSVXXPSASA

SEQ ID NO: 27480 - protein, 33 aa, Artificial Sequence
  Non-cyclic GFR-binding peptide
  MOD_RES (31)..(31): Xaa is C or S
RVVMNSMEGIIVNSSDDMIQVTINSLKTPAXTP

SEQ ID NO: 27481 - protein, 34 aa, Artificial Sequence
  Non-cyclic GFR-binding peptide
  MOD_RES (1)..(1): Xaa is C or S
  MOD_RES (13)..(14)..(15)..(16)..(17): Xaa is A or G
  MOD_RES (18)..(19)..(20)..(21): Xaa is A or G or absent
XGEVVMDVQVEKXXXXXXXXXVKAMKVSRLETPV

SEQ ID NO: 27482 - protein, 39 aa, Artificial Sequence
  Non-cyclic GFR-binding peptide
  MOD_RES (2)..(4)..(37)..(38): Xaa is C or S
  MOD_RES (15)..(16)..(17)..(18)..(19): Xaa is A or G
  MOD_RES (20)..(21)..(22)..(23): Xaa is A or G or absent
SXKXSKVIMVQVEKXXXXXXXXXVKAIKVSRLDQSVXXP

SEQ ID NO: 27483 - protein, 33 aa, Artificial Sequence
  Non-cyclic GFR-binding peptide
HEELRNSLQELKPKKRVYEYYVVPLPEHHVRSP

SEQ ID NO: 27484 - protein, 36 aa, Artificial Sequence
  Non-cyclic GFR-binding peptide
  MOD_RES (1)..(35): Xaa is C or S
  MOD_RES (13)..(14)..(15)..(16)..(17): Xaa is A or G
  MOD_RES (18)..(19)..(20)..(21): Xaa is A or G or absent
XSRVVMNVQVEKXXXXXXXXXVKAVKVSRLKTPAXT

SEQ ID NO: 27485 - protein, 36 aa, Artificial Sequence
  Non-cyclic GFR-binding peptide
  MOD_RES (1)..(35): Xaa is C or S
XKNHQLFNSLQEHQGQHPKIRYYVMPLPEEETPVXE

SEQ ID NO: 27486 - protein, 32 aa, Artificial Sequence
  Non-cyclic GFR-binding peptide
  MOD_RES (1)..(32): Xaa is C or S
XSKVVMVTAKKVKPTRGVIKRIQVPRLDQPVX

SEQ ID NO: 27487 - protein, 33 aa, Artificial Sequence
  Non-cyclic GFR-binding peptide
LHEELRNSLQELKPKKRVYEYYLVTLPEHHVRS

SEQ ID NO: 27488 - protein, 33 aa, Artificial Sequence
  Non-cyclic GFR-binding peptide
  MOD_RES (31)..(32): Xaa is C or S
RVVMNSMEGIIVNSSDDMIQVTINSLKTPAXXP

SEQ ID NO: 27489 - protein, 37 aa, Artificial Sequence
  Non-cyclic GFR-binding peptide
  MOD_RES (2)..(4)..(37): Xaa is C or S
  MOD_RES (15)..(16)..(17)..(18)..(19): Xaa is A or G
  MOD_RES (20)..(21)..(22)..(23): Xaa is A or G or absent
SXKXSKVVMVTAKKXXXXXXXXXIKRIQVPRLDQPVX

SEQ ID NO: 27490 - protein, 41 aa, Artificial Sequence
  Non-cyclic GFR-binding peptide
  MOD_RES (2)..(4)..(37)..(38): Xaa is C or S
  MOD_RES (15)..(16)..(17)..(18)..(19): Xaa is A or G
  MOD_RES (20)..(21)..(22)..(23): Xaa is A or G or absent
SXKXSKVIMVTAKKXXXXXXXXXIKRIQVPRLDQSVXXPSA

SEQ ID NO: 27491 - protein, 42 aa, Artificial Sequence
  Non-cyclic GFR-binding peptide
  MOD_RES (1)..(3)..(37)..(38): Xaa is C or S
  MOD_RES (15)..(16)..(17)..(18)..(19): Xaa is A or G
  MOD_RES (20)..(21)..(22)..(23): Xaa is A or G or absent
XGXGEVVMESMEGIXXXXXXXXXMIQMTINSLETPVXXAKPI

SEQ ID NO: 27492 - protein, 34 aa, Artificial Sequence
  Non-cyclic GFR-binding peptide
  MOD_RES (2)..(34): Xaa is C or S
GXSRVVMNVTAKKIVNSSDDIKRVQVPRLKTPAX

SEQ ID NO: 27493 - protein, 33 aa, Artificial Sequence
  Non-cyclic GFR-binding peptide
  MOD_RES (2)..(33): Xaa is C or S
KXSKVVMVTAKKVKPTRGVIKRIQVPRLDQPVX

SEQ ID NO: 27494 - protein, 38 aa, Artificial Sequence
  Non-cyclic GFR-binding peptide
  MOD_RES (2)..(4)..(37)..(38): Xaa is C or S
  MOD_RES (15)..(16)..(17)..(18)..(19): Xaa is A or G
  MOD_RES (20)..(21)..(22)..(23): Xaa is A or G or absent
SXKXSKVVMSMEGIXXXXXXXXXMIQITINSLDQPVXX

SEQ ID NO: 27495 - protein, 41 aa, Artificial Sequence
  Non-cyclic GFR-binding peptide
  MOD_RES (2)..(4)..(36)..(37): Xaa is C or S
RXGXGEVVMDVTAKKVVKENEDIKRMQVPRLETPVXXAKPI

SEQ ID NO: 27496 - protein, 40 aa, Artificial Sequence
  Non-cyclic GFR-binding peptide
  MOD_RES (2)..(4)..(37)..(38): Xaa is C or S
  MOD_RES (15)..(16)..(17)..(18)..(19): Xaa is A or G
  MOD_RES (20)..(21)..(22)..(23): Xaa is A or G or absent
SXKXSKVIMVTAKKXXXXXXXXXIKRIQVPRLDQSVXXPS

SEQ ID NO: 27497 - protein, 34 aa, Artificial Sequence
  Non-cyclic GFR-binding peptide
  MOD_RES (32)..(33): Xaa is C or S
SRVVMNVQVEKIVNSSDDVKAVKVSRLKTPAXXP

SEQ ID NO: 27498 - protein, 34 aa, Artificial Sequence
  Non-cyclic GFR-binding peptide
  MOD_RES (11)..(12)..(13)..(14)..(15): Xaa is A or G
  MOD_RES (16)..(17)..(18)..(19): Xaa is A or G or absent
HEELRNSLQEXXXXXXXXXYYLVTLPEHHVRSPQ

SEQ ID NO: 27499 - protein, 36 aa, Artificial Sequence
  Non-cyclic GFR-binding peptide
  MOD_RES (1)..(3): Xaa is C or S
  MOD_RES (15)..(16)..(17)..(18)..(19): Xaa is A or G
  MOD_RES (20)..(21)..(22)..(23): Xaa is A or G or absent
XGXGEVVMEVQVEKXXXXXXXXXVKAMKVSRLETPV

SEQ ID NO: 27500 - protein, 40 aa, Artificial Sequence
  Non-cyclic GFR-binding peptide
  MOD_RES (1)..(3)..(37)..(38): Xaa is C or S
  MOD_RES (15)..(16)..(17)..(18)..(19): Xaa is A or G
  MOD_RES (20)..(21)..(22)..(23): Xaa is A or G or absent
XGXSRVVMNVQVEKXXXXXXXXXVKAVKVSRLKTPAXXPK

SEQ ID NO: 27501 - protein, 41 aa, Artificial Sequence
  Non-cyclic GFR-binding peptide
  MOD_RES (2)..(4)..(36)..(37): Xaa is C or S
HXGXARVVMNVTAKKIVNSSDDIKRVQVPRLQTPAXXPKPV

SEQ ID NO: 27502 - protein, 36 aa, Artificial Sequence
  Non-cyclic GFR-binding peptide
  MOD_RES (2)..(33)..(34): Xaa is C or S
KXSRVIMSMEGIVKPKRGVMIQITINSLAQPVXXPA

SEQ ID NO: 27503 - protein, 35 aa, Artificial Sequence
  Non-cyclic GFR-binding peptide
  MOD_RES (31)..(32): Xaa is C or S
RVVMNVQVEKIVNSSDDVKAVKVSRLQTPAXXPKP

SEQ ID NO: 27504 - protein, 40 aa, Artificial Sequence
  Non-cyclic GFR-binding peptide
  MOD_RES (2)..(35)..(36): Xaa is C or S
  MOD_RES (13)..(14)..(15)..(16)..(17): Xaa is A or G
  MOD_RES (18)..(19)..(20)..(21): Xaa is A or G or absent
KXSKVVMVQVEKXXXXXXXXXVKAIKVSRLDQPVXXPSAS

SEQ ID NO: 27505 - protein, 38 aa, Artificial Sequence
  Non-cyclic GFR-binding peptide
  MOD_RES (1)..(35)..(36): Xaa is C or S
  MOD_RES (13)..(14)..(15)..(16)..(17): Xaa is A or G
  MOD_RES (18)..(19)..(20)..(21): Xaa is A or G or absent
XSRVVMNVTAKKXXXXXXXXXIKRVQVPRLKTPAXXPK

SEQ ID NO: 27506 - protein, 41 aa, Artificial Sequence
  Non-cyclic GFR-binding peptide
  MOD_RES (1)..(3)..(36)..(37): Xaa is C or S
  MOD_RES (14)..(15)..(16)..(17)..(18): Xaa is A or G
  MOD_RES (19)..(20)..(21)..(22): Xaa is A or G or absent
XKXSKVIMVQVEKXXXXXXXXXVKAIKVSRLDQSVXXPSAS

SEQ ID NO: 27507 - protein, 34 aa, Artificial Sequence
  Non-cyclic GFR-binding peptide
  MOD_RES (33)..(34): Xaa is C or S
  MOD_RES (11)..(12)..(13)..(14)..(15): Xaa is A or G
  MOD_RES (16)..(17)..(18)..(19): Xaa is A or G or absent
EVVMEVQVEKXXXXXXXXXVKAMKVSRLETPVXX

SEQ ID NO: 27508 - protein, 36 aa, Artificial Sequence
  Non-cyclic GFR-binding peptide
  MOD_RES (32)..(33): Xaa is C or S
ARVVMNVTAKKIVNSSDDIKRVQVPRLQTPAXXPKP

SEQ ID NO: 27509 - protein, 39 aa, Artificial Sequence
  Non-cyclic GFR-binding peptide
  MOD_RES (1)..(3): Xaa is C or S
  MOD_RES (16)..(17)..(18)..(19)..(20): Xaa is A or G
  MOD_RES (21)..(22)..(23)..(24): Xaa is A or G or absent
XKXALHDELTNSLQEXXXXXXXXXYYLVTLPELQVQTPR

SEQ ID NO: 27510 - protein, 33 aa, Artificial Sequence
  Non-cyclic GFR-binding peptide
  MOD_RES (1)..(1): Xaa is C or S
  MOD_RES (12)..(13)..(14)..(15)..(16): Xaa is A or G
  MOD_RES (17)..(18)..(19)..(20): Xaa is A or G or absent
XSRVIMVTAKKXXXXXXXXXIKRIQVPRLAQPV

SEQ ID NO: 27511 - protein, 38 aa, Artificial Sequence
  Non-cyclic GFR-binding peptide
  MOD_RES (37)..(37): Xaa is C or S
ELHEELRNSLQELKPKKRVYEYYVVPLPEHHVRSPQXK

SEQ ID NO: 27512 - protein, 39 aa, Artificial Sequence
  Non-cyclic GFR-binding peptide
  MOD_RES (2)..(4)..(37)..(38): Xaa is C or S
  MOD_RES (15)..(16)..(17)..(18)..(19): Xaa is A or G
  MOD_RES (20)..(21)..(22)..(23): Xaa is A or G or absent
SXKXSKVVMVTAKKXXXXXXXXXIKRIQVPRLDQPVXXP

SEQ ID NO: 27513 - protein, 37 aa, Artificial Sequence
  Non-cyclic GFR-binding peptide
  MOD_RES (1)..(34)..(35): Xaa is C or S
  MOD_RES (12)..(13)..(14)..(15)..(16): Xaa is A or G
  MOD_RES (17)..(18)..(19)..(20): Xaa is A or G or absent
XSKVIMVQVEKXXXXXXXXXVKAIKVSRLDQSVXXPS

SEQ ID NO: 27514 - protein, 38 aa, Artificial Sequence
  Non-cyclic GFR-binding peptide
  MOD_RES (1)..(3)..(35)..(36): Xaa is C or S
XGXGEVVMDSMEGIVVKENEDMIQMTINSLETPVXXAK

SEQ ID NO: 27515 - protein, 34 aa, Artificial Sequence
  Non-cyclic GFR-binding peptide
  MOD_RES (33)..(33): Xaa is C or S
  MOD_RES (11)..(12)..(13)..(14)..(15): Xaa is A or G
  MOD_RES (16)..(17)..(18)..(19): Xaa is A or G or absent
NHQLFNSLQEXXXXXXXXXYYVMPLPEEETPVXE

SEQ ID NO: 27516 - protein, 39 aa, Artificial Sequence
  Non-cyclic GFR-binding peptide
  MOD_RES (2)..(34)..(35): Xaa is C or S
GXGEVVMEVTAKKVVKDYEDIKRMQVPRLETPVXXAKPI

SEQ ID NO: 27517 - protein, 34 aa, Artificial Sequence
  Non-cyclic GFR-binding peptide
  MOD_RES (31)..(32): Xaa is C or S
EVVMDSMEGIVVKENEDMIQMTINSLETPVXXAK

SEQ ID NO: 27518 - protein, 36 aa, Artificial Sequence
  Non-cyclic GFR-binding peptide
  MOD_RES (1)..(3)..(34)..(35): Xaa is C or S
XKXSKVIMVQVEKIKPTKGIVKAIKVSRLDQSVXXP

SEQ ID NO: 27519 - protein, 42 aa, Artificial Sequence
  Non-cyclic GFR-binding peptide
  MOD_RES (2)..(4)..(37)..(38): Xaa is C or S
  MOD_RES (15)..(16)..(17)..(18)..(19): Xaa is A or G
  MOD_RES (20)..(21)..(22)..(23): Xaa is A or G or absent
SXKXSKVIMVQVEKXXXXXXXXXVKAIKVSRLDQSVXXPSAS

SEQ ID NO: 27520 - protein, 44 aa, Artificial Sequence
  Non-cyclic GFR-binding peptide
  MOD_RES (2)..(4)..(38): Xaa is C or S
RXEXKNHQLFNSLQEHQGQHPKIRYYLMTLPEEETPVXELGEDN

SEQ ID NO: 27521 - protein, 40 aa, Artificial Sequence
  Non-cyclic GFR-binding peptide
  MOD_RES (1)..(3)..(40): Xaa is C or S
  MOD_RES (16)..(17)..(18)..(19)..(20): Xaa is A or G
  MOD_RES (21)..(22)..(23)..(24): Xaa is A or G or absent
XAXELHEELRNSLQEXXXXXXXXXYYLVTLPEHHVRSPQX

SEQ ID NO: 27522 - protein, 40 aa, Artificial Sequence
  Non-cyclic GFR-binding peptide
  MOD_RES (2)..(36): Xaa is C or S
  MOD_RES (14)..(15)..(16)..(17)..(18): Xaa is A or G
  MOD_RES (19)..(20)..(21)..(22): Xaa is A or G or absent
EXKNHQLFNSLQEXXXXXXXXXYYVMPLPEEETPVXELGE

SEQ ID NO: 27523 - protein, 39 aa, Artificial Sequence
  Non-cyclic GFR-binding peptide
  MOD_RES (2)..(4)..(38)..(39): Xaa is C or S
  MOD_RES (16)..(17)..(18)..(19)..(20): Xaa is A or G
  MOD_RES (21)..(22)..(23)..(24): Xaa is A or G or absent
RXGXGEVVMEVQVEKXXXXXXXXXVKAMKVSRLETPVXX

SEQ ID NO: 27524 - protein, 36 aa, Artificial Sequence
  Non-cyclic GFR-binding peptide
  MOD_RES (1)..(3)..(34)..(35): Xaa is C or S
XKXSRVIMVQVEKVKPKRGVVKAIKVSRLAQPVXXP

SEQ ID NO: 27525 - protein, 36 aa, Artificial Sequence
  Non-cyclic GFR-binding peptide
  MOD_RES (2)..(4)..(36): Xaa is C or S
RXGXGEVVMESMEGIVVKDYEDMIQMTINSLETPVX

SEQ ID NO: 27526 - protein, 42 aa, Artificial Sequence
  Non-cyclic GFR-binding peptide
  MOD_RES (2)..(4)..(38)..(39): Xaa is C or S
  MOD_RES (16)..(17)..(18)..(19)..(20): Xaa is A or G
  MOD_RES (21)..(22)..(23)..(24): Xaa is A or G or absent
RXGXGEVVMDVQVEKXXXXXXXXXVKAMKVSRLETPVXXAKP

SEQ ID NO: 27527 - protein, 38 aa, Artificial Sequence
  Non-cyclic GFR-binding peptide
  MOD_RES (32)..(33): Xaa is C or S
ARVVMNVQVEKIVNSSDDVKAVKVSRLQTPAXXPKPVT

SEQ ID NO: 27528 - protein, 39 aa, Artificial Sequence
  Non-cyclic GFR-binding peptide
  MOD_RES (1)..(38): Xaa is C or S
  MOD_RES (14)..(15)..(16)..(17)..(18): Xaa is A or G
  MOD_RES (19)..(20)..(21)..(22): Xaa is A or G or absent
XELHEELRNSLQEXXXXXXXXXYYVVPLPEHHVRSPQXK

SEQ ID NO: 27529 - protein, 35 aa, Artificial Sequence
  Non-cyclic GFR-binding peptide
  MOD_RES (1)..(35): Xaa is C or S
  MOD_RES (13)..(14)..(15)..(16)..(17): Xaa is A or G
  MOD_RES (18)..(19)..(20)..(21): Xaa is A or G or absent
XSRVVMNSMEGIXXXXXXXXXMIQVTINSLKTPAX

SEQ ID NO: 27530 - protein, 34 aa, Artificial Sequence
  Non-cyclic GFR-binding peptide
  MOD_RES (32)..(32): Xaa is C or S
SRVVMNVTAKKIVNSSDDIKRVQVPRLKTPAXTP

SEQ ID NO: 27531 - protein, 36 aa, Artificial Sequence
  Non-cyclic GFR-binding peptide
  MOD_RES (34)..(35): Xaa is C or S
  MOD_RES (12)..(13)..(14)..(15)..(16): Xaa is A or G
  MOD_RES (17)..(18)..(19)..(20): Xaa is A or G or absent
ARVVMNVTAKKXXXXXXXXXIKRVQVPRLQTPAXXP

SEQ ID NO: 27532 - protein, 31 aa, Artificial Sequence
  Non-cyclic GFR-binding peptide
  MOD_RES (31)..(31): Xaa is C or S
RVVMNVQVEKIVNSSDDVKAVKVSRLQTPAX

SEQ ID NO: 27533 - protein, 32 aa, Artificial Sequence
  Non-cyclic GFR-binding peptide
  MOD_RES (31)..(32): Xaa is C or S
RVVMNSMEGIIVNSSDDMIQVTINSLKTPAXX

SEQ ID NO: 27534 - protein, 38 aa, Artificial Sequence
  Non-cyclic GFR-binding peptide
  MOD_RES (37)..(37): Xaa is C or S
  MOD_RES (13)..(14)..(15)..(16)..(17): Xaa is A or G
  MOD_RES (18)..(19)..(20)..(21): Xaa is A or G or absent
ALHDELTNSLQEXXXXXXXXXYYVVPLPELQVQTPRXQ

SEQ ID NO: 27535 - protein, 36 aa, Artificial Sequence
  Non-cyclic GFR-binding peptide
  MOD_RES (32)..(33): Xaa is C or S
SRVVMNSMEGIIVNSSDDMIQVTINSLKTPAXXPKP

SEQ ID NO: 27536 - protein, 38 aa, Artificial Sequence
  Non-cyclic GFR-binding peptide
  MOD_RES (2)..(4)..(37)..(38): Xaa is C or S
  MOD_RES (15)..(16)..(17)..(18)..(19): Xaa is A or G
  MOD_RES (20)..(21)..(22)..(23): Xaa is A or G or absent
SXKXSKVVMVTAKKXXXXXXXXXIKRIQVPRLDQPVXX

SEQ ID NO: 27537 - protein, 32 aa, Artificial Sequence
  Non-cyclic GFR-binding peptide
  MOD_RES (11)..(12)..(13)..(14)..(15): Xaa is A or G
  MOD_RES (16)..(17)..(18)..(19): Xaa is A or G or absent
EVVMDSMEGIXXXXXXXXXMIQMTINSLETPV

SEQ ID NO: 27538 - protein, 34 aa, Artificial Sequence
  Non-cyclic GFR-binding peptide
LHDELTNSLQEFIPKKRVIEYYVVPLPELQVQTP

SEQ ID NO: 27539 - protein, 37 aa, Artificial Sequence
  Non-cyclic GFR-binding peptide
  MOD_RES (2)..(4)..(36)..(37): Xaa is C or S
RXGXGEVVMDVTAKKVVKENEDIKRMQVPRLETPVXX

SEQ ID NO: 27540 - protein, 33 aa, Artificial Sequence
  Non-cyclic GFR-binding peptide
  MOD_RES (31)..(32): Xaa is C or S
SKVIMSMEGIIKPTKGIMIQITINSLDQSVXXP

SEQ ID NO: 27541 - protein, 34 aa, Artificial Sequence
  Non-cyclic GFR-binding peptide
  MOD_RES (1)..(33)..(34): Xaa is C or S
XGEVVMDVTAKKVVKENEDIKRMQVPRLETPVXX

SEQ ID NO: 27542 - protein, 39 aa, Artificial Sequence
  Non-cyclic GFR-binding peptide
  MOD_RES (2)..(4)..(38)..(39): Xaa is C or S
  MOD_RES (16)..(17)..(18)..(19)..(20): Xaa is A or G
  MOD_RES (21)..(22)..(23)..(24): Xaa is A or G or absent
RXGXGEVVMDSMEGIXXXXXXXXXMIQMTINSLETPVXX

SEQ ID NO: 27543 - protein, 39 aa, Artificial Sequence
  Non-cyclic GFR-binding peptide
  MOD_RES (1)..(35)..(36): Xaa is C or S
  MOD_RES (13)..(14)..(15)..(16)..(17): Xaa is A or G
  MOD_RES (18)..(19)..(20)..(21): Xaa is A or G or absent
XSRVVMNVQVEKXXXXXXXXXVKAVKVSRLKTPAXXPKP

SEQ ID NO: 27544 - protein, 39 aa, Artificial Sequence
  Non-cyclic GFR-binding peptide
  MOD_RES (2)..(33)..(34): Xaa is C or S
KXSRVIMSMEGIVKPKRGVMIQITINSLAQPVXXPAASA

SEQ ID NO: 27545 - protein, 35 aa, Artificial Sequence
  Non-cyclic GFR-binding peptide
  MOD_RES (34)..(35): Xaa is C or S
  MOD_RES (12)..(13)..(14)..(15)..(16): Xaa is A or G
  MOD_RES (17)..(18)..(19)..(20): Xaa is A or G or absent
ARVVMNVTAKKXXXXXXXXXIKRVQVPRLQTPAXX

SEQ ID NO: 27546 - protein, 39 aa, Artificial Sequence
  Non-cyclic GFR-binding peptide
  MOD_RES (1)..(3)..(35)..(36): Xaa is C or S
XGXGEVVMDSMEGIVVKENEDMIQMTINSLETPVXXAKP

SEQ ID NO: 27547 - protein, 42 aa, Artificial Sequence
  Non-cyclic GFR-binding peptide
  MOD_RES (1)..(3)..(37): Xaa is C or S
XEXKNHQLFNSLQEHQGQHPKIRYYLMTLPEEETPVXELGED

SEQ ID NO: 27548 - protein, 39 aa, Artificial Sequence
  Non-cyclic GFR-binding peptide
  MOD_RES (2)..(36)..(37): Xaa is C or S
  MOD_RES (14)..(15)..(16)..(17)..(18): Xaa is A or G
  MOD_RES (19)..(20)..(21)..(22): Xaa is A or G or absent
GXGEVVMEVQVEKXXXXXXXXXVKAMKVSRLETPVXXAK

SEQ ID NO: 27549 - protein, 36 aa, Artificial Sequence
  Non-cyclic GFR-binding peptide
  MOD_RES (33)..(34): Xaa is C or S
  MOD_RES (11)..(12)..(13)..(14)..(15): Xaa is A or G
  MOD_RES (16)..(17)..(18)..(19): Xaa is A or G or absent
RVVMNVQVEKXXXXXXXXXVKAVKVSRLKTPAXXPK

SEQ ID NO: 27550 - protein, 38 aa, Artificial Sequence
  Non-cyclic GFR-binding peptide
  MOD_RES (2)..(4)..(36)..(37): Xaa is C or S
HXGXARVVMNVQVEKIVNSSDDVKAVKVSRLQTPAXXP

SEQ ID NO: 27551 - protein, 34 aa, Artificial Sequence
  Non-cyclic GFR-binding peptide
  MOD_RES (33)..(34): Xaa is C or S
  MOD_RES (11)..(12)..(13)..(14)..(15): Xaa is A or G
  MOD_RES (16)..(17)..(18)..(19): Xaa is A or G or absent
RVVMNSMEGIXXXXXXXXXMIQVTINSLKTPAXX

SEQ ID NO: 27552 - protein, 36 aa, Artificial Sequence
  Non-cyclic GFR-binding peptide
  MOD_RES (1)..(3): Xaa is C or S
  MOD_RES (15)..(16)..(17)..(18)..(19): Xaa is A or G
  MOD_RES (20)..(21)..(22)..(23): Xaa is A or G or absent
XGXARVVMNVQVEKXXXXXXXXXVKAVKVSRLQTPA

SEQ ID NO: 27553 - protein, 38 aa, Artificial Sequence
  Non-cyclic GFR-binding peptide
  MOD_RES (2)..(36)..(37): Xaa is C or S
  MOD_RES (14)..(15)..(16)..(17)..(18): Xaa is A or G
  MOD_RES (19)..(20)..(21)..(22): Xaa is A or G or absent
GXGEVVMDVQVEKXXXXXXXXXVKAMKVSRLETPVXXA

SEQ ID NO: 27554 - protein, 31 aa, Artificial Sequence
  Non-cyclic GFR-binding peptide
  MOD_RES (1)..(1): Xaa is C or S
XSKVVMSMEGIVKPTRGVMIQITINSLDQPV

SEQ ID NO: 27555 - protein, 42 aa, Artificial Sequence
  Non-cyclic GFR-binding peptide
  MOD_RES (1)..(3)..(37)..(38): Xaa is C or S
  MOD_RES (15)..(16)..(17)..(18)..(19): Xaa is A or G
  MOD_RES (20)..(21)..(22)..(23): Xaa is A or G or absent
XGXGEVVMEVQVEKXXXXXXXXXVKAMKVSRLETPVXXAKPI

SEQ ID NO: 27556 - protein, 35 aa, Artificial Sequence
  Non-cyclic GFR-binding peptide
  MOD_RES (1)..(3)..(35): Xaa is C or S
XGXGEVVMESMEGIVVKDYEDMIQMTINSLETPVX

SEQ ID NO: 27557 - protein, 40 aa, Artificial Sequence
  Non-cyclic GFR-binding peptide
  MOD_RES (2)..(39): Xaa is C or S
AXELHEELRNSLQELKPKKRVYEYYVVPLPEHHVRSPQXK

SEQ ID NO: 27558 - protein, 37 aa, Artificial Sequence
  Non-cyclic GFR-binding peptide
  MOD_RES (2)..(4)..(37): Xaa is C or S
  MOD_RES (15)..(16)..(17)..(18)..(19): Xaa is A or G
  MOD_RES (20)..(21)..(22)..(23): Xaa is A or G or absent
SXKXSKVIMVTAKKXXXXXXXXXIKRIQVPRLDQSVX

SEQ ID NO: 27559 - protein, 41 aa, Artificial Sequence
  Non-cyclic GFR-binding peptide
  MOD_RES (2)..(4)..(35)..(36): Xaa is C or S
SXKXSRVIMVTAKKVKPKRGVIKRIQVPRLAQPVXXPAASA

SEQ ID NO: 27560 - protein, 41 aa, Artificial Sequence
  Non-cyclic GFR-binding peptide
  MOD_RES (1)..(35): Xaa is C or S
  MOD_RES (13)..(14)..(15)..(16)..(17): Xaa is A or G
  MOD_RES (18)..(19)..(20)..(21): Xaa is A or G or absent
XSRVVMNVQVEKXXXXXXXXXVKAVKVSRLKTPAXTPKTVH

SEQ ID NO: 27561 - protein, 34 aa, Artificial Sequence
  Non-cyclic GFR-binding peptide
  MOD_RES (1)..(34): Xaa is C or S
  MOD_RES (12)..(13)..(14)..(15)..(16): Xaa is A or G
  MOD_RES (17)..(18)..(19)..(20): Xaa is A or G or absent
XSKVVMVQVEKXXXXXXXXXVKAIKVSRLDQPVX

SEQ ID NO: 27562 - protein, 37 aa, Artificial Sequence
  Non-cyclic GFR-binding peptide
  MOD_RES (36)..(36): Xaa is C or S
  MOD_RES (12)..(13)..(14)..(15)..(16): Xaa is A or G
  MOD_RES (17)..(18)..(19)..(20): Xaa is A or G or absent
LHDELTNSLQEXXXXXXXXXYYVVPLPELQVQTPRXQ

SEQ ID NO: 27563 - protein, 36 aa, Artificial Sequence
  Non-cyclic GFR-binding peptide
  MOD_RES (1)..(32)..(33): Xaa is C or S
XSKVIMSMEGIIKPTKGIMIQITINSLDQSVXXPSA

SEQ ID NO: 27564 - protein, 39 aa, Artificial Sequence
  Non-cyclic GFR-binding peptide
  MOD_RES (2)..(4)..(35)..(36): Xaa is C or S
SXKXSKVVMSMEGIVKPTRGVMIQITINSLDQPVXXPSA

SEQ ID NO: 27565 - protein, 40 aa, Artificial Sequence
  Non-cyclic GFR-binding peptide
  MOD_RES (1)..(34)..(35): Xaa is C or S
  MOD_RES (12)..(13)..(14)..(15)..(16): Xaa is A or G
  MOD_RES (17)..(18)..(19)..(20): Xaa is A or G or absent
XSKVVMVTAKKXXXXXXXXXIKRIQVPRLDQPVXXPSASA

SEQ ID NO: 27566 - protein, 36 aa, Artificial Sequence
  Non-cyclic GFR-binding peptide
  MOD_RES (2)..(34)..(35): Xaa is C or S
GXSRVVMNSMEGIIVNSSDDMIQVTINSLKTPAXXP

SEQ ID NO: 27567 - protein, 32 aa, Artificial Sequence
  Non-cyclic GFR-binding peptide
  MOD_RES (32)..(32): Xaa is C or S
GEVVMDVQVEKVVKENEDVKAMKVSRLETPVX

SEQ ID NO: 27568 - protein, 40 aa, Artificial Sequence
  Non-cyclic GFR-binding peptide
  MOD_RES (2)..(4)..(38)..(39): Xaa is C or S
  MOD_RES (16)..(17)..(18)..(19)..(20): Xaa is A or G
  MOD_RES (21)..(22)..(23)..(24): Xaa is A or G or absent
RXGXGEVVMESMEGIXXXXXXXXXMIQMTINSLETPVXXA

SEQ ID NO: 27569 - protein, 41 aa, Artificial Sequence
  Non-cyclic GFR-binding peptide
  MOD_RES (1)..(35)..(36): Xaa is C or S
  MOD_RES (13)..(14)..(15)..(16)..(17): Xaa is A or G
  MOD_RES (18)..(19)..(20)..(21): Xaa is A or G or absent
XARVVMNVQVEKXXXXXXXXXVKAVKVSRLQTPAXXPKPVT

SEQ ID NO: 27570 - protein, 37 aa, Artificial Sequence
  Non-cyclic GFR-binding peptide
  MOD_RES (35)..(35): Xaa is C or S
  MOD_RES (11)..(12)..(13)..(14)..(15): Xaa is A or G
  MOD_RES (16)..(17)..(18)..(19): Xaa is A or G or absent
HDELTNSLQEXXXXXXXXXYYLVTLPELQVQTPRXQV

SEQ ID NO: 27571 - protein, 39 aa, Artificial Sequence
  Non-cyclic GFR-binding peptide
  MOD_RES (2)..(4)..(37)..(38): Xaa is C or S
  MOD_RES (15)..(16)..(17)..(18)..(19): Xaa is A or G
  MOD_RES (20)..(21)..(22)..(23): Xaa is A or G or absent
SXKXSKVVMVQVEKXXXXXXXXXVKAIKVSRLDQPVXXP

SEQ ID NO: 27572 - protein, 42 aa, Artificial Sequence
  Non-cyclic GFR-binding peptide
  MOD_RES (1)..(3)..(40): Xaa is C or S
  MOD_RES (16)..(17)..(18)..(19)..(20): Xaa is A or G
  MOD_RES (21)..(22)..(23)..(24): Xaa is A or G or absent
XAXELHEELRNSLQEXXXXXXXXXYYLVTLPEHHVRSPQXKV

SEQ ID NO: 27573 - protein, 35 aa, Artificial Sequence
  Non-cyclic GFR-binding peptide
  MOD_RES (2)..(4)..(35): Xaa is C or S
SXKXSKVIMVTAKKIKPTKGIIKRIQVPRLDQSVX

SEQ ID NO: 27574 - protein, 38 aa, Artificial Sequence
  Non-cyclic GFR-binding peptide
  MOD_RES (33)..(34): Xaa is C or S
  MOD_RES (11)..(12)..(13)..(14)..(15): Xaa is A or G
  MOD_RES (16)..(17)..(18)..(19): Xaa is A or G or absent
SRVIMVTAKKXXXXXXXXXIKRIQVPRLAQPVXXPAAS

SEQ ID NO: 27575 - protein, 35 aa, Artificial Sequence
  Non-cyclic GFR-binding peptide
  MOD_RES (33)..(34): Xaa is C or S
  MOD_RES (11)..(12)..(13)..(14)..(15): Xaa is A or G
  MOD_RES (16)..(17)..(18)..(19): Xaa is A or G or absent
RVVMNVQVEKXXXXXXXXXVKAVKVSRLKTPAXXP

SEQ ID NO: 27576 - protein, 36 aa, Artificial Sequence
  Non-cyclic GFR-binding peptide
  MOD_RES (2)..(36): Xaa is C or S
  MOD_RES (14)..(15)..(16)..(17)..(18): Xaa is A or G
  MOD_RES (19)..(20)..(21)..(22): Xaa is A or G or absent
GXGEVVMEVTAKKXXXXXXXXXIKRMQVPRLETPVX

SEQ ID NO: 27577 - protein, 43 aa, Artificial Sequence
  Non-cyclic GFR-binding peptide
  MOD_RES (2)..(39): Xaa is C or S
  MOD_RES (15)..(16)..(17)..(18)..(19): Xaa is A or G
  MOD_RES (20)..(21)..(22)..(23): Xaa is A or G or absent
KXALHDELTNSLQEXXXXXXXXXYYLVTLPELQVQTPRXQVNR

SEQ ID NO: 27578 - protein, 33 aa, Artificial Sequence
  Non-cyclic GFR-binding peptide
  MOD_RES (33)..(33): Xaa is C or S
  MOD_RES (11)..(12)..(13)..(14)..(15): Xaa is A or G
  MOD_RES (16)..(17)..(18)..(19): Xaa is A or G or absent
EVVMDVTAKKXXXXXXXXXIKRMQVPRLETPVX

SEQ ID NO: 27579 - protein, 36 aa, Artificial Sequence
  Non-cyclic GFR-binding peptide
  MOD_RES (1)..(3)..(36): Xaa is C or S
  MOD_RES (14)..(15)..(16)..(17)..(18): Xaa is A or G
  MOD_RES (19)..(20)..(21)..(22): Xaa is A or G or absent
XKXSKVVMVQVEKXXXXXXXXXVKAIKVSRLDQPVX

SEQ ID NO: 27580 - protein, 42 aa, Artificial Sequence
  Non-cyclic GFR-binding peptide
  MOD_RES (2)..(4)..(36)..(37): Xaa is C or S
HXGXSRVVMNSMEGIIVNSSDDMIQVTINSLKTPAXXPKPVY

SEQ ID NO: 27581 - protein, 34 aa, Artificial Sequence
  Non-cyclic GFR-binding peptide
  MOD_RES (2)..(4): Xaa is C or S
SXKXSKVVMVTAKKVKPTRGVIKRIQVPRLDQPV

SEQ ID NO: 27582 - protein, 37 aa, Artificial Sequence
  Non-cyclic GFR-binding peptide
  MOD_RES (2)..(4)..(35)..(36): Xaa is C or S
SXKXSKVIMSMEGIIKPTKGIMIQITINSLDQSVXXP

SEQ ID NO: 27583 - protein, 36 aa, Artificial Sequence
  Non-cyclic GFR-binding peptide
  MOD_RES (31)..(32): Xaa is C or S
EVVMESMEGIVVKDYEDMIQMTINSLETPVXXAKPI

SEQ ID NO: 27584 - protein, 41 aa, Artificial Sequence
  Non-cyclic GFR-binding peptide
  MOD_RES (2)..(36)..(37): Xaa is C or S
  MOD_RES (14)..(15)..(16)..(17)..(18): Xaa is A or G
  MOD_RES (19)..(20)..(21)..(22): Xaa is A or G or absent
GXARVVMNVQVEKXXXXXXXXXVKAVKVSRLQTPAXXPKPV

SEQ ID NO: 27585 - protein, 31 aa, Artificial Sequence
  Non-cyclic GFR-binding peptide
  MOD_RES (1)..(1): Xaa is C or S
XSKVVMVQVEKVKPTRGVVKAIKVSRLDQPV

SEQ ID NO: 27586 - protein, 39 aa, Artificial Sequence
  Non-cyclic GFR-binding peptide
  MOD_RES (1)..(38): Xaa is C or S
XALHDELTNSLQEFIPKKRVIEYYLVTLPELQVQTPRXQ

SEQ ID NO: 27587 - protein, 38 aa, Artificial Sequence
  Non-cyclic GFR-binding peptide
  MOD_RES (2)..(4)..(36): Xaa is C or S
HXGXSRVVMNVTAKKIVNSSDDIKRVQVPRLKTPAXTP

SEQ ID NO: 27588 - protein, 35 aa, Artificial Sequence
  Non-cyclic GFR-binding peptide
  MOD_RES (33)..(34): Xaa is C or S
  MOD_RES (11)..(12)..(13)..(14)..(15): Xaa is A or G
  MOD_RES (16)..(17)..(18)..(19): Xaa is A or G or absent
SKVVMSMEGIXXXXXXXXXMIQITINSLDQPVXXP

SEQ ID NO: 27589 - protein, 35 aa, Artificial Sequence
  Non-cyclic GFR-binding peptide
  MOD_RES (33)..(33): Xaa is C or S
  MOD_RES (11)..(12)..(13)..(14)..(15): Xaa is A or G
  MOD_RES (16)..(17)..(18)..(19): Xaa is A or G or absent
RVVMNSMEGIXXXXXXXXXMIQVTINSLKTPAXTP

SEQ ID NO: 27590 - protein, 39 aa, Artificial Sequence
  Non-cyclic GFR-binding peptide
  MOD_RES (35)..(35): Xaa is C or S
HEELRNSLQELKPKKRVYEYYVVPLPEHHVRSPQXKVSS

SEQ ID NO: 27591 - protein, 39 aa, Artificial Sequence
  Non-cyclic GFR-binding peptide
  MOD_RES (36)..(36): Xaa is C or S
LHDELTNSLQEFIPKKRVIEYYLVTLPELQVQTPRXQVN

SEQ ID NO: 27592 - protein, 33 aa, Artificial Sequence
  Non-cyclic GFR-binding peptide
  MOD_RES (1)..(3): Xaa is C or S
XKXSKVIMVQVEKIKPTKGIVKAIKVSRLDQSV

SEQ ID NO: 27593 - protein, 37 aa, Artificial Sequence
  Non-cyclic GFR-binding peptide
  MOD_RES (2)..(4)..(36)..(37): Xaa is C or S
HXGXSRVVMNVQVEKIVNSSDDVKAVKVSRLKTPAXX

SEQ ID NO: 27594 - protein, 37 aa, Artificial Sequence
  Non-cyclic GFR-binding peptide
  MOD_RES (34)..(35): Xaa is C or S
  MOD_RES (12)..(13)..(14)..(15)..(16): Xaa is A or G
  MOD_RES (17)..(18)..(19)..(20): Xaa is A or G or absent
ARVVMNSMEGIXXXXXXXXXMIQVTINSLQTPAXXPK

SEQ ID NO: 27595 - protein, 37 aa, Artificial Sequence
  Non-cyclic GFR-binding peptide
  MOD_RES (1)..(3)..(35)..(36): Xaa is C or S
XGXSRVVMNSMEGIIVNSSDDMIQVTINSLKTPAXXP

SEQ ID NO: 27596 - protein, 34 aa, Artificial Sequence
  Non-cyclic GFR-binding peptide
  MOD_RES (1)..(1): Xaa is C or S
  MOD_RES (13)..(14)..(15)..(16)..(17): Xaa is A or G
  MOD_RES (18)..(19)..(20)..(21): Xaa is A or G or absent
XKNHQLFNSLQEXXXXXXXXXYYVMPLPEEETPV

SEQ ID NO: 27597 - protein, 35 aa, Artificial Sequence
  Non-cyclic GFR-binding peptide
  MOD_RES (2)..(35): Xaa is C or S
  MOD_RES (13)..(14)..(15)..(16)..(17): Xaa is A or G
  MOD_RES (18)..(19)..(20)..(21): Xaa is A or G or absent
KXSKVVMSMEGIXXXXXXXXXMIQITINSLDQPVX

SEQ ID NO: 27598 - protein, 33 aa, Artificial Sequence
  Non-cyclic GFR-binding peptide
  MOD_RES (32)..(33): Xaa is C or S
ARVVMNSMEGIIVNSSDDMIQVTINSLQTPAXX

SEQ ID NO: 27599 - protein, 35 aa, Artificial Sequence
  Non-cyclic GFR-binding peptide
  MOD_RES (31)..(32): Xaa is C or S
EVVMEVTAKKVVKDYEDIKRMQVPRLETPVXXAKP

SEQ ID NO: 27600 - protein, 44 aa, Artificial Sequence
  Non-cyclic GFR-binding peptide
  MOD_RES (2)..(4)..(41): Xaa is C or S
  MOD_RES (17)..(18)..(19)..(20)..(21): Xaa is A or G
  MOD_RES (22)..(23)..(24)..(25): Xaa is A or G or absent
AXAXELHEELRNSLQEXXXXXXXXXYYLVTLPEHHVRSPQXKVS

SEQ ID NO: 27601 - protein, 37 aa, Artificial Sequence
  Non-cyclic GFR-binding peptide
  MOD_RES (32)..(33): Xaa is C or S
GEVVMEVTAKKVVKDYEDIKRMQVPRLETPVXXAKPI

SEQ ID NO: 27602 - protein, 39 aa, Artificial Sequence
  Non-cyclic GFR-binding peptide
  MOD_RES (33)..(34): Xaa is C or S
  MOD_RES (11)..(12)..(13)..(14)..(15): Xaa is A or G
  MOD_RES (16)..(17)..(18)..(19): Xaa is A or G or absent
SKVVMSMEGIXXXXXXXXXMIQITINSLDQPVXXPSASA

SEQ ID NO: 27603 - protein, 42 aa, Artificial Sequence
  Non-cyclic GFR-binding peptide
  MOD_RES (2)..(4)..(37)..(38): Xaa is C or S
  MOD_RES (15)..(16)..(17)..(18)..(19): Xaa is A or G
  MOD_RES (20)..(21)..(22)..(23): Xaa is A or G or absent
SXKXSKVVMVQVEKXXXXXXXXXVKAIKVSRLDQPVXXPSAS

SEQ ID NO: 27604 - protein, 31 aa, Artificial Sequence
  Non-cyclic GFR-binding peptide
GEVVMDVQVEKVVKENEDVKAMKVSRLETPV

SEQ ID NO: 27605 - protein, 39 aa, Artificial Sequence
  Non-cyclic GFR-binding peptide
  MOD_RES (2)..(4)..(36)..(37): Xaa is C or S
HXGXARVVMNVQVEKIVNSSDDVKAVKVSRLQTPAXXPK

SEQ ID NO: 27606 - protein, 38 aa, Artificial Sequence
  Non-cyclic GFR-binding peptide
  MOD_RES (1)..(3): Xaa is C or S
  MOD_RES (16)..(17)..(18)..(19)..(20): Xaa is A or G
  MOD_RES (21)..(22)..(23)..(24): Xaa is A or G or absent
XAXELHEELRNSLQEXXXXXXXXXYYLVTLPEHHVRSP

SEQ ID NO: 27607 - protein, 35 aa, Artificial Sequence
  Non-cyclic GFR-binding peptide
  MOD_RES (33)..(33): Xaa is C or S
  MOD_RES (11)..(12)..(13)..(14)..(15): Xaa is A or G
  MOD_RES (16)..(17)..(18)..(19): Xaa is A or G or absent
NHQLFNSLQEXXXXXXXXXYYVMPLPEEETPVXEL

SEQ ID NO: 27608 - protein, 37 aa, Artificial Sequence
  Non-cyclic GFR-binding peptide
  MOD_RES (34)..(35): Xaa is C or S
  MOD_RES (12)..(13)..(14)..(15)..(16): Xaa is A or G
  MOD_RES (17)..(18)..(19)..(20): Xaa is A or G or absent
GEVVMDVTAKKXXXXXXXXXIKRMQVPRLETPVXXAK

SEQ ID NO: 27609 - protein, 42 aa, Artificial Sequence
  Non-cyclic GFR-binding peptide
  MOD_RES (2)..(4)..(37)..(38): Xaa is C or S
  MOD_RES (15)..(16)..(17)..(18)..(19): Xaa is A or G
  MOD_RES (20)..(21)..(22)..(23): Xaa is A or G or absent
SXKXSKVIMSMEGIXXXXXXXXXMIQITINSLDQSVXXPSAS

SEQ ID NO: 27610 - protein, 35 aa, Artificial Sequence
  Non-cyclic GFR-binding peptide
  MOD_RES (34)..(35): Xaa is C or S
  MOD_RES (12)..(13)..(14)..(15)..(16): Xaa is A or G
  MOD_RES (17)..(18)..(19)..(20): Xaa is A or G or absent
GEVVMDVQVEKXXXXXXXXXVKAMKVSRLETPVXX

SEQ ID NO: 27611 - protein, 41 aa, Artificial Sequence
  Non-cyclic GFR-binding peptide
  MOD_RES (1)..(3)..(37): Xaa is C or S
XEXKNHQLFNSLQEHQGQHPKIRYYVMPLPEEETPVXELGE

SEQ ID NO: 27612 - protein, 36 aa, Artificial Sequence
  Non-cyclic GFR-binding peptide
  MOD_RES (1)..(3)..(34)..(35): Xaa is C or S
XKXSKVIMSMEGIIKPTKGIMIQITINSLDQSVXXP

SEQ ID NO: 27613 - protein, 41 aa, Artificial Sequence
  Non-cyclic GFR-binding peptide
  MOD_RES (1)..(38): Xaa is C or S
  MOD_RES (14)..(15)..(16)..(17)..(18): Xaa is A or G
  MOD_RES (19)..(20)..(21)..(22): Xaa is A or G or absent
XALHDELTNSLQEXXXXXXXXXYYLVTLPELQVQTPRXQVN

SEQ ID NO: 27614 - protein, 33 aa, Artificial Sequence
  Non-cyclic GFR-binding peptide
  MOD_RES (31)..(32): Xaa is C or S
SRVIMSMEGIVKPKRGVMIQITINSLAQPVXXP

SEQ ID NO: 27615 - protein, 41 aa, Artificial Sequence
  Non-cyclic GFR-binding peptide
  MOD_RES (1)..(35): Xaa is C or S
XKNHQLFNSLQEHQGQHPKIRYYLMTLPEEETPVXELGEDN

SEQ ID NO: 27616 - protein, 35 aa, Artificial Sequence
  Non-cyclic GFR-binding peptide
  MOD_RES (1)..(3)..(35): Xaa is C or S
XGXARVVMNSMEGIIVNSSDDMIQVTINSLQTPAX

SEQ ID NO: 27617 - protein, 33 aa, Artificial Sequence
  Non-cyclic GFR-binding peptide
  MOD_RES (1)..(1): Xaa is C or S
  MOD_RES (12)..(13)..(14)..(15)..(16): Xaa is A or G
  MOD_RES (17)..(18)..(19)..(20): Xaa is A or G or absent
XSKVIMVQVEKXXXXXXXXXVKAIKVSRLDQSV

SEQ ID NO: 27618 - protein, 41 aa, Artificial Sequence
  Non-cyclic GFR-binding peptide
  MOD_RES (1)..(3)..(36)..(37): Xaa is C or S
  MOD_RES (14)..(15)..(16)..(17)..(18): Xaa is A or G
  MOD_RES (19)..(20)..(21)..(22): Xaa is A or G or absent
XKXSKVVMSMEGIXXXXXXXXXMIQITINSLDQPVXXPSAS

SEQ ID NO: 27619 - protein, 39 aa, Artificial Sequence
  Non-cyclic GFR-binding peptide
  MOD_RES (34)..(34): Xaa is C or S
  MOD_RES (12)..(13)..(14)..(15)..(16): Xaa is A or G
  MOD_RES (17)..(18)..(19)..(20): Xaa is A or G or absent
SRVVMNVQVEKXXXXXXXXXVKAVKVSRLKTPAXTPKTV

SEQ ID NO: 27620 - protein, 32 aa, Artificial Sequence
  Non-cyclic GFR-binding peptide
  MOD_RES (31)..(32): Xaa is C or S
RVVMNVTAKKIVNSSDDIKRVQVPRLKTPAXX

SEQ ID NO: 27621 - protein, 31 aa, Artificial Sequence
  Non-cyclic GFR-binding peptide
GEVVMEVQVEKVVKDYEDVKAMKVSRLETPV

SEQ ID NO: 27622 - protein, 42 aa, Artificial Sequence
  Non-cyclic GFR-binding peptide
  MOD_RES (1)..(3)..(37)..(38): Xaa is C or S
  MOD_RES (15)..(16)..(17)..(18)..(19): Xaa is A or G
  MOD_RES (20)..(21)..(22)..(23): Xaa is A or G or absent
XGXGEVVMEVTAKKXXXXXXXXXIKRMQVPRLETPVXXAKPI

SEQ ID NO: 27623 - protein, 33 aa, Artificial Sequence
  Non-cyclic GFR-binding peptide
KNHQLFNSLQEHQGQHPKIRYYVMPLPEEETPV

SEQ ID NO: 27624 - protein, 37 aa, Artificial Sequence
  Non-cyclic GFR-binding peptide
  MOD_RES (2)..(4)..(37): Xaa is C or S
  MOD_RES (15)..(16)..(17)..(18)..(19): Xaa is A or G
  MOD_RES (20)..(21)..(22)..(23): Xaa is A or G or absent
SXKXSRVIMVQVEKXXXXXXXXXVKAIKVSRLAQPVX

SEQ ID NO: 27625 - protein, 39 aa, Artificial Sequence
  Non-cyclic GFR-binding peptide
  MOD_RES (1)..(35)..(36): Xaa is C or S
  MOD_RES (13)..(14)..(15)..(16)..(17): Xaa is A or G
  MOD_RES (18)..(19)..(20)..(21): Xaa is A or G or absent
XGEVVMEVTAKKXXXXXXXXXIKRMQVPRLETPVXXAKP

SEQ ID NO: 27626 - protein, 37 aa, Artificial Sequence
  Non-cyclic GFR-binding peptide
  MOD_RES (31)..(32): Xaa is C or S
SKVVMSMEGIVKPTRGVMIQITINSLDQPVXXPSASA

SEQ ID NO: 27627 - protein, 34 aa, Artificial Sequence
  Non-cyclic GFR-binding peptide
  MOD_RES (1)..(1): Xaa is C or S
XKNHQLFNSLQEHQGQHPKIRYYVMPLPEEETPV

SEQ ID NO: 27628 - protein, 35 aa, Artificial Sequence
  Non-cyclic GFR-binding peptide
LHDELTNSLQEFIPKKRVIEYYLVTLPELQVQTPR

SEQ ID NO: 27629 - protein, 34 aa, Artificial Sequence
  Non-cyclic GFR-binding peptide
  MOD_RES (34)..(34): Xaa is C or S
  MOD_RES (12)..(13)..(14)..(15)..(16): Xaa is A or G
  MOD_RES (17)..(18)..(19)..(20): Xaa is A or G or absent
GEVVMEVTAKKXXXXXXXXXIKRMQVPRLETPVX

SEQ ID NO: 27630 - protein, 38 aa, Artificial Sequence
  Non-cyclic GFR-binding peptide
  MOD_RES (34)..(35): Xaa is C or S
  MOD_RES (12)..(13)..(14)..(15)..(16): Xaa is A or G
  MOD_RES (17)..(18)..(19)..(20): Xaa is A or G or absent
GEVVMDVQVEKXXXXXXXXXVKAMKVSRLETPVXXAKP

SEQ ID NO: 27631 - protein, 40 aa, Artificial Sequence
  Non-cyclic GFR-binding peptide
  MOD_RES (1)..(3)..(37): Xaa is C or S
XEXKNHQLFNSLQEHQGQHPKIRYYVMPLPEEETPVXELG

SEQ ID NO: 27632 - protein, 38 aa, Artificial Sequence
  Non-cyclic GFR-binding peptide
  MOD_RES (2)..(4)..(37)..(38): Xaa is C or S
  MOD_RES (15)..(16)..(17)..(18)..(19): Xaa is A or G
  MOD_RES (20)..(21)..(22)..(23): Xaa is A or G or absent
SXKXSKVVMVQVEKXXXXXXXXXVKAIKVSRLDQPVXX

SEQ ID NO: 27633 - protein, 36 aa, Artificial Sequence
  Non-cyclic GFR-binding peptide
  MOD_RES (34)..(35): Xaa is C or S
  MOD_RES (12)..(13)..(14)..(15)..(16): Xaa is A or G
  MOD_RES (17)..(18)..(19)..(20): Xaa is A or G or absent
GEVVMDSMEGIXXXXXXXXXMIQMTINSLETPVXXA

SEQ ID NO: 27634 - protein, 32 aa, Artificial Sequence
  Non-cyclic GFR-binding peptide
  MOD_RES (2)..(2): Xaa is C or S
KXSRVIMVQVEKVKPKRGVVKAIKVSRLAQPV

SEQ ID NO: 27635 - protein, 41 aa, Artificial Sequence
  Non-cyclic GFR-binding peptide
  MOD_RES (2)..(35)..(36): Xaa is C or S
  MOD_RES (13)..(14)..(15)..(16)..(17): Xaa is A or G
  MOD_RES (18)..(19)..(20)..(21): Xaa is A or G or absent
KXSKVVMSMEGIXXXXXXXXXMIQITINSLDQPVXXPSASA

SEQ ID NO: 27636 - protein, 36 aa, Artificial Sequence
  Non-cyclic GFR-binding peptide
  MOD_RES (2)..(35)..(36): Xaa is C or S
  MOD_RES (13)..(14)..(15)..(16)..(17): Xaa is A or G
  MOD_RES (18)..(19)..(20)..(21): Xaa is A or G or absent
KXSKVIMSMEGIXXXXXXXXXMIQITINSLDQSVXX

SEQ ID NO: 27637 - protein, 41 aa, Artificial Sequence
  Non-cyclic GFR-binding peptide
  MOD_RES (2)..(4)..(38): Xaa is C or S
  MOD_RES (16)..(17)..(18)..(19)..(20): Xaa is A or G
  MOD_RES (21)..(22)..(23)..(24): Xaa is A or G or absent
HXGXSRVVMNVTAKKXXXXXXXXXIKRVQVPRLKTPAXTPK

SEQ ID NO: 27638 - protein, 37 aa, Artificial Sequence
  Non-cyclic GFR-binding peptide
  MOD_RES (36)..(36): Xaa is C or S
LHEELRNSLQELKPKKRVYEYYVVPLPEHHVRSPQXK

SEQ ID NO: 27639 - protein, 37 aa, Artificial Sequence
  Non-cyclic GFR-binding peptide
  MOD_RES (31)..(32): Xaa is C or S
SRVIMVTAKKVKPKRGVIKRIQVPRLAQPVXXPAASA

SEQ ID NO: 27640 - protein, 40 aa, Artificial Sequence
  Non-cyclic GFR-binding peptide
  MOD_RES (2)..(34)..(35): Xaa is C or S
GXARVVMNSMEGIIVNSSDDMIQVTINSLQTPAXXPKPVT

SEQ ID NO: 27641 - protein, 36 aa, Artificial Sequence
  Non-cyclic GFR-binding peptide
  MOD_RES (31)..(32): Xaa is C or S
SKVVMVTAKKVKPTRGVIKRIQVPRLDQPVXXPSAS

SEQ ID NO: 27642 - protein, 34 aa, Artificial Sequence
  Non-cyclic GFR-binding peptide
  MOD_RES (1)..(32)..(33): Xaa is C or S
XSRVIMVTAKKVKPKRGVIKRIQVPRLAQPVXXP

SEQ ID NO: 27643 - protein, 34 aa, Artificial Sequence
  Non-cyclic GFR-binding peptide
  MOD_RES (1)..(3)..(34): Xaa is C or S
XKXSKVVMVQVEKVKPTRGVVKAIKVSRLDQPVX

SEQ ID NO: 27644 - protein, 37 aa, Artificial Sequence
  Non-cyclic GFR-binding peptide
  MOD_RES (2)..(34)..(35): Xaa is C or S
GXGEVVMESMEGIVVKDYEDMIQMTINSLETPVXXAK

SEQ ID NO: 27645 - protein, 33 aa, Artificial Sequence
  Non-cyclic GFR-binding peptide
  MOD_RES (33)..(33): Xaa is C or S
  MOD_RES (11)..(12)..(13)..(14)..(15): Xaa is A or G
  MOD_RES (16)..(17)..(18)..(19): Xaa is A or G or absent
EVVMDVQVEKXXXXXXXXXVKAMKVSRLETPVX

SEQ ID NO: 27646 - protein, 39 aa, Artificial Sequence
  Non-cyclic GFR-binding peptide
  MOD_RES (1)..(33): Xaa is C or S
XSRVVMNSMEGIIVNSSDDMIQVTINSLKTPAXTPKTVH

SEQ ID NO: 27647 - protein, 37 aa, Artificial Sequence
  Non-cyclic GFR-binding peptide
  MOD_RES (2)..(2): Xaa is C or S
  MOD_RES (15)..(16)..(17)..(18)..(19): Xaa is A or G
  MOD_RES (20)..(21)..(22)..(23): Xaa is A or G or absent
KXALHDELTNSLQEXXXXXXXXXYYVVPLPELQVQTP

SEQ ID NO: 27648 - protein, 31 aa, Artificial Sequence
  Non-cyclic GFR-binding peptide
SRVVMNVQVEKIVNSSDDVKAVKVSRLKTPA

SEQ ID NO: 27649 - protein, 40 aa, Artificial Sequence
  Non-cyclic GFR-binding peptide
  MOD_RES (2)..(4): Xaa is C or S
  MOD_RES (17)..(18)..(19)..(20)..(21): Xaa is A or G
  MOD_RES (22)..(23)..(24)..(25): Xaa is A or G or absent
EXKXALHDELTNSLQEXXXXXXXXXYYLVTLPELQVQTPR

SEQ ID NO: 27650 - protein, 38 aa, Artificial Sequence
  Non-cyclic GFR-binding peptide
  MOD_RES (34)..(34): Xaa is C or S
  MOD_RES (12)..(13)..(14)..(15)..(16): Xaa is A or G
  MOD_RES (17)..(18)..(19)..(20): Xaa is A or G or absent
KNHQLFNSLQEXXXXXXXXXYYLMTLPEEETPVXELGE

SEQ ID NO: 27651 - protein, 38 aa, Artificial Sequence
  Non-cyclic GFR-binding peptide
  MOD_RES (2)..(33)..(34): Xaa is C or S
KXSKVVMVTAKKVKPTRGVIKRIQVPRLDQPVXXPSAS

SEQ ID NO: 27652 - protein, 39 aa, Artificial Sequence
  Non-cyclic GFR-binding peptide
  MOD_RES (2)..(39): Xaa is C or S
KXALHDELTNSLQEFIPKKRVIEYYVVPLPELQVQTPRX

SEQ ID NO: 27653 - protein, 44 aa, Artificial Sequence
  Non-cyclic GFR-binding peptide
  MOD_RES (2)..(4)..(38)..(39): Xaa is C or S
  MOD_RES (16)..(17)..(18)..(19)..(20): Xaa is A or G
  MOD_RES (21)..(22)..(23)..(24): Xaa is A or G or absent
HXGXSRVVMNVQVEKXXXXXXXXXVKAVKVSRLKTPAXXPKPVY

SEQ ID NO: 27654 - protein, 38 aa, Artificial Sequence
  Non-cyclic GFR-binding peptide
  MOD_RES (2)..(33)..(34): Xaa is C or S
KXSKVIMVTAKKIKPTKGIIKRIQVPRLDQSVXXPSAS

SEQ ID NO: 27655 - protein, 34 aa, Artificial Sequence
  Non-cyclic GFR-binding peptide
  MOD_RES (2)..(2): Xaa is C or S
  MOD_RES (13)..(14)..(15)..(16)..(17): Xaa is A or G
  MOD_RES (18)..(19)..(20)..(21): Xaa is A or G or absent
KXSKVVMSMEGIXXXXXXXXXMIQITINSLDQPV

SEQ ID NO: 27656 - protein, 38 aa, Artificial Sequence
  Non-cyclic GFR-binding peptide
  MOD_RES (2)..(4): Xaa is C or S
  MOD_RES (17)..(18)..(19)..(20)..(21): Xaa is A or G
  MOD_RES (22)..(23)..(24)..(25): Xaa is A or G or absent
AXAXELHEELRNSLQEXXXXXXXXXYYLVTLPEHHVRS

SEQ ID NO: 27657 - protein, 39 aa, Artificial Sequence
  Non-cyclic GFR-binding peptide
  MOD_RES (1)..(3)..(34)..(35): Xaa is C or S
XKXSRVIMSMEGIVKPKRGVMIQITINSLAQPVXXPAAS

SEQ ID NO: 27658 - protein, 39 aa, Artificial Sequence
  Non-cyclic GFR-binding peptide
  MOD_RES (34)..(35): Xaa is C or S
  MOD_RES (12)..(13)..(14)..(15)..(16): Xaa is A or G
  MOD_RES (17)..(18)..(19)..(20): Xaa is A or G or absent
ARVVMNSMEGIXXXXXXXXXMIQVTINSLQTPAXXPKPV

SEQ ID NO: 27659 - protein, 39 aa, Artificial Sequence
  Non-cyclic GFR-binding peptide
  MOD_RES (37)..(37): Xaa is C or S
  MOD_RES (13)..(14)..(15)..(16)..(17): Xaa is A or G
  MOD_RES (18)..(19)..(20)..(21): Xaa is A or G or absent
ELHEELRNSLQEXXXXXXXXXYYLVTLPEHHVRSPQXKV

SEQ ID NO: 27660 - protein, 34 aa, Artificial Sequence
  Non-cyclic GFR-binding peptide
ELHEELRNSLQELKPKKRVYEYYVVPLPEHHVRS

SEQ ID NO: 27661 - protein, 42 aa, Artificial Sequence
  Non-cyclic GFR-binding peptide
  MOD_RES (2)..(4)..(36)..(37): Xaa is C or S
HXGXSRVVMNVTAKKIVNSSDDIKRVQVPRLKTPAXXPKPVY

SEQ ID NO: 27662 - protein, 38 aa, Artificial Sequence
  Non-cyclic GFR-binding peptide
  MOD_RES (1)..(33)..(34): Xaa is C or S
XSRVVMNSMEGIIVNSSDDMIQVTINSLKTPAXXPKPV

SEQ ID NO: 27663 - protein, 39 aa, Artificial Sequence
  Non-cyclic GFR-binding peptide
  MOD_RES (2)..(34)..(35): Xaa is C or S
GXGEVVMEVQVEKVVKDYEDVKAMKVSRLETPVXXAKPI

SEQ ID NO: 27664 - protein, 36 aa, Artificial Sequence
  Non-cyclic GFR-binding peptide
  MOD_RES (31)..(32): Xaa is C or S
SRVIMVTAKKVKPKRGVIKRIQVPRLAQPVXXPAAS

SEQ ID NO: 27665 - protein, 38 aa, Artificial Sequence
  Non-cyclic GFR-binding peptide
  MOD_RES (2)..(34)..(35): Xaa is C or S
GXGEVVMESMEGIVVKDYEDMIQMTINSLETPVXXAKP

SEQ ID NO: 27666 - protein, 37 aa, Artificial Sequence
  Non-cyclic GFR-binding peptide
  MOD_RES (1)..(32)..(33): Xaa is C or S
XSRVIMVTAKKVKPKRGVIKRIQVPRLAQPVXXPAAS

SEQ ID NO: 27667 - protein, 36 aa, Artificial Sequence
  Non-cyclic GFR-binding peptide
  MOD_RES (2)..(34)..(35): Xaa is C or S
GXGEVVMDSMEGIVVKENEDMIQMTINSLETPVXXA

SEQ ID NO: 27668 - protein, 35 aa, Artificial Sequence
  Non-cyclic GFR-binding peptide
  MOD_RES (33)..(33): Xaa is C or S
NHQLFNSLQEHQGQHPKIRYYLMTLPEEETPVXEL

SEQ ID NO: 27669 - protein, 39 aa, Artificial Sequence
  Non-cyclic GFR-binding peptide
  MOD_RES (1)..(33)..(34): Xaa is C or S
XGEVVMDVTAKKVVKENEDIKRMQVPRLETPVXXAKPIK

SEQ ID NO: 27670 - protein, 39 aa, Artificial Sequence
  Non-cyclic GFR-binding peptide
  MOD_RES (2)..(4)..(38): Xaa is C or S
  MOD_RES (16)..(17)..(18)..(19)..(20): Xaa is A or G
  MOD_RES (21)..(22)..(23)..(24): Xaa is A or G or absent
HXGXSRVVMNSMEGIXXXXXXXXXMIQVTINSLKTPAXT

SEQ ID NO: 27671 - protein, 35 aa, Artificial Sequence
  Non-cyclic GFR-binding peptide
  MOD_RES (2)..(4): Xaa is C or S
RXGXGEVVMEVQVEKVVKDYEDVKAMKVSRLETPV

SEQ ID NO: 27672 - protein, 35 aa, Artificial Sequence
  Non-cyclic GFR-binding peptide
  MOD_RES (35)..(35): Xaa is C or S
  MOD_RES (11)..(12)..(13)..(14)..(15): Xaa is A or G
  MOD_RES (16)..(17)..(18)..(19): Xaa is A or G or absent
HDELTNSLQEXXXXXXXXXYYVVPLPELQVQTPRX

SEQ ID NO: 27673 - protein, 38 aa, Artificial Sequence
  Non-cyclic GFR-binding peptide
  MOD_RES (32)..(33): Xaa is C or S
SRVVMNSMEGIIVNSSDDMIQVTINSLKTPAXXPKPVY

SEQ ID NO: 27674 - protein, 38 aa, Artificial Sequence
  Non-cyclic GFR-binding peptide
  MOD_RES (1)..(3)..(35): Xaa is C or S
XGXSRVVMNVTAKKIVNSSDDIKRVQVPRLKTPAXTPK

SEQ ID NO: 27675 - protein, 33 aa, Artificial Sequence
  Non-cyclic GFR-binding peptide
  MOD_RES (2)..(2): Xaa is C or S
GXGEVVMEVQVEKVVKDYEDVKAMKVSRLETPV

SEQ ID NO: 27676 - protein, 41 aa, Artificial Sequence
  Non-cyclic GFR-binding peptide
  MOD_RES (37)..(37): Xaa is C or S
  MOD_RES (13)..(14)..(15)..(16)..(17): Xaa is A or G
  MOD_RES (18)..(19)..(20)..(21): Xaa is A or G or absent
ELHEELRNSLQEXXXXXXXXXYYVVPLPEHHVRSPQXKVSS

SEQ ID NO: 27677 - protein, 38 aa, Artificial Sequence
  Non-cyclic GFR-binding peptide
  MOD_RES (1)..(35): Xaa is C or S
  MOD_RES (13)..(14)..(15)..(16)..(17): Xaa is A or G
  MOD_RES (18)..(19)..(20)..(21): Xaa is A or G or absent
XSRVVMNVTAKKXXXXXXXXXIKRVQVPRLKTPAXTPK

SEQ ID NO: 27678 - protein, 37 aa, Artificial Sequence
  Non-cyclic GFR-binding peptide
  MOD_RES (2)..(4)..(36)..(37): Xaa is C or S
HXGXSRVVMNSMEGIIVNSSDDMIQVTINSLKTPAXX

SEQ ID NO: 27679 - protein, 35 aa, Artificial Sequence
  Non-cyclic GFR-binding peptide
  MOD_RES (1)..(3)..(35): Xaa is C or S
XGXSRVVMNVTAKKIVNSSDDIKRVQVPRLKTPAX

SEQ ID NO: 27680 - protein, 44 aa, Artificial Sequence
  Non-cyclic GFR-binding peptide
  MOD_RES (2)..(4)..(38)..(39): Xaa is C or S
  MOD_RES (16)..(17)..(18)..(19)..(20): Xaa is A or G
  MOD_RES (21)..(22)..(23)..(24): Xaa is A or G or absent
HXGXSRVVMNSMEGIXXXXXXXXXMIQVTINSLKTPAXXPKPVY

SEQ ID NO: 27681 - protein, 42 aa, Artificial Sequence
  Non-cyclic GFR-binding peptide
  MOD_RES (2)..(4)..(38)..(39): Xaa is C or S
  MOD_RES (16)..(17)..(18)..(19)..(20): Xaa is A or G
  MOD_RES (21)..(22)..(23)..(24): Xaa is A or G or absent
RXGXGEVVMEVQVEKXXXXXXXXXVKAMKVSRLETPVXXAKP

SEQ ID NO: 27682 - protein, 37 aa, Artificial Sequence
  Non-cyclic GFR-binding peptide
  MOD_RES (2)..(33)..(34): Xaa is C or S
KXSKVIMVQVEKIKPTKGIVKAIKVSRLDQSVXXPSA

SEQ ID NO: 27683 - protein, 36 aa, Artificial Sequence
  Non-cyclic GFR-binding peptide
  MOD_RES (2)..(35)..(36): Xaa is C or S
  MOD_RES (13)..(14)..(15)..(16)..(17): Xaa is A or G
  MOD_RES (18)..(19)..(20)..(21): Xaa is A or G or absent
KXSKVVMSMEGIXXXXXXXXXMIQITINSLDQPVXX

SEQ ID NO: 27684 - protein, 36 aa, Artificial Sequence
  Non-cyclic GFR-binding peptide
  MOD_RES (2)..(4): Xaa is C or S
  MOD_RES (15)..(16)..(17)..(18)..(19): Xaa is A or G
  MOD_RES (20)..(21)..(22)..(23): Xaa is A or G or absent
SXKXSKVVMVQVEKXXXXXXXXXVKAIKVSRLDQPV

SEQ ID NO: 27685 - protein, 38 aa, Artificial Sequence
  Non-cyclic GFR-binding peptide
  MOD_RES (32)..(32): Xaa is C or S
SRVVMNSMEGIIVNSSDDMIQVTINSLKTPAXTPKTVH

SEQ ID NO: 27686 - protein, 42 aa, Artificial Sequence
  Non-cyclic GFR-binding peptide
  MOD_RES (2)..(4)..(41): Xaa is C or S
EXKXALHDELTNSLQEFIPKKRVIEYYLVTLPELQVQTPRXQ

SEQ ID NO: 27687 - protein, 39 aa, Artificial Sequence
  Non-cyclic GFR-binding peptide
  MOD_RES (1)..(34)..(35): Xaa is C or S
  MOD_RES (12)..(13)..(14)..(15)..(16): Xaa is A or G
  MOD_RES (17)..(18)..(19)..(20): Xaa is A or G or absent
XSKVVMSMEGIXXXXXXXXXMIQITINSLDQPVXXPSAS

SEQ ID NO: 27688 - protein, 35 aa, Artificial Sequence
  Non-cyclic GFR-binding peptide
  MOD_RES (2)..(33)..(34): Xaa is C or S
KXSRVIMSMEGIVKPKRGVMIQITINSLAQPVXXP

SEQ ID NO: 27689 - protein, 40 aa, Artificial Sequence
  Non-cyclic GFR-binding peptide
  MOD_RES (2)..(35)..(36): Xaa is C or S
  MOD_RES (13)..(14)..(15)..(16)..(17): Xaa is A or G
  MOD_RES (18)..(19)..(20)..(21): Xaa is A or G or absent
KXSKVIMVQVEKXXXXXXXXXVKAIKVSRLDQSVXXPSAS

SEQ ID NO: 27690 - protein, 42 aa, Artificial Sequence
  Non-cyclic GFR-binding peptide
  MOD_RES (1)..(3)..(37): Xaa is C or S
XEXKNHQLFNSLQEHQGQHPKIRYYVMPLPEEETPVXELGED

SEQ ID NO: 27691 - protein, 45 aa, Artificial Sequence
  Non-cyclic GFR-binding peptide
  MOD_RES (2)..(4)..(41): Xaa is C or S
EXKXALHDELTNSLQEFIPKKRVIEYYLVTLPELQVQTPRXQVNR

SEQ ID NO: 27692 - protein, 31 aa, Artificial Sequence
  Non-cyclic GFR-binding peptide
  MOD_RES (31)..(31): Xaa is C or S
RVVMNVTAKKIVNSSDDIKRVQVPRLQTPAX

SEQ ID NO: 27693 - protein, 32 aa, Artificial Sequence
  Non-cyclic GFR-binding peptide
  MOD_RES (31)..(32): Xaa is C or S
SRVIMSMEGIVKPKRGVMIQITINSLAQPVXX

SEQ ID NO: 27694 - protein, 40 aa, Artificial Sequence
  Non-cyclic GFR-binding peptide
  MOD_RES (1)..(38): Xaa is C or S
  MOD_RES (14)..(15)..(16)..(17)..(18): Xaa is A or G
  MOD_RES (19)..(20)..(21)..(22): Xaa is A or G or absent
XELHEELRNSLQEXXXXXXXXXYYLVTLPEHHVRSPQXKV

SEQ ID NO: 27695 - protein, 35 aa, Artificial Sequence
  Non-cyclic GFR-binding peptide
  MOD_RES (2)..(4): Xaa is C or S
HXGXARVVMNVTAKKIVNSSDDIKRVQVPRLQTPA

SEQ ID NO: 27696 - protein, 38 aa, Artificial Sequence
  Non-cyclic GFR-binding peptide
  MOD_RES (34)..(35): Xaa is C or S
  MOD_RES (12)..(13)..(14)..(15)..(16): Xaa is A or G
  MOD_RES (17)..(18)..(19)..(20): Xaa is A or G or absent
ARVVMNVTAKKXXXXXXXXXIKRVQVPRLQTPAXXPKP

SEQ ID NO: 27697 - protein, 35 aa, Artificial Sequence
  Non-cyclic GFR-binding peptide
  MOD_RES (31)..(32): Xaa is C or S
SKVVMVQVEKVKPTRGVVKAIKVSRLDQPVXXPSA

SEQ ID NO: 27698 - protein, 35 aa, Artificial Sequence
  Non-cyclic GFR-binding peptide
ELHEELRNSLQELKPKKRVYEYYVVPLPEHHVRSP

SEQ ID NO: 27699 - protein, 33 aa, Artificial Sequence
  Non-cyclic GFR-binding peptide
  MOD_RES (12)..(13)..(14)..(15)..(16): Xaa is A or G
  MOD_RES (17)..(18)..(19)..(20): Xaa is A or G or absent
GEVVMDVQVEKXXXXXXXXXVKAMKVSRLETPV

SEQ ID NO: 27700 - protein, 38 aa, Artificial Sequence
  Non-cyclic GFR-binding peptide
  MOD_RES (34)..(35): Xaa is C or S
  MOD_RES (12)..(13)..(14)..(15)..(16): Xaa is A or G
  MOD_RES (17)..(18)..(19)..(20): Xaa is A or G or absent
GEVVMDSMEGIXXXXXXXXXMIQMTINSLETPVXXAKP

SEQ ID NO: 27701 - protein, 38 aa, Artificial Sequence
  Non-cyclic GFR-binding peptide
  MOD_RES (33)..(34): Xaa is C or S
  MOD_RES (11)..(12)..(13)..(14)..(15): Xaa is A or G
  MOD_RES (16)..(17)..(18)..(19): Xaa is A or G or absent
SKVVMVQVEKXXXXXXXXXVKAIKVSRLDQPVXXPSAS

SEQ ID NO: 27702 - protein, 44 aa, Artificial Sequence
  Non-cyclic GFR-binding peptide
  MOD_RES (2)..(4)..(38)..(39): Xaa is C or S
  MOD_RES (16)..(17)..(18)..(19)..(20): Xaa is A or G
  MOD_RES (21)..(22)..(23)..(24): Xaa is A or G or absent
HXGXARVVMNVQVEKXXXXXXXXXVKAVKVSRLQTPAXXPKPVT

SEQ ID NO: 27703 - protein, 41 aa, Artificial Sequence
  Non-cyclic GFR-binding peptide
  MOD_RES (2)..(4)..(35)..(36): Xaa is C or S
SXKXSKVVMVTAKKVKPTRGVIKRIQVPRLDQPVXXPSASA

SEQ ID NO: 27704 - protein, 38 aa, Artificial Sequence
  Non-cyclic GFR-binding peptide
  MOD_RES (32)..(33): Xaa is C or S
GEVVMESMEGIVVKDYEDMIQMTINSLETPVXXAKPIS

SEQ ID NO: 27705 - protein, 40 aa, Artificial Sequence
  Non-cyclic GFR-binding peptide
  MOD_RES (1)..(35)..(36): Xaa is C or S
  MOD_RES (13)..(14)..(15)..(16)..(17): Xaa is A or G
  MOD_RES (18)..(19)..(20)..(21): Xaa is A or G or absent
XARVVMNVTAKKXXXXXXXXXIKRVQVPRLQTPAXXPKPV

SEQ ID NO: 27706 - protein, 35 aa, Artificial Sequence
  Non-cyclic GFR-binding peptide
  MOD_RES (1)..(33)..(34): Xaa is C or S
XGEVVMEVQVEKVVKDYEDVKAMKVSRLETPVXXA

SEQ ID NO: 27707 - protein, 41 aa, Artificial Sequence
  Non-cyclic GFR-binding peptide
  MOD_RES (1)..(3)..(35): Xaa is C or S
XGXSRVVMNVQVEKIVNSSDDVKAVKVSRLKTPAXTPKTVH

SEQ ID NO: 27708 - protein, 31 aa, Artificial Sequence
  Non-cyclic GFR-binding peptide
  MOD_RES (31)..(31): Xaa is C or S
SKVIMSMEGIIKPTKGIMIQITINSLDQSVX

SEQ ID NO: 27709 - protein, 34 aa, Artificial Sequence
  Non-cyclic GFR-binding peptide
  MOD_RES (34)..(34): Xaa is C or S
  MOD_RES (12)..(13)..(14)..(15)..(16): Xaa is A or G
  MOD_RES (17)..(18)..(19)..(20): Xaa is A or G or absent
ARVVMNVQVEKXXXXXXXXXVKAVKVSRLQTPAX

SEQ ID NO: 27710 - protein, 39 aa, Artificial Sequence
  Non-cyclic GFR-binding peptide
  MOD_RES (2)..(33)..(34): Xaa is C or S
KXSRVIMVQVEKVKPKRGVVKAIKVSRLAQPVXXPAASA

SEQ ID NO: 27711 - protein, 36 aa, Artificial Sequence
  Non-cyclic GFR-binding peptide
  MOD_RES (2)..(4)..(35)..(36): Xaa is C or S
SXKXSKVIMVQVEKIKPTKGIVKAIKVSRLDQSVXX

SEQ ID NO: 27712 - protein, 40 aa, Artificial Sequence
  Non-cyclic GFR-binding peptide
  MOD_RES (1)..(3)..(35)..(36): Xaa is C or S
XGXSRVVMNVQVEKIVNSSDDVKAVKVSRLKTPAXXPKPV

SEQ ID NO: 27713 - protein, 34 aa, Artificial Sequence
  Non-cyclic GFR-binding peptide
  MOD_RES (2)..(34): Xaa is C or S
GXSRVVMNVQVEKIVNSSDDVKAVKVSRLKTPAX

SEQ ID NO: 27714 - protein, 37 aa, Artificial Sequence
  Non-cyclic GFR-binding peptide
  MOD_RES (2)..(4)..(35)..(36): Xaa is C or S
SXKXSRVIMVQVEKVKPKRGVVKAIKVSRLAQPVXXP

SEQ ID NO: 27715 - protein, 40 aa, Artificial Sequence
  Non-cyclic GFR-binding peptide
  MOD_RES (1)..(3)..(36)..(37): Xaa is C or S
  MOD_RES (14)..(15)..(16)..(17)..(18): Xaa is A or G
  MOD_RES (19)..(20)..(21)..(22): Xaa is A or G or absent
XKXSKVVMVQVEKXXXXXXXXXVKAIKVSRLDQPVXXPSA

SEQ ID NO: 27716 - protein, 36 aa, Artificial Sequence
  Non-cyclic GFR-binding peptide
  MOD_RES (31)..(32): Xaa is C or S
SKVIMSMEGIIKPTKGIMIQITINSLDQSVXXPSAS

SEQ ID NO: 27717 - protein, 37 aa, Artificial Sequence
  Non-cyclic GFR-binding peptide
  MOD_RES (31)..(32): Xaa is C or S
EVVMEVQVEKVVKDYEDVKAMKVSRLETPVXXAKPIS

SEQ ID NO: 27718 - protein, 33 aa, Artificial Sequence
  Non-cyclic GFR-binding peptide
  MOD_RES (12)..(13)..(14)..(15)..(16): Xaa is A or G
  MOD_RES (17)..(18)..(19)..(20): Xaa is A or G or absent
ARVVMNVTAKKXXXXXXXXXIKRVQVPRLQTPA

SEQ ID NO: 27719 - protein, 35 aa, Artificial Sequence
  Non-cyclic GFR-binding peptide
  MOD_RES (33)..(34): Xaa is C or S
  MOD_RES (11)..(12)..(13)..(14)..(15): Xaa is A or G
  MOD_RES (16)..(17)..(18)..(19): Xaa is A or G or absent
SKVIMVQVEKXXXXXXXXXVKAIKVSRLDQSVXXP

SEQ ID NO: 27720 - protein, 35 aa, Artificial Sequence
  Non-cyclic GFR-binding peptide
  MOD_RES (1)..(3)..(35): Xaa is C or S
XGXGEVVMEVQVEKVVKDYEDVKAMKVSRLETPVX

SEQ ID NO: 27721 - protein, 34 aa, Artificial Sequence
  Non-cyclic GFR-binding peptide
  MOD_RES (32)..(33): Xaa is C or S
GEVVMDSMEGIVVKENEDMIQMTINSLETPVXXA

SEQ ID NO: 27722 - protein, 38 aa, Artificial Sequence
  Non-cyclic GFR-binding peptide
  MOD_RES (1)..(33)..(34): Xaa is C or S
XGEVVMDSMEGIVVKENEDMIQMTINSLETPVXXAKPI

SEQ ID NO: 27723 - protein, 37 aa, Artificial Sequence
  Non-cyclic GFR-binding peptide
  MOD_RES (1)..(3): Xaa is C or S
XKXALHDELTNSLQEFIPKKRVIEYYVVPLPELQVQT

SEQ ID NO: 27724 - protein, 36 aa, Artificial Sequence
  Non-cyclic GFR-binding peptide
  MOD_RES (2)..(36): Xaa is C or S
EXKNHQLFNSLQEHQGQHPKIRYYLMTLPEEETPVX

SEQ ID NO: 27725 - protein, 32 aa, Artificial Sequence
  Non-cyclic GFR-binding peptide
  MOD_RES (32)..(32): Xaa is C or S
GEVVMEVQVEKVVKDYEDVKAMKVSRLETPVX

SEQ ID NO: 27726 - protein, 39 aa, Artificial Sequence
  Non-cyclic GFR-binding peptide
  MOD_RES (1)..(35)..(36): Xaa is C or S
  MOD_RES (13)..(14)..(15)..(16)..(17): Xaa is A or G
  MOD_RES (18)..(19)..(20)..(21): Xaa is A or G or absent
XGEVVMDVQVEKXXXXXXXXXVKAMKVSRLETPVXXAKP

SEQ ID NO: 27727 - protein, 36 aa, Artificial Sequence
  Non-cyclic GFR-binding peptide
  MOD_RES (1)..(3)..(34)..(35): Xaa is C or S
XKXSKVVMVQVEKVKPTRGVVKAIKVSRLDQPVXXP

SEQ ID NO: 27728 - protein, 34 aa, Artificial Sequence
  Non-cyclic GFR-binding peptide
  MOD_RES (1)..(3): Xaa is C or S
XGXGEVVMEVTAKKVVKDYEDIKRMQVPRLETPV

SEQ ID NO: 27729 - protein, 38 aa, Artificial Sequence
  Non-cyclic GFR-binding peptide
  MOD_RES (2)..(36)..(37): Xaa is C or S
  MOD_RES (14)..(15)..(16)..(17)..(18): Xaa is A or G
  MOD_RES (19)..(20)..(21)..(22): Xaa is A or G or absent
GXSRVVMNSMEGIXXXXXXXXXMIQVTINSLKTPAXXP

SEQ ID NO: 27730 - protein, 33 aa, Artificial Sequence
  Non-cyclic GFR-binding peptide
  MOD_RES (1)..(33): Xaa is C or S
XSRVVMNVQVEKIVNSSDDVKAVKVSRLKTPAX

SEQ ID NO: 27731 - protein, 35 aa, Artificial Sequence
  Non-cyclic GFR-binding peptide
  MOD_RES (1)..(3): Xaa is C or S
  MOD_RES (14)..(15)..(16)..(17)..(18): Xaa is A or G
  MOD_RES (19)..(20)..(21)..(22): Xaa is A or G or absent
XKXSKVVMVQVEKXXXXXXXXXVKAIKVSRLDQPV

SEQ ID NO: 27732 - protein, 34 aa, Artificial Sequence
  Non-cyclic GFR-binding peptide
  MOD_RES (2)..(34): Xaa is C or S
GXARVVMNVTAKKIVNSSDDIKRVQVPRLQTPAX

SEQ ID NO: 27733 - protein, 35 aa, Artificial Sequence
  Non-cyclic GFR-binding peptide
  MOD_RES (1)..(33)..(34): Xaa is C or S
XGEVVMDVQVEKVVKENEDVKAMKVSRLETPVXXA

SEQ ID NO: 27734 - protein, 35 aa, Artificial Sequence
  Non-cyclic GFR-binding peptide
  MOD_RES (1)..(32)..(33): Xaa is C or S
XSKVVMVTAKKVKPTRGVIKRIQVPRLDQPVXXPS

SEQ ID NO: 27735 - protein, 37 aa, Artificial Sequence
  Non-cyclic GFR-binding peptide
  MOD_RES (2)..(36): Xaa is C or S
  MOD_RES (14)..(15)..(16)..(17)..(18): Xaa is A or G
  MOD_RES (19)..(20)..(21)..(22): Xaa is A or G or absent
GXSRVVMNVQVEKXXXXXXXXXVKAVKVSRLKTPAXT

SEQ ID NO: 27736 - protein, 40 aa, Artificial Sequence
  Non-cyclic GFR-binding peptide
  MOD_RES (2)..(4)..(36)..(37): Xaa is C or S
HXGXSRVVMNVTAKKIVNSSDDIKRVQVPRLKTPAXXPKP

SEQ ID NO: 27737 - protein, 39 aa, Artificial Sequence
  Non-cyclic GFR-binding peptide
  MOD_RES (2)..(4)..(37)..(38): Xaa is C or S
  MOD_RES (15)..(16)..(17)..(18)..(19): Xaa is A or G
  MOD_RES (20)..(21)..(22)..(23): Xaa is A or G or absent
SXKXSKVIMVTAKKXXXXXXXXXIKRIQVPRLDQSVXXP

SEQ ID NO: 27738 - protein, 36 aa, Artificial Sequence
  Non-cyclic GFR-binding peptide
  MOD_RES (1)..(1): Xaa is C or S
XELHEELRNSLQELKPKKRVYEYYLVTLPEHHVRSP

SEQ ID NO: 27739 - protein, 39 aa, Artificial Sequence
  Non-cyclic GFR-binding peptide
  MOD_RES (1)..(34)..(35): Xaa is C or S
  MOD_RES (12)..(13)..(14)..(15)..(16): Xaa is A or G
  MOD_RES (17)..(18)..(19)..(20): Xaa is A or G or absent
XSRVIMSMEGIXXXXXXXXXMIQITINSLAQPVXXPAAS

SEQ ID NO: 27740 - protein, 36 aa, Artificial Sequence
  Non-cyclic GFR-binding peptide
  MOD_RES (31)..(32): Xaa is C or S
EVVMDVQVEKVVKENEDVKAMKVSRLETPVXXAKPI

SEQ ID NO: 27741 - protein, 42 aa, Artificial Sequence
  Non-cyclic GFR-binding peptide
  MOD_RES (2)..(36): Xaa is C or S
EXKNHQLFNSLQEHQGQHPKIRYYVMPLPEEETPVXELGEDN

SEQ ID NO: 27742 - protein, 39 aa, Artificial Sequence
  Non-cyclic GFR-binding peptide
  MOD_RES (1)..(38): Xaa is C or S
XELHEELRNSLQELKPKKRVYEYYLVTLPEHHVRSPQXK

SEQ ID NO: 27743 - protein, 38 aa, Artificial Sequence
  Non-cyclic GFR-binding peptide
  MOD_RES (1)..(3)..(36)..(37): Xaa is C or S
  MOD_RES (14)..(15)..(16)..(17)..(18): Xaa is A or G
  MOD_RES (19)..(20)..(21)..(22): Xaa is A or G or absent
XKXSRVIMVTAKKXXXXXXXXXIKRIQVPRLAQPVXXP

SEQ ID NO: 27744 - protein, 35 aa, Artificial Sequence
  Non-cyclic GFR-binding peptide
  MOD_RES (2)..(35): Xaa is C or S
  MOD_RES (13)..(14)..(15)..(16)..(17): Xaa is A or G
  MOD_RES (18)..(19)..(20)..(21): Xaa is A or G or absent
KXSKVIMSMEGIXXXXXXXXXMIQITINSLDQSVX

SEQ ID NO: 27745 - protein, 39 aa, Artificial Sequence
  Non-cyclic GFR-binding peptide
  MOD_RES (33)..(34): Xaa is C or S
  MOD_RES (11)..(12)..(13)..(14)..(15): Xaa is A or G
  MOD_RES (16)..(17)..(18)..(19): Xaa is A or G or absent
SKVVMVQVEKXXXXXXXXXVKAIKVSRLDQPVXXPSASA

SEQ ID NO: 27746 - protein, 36 aa, Artificial Sequence
  Non-cyclic GFR-binding peptide
  MOD_RES (2)..(33)..(34): Xaa is C or S
KXSRVIMVQVEKVKPKRGVVKAIKVSRLAQPVXXPA

SEQ ID NO: 27747 - protein, 42 aa, Artificial Sequence
  Non-cyclic GFR-binding peptide
  MOD_RES (2)..(4)..(37)..(38): Xaa is C or S
  MOD_RES (15)..(16)..(17)..(18)..(19): Xaa is A or G
  MOD_RES (20)..(21)..(22)..(23): Xaa is A or G or absent
SXKXSKVIMVTAKKXXXXXXXXXIKRIQVPRLDQSVXXPSAS

SEQ ID NO: 27748 - protein, 39 aa, Artificial Sequence
  Non-cyclic GFR-binding peptide
  MOD_RES (33)..(34): Xaa is C or S
  MOD_RES (11)..(12)..(13)..(14)..(15): Xaa is A or G
  MOD_RES (16)..(17)..(18)..(19): Xaa is A or G or absent
EVVMEVTAKKXXXXXXXXXIKRMQVPRLETPVXXAKPIS

SEQ ID NO: 27749 - protein, 34 aa, Artificial Sequence
  Non-cyclic GFR-binding peptide
  MOD_RES (32)..(33): Xaa is C or S
ARVVMNSMEGIIVNSSDDMIQVTINSLQTPAXXP

SEQ ID NO: 27750 - protein, 37 aa, Artificial Sequence
  Non-cyclic GFR-binding peptide
  MOD_RES (1)..(1): Xaa is C or S
  MOD_RES (14)..(15)..(16)..(17)..(18): Xaa is A or G
  MOD_RES (19)..(20)..(21)..(22): Xaa is A or G or absent
XALHDELTNSLQEXXXXXXXXXYYVVPLPELQVQTPR

SEQ ID NO: 27751 - protein, 41 aa, Artificial Sequence
  Non-cyclic GFR-binding peptide
  MOD_RES (2)..(39): Xaa is C or S
  MOD_RES (15)..(16)..(17)..(18)..(19): Xaa is A or G
  MOD_RES (20)..(21)..(22)..(23): Xaa is A or G or absent
KXALHDELTNSLQEXXXXXXXXXYYLVTLPELQVQTPRXQV

SEQ ID NO: 27752 - protein, 41 aa, Artificial Sequence
  Non-cyclic GFR-binding peptide
  MOD_RES (2)..(4)..(37)..(38): Xaa is C or S
  MOD_RES (15)..(16)..(17)..(18)..(19): Xaa is A or G
  MOD_RES (20)..(21)..(22)..(23): Xaa is A or G or absent
SXKXSKVIMVQVEKXXXXXXXXXVKAIKVSRLDQSVXXPSA

SEQ ID NO: 27753 - protein, 37 aa, Artificial Sequence
  Non-cyclic GFR-binding peptide
  MOD_RES (1)..(35)..(36): Xaa is C or S
  MOD_RES (13)..(14)..(15)..(16)..(17): Xaa is A or G
  MOD_RES (18)..(19)..(20)..(21): Xaa is A or G or absent
XGEVVMDSMEGIXXXXXXXXXMIQMTINSLETPVXXA

SEQ ID NO: 27754 - protein, 43 aa, Artificial Sequence
  Non-cyclic GFR-binding peptide
  MOD_RES (2)..(4)..(38): Xaa is C or S
  MOD_RES (16)..(17)..(18)..(19)..(20): Xaa is A or G
  MOD_RES (21)..(22)..(23)..(24): Xaa is A or G or absent
RXEXKNHQLFNSLQEXXXXXXXXXYYVMPLPEEETPVXELGED

SEQ ID NO: 27755 - protein, 36 aa, Artificial Sequence
  Non-cyclic GFR-binding peptide
  MOD_RES (1)..(33)..(34): Xaa is C or S
XSRVVMNSMEGIIVNSSDDMIQVTINSLKTPAXXPK

SEQ ID NO: 27756 - protein, 36 aa, Artificial Sequence
  Non-cyclic GFR-binding peptide
  MOD_RES (1)..(32)..(33): Xaa is C or S
XSKVVMVTAKKVKPTRGVIKRIQVPRLDQPVXXPSA

SEQ ID NO: 27757 - protein, 41 aa, Artificial Sequence
  Non-cyclic GFR-binding peptide
  MOD_RES (2)..(35)..(36): Xaa is C or S
  MOD_RES (13)..(14)..(15)..(16)..(17): Xaa is A or G
  MOD_RES (18)..(19)..(20)..(21): Xaa is A or G or absent
KXSRVIMVQVEKXXXXXXXXXVKAIKVSRLAQPVXXPAASA

SEQ ID NO: 27758 - protein, 38 aa, Artificial Sequence
  Non-cyclic GFR-binding peptide
  MOD_RES (2)..(4)..(36)..(37): Xaa is C or S
RXGXGEVVMDVTAKKVVKENEDIKRMQVPRLETPVXXA

SEQ ID NO: 27759 - protein, 40 aa, Artificial Sequence
  Non-cyclic GFR-binding peptide
  MOD_RES (2)..(4)..(38)..(39): Xaa is C or S
  MOD_RES (16)..(17)..(18)..(19)..(20): Xaa is A or G
  MOD_RES (21)..(22)..(23)..(24): Xaa is A or G or absent
RXGXGEVVMEVQVEKXXXXXXXXXVKAMKVSRLETPVXXA

SEQ ID NO: 27760 - protein, 36 aa, Artificial Sequence
  Non-cyclic GFR-binding peptide
  MOD_RES (1)..(35)..(36): Xaa is C or S
  MOD_RES (13)..(14)..(15)..(16)..(17): Xaa is A or G
  MOD_RES (18)..(19)..(20)..(21): Xaa is A or G or absent
XSRVVMNSMEGIXXXXXXXXXMIQVTINSLKTPAXX

SEQ ID NO: 27761 - protein, 44 aa, Artificial Sequence
  Non-cyclic GFR-binding peptide
  MOD_RES (2)..(4)..(38)..(39): Xaa is C or S
  MOD_RES (16)..(17)..(18)..(19)..(20): Xaa is A or G
  MOD_RES (21)..(22)..(23)..(24): Xaa is A or G or absent
RXGXGEVVMESMEGIXXXXXXXXXMIQMTINSLETPVXXAKPIS

SEQ ID NO: 27762 - protein, 39 aa, Artificial Sequence
  Non-cyclic GFR-binding peptide
  MOD_RES (2)..(33)..(34): Xaa is C or S
KXSKVVMVTAKKVKPTRGVIKRIQVPRLDQPVXXPSASA

SEQ ID NO: 27763 - protein, 39 aa, Artificial Sequence
  Non-cyclic GFR-binding peptide
  MOD_RES (33)..(34): Xaa is C or S
  MOD_RES (11)..(12)..(13)..(14)..(15): Xaa is A or G
  MOD_RES (16)..(17)..(18)..(19): Xaa is A or G or absent
EVVMEVQVEKXXXXXXXXXVKAMKVSRLETPVXXAKPIS

SEQ ID NO: 27764 - protein, 39 aa, Artificial Sequence
  Non-cyclic GFR-binding peptide
  MOD_RES (1)..(3)..(37)..(38): Xaa is C or S
  MOD_RES (15)..(16)..(17)..(18)..(19): Xaa is A or G
  MOD_RES (20)..(21)..(22)..(23): Xaa is A or G or absent
XGXGEVVMDSMEGIXXXXXXXXXMIQMTINSLETPVXXA

SEQ ID NO: 27765 - protein, 36 aa, Artificial Sequence
  Non-cyclic GFR-binding peptide
  MOD_RES (35)..(35): Xaa is C or S
  MOD_RES (11)..(12)..(13)..(14)..(15): Xaa is A or G
  MOD_RES (16)..(17)..(18)..(19): Xaa is A or G or absent
HEELRNSLQEXXXXXXXXXYYVVPLPEHHVRSPQXK

SEQ ID NO: 27766 - protein, 36 aa, Artificial Sequence
  Non-cyclic GFR-binding peptide
  MOD_RES (2)..(4)..(36): Xaa is C or S
HXGXARVVMNVTAKKIVNSSDDIKRVQVPRLQTPAX

SEQ ID NO: 27767 - protein, 38 aa, Artificial Sequence
  Non-cyclic GFR-binding peptide
  MOD_RES (1)..(3)..(37)..(38): Xaa is C or S
  MOD_RES (15)..(16)..(17)..(18)..(19): Xaa is A or G
  MOD_RES (20)..(21)..(22)..(23): Xaa is A or G or absent
XGXGEVVMEVQVEKXXXXXXXXXVKAMKVSRLETPVXX

SEQ ID NO: 27768 - protein, 30 aa, Artificial Sequence
  Non-cyclic GFR-binding peptide
RVVMNSMEGIIVNSSDDMIQVTINSLQTPA

SEQ ID NO: 27769 - protein, 38 aa, Artificial Sequence
  Non-cyclic GFR-binding peptide
  MOD_RES (2)..(4)..(37)..(38): Xaa is C or S
  MOD_RES (15)..(16)..(17)..(18)..(19): Xaa is A or G
  MOD_RES (20)..(21)..(22)..(23): Xaa is A or G or absent
SXKXSKVIMSMEGIXXXXXXXXXMIQITINSLDQSVXX

SEQ ID NO: 27770 - protein, 42 aa, Artificial Sequence
  Non-cyclic GFR-binding peptide
  MOD_RES (1)..(3)..(40): Xaa is C or S
XKXALHDELTNSLQEFIPKKRVIEYYLVTLPELQVQTPRXQV

SEQ ID NO: 27771 - protein, 38 aa, Artificial Sequence
  Non-cyclic GFR-binding peptide
  MOD_RES (33)..(34): Xaa is C or S
  MOD_RES (11)..(12)..(13)..(14)..(15): Xaa is A or G
  MOD_RES (16)..(17)..(18)..(19): Xaa is A or G or absent
SKVVMVTAKKXXXXXXXXXIKRIQVPRLDQPVXXPSAS

SEQ ID NO: 27772 - protein, 39 aa, Artificial Sequence
  Non-cyclic GFR-binding peptide
  MOD_RES (1)..(33)..(34): Xaa is C or S
XSRVVMNVTAKKIVNSSDDIKRVQVPRLKTPAXXPKPVY

SEQ ID NO: 27773 - protein, 38 aa, Artificial Sequence
  Non-cyclic GFR-binding peptide
  MOD_RES (2)..(4)..(38): Xaa is C or S
  MOD_RES (16)..(17)..(18)..(19)..(20): Xaa is A or G
  MOD_RES (21)..(22)..(23)..(24): Xaa is A or G or absent
RXGXGEVVMDVTAKKXXXXXXXXXIKRMQVPRLETPVX

SEQ ID NO: 27774 - protein, 43 aa, Artificial Sequence
  Non-cyclic GFR-binding peptide
  MOD_RES (1)..(3)..(37)..(38): Xaa is C or S
  MOD_RES (15)..(16)..(17)..(18)..(19): Xaa is A or G
  MOD_RES (20)..(21)..(22)..(23): Xaa is A or G or absent
XGXSRVVMNSMEGIXXXXXXXXXMIQVTINSLKTPAXXPKPVY

SEQ ID NO: 27775 - protein, 35 aa, Artificial Sequence
  Non-cyclic GFR-binding peptide
  MOD_RES (2)..(4): Xaa is C or S
RXGXGEVVMESMEGIVVKDYEDMIQMTINSLETPV

SEQ ID NO: 27776 - protein, 38 aa, Artificial Sequence
  Non-cyclic GFR-binding peptide
  MOD_RES (1)..(32)..(33): Xaa is C or S
XSRVIMVTAKKVKPKRGVIKRIQVPRLAQPVXXPAASA

SEQ ID NO: 27777 - protein, 35 aa, Artificial Sequence
  Non-cyclic GFR-binding peptide
  MOD_RES (1)..(3)..(34)..(35): Xaa is C or S
XKXSKVVMVQVEKVKPTRGVVKAIKVSRLDQPVXX

SEQ ID NO: 27778 - protein, 36 aa, Artificial Sequence
  Non-cyclic GFR-binding peptide
  MOD_RES (1)..(1): Xaa is C or S
XELHEELRNSLQELKPKKRVYEYYVVPLPEHHVRSP

SEQ ID NO: 27779 - protein, 41 aa, Artificial Sequence
  Non-cyclic GFR-binding peptide
  MOD_RES (2)..(36): Xaa is C or S
EXKNHQLFNSLQEHQGQHPKIRYYLMTLPEEETPVXELGED

SEQ ID NO: 27780 - protein, 43 aa, Artificial Sequence
  Non-cyclic GFR-binding peptide
  MOD_RES (2)..(39): Xaa is C or S
  MOD_RES (15)..(16)..(17)..(18)..(19): Xaa is A or G
  MOD_RES (20)..(21)..(22)..(23): Xaa is A or G or absent
KXALHDELTNSLQEXXXXXXXXXYYVVPLPELQVQTPRXQVNR

SEQ ID NO: 27781 - protein, 39 aa, Artificial Sequence
  Non-cyclic GFR-binding peptide
  MOD_RES (2)..(36): Xaa is C or S
EXKNHQLFNSLQEHQGQHPKIRYYLMTLPEEETPVXELG

SEQ ID NO: 27782 - protein, 38 aa, Artificial Sequence
  Non-cyclic GFR-binding peptide
  MOD_RES (37)..(37): Xaa is C or S
ALHDELTNSLQEFIPKKRVIEYYVVPLPELQVQTPRXQ

SEQ ID NO: 27783 - protein, 35 aa, Artificial Sequence
  Non-cyclic GFR-binding peptide
  MOD_RES (33)..(34): Xaa is C or S
  MOD_RES (11)..(12)..(13)..(14)..(15): Xaa is A or G
  MOD_RES (16)..(17)..(18)..(19): Xaa is A or G or absent
SRVIMSMEGIXXXXXXXXXMIQITINSLAQPVXXP

SEQ ID NO: 27784 - protein, 41 aa, Artificial Sequence
  Non-cyclic GFR-binding peptide
  MOD_RES (2)..(4)..(41): Xaa is C or S
  MOD_RES (17)..(18)..(19)..(20)..(21): Xaa is A or G
  MOD_RES (22)..(23)..(24)..(25): Xaa is A or G or absent
AXAXELHEELRNSLQEXXXXXXXXXYYVVPLPEHHVRSPQX

SEQ ID NO: 27785 - protein, 41 aa, Artificial Sequence
  Non-cyclic GFR-binding peptide
  MOD_RES (2)..(35)..(36): Xaa is C or S
  MOD_RES (13)..(14)..(15)..(16)..(17): Xaa is A or G
  MOD_RES (18)..(19)..(20)..(21): Xaa is A or G or absent
KXSKVIMVQVEKXXXXXXXXXVKAIKVSRLDQSVXXPSASA

SEQ ID NO: 27786 - protein, 35 aa, Artificial Sequence
  Non-cyclic GFR-binding peptide
  MOD_RES (13)..(14)..(15)..(16)..(17): Xaa is A or G
  MOD_RES (18)..(19)..(20)..(21): Xaa is A or G or absent
ALHDELTNSLQEXXXXXXXXXYYLVTLPELQVQTP

SEQ ID NO: 27787 - protein, 44 aa, Artificial Sequence
  Non-cyclic GFR-binding peptide
  MOD_RES (1)..(3)..(40): Xaa is C or S
XKXALHDELTNSLQEFIPKKRVIEYYVVPLPELQVQTPRXQVNR

SEQ ID NO: 27788 - protein, 40 aa, Artificial Sequence
  Non-cyclic GFR-binding peptide
  MOD_RES (2)..(35)..(36): Xaa is C or S
  MOD_RES (13)..(14)..(15)..(16)..(17): Xaa is A or G
  MOD_RES (18)..(19)..(20)..(21): Xaa is A or G or absent
KXSRVIMVQVEKXXXXXXXXXVKAIKVSRLAQPVXXPAAS

SEQ ID NO: 27789 - protein, 38 aa, Artificial Sequence
  Non-cyclic GFR-binding peptide
  MOD_RES (1)..(33)..(34): Xaa is C or S
XGEVVMDVQVEKVVKENEDVKAMKVSRLETPVXXAKPI

SEQ ID NO: 27790 - protein, 39 aa, Artificial Sequence
  Non-cyclic GFR-binding peptide
  MOD_RES (1)..(3)..(36)..(37): Xaa is C or S
  MOD_RES (14)..(15)..(16)..(17)..(18): Xaa is A or G
  MOD_RES (19)..(20)..(21)..(22): Xaa is A or G or absent
XKXSKVVMVQVEKXXXXXXXXXVKAIKVSRLDQPVXXPS

SEQ ID NO: 27791 - protein, 37 aa, Artificial Sequence
  Non-cyclic GFR-binding peptide
  MOD_RES (36)..(36): Xaa is C or S
  MOD_RES (12)..(13)..(14)..(15)..(16): Xaa is A or G
  MOD_RES (17)..(18)..(19)..(20): Xaa is A or G or absent
LHEELRNSLQEXXXXXXXXXYYVVPLPEHHVRSPQXK

SEQ ID NO: 27792 - protein, 38 aa, Artificial Sequence
  Non-cyclic GFR-binding peptide
  MOD_RES (1)..(38): Xaa is C or S
  MOD_RES (14)..(15)..(16)..(17)..(18): Xaa is A or G
  MOD_RES (19)..(20)..(21)..(22): Xaa is A or G or absent
XELHEELRNSLQEXXXXXXXXXYYLVTLPEHHVRSPQX

SEQ ID NO: 27793 - protein, 43 aa, Artificial Sequence
  Non-cyclic GFR-binding peptide
  MOD_RES (2)..(4)..(41): Xaa is C or S
  MOD_RES (17)..(18)..(19)..(20)..(21): Xaa is A or G
  MOD_RES (22)..(23)..(24)..(25): Xaa is A or G or absent
EXKXALHDELTNSLQEXXXXXXXXXYYVVPLPELQVQTPRXQV

SEQ ID NO: 27794 - protein, 36 aa, Artificial Sequence
  Non-cyclic GFR-binding peptide
  MOD_RES (2)..(2): Xaa is C or S
  MOD_RES (15)..(16)..(17)..(18)..(19): Xaa is A or G
  MOD_RES (20)..(21)..(22)..(23): Xaa is A or G or absent
AXELHEELRNSLQEXXXXXXXXXYYVVPLPEHHVRS

SEQ ID NO: 27795 - protein, 39 aa, Artificial Sequence
  Non-cyclic GFR-binding peptide
  MOD_RES (2)..(4)..(37)..(38): Xaa is C or S
  MOD_RES (15)..(16)..(17)..(18)..(19): Xaa is A or G
  MOD_RES (20)..(21)..(22)..(23): Xaa is A or G or absent
SXKXSKVIMSMEGIXXXXXXXXXMIQITINSLDQSVXXP

SEQ ID NO: 27796 - protein, 34 aa, Artificial Sequence
  Non-cyclic GFR-binding peptide
  MOD_RES (31)..(32): Xaa is C or S
RVVMNSMEGIIVNSSDDMIQVTINSLKTPAXXPK

SEQ ID NO: 27797 - protein, 33 aa, Artificial Sequence
  Non-cyclic GFR-binding peptide
HEELRNSLQELKPKKRVYEYYLVTLPEHHVRSP

SEQ ID NO: 27798 - protein, 37 aa, Artificial Sequence
  Non-cyclic GFR-binding peptide
  MOD_RES (34)..(34): Xaa is C or S
  MOD_RES (12)..(13)..(14)..(15)..(16): Xaa is A or G
  MOD_RES (17)..(18)..(19)..(20): Xaa is A or G or absent
KNHQLFNSLQEXXXXXXXXXYYLMTLPEEETPVXELG

SEQ ID NO: 27799 - protein, 40 aa, Artificial Sequence
  Non-cyclic GFR-binding peptide
  MOD_RES (1)..(34)..(35): Xaa is C or S
  MOD_RES (12)..(13)..(14)..(15)..(16): Xaa is A or G
  MOD_RES (17)..(18)..(19)..(20): Xaa is A or G or absent
XSRVIMVTAKKXXXXXXXXXIKRIQVPRLAQPVXXPAASA

SEQ ID NO: 27800 - protein, 36 aa, Artificial Sequence
  Non-cyclic GFR-binding peptide
  MOD_RES (1)..(3)..(34)..(35): Xaa is C or S
XKXSRVIMVTAKKVKPKRGVIKRIQVPRLAQPVXXP

SEQ ID NO: 27801 - protein, 37 aa, Artificial Sequence
  Non-cyclic GFR-binding peptide
  MOD_RES (1)..(3)..(37): Xaa is C or S
  MOD_RES (15)..(16)..(17)..(18)..(19): Xaa is A or G
  MOD_RES (20)..(21)..(22)..(23): Xaa is A or G or absent
XGXGEVVMEVTAKKXXXXXXXXXIKRMQVPRLETPVX

SEQ ID NO: 27802 - protein, 36 aa, Artificial Sequence
  Non-cyclic GFR-binding peptide
  MOD_RES (1)..(34)..(35): Xaa is C or S
  MOD_RES (12)..(13)..(14)..(15)..(16): Xaa is A or G
  MOD_RES (17)..(18)..(19)..(20): Xaa is A or G or absent
XSRVIMVQVEKXXXXXXXXXVKAIKVSRLAQPVXXP

SEQ ID NO: 27803 - protein, 37 aa, Artificial Sequence
  Non-cyclic GFR-binding peptide
  MOD_RES (34)..(34): Xaa is C or S
  MOD_RES (12)..(13)..(14)..(15)..(16): Xaa is A or G
  MOD_RES (17)..(18)..(19)..(20): Xaa is A or G or absent
SRVVMNSMEGIXXXXXXXXXMIQVTINSLKTPAXTPK

SEQ ID NO: 27804 - protein, 39 aa, Artificial Sequence
  Non-cyclic GFR-binding peptide
  MOD_RES (2)..(4)..(38)..(39): Xaa is C or S
  MOD_RES (16)..(17)..(18)..(19)..(20): Xaa is A or G
  MOD_RES (21)..(22)..(23)..(24): Xaa is A or G or absent
RXGXGEVVMESMEGIXXXXXXXXXMIQMTINSLETPVXX

SEQ ID NO: 27805 - protein, 33 aa, Artificial Sequence
  Non-cyclic GFR-binding peptide
  MOD_RES (12)..(13)..(14)..(15)..(16): Xaa is A or G
  MOD_RES (17)..(18)..(19)..(20): Xaa is A or G or absent
LHEELRNSLQEXXXXXXXXXYYVVPLPEHHVRS

SEQ ID NO: 27806 - protein, 35 aa, Artificial Sequence
  Non-cyclic GFR-binding peptide
  MOD_RES (33)..(34): Xaa is C or S
  MOD_RES (11)..(12)..(13)..(14)..(15): Xaa is A or G
  MOD_RES (16)..(17)..(18)..(19): Xaa is A or G or absent
RVVMNVQVEKXXXXXXXXXVKAVKVSRLQTPAXXP

SEQ ID NO: 27807 - protein, 34 aa, Artificial Sequence
  Non-cyclic GFR-binding peptide
  MOD_RES (33)..(33): Xaa is C or S
  MOD_RES (11)..(12)..(13)..(14)..(15): Xaa is A or G
  MOD_RES (16)..(17)..(18)..(19): Xaa is A or G or absent
RVVMNSMEGIXXXXXXXXXMIQVTINSLKTPAXT

SEQ ID NO: 27808 - protein, 35 aa, Artificial Sequence
  Non-cyclic GFR-binding peptide
  MOD_RES (35)..(35): Xaa is C or S
  MOD_RES (11)..(12)..(13)..(14)..(15): Xaa is A or G
  MOD_RES (16)..(17)..(18)..(19): Xaa is A or G or absent
HDELTNSLQEXXXXXXXXXYYLVTLPELQVQTPRX

SEQ ID NO: 27809 - protein, 38 aa, Artificial Sequence
  Non-cyclic GFR-binding peptide
  MOD_RES (1)..(3)..(37)..(38): Xaa is C or S
  MOD_RES (15)..(16)..(17)..(18)..(19): Xaa is A or G
  MOD_RES (20)..(21)..(22)..(23): Xaa is A or G or absent
XGXARVVMNVQVEKXXXXXXXXXVKAVKVSRLQTPAXX

SEQ ID NO: 27810 - protein, 35 aa, Artificial Sequence
  Non-cyclic GFR-binding peptide
  MOD_RES (1)..(34)..(35): Xaa is C or S
  MOD_RES (12)..(13)..(14)..(15)..(16): Xaa is A or G
  MOD_RES (17)..(18)..(19)..(20): Xaa is A or G or absent
XSKVVMVTAKKXXXXXXXXXIKRIQVPRLDQPVXX

SEQ ID NO: 27811 - protein, 40 aa, Artificial Sequence
  Non-cyclic GFR-binding peptide
  MOD_RES (2)..(34)..(35): Xaa is C or S
GXSRVVMNVQVEKIVNSSDDVKAVKVSRLKTPAXXPKPVY

SEQ ID NO: 27812 - protein, 40 aa, Artificial Sequence
  Non-cyclic GFR-binding peptide
  MOD_RES (2)..(4)..(38): Xaa is C or S
  MOD_RES (16)..(17)..(18)..(19)..(20): Xaa is A or G
  MOD_RES (21)..(22)..(23)..(24): Xaa is A or G or absent
HXGXSRVVMNSMEGIXXXXXXXXXMIQVTINSLKTPAXTP

SEQ ID NO: 27813 - protein, 35 aa, Artificial Sequence
  Non-cyclic GFR-binding peptide
  MOD_RES (2)..(34)..(35): Xaa is C or S
GXGEVVMDSMEGIVVKENEDMIQMTINSLETPVXX

SEQ ID NO: 27814 - protein, 40 aa, Artificial Sequence
  Non-cyclic GFR-binding peptide
  MOD_RES (1)..(3)..(37)..(38): Xaa is C or S
  MOD_RES (15)..(16)..(17)..(18)..(19): Xaa is A or G
  MOD_RES (20)..(21)..(22)..(23): Xaa is A or G or absent
XGXSRVVMNVTAKKXXXXXXXXXIKRVQVPRLKTPAXXPK

SEQ ID NO: 27815 - protein, 35 aa, Artificial Sequence
  Non-cyclic GFR-binding peptide
  MOD_RES (2)..(2): Xaa is C or S
  MOD_RES (14)..(15)..(16)..(17)..(18): Xaa is A or G
  MOD_RES (19)..(20)..(21)..(22): Xaa is A or G or absent
GXSRVVMNVQVEKXXXXXXXXXVKAVKVSRLKTPA

SEQ ID NO: 27816 - protein, 42 aa, Artificial Sequence
  Non-cyclic GFR-binding peptide
  MOD_RES (2)..(4)..(37)..(38): Xaa is C or S
  MOD_RES (15)..(16)..(17)..(18)..(19): Xaa is A or G
  MOD_RES (20)..(21)..(22)..(23): Xaa is A or G or absent
SXKXSKVVMVTAKKXXXXXXXXXIKRIQVPRLDQPVXXPSAS

SEQ ID NO: 27817 - protein, 37 aa, Artificial Sequence
  Non-cyclic GFR-binding peptide
  MOD_RES (1)..(35): Xaa is C or S
XKNHQLFNSLQEHQGQHPKIRYYLMTLPEEETPVXEL

SEQ ID NO: 27818 - protein, 35 aa, Artificial Sequence
  Non-cyclic GFR-binding peptide
  MOD_RES (33)..(34): Xaa is C or S
  MOD_RES (11)..(12)..(13)..(14)..(15): Xaa is A or G
  MOD_RES (16)..(17)..(18)..(19): Xaa is A or G or absent
RVVMNVTAKKXXXXXXXXXIKRVQVPRLQTPAXXP

SEQ ID NO: 27819 - protein, 36 aa, Artificial Sequence
  Non-cyclic GFR-binding peptide
  MOD_RES (34)..(34): Xaa is C or S
  MOD_RES (12)..(13)..(14)..(15)..(16): Xaa is A or G
  MOD_RES (17)..(18)..(19)..(20): Xaa is A or G or absent
KNHQLFNSLQEXXXXXXXXXYYVMPLPEEETPVXEL

SEQ ID NO: 27820 - protein, 40 aa, Artificial Sequence
  Non-cyclic GFR-binding peptide
  MOD_RES (1)..(3)..(34)..(35): Xaa is C or S
XKXSRVIMSMEGIVKPKRGVMIQITINSLAQPVXXPAASA

SEQ ID NO: 27821 - protein, 38 aa, Artificial Sequence
  Non-cyclic GFR-binding peptide
  MOD_RES (1)..(33)..(34): Xaa is C or S
XGEVVMEVQVEKVVKDYEDVKAMKVSRLETPVXXAKPI

SEQ ID NO: 27822 - protein, 33 aa, Artificial Sequence
  Non-cyclic GFR-binding peptide
  MOD_RES (31)..(32): Xaa is C or S
EVVMDSMEGIVVKENEDMIQMTINSLETPVXXA

SEQ ID NO: 27823 - protein, 40 aa, Artificial Sequence
  Non-cyclic GFR-binding peptide
  MOD_RES (2)..(36)..(37): Xaa is C or S
  MOD_RES (14)..(15)..(16)..(17)..(18): Xaa is A or G
  MOD_RES (19)..(20)..(21)..(22): Xaa is A or G or absent
GXGEVVMEVQVEKXXXXXXXXXVKAMKVSRLETPVXXAKP

SEQ ID NO: 27824 - protein, 41 aa, Artificial Sequence
  Non-cyclic GFR-binding peptide
  MOD_RES (2)..(4)..(35)..(36): Xaa is C or S
SXKXSKVVMVQVEKVKPTRGVVKAIKVSRLDQPVXXPSASA

SEQ ID NO: 27825 - protein, 39 aa, Artificial Sequence
  Non-cyclic GFR-binding peptide
  MOD_RES (1)..(33): Xaa is C or S
XSRVVMNVTAKKIVNSSDDIKRVQVPRLKTPAXTPKTVH

SEQ ID NO: 27826 - protein, 37 aa, Artificial Sequence
  Non-cyclic GFR-binding peptide
  MOD_RES (1)..(34)..(35): Xaa is C or S
  MOD_RES (12)..(13)..(14)..(15)..(16): Xaa is A or G
  MOD_RES (17)..(18)..(19)..(20): Xaa is A or G or absent
XSKVVMSMEGIXXXXXXXXXMIQITINSLDQPVXXPS

SEQ ID NO: 27827 - protein, 41 aa, Artificial Sequence
  Non-cyclic GFR-binding peptide
  MOD_RES (2)..(4)..(36)..(37): Xaa is C or S
RXGXGEVVMEVQVEKVVKDYEDVKAMKVSRLETPVXXAKPI

SEQ ID NO: 27828 - protein, 35 aa, Artificial Sequence
  Non-cyclic GFR-binding peptide
  MOD_RES (33)..(34): Xaa is C or S
  MOD_RES (11)..(12)..(13)..(14)..(15): Xaa is A or G
  MOD_RES (16)..(17)..(18)..(19): Xaa is A or G or absent
EVVMEVTAKKXXXXXXXXXIKRMQVPRLETPVXXA

SEQ ID NO: 27829 - protein, 38 aa, Artificial Sequence
  Non-cyclic GFR-binding peptide
  MOD_RES (2)..(34)..(35): Xaa is C or S
GXGEVVMDSMEGIVVKENEDMIQMTINSLETPVXXAKP

SEQ ID NO: 27830 - protein, 34 aa, Artificial Sequence
  Non-cyclic GFR-binding peptide
  MOD_RES (32)..(33): Xaa is C or S
GEVVMESMEGIVVKDYEDMIQMTINSLETPVXXA

SEQ ID NO: 27831 - protein, 36 aa, Artificial Sequence
  Non-cyclic GFR-binding peptide
  MOD_RES (2)..(34)..(35): Xaa is C or S
GXGEVVMEVTAKKVVKDYEDIKRMQVPRLETPVXXA

SEQ ID NO: 27832 - protein, 37 aa, Artificial Sequence
  Non-cyclic GFR-binding peptide
  MOD_RES (34)..(35): Xaa is C or S
  MOD_RES (12)..(13)..(14)..(15)..(16): Xaa is A or G
  MOD_RES (17)..(18)..(19)..(20): Xaa is A or G or absent
GEVVMESMEGIXXXXXXXXXMIQMTINSLETPVXXAK

SEQ ID NO: 27833 - protein, 36 aa, Artificial Sequence
  Non-cyclic GFR-binding peptide
  MOD_RES (2)..(35)..(36): Xaa is C or S
  MOD_RES (13)..(14)..(15)..(16)..(17): Xaa is A or G
  MOD_RES (18)..(19)..(20)..(21): Xaa is A or G or absent
KXSKVIMVQVEKXXXXXXXXXVKAIKVSRLDQSVXX

SEQ ID NO: 27834 - protein, 39 aa, Artificial Sequence
  Non-cyclic GFR-binding peptide
  MOD_RES (2)..(4)..(36)..(37): Xaa is C or S
RXGXGEVVMESMEGIVVKDYEDMIQMTINSLETPVXXAK

SEQ ID NO: 27835 - protein, 41 aa, Artificial Sequence
  Non-cyclic GFR-binding peptide
  MOD_RES (2)..(4)..(41): Xaa is C or S
EXKXALHDELTNSLQEFIPKKRVIEYYLVTLPELQVQTPRX

SEQ ID NO: 27836 - protein, 36 aa, Artificial Sequence
  Non-cyclic GFR-binding peptide
  MOD_RES (1)..(35)..(36): Xaa is C or S
  MOD_RES (13)..(14)..(15)..(16)..(17): Xaa is A or G
  MOD_RES (18)..(19)..(20)..(21): Xaa is A or G or absent
XGEVVMEVTAKKXXXXXXXXXIKRMQVPRLETPVXX

SEQ ID NO: 27837 - protein, 34 aa, Artificial Sequence
  Non-cyclic GFR-binding peptide
  MOD_RES (1)..(3): Xaa is C or S
XGXARVVMNSMEGIIVNSSDDMIQVTINSLQTPA

SEQ ID NO: 27838 - protein, 32 aa, Artificial Sequence
  Non-cyclic GFR-binding peptide
  MOD_RES (32)..(32): Xaa is C or S
SRVVMNVTAKKIVNSSDDIKRVQVPRLKTPAX

SEQ ID NO: 27839 - protein, 41 aa, Artificial Sequence
  Non-cyclic GFR-binding peptide
  MOD_RES (1)..(3)..(36)..(37): Xaa is C or S
  MOD_RES (14)..(15)..(16)..(17)..(18): Xaa is A or G
  MOD_RES (19)..(20)..(21)..(22): Xaa is A or G or absent
XKXSKVVMVTAKKXXXXXXXXXIKRIQVPRLDQPVXXPSAS

SEQ ID NO: 27840 - protein, 37 aa, Artificial Sequence
  Non-cyclic GFR-binding peptide
  MOD_RES (2)..(4): Xaa is C or S
  MOD_RES (16)..(17)..(18)..(19)..(20): Xaa is A or G
  MOD_RES (21)..(22)..(23)..(24): Xaa is A or G or absent
HXGXSRVVMNVTAKKXXXXXXXXXIKRVQVPRLKTPA

SEQ ID NO: 27841 - protein, 32 aa, Artificial Sequence
  Non-cyclic GFR-binding peptide
  MOD_RES (31)..(32): Xaa is C or S
EVVMESMEGIVVKDYEDMIQMTINSLETPVXX

SEQ ID NO: 27842 - protein, 37 aa, Artificial Sequence
  Non-cyclic GFR-binding peptide
  MOD_RES (37)..(37): Xaa is C or S
ELHEELRNSLQELKPKKRVYEYYLVTLPEHHVRSPQX

SEQ ID NO: 27843 - protein, 36 aa, Artificial Sequence
  Non-cyclic GFR-binding peptide
  MOD_RES (2)..(36): Xaa is C or S
  MOD_RES (14)..(15)..(16)..(17)..(18): Xaa is A or G
  MOD_RES (19)..(20)..(21)..(22): Xaa is A or G or absent
GXGEVVMDVQVEKXXXXXXXXXVKAMKVSRLETPVX

SEQ ID NO: 27844 - protein, 40 aa, Artificial Sequence
  Non-cyclic GFR-binding peptide
  MOD_RES (1)..(3)..(34)..(35): Xaa is C or S
XKXSKVIMSMEGIIKPTKGIMIQITINSLDQSVXXPSASA

SEQ ID NO: 27845 - protein, 40 aa, Artificial Sequence
  Non-cyclic GFR-binding peptide
  MOD_RES (2)..(36): Xaa is C or S
EXKNHQLFNSLQEHQGQHPKIRYYVMPLPEEETPVXELGE

SEQ ID NO: 27846 - protein, 38 aa, Artificial Sequence
  Non-cyclic GFR-binding peptide
  MOD_RES (1)..(3)..(35)..(36): Xaa is C or S
XGXGEVVMDVTAKKVVKENEDIKRMQVPRLETPVXXAK

SEQ ID NO: 27847 - protein, 37 aa, Artificial Sequence
  Non-cyclic GFR-binding peptide
  MOD_RES (2)..(4): Xaa is C or S
  MOD_RES (16)..(17)..(18)..(19)..(20): Xaa is A or G
  MOD_RES (21)..(22)..(23)..(24): Xaa is A or G or absent
HXGXSRVVMNVQVEKXXXXXXXXXVKAVKVSRLKTPA

SEQ ID NO: 27848 - protein, 35 aa, Artificial Sequence
  Non-cyclic GFR-binding peptide
  MOD_RES (34)..(34): Xaa is C or S
KNHQLFNSLQEHQGQHPKIRYYVMPLPEEETPVXE

SEQ ID NO: 27849 - protein, 33 aa, Artificial Sequence
  Non-cyclic GFR-binding peptide
  MOD_RES (1)..(33): Xaa is C or S
XGEVVMESMEGIVVKDYEDMIQMTINSLETPVX

SEQ ID NO: 27850 - protein, 36 aa, Artificial Sequence
  Non-cyclic GFR-binding peptide
  MOD_RES (2)..(4): Xaa is C or S
  MOD_RES (15)..(16)..(17)..(18)..(19): Xaa is A or G
  MOD_RES (20)..(21)..(22)..(23): Xaa is A or G or absent
SXKXSRVIMVQVEKXXXXXXXXXVKAIKVSRLAQPV

SEQ ID NO: 27851 - protein, 34 aa, Artificial Sequence
  Non-cyclic GFR-binding peptide
  MOD_RES (34)..(34): Xaa is C or S
KNHQLFNSLQEHQGQHPKIRYYLMTLPEEETPVX

SEQ ID NO: 27852 - protein, 34 aa, Artificial Sequence
  Non-cyclic GFR-binding peptide
  MOD_RES (2)..(33)..(34): Xaa is C or S
KXSKVVMVQVEKVKPTRGVVKAIKVSRLDQPVXX

SEQ ID NO: 27853 - protein, 39 aa, Artificial Sequence
  Non-cyclic GFR-binding peptide
  MOD_RES (1)..(33): Xaa is C or S
XSRVVMNVQVEKIVNSSDDVKAVKVSRLKTPAXTPKTVH

SEQ ID NO: 27854 - protein, 36 aa, Artificial Sequence
  Non-cyclic GFR-binding peptide
  MOD_RES (2)..(4): Xaa is C or S
  MOD_RES (15)..(16)..(17)..(18)..(19): Xaa is A or G
  MOD_RES (20)..(21)..(22)..(23): Xaa is A or G or absent
SXKXSKVIMSMEGIXXXXXXXXXMIQITINSLDQSV

SEQ ID NO: 27855 - protein, 35 aa, Artificial Sequence
  Non-cyclic GFR-binding peptide
  MOD_RES (1)..(32)..(33): Xaa is C or S
XSKVVMVQVEKVKPTRGVVKAIKVSRLDQPVXXPS

SEQ ID NO: 27856 - protein, 36 aa, Artificial Sequence
  Non-cyclic GFR-binding peptide
  MOD_RES (35)..(35): Xaa is C or S
  MOD_RES (11)..(12)..(13)..(14)..(15): Xaa is A or G
  MOD_RES (16)..(17)..(18)..(19): Xaa is A or G or absent
HEELRNSLQEXXXXXXXXXYYLVTLPEHHVRSPQXK

SEQ ID NO: 27857 - protein, 37 aa, Artificial Sequence
  Non-cyclic GFR-binding peptide
  MOD_RES (2)..(2): Xaa is C or S
AXELHEELRNSLQELKPKKRVYEYYLVTLPEHHVRSP

SEQ ID NO: 27858 - protein, 33 aa, Artificial Sequence
  Non-cyclic GFR-binding peptide
  MOD_RES (1)..(32)..(33): Xaa is C or S
XSRVIMVTAKKVKPKRGVIKRIQVPRLAQPVXX

SEQ ID NO: 27859 - protein, 35 aa, Artificial Sequence
  Non-cyclic GFR-binding peptide
  MOD_RES (1)..(35): Xaa is C or S
  MOD_RES (13)..(14)..(15)..(16)..(17): Xaa is A or G
  MOD_RES (18)..(19)..(20)..(21): Xaa is A or G or absent
XGEVVMEVTAKKXXXXXXXXXIKRMQVPRLETPVX

SEQ ID NO: 27860 - protein, 41 aa, Artificial Sequence
  Non-cyclic GFR-binding peptide
  MOD_RES (37)..(37): Xaa is C or S
ELHEELRNSLQELKPKKRVYEYYLVTLPEHHVRSPQXKVSS

SEQ ID NO: 27861 - protein, 41 aa, Artificial Sequence
  Non-cyclic GFR-binding peptide
  MOD_RES (1)..(35): Xaa is C or S
  MOD_RES (13)..(14)..(15)..(16)..(17): Xaa is A or G
  MOD_RES (18)..(19)..(20)..(21): Xaa is A or G or absent
XSRVVMNSMEGIXXXXXXXXXMIQVTINSLKTPAXTPKTVH

SEQ ID NO: 27862 - protein, 34 aa, Artificial Sequence
  Non-cyclic GFR-binding peptide
  MOD_RES (1)..(3)..(34): Xaa is C or S
XKXSKVIMVQVEKIKPTKGIVKAIKVSRLDQSVX

SEQ ID NO: 27863 - protein, 42 aa, Artificial Sequence
  Non-cyclic GFR-binding peptide
  MOD_RES (2)..(4)..(38)..(39): Xaa is C or S
  MOD_RES (16)..(17)..(18)..(19)..(20): Xaa is A or G
  MOD_RES (21)..(22)..(23)..(24): Xaa is A or G or absent
HXGXSRVVMNSMEGIXXXXXXXXXMIQVTINSLKTPAXXPKP

SEQ ID NO: 27864 - protein, 32 aa, Artificial Sequence
  Non-cyclic GFR-binding peptide
  MOD_RES (1)..(32): Xaa is C or S
XSRVIMVTAKKVKPKRGVIKRIQVPRLAQPVX

SEQ ID NO: 27865 - protein, 39 aa, Artificial Sequence
  Non-cyclic GFR-binding peptide
  MOD_RES (1)..(3)..(34)..(35): Xaa is C or S
XKXSKVVMSMEGIVKPTRGVMIQITINSLDQPVXXPSAS

SEQ ID NO: 27866 - protein, 36 aa, Artificial Sequence
  Non-cyclic GFR-binding peptide
  MOD_RES (2)..(35)..(36): Xaa is C or S
  MOD_RES (13)..(14)..(15)..(16)..(17): Xaa is A or G
  MOD_RES (18)..(19)..(20)..(21): Xaa is A or G or absent
KXSKVVMVTAKKXXXXXXXXXIKRIQVPRLDQPVXX

SEQ ID NO: 27867 - protein, 33 aa, Artificial Sequence
  Non-cyclic GFR-binding peptide
  MOD_RES (1)..(3): Xaa is C or S
XKXSKVIMVTAKKIKPTKGIIKRIQVPRLDQSV

SEQ ID NO: 27868 - protein, 38 aa, Artificial Sequence
  Non-cyclic GFR-binding peptide
  MOD_RES (1)..(35): Xaa is C or S
  MOD_RES (13)..(14)..(15)..(16)..(17): Xaa is A or G
  MOD_RES (18)..(19)..(20)..(21): Xaa is A or G or absent
XSRVVMNSMEGIXXXXXXXXXMIQVTINSLKTPAXTPK

SEQ ID NO: 27869 - protein, 41 aa, Artificial Sequence
  Non-cyclic GFR-binding peptide
  MOD_RES (2)..(4)..(38)..(39): Xaa is C or S
  MOD_RES (16)..(17)..(18)..(19)..(20): Xaa is A or G
  MOD_RES (21)..(22)..(23)..(24): Xaa is A or G or absent
RXGXGEVVMDVQVEKXXXXXXXXXVKAMKVSRLETPVXXAK

SEQ ID NO: 27870 - protein, 39 aa, Artificial Sequence
  Non-cyclic GFR-binding peptide
  MOD_RES (2)..(34)..(35): Xaa is C or S
GXSRVVMNVQVEKIVNSSDDVKAVKVSRLKTPAXXPKPV

SEQ ID NO: 27871 - protein, 40 aa, Artificial Sequence
  Non-cyclic GFR-binding peptide
  MOD_RES (2)..(34): Xaa is C or S
GXSRVVMNSMEGIIVNSSDDMIQVTINSLKTPAXTPKTVH

SEQ ID NO: 27872 - protein, 33 aa, Artificial Sequence
  Non-cyclic GFR-binding peptide
  MOD_RES (2)..(2): Xaa is C or S
GXARVVMNVQVEKIVNSSDDVKAVKVSRLQTPA

SEQ ID NO: 27873 - protein, 38 aa, Artificial Sequence
  Non-cyclic GFR-binding peptide
  MOD_RES (2)..(4)..(35)..(36): Xaa is C or S
SXKXSKVVMVQVEKVKPTRGVVKAIKVSRLDQPVXXPS

SEQ ID NO: 27874 - protein, 37 aa, Artificial Sequence
  Non-cyclic GFR-binding peptide
  MOD_RES (33)..(34): Xaa is C or S
  MOD_RES (11)..(12)..(13)..(14)..(15): Xaa is A or G
  MOD_RES (16)..(17)..(18)..(19): Xaa is A or G or absent
RVVMNVQVEKXXXXXXXXXVKAVKVSRLKTPAXXPKP

SEQ ID NO: 27875 - protein, 40 aa, Artificial Sequence
  Non-cyclic GFR-binding peptide
  MOD_RES (2)..(4)..(37)..(38): Xaa is C or S
  MOD_RES (15)..(16)..(17)..(18)..(19): Xaa is A or G
  MOD_RES (20)..(21)..(22)..(23): Xaa is A or G or absent
SXKXSRVIMSMEGIXXXXXXXXXMIQITINSLAQPVXXPA

SEQ ID NO: 27876 - protein, 41 aa, Artificial Sequence
  Non-cyclic GFR-binding peptide
  MOD_RES (1)..(38): Xaa is C or S
XELHEELRNSLQELKPKKRVYEYYVVPLPEHHVRSPQXKVS

SEQ ID NO: 27877 - protein, 37 aa, Artificial Sequence
  Non-cyclic GFR-binding peptide
  MOD_RES (2)..(4)..(35)..(36): Xaa is C or S
SXKXSKVIMVQVEKIKPTKGIVKAIKVSRLDQSVXXP

SEQ ID NO: 27878 - protein, 33 aa, Artificial Sequence
  Non-cyclic GFR-binding peptide
  MOD_RES (12)..(13)..(14)..(15)..(16): Xaa is A or G
  MOD_RES (17)..(18)..(19)..(20): Xaa is A or G or absent
SRVVMNVTAKKXXXXXXXXXIKRVQVPRLKTPA

SEQ ID NO: 27879 - protein, 34 aa, Artificial Sequence
  Non-cyclic GFR-binding peptide
  MOD_RES (31)..(32): Xaa is C or S
EVVMEVTAKKVVKDYEDIKRMQVPRLETPVXXAK

SEQ ID NO: 27880 - protein, 36 aa, Artificial Sequence
  Non-cyclic GFR-binding peptide
  MOD_RES (2)..(34): Xaa is C or S
GXSRVVMNSMEGIIVNSSDDMIQVTINSLKTPAXTP

SEQ ID NO: 27881 - protein, 36 aa, Artificial Sequence
  Non-cyclic GFR-binding peptide
  MOD_RES (33)..(34): Xaa is C or S
  MOD_RES (11)..(12)..(13)..(14)..(15): Xaa is A or G
  MOD_RES (16)..(17)..(18)..(19): Xaa is A or G or absent
EVVMEVTAKKXXXXXXXXXIKRMQVPRLETPVXXAK

SEQ ID NO: 27882 - protein, 36 aa, Artificial Sequence
  Non-cyclic GFR-binding peptide
  MOD_RES (1)..(32)..(33): Xaa is C or S
XSRVIMVTAKKVKPKRGVIKRIQVPRLAQPVXXPAA

SEQ ID NO: 27883 - protein, 41 aa, Artificial Sequence
  Non-cyclic GFR-binding peptide
  MOD_RES (2)..(4)..(35)..(36): Xaa is C or S
SXKXSRVIMSMEGIVKPKRGVMIQITINSLAQPVXXPAASA

SEQ ID NO: 27884 - protein, 36 aa, Artificial Sequence
  Non-cyclic GFR-binding peptide
  MOD_RES (1)..(34)..(35): Xaa is C or S
  MOD_RES (12)..(13)..(14)..(15)..(16): Xaa is A or G
  MOD_RES (17)..(18)..(19)..(20): Xaa is A or G or absent
XSKVVMVTAKKXXXXXXXXXIKRIQVPRLDQPVXXP

SEQ ID NO: 27885 - protein, 38 aa, Artificial Sequence
  Non-cyclic GFR-binding peptide
  MOD_RES (2)..(36): Xaa is C or S
EXKNHQLFNSLQEHQGQHPKIRYYVMPLPEEETPVXEL

SEQ ID NO: 27886 - protein, 35 aa, Artificial Sequence
  Non-cyclic GFR-binding peptide
  MOD_RES (2)..(4)..(35): Xaa is C or S
SXKXSRVIMSMEGIVKPKRGVMIQITINSLAQPVX

SEQ ID NO: 27887 - protein, 34 aa, Artificial Sequence
  Non-cyclic GFR-binding peptide
  MOD_RES (1)..(3)..(34): Xaa is C or S
XKXSKVVMVTAKKVKPTRGVIKRIQVPRLDQPVX

SEQ ID NO: 27888 - protein, 35 aa, Artificial Sequence
  Non-cyclic GFR-binding peptide
  MOD_RES (2)..(2): Xaa is C or S
  MOD_RES (14)..(15)..(16)..(17)..(18): Xaa is A or G
  MOD_RES (19)..(20)..(21)..(22): Xaa is A or G or absent
GXSRVVMNSMEGIXXXXXXXXXMIQVTINSLKTPA

SEQ ID NO: 27889 - protein, 43 aa, Artificial Sequence
  Non-cyclic GFR-binding peptide
  MOD_RES (2)..(4)..(41): Xaa is C or S
AXAXELHEELRNSLQELKPKKRVYEYYVVPLPEHHVRSPQXKV

SEQ ID NO: 27890 - protein, 40 aa, Artificial Sequence
  Non-cyclic GFR-binding peptide
  MOD_RES (2)..(4)..(36)..(37): Xaa is C or S
RXGXGEVVMDVQVEKVVKENEDVKAMKVSRLETPVXXAKP

SEQ ID NO: 27891 - protein, 36 aa, Artificial Sequence
  Non-cyclic GFR-binding peptide
  MOD_RES (2)..(4): Xaa is C or S
  MOD_RES (15)..(16)..(17)..(18)..(19): Xaa is A or G
  MOD_RES (20)..(21)..(22)..(23): Xaa is A or G or absent
SXKXSRVIMVTAKKXXXXXXXXXIKRIQVPRLAQPV

SEQ ID NO: 27892 - protein, 35 aa, Artificial Sequence
  Non-cyclic GFR-binding peptide
  MOD_RES (32)..(33): Xaa is C or S
ARVVMNVQVEKIVNSSDDVKAVKVSRLQTPAXXPK

SEQ ID NO: 27893 - protein, 35 aa, Artificial Sequence
  Non-cyclic GFR-binding peptide
  MOD_RES (34)..(34): Xaa is C or S
  MOD_RES (12)..(13)..(14)..(15)..(16): Xaa is A or G
  MOD_RES (17)..(18)..(19)..(20): Xaa is A or G or absent
SRVVMNVTAKKXXXXXXXXXIKRVQVPRLKTPAXT

SEQ ID NO: 27894 - protein, 33 aa, Artificial Sequence
  Non-cyclic GFR-binding peptide
  MOD_RES (32)..(33): Xaa is C or S
GEVVMEVQVEKVVKDYEDVKAMKVSRLETPVXX

SEQ ID NO: 27895 - protein, 33 aa, Artificial Sequence
  Non-cyclic GFR-binding peptide
  MOD_RES (31)..(32): Xaa is C or S
SKVVMSMEGIVKPTRGVMIQITINSLDQPVXXP

SEQ ID NO: 27896 - protein, 44 aa, Artificial Sequence
  Non-cyclic GFR-binding peptide
  MOD_RES (2)..(4)..(41): Xaa is C or S
AXAXELHEELRNSLQELKPKKRVYEYYVVPLPEHHVRSPQXKVS

SEQ ID NO: 27897 - protein, 36 aa, Artificial Sequence
  Non-cyclic GFR-binding peptide
  MOD_RES (2)..(33)..(34): Xaa is C or S
KXSRVIMVTAKKVKPKRGVIKRIQVPRLAQPVXXPA

SEQ ID NO: 27898 - protein, 44 aa, Artificial Sequence
  Non-cyclic GFR-binding peptide
  MOD_RES (2)..(4)..(38)..(39): Xaa is C or S
  MOD_RES (16)..(17)..(18)..(19)..(20): Xaa is A or G
  MOD_RES (21)..(22)..(23)..(24): Xaa is A or G or absent
RXGXGEVVMDSMEGIXXXXXXXXXMIQMTINSLETPVXXAKPIK

SEQ ID NO: 27899 - protein, 41 aa, Artificial Sequence
  Non-cyclic GFR-binding peptide
  MOD_RES (2)..(4)..(37)..(38): Xaa is C or S
  MOD_RES (15)..(16)..(17)..(18)..(19): Xaa is A or G
  MOD_RES (20)..(21)..(22)..(23): Xaa is A or G or absent
SXKXSRVIMSMEGIXXXXXXXXXMIQITINSLAQPVXXPAA

SEQ ID NO: 27900 - protein, 37 aa, Artificial Sequence
  Non-cyclic GFR-binding peptide
  MOD_RES (32)..(32): Xaa is C or S
SRVVMNSMEGIIVNSSDDMIQVTINSLKTPAXTPKTV

SEQ ID NO: 27901 - protein, 39 aa, Artificial Sequence
  Non-cyclic GFR-binding peptide
  MOD_RES (2)..(36)..(37): Xaa is C or S
  MOD_RES (14)..(15)..(16)..(17)..(18): Xaa is A or G
  MOD_RES (19)..(20)..(21)..(22): Xaa is A or G or absent
GXARVVMNVQVEKXXXXXXXXXVKAVKVSRLQTPAXXPK

SEQ ID NO: 27902 - protein, 36 aa, Artificial Sequence
  Non-cyclic GFR-binding peptide
  MOD_RES (34)..(34): Xaa is C or S
KNHQLFNSLQEHQGQHPKIRYYLMTLPEEETPVXEL

SEQ ID NO: 27903 - protein, 40 aa, Artificial Sequence
  Non-cyclic GFR-binding peptide
  MOD_RES (1)..(3)..(35)..(36): Xaa is C or S
XGXSRVVMNVTAKKIVNSSDDIKRVQVPRLKTPAXXPKPV

SEQ ID NO: 27904 - protein, 37 aa, Artificial Sequence
  Non-cyclic GFR-binding peptide
  MOD_RES (1)..(34)..(35): Xaa is C or S
  MOD_RES (12)..(13)..(14)..(15)..(16): Xaa is A or G
  MOD_RES (17)..(18)..(19)..(20): Xaa is A or G or absent
XSKVIMSMEGIXXXXXXXXXMIQITINSLDQSVXXPS

SEQ ID NO: 27905 - protein, 34 aa, Artificial Sequence
  Non-cyclic GFR-binding peptide
  MOD_RES (34)..(34): Xaa is C or S
  MOD_RES (12)..(13)..(14)..(15)..(16): Xaa is A or G
  MOD_RES (17)..(18)..(19)..(20): Xaa is A or G or absent
SRVVMNVQVEKXXXXXXXXXVKAVKVSRLKTPAX

SEQ ID NO: 27906 - protein, 34 aa, Artificial Sequence
  Non-cyclic GFR-binding peptide
  MOD_RES (1)..(1): Xaa is C or S
  MOD_RES (13)..(14)..(15)..(16)..(17): Xaa is A or G
  MOD_RES (18)..(19)..(20)..(21): Xaa is A or G or absent
XARVVMNVTAKKXXXXXXXXXIKRVQVPRLQTPA

SEQ ID NO: 27907 - protein, 39 aa, Artificial Sequence
  Non-cyclic GFR-binding peptide
  MOD_RES (2)..(4)..(38): Xaa is C or S
  MOD_RES (16)..(17)..(18)..(19)..(20): Xaa is A or G
  MOD_RES (21)..(22)..(23)..(24): Xaa is A or G or absent
HXGXSRVVMNVTAKKXXXXXXXXXIKRVQVPRLKTPAXT

SEQ ID NO: 27908 - protein, 34 aa, Artificial Sequence
  Non-cyclic GFR-binding peptide
  MOD_RES (33)..(34): Xaa is C or S
  MOD_RES (11)..(12)..(13)..(14)..(15): Xaa is A or G
  MOD_RES (16)..(17)..(18)..(19): Xaa is A or G or absent
EVVMDSMEGIXXXXXXXXXMIQMTINSLETPVXX

SEQ ID NO: 27909 - protein, 44 aa, Artificial Sequence
  Non-cyclic GFR-binding peptide
  MOD_RES (2)..(4)..(38)..(39): Xaa is C or S
  MOD_RES (16)..(17)..(18)..(19)..(20): Xaa is A or G
  MOD_RES (21)..(22)..(23)..(24): Xaa is A or G or absent
HXGXARVVMNSMEGIXXXXXXXXXMIQVTINSLQTPAXXPKPVT

SEQ ID NO: 27910 - protein, 34 aa, Artificial Sequence
  Non-cyclic GFR-binding peptide
LHDELTNSLQEFIPKKRVIEYYLVTLPELQVQTP

SEQ ID NO: 27911 - protein, 37 aa, Artificial Sequence
  Non-cyclic GFR-binding peptide
  MOD_RES (1)..(3)..(37): Xaa is C or S
  MOD_RES (15)..(16)..(17)..(18)..(19): Xaa is A or G
  MOD_RES (20)..(21)..(22)..(23): Xaa is A or G or absent
XGXSRVVMNVTAKKXXXXXXXXXIKRVQVPRLKTPAX

SEQ ID NO: 27912 - protein, 37 aa, Artificial Sequence
  Non-cyclic GFR-binding peptide
  MOD_RES (1)..(3): Xaa is C or S
  MOD_RES (16)..(17)..(18)..(19)..(20): Xaa is A or G
  MOD_RES (21)..(22)..(23)..(24): Xaa is A or G or absent
XKXALHDELTNSLQEXXXXXXXXXYYVVPLPELQVQT

SEQ ID NO: 27913 - protein, 34 aa, Artificial Sequence
  Non-cyclic GFR-binding peptide
  MOD_RES (1)..(1): Xaa is C or S
  MOD_RES (13)..(14)..(15)..(16)..(17): Xaa is A or G
  MOD_RES (18)..(19)..(20)..(21): Xaa is A or G or absent
XSRVVMNSMEGIXXXXXXXXXMIQVTINSLKTPA

SEQ ID NO: 27914 - protein, 34 aa, Artificial Sequence
  Non-cyclic GFR-binding peptide
  MOD_RES (1)..(1): Xaa is C or S
  MOD_RES (13)..(14)..(15)..(16)..(17): Xaa is A or G
  MOD_RES (18)..(19)..(20)..(21): Xaa is A or G or absent
XGEVVMEVQVEKXXXXXXXXXVKAMKVSRLETPV

SEQ ID NO: 27915 - protein, 38 aa, Artificial Sequence
  Non-cyclic GFR-binding peptide
  MOD_RES (1)..(38): Xaa is C or S
XALHDELTNSLQEFIPKKRVIEYYVVPLPELQVQTPRX

SEQ ID NO: 27916 - protein, 35 aa, Artificial Sequence
  Non-cyclic GFR-binding peptide
  MOD_RES (34)..(35): Xaa is C or S
  MOD_RES (12)..(13)..(14)..(15)..(16): Xaa is A or G
  MOD_RES (17)..(18)..(19)..(20): Xaa is A or G or absent
GEVVMEVTAKKXXXXXXXXXIKRMQVPRLETPVXX

SEQ ID NO: 27917 - protein, 41 aa, Artificial Sequence
  Non-cyclic GFR-binding peptide
  MOD_RES (1)..(3)..(36)..(37): Xaa is C or S
  MOD_RES (14)..(15)..(16)..(17)..(18): Xaa is A or G
  MOD_RES (19)..(20)..(21)..(22): Xaa is A or G or absent
XKXSKVIMVTAKKXXXXXXXXXIKRIQVPRLDQSVXXPSAS

SEQ ID NO: 27918 - protein, 35 aa, Artificial Sequence
  Non-cyclic GFR-binding peptide
  MOD_RES (2)..(34)..(35): Xaa is C or S
GXSRVVMNVTAKKIVNSSDDIKRVQVPRLKTPAXX

SEQ ID NO: 27919 - protein, 38 aa, Artificial Sequence
  Non-cyclic GFR-binding peptide
  MOD_RES (34)..(34): Xaa is C or S
  MOD_RES (12)..(13)..(14)..(15)..(16): Xaa is A or G
  MOD_RES (17)..(18)..(19)..(20): Xaa is A or G or absent
SRVVMNVTAKKXXXXXXXXXIKRVQVPRLKTPAXTPKT

SEQ ID NO: 27920 - protein, 33 aa, Artificial Sequence
  Non-cyclic GFR-binding peptide
  MOD_RES (1)..(32)..(33): Xaa is C or S
XSKVIMVTAKKIKPTKGIIKRIQVPRLDQSVXX

SEQ ID NO: 27921 - protein, 35 aa, Artificial Sequence
  Non-cyclic GFR-binding peptide
  MOD_RES (32)..(32): Xaa is C or S
SRVVMNSMEGIIVNSSDDMIQVTINSLKTPAXTPK

SEQ ID NO: 27922 - protein, 40 aa, Artificial Sequence
  Non-cyclic GFR-binding peptide
  MOD_RES (1)..(35)..(36): Xaa is C or S
  MOD_RES (13)..(14)..(15)..(16)..(17): Xaa is A or G
  MOD_RES (18)..(19)..(20)..(21): Xaa is A or G or absent
XSRVVMNVTAKKXXXXXXXXXIKRVQVPRLKTPAXXPKPV

SEQ ID NO: 27923 - protein, 36 aa, Artificial Sequence
  Non-cyclic GFR-binding peptide
  MOD_RES (33)..(34): Xaa is C or S
  MOD_RES (11)..(12)..(13)..(14)..(15): Xaa is A or G
  MOD_RES (16)..(17)..(18)..(19): Xaa is A or G or absent
SKVVMSMEGIXXXXXXXXXMIQITINSLDQPVXXPS

SEQ ID NO: 27924 - protein, 38 aa, Artificial Sequence
  Non-cyclic GFR-binding peptide
  MOD_RES (32)..(33): Xaa is C or S
GEVVMEVTAKKVVKDYEDIKRMQVPRLETPVXXAKPIS

SEQ ID NO: 27925 - protein, 38 aa, Artificial Sequence
  Non-cyclic GFR-binding peptide
  MOD_RES (1)..(38): Xaa is C or S
  MOD_RES (14)..(15)..(16)..(17)..(18): Xaa is A or G
  MOD_RES (19)..(20)..(21)..(22): Xaa is A or G or absent
XALHDELTNSLQEXXXXXXXXXYYLVTLPELQVQTPRX

SEQ ID NO: 27926 - protein, 38 aa, Artificial Sequence
  Non-cyclic GFR-binding peptide
  MOD_RES (1)..(3)..(35)..(36): Xaa is C or S
XGXGEVVMEVTAKKVVKDYEDIKRMQVPRLETPVXXAK

SEQ ID NO: 27927 - protein, 37 aa, Artificial Sequence
  Non-cyclic GFR-binding peptide
  MOD_RES (2)..(35)..(36): Xaa is C or S
  MOD_RES (13)..(14)..(15)..(16)..(17): Xaa is A or G
  MOD_RES (18)..(19)..(20)..(21): Xaa is A or G or absent
KXSRVIMSMEGIXXXXXXXXXMIQITINSLAQPVXXP

SEQ ID NO: 27928 - protein, 40 aa, Artificial Sequence
  Non-cyclic GFR-binding peptide
  MOD_RES (1)..(3)..(37)..(38): Xaa is C or S
  MOD_RES (15)..(16)..(17)..(18)..(19): Xaa is A or G
  MOD_RES (20)..(21)..(22)..(23): Xaa is A or G or absent
XGXGEVVMESMEGIXXXXXXXXXMIQMTINSLETPVXXAK

SEQ ID NO: 27929 - protein, 36 aa, Artificial Sequence
  Non-cyclic GFR-binding peptide
  MOD_RES (1)..(35): Xaa is C or S
  MOD_RES (13)..(14)..(15)..(16)..(17): Xaa is A or G
  MOD_RES (18)..(19)..(20)..(21): Xaa is A or G or absent
XSRVVMNSMEGIXXXXXXXXXMIQVTINSLKTPAXT

SEQ ID NO: 27930 - protein, 37 aa, Artificial Sequence
  Non-cyclic GFR-binding peptide
  MOD_RES (2)..(4)..(36)..(37): Xaa is C or S
HXGXSRVVMNVTAKKIVNSSDDIKRVQVPRLKTPAXX

SEQ ID NO: 27931 - protein, 37 aa, Artificial Sequence
  Non-cyclic GFR-binding peptide
  MOD_RES (33)..(34): Xaa is C or S
  MOD_RES (11)..(12)..(13)..(14)..(15): Xaa is A or G
  MOD_RES (16)..(17)..(18)..(19): Xaa is A or G or absent
RVVMNSMEGIXXXXXXXXXMIQVTINSLQTPAXXPKP

SEQ ID NO: 27932 - protein, 38 aa, Artificial Sequence
  Non-cyclic GFR-binding peptide
  MOD_RES (2)..(4): Xaa is C or S
  MOD_RES (17)..(18)..(19)..(20)..(21): Xaa is A or G
  MOD_RES (22)..(23)..(24)..(25): Xaa is A or G or absent
AXAXELHEELRNSLQEXXXXXXXXXYYVVPLPEHHVRS

SEQ ID NO: 27933 - protein, 36 aa, Artificial Sequence
  Non-cyclic GFR-binding peptide
  MOD_RES (2)..(4)..(35)..(36): Xaa is C or S
SXKXSKVIMVTAKKIKPTKGIIKRIQVPRLDQSVXX

SEQ ID NO: 27934 - protein, 37 aa, Artificial Sequence
  Non-cyclic GFR-binding peptide
  MOD_RES (1)..(33)..(34): Xaa is C or S
XARVVMNVQVEKIVNSSDDVKAVKVSRLQTPAXXPKP

SEQ ID NO: 27935 - protein, 41 aa, Artificial Sequence
  Non-cyclic GFR-binding peptide
  MOD_RES (1)..(3)..(37): Xaa is C or S
  MOD_RES (15)..(16)..(17)..(18)..(19): Xaa is A or G
  MOD_RES (20)..(21)..(22)..(23): Xaa is A or G or absent
XEXKNHQLFNSLQEXXXXXXXXXYYVMPLPEEETPVXELGE

SEQ ID NO: 27936 - protein, 42 aa, Artificial Sequence
  Non-cyclic GFR-binding peptide
  MOD_RES (2)..(4)..(36)..(37): Xaa is C or S
HXGXARVVMNVTAKKIVNSSDDIKRVQVPRLQTPAXXPKPVT

SEQ ID NO: 27937 - protein, 36 aa, Artificial Sequence
  Non-cyclic GFR-binding peptide
  MOD_RES (33)..(34): Xaa is C or S
  MOD_RES (11)..(12)..(13)..(14)..(15): Xaa is A or G
  MOD_RES (16)..(17)..(18)..(19): Xaa is A or G or absent
EVVMEVQVEKXXXXXXXXXVKAMKVSRLETPVXXAK

SEQ ID NO: 27938 - protein, 41 aa, Artificial Sequence
  Non-cyclic GFR-binding peptide
  MOD_RES (2)..(4)..(41): Xaa is C or S
  MOD_RES (17)..(18)..(19)..(20)..(21): Xaa is A or G
  MOD_RES (22)..(23)..(24)..(25): Xaa is A or G or absent
AXAXELHEELRNSLQEXXXXXXXXXYYLVTLPEHHVRSPQX

SEQ ID NO: 27939 - protein, 42 aa, Artificial Sequence
  Non-cyclic GFR-binding peptide
  MOD_RES (1)..(3)..(37)..(38): Xaa is C or S
  MOD_RES (15)..(16)..(17)..(18)..(19): Xaa is A or G
  MOD_RES (20)..(21)..(22)..(23): Xaa is A or G or absent
XGXSRVVMNVQVEKXXXXXXXXXVKAVKVSRLKTPAXXPKPV

SEQ ID NO: 27940 - protein, 30 aa, Artificial Sequence
  Non-cyclic GFR-binding peptide
SRVIMVQVEKVKPKRGVVKAIKVSRLAQPV

SEQ ID NO: 27941 - protein, 37 aa, Artificial Sequence
  Non-cyclic GFR-binding peptide
  MOD_RES (34)..(34): Xaa is C or S
  MOD_RES (12)..(13)..(14)..(15)..(16): Xaa is A or G
  MOD_RES (17)..(18)..(19)..(20): Xaa is A or G or absent
SRVVMNVQVEKXXXXXXXXXVKAVKVSRLKTPAXTPK

SEQ ID NO: 27942 - protein, 33 aa, Artificial Sequence
  Non-cyclic GFR-binding peptide
  MOD_RES (32)..(33): Xaa is C or S
ARVVMNVQVEKIVNSSDDVKAVKVSRLQTPAXX

SEQ ID NO: 27943 - protein, 39 aa, Artificial Sequence
  Non-cyclic GFR-binding peptide
  MOD_RES (34)..(35): Xaa is C or S
  MOD_RES (12)..(13)..(14)..(15)..(16): Xaa is A or G
  MOD_RES (17)..(18)..(19)..(20): Xaa is A or G or absent
GEVVMDSMEGIXXXXXXXXXMIQMTINSLETPVXXAKPI

SEQ ID NO: 27944 - protein, 35 aa, Artificial Sequence
  Non-cyclic GFR-binding peptide
  MOD_RES (2)..(2): Xaa is C or S
  MOD_RES (14)..(15)..(16)..(17)..(18): Xaa is A or G
  MOD_RES (19)..(20)..(21)..(22): Xaa is A or G or absent
GXARVVMNVTAKKXXXXXXXXXIKRVQVPRLQTPA

SEQ ID NO: 27945 - protein, 37 aa, Artificial Sequence
  Non-cyclic GFR-binding peptide
  MOD_RES (1)..(33)..(34): Xaa is C or S
XSRVVMNVTAKKIVNSSDDIKRVQVPRLKTPAXXPKP

SEQ ID NO: 27946 - protein, 41 aa, Artificial Sequence
  Non-cyclic GFR-binding peptide
  MOD_RES (1)..(38): Xaa is C or S
  MOD_RES (14)..(15)..(16)..(17)..(18): Xaa is A or G
  MOD_RES (19)..(20)..(21)..(22): Xaa is A or G or absent
XALHDELTNSLQEXXXXXXXXXYYVVPLPELQVQTPRXQVN

SEQ ID NO: 27947 - protein, 38 aa, Artificial Sequence
  Non-cyclic GFR-binding peptide
  MOD_RES (33)..(33): Xaa is C or S
  MOD_RES (11)..(12)..(13)..(14)..(15): Xaa is A or G
  MOD_RES (16)..(17)..(18)..(19): Xaa is A or G or absent
NHQLFNSLQEXXXXXXXXXYYVMPLPEEETPVXELGED

SEQ ID NO: 27948 - protein, 33 aa, Artificial Sequence
  Non-cyclic GFR-binding peptide
  MOD_RES (31)..(32): Xaa is C or S
SKVVMVQVEKVKPTRGVVKAIKVSRLDQPVXXP

SEQ ID NO: 27949 - protein, 37 aa, Artificial Sequence
  Non-cyclic GFR-binding peptide
  MOD_RES (2)..(33)..(34): Xaa is C or S
KXSKVVMVQVEKVKPTRGVVKAIKVSRLDQPVXXPSA

SEQ ID NO: 27950 - protein, 41 aa, Artificial Sequence
  Non-cyclic GFR-binding peptide
  MOD_RES (1)..(3)..(36)..(37): Xaa is C or S
  MOD_RES (14)..(15)..(16)..(17)..(18): Xaa is A or G
  MOD_RES (19)..(20)..(21)..(22): Xaa is A or G or absent
XKXSRVIMVTAKKXXXXXXXXXIKRIQVPRLAQPVXXPAAS

SEQ ID NO: 27951 - protein, 41 aa, Artificial Sequence
  Non-cyclic GFR-binding peptide
  MOD_RES (2)..(39): Xaa is C or S
  MOD_RES (15)..(16)..(17)..(18)..(19): Xaa is A or G
  MOD_RES (20)..(21)..(22)..(23): Xaa is A or G or absent
AXELHEELRNSLQEXXXXXXXXXYYLVTLPEHHVRSPQXKV

SEQ ID NO: 27952 - protein, 31 aa, Artificial Sequence
  Non-cyclic GFR-binding peptide
ARVVMNVTAKKIVNSSDDIKRVQVPRLQTPA

SEQ ID NO: 27953 - protein, 39 aa, Artificial Sequence
  Non-cyclic GFR-binding peptide
  MOD_RES (2)..(4)..(38)..(39): Xaa is C or S
  MOD_RES (16)..(17)..(18)..(19)..(20): Xaa is A or G
  MOD_RES (21)..(22)..(23)..(24): Xaa is A or G or absent
HXGXSRVVMNSMEGIXXXXXXXXXMIQVTINSLKTPAXX

SEQ ID NO: 27954 - protein, 41 aa, Artificial Sequence
  Non-cyclic GFR-binding peptide
  MOD_RES (2)..(36): Xaa is C or S
  MOD_RES (14)..(15)..(16)..(17)..(18): Xaa is A or G
  MOD_RES (19)..(20)..(21)..(22): Xaa is A or G or absent
EXKNHQLFNSLQEXXXXXXXXXYYLMTLPEEETPVXELGED

SEQ ID NO: 27955 - protein, 39 aa, Artificial Sequence
  Non-cyclic GFR-binding peptide
  MOD_RES (33)..(34): Xaa is C or S
  MOD_RES (11)..(12)..(13)..(14)..(15): Xaa is A or G
  MOD_RES (16)..(17)..(18)..(19): Xaa is A or G or absent
SKVIMVTAKKXXXXXXXXXIKRIQVPRLDQSVXXPSASA

SEQ ID NO: 27956 - protein, 38 aa, Artificial Sequence
  Non-cyclic GFR-binding peptide
  MOD_RES (2)..(2): Xaa is C or S
KXALHDELTNSLQEFIPKKRVIEYYLVTLPELQVQTPR

SEQ ID NO: 27957 - protein, 35 aa, Artificial Sequence
  Non-cyclic GFR-binding peptide
  MOD_RES (32)..(33): Xaa is C or S
GEVVMEVQVEKVVKDYEDVKAMKVSRLETPVXXAK

SEQ ID NO: 27958 - protein, 37 aa, Artificial Sequence
  Non-cyclic GFR-binding peptide
  MOD_RES (1)..(3)..(34)..(35): Xaa is C or S
XKXSRVIMSMEGIVKPKRGVMIQITINSLAQPVXXPA

SEQ ID NO: 27959 - protein, 40 aa, Artificial Sequence
  Non-cyclic GFR-binding peptide
  MOD_RES (2)..(4)..(35)..(36): Xaa is C or S
SXKXSKVVMVTAKKVKPTRGVIKRIQVPRLDQPVXXPSAS

SEQ ID NO: 27960 - protein, 36 aa, Artificial Sequence
  Non-cyclic GFR-binding peptide
  MOD_RES (33)..(34): Xaa is C or S
  MOD_RES (11)..(12)..(13)..(14)..(15): Xaa is A or G
  MOD_RES (16)..(17)..(18)..(19): Xaa is A or G or absent
RVVMNVQVEKXXXXXXXXXVKAVKVSRLQTPAXXPK

SEQ ID NO: 27961 - protein, 45 aa, Artificial Sequence
  Non-cyclic GFR-binding peptide
  MOD_RES (2)..(4)..(41): Xaa is C or S
AXAXELHEELRNSLQELKPKKRVYEYYLVTLPEHHVRSPQXKVSS

SEQ ID NO: 27962 - protein, 34 aa, Artificial Sequence
  Non-cyclic GFR-binding peptide
  MOD_RES (2)..(33)..(34): Xaa is C or S
KXSKVIMVQVEKIKPTKGIVKAIKVSRLDQSVXX

SEQ ID NO: 27963 - protein, 37 aa, Artificial Sequence
  Non-cyclic GFR-binding peptide
  MOD_RES (1)..(32)..(33): Xaa is C or S
XSRVIMVQVEKVKPKRGVVKAIKVSRLAQPVXXPAAS

SEQ ID NO: 27964 - protein, 39 aa, Artificial Sequence
  Non-cyclic GFR-binding peptide
  MOD_RES (1)..(3)..(37): Xaa is C or S
  MOD_RES (15)..(16)..(17)..(18)..(19): Xaa is A or G
  MOD_RES (20)..(21)..(22)..(23): Xaa is A or G or absent
XEXKNHQLFNSLQEXXXXXXXXXYYVMPLPEEETPVXEL

SEQ ID NO: 27965 - protein, 41 aa, Artificial Sequence
  Non-cyclic GFR-binding peptide
  MOD_RES (1)..(3)..(35)..(36): Xaa is C or S
XGXGEVVMDVQVEKVVKENEDVKAMKVSRLETPVXXAKPIK

SEQ ID NO: 27966 - protein, 43 aa, Artificial Sequence
  Non-cyclic GFR-binding peptide
  MOD_RES (1)..(3)..(40): Xaa is C or S
  MOD_RES (16)..(17)..(18)..(19)..(20): Xaa is A or G
  MOD_RES (21)..(22)..(23)..(24): Xaa is A or G or absent
XKXALHDELTNSLQEXXXXXXXXXYYVVPLPELQVQTPRXQVN

SEQ ID NO: 27967 - protein, 40 aa, Artificial Sequence
  Non-cyclic GFR-binding peptide
  MOD_RES (2)..(4)..(35)..(36): Xaa is C or S
SXKXSRVIMSMEGIVKPKRGVMIQITINSLAQPVXXPAAS

SEQ ID NO: 27968 - protein, 31 aa, Artificial Sequence
  Non-cyclic GFR-binding peptide
  MOD_RES (31)..(31): Xaa is C or S
EVVMDVQVEKVVKENEDVKAMKVSRLETPVX

SEQ ID NO: 27969 - protein, 34 aa, Artificial Sequence
  Non-cyclic GFR-binding peptide
  MOD_RES (1)..(3): Xaa is C or S
XGXGEVVMDSMEGIVVKENEDMIQMTINSLETPV

SEQ ID NO: 27970 - protein, 42 aa, Artificial Sequence
  Non-cyclic GFR-binding peptide
  MOD_RES (2)..(4)..(41): Xaa is C or S
  MOD_RES (17)..(18)..(19)..(20)..(21): Xaa is A or G
  MOD_RES (22)..(23)..(24)..(25): Xaa is A or G or absent
AXAXELHEELRNSLQEXXXXXXXXXYYLVTLPEHHVRSPQXK

SEQ ID NO: 27971 - protein, 39 aa, Artificial Sequence
  Non-cyclic GFR-binding peptide
  MOD_RES (33)..(34): Xaa is C or S
  MOD_RES (11)..(12)..(13)..(14)..(15): Xaa is A or G
  MOD_RES (16)..(17)..(18)..(19): Xaa is A or G or absent
RVVMNVTAKKXXXXXXXXXIKRVQVPRLQTPAXXPKPVT

SEQ ID NO: 27972 - protein, 37 aa, Artificial Sequence
  Non-cyclic GFR-binding peptide
  MOD_RES (33)..(34): Xaa is C or S
  MOD_RES (11)..(12)..(13)..(14)..(15): Xaa is A or G
  MOD_RES (16)..(17)..(18)..(19): Xaa is A or G or absent
EVVMESMEGIXXXXXXXXXMIQMTINSLETPVXXAKP

SEQ ID NO: 27973 - protein, 34 aa, Artificial Sequence
  Non-cyclic GFR-binding peptide
  MOD_RES (1)..(34): Xaa is C or S
  MOD_RES (12)..(13)..(14)..(15)..(16): Xaa is A or G
  MOD_RES (17)..(18)..(19)..(20): Xaa is A or G or absent
XSKVVMVTAKKXXXXXXXXXIKRIQVPRLDQPVX

SEQ ID NO: 27974 - protein, 38 aa, Artificial Sequence
  Non-cyclic GFR-binding peptide
  MOD_RES (2)..(2): Xaa is C or S
  MOD_RES (15)..(16)..(17)..(18)..(19): Xaa is A or G
  MOD_RES (20)..(21)..(22)..(23): Xaa is A or G or absent
KXALHDELTNSLQEXXXXXXXXXYYLVTLPELQVQTPR

SEQ ID NO: 27975 - protein, 35 aa, Artificial Sequence
  Non-cyclic GFR-binding peptide
  MOD_RES (33)..(33): Xaa is C or S
NHQLFNSLQEHQGQHPKIRYYVMPLPEEETPVXEL

SEQ ID NO: 27976 - protein, 43 aa, Artificial Sequence
  Non-cyclic GFR-binding peptide
  MOD_RES (2)..(4)..(38): Xaa is C or S
  MOD_RES (16)..(17)..(18)..(19)..(20): Xaa is A or G
  MOD_RES (21)..(22)..(23)..(24): Xaa is A or G or absent
RXEXKNHQLFNSLQEXXXXXXXXXYYLMTLPEEETPVXELGED

SEQ ID NO: 27977 - protein, 41 aa, Artificial Sequence
  Non-cyclic GFR-binding peptide
  MOD_RES (2)..(36)..(37): Xaa is C or S
  MOD_RES (14)..(15)..(16)..(17)..(18): Xaa is A or G
  MOD_RES (19)..(20)..(21)..(22): Xaa is A or G or absent
GXGEVVMDVQVEKXXXXXXXXXVKAMKVSRLETPVXXAKPI

SEQ ID NO: 27978 - protein, 36 aa, Artificial Sequence
  Non-cyclic GFR-binding peptide
  MOD_RES (1)..(3): Xaa is C or S
  MOD_RES (15)..(16)..(17)..(18)..(19): Xaa is A or G
  MOD_RES (20)..(21)..(22)..(23): Xaa is A or G or absent
XGXGEVVMDVQVEKXXXXXXXXXVKAMKVSRLETPV

SEQ ID NO: 27979 - protein, 36 aa, Artificial Sequence
  Non-cyclic GFR-binding peptide
  MOD_RES (1)..(3)..(35): Xaa is C or S
XGXSRVVMNSMEGIIVNSSDDMIQVTINSLKTPAXT

SEQ ID NO: 27980 - protein, 34 aa, Artificial Sequence
  Non-cyclic GFR-binding peptide
  MOD_RES (1)..(32)..(33): Xaa is C or S
XSKVVMVTAKKVKPTRGVIKRIQVPRLDQPVXXP

SEQ ID NO: 27981 - protein, 34 aa, Artificial Sequence
  Non-cyclic GFR-binding peptide
  MOD_RES (2)..(2): Xaa is C or S
  MOD_RES (13)..(14)..(15)..(16)..(17): Xaa is A or G
  MOD_RES (18)..(19)..(20)..(21): Xaa is A or G or absent
KXSKVVMVQVEKXXXXXXXXXVKAIKVSRLDQPV

SEQ ID NO: 27982 - protein, 43 aa, Artificial Sequence
  Non-cyclic GFR-binding peptide
  MOD_RES (2)..(4)..(37)..(38): Xaa is C or S
  MOD_RES (15)..(16)..(17)..(18)..(19): Xaa is A or G
  MOD_RES (20)..(21)..(22)..(23): Xaa is A or G or absent
SXKXSKVVMSMEGIXXXXXXXXXMIQITINSLDQPVXXPSASA

SEQ ID NO: 27983 - protein, 42 aa, Artificial Sequence
  Non-cyclic GFR-binding peptide
  MOD_RES (2)..(39): Xaa is C or S
KXALHDELTNSLQEFIPKKRVIEYYLVTLPELQVQTPRXQVN

SEQ ID NO: 27984 - protein, 39 aa, Artificial Sequence
  Non-cyclic GFR-binding peptide
  MOD_RES (33)..(34): Xaa is C or S
  MOD_RES (11)..(12)..(13)..(14)..(15): Xaa is A or G
  MOD_RES (16)..(17)..(18)..(19): Xaa is A or G or absent
RVVMNVQVEKXXXXXXXXXVKAVKVSRLQTPAXXPKPVT

SEQ ID NO: 27985 - protein, 37 aa, Artificial Sequence
  Non-cyclic GFR-binding peptide
  MOD_RES (34)..(34): Xaa is C or S
  MOD_RES (12)..(13)..(14)..(15)..(16): Xaa is A or G
  MOD_RES (17)..(18)..(19)..(20): Xaa is A or G or absent
KNHQLFNSLQEXXXXXXXXXYYVMPLPEEETPVXELG

SEQ ID NO: 27986 - protein, 39 aa, Artificial Sequence
  Non-cyclic GFR-binding peptide
  MOD_RES (2)..(35)..(36): Xaa is C or S
  MOD_RES (13)..(14)..(15)..(16)..(17): Xaa is A or G
  MOD_RES (18)..(19)..(20)..(21): Xaa is A or G or absent
KXSKVVMVQVEKXXXXXXXXXVKAIKVSRLDQPVXXPSA

SEQ ID NO: 27987 - protein, 37 aa, Artificial Sequence
  Non-cyclic GFR-binding peptide
  MOD_RES (33)..(34): Xaa is C or S
  MOD_RES (11)..(12)..(13)..(14)..(15): Xaa is A or G
  MOD_RES (16)..(17)..(18)..(19): Xaa is A or G or absent
SKVIMSMEGIXXXXXXXXXMIQITINSLDQSVXXPSA

SEQ ID NO: 27988 - protein, 31 aa, Artificial Sequence
  Non-cyclic GFR-binding peptide
SRVVMNSMEGIIVNSSDDMIQVTINSLKTPA

SEQ ID NO: 27989 - protein, 40 aa, Artificial Sequence
  Non-cyclic GFR-binding peptide
  MOD_RES (2)..(4)..(38)..(39): Xaa is C or S
  MOD_RES (16)..(17)..(18)..(19)..(20): Xaa is A or G
  MOD_RES (21)..(22)..(23)..(24): Xaa is A or G or absent
RXGXGEVVMDSMEGIXXXXXXXXXMIQMTINSLETPVXXA

SEQ ID NO: 27990 - protein, 37 aa, Artificial Sequence
  Non-cyclic GFR-binding peptide
  MOD_RES (1)..(3)..(36)..(37): Xaa is C or S
  MOD_RES (14)..(15)..(16)..(17)..(18): Xaa is A or G
  MOD_RES (19)..(20)..(21)..(22): Xaa is A or G or absent
XKXSRVIMSMEGIXXXXXXXXXMIQITINSLAQPVXX

SEQ ID NO: 27991 - protein, 38 aa, Artificial Sequence
  Non-cyclic GFR-binding peptide
  MOD_RES (1)..(3)..(37): Xaa is C or S
  MOD_RES (15)..(16)..(17)..(18)..(19): Xaa is A or G
  MOD_RES (20)..(21)..(22)..(23): Xaa is A or G or absent
XGXSRVVMNSMEGIXXXXXXXXXMIQVTINSLKTPAXT

SEQ ID NO: 27992 - protein, 38 aa, Artificial Sequence
  Non-cyclic GFR-binding peptide
  MOD_RES (33)..(34): Xaa is C or S
  MOD_RES (11)..(12)..(13)..(14)..(15): Xaa is A or G
  MOD_RES (16)..(17)..(18)..(19): Xaa is A or G or absent
SRVIMSMEGIXXXXXXXXXMIQITINSLAQPVXXPAAS

SEQ ID NO: 27993 - protein, 41 aa, Artificial Sequence
  Non-cyclic GFR-binding peptide
  MOD_RES (2)..(4)..(36): Xaa is C or S
HXGXSRVVMNVTAKKIVNSSDDIKRVQVPRLKTPAXTPKTV

SEQ ID NO: 27994 - protein, 37 aa, Artificial Sequence
  Non-cyclic GFR-binding peptide
  MOD_RES (2)..(34)..(35): Xaa is C or S
GXSRVVMNSMEGIIVNSSDDMIQVTINSLKTPAXXPK

SEQ ID NO: 27995 - protein, 35 aa, Artificial Sequence
  Non-cyclic GFR-binding peptide
  MOD_RES (34)..(35): Xaa is C or S
  MOD_RES (12)..(13)..(14)..(15)..(16): Xaa is A or G
  MOD_RES (17)..(18)..(19)..(20): Xaa is A or G or absent
GEVVMDSMEGIXXXXXXXXXMIQMTINSLETPVXX

SEQ ID NO: 27996 - protein, 39 aa, Artificial Sequence
  Non-cyclic GFR-binding peptide
  MOD_RES (2)..(4)..(38)..(39): Xaa is C or S
  MOD_RES (16)..(17)..(18)..(19)..(20): Xaa is A or G
  MOD_RES (21)..(22)..(23)..(24): Xaa is A or G or absent
RXGXGEVVMDVQVEKXXXXXXXXXVKAMKVSRLETPVXX

SEQ ID NO: 27997 - protein, 36 aa, Artificial Sequence
  Non-cyclic GFR-binding peptide
  MOD_RES (2)..(4)..(35)..(36): Xaa is C or S
SXKXSKVVMVQVEKVKPTRGVVKAIKVSRLDQPVXX

SEQ ID NO: 27998 - protein, 32 aa, Artificial Sequence
  Non-cyclic GFR-binding peptide
  MOD_RES (31)..(32): Xaa is C or S
EVVMDVQVEKVVKENEDVKAMKVSRLETPVXX

SEQ ID NO: 27999 - protein, 38 aa, Artificial Sequence
  Non-cyclic GFR-binding peptide
  MOD_RES (1)..(35)..(36): Xaa is C or S
  MOD_RES (13)..(14)..(15)..(16)..(17): Xaa is A or G
  MOD_RES (18)..(19)..(20)..(21): Xaa is A or G or absent
XSRVVMNSMEGIXXXXXXXXXMIQVTINSLKTPAXXPK

SEQ ID NO: 28000 - protein, 32 aa, Artificial Sequence
  Non-cyclic GFR-binding peptide
  MOD_RES (2)..(2): Xaa is C or S
KXSKVIMVQVEKIKPTKGIVKAIKVSRLDQSV

SEQ ID NO: 28001 - protein, 34 aa, Artificial Sequence
  Non-cyclic GFR-binding peptide
  MOD_RES (32)..(33): Xaa is C or S
GEVVMDVQVEKVVKENEDVKAMKVSRLETPVXXA

SEQ ID NO: 28002 - protein, 39 aa, Artificial Sequence
  Non-cyclic GFR-binding peptide
  MOD_RES (2)..(4)..(36)..(37): Xaa is C or S
RXGXGEVVMDSMEGIVVKENEDMIQMTINSLETPVXXAK

SEQ ID NO: 28003 - protein, 35 aa, Artificial Sequence
  Non-cyclic GFR-binding peptide
  MOD_RES (2)..(35): Xaa is C or S
  MOD_RES (13)..(14)..(15)..(16)..(17): Xaa is A or G
  MOD_RES (18)..(19)..(20)..(21): Xaa is A or G or absent
KXSKVVMVQVEKXXXXXXXXXVKAIKVSRLDQPVX

SEQ ID NO: 28004 - protein, 39 aa, Artificial Sequence
  Non-cyclic GFR-binding peptide
  MOD_RES (1)..(3)..(37)..(38): Xaa is C or S
  MOD_RES (15)..(16)..(17)..(18)..(19): Xaa is A or G
  MOD_RES (20)..(21)..(22)..(23): Xaa is A or G or absent
XGXARVVMNSMEGIXXXXXXXXXMIQVTINSLQTPAXXP

SEQ ID NO: 28005 - protein, 40 aa, Artificial Sequence
  Non-cyclic GFR-binding peptide
  MOD_RES (2)..(4)..(38)..(39): Xaa is C or S
  MOD_RES (16)..(17)..(18)..(19)..(20): Xaa is A or G
  MOD_RES (21)..(22)..(23)..(24): Xaa is A or G or absent
HXGXARVVMNVQVEKXXXXXXXXXVKAVKVSRLQTPAXXP

SEQ ID NO: 28006 - protein, 40 aa, Artificial Sequence
  Non-cyclic GFR-binding peptide
  MOD_RES (2)..(39): Xaa is C or S
  MOD_RES (15)..(16)..(17)..(18)..(19): Xaa is A or G
  MOD_RES (20)..(21)..(22)..(23): Xaa is A or G or absent
AXELHEELRNSLQEXXXXXXXXXYYVVPLPEHHVRSPQXK

SEQ ID NO: 28007 - protein, 44 aa, Artificial Sequence
  Non-cyclic GFR-binding peptide
  MOD_RES (1)..(3)..(40): Xaa is C or S
  MOD_RES (16)..(17)..(18)..(19)..(20): Xaa is A or G
  MOD_RES (21)..(22)..(23)..(24): Xaa is A or G or absent
XKXALHDELTNSLQEXXXXXXXXXYYVVPLPELQVQTPRXQVNR

SEQ ID NO: 28008 - protein, 32 aa, Artificial Sequence
  Non-cyclic GFR-binding peptide
  MOD_RES (31)..(32): Xaa is C or S
EVVMEVQVEKVVKDYEDVKAMKVSRLETPVXX

SEQ ID NO: 28009 - protein, 37 aa, Artificial Sequence
  Non-cyclic GFR-binding peptide
  MOD_RES (31)..(31): Xaa is C or S
RVVMNSMEGIIVNSSDDMIQVTINSLKTPAXTPKTVH

SEQ ID NO: 28010 - protein, 40 aa, Artificial Sequence
  Non-cyclic GFR-binding peptide
  MOD_RES (2)..(4)..(36)..(37): Xaa is C or S
RXGXGEVVMDSMEGIVVKENEDMIQMTINSLETPVXXAKP

SEQ ID NO: 28011 - protein, 35 aa, Artificial Sequence
  Non-cyclic GFR-binding peptide
  MOD_RES (33)..(34): Xaa is C or S
  MOD_RES (11)..(12)..(13)..(14)..(15): Xaa is A or G
  MOD_RES (16)..(17)..(18)..(19): Xaa is A or G or absent
EVVMEVQVEKXXXXXXXXXVKAMKVSRLETPVXXA

SEQ ID NO: 28012 - protein, 41 aa, Artificial Sequence
  Non-cyclic GFR-binding peptide
  MOD_RES (2)..(36)..(37): Xaa is C or S
  MOD_RES (14)..(15)..(16)..(17)..(18): Xaa is A or G
  MOD_RES (19)..(20)..(21)..(22): Xaa is A or G or absent
GXSRVVMNVTAKKXXXXXXXXXIKRVQVPRLKTPAXXPKPV

SEQ ID NO: 28013 - protein, 34 aa, Artificial Sequence
  Non-cyclic GFR-binding peptide
  MOD_RES (33)..(33): Xaa is C or S
  MOD_RES (11)..(12)..(13)..(14)..(15): Xaa is A or G
  MOD_RES (16)..(17)..(18)..(19): Xaa is A or G or absent
NHQLFNSLQEXXXXXXXXXYYLMTLPEEETPVXE

SEQ ID NO: 28014 - protein, 34 aa, Artificial Sequence
  Non-cyclic GFR-binding peptide
  MOD_RES (31)..(32): Xaa is C or S
SRVIMVTAKKVKPKRGVIKRIQVPRLAQPVXXPA

SEQ ID NO: 28015 - protein, 36 aa, Artificial Sequence
  Non-cyclic GFR-binding peptide
  MOD_RES (33)..(34): Xaa is C or S
  MOD_RES (11)..(12)..(13)..(14)..(15): Xaa is A or G
  MOD_RES (16)..(17)..(18)..(19): Xaa is A or G or absent
SRVIMVQVEKXXXXXXXXXVKAIKVSRLAQPVXXPA

SEQ ID NO: 28016 - protein, 37 aa, Artificial Sequence
  Non-cyclic GFR-binding peptide
  MOD_RES (1)..(35)..(36): Xaa is C or S
  MOD_RES (13)..(14)..(15)..(16)..(17): Xaa is A or G
  MOD_RES (18)..(19)..(20)..(21): Xaa is A or G or absent
XARVVMNSMEGIXXXXXXXXXMIQVTINSLQTPAXXP

SEQ ID NO: 28017 - protein, 33 aa, Artificial Sequence
  Non-cyclic GFR-binding peptide
  MOD_RES (31)..(32): Xaa is C or S
RVVMNVQVEKIVNSSDDVKAVKVSRLKTPAXXP

SEQ ID NO: 28018 - protein, 36 aa, Artificial Sequence
  Non-cyclic GFR-binding peptide
  MOD_RES (1)..(3)..(36): Xaa is C or S
  MOD_RES (14)..(15)..(16)..(17)..(18): Xaa is A or G
  MOD_RES (19)..(20)..(21)..(22): Xaa is A or G or absent
XKXSRVIMSMEGIXXXXXXXXXMIQITINSLAQPVX

SEQ ID NO: 28019 - protein, 33 aa, Artificial Sequence
  Non-cyclic GFR-binding peptide
  MOD_RES (12)..(13)..(14)..(15)..(16): Xaa is A or G
  MOD_RES (17)..(18)..(19)..(20): Xaa is A or G or absent
LHEELRNSLQEXXXXXXXXXYYLVTLPEHHVRS

SEQ ID NO: 28020 - protein, 37 aa, Artificial Sequence
  Non-cyclic GFR-binding peptide
  MOD_RES (31)..(32): Xaa is C or S
EVVMDSMEGIVVKENEDMIQMTINSLETPVXXAKPIK

SEQ ID NO: 28021 - protein, 33 aa, Artificial Sequence
  Non-cyclic GFR-binding peptide
  MOD_RES (1)..(1): Xaa is C or S
  MOD_RES (12)..(13)..(14)..(15)..(16): Xaa is A or G
  MOD_RES (17)..(18)..(19)..(20): Xaa is A or G or absent
XSKVIMVTAKKXXXXXXXXXIKRIQVPRLDQSV

SEQ ID NO: 28022 - protein, 39 aa, Artificial Sequence
  Non-cyclic GFR-binding peptide
  MOD_RES (36)..(36): Xaa is C or S
  MOD_RES (12)..(13)..(14)..(15)..(16): Xaa is A or G
  MOD_RES (17)..(18)..(19)..(20): Xaa is A or G or absent
LHEELRNSLQEXXXXXXXXXYYVVPLPEHHVRSPQXKVS

SEQ ID NO: 28023 - protein, 40 aa, Artificial Sequence
  Non-cyclic GFR-binding peptide
  MOD_RES (1)..(3)..(35)..(36): Xaa is C or S
XGXGEVVMDVTAKKVVKENEDIKRMQVPRLETPVXXAKPI

SEQ ID NO: 28024 - protein, 38 aa, Artificial Sequence
  Non-cyclic GFR-binding peptide
  MOD_RES (1)..(3)..(34)..(35): Xaa is C or S
XKXSKVIMVTAKKIKPTKGIIKRIQVPRLDQSVXXPSA

SEQ ID NO: 28025 - protein, 36 aa, Artificial Sequence
  Non-cyclic GFR-binding peptide
  MOD_RES (33)..(33): Xaa is C or S
  MOD_RES (11)..(12)..(13)..(14)..(15): Xaa is A or G
  MOD_RES (16)..(17)..(18)..(19): Xaa is A or G or absent
RVVMNVTAKKXXXXXXXXXIKRVQVPRLKTPAXTPK

SEQ ID NO: 28026 - protein, 39 aa, Artificial Sequence
  Non-cyclic GFR-binding peptide
  MOD_RES (2)..(35)..(36): Xaa is C or S
  MOD_RES (13)..(14)..(15)..(16)..(17): Xaa is A or G
  MOD_RES (18)..(19)..(20)..(21): Xaa is A or G or absent
KXSKVVMVTAKKXXXXXXXXXIKRIQVPRLDQPVXXPSA

SEQ ID NO: 28027 - protein, 38 aa, Artificial Sequence
  Non-cyclic GFR-binding peptide
  MOD_RES (1)..(35)..(36): Xaa is C or S
  MOD_RES (13)..(14)..(15)..(16)..(17): Xaa is A or G
  MOD_RES (18)..(19)..(20)..(21): Xaa is A or G or absent
XGEVVMEVQVEKXXXXXXXXXVKAMKVSRLETPVXXAK

SEQ ID NO: 28028 - protein, 40 aa, Artificial Sequence
  Non-cyclic GFR-binding peptide
  MOD_RES (2)..(36)..(37): Xaa is C or S
  MOD_RES (14)..(15)..(16)..(17)..(18): Xaa is A or G
  MOD_RES (19)..(20)..(21)..(22): Xaa is A or G or absent
GXSRVVMNVQVEKXXXXXXXXXVKAVKVSRLKTPAXXPKP

SEQ ID NO: 28029 - protein, 36 aa, Artificial Sequence
  Non-cyclic GFR-binding peptide
  MOD_RES (1)..(1): Xaa is C or S
XALHDELTNSLQEFIPKKRVIEYYVVPLPELQVQTP

SEQ ID NO: 28030 - protein, 34 aa, Artificial Sequence
  Non-cyclic GFR-binding peptide
  MOD_RES (2)..(33)..(34): Xaa is C or S
KXSKVIMVTAKKIKPTKGIIKRIQVPRLDQSVXX

SEQ ID NO: 28031 - protein, 39 aa, Artificial Sequence
  Non-cyclic GFR-binding peptide
  MOD_RES (1)..(34)..(35): Xaa is C or S
  MOD_RES (12)..(13)..(14)..(15)..(16): Xaa is A or G
  MOD_RES (17)..(18)..(19)..(20): Xaa is A or G or absent
XSRVIMVTAKKXXXXXXXXXIKRIQVPRLAQPVXXPAAS

SEQ ID NO: 28032 - protein, 43 aa, Artificial Sequence
  Non-cyclic GFR-binding peptide
  MOD_RES (2)..(4)..(41): Xaa is C or S
  MOD_RES (17)..(18)..(19)..(20)..(21): Xaa is A or G
  MOD_RES (22)..(23)..(24)..(25): Xaa is A or G or absent
EXKXALHDELTNSLQEXXXXXXXXXYYLVTLPELQVQTPRXQV

SEQ ID NO: 28033 - protein, 39 aa, Artificial Sequence
  Non-cyclic GFR-binding peptide
  MOD_RES (1)..(34)..(35): Xaa is C or S
  MOD_RES (12)..(13)..(14)..(15)..(16): Xaa is A or G
  MOD_RES (17)..(18)..(19)..(20): Xaa is A or G or absent
XSKVIMVQVEKXXXXXXXXXVKAIKVSRLDQSVXXPSAS

SEQ ID NO: 28034 - protein, 32 aa, Artificial Sequence
  Non-cyclic GFR-binding peptide
  MOD_RES (2)..(2): Xaa is C or S
KXSKVIMVTAKKIKPTKGIIKRIQVPRLDQSV

SEQ ID NO: 28035 - protein, 35 aa, Artificial Sequence
  Non-cyclic GFR-binding peptide
  MOD_RES (1)..(35): Xaa is C or S
  MOD_RES (13)..(14)..(15)..(16)..(17): Xaa is A or G
  MOD_RES (18)..(19)..(20)..(21): Xaa is A or G or absent
XSRVVMNVTAKKXXXXXXXXXIKRVQVPRLKTPAX

SEQ ID NO: 28036 - protein, 37 aa, Artificial Sequence
  Non-cyclic GFR-binding peptide
  MOD_RES (1)..(3)..(35)..(36): Xaa is C or S
XGXARVVMNVTAKKIVNSSDDIKRVQVPRLQTPAXXP

SEQ ID NO: 28037 - protein, 35 aa, Artificial Sequence
  Non-cyclic GFR-binding peptide
  MOD_RES (2)..(33)..(34): Xaa is C or S
KXSKVIMSMEGIIKPTKGIMIQITINSLDQSVXXP

SEQ ID NO: 28038 - protein, 39 aa, Artificial Sequence
  Non-cyclic GFR-binding peptide
  MOD_RES (1)..(35): Xaa is C or S
  MOD_RES (13)..(14)..(15)..(16)..(17): Xaa is A or G
  MOD_RES (18)..(19)..(20)..(21): Xaa is A or G or absent
XSRVVMNVTAKKXXXXXXXXXIKRVQVPRLKTPAXTPKT

SEQ ID NO: 28039 - protein, 38 aa, Artificial Sequence
  Non-cyclic GFR-binding peptide
  MOD_RES (2)..(35)..(36): Xaa is C or S
  MOD_RES (13)..(14)..(15)..(16)..(17): Xaa is A or G
  MOD_RES (18)..(19)..(20)..(21): Xaa is A or G or absent
KXSKVIMSMEGIXXXXXXXXXMIQITINSLDQSVXXPS

SEQ ID NO: 28040 - protein, 38 aa, Artificial Sequence
  Non-cyclic GFR-binding peptide
  MOD_RES (1)..(35)..(36): Xaa is C or S
  MOD_RES (13)..(14)..(15)..(16)..(17): Xaa is A or G
  MOD_RES (18)..(19)..(20)..(21): Xaa is A or G or absent
XARVVMNVTAKKXXXXXXXXXIKRVQVPRLQTPAXXPK

SEQ ID NO: 28041 - protein, 42 aa, Artificial Sequence
  Non-cyclic GFR-binding peptide
  MOD_RES (1)..(3)..(36)..(37): Xaa is C or S
  MOD_RES (14)..(15)..(16)..(17)..(18): Xaa is A or G
  MOD_RES (19)..(20)..(21)..(22): Xaa is A or G or absent
XKXSKVVMSMEGIXXXXXXXXXMIQITINSLDQPVXXPSASA

SEQ ID NO: 28042 - protein, 34 aa, Artificial Sequence
  Non-cyclic GFR-binding peptide
  MOD_RES (33)..(34): Xaa is C or S
  MOD_RES (11)..(12)..(13)..(14)..(15): Xaa is A or G
  MOD_RES (16)..(17)..(18)..(19): Xaa is A or G or absent
SKVIMSMEGIXXXXXXXXXMIQITINSLDQSVXX

SEQ ID NO: 28043 - protein, 39 aa, Artificial Sequence
  Non-cyclic GFR-binding peptide
  MOD_RES (1)..(3)..(37)..(38): Xaa is C or S
  MOD_RES (15)..(16)..(17)..(18)..(19): Xaa is A or G
  MOD_RES (20)..(21)..(22)..(23): Xaa is A or G or absent
XGXGEVVMEVQVEKXXXXXXXXXVKAMKVSRLETPVXXA

SEQ ID NO: 28044 - protein, 32 aa, Artificial Sequence
  Non-cyclic GFR-binding peptide
  MOD_RES (31)..(31): Xaa is C or S
RVVMNVTAKKIVNSSDDIKRVQVPRLKTPAXT

SEQ ID NO: 28045 - protein, 34 aa, Artificial Sequence
  Non-cyclic GFR-binding peptide
  MOD_RES (1)..(3): Xaa is C or S
XGXGEVVMESMEGIVVKDYEDMIQMTINSLETPV

SEQ ID NO: 28046 - protein, 38 aa, Artificial Sequence
  Non-cyclic GFR-binding peptide
  MOD_RES (33)..(34): Xaa is C or S
  MOD_RES (11)..(12)..(13)..(14)..(15): Xaa is A or G
  MOD_RES (16)..(17)..(18)..(19): Xaa is A or G or absent
RVVMNSMEGIXXXXXXXXXMIQVTINSLKTPAXXPKPV

SEQ ID NO: 28047 - protein, 37 aa, Artificial Sequence
  Non-cyclic GFR-binding peptide
  MOD_RES (37)..(37): Xaa is C or S
  MOD_RES (13)..(14)..(15)..(16)..(17): Xaa is A or G
  MOD_RES (18)..(19)..(20)..(21): Xaa is A or G or absent
ELHEELRNSLQEXXXXXXXXXYYLVTLPEHHVRSPQX

SEQ ID NO: 28048 - protein, 42 aa, Artificial Sequence
  Non-cyclic GFR-binding peptide
  MOD_RES (1)..(3)..(37): Xaa is C or S
  MOD_RES (15)..(16)..(17)..(18)..(19): Xaa is A or G
  MOD_RES (20)..(21)..(22)..(23): Xaa is A or G or absent
XEXKNHQLFNSLQEXXXXXXXXXYYLMTLPEEETPVXELGED

SEQ ID NO: 28049 - protein, 38 aa, Artificial Sequence
  Non-cyclic GFR-binding peptide
  MOD_RES (33)..(33): Xaa is C or S
  MOD_RES (11)..(12)..(13)..(14)..(15): Xaa is A or G
  MOD_RES (16)..(17)..(18)..(19): Xaa is A or G or absent
NHQLFNSLQEXXXXXXXXXYYLMTLPEEETPVXELGED

SEQ ID NO: 28050 - protein, 40 aa, Artificial Sequence
  Non-cyclic GFR-binding peptide
  MOD_RES (2)..(4)..(36)..(37): Xaa is C or S
HXGXARVVMNVTAKKIVNSSDDIKRVQVPRLQTPAXXPKP

SEQ ID NO: 28051 - protein, 37 aa, Artificial Sequence
  Non-cyclic GFR-binding peptide
  MOD_RES (1)..(35)..(36): Xaa is C or S
  MOD_RES (13)..(14)..(15)..(16)..(17): Xaa is A or G
  MOD_RES (18)..(19)..(20)..(21): Xaa is A or G or absent
XGEVVMDVQVEKXXXXXXXXXVKAMKVSRLETPVXXA

SEQ ID NO: 28052 - protein, 38 aa, Artificial Sequence
  Non-cyclic GFR-binding peptide
  MOD_RES (1)..(3)..(37)..(38): Xaa is C or S
  MOD_RES (15)..(16)..(17)..(18)..(19): Xaa is A or G
  MOD_RES (20)..(21)..(22)..(23): Xaa is A or G or absent
XGXARVVMNVTAKKXXXXXXXXXIKRVQVPRLQTPAXX

SEQ ID NO: 28053 - protein, 39 aa, Artificial Sequence
  Non-cyclic GFR-binding peptide
  MOD_RES (2)..(34)..(35): Xaa is C or S
GXARVVMNVTAKKIVNSSDDIKRVQVPRLQTPAXXPKPV

SEQ ID NO: 28054 - protein, 43 aa, Artificial Sequence
  Non-cyclic GFR-binding peptide
  MOD_RES (2)..(4)..(38)..(39): Xaa is C or S
  MOD_RES (16)..(17)..(18)..(19)..(20): Xaa is A or G
  MOD_RES (21)..(22)..(23)..(24): Xaa is A or G or absent
RXGXGEVVMEVTAKKXXXXXXXXXIKRMQVPRLETPVXXAKPI

SEQ ID NO: 28055 - protein, 36 aa, Artificial Sequence
  Non-cyclic GFR-binding peptide
  MOD_RES (32)..(33): Xaa is C or S
GEVVMDSMEGIVVKENEDMIQMTINSLETPVXXAKP

SEQ ID NO: 28056 - protein, 36 aa, Artificial Sequence
  Non-cyclic GFR-binding peptide
  MOD_RES (1)..(3)..(36): Xaa is C or S
  MOD_RES (14)..(15)..(16)..(17)..(18): Xaa is A or G
  MOD_RES (19)..(20)..(21)..(22): Xaa is A or G or absent
XKXSKVVMVTAKKXXXXXXXXXIKRIQVPRLDQPVX

SEQ ID NO: 28057 - protein, 37 aa, Artificial Sequence
  Non-cyclic GFR-binding peptide
  MOD_RES (2)..(33)..(34): Xaa is C or S
KXSKVIMVTAKKIKPTKGIIKRIQVPRLDQSVXXPSA

SEQ ID NO: 28058 - protein, 38 aa, Artificial Sequence
  Non-cyclic GFR-binding peptide
  MOD_RES (35)..(35): Xaa is C or S
HDELTNSLQEFIPKKRVIEYYLVTLPELQVQTPRXQVN

SEQ ID NO: 28059 - protein, 36 aa, Artificial Sequence
  Non-cyclic GFR-binding peptide
  MOD_RES (2)..(2): Xaa is C or S
  MOD_RES (15)..(16)..(17)..(18)..(19): Xaa is A or G
  MOD_RES (20)..(21)..(22)..(23): Xaa is A or G or absent
AXELHEELRNSLQEXXXXXXXXXYYLVTLPEHHVRS

SEQ ID NO: 28060 - protein, 44 aa, Artificial Sequence
  Non-cyclic GFR-binding peptide
  MOD_RES (2)..(4)..(38)..(39): Xaa is C or S
  MOD_RES (16)..(17)..(18)..(19)..(20): Xaa is A or G
  MOD_RES (21)..(22)..(23)..(24): Xaa is A or G or absent
HXGXARVVMNVTAKKXXXXXXXXXIKRVQVPRLQTPAXXPKPVT

SEQ ID NO: 28061 - protein, 35 aa, Artificial Sequence
  Non-cyclic GFR-binding peptide
  MOD_RES (31)..(32): Xaa is C or S
SKVVMVTAKKVKPTRGVIKRIQVPRLDQPVXXPSA

SEQ ID NO: 28062 - protein, 39 aa, Artificial Sequence
  Non-cyclic GFR-binding peptide
  MOD_RES (2)..(4)..(36)..(37): Xaa is C or S
RXGXGEVVMEVQVEKVVKDYEDVKAMKVSRLETPVXXAK

SEQ ID NO: 28063 - protein, 39 aa, Artificial Sequence
  Non-cyclic GFR-binding peptide
  MOD_RES (2)..(39): Xaa is C or S
AXELHEELRNSLQELKPKKRVYEYYLVTLPEHHVRSPQX

SEQ ID NO: 28064 - protein, 42 aa, Artificial Sequence
  Non-cyclic GFR-binding peptide
  MOD_RES (2)..(4)..(38)..(39): Xaa is C or S
  MOD_RES (16)..(17)..(18)..(19)..(20): Xaa is A or G
  MOD_RES (21)..(22)..(23)..(24): Xaa is A or G or absent
HXGXSRVVMNVQVEKXXXXXXXXXVKAVKVSRLKTPAXXPKP

SEQ ID NO: 28065 - protein, 41 aa, Artificial Sequence
  Non-cyclic GFR-binding peptide
  MOD_RES (1)..(35): Xaa is C or S
XKNHQLFNSLQEHQGQHPKIRYYVMPLPEEETPVXELGEDN

SEQ ID NO: 28066 - protein, 33 aa, Artificial Sequence
  Non-cyclic GFR-binding peptide
  MOD_RES (12)..(13)..(14)..(15)..(16): Xaa is A or G
  MOD_RES (17)..(18)..(19)..(20): Xaa is A or G or absent
LHDELTNSLQEXXXXXXXXXYYLVTLPELQVQT

SEQ ID NO: 28067 - protein, 45 aa, Artificial Sequence
  Non-cyclic GFR-binding peptide
  MOD_RES (2)..(4)..(41): Xaa is C or S
AXAXELHEELRNSLQELKPKKRVYEYYVVPLPEHHVRSPQXKVSS

SEQ ID NO: 28068 - protein, 37 aa, Artificial Sequence
  Non-cyclic GFR-binding peptide
  MOD_RES (2)..(4): Xaa is C or S
  MOD_RES (16)..(17)..(18)..(19)..(20): Xaa is A or G
  MOD_RES (21)..(22)..(23)..(24): Xaa is A or G or absent
HXGXSRVVMNSMEGIXXXXXXXXXMIQVTINSLKTPA

SEQ ID NO: 28069 - protein, 40 aa, Artificial Sequence
  Non-cyclic GFR-binding peptide
  MOD_RES (2)..(4)..(38)..(39): Xaa is C or S
  MOD_RES (16)..(17)..(18)..(19)..(20): Xaa is A or G
  MOD_RES (21)..(22)..(23)..(24): Xaa is A or G or absent
RXGXGEVVMEVTAKKXXXXXXXXXIKRMQVPRLETPVXXA

SEQ ID NO: 28070 - protein, 38 aa, Artificial Sequence
  Non-cyclic GFR-binding peptide
  MOD_RES (1)..(32)..(33): Xaa is C or S
XSKVVMSMEGIVKPTRGVMIQITINSLDQPVXXPSASA

SEQ ID NO: 28071 - protein, 32 aa, Artificial Sequence
  Non-cyclic GFR-binding peptide
  MOD_RES (32)..(32): Xaa is C or S
GEVVMESMEGIVVKDYEDMIQMTINSLETPVX

SEQ ID NO: 28072 - protein, 35 aa, Artificial Sequence
  Non-cyclic GFR-binding peptide
  MOD_RES (2)..(2): Xaa is C or S
  MOD_RES (14)..(15)..(16)..(17)..(18): Xaa is A or G
  MOD_RES (19)..(20)..(21)..(22): Xaa is A or G or absent
GXGEVVMEVTAKKXXXXXXXXXIKRMQVPRLETPV

SEQ ID NO: 28073 - protein, 37 aa, Artificial Sequence
  Non-cyclic GFR-binding peptide
  MOD_RES (37)..(37): Xaa is C or S
  MOD_RES (13)..(14)..(15)..(16)..(17): Xaa is A or G
  MOD_RES (18)..(19)..(20)..(21): Xaa is A or G or absent
ALHDELTNSLQEXXXXXXXXXYYLVTLPELQVQTPRX

SEQ ID NO: 28074 - protein, 37 aa, Artificial Sequence
  Non-cyclic GFR-binding peptide
  MOD_RES (1)..(3)..(34)..(35): Xaa is C or S
XKXSKVIMVTAKKIKPTKGIIKRIQVPRLDQSVXXPS

SEQ ID NO: 28075 - protein, 37 aa, Artificial Sequence
  Non-cyclic GFR-binding peptide
  MOD_RES (1)..(33): Xaa is C or S
XSRVVMNVQVEKIVNSSDDVKAVKVSRLKTPAXTPKT

SEQ ID NO: 28076 - protein, 41 aa, Artificial Sequence
  Non-cyclic GFR-binding peptide
  MOD_RES (2)..(4)..(38)..(39): Xaa is C or S
  MOD_RES (16)..(17)..(18)..(19)..(20): Xaa is A or G
  MOD_RES (21)..(22)..(23)..(24): Xaa is A or G or absent
RXGXGEVVMDSMEGIXXXXXXXXXMIQMTINSLETPVXXAK

SEQ ID NO: 28077 - protein, 34 aa, Artificial Sequence
  Non-cyclic GFR-binding peptide
  MOD_RES (2)..(2): Xaa is C or S
  MOD_RES (13)..(14)..(15)..(16)..(17): Xaa is A or G
  MOD_RES (18)..(19)..(20)..(21): Xaa is A or G or absent
KXSRVIMVTAKKXXXXXXXXXIKRIQVPRLAQPV

SEQ ID NO: 28078 - protein, 30 aa, Artificial Sequence
  Non-cyclic GFR-binding peptide
RVVMNSMEGIIVNSSDDMIQVTINSLKTPA

SEQ ID NO: 28079 - protein, 42 aa, Artificial Sequence
  Non-cyclic GFR-binding peptide
  MOD_RES (2)..(4)..(38): Xaa is C or S
  MOD_RES (16)..(17)..(18)..(19)..(20): Xaa is A or G
  MOD_RES (21)..(22)..(23)..(24): Xaa is A or G or absent
HXGXSRVVMNVTAKKXXXXXXXXXIKRVQVPRLKTPAXTPKT

SEQ ID NO: 28080 - protein, 36 aa, Artificial Sequence
  Non-cyclic GFR-binding peptide
  MOD_RES (31)..(32): Xaa is C or S
RVVMNVQVEKIVNSSDDVKAVKVSRLKTPAXXPKPV

SEQ ID NO: 28081 - protein, 38 aa, Artificial Sequence
  Non-cyclic GFR-binding peptide
  MOD_RES (1)..(3)..(34)..(35): Xaa is C or S
XKXSKVVMVTAKKVKPTRGVIKRIQVPRLDQPVXXPSA

SEQ ID NO: 28082 - protein, 35 aa, Artificial Sequence
  Non-cyclic GFR-binding peptide
  MOD_RES (1)..(34)..(35): Xaa is C or S
  MOD_RES (12)..(13)..(14)..(15)..(16): Xaa is A or G
  MOD_RES (17)..(18)..(19)..(20): Xaa is A or G or absent
XSRVIMSMEGIXXXXXXXXXMIQITINSLAQPVXX

SEQ ID NO: 28083 - protein, 42 aa, Artificial Sequence
  Non-cyclic GFR-binding peptide
  MOD_RES (1)..(3)..(40): Xaa is C or S
XAXELHEELRNSLQELKPKKRVYEYYVVPLPEHHVRSPQXKV

SEQ ID NO: 28084 - protein, 41 aa, Artificial Sequence
  Non-cyclic GFR-binding peptide
  MOD_RES (1)..(3)..(35)..(36): Xaa is C or S
XGXGEVVMDVTAKKVVKENEDIKRMQVPRLETPVXXAKPIK

SEQ ID NO: 28085 - protein, 34 aa, Artificial Sequence
  Non-cyclic GFR-binding peptide
  MOD_RES (34)..(34): Xaa is C or S
  MOD_RES (12)..(13)..(14)..(15)..(16): Xaa is A or G
  MOD_RES (17)..(18)..(19)..(20): Xaa is A or G or absent
GEVVMEVQVEKXXXXXXXXXVKAMKVSRLETPVX

SEQ ID NO: 28086 - protein, 39 aa, Artificial Sequence
  Non-cyclic GFR-binding peptide
  MOD_RES (2)..(4): Xaa is C or S
  MOD_RES (17)..(18)..(19)..(20)..(21): Xaa is A or G
  MOD_RES (22)..(23)..(24)..(25): Xaa is A or G or absent
AXAXELHEELRNSLQEXXXXXXXXXYYVVPLPEHHVRSP

SEQ ID NO: 28087 - protein, 44 aa, Artificial Sequence
  Non-cyclic GFR-binding peptide
  MOD_RES (2)..(4)..(38)..(39): Xaa is C or S
  MOD_RES (16)..(17)..(18)..(19)..(20): Xaa is A or G
  MOD_RES (21)..(22)..(23)..(24): Xaa is A or G or absent
RXGXGEVVMEVTAKKXXXXXXXXXIKRMQVPRLETPVXXAKPIS

SEQ ID NO: 28088 - protein, 32 aa, Artificial Sequence
  Non-cyclic GFR-binding peptide
  MOD_RES (2)..(2): Xaa is C or S
KXSKVIMSMEGIIKPTKGIMIQITINSLDQSV

SEQ ID NO: 28089 - protein, 40 aa, Artificial Sequence
  Non-cyclic GFR-binding peptide
  MOD_RES (2)..(35)..(36): Xaa is C or S
  MOD_RES (13)..(14)..(15)..(16)..(17): Xaa is A or G
  MOD_RES (18)..(19)..(20)..(21): Xaa is A or G or absent
KXSKVIMSMEGIXXXXXXXXXMIQITINSLDQSVXXPSAS

SEQ ID NO: 28090 - protein, 36 aa, Artificial Sequence
  Non-cyclic GFR-binding peptide
  MOD_RES (1)..(3): Xaa is C or S
  MOD_RES (15)..(16)..(17)..(18)..(19): Xaa is A or G
  MOD_RES (20)..(21)..(22)..(23): Xaa is A or G or absent
XGXARVVMNSMEGIXXXXXXXXXMIQVTINSLQTPA

SEQ ID NO: 28091 - protein, 37 aa, Artificial Sequence
  Non-cyclic GFR-binding peptide
  MOD_RES (1)..(35): Xaa is C or S
XKNHQLFNSLQEHQGQHPKIRYYVMPLPEEETPVXEL

SEQ ID NO: 28092 - protein, 37 aa, Artificial Sequence
  Non-cyclic GFR-binding peptide
  MOD_RES (2)..(4)..(35)..(36): Xaa is C or S
SXKXSKVIMVTAKKIKPTKGIIKRIQVPRLDQSVXXP

SEQ ID NO: 28093 - protein, 35 aa, Artificial Sequence
  Non-cyclic GFR-binding peptide
  MOD_RES (2)..(35): Xaa is C or S
  MOD_RES (13)..(14)..(15)..(16)..(17): Xaa is A or G
  MOD_RES (18)..(19)..(20)..(21): Xaa is A or G or absent
KXSKVIMVTAKKXXXXXXXXXIKRIQVPRLDQSVX

SEQ ID NO: 28094 - protein, 36 aa, Artificial Sequence
  Non-cyclic GFR-binding peptide
  MOD_RES (31)..(32): Xaa is C or S
RVVMNSMEGIIVNSSDDMIQVTINSLKTPAXXPKPV

SEQ ID NO: 28095 - protein, 34 aa, Artificial Sequence
  Non-cyclic GFR-binding peptide
  MOD_RES (2)..(34): Xaa is C or S
GXGEVVMDVQVEKVVKENEDVKAMKVSRLETPVX

SEQ ID NO: 28096 - protein, 38 aa, Artificial Sequence
  Non-cyclic GFR-binding peptide
  MOD_RES (2)..(36)..(37): Xaa is C or S
  MOD_RES (14)..(15)..(16)..(17)..(18): Xaa is A or G
  MOD_RES (19)..(20)..(21)..(22): Xaa is A or G or absent
GXGEVVMESMEGIXXXXXXXXXMIQMTINSLETPVXXA

SEQ ID NO: 28097 - protein, 39 aa, Artificial Sequence
  Non-cyclic GFR-binding peptide
  MOD_RES (1)..(3)..(35): Xaa is C or S
XGXSRVVMNSMEGIIVNSSDDMIQVTINSLKTPAXTPKT

SEQ ID NO: 28098 - protein, 37 aa, Artificial Sequence
  Non-cyclic GFR-binding peptide
  MOD_RES (1)..(33)..(34): Xaa is C or S
XARVVMNVTAKKIVNSSDDIKRVQVPRLQTPAXXPKP

SEQ ID NO: 28099 - protein, 40 aa, Artificial Sequence
  Non-cyclic GFR-binding peptide
  MOD_RES (2)..(4)..(38)..(39): Xaa is C or S
  MOD_RES (16)..(17)..(18)..(19)..(20): Xaa is A or G
  MOD_RES (21)..(22)..(23)..(24): Xaa is A or G or absent
RXGXGEVVMDVQVEKXXXXXXXXXVKAMKVSRLETPVXXA

SEQ ID NO: 28100 - protein, 37 aa, Artificial Sequence
  Non-cyclic GFR-binding peptide
  MOD_RES (1)..(32)..(33): Xaa is C or S
XSKVIMSMEGIIKPTKGIMIQITINSLDQSVXXPSAS

SEQ ID NO: 28101 - protein, 40 aa, Artificial Sequence
  Non-cyclic GFR-binding peptide
  MOD_RES (37)..(37): Xaa is C or S
ELHEELRNSLQELKPKKRVYEYYLVTLPEHHVRSPQXKVS

SEQ ID NO: 28102 - protein, 34 aa, Artificial Sequence
  Non-cyclic GFR-binding peptide
  MOD_RES (12)..(13)..(14)..(15)..(16): Xaa is A or G
  MOD_RES (17)..(18)..(19)..(20): Xaa is A or G or absent
LHDELTNSLQEXXXXXXXXXYYVVPLPELQVQTP

SEQ ID NO: 28103 - protein, 41 aa, Artificial Sequence
  Non-cyclic GFR-binding peptide
  MOD_RES (1)..(35)..(36): Xaa is C or S
  MOD_RES (13)..(14)..(15)..(16)..(17): Xaa is A or G
  MOD_RES (18)..(19)..(20)..(21): Xaa is A or G or absent
XARVVMNSMEGIXXXXXXXXXMIQVTINSLQTPAXXPKPVT

SEQ ID NO: 28104 - protein, 34 aa, Artificial Sequence
  Non-cyclic GFR-binding peptide
  MOD_RES (2)..(4): Xaa is C or S
SXKXSKVIMVQVEKIKPTKGIVKAIKVSRLDQSV

SEQ ID NO: 28105 - protein, 30 aa, Artificial Sequence
  Non-cyclic GFR-binding peptide
SKVVMSMEGIVKPTRGVMIQITINSLDQPV

SEQ ID NO: 28106 - protein, 40 aa, Artificial Sequence
  Non-cyclic GFR-binding peptide
  MOD_RES (2)..(4)..(38): Xaa is C or S
  MOD_RES (16)..(17)..(18)..(19)..(20): Xaa is A or G
  MOD_RES (21)..(22)..(23)..(24): Xaa is A or G or absent
RXEXKNHQLFNSLQEXXXXXXXXXYYLMTLPEEETPVXEL

SEQ ID NO: 28107 - protein, 41 aa, Artificial Sequence
  Non-cyclic GFR-binding peptide
  MOD_RES (1)..(38): Xaa is C or S
XALHDELTNSLQEFIPKKRVIEYYVVPLPELQVQTPRXQVN

SEQ ID NO: 28108 - protein, 36 aa, Artificial Sequence
  Non-cyclic GFR-binding peptide
  MOD_RES (2)..(36): Xaa is C or S
  MOD_RES (14)..(15)..(16)..(17)..(18): Xaa is A or G
  MOD_RES (19)..(20)..(21)..(22): Xaa is A or G or absent
GXGEVVMDVTAKKXXXXXXXXXIKRMQVPRLETPVX

SEQ ID NO: 28109 - protein, 34 aa, Artificial Sequence
  Non-cyclic GFR-binding peptide
  MOD_RES (34)..(34): Xaa is C or S
  MOD_RES (12)..(13)..(14)..(15)..(16): Xaa is A or G
  MOD_RES (17)..(18)..(19)..(20): Xaa is A or G or absent
GEVVMDSMEGIXXXXXXXXXMIQMTINSLETPVX

SEQ ID NO: 28110 - protein, 41 aa, Artificial Sequence
  Non-cyclic GFR-binding peptide
  MOD_RES (1)..(3)..(35)..(36): Xaa is C or S
XGXGEVVMEVQVEKVVKDYEDVKAMKVSRLETPVXXAKPIS

SEQ ID NO: 28111 - protein, 36 aa, Artificial Sequence
  Non-cyclic GFR-binding peptide
  MOD_RES (1)..(3): Xaa is C or S
  MOD_RES (15)..(16)..(17)..(18)..(19): Xaa is A or G
  MOD_RES (20)..(21)..(22)..(23): Xaa is A or G or absent
XGXGEVVMDVTAKKXXXXXXXXXIKRMQVPRLETPV

SEQ ID NO: 28112 - protein, 35 aa, Artificial Sequence
  Non-cyclic GFR-binding peptide
  MOD_RES (1)..(34)..(35): Xaa is C or S
  MOD_RES (12)..(13)..(14)..(15)..(16): Xaa is A or G
  MOD_RES (17)..(18)..(19)..(20): Xaa is A or G or absent
XSRVIMVQVEKXXXXXXXXXVKAIKVSRLAQPVXX

SEQ ID NO: 28113 - protein, 41 aa, Artificial Sequence
  Non-cyclic GFR-binding peptide
  MOD_RES (2)..(4)..(41): Xaa is C or S
  MOD_RES (17)..(18)..(19)..(20)..(21): Xaa is A or G
  MOD_RES (22)..(23)..(24)..(25): Xaa is A or G or absent
EXKXALHDELTNSLQEXXXXXXXXXYYLVTLPELQVQTPRX

SEQ ID NO: 28114 - protein, 41 aa, Artificial Sequence
  Non-cyclic GFR-binding peptide
  MOD_RES (2)..(4)..(41): Xaa is C or S
EXKXALHDELTNSLQEFIPKKRVIEYYVVPLPELQVQTPRX

SEQ ID NO: 28115 - protein, 38 aa, Artificial Sequence
  Non-cyclic GFR-binding peptide
  MOD_RES (2)..(33)..(34): Xaa is C or S
KXSKVVMSMEGIVKPTRGVMIQITINSLDQPVXXPSAS

SEQ ID NO: 28116 - protein, 35 aa, Artificial Sequence
  Non-cyclic GFR-binding peptide
  MOD_RES (32)..(33): Xaa is C or S
GEVVMEVTAKKVVKDYEDIKRMQVPRLETPVXXAK

SEQ ID NO: 28117 - protein, 36 aa, Artificial Sequence
  Non-cyclic GFR-binding peptide
  MOD_RES (1)..(33)..(34): Xaa is C or S
XARVVMNVTAKKIVNSSDDIKRVQVPRLQTPAXXPK

SEQ ID NO: 28118 - protein, 37 aa, Artificial Sequence
  Non-cyclic GFR-binding peptide
  MOD_RES (1)..(33)..(34): Xaa is C or S
XGEVVMDVQVEKVVKENEDVKAMKVSRLETPVXXAKP

SEQ ID NO: 28119 - protein, 37 aa, Artificial Sequence
  Non-cyclic GFR-binding peptide
  MOD_RES (1)..(3)..(35)..(36): Xaa is C or S
XGXARVVMNVQVEKIVNSSDDVKAVKVSRLQTPAXXP

SEQ ID NO: 28120 - protein, 37 aa, Artificial Sequence
  Non-cyclic GFR-binding peptide
  MOD_RES (2)..(35)..(36): Xaa is C or S
  MOD_RES (13)..(14)..(15)..(16)..(17): Xaa is A or G
  MOD_RES (18)..(19)..(20)..(21): Xaa is A or G or absent
KXSKVVMVTAKKXXXXXXXXXIKRIQVPRLDQPVXXP

SEQ ID NO: 28121 - protein, 36 aa, Artificial Sequence
  Non-cyclic GFR-binding peptide
  MOD_RES (1)..(35): Xaa is C or S
  MOD_RES (13)..(14)..(15)..(16)..(17): Xaa is A or G
  MOD_RES (18)..(19)..(20)..(21): Xaa is A or G or absent
XKNHQLFNSLQEXXXXXXXXXYYLMTLPEEETPVXE

SEQ ID NO: 28122 - protein, 33 aa, Artificial Sequence
  Non-cyclic GFR-binding peptide
  MOD_RES (1)..(1): Xaa is C or S
  MOD_RES (12)..(13)..(14)..(15)..(16): Xaa is A or G
  MOD_RES (17)..(18)..(19)..(20): Xaa is A or G or absent
XSKVVMVTAKKXXXXXXXXXIKRIQVPRLDQPV

SEQ ID NO: 28123 - protein, 36 aa, Artificial Sequence
  Non-cyclic GFR-binding peptide
  MOD_RES (2)..(36): Xaa is C or S
  MOD_RES (14)..(15)..(16)..(17)..(18): Xaa is A or G
  MOD_RES (19)..(20)..(21)..(22): Xaa is A or G or absent
EXKNHQLFNSLQEXXXXXXXXXYYLMTLPEEETPVX

SEQ ID NO: 28124 - protein, 40 aa, Artificial Sequence
  Non-cyclic GFR-binding peptide
  MOD_RES (1)..(3)..(35)..(36): Xaa is C or S
XGXGEVVMEVTAKKVVKDYEDIKRMQVPRLETPVXXAKPI

SEQ ID NO: 28125 - protein, 33 aa, Artificial Sequence
  Non-cyclic GFR-binding peptide
  MOD_RES (2)..(2): Xaa is C or S
GXGEVVMDVTAKKVVKENEDIKRMQVPRLETPV

SEQ ID NO: 28126 - protein, 34 aa, Artificial Sequence
  Non-cyclic GFR-binding peptide
  MOD_RES (12)..(13)..(14)..(15)..(16): Xaa is A or G
  MOD_RES (17)..(18)..(19)..(20): Xaa is A or G or absent
LHEELRNSLQEXXXXXXXXXYYVVPLPEHHVRSP

SEQ ID NO: 28127 - protein, 40 aa, Artificial Sequence
  Non-cyclic GFR-binding peptide
  MOD_RES (1)..(35): Xaa is C or S
  MOD_RES (13)..(14)..(15)..(16)..(17): Xaa is A or G
  MOD_RES (18)..(19)..(20)..(21): Xaa is A or G or absent
XKNHQLFNSLQEXXXXXXXXXYYVMPLPEEETPVXELGED

SEQ ID NO: 28128 - protein, 39 aa, Artificial Sequence
  Non-cyclic GFR-binding peptide
  MOD_RES (1)..(38): Xaa is C or S
  MOD_RES (14)..(15)..(16)..(17)..(18): Xaa is A or G
  MOD_RES (19)..(20)..(21)..(22): Xaa is A or G or absent
XELHEELRNSLQEXXXXXXXXXYYLVTLPEHHVRSPQXK

SEQ ID NO: 28129 - protein, 32 aa, Artificial Sequence
  Non-cyclic GFR-binding peptide
  MOD_RES (32)..(32): Xaa is C or S
ARVVMNSMEGIIVNSSDDMIQVTINSLQTPAX

SEQ ID NO: 28130 - protein, 34 aa, Artificial Sequence
  Non-cyclic GFR-binding peptide
HEELRNSLQELKPKKRVYEYYVVPLPEHHVRSPQ

SEQ ID NO: 28131 - protein, 38 aa, Artificial Sequence
  Non-cyclic GFR-binding peptide
  MOD_RES (1)..(32)..(33): Xaa is C or S
XSKVIMSMEGIIKPTKGIMIQITINSLDQSVXXPSASA

SEQ ID NO: 28132 - protein, 31 aa, Artificial Sequence
  Non-cyclic GFR-binding peptide
  MOD_RES (31)..(31): Xaa is C or S
EVVMESMEGIVVKDYEDMIQMTINSLETPVX

SEQ ID NO: 28133 - protein, 38 aa, Artificial Sequence
  Non-cyclic GFR-binding peptide
  MOD_RES (2)..(35)..(36): Xaa is C or S
  MOD_RES (13)..(14)..(15)..(16)..(17): Xaa is A or G
  MOD_RES (18)..(19)..(20)..(21): Xaa is A or G or absent
KXSKVVMVQVEKXXXXXXXXXVKAIKVSRLDQPVXXPS

SEQ ID NO: 28134 - protein, 35 aa, Artificial Sequence
  Non-cyclic GFR-binding peptide
  MOD_RES (1)..(34)..(35): Xaa is C or S
  MOD_RES (12)..(13)..(14)..(15)..(16): Xaa is A or G
  MOD_RES (17)..(18)..(19)..(20): Xaa is A or G or absent
XSKVVMSMEGIXXXXXXXXXMIQITINSLDQPVXX

SEQ ID NO: 28135 - protein, 35 aa, Artificial Sequence
  Non-cyclic GFR-binding peptide
  MOD_RES (1)..(1): Xaa is C or S
XELHEELRNSLQELKPKKRVYEYYVVPLPEHHVRS

SEQ ID NO: 28136 - protein, 41 aa, Artificial Sequence
  Non-cyclic GFR-binding peptide
  MOD_RES (1)..(3)..(40): Xaa is C or S
XKXALHDELTNSLQEFIPKKRVIEYYVVPLPELQVQTPRXQ

SEQ ID NO: 28137 - protein, 37 aa, Artificial Sequence
  Non-cyclic GFR-binding peptide
  MOD_RES (31)..(32): Xaa is C or S
EVVMDVQVEKVVKENEDVKAMKVSRLETPVXXAKPIK

SEQ ID NO: 28138 - protein, 37 aa, Artificial Sequence
  Non-cyclic GFR-binding peptide
  MOD_RES (1)..(3)..(34)..(35): Xaa is C or S
XKXSKVIMSMEGIIKPTKGIMIQITINSLDQSVXXPS

SEQ ID NO: 28139 - protein, 37 aa, Artificial Sequence
  Non-cyclic GFR-binding peptide
  MOD_RES (36)..(36): Xaa is C or S
LHEELRNSLQELKPKKRVYEYYLVTLPEHHVRSPQXK

SEQ ID NO: 28140 - protein, 41 aa, Artificial Sequence
  Non-cyclic GFR-binding peptide
  MOD_RES (2)..(4)..(38)..(39): Xaa is C or S
  MOD_RES (16)..(17)..(18)..(19)..(20): Xaa is A or G
  MOD_RES (21)..(22)..(23)..(24): Xaa is A or G or absent
RXGXGEVVMEVTAKKXXXXXXXXXIKRMQVPRLETPVXXAK

SEQ ID NO: 28141 - protein, 38 aa, Artificial Sequence
  Non-cyclic GFR-binding peptide
  MOD_RES (2)..(2): Xaa is C or S
AXELHEELRNSLQELKPKKRVYEYYLVTLPEHHVRSPQ

SEQ ID NO: 28142 - protein, 38 aa, Artificial Sequence
  Non-cyclic GFR-binding peptide
  MOD_RES (33)..(33): Xaa is C or S
  MOD_RES (11)..(12)..(13)..(14)..(15): Xaa is A or G
  MOD_RES (16)..(17)..(18)..(19): Xaa is A or G or absent
RVVMNSMEGIXXXXXXXXXMIQVTINSLKTPAXTPKTV

SEQ ID NO: 28143 - protein, 42 aa, Artificial Sequence
  Non-cyclic GFR-binding peptide
  MOD_RES (2)..(36): Xaa is C or S
  MOD_RES (14)..(15)..(16)..(17)..(18): Xaa is A or G
  MOD_RES (19)..(20)..(21)..(22): Xaa is A or G or absent
GXSRVVMNVQVEKXXXXXXXXXVKAVKVSRLKTPAXTPKTVH

SEQ ID NO: 28144 - protein, 40 aa, Artificial Sequence
  Non-cyclic GFR-binding peptide
  MOD_RES (2)..(4)..(36)..(37): Xaa is C or S
RXGXGEVVMEVTAKKVVKDYEDIKRMQVPRLETPVXXAKP

SEQ ID NO: 28145 - protein, 37 aa, Artificial Sequence
  Non-cyclic GFR-binding peptide
  MOD_RES (1)..(3)..(34)..(35): Xaa is C or S
XKXSKVVMSMEGIVKPTRGVMIQITINSLDQPVXXPS

SEQ ID NO: 28146 - protein, 38 aa, Artificial Sequence
  Non-cyclic GFR-binding peptide
  MOD_RES (2)..(4)..(35)..(36): Xaa is C or S
SXKXSKVIMVTAKKIKPTKGIIKRIQVPRLDQSVXXPS

SEQ ID NO: 28147 - protein, 36 aa, Artificial Sequence
  Non-cyclic GFR-binding peptide
  MOD_RES (31)..(32): Xaa is C or S
SKVIMVTAKKIKPTKGIIKRIQVPRLDQSVXXPSAS

SEQ ID NO: 28148 - protein, 36 aa, Artificial Sequence
  Non-cyclic GFR-binding peptide
  MOD_RES (2)..(4)..(36): Xaa is C or S
HXGXSRVVMNVQVEKIVNSSDDVKAVKVSRLKTPAX

SEQ ID NO: 28149 - protein, 35 aa, Artificial Sequence
  Non-cyclic GFR-binding peptide
  MOD_RES (31)..(32): Xaa is C or S
EVVMDVTAKKVVKENEDIKRMQVPRLETPVXXAKP

SEQ ID NO: 28150 - protein, 32 aa, Artificial Sequence
  Non-cyclic GFR-binding peptide
HEELRNSLQELKPKKRVYEYYVVPLPEHHVRS

SEQ ID NO: 28151 - protein, 36 aa, Artificial Sequence
  Non-cyclic GFR-binding peptide
  MOD_RES (34)..(35): Xaa is C or S
  MOD_RES (12)..(13)..(14)..(15)..(16): Xaa is A or G
  MOD_RES (17)..(18)..(19)..(20): Xaa is A or G or absent
GEVVMDVQVEKXXXXXXXXXVKAMKVSRLETPVXXA

SEQ ID NO: 28152 - protein, 38 aa, Artificial Sequence
  Non-cyclic GFR-binding peptide
  MOD_RES (1)..(3)..(36)..(37): Xaa is C or S
  MOD_RES (14)..(15)..(16)..(17)..(18): Xaa is A or G
  MOD_RES (19)..(20)..(21)..(22): Xaa is A or G or absent
XKXSKVIMSMEGIXXXXXXXXXMIQITINSLDQSVXXP

SEQ ID NO: 28153 - protein, 40 aa, Artificial Sequence
  Non-cyclic GFR-binding peptide
  MOD_RES (2)..(36)..(37): Xaa is C or S
  MOD_RES (14)..(15)..(16)..(17)..(18): Xaa is A or G
  MOD_RES (19)..(20)..(21)..(22): Xaa is A or G or absent
GXGEVVMDSMEGIXXXXXXXXXMIQMTINSLETPVXXAKP

SEQ ID NO: 28154 - protein, 42 aa, Artificial Sequence
  Non-cyclic GFR-binding peptide
  MOD_RES (2)..(4)..(41): Xaa is C or S
  MOD_RES (17)..(18)..(19)..(20)..(21): Xaa is A or G
  MOD_RES (22)..(23)..(24)..(25): Xaa is A or G or absent
EXKXALHDELTNSLQEXXXXXXXXXYYLVTLPELQVQTPRXQ

SEQ ID NO: 28155 - protein, 40 aa, Artificial Sequence
  Non-cyclic GFR-binding peptide
  MOD_RES (2)..(4)..(38): Xaa is C or S
RXEXKNHQLFNSLQEHQGQHPKIRYYVMPLPEEETPVXEL

SEQ ID NO: 28156 - protein, 36 aa, Artificial Sequence
  Non-cyclic GFR-binding peptide
  MOD_RES (1)..(32)..(33): Xaa is C or S
XSKVVMSMEGIVKPTRGVMIQITINSLDQPVXXPSA

SEQ ID NO: 28157 - protein, 36 aa, Artificial Sequence
  Non-cyclic GFR-binding peptide
  MOD_RES (1)..(35)..(36): Xaa is C or S
  MOD_RES (13)..(14)..(15)..(16)..(17): Xaa is A or G
  MOD_RES (18)..(19)..(20)..(21): Xaa is A or G or absent
XSRVVMNVQVEKXXXXXXXXXVKAVKVSRLKTPAXX

SEQ ID NO: 28158 - protein, 33 aa, Artificial Sequence
  Non-cyclic GFR-binding peptide
  MOD_RES (12)..(13)..(14)..(15)..(16): Xaa is A or G
  MOD_RES (17)..(18)..(19)..(20): Xaa is A or G or absent
GEVVMEVTAKKXXXXXXXXXIKRMQVPRLETPV

SEQ ID NO: 28159 - protein, 42 aa, Artificial Sequence
  Non-cyclic GFR-binding peptide
  MOD_RES (1)..(3)..(37)..(38): Xaa is C or S
  MOD_RES (15)..(16)..(17)..(18)..(19): Xaa is A or G
  MOD_RES (20)..(21)..(22)..(23): Xaa is A or G or absent
XGXSRVVMNVTAKKXXXXXXXXXIKRVQVPRLKTPAXXPKPV

SEQ ID NO: 28160 - protein, 42 aa, Artificial Sequence
  Non-cyclic GFR-binding peptide
  MOD_RES (1)..(38): Xaa is C or S
XALHDELTNSLQEFIPKKRVIEYYLVTLPELQVQTPRXQVNR

SEQ ID NO: 28161 - protein, 38 aa, Artificial Sequence
  Non-cyclic GFR-binding peptide
  MOD_RES (1)..(3)..(34)..(35): Xaa is C or S
XKXSRVIMSMEGIVKPKRGVMIQITINSLAQPVXXPAA

SEQ ID NO: 28162 - protein, 39 aa, Artificial Sequence
  Non-cyclic GFR-binding peptide
  MOD_RES (2)..(36)..(37): Xaa is C or S
  MOD_RES (14)..(15)..(16)..(17)..(18): Xaa is A or G
  MOD_RES (19)..(20)..(21)..(22): Xaa is A or G or absent
GXGEVVMDVQVEKXXXXXXXXXVKAMKVSRLETPVXXAK

SEQ ID NO: 28163 - protein, 39 aa, Artificial Sequence
  Non-cyclic GFR-binding peptide
  MOD_RES (1)..(3)..(37): Xaa is C or S
  MOD_RES (15)..(16)..(17)..(18)..(19): Xaa is A or G
  MOD_RES (20)..(21)..(22)..(23): Xaa is A or G or absent
XGXSRVVMNVTAKKXXXXXXXXXIKRVQVPRLKTPAXTP

SEQ ID NO: 28164 - protein, 44 aa, Artificial Sequence
  Non-cyclic GFR-binding peptide
  MOD_RES (2)..(4)..(38): Xaa is C or S
RXEXKNHQLFNSLQEHQGQHPKIRYYVMPLPEEETPVXELGEDN

SEQ ID NO: 28165 - protein, 32 aa, Artificial Sequence
  Non-cyclic GFR-binding peptide
HEELRNSLQELKPKKRVYEYYLVTLPEHHVRS

SEQ ID NO: 28166 - protein, 33 aa, Artificial Sequence
  Non-cyclic GFR-binding peptide
  MOD_RES (32)..(32): Xaa is C or S
SRVVMNSMEGIIVNSSDDMIQVTINSLKTPAXT

SEQ ID NO: 28167 - protein, 41 aa, Artificial Sequence
  Non-cyclic GFR-binding peptide
  MOD_RES (2)..(4)..(38)..(39): Xaa is C or S
  MOD_RES (16)..(17)..(18)..(19)..(20): Xaa is A or G
  MOD_RES (21)..(22)..(23)..(24): Xaa is A or G or absent
HXGXSRVVMNSMEGIXXXXXXXXXMIQVTINSLKTPAXXPK

SEQ ID NO: 28168 - protein, 44 aa, Artificial Sequence
  Non-cyclic GFR-binding peptide
  MOD_RES (2)..(4)..(41): Xaa is C or S
  MOD_RES (17)..(18)..(19)..(20)..(21): Xaa is A or G
  MOD_RES (22)..(23)..(24)..(25): Xaa is A or G or absent
AXAXELHEELRNSLQEXXXXXXXXXYYVVPLPEHHVRSPQXKVS

SEQ ID NO: 28169 - protein, 36 aa, Artificial Sequence
  Non-cyclic GFR-binding peptide
  MOD_RES (31)..(32): Xaa is C or S
EVVMEVTAKKVVKDYEDIKRMQVPRLETPVXXAKPI

SEQ ID NO: 28170 - protein, 38 aa, Artificial Sequence
  Non-cyclic GFR-binding peptide
  MOD_RES (1)..(3)..(37)..(38): Xaa is C or S
  MOD_RES (15)..(16)..(17)..(18)..(19): Xaa is A or G
  MOD_RES (20)..(21)..(22)..(23): Xaa is A or G or absent
XGXGEVVMDSMEGIXXXXXXXXXMIQMTINSLETPVXX

SEQ ID NO: 28171 - protein, 40 aa, Artificial Sequence
  Non-cyclic GFR-binding peptide
  MOD_RES (1)..(38): Xaa is C or S
XELHEELRNSLQELKPKKRVYEYYVVPLPEHHVRSPQXKV

SEQ ID NO: 28172 - protein, 37 aa, Artificial Sequence
  Non-cyclic GFR-binding peptide
  MOD_RES (2)..(34): Xaa is C or S
GXSRVVMNVTAKKIVNSSDDIKRVQVPRLKTPAXTPK

SEQ ID NO: 28173 - protein, 33 aa, Artificial Sequence
  Non-cyclic GFR-binding peptide
  MOD_RES (33)..(33): Xaa is C or S
  MOD_RES (11)..(12)..(13)..(14)..(15): Xaa is A or G
  MOD_RES (16)..(17)..(18)..(19): Xaa is A or G or absent
RVVMNVQVEKXXXXXXXXXVKAVKVSRLQTPAX

SEQ ID NO: 28174 - protein, 35 aa, Artificial Sequence
  Non-cyclic GFR-binding peptide
  MOD_RES (1)..(34)..(35): Xaa is C or S
  MOD_RES (12)..(13)..(14)..(15)..(16): Xaa is A or G
  MOD_RES (17)..(18)..(19)..(20): Xaa is A or G or absent
XSKVIMVTAKKXXXXXXXXXIKRIQVPRLDQSVXX

SEQ ID NO: 28175 - protein, 43 aa, Artificial Sequence
  Non-cyclic GFR-binding peptide
  MOD_RES (2)..(4)..(37)..(38): Xaa is C or S
  MOD_RES (15)..(16)..(17)..(18)..(19): Xaa is A or G
  MOD_RES (20)..(21)..(22)..(23): Xaa is A or G or absent
SXKXSRVIMVTAKKXXXXXXXXXIKRIQVPRLAQPVXXPAASA

SEQ ID NO: 28176 - protein, 39 aa, Artificial Sequence
  Non-cyclic GFR-binding peptide
  MOD_RES (2)..(4)..(38)..(39): Xaa is C or S
  MOD_RES (16)..(17)..(18)..(19)..(20): Xaa is A or G
  MOD_RES (21)..(22)..(23)..(24): Xaa is A or G or absent
HXGXSRVVMNVQVEKXXXXXXXXXVKAVKVSRLKTPAXX

SEQ ID NO: 28177 - protein, 36 aa, Artificial Sequence
  Non-cyclic GFR-binding peptide
  MOD_RES (1)..(3): Xaa is C or S
  MOD_RES (15)..(16)..(17)..(18)..(19): Xaa is A or G
  MOD_RES (20)..(21)..(22)..(23): Xaa is A or G or absent
XEXKNHQLFNSLQEXXXXXXXXXYYLMTLPEEETPV

SEQ ID NO: 28178 - protein, 37 aa, Artificial Sequence
  Non-cyclic GFR-binding peptide
  MOD_RES (31)..(32): Xaa is C or S
EVVMESMEGIVVKDYEDMIQMTINSLETPVXXAKPIS

SEQ ID NO: 28179 - protein, 36 aa, Artificial Sequence
  Non-cyclic GFR-binding peptide
  MOD_RES (34)..(34): Xaa is C or S
KNHQLFNSLQEHQGQHPKIRYYVMPLPEEETPVXEL

SEQ ID NO: 28180 - protein, 36 aa, Artificial Sequence
  Non-cyclic GFR-binding peptide
  MOD_RES (33)..(34): Xaa is C or S
  MOD_RES (11)..(12)..(13)..(14)..(15): Xaa is A or G
  MOD_RES (16)..(17)..(18)..(19): Xaa is A or G or absent
SRVIMVTAKKXXXXXXXXXIKRIQVPRLAQPVXXPA

SEQ ID NO: 28181 - protein, 38 aa, Artificial Sequence
  Non-cyclic GFR-binding peptide
  MOD_RES (2)..(36): Xaa is C or S
  MOD_RES (14)..(15)..(16)..(17)..(18): Xaa is A or G
  MOD_RES (19)..(20)..(21)..(22): Xaa is A or G or absent
EXKNHQLFNSLQEXXXXXXXXXYYVMPLPEEETPVXEL

SEQ ID NO: 28182 - protein, 41 aa, Artificial Sequence
  Non-cyclic GFR-binding peptide
  MOD_RES (2)..(36)..(37): Xaa is C or S
  MOD_RES (14)..(15)..(16)..(17)..(18): Xaa is A or G
  MOD_RES (19)..(20)..(21)..(22): Xaa is A or G or absent
GXARVVMNSMEGIXXXXXXXXXMIQVTINSLQTPAXXPKPV

SEQ ID NO: 28183 - protein, 35 aa, Artificial Sequence
  Non-cyclic GFR-binding peptide
  MOD_RES (13)..(14)..(15)..(16)..(17): Xaa is A or G
  MOD_RES (18)..(19)..(20)..(21): Xaa is A or G or absent
ALHDELTNSLQEXXXXXXXXXYYVVPLPELQVQTP

SEQ ID NO: 28184 - protein, 39 aa, Artificial Sequence
  Non-cyclic GFR-binding peptide
  MOD_RES (2)..(35)..(36): Xaa is C or S
  MOD_RES (13)..(14)..(15)..(16)..(17): Xaa is A or G
  MOD_RES (18)..(19)..(20)..(21): Xaa is A or G or absent
KXSRVIMSMEGIXXXXXXXXXMIQITINSLAQPVXXPAA

SEQ ID NO: 28185 - protein, 33 aa, Artificial Sequence
  Non-cyclic GFR-binding peptide
  MOD_RES (33)..(33): Xaa is C or S
  MOD_RES (11)..(12)..(13)..(14)..(15): Xaa is A or G
  MOD_RES (16)..(17)..(18)..(19): Xaa is A or G or absent
SKVVMVTAKKXXXXXXXXXIKRIQVPRLDQPVX

SEQ ID NO: 28186 - protein, 41 aa, Artificial Sequence
  Non-cyclic GFR-binding peptide
  MOD_RES (2)..(4)..(38): Xaa is C or S
  MOD_RES (16)..(17)..(18)..(19)..(20): Xaa is A or G
  MOD_RES (21)..(22)..(23)..(24): Xaa is A or G or absent
HXGXSRVVMNVQVEKXXXXXXXXXVKAVKVSRLKTPAXTPK

SEQ ID NO: 28187 - protein, 36 aa, Artificial Sequence
  Non-cyclic GFR-binding peptide
  MOD_RES (33)..(34): Xaa is C or S
  MOD_RES (11)..(12)..(13)..(14)..(15): Xaa is A or G
  MOD_RES (16)..(17)..(18)..(19): Xaa is A or G or absent
SKVIMVQVEKXXXXXXXXXVKAIKVSRLDQSVXXPS

SEQ ID NO: 28188 - protein, 37 aa, Artificial Sequence
  Non-cyclic GFR-binding peptide
  MOD_RES (33)..(34): Xaa is C or S
  MOD_RES (11)..(12)..(13)..(14)..(15): Xaa is A or G
  MOD_RES (16)..(17)..(18)..(19): Xaa is A or G or absent
EVVMDVTAKKXXXXXXXXXIKRMQVPRLETPVXXAKP

SEQ ID NO: 28189 - protein, 38 aa, Artificial Sequence
  Non-cyclic GFR-binding peptide
  MOD_RES (2)..(36)..(37): Xaa is C or S
  MOD_RES (14)..(15)..(16)..(17)..(18): Xaa is A or G
  MOD_RES (19)..(20)..(21)..(22): Xaa is A or G or absent
GXARVVMNSMEGIXXXXXXXXXMIQVTINSLQTPAXXP

SEQ ID NO: 28190 - protein, 37 aa, Artificial Sequence
  Non-cyclic GFR-binding peptide
  MOD_RES (2)..(34)..(35): Xaa is C or S
GXARVVMNSMEGIIVNSSDDMIQVTINSLQTPAXXPK

SEQ ID NO: 28191 - protein, 35 aa, Artificial Sequence
  Non-cyclic GFR-binding peptide
  MOD_RES (31)..(32): Xaa is C or S
EVVMESMEGIVVKDYEDMIQMTINSLETPVXXAKP

SEQ ID NO: 28192 - protein, 44 aa, Artificial Sequence
  Non-cyclic GFR-binding peptide
  MOD_RES (2)..(4)..(38): Xaa is C or S
  MOD_RES (16)..(17)..(18)..(19)..(20): Xaa is A or G
  MOD_RES (21)..(22)..(23)..(24): Xaa is A or G or absent
HXGXSRVVMNSMEGIXXXXXXXXXMIQVTINSLKTPAXTPKTVH

SEQ ID NO: 28193 - protein, 38 aa, Artificial Sequence
  Non-cyclic GFR-binding peptide
  MOD_RES (1)..(3)..(37)..(38): Xaa is C or S
  MOD_RES (15)..(16)..(17)..(18)..(19): Xaa is A or G
  MOD_RES (20)..(21)..(22)..(23): Xaa is A or G or absent
XGXGEVVMDVTAKKXXXXXXXXXIKRMQVPRLETPVXX

SEQ ID NO: 28194 - protein, 43 aa, Artificial Sequence
  Non-cyclic GFR-binding peptide
  MOD_RES (2)..(39): Xaa is C or S
  MOD_RES (15)..(16)..(17)..(18)..(19): Xaa is A or G
  MOD_RES (20)..(21)..(22)..(23): Xaa is A or G or absent
AXELHEELRNSLQEXXXXXXXXXYYVVPLPEHHVRSPQXKVSS

SEQ ID NO: 28195 - protein, 38 aa, Artificial Sequence
  Non-cyclic GFR-binding peptide
  MOD_RES (1)..(3): Xaa is C or S
XKXALHDELTNSLQEFIPKKRVIEYYLVTLPELQVQTP

SEQ ID NO: 28196 - protein, 38 aa, Artificial Sequence
  Non-cyclic GFR-binding peptide
  MOD_RES (2)..(4)..(35)..(36): Xaa is C or S
SXKXSRVIMVTAKKVKPKRGVIKRIQVPRLAQPVXXPA

SEQ ID NO: 28197 - protein, 40 aa, Artificial Sequence
  Non-cyclic GFR-binding peptide
  MOD_RES (1)..(3)..(35): Xaa is C or S
XGXSRVVMNSMEGIIVNSSDDMIQVTINSLKTPAXTPKTV

SEQ ID NO: 28198 - protein, 34 aa, Artificial Sequence
  Non-cyclic GFR-binding peptide
  MOD_RES (2)..(2): Xaa is C or S
  MOD_RES (13)..(14)..(15)..(16)..(17): Xaa is A or G
  MOD_RES (18)..(19)..(20)..(21): Xaa is A or G or absent
KXSRVIMVQVEKXXXXXXXXXVKAIKVSRLAQPV

SEQ ID NO: 28199 - protein, 38 aa, Artificial Sequence
  Non-cyclic GFR-binding peptide
  MOD_RES (2)..(36)..(37): Xaa is C or S
  MOD_RES (14)..(15)..(16)..(17)..(18): Xaa is A or G
  MOD_RES (19)..(20)..(21)..(22): Xaa is A or G or absent
GXGEVVMDSMEGIXXXXXXXXXMIQMTINSLETPVXXA

SEQ ID NO: 28200 - protein, 36 aa, Artificial Sequence
  Non-cyclic GFR-binding peptide
  MOD_RES (1)..(1): Xaa is C or S
  MOD_RES (14)..(15)..(16)..(17)..(18): Xaa is A or G
  MOD_RES (19)..(20)..(21)..(22): Xaa is A or G or absent
XALHDELTNSLQEXXXXXXXXXYYLVTLPELQVQTP

SEQ ID NO: 28201 - protein, 31 aa, Artificial Sequence
  Non-cyclic GFR-binding peptide
  MOD_RES (31)..(31): Xaa is C or S
SRVIMVTAKKVKPKRGVIKRIQVPRLAQPVX

SEQ ID NO: 28202 - protein, 33 aa, Artificial Sequence
  Non-cyclic GFR-binding peptide
  MOD_RES (2)..(2): Xaa is C or S
GXGEVVMDVQVEKVVKENEDVKAMKVSRLETPV

SEQ ID NO: 28203 - protein, 39 aa, Artificial Sequence
  Non-cyclic GFR-binding peptide
  MOD_RES (34)..(34): Xaa is C or S
  MOD_RES (12)..(13)..(14)..(15)..(16): Xaa is A or G
  MOD_RES (17)..(18)..(19)..(20): Xaa is A or G or absent
SRVVMNSMEGIXXXXXXXXXMIQVTINSLKTPAXTPKTV

SEQ ID NO: 28204 - protein, 41 aa, Artificial Sequence
  Non-cyclic GFR-binding peptide
  MOD_RES (1)..(3)..(36)..(37): Xaa is C or S
  MOD_RES (14)..(15)..(16)..(17)..(18): Xaa is A or G
  MOD_RES (19)..(20)..(21)..(22): Xaa is A or G or absent
XKXSRVIMVQVEKXXXXXXXXXVKAIKVSRLAQPVXXPAAS

SEQ ID NO: 28205 - protein, 40 aa, Artificial Sequence
  Non-cyclic GFR-binding peptide
  MOD_RES (2)..(4)..(38)..(39): Xaa is C or S
  MOD_RES (16)..(17)..(18)..(19)..(20): Xaa is A or G
  MOD_RES (21)..(22)..(23)..(24): Xaa is A or G or absent
HXGXARVVMNSMEGIXXXXXXXXXMIQVTINSLQTPAXXP

SEQ ID NO: 28206 - protein, 45 aa, Artificial Sequence
  Non-cyclic GFR-binding peptide
  MOD_RES (2)..(4)..(41): Xaa is C or S
  MOD_RES (17)..(18)..(19)..(20)..(21): Xaa is A or G
  MOD_RES (22)..(23)..(24)..(25): Xaa is A or G or absent
AXAXELHEELRNSLQEXXXXXXXXXYYLVTLPEHHVRSPQXKVSS

SEQ ID NO: 28207 - protein, 41 aa, Artificial Sequence
  Non-cyclic GFR-binding peptide
  MOD_RES (2)..(4)..(36)..(37): Xaa is C or S
HXGXSRVVMNVTAKKIVNSSDDIKRVQVPRLKTPAXXPKPV

SEQ ID NO: 28208 - protein, 34 aa, Artificial Sequence
  Non-cyclic GFR-binding peptide
LHEELRNSLQELKPKKRVYEYYLVTLPEHHVRSP

SEQ ID NO: 28209 - protein, 39 aa, Artificial Sequence
  Non-cyclic GFR-binding peptide
  MOD_RES (2)..(36)..(37): Xaa is C or S
  MOD_RES (14)..(15)..(16)..(17)..(18): Xaa is A or G
  MOD_RES (19)..(20)..(21)..(22): Xaa is A or G or absent
GXSRVVMNVTAKKXXXXXXXXXIKRVQVPRLKTPAXXPK

SEQ ID NO: 28210 - protein, 37 aa, Artificial Sequence
  Non-cyclic GFR-binding peptide
  MOD_RES (34)..(35): Xaa is C or S
  MOD_RES (12)..(13)..(14)..(15)..(16): Xaa is A or G
  MOD_RES (17)..(18)..(19)..(20): Xaa is A or G or absent
SRVVMNSMEGIXXXXXXXXXMIQVTINSLKTPAXXPK

SEQ ID NO: 28211 - protein, 39 aa, Artificial Sequence
  Non-cyclic GFR-binding peptide
  MOD_RES (1)..(3)..(36)..(37): Xaa is C or S
  MOD_RES (14)..(15)..(16)..(17)..(18): Xaa is A or G
  MOD_RES (19)..(20)..(21)..(22): Xaa is A or G or absent
XKXSKVIMSMEGIXXXXXXXXXMIQITINSLDQSVXXPS

SEQ ID NO: 28212 - protein, 30 aa, Artificial Sequence
  Non-cyclic GFR-binding peptide
EVVMEVQVEKVVKDYEDVKAMKVSRLETPV

SEQ ID NO: 28213 - protein, 36 aa, Artificial Sequence
  Non-cyclic GFR-binding peptide
  MOD_RES (2)..(2): Xaa is C or S
  MOD_RES (15)..(16)..(17)..(18)..(19): Xaa is A or G
  MOD_RES (20)..(21)..(22)..(23): Xaa is A or G or absent
KXALHDELTNSLQEXXXXXXXXXYYVVPLPELQVQT

SEQ ID NO: 28214 - protein, 40 aa, Artificial Sequence
  Non-cyclic GFR-binding peptide
  MOD_RES (37)..(37): Xaa is C or S
ELHEELRNSLQELKPKKRVYEYYVVPLPEHHVRSPQXKVS

SEQ ID NO: 28215 - protein, 43 aa, Artificial Sequence
  Non-cyclic GFR-binding peptide
  MOD_RES (2)..(4)..(41): Xaa is C or S
  MOD_RES (17)..(18)..(19)..(20)..(21): Xaa is A or G
  MOD_RES (22)..(23)..(24)..(25): Xaa is A or G or absent
AXAXELHEELRNSLQEXXXXXXXXXYYVVPLPEHHVRSPQXKV

SEQ ID NO: 28216 - protein, 32 aa, Artificial Sequence
  Non-cyclic GFR-binding peptide
  MOD_RES (31)..(32): Xaa is C or S
SRVIMVQVEKVKPKRGVVKAIKVSRLAQPVXX

SEQ ID NO: 28217 - protein, 34 aa, Artificial Sequence
  Non-cyclic GFR-binding peptide
  MOD_RES (2)..(4): Xaa is C or S
SXKXSRVIMVQVEKVKPKRGVVKAIKVSRLAQPV

SEQ ID NO: 28218 - protein, 42 aa, Artificial Sequence
  Non-cyclic GFR-binding peptide
  MOD_RES (1)..(38): Xaa is C or S
  MOD_RES (14)..(15)..(16)..(17)..(18): Xaa is A or G
  MOD_RES (19)..(20)..(21)..(22): Xaa is A or G or absent
XELHEELRNSLQEXXXXXXXXXYYVVPLPEHHVRSPQXKVSS

SEQ ID NO: 28219 - protein, 36 aa, Artificial Sequence
  Non-cyclic GFR-binding peptide
  MOD_RES (1)..(33)..(34): Xaa is C or S
XGEVVMDSMEGIVVKENEDMIQMTINSLETPVXXAK

SEQ ID NO: 28220 - protein, 40 aa, Artificial Sequence
  Non-cyclic GFR-binding peptide
  MOD_RES (2)..(36)..(37): Xaa is C or S
  MOD_RES (14)..(15)..(16)..(17)..(18): Xaa is A or G
  MOD_RES (19)..(20)..(21)..(22): Xaa is A or G or absent
GXGEVVMESMEGIXXXXXXXXXMIQMTINSLETPVXXAKP

SEQ ID NO: 28221 - protein, 35 aa, Artificial Sequence
  Non-cyclic GFR-binding peptide
  MOD_RES (2)..(34)..(35): Xaa is C or S
GXARVVMNVTAKKIVNSSDDIKRVQVPRLQTPAXX

SEQ ID NO: 28222 - protein, 41 aa, Artificial Sequence
  Non-cyclic GFR-binding peptide
  MOD_RES (2)..(4)..(38)..(39): Xaa is C or S
  MOD_RES (16)..(17)..(18)..(19)..(20): Xaa is A or G
  MOD_RES (21)..(22)..(23)..(24): Xaa is A or G or absent
HXGXARVVMNVTAKKXXXXXXXXXIKRVQVPRLQTPAXXPK

SEQ ID NO: 28223 - protein, 41 aa, Artificial Sequence
  Non-cyclic GFR-binding peptide
  MOD_RES (2)..(36)..(37): Xaa is C or S
  MOD_RES (14)..(15)..(16)..(17)..(18): Xaa is A or G
  MOD_RES (19)..(20)..(21)..(22): Xaa is A or G or absent
GXSRVVMNVQVEKXXXXXXXXXVKAVKVSRLKTPAXXPKPV

SEQ ID NO: 28224 - protein, 32 aa, Artificial Sequence
  Non-cyclic GFR-binding peptide
  MOD_RES (11)..(12)..(13)..(14)..(15): Xaa is A or G
  MOD_RES (16)..(17)..(18)..(19): Xaa is A or G or absent
RVVMNVTAKKXXXXXXXXXIKRVQVPRLQTPA

SEQ ID NO: 28225 - protein, 41 aa, Artificial Sequence
  Non-cyclic GFR-binding peptide
  MOD_RES (1)..(35)..(36): Xaa is C or S
  MOD_RES (13)..(14)..(15)..(16)..(17): Xaa is A or G
  MOD_RES (18)..(19)..(20)..(21): Xaa is A or G or absent
XGEVVMEVQVEKXXXXXXXXXVKAMKVSRLETPVXXAKPIS

SEQ ID NO: 28226 - protein, 36 aa, Artificial Sequence
  Non-cyclic GFR-binding peptide
  MOD_RES (33)..(33): Xaa is C or S
  MOD_RES (11)..(12)..(13)..(14)..(15): Xaa is A or G
  MOD_RES (16)..(17)..(18)..(19): Xaa is A or G or absent
RVVMNVQVEKXXXXXXXXXVKAVKVSRLKTPAXTPK

SEQ ID NO: 28227 - protein, 34 aa, Artificial Sequence
  Non-cyclic GFR-binding peptide
  MOD_RES (1)..(32)..(33): Xaa is C or S
XSKVIMSMEGIIKPTKGIMIQITINSLDQSVXXP

SEQ ID NO: 28228 - protein, 39 aa, Artificial Sequence
  Non-cyclic GFR-binding peptide
  MOD_RES (1)..(3)..(37): Xaa is C or S
  MOD_RES (15)..(16)..(17)..(18)..(19): Xaa is A or G
  MOD_RES (20)..(21)..(22)..(23): Xaa is A or G or absent
XEXKNHQLFNSLQEXXXXXXXXXYYLMTLPEEETPVXEL

SEQ ID NO: 28229 - protein, 33 aa, Artificial Sequence
  Non-cyclic GFR-binding peptide
  MOD_RES (2)..(2): Xaa is C or S
GXSRVVMNVTAKKIVNSSDDIKRVQVPRLKTPA

SEQ ID NO: 28230 - protein, 38 aa, Artificial Sequence
  Non-cyclic GFR-binding peptide
  MOD_RES (1)..(3)..(37)..(38): Xaa is C or S
  MOD_RES (15)..(16)..(17)..(18)..(19): Xaa is A or G
  MOD_RES (20)..(21)..(22)..(23): Xaa is A or G or absent
XGXGEVVMDVQVEKXXXXXXXXXVKAMKVSRLETPVXX

SEQ ID NO: 28231 - protein, 34 aa, Artificial Sequence
  Non-cyclic GFR-binding peptide
  MOD_RES (1)..(3)..(34): Xaa is C or S
XKXSKVIMVTAKKIKPTKGIIKRIQVPRLDQSVX

SEQ ID NO: 28232 - protein, 39 aa, Artificial Sequence
  Non-cyclic GFR-binding peptide
  MOD_RES (1)..(3)..(37)..(38): Xaa is C or S
  MOD_RES (15)..(16)..(17)..(18)..(19): Xaa is A or G
  MOD_RES (20)..(21)..(22)..(23): Xaa is A or G or absent
XGXGEVVMESMEGIXXXXXXXXXMIQMTINSLETPVXXA

SEQ ID NO: 28233 - protein, 34 aa, Artificial Sequence
  Non-cyclic GFR-binding peptide
  MOD_RES (1)..(34): Xaa is C or S
  MOD_RES (12)..(13)..(14)..(15)..(16): Xaa is A or G
  MOD_RES (17)..(18)..(19)..(20): Xaa is A or G or absent
XSRVIMVTAKKXXXXXXXXXIKRIQVPRLAQPVX

SEQ ID NO: 28234 - protein, 35 aa, Artificial Sequence
  Non-cyclic GFR-binding peptide
  MOD_RES (34)..(34): Xaa is C or S
KNHQLFNSLQEHQGQHPKIRYYLMTLPEEETPVXE

SEQ ID NO: 28235 - protein, 35 aa, Artificial Sequence
  Non-cyclic GFR-binding peptide
  MOD_RES (34)..(34): Xaa is C or S
  MOD_RES (12)..(13)..(14)..(15)..(16): Xaa is A or G
  MOD_RES (17)..(18)..(19)..(20): Xaa is A or G or absent
SRVVMNVQVEKXXXXXXXXXVKAVKVSRLKTPAXT

SEQ ID NO: 28236 - protein, 38 aa, Artificial Sequence
  Non-cyclic GFR-binding peptide
  MOD_RES (34)..(35): Xaa is C or S
  MOD_RES (12)..(13)..(14)..(15)..(16): Xaa is A or G
  MOD_RES (17)..(18)..(19)..(20): Xaa is A or G or absent
GEVVMESMEGIXXXXXXXXXMIQMTINSLETPVXXAKP

SEQ ID NO: 28237 - protein, 38 aa, Artificial Sequence
  Non-cyclic GFR-binding peptide
  MOD_RES (35)..(35): Xaa is C or S
  MOD_RES (11)..(12)..(13)..(14)..(15): Xaa is A or G
  MOD_RES (16)..(17)..(18)..(19): Xaa is A or G or absent
HDELTNSLQEXXXXXXXXXYYLVTLPELQVQTPRXQVN

SEQ ID NO: 28238 - protein, 36 aa, Artificial Sequence
  Non-cyclic GFR-binding peptide
  MOD_RES (1)..(3)..(35)..(36): Xaa is C or S
XGXARVVMNVTAKKIVNSSDDIKRVQVPRLQTPAXX

SEQ ID NO: 28239 - protein, 33 aa, Artificial Sequence
  Non-cyclic GFR-binding peptide
  MOD_RES (1)..(1): Xaa is C or S
  MOD_RES (12)..(13)..(14)..(15)..(16): Xaa is A or G
  MOD_RES (17)..(18)..(19)..(20): Xaa is A or G or absent
XSKVVMVQVEKXXXXXXXXXVKAIKVSRLDQPV

SEQ ID NO: 28240 - protein, 37 aa, Artificial Sequence
  Non-cyclic GFR-binding peptide
  MOD_RES (1)..(3)..(35): Xaa is C or S
XGXSRVVMNSMEGIIVNSSDDMIQVTINSLKTPAXTP

SEQ ID NO: 28241 - protein, 37 aa, Artificial Sequence
  Non-cyclic GFR-binding peptide
  MOD_RES (35)..(35): Xaa is C or S
HEELRNSLQELKPKKRVYEYYLVTLPEHHVRSPQXKV

SEQ ID NO: 28242 - protein, 33 aa, Artificial Sequence
  Non-cyclic GFR-binding peptide
  MOD_RES (1)..(3): Xaa is C or S
XKXSKVVMVTAKKVKPTRGVIKRIQVPRLDQPV

SEQ ID NO: 28243 - protein, 41 aa, Artificial Sequence
  Non-cyclic GFR-binding peptide
  MOD_RES (1)..(3)..(37): Xaa is C or S
  MOD_RES (15)..(16)..(17)..(18)..(19): Xaa is A or G
  MOD_RES (20)..(21)..(22)..(23): Xaa is A or G or absent
XEXKNHQLFNSLQEXXXXXXXXXYYLMTLPEEETPVXELGE

SEQ ID NO: 28244 - protein, 33 aa, Artificial Sequence
  Non-cyclic GFR-binding peptide
  MOD_RES (33)..(33): Xaa is C or S
  MOD_RES (11)..(12)..(13)..(14)..(15): Xaa is A or G
  MOD_RES (16)..(17)..(18)..(19): Xaa is A or G or absent
RVVMNSMEGIXXXXXXXXXMIQVTINSLKTPAX

SEQ ID NO: 28245 - protein, 34 aa, Artificial Sequence
  Non-cyclic GFR-binding peptide
  MOD_RES (1)..(33)..(34): Xaa is C or S
XGEVVMESMEGIVVKDYEDMIQMTINSLETPVXX

SEQ ID NO: 28246 - protein, 34 aa, Artificial Sequence
  Non-cyclic GFR-binding peptide
  MOD_RES (1)..(3): Xaa is C or S
XGXSRVVMNVQVEKIVNSSDDVKAVKVSRLKTPA

SEQ ID NO: 28247 - protein, 37 aa, Artificial Sequence
  Non-cyclic GFR-binding peptide
  MOD_RES (1)..(33)..(34): Xaa is C or S
XGEVVMDVTAKKVVKENEDIKRMQVPRLETPVXXAKP

SEQ ID NO: 28248 - protein, 36 aa, Artificial Sequence
  Non-cyclic GFR-binding peptide
  MOD_RES (1)..(3)..(35): Xaa is C or S
XGXSRVVMNVQVEKIVNSSDDVKAVKVSRLKTPAXT

SEQ ID NO: 28249 - protein, 39 aa, Artificial Sequence
  Non-cyclic GFR-binding peptide
  MOD_RES (1)..(3)..(34)..(35): Xaa is C or S
XKXSKVIMSMEGIIKPTKGIMIQITINSLDQSVXXPSAS

SEQ ID NO: 28250 - protein, 40 aa, Artificial Sequence
  Non-cyclic GFR-binding peptide
  MOD_RES (1)..(3)..(34)..(35): Xaa is C or S
XKXSKVVMSMEGIVKPTRGVMIQITINSLDQPVXXPSASA

SEQ ID NO: 28251 - protein, 38 aa, Artificial Sequence
  Non-cyclic GFR-binding peptide
  MOD_RES (35)..(35): Xaa is C or S
HDELTNSLQEFIPKKRVIEYYVVPLPELQVQTPRXQVN

SEQ ID NO: 28252 - protein, 42 aa, Artificial Sequence
  Non-cyclic GFR-binding peptide
  MOD_RES (2)..(36): Xaa is C or S
  MOD_RES (14)..(15)..(16)..(17)..(18): Xaa is A or G
  MOD_RES (19)..(20)..(21)..(22): Xaa is A or G or absent
GXSRVVMNVTAKKXXXXXXXXXIKRVQVPRLKTPAXTPKTVH

SEQ ID NO: 28253 - protein, 36 aa, Artificial Sequence
  Non-cyclic GFR-binding peptide
  MOD_RES (32)..(32): Xaa is C or S
SRVVMNVTAKKIVNSSDDIKRVQVPRLKTPAXTPKT

SEQ ID NO: 28254 - protein, 39 aa, Artificial Sequence
  Non-cyclic GFR-binding peptide
  MOD_RES (34)..(34): Xaa is C or S
KNHQLFNSLQEHQGQHPKIRYYVMPLPEEETPVXELGED

SEQ ID NO: 28255 - protein, 37 aa, Artificial Sequence
  Non-cyclic GFR-binding peptide
  MOD_RES (1)..(35): Xaa is C or S
  MOD_RES (13)..(14)..(15)..(16)..(17): Xaa is A or G
  MOD_RES (18)..(19)..(20)..(21): Xaa is A or G or absent
XSRVVMNVTAKKXXXXXXXXXIKRVQVPRLKTPAXTP

SEQ ID NO: 28256 - protein, 38 aa, Artificial Sequence
  Non-cyclic GFR-binding peptide
  MOD_RES (2)..(4)..(37)..(38): Xaa is C or S
  MOD_RES (15)..(16)..(17)..(18)..(19): Xaa is A or G
  MOD_RES (20)..(21)..(22)..(23): Xaa is A or G or absent
SXKXSRVIMVQVEKXXXXXXXXXVKAIKVSRLAQPVXX

SEQ ID NO: 28257 - protein, 40 aa, Artificial Sequence
  Non-cyclic GFR-binding peptide
  MOD_RES (1)..(34)..(35): Xaa is C or S
  MOD_RES (12)..(13)..(14)..(15)..(16): Xaa is A or G
  MOD_RES (17)..(18)..(19)..(20): Xaa is A or G or absent
XSKVIMVTAKKXXXXXXXXXIKRIQVPRLDQSVXXPSASA

SEQ ID NO: 28258 - protein, 34 aa, Artificial Sequence
  Non-cyclic GFR-binding peptide
  MOD_RES (1)..(1): Xaa is C or S
  MOD_RES (13)..(14)..(15)..(16)..(17): Xaa is A or G
  MOD_RES (18)..(19)..(20)..(21): Xaa is A or G or absent
XARVVMNVQVEKXXXXXXXXXVKAVKVSRLQTPA

SEQ ID NO: 28259 - protein, 38 aa, Artificial Sequence
  Non-cyclic GFR-binding peptide
  MOD_RES (33)..(34): Xaa is C or S
  MOD_RES (11)..(12)..(13)..(14)..(15): Xaa is A or G
  MOD_RES (16)..(17)..(18)..(19): Xaa is A or G or absent
EVVMEVQVEKXXXXXXXXXVKAMKVSRLETPVXXAKPI

SEQ ID NO: 28260 - protein, 38 aa, Artificial Sequence
  Non-cyclic GFR-binding peptide
  MOD_RES (1)..(33)..(34): Xaa is C or S
XGEVVMDVTAKKVVKENEDIKRMQVPRLETPVXXAKPI

SEQ ID NO: 28261 - protein, 35 aa, Artificial Sequence
  Non-cyclic GFR-binding peptide
  MOD_RES (12)..(13)..(14)..(15)..(16): Xaa is A or G
  MOD_RES (17)..(18)..(19)..(20): Xaa is A or G or absent
LHDELTNSLQEXXXXXXXXXYYVVPLPELQVQTPR

SEQ ID NO: 28262 - protein, 34 aa, Artificial Sequence
  Non-cyclic GFR-binding peptide
  MOD_RES (33)..(34): Xaa is C or S
  MOD_RES (11)..(12)..(13)..(14)..(15): Xaa is A or G
  MOD_RES (16)..(17)..(18)..(19): Xaa is A or G or absent
SKVVMVTAKKXXXXXXXXXIKRIQVPRLDQPVXX

SEQ ID NO: 28263 - protein, 34 aa, Artificial Sequence
  Non-cyclic GFR-binding peptide
  MOD_RES (2)..(34): Xaa is C or S
GXGEVVMEVQVEKVVKDYEDVKAMKVSRLETPVX

SEQ ID NO: 28264 - protein, 37 aa, Artificial Sequence
  Non-cyclic GFR-binding peptide
  MOD_RES (32)..(33): Xaa is C or S
ARVVMNSMEGIIVNSSDDMIQVTINSLQTPAXXPKPV

SEQ ID NO: 28265 - protein, 39 aa, Artificial Sequence
  Non-cyclic GFR-binding peptide
  MOD_RES (34)..(35): Xaa is C or S
  MOD_RES (12)..(13)..(14)..(15)..(16): Xaa is A or G
  MOD_RES (17)..(18)..(19)..(20): Xaa is A or G or absent
SRVVMNVQVEKXXXXXXXXXVKAVKVSRLKTPAXXPKPV

SEQ ID NO: 28266 - protein, 40 aa, Artificial Sequence
  Non-cyclic GFR-binding peptide
  MOD_RES (1)..(35)..(36): Xaa is C or S
  MOD_RES (13)..(14)..(15)..(16)..(17): Xaa is A or G
  MOD_RES (18)..(19)..(20)..(21): Xaa is A or G or absent
XGEVVMEVQVEKXXXXXXXXXVKAMKVSRLETPVXXAKPI

SEQ ID NO: 28267 - protein, 40 aa, Artificial Sequence
  Non-cyclic GFR-binding peptide
  MOD_RES (2)..(36)..(37): Xaa is C or S
  MOD_RES (14)..(15)..(16)..(17)..(18): Xaa is A or G
  MOD_RES (19)..(20)..(21)..(22): Xaa is A or G or absent
GXSRVVMNVTAKKXXXXXXXXXIKRVQVPRLKTPAXXPKP

SEQ ID NO: 28268 - protein, 34 aa, Artificial Sequence
  Non-cyclic GFR-binding peptide
  MOD_RES (2)..(34): Xaa is C or S
GXGEVVMDVTAKKVVKENEDIKRMQVPRLETPVX

SEQ ID NO: 28269 - protein, 44 aa, Artificial Sequence
  Non-cyclic GFR-binding peptide
  MOD_RES (2)..(4)..(38)..(39): Xaa is C or S
  MOD_RES (16)..(17)..(18)..(19)..(20): Xaa is A or G
  MOD_RES (21)..(22)..(23)..(24): Xaa is A or G or absent
RXGXGEVVMDVQVEKXXXXXXXXXVKAMKVSRLETPVXXAKPIK

SEQ ID NO: 28270 - protein, 39 aa, Artificial Sequence
  Non-cyclic GFR-binding peptide
  MOD_RES (37)..(37): Xaa is C or S
ALHDELTNSLQEFIPKKRVIEYYLVTLPELQVQTPRXQV

SEQ ID NO: 28271 - protein, 33 aa, Artificial Sequence
  Non-cyclic GFR-binding peptide
  MOD_RES (33)..(33): Xaa is C or S
  MOD_RES (11)..(12)..(13)..(14)..(15): Xaa is A or G
  MOD_RES (16)..(17)..(18)..(19): Xaa is A or G or absent
SKVIMSMEGIXXXXXXXXXMIQITINSLDQSVX

SEQ ID NO: 28272 - protein, 32 aa, Artificial Sequence
  Non-cyclic GFR-binding peptide
  MOD_RES (1)..(1): Xaa is C or S
XGEVVMEVTAKKVVKDYEDIKRMQVPRLETPV

SEQ ID NO: 28273 - protein, 35 aa, Artificial Sequence
  Non-cyclic GFR-binding peptide
  MOD_RES (1)..(32)..(33): Xaa is C or S
XSKVIMVQVEKIKPTKGIVKAIKVSRLDQSVXXPS

SEQ ID NO: 28274 - protein, 37 aa, Artificial Sequence
  Non-cyclic GFR-binding peptide
  MOD_RES (1)..(3)..(34)..(35): Xaa is C or S
XKXSKVVMVTAKKVKPTRGVIKRIQVPRLDQPVXXPS

SEQ ID NO: 28275 - protein, 37 aa, Artificial Sequence
  Non-cyclic GFR-binding peptide
  MOD_RES (1)..(3)..(35)..(36): Xaa is C or S
XGXGEVVMEVTAKKVVKDYEDIKRMQVPRLETPVXXA

SEQ ID NO: 28276 - protein, 38 aa, Artificial Sequence
  Non-cyclic GFR-binding peptide
  MOD_RES (33)..(34): Xaa is C or S
  MOD_RES (11)..(12)..(13)..(14)..(15): Xaa is A or G
  MOD_RES (16)..(17)..(18)..(19): Xaa is A or G or absent
EVVMEVTAKKXXXXXXXXXIKRMQVPRLETPVXXAKPI

SEQ ID NO: 28277 - protein, 42 aa, Artificial Sequence
  Non-cyclic GFR-binding peptide
  MOD_RES (1)..(3)..(36)..(37): Xaa is C or S
  MOD_RES (14)..(15)..(16)..(17)..(18): Xaa is A or G
  MOD_RES (19)..(20)..(21)..(22): Xaa is A or G or absent
XKXSKVIMSMEGIXXXXXXXXXMIQITINSLDQSVXXPSASA

SEQ ID NO: 28278 - protein, 42 aa, Artificial Sequence
  Non-cyclic GFR-binding peptide
  MOD_RES (2)..(4)..(36): Xaa is C or S
HXGXSRVVMNSMEGIIVNSSDDMIQVTINSLKTPAXTPKTVH

SEQ ID NO: 28279 - protein, 36 aa, Artificial Sequence
  Non-cyclic GFR-binding peptide
  MOD_RES (1)..(3)..(34)..(35): Xaa is C or S
XKXSRVIMSMEGIVKPKRGVMIQITINSLAQPVXXP

SEQ ID NO: 28280 - protein, 34 aa, Artificial Sequence
  Non-cyclic GFR-binding peptide
  MOD_RES (33)..(34): Xaa is C or S
  MOD_RES (11)..(12)..(13)..(14)..(15): Xaa is A or G
  MOD_RES (16)..(17)..(18)..(19): Xaa is A or G or absent
SKVVMVQVEKXXXXXXXXXVKAIKVSRLDQPVXX

SEQ ID NO: 28281 - protein, 36 aa, Artificial Sequence
  Non-cyclic GFR-binding peptide
  MOD_RES (1)..(3)..(35)..(36): Xaa is C or S
XGXGEVVMEVTAKKVVKDYEDIKRMQVPRLETPVXX

SEQ ID NO: 28282 - protein, 35 aa, Artificial Sequence
  Non-cyclic GFR-binding peptide
  MOD_RES (2)..(2): Xaa is C or S
  MOD_RES (14)..(15)..(16)..(17)..(18): Xaa is A or G
  MOD_RES (19)..(20)..(21)..(22): Xaa is A or G or absent
EXKNHQLFNSLQEXXXXXXXXXYYVMPLPEEETPV

SEQ ID NO: 28283 - protein, 41 aa, Artificial Sequence
  Non-cyclic GFR-binding peptide
  MOD_RES (1)..(3)..(37)..(38): Xaa is C or S
  MOD_RES (15)..(16)..(17)..(18)..(19): Xaa is A or G
  MOD_RES (20)..(21)..(22)..(23): Xaa is A or G or absent
XGXSRVVMNVTAKKXXXXXXXXXIKRVQVPRLKTPAXXPKP

SEQ ID NO: 28284 - protein, 35 aa, Artificial Sequence
  Non-cyclic GFR-binding peptide
  MOD_RES (2)..(33)..(34): Xaa is C or S
KXSKVVMSMEGIVKPTRGVMIQITINSLDQPVXXP

SEQ ID NO: 28285 - protein, 30 aa, Artificial Sequence
  Non-cyclic GFR-binding peptide
SKVIMSMEGIIKPTKGIMIQITINSLDQSV

SEQ ID NO: 28286 - protein, 39 aa, Artificial Sequence
  Non-cyclic GFR-binding peptide
  MOD_RES (2)..(33)..(34): Xaa is C or S
KXSKVVMSMEGIVKPTRGVMIQITINSLDQPVXXPSASA

SEQ ID NO: 28287 - protein, 39 aa, Artificial Sequence
  Non-cyclic GFR-binding peptide
  MOD_RES (2)..(36)..(37): Xaa is C or S
  MOD_RES (14)..(15)..(16)..(17)..(18): Xaa is A or G
  MOD_RES (19)..(20)..(21)..(22): Xaa is A or G or absent
GXGEVVMESMEGIXXXXXXXXXMIQMTINSLETPVXXAK

SEQ ID NO: 28288 - protein, 39 aa, Artificial Sequence
  Non-cyclic GFR-binding peptide
  MOD_RES (1)..(35)..(36): Xaa is C or S
  MOD_RES (13)..(14)..(15)..(16)..(17): Xaa is A or G
  MOD_RES (18)..(19)..(20)..(21): Xaa is A or G or absent
XGEVVMESMEGIXXXXXXXXXMIQMTINSLETPVXXAKP

SEQ ID NO: 28289 - protein, 40 aa, Artificial Sequence
  Non-cyclic GFR-binding peptide
  MOD_RES (1)..(38): Xaa is C or S
  MOD_RES (14)..(15)..(16)..(17)..(18): Xaa is A or G
  MOD_RES (19)..(20)..(21)..(22): Xaa is A or G or absent
XALHDELTNSLQEXXXXXXXXXYYVVPLPELQVQTPRXQV

SEQ ID NO: 28290 - protein, 42 aa, Artificial Sequence
  Non-cyclic GFR-binding peptide
  MOD_RES (1)..(3)..(36)..(37): Xaa is C or S
  MOD_RES (14)..(15)..(16)..(17)..(18): Xaa is A or G
  MOD_RES (19)..(20)..(21)..(22): Xaa is A or G or absent
XKXSRVIMSMEGIXXXXXXXXXMIQITINSLAQPVXXPAASA

SEQ ID NO: 28291 - protein, 33 aa, Artificial Sequence
  Non-cyclic GFR-binding peptide
  MOD_RES (31)..(32): Xaa is C or S
SKVIMVTAKKIKPTKGIIKRIQVPRLDQSVXXP

SEQ ID NO: 28292 - protein, 37 aa, Artificial Sequence
  Non-cyclic GFR-binding peptide
  MOD_RES (35)..(35): Xaa is C or S
HEELRNSLQELKPKKRVYEYYVVPLPEHHVRSPQXKV

SEQ ID NO: 28293 - protein, 36 aa, Artificial Sequence
  Non-cyclic GFR-binding peptide
  MOD_RES (34)..(34): Xaa is C or S
  MOD_RES (12)..(13)..(14)..(15)..(16): Xaa is A or G
  MOD_RES (17)..(18)..(19)..(20): Xaa is A or G or absent
SRVVMNVTAKKXXXXXXXXXIKRVQVPRLKTPAXTP

SEQ ID NO: 28294 - protein, 34 aa, Artificial Sequence
  Non-cyclic GFR-binding peptide
HDELTNSLQEFIPKKRVIEYYVVPLPELQVQTPR

SEQ ID NO: 28295 - protein, 34 aa, Artificial Sequence
  Non-cyclic GFR-binding peptide
  MOD_RES (31)..(32): Xaa is C or S
SKVVMSMEGIVKPTRGVMIQITINSLDQPVXXPS

SEQ ID NO: 28296 - protein, 43 aa, Artificial Sequence
  Non-cyclic GFR-binding peptide
  MOD_RES (2)..(4)..(38)..(39): Xaa is C or S
  MOD_RES (16)..(17)..(18)..(19)..(20): Xaa is A or G
  MOD_RES (21)..(22)..(23)..(24): Xaa is A or G or absent
RXGXGEVVMDSMEGIXXXXXXXXXMIQMTINSLETPVXXAKPI

SEQ ID NO: 28297 - protein, 41 aa, Artificial Sequence
  Non-cyclic GFR-binding peptide
  MOD_RES (1)..(3)..(37)..(38): Xaa is C or S
  MOD_RES (15)..(16)..(17)..(18)..(19): Xaa is A or G
  MOD_RES (20)..(21)..(22)..(23): Xaa is A or G or absent
XGXSRVVMNSMEGIXXXXXXXXXMIQVTINSLKTPAXXPKP

SEQ ID NO: 28298 - protein, 33 aa, Artificial Sequence
  Non-cyclic GFR-binding peptide
  MOD_RES (2)..(33): Xaa is C or S
KXSKVVMVQVEKVKPTRGVVKAIKVSRLDQPVX

SEQ ID NO: 28299 - protein, 39 aa, Artificial Sequence
  Non-cyclic GFR-binding peptide
  MOD_RES (2)..(4)..(36): Xaa is C or S
HXGXSRVVMNSMEGIIVNSSDDMIQVTINSLKTPAXTPK

SEQ ID NO: 28300 - protein, 36 aa, Artificial Sequence
  Non-cyclic GFR-binding peptide
  MOD_RES (1)..(33)..(34): Xaa is C or S
XSRVVMNVTAKKIVNSSDDIKRVQVPRLKTPAXXPK

SEQ ID NO: 28301 - protein, 34 aa, Artificial Sequence
  Non-cyclic GFR-binding peptide
  MOD_RES (1)..(32)..(33): Xaa is C or S
XSKVVMSMEGIVKPTRGVMIQITINSLDQPVXXP

SEQ ID NO: 28302 - protein, 36 aa, Artificial Sequence
  Non-cyclic GFR-binding peptide
  MOD_RES (1)..(33)..(34): Xaa is C or S
XARVVMNVQVEKIVNSSDDVKAVKVSRLQTPAXXPK

SEQ ID NO: 28303 - protein, 39 aa, Artificial Sequence
  Non-cyclic GFR-binding peptide
  MOD_RES (2)..(4)..(37)..(38): Xaa is C or S
  MOD_RES (15)..(16)..(17)..(18)..(19): Xaa is A or G
  MOD_RES (20)..(21)..(22)..(23): Xaa is A or G or absent
SXKXSRVIMVQVEKXXXXXXXXXVKAIKVSRLAQPVXXP

SEQ ID NO: 28304 - protein, 39 aa, Artificial Sequence
  Non-cyclic GFR-binding peptide
  MOD_RES (1)..(34)..(35): Xaa is C or S
  MOD_RES (12)..(13)..(14)..(15)..(16): Xaa is A or G
  MOD_RES (17)..(18)..(19)..(20): Xaa is A or G or absent
XSKVIMSMEGIXXXXXXXXXMIQITINSLDQSVXXPSAS

SEQ ID NO: 28305 - protein, 35 aa, Artificial Sequence
  Non-cyclic GFR-binding peptide
  MOD_RES (31)..(31): Xaa is C or S
RVVMNVQVEKIVNSSDDVKAVKVSRLKTPAXTPKT

SEQ ID NO: 28306 - protein, 41 aa, Artificial Sequence
  Non-cyclic GFR-binding peptide
  MOD_RES (2)..(36): Xaa is C or S
  MOD_RES (14)..(15)..(16)..(17)..(18): Xaa is A or G
  MOD_RES (19)..(20)..(21)..(22): Xaa is A or G or absent
GXSRVVMNSMEGIXXXXXXXXXMIQVTINSLKTPAXTPKTV

SEQ ID NO: 28307 - protein, 37 aa, Artificial Sequence
  Non-cyclic GFR-binding peptide
  MOD_RES (1)..(3)..(35)..(36): Xaa is C or S
XGXGEVVMDVTAKKVVKENEDIKRMQVPRLETPVXXA

SEQ ID NO: 28308 - protein, 43 aa, Artificial Sequence
  Non-cyclic GFR-binding peptide
  MOD_RES (2)..(4)..(38)..(39): Xaa is C or S
  MOD_RES (16)..(17)..(18)..(19)..(20): Xaa is A or G
  MOD_RES (21)..(22)..(23)..(24): Xaa is A or G or absent
HXGXSRVVMNVTAKKXXXXXXXXXIKRVQVPRLKTPAXXPKPV

SEQ ID NO: 28309 - protein, 36 aa, Artificial Sequence
  Non-cyclic GFR-binding peptide
  MOD_RES (33)..(34): Xaa is C or S
  MOD_RES (11)..(12)..(13)..(14)..(15): Xaa is A or G
  MOD_RES (16)..(17)..(18)..(19): Xaa is A or G or absent
RVVMNVTAKKXXXXXXXXXIKRVQVPRLQTPAXXPK

SEQ ID NO: 28310 - protein, 36 aa, Artificial Sequence
  Non-cyclic GFR-binding peptide
  MOD_RES (31)..(32): Xaa is C or S
SKVIMVQVEKIKPTKGIVKAIKVSRLDQSVXXPSAS

SEQ ID NO: 28311 - protein, 38 aa, Artificial Sequence
  Non-cyclic GFR-binding peptide
  MOD_RES (1)..(3)..(34)..(35): Xaa is C or S
XKXSKVVMSMEGIVKPTRGVMIQITINSLDQPVXXPSA

SEQ ID NO: 28312 - protein, 38 aa, Artificial Sequence
  Non-cyclic GFR-binding peptide
  MOD_RES (1)..(3)..(34)..(35): Xaa is C or S
XKXSKVVMVQVEKVKPTRGVVKAIKVSRLDQPVXXPSA

SEQ ID NO: 28313 - protein, 38 aa, Artificial Sequence
  Non-cyclic GFR-binding peptide
  MOD_RES (2)..(36): Xaa is C or S
  MOD_RES (14)..(15)..(16)..(17)..(18): Xaa is A or G
  MOD_RES (19)..(20)..(21)..(22): Xaa is A or G or absent
GXSRVVMNSMEGIXXXXXXXXXMIQVTINSLKTPAXTP

SEQ ID NO: 28314 - protein, 36 aa, Artificial Sequence
  Non-cyclic GFR-binding peptide
  MOD_RES (1)..(3)..(35)..(36): Xaa is C or S
XGXGEVVMDVTAKKVVKENEDIKRMQVPRLETPVXX

SEQ ID NO: 28315 - protein, 33 aa, Artificial Sequence
  Non-cyclic GFR-binding peptide
  MOD_RES (1)..(33): Xaa is C or S
XGEVVMEVQVEKVVKDYEDVKAMKVSRLETPVX

SEQ ID NO: 28316 - protein, 34 aa, Artificial Sequence
  Non-cyclic GFR-binding peptide
  MOD_RES (12)..(13)..(14)..(15)..(16): Xaa is A or G
  MOD_RES (17)..(18)..(19)..(20): Xaa is A or G or absent
LHEELRNSLQEXXXXXXXXXYYLVTLPEHHVRSP

SEQ ID NO: 28317 - protein, 33 aa, Artificial Sequence
  Non-cyclic GFR-binding peptide
  MOD_RES (2)..(33): Xaa is C or S
KXSKVIMVQVEKIKPTKGIVKAIKVSRLDQSVX

SEQ ID NO: 28318 - protein, 37 aa, Artificial Sequence
  Non-cyclic GFR-binding peptide
  MOD_RES (2)..(4)..(37): Xaa is C or S
  MOD_RES (15)..(16)..(17)..(18)..(19): Xaa is A or G
  MOD_RES (20)..(21)..(22)..(23): Xaa is A or G or absent
SXKXSKVIMVQVEKXXXXXXXXXVKAIKVSRLDQSVX

SEQ ID NO: 28319 - protein, 35 aa, Artificial Sequence
  Non-cyclic GFR-binding peptide
  MOD_RES (2)..(4): Xaa is C or S
RXGXGEVVMDVTAKKVVKENEDIKRMQVPRLETPV

SEQ ID NO: 28320 - protein, 39 aa, Artificial Sequence
  Non-cyclic GFR-binding peptide
  MOD_RES (2)..(33)..(34): Xaa is C or S
KXSKVIMSMEGIIKPTKGIMIQITINSLDQSVXXPSASA

SEQ ID NO: 28321 - protein, 36 aa, Artificial Sequence
  Non-cyclic GFR-binding peptide
  MOD_RES (1)..(3)..(35)..(36): Xaa is C or S
XGXSRVVMNVTAKKIVNSSDDIKRVQVPRLKTPAXX

SEQ ID NO: 28322 - protein, 38 aa, Artificial Sequence
  Non-cyclic GFR-binding peptide
  MOD_RES (1)..(3)..(36)..(37): Xaa is C or S
  MOD_RES (14)..(15)..(16)..(17)..(18): Xaa is A or G
  MOD_RES (19)..(20)..(21)..(22): Xaa is A or G or absent
XKXSRVIMVQVEKXXXXXXXXXVKAIKVSRLAQPVXXP

SEQ ID NO: 28323 - protein, 34 aa, Artificial Sequence
  Non-cyclic GFR-binding peptide
  MOD_RES (11)..(12)..(13)..(14)..(15): Xaa is A or G
  MOD_RES (16)..(17)..(18)..(19): Xaa is A or G or absent
HDELTNSLQEXXXXXXXXXYYLVTLPELQVQTPR

SEQ ID NO: 28324 - protein, 37 aa, Artificial Sequence
  Non-cyclic GFR-binding peptide
  MOD_RES (1)..(33)..(34): Xaa is C or S
XARVVMNSMEGIIVNSSDDMIQVTINSLQTPAXXPKP

SEQ ID NO: 28325 - protein, 40 aa, Artificial Sequence
  Non-cyclic GFR-binding peptide
  MOD_RES (1)..(3)..(37): Xaa is C or S
  MOD_RES (15)..(16)..(17)..(18)..(19): Xaa is A or G
  MOD_RES (20)..(21)..(22)..(23): Xaa is A or G or absent
XGXSRVVMNVQVEKXXXXXXXXXVKAVKVSRLKTPAXTPK

SEQ ID NO: 28326 - protein, 34 aa, Artificial Sequence
  Non-cyclic GFR-binding peptide
  MOD_RES (11)..(12)..(13)..(14)..(15): Xaa is A or G
  MOD_RES (16)..(17)..(18)..(19): Xaa is A or G or absent
HDELTNSLQEXXXXXXXXXYYVVPLPELQVQTPR

SEQ ID NO: 28327 - protein, 38 aa, Artificial Sequence
  Non-cyclic GFR-binding peptide
  MOD_RES (2)..(34): Xaa is C or S
GXSRVVMNVQVEKIVNSSDDVKAVKVSRLKTPAXTPKT

SEQ ID NO: 28328 - protein, 40 aa, Artificial Sequence
  Non-cyclic GFR-binding peptide
  MOD_RES (1)..(35)..(36): Xaa is C or S
  MOD_RES (13)..(14)..(15)..(16)..(17): Xaa is A or G
  MOD_RES (18)..(19)..(20)..(21): Xaa is A or G or absent
XGEVVMDSMEGIXXXXXXXXXMIQMTINSLETPVXXAKPI

SEQ ID NO: 28329 - protein, 41 aa, Artificial Sequence
  Non-cyclic GFR-binding peptide
  MOD_RES (2)..(4)..(41): Xaa is C or S
AXAXELHEELRNSLQELKPKKRVYEYYLVTLPEHHVRSPQX

SEQ ID NO: 28330 - protein, 36 aa, Artificial Sequence
  Non-cyclic GFR-binding peptide
  MOD_RES (2)..(4)..(36): Xaa is C or S
RXGXGEVVMDSMEGIVVKENEDMIQMTINSLETPVX

SEQ ID NO: 28331 - protein, 37 aa, Artificial Sequence
  Non-cyclic GFR-binding peptide
  MOD_RES (37)..(37): Xaa is C or S
  MOD_RES (13)..(14)..(15)..(16)..(17): Xaa is A or G
  MOD_RES (18)..(19)..(20)..(21): Xaa is A or G or absent
ELHEELRNSLQEXXXXXXXXXYYVVPLPEHHVRSPQX

SEQ ID NO: 28332 - protein, 37 aa, Artificial Sequence
  Non-cyclic GFR-binding peptide
  MOD_RES (2)..(36)..(37): Xaa is C or S
  MOD_RES (14)..(15)..(16)..(17)..(18): Xaa is A or G
  MOD_RES (19)..(20)..(21)..(22): Xaa is A or G or absent
GXARVVMNSMEGIXXXXXXXXXMIQVTINSLQTPAXX

SEQ ID NO: 28333 - protein, 39 aa, Artificial Sequence
  Non-cyclic GFR-binding peptide
  MOD_RES (34)..(35): Xaa is C or S
  MOD_RES (12)..(13)..(14)..(15)..(16): Xaa is A or G
  MOD_RES (17)..(18)..(19)..(20): Xaa is A or G or absent
GEVVMESMEGIXXXXXXXXXMIQMTINSLETPVXXAKPI

SEQ ID NO: 28334 - protein, 37 aa, Artificial Sequence
  Non-cyclic GFR-binding peptide
  MOD_RES (1)..(35)..(36): Xaa is C or S
  MOD_RES (13)..(14)..(15)..(16)..(17): Xaa is A or G
  MOD_RES (18)..(19)..(20)..(21): Xaa is A or G or absent
XGEVVMEVTAKKXXXXXXXXXIKRMQVPRLETPVXXA

SEQ ID NO: 28335 - protein, 39 aa, Artificial Sequence
  Non-cyclic GFR-binding peptide
  MOD_RES (1)..(35)..(36): Xaa is C or S
  MOD_RES (13)..(14)..(15)..(16)..(17): Xaa is A or G
  MOD_RES (18)..(19)..(20)..(21): Xaa is A or G or absent
XSRVVMNVTAKKXXXXXXXXXIKRVQVPRLKTPAXXPKP

SEQ ID NO: 28336 - protein, 36 aa, Artificial Sequence
  Non-cyclic GFR-binding peptide
  MOD_RES (33)..(34): Xaa is C or S
  MOD_RES (11)..(12)..(13)..(14)..(15): Xaa is A or G
  MOD_RES (16)..(17)..(18)..(19): Xaa is A or G or absent
SKVIMVTAKKXXXXXXXXXIKRIQVPRLDQSVXXPS

SEQ ID NO: 28337 - protein, 35 aa, Artificial Sequence
  Non-cyclic GFR-binding peptide
  MOD_RES (2)..(34)..(35): Xaa is C or S
GXGEVVMESMEGIVVKDYEDMIQMTINSLETPVXX

SEQ ID NO: 28338 - protein, 33 aa, Artificial Sequence
  Non-cyclic GFR-binding peptide
  MOD_RES (33)..(33): Xaa is C or S
  MOD_RES (11)..(12)..(13)..(14)..(15): Xaa is A or G
  MOD_RES (16)..(17)..(18)..(19): Xaa is A or G or absent
RVVMNVTAKKXXXXXXXXXIKRVQVPRLQTPAX

SEQ ID NO: 28339 - protein, 39 aa, Artificial Sequence
  Non-cyclic GFR-binding peptide
  MOD_RES (2)..(4)..(38)..(39): Xaa is C or S
  MOD_RES (16)..(17)..(18)..(19)..(20): Xaa is A or G
  MOD_RES (21)..(22)..(23)..(24): Xaa is A or G or absent
HXGXARVVMNVTAKKXXXXXXXXXIKRVQVPRLQTPAXX

SEQ ID NO: 28340 - protein, 40 aa, Artificial Sequence
  Non-cyclic GFR-binding peptide
  MOD_RES (1)..(3)..(40): Xaa is C or S
XKXALHDELTNSLQEFIPKKRVIEYYVVPLPELQVQTPRX

SEQ ID NO: 28341 - protein, 41 aa, Artificial Sequence
  Non-cyclic GFR-binding peptide
  MOD_RES (1)..(3)..(37)..(38): Xaa is C or S
  MOD_RES (15)..(16)..(17)..(18)..(19): Xaa is A or G
  MOD_RES (20)..(21)..(22)..(23): Xaa is A or G or absent
XGXSRVVMNVQVEKXXXXXXXXXVKAVKVSRLKTPAXXPKP

SEQ ID NO: 28342 - protein, 35 aa, Artificial Sequence
  Non-cyclic GFR-binding peptide
  MOD_RES (2)..(4): Xaa is C or S
HXGXSRVVMNVTAKKIVNSSDDIKRVQVPRLKTPA

SEQ ID NO: 28343 - protein, 36 aa, Artificial Sequence
  Non-cyclic GFR-binding peptide
  MOD_RES (34)..(35): Xaa is C or S
  MOD_RES (12)..(13)..(14)..(15)..(16): Xaa is A or G
  MOD_RES (17)..(18)..(19)..(20): Xaa is A or G or absent
GEVVMEVQVEKXXXXXXXXXVKAMKVSRLETPVXXA

SEQ ID NO: 28344 - protein, 32 aa, Artificial Sequence
  Non-cyclic GFR-binding peptide
  MOD_RES (2)..(2): Xaa is C or S
KXSKVVMSMEGIVKPTRGVMIQITINSLDQPV

SEQ ID NO: 28345 - protein, 33 aa, Artificial Sequence
  Non-cyclic GFR-binding peptide
  MOD_RES (2)..(2): Xaa is C or S
GXARVVMNVTAKKIVNSSDDIKRVQVPRLQTPA

SEQ ID NO: 28346 - protein, 41 aa, Artificial Sequence
  Non-cyclic GFR-binding peptide
  MOD_RES (1)..(3)..(35)..(36): Xaa is C or S
XGXSRVVMNVTAKKIVNSSDDIKRVQVPRLKTPAXXPKPVY

SEQ ID NO: 28347 - protein, 42 aa, Artificial Sequence
  Non-cyclic GFR-binding peptide
  MOD_RES (2)..(4)..(38): Xaa is C or S
  MOD_RES (16)..(17)..(18)..(19)..(20): Xaa is A or G
  MOD_RES (21)..(22)..(23)..(24): Xaa is A or G or absent
RXEXKNHQLFNSLQEXXXXXXXXXYYLMTLPEEETPVXELGE

SEQ ID NO: 28348 - protein, 37 aa, Artificial Sequence
  Non-cyclic GFR-binding peptide
  MOD_RES (2)..(4)..(36): Xaa is C or S
HXGXSRVVMNSMEGIIVNSSDDMIQVTINSLKTPAXT

SEQ ID NO: 28349 - protein, 37 aa, Artificial Sequence
  Non-cyclic GFR-binding peptide
  MOD_RES (2)..(36)..(37): Xaa is C or S
  MOD_RES (14)..(15)..(16)..(17)..(18): Xaa is A or G
  MOD_RES (19)..(20)..(21)..(22): Xaa is A or G or absent
GXGEVVMDSMEGIXXXXXXXXXMIQMTINSLETPVXX

SEQ ID NO: 28350 - protein, 39 aa, Artificial Sequence
  Non-cyclic GFR-binding peptide
  MOD_RES (1)..(3)..(37): Xaa is C or S
  MOD_RES (15)..(16)..(17)..(18)..(19): Xaa is A or G
  MOD_RES (20)..(21)..(22)..(23): Xaa is A or G or absent
XGXSRVVMNVQVEKXXXXXXXXXVKAVKVSRLKTPAXTP

SEQ ID NO: 28351 - protein, 37 aa, Artificial Sequence
  Non-cyclic GFR-binding peptide
  MOD_RES (33)..(34): Xaa is C or S
  MOD_RES (11)..(12)..(13)..(14)..(15): Xaa is A or G
  MOD_RES (16)..(17)..(18)..(19): Xaa is A or G or absent
EVVMDVQVEKXXXXXXXXXVKAMKVSRLETPVXXAKP

SEQ ID NO: 28352 - protein, 35 aa, Artificial Sequence
  Non-cyclic GFR-binding peptide
  MOD_RES (34)..(35): Xaa is C or S
  MOD_RES (12)..(13)..(14)..(15)..(16): Xaa is A or G
  MOD_RES (17)..(18)..(19)..(20): Xaa is A or G or absent
SRVVMNVQVEKXXXXXXXXXVKAVKVSRLKTPAXX

SEQ ID NO: 28353 - protein, 41 aa, Artificial Sequence
  Non-cyclic GFR-binding peptide
  MOD_RES (2)..(35)..(36): Xaa is C or S
  MOD_RES (13)..(14)..(15)..(16)..(17): Xaa is A or G
  MOD_RES (18)..(19)..(20)..(21): Xaa is A or G or absent
KXSKVVMVTAKKXXXXXXXXXIKRIQVPRLDQPVXXPSASA

SEQ ID NO: 28354 - protein, 33 aa, Artificial Sequence
  Non-cyclic GFR-binding peptide
  MOD_RES (2)..(33): Xaa is C or S
KXSKVIMSMEGIIKPTKGIMIQITINSLDQSVX

SEQ ID NO: 28355 - protein, 39 aa, Artificial Sequence
  Non-cyclic GFR-binding peptide
  MOD_RES (37)..(37): Xaa is C or S
  MOD_RES (13)..(14)..(15)..(16)..(17): Xaa is A or G
  MOD_RES (18)..(19)..(20)..(21): Xaa is A or G or absent
ELHEELRNSLQEXXXXXXXXXYYVVPLPEHHVRSPQXKV

SEQ ID NO: 28356 - protein, 38 aa, Artificial Sequence
  Non-cyclic GFR-binding peptide
  MOD_RES (34)..(34): Xaa is C or S
KNHQLFNSLQEHQGQHPKIRYYVMPLPEEETPVXELGE

SEQ ID NO: 28357 - protein, 39 aa, Artificial Sequence
  Non-cyclic GFR-binding peptide
  MOD_RES (2)..(4)..(38): Xaa is C or S
  MOD_RES (16)..(17)..(18)..(19)..(20): Xaa is A or G
  MOD_RES (21)..(22)..(23)..(24): Xaa is A or G or absent
RXEXKNHQLFNSLQEXXXXXXXXXYYVMPLPEEETPVXE

SEQ ID NO: 28358 - protein, 36 aa, Artificial Sequence
  Non-cyclic GFR-binding peptide
  MOD_RES (35)..(35): Xaa is C or S
HDELTNSLQEFIPKKRVIEYYLVTLPELQVQTPRXQ

SEQ ID NO: 28359 - protein, 40 aa, Artificial Sequence
  Non-cyclic GFR-binding peptide
  MOD_RES (2)..(34)..(35): Xaa is C or S
GXGEVVMDSMEGIVVKENEDMIQMTINSLETPVXXAKPIK

SEQ ID NO: 28360 - protein, 37 aa, Artificial Sequence
  Non-cyclic GFR-binding peptide
  MOD_RES (2)..(33)..(34): Xaa is C or S
KXSRVIMSMEGIVKPKRGVMIQITINSLAQPVXXPAA

SEQ ID NO: 28361 - protein, 34 aa, Artificial Sequence
  Non-cyclic GFR-binding peptide
  MOD_RES (1)..(3): Xaa is C or S
XGXGEVVMDVQVEKVVKENEDVKAMKVSRLETPV

SEQ ID NO: 28362 - protein, 36 aa, Artificial Sequence
  Non-cyclic GFR-binding peptide
  MOD_RES (2)..(2): Xaa is C or S
KXALHDELTNSLQEFIPKKRVIEYYVVPLPELQVQT

SEQ ID NO: 28363 - protein, 37 aa, Artificial Sequence
  Non-cyclic GFR-binding peptide
  MOD_RES (2)..(4): Xaa is C or S
  MOD_RES (16)..(17)..(18)..(19)..(20): Xaa is A or G
  MOD_RES (21)..(22)..(23)..(24): Xaa is A or G or absent
RXGXGEVVMDVQVEKXXXXXXXXXVKAMKVSRLETPV

SEQ ID NO: 28364 - protein, 35 aa, Artificial Sequence
  Non-cyclic GFR-binding peptide
  MOD_RES (31)..(32): Xaa is C or S
EVVMDVQVEKVVKENEDVKAMKVSRLETPVXXAKP

SEQ ID NO: 28365 - protein, 30 aa, Artificial Sequence
  Non-cyclic GFR-binding peptide
EVVMEVTAKKVVKDYEDIKRMQVPRLETPV

SEQ ID NO: 28366 - protein, 32 aa, Artificial Sequence
  Non-cyclic GFR-binding peptide
  MOD_RES (11)..(12)..(13)..(14)..(15): Xaa is A or G
  MOD_RES (16)..(17)..(18)..(19): Xaa is A or G or absent
SKVIMSMEGIXXXXXXXXXMIQITINSLDQSV

SEQ ID NO: 28367 - protein, 37 aa, Artificial Sequence
  Non-cyclic GFR-binding peptide
  MOD_RES (33)..(34): Xaa is C or S
  MOD_RES (11)..(12)..(13)..(14)..(15): Xaa is A or G
  MOD_RES (16)..(17)..(18)..(19): Xaa is A or G or absent
RVVMNVTAKKXXXXXXXXXIKRVQVPRLKTPAXXPKP

SEQ ID NO: 28368 - protein, 42 aa, Artificial Sequence
  Non-cyclic GFR-binding peptide
  MOD_RES (2)..(4)..(36)..(37): Xaa is C or S
RXGXGEVVMEVTAKKVVKDYEDIKRMQVPRLETPVXXAKPIS

SEQ ID NO: 28369 - protein, 38 aa, Artificial Sequence
  Non-cyclic GFR-binding peptide
  MOD_RES (2)..(4)..(37)..(38): Xaa is C or S
  MOD_RES (15)..(16)..(17)..(18)..(19): Xaa is A or G
  MOD_RES (20)..(21)..(22)..(23): Xaa is A or G or absent
SXKXSRVIMSMEGIXXXXXXXXXMIQITINSLAQPVXX

SEQ ID NO: 28370 - protein, 35 aa, Artificial Sequence
  Non-cyclic GFR-binding peptide
  MOD_RES (1)..(35): Xaa is C or S
  MOD_RES (13)..(14)..(15)..(16)..(17): Xaa is A or G
  MOD_RES (18)..(19)..(20)..(21): Xaa is A or G or absent
XGEVVMDSMEGIXXXXXXXXXMIQMTINSLETPVX

SEQ ID NO: 28371 - protein, 35 aa, Artificial Sequence
  Non-cyclic GFR-binding peptide
  MOD_RES (1)..(35): Xaa is C or S
  MOD_RES (13)..(14)..(15)..(16)..(17): Xaa is A or G
  MOD_RES (18)..(19)..(20)..(21): Xaa is A or G or absent
XARVVMNVQVEKXXXXXXXXXVKAVKVSRLQTPAX

SEQ ID NO: 28372 - protein, 39 aa, Artificial Sequence
  Non-cyclic GFR-binding peptide
  MOD_RES (2)..(33)..(34): Xaa is C or S
KXSKVVMVQVEKVKPTRGVVKAIKVSRLDQPVXXPSASA

SEQ ID NO: 28373 - protein, 38 aa, Artificial Sequence
  Non-cyclic GFR-binding peptide
  MOD_RES (2)..(34)..(35): Xaa is C or S
GXARVVMNSMEGIIVNSSDDMIQVTINSLQTPAXXPKP

SEQ ID NO: 28374 - protein, 39 aa, Artificial Sequence
  Non-cyclic GFR-binding peptide
  MOD_RES (1)..(35)..(36): Xaa is C or S
  MOD_RES (13)..(14)..(15)..(16)..(17): Xaa is A or G
  MOD_RES (18)..(19)..(20)..(21): Xaa is A or G or absent
XGEVVMDVTAKKXXXXXXXXXIKRMQVPRLETPVXXAKP

SEQ ID NO: 28375 - protein, 33 aa, Artificial Sequence
  Non-cyclic GFR-binding peptide
  MOD_RES (11)..(12)..(13)..(14)..(15): Xaa is A or G
  MOD_RES (16)..(17)..(18)..(19): Xaa is A or G or absent
HEELRNSLQEXXXXXXXXXYYVVPLPEHHVRSP

SEQ ID NO: 28376 - protein, 40 aa, Artificial Sequence
  Non-cyclic GFR-binding peptide
  MOD_RES (2)..(36)..(37): Xaa is C or S
  MOD_RES (14)..(15)..(16)..(17)..(18): Xaa is A or G
  MOD_RES (19)..(20)..(21)..(22): Xaa is A or G or absent
GXARVVMNSMEGIXXXXXXXXXMIQVTINSLQTPAXXPKP

SEQ ID NO: 28377 - protein, 38 aa, Artificial Sequence
  Non-cyclic GFR-binding peptide
  MOD_RES (1)..(34)..(35): Xaa is C or S
  MOD_RES (12)..(13)..(14)..(15)..(16): Xaa is A or G
  MOD_RES (17)..(18)..(19)..(20): Xaa is A or G or absent
XSRVIMVQVEKXXXXXXXXXVKAIKVSRLAQPVXXPAA

SEQ ID NO: 28378 - protein, 36 aa, Artificial Sequence
  Non-cyclic GFR-binding peptide
  MOD_RES (2)..(4)..(35)..(36): Xaa is C or S
SXKXSRVIMVTAKKVKPKRGVIKRIQVPRLAQPVXX

SEQ ID NO: 28379 - protein, 40 aa, Artificial Sequence
  Non-cyclic GFR-binding peptide
  MOD_RES (2)..(4)..(36): Xaa is C or S
HXGXSRVVMNVTAKKIVNSSDDIKRVQVPRLKTPAXTPKT

SEQ ID NO: 28380 - protein, 32 aa, Artificial Sequence
  Non-cyclic GFR-binding peptide
  MOD_RES (11)..(12)..(13)..(14)..(15): Xaa is A or G
  MOD_RES (16)..(17)..(18)..(19): Xaa is A or G or absent
RVVMNVQVEKXXXXXXXXXVKAVKVSRLQTPA

SEQ ID NO: 28381 - protein, 38 aa, Artificial Sequence
  Non-cyclic GFR-binding peptide
  MOD_RES (33)..(34): Xaa is C or S
  MOD_RES (11)..(12)..(13)..(14)..(15): Xaa is A or G
  MOD_RES (16)..(17)..(18)..(19): Xaa is A or G or absent
RVVMNVQVEKXXXXXXXXXVKAVKVSRLQTPAXXPKPV

SEQ ID NO: 28382 - protein, 40 aa, Artificial Sequence
  Non-cyclic GFR-binding peptide
  MOD_RES (2)..(35)..(36): Xaa is C or S
  MOD_RES (13)..(14)..(15)..(16)..(17): Xaa is A or G
  MOD_RES (18)..(19)..(20)..(21): Xaa is A or G or absent
KXSKVVMVTAKKXXXXXXXXXIKRIQVPRLDQPVXXPSAS

SEQ ID NO: 28383 - protein, 40 aa, Artificial Sequence
  Non-cyclic GFR-binding peptide
  MOD_RES (1)..(35): Xaa is C or S
XKNHQLFNSLQEHQGQHPKIRYYLMTLPEEETPVXELGED

SEQ ID NO: 28384 - protein, 37 aa, Artificial Sequence
  Non-cyclic GFR-binding peptide
  MOD_RES (1)..(3)..(36)..(37): Xaa is C or S
  MOD_RES (14)..(15)..(16)..(17)..(18): Xaa is A or G
  MOD_RES (19)..(20)..(21)..(22): Xaa is A or G or absent
XKXSKVVMSMEGIXXXXXXXXXMIQITINSLDQPVXX

SEQ ID NO: 28385 - protein, 32 aa, Artificial Sequence
  Non-cyclic GFR-binding peptide
  MOD_RES (11)..(12)..(13)..(14)..(15): Xaa is A or G
  MOD_RES (16)..(17)..(18)..(19): Xaa is A or G or absent
SRVIMSMEGIXXXXXXXXXMIQITINSLAQPV

SEQ ID NO: 28386 - protein, 34 aa, Artificial Sequence
  Non-cyclic GFR-binding peptide
  MOD_RES (34)..(34): Xaa is C or S
  MOD_RES (12)..(13)..(14)..(15)..(16): Xaa is A or G
  MOD_RES (17)..(18)..(19)..(20): Xaa is A or G or absent
SRVVMNVTAKKXXXXXXXXXIKRVQVPRLKTPAX

SEQ ID NO: 28387 - protein, 40 aa, Artificial Sequence
  Non-cyclic GFR-binding peptide
  MOD_RES (34)..(35): Xaa is C or S
  MOD_RES (12)..(13)..(14)..(15)..(16): Xaa is A or G
  MOD_RES (17)..(18)..(19)..(20): Xaa is A or G or absent
GEVVMESMEGIXXXXXXXXXMIQMTINSLETPVXXAKPIS

SEQ ID NO: 28388 - protein, 39 aa, Artificial Sequence
  Non-cyclic GFR-binding peptide
  MOD_RES (37)..(37): Xaa is C or S
  MOD_RES (13)..(14)..(15)..(16)..(17): Xaa is A or G
  MOD_RES (18)..(19)..(20)..(21): Xaa is A or G or absent
ALHDELTNSLQEXXXXXXXXXYYLVTLPELQVQTPRXQV

SEQ ID NO: 28389 - protein, 37 aa, Artificial Sequence
  Non-cyclic GFR-binding peptide
  MOD_RES (2)..(33)..(34): Xaa is C or S
KXSKVVMVTAKKVKPTRGVIKRIQVPRLDQPVXXPSA

SEQ ID NO: 28390 - protein, 42 aa, Artificial Sequence
  Non-cyclic GFR-binding peptide
  MOD_RES (2)..(4)..(36)..(37): Xaa is C or S
RXGXGEVVMDVQVEKVVKENEDVKAMKVSRLETPVXXAKPIK

SEQ ID NO: 28391 - protein, 35 aa, Artificial Sequence
  Non-cyclic GFR-binding peptide
  MOD_RES (1)..(33)..(34): Xaa is C or S
XGEVVMEVTAKKVVKDYEDIKRMQVPRLETPVXXA

SEQ ID NO: 28392 - protein, 37 aa, Artificial Sequence
  Non-cyclic GFR-binding peptide
  MOD_RES (1)..(3)..(35): Xaa is C or S
XGXSRVVMNVQVEKIVNSSDDVKAVKVSRLKTPAXTP

SEQ ID NO: 28393 - protein, 35 aa, Artificial Sequence
  Non-cyclic GFR-binding peptide
  MOD_RES (31)..(32): Xaa is C or S
SRVIMSMEGIVKPKRGVMIQITINSLAQPVXXPAA

SEQ ID NO: 28394 - protein, 34 aa, Artificial Sequence
  Non-cyclic GFR-binding peptide
  MOD_RES (2)..(4): Xaa is C or S
SXKXSKVIMSMEGIIKPTKGIMIQITINSLDQSV

SEQ ID NO: 28395 - protein, 39 aa, Artificial Sequence
  Non-cyclic GFR-binding peptide
  MOD_RES (2)..(4)..(37)..(38): Xaa is C or S
  MOD_RES (15)..(16)..(17)..(18)..(19): Xaa is A or G
  MOD_RES (20)..(21)..(22)..(23): Xaa is A or G or absent
SXKXSRVIMVTAKKXXXXXXXXXIKRIQVPRLAQPVXXP

SEQ ID NO: 28396 - protein, 37 aa, Artificial Sequence
  Non-cyclic GFR-binding peptide
  MOD_RES (1)..(1): Xaa is C or S
XALHDELTNSLQEFIPKKRVIEYYLVTLPELQVQTPR

SEQ ID NO: 28397 - protein, 40 aa, Artificial Sequence
  Non-cyclic GFR-binding peptide
  MOD_RES (1)..(35): Xaa is C or S
  MOD_RES (13)..(14)..(15)..(16)..(17): Xaa is A or G
  MOD_RES (18)..(19)..(20)..(21): Xaa is A or G or absent
XKNHQLFNSLQEXXXXXXXXXYYLMTLPEEETPVXELGED

SEQ ID NO: 28398 - protein, 41 aa, Artificial Sequence
  Non-cyclic GFR-binding peptide
  MOD_RES (2)..(4)..(36)..(37): Xaa is C or S
RXGXGEVVMESMEGIVVKDYEDMIQMTINSLETPVXXAKPI

SEQ ID NO: 28399 - protein, 33 aa, Artificial Sequence
  Non-cyclic GFR-binding peptide
  MOD_RES (32)..(33): Xaa is C or S
GEVVMDVTAKKVVKENEDIKRMQVPRLETPVXX

SEQ ID NO: 28400 - protein, 35 aa, Artificial Sequence
  Non-cyclic GFR-binding peptide
  MOD_RES (2)..(34)..(35): Xaa is C or S
GXARVVMNVQVEKIVNSSDDVKAVKVSRLQTPAXX

SEQ ID NO: 28401 - protein, 33 aa, Artificial Sequence
  Non-cyclic GFR-binding peptide
  MOD_RES (1)..(32)..(33): Xaa is C or S
XSKVVMSMEGIVKPTRGVMIQITINSLDQPVXX

SEQ ID NO: 28402 - protein, 38 aa, Artificial Sequence
  Non-cyclic GFR-binding peptide
  MOD_RES (34)..(34): Xaa is C or S
KNHQLFNSLQEHQGQHPKIRYYLMTLPEEETPVXELGE

SEQ ID NO: 28403 - protein, 44 aa, Artificial Sequence
  Non-cyclic GFR-binding peptide
  MOD_RES (2)..(4)..(38): Xaa is C or S
  MOD_RES (16)..(17)..(18)..(19)..(20): Xaa is A or G
  MOD_RES (21)..(22)..(23)..(24): Xaa is A or G or absent
HXGXSRVVMNVQVEKXXXXXXXXXVKAVKVSRLKTPAXTPKTVH

SEQ ID NO: 28404 - protein, 37 aa, Artificial Sequence
  Non-cyclic GFR-binding peptide
  MOD_RES (1)..(1): Xaa is C or S
XELHEELRNSLQELKPKKRVYEYYLVTLPEHHVRSPQ

SEQ ID NO: 28405 - protein, 39 aa, Artificial Sequence
  Non-cyclic GFR-binding peptide
  MOD_RES (1)..(3)..(35)..(36): Xaa is C or S
XGXARVVMNVTAKKIVNSSDDIKRVQVPRLQTPAXXPKP

SEQ ID NO: 28406 - protein, 41 aa, Artificial Sequence
  Non-cyclic GFR-binding peptide
  MOD_RES (2)..(4)..(41): Xaa is C or S
  MOD_RES (17)..(18)..(19)..(20)..(21): Xaa is A or G
  MOD_RES (22)..(23)..(24)..(25): Xaa is A or G or absent
EXKXALHDELTNSLQEXXXXXXXXXYYVVPLPELQVQTPRX

SEQ ID NO: 28407 - protein, 33 aa, Artificial Sequence
  Non-cyclic GFR-binding peptide
  MOD_RES (11)..(12)..(13)..(14)..(15): Xaa is A or G
  MOD_RES (16)..(17)..(18)..(19): Xaa is A or G or absent
HEELRNSLQEXXXXXXXXXYYLVTLPEHHVRSP

SEQ ID NO: 28408 - protein, 37 aa, Artificial Sequence
  Non-cyclic GFR-binding peptide
  MOD_RES (2)..(34): Xaa is C or S
GXSRVVMNVQVEKIVNSSDDVKAVKVSRLKTPAXTPK

SEQ ID NO: 28409 - protein, 34 aa, Artificial Sequence
  Non-cyclic GFR-binding peptide
  MOD_RES (2)..(33)..(34): Xaa is C or S
KXSKVIMSMEGIIKPTKGIMIQITINSLDQSVXX

SEQ ID NO: 28410 - protein, 35 aa, Artificial Sequence
  Non-cyclic GFR-binding peptide
ALHDELTNSLQEFIPKKRVIEYYVVPLPELQVQTP

SEQ ID NO: 28411 - protein, 38 aa, Artificial Sequence
  Non-cyclic GFR-binding peptide
  MOD_RES (1)..(3)..(35)..(36): Xaa is C or S
XGXSRVVMNVTAKKIVNSSDDIKRVQVPRLKTPAXXPK

SEQ ID NO: 28412 - protein, 42 aa, Artificial Sequence
  Non-cyclic GFR-binding peptide
  MOD_RES (2)..(4)..(41): Xaa is C or S
  MOD_RES (17)..(18)..(19)..(20)..(21): Xaa is A or G
  MOD_RES (22)..(23)..(24)..(25): Xaa is A or G or absent
AXAXELHEELRNSLQEXXXXXXXXXYYVVPLPEHHVRSPQXK

SEQ ID NO: 28413 - protein, 36 aa, Artificial Sequence
  Non-cyclic GFR-binding peptide
  MOD_RES (2)..(36): Xaa is C or S
  MOD_RES (14)..(15)..(16)..(17)..(18): Xaa is A or G
  MOD_RES (19)..(20)..(21)..(22): Xaa is A or G or absent
GXGEVVMEVQVEKXXXXXXXXXVKAMKVSRLETPVX

SEQ ID NO: 28414 - protein, 35 aa, Artificial Sequence
  Non-cyclic GFR-binding peptide
  MOD_RES (1)..(35): Xaa is C or S
  MOD_RES (13)..(14)..(15)..(16)..(17): Xaa is A or G
  MOD_RES (18)..(19)..(20)..(21): Xaa is A or G or absent
XGEVVMEVQVEKXXXXXXXXXVKAMKVSRLETPVX

SEQ ID NO: 28415 - protein, 34 aa, Artificial Sequence
  Non-cyclic GFR-binding peptide
  MOD_RES (1)..(3): Xaa is C or S
XGXGEVVMEVQVEKVVKDYEDVKAMKVSRLETPV

SEQ ID NO: 28416 - protein, 38 aa, Artificial Sequence
  Non-cyclic GFR-binding peptide
  MOD_RES (1)..(3)..(35)..(36): Xaa is C or S
XGXARVVMNVTAKKIVNSSDDIKRVQVPRLQTPAXXPK

SEQ ID NO: 28417 - protein, 41 aa, Artificial Sequence
  Non-cyclic GFR-binding peptide
  MOD_RES (2)..(36)..(37): Xaa is C or S
  MOD_RES (14)..(15)..(16)..(17)..(18): Xaa is A or G
  MOD_RES (19)..(20)..(21)..(22): Xaa is A or G or absent
GXGEVVMESMEGIXXXXXXXXXMIQMTINSLETPVXXAKPI

SEQ ID NO: 28418 - protein, 37 aa, Artificial Sequence
  Non-cyclic GFR-binding peptide
  MOD_RES (33)..(34): Xaa is C or S
  MOD_RES (11)..(12)..(13)..(14)..(15): Xaa is A or G
  MOD_RES (16)..(17)..(18)..(19): Xaa is A or G or absent
SKVVMVQVEKXXXXXXXXXVKAIKVSRLDQPVXXPSA

SEQ ID NO: 28419 - protein, 38 aa, Artificial Sequence
  Non-cyclic GFR-binding peptide
  MOD_RES (2)..(34)..(35): Xaa is C or S
GXSRVVMNSMEGIIVNSSDDMIQVTINSLKTPAXXPKP

SEQ ID NO: 28420 - protein, 38 aa, Artificial Sequence
  Non-cyclic GFR-binding peptide
  MOD_RES (2)..(36)..(37): Xaa is C or S
  MOD_RES (14)..(15)..(16)..(17)..(18): Xaa is A or G
  MOD_RES (19)..(20)..(21)..(22): Xaa is A or G or absent
GXSRVVMNVQVEKXXXXXXXXXVKAVKVSRLKTPAXXP

SEQ ID NO: 28421 - protein, 32 aa, Artificial Sequence
  Non-cyclic GFR-binding peptide
  MOD_RES (2)..(2): Xaa is C or S
KXSKVVMVQVEKVKPTRGVVKAIKVSRLDQPV

SEQ ID NO: 28422 - protein, 32 aa, Artificial Sequence
  Non-cyclic GFR-binding peptide
  MOD_RES (11)..(12)..(13)..(14)..(15): Xaa is A or G
  MOD_RES (16)..(17)..(18)..(19): Xaa is A or G or absent
EVVMESMEGIXXXXXXXXXMIQMTINSLETPV

SEQ ID NO: 28423 - protein, 37 aa, Artificial Sequence
  Non-cyclic GFR-binding peptide
  MOD_RES (1)..(32)..(33): Xaa is C or S
XSKVVMVTAKKVKPTRGVIKRIQVPRLDQPVXXPSAS

SEQ ID NO: 28424 - protein, 31 aa, Artificial Sequence
  Non-cyclic GFR-binding peptide
  MOD_RES (31)..(31): Xaa is C or S
SRVIMVQVEKVKPKRGVVKAIKVSRLAQPVX

SEQ ID NO: 28425 - protein, 35 aa, Artificial Sequence
  Non-cyclic GFR-binding peptide
  MOD_RES (2)..(34)..(35): Xaa is C or S
GXSRVVMNVQVEKIVNSSDDVKAVKVSRLKTPAXX

SEQ ID NO: 28426 - protein, 42 aa, Artificial Sequence
  Non-cyclic GFR-binding peptide
  MOD_RES (2)..(39): Xaa is C or S
AXELHEELRNSLQELKPKKRVYEYYVVPLPEHHVRSPQXKVS

SEQ ID NO: 28427 - protein, 39 aa, Artificial Sequence
  Non-cyclic GFR-binding peptide
  MOD_RES (1)..(3): Xaa is C or S
  MOD_RES (16)..(17)..(18)..(19)..(20): Xaa is A or G
  MOD_RES (21)..(22)..(23)..(24): Xaa is A or G or absent
XAXELHEELRNSLQEXXXXXXXXXYYLVTLPEHHVRSPQ

SEQ ID NO: 28428 - protein, 43 aa, Artificial Sequence
  Non-cyclic GFR-binding peptide
  MOD_RES (1)..(3)..(40): Xaa is C or S
XKXALHDELTNSLQEFIPKKRVIEYYLVTLPELQVQTPRXQVN

SEQ ID NO: 28429 - protein, 40 aa, Artificial Sequence
  Non-cyclic GFR-binding peptide
  MOD_RES (1)..(3)..(37): Xaa is C or S
  MOD_RES (15)..(16)..(17)..(18)..(19): Xaa is A or G
  MOD_RES (20)..(21)..(22)..(23): Xaa is A or G or absent
XGXSRVVMNVTAKKXXXXXXXXXIKRVQVPRLKTPAXTPK

SEQ ID NO: 28430 - protein, 36 aa, Artificial Sequence
  Non-cyclic GFR-binding peptide
  MOD_RES (34)..(34): Xaa is C or S
  MOD_RES (12)..(13)..(14)..(15)..(16): Xaa is A or G
  MOD_RES (17)..(18)..(19)..(20): Xaa is A or G or absent
SRVVMNVQVEKXXXXXXXXXVKAVKVSRLKTPAXTP

SEQ ID NO: 28431 - protein, 35 aa, Artificial Sequence
  Non-cyclic GFR-binding peptide
  MOD_RES (35)..(35): Xaa is C or S
  MOD_RES (11)..(12)..(13)..(14)..(15): Xaa is A or G
  MOD_RES (16)..(17)..(18)..(19): Xaa is A or G or absent
HEELRNSLQEXXXXXXXXXYYVVPLPEHHVRSPQX

SEQ ID NO: 28432 - protein, 39 aa, Artificial Sequence
  Non-cyclic GFR-binding peptide
  MOD_RES (2)..(4)..(36)..(37): Xaa is C or S
HXGXSRVVMNVTAKKIVNSSDDIKRVQVPRLKTPAXXPK

SEQ ID NO: 28433 - protein, 39 aa, Artificial Sequence
  Non-cyclic GFR-binding peptide
  MOD_RES (2)..(39): Xaa is C or S
  MOD_RES (15)..(16)..(17)..(18)..(19): Xaa is A or G
  MOD_RES (20)..(21)..(22)..(23): Xaa is A or G or absent
AXELHEELRNSLQEXXXXXXXXXYYVVPLPEHHVRSPQX

SEQ ID NO: 28434 - protein, 34 aa, Artificial Sequence
  Non-cyclic GFR-binding peptide
  MOD_RES (31)..(32): Xaa is C or S
EVVMDVTAKKVVKENEDIKRMQVPRLETPVXXAK

SEQ ID NO: 28435 - protein, 37 aa, Artificial Sequence
  Non-cyclic GFR-binding peptide
  MOD_RES (1)..(34)..(35): Xaa is C or S
  MOD_RES (12)..(13)..(14)..(15)..(16): Xaa is A or G
  MOD_RES (17)..(18)..(19)..(20): Xaa is A or G or absent
XSRVIMVQVEKXXXXXXXXXVKAIKVSRLAQPVXXPA

SEQ ID NO: 28436 - protein, 35 aa, Artificial Sequence
  Non-cyclic GFR-binding peptide
  MOD_RES (35)..(35): Xaa is C or S
  MOD_RES (11)..(12)..(13)..(14)..(15): Xaa is A or G
  MOD_RES (16)..(17)..(18)..(19): Xaa is A or G or absent
HEELRNSLQEXXXXXXXXXYYLVTLPEHHVRSPQX

SEQ ID NO: 28437 - protein, 41 aa, Artificial Sequence
  Non-cyclic GFR-binding peptide
  MOD_RES (1)..(3)..(35)..(36): Xaa is C or S
XGXGEVVMESMEGIVVKDYEDMIQMTINSLETPVXXAKPIS

SEQ ID NO: 28438 - protein, 37 aa, Artificial Sequence
  Non-cyclic GFR-binding peptide
  MOD_RES (33)..(34): Xaa is C or S
  MOD_RES (11)..(12)..(13)..(14)..(15): Xaa is A or G
  MOD_RES (16)..(17)..(18)..(19): Xaa is A or G or absent
SKVVMVTAKKXXXXXXXXXIKRIQVPRLDQPVXXPSA

SEQ ID NO: 28439 - protein, 33 aa, Artificial Sequence
  Non-cyclic GFR-binding peptide
  MOD_RES (12)..(13)..(14)..(15)..(16): Xaa is A or G
  MOD_RES (17)..(18)..(19)..(20): Xaa is A or G or absent
LHDELTNSLQEXXXXXXXXXYYVVPLPELQVQT

SEQ ID NO: 28440 - protein, 31 aa, Artificial Sequence
  Non-cyclic GFR-binding peptide
  MOD_RES (1)..(1): Xaa is C or S
XSRVIMVTAKKVKPKRGVIKRIQVPRLAQPV

SEQ ID NO: 28441 - protein, 35 aa, Artificial Sequence
  Non-cyclic GFR-binding peptide
  MOD_RES (1)..(3)..(34)..(35): Xaa is C or S
XKXSRVIMSMEGIVKPKRGVMIQITINSLAQPVXX

SEQ ID NO: 28442 - protein, 39 aa, Artificial Sequence
  Non-cyclic GFR-binding peptide
  MOD_RES (34)..(35): Xaa is C or S
  MOD_RES (12)..(13)..(14)..(15)..(16): Xaa is A or G
  MOD_RES (17)..(18)..(19)..(20): Xaa is A or G or absent
SRVVMNVTAKKXXXXXXXXXIKRVQVPRLKTPAXXPKPV

SEQ ID NO: 28443 - protein, 36 aa, Artificial Sequence
  Non-cyclic GFR-binding peptide
  MOD_RES (34)..(35): Xaa is C or S
  MOD_RES (12)..(13)..(14)..(15)..(16): Xaa is A or G
  MOD_RES (17)..(18)..(19)..(20): Xaa is A or G or absent
GEVVMEVTAKKXXXXXXXXXIKRMQVPRLETPVXXA

SEQ ID NO: 28444 - protein, 40 aa, Artificial Sequence
  Non-cyclic GFR-binding peptide
  MOD_RES (34)..(35): Xaa is C or S
  MOD_RES (12)..(13)..(14)..(15)..(16): Xaa is A or G
  MOD_RES (17)..(18)..(19)..(20): Xaa is A or G or absent
GEVVMDSMEGIXXXXXXXXXMIQMTINSLETPVXXAKPIK

SEQ ID NO: 28445 - protein, 33 aa, Artificial Sequence
  Non-cyclic GFR-binding peptide
  MOD_RES (31)..(32): Xaa is C or S
SKVIMVQVEKIKPTKGIVKAIKVSRLDQSVXXP

SEQ ID NO: 28446 - protein, 38 aa, Artificial Sequence
  Non-cyclic GFR-binding peptide
  MOD_RES (2)..(33)..(34): Xaa is C or S
KXSKVIMSMEGIIKPTKGIMIQITINSLDQSVXXPSAS

SEQ ID NO: 28447 - protein, 39 aa, Artificial Sequence
  Non-cyclic GFR-binding peptide
  MOD_RES (1)..(3)..(37)..(38): Xaa is C or S
  MOD_RES (15)..(16)..(17)..(18)..(19): Xaa is A or G
  MOD_RES (20)..(21)..(22)..(23): Xaa is A or G or absent
XGXGEVVMEVTAKKXXXXXXXXXIKRMQVPRLETPVXXA

SEQ ID NO: 28448 - protein, 33 aa, Artificial Sequence
  Non-cyclic GFR-binding peptide
  MOD_RES (1)..(1): Xaa is C or S
  MOD_RES (12)..(13)..(14)..(15)..(16): Xaa is A or G
  MOD_RES (17)..(18)..(19)..(20): Xaa is A or G or absent
XSRVIMVQVEKXXXXXXXXXVKAIKVSRLAQPV

SEQ ID NO: 28449 - protein, 31 aa, Artificial Sequence
  Non-cyclic GFR-binding peptide
  MOD_RES (31)..(31): Xaa is C or S
EVVMDVTAKKVVKENEDIKRMQVPRLETPVX

SEQ ID NO: 28450 - protein, 39 aa, Artificial Sequence
  Non-cyclic GFR-binding peptide
  MOD_RES (36)..(36): Xaa is C or S
  MOD_RES (12)..(13)..(14)..(15)..(16): Xaa is A or G
  MOD_RES (17)..(18)..(19)..(20): Xaa is A or G or absent
LHDELTNSLQEXXXXXXXXXYYVVPLPELQVQTPRXQVN

SEQ ID NO: 28451 - protein, 36 aa, Artificial Sequence
  Non-cyclic GFR-binding peptide
  MOD_RES (1)..(3)..(36): Xaa is C or S
  MOD_RES (14)..(15)..(16)..(17)..(18): Xaa is A or G
  MOD_RES (19)..(20)..(21)..(22): Xaa is A or G or absent
XKXSKVIMVTAKKXXXXXXXXXIKRIQVPRLDQSVX

SEQ ID NO: 28452 - protein, 34 aa, Artificial Sequence
  Non-cyclic GFR-binding peptide
  MOD_RES (32)..(32): Xaa is C or S
SRVVMNVQVEKIVNSSDDVKAVKVSRLKTPAXTP

SEQ ID NO: 28453 - protein, 37 aa, Artificial Sequence
  Non-cyclic GFR-binding peptide
  MOD_RES (2)..(4)..(36)..(37): Xaa is C or S
RXGXGEVVMESMEGIVVKDYEDMIQMTINSLETPVXX

SEQ ID NO: 28454 - protein, 38 aa, Artificial Sequence
  Non-cyclic GFR-binding peptide
  MOD_RES (2)..(4)..(38): Xaa is C or S
  MOD_RES (16)..(17)..(18)..(19)..(20): Xaa is A or G
  MOD_RES (21)..(22)..(23)..(24): Xaa is A or G or absent
HXGXSRVVMNVTAKKXXXXXXXXXIKRVQVPRLKTPAX

SEQ ID NO: 28455 - protein, 36 aa, Artificial Sequence
  Non-cyclic GFR-binding peptide
  MOD_RES (1)..(3): Xaa is C or S
  MOD_RES (15)..(16)..(17)..(18)..(19): Xaa is A or G
  MOD_RES (20)..(21)..(22)..(23): Xaa is A or G or absent
XEXKNHQLFNSLQEXXXXXXXXXYYVMPLPEEETPV

SEQ ID NO: 28456 - protein, 40 aa, Artificial Sequence
  Non-cyclic GFR-binding peptide
  MOD_RES (1)..(3)..(36)..(37): Xaa is C or S
  MOD_RES (14)..(15)..(16)..(17)..(18): Xaa is A or G
  MOD_RES (19)..(20)..(21)..(22): Xaa is A or G or absent
XKXSKVIMSMEGIXXXXXXXXXMIQITINSLDQSVXXPSA

SEQ ID NO: 28457 - protein, 34 aa, Artificial Sequence
  Non-cyclic GFR-binding peptide
ELHEELRNSLQELKPKKRVYEYYLVTLPEHHVRS

SEQ ID NO: 28458 - protein, 36 aa, Artificial Sequence
  Non-cyclic GFR-binding peptide
  MOD_RES (32)..(33): Xaa is C or S
ARVVMNVQVEKIVNSSDDVKAVKVSRLQTPAXXPKP

SEQ ID NO: 28459 - protein, 39 aa, Artificial Sequence
  Non-cyclic GFR-binding peptide
  MOD_RES (2)..(4)..(37)..(38): Xaa is C or S
  MOD_RES (15)..(16)..(17)..(18)..(19): Xaa is A or G
  MOD_RES (20)..(21)..(22)..(23): Xaa is A or G or absent
SXKXSRVIMSMEGIXXXXXXXXXMIQITINSLAQPVXXP

SEQ ID NO: 28460 - protein, 35 aa, Artificial Sequence
  Non-cyclic GFR-binding peptide
  MOD_RES (32)..(33): Xaa is C or S
SRVVMNSMEGIIVNSSDDMIQVTINSLKTPAXXPK

SEQ ID NO: 28461 - protein, 37 aa, Artificial Sequence
  Non-cyclic GFR-binding peptide
  MOD_RES (1)..(32)..(33): Xaa is C or S
XSKVIMVTAKKIKPTKGIIKRIQVPRLDQSVXXPSAS

SEQ ID NO: 28462 - protein, 39 aa, Artificial Sequence
  Non-cyclic GFR-binding peptide
  MOD_RES (1)..(3)..(35)..(36): Xaa is C or S
XGXSRVVMNVTAKKIVNSSDDIKRVQVPRLKTPAXXPKP

SEQ ID NO: 28463 - protein, 33 aa, Artificial Sequence
  Non-cyclic GFR-binding peptide
  MOD_RES (32)..(33): Xaa is C or S
SRVVMNVTAKKIVNSSDDIKRVQVPRLKTPAXX

SEQ ID NO: 28464 - protein, 38 aa, Artificial Sequence
  Non-cyclic GFR-binding peptide
  MOD_RES (2)..(33)..(34): Xaa is C or S
KXSKVIMVQVEKIKPTKGIVKAIKVSRLDQSVXXPSAS

SEQ ID NO: 28465 - protein, 34 aa, Artificial Sequence
  Non-cyclic GFR-binding peptide
  MOD_RES (1)..(32)..(33): Xaa is C or S
XSRVIMVQVEKVKPKRGVVKAIKVSRLAQPVXXP

SEQ ID NO: 28466 - protein, 37 aa, Artificial Sequence
  Non-cyclic GFR-binding peptide
  MOD_RES (32)..(33): Xaa is C or S
GEVVMESMEGIVVKDYEDMIQMTINSLETPVXXAKPI

SEQ ID NO: 28467 - protein, 37 aa, Artificial Sequence
  Non-cyclic GFR-binding peptide
  MOD_RES (1)..(3)..(34)..(35): Xaa is C or S
XKXSKVVMVQVEKVKPTRGVVKAIKVSRLDQPVXXPS

SEQ ID NO: 28468 - protein, 37 aa, Artificial Sequence
  Non-cyclic GFR-binding peptide
  MOD_RES (2)..(34)..(35): Xaa is C or S
GXGEVVMDSMEGIVVKENEDMIQMTINSLETPVXXAK

SEQ ID NO: 28469 - protein, 39 aa, Artificial Sequence
  Non-cyclic GFR-binding peptide
  MOD_RES (2)..(34): Xaa is C or S
GXSRVVMNSMEGIIVNSSDDMIQVTINSLKTPAXTPKTV

SEQ ID NO: 28470 - protein, 37 aa, Artificial Sequence
  Non-cyclic GFR-binding peptide
  MOD_RES (1)..(3)..(34)..(35): Xaa is C or S
XKXSKVIMVQVEKIKPTKGIVKAIKVSRLDQSVXXPS

SEQ ID NO: 28471 - protein, 35 aa, Artificial Sequence
  Non-cyclic GFR-binding peptide
  MOD_RES (2)..(2): Xaa is C or S
EXKNHQLFNSLQEHQGQHPKIRYYVMPLPEEETPV

SEQ ID NO: 28472 - protein, 35 aa, Artificial Sequence
  Non-cyclic GFR-binding peptide
  MOD_RES (2)..(33)..(34): Xaa is C or S
KXSKVIMVTAKKIKPTKGIIKRIQVPRLDQSVXXP

SEQ ID NO: 28473 - protein, 41 aa, Artificial Sequence
  Non-cyclic GFR-binding peptide
  MOD_RES (1)..(35)..(36): Xaa is C or S
  MOD_RES (13)..(14)..(15)..(16)..(17): Xaa is A or G
  MOD_RES (18)..(19)..(20)..(21): Xaa is A or G or absent
XSRVVMNVTAKKXXXXXXXXXIKRVQVPRLKTPAXXPKPVY

SEQ ID NO: 28474 - protein, 34 aa, Artificial Sequence
  Non-cyclic GFR-binding peptide
  MOD_RES (31)..(32): Xaa is C or S
SKVIMSMEGIIKPTKGIMIQITINSLDQSVXXPS

SEQ ID NO: 28475 - protein, 38 aa, Artificial Sequence
  Non-cyclic GFR-binding peptide
  MOD_RES (1)..(32)..(33): Xaa is C or S
XSKVIMVTAKKIKPTKGIIKRIQVPRLDQSVXXPSASA

SEQ ID NO: 28476 - protein, 43 aa, Artificial Sequence
  Non-cyclic GFR-binding peptide
  MOD_RES (2)..(4)..(37)..(38): Xaa is C or S
  MOD_RES (15)..(16)..(17)..(18)..(19): Xaa is A or G
  MOD_RES (20)..(21)..(22)..(23): Xaa is A or G or absent
SXKXSKVVMVQVEKXXXXXXXXXVKAIKVSRLDQPVXXPSASA

SEQ ID NO: 28477 - protein, 38 aa, Artificial Sequence
  Non-cyclic GFR-binding peptide
  MOD_RES (2)..(4)..(36)..(37): Xaa is C or S
RXGXGEVVMEVQVEKVVKDYEDVKAMKVSRLETPVXXA

SEQ ID NO: 28478 - protein, 39 aa, Artificial Sequence
  Non-cyclic GFR-binding peptide
  MOD_RES (2)..(4)..(36): Xaa is C or S
HXGXSRVVMNVQVEKIVNSSDDVKAVKVSRLKTPAXTPK

SEQ ID NO: 28479 - protein, 39 aa, Artificial Sequence
  Non-cyclic GFR-binding peptide
  MOD_RES (1)..(3)..(36)..(37): Xaa is C or S
  MOD_RES (14)..(15)..(16)..(17)..(18): Xaa is A or G
  MOD_RES (19)..(20)..(21)..(22): Xaa is A or G or absent
XKXSRVIMSMEGIXXXXXXXXXMIQITINSLAQPVXXPA

SEQ ID NO: 28480 - protein, 37 aa, Artificial Sequence
  Non-cyclic GFR-binding peptide
  MOD_RES (2)..(33)..(34): Xaa is C or S
KXSRVIMVQVEKVKPKRGVVKAIKVSRLAQPVXXPAA

SEQ ID NO: 28481 - protein, 31 aa, Artificial Sequence
  Non-cyclic GFR-binding peptide
GEVVMEVTAKKVVKDYEDIKRMQVPRLETPV

SEQ ID NO: 28482 - protein, 38 aa, Artificial Sequence
  Non-cyclic GFR-binding peptide
  MOD_RES (2)..(34): Xaa is C or S
GXSRVVMNVTAKKIVNSSDDIKRVQVPRLKTPAXTPKT

SEQ ID NO: 28483 - protein, 36 aa, Artificial Sequence
  Non-cyclic GFR-binding peptide
  MOD_RES (31)..(32): Xaa is C or S
RVVMNSMEGIIVNSSDDMIQVTINSLQTPAXXPKPV

SEQ ID NO: 28484 - protein, 38 aa, Artificial Sequence
  Non-cyclic GFR-binding peptide
  MOD_RES (2)..(4)..(37)..(38): Xaa is C or S
  MOD_RES (15)..(16)..(17)..(18)..(19): Xaa is A or G
  MOD_RES (20)..(21)..(22)..(23): Xaa is A or G or absent
SXKXSRVIMVTAKKXXXXXXXXXIKRIQVPRLAQPVXX

SEQ ID NO: 28485 - protein, 39 aa, Artificial Sequence
  Non-cyclic GFR-binding peptide
  MOD_RES (2)..(35)..(36): Xaa is C or S
  MOD_RES (13)..(14)..(15)..(16)..(17): Xaa is A or G
  MOD_RES (18)..(19)..(20)..(21): Xaa is A or G or absent
KXSKVIMSMEGIXXXXXXXXXMIQITINSLDQSVXXPSA

SEQ ID NO: 28486 - protein, 39 aa, Artificial Sequence
  Non-cyclic GFR-binding peptide
  MOD_RES (34)..(34): Xaa is C or S
KNHQLFNSLQEHQGQHPKIRYYLMTLPEEETPVXELGED

SEQ ID NO: 28487 - protein, 40 aa, Artificial Sequence
  Non-cyclic GFR-binding peptide
  MOD_RES (1)..(3)..(37): Xaa is C or S
  MOD_RES (15)..(16)..(17)..(18)..(19): Xaa is A or G
  MOD_RES (20)..(21)..(22)..(23): Xaa is A or G or absent
XGXSRVVMNSMEGIXXXXXXXXXMIQVTINSLKTPAXTPK

SEQ ID NO: 28488 - protein, 32 aa, Artificial Sequence
  Non-cyclic GFR-binding peptide
  MOD_RES (31)..(32): Xaa is C or S
EVVMDVTAKKVVKENEDIKRMQVPRLETPVXX

SEQ ID NO: 28489 - protein, 40 aa, Artificial Sequence
  Non-cyclic GFR-binding peptide
  MOD_RES (2)..(4)..(37)..(38): Xaa is C or S
  MOD_RES (15)..(16)..(17)..(18)..(19): Xaa is A or G
  MOD_RES (20)..(21)..(22)..(23): Xaa is A or G or absent
SXKXSRVIMVTAKKXXXXXXXXXIKRIQVPRLAQPVXXPA

SEQ ID NO: 28490 - protein, 41 aa, Artificial Sequence
  Non-cyclic GFR-binding peptide
  MOD_RES (3)..(40): Xaa is C or S
VKXQPSRVHHEPLTVLYYEYVRKKPKLEQLSNRLEEHLEXA

SEQ ID NO: 28491 - protein, 34 aa, Artificial Sequence
  Non-cyclic GFR-binding peptide
  MOD_RES (1)..(2)..(34): Xaa is C or S
XXVPTELRSVKMAKVDEYDKVVKEVQVEMVVEGX

SEQ ID NO: 28492 - protein, 35 aa, Artificial Sequence
  Non-cyclic GFR-binding peptide
  MOD_RES (1)..(2)..(34): Xaa is C or S
XXVPTELRSVKMAKVDEYDKVVKEVQVEMVVEGXG

SEQ ID NO: 28493 - protein, 36 aa, Artificial Sequence
  Non-cyclic GFR-binding peptide
  MOD_RES (2)..(2): Xaa is C or S
  MOD_RES (18)..(19)..(20)..(21)..(22): Xaa is A or G
  MOD_RES (23)..(24)..(25)..(26): Xaa is A or G or absent
QXRPTQVQLEPLTVLYYXXXXXXXXXEQLSNTLEDH

SEQ ID NO: 28494 - protein, 39 aa, Artificial Sequence
  Non-cyclic GFR-binding peptide
  MOD_RES (4)..(5)..(37)..(39): Xaa is C or S
PKPXXAPTKLRSVKVAKVDDSSNVIKEVQVNMVVRSXGX

SEQ ID NO: 28495 - protein, 34 aa, Artificial Sequence
  Non-cyclic GFR-binding peptide
  MOD_RES (1)..(32)..(34): Xaa is C or S
XVPQALRSVKIAKVVGRKPKVKEVQVMIVRSXKX

SEQ ID NO: 28496 - protein, 38 aa, Artificial Sequence
  Non-cyclic GFR-binding peptide
  MOD_RES (1)..(35)..(37): Xaa is C or S
  MOD_RES (15)..(16)..(17)..(18)..(19): Xaa is A or G
  MOD_RES (20)..(21)..(22)..(23): Xaa is A or G or absent
XVPTEEEPLTMLYYXXXXXXXXXEQLSNFLQHNKXEXR

SEQ ID NO: 28497 - protein, 38 aa, Artificial Sequence
  Non-cyclic GFR-binding peptide
  MOD_RES (3)..(35)..(37): Xaa is C or S
PTXAPTKLSNITVQIMDDSSNVIIGEMSNMVVRSXGXH

SEQ ID NO: 28498 - protein, 41 aa, Artificial Sequence
  Non-cyclic GFR-binding peptide
  MOD_RES (4)..(38)..(40): Xaa is C or S
GLEXVPTEEEPLPMVYYRIKPHQGQHEQLSNFLQHNKXEXR

SEQ ID NO: 28499 - protein, 42 aa, Artificial Sequence
  Non-cyclic GFR-binding peptide
  MOD_RES (5)..(6)..(40)..(42): Xaa is C or S
  MOD_RES (20)..(21)..(22)..(23)..(24): Xaa is A or G
  MOD_RES (25)..(26)..(27)..(28): Xaa is A or G or absent
VPKPXXAPTQLRSVKVAKVXXXXXXXXXKEVQVNMVVRAXGX

SEQ ID NO: 28500 - protein, 36 aa, Artificial Sequence
  Non-cyclic GFR-binding peptide
  MOD_RES (33)..(35): Xaa is C or S
  MOD_RES (14)..(15)..(16)..(17)..(18): Xaa is A or G
  MOD_RES (19)..(20)..(21)..(22): Xaa is A or G or absent
VSQDLRPVQIRKIXXXXXXXXXKKATVMIVKSXKXS

SEQ ID NO: 28501 - protein, 38 aa, Artificial Sequence
  Non-cyclic GFR-binding peptide
  MOD_RES (2)..(36)..(38): Xaa is C or S
EXVPTEEEPLPMVYYRIKPHQGQHEQLSNFLQHNKXEX

SEQ ID NO: 28502 - protein, 39 aa, Artificial Sequence
  Non-cyclic GFR-binding peptide
  MOD_RES (5)..(39): Xaa is C or S
  MOD_RES (19)..(20)..(21)..(22)..(23): Xaa is A or G
  MOD_RES (24)..(25)..(26)..(27): Xaa is A or G or absent
TKPTXAPTKLSNITVQIMXXXXXXXXXIGEMSNMVVRSX

SEQ ID NO: 28503 - protein, 40 aa, Artificial Sequence
  Non-cyclic GFR-binding peptide
  MOD_RES (6)..(7)..(39): Xaa is C or S
SIPKAXXVPTELRPVQMRKIDEYDKVVKKATVEMVVEGXG

SEQ ID NO: 28504 - protein, 33 aa, Artificial Sequence
  Non-cyclic GFR-binding peptide
  MOD_RES (1)..(1): Xaa is C or S
  MOD_RES (15)..(16)..(17)..(18)..(19): Xaa is A or G
  MOD_RES (20)..(21)..(22)..(23): Xaa is A or G or absent
XAPTQLSNITVQIMXXXXXXXXXIGEMSNMVVR

SEQ ID NO: 28505 - protein, 36 aa, Artificial Sequence
  Non-cyclic GFR-binding peptide
  MOD_RES (3)..(4)..(35): Xaa is C or S
SPXXVSQDLRSVKIAKVIGKTPKIKEVQVMIVKSXK

SEQ ID NO: 28506 - protein, 43 aa, Artificial Sequence
  Non-cyclic GFR-binding peptide
  MOD_RES (4)..(41)..(43): Xaa is C or S
  MOD_RES (20)..(21)..(22)..(23)..(24): Xaa is A or G
  MOD_RES (25)..(26)..(27)..(28): Xaa is A or G or absent
SVKXQPSRVHHEPLPVVYYXXXXXXXXXEQLSNRLEEHLEXAX

SEQ ID NO: 28507 - protein, 35 aa, Artificial Sequence
  Non-cyclic GFR-binding peptide
  MOD_RES (16)..(17)..(18)..(19)..(20): Xaa is A or G
  MOD_RES (21)..(22)..(23)..(24): Xaa is A or G or absent
RPTQVQLEPLTVLYYXXXXXXXXXEQLSNTLEDHL

SEQ ID NO: 28508 - protein, 42 aa, Artificial Sequence
  Non-cyclic GFR-binding peptide
  MOD_RES (3)..(40)..(42): Xaa is C or S
  MOD_RES (19)..(20)..(21)..(22)..(23): Xaa is A or G
  MOD_RES (24)..(25)..(26)..(27): Xaa is A or G or absent
VQXRPTQVQLEPLTVLYYXXXXXXXXXEQLSNTLEDHLAXKX

SEQ ID NO: 28509 - protein, 34 aa, Artificial Sequence
  Non-cyclic GFR-binding peptide
  MOD_RES (1)..(2): Xaa is C or S
  MOD_RES (16)..(17)..(18)..(19)..(20): Xaa is A or G
  MOD_RES (21)..(22)..(23)..(24): Xaa is A or G or absent
XXAPTKLRSVKVAKVXXXXXXXXXKEVQVNMVVR

SEQ ID NO: 28510 - protein, 35 aa, Artificial Sequence
  Non-cyclic GFR-binding peptide
  MOD_RES (32)..(34): Xaa is C or S
VPTELRSVKMAKVDENEKVVKEVQVDMVVEGXGXR

SEQ ID NO: 28511 - protein, 30 aa, Artificial Sequence
  Non-cyclic GFR-binding peptide
VPQDLRPVQIRKIVGRTPKVKKATVMVVKS

SEQ ID NO: 28512 - protein, 38 aa, Artificial Sequence
  Non-cyclic GFR-binding peptide
  MOD_RES (5)..(5): Xaa is C or S
  MOD_RES (19)..(20)..(21)..(22)..(23): Xaa is A or G
  MOD_RES (24)..(25)..(26)..(27): Xaa is A or G or absent
EGLEXVPTEEEPLPMVYYXXXXXXXXXEQLSNFLQHNK

SEQ ID NO: 28513 - protein, 39 aa, Artificial Sequence
  Non-cyclic GFR-binding peptide
  MOD_RES (7)..(7): Xaa is C or S
  MOD_RES (21)..(22)..(23)..(24)..(25): Xaa is A or G
  MOD_RES (26)..(27)..(28)..(29): Xaa is A or G or absent
NDEGLEXVPTEEEPLPMVYYXXXXXXXXXEQLSNFLQHN

SEQ ID NO: 28514 - protein, 40 aa, Artificial Sequence
  Non-cyclic GFR-binding peptide
  MOD_RES (6)..(38)..(40): Xaa is C or S
VTKPTXAPTKLRPVQVRKIDDSSNVIKKATVNMVVRSXGX

SEQ ID NO: 28515 - protein, 33 aa, Artificial Sequence
  Non-cyclic GFR-binding peptide
  MOD_RES (1)..(2)..(33): Xaa is C or S
XXVSQDLRSVKIAKVIGKTPKIKEVQVMIVKSX

SEQ ID NO: 28516 - protein, 39 aa, Artificial Sequence
  Non-cyclic GFR-binding peptide
  MOD_RES (6)..(7)..(38): Xaa is C or S
ASASPXXVSQDLRSVKIAKVIGKTPKIKEVQVMIVKSXK

SEQ ID NO: 28517 - protein, 38 aa, Artificial Sequence
  Non-cyclic GFR-binding peptide
  MOD_RES (4)..(5): Xaa is C or S
  MOD_RES (19)..(20)..(21)..(22)..(23): Xaa is A or G
  MOD_RES (24)..(25)..(26)..(27): Xaa is A or G or absent
PKPXXAPTKLSNITVQIMXXXXXXXXXIGEMSNMVVRS

SEQ ID NO: 28518 - protein, 39 aa, Artificial Sequence
  Non-cyclic GFR-binding peptide
  MOD_RES (3)..(4)..(36)..(38): Xaa is C or S
KPXXAPTKLSNITVQIMDDSSNVIIGEMSNMVVRSXGXH

SEQ ID NO: 28519 - protein, 40 aa, Artificial Sequence
  Non-cyclic GFR-binding peptide
  MOD_RES (5)..(6)..(40): Xaa is C or S
  MOD_RES (20)..(21)..(22)..(23)..(24): Xaa is A or G
  MOD_RES (25)..(26)..(27)..(28): Xaa is A or G or absent
IPKAXXVPTELRSVKMAKVXXXXXXXXXKEVQVDMVVEGX

SEQ ID NO: 28520 - protein, 40 aa, Artificial Sequence
  Non-cyclic GFR-binding peptide
  MOD_RES (3)..(4)..(38)..(40): Xaa is C or S
  MOD_RES (18)..(19)..(20)..(21)..(22): Xaa is A or G
  MOD_RES (23)..(24)..(25)..(26): Xaa is A or G or absent
KAXXVPTELRSVKMAKVXXXXXXXXXKEVQVDMVVEGXGX

SEQ ID NO: 28521 - protein, 41 aa, Artificial Sequence
  Non-cyclic GFR-binding peptide
  MOD_RES (5)..(6)..(40): Xaa is C or S
  MOD_RES (20)..(21)..(22)..(23)..(24): Xaa is A or G
  MOD_RES (25)..(26)..(27)..(28): Xaa is A or G or absent
IPKAXXVPTELSNITMQIMXXXXXXXXXIGEMSDMVVEGXG

SEQ ID NO: 28522 - protein, 33 aa, Artificial Sequence
  Non-cyclic GFR-binding peptide
  MOD_RES (1)..(33): Xaa is C or S
XAPTKLSNITVQIMDDSSNVIIGEMSNMVVRSX

SEQ ID NO: 28523 - protein, 36 aa, Artificial Sequence
  Non-cyclic GFR-binding peptide
  MOD_RES (16)..(17)..(18)..(19)..(20): Xaa is A or G
  MOD_RES (21)..(22)..(23)..(24): Xaa is A or G or absent
QPSRVHHEPLTVLYYXXXXXXXXXEQLSNRLEEHLE

SEQ ID NO: 28524 - protein, 37 aa, Artificial Sequence
  Non-cyclic GFR-binding peptide
  MOD_RES (2)..(2): Xaa is C or S
  MOD_RES (18)..(19)..(20)..(21)..(22): Xaa is A or G
  MOD_RES (23)..(24)..(25)..(26): Xaa is A or G or absent
QXRPTQVQLEPLTVLYYXXXXXXXXXEQLSNTLEDHL

SEQ ID NO: 28525 - protein, 37 aa, Artificial Sequence
  Non-cyclic GFR-binding peptide
  MOD_RES (3)..(4): Xaa is C or S
  MOD_RES (18)..(19)..(20)..(21)..(22): Xaa is A or G
  MOD_RES (23)..(24)..(25)..(26): Xaa is A or G or absent
KPXXAPTKLRPVQVRKIXXXXXXXXXKKATVNMVVRS

SEQ ID NO: 28526 - protein, 36 aa, Artificial Sequence
  Non-cyclic GFR-binding peptide
  MOD_RES (2)..(3)..(35): Xaa is C or S
PXXAPTQLRPVQVRKIDDSSNVIKKATVNMVVRAXG

SEQ ID NO: 28527 - protein, 32 aa, Artificial Sequence
  Non-cyclic GFR-binding peptide
  MOD_RES (32)..(32): Xaa is C or S
VPTELRSVKMAKVDENEKVVKEVQVDMVVEGX

SEQ ID NO: 28528 - protein, 36 aa, Artificial Sequence
  Non-cyclic GFR-binding peptide
  MOD_RES (4)..(5): Xaa is C or S
PKAXXVPTELRSVKMAKVDEYDKVVKEVQVEMVVEG

SEQ ID NO: 28529 - protein, 40 aa, Artificial Sequence
  Non-cyclic GFR-binding peptide
  MOD_RES (6)..(40): Xaa is C or S
  MOD_RES (20)..(21)..(22)..(23)..(24): Xaa is A or G
  MOD_RES (25)..(26)..(27)..(28): Xaa is A or G or absent
VTKPTXAPTKLRSVKVAKVXXXXXXXXXKEVQVNMVVRSX

SEQ ID NO: 28530 - protein, 42 aa, Artificial Sequence
  Non-cyclic GFR-binding peptide
  MOD_RES (6)..(40)..(42): Xaa is C or S
  MOD_RES (20)..(21)..(22)..(23)..(24): Xaa is A or G
  MOD_RES (25)..(26)..(27)..(28): Xaa is A or G or absent
DEGLEXVPTEEEPLPMVYYXXXXXXXXXEQLSNFLQHNKXEX

SEQ ID NO: 28531 - protein, 42 aa, Artificial Sequence
  Non-cyclic GFR-binding peptide
  MOD_RES (5)..(6)..(40)..(42): Xaa is C or S
  MOD_RES (20)..(21)..(22)..(23)..(24): Xaa is A or G
  MOD_RES (25)..(26)..(27)..(28): Xaa is A or G or absent
VPKPXXAPTKLSNITVQIMXXXXXXXXXIGEMSNMVVRSXGX

SEQ ID NO: 28532 - protein, 33 aa, Artificial Sequence
  Non-cyclic GFR-binding peptide
  MOD_RES (32)..(32): Xaa is C or S
VPTELSNITMQIMDEYDKVVIGEMSEMVVEGXG

SEQ ID NO: 28533 - protein, 38 aa, Artificial Sequence
  Non-cyclic GFR-binding peptide
  MOD_RES (3)..(4)..(37): Xaa is C or S
  MOD_RES (18)..(19)..(20)..(21)..(22): Xaa is A or G
  MOD_RES (23)..(24)..(25)..(26): Xaa is A or G or absent
SPXXVSQDLRPVQIRKIXXXXXXXXXKKATVMIVKSXK

SEQ ID NO: 28534 - protein, 43 aa, Artificial Sequence
  Non-cyclic GFR-binding peptide
  MOD_RES (6)..(7)..(41)..(43): Xaa is C or S
  MOD_RES (21)..(22)..(23)..(24)..(25): Xaa is A or G
  MOD_RES (26)..(27)..(28)..(29): Xaa is A or G or absent
KIPKAXXVPTELRSVKMAKVXXXXXXXXXKEVQVDMVVEGXGX

SEQ ID NO: 28535 - protein, 37 aa, Artificial Sequence
  Non-cyclic GFR-binding peptide
  MOD_RES (2)..(3)..(37): Xaa is C or S
  MOD_RES (17)..(18)..(19)..(20)..(21): Xaa is A or G
  MOD_RES (22)..(23)..(24)..(25): Xaa is A or G or absent
PXXAPTKLSNITVQIMXXXXXXXXXIGEMSNMVVRSX

SEQ ID NO: 28536 - protein, 33 aa, Artificial Sequence
  Non-cyclic GFR-binding peptide
  MOD_RES (31)..(33): Xaa is C or S
VPQALRPVQIRKIVGRKPKVKKATVMIVRSXKX

SEQ ID NO: 28537 - protein, 41 aa, Artificial Sequence
  Non-cyclic GFR-binding peptide
  MOD_RES (5)..(5): Xaa is C or S
SSVKXQPSRVHHEPLPVVYYEYVRKKPKLEQLSNRLEEHLE

SEQ ID NO: 28538 - protein, 43 aa, Artificial Sequence
  Non-cyclic GFR-binding peptide
  MOD_RES (7)..(41)..(43): Xaa is C or S
  MOD_RES (21)..(22)..(23)..(24)..(25): Xaa is A or G
  MOD_RES (26)..(27)..(28)..(29): Xaa is A or G or absent
HVTKPTXAPTKLRSVKVAKVXXXXXXXXXKEVQVNMVVRSXGX

SEQ ID NO: 28539 - protein, 38 aa, Artificial Sequence
  Non-cyclic GFR-binding peptide
  MOD_RES (3)..(3): Xaa is C or S
  MOD_RES (19)..(20)..(21)..(22)..(23): Xaa is A or G
  MOD_RES (24)..(25)..(26)..(27): Xaa is A or G or absent
VKXQPSRVHHEPLPVVYYXXXXXXXXXEQLSNRLEEHL

SEQ ID NO: 28540 - protein, 40 aa, Artificial Sequence
  Non-cyclic GFR-binding peptide
  MOD_RES (4)..(38)..(40): Xaa is C or S
GLEXVPTEEEPLTMLYYRIKPHQGQHEQLSNFLQHNKXEX

SEQ ID NO: 28541 - protein, 34 aa, Artificial Sequence
  Non-cyclic GFR-binding peptide
  MOD_RES (1)..(2): Xaa is C or S
  MOD_RES (16)..(17)..(18)..(19)..(20): Xaa is A or G
  MOD_RES (21)..(22)..(23)..(24): Xaa is A or G or absent
XXVPTELSNITMQIMXXXXXXXXXIGEMSEMVVE

SEQ ID NO: 28542 - protein, 35 aa, Artificial Sequence
  Non-cyclic GFR-binding peptide
  MOD_RES (1)..(2)..(33)..(35): Xaa is C or S
XXVPQALRSVKIAKVVGRKPKVKEVQVMIVRSXKX

SEQ ID NO: 28543 - protein, 38 aa, Artificial Sequence
  Non-cyclic GFR-binding peptide
  MOD_RES (4)..(5)..(36)..(38): Xaa is C or S
ASPXXVSQDLSNITIQIMIGKTPKIIGEMSMIVKSXKX

SEQ ID NO: 28544 - protein, 34 aa, Artificial Sequence
  Non-cyclic GFR-binding peptide
  MOD_RES (33)..(33): Xaa is C or S
  MOD_RES (14)..(15)..(16)..(17)..(18): Xaa is A or G
  MOD_RES (19)..(20)..(21)..(22): Xaa is A or G or absent
VPQALSNITIQIMXXXXXXXXXIGEMSMIVRSXK

SEQ ID NO: 28545 - protein, 37 aa, Artificial Sequence
  Non-cyclic GFR-binding peptide
  MOD_RES (6)..(6): Xaa is C or S
VTKPTXAPTKLRPVQVRKIDDSSNVIKKATVNMVVRS

SEQ ID NO: 28546 - protein, 34 aa, Artificial Sequence
  Non-cyclic GFR-binding peptide
  MOD_RES (2)..(3): Xaa is C or S
AXXVPTELRPVQMRKIDEYDKVVKKATVEMVVEG

SEQ ID NO: 28547 - protein, 35 aa, Artificial Sequence
  Non-cyclic GFR-binding peptide
  MOD_RES (1)..(2): Xaa is C or S
  MOD_RES (16)..(17)..(18)..(19)..(20): Xaa is A or G
  MOD_RES (21)..(22)..(23)..(24): Xaa is A or G or absent
XXAPTQLSNITVQIMXXXXXXXXXIGEMSNMVVRA

SEQ ID NO: 28548 - protein, 35 aa, Artificial Sequence
  Non-cyclic GFR-binding peptide
  MOD_RES (1)..(34): Xaa is C or S
  MOD_RES (15)..(16)..(17)..(18)..(19): Xaa is A or G
  MOD_RES (20)..(21)..(22)..(23): Xaa is A or G or absent
XVPQALRSVKIAKVXXXXXXXXXKEVQVMIVRSXK

SEQ ID NO: 28549 - protein, 37 aa, Artificial Sequence
  Non-cyclic GFR-binding peptide
  MOD_RES (2)..(36): Xaa is C or S
EXVPTEEEPLTMLYYRIKPHQGQHEQLSNFLQHNKXE

SEQ ID NO: 28550 - protein, 40 aa, Artificial Sequence
  Non-cyclic GFR-binding peptide
  MOD_RES (2)..(3)..(37)..(39): Xaa is C or S
  MOD_RES (17)..(18)..(19)..(20)..(21): Xaa is A or G
  MOD_RES (22)..(23)..(24)..(25): Xaa is A or G or absent
PXXAPTKLRPVQVRKIXXXXXXXXXKKATVNMVVRSXGXH

SEQ ID NO: 28551 - protein, 41 aa, Artificial Sequence
  Non-cyclic GFR-binding peptide
  MOD_RES (3)..(40): Xaa is C or S
VQXRPTQVQLEPLTVLYYEIVRKKPIFEQLSNTLEDHLAXK

SEQ ID NO: 28552 - protein, 39 aa, Artificial Sequence
  Non-cyclic GFR-binding peptide
  MOD_RES (4)..(5)..(37)..(39): Xaa is C or S
PKAXXVPTELRPVQMRKIDENEKVVKKATVDMVVEGXGX

SEQ ID NO: 28553 - protein, 38 aa, Artificial Sequence
  Non-cyclic GFR-binding peptide
  MOD_RES (6)..(7)..(38): Xaa is C or S
ASASPXXVPQDLRPVQIRKIVGRTPKVKKATVMVVKSX

SEQ ID NO: 28554 - protein, 40 aa, Artificial Sequence
  Non-cyclic GFR-binding peptide
  MOD_RES (2)..(3)..(37)..(39): Xaa is C or S
  MOD_RES (17)..(18)..(19)..(20)..(21): Xaa is A or G
  MOD_RES (22)..(23)..(24)..(25): Xaa is A or G or absent
PXXAPTKLRSVKVAKVXXXXXXXXXKEVQVNMVVRSXGXH

SEQ ID NO: 28555 - protein, 40 aa, Artificial Sequence
  Non-cyclic GFR-binding peptide
  MOD_RES (5)..(37)..(39): Xaa is C or S
TKPTXAPTKLRSVKVAKVDDSSNVIKEVQVNMVVRSXGXH

SEQ ID NO: 28556 - protein, 37 aa, Artificial Sequence
  Non-cyclic GFR-binding peptide
  MOD_RES (4)..(5): Xaa is C or S
  MOD_RES (19)..(20)..(21)..(22)..(23): Xaa is A or G
  MOD_RES (24)..(25)..(26)..(27): Xaa is A or G or absent
AAPXXVPQALSNITIQIMXXXXXXXXXIGEMSMIVRS

SEQ ID NO: 28557 - protein, 34 aa, Artificial Sequence
  Non-cyclic GFR-binding peptide
  MOD_RES (4)..(4): Xaa is C or S
KPTXAPTKLSNITVQIMDDSSNVIIGEMSNMVVR

SEQ ID NO: 28558 - protein, 44 aa, Artificial Sequence
  Non-cyclic GFR-binding peptide
  MOD_RES (5)..(42)..(44): Xaa is C or S
SSVKXQPSRVHHEPLTVLYYEYVRKKPKLEQLSNRLEEHLEXAX

SEQ ID NO: 28559 - protein, 40 aa, Artificial Sequence
  Non-cyclic GFR-binding peptide
  MOD_RES (6)..(7)..(38)..(40): Xaa is C or S
ASASPXXVPQDLRPVQIRKIVGRTPKVKKATVMVVKSXKX

SEQ ID NO: 28560 - protein, 38 aa, Artificial Sequence
  Non-cyclic GFR-binding peptide
  MOD_RES (4)..(4): Xaa is C or S
  MOD_RES (20)..(21)..(22)..(23)..(24): Xaa is A or G
  MOD_RES (25)..(26)..(27)..(28): Xaa is A or G or absent
SVKXQPSRVHHEPLPVVYYXXXXXXXXXEQLSNRLEEH

SEQ ID NO: 28561 - protein, 36 aa, Artificial Sequence
  Non-cyclic GFR-binding peptide
  MOD_RES (1)..(2)..(35): Xaa is C or S
  MOD_RES (16)..(17)..(18)..(19)..(20): Xaa is A or G
  MOD_RES (21)..(22)..(23)..(24): Xaa is A or G or absent
XXVPQALRSVKIAKVXXXXXXXXXKEVQVMIVRSXK

SEQ ID NO: 28562 - protein, 40 aa, Artificial Sequence
  Non-cyclic GFR-binding peptide
  MOD_RES (6)..(7)..(39): Xaa is C or S
KIPKAXXVPTELRSVKMAKVDENEKVVKEVQVDMVVEGXG

SEQ ID NO: 28563 - protein, 37 aa, Artificial Sequence
  Non-cyclic GFR-binding peptide
  MOD_RES (1)..(35)..(37): Xaa is C or S
  MOD_RES (15)..(16)..(17)..(18)..(19): Xaa is A or G
  MOD_RES (20)..(21)..(22)..(23): Xaa is A or G or absent
XAPTKLSNITVQIMXXXXXXXXXIGEMSNMVVRSXGX

SEQ ID NO: 28564 - protein, 39 aa, Artificial Sequence
  Non-cyclic GFR-binding peptide
  MOD_RES (4)..(5)..(36)..(38): Xaa is C or S
ASPXXVPQDLRPVQIRKIVGRTPKVKKATVMVVKSXKXS

SEQ ID NO: 28565 - protein, 37 aa, Artificial Sequence
  Non-cyclic GFR-binding peptide
  MOD_RES (2)..(34)..(36): Xaa is C or S
TXAPTKLRSVKVAKVDDSSNVIKEVQVNMVVRSXGXH

SEQ ID NO: 28566 - protein, 35 aa, Artificial Sequence
  Non-cyclic GFR-binding peptide
  MOD_RES (4)..(5): Xaa is C or S
PKAXXVPTELSNITMQIMDENEKVVIGEMSDMVVE

SEQ ID NO: 28567 - protein, 34 aa, Artificial Sequence
  Non-cyclic GFR-binding peptide
  MOD_RES (1)..(2): Xaa is C or S
  MOD_RES (16)..(17)..(18)..(19)..(20): Xaa is A or G
  MOD_RES (21)..(22)..(23)..(24): Xaa is A or G or absent
XXVPQALSNITIQIMXXXXXXXXXIGEMSMIVRS

SEQ ID NO: 28568 - protein, 35 aa, Artificial Sequence
  Non-cyclic GFR-binding peptide
  MOD_RES (1)..(32)..(34): Xaa is C or S
XVSQDLSNITIQIMIGKTPKIIGEMSMIVKSXKXS

SEQ ID NO: 28569 - protein, 37 aa, Artificial Sequence
  Non-cyclic GFR-binding peptide
  MOD_RES (4)..(5)..(36): Xaa is C or S
ASPXXVSQDLSNITIQIMIGKTPKIIGEMSMIVKSXK

SEQ ID NO: 28570 - protein, 37 aa, Artificial Sequence
  Non-cyclic GFR-binding peptide
  MOD_RES (5)..(5): Xaa is C or S
  MOD_RES (19)..(20)..(21)..(22)..(23): Xaa is A or G
  MOD_RES (24)..(25)..(26)..(27): Xaa is A or G or absent
EGLEXVPTEEEPLTMLYYXXXXXXXXXEQLSNFLQHN

SEQ ID NO: 28571 - protein, 32 aa, Artificial Sequence
  Non-cyclic GFR-binding peptide
  MOD_RES (1)..(1): Xaa is C or S
XAPTQLRPVQVRKIDDSSNVIKKATVNMVVRA

SEQ ID NO: 28572 - protein, 40 aa, Artificial Sequence
  Non-cyclic GFR-binding peptide
  MOD_RES (1)..(38)..(40): Xaa is C or S
XQPSRVHHEPLPVVYYEYVRKKPKLEQLSNRLEEHLEXAX

SEQ ID NO: 28573 - protein, 36 aa, Artificial Sequence
  Non-cyclic GFR-binding peptide
  MOD_RES (35)..(35): Xaa is C or S
TQVQLEPLTVLYYEIVRKKPIFEQLSNTLEDHLAXK

SEQ ID NO: 28574 - protein, 37 aa, Artificial Sequence
  Non-cyclic GFR-binding peptide
  MOD_RES (1)..(1): Xaa is C or S
XQPSRVHHEPLPVVYYEYVRKKPKLEQLSNRLEEHLE

SEQ ID NO: 28575 - protein, 35 aa, Artificial Sequence
  Non-cyclic GFR-binding peptide
  MOD_RES (2)..(3)..(35): Xaa is C or S
PXXAPTKLRPVQVRKIDDSSNVIKKATVNMVVRSX

SEQ ID NO: 28576 - protein, 38 aa, Artificial Sequence
  Non-cyclic GFR-binding peptide
  MOD_RES (4)..(4): Xaa is C or S
  MOD_RES (20)..(21)..(22)..(23)..(24): Xaa is A or G
  MOD_RES (25)..(26)..(27)..(28): Xaa is A or G or absent
NVQXRPTQVQLEPLPVVYYXXXXXXXXXEQLSNTLEDH

SEQ ID NO: 28577 - protein, 40 aa, Artificial Sequence
  Non-cyclic GFR-binding peptide
  MOD_RES (5)..(5): Xaa is C or S
  MOD_RES (21)..(22)..(23)..(24)..(25): Xaa is A or G
  MOD_RES (26)..(27)..(28)..(29): Xaa is A or G or absent
SSVKXQPSRVHHEPLTVLYYXXXXXXXXXEQLSNRLEEHL

SEQ ID NO: 28578 - protein, 31 aa, Artificial Sequence
  Non-cyclic GFR-binding peptide
APTQLSNITVQIMDDSSNVIIGEMSNMVVRA

SEQ ID NO: 28579 - protein, 42 aa, Artificial Sequence
  Non-cyclic GFR-binding peptide
  MOD_RES (5)..(39)..(41): Xaa is C or S
EGLEXVPTEEEPLPMVYYRIKPHQGQHEQLSNFLQHNKXEXR

SEQ ID NO: 28580 - protein, 40 aa, Artificial Sequence
  Non-cyclic GFR-binding peptide
  MOD_RES (37)..(39): Xaa is C or S
  MOD_RES (16)..(17)..(18)..(19)..(20): Xaa is A or G
  MOD_RES (21)..(22)..(23)..(24): Xaa is A or G or absent
QPSRVHHEPLTVLYYXXXXXXXXXEQLSNRLEEHLEXAXA

SEQ ID NO: 28581 - protein, 40 aa, Artificial Sequence
  Non-cyclic GFR-binding peptide
  MOD_RES (6)..(7)..(40): Xaa is C or S
  MOD_RES (21)..(22)..(23)..(24)..(25): Xaa is A or G
  MOD_RES (26)..(27)..(28)..(29): Xaa is A or G or absent
ASASPXXVSQDLRSVKIAKVXXXXXXXXXKEVQVMIVKSX

SEQ ID NO: 28582 - protein, 39 aa, Artificial Sequence
  Non-cyclic GFR-binding peptide
  MOD_RES (1)..(2)..(36)..(38): Xaa is C or S
  MOD_RES (16)..(17)..(18)..(19)..(20): Xaa is A or G
  MOD_RES (21)..(22)..(23)..(24): Xaa is A or G or absent
XXAPTQLSNITVQIMXXXXXXXXXIGEMSNMVVRAXGXH

SEQ ID NO: 28583 - protein, 40 aa, Artificial Sequence
  Non-cyclic GFR-binding peptide
  MOD_RES (4)..(4): Xaa is C or S
  MOD_RES (20)..(21)..(22)..(23)..(24): Xaa is A or G
  MOD_RES (25)..(26)..(27)..(28): Xaa is A or G or absent
SVKXQPSRVHHEPLPVVYYXXXXXXXXXEQLSNRLEEHLE

SEQ ID NO: 28584 - protein, 42 aa, Artificial Sequence
  Non-cyclic GFR-binding peptide
  MOD_RES (5)..(42): Xaa is C or S
  MOD_RES (21)..(22)..(23)..(24)..(25): Xaa is A or G
  MOD_RES (26)..(27)..(28)..(29): Xaa is A or G or absent
SSVKXQPSRVHHEPLTVLYYXXXXXXXXXEQLSNRLEEHLEX

SEQ ID NO: 28585 - protein, 34 aa, Artificial Sequence
  Non-cyclic GFR-binding peptide
  MOD_RES (1)..(32)..(34): Xaa is C or S
XVSQDLSNITIQIMIGKTPKIIGEMSMIVKSXKX

SEQ ID NO: 28586 - protein, 39 aa, Artificial Sequence
  Non-cyclic GFR-binding peptide
  MOD_RES (4)..(38): Xaa is C or S
  MOD_RES (18)..(19)..(20)..(21)..(22): Xaa is A or G
  MOD_RES (23)..(24)..(25)..(26): Xaa is A or G or absent
GLEXVPTEEEPLPMVYYXXXXXXXXXEQLSNFLQHNKXE

SEQ ID NO: 28587 - protein, 35 aa, Artificial Sequence
  Non-cyclic GFR-binding peptide
  MOD_RES (34)..(34): Xaa is C or S
  MOD_RES (14)..(15)..(16)..(17)..(18): Xaa is A or G
  MOD_RES (19)..(20)..(21)..(22): Xaa is A or G or absent
VPTELSNITMQIMXXXXXXXXXIGEMSEMVVEGXG

SEQ ID NO: 28588 - protein, 35 aa, Artificial Sequence
  Non-cyclic GFR-binding peptide
  MOD_RES (2)..(3): Xaa is C or S
  MOD_RES (17)..(18)..(19)..(20)..(21): Xaa is A or G
  MOD_RES (22)..(23)..(24)..(25): Xaa is A or G or absent
PXXVPQDLRPVQIRKIXXXXXXXXXKKATVMVVKS

SEQ ID NO: 28589 - protein, 40 aa, Artificial Sequence
  Non-cyclic GFR-binding peptide
  MOD_RES (6)..(7)..(39): Xaa is C or S
YVPKPXXAPTKLSNITVQIMDDSSNVIIGEMSNMVVRSXG

SEQ ID NO: 28590 - protein, 40 aa, Artificial Sequence
  Non-cyclic GFR-binding peptide
  MOD_RES (6)..(7)..(38)..(40): Xaa is C or S
ASASPXXVSQDLRSVKIAKVIGKTPKIKEVQVMIVKSXKX

SEQ ID NO: 28591 - protein, 35 aa, Artificial Sequence
  Non-cyclic GFR-binding peptide
  MOD_RES (1)..(2): Xaa is C or S
  MOD_RES (16)..(17)..(18)..(19)..(20): Xaa is A or G
  MOD_RES (21)..(22)..(23)..(24): Xaa is A or G or absent
XXAPTKLSNITVQIMXXXXXXXXXIGEMSNMVVRS

SEQ ID NO: 28592 - protein, 34 aa, Artificial Sequence
  Non-cyclic GFR-binding peptide
  MOD_RES (3)..(4): Xaa is C or S
APXXVPQALSNITIQIMVGRKPKVIGEMSMIVRS

SEQ ID NO: 28593 - protein, 39 aa, Artificial Sequence
  Non-cyclic GFR-binding peptide
  MOD_RES (2)..(3)..(37)..(39): Xaa is C or S
  MOD_RES (17)..(18)..(19)..(20)..(21): Xaa is A or G
  MOD_RES (22)..(23)..(24)..(25): Xaa is A or G or absent
PXXAPTKLSNITVQIMXXXXXXXXXIGEMSNMVVRSXGX

SEQ ID NO: 28594 - protein, 40 aa, Artificial Sequence
  Non-cyclic GFR-binding peptide
  MOD_RES (5)..(6)..(40): Xaa is C or S
  MOD_RES (20)..(21)..(22)..(23)..(24): Xaa is A or G
  MOD_RES (25)..(26)..(27)..(28): Xaa is A or G or absent
VPKPXXAPTKLSNITVQIMXXXXXXXXXIGEMSNMVVRSX

SEQ ID NO: 28595 - protein, 35 aa, Artificial Sequence
  Non-cyclic GFR-binding peptide
  MOD_RES (2)..(3): Xaa is C or S
  MOD_RES (17)..(18)..(19)..(20)..(21): Xaa is A or G
  MOD_RES (22)..(23)..(24)..(25): Xaa is A or G or absent
PXXVPQDLRSVKIAKVXXXXXXXXXKEVQVMVVKS

SEQ ID NO: 28596 - protein, 32 aa, Artificial Sequence
  Non-cyclic GFR-binding peptide
  MOD_RES (1)..(2): Xaa is C or S
XXAPTQLRPVQVRKIDDSSNVIKKATVNMVVR

SEQ ID NO: 28597 - protein, 42 aa, Artificial Sequence
  Non-cyclic GFR-binding peptide
  MOD_RES (4)..(5)..(39)..(41): Xaa is C or S
  MOD_RES (19)..(20)..(21)..(22)..(23): Xaa is A or G
  MOD_RES (24)..(25)..(26)..(27): Xaa is A or G or absent
PKPXXAPTQLRPVQVRKIXXXXXXXXXKKATVNMVVRAXGXH

SEQ ID NO: 28598 - protein, 37 aa, Artificial Sequence
  Non-cyclic GFR-binding peptide
  MOD_RES (2)..(3)..(36): Xaa is C or S
  MOD_RES (17)..(18)..(19)..(20)..(21): Xaa is A or G
  MOD_RES (22)..(23)..(24)..(25): Xaa is A or G or absent
PXXVSQDLSNITIQIMXXXXXXXXXIGEMSMIVKSXK

SEQ ID NO: 28599 - protein, 34 aa, Artificial Sequence
  Non-cyclic GFR-binding peptide
  MOD_RES (1)..(2)..(33): Xaa is C or S
XXVPQALRPVQIRKIVGRKPKVKKATVMIVRSXK

SEQ ID NO: 28600 - protein, 38 aa, Artificial Sequence
  Non-cyclic GFR-binding peptide
  MOD_RES (5)..(6): Xaa is C or S
  MOD_RES (20)..(21)..(22)..(23)..(24): Xaa is A or G
  MOD_RES (25)..(26)..(27)..(28): Xaa is A or G or absent
SASPXXVPQDLSNITIQIMXXXXXXXXXIGEMSMVVKS

SEQ ID NO: 28601 - protein, 40 aa, Artificial Sequence
  Non-cyclic GFR-binding peptide
  MOD_RES (3)..(4)..(38)..(40): Xaa is C or S
  MOD_RES (18)..(19)..(20)..(21)..(22): Xaa is A or G
  MOD_RES (23)..(24)..(25)..(26): Xaa is A or G or absent
KAXXVPTELRPVQMRKIXXXXXXXXXKKATVDMVVEGXGX

SEQ ID NO: 28602 - protein, 35 aa, Artificial Sequence
  Non-cyclic GFR-binding peptide
  MOD_RES (3)..(4)..(35): Xaa is C or S
APXXVPQALRSVKIAKVVGRKPKVKEVQVMIVRSX

SEQ ID NO: 28603 - protein, 32 aa, Artificial Sequence
  Non-cyclic GFR-binding peptide
  MOD_RES (14)..(15)..(16)..(17)..(18): Xaa is A or G
  MOD_RES (19)..(20)..(21)..(22): Xaa is A or G or absent
APTKLRPVQVRKIXXXXXXXXXKKATVNMVVR

SEQ ID NO: 28604 - protein, 38 aa, Artificial Sequence
  Non-cyclic GFR-binding peptide
  MOD_RES (2)..(36)..(38): Xaa is C or S
  MOD_RES (16)..(17)..(18)..(19)..(20): Xaa is A or G
  MOD_RES (21)..(22)..(23)..(24): Xaa is A or G or absent
TXAPTKLRPVQVRKIXXXXXXXXXKKATVNMVVRSXGX

SEQ ID NO: 28605 - protein, 38 aa, Artificial Sequence
  Non-cyclic GFR-binding peptide
  MOD_RES (1)..(38): Xaa is C or S
XQPSRVHHEPLPVVYYEYVRKKPKLEQLSNRLEEHLEX

SEQ ID NO: 28606 - protein, 37 aa, Artificial Sequence
  Non-cyclic GFR-binding peptide
  MOD_RES (34)..(36): Xaa is C or S
  MOD_RES (14)..(15)..(16)..(17)..(18): Xaa is A or G
  MOD_RES (19)..(20)..(21)..(22): Xaa is A or G or absent
VPTEEEPLTMLYYXXXXXXXXXEQLSNFLQHNKXEXR

SEQ ID NO: 28607 - protein, 39 aa, Artificial Sequence
  Non-cyclic GFR-binding peptide
  MOD_RES (5)..(6)..(37)..(39): Xaa is C or S
SASPXXVPQDLRSVKIAKVVGRTPKVKEVQVMVVKSXKX

SEQ ID NO: 28608 - protein, 38 aa, Artificial Sequence
  Non-cyclic GFR-binding peptide
  MOD_RES (2)..(2): Xaa is C or S
  MOD_RES (18)..(19)..(20)..(21)..(22): Xaa is A or G
  MOD_RES (23)..(24)..(25)..(26): Xaa is A or G or absent
KXQPSRVHHEPLPVVYYXXXXXXXXXEQLSNRLEEHLE

SEQ ID NO: 28609 - protein, 34 aa, Artificial Sequence
  Non-cyclic GFR-binding peptide
  MOD_RES (4)..(4): Xaa is C or S
KPTXAPTKLRSVKVAKVDDSSNVIKEVQVNMVVR

SEQ ID NO: 28610 - protein, 39 aa, Artificial Sequence
  Non-cyclic GFR-binding peptide
  MOD_RES (5)..(39): Xaa is C or S
EGLEXVPTEEEPLTMLYYRIKPHQGQHEQLSNFLQHNKX

SEQ ID NO: 28611 - protein, 38 aa, Artificial Sequence
  Non-cyclic GFR-binding peptide
  MOD_RES (3)..(4)..(36)..(38): Xaa is C or S
KPXXAPTQLRSVKVAKVDDSSNVIKEVQVNMVVRAXGX

SEQ ID NO: 28612 - protein, 41 aa, Artificial Sequence
  Non-cyclic GFR-binding peptide
  MOD_RES (2)..(39)..(41): Xaa is C or S
KXQPSRVHHEPLTVLYYEYVRKKPKLEQLSNRLEEHLEXAX

SEQ ID NO: 28613 - protein, 40 aa, Artificial Sequence
  Non-cyclic GFR-binding peptide
  MOD_RES (6)..(38)..(40): Xaa is C or S
VTKPTXAPTKLRSVKVAKVDDSSNVIKEVQVNMVVRSXGX

SEQ ID NO: 28614 - protein, 36 aa, Artificial Sequence
  Non-cyclic GFR-binding peptide
  MOD_RES (33)..(35): Xaa is C or S
  MOD_RES (14)..(15)..(16)..(17)..(18): Xaa is A or G
  MOD_RES (19)..(20)..(21)..(22): Xaa is A or G or absent
VSQDLRSVKIAKVXXXXXXXXXKEVQVMIVKSXKXS

SEQ ID NO: 28615 - protein, 37 aa, Artificial Sequence
  Non-cyclic GFR-binding peptide
  MOD_RES (3)..(4): Xaa is C or S
  MOD_RES (18)..(19)..(20)..(21)..(22): Xaa is A or G
  MOD_RES (23)..(24)..(25)..(26): Xaa is A or G or absent
KAXXVPTELSNITMQIMXXXXXXXXXIGEMSDMVVEG

SEQ ID NO: 28616 - protein, 37 aa, Artificial Sequence
  Non-cyclic GFR-binding peptide
  MOD_RES (3)..(4): Xaa is C or S
  MOD_RES (18)..(19)..(20)..(21)..(22): Xaa is A or G
  MOD_RES (23)..(24)..(25)..(26): Xaa is A or G or absent
KAXXVPTELRSVKMAKVXXXXXXXXXKEVQVEMVVEG

SEQ ID NO: 28617 - protein, 33 aa, Artificial Sequence
  Non-cyclic GFR-binding peptide
SRVHHEPLPVVYYEYVRKKPKLEQLSNRLEEHL

SEQ ID NO: 28618 - protein, 42 aa, Artificial Sequence
  Non-cyclic GFR-binding peptide
  MOD_RES (6)..(7)..(41): Xaa is C or S
  MOD_RES (21)..(22)..(23)..(24)..(25): Xaa is A or G
  MOD_RES (26)..(27)..(28)..(29): Xaa is A or G or absent
SIPKAXXVPTELRPVQMRKIXXXXXXXXXKKATVEMVVEGXG

SEQ ID NO: 28619 - protein, 38 aa, Artificial Sequence
  Non-cyclic GFR-binding peptide
  MOD_RES (2)..(3)..(37): Xaa is C or S
  MOD_RES (17)..(18)..(19)..(20)..(21): Xaa is A or G
  MOD_RES (22)..(23)..(24)..(25): Xaa is A or G or absent
AXXVPTELRPVQMRKIXXXXXXXXXKKATVEMVVEGXG

SEQ ID NO: 28620 - protein, 42 aa, Artificial Sequence
  Non-cyclic GFR-binding peptide
  MOD_RES (4)..(5)..(39)..(41): Xaa is C or S
  MOD_RES (19)..(20)..(21)..(22)..(23): Xaa is A or G
  MOD_RES (24)..(25)..(26)..(27): Xaa is A or G or absent
PKPXXAPTQLSNITVQIMXXXXXXXXXIGEMSNMVVRAXGXH

SEQ ID NO: 28621 - protein, 35 aa, Artificial Sequence
  Non-cyclic GFR-binding peptide
  MOD_RES (4)..(5): Xaa is C or S
ASPXXVSQDLRPVQIRKIIGKTPKIKKATVMIVKS

SEQ ID NO: 28622 - protein, 37 aa, Artificial Sequence
  Non-cyclic GFR-binding peptide
  MOD_RES (1)..(2)..(36): Xaa is C or S
  MOD_RES (16)..(17)..(18)..(19)..(20): Xaa is A or G
  MOD_RES (21)..(22)..(23)..(24): Xaa is A or G or absent
XXAPTKLRSVKVAKVXXXXXXXXXKEVQVNMVVRSXG

SEQ ID NO: 28623 - protein, 32 aa, Artificial Sequence
  Non-cyclic GFR-binding peptide
  MOD_RES (1)..(2): Xaa is C or S
XXVPQDLRSVKIAKVVGRTPKVKEVQVMVVKS

SEQ ID NO: 28624 - protein, 35 aa, Artificial Sequence
  Non-cyclic GFR-binding peptide
  MOD_RES (32)..(34): Xaa is C or S
VPTELRPVQMRKIDEYDKVVKKATVEMVVEGXGXR

SEQ ID NO: 28625 - protein, 42 aa, Artificial Sequence
  Non-cyclic GFR-binding peptide
  MOD_RES (6)..(7)..(40)..(42): Xaa is C or S
  MOD_RES (21)..(22)..(23)..(24)..(25): Xaa is A or G
  MOD_RES (26)..(27)..(28)..(29): Xaa is A or G or absent
ASASPXXVPQDLRSVKIAKVXXXXXXXXXKEVQVMVVKSXKX

SEQ ID NO: 28626 - protein, 37 aa, Artificial Sequence
  Non-cyclic GFR-binding peptide
  MOD_RES (34)..(36): Xaa is C or S
  MOD_RES (14)..(15)..(16)..(17)..(18): Xaa is A or G
  MOD_RES (19)..(20)..(21)..(22): Xaa is A or G or absent
APTQLRPVQVRKIXXXXXXXXXKKATVNMVVRAXGXH

SEQ ID NO: 28627 - protein, 34 aa, Artificial Sequence
  Non-cyclic GFR-binding peptide
  MOD_RES (32)..(34): Xaa is C or S
APTKLSNITVQIMDDSSNVIIGEMSNMVVRSXGX

SEQ ID NO: 28628 - protein, 39 aa, Artificial Sequence
  Non-cyclic GFR-binding peptide
  MOD_RES (4)..(5)..(39): Xaa is C or S
  MOD_RES (19)..(20)..(21)..(22)..(23): Xaa is A or G
  MOD_RES (24)..(25)..(26)..(27): Xaa is A or G or absent
PKPXXAPTQLRPVQVRKIXXXXXXXXXKKATVNMVVRAX

SEQ ID NO: 28629 - protein, 31 aa, Artificial Sequence
  Non-cyclic GFR-binding peptide
  MOD_RES (31)..(31): Xaa is C or S
VPQALRSVKIAKVVGRKPKVKEVQVMIVRSX

SEQ ID NO: 28630 - protein, 37 aa, Artificial Sequence
  Non-cyclic GFR-binding peptide
  MOD_RES (1)..(2)..(34)..(36): Xaa is C or S
XXVPTELRPVQMRKIDEYDKVVKKATVEMVVEGXGXR

SEQ ID NO: 28631 - protein, 32 aa, Artificial Sequence
  Non-cyclic GFR-binding peptide
  MOD_RES (14)..(15)..(16)..(17)..(18): Xaa is A or G
  MOD_RES (19)..(20)..(21)..(22): Xaa is A or G or absent
VSQDLRPVQIRKIXXXXXXXXXKKATVMIVKS

SEQ ID NO: 28632 - protein, 35 aa, Artificial Sequence
  Non-cyclic GFR-binding peptide
  MOD_RES (2)..(34): Xaa is C or S
TXAPTKLRPVQVRKIDDSSNVIKKATVNMVVRSXG

SEQ ID NO: 28633 - protein, 35 aa, Artificial Sequence
  Non-cyclic GFR-binding peptide
  MOD_RES (34)..(34): Xaa is C or S
  MOD_RES (14)..(15)..(16)..(17)..(18): Xaa is A or G
  MOD_RES (19)..(20)..(21)..(22): Xaa is A or G or absent
VPTELRPVQMRKIXXXXXXXXXKKATVDMVVEGXG

SEQ ID NO: 28634 - protein, 36 aa, Artificial Sequence
  Non-cyclic GFR-binding peptide
  MOD_RES (2)..(3): Xaa is C or S
  MOD_RES (17)..(18)..(19)..(20)..(21): Xaa is A or G
  MOD_RES (22)..(23)..(24)..(25): Xaa is A or G or absent
AXXVPTELRPVQMRKIXXXXXXXXXKKATVDMVVEG

SEQ ID NO: 28635 - protein, 39 aa, Artificial Sequence
  Non-cyclic GFR-binding peptide
  MOD_RES (5)..(6)..(39): Xaa is C or S
  MOD_RES (20)..(21)..(22)..(23)..(24): Xaa is A or G
  MOD_RES (25)..(26)..(27)..(28): Xaa is A or G or absent
SAAPXXVPQALRSVKIAKVXXXXXXXXXKEVQVMIVRSX

SEQ ID NO: 28636 - protein, 34 aa, Artificial Sequence
  Non-cyclic GFR-binding peptide
  MOD_RES (3)..(4): Xaa is C or S
SPXXVPQDLRSVKIAKVVGRTPKVKEVQVMVVKS

SEQ ID NO: 28637 - protein, 40 aa, Artificial Sequence
  Non-cyclic GFR-binding peptide
  MOD_RES (5)..(39): Xaa is C or S
  MOD_RES (19)..(20)..(21)..(22)..(23): Xaa is A or G
  MOD_RES (24)..(25)..(26)..(27): Xaa is A or G or absent
EGLEXVPTEEEPLTMLYYXXXXXXXXXEQLSNFLQHNKXE

SEQ ID NO: 28638 - protein, 38 aa, Artificial Sequence
  Non-cyclic GFR-binding peptide
  MOD_RES (2)..(36)..(38): Xaa is C or S
  MOD_RES (16)..(17)..(18)..(19)..(20): Xaa is A or G
  MOD_RES (21)..(22)..(23)..(24): Xaa is A or G or absent
EXVPTEEEPLTMLYYXXXXXXXXXEQLSNFLQHNKXEX

SEQ ID NO: 28639 - protein, 36 aa, Artificial Sequence
  Non-cyclic GFR-binding peptide
  MOD_RES (3)..(4): Xaa is C or S
  MOD_RES (18)..(19)..(20)..(21)..(22): Xaa is A or G
  MOD_RES (23)..(24)..(25)..(26): Xaa is A or G or absent
KPXXAPTKLSNITVQIMXXXXXXXXXIGEMSNMVVR

SEQ ID NO: 28640 - protein, 33 aa, Artificial Sequence
  Non-cyclic GFR-binding peptide
  MOD_RES (14)..(15)..(16)..(17)..(18): Xaa is A or G
  MOD_RES (19)..(20)..(21)..(22): Xaa is A or G or absent
VPTELRSVKMAKVXXXXXXXXXKEVQVEMVVEG

SEQ ID NO: 28641 - protein, 32 aa, Artificial Sequence
  Non-cyclic GFR-binding peptide
  MOD_RES (14)..(15)..(16)..(17)..(18): Xaa is A or G
  MOD_RES (19)..(20)..(21)..(22): Xaa is A or G or absent
VSQDLRSVKIAKVXXXXXXXXXKEVQVMIVKS

SEQ ID NO: 28642 - protein, 37 aa, Artificial Sequence
  Non-cyclic GFR-binding peptide
  MOD_RES (36)..(36): Xaa is C or S
  MOD_RES (15)..(16)..(17)..(18)..(19): Xaa is A or G
  MOD_RES (20)..(21)..(22)..(23): Xaa is A or G or absent
PSRVHHEPLTVLYYXXXXXXXXXEQLSNRLEEHLEXA

SEQ ID NO: 28643 - protein, 38 aa, Artificial Sequence
  Non-cyclic GFR-binding peptide
  MOD_RES (6)..(6): Xaa is C or S
DEGLEXVPTEEEPLPMVYYRIKPHQGQHEQLSNFLQHN

SEQ ID NO: 28644 - protein, 34 aa, Artificial Sequence
  Non-cyclic GFR-binding peptide
  MOD_RES (1)..(34): Xaa is C or S
  MOD_RES (15)..(16)..(17)..(18)..(19): Xaa is A or G
  MOD_RES (20)..(21)..(22)..(23): Xaa is A or G or absent
XVPQDLSNITIQIMXXXXXXXXXIGEMSMVVKSX

SEQ ID NO: 28645 - protein, 39 aa, Artificial Sequence
  Non-cyclic GFR-binding peptide
  MOD_RES (2)..(36)..(38): Xaa is C or S
EXVPTEEEPLTMLYYRIKPHQGQHEQLSNFLQHNKXEXR

SEQ ID NO: 28646 - protein, 38 aa, Artificial Sequence
  Non-cyclic GFR-binding peptide
  MOD_RES (5)..(6)..(38): Xaa is C or S
IPKAXXVPTELRPVQMRKIDEYDKVVKKATVEMVVEGX

SEQ ID NO: 28647 - protein, 40 aa, Artificial Sequence
  Non-cyclic GFR-binding peptide
  MOD_RES (5)..(6)..(38)..(40): Xaa is C or S
VPKPXXAPTQLRPVQVRKIDDSSNVIKKATVNMVVRAXGX

SEQ ID NO: 28648 - protein, 34 aa, Artificial Sequence
  Non-cyclic GFR-binding peptide
  MOD_RES (14)..(15)..(16)..(17)..(18): Xaa is A or G
  MOD_RES (19)..(20)..(21)..(22): Xaa is A or G or absent
SRVHHEPLPVVYYXXXXXXXXXEQLSNRLEEHLE

SEQ ID NO: 28649 - protein, 37 aa, Artificial Sequence
  Non-cyclic GFR-binding peptide
  MOD_RES (3)..(4): Xaa is C or S
  MOD_RES (18)..(19)..(20)..(21)..(22): Xaa is A or G
  MOD_RES (23)..(24)..(25)..(26): Xaa is A or G or absent
KPXXAPTQLRPVQVRKIXXXXXXXXXKKATVNMVVRA

SEQ ID NO: 28650 - protein, 33 aa, Artificial Sequence
  Non-cyclic GFR-binding peptide
  MOD_RES (2)..(3): Xaa is C or S
PXXAPTQLSNITVQIMDDSSNVIIGEMSNMVVR

SEQ ID NO: 28651 - protein, 32 aa, Artificial Sequence
  Non-cyclic GFR-binding peptide
  MOD_RES (14)..(15)..(16)..(17)..(18): Xaa is A or G
  MOD_RES (19)..(20)..(21)..(22): Xaa is A or G or absent
VPTELRSVKMAKVXXXXXXXXXKEVQVDMVVE

SEQ ID NO: 28652 - protein, 38 aa, Artificial Sequence
  Non-cyclic GFR-binding peptide
  MOD_RES (3)..(4)..(37): Xaa is C or S
  MOD_RES (18)..(19)..(20)..(21)..(22): Xaa is A or G
  MOD_RES (23)..(24)..(25)..(26): Xaa is A or G or absent
APXXVPQALSNITIQIMXXXXXXXXXIGEMSMIVRSXK

SEQ ID NO: 28653 - protein, 35 aa, Artificial Sequence
  Non-cyclic GFR-binding peptide
  MOD_RES (3)..(4): Xaa is C or S
KAXXVPTELSNITMQIMDENEKVVIGEMSDMVVEG

SEQ ID NO: 28654 - protein, 39 aa, Artificial Sequence
  Non-cyclic GFR-binding peptide
  MOD_RES (3)..(4)..(38): Xaa is C or S
  MOD_RES (18)..(19)..(20)..(21)..(22): Xaa is A or G
  MOD_RES (23)..(24)..(25)..(26): Xaa is A or G or absent
KPXXAPTQLSNITVQIMXXXXXXXXXIGEMSNMVVRAXG

SEQ ID NO: 28655 - protein, 35 aa, Artificial Sequence
  Non-cyclic GFR-binding peptide
  MOD_RES (2)..(3)..(34): Xaa is C or S
PXXVPQDLRSVKIAKVVGRTPKVKEVQVMVVKSXK

SEQ ID NO: 28656 - protein, 34 aa, Artificial Sequence
  Non-cyclic GFR-binding peptide
  MOD_RES (1)..(1): Xaa is C or S
  MOD_RES (15)..(16)..(17)..(18)..(19): Xaa is A or G
  MOD_RES (20)..(21)..(22)..(23): Xaa is A or G or absent
XVPTELSNITMQIMXXXXXXXXXIGEMSEMVVEG

SEQ ID NO: 28657 - protein, 36 aa, Artificial Sequence
  Non-cyclic GFR-binding peptide
  MOD_RES (4)..(4): Xaa is C or S
GLEXVPTEEEPLTMLYYRIKPHQGQHEQLSNFLQHN

SEQ ID NO: 28658 - protein, 35 aa, Artificial Sequence
  Non-cyclic GFR-binding peptide
  MOD_RES (2)..(3)..(34): Xaa is C or S
PXXVSQDLRSVKIAKVIGKTPKIKEVQVMIVKSXK

SEQ ID NO: 28659 - protein, 30 aa, Artificial Sequence
  Non-cyclic GFR-binding peptide
VSQDLRSVKIAKVIGKTPKIKEVQVMIVKS

SEQ ID NO: 28660 - protein, 40 aa, Artificial Sequence
  Non-cyclic GFR-binding peptide
  MOD_RES (3)..(4)..(38)..(40): Xaa is C or S
  MOD_RES (18)..(19)..(20)..(21)..(22): Xaa is A or G
  MOD_RES (23)..(24)..(25)..(26): Xaa is A or G or absent
KAXXVPTELRPVQMRKIXXXXXXXXXKKATVEMVVEGXGX

SEQ ID NO: 28661 - protein, 35 aa, Artificial Sequence
  Non-cyclic GFR-binding peptide
  MOD_RES (34)..(34): Xaa is C or S
  MOD_RES (14)..(15)..(16)..(17)..(18): Xaa is A or G
  MOD_RES (19)..(20)..(21)..(22): Xaa is A or G or absent
APTKLRPVQVRKIXXXXXXXXXKKATVNMVVRSXG

SEQ ID NO: 28662 - protein, 43 aa, Artificial Sequence
  Non-cyclic GFR-binding peptide
  MOD_RES (6)..(7)..(41)..(43): Xaa is C or S
  MOD_RES (21)..(22)..(23)..(24)..(25): Xaa is A or G
  MOD_RES (26)..(27)..(28)..(29): Xaa is A or G or absent
KIPKAXXVPTELRPVQMRKIXXXXXXXXXKKATVDMVVEGXGX

SEQ ID NO: 28663 - protein, 37 aa, Artificial Sequence
  Non-cyclic GFR-binding peptide
  MOD_RES (6)..(7): Xaa is C or S
YVPKPXXAPTKLRSVKVAKVDDSSNVIKEVQVNMVVR

SEQ ID NO: 28664 - protein, 34 aa, Artificial Sequence
  Non-cyclic GFR-binding peptide
  MOD_RES (1)..(32)..(34): Xaa is C or S
XVPQDLSNITIQIMVGRTPKVIGEMSMVVKSXKX

SEQ ID NO: 28665 - protein, 33 aa, Artificial Sequence
  Non-cyclic GFR-binding peptide
  MOD_RES (1)..(2)..(33): Xaa is C or S
XXVSQDLSNITIQIMIGKTPKIIGEMSMIVKSX

SEQ ID NO: 28666 - protein, 39 aa, Artificial Sequence
  Non-cyclic GFR-binding peptide
  MOD_RES (5)..(5): Xaa is C or S
  MOD_RES (21)..(22)..(23)..(24)..(25): Xaa is A or G
  MOD_RES (26)..(27)..(28)..(29): Xaa is A or G or absent
RNVQXRPTQVQLEPLPVVYYXXXXXXXXXEQLSNTLEDH

SEQ ID NO: 28667 - protein, 37 aa, Artificial Sequence
  Non-cyclic GFR-binding peptide
  MOD_RES (3)..(37): Xaa is C or S
  MOD_RES (17)..(18)..(19)..(20)..(21): Xaa is A or G
  MOD_RES (22)..(23)..(24)..(25): Xaa is A or G or absent
PTXAPTKLRSVKVAKVXXXXXXXXXKEVQVNMVVRSX

SEQ ID NO: 28668 - protein, 35 aa, Artificial Sequence
  Non-cyclic GFR-binding peptide
  MOD_RES (1)..(2)..(35): Xaa is C or S
  MOD_RES (16)..(17)..(18)..(19)..(20): Xaa is A or G
  MOD_RES (21)..(22)..(23)..(24): Xaa is A or G or absent
XXVSQDLRSVKIAKVXXXXXXXXXKEVQVMIVKSX

SEQ ID NO: 28669 - protein, 40 aa, Artificial Sequence
  Non-cyclic GFR-binding peptide
  MOD_RES (3)..(40): Xaa is C or S
VQXRPTQVQLEPLPVVYYEIVRKKPIFEQLSNTLEDHLAX

SEQ ID NO: 28670 - protein, 36 aa, Artificial Sequence
  Non-cyclic GFR-binding peptide
  MOD_RES (3)..(4): Xaa is C or S
  MOD_RES (18)..(19)..(20)..(21)..(22): Xaa is A or G
  MOD_RES (23)..(24)..(25)..(26): Xaa is A or G or absent
APXXVPQALSNITIQIMXXXXXXXXXIGEMSMIVRS

SEQ ID NO: 28671 - protein, 38 aa, Artificial Sequence
  Non-cyclic GFR-binding peptide
  MOD_RES (3)..(4)..(37): Xaa is C or S
  MOD_RES (18)..(19)..(20)..(21)..(22): Xaa is A or G
  MOD_RES (23)..(24)..(25)..(26): Xaa is A or G or absent
SPXXVPQDLRPVQIRKIXXXXXXXXXKKATVMVVKSXK

SEQ ID NO: 28672 - protein, 37 aa, Artificial Sequence
  Non-cyclic GFR-binding peptide
  MOD_RES (4)..(5)..(36): Xaa is C or S
ASPXXVPQDLSNITIQIMVGRTPKVIGEMSMVVKSXK

SEQ ID NO: 28673 - protein, 38 aa, Artificial Sequence
  Non-cyclic GFR-binding peptide
  MOD_RES (1)..(2)..(36)..(38): Xaa is C or S
  MOD_RES (16)..(17)..(18)..(19)..(20): Xaa is A or G
  MOD_RES (21)..(22)..(23)..(24): Xaa is A or G or absent
XXAPTQLSNITVQIMXXXXXXXXXIGEMSNMVVRAXGX

SEQ ID NO: 28674 - protein, 39 aa, Artificial Sequence
  Non-cyclic GFR-binding peptide
  MOD_RES (4)..(5)..(39): Xaa is C or S
  MOD_RES (19)..(20)..(21)..(22)..(23): Xaa is A or G
  MOD_RES (24)..(25)..(26)..(27): Xaa is A or G or absent
PKPXXAPTQLRSVKVAKVXXXXXXXXXKEVQVNMVVRAX

SEQ ID NO: 28675 - protein, 41 aa, Artificial Sequence
  Non-cyclic GFR-binding peptide
  MOD_RES (3)..(40): Xaa is C or S
VQXRPTQVQLEPLPVVYYEIVRKKPIFEQLSNTLEDHLAXK

SEQ ID NO: 28676 - protein, 36 aa, Artificial Sequence
  Non-cyclic GFR-binding peptide
  MOD_RES (3)..(4): Xaa is C or S
  MOD_RES (18)..(19)..(20)..(21)..(22): Xaa is A or G
  MOD_RES (23)..(24)..(25)..(26): Xaa is A or G or absent
KAXXVPTELSNITMQIMXXXXXXXXXIGEMSDMVVE

SEQ ID NO: 28677 - protein, 39 aa, Artificial Sequence
  Non-cyclic GFR-binding peptide
  MOD_RES (6)..(7): Xaa is C or S
  MOD_RES (21)..(22)..(23)..(24)..(25): Xaa is A or G
  MOD_RES (26)..(27)..(28)..(29): Xaa is A or G or absent
YVPKPXXAPTKLRSVKVAKVXXXXXXXXXKEVQVNMVVR

SEQ ID NO: 28678 - protein, 35 aa, Artificial Sequence
  Non-cyclic GFR-binding peptide
  MOD_RES (35)..(35): Xaa is C or S
TQVQLEPLPVVYYEIVRKKPIFEQLSNTLEDHLAX

SEQ ID NO: 28679 - protein, 39 aa, Artificial Sequence
  Non-cyclic GFR-binding peptide
  MOD_RES (5)..(6)..(38): Xaa is C or S
IPKAXXVPTELSNITMQIMDENEKVVIGEMSDMVVEGXG

SEQ ID NO: 28680 - protein, 37 aa, Artificial Sequence
  Non-cyclic GFR-binding peptide
  MOD_RES (2)..(3)..(36): Xaa is C or S
  MOD_RES (17)..(18)..(19)..(20)..(21): Xaa is A or G
  MOD_RES (22)..(23)..(24)..(25): Xaa is A or G or absent
PXXVPQDLRSVKIAKVXXXXXXXXXKEVQVMVVKSXK

SEQ ID NO: 28681 - protein, 40 aa, Artificial Sequence
  Non-cyclic GFR-binding peptide
  MOD_RES (37)..(39): Xaa is C or S
RPTQVQLEPLPVVYYEIVRKKPIFEQLSNTLEDHLAXKXE

SEQ ID NO: 28682 - protein, 33 aa, Artificial Sequence
  Non-cyclic GFR-binding peptide
  MOD_RES (1)..(2): Xaa is C or S
XXVPTELSNITMQIMDENEKVVIGEMSDMVVEG

SEQ ID NO: 28683 - protein, 39 aa, Artificial Sequence
  Non-cyclic GFR-binding peptide
  MOD_RES (4)..(5)..(38): Xaa is C or S
  MOD_RES (19)..(20)..(21)..(22)..(23): Xaa is A or G
  MOD_RES (24)..(25)..(26)..(27): Xaa is A or G or absent
AAPXXVPQALRPVQIRKIXXXXXXXXXKKATVMIVRSXK

SEQ ID NO: 28684 - protein, 34 aa, Artificial Sequence
  Non-cyclic GFR-binding peptide
  MOD_RES (2)..(3)..(34): Xaa is C or S
PXXVPQDLRSVKIAKVVGRTPKVKEVQVMVVKSX

SEQ ID NO: 28685 - protein, 36 aa, Artificial Sequence
  Non-cyclic GFR-binding peptide
  MOD_RES (1)..(2)..(36): Xaa is C or S
  MOD_RES (16)..(17)..(18)..(19)..(20): Xaa is A or G
  MOD_RES (21)..(22)..(23)..(24): Xaa is A or G or absent
XXAPTQLSNITVQIMXXXXXXXXXIGEMSNMVVRAX

SEQ ID NO: 28686 - protein, 39 aa, Artificial Sequence
  Non-cyclic GFR-binding peptide
  MOD_RES (4)..(4): Xaa is C or S
  MOD_RES (20)..(21)..(22)..(23)..(24): Xaa is A or G
  MOD_RES (25)..(26)..(27)..(28): Xaa is A or G or absent
NVQXRPTQVQLEPLTVLYYXXXXXXXXXEQLSNTLEDHL

SEQ ID NO: 28687 - protein, 39 aa, Artificial Sequence
  Non-cyclic GFR-binding peptide
  MOD_RES (5)..(6): Xaa is C or S
  MOD_RES (20)..(21)..(22)..(23)..(24): Xaa is A or G
  MOD_RES (25)..(26)..(27)..(28): Xaa is A or G or absent
IPKAXXVPTELRSVKMAKVXXXXXXXXXKEVQVDMVVEG

SEQ ID NO: 28688 - protein, 31 aa, Artificial Sequence
  Non-cyclic GFR-binding peptide
  MOD_RES (1)..(1): Xaa is C or S
XAPTKLSNITVQIMDDSSNVIIGEMSNMVVR

SEQ ID NO: 28689 - protein, 35 aa, Artificial Sequence
  Non-cyclic GFR-binding peptide
  MOD_RES (1)..(35): Xaa is C or S
  MOD_RES (15)..(16)..(17)..(18)..(19): Xaa is A or G
  MOD_RES (20)..(21)..(22)..(23): Xaa is A or G or absent
XAPTQLSNITVQIMXXXXXXXXXIGEMSNMVVRAX

SEQ ID NO: 28690 - protein, 37 aa, Artificial Sequence
  Non-cyclic GFR-binding peptide
  MOD_RES (37)..(37): Xaa is C or S
  MOD_RES (16)..(17)..(18)..(19)..(20): Xaa is A or G
  MOD_RES (21)..(22)..(23)..(24): Xaa is A or G or absent
QPSRVHHEPLTVLYYXXXXXXXXXEQLSNRLEEHLEX

SEQ ID NO: 28691 - protein, 39 aa, Artificial Sequence
  Non-cyclic GFR-binding peptide
  MOD_RES (2)..(3)..(37)..(39): Xaa is C or S
  MOD_RES (17)..(18)..(19)..(20)..(21): Xaa is A or G
  MOD_RES (22)..(23)..(24)..(25): Xaa is A or G or absent
PXXAPTQLRPVQVRKIXXXXXXXXXKKATVNMVVRAXGX

SEQ ID NO: 28692 - protein, 40 aa, Artificial Sequence
  Non-cyclic GFR-binding peptide
  MOD_RES (4)..(5)..(39): Xaa is C or S
  MOD_RES (19)..(20)..(21)..(22)..(23): Xaa is A or G
  MOD_RES (24)..(25)..(26)..(27): Xaa is A or G or absent
PKAXXVPTELRPVQMRKIXXXXXXXXXKKATVDMVVEGXG

SEQ ID NO: 28693 - protein, 39 aa, Artificial Sequence
  Non-cyclic GFR-binding peptide
  MOD_RES (1)..(2)..(36)..(38): Xaa is C or S
  MOD_RES (16)..(17)..(18)..(19)..(20): Xaa is A or G
  MOD_RES (21)..(22)..(23)..(24): Xaa is A or G or absent
XXAPTQLRSVKVAKVXXXXXXXXXKEVQVNMVVRAXGXH

SEQ ID NO: 28694 - protein, 33 aa, Artificial Sequence
  Non-cyclic GFR-binding peptide
  MOD_RES (1)..(1): Xaa is C or S
  MOD_RES (15)..(16)..(17)..(18)..(19): Xaa is A or G
  MOD_RES (20)..(21)..(22)..(23): Xaa is A or G or absent
XVPQDLRSVKIAKVXXXXXXXXXKEVQVMVVKS

SEQ ID NO: 28695 - protein, 40 aa, Artificial Sequence
  Non-cyclic GFR-binding peptide
  MOD_RES (6)..(7): Xaa is C or S
  MOD_RES (21)..(22)..(23)..(24)..(25): Xaa is A or G
  MOD_RES (26)..(27)..(28)..(29): Xaa is A or G or absent
TVPKPXXAPTQLRSVKVAKVXXXXXXXXXKEVQVNMVVRA

SEQ ID NO: 28696 - protein, 33 aa, Artificial Sequence
  Non-cyclic GFR-binding peptide
  MOD_RES (1)..(1): Xaa is C or S
  MOD_RES (15)..(16)..(17)..(18)..(19): Xaa is A or G
  MOD_RES (20)..(21)..(22)..(23): Xaa is A or G or absent
XVPQALRPVQIRKIXXXXXXXXXKKATVMIVRS

SEQ ID NO: 28697 - protein, 39 aa, Artificial Sequence
  Non-cyclic GFR-binding peptide
  MOD_RES (3)..(4)..(38): Xaa is C or S
  MOD_RES (18)..(19)..(20)..(21)..(22): Xaa is A or G
  MOD_RES (23)..(24)..(25)..(26): Xaa is A or G or absent
KPXXAPTKLRSVKVAKVXXXXXXXXXKEVQVNMVVRSXG

SEQ ID NO: 28698 - protein, 42 aa, Artificial Sequence
  Non-cyclic GFR-binding peptide
  MOD_RES (7)..(39)..(41): Xaa is C or S
HVTKPTXAPTKLRSVKVAKVDDSSNVIKEVQVNMVVRSXGXH

SEQ ID NO: 28699 - protein, 35 aa, Artificial Sequence
  Non-cyclic GFR-binding peptide
  MOD_RES (1)..(1): Xaa is C or S
XRPTQVQLEPLTVLYYEIVRKKPIFEQLSNTLEDH

SEQ ID NO: 28700 - protein, 42 aa, Artificial Sequence
  Non-cyclic GFR-binding peptide
  MOD_RES (6)..(7)..(41): Xaa is C or S
  MOD_RES (21)..(22)..(23)..(24)..(25): Xaa is A or G
  MOD_RES (26)..(27)..(28)..(29): Xaa is A or G or absent
YVPKPXXAPTKLRSVKVAKVXXXXXXXXXKEVQVNMVVRSXG

SEQ ID NO: 28701 - protein, 40 aa, Artificial Sequence
  Non-cyclic GFR-binding peptide
  MOD_RES (3)..(4)..(37)..(39): Xaa is C or S
  MOD_RES (18)..(19)..(20)..(21)..(22): Xaa is A or G
  MOD_RES (23)..(24)..(25)..(26): Xaa is A or G or absent
SPXXVPQDLRSVKIAKVXXXXXXXXXKEVQVMVVKSXKXS

SEQ ID NO: 28702 - protein, 40 aa, Artificial Sequence
  Non-cyclic GFR-binding peptide
  MOD_RES (4)..(4): Xaa is C or S
NVQXRPTQVQLEPLPVVYYEIVRKKPIFEQLSNTLEDHLA

SEQ ID NO: 28703 - protein, 33 aa, Artificial Sequence
  Non-cyclic GFR-binding peptide
  MOD_RES (1)..(2)..(33): Xaa is C or S
XXVPQALRSVKIAKVVGRKPKVKEVQVMIVRSX

SEQ ID NO: 28704 - protein, 38 aa, Artificial Sequence
  Non-cyclic GFR-binding peptide
  MOD_RES (3)..(4)..(35)..(37): Xaa is C or S
SPXXVPQDLSNITIQIMVGRTPKVIGEMSMVVKSXKXS

SEQ ID NO: 28705 - protein, 34 aa, Artificial Sequence
  Non-cyclic GFR-binding peptide
  MOD_RES (34)..(34): Xaa is C or S
  MOD_RES (14)..(15)..(16)..(17)..(18): Xaa is A or G
  MOD_RES (19)..(20)..(21)..(22): Xaa is A or G or absent
APTQLSNITVQIMXXXXXXXXXIGEMSNMVVRAX

SEQ ID NO: 28706 - protein, 39 aa, Artificial Sequence
  Non-cyclic GFR-binding peptide
  MOD_RES (3)..(37)..(39): Xaa is C or S
  MOD_RES (17)..(18)..(19)..(20)..(21): Xaa is A or G
  MOD_RES (22)..(23)..(24)..(25): Xaa is A or G or absent
PTXAPTKLSNITVQIMXXXXXXXXXIGEMSNMVVRSXGX

SEQ ID NO: 28707 - protein, 38 aa, Artificial Sequence
  Non-cyclic GFR-binding peptide
  MOD_RES (5)..(6): Xaa is C or S
  MOD_RES (20)..(21)..(22)..(23)..(24): Xaa is A or G
  MOD_RES (25)..(26)..(27)..(28): Xaa is A or G or absent
IPKAXXVPTELSNITMQIMXXXXXXXXXIGEMSEMVVE

SEQ ID NO: 28708 - protein, 39 aa, Artificial Sequence
  Non-cyclic GFR-binding peptide
  MOD_RES (3)..(37)..(39): Xaa is C or S
LEXVPTEEEPLTMLYYRIKPHQGQHEQLSNFLQHNKXEX

SEQ ID NO: 28709 - protein, 32 aa, Artificial Sequence
  Non-cyclic GFR-binding peptide
  MOD_RES (31)..(31): Xaa is C or S
VPQALSNITIQIMVGRKPKVIGEMSMIVRSXK

SEQ ID NO: 28710 - protein, 40 aa, Artificial Sequence
  Non-cyclic GFR-binding peptide
  MOD_RES (1)..(38)..(40): Xaa is C or S
XQPSRVHHEPLTVLYYEYVRKKPKLEQLSNRLEEHLEXAX

SEQ ID NO: 28711 - protein, 38 aa, Artificial Sequence
  Non-cyclic GFR-binding peptide
  MOD_RES (6)..(38): Xaa is C or S
VTKPTXAPTKLSNITVQIMDDSSNVIIGEMSNMVVRSX

SEQ ID NO: 28712 - protein, 43 aa, Artificial Sequence
  Non-cyclic GFR-binding peptide
  MOD_RES (5)..(6)..(40)..(42): Xaa is C or S
  MOD_RES (20)..(21)..(22)..(23)..(24): Xaa is A or G
  MOD_RES (25)..(26)..(27)..(28): Xaa is A or G or absent
VPKPXXAPTQLSNITVQIMXXXXXXXXXIGEMSNMVVRAXGXH

SEQ ID NO: 28713 - protein, 37 aa, Artificial Sequence
  Non-cyclic GFR-binding peptide
  MOD_RES (4)..(4): Xaa is C or S
GLEXVPTEEEPLPMVYYRIKPHQGQHEQLSNFLQHNK

SEQ ID NO: 28714 - protein, 40 aa, Artificial Sequence
  Non-cyclic GFR-binding peptide
  MOD_RES (5)..(6)..(38)..(40): Xaa is C or S
IPKAXXVPTELSNITMQIMDENEKVVIGEMSDMVVEGXGX

SEQ ID NO: 28715 - protein, 43 aa, Artificial Sequence
  Non-cyclic GFR-binding peptide
  MOD_RES (6)..(7)..(41)..(43): Xaa is C or S
  MOD_RES (21)..(22)..(23)..(24)..(25): Xaa is A or G
  MOD_RES (26)..(27)..(28)..(29): Xaa is A or G or absent
TVPKPXXAPTQLRPVQVRKIXXXXXXXXXKKATVNMVVRAXGX

SEQ ID NO: 28716 - protein, 32 aa, Artificial Sequence
  Non-cyclic GFR-binding peptide
  MOD_RES (32)..(32): Xaa is C or S
APTQLRSVKVAKVDDSSNVIKEVQVNMVVRAX

SEQ ID NO: 28717 - protein, 38 aa, Artificial Sequence
  Non-cyclic GFR-binding peptide
  MOD_RES (6)..(7): Xaa is C or S
KIPKAXXVPTELRSVKMAKVDENEKVVKEVQVDMVVEG

SEQ ID NO: 28718 - protein, 41 aa, Artificial Sequence
  Non-cyclic GFR-binding peptide
  MOD_RES (7)..(41): Xaa is C or S
  MOD_RES (21)..(22)..(23)..(24)..(25): Xaa is A or G
  MOD_RES (26)..(27)..(28)..(29): Xaa is A or G or absent
NDEGLEXVPTEEEPLPMVYYXXXXXXXXXEQLSNFLQHNKX

SEQ ID NO: 28719 - protein, 34 aa, Artificial Sequence
  Non-cyclic GFR-binding peptide
  MOD_RES (1)..(2): Xaa is C or S
  MOD_RES (16)..(17)..(18)..(19)..(20): Xaa is A or G
  MOD_RES (21)..(22)..(23)..(24): Xaa is A or G or absent
XXAPTQLRPVQVRKIXXXXXXXXXKKATVNMVVR

SEQ ID NO: 28720 - protein, 40 aa, Artificial Sequence
  Non-cyclic GFR-binding peptide
  MOD_RES (7)..(39): Xaa is C or S
HVTKPTXAPTKLRSVKVAKVDDSSNVIKEVQVNMVVRSXG

SEQ ID NO: 28721 - protein, 36 aa, Artificial Sequence
  Non-cyclic GFR-binding peptide
  MOD_RES (1)..(2)..(34)..(36): Xaa is C or S
XXVPTELRSVKMAKVDEYDKVVKEVQVEMVVEGXGX

SEQ ID NO: 28722 - protein, 38 aa, Artificial Sequence
  Non-cyclic GFR-binding peptide
  MOD_RES (6)..(7): Xaa is C or S
YVPKPXXAPTKLRPVQVRKIDDSSNVIKKATVNMVVRS

SEQ ID NO: 28723 - protein, 38 aa, Artificial Sequence
  Non-cyclic GFR-binding peptide
  MOD_RES (3)..(35)..(37): Xaa is C or S
PTXAPTKLRSVKVAKVDDSSNVIKEVQVNMVVRSXGXH

SEQ ID NO: 28724 - protein, 33 aa, Artificial Sequence
  Non-cyclic GFR-binding peptide
  MOD_RES (14)..(15)..(16)..(17)..(18): Xaa is A or G
  MOD_RES (19)..(20)..(21)..(22): Xaa is A or G or absent
APTKLRSVKVAKVXXXXXXXXXKEVQVNMVVRS

SEQ ID NO: 28725 - protein, 36 aa, Artificial Sequence
  Non-cyclic GFR-binding peptide
  MOD_RES (2)..(3)..(35): Xaa is C or S
PXXAPTKLRSVKVAKVDDSSNVIKEVQVNMVVRSXG

SEQ ID NO: 28726 - protein, 38 aa, Artificial Sequence
  Non-cyclic GFR-binding peptide
  MOD_RES (4)..(4): Xaa is C or S
  MOD_RES (20)..(21)..(22)..(23)..(24): Xaa is A or G
  MOD_RES (25)..(26)..(27)..(28): Xaa is A or G or absent
SVKXQPSRVHHEPLTVLYYXXXXXXXXXEQLSNRLEEH

SEQ ID NO: 28727 - protein, 39 aa, Artificial Sequence
  Non-cyclic GFR-binding peptide
  MOD_RES (4)..(5)..(36)..(38): Xaa is C or S
AAPXXVPQALSNITIQIMVGRKPKVIGEMSMIVRSXKXS

SEQ ID NO: 28728 - protein, 36 aa, Artificial Sequence
  Non-cyclic GFR-binding peptide
  MOD_RES (2)..(3)..(35): Xaa is C or S
AXXVPTELRSVKMAKVDEYDKVVKEVQVEMVVEGXG

SEQ ID NO: 28729 - protein, 38 aa, Artificial Sequence
  Non-cyclic GFR-binding peptide
  MOD_RES (2)..(3)..(36)..(38): Xaa is C or S
  MOD_RES (17)..(18)..(19)..(20)..(21): Xaa is A or G
  MOD_RES (22)..(23)..(24)..(25): Xaa is A or G or absent
PXXVPQDLRSVKIAKVXXXXXXXXXKEVQVMVVKSXKX

SEQ ID NO: 28730 - protein, 36 aa, Artificial Sequence
  Non-cyclic GFR-binding peptide
  MOD_RES (16)..(17)..(18)..(19)..(20): Xaa is A or G
  MOD_RES (21)..(22)..(23)..(24): Xaa is A or G or absent
RPTQVQLEPLTVLYYXXXXXXXXXEQLSNTLEDHLA

SEQ ID NO: 28731 - protein, 39 aa, Artificial Sequence
  Non-cyclic GFR-binding peptide
  MOD_RES (5)..(6)..(38): Xaa is C or S
VPKPXXAPTKLRPVQVRKIDDSSNVIKKATVNMVVRSXG

SEQ ID NO: 28732 - protein, 39 aa, Artificial Sequence
  Non-cyclic GFR-binding peptide
  MOD_RES (6)..(7): Xaa is C or S
  MOD_RES (21)..(22)..(23)..(24)..(25): Xaa is A or G
  MOD_RES (26)..(27)..(28)..(29): Xaa is A or G or absent
KIPKAXXVPTELRPVQMRKIXXXXXXXXXKKATVDMVVE

SEQ ID NO: 28733 - protein, 36 aa, Artificial Sequence
  Non-cyclic GFR-binding peptide
  MOD_RES (1)..(35): Xaa is C or S
  MOD_RES (15)..(16)..(17)..(18)..(19): Xaa is A or G
  MOD_RES (20)..(21)..(22)..(23): Xaa is A or G or absent
XVPTELSNITMQIMXXXXXXXXXIGEMSDMVVEGXG

SEQ ID NO: 28734 - protein, 43 aa, Artificial Sequence
  Non-cyclic GFR-binding peptide
  MOD_RES (5)..(42): Xaa is C or S
RNVQXRPTQVQLEPLTVLYYEIVRKKPIFEQLSNTLEDHLAXK

SEQ ID NO: 28735 - protein, 36 aa, Artificial Sequence
  Non-cyclic GFR-binding peptide
  MOD_RES (4)..(5)..(36): Xaa is C or S
AAPXXVPQALSNITIQIMVGRKPKVIGEMSMIVRSX

SEQ ID NO: 28736 - protein, 37 aa, Artificial Sequence
  Non-cyclic GFR-binding peptide
  MOD_RES (1)..(2)..(34)..(36): Xaa is C or S
XXVPTELRSVKMAKVDENEKVVKEVQVDMVVEGXGXR

SEQ ID NO: 28737 - protein, 34 aa, Artificial Sequence
  Non-cyclic GFR-binding peptide
  MOD_RES (3)..(4): Xaa is C or S
APXXVPQALRSVKIAKVVGRKPKVKEVQVMIVRS

SEQ ID NO: 28738 - protein, 33 aa, Artificial Sequence
  Non-cyclic GFR-binding peptide
  MOD_RES (1)..(2)..(33): Xaa is C or S
XXVPQALSNITIQIMVGRKPKVIGEMSMIVRSX

SEQ ID NO: 28739 - protein, 39 aa, Artificial Sequence
  Non-cyclic GFR-binding peptide
  MOD_RES (6)..(7): Xaa is C or S
  MOD_RES (21)..(22)..(23)..(24)..(25): Xaa is A or G
  MOD_RES (26)..(27)..(28)..(29): Xaa is A or G or absent
ASAAPXXVPQALRPVQIRKIXXXXXXXXXKKATVMIVRS

SEQ ID NO: 28740 - protein, 33 aa, Artificial Sequence
  Non-cyclic GFR-binding peptide
  MOD_RES (2)..(3): Xaa is C or S
AXXVPTELRPVQMRKIDENEKVVKKATVDMVVE

SEQ ID NO: 28741 - protein, 40 aa, Artificial Sequence
  Non-cyclic GFR-binding peptide
  MOD_RES (3)..(4)..(38)..(40): Xaa is C or S
  MOD_RES (18)..(19)..(20)..(21)..(22): Xaa is A or G
  MOD_RES (23)..(24)..(25)..(26): Xaa is A or G or absent
KPXXAPTQLSNITVQIMXXXXXXXXXIGEMSNMVVRAXGX

SEQ ID NO: 28742 - protein, 41 aa, Artificial Sequence
  Non-cyclic GFR-binding peptide
  MOD_RES (6)..(7)..(39)..(41): Xaa is C or S
TVPKPXXAPTQLSNITVQIMDDSSNVIIGEMSNMVVRAXGX

SEQ ID NO: 28743 - protein, 37 aa, Artificial Sequence
  Non-cyclic GFR-binding peptide
  MOD_RES (2)..(3)..(37): Xaa is C or S
  MOD_RES (17)..(18)..(19)..(20)..(21): Xaa is A or G
  MOD_RES (22)..(23)..(24)..(25): Xaa is A or G or absent
PXXAPTKLRSVKVAKVXXXXXXXXXKEVQVNMVVRSX

SEQ ID NO: 28744 - protein, 45 aa, Artificial Sequence
  Non-cyclic GFR-binding peptide
  MOD_RES (5)..(42)..(44): Xaa is C or S
RNVQXRPTQVQLEPLPVVYYEIVRKKPIFEQLSNTLEDHLAXKXE

SEQ ID NO: 28745 - protein, 36 aa, Artificial Sequence
  Non-cyclic GFR-binding peptide
  MOD_RES (4)..(5)..(36): Xaa is C or S
AAPXXVPQALRSVKIAKVVGRKPKVKEVQVMIVRSX

SEQ ID NO: 28746 - protein, 34 aa, Artificial Sequence
  Non-cyclic GFR-binding peptide
  MOD_RES (31)..(33): Xaa is C or S
VPQDLSNITIQIMVGRTPKVIGEMSMVVKSXKXS

SEQ ID NO: 28747 - protein, 33 aa, Artificial Sequence
  Non-cyclic GFR-binding peptide
  MOD_RES (32)..(32): Xaa is C or S
APTKLRSVKVAKVDDSSNVIKEVQVNMVVRSXG

SEQ ID NO: 28748 - protein, 39 aa, Artificial Sequence
  Non-cyclic GFR-binding peptide
  MOD_RES (3)..(4)..(36)..(38): Xaa is C or S
KAXXVPTELRPVQMRKIDEYDKVVKKATVEMVVEGXGXR

SEQ ID NO: 28749 - protein, 40 aa, Artificial Sequence
  Non-cyclic GFR-binding peptide
  MOD_RES (6)..(7): Xaa is C or S
  MOD_RES (21)..(22)..(23)..(24)..(25): Xaa is A or G
  MOD_RES (26)..(27)..(28)..(29): Xaa is A or G or absent
TVPKPXXAPTQLRPVQVRKIXXXXXXXXXKKATVNMVVRA

SEQ ID NO: 28750 - protein, 33 aa, Artificial Sequence
  Non-cyclic GFR-binding peptide
  MOD_RES (1)..(1): Xaa is C or S
  MOD_RES (15)..(16)..(17)..(18)..(19): Xaa is A or G
  MOD_RES (20)..(21)..(22)..(23): Xaa is A or G or absent
XVPTEEEPLPMVYYXXXXXXXXXEQLSNFLQHN

SEQ ID NO: 28751 - protein, 37 aa, Artificial Sequence
  Non-cyclic GFR-binding peptide
  MOD_RES (1)..(35)..(37): Xaa is C or S
  MOD_RES (15)..(16)..(17)..(18)..(19): Xaa is A or G
  MOD_RES (20)..(21)..(22)..(23): Xaa is A or G or absent
XAPTQLRSVKVAKVXXXXXXXXXKEVQVNMVVRAXGX

SEQ ID NO: 28752 - protein, 40 aa, Artificial Sequence
  Non-cyclic GFR-binding peptide
  MOD_RES (6)..(40): Xaa is C or S
DEGLEXVPTEEEPLPMVYYRIKPHQGQHEQLSNFLQHNKX

SEQ ID NO: 28753 - protein, 37 aa, Artificial Sequence
  Non-cyclic GFR-binding peptide
  MOD_RES (2)..(3)..(37): Xaa is C or S
  MOD_RES (17)..(18)..(19)..(20)..(21): Xaa is A or G
  MOD_RES (22)..(23)..(24)..(25): Xaa is A or G or absent
AXXVPTELRPVQMRKIXXXXXXXXXKKATVDMVVEGX

SEQ ID NO: 28754 - protein, 42 aa, Artificial Sequence
  Non-cyclic GFR-binding peptide
  MOD_RES (4)..(5)..(39)..(41): Xaa is C or S
  MOD_RES (19)..(20)..(21)..(22)..(23): Xaa is A or G
  MOD_RES (24)..(25)..(26)..(27): Xaa is A or G or absent
PKPXXAPTQLRSVKVAKVXXXXXXXXXKEVQVNMVVRAXGXH

SEQ ID NO: 28755 - protein, 41 aa, Artificial Sequence
  Non-cyclic GFR-binding peptide
  MOD_RES (5)..(6)..(38)..(40): Xaa is C or S
VPKPXXAPTQLSNITVQIMDDSSNVIIGEMSNMVVRAXGXH

SEQ ID NO: 28756 - protein, 31 aa, Artificial Sequence
  Non-cyclic GFR-binding peptide
  MOD_RES (31)..(31): Xaa is C or S
VPQALSNITIQIMVGRKPKVIGEMSMIVRSX

SEQ ID NO: 28757 - protein, 36 aa, Artificial Sequence
  Non-cyclic GFR-binding peptide
  MOD_RES (1)..(2)..(35): Xaa is C or S
  MOD_RES (16)..(17)..(18)..(19)..(20): Xaa is A or G
  MOD_RES (21)..(22)..(23)..(24): Xaa is A or G or absent
XXVPQALSNITIQIMXXXXXXXXXIGEMSMIVRSXK

SEQ ID NO: 28758 - protein, 39 aa, Artificial Sequence
  Non-cyclic GFR-binding peptide
  MOD_RES (4)..(5)..(36)..(38): Xaa is C or S
ASPXXVPQDLRSVKIAKVVGRTPKVKEVQVMVVKSXKXS

SEQ ID NO: 28759 - protein, 35 aa, Artificial Sequence
  Non-cyclic GFR-binding peptide
  MOD_RES (1)..(33)..(35): Xaa is C or S
XVPTELSNITMQIMDENEKVVIGEMSDMVVEGXGX

SEQ ID NO: 28760 - protein, 38 aa, Artificial Sequence
  Non-cyclic GFR-binding peptide
  MOD_RES (2)..(3)..(37): Xaa is C or S
  MOD_RES (17)..(18)..(19)..(20)..(21): Xaa is A or G
  MOD_RES (22)..(23)..(24)..(25): Xaa is A or G or absent
PXXAPTQLRSVKVAKVXXXXXXXXXKEVQVNMVVRAXG

SEQ ID NO: 28761 - protein, 36 aa, Artificial Sequence
  Non-cyclic GFR-binding peptide
  MOD_RES (3)..(4)..(35): Xaa is C or S
SPXXVPQDLRSVKIAKVVGRTPKVKEVQVMVVKSXK

SEQ ID NO: 28762 - protein, 37 aa, Artificial Sequence
  Non-cyclic GFR-binding peptide
  MOD_RES (36)..(36): Xaa is C or S
  MOD_RES (15)..(16)..(17)..(18)..(19): Xaa is A or G
  MOD_RES (20)..(21)..(22)..(23): Xaa is A or G or absent
PSRVHHEPLPVVYYXXXXXXXXXEQLSNRLEEHLEXA

SEQ ID NO: 28763 - protein, 37 aa, Artificial Sequence
  Non-cyclic GFR-binding peptide
  MOD_RES (3)..(4)..(37): Xaa is C or S
  MOD_RES (18)..(19)..(20)..(21)..(22): Xaa is A or G
  MOD_RES (23)..(24)..(25)..(26): Xaa is A or G or absent
SPXXVPQDLRPVQIRKIXXXXXXXXXKKATVMVVKSX

SEQ ID NO: 28764 - protein, 37 aa, Artificial Sequence
  Non-cyclic GFR-binding peptide
  MOD_RES (2)..(3)..(35)..(37): Xaa is C or S
PXXAPTKLRPVQVRKIDDSSNVIKKATVNMVVRSXGX

SEQ ID NO: 28765 - protein, 41 aa, Artificial Sequence
  Non-cyclic GFR-binding peptide
  MOD_RES (1)..(38)..(40): Xaa is C or S
XQPSRVHHEPLPVVYYEYVRKKPKLEQLSNRLEEHLEXAXA

SEQ ID NO: 28766 - protein, 38 aa, Artificial Sequence
  Non-cyclic GFR-binding peptide
  MOD_RES (2)..(3)..(36)..(38): Xaa is C or S
  MOD_RES (17)..(18)..(19)..(20)..(21): Xaa is A or G
  MOD_RES (22)..(23)..(24)..(25): Xaa is A or G or absent
PXXVPQALSNITIQIMXXXXXXXXXIGEMSMIVRSXKX

SEQ ID NO: 28767 - protein, 36 aa, Artificial Sequence
  Non-cyclic GFR-binding peptide
  MOD_RES (3)..(4): Xaa is C or S
  MOD_RES (18)..(19)..(20)..(21)..(22): Xaa is A or G
  MOD_RES (23)..(24)..(25)..(26): Xaa is A or G or absent
KPXXAPTQLSNITVQIMXXXXXXXXXIGEMSNMVVR

SEQ ID NO: 28768 - protein, 34 aa, Artificial Sequence
  Non-cyclic GFR-binding peptide
  MOD_RES (2)..(3): Xaa is C or S
AXXVPTELRPVQMRKIDENEKVVKKATVDMVVEG

SEQ ID NO: 28769 - protein, 40 aa, Artificial Sequence
  Non-cyclic GFR-binding peptide
  MOD_RES (5)..(5): Xaa is C or S
  MOD_RES (21)..(22)..(23)..(24)..(25): Xaa is A or G
  MOD_RES (26)..(27)..(28)..(29): Xaa is A or G or absent
RNVQXRPTQVQLEPLTVLYYXXXXXXXXXEQLSNTLEDHL

SEQ ID NO: 28770 - protein, 32 aa, Artificial Sequence
  Non-cyclic GFR-binding peptide
  MOD_RES (1)..(1): Xaa is C or S
XAPTKLSNITVQIMDDSSNVIIGEMSNMVVRS

SEQ ID NO: 28771 - protein, 39 aa, Artificial Sequence
  Non-cyclic GFR-binding peptide
  MOD_RES (4)..(5)..(38): Xaa is C or S
  MOD_RES (19)..(20)..(21)..(22)..(23): Xaa is A or G
  MOD_RES (24)..(25)..(26)..(27): Xaa is A or G or absent
AAPXXVPQALRSVKIAKVXXXXXXXXXKEVQVMIVRSXK

SEQ ID NO: 28772 - protein, 36 aa, Artificial Sequence
  Non-cyclic GFR-binding peptide
  MOD_RES (1)..(33)..(35): Xaa is C or S
XVPTELRPVQMRKIDEYDKVVKKATVEMVVEGXGXR

SEQ ID NO: 28773 - protein, 34 aa, Artificial Sequence
  Non-cyclic GFR-binding peptide
  MOD_RES (1)..(33): Xaa is C or S
XVPTELRPVQMRKIDEYDKVVKKATVEMVVEGXG

SEQ ID NO: 28774 - protein, 35 aa, Artificial Sequence
  Non-cyclic GFR-binding peptide
  MOD_RES (2)..(3)..(35): Xaa is C or S
PXXAPTQLSNITVQIMDDSSNVIIGEMSNMVVRAX

SEQ ID NO: 28775 - protein, 40 aa, Artificial Sequence
  Non-cyclic GFR-binding peptide
  MOD_RES (5)..(5): Xaa is C or S
RNVQXRPTQVQLEPLPVVYYEIVRKKPIFEQLSNTLEDHL

SEQ ID NO: 28776 - protein, 35 aa, Artificial Sequence
  Non-cyclic GFR-binding peptide
  MOD_RES (4)..(5): Xaa is C or S
PKPXXAPTKLSNITVQIMDDSSNVIIGEMSNMVVR

SEQ ID NO: 28777 - protein, 40 aa, Artificial Sequence
  Non-cyclic GFR-binding peptide
  MOD_RES (4)..(5)..(38)..(40): Xaa is C or S
  MOD_RES (19)..(20)..(21)..(22)..(23): Xaa is A or G
  MOD_RES (24)..(25)..(26)..(27): Xaa is A or G or absent
ASPXXVPQDLSNITIQIMXXXXXXXXXIGEMSMVVKSXKX

SEQ ID NO: 28778 - protein, 36 aa, Artificial Sequence
  Non-cyclic GFR-binding peptide
  MOD_RES (1)..(35): Xaa is C or S
  MOD_RES (15)..(16)..(17)..(18)..(19): Xaa is A or G
  MOD_RES (20)..(21)..(22)..(23): Xaa is A or G or absent
XAPTQLRPVQVRKIXXXXXXXXXKKATVNMVVRAXG

SEQ ID NO: 28779 - protein, 43 aa, Artificial Sequence
  Non-cyclic GFR-binding peptide
  MOD_RES (5)..(6)..(40)..(42): Xaa is C or S
  MOD_RES (20)..(21)..(22)..(23)..(24): Xaa is A or G
  MOD_RES (25)..(26)..(27)..(28): Xaa is A or G or absent
VPKPXXAPTKLRSVKVAKVXXXXXXXXXKEVQVNMVVRSXGXH

SEQ ID NO: 28780 - protein, 36 aa, Artificial Sequence
  Non-cyclic GFR-binding peptide
  MOD_RES (2)..(2): Xaa is C or S
  MOD_RES (18)..(19)..(20)..(21)..(22): Xaa is A or G
  MOD_RES (23)..(24)..(25)..(26): Xaa is A or G or absent
QXRPTQVQLEPLPVVYYXXXXXXXXXEQLSNTLEDH

SEQ ID NO: 28781 - protein, 40 aa, Artificial Sequence
  Non-cyclic GFR-binding peptide
  MOD_RES (5)..(6)..(37)..(39): Xaa is C or S
SASPXXVPQDLSNITIQIMVGRTPKVIGEMSMVVKSXKXS

SEQ ID NO: 28782 - protein, 38 aa, Artificial Sequence
  Non-cyclic GFR-binding peptide
  MOD_RES (3)..(4)..(38): Xaa is C or S
  MOD_RES (18)..(19)..(20)..(21)..(22): Xaa is A or G
  MOD_RES (23)..(24)..(25)..(26): Xaa is A or G or absent
KAXXVPTELSNITMQIMXXXXXXXXXIGEMSDMVVEGX

SEQ ID NO: 28783 - protein, 41 aa, Artificial Sequence
  Non-cyclic GFR-binding peptide
  MOD_RES (6)..(7)..(41): Xaa is C or S
  MOD_RES (21)..(22)..(23)..(24)..(25): Xaa is A or G
  MOD_RES (26)..(27)..(28)..(29): Xaa is A or G or absent
KIPKAXXVPTELSNITMQIMXXXXXXXXXIGEMSDMVVEGX

SEQ ID NO: 28784 - protein, 35 aa, Artificial Sequence
  Non-cyclic GFR-binding peptide
  MOD_RES (35)..(35): Xaa is C or S
  MOD_RES (14)..(15)..(16)..(17)..(18): Xaa is A or G
  MOD_RES (19)..(20)..(21)..(22): Xaa is A or G or absent
TQVQLEPLPVVYYXXXXXXXXXEQLSNTLEDHLAX

SEQ ID NO: 28785 - protein, 36 aa, Artificial Sequence
  Non-cyclic GFR-binding peptide
  MOD_RES (3)..(4)..(36): Xaa is C or S
KAXXVPTELRSVKMAKVDENEKVVKEVQVDMVVEGX

SEQ ID NO: 28786 - protein, 32 aa, Artificial Sequence
  Non-cyclic GFR-binding peptide
  MOD_RES (32)..(32): Xaa is C or S
VPTELRSVKMAKVDEYDKVVKEVQVEMVVEGX

SEQ ID NO: 28787 - protein, 35 aa, Artificial Sequence
  Non-cyclic GFR-binding peptide
  MOD_RES (1)..(2)..(33)..(35): Xaa is C or S
XXVPQDLSNITIQIMVGRTPKVIGEMSMVVKSXKX

SEQ ID NO: 28788 - protein, 39 aa, Artificial Sequence
  Non-cyclic GFR-binding peptide
  MOD_RES (4)..(5)..(38): Xaa is C or S
  MOD_RES (19)..(20)..(21)..(22)..(23): Xaa is A or G
  MOD_RES (24)..(25)..(26)..(27): Xaa is A or G or absent
ASPXXVSQDLRPVQIRKIXXXXXXXXXKKATVMIVKSXK

SEQ ID NO: 28789 - protein, 37 aa, Artificial Sequence
  Non-cyclic GFR-binding peptide
  MOD_RES (4)..(5)..(37): Xaa is C or S
PKAXXVPTELSNITMQIMDEYDKVVIGEMSEMVVEGX

SEQ ID NO: 28790 - protein, 35 aa, Artificial Sequence
  Non-cyclic GFR-binding peptide
  MOD_RES (3)..(4)..(35): Xaa is C or S
APXXVPQALSNITIQIMVGRKPKVIGEMSMIVRSX

SEQ ID NO: 28791 - protein, 36 aa, Artificial Sequence
  Non-cyclic GFR-binding peptide
  MOD_RES (1)..(33)..(35): Xaa is C or S
XVPTELRSVKMAKVDENEKVVKEVQVDMVVEGXGXR

SEQ ID NO: 28792 - protein, 38 aa, Artificial Sequence
  Non-cyclic GFR-binding peptide
  MOD_RES (5)..(6)..(37): Xaa is C or S
SASPXXVPQDLRSVKIAKVVGRTPKVKEVQVMVVKSXK

SEQ ID NO: 28793 - protein, 41 aa, Artificial Sequence
  Non-cyclic GFR-binding peptide
  MOD_RES (4)..(5)..(38)..(40): Xaa is C or S
  MOD_RES (19)..(20)..(21)..(22)..(23): Xaa is A or G
  MOD_RES (24)..(25)..(26)..(27): Xaa is A or G or absent
ASPXXVPQDLRPVQIRKIXXXXXXXXXKKATVMVVKSXKXS

SEQ ID NO: 28794 - protein, 35 aa, Artificial Sequence
  Non-cyclic GFR-binding peptide
  MOD_RES (2)..(3): Xaa is C or S
  MOD_RES (17)..(18)..(19)..(20)..(21): Xaa is A or G
  MOD_RES (22)..(23)..(24)..(25): Xaa is A or G or absent
AXXVPTELSNITMQIMXXXXXXXXXIGEMSDMVVE

SEQ ID NO: 28795 - protein, 38 aa, Artificial Sequence
  Non-cyclic GFR-binding peptide
  MOD_RES (3)..(37): Xaa is C or S
  MOD_RES (17)..(18)..(19)..(20)..(21): Xaa is A or G
  MOD_RES (22)..(23)..(24)..(25): Xaa is A or G or absent
LEXVPTEEEPLTMLYYXXXXXXXXXEQLSNFLQHNKXE

SEQ ID NO: 28796 - protein, 34 aa, Artificial Sequence
  Non-cyclic GFR-binding peptide
  MOD_RES (1)..(2): Xaa is C or S
  MOD_RES (16)..(17)..(18)..(19)..(20): Xaa is A or G
  MOD_RES (21)..(22)..(23)..(24): Xaa is A or G or absent
XXVSQDLRPVQIRKIXXXXXXXXXKKATVMIVKS

SEQ ID NO: 28797 - protein, 36 aa, Artificial Sequence
  Non-cyclic GFR-binding peptide
  MOD_RES (1)..(1): Xaa is C or S
XRPTQVQLEPLPVVYYEIVRKKPIFEQLSNTLEDHL

SEQ ID NO: 28798 - protein, 33 aa, Artificial Sequence
  Non-cyclic GFR-binding peptide
  MOD_RES (1)..(1): Xaa is C or S
  MOD_RES (15)..(16)..(17)..(18)..(19): Xaa is A or G
  MOD_RES (20)..(21)..(22)..(23): Xaa is A or G or absent
XVPTEEEPLTMLYYXXXXXXXXXEQLSNFLQHN

SEQ ID NO: 28799 - protein, 37 aa, Artificial Sequence
  Non-cyclic GFR-binding peptide
  MOD_RES (3)..(37): Xaa is C or S
  MOD_RES (17)..(18)..(19)..(20)..(21): Xaa is A or G
  MOD_RES (22)..(23)..(24)..(25): Xaa is A or G or absent
LEXVPTEEEPLPMVYYXXXXXXXXXEQLSNFLQHNKX

SEQ ID NO: 28800 - protein, 35 aa, Artificial Sequence
  Non-cyclic GFR-binding peptide
  MOD_RES (3)..(4): Xaa is C or S
KPXXAPTKLRSVKVAKVDDSSNVIKEVQVNMVVRS

SEQ ID NO: 28801 - protein, 41 aa, Artificial Sequence
  Non-cyclic GFR-binding peptide
  MOD_RES (5)..(6)..(40): Xaa is C or S
  MOD_RES (20)..(21)..(22)..(23)..(24): Xaa is A or G
  MOD_RES (25)..(26)..(27)..(28): Xaa is A or G or absent
VPKPXXAPTKLSNITVQIMXXXXXXXXXIGEMSNMVVRSXG

SEQ ID NO: 28802 - protein, 35 aa, Artificial Sequence
  Non-cyclic GFR-binding peptide
  MOD_RES (4)..(5): Xaa is C or S
PKPXXAPTKLRSVKVAKVDDSSNVIKEVQVNMVVR

SEQ ID NO: 28803 - protein, 35 aa, Artificial Sequence
  Non-cyclic GFR-binding peptide
  MOD_RES (4)..(5): Xaa is C or S
AAPXXVPQALRPVQIRKIVGRKPKVKKATVMIVRS

SEQ ID NO: 28804 - protein, 34 aa, Artificial Sequence
  Non-cyclic GFR-binding peptide
  MOD_RES (1)..(2): Xaa is C or S
  MOD_RES (16)..(17)..(18)..(19)..(20): Xaa is A or G
  MOD_RES (21)..(22)..(23)..(24): Xaa is A or G or absent
XXVPTELRSVKMAKVXXXXXXXXXKEVQVDMVVE

SEQ ID NO: 28805 - protein, 37 aa, Artificial Sequence
  Non-cyclic GFR-binding peptide
  MOD_RES (4)..(5)..(37): Xaa is C or S
PKAXXVPTELSNITMQIMDENEKVVIGEMSDMVVEGX

SEQ ID NO: 28806 - protein, 39 aa, Artificial Sequence
  Non-cyclic GFR-binding peptide
  MOD_RES (4)..(5)..(37)..(39): Xaa is C or S
PKAXXVPTELSNITMQIMDEYDKVVIGEMSEMVVEGXGX

SEQ ID NO: 28807 - protein, 38 aa, Artificial Sequence
  Non-cyclic GFR-binding peptide
  MOD_RES (2)..(3)..(35)..(37): Xaa is C or S
PXXAPTKLRPVQVRKIDDSSNVIKKATVNMVVRSXGXH

SEQ ID NO: 28808 - protein, 43 aa, Artificial Sequence
  Non-cyclic GFR-binding peptide
  MOD_RES (5)..(6)..(40)..(42): Xaa is C or S
  MOD_RES (20)..(21)..(22)..(23)..(24): Xaa is A or G
  MOD_RES (25)..(26)..(27)..(28): Xaa is A or G or absent
IPKAXXVPTELRSVKMAKVXXXXXXXXXKEVQVDMVVEGXGXR

SEQ ID NO: 28809 - protein, 34 aa, Artificial Sequence
  Non-cyclic GFR-binding peptide
  MOD_RES (1)..(2): Xaa is C or S
  MOD_RES (16)..(17)..(18)..(19)..(20): Xaa is A or G
  MOD_RES (21)..(22)..(23)..(24): Xaa is A or G or absent
XXVSQDLRSVKIAKVXXXXXXXXXKEVQVMIVKS

SEQ ID NO: 28810 - protein, 37 aa, Artificial Sequence
  Non-cyclic GFR-binding peptide
  MOD_RES (35)..(37): Xaa is C or S
  MOD_RES (14)..(15)..(16)..(17)..(18): Xaa is A or G
  MOD_RES (19)..(20)..(21)..(22): Xaa is A or G or absent
SRVHHEPLPVVYYXXXXXXXXXEQLSNRLEEHLEXAX

SEQ ID NO: 28811 - protein, 43 aa, Artificial Sequence
  Non-cyclic GFR-binding peptide
  MOD_RES (5)..(42): Xaa is C or S
  MOD_RES (21)..(22)..(23)..(24)..(25): Xaa is A or G
  MOD_RES (26)..(27)..(28)..(29): Xaa is A or G or absent
SSVKXQPSRVHHEPLTVLYYXXXXXXXXXEQLSNRLEEHLEXA

SEQ ID NO: 28812 - protein, 35 aa, Artificial Sequence
  Non-cyclic GFR-binding peptide
  MOD_RES (1)..(2): Xaa is C or S
  MOD_RES (16)..(17)..(18)..(19)..(20): Xaa is A or G
  MOD_RES (21)..(22)..(23)..(24): Xaa is A or G or absent
XXVPTELRSVKMAKVXXXXXXXXXKEVQVEMVVEG

SEQ ID NO: 28813 - protein, 36 aa, Artificial Sequence
  Non-cyclic GFR-binding peptide
  MOD_RES (35)..(35): Xaa is C or S
SRVHHEPLTVLYYEYVRKKPKLEQLSNRLEEHLEXA

SEQ ID NO: 28814 - protein, 41 aa, Artificial Sequence
  Non-cyclic GFR-binding peptide
  MOD_RES (3)..(40): Xaa is C or S
VKXQPSRVHHEPLPVVYYEYVRKKPKLEQLSNRLEEHLEXA

SEQ ID NO: 28815 - protein, 35 aa, Artificial Sequence
  Non-cyclic GFR-binding peptide
  MOD_RES (5)..(5): Xaa is C or S
TKPTXAPTKLRPVQVRKIDDSSNVIKKATVNMVVR

SEQ ID NO: 28816 - protein, 36 aa, Artificial Sequence
  Non-cyclic GFR-binding peptide
  MOD_RES (1)..(1): Xaa is C or S
  MOD_RES (17)..(18)..(19)..(20)..(21): Xaa is A or G
  MOD_RES (22)..(23)..(24)..(25): Xaa is A or G or absent
XRPTQVQLEPLTVLYYXXXXXXXXXEQLSNTLEDHL

SEQ ID NO: 28817 - protein, 34 aa, Artificial Sequence
  Non-cyclic GFR-binding peptide
  MOD_RES (33)..(33): Xaa is C or S
  MOD_RES (14)..(15)..(16)..(17)..(18): Xaa is A or G
  MOD_RES (19)..(20)..(21)..(22): Xaa is A or G or absent
VSQDLRPVQIRKIXXXXXXXXXKKATVMIVKSXK

SEQ ID NO: 28818 - protein, 35 aa, Artificial Sequence
  Non-cyclic GFR-binding peptide
  MOD_RES (2)..(3): Xaa is C or S
  MOD_RES (17)..(18)..(19)..(20)..(21): Xaa is A or G
  MOD_RES (22)..(23)..(24)..(25): Xaa is A or G or absent
PXXAPTKLSNITVQIMXXXXXXXXXIGEMSNMVVR

SEQ ID NO: 28819 - protein, 41 aa, Artificial Sequence
  Non-cyclic GFR-binding peptide
  MOD_RES (6)..(7)..(41): Xaa is C or S
  MOD_RES (21)..(22)..(23)..(24)..(25): Xaa is A or G
  MOD_RES (26)..(27)..(28)..(29): Xaa is A or G or absent
YVPKPXXAPTKLSNITVQIMXXXXXXXXXIGEMSNMVVRSX

SEQ ID NO: 28820 - protein, 38 aa, Artificial Sequence
  Non-cyclic GFR-binding peptide
  MOD_RES (7)..(7): Xaa is C or S
HVTKPTXAPTKLRPVQVRKIDDSSNVIKKATVNMVVRS

SEQ ID NO: 28821 - protein, 39 aa, Artificial Sequence
  Non-cyclic GFR-binding peptide
  MOD_RES (2)..(3)..(36)..(38): Xaa is C or S
  MOD_RES (17)..(18)..(19)..(20)..(21): Xaa is A or G
  MOD_RES (22)..(23)..(24)..(25): Xaa is A or G or absent
PXXVPQDLSNITIQIMXXXXXXXXXIGEMSMVVKSXKXS

SEQ ID NO: 28822 - protein, 40 aa, Artificial Sequence
  Non-cyclic GFR-binding peptide
  MOD_RES (4)..(5)..(37)..(39): Xaa is C or S
PKPXXAPTKLSNITVQIMDDSSNVIIGEMSNMVVRSXGXH

SEQ ID NO: 28823 - protein, 34 aa, Artificial Sequence
  Non-cyclic GFR-binding peptide
  MOD_RES (14)..(15)..(16)..(17)..(18): Xaa is A or G
  MOD_RES (19)..(20)..(21)..(22): Xaa is A or G or absent
TQVQLEPLTVLYYXXXXXXXXXEQLSNTLEDHLA

SEQ ID NO: 28824 - protein, 36 aa, Artificial Sequence
  Non-cyclic GFR-binding peptide
  MOD_RES (1)..(1): Xaa is C or S
  MOD_RES (17)..(18)..(19)..(20)..(21): Xaa is A or G
  MOD_RES (22)..(23)..(24)..(25): Xaa is A or G or absent
XQPSRVHHEPLTVLYYXXXXXXXXXEQLSNRLEEHL

SEQ ID NO: 28825 - protein, 37 aa, Artificial Sequence
  Non-cyclic GFR-binding peptide
  MOD_RES (3)..(4)..(37): Xaa is C or S
  MOD_RES (18)..(19)..(20)..(21)..(22): Xaa is A or G
  MOD_RES (23)..(24)..(25)..(26): Xaa is A or G or absent
APXXVPQALRPVQIRKIXXXXXXXXXKKATVMIVRSX

SEQ ID NO: 28826 - protein, 40 aa, Artificial Sequence
  Non-cyclic GFR-binding peptide
  MOD_RES (2)..(39): Xaa is C or S
  MOD_RES (18)..(19)..(20)..(21)..(22): Xaa is A or G
  MOD_RES (23)..(24)..(25)..(26): Xaa is A or G or absent
QXRPTQVQLEPLPVVYYXXXXXXXXXEQLSNTLEDHLAXK

SEQ ID NO: 28827 - protein, 38 aa, Artificial Sequence
  Non-cyclic GFR-binding peptide
  MOD_RES (5)..(6): Xaa is C or S
  MOD_RES (20)..(21)..(22)..(23)..(24): Xaa is A or G
  MOD_RES (25)..(26)..(27)..(28): Xaa is A or G or absent
IPKAXXVPTELRPVQMRKIXXXXXXXXXKKATVDMVVE

SEQ ID NO: 28828 - protein, 37 aa, Artificial Sequence
  Non-cyclic GFR-binding peptide
  MOD_RES (3)..(4): Xaa is C or S
  MOD_RES (18)..(19)..(20)..(21)..(22): Xaa is A or G
  MOD_RES (23)..(24)..(25)..(26): Xaa is A or G or absent
KPXXAPTQLRSVKVAKVXXXXXXXXXKEVQVNMVVRA

SEQ ID NO: 28829 - protein, 38 aa, Artificial Sequence
  Non-cyclic GFR-binding peptide
  MOD_RES (3)..(3): Xaa is C or S
VQXRPTQVQLEPLTVLYYEIVRKKPIFEQLSNTLEDHL

SEQ ID NO: 28830 - protein, 39 aa, Artificial Sequence
  Non-cyclic GFR-binding peptide
  MOD_RES (5)..(5): Xaa is C or S
  MOD_RES (21)..(22)..(23)..(24)..(25): Xaa is A or G
  MOD_RES (26)..(27)..(28)..(29): Xaa is A or G or absent
SSVKXQPSRVHHEPLTVLYYXXXXXXXXXEQLSNRLEEH

SEQ ID NO: 28831 - protein, 33 aa, Artificial Sequence
  Non-cyclic GFR-binding peptide
  MOD_RES (14)..(15)..(16)..(17)..(18): Xaa is A or G
  MOD_RES (19)..(20)..(21)..(22): Xaa is A or G or absent
APTQLRSVKVAKVXXXXXXXXXKEVQVNMVVRA

SEQ ID NO: 28832 - protein, 40 aa, Artificial Sequence
  Non-cyclic GFR-binding peptide
  MOD_RES (6)..(7)..(38)..(40): Xaa is C or S
ASASPXXVPQDLRSVKIAKVVGRTPKVKEVQVMVVKSXKX

SEQ ID NO: 28833 - protein, 36 aa, Artificial Sequence
  Non-cyclic GFR-binding peptide
  MOD_RES (1)..(35): Xaa is C or S
  MOD_RES (15)..(16)..(17)..(18)..(19): Xaa is A or G
  MOD_RES (20)..(21)..(22)..(23): Xaa is A or G or absent
XVPTELSNITMQIMXXXXXXXXXIGEMSEMVVEGXG

SEQ ID NO: 28834 - protein, 40 aa, Artificial Sequence
  Non-cyclic GFR-binding peptide
  MOD_RES (5)..(39): Xaa is C or S
  MOD_RES (19)..(20)..(21)..(22)..(23): Xaa is A or G
  MOD_RES (24)..(25)..(26)..(27): Xaa is A or G or absent
TKPTXAPTKLRPVQVRKIXXXXXXXXXKKATVNMVVRSXG

SEQ ID NO: 28835 - protein, 38 aa, Artificial Sequence
  Non-cyclic GFR-binding peptide
  MOD_RES (6)..(6): Xaa is C or S
DEGLEXVPTEEEPLTMLYYRIKPHQGQHEQLSNFLQHN

SEQ ID NO: 28836 - protein, 35 aa, Artificial Sequence
  Non-cyclic GFR-binding peptide
  MOD_RES (1)..(32)..(34): Xaa is C or S
XVPQDLSNITIQIMVGRTPKVIGEMSMVVKSXKXS

SEQ ID NO: 28837 - protein, 34 aa, Artificial Sequence
  Non-cyclic GFR-binding peptide
  MOD_RES (33)..(33): Xaa is C or S
  MOD_RES (14)..(15)..(16)..(17)..(18): Xaa is A or G
  MOD_RES (19)..(20)..(21)..(22): Xaa is A or G or absent
VPQDLRPVQIRKIXXXXXXXXXKKATVMVVKSXK

SEQ ID NO: 28838 - protein, 37 aa, Artificial Sequence
  Non-cyclic GFR-binding peptide
  MOD_RES (4)..(4): Xaa is C or S
  MOD_RES (18)..(19)..(20)..(21)..(22): Xaa is A or G
  MOD_RES (23)..(24)..(25)..(26): Xaa is A or G or absent
KPTXAPTKLRPVQVRKIXXXXXXXXXKKATVNMVVRS

SEQ ID NO: 28839 - protein, 41 aa, Artificial Sequence
  Non-cyclic GFR-binding peptide
  MOD_RES (6)..(7)..(41): Xaa is C or S
  MOD_RES (21)..(22)..(23)..(24)..(25): Xaa is A or G
  MOD_RES (26)..(27)..(28)..(29): Xaa is A or G or absent
KIPKAXXVPTELRSVKMAKVXXXXXXXXXKEVQVDMVVEGX

SEQ ID NO: 28840 - protein, 36 aa, Artificial Sequence
  Non-cyclic GFR-binding peptide
  MOD_RES (1)..(2)..(36): Xaa is C or S
  MOD_RES (16)..(17)..(18)..(19)..(20): Xaa is A or G
  MOD_RES (21)..(22)..(23)..(24): Xaa is A or G or absent
XXAPTQLRPVQVRKIXXXXXXXXXKKATVNMVVRAX

SEQ ID NO: 28841 - protein, 38 aa, Artificial Sequence
  Non-cyclic GFR-binding peptide
  MOD_RES (6)..(7)..(38): Xaa is C or S
ASASPXXVSQDLRSVKIAKVIGKTPKIKEVQVMIVKSX

SEQ ID NO: 28842 - protein, 39 aa, Artificial Sequence
  Non-cyclic GFR-binding peptide
  MOD_RES (6)..(6): Xaa is C or S
  MOD_RES (20)..(21)..(22)..(23)..(24): Xaa is A or G
  MOD_RES (25)..(26)..(27)..(28): Xaa is A or G or absent
DEGLEXVPTEEEPLTMLYYXXXXXXXXXEQLSNFLQHNK

SEQ ID NO: 28843 - protein, 41 aa, Artificial Sequence
  Non-cyclic GFR-binding peptide
  MOD_RES (4)..(5)..(38)..(40): Xaa is C or S
  MOD_RES (19)..(20)..(21)..(22)..(23): Xaa is A or G
  MOD_RES (24)..(25)..(26)..(27): Xaa is A or G or absent
ASPXXVSQDLSNITIQIMXXXXXXXXXIGEMSMIVKSXKXS

SEQ ID NO: 28844 - protein, 33 aa, Artificial Sequence
  Non-cyclic GFR-binding peptide
  MOD_RES (1)..(2): Xaa is C or S
XXVPTELSNITMQIMDEYDKVVIGEMSEMVVEG

SEQ ID NO: 28845 - protein, 37 aa, Artificial Sequence
  Non-cyclic GFR-binding peptide
  MOD_RES (1)..(1): Xaa is C or S
XRPTQVQLEPLTVLYYEIVRKKPIFEQLSNTLEDHLA

SEQ ID NO: 28846 - protein, 43 aa, Artificial Sequence
  Non-cyclic GFR-binding peptide
  MOD_RES (6)..(7)..(41)..(43): Xaa is C or S
  MOD_RES (21)..(22)..(23)..(24)..(25): Xaa is A or G
  MOD_RES (26)..(27)..(28)..(29): Xaa is A or G or absent
YVPKPXXAPTKLRSVKVAKVXXXXXXXXXKEVQVNMVVRSXGX

SEQ ID NO: 28847 - protein, 35 aa, Artificial Sequence
  Non-cyclic GFR-binding peptide
  MOD_RES (4)..(5): Xaa is C or S
PKPXXAPTKLRPVQVRKIDDSSNVIKKATVNMVVR

SEQ ID NO: 28848 - protein, 35 aa, Artificial Sequence
  Non-cyclic GFR-binding peptide
  MOD_RES (32)..(34): Xaa is C or S
APTQLRSVKVAKVDDSSNVIKEVQVNMVVRAXGXH

SEQ ID NO: 28849 - protein, 45 aa, Artificial Sequence
  Non-cyclic GFR-binding peptide
  MOD_RES (5)..(42)..(44): Xaa is C or S
  MOD_RES (21)..(22)..(23)..(24)..(25): Xaa is A or G
  MOD_RES (26)..(27)..(28)..(29): Xaa is A or G or absent
RNVQXRPTQVQLEPLPVVYYXXXXXXXXXEQLSNTLEDHLAXKXE

SEQ ID NO: 28850 - protein, 39 aa, Artificial Sequence
  Non-cyclic GFR-binding peptide
  MOD_RES (3)..(4)..(37)..(39): Xaa is C or S
  MOD_RES (18)..(19)..(20)..(21)..(22): Xaa is A or G
  MOD_RES (23)..(24)..(25)..(26): Xaa is A or G or absent
SPXXVPQDLSNITIQIMXXXXXXXXXIGEMSMVVKSXKX

SEQ ID NO: 28851 - protein, 34 aa, Artificial Sequence
  Non-cyclic GFR-binding peptide
  MOD_RES (32)..(34): Xaa is C or S
VPTELRPVQMRKIDENEKVVKKATVDMVVEGXGX

SEQ ID NO: 28852 - protein, 35 aa, Artificial Sequence
  Non-cyclic GFR-binding peptide
  MOD_RES (1)..(35): Xaa is C or S
  MOD_RES (15)..(16)..(17)..(18)..(19): Xaa is A or G
  MOD_RES (20)..(21)..(22)..(23): Xaa is A or G or absent
XAPTQLRPVQVRKIXXXXXXXXXKKATVNMVVRAX

SEQ ID NO: 28853 - protein, 40 aa, Artificial Sequence
  Non-cyclic GFR-binding peptide
  MOD_RES (3)..(4)..(37)..(39): Xaa is C or S
  MOD_RES (18)..(19)..(20)..(21)..(22): Xaa is A or G
  MOD_RES (23)..(24)..(25)..(26): Xaa is A or G or absent
SPXXVSQDLSNITIQIMXXXXXXXXXIGEMSMIVKSXKXS

SEQ ID NO: 28854 - protein, 43 aa, Artificial Sequence
  Non-cyclic GFR-binding peptide
  MOD_RES (4)..(41)..(43): Xaa is C or S
  MOD_RES (20)..(21)..(22)..(23)..(24): Xaa is A or G
  MOD_RES (25)..(26)..(27)..(28): Xaa is A or G or absent
NVQXRPTQVQLEPLTVLYYXXXXXXXXXEQLSNTLEDHLAXKX

SEQ ID NO: 28855 - protein, 40 aa, Artificial Sequence
  Non-cyclic GFR-binding peptide
  MOD_RES (5)..(39): Xaa is C or S
  MOD_RES (19)..(20)..(21)..(22)..(23): Xaa is A or G
  MOD_RES (24)..(25)..(26)..(27): Xaa is A or G or absent
TKPTXAPTKLSNITVQIMXXXXXXXXXIGEMSNMVVRSXG

SEQ ID NO: 28856 - protein, 42 aa, Artificial Sequence
  Non-cyclic GFR-binding peptide
  MOD_RES (5)..(6)..(39)..(41): Xaa is C or S
  MOD_RES (20)..(21)..(22)..(23)..(24): Xaa is A or G
  MOD_RES (25)..(26)..(27)..(28): Xaa is A or G or absent
SASPXXVPQDLSNITIQIMXXXXXXXXXIGEMSMVVKSXKXS

SEQ ID NO: 28857 - protein, 43 aa, Artificial Sequence
  Non-cyclic GFR-binding peptide
  MOD_RES (7)..(41)..(43): Xaa is C or S
  MOD_RES (21)..(22)..(23)..(24)..(25): Xaa is A or G
  MOD_RES (26)..(27)..(28)..(29): Xaa is A or G or absent
NDEGLEXVPTEEEPLPMVYYXXXXXXXXXEQLSNFLQHNKXEX

SEQ ID NO: 28858 - protein, 39 aa, Artificial Sequence
  Non-cyclic GFR-binding peptide
  MOD_RES (4)..(5)..(36)..(38): Xaa is C or S
ASPXXVSQDLRPVQIRKIIGKTPKIKKATVMIVKSXKXS

SEQ ID NO: 28859 - protein, 33 aa, Artificial Sequence
  Non-cyclic GFR-binding peptide
  MOD_RES (2)..(2): Xaa is C or S
TXAPTKLRPVQVRKIDDSSNVIKKATVNMVVRS

SEQ ID NO: 28860 - protein, 31 aa, Artificial Sequence
  Non-cyclic GFR-binding peptide
  MOD_RES (1)..(1): Xaa is C or S
XVPTELRSVKMAKVDEYDKVVKEVQVEMVVE

SEQ ID NO: 28861 - protein, 38 aa, Artificial Sequence
  Non-cyclic GFR-binding peptide
  MOD_RES (1)..(2)..(35)..(37): Xaa is C or S
  MOD_RES (16)..(17)..(18)..(19)..(20): Xaa is A or G
  MOD_RES (21)..(22)..(23)..(24): Xaa is A or G or absent
XXVSQDLRSVKIAKVXXXXXXXXXKEVQVMIVKSXKXS

SEQ ID NO: 28862 - protein, 39 aa, Artificial Sequence
  Non-cyclic GFR-binding peptide
  MOD_RES (6)..(7): Xaa is C or S
  MOD_RES (21)..(22)..(23)..(24)..(25): Xaa is A or G
  MOD_RES (26)..(27)..(28)..(29): Xaa is A or G or absent
YVPKPXXAPTKLRPVQVRKIXXXXXXXXXKKATVNMVVR

SEQ ID NO: 28863 - protein, 35 aa, Artificial Sequence
  Non-cyclic GFR-binding peptide
  MOD_RES (1)..(1): Xaa is C or S
XRPTQVQLEPLPVVYYEIVRKKPIFEQLSNTLEDH

SEQ ID NO: 28864 - protein, 34 aa, Artificial Sequence
  Non-cyclic GFR-binding peptide
  MOD_RES (3)..(4): Xaa is C or S
SPXXVSQDLRSVKIAKVIGKTPKIKEVQVMIVKS

SEQ ID NO: 28865 - protein, 44 aa, Artificial Sequence
  Non-cyclic GFR-binding peptide
  MOD_RES (5)..(42)..(44): Xaa is C or S
  MOD_RES (21)..(22)..(23)..(24)..(25): Xaa is A or G
  MOD_RES (26)..(27)..(28)..(29): Xaa is A or G or absent
RNVQXRPTQVQLEPLTVLYYXXXXXXXXXEQLSNTLEDHLAXKX

SEQ ID NO: 28866 - protein, 40 aa, Artificial Sequence
  Non-cyclic GFR-binding peptide
  MOD_RES (3)..(4)..(38)..(40): Xaa is C or S
  MOD_RES (18)..(19)..(20)..(21)..(22): Xaa is A or G
  MOD_RES (23)..(24)..(25)..(26): Xaa is A or G or absent
KPXXAPTKLSNITVQIMXXXXXXXXXIGEMSNMVVRSXGX

SEQ ID NO: 28867 - protein, 41 aa, Artificial Sequence
  Non-cyclic GFR-binding peptide
  MOD_RES (6)..(40): Xaa is C or S
  MOD_RES (20)..(21)..(22)..(23)..(24): Xaa is A or G
  MOD_RES (25)..(26)..(27)..(28): Xaa is A or G or absent
VTKPTXAPTKLRSVKVAKVXXXXXXXXXKEVQVNMVVRSXG

SEQ ID NO: 28868 - protein, 38 aa, Artificial Sequence
  Non-cyclic GFR-binding peptide
  MOD_RES (36)..(38): Xaa is C or S
PSRVHHEPLTVLYYEYVRKKPKLEQLSNRLEEHLEXAX

SEQ ID NO: 28869 - protein, 35 aa, Artificial Sequence
  Non-cyclic GFR-binding peptide
  MOD_RES (2)..(2): Xaa is C or S
  MOD_RES (16)..(17)..(18)..(19)..(20): Xaa is A or G
  MOD_RES (21)..(22)..(23)..(24): Xaa is A or G or absent
TXAPTKLSNITVQIMXXXXXXXXXIGEMSNMVVRS

SEQ ID NO: 28870 - protein, 41 aa, Artificial Sequence
  Non-cyclic GFR-binding peptide
  MOD_RES (5)..(6)..(39)..(41): Xaa is C or S
  MOD_RES (20)..(21)..(22)..(23)..(24): Xaa is A or G
  MOD_RES (25)..(26)..(27)..(28): Xaa is A or G or absent
SASPXXVPQDLRSVKIAKVXXXXXXXXXKEVQVMVVKSXKX

SEQ ID NO: 28871 - protein, 38 aa, Artificial Sequence
  Non-cyclic GFR-binding peptide
  MOD_RES (1)..(35)..(37): Xaa is C or S
  MOD_RES (15)..(16)..(17)..(18)..(19): Xaa is A or G
  MOD_RES (20)..(21)..(22)..(23): Xaa is A or G or absent
XAPTQLSNITVQIMXXXXXXXXXIGEMSNMVVRAXGXH

SEQ ID NO: 28872 - protein, 36 aa, Artificial Sequence
  Non-cyclic GFR-binding peptide
  MOD_RES (1)..(33)..(35): Xaa is C or S
XAPTQLRSVKVAKVDDSSNVIKEVQVNMVVRAXGXH

SEQ ID NO: 28873 - protein, 39 aa, Artificial Sequence
  Non-cyclic GFR-binding peptide
  MOD_RES (4)..(4): Xaa is C or S
SVKXQPSRVHHEPLTVLYYEYVRKKPKLEQLSNRLEEHL

SEQ ID NO: 28874 - protein, 39 aa, Artificial Sequence
  Non-cyclic GFR-binding peptide
  MOD_RES (7)..(7): Xaa is C or S
  MOD_RES (21)..(22)..(23)..(24)..(25): Xaa is A or G
  MOD_RES (26)..(27)..(28)..(29): Xaa is A or G or absent
HVTKPTXAPTKLSNITVQIMXXXXXXXXXIGEMSNMVVR

SEQ ID NO: 28875 - protein, 35 aa, Artificial Sequence
  Non-cyclic GFR-binding peptide
  MOD_RES (2)..(3)..(35): Xaa is C or S
PXXAPTKLSNITVQIMDDSSNVIIGEMSNMVVRSX

SEQ ID NO: 28876 - protein, 39 aa, Artificial Sequence
  Non-cyclic GFR-binding peptide
  MOD_RES (3)..(3): Xaa is C or S
VQXRPTQVQLEPLPVVYYEIVRKKPIFEQLSNTLEDHLA

SEQ ID NO: 28877 - protein, 40 aa, Artificial Sequence
  Non-cyclic GFR-binding peptide
  MOD_RES (4)..(5)..(37)..(39): Xaa is C or S
PKPXXAPTQLSNITVQIMDDSSNVIIGEMSNMVVRAXGXH

SEQ ID NO: 28878 - protein, 37 aa, Artificial Sequence
  Non-cyclic GFR-binding peptide
  MOD_RES (2)..(3)..(36): Xaa is C or S
  MOD_RES (17)..(18)..(19)..(20)..(21): Xaa is A or G
  MOD_RES (22)..(23)..(24)..(25): Xaa is A or G or absent
PXXVSQDLRSVKIAKVXXXXXXXXXKEVQVMIVKSXK

SEQ ID NO: 28879 - protein, 42 aa, Artificial Sequence
  Non-cyclic GFR-binding peptide
  MOD_RES (2)..(39)..(41): Xaa is C or S
  MOD_RES (18)..(19)..(20)..(21)..(22): Xaa is A or G
  MOD_RES (23)..(24)..(25)..(26): Xaa is A or G or absent
QXRPTQVQLEPLPVVYYXXXXXXXXXEQLSNTLEDHLAXKXE

SEQ ID NO: 28880 - protein, 35 aa, Artificial Sequence
  Non-cyclic GFR-binding peptide
  MOD_RES (1)..(2)..(33)..(35): Xaa is C or S
XXVSQDLRPVQIRKIIGKTPKIKKATVMIVKSXKX

SEQ ID NO: 28881 - protein, 35 aa, Artificial Sequence
  Non-cyclic GFR-binding peptide
  MOD_RES (3)..(4): Xaa is C or S
KPXXAPTQLRPVQVRKIDDSSNVIKKATVNMVVRA

SEQ ID NO: 28882 - protein, 36 aa, Artificial Sequence
  Non-cyclic GFR-binding peptide
QPSRVHHEPLPVVYYEYVRKKPKLEQLSNRLEEHLE

SEQ ID NO: 28883 - protein, 37 aa, Artificial Sequence
  Non-cyclic GFR-binding peptide
  MOD_RES (1)..(2)..(36): Xaa is C or S
  MOD_RES (16)..(17)..(18)..(19)..(20): Xaa is A or G
  MOD_RES (21)..(22)..(23)..(24): Xaa is A or G or absent
XXVPTELRSVKMAKVXXXXXXXXXKEVQVDMVVEGXG

SEQ ID NO: 28884 - protein, 41 aa, Artificial Sequence
  Non-cyclic GFR-binding peptide
  MOD_RES (4)..(41): Xaa is C or S
  MOD_RES (20)..(21)..(22)..(23)..(24): Xaa is A or G
  MOD_RES (25)..(26)..(27)..(28): Xaa is A or G or absent
SVKXQPSRVHHEPLPVVYYXXXXXXXXXEQLSNRLEEHLEX

SEQ ID NO: 28885 - protein, 37 aa, Artificial Sequence
  Non-cyclic GFR-binding peptide
  MOD_RES (4)..(5): Xaa is C or S
  MOD_RES (19)..(20)..(21)..(22)..(23): Xaa is A or G
  MOD_RES (24)..(25)..(26)..(27): Xaa is A or G or absent
PKAXXVPTELRPVQMRKIXXXXXXXXXKKATVEMVVE

SEQ ID NO: 28886 - protein, 39 aa, Artificial Sequence
  Non-cyclic GFR-binding peptide
  MOD_RES (37)..(39): Xaa is C or S
QPSRVHHEPLPVVYYEYVRKKPKLEQLSNRLEEHLEXAX

SEQ ID NO: 28887 - protein, 35 aa, Artificial Sequence
  Non-cyclic GFR-binding peptide
  MOD_RES (1)..(2)..(33)..(35): Xaa is C or S
XXVPQALRPVQIRKIVGRKPKVKKATVMIVRSXKX

SEQ ID NO: 28888 - protein, 40 aa, Artificial Sequence
  Non-cyclic GFR-binding peptide
  MOD_RES (6)..(40): Xaa is C or S
  MOD_RES (20)..(21)..(22)..(23)..(24): Xaa is A or G
  MOD_RES (25)..(26)..(27)..(28): Xaa is A or G or absent
VTKPTXAPTKLSNITVQIMXXXXXXXXXIGEMSNMVVRSX

SEQ ID NO: 28889 - protein, 35 aa, Artificial Sequence
  Non-cyclic GFR-binding peptide
  MOD_RES (2)..(3)..(35): Xaa is C or S
AXXVPTELSNITMQIMDEYDKVVIGEMSEMVVEGX

SEQ ID NO: 28890 - protein, 38 aa, Artificial Sequence
  Non-cyclic GFR-binding peptide
  MOD_RES (4)..(5)..(36)..(38): Xaa is C or S
AAPXXVPQALRPVQIRKIVGRKPKVKKATVMIVRSXKX

SEQ ID NO: 28891 - protein, 39 aa, Artificial Sequence
  Non-cyclic GFR-binding peptide
  MOD_RES (3)..(4)..(36)..(38): Xaa is C or S
KAXXVPTELRSVKMAKVDENEKVVKEVQVDMVVEGXGXR

SEQ ID NO: 28892 - protein, 34 aa, Artificial Sequence
  Non-cyclic GFR-binding peptide
  MOD_RES (1)..(1): Xaa is C or S
  MOD_RES (15)..(16)..(17)..(18)..(19): Xaa is A or G
  MOD_RES (20)..(21)..(22)..(23): Xaa is A or G or absent
XAPTQLSNITVQIMXXXXXXXXXIGEMSNMVVRA

SEQ ID NO: 28893 - protein, 34 aa, Artificial Sequence
  Non-cyclic GFR-binding peptide
  MOD_RES (1)..(32)..(34): Xaa is C or S
XVPQALRPVQIRKIVGRKPKVKKATVMIVRSXKX

SEQ ID NO: 28894 - protein, 39 aa, Artificial Sequence
  Non-cyclic GFR-binding peptide
  MOD_RES (5)..(6): Xaa is C or S
  MOD_RES (20)..(21)..(22)..(23)..(24): Xaa is A or G
  MOD_RES (25)..(26)..(27)..(28): Xaa is A or G or absent
VPKPXXAPTQLRSVKVAKVXXXXXXXXXKEVQVNMVVRA

SEQ ID NO: 28895 - protein, 37 aa, Artificial Sequence
  Non-cyclic GFR-binding peptide
  MOD_RES (6)..(6): Xaa is C or S
VTKPTXAPTKLRSVKVAKVDDSSNVIKEVQVNMVVRS

SEQ ID NO: 28896 - protein, 38 aa, Artificial Sequence
  Non-cyclic GFR-binding peptide
  MOD_RES (37)..(37): Xaa is C or S
  MOD_RES (16)..(17)..(18)..(19)..(20): Xaa is A or G
  MOD_RES (21)..(22)..(23)..(24): Xaa is A or G or absent
QPSRVHHEPLTVLYYXXXXXXXXXEQLSNRLEEHLEXA

SEQ ID NO: 28897 - protein, 39 aa, Artificial Sequence
  Non-cyclic GFR-binding peptide
  MOD_RES (6)..(7)..(39): Xaa is C or S
TVPKPXXAPTQLRSVKVAKVDDSSNVIKEVQVNMVVRAX

SEQ ID NO: 28898 - protein, 40 aa, Artificial Sequence
  Non-cyclic GFR-binding peptide
  MOD_RES (6)..(7)..(40): Xaa is C or S
  MOD_RES (21)..(22)..(23)..(24)..(25): Xaa is A or G
  MOD_RES (26)..(27)..(28)..(29): Xaa is A or G or absent
ASASPXXVPQDLSNITIQIMXXXXXXXXXIGEMSMVVKSX

SEQ ID NO: 28899 - protein, 32 aa, Artificial Sequence
  Non-cyclic GFR-binding peptide
  MOD_RES (32)..(32): Xaa is C or S
APTKLRSVKVAKVDDSSNVIKEVQVNMVVRSX

SEQ ID NO: 28900 - protein, 43 aa, Artificial Sequence
  Non-cyclic GFR-binding peptide
  MOD_RES (5)..(6)..(40)..(42): Xaa is C or S
  MOD_RES (20)..(21)..(22)..(23)..(24): Xaa is A or G
  MOD_RES (25)..(26)..(27)..(28): Xaa is A or G or absent
VPKPXXAPTQLRPVQVRKIXXXXXXXXXKKATVNMVVRAXGXH

SEQ ID NO: 28901 - protein, 39 aa, Artificial Sequence
  Non-cyclic GFR-binding peptide
  MOD_RES (6)..(7)..(39): Xaa is C or S
SIPKAXXVPTELRSVKMAKVDEYDKVVKEVQVEMVVEGX

SEQ ID NO: 28902 - protein, 39 aa, Artificial Sequence
  Non-cyclic GFR-binding peptide
  MOD_RES (7)..(7): Xaa is C or S
NDEGLEXVPTEEEPLTMLYYRIKPHQGQHEQLSNFLQHN

SEQ ID NO: 28903 - protein, 39 aa, Artificial Sequence
  Non-cyclic GFR-binding peptide
  MOD_RES (6)..(7): Xaa is C or S
  MOD_RES (21)..(22)..(23)..(24)..(25): Xaa is A or G
  MOD_RES (26)..(27)..(28)..(29): Xaa is A or G or absent
ASAAPXXVPQALRSVKIAKVXXXXXXXXXKEVQVMIVRS

SEQ ID NO: 28904 - protein, 34 aa, Artificial Sequence
  Non-cyclic GFR-binding peptide
  MOD_RES (34)..(34): Xaa is C or S
  MOD_RES (14)..(15)..(16)..(17)..(18): Xaa is A or G
  MOD_RES (19)..(20)..(21)..(22): Xaa is A or G or absent
VPTELRPVQMRKIXXXXXXXXXKKATVEMVVEGX

SEQ ID NO: 28905 - protein, 31 aa, Artificial Sequence
  Non-cyclic GFR-binding peptide
APTQLRSVKVAKVDDSSNVIKEVQVNMVVRA

SEQ ID NO: 28906 - protein, 34 aa, Artificial Sequence
  Non-cyclic GFR-binding peptide
  MOD_RES (1)..(2): Xaa is C or S
  MOD_RES (16)..(17)..(18)..(19)..(20): Xaa is A or G
  MOD_RES (21)..(22)..(23)..(24): Xaa is A or G or absent
XXAPTQLRSVKVAKVXXXXXXXXXKEVQVNMVVR

SEQ ID NO: 28907 - protein, 36 aa, Artificial Sequence
  Non-cyclic GFR-binding peptide
  MOD_RES (2)..(3)..(35): Xaa is C or S
AXXVPTELRSVKMAKVDENEKVVKEVQVDMVVEGXG

SEQ ID NO: 28908 - protein, 38 aa, Artificial Sequence
  Non-cyclic GFR-binding peptide
  MOD_RES (5)..(5): Xaa is C or S
  MOD_RES (19)..(20)..(21)..(22)..(23): Xaa is A or G
  MOD_RES (24)..(25)..(26)..(27): Xaa is A or G or absent
TKPTXAPTKLRSVKVAKVXXXXXXXXXKEVQVNMVVRS

SEQ ID NO: 28909 - protein, 43 aa, Artificial Sequence
  Non-cyclic GFR-binding peptide
  MOD_RES (5)..(6)..(40)..(42): Xaa is C or S
  MOD_RES (20)..(21)..(22)..(23)..(24): Xaa is A or G
  MOD_RES (25)..(26)..(27)..(28): Xaa is A or G or absent
VPKPXXAPTQLRSVKVAKVXXXXXXXXXKEVQVNMVVRAXGXH

SEQ ID NO: 28910 - protein, 43 aa, Artificial Sequence
  Non-cyclic GFR-binding peptide
  MOD_RES (6)..(7)..(41)..(43): Xaa is C or S
  MOD_RES (21)..(22)..(23)..(24)..(25): Xaa is A or G
  MOD_RES (26)..(27)..(28)..(29): Xaa is A or G or absent
SIPKAXXVPTELSNITMQIMXXXXXXXXXIGEMSEMVVEGXGX

SEQ ID NO: 28911 - protein, 43 aa, Artificial Sequence
  Non-cyclic GFR-binding peptide
  MOD_RES (6)..(7)..(41)..(43): Xaa is C or S
  MOD_RES (21)..(22)..(23)..(24)..(25): Xaa is A or G
  MOD_RES (26)..(27)..(28)..(29): Xaa is A or G or absent
SIPKAXXVPTELRSVKMAKVXXXXXXXXXKEVQVEMVVEGXGX

SEQ ID NO: 28912 - protein, 37 aa, Artificial Sequence
  Non-cyclic GFR-binding peptide
  MOD_RES (34)..(36): Xaa is C or S
  MOD_RES (14)..(15)..(16)..(17)..(18): Xaa is A or G
  MOD_RES (19)..(20)..(21)..(22): Xaa is A or G or absent
VPTEEEPLPMVYYXXXXXXXXXEQLSNFLQHNKXEXR

SEQ ID NO: 28913 - protein, 35 aa, Artificial Sequence
  Non-cyclic GFR-binding peptide
  MOD_RES (2)..(3): Xaa is C or S
  MOD_RES (17)..(18)..(19)..(20)..(21): Xaa is A or G
  MOD_RES (22)..(23)..(24)..(25): Xaa is A or G or absent
PXXAPTQLSNITVQIMXXXXXXXXXIGEMSNMVVR

SEQ ID NO: 28914 - protein, 34 aa, Artificial Sequence
  Non-cyclic GFR-binding peptide
  MOD_RES (2)..(2): Xaa is C or S
  MOD_RES (16)..(17)..(18)..(19)..(20): Xaa is A or G
  MOD_RES (21)..(22)..(23)..(24): Xaa is A or G or absent
TXAPTKLRPVQVRKIXXXXXXXXXKKATVNMVVR

SEQ ID NO: 28915 - protein, 40 aa, Artificial Sequence
  Non-cyclic GFR-binding peptide
  MOD_RES (5)..(6)..(37)..(39): Xaa is C or S
SASPXXVSQDLRSVKIAKVIGKTPKIKEVQVMIVKSXKXS

SEQ ID NO: 28916 - protein, 41 aa, Artificial Sequence
  Non-cyclic GFR-binding peptide
  MOD_RES (4)..(5)..(38)..(40): Xaa is C or S
  MOD_RES (19)..(20)..(21)..(22)..(23): Xaa is A or G
  MOD_RES (24)..(25)..(26)..(27): Xaa is A or G or absent
ASPXXVPQDLSNITIQIMXXXXXXXXXIGEMSMVVKSXKXS

SEQ ID NO: 28917 - protein, 36 aa, Artificial Sequence
  Non-cyclic GFR-binding peptide
  MOD_RES (5)..(6): Xaa is C or S
VPKPXXAPTQLRPVQVRKIDDSSNVIKKATVNMVVR

SEQ ID NO: 28918 - protein, 32 aa, Artificial Sequence
  Non-cyclic GFR-binding peptide
  MOD_RES (1)..(2): Xaa is C or S
XXVPTELSNITMQIMDENEKVVIGEMSDMVVE

SEQ ID NO: 28919 - protein, 36 aa, Artificial Sequence
  Non-cyclic GFR-binding peptide
  MOD_RES (4)..(4): Xaa is C or S
  MOD_RES (18)..(19)..(20)..(21)..(22): Xaa is A or G
  MOD_RES (23)..(24)..(25)..(26): Xaa is A or G or absent
GLEXVPTEEEPLTMLYYXXXXXXXXXEQLSNFLQHN

SEQ ID NO: 28920 - protein, 43 aa, Artificial Sequence
  Non-cyclic GFR-binding peptide
  MOD_RES (5)..(42): Xaa is C or S
SSVKXQPSRVHHEPLTVLYYEYVRKKPKLEQLSNRLEEHLEXA

SEQ ID NO: 28921 - protein, 37 aa, Artificial Sequence
  Non-cyclic GFR-binding peptide
  MOD_RES (1)..(34)..(36): Xaa is C or S
  MOD_RES (15)..(16)..(17)..(18)..(19): Xaa is A or G
  MOD_RES (20)..(21)..(22)..(23): Xaa is A or G or absent
XVPQDLSNITIQIMXXXXXXXXXIGEMSMVVKSXKXS

SEQ ID NO: 28922 - protein, 41 aa, Artificial Sequence
  Non-cyclic GFR-binding peptide
  MOD_RES (2)..(39)..(41): Xaa is C or S
KXQPSRVHHEPLPVVYYEYVRKKPKLEQLSNRLEEHLEXAX

SEQ ID NO: 28923 - protein, 36 aa, Artificial Sequence
  Non-cyclic GFR-binding peptide
  MOD_RES (4)..(5): Xaa is C or S
PKPXXAPTKLRPVQVRKIDDSSNVIKKATVNMVVRS

SEQ ID NO: 28924 - protein, 33 aa, Artificial Sequence
  Non-cyclic GFR-binding peptide
  MOD_RES (14)..(15)..(16)..(17)..(18): Xaa is A or G
  MOD_RES (19)..(20)..(21)..(22): Xaa is A or G or absent
APTQLSNITVQIMXXXXXXXXXIGEMSNMVVRA

SEQ ID NO: 28925 - protein, 36 aa, Artificial Sequence
  Non-cyclic GFR-binding peptide
  MOD_RES (4)..(5)..(36): Xaa is C or S
ASPXXVSQDLRPVQIRKIIGKTPKIKKATVMIVKSX

SEQ ID NO: 28926 - protein, 41 aa, Artificial Sequence
  Non-cyclic GFR-binding peptide
  MOD_RES (7)..(41): Xaa is C or S
  MOD_RES (21)..(22)..(23)..(24)..(25): Xaa is A or G
  MOD_RES (26)..(27)..(28)..(29): Xaa is A or G or absent
NDEGLEXVPTEEEPLTMLYYXXXXXXXXXEQLSNFLQHNKX

SEQ ID NO: 28927 - protein, 36 aa, Artificial Sequence
  Non-cyclic GFR-binding peptide
  MOD_RES (1)..(35): Xaa is C or S
  MOD_RES (15)..(16)..(17)..(18)..(19): Xaa is A or G
  MOD_RES (20)..(21)..(22)..(23): Xaa is A or G or absent
XAPTKLSNITVQIMXXXXXXXXXIGEMSNMVVRSXG

SEQ ID NO: 28928 - protein, 42 aa, Artificial Sequence
  Non-cyclic GFR-binding peptide
  MOD_RES (5)..(42): Xaa is C or S
SSVKXQPSRVHHEPLTVLYYEYVRKKPKLEQLSNRLEEHLEX

SEQ ID NO: 28929 - protein, 37 aa, Artificial Sequence
  Non-cyclic GFR-binding peptide
  MOD_RES (1)..(2)..(36): Xaa is C or S
  MOD_RES (16)..(17)..(18)..(19)..(20): Xaa is A or G
  MOD_RES (21)..(22)..(23)..(24): Xaa is A or G or absent
XXAPTQLRSVKVAKVXXXXXXXXXKEVQVNMVVRAXG

SEQ ID NO: 28930 - protein, 34 aa, Artificial Sequence
  Non-cyclic GFR-binding peptide
  MOD_RES (3)..(4): Xaa is C or S
KPXXAPTQLRPVQVRKIDDSSNVIKKATVNMVVR

SEQ ID NO: 28931 - protein, 35 aa, Artificial Sequence
  Non-cyclic GFR-binding peptide
  MOD_RES (3)..(3): Xaa is C or S
  MOD_RES (17)..(18)..(19)..(20)..(21): Xaa is A or G
  MOD_RES (22)..(23)..(24)..(25): Xaa is A or G or absent
PTXAPTKLRPVQVRKIXXXXXXXXXKKATVNMVVR

SEQ ID NO: 28932 - protein, 39 aa, Artificial Sequence
  Non-cyclic GFR-binding peptide
  MOD_RES (6)..(7): Xaa is C or S
  MOD_RES (21)..(22)..(23)..(24)..(25): Xaa is A or G
  MOD_RES (26)..(27)..(28)..(29): Xaa is A or G or absent
SIPKAXXVPTELSNITMQIMXXXXXXXXXIGEMSEMVVE

SEQ ID NO: 28933 - protein, 35 aa, Artificial Sequence
  Non-cyclic GFR-binding peptide
  MOD_RES (3)..(4): Xaa is C or S
KPXXAPTKLRPVQVRKIDDSSNVIKKATVNMVVRS

SEQ ID NO: 28934 - protein, 33 aa, Artificial Sequence
  Non-cyclic GFR-binding peptide
  MOD_RES (2)..(3): Xaa is C or S
PXXAPTKLRPVQVRKIDDSSNVIKKATVNMVVR

SEQ ID NO: 28935 - protein, 35 aa, Artificial Sequence
  Non-cyclic GFR-binding peptide
  MOD_RES (35)..(35): Xaa is C or S
SRVHHEPLTVLYYEYVRKKPKLEQLSNRLEEHLEX

SEQ ID NO: 28936 - protein, 33 aa, Artificial Sequence
  Non-cyclic GFR-binding peptide
  MOD_RES (33)..(33): Xaa is C or S
  MOD_RES (14)..(15)..(16)..(17)..(18): Xaa is A or G
  MOD_RES (19)..(20)..(21)..(22): Xaa is A or G or absent
VPQALSNITIQIMXXXXXXXXXIGEMSMIVRSX

SEQ ID NO: 28937 - protein, 38 aa, Artificial Sequence
  Non-cyclic GFR-binding peptide
  MOD_RES (1)..(38): Xaa is C or S
  MOD_RES (17)..(18)..(19)..(20)..(21): Xaa is A or G
  MOD_RES (22)..(23)..(24)..(25): Xaa is A or G or absent
XQPSRVHHEPLPVVYYXXXXXXXXXEQLSNRLEEHLEX

SEQ ID NO: 28938 - protein, 34 aa, Artificial Sequence
  Non-cyclic GFR-binding peptide
  MOD_RES (34)..(34): Xaa is C or S
  MOD_RES (14)..(15)..(16)..(17)..(18): Xaa is A or G
  MOD_RES (19)..(20)..(21)..(22): Xaa is A or G or absent
APTKLRPVQVRKIXXXXXXXXXKKATVNMVVRSX

SEQ ID NO: 28939 - protein, 43 aa, Artificial Sequence
  Non-cyclic GFR-binding peptide
  MOD_RES (6)..(7)..(40)..(42): Xaa is C or S
  MOD_RES (21)..(22)..(23)..(24)..(25): Xaa is A or G
  MOD_RES (26)..(27)..(28)..(29): Xaa is A or G or absent
ASAAPXXVPQALRSVKIAKVXXXXXXXXXKEVQVMIVRSXKXS

SEQ ID NO: 28940 - protein, 35 aa, Artificial Sequence
  Non-cyclic GFR-binding peptide
  MOD_RES (1)..(2): Xaa is C or S
  MOD_RES (16)..(17)..(18)..(19)..(20): Xaa is A or G
  MOD_RES (21)..(22)..(23)..(24): Xaa is A or G or absent
XXVPTELSNITMQIMXXXXXXXXXIGEMSEMVVEG

SEQ ID NO: 28941 - protein, 36 aa, Artificial Sequence
  Non-cyclic GFR-binding peptide
  MOD_RES (1)..(2)..(34)..(36): Xaa is C or S
XXAPTQLRSVKVAKVDDSSNVIKEVQVNMVVRAXGX

SEQ ID NO: 28942 - protein, 42 aa, Artificial Sequence
  Non-cyclic GFR-binding peptide
  MOD_RES (6)..(7)..(39)..(41): Xaa is C or S
TVPKPXXAPTQLRSVKVAKVDDSSNVIKEVQVNMVVRAXGXH

SEQ ID NO: 28943 - protein, 31 aa, Artificial Sequence
  Non-cyclic GFR-binding peptide
  MOD_RES (1)..(1): Xaa is C or S
XAPTKLRPVQVRKIDDSSNVIKKATVNMVVR

SEQ ID NO: 28944 - protein, 33 aa, Artificial Sequence
  Non-cyclic GFR-binding peptide
  MOD_RES (31)..(33): Xaa is C or S
VPQALRSVKIAKVVGRKPKVKEVQVMIVRSXKX

SEQ ID NO: 28945 - protein, 39 aa, Artificial Sequence
  Non-cyclic GFR-binding peptide
  MOD_RES (5)..(6): Xaa is C or S
  MOD_RES (20)..(21)..(22)..(23)..(24): Xaa is A or G
  MOD_RES (25)..(26)..(27)..(28): Xaa is A or G or absent
IPKAXXVPTELRPVQMRKIXXXXXXXXXKKATVDMVVEG

SEQ ID NO: 28946 - protein, 37 aa, Artificial Sequence
  Non-cyclic GFR-binding peptide
  MOD_RES (6)..(7): Xaa is C or S
KIPKAXXVPTELRPVQMRKIDENEKVVKKATVDMVVE

SEQ ID NO: 28947 - protein, 39 aa, Artificial Sequence
  Non-cyclic GFR-binding peptide
  MOD_RES (3)..(4)..(36)..(38): Xaa is C or S
KPXXAPTQLRPVQVRKIDDSSNVIKKATVNMVVRAXGXH

SEQ ID NO: 28948 - protein, 37 aa, Artificial Sequence
  Non-cyclic GFR-binding peptide
  MOD_RES (6)..(7): Xaa is C or S
YVPKPXXAPTKLSNITVQIMDDSSNVIIGEMSNMVVR

SEQ ID NO: 28949 - protein, 31 aa, Artificial Sequence
  Non-cyclic GFR-binding peptide
  MOD_RES (31)..(31): Xaa is C or S
VSQDLRSVKIAKVIGKTPKIKEVQVMIVKSX

SEQ ID NO: 28950 - protein, 37 aa, Artificial Sequence
  Non-cyclic GFR-binding peptide
  MOD_RES (5)..(6)..(37): Xaa is C or S
SASPXXVSQDLRSVKIAKVIGKTPKIKEVQVMIVKSX

SEQ ID NO: 28951 - protein, 38 aa, Artificial Sequence
  Non-cyclic GFR-binding peptide
  MOD_RES (6)..(38): Xaa is C or S
VTKPTXAPTKLRPVQVRKIDDSSNVIKKATVNMVVRSX

SEQ ID NO: 28952 - protein, 41 aa, Artificial Sequence
  Non-cyclic GFR-binding peptide
  MOD_RES (6)..(7)..(38)..(40): Xaa is C or S
ASASPXXVSQDLRPVQIRKIIGKTPKIKKATVMIVKSXKXS

SEQ ID NO: 28953 - protein, 37 aa, Artificial Sequence
  Non-cyclic GFR-binding peptide
  MOD_RES (2)..(3)..(35)..(37): Xaa is C or S
PXXAPTKLRSVKVAKVDDSSNVIKEVQVNMVVRSXGX

SEQ ID NO: 28954 - protein, 33 aa, Artificial Sequence
  Non-cyclic GFR-binding peptide
  MOD_RES (31)..(33): Xaa is C or S
VPQDLSNITIQIMVGRTPKVIGEMSMVVKSXKX

SEQ ID NO: 28955 - protein, 35 aa, Artificial Sequence
  Non-cyclic GFR-binding peptide
  MOD_RES (1)..(1): Xaa is C or S
XQPSRVHHEPLTVLYYEYVRKKPKLEQLSNRLEEH

SEQ ID NO: 28956 - protein, 43 aa, Artificial Sequence
  Non-cyclic GFR-binding peptide
  MOD_RES (4)..(41)..(43): Xaa is C or S
  MOD_RES (20)..(21)..(22)..(23)..(24): Xaa is A or G
  MOD_RES (25)..(26)..(27)..(28): Xaa is A or G or absent
SVKXQPSRVHHEPLTVLYYXXXXXXXXXEQLSNRLEEHLEXAX

SEQ ID NO: 28957 - protein, 37 aa, Artificial Sequence
  Non-cyclic GFR-binding peptide
  MOD_RES (5)..(5): Xaa is C or S
  MOD_RES (19)..(20)..(21)..(22)..(23): Xaa is A or G
  MOD_RES (24)..(25)..(26)..(27): Xaa is A or G or absent
TKPTXAPTKLSNITVQIMXXXXXXXXXIGEMSNMVVR

SEQ ID NO: 28958 - protein, 37 aa, Artificial Sequence
  Non-cyclic GFR-binding peptide
  MOD_RES (2)..(2): Xaa is C or S
  MOD_RES (18)..(19)..(20)..(21)..(22): Xaa is A or G
  MOD_RES (23)..(24)..(25)..(26): Xaa is A or G or absent
KXQPSRVHHEPLTVLYYXXXXXXXXXEQLSNRLEEHL

SEQ ID NO: 28959 - protein, 35 aa, Artificial Sequence
  Non-cyclic GFR-binding peptide
  MOD_RES (1)..(34): Xaa is C or S
  MOD_RES (15)..(16)..(17)..(18)..(19): Xaa is A or G
  MOD_RES (20)..(21)..(22)..(23): Xaa is A or G or absent
XVPQALRPVQIRKIXXXXXXXXXKKATVMIVRSXK

SEQ ID NO: 28960 - protein, 38 aa, Artificial Sequence
  Non-cyclic GFR-binding peptide
  MOD_RES (3)..(37): Xaa is C or S
  MOD_RES (17)..(18)..(19)..(20)..(21): Xaa is A or G
  MOD_RES (22)..(23)..(24)..(25): Xaa is A or G or absent
PTXAPTKLRSVKVAKVXXXXXXXXXKEVQVNMVVRSXG

SEQ ID NO: 28961 - protein, 40 aa, Artificial Sequence
  Non-cyclic GFR-binding peptide
  MOD_RES (2)..(3)..(37)..(39): Xaa is C or S
  MOD_RES (17)..(18)..(19)..(20)..(21): Xaa is A or G
  MOD_RES (22)..(23)..(24)..(25): Xaa is A or G or absent
PXXAPTKLSNITVQIMXXXXXXXXXIGEMSNMVVRSXGXH

SEQ ID NO: 28962 - protein, 31 aa, Artificial Sequence
  Non-cyclic GFR-binding peptide
  MOD_RES (1)..(1): Xaa is C or S
XVPQALSNITIQIMVGRKPKVIGEMSMIVRS

SEQ ID NO: 28963 - protein, 43 aa, Artificial Sequence
  Non-cyclic GFR-binding peptide
  MOD_RES (5)..(6)..(40)..(42): Xaa is C or S
  MOD_RES (20)..(21)..(22)..(23)..(24): Xaa is A or G
  MOD_RES (25)..(26)..(27)..(28): Xaa is A or G or absent
VPKPXXAPTKLSNITVQIMXXXXXXXXXIGEMSNMVVRSXGXH

SEQ ID NO: 28964 - protein, 40 aa, Artificial Sequence
  Non-cyclic GFR-binding peptide
  MOD_RES (3)..(4)..(37)..(39): Xaa is C or S
  MOD_RES (18)..(19)..(20)..(21)..(22): Xaa is A or G
  MOD_RES (23)..(24)..(25)..(26): Xaa is A or G or absent
SPXXVPQDLSNITIQIMXXXXXXXXXIGEMSMVVKSXKXS

SEQ ID NO: 28965 - protein, 38 aa, Artificial Sequence
  Non-cyclic GFR-binding peptide
  MOD_RES (4)..(5)..(38): Xaa is C or S
  MOD_RES (19)..(20)..(21)..(22)..(23): Xaa is A or G
  MOD_RES (24)..(25)..(26)..(27): Xaa is A or G or absent
ASPXXVSQDLRSVKIAKVXXXXXXXXXKEVQVMIVKSX

SEQ ID NO: 28966 - protein, 33 aa, Artificial Sequence
  Non-cyclic GFR-binding peptide
  MOD_RES (1)..(2)..(33): Xaa is C or S
XXVPQDLRPVQIRKIVGRTPKVKKATVMVVKSX

SEQ ID NO: 28967 - protein, 32 aa, Artificial Sequence
  Non-cyclic GFR-binding peptide
  MOD_RES (31)..(31): Xaa is C or S
VPQDLRPVQIRKIVGRTPKVKKATVMVVKSXK

SEQ ID NO: 28968 - protein, 39 aa, Artificial Sequence
  Non-cyclic GFR-binding peptide
  MOD_RES (2)..(3)..(37)..(39): Xaa is C or S
  MOD_RES (17)..(18)..(19)..(20)..(21): Xaa is A or G
  MOD_RES (22)..(23)..(24)..(25): Xaa is A or G or absent
AXXVPTELRSVKMAKVXXXXXXXXXKEVQVDMVVEGXGX

SEQ ID NO: 28969 - protein, 39 aa, Artificial Sequence
  Non-cyclic GFR-binding peptide
  MOD_RES (3)..(3): Xaa is C or S
VKXQPSRVHHEPLTVLYYEYVRKKPKLEQLSNRLEEHLE

SEQ ID NO: 28970 - protein, 40 aa, Artificial Sequence
  Non-cyclic GFR-binding peptide
  MOD_RES (6)..(7)..(39): Xaa is C or S
TVPKPXXAPTQLRPVQVRKIDDSSNVIKKATVNMVVRAXG

SEQ ID NO: 28971 - protein, 37 aa, Artificial Sequence
  Non-cyclic GFR-binding peptide
  MOD_RES (3)..(4)..(35)..(37): Xaa is C or S
APXXVPQALRSVKIAKVVGRKPKVKEVQVMIVRSXKX

SEQ ID NO: 28972 - protein, 37 aa, Artificial Sequence
  Non-cyclic GFR-binding peptide
  MOD_RES (5)..(37): Xaa is C or S
TKPTXAPTKLSNITVQIMDDSSNVIIGEMSNMVVRSX

SEQ ID NO: 28973 - protein, 30 aa, Artificial Sequence
  Non-cyclic GFR-binding peptide
VPTELRPVQMRKIDENEKVVKKATVDMVVE

SEQ ID NO: 28974 - protein, 38 aa, Artificial Sequence
  Non-cyclic GFR-binding peptide
  MOD_RES (35)..(37): Xaa is C or S
SRVHHEPLPVVYYEYVRKKPKLEQLSNRLEEHLEXAXA

SEQ ID NO: 28975 - protein, 42 aa, Artificial Sequence
  Non-cyclic GFR-binding peptide
  MOD_RES (5)..(42): Xaa is C or S
  MOD_RES (21)..(22)..(23)..(24)..(25): Xaa is A or G
  MOD_RES (26)..(27)..(28)..(29): Xaa is A or G or absent
RNVQXRPTQVQLEPLTVLYYXXXXXXXXXEQLSNTLEDHLAX

SEQ ID NO: 28976 - protein, 40 aa, Artificial Sequence
  Non-cyclic GFR-binding peptide
  MOD_RES (3)..(4)..(37)..(39): Xaa is C or S
  MOD_RES (18)..(19)..(20)..(21)..(22): Xaa is A or G
  MOD_RES (23)..(24)..(25)..(26): Xaa is A or G or absent
SPXXVPQDLRPVQIRKIXXXXXXXXXKKATVMVVKSXKXS

SEQ ID NO: 28977 - protein, 34 aa, Artificial Sequence
  Non-cyclic GFR-binding peptide
  MOD_RES (1)..(2)..(34): Xaa is C or S
XXAPTKLSNITVQIMDDSSNVIIGEMSNMVVRSX

SEQ ID NO: 28978 - protein, 39 aa, Artificial Sequence
  Non-cyclic GFR-binding peptide
  MOD_RES (4)..(5)..(39): Xaa is C or S
  MOD_RES (19)..(20)..(21)..(22)..(23): Xaa is A or G
  MOD_RES (24)..(25)..(26)..(27): Xaa is A or G or absent
PKPXXAPTQLSNITVQIMXXXXXXXXXIGEMSNMVVRAX

SEQ ID NO: 28979 - protein, 39 aa, Artificial Sequence
  Non-cyclic GFR-binding peptide
  MOD_RES (5)..(6)..(39): Xaa is C or S
  MOD_RES (20)..(21)..(22)..(23)..(24): Xaa is A or G
  MOD_RES (25)..(26)..(27)..(28): Xaa is A or G or absent
SASPXXVSQDLRPVQIRKIXXXXXXXXXKKATVMIVKSX

SEQ ID NO: 28980 - protein, 40 aa, Artificial Sequence
  Non-cyclic GFR-binding peptide
  MOD_RES (1)..(38)..(40): Xaa is C or S
XRPTQVQLEPLTVLYYEIVRKKPIFEQLSNTLEDHLAXKX

SEQ ID NO: 28981 - protein, 37 aa, Artificial Sequence
  Non-cyclic GFR-binding peptide
  MOD_RES (6)..(7): Xaa is C or S
TVPKPXXAPTQLSNITVQIMDDSSNVIIGEMSNMVVR

SEQ ID NO: 28982 - protein, 36 aa, Artificial Sequence
  Non-cyclic GFR-binding peptide
  MOD_RES (36)..(36): Xaa is C or S
PTQVQLEPLTVLYYEIVRKKPIFEQLSNTLEDHLAX

SEQ ID NO: 28983 - protein, 32 aa, Artificial Sequence
  Non-cyclic GFR-binding peptide
  MOD_RES (1)..(32): Xaa is C or S
XVPQDLRSVKIAKVVGRTPKVKEVQVMVVKSX

SEQ ID NO: 28984 - protein, 33 aa, Artificial Sequence
  Non-cyclic GFR-binding peptide
  MOD_RES (14)..(15)..(16)..(17)..(18): Xaa is A or G
  MOD_RES (19)..(20)..(21)..(22): Xaa is A or G or absent
VPTELSNITMQIMXXXXXXXXXIGEMSDMVVEG

SEQ ID NO: 28985 - protein, 37 aa, Artificial Sequence
  Non-cyclic GFR-binding peptide
  MOD_RES (3)..(4)..(36): Xaa is C or S
KAXXVPTELRPVQMRKIDEYDKVVKKATVEMVVEGXG

SEQ ID NO: 28986 - protein, 36 aa, Artificial Sequence
  Non-cyclic GFR-binding peptide
  MOD_RES (3)..(3): Xaa is C or S
  MOD_RES (17)..(18)..(19)..(20)..(21): Xaa is A or G
  MOD_RES (22)..(23)..(24)..(25): Xaa is A or G or absent
LEXVPTEEEPLTMLYYXXXXXXXXXEQLSNFLQHNK

SEQ ID NO: 28987 - protein, 38 aa, Artificial Sequence
  Non-cyclic GFR-binding peptide
  MOD_RES (3)..(4)..(37): Xaa is C or S
  MOD_RES (18)..(19)..(20)..(21)..(22): Xaa is A or G
  MOD_RES (23)..(24)..(25)..(26): Xaa is A or G or absent
APXXVPQALRPVQIRKIXXXXXXXXXKKATVMIVRSXK

SEQ ID NO: 28988 - protein, 39 aa, Artificial Sequence
  Non-cyclic GFR-binding peptide
  MOD_RES (4)..(38): Xaa is C or S
  MOD_RES (18)..(19)..(20)..(21)..(22): Xaa is A or G
  MOD_RES (23)..(24)..(25)..(26): Xaa is A or G or absent
KPTXAPTKLSNITVQIMXXXXXXXXXIGEMSNMVVRSXG

SEQ ID NO: 28989 - protein, 38 aa, Artificial Sequence
  Non-cyclic GFR-binding peptide
  MOD_RES (3)..(37): Xaa is C or S
LEXVPTEEEPLTMLYYRIKPHQGQHEQLSNFLQHNKXE

SEQ ID NO: 28990 - protein, 39 aa, Artificial Sequence
  Non-cyclic GFR-binding peptide
  MOD_RES (1)..(2)..(36)..(38): Xaa is C or S
  MOD_RES (16)..(17)..(18)..(19)..(20): Xaa is A or G
  MOD_RES (21)..(22)..(23)..(24): Xaa is A or G or absent
XXAPTKLRPVQVRKIXXXXXXXXXKKATVNMVVRSXGXH

SEQ ID NO: 28991 - protein, 35 aa, Artificial Sequence
  Non-cyclic GFR-binding peptide
QPSRVHHEPLTVLYYEYVRKKPKLEQLSNRLEEHL

SEQ ID NO: 28992 - protein, 43 aa, Artificial Sequence
  Non-cyclic GFR-binding peptide
  MOD_RES (5)..(6)..(40)..(42): Xaa is C or S
  MOD_RES (20)..(21)..(22)..(23)..(24): Xaa is A or G
  MOD_RES (25)..(26)..(27)..(28): Xaa is A or G or absent
IPKAXXVPTELRPVQMRKIXXXXXXXXXKKATVDMVVEGXGXR

SEQ ID NO: 28993 - protein, 39 aa, Artificial Sequence
  Non-cyclic GFR-binding peptide
  MOD_RES (5)..(6)..(37)..(39): Xaa is C or S
SASPXXVSQDLRSVKIAKVIGKTPKIKEVQVMIVKSXKX

SEQ ID NO: 28994 - protein, 41 aa, Artificial Sequence
  Non-cyclic GFR-binding peptide
  MOD_RES (5)..(39)..(41): Xaa is C or S
EGLEXVPTEEEPLTMLYYRIKPHQGQHEQLSNFLQHNKXEX

SEQ ID NO: 28995 - protein, 35 aa, Artificial Sequence
  Non-cyclic GFR-binding peptide
  MOD_RES (3)..(4): Xaa is C or S
KAXXVPTELRSVKMAKVDENEKVVKEVQVDMVVEG

SEQ ID NO: 28996 - protein, 43 aa, Artificial Sequence
  Non-cyclic GFR-binding peptide
  MOD_RES (3)..(40)..(42): Xaa is C or S
VQXRPTQVQLEPLTVLYYEIVRKKPIFEQLSNTLEDHLAXKXE

SEQ ID NO: 28997 - protein, 32 aa, Artificial Sequence
  Non-cyclic GFR-binding peptide
  MOD_RES (14)..(15)..(16)..(17)..(18): Xaa is A or G
  MOD_RES (19)..(20)..(21)..(22): Xaa is A or G or absent
VPTELRPVQMRKIXXXXXXXXXKKATVDMVVE

SEQ ID NO: 28998 - protein, 36 aa, Artificial Sequence
  Non-cyclic GFR-binding peptide
  MOD_RES (1)..(35): Xaa is C or S
XVPTEEEPLPMVYYRIKPHQGQHEQLSNFLQHNKXE

SEQ ID NO: 28999 - protein, 40 aa, Artificial Sequence
  Non-cyclic GFR-binding peptide
  MOD_RES (5)..(6)..(40): Xaa is C or S
  MOD_RES (20)..(21)..(22)..(23)..(24): Xaa is A or G
  MOD_RES (25)..(26)..(27)..(28): Xaa is A or G or absent
IPKAXXVPTELRPVQMRKIXXXXXXXXXKKATVDMVVEGX

SEQ ID NO: 29000 - protein, 36 aa, Artificial Sequence
  Non-cyclic GFR-binding peptide
  MOD_RES (4)..(4): Xaa is C or S
GLEXVPTEEEPLPMVYYRIKPHQGQHEQLSNFLQHN

SEQ ID NO: 29001 - protein, 39 aa, Artificial Sequence
  Non-cyclic GFR-binding peptide
  MOD_RES (6)..(7): Xaa is C or S
  MOD_RES (21)..(22)..(23)..(24)..(25): Xaa is A or G
  MOD_RES (26)..(27)..(28)..(29): Xaa is A or G or absent
ASASPXXVSQDLRSVKIAKVXXXXXXXXXKEVQVMIVKS

SEQ ID NO: 29002 - protein, 39 aa, Artificial Sequence
  Non-cyclic GFR-binding peptide
  MOD_RES (5)..(6)..(38): Xaa is C or S
IPKAXXVPTELSNITMQIMDEYDKVVIGEMSEMVVEGXG

SEQ ID NO: 29003 - protein, 38 aa, Artificial Sequence
  Non-cyclic GFR-binding peptide
  MOD_RES (5)..(6): Xaa is C or S
  MOD_RES (20)..(21)..(22)..(23)..(24): Xaa is A or G
  MOD_RES (25)..(26)..(27)..(28): Xaa is A or G or absent
SASPXXVSQDLRSVKIAKVXXXXXXXXXKEVQVMIVKS

SEQ ID NO: 29004 - protein, 37 aa, Artificial Sequence
  Non-cyclic GFR-binding peptide
  MOD_RES (36)..(36): Xaa is C or S
PTQVQLEPLPVVYYEIVRKKPIFEQLSNTLEDHLAXK

SEQ ID NO: 29005 - protein, 38 aa, Artificial Sequence
  Non-cyclic GFR-binding peptide
  MOD_RES (3)..(4)..(35)..(37): Xaa is C or S
SPXXVSQDLRSVKIAKVIGKTPKIKEVQVMIVKSXKXS

SEQ ID NO: 29006 - protein, 30 aa, Artificial Sequence; identical to SEQ ID NO: 1100
  Non-cyclic GFR-binding peptide

SEQ ID NO: 29007 - protein, 39 aa, Artificial Sequence
  Non-cyclic GFR-binding peptide
  MOD_RES (1)..(38): Xaa is C or S
  MOD_RES (17)..(18)..(19)..(20)..(21): Xaa is A or G
  MOD_RES (22)..(23)..(24)..(25): Xaa is A or G or absent
XRPTQVQLEPLPVVYYXXXXXXXXXEQLSNTLEDHLAXK

SEQ ID NO: 29008 - protein, 38 aa, Artificial Sequence
  Non-cyclic GFR-binding peptide
  MOD_RES (4)..(36)..(38): Xaa is C or S
KPTXAPTKLSNITVQIMDDSSNVIIGEMSNMVVRSXGX

SEQ ID NO: 29009 - protein, 36 aa, Artificial Sequence
  Non-cyclic GFR-binding peptide
  MOD_RES (35)..(35): Xaa is C or S
SRVHHEPLPVVYYEYVRKKPKLEQLSNRLEEHLEXA

SEQ ID NO: 29010 - protein, 38 aa, Artificial Sequence
  Non-cyclic GFR-binding peptide
  MOD_RES (5)..(6)..(38): Xaa is C or S
IPKAXXVPTELSNITMQIMDEYDKVVIGEMSEMVVEGX

SEQ ID NO: 29011 - protein, 40 aa, Artificial Sequence
  Non-cyclic GFR-binding peptide
  MOD_RES (6)..(7): Xaa is C or S
  MOD_RES (21)..(22)..(23)..(24)..(25): Xaa is A or G
  MOD_RES (26)..(27)..(28)..(29): Xaa is A or G or absent
YVPKPXXAPTKLSNITVQIMXXXXXXXXXIGEMSNMVVRS

SEQ ID NO: 29012 - protein, 40 aa, Artificial Sequence
  Non-cyclic GFR-binding peptide
  MOD_RES (2)..(3)..(37)..(39): Xaa is C or S
  MOD_RES (17)..(18)..(19)..(20)..(21): Xaa is A or G
  MOD_RES (22)..(23)..(24)..(25): Xaa is A or G or absent
PXXAPTQLRPVQVRKIXXXXXXXXXKKATVNMVVRAXGXH

SEQ ID NO: 29013 - protein, 32 aa, Artificial Sequence
  Non-cyclic GFR-binding peptide
TQVQLEPLPVVYYEIVRKKPIFEQLSNTLEDH

SEQ ID NO: 29014 - protein, 36 aa, Artificial Sequence
  Non-cyclic GFR-binding peptide
  MOD_RES (1)..(34)..(36): Xaa is C or S
  MOD_RES (15)..(16)..(17)..(18)..(19): Xaa is A or G
  MOD_RES (20)..(21)..(22)..(23): Xaa is A or G or absent
XVPQDLSNITIQIMXXXXXXXXXIGEMSMVVKSXKX

SEQ ID NO: 29015 - protein, 38 aa, Artificial Sequence
  Non-cyclic GFR-binding peptide
  MOD_RES (5)..(6): Xaa is C or S
  MOD_RES (20)..(21)..(22)..(23)..(24): Xaa is A or G
  MOD_RES (25)..(26)..(27)..(28): Xaa is A or G or absent
SASPXXVSQDLRPVQIRKIXXXXXXXXXKKATVMIVKS

SEQ ID NO: 29016 - protein, 32 aa, Artificial Sequence
  Non-cyclic GFR-binding peptide
  MOD_RES (1)..(2): Xaa is C or S
XXAPTQLRSVKVAKVDDSSNVIKEVQVNMVVR

SEQ ID NO: 29017 - protein, 41 aa, Artificial Sequence
  Non-cyclic GFR-binding peptide
  MOD_RES (4)..(41): Xaa is C or S
SVKXQPSRVHHEPLTVLYYEYVRKKPKLEQLSNRLEEHLEX

SEQ ID NO: 29018 - protein, 35 aa, Artificial Sequence
  Non-cyclic GFR-binding peptide
  MOD_RES (4)..(5): Xaa is C or S
ASPXXVSQDLRSVKIAKVIGKTPKIKEVQVMIVKS

SEQ ID NO: 29019 - protein, 33 aa, Artificial Sequence
  Non-cyclic GFR-binding peptide
  MOD_RES (1)..(2): Xaa is C or S
XXAPTKLRSVKVAKVDDSSNVIKEVQVNMVVRS

SEQ ID NO: 29020 - protein, 41 aa, Artificial Sequence
  Non-cyclic GFR-binding peptide
  MOD_RES (6)..(40): Xaa is C or S
DEGLEXVPTEEEPLPMVYYRIKPHQGQHEQLSNFLQHNKXE

SEQ ID NO: 29021 - protein, 34 aa, Artificial Sequence
  Non-cyclic GFR-binding peptide
  MOD_RES (1)..(33): Xaa is C or S
XAPTQLSNITVQIMDDSSNVIIGEMSNMVVRAXG

SEQ ID NO: 29022 - protein, 36 aa, Artificial Sequence
  Non-cyclic GFR-binding peptide
  MOD_RES (2)..(3)..(36): Xaa is C or S
  MOD_RES (17)..(18)..(19)..(20)..(21): Xaa is A or G
  MOD_RES (22)..(23)..(24)..(25): Xaa is A or G or absent
PXXVPQDLRSVKIAKVXXXXXXXXXKEVQVMVVKSX

SEQ ID NO: 29023 - protein, 38 aa, Artificial Sequence
  Non-cyclic GFR-binding peptide
  MOD_RES (6)..(7)..(38): Xaa is C or S
ASASPXXVPQDLRSVKIAKVVGRTPKVKEVQVMVVKSX

SEQ ID NO: 29024 - protein, 41 aa, Artificial Sequence
  Non-cyclic GFR-binding peptide
  MOD_RES (6)..(7)..(41): Xaa is C or S
  MOD_RES (21)..(22)..(23)..(24)..(25): Xaa is A or G
  MOD_RES (26)..(27)..(28)..(29): Xaa is A or G or absent
YVPKPXXAPTKLRSVKVAKVXXXXXXXXXKEVQVNMVVRSX

SEQ ID NO: 29025 - protein, 35 aa, Artificial Sequence
  Non-cyclic GFR-binding peptide
  MOD_RES (1)..(2)..(34): Xaa is C or S
XXVPTELRSVKMAKVDENEKVVKEVQVDMVVEGXG

SEQ ID NO: 29026 - protein, 39 aa, Artificial Sequence
  Non-cyclic GFR-binding peptide
  MOD_RES (5)..(6): Xaa is C or S
  MOD_RES (20)..(21)..(22)..(23)..(24): Xaa is A or G
  MOD_RES (25)..(26)..(27)..(28): Xaa is A or G or absent
VPKPXXAPTQLRPVQVRKIXXXXXXXXXKKATVNMVVRA

SEQ ID NO: 29027 - protein, 40 aa, Artificial Sequence
  Non-cyclic GFR-binding peptide
  MOD_RES (5)..(6)..(40): Xaa is C or S
  MOD_RES (20)..(21)..(22)..(23)..(24): Xaa is A or G
  MOD_RES (25)..(26)..(27)..(28): Xaa is A or G or absent
IPKAXXVPTELSNITMQIMXXXXXXXXXIGEMSEMVVEGX

SEQ ID NO: 29028 - protein, 34 aa, Artificial Sequence
  Non-cyclic GFR-binding peptide
  MOD_RES (31)..(33): Xaa is C or S
VPQALRPVQIRKIVGRKPKVKKATVMIVRSXKXS

SEQ ID NO: 29029 - protein, 38 aa, Artificial Sequence
  Non-cyclic GFR-binding peptide
  MOD_RES (5)..(6): Xaa is C or S
  MOD_RES (20)..(21)..(22)..(23)..(24): Xaa is A or G
  MOD_RES (25)..(26)..(27)..(28): Xaa is A or G or absent
IPKAXXVPTELRSVKMAKVXXXXXXXXXKEVQVDMVVE

SEQ ID NO: 29030 - protein, 42 aa, Artificial Sequence
  Non-cyclic GFR-binding peptide
  MOD_RES (4)..(41): Xaa is C or S
  MOD_RES (20)..(21)..(22)..(23)..(24): Xaa is A or G
  MOD_RES (25)..(26)..(27)..(28): Xaa is A or G or absent
NVQXRPTQVQLEPLTVLYYXXXXXXXXXEQLSNTLEDHLAXK

SEQ ID NO: 29031 - protein, 34 aa, Artificial Sequence
  Non-cyclic GFR-binding peptide
  MOD_RES (1)..(34): Xaa is C or S
  MOD_RES (15)..(16)..(17)..(18)..(19): Xaa is A or G
  MOD_RES (20)..(21)..(22)..(23): Xaa is A or G or absent
XVPQALRSVKIAKVXXXXXXXXXKEVQVMIVRSX

SEQ ID NO: 29032 - protein, 33 aa, Artificial Sequence
  Non-cyclic GFR-binding peptide
  MOD_RES (2)..(3): Xaa is C or S
AXXVPTELRPVQMRKIDEYDKVVKKATVEMVVE

SEQ ID NO: 29033 - protein, 35 aa, Artificial Sequence
  Non-cyclic GFR-binding peptide
  MOD_RES (4)..(5): Xaa is C or S
PKAXXVPTELRSVKMAKVDEYDKVVKEVQVEMVVE

SEQ ID NO: 29034 - protein, 33 aa, Artificial Sequence
  Non-cyclic GFR-binding peptide
  MOD_RES (1)..(2): Xaa is C or S
XXVPTELRSVKMAKVDENEKVVKEVQVDMVVEG

SEQ ID NO: 29035 - protein, 40 aa, Artificial Sequence
  Non-cyclic GFR-binding peptide
  MOD_RES (3)..(4)..(38)..(40): Xaa is C or S
  MOD_RES (18)..(19)..(20)..(21)..(22): Xaa is A or G
  MOD_RES (23)..(24)..(25)..(26): Xaa is A or G or absent
KAXXVPTELRSVKMAKVXXXXXXXXXKEVQVEMVVEGXGX

SEQ ID NO: 29036 - protein, 33 aa, Artificial Sequence
  Non-cyclic GFR-binding peptide
  MOD_RES (31)..(33): Xaa is C or S
VSQDLSNITIQIMIGKTPKIIGEMSMIVKSXKX

SEQ ID NO: 29037 - protein, 36 aa, Artificial Sequence
  Non-cyclic GFR-binding peptide
  MOD_RES (1)..(34)..(36): Xaa is C or S
  MOD_RES (15)..(16)..(17)..(18)..(19): Xaa is A or G
  MOD_RES (20)..(21)..(22)..(23): Xaa is A or G or absent
XVSQDLRSVKIAKVXXXXXXXXXKEVQVMIVKSXKX

SEQ ID NO: 29038 - protein, 40 aa, Artificial Sequence
  Non-cyclic GFR-binding peptide
  MOD_RES (6)..(7)..(38)..(40): Xaa is C or S
ASASPXXVSQDLRPVQIRKIIGKTPKIKKATVMIVKSXKX

SEQ ID NO: 29039 - protein, 41 aa, Artificial Sequence
  Non-cyclic GFR-binding peptide
  MOD_RES (5)..(6)..(38)..(40): Xaa is C or S
VPKPXXAPTQLRSVKVAKVDDSSNVIKEVQVNMVVRAXGXH

SEQ ID NO: 29040 - protein, 39 aa, Artificial Sequence
  Non-cyclic GFR-binding peptide
  MOD_RES (37)..(39): Xaa is C or S
RPTQVQLEPLPVVYYEIVRKKPIFEQLSNTLEDHLAXKX

SEQ ID NO: 29041 - protein, 37 aa, Artificial Sequence
  Non-cyclic GFR-binding peptide
  MOD_RES (35)..(37): Xaa is C or S
  MOD_RES (14)..(15)..(16)..(17)..(18): Xaa is A or G
  MOD_RES (19)..(20)..(21)..(22): Xaa is A or G or absent
SRVHHEPLTVLYYXXXXXXXXXEQLSNRLEEHLEXAX

SEQ ID NO: 29042 - protein, 34 aa, Artificial Sequence
  Non-cyclic GFR-binding peptide
  MOD_RES (1)..(2): Xaa is C or S
  MOD_RES (16)..(17)..(18)..(19)..(20): Xaa is A or G
  MOD_RES (21)..(22)..(23)..(24): Xaa is A or G or absent
XXAPTKLRPVQVRKIXXXXXXXXXKKATVNMVVR

SEQ ID NO: 29043 - protein, 35 aa, Artificial Sequence
  Non-cyclic GFR-binding peptide
  MOD_RES (1)..(33)..(35): Xaa is C or S
XAPTKLSNITVQIMDDSSNVIIGEMSNMVVRSXGX

SEQ ID NO: 29044 - protein, 39 aa, Artificial Sequence
  Non-cyclic GFR-binding peptide
  MOD_RES (7)..(7): Xaa is C or S
  MOD_RES (21)..(22)..(23)..(24)..(25): Xaa is A or G
  MOD_RES (26)..(27)..(28)..(29): Xaa is A or G or absent
NDEGLEXVPTEEEPLTMLYYXXXXXXXXXEQLSNFLQHN

SEQ ID NO: 29045 - protein, 35 aa, Artificial Sequence
  Non-cyclic GFR-binding peptide
  MOD_RES (1)..(1): Xaa is C or S
XQPSRVHHEPLPVVYYEYVRKKPKLEQLSNRLEEH

SEQ ID NO: 29046 - protein, 38 aa, Artificial Sequence
  Non-cyclic GFR-binding peptide
  MOD_RES (2)..(3)..(35)..(37): Xaa is C or S
AXXVPTELSNITMQIMDENEKVVIGEMSDMVVEGXGXR

SEQ ID NO: 29047 - protein, 39 aa, Artificial Sequence
  Non-cyclic GFR-binding peptide
  MOD_RES (3)..(3): Xaa is C or S
  MOD_RES (19)..(20)..(21)..(22)..(23): Xaa is A or G
  MOD_RES (24)..(25)..(26)..(27): Xaa is A or G or absent
VQXRPTQVQLEPLPVVYYXXXXXXXXXEQLSNTLEDHLA

SEQ ID NO: 29048 - protein, 38 aa, Artificial Sequence
  Non-cyclic GFR-binding peptide
  MOD_RES (4)..(5)..(37): Xaa is C or S
PKAXXVPTELRPVQMRKIDEYDKVVKKATVEMVVEGXG

SEQ ID NO: 29049 - protein, 42 aa, Artificial Sequence
  Non-cyclic GFR-binding peptide
  MOD_RES (6)..(7)..(39)..(41): Xaa is C or S
TVPKPXXAPTQLSNITVQIMDDSSNVIIGEMSNMVVRAXGXH

SEQ ID NO: 29050 - protein, 38 aa, Artificial Sequence
  Non-cyclic GFR-binding peptide
  MOD_RES (1)..(35)..(37): Xaa is C or S
  MOD_RES (15)..(16)..(17)..(18)..(19): Xaa is A or G
  MOD_RES (20)..(21)..(22)..(23): Xaa is A or G or absent
XAPTQLRPVQVRKIXXXXXXXXXKKATVNMVVRAXGXH

SEQ ID NO: 29051 - protein, 36 aa, Artificial Sequence
  Non-cyclic GFR-binding peptide
  MOD_RES (1)..(33)..(35): Xaa is C or S
XAPTQLSNITVQIMDDSSNVIIGEMSNMVVRAXGXH

SEQ ID NO: 29052 - protein, 37 aa, Artificial Sequence
  Non-cyclic GFR-binding peptide
  MOD_RES (2)..(3)..(35)..(37): Xaa is C or S
PXXAPTQLSNITVQIMDDSSNVIIGEMSNMVVRAXGX

SEQ ID NO: 29053 - protein, 40 aa, Artificial Sequence
  Non-cyclic GFR-binding peptide
  MOD_RES (6)..(7): Xaa is C or S
  MOD_RES (21)..(22)..(23)..(24)..(25): Xaa is A or G
  MOD_RES (26)..(27)..(28)..(29): Xaa is A or G or absent
YVPKPXXAPTKLRPVQVRKIXXXXXXXXXKKATVNMVVRS

SEQ ID NO: 29054 - protein, 34 aa, Artificial Sequence
  Non-cyclic GFR-binding peptide
  MOD_RES (15)..(16)..(17)..(18)..(19): Xaa is A or G
  MOD_RES (20)..(21)..(22)..(23): Xaa is A or G or absent
PTQVQLEPLTVLYYXXXXXXXXXEQLSNTLEDHL

SEQ ID NO: 29055 - protein, 38 aa, Artificial Sequence
  Non-cyclic GFR-binding peptide
  MOD_RES (1)..(35)..(37): Xaa is C or S
  MOD_RES (15)..(16)..(17)..(18)..(19): Xaa is A or G
  MOD_RES (20)..(21)..(22)..(23): Xaa is A or G or absent
XAPTQLRSVKVAKVXXXXXXXXXKEVQVNMVVRAXGXH

SEQ ID NO: 29056 - protein, 36 aa, Artificial Sequence
  Non-cyclic GFR-binding peptide
  MOD_RES (1)..(1): Xaa is C or S
XQPSRVHHEPLTVLYYEYVRKKPKLEQLSNRLEEHL

SEQ ID NO: 29057 - protein, 35 aa, Artificial Sequence
  Non-cyclic GFR-binding peptide
  MOD_RES (33)..(35): Xaa is C or S
  MOD_RES (14)..(15)..(16)..(17)..(18): Xaa is A or G
  MOD_RES (19)..(20)..(21)..(22): Xaa is A or G or absent
VPQDLSNITIQIMXXXXXXXXXIGEMSMVVKSXKX

SEQ ID NO: 29058 - protein, 35 aa, Artificial Sequence
  Non-cyclic GFR-binding peptide
  MOD_RES (35)..(35): Xaa is C or S
  MOD_RES (14)..(15)..(16)..(17)..(18): Xaa is A or G
  MOD_RES (19)..(20)..(21)..(22): Xaa is A or G or absent
SRVHHEPLPVVYYXXXXXXXXXEQLSNRLEEHLEX

SEQ ID NO: 29059 - protein, 37 aa, Artificial Sequence
  Non-cyclic GFR-binding peptide
  MOD_RES (1)..(35)..(37): Xaa is C or S
  MOD_RES (15)..(16)..(17)..(18)..(19): Xaa is A or G
  MOD_RES (20)..(21)..(22)..(23): Xaa is A or G or absent
XAPTQLRPVQVRKIXXXXXXXXXKKATVNMVVRAXGX

SEQ ID NO: 29060 - protein, 41 aa, Artificial Sequence
  Non-cyclic GFR-binding peptide
  MOD_RES (5)..(6)..(40): Xaa is C or S
  MOD_RES (20)..(21)..(22)..(23)..(24): Xaa is A or G
  MOD_RES (25)..(26)..(27)..(28): Xaa is A or G or absent
IPKAXXVPTELRSVKMAKVXXXXXXXXXKEVQVEMVVEGXG

SEQ ID NO: 29061 - protein, 38 aa, Artificial Sequence
  Non-cyclic GFR-binding peptide
  MOD_RES (35)..(37): Xaa is C or S
TQVQLEPLPVVYYEIVRKKPIFEQLSNTLEDHLAXKXE

SEQ ID NO: 29062 - protein, 38 aa, Artificial Sequence
  Non-cyclic GFR-binding peptide
  MOD_RES (4)..(5): Xaa is C or S
  MOD_RES (19)..(20)..(21)..(22)..(23): Xaa is A or G
  MOD_RES (24)..(25)..(26)..(27): Xaa is A or G or absent
PKAXXVPTELRPVQMRKIXXXXXXXXXKKATVDMVVEG

SEQ ID NO: 29063 - protein, 38 aa, Artificial Sequence
  Non-cyclic GFR-binding peptide
  MOD_RES (5)..(6)..(37): Xaa is C or S
SAAPXXVPQALRSVKIAKVVGRKPKVKEVQVMIVRSXK

SEQ ID NO: 29064 - protein, 31 aa, Artificial Sequence
  Non-cyclic GFR-binding peptide
  MOD_RES (1)..(1): Xaa is C or S
XVPTELRPVQMRKIDEYDKVVKKATVEMVVE

SEQ ID NO: 29065 - protein, 35 aa, Artificial Sequence
  Non-cyclic GFR-binding peptide
  MOD_RES (2)..(3): Xaa is C or S
  MOD_RES (17)..(18)..(19)..(20)..(21): Xaa is A or G
  MOD_RES (22)..(23)..(24)..(25): Xaa is A or G or absent
PXXVPQALRPVQIRKIXXXXXXXXXKKATVMIVRS

SEQ ID NO: 29066 - protein, 37 aa, Artificial Sequence
  Non-cyclic GFR-binding peptide
  MOD_RES (1)..(2)..(34)..(36): Xaa is C or S
XXVPTELSNITMQIMDENEKVVIGEMSDMVVEGXGXR

SEQ ID NO: 29067 - protein, 32 aa, Artificial Sequence
  Non-cyclic GFR-binding peptide
  MOD_RES (1)..(1): Xaa is C or S
XAPTQLRSVKVAKVDDSSNVIKEVQVNMVVRA

SEQ ID NO: 29068 - protein, 39 aa, Artificial Sequence
  Non-cyclic GFR-binding peptide
  MOD_RES (1)..(38): Xaa is C or S
  MOD_RES (17)..(18)..(19)..(20)..(21): Xaa is A or G
  MOD_RES (22)..(23)..(24)..(25): Xaa is A or G or absent
XRPTQVQLEPLTVLYYXXXXXXXXXEQLSNTLEDHLAXK

SEQ ID NO: 29069 - protein, 38 aa, Artificial Sequence
  Non-cyclic GFR-binding peptide
  MOD_RES (37)..(37): Xaa is C or S
  MOD_RES (16)..(17)..(18)..(19)..(20): Xaa is A or G
  MOD_RES (21)..(22)..(23)..(24): Xaa is A or G or absent
QPSRVHHEPLPVVYYXXXXXXXXXEQLSNRLEEHLEXA

SEQ ID NO: 29070 - protein, 42 aa, Artificial Sequence
  Non-cyclic GFR-binding peptide
  MOD_RES (7)..(41): Xaa is C or S
NDEGLEXVPTEEEPLTMLYYRIKPHQGQHEQLSNFLQHNKXE

SEQ ID NO: 29071 - protein, 41 aa, Artificial Sequence
  Non-cyclic GFR-binding peptide
  MOD_RES (6)..(7)..(38)..(40): Xaa is C or S
ASASPXXVPQDLSNITIQIMVGRTPKVIGEMSMVVKSXKXS

SEQ ID NO: 29072 - protein, 35 aa, Artificial Sequence
  Non-cyclic GFR-binding peptide
  MOD_RES (4)..(4): Xaa is C or S
KPTXAPTKLRPVQVRKIDDSSNVIKKATVNMVVRS

SEQ ID NO: 29073 - protein, 38 aa, Artificial Sequence
  Non-cyclic GFR-binding peptide
  MOD_RES (2)..(3)..(35)..(37): Xaa is C or S
PXXAPTQLRPVQVRKIDDSSNVIKKATVNMVVRAXGXH

SEQ ID NO: 29074 - protein, 35 aa, Artificial Sequence
  Non-cyclic GFR-binding peptide
  MOD_RES (1)..(32)..(34): Xaa is C or S
XVPQALRSVKIAKVVGRKPKVKEVQVMIVRSXKXS

SEQ ID NO: 29075 - protein, 40 aa, Artificial Sequence
  Non-cyclic GFR-binding peptide
  MOD_RES (5)..(39): Xaa is C or S
EGLEXVPTEEEPLTMLYYRIKPHQGQHEQLSNFLQHNKXE

SEQ ID NO: 29076 - protein, 35 aa, Artificial Sequence
  Non-cyclic GFR-binding peptide
  MOD_RES (33)..(35): Xaa is C or S
  MOD_RES (14)..(15)..(16)..(17)..(18): Xaa is A or G
  MOD_RES (19)..(20)..(21)..(22): Xaa is A or G or absent
VPQALSNITIQIMXXXXXXXXXIGEMSMIVRSXKX

SEQ ID NO: 29077 - protein, 32 aa, Artificial Sequence
  Non-cyclic GFR-binding peptide
  MOD_RES (1)..(32): Xaa is C or S
XVPQDLSNITIQIMVGRTPKVIGEMSMVVKSX

SEQ ID NO: 29078 - protein, 37 aa, Artificial Sequence
  Non-cyclic GFR-binding peptide
  MOD_RES (1)..(35)..(37): Xaa is C or S
  MOD_RES (15)..(16)..(17)..(18)..(19): Xaa is A or G
  MOD_RES (20)..(21)..(22)..(23): Xaa is A or G or absent
XVPTELSNITMQIMXXXXXXXXXIGEMSEMVVEGXGX

SEQ ID NO: 29079 - protein, 38 aa, Artificial Sequence
  Non-cyclic GFR-binding peptide
  MOD_RES (4)..(5): Xaa is C or S
  MOD_RES (19)..(20)..(21)..(22)..(23): Xaa is A or G
  MOD_RES (24)..(25)..(26)..(27): Xaa is A or G or absent
PKPXXAPTQLSNITVQIMXXXXXXXXXIGEMSNMVVRA

SEQ ID NO: 29080 - protein, 38 aa, Artificial Sequence
  Non-cyclic GFR-binding peptide
  MOD_RES (3)..(4)..(38): Xaa is C or S
  MOD_RES (18)..(19)..(20)..(21)..(22): Xaa is A or G
  MOD_RES (23)..(24)..(25)..(26): Xaa is A or G or absent
KAXXVPTELSNITMQIMXXXXXXXXXIGEMSEMVVEGX

SEQ ID NO: 29081 - protein, 38 aa, Artificial Sequence
  Non-cyclic GFR-binding peptide
  MOD_RES (6)..(7): Xaa is C or S
KIPKAXXVPTELSNITMQIMDENEKVVIGEMSDMVVEG

SEQ ID NO: 29082 - protein, 42 aa, Artificial Sequence
  Non-cyclic GFR-binding peptide
  MOD_RES (7)..(41): Xaa is C or S
  MOD_RES (21)..(22)..(23)..(24)..(25): Xaa is A or G
  MOD_RES (26)..(27)..(28)..(29): Xaa is A or G or absent
NDEGLEXVPTEEEPLTMLYYXXXXXXXXXEQLSNFLQHNKXE

SEQ ID NO: 29083 - protein, 38 aa, Artificial Sequence
  Non-cyclic GFR-binding peptide
  MOD_RES (4)..(5)..(38): Xaa is C or S
  MOD_RES (19)..(20)..(21)..(22)..(23): Xaa is A or G
  MOD_RES (24)..(25)..(26)..(27): Xaa is A or G or absent
AAPXXVPQALSNITIQIMXXXXXXXXXIGEMSMIVRSX

SEQ ID NO: 29084 - protein, 37 aa, Artificial Sequence
  Non-cyclic GFR-binding peptide
  MOD_RES (37)..(37): Xaa is C or S
  MOD_RES (16)..(17)..(18)..(19)..(20): Xaa is A or G
  MOD_RES (21)..(22)..(23)..(24): Xaa is A or G or absent
RPTQVQLEPLTVLYYXXXXXXXXXEQLSNTLEDHLAX

SEQ ID NO: 29085 - protein, 37 aa, Artificial Sequence
  Non-cyclic GFR-binding peptide
  MOD_RES (4)..(5): Xaa is C or S
  MOD_RES (19)..(20)..(21)..(22)..(23): Xaa is A or G
  MOD_RES (24)..(25)..(26)..(27): Xaa is A or G or absent
PKAXXVPTELRSVKMAKVXXXXXXXXXKEVQVEMVVE

SEQ ID NO: 29086 - protein, 39 aa, Artificial Sequence
  Non-cyclic GFR-binding peptide
  MOD_RES (7)..(7): Xaa is C or S
NDEGLEXVPTEEEPLPMVYYRIKPHQGQHEQLSNFLQHN

SEQ ID NO: 29087 - protein, 37 aa, Artificial Sequence
  Non-cyclic GFR-binding peptide
  MOD_RES (1)..(35)..(37): Xaa is C or S
XVPTEEEPLTMLYYRIKPHQGQHEQLSNFLQHNKXEX

SEQ ID NO: 29088 - protein, 40 aa, Artificial Sequence
  Non-cyclic GFR-binding peptide
  MOD_RES (5)..(6)..(37)..(39): Xaa is C or S
SASPXXVSQDLSNITIQIMIGKTPKIIGEMSMIVKSXKXS

SEQ ID NO: 29089 - protein, 33 aa, Artificial Sequence
  Non-cyclic GFR-binding peptide
  MOD_RES (2)..(3): Xaa is C or S
PXXAPTQLRSVKVAKVDDSSNVIKEVQVNMVVR

SEQ ID NO: 29090 - protein, 39 aa, Artificial Sequence
  Non-cyclic GFR-binding peptide
  MOD_RES (2)..(3)..(37)..(39): Xaa is C or S
  MOD_RES (17)..(18)..(19)..(20)..(21): Xaa is A or G
  MOD_RES (22)..(23)..(24)..(25): Xaa is A or G or absent
PXXAPTQLRSVKVAKVXXXXXXXXXKEVQVNMVVRAXGX

SEQ ID NO: 29091 - protein, 36 aa, Artificial Sequence
  Non-cyclic GFR-binding peptide
  MOD_RES (4)..(4): Xaa is C or S
  MOD_RES (18)..(19)..(20)..(21)..(22): Xaa is A or G
  MOD_RES (23)..(24)..(25)..(26): Xaa is A or G or absent
GLEXVPTEEEPLPMVYYXXXXXXXXXEQLSNFLQHN

SEQ ID NO: 29092 - protein, 37 aa, Artificial Sequence
  Non-cyclic GFR-binding peptide
  MOD_RES (1)..(35)..(37): Xaa is C or S
  MOD_RES (15)..(16)..(17)..(18)..(19): Xaa is A or G
  MOD_RES (20)..(21)..(22)..(23): Xaa is A or G or absent
XAPTQLSNITVQIMXXXXXXXXXIGEMSNMVVRAXGX

SEQ ID NO: 29093 - protein, 41 aa, Artificial Sequence
  Non-cyclic GFR-binding peptide
  MOD_RES (4)..(5)..(38)..(40): Xaa is C or S
  MOD_RES (19)..(20)..(21)..(22)..(23): Xaa is A or G
  MOD_RES (24)..(25)..(26)..(27): Xaa is A or G or absent
ASPXXVPQDLRSVKIAKVXXXXXXXXXKEVQVMVVKSXKXS

SEQ ID NO: 29094 - protein, 32 aa, Artificial Sequence
  Non-cyclic GFR-binding peptide
  MOD_RES (1)..(2): Xaa is C or S
XXVPQDLSNITIQIMVGRTPKVIGEMSMVVKS

SEQ ID NO: 29095 - protein, 43 aa, Artificial Sequence
  Non-cyclic GFR-binding peptide
  MOD_RES (6)..(40)..(42): Xaa is C or S
DEGLEXVPTEEEPLPMVYYRIKPHQGQHEQLSNFLQHNKXEXR

SEQ ID NO: 29096 - protein, 33 aa, Artificial Sequence
  Non-cyclic GFR-binding peptide
  MOD_RES (3)..(3): Xaa is C or S
PTXAPTKLRPVQVRKIDDSSNVIKKATVNMVVR

SEQ ID NO: 29097 - protein, 35 aa, Artificial Sequence
  Non-cyclic GFR-binding peptide
  MOD_RES (5)..(5): Xaa is C or S
TKPTXAPTKLSNITVQIMDDSSNVIIGEMSNMVVR

SEQ ID NO: 29098 - protein, 37 aa, Artificial Sequence
  Non-cyclic GFR-binding peptide
  MOD_RES (5)..(5): Xaa is C or S
  MOD_RES (19)..(20)..(21)..(22)..(23): Xaa is A or G
  MOD_RES (24)..(25)..(26)..(27): Xaa is A or G or absent
EGLEXVPTEEEPLPMVYYXXXXXXXXXEQLSNFLQHN

SEQ ID NO: 29099 - protein, 37 aa, Artificial Sequence
  Non-cyclic GFR-binding peptide
  MOD_RES (1)..(2)..(35)..(37): Xaa is C or S
  MOD_RES (16)..(17)..(18)..(19)..(20): Xaa is A or G
  MOD_RES (21)..(22)..(23)..(24): Xaa is A or G or absent
XXVSQDLRPVQIRKIXXXXXXXXXKKATVMIVKSXKX

SEQ ID NO: 29100 - protein, 44 aa, Artificial Sequence
  Non-cyclic GFR-binding peptide
  MOD_RES (6)..(7)..(41)..(43): Xaa is C or S
  MOD_RES (21)..(22)..(23)..(24)..(25): Xaa is A or G
  MOD_RES (26)..(27)..(28)..(29): Xaa is A or G or absent
SIPKAXXVPTELRSVKMAKVXXXXXXXXXKEVQVEMVVEGXGXR

SEQ ID NO: 29101 - protein, 36 aa, Artificial Sequence
  Non-cyclic GFR-binding peptide
  MOD_RES (2)..(3)..(35): Xaa is C or S
AXXVPTELRPVQMRKIDENEKVVKKATVDMVVEGXG

SEQ ID NO: 29102 - protein, 35 aa, Artificial Sequence
  Non-cyclic GFR-binding peptide
  MOD_RES (1)..(2)..(35): Xaa is C or S
  MOD_RES (16)..(17)..(18)..(19)..(20): Xaa is A or G
  MOD_RES (21)..(22)..(23)..(24): Xaa is A or G or absent
XXVPQALRPVQIRKIXXXXXXXXXKKATVMIVRSX

SEQ ID NO: 29103 - protein, 41 aa, Artificial Sequence
  Non-cyclic GFR-binding peptide
  MOD_RES (6)..(7)..(41): Xaa is C or S
  MOD_RES (21)..(22)..(23)..(24)..(25): Xaa is A or G
  MOD_RES (26)..(27)..(28)..(29): Xaa is A or G or absent
SIPKAXXVPTELRPVQMRKIXXXXXXXXXKKATVEMVVEGX

SEQ ID NO: 29104 - protein, 41 aa, Artificial Sequence
  Non-cyclic GFR-binding peptide
  MOD_RES (2)..(39)..(41): Xaa is C or S
  MOD_RES (18)..(19)..(20)..(21)..(22): Xaa is A or G
  MOD_RES (23)..(24)..(25)..(26): Xaa is A or G or absent
QXRPTQVQLEPLPVVYYXXXXXXXXXEQLSNTLEDHLAXKX

SEQ ID NO: 29105 - protein, 34 aa, Artificial Sequence
  Non-cyclic GFR-binding peptide
  MOD_RES (2)..(2): Xaa is C or S
  MOD_RES (16)..(17)..(18)..(19)..(20): Xaa is A or G
  MOD_RES (21)..(22)..(23)..(24): Xaa is A or G or absent
TXAPTKLRSVKVAKVXXXXXXXXXKEVQVNMVVR

SEQ ID NO: 29106 - protein, 38 aa, Artificial Sequence
  Non-cyclic GFR-binding peptide
  MOD_RES (2)..(3)..(35)..(37): Xaa is C or S
AXXVPTELRSVKMAKVDENEKVVKEVQVDMVVEGXGXR

SEQ ID NO: 29107 - protein, 36 aa, Artificial Sequence
  Non-cyclic GFR-binding peptide
  MOD_RES (2)..(3)..(36): Xaa is C or S
  MOD_RES (17)..(18)..(19)..(20)..(21): Xaa is A or G
  MOD_RES (22)..(23)..(24)..(25): Xaa is A or G or absent
PXXVSQDLSNITIQIMXXXXXXXXXIGEMSMIVKSX

SEQ ID NO: 29108 - protein, 40 aa, Artificial Sequence
  Non-cyclic GFR-binding peptide
  MOD_RES (5)..(6)..(38)..(40): Xaa is C or S
VPKPXXAPTQLRSVKVAKVDDSSNVIKEVQVNMVVRAXGX

SEQ ID NO: 29109 - protein, 37 aa, Artificial Sequence
  Non-cyclic GFR-binding peptide
  MOD_RES (3)..(3): Xaa is C or S
  MOD_RES (19)..(20)..(21)..(22)..(23): Xaa is A or G
  MOD_RES (24)..(25)..(26)..(27): Xaa is A or G or absent
VKXQPSRVHHEPLPVVYYXXXXXXXXXEQLSNRLEEH

SEQ ID NO: 29110 - protein, 36 aa, Artificial Sequence
  Non-cyclic GFR-binding peptide
  MOD_RES (2)..(3)..(35): Xaa is C or S
PXXAPTKLRPVQVRKIDDSSNVIKKATVNMVVRSXG

SEQ ID NO: 29111 - protein, 33 aa, Artificial Sequence
  Non-cyclic GFR-binding peptide
  MOD_RES (2)..(3): Xaa is C or S
AXXVPTELRSVKMAKVDEYDKVVKEVQVEMVVE

SEQ ID NO: 29112 - protein, 32 aa, Artificial Sequence
  Non-cyclic GFR-binding peptide
  MOD_RES (1)..(2): Xaa is C or S
XXVSQDLSNITIQIMIGKTPKIIGEMSMIVKS

SEQ ID NO: 29113 - protein, 43 aa, Artificial Sequence
  Non-cyclic GFR-binding peptide
  MOD_RES (6)..(7)..(41)..(43): Xaa is C or S
  MOD_RES (21)..(22)..(23)..(24)..(25): Xaa is A or G
  MOD_RES (26)..(27)..(28)..(29): Xaa is A or G or absent
SIPKAXXVPTELRPVQMRKIXXXXXXXXXKKATVEMVVEGXGX

SEQ ID NO: 29114 - protein, 39 aa, Artificial Sequence
  Non-cyclic GFR-binding peptide
  MOD_RES (4)..(38): Xaa is C or S
GLEXVPTEEEPLPMVYYRIKPHQGQHEQLSNFLQHNKXE

SEQ ID NO: 29115 - protein, 37 aa, Artificial Sequence
  Non-cyclic GFR-binding peptide
  MOD_RES (3)..(4)..(37): Xaa is C or S
  MOD_RES (18)..(19)..(20)..(21)..(22): Xaa is A or G
  MOD_RES (23)..(24)..(25)..(26): Xaa is A or G or absent
APXXVPQALSNITIQIMXXXXXXXXXIGEMSMIVRSX

SEQ ID NO: 29116 - protein, 36 aa, Artificial Sequence
  Non-cyclic GFR-binding peptide
  MOD_RES (4)..(5): Xaa is C or S
PKAXXVPTELRPVQMRKIDEYDKVVKKATVEMVVEG

SEQ ID NO: 29117 - protein, 39 aa, Artificial Sequence
  Non-cyclic GFR-binding peptide
  MOD_RES (4)..(38): Xaa is C or S
  MOD_RES (18)..(19)..(20)..(21)..(22): Xaa is A or G
  MOD_RES (23)..(24)..(25)..(26): Xaa is A or G or absent
KPTXAPTKLRPVQVRKIXXXXXXXXXKKATVNMVVRSXG

SEQ ID NO: 29118 - protein, 38 aa, Artificial Sequence
  Non-cyclic GFR-binding peptide
  MOD_RES (5)..(6)..(38): Xaa is C or S
VPKPXXAPTKLRSVKVAKVDDSSNVIKEVQVNMVVRSX

SEQ ID NO: 29119 - protein, 32 aa, Artificial Sequence
  Non-cyclic GFR-binding peptide
  MOD_RES (32)..(32): Xaa is C or S
APTKLSNITVQIMDDSSNVIIGEMSNMVVRSX

SEQ ID NO: 29120 - protein, 36 aa, Artificial Sequence
  Non-cyclic GFR-binding peptide
  MOD_RES (1)..(2)..(35): Xaa is C or S
  MOD_RES (16)..(17)..(18)..(19)..(20): Xaa is A or G
  MOD_RES (21)..(22)..(23)..(24): Xaa is A or G or absent
XXVPQALRPVQIRKIXXXXXXXXXKKATVMIVRSXK

SEQ ID NO: 29121 - protein, 37 aa, Artificial Sequence
  Non-cyclic GFR-binding peptide
  MOD_RES (5)..(5): Xaa is C or S
EGLEXVPTEEEPLTMLYYRIKPHQGQHEQLSNFLQHN

SEQ ID NO: 29122 - protein, 35 aa, Artificial Sequence
  Non-cyclic GFR-binding peptide
  MOD_RES (1)..(33)..(35): Xaa is C or S
XVPTELRSVKMAKVDENEKVVKEVQVDMVVEGXGX

SEQ ID NO: 29123 - protein, 35 aa, Artificial Sequence
  Non-cyclic GFR-binding peptide
  MOD_RES (3)..(4)..(35): Xaa is C or S
SPXXVSQDLRPVQIRKIIGKTPKIKKATVMIVKSX

SEQ ID NO: 29124 - protein, 38 aa, Artificial Sequence
  Non-cyclic GFR-binding peptide
  MOD_RES (2)..(2): Xaa is C or S
  MOD_RES (18)..(19)..(20)..(21)..(22): Xaa is A or G
  MOD_RES (23)..(24)..(25)..(26): Xaa is A or G or absent
KXQPSRVHHEPLTVLYYXXXXXXXXXEQLSNRLEEHLE

SEQ ID NO: 29125 - protein, 39 aa, Artificial Sequence
  Non-cyclic GFR-binding peptide
  MOD_RES (6)..(7)..(39): Xaa is C or S
SIPKAXXVPTELSNITMQIMDEYDKVVIGEMSEMVVEGX

SEQ ID NO: 29126 - protein, 40 aa, Artificial Sequence
  Non-cyclic GFR-binding peptide
  MOD_RES (6)..(7): Xaa is C or S
  MOD_RES (21)..(22)..(23)..(24)..(25): Xaa is A or G
  MOD_RES (26)..(27)..(28)..(29): Xaa is A or G or absent
YVPKPXXAPTKLRSVKVAKVXXXXXXXXXKEVQVNMVVRS

SEQ ID NO: 29127 - protein, 43 aa, Artificial Sequence
  Non-cyclic GFR-binding peptide
  MOD_RES (5)..(42): Xaa is C or S
RNVQXRPTQVQLEPLPVVYYEIVRKKPIFEQLSNTLEDHLAXK

SEQ ID NO: 29128 - protein, 41 aa, Artificial Sequence
  Non-cyclic GFR-binding peptide
  MOD_RES (4)..(38)..(40): Xaa is C or S
GLEXVPTEEEPLTMLYYRIKPHQGQHEQLSNFLQHNKXEXR

SEQ ID NO: 29129 - protein, 39 aa, Artificial Sequence
  Non-cyclic GFR-binding peptide
  MOD_RES (6)..(7): Xaa is C or S
  MOD_RES (21)..(22)..(23)..(24)..(25): Xaa is A or G
  MOD_RES (26)..(27)..(28)..(29): Xaa is A or G or absent
ASASPXXVPQDLRPVQIRKIXXXXXXXXXKKATVMVVKS

SEQ ID NO: 29130 - protein, 39 aa, Artificial Sequence
  Non-cyclic GFR-binding peptide
  MOD_RES (5)..(6)..(37)..(39): Xaa is C or S
SASPXXVSQDLRPVQIRKIIGKTPKIKKATVMIVKSXKX

SEQ ID NO: 29131 - protein, 33 aa, Artificial Sequence
  Non-cyclic GFR-binding peptide
VPTEEEPLTMLYYRIKPHQGQHEQLSNFLQHNK

SEQ ID NO: 29132 - protein, 41 aa, Artificial Sequence
  Non-cyclic GFR-binding peptide
  MOD_RES (6)..(7)..(39)..(41): Xaa is C or S
TVPKPXXAPTQLRSVKVAKVDDSSNVIKEVQVNMVVRAXGX

SEQ ID NO: 29133 - protein, 43 aa, Artificial Sequence
  Non-cyclic GFR-binding peptide
  MOD_RES (6)..(7)..(41)..(43): Xaa is C or S
  MOD_RES (21)..(22)..(23)..(24)..(25): Xaa is A or G
  MOD_RES (26)..(27)..(28)..(29): Xaa is A or G or absent
TVPKPXXAPTQLRSVKVAKVXXXXXXXXXKEVQVNMVVRAXGX

SEQ ID NO: 29134 - protein, 38 aa, Artificial Sequence
  Non-cyclic GFR-binding peptide
  MOD_RES (2)..(3)..(36)..(38): Xaa is C or S
  MOD_RES (17)..(18)..(19)..(20)..(21): Xaa is A or G
  MOD_RES (22)..(23)..(24)..(25): Xaa is A or G or absent
PXXVPQDLSNITIQIMXXXXXXXXXIGEMSMVVKSXKX

SEQ ID NO: 29135 - protein, 39 aa, Artificial Sequence
  Non-cyclic GFR-binding peptide
  MOD_RES (36)..(38): Xaa is C or S
PSRVHHEPLPVVYYEYVRKKPKLEQLSNRLEEHLEXAXA

SEQ ID NO: 29136 - protein, 35 aa, Artificial Sequence
  Non-cyclic GFR-binding peptide
  MOD_RES (1)..(33)..(35): Xaa is C or S
XAPTQLRPVQVRKIDDSSNVIKKATVNMVVRAXGX

SEQ ID NO: 29137 - protein, 37 aa, Artificial Sequence
  Non-cyclic GFR-binding peptide
  MOD_RES (2)..(3)..(36): Xaa is C or S
  MOD_RES (17)..(18)..(19)..(20)..(21): Xaa is A or G
  MOD_RES (22)..(23)..(24)..(25): Xaa is A or G or absent
PXXVPQDLSNITIQIMXXXXXXXXXIGEMSMVVKSXK

SEQ ID NO: 29138 - protein, 32 aa, Artificial Sequence
  Non-cyclic GFR-binding peptide
  MOD_RES (1)..(1): Xaa is C or S
XAPTKLRSVKVAKVDDSSNVIKEVQVNMVVRS

SEQ ID NO: 29139 - protein, 37 aa, Artificial Sequence
  Non-cyclic GFR-binding peptide
  MOD_RES (3)..(3): Xaa is C or S
  MOD_RES (19)..(20)..(21)..(22)..(23): Xaa is A or G
  MOD_RES (24)..(25)..(26)..(27): Xaa is A or G or absent
VKXQPSRVHHEPLTVLYYXXXXXXXXXEQLSNRLEEH

SEQ ID NO: 29140 - protein, 40 aa, Artificial Sequence
  Non-cyclic GFR-binding peptide
  MOD_RES (4)..(5)..(39): Xaa is C or S
  MOD_RES (19)..(20)..(21)..(22)..(23): Xaa is A or G
  MOD_RES (24)..(25)..(26)..(27): Xaa is A or G or absent
PKPXXAPTQLRSVKVAKVXXXXXXXXXKEVQVNMVVRAXG

SEQ ID NO: 29141 - protein, 36 aa, Artificial Sequence
  Non-cyclic GFR-binding peptide
  MOD_RES (1)..(2)..(34)..(36): Xaa is C or S
XXAPTKLRSVKVAKVDDSSNVIKEVQVNMVVRSXGX

SEQ ID NO: 29142 - protein, 34 aa, Artificial Sequence
  Non-cyclic GFR-binding peptide
  MOD_RES (1)..(33): Xaa is C or S
XAPTKLSNITVQIMDDSSNVIIGEMSNMVVRSXG

SEQ ID NO: 29143 - protein, 42 aa, Artificial Sequence
  Non-cyclic GFR-binding peptide
  MOD_RES (6)..(7)..(41): Xaa is C or S
  MOD_RES (21)..(22)..(23)..(24)..(25): Xaa is A or G
  MOD_RES (26)..(27)..(28)..(29): Xaa is A or G or absent
TVPKPXXAPTQLRSVKVAKVXXXXXXXXXKEVQVNMVVRAXG

SEQ ID NO: 29144 - protein, 39 aa, Artificial Sequence
  Non-cyclic GFR-binding peptide
  MOD_RES (2)..(39): Xaa is C or S
QXRPTQVQLEPLPVVYYEIVRKKPIFEQLSNTLEDHLAX

SEQ ID NO: 29145 - protein, 31 aa, Artificial Sequence
  Non-cyclic GFR-binding peptide
  MOD_RES (31)..(31): Xaa is C or S
VSQDLSNITIQIMIGKTPKIIGEMSMIVKSX

SEQ ID NO: 29146 - protein, 37 aa, Artificial Sequence
  Non-cyclic GFR-binding peptide
  MOD_RES (2)..(3)..(37): Xaa is C or S
  MOD_RES (17)..(18)..(19)..(20)..(21): Xaa is A or G
  MOD_RES (22)..(23)..(24)..(25): Xaa is A or G or absent
AXXVPTELRSVKMAKVXXXXXXXXXKEVQVEMVVEGX

SEQ ID NO: 29147 - protein, 44 aa, Artificial Sequence
  Non-cyclic GFR-binding peptide
  MOD_RES (4)..(41)..(43): Xaa is C or S
NVQXRPTQVQLEPLPVVYYEIVRKKPIFEQLSNTLEDHLAXKXE

SEQ ID NO: 29148 - protein, 36 aa, Artificial Sequence
  Non-cyclic GFR-binding peptide
  MOD_RES (1)..(34)..(36): Xaa is C or S
  MOD_RES (15)..(16)..(17)..(18)..(19): Xaa is A or G
  MOD_RES (20)..(21)..(22)..(23): Xaa is A or G or absent
XVPQALRPVQIRKIXXXXXXXXXKKATVMIVRSXKX

SEQ ID NO: 29149 - protein, 32 aa, Artificial Sequence
  Non-cyclic GFR-binding peptide
  MOD_RES (2)..(2): Xaa is C or S
TXAPTKLRSVKVAKVDDSSNVIKEVQVNMVVR

SEQ ID NO: 29150 - protein, 39 aa, Artificial Sequence
  Non-cyclic GFR-binding peptide
  MOD_RES (5)..(6)..(37)..(39): Xaa is C or S
SASPXXVPQDLRPVQIRKIVGRTPKVKKATVMVVKSXKX

SEQ ID NO: 29151 - protein, 45 aa, Artificial Sequence
  Non-cyclic GFR-binding peptide
  MOD_RES (5)..(42)..(44): Xaa is C or S
  MOD_RES (21)..(22)..(23)..(24)..(25): Xaa is A or G
  MOD_RES (26)..(27)..(28)..(29): Xaa is A or G or absent
SSVKXQPSRVHHEPLPVVYYXXXXXXXXXEQLSNRLEEHLEXAXA

SEQ ID NO: 29152 - protein, 38 aa, Artificial Sequence
  Non-cyclic GFR-binding peptide
  MOD_RES (4)..(5)..(38): Xaa is C or S
  MOD_RES (19)..(20)..(21)..(22)..(23): Xaa is A or G
  MOD_RES (24)..(25)..(26)..(27): Xaa is A or G or absent
ASPXXVPQDLSNITIQIMXXXXXXXXXIGEMSMVVKSX

SEQ ID NO: 29153 - protein, 36 aa, Artificial Sequence
  Non-cyclic GFR-binding peptide
  MOD_RES (2)..(36): Xaa is C or S
  MOD_RES (16)..(17)..(18)..(19)..(20): Xaa is A or G
  MOD_RES (21)..(22)..(23)..(24): Xaa is A or G or absent
EXVPTEEEPLPMVYYXXXXXXXXXEQLSNFLQHNKX

SEQ ID NO: 29154 - protein, 37 aa, Artificial Sequence
  Non-cyclic GFR-binding peptide
  MOD_RES (3)..(4)..(35)..(37): Xaa is C or S
APXXVPQALRPVQIRKIVGRKPKVKKATVMIVRSXKX

SEQ ID NO: 29155 - protein, 40 aa, Artificial Sequence
  Non-cyclic GFR-binding peptide
  MOD_RES (4)..(5)..(37)..(39): Xaa is C or S
PKPXXAPTKLRSVKVAKVDDSSNVIKEVQVNMVVRSXGXH

SEQ ID NO: 29156 - protein, 39 aa, Artificial Sequence
  Non-cyclic GFR-binding peptide
  MOD_RES (4)..(4): Xaa is C or S
  MOD_RES (20)..(21)..(22)..(23)..(24): Xaa is A or G
  MOD_RES (25)..(26)..(27)..(28): Xaa is A or G or absent
SVKXQPSRVHHEPLTVLYYXXXXXXXXXEQLSNRLEEHL

SEQ ID NO: 29157 - protein, 37 aa, Artificial Sequence
  Non-cyclic GFR-binding peptide
  MOD_RES (5)..(5): Xaa is C or S
EGLEXVPTEEEPLPMVYYRIKPHQGQHEQLSNFLQHN

SEQ ID NO: 29158 - protein, 37 aa, Artificial Sequence
  Non-cyclic GFR-binding peptide
  MOD_RES (35)..(37): Xaa is C or S
  MOD_RES (14)..(15)..(16)..(17)..(18): Xaa is A or G
  MOD_RES (19)..(20)..(21)..(22): Xaa is A or G or absent
TQVQLEPLTVLYYXXXXXXXXXEQLSNTLEDHLAXKX

SEQ ID NO: 29159 - protein, 37 aa, Artificial Sequence
  Non-cyclic GFR-binding peptide
  MOD_RES (4)..(5)..(37): Xaa is C or S
PKPXXAPTKLSNITVQIMDDSSNVIIGEMSNMVVRSX

SEQ ID NO: 29160 - protein, 35 aa, Artificial Sequence
  Non-cyclic GFR-binding peptide
  MOD_RES (1)..(2)..(34): Xaa is C or S
XXVPTELRPVQMRKIDENEKVVKKATVDMVVEGXG

SEQ ID NO: 29161 - protein, 38 aa, Artificial Sequence
  Non-cyclic GFR-binding peptide
  MOD_RES (2)..(36)..(38): Xaa is C or S
  MOD_RES (16)..(17)..(18)..(19)..(20): Xaa is A or G
  MOD_RES (21)..(22)..(23)..(24): Xaa is A or G or absent
TXAPTKLRSVKVAKVXXXXXXXXXKEVQVNMVVRSXGX

SEQ ID NO: 29162 - protein, 34 aa, Artificial Sequence
  Non-cyclic GFR-binding peptide
  MOD_RES (4)..(4): Xaa is C or S
KPTXAPTKLRPVQVRKIDDSSNVIKKATVNMVVR

SEQ ID NO: 29163 - protein, 35 aa, Artificial Sequence
  Non-cyclic GFR-binding peptide
  MOD_RES (2)..(2): Xaa is C or S
  MOD_RES (16)..(17)..(18)..(19)..(20): Xaa is A or G
  MOD_RES (21)..(22)..(23)..(24): Xaa is A or G or absent
EXVPTEEEPLPMVYYXXXXXXXXXEQLSNFLQHNK

SEQ ID NO: 29164 - protein, 37 aa, Artificial Sequence
  Non-cyclic GFR-binding peptide
  MOD_RES (2)..(3)..(34)..(36): Xaa is C or S
PXXVPQDLRSVKIAKVVGRTPKVKEVQVMVVKSXKXS

SEQ ID NO: 29165 - protein, 36 aa, Artificial Sequence
  Non-cyclic GFR-binding peptide
  MOD_RES (4)..(5): Xaa is C or S
PKAXXVPTELRPVQMRKIDENEKVVKKATVDMVVEG

SEQ ID NO: 29166 - protein, 38 aa, Artificial Sequence
  Non-cyclic GFR-binding peptide
  MOD_RES (36)..(38): Xaa is C or S
PTQVQLEPLPVVYYEIVRKKPIFEQLSNTLEDHLAXKX

SEQ ID NO: 29167 - protein, 36 aa, Artificial Sequence
  Non-cyclic GFR-binding peptide
  MOD_RES (5)..(5): Xaa is C or S
TKPTXAPTKLSNITVQIMDDSSNVIIGEMSNMVVRS

SEQ ID NO: 29168 - protein, 39 aa, Artificial Sequence
  Non-cyclic GFR-binding peptide
  MOD_RES (2)..(3)..(37)..(39): Xaa is C or S
  MOD_RES (17)..(18)..(19)..(20)..(21): Xaa is A or G
  MOD_RES (22)..(23)..(24)..(25): Xaa is A or G or absent
AXXVPTELRPVQMRKIXXXXXXXXXKKATVDMVVEGXGX

SEQ ID NO: 29169 - protein, 43 aa, Artificial Sequence
  Non-cyclic GFR-binding peptide
  MOD_RES (3)..(40)..(42): Xaa is C or S
  MOD_RES (19)..(20)..(21)..(22)..(23): Xaa is A or G
  MOD_RES (24)..(25)..(26)..(27): Xaa is A or G or absent
VKXQPSRVHHEPLTVLYYXXXXXXXXXEQLSNRLEEHLEXAXA

SEQ ID NO: 29170 - protein, 36 aa, Artificial Sequence
  Non-cyclic GFR-binding peptide
  MOD_RES (3)..(4)..(36): Xaa is C or S
KPXXAPTKLRSVKVAKVDDSSNVIKEVQVNMVVRSX

SEQ ID NO: 29171 - protein, 43 aa, Artificial Sequence
  Non-cyclic GFR-binding peptide
  MOD_RES (6)..(7)..(41)..(43): Xaa is C or S
  MOD_RES (21)..(22)..(23)..(24)..(25): Xaa is A or G
  MOD_RES (26)..(27)..(28)..(29): Xaa is A or G or absent
YVPKPXXAPTKLRPVQVRKIXXXXXXXXXKKATVNMVVRSXGX

SEQ ID NO: 29172 - protein, 33 aa, Artificial Sequence
  Non-cyclic GFR-binding peptide
  MOD_RES (15)..(16)..(17)..(18)..(19): Xaa is A or G
  MOD_RES (20)..(21)..(22)..(23): Xaa is A or G or absent
PTQVQLEPLPVVYYXXXXXXXXXEQLSNTLEDH

SEQ ID NO: 29173 - protein, 37 aa, Artificial Sequence
  Non-cyclic GFR-binding peptide
  MOD_RES (3)..(37): Xaa is C or S
  MOD_RES (17)..(18)..(19)..(20)..(21): Xaa is A or G
  MOD_RES (22)..(23)..(24)..(25): Xaa is A or G or absent
LEXVPTEEEPLTMLYYXXXXXXXXXEQLSNFLQHNKX

SEQ ID NO: 29174 - protein, 34 aa, Artificial Sequence
  Non-cyclic GFR-binding peptide
  MOD_RES (33)..(33): Xaa is C or S
  MOD_RES (14)..(15)..(16)..(17)..(18): Xaa is A or G
  MOD_RES (19)..(20)..(21)..(22): Xaa is A or G or absent
VSQDLSNITIQIMXXXXXXXXXIGEMSMIVKSXK

SEQ ID NO: 29175 - protein, 35 aa, Artificial Sequence
  Non-cyclic GFR-binding peptide
  MOD_RES (2)..(3): Xaa is C or S
  MOD_RES (17)..(18)..(19)..(20)..(21): Xaa is A or G
  MOD_RES (22)..(23)..(24)..(25): Xaa is A or G or absent
PXXVSQDLSNITIQIMXXXXXXXXXIGEMSMIVKS

SEQ ID NO: 29176 - protein, 34 aa, Artificial Sequence
  Non-cyclic GFR-binding peptide
  MOD_RES (1)..(1): Xaa is C or S
XVPTEEEPLPMVYYRIKPHQGQHEQLSNFLQHNK

SEQ ID NO: 29177 - protein, 32 aa, Artificial Sequence
  Non-cyclic GFR-binding peptide
TQVQLEPLTVLYYEIVRKKPIFEQLSNTLEDH

SEQ ID NO: 29178 - protein, 38 aa, Artificial Sequence
  Non-cyclic GFR-binding peptide
  MOD_RES (1)..(2)..(35)..(37): Xaa is C or S
  MOD_RES (16)..(17)..(18)..(19)..(20): Xaa is A or G
  MOD_RES (21)..(22)..(23)..(24): Xaa is A or G or absent
XXVSQDLRPVQIRKIXXXXXXXXXKKATVMIVKSXKXS

SEQ ID NO: 29179 - protein, 30 aa, Artificial Sequence
  Non-cyclic GFR-binding peptide
VPTELRSVKMAKVDENEKVVKEVQVDMVVE

SEQ ID NO: 29180 - protein, 38 aa, Artificial Sequence
  Non-cyclic GFR-binding peptide
  MOD_RES (3)..(4)..(38): Xaa is C or S
  MOD_RES (18)..(19)..(20)..(21)..(22): Xaa is A or G
  MOD_RES (23)..(24)..(25)..(26): Xaa is A or G or absent
KAXXVPTELRPVQMRKIXXXXXXXXXKKATVDMVVEGX

SEQ ID NO: 29181 - protein, 33 aa, Artificial Sequence
  Non-cyclic GFR-binding peptide
  MOD_RES (15)..(16)..(17)..(18)..(19): Xaa is A or G
  MOD_RES (20)..(21)..(22)..(23): Xaa is A or G or absent
PTQVQLEPLTVLYYXXXXXXXXXEQLSNTLEDH

SEQ ID NO: 29182 - protein, 36 aa, Artificial Sequence
  Non-cyclic GFR-binding peptide
  MOD_RES (1)..(35): Xaa is C or S
  MOD_RES (15)..(16)..(17)..(18)..(19): Xaa is A or G
  MOD_RES (20)..(21)..(22)..(23): Xaa is A or G or absent
XAPTKLRPVQVRKIXXXXXXXXXKKATVNMVVRSXG

SEQ ID NO: 29183 - protein, 35 aa, Artificial Sequence
  Non-cyclic GFR-binding peptide
  MOD_RES (2)..(3)..(34): Xaa is C or S
PXXVPQALRSVKIAKVVGRKPKVKEVQVMIVRSXK

SEQ ID NO: 29184 - protein, 38 aa, Artificial Sequence
  Non-cyclic GFR-binding peptide
  MOD_RES (4)..(5)..(36)..(38): Xaa is C or S
AAPXXVPQALRSVKIAKVVGRKPKVKEVQVMIVRSXKX

SEQ ID NO: 29185 - protein, 41 aa, Artificial Sequence
  Non-cyclic GFR-binding peptide
  MOD_RES (6)..(7)..(39)..(41): Xaa is C or S
YVPKPXXAPTKLRSVKVAKVDDSSNVIKEVQVNMVVRSXGX

SEQ ID NO: 29186 - protein, 37 aa, Artificial Sequence
  Non-cyclic GFR-binding peptide
  MOD_RES (3)..(4): Xaa is C or S
  MOD_RES (18)..(19)..(20)..(21)..(22): Xaa is A or G
  MOD_RES (23)..(24)..(25)..(26): Xaa is A or G or absent
KAXXVPTELRSVKMAKVXXXXXXXXXKEVQVDMVVEG

SEQ ID NO: 29187 - protein, 37 aa, Artificial Sequence
  Non-cyclic GFR-binding peptide
  MOD_RES (36)..(36): Xaa is C or S
PTQVQLEPLTVLYYEIVRKKPIFEQLSNTLEDHLAXK

SEQ ID NO: 29188 - protein, 35 aa, Artificial Sequence
  Non-cyclic GFR-binding peptide
  MOD_RES (1)..(35): Xaa is C or S
  MOD_RES (15)..(16)..(17)..(18)..(19): Xaa is A or G
  MOD_RES (20)..(21)..(22)..(23): Xaa is A or G or absent
XVPTEEEPLPMVYYXXXXXXXXXEQLSNFLQHNKX

SEQ ID NO: 29189 - protein, 34 aa, Artificial Sequence
  Non-cyclic GFR-binding peptide
  MOD_RES (1)..(2)..(34): Xaa is C or S
XXAPTKLRPVQVRKIDDSSNVIKKATVNMVVRSX

SEQ ID NO: 29190 - protein, 40 aa, Artificial Sequence
  Non-cyclic GFR-binding peptide
  MOD_RES (6)..(7): Xaa is C or S
  MOD_RES (21)..(22)..(23)..(24)..(25): Xaa is A or G
  MOD_RES (26)..(27)..(28)..(29): Xaa is A or G or absent
SIPKAXXVPTELRSVKMAKVXXXXXXXXXKEVQVEMVVEG

SEQ ID NO: 29191 - protein, 42 aa, Artificial Sequence
  Non-cyclic GFR-binding peptide
  MOD_RES (5)..(42): Xaa is C or S
  MOD_RES (21)..(22)..(23)..(24)..(25): Xaa is A or G
  MOD_RES (26)..(27)..(28)..(29): Xaa is A or G or absent
RNVQXRPTQVQLEPLPVVYYXXXXXXXXXEQLSNTLEDHLAX

SEQ ID NO: 29192 - protein, 35 aa, Artificial Sequence
  Non-cyclic GFR-binding peptide
  MOD_RES (34)..(34): Xaa is C or S
  MOD_RES (14)..(15)..(16)..(17)..(18): Xaa is A or G
  MOD_RES (19)..(20)..(21)..(22): Xaa is A or G or absent
VPTELRSVKMAKVXXXXXXXXXKEVQVEMVVEGXG

SEQ ID NO: 29193 - protein, 37 aa, Artificial Sequence
  Non-cyclic GFR-binding peptide
  MOD_RES (1)..(35)..(37): Xaa is C or S
  MOD_RES (15)..(16)..(17)..(18)..(19): Xaa is A or G
  MOD_RES (20)..(21)..(22)..(23): Xaa is A or G or absent
XAPTKLRSVKVAKVXXXXXXXXXKEVQVNMVVRSXGX

SEQ ID NO: 29194 - protein, 40 aa, Artificial Sequence
  Non-cyclic GFR-binding peptide
  MOD_RES (3)..(40): Xaa is C or S
  MOD_RES (19)..(20)..(21)..(22)..(23): Xaa is A or G
  MOD_RES (24)..(25)..(26)..(27): Xaa is A or G or absent
VKXQPSRVHHEPLPVVYYXXXXXXXXXEQLSNRLEEHLEX

SEQ ID NO: 29195 - protein, 36 aa, Artificial Sequence
  Non-cyclic GFR-binding peptide
  MOD_RES (5)..(5): Xaa is C or S
TKPTXAPTKLRSVKVAKVDDSSNVIKEVQVNMVVRS

SEQ ID NO: 29196 - protein, 30 aa, Artificial Sequence; identical to SEQ ID NO: 1139
  Non-cyclic GFR-binding peptide

SEQ ID NO: 29197 - protein, 40 aa, Artificial Sequence
  Non-cyclic GFR-binding peptide
  MOD_RES (5)..(6)..(38)..(40): Xaa is C or S
IPKAXXVPTELRSVKMAKVDENEKVVKEVQVDMVVEGXGX

SEQ ID NO: 29198 - protein, 36 aa, Artificial Sequence
  Non-cyclic GFR-binding peptide
  MOD_RES (3)..(4): Xaa is C or S
  MOD_RES (18)..(19)..(20)..(21)..(22): Xaa is A or G
  MOD_RES (23)..(24)..(25)..(26): Xaa is A or G or absent
SPXXVSQDLSNITIQIMXXXXXXXXXIGEMSMIVKS

SEQ ID NO: 29199 - protein, 38 aa, Artificial Sequence
  Non-cyclic GFR-binding peptide
  MOD_RES (3)..(4)..(36)..(38): Xaa is C or S
KPXXAPTKLRSVKVAKVDDSSNVIKEVQVNMVVRSXGX

SEQ ID NO: 29200 - protein, 38 aa, Artificial Sequence
  Non-cyclic GFR-binding peptide
  MOD_RES (37)..(37): Xaa is C or S
QPSRVHHEPLPVVYYEYVRKKPKLEQLSNRLEEHLEXA

SEQ ID NO: 29201 - protein, 38 aa, Artificial Sequence
  Non-cyclic GFR-binding peptide
  MOD_RES (4)..(5)..(37): Xaa is C or S
PKAXXVPTELRSVKMAKVDEYDKVVKEVQVEMVVEGXG

SEQ ID NO: 29202 - protein, 40 aa, Artificial Sequence
  Non-cyclic GFR-binding peptide
  MOD_RES (5)..(6)..(40): Xaa is C or S
  MOD_RES (20)..(21)..(22)..(23)..(24): Xaa is A or G
  MOD_RES (25)..(26)..(27)..(28): Xaa is A or G or absent
IPKAXXVPTELRPVQMRKIXXXXXXXXXKKATVEMVVEGX

SEQ ID NO: 29203 - protein, 39 aa, Artificial Sequence
  Non-cyclic GFR-binding peptide
  MOD_RES (5)..(6)..(38): Xaa is C or S
IPKAXXVPTELRSVKMAKVDENEKVVKEVQVDMVVEGXG

SEQ ID NO: 29204 - protein, 40 aa, Artificial Sequence
  Non-cyclic GFR-binding peptide
  MOD_RES (5)..(6)..(37)..(39): Xaa is C or S
SASPXXVPQDLRSVKIAKVVGRTPKVKEVQVMVVKSXKXS

SEQ ID NO: 29205 - protein, 44 aa, Artificial Sequence
  Non-cyclic GFR-binding peptide
  MOD_RES (7)..(41)..(43): Xaa is C or S
  MOD_RES (21)..(22)..(23)..(24)..(25): Xaa is A or G
  MOD_RES (26)..(27)..(28)..(29): Xaa is A or G or absent
NDEGLEXVPTEEEPLPMVYYXXXXXXXXXEQLSNFLQHNKXEXR

SEQ ID NO: 29206 - protein, 36 aa, Artificial Sequence
  Non-cyclic GFR-binding peptide
  MOD_RES (1)..(2)..(34)..(36): Xaa is C or S
XXVPTELSNITMQIMDENEKVVIGEMSDMVVEGXGX

SEQ ID NO: 29207 - protein, 38 aa, Artificial Sequence
  Non-cyclic GFR-binding peptide
  MOD_RES (3)..(4)..(37): Xaa is C or S
  MOD_RES (18)..(19)..(20)..(21)..(22): Xaa is A or G
  MOD_RES (23)..(24)..(25)..(26): Xaa is A or G or absent
SPXXVPQDLSNITIQIMXXXXXXXXXIGEMSMVVKSXK

SEQ ID NO: 29208 - protein, 40 aa, Artificial Sequence
  Non-cyclic GFR-binding peptide
  MOD_RES (7)..(39): Xaa is C or S
HVTKPTXAPTKLRPVQVRKIDDSSNVIKKATVNMVVRSXG

SEQ ID NO: 29209 - protein, 32 aa, Artificial Sequence
  Non-cyclic GFR-binding peptide
  MOD_RES (1)..(2): Xaa is C or S
XXAPTQLSNITVQIMDDSSNVIIGEMSNMVVR

SEQ ID NO: 29210 - protein, 39 aa, Artificial Sequence
  Non-cyclic GFR-binding peptide
  MOD_RES (1)..(38): Xaa is C or S
XRPTQVQLEPLTVLYYEIVRKKPIFEQLSNTLEDHLAXK

SEQ ID NO: 29211 - protein, 39 aa, Artificial Sequence
  Non-cyclic GFR-binding peptide
  MOD_RES (3)..(4)..(36)..(38): Xaa is C or S
KPXXAPTQLSNITVQIMDDSSNVIIGEMSNMVVRAXGXH

SEQ ID NO: 29212 - protein, 37 aa, Artificial Sequence
  Non-cyclic GFR-binding peptide
  MOD_RES (4)..(5)..(37): Xaa is C or S
PKAXXVPTELRPVQMRKIDEYDKVVKKATVEMVVEGX

SEQ ID NO: 29213 - protein, 36 aa, Artificial Sequence
  Non-cyclic GFR-binding peptide
  MOD_RES (4)..(4): Xaa is C or S
  MOD_RES (18)..(19)..(20)..(21)..(22): Xaa is A or G
  MOD_RES (23)..(24)..(25)..(26): Xaa is A or G or absent
KPTXAPTKLSNITVQIMXXXXXXXXXIGEMSNMVVR

SEQ ID NO: 29214 - protein, 37 aa, Artificial Sequence
  Non-cyclic GFR-binding peptide
  MOD_RES (2)..(36): Xaa is C or S
  MOD_RES (16)..(17)..(18)..(19)..(20): Xaa is A or G
  MOD_RES (21)..(22)..(23)..(24): Xaa is A or G or absent
TXAPTKLRPVQVRKIXXXXXXXXXKKATVNMVVRSXG

SEQ ID NO: 29215 - protein, 38 aa, Artificial Sequence
  Non-cyclic GFR-binding peptide
  MOD_RES (5)..(37): Xaa is C or S
TKPTXAPTKLSNITVQIMDDSSNVIIGEMSNMVVRSXG

SEQ ID NO: 29216 - protein, 38 aa, Artificial Sequence
  Non-cyclic GFR-binding peptide
  MOD_RES (3)..(4)..(35)..(37): Xaa is C or S
APXXVPQALSNITIQIMVGRKPKVIGEMSMIVRSXKXS

SEQ ID NO: 29217 - protein, 37 aa, Artificial Sequence
  Non-cyclic GFR-binding peptide
  MOD_RES (1)..(2)..(36): Xaa is C or S
  MOD_RES (16)..(17)..(18)..(19)..(20): Xaa is A or G
  MOD_RES (21)..(22)..(23)..(24): Xaa is A or G or absent
XXAPTKLSNITVQIMXXXXXXXXXIGEMSNMVVRSXG

SEQ ID NO: 29218 - protein, 39 aa, Artificial Sequence
  Non-cyclic GFR-binding peptide
  MOD_RES (3)..(4)..(37)..(39): Xaa is C or S
  MOD_RES (18)..(19)..(20)..(21)..(22): Xaa is A or G
  MOD_RES (23)..(24)..(25)..(26): Xaa is A or G or absent
APXXVPQALRPVQIRKIXXXXXXXXXKKATVMIVRSXKX

SEQ ID NO: 29219 - protein, 38 aa, Artificial Sequence
  Non-cyclic GFR-binding peptide
  MOD_RES (4)..(5)..(37): Xaa is C or S
PKAXXVPTELRPVQMRKIDENEKVVKKATVDMVVEGXG

SEQ ID NO: 29220 - protein, 39 aa, Artificial Sequence
  Non-cyclic GFR-binding peptide
  MOD_RES (36)..(38): Xaa is C or S
  MOD_RES (15)..(16)..(17)..(18)..(19): Xaa is A or G
  MOD_RES (20)..(21)..(22)..(23): Xaa is A or G or absent
PTQVQLEPLTVLYYXXXXXXXXXEQLSNTLEDHLAXKXE

SEQ ID NO: 29221 - protein, 43 aa, Artificial Sequence
  Non-cyclic GFR-binding peptide
  MOD_RES (5)..(6)..(40)..(42): Xaa is C or S
  MOD_RES (20)..(21)..(22)..(23)..(24): Xaa is A or G
  MOD_RES (25)..(26)..(27)..(28): Xaa is A or G or absent
IPKAXXVPTELSNITMQIMXXXXXXXXXIGEMSEMVVEGXGXR

SEQ ID NO: 29222 - protein, 42 aa, Artificial Sequence
  Non-cyclic GFR-binding peptide
  MOD_RES (6)..(7)..(39)..(41): Xaa is C or S
YVPKPXXAPTKLRSVKVAKVDDSSNVIKEVQVNMVVRSXGXH

SEQ ID NO: 29223 - protein, 35 aa, Artificial Sequence
  Non-cyclic GFR-binding peptide
  MOD_RES (4)..(5): Xaa is C or S
ASPXXVSQDLSNITIQIMIGKTPKIIGEMSMIVKS

SEQ ID NO: 29224 - protein, 43 aa, Artificial Sequence
  Non-cyclic GFR-binding peptide
  MOD_RES (3)..(40)..(42): Xaa is C or S
VKXQPSRVHHEPLTVLYYEYVRKKPKLEQLSNRLEEHLEXAXA

SEQ ID NO: 29225 - protein, 34 aa, Artificial Sequence
  Non-cyclic GFR-binding peptide
  MOD_RES (3)..(4): Xaa is C or S
KPXXAPTQLRSVKVAKVDDSSNVIKEVQVNMVVR

SEQ ID NO: 29226 - protein, 35 aa, Artificial Sequence
  Non-cyclic GFR-binding peptide
  MOD_RES (1)..(2)..(33)..(35): Xaa is C or S
XXVSQDLRSVKIAKVIGKTPKIKEVQVMIVKSXKX

SEQ ID NO: 29227 - protein, 40 aa, Artificial Sequence
  Non-cyclic GFR-binding peptide
  MOD_RES (2)..(39): Xaa is C or S
  MOD_RES (18)..(19)..(20)..(21)..(22): Xaa is A or G
  MOD_RES (23)..(24)..(25)..(26): Xaa is A or G or absent
KXQPSRVHHEPLTVLYYXXXXXXXXXEQLSNRLEEHLEXA

SEQ ID NO: 29228 - protein, 42 aa, Artificial Sequence
  Non-cyclic GFR-binding peptide
  MOD_RES (5)..(6)..(39)..(41): Xaa is C or S
  MOD_RES (20)..(21)..(22)..(23)..(24): Xaa is A or G
  MOD_RES (25)..(26)..(27)..(28): Xaa is A or G or absent
SAAPXXVPQALRSVKIAKVXXXXXXXXXKEVQVMIVRSXKXS

SEQ ID NO: 29229 - protein, 37 aa, Artificial Sequence
  Non-cyclic GFR-binding peptide
  MOD_RES (4)..(5)..(37): Xaa is C or S
PKAXXVPTELRSVKMAKVDEYDKVVKEVQVEMVVEGX

SEQ ID NO: 29230 - protein, 34 aa, Artificial Sequence
  Non-cyclic GFR-binding peptide
  MOD_RES (2)..(3): Xaa is C or S
PXXAPTKLRPVQVRKIDDSSNVIKKATVNMVVRS

SEQ ID NO: 29231 - protein, 43 aa, Artificial Sequence
  Non-cyclic GFR-binding peptide
  MOD_RES (6)..(7)..(41)..(43): Xaa is C or S
  MOD_RES (21)..(22)..(23)..(24)..(25): Xaa is A or G
  MOD_RES (26)..(27)..(28)..(29): Xaa is A or G or absent
KIPKAXXVPTELSNITMQIMXXXXXXXXXIGEMSDMVVEGXGX

SEQ ID NO: 29232 - protein, 41 aa, Artificial Sequence
  Non-cyclic GFR-binding peptide
  MOD_RES (5)..(39)..(41): Xaa is C or S
  MOD_RES (19)..(20)..(21)..(22)..(23): Xaa is A or G
  MOD_RES (24)..(25)..(26)..(27): Xaa is A or G or absent
TKPTXAPTKLSNITVQIMXXXXXXXXXIGEMSNMVVRSXGX

SEQ ID NO: 29233 - protein, 36 aa, Artificial Sequence
  Non-cyclic GFR-binding peptide
  MOD_RES (5)..(6): Xaa is C or S
VPKPXXAPTQLRSVKVAKVDDSSNVIKEVQVNMVVR

SEQ ID NO: 29234 - protein, 42 aa, Artificial Sequence
  Non-cyclic GFR-binding peptide
  MOD_RES (5)..(42): Xaa is C or S
RNVQXRPTQVQLEPLPVVYYEIVRKKPIFEQLSNTLEDHLAX

SEQ ID NO: 29235 - protein, 33 aa, Artificial Sequence
  Non-cyclic GFR-binding peptide
  MOD_RES (1)..(1): Xaa is C or S
XVPTEEEPLPMVYYRIKPHQGQHEQLSNFLQHN

SEQ ID NO: 29236 - protein, 37 aa, Artificial Sequence
  Non-cyclic GFR-binding peptide
  MOD_RES (1)..(2)..(36): Xaa is C or S
  MOD_RES (16)..(17)..(18)..(19)..(20): Xaa is A or G
  MOD_RES (21)..(22)..(23)..(24): Xaa is A or G or absent
XXVPTELRSVKMAKVXXXXXXXXXKEVQVEMVVEGXG

SEQ ID NO: 29237 - protein, 33 aa, Artificial Sequence
  Non-cyclic GFR-binding peptide
TQVQLEPLTVLYYEIVRKKPIFEQLSNTLEDHL

SEQ ID NO: 29238 - protein, 35 aa, Artificial Sequence
  Non-cyclic GFR-binding peptide
  MOD_RES (2)..(3): Xaa is C or S
  MOD_RES (17)..(18)..(19)..(20)..(21): Xaa is A or G
  MOD_RES (22)..(23)..(24)..(25): Xaa is A or G or absent
PXXVPQALRSVKIAKVXXXXXXXXXKEVQVMIVRS

SEQ ID NO: 29239 - protein, 40 aa, Artificial Sequence
  Non-cyclic GFR-binding peptide
  MOD_RES (4)..(4): Xaa is C or S
  MOD_RES (20)..(21)..(22)..(23)..(24): Xaa is A or G
  MOD_RES (25)..(26)..(27)..(28): Xaa is A or G or absent
SVKXQPSRVHHEPLTVLYYXXXXXXXXXEQLSNRLEEHLE

SEQ ID NO: 29240 - protein, 39 aa, Artificial Sequence
  Non-cyclic GFR-binding peptide
  MOD_RES (2)..(36)..(38): Xaa is C or S
  MOD_RES (16)..(17)..(18)..(19)..(20): Xaa is A or G
  MOD_RES (21)..(22)..(23)..(24): Xaa is A or G or absent
TXAPTKLRSVKVAKVXXXXXXXXXKEVQVNMVVRSXGXH

SEQ ID NO: 29241 - protein, 39 aa, Artificial Sequence
  Non-cyclic GFR-binding peptide
  MOD_RES (4)..(5)..(37)..(39): Xaa is C or S
PKPXXAPTQLRSVKVAKVDDSSNVIKEVQVNMVVRAXGX

SEQ ID NO: 29242 - protein, 39 aa, Artificial Sequence
  Non-cyclic GFR-binding peptide
  MOD_RES (36)..(38): Xaa is C or S
PTQVQLEPLPVVYYEIVRKKPIFEQLSNTLEDHLAXKXE

SEQ ID NO: 29243 - protein, 34 aa, Artificial Sequence
  Non-cyclic GFR-binding peptide
  MOD_RES (1)..(2)..(33): Xaa is C or S
XXVPQDLRPVQIRKIVGRTPKVKKATVMVVKSXK

SEQ ID NO: 29244 - protein, 35 aa, Artificial Sequence
  Non-cyclic GFR-binding peptide
  MOD_RES (3)..(4)..(35): Xaa is C or S
SPXXVPQDLSNITIQIMVGRTPKVIGEMSMVVKSX

SEQ ID NO: 29245 - protein, 41 aa, Artificial Sequence
  Non-cyclic GFR-binding peptide
  MOD_RES (4)..(5)..(39)..(41): Xaa is C or S
  MOD_RES (19)..(20)..(21)..(22)..(23): Xaa is A or G
  MOD_RES (24)..(25)..(26)..(27): Xaa is A or G or absent
PKAXXVPTELRPVQMRKIXXXXXXXXXKKATVDMVVEGXGX

SEQ ID NO: 29246 - protein, 41 aa, Artificial Sequence
  Non-cyclic GFR-binding peptide
  MOD_RES (3)..(4)..(38)..(40): Xaa is C or S
  MOD_RES (18)..(19)..(20)..(21)..(22): Xaa is A or G
  MOD_RES (23)..(24)..(25)..(26): Xaa is A or G or absent
KAXXVPTELRPVQMRKIXXXXXXXXXKKATVDMVVEGXGXR

SEQ ID NO: 29247 - protein, 37 aa, Artificial Sequence
  Non-cyclic GFR-binding peptide
  MOD_RES (4)..(5)..(37): Xaa is C or S
PKPXXAPTKLRSVKVAKVDDSSNVIKEVQVNMVVRSX

SEQ ID NO: 29248 - protein, 34 aa, Artificial Sequence
  Non-cyclic GFR-binding peptide
  MOD_RES (1)..(2)..(34): Xaa is C or S
XXAPTKLRSVKVAKVDDSSNVIKEVQVNMVVRSX

SEQ ID NO: 29249 - protein, 32 aa, Artificial Sequence
  Non-cyclic GFR-binding peptide
  MOD_RES (1)..(1): Xaa is C or S
XVPTELSNITMQIMDENEKVVIGEMSDMVVEG

SEQ ID NO: 29250 - protein, 38 aa, Artificial Sequence
  Non-cyclic GFR-binding peptide
  MOD_RES (3)..(4)..(38): Xaa is C or S
  MOD_RES (18)..(19)..(20)..(21)..(22): Xaa is A or G
  MOD_RES (23)..(24)..(25)..(26): Xaa is A or G or absent
KAXXVPTELRPVQMRKIXXXXXXXXXKKATVEMVVEGX

SEQ ID NO: 29251 - protein, 36 aa, Artificial Sequence
  Non-cyclic GFR-binding peptide
  MOD_RES (4)..(5): Xaa is C or S
PKPXXAPTKLRSVKVAKVDDSSNVIKEVQVNMVVRS

SEQ ID NO: 29252 - protein, 39 aa, Artificial Sequence
  Non-cyclic GFR-binding peptide
  MOD_RES (4)..(5)..(39): Xaa is C or S
  MOD_RES (19)..(20)..(21)..(22)..(23): Xaa is A or G
  MOD_RES (24)..(25)..(26)..(27): Xaa is A or G or absent
PKAXXVPTELSNITMQIMXXXXXXXXXIGEMSDMVVEGX

SEQ ID NO: 29253 - protein, 44 aa, Artificial Sequence
  Non-cyclic GFR-binding peptide
  MOD_RES (4)..(41)..(43): Xaa is C or S
NVQXRPTQVQLEPLTVLYYEIVRKKPIFEQLSNTLEDHLAXKXE

SEQ ID NO: 29254 - protein, 33 aa, Artificial Sequence
  Non-cyclic GFR-binding peptide
  MOD_RES (2)..(3): Xaa is C or S
PXXAPTQLRPVQVRKIDDSSNVIKKATVNMVVR

SEQ ID NO: 29255 - protein, 38 aa, Artificial Sequence
  Non-cyclic GFR-binding peptide
  MOD_RES (6)..(6): Xaa is C or S
  MOD_RES (20)..(21)..(22)..(23)..(24): Xaa is A or G
  MOD_RES (25)..(26)..(27)..(28): Xaa is A or G or absent
VTKPTXAPTKLRPVQVRKIXXXXXXXXXKKATVNMVVR

SEQ ID NO: 29256 - protein, 34 aa, Artificial Sequence
  Non-cyclic GFR-binding peptide
  MOD_RES (1)..(2)..(34): Xaa is C or S
XXVPTELSNITMQIMDENEKVVIGEMSDMVVEGX

SEQ ID NO: 29257 - protein, 38 aa, Artificial Sequence
  Non-cyclic GFR-binding peptide
  MOD_RES (4)..(5): Xaa is C or S
  MOD_RES (19)..(20)..(21)..(22)..(23): Xaa is A or G
  MOD_RES (24)..(25)..(26)..(27): Xaa is A or G or absent
PKPXXAPTQLRSVKVAKVXXXXXXXXXKEVQVNMVVRA

SEQ ID NO: 29258 - protein, 39 aa, Artificial Sequence
  Non-cyclic GFR-binding peptide
  MOD_RES (36)..(38): Xaa is C or S
  MOD_RES (15)..(16)..(17)..(18)..(19): Xaa is A or G
  MOD_RES (20)..(21)..(22)..(23): Xaa is A or G or absent
PSRVHHEPLTVLYYXXXXXXXXXEQLSNRLEEHLEXAXA

SEQ ID NO: 29259 - protein, 35 aa, Artificial Sequence
  Non-cyclic GFR-binding peptide
  MOD_RES (1)..(33)..(35): Xaa is C or S
XVPTELRPVQMRKIDEYDKVVKKATVEMVVEGXGX

SEQ ID NO: 29260 - protein, 39 aa, Artificial Sequence
  Non-cyclic GFR-binding peptide
  MOD_RES (2)..(3)..(37)..(39): Xaa is C or S
  MOD_RES (17)..(18)..(19)..(20)..(21): Xaa is A or G
  MOD_RES (22)..(23)..(24)..(25): Xaa is A or G or absent
PXXAPTKLRSVKVAKVXXXXXXXXXKEVQVNMVVRSXGX

SEQ ID NO: 29261 - protein, 42 aa, Artificial Sequence
  Non-cyclic GFR-binding peptide
  MOD_RES (5)..(6)..(40)..(42): Xaa is C or S
  MOD_RES (20)..(21)..(22)..(23)..(24): Xaa is A or G
  MOD_RES (25)..(26)..(27)..(28): Xaa is A or G or absent
VPKPXXAPTQLSNITVQIMXXXXXXXXXIGEMSNMVVRAXGX

SEQ ID NO: 29262 - protein, 39 aa, Artificial Sequence
  Non-cyclic GFR-binding peptide
  MOD_RES (4)..(4): Xaa is C or S
NVQXRPTQVQLEPLPVVYYEIVRKKPIFEQLSNTLEDHL

SEQ ID NO: 29263 - protein, 36 aa, Artificial Sequence
  Non-cyclic GFR-binding peptide
  MOD_RES (2)..(3)..(35): Xaa is C or S
AXXVPTELSNITMQIMDEYDKVVIGEMSEMVVEGXG

SEQ ID NO: 29264 - protein, 37 aa, Artificial Sequence
  Non-cyclic GFR-binding peptide
  MOD_RES (4)..(5): Xaa is C or S
  MOD_RES (19)..(20)..(21)..(22)..(23): Xaa is A or G
  MOD_RES (24)..(25)..(26)..(27): Xaa is A or G or absent
ASPXXVSQDLRPVQIRKIXXXXXXXXXKKATVMIVKS

SEQ ID NO: 29265 - protein, 36 aa, Artificial Sequence
  Non-cyclic GFR-binding peptide
  MOD_RES (2)..(3): Xaa is C or S
  MOD_RES (17)..(18)..(19)..(20)..(21): Xaa is A or G
  MOD_RES (22)..(23)..(24)..(25): Xaa is A or G or absent
PXXAPTQLSNITVQIMXXXXXXXXXIGEMSNMVVRA

SEQ ID NO: 29266 - protein, 35 aa, Artificial Sequence
  Non-cyclic GFR-binding peptide
  MOD_RES (1)..(2)..(33)..(35): Xaa is C or S
XXVPQDLRPVQIRKIVGRTPKVKKATVMVVKSXKX

SEQ ID NO: 29267 - protein, 34 aa, Artificial Sequence
  Non-cyclic GFR-binding peptide
  MOD_RES (3)..(4): Xaa is C or S
SPXXVSQDLRPVQIRKIIGKTPKIKKATVMIVKS

SEQ ID NO: 29268 - protein, 39 aa, Artificial Sequence
  Non-cyclic GFR-binding peptide
  MOD_RES (3)..(4)..(37)..(39): Xaa is C or S
  MOD_RES (18)..(19)..(20)..(21)..(22): Xaa is A or G
  MOD_RES (23)..(24)..(25)..(26): Xaa is A or G or absent
SPXXVSQDLRPVQIRKIXXXXXXXXXKKATVMIVKSXKX

SEQ ID NO: 29269 - protein, 40 aa, Artificial Sequence
  Non-cyclic GFR-binding peptide
  MOD_RES (5)..(6)..(39): Xaa is C or S
  MOD_RES (20)..(21)..(22)..(23)..(24): Xaa is A or G
  MOD_RES (25)..(26)..(27)..(28): Xaa is A or G or absent
SASPXXVPQDLSNITIQIMXXXXXXXXXIGEMSMVVKSXK

SEQ ID NO: 29270 - protein, 38 aa, Artificial Sequence
  Non-cyclic GFR-binding peptide
  MOD_RES (4)..(5)..(38): Xaa is C or S
  MOD_RES (19)..(20)..(21)..(22)..(23): Xaa is A or G
  MOD_RES (24)..(25)..(26)..(27): Xaa is A or G or absent
ASPXXVSQDLRPVQIRKIXXXXXXXXXKKATVMIVKSX

SEQ ID NO: 29271 - protein, 36 aa, Artificial Sequence
  Non-cyclic GFR-binding peptide
  MOD_RES (1)..(2)..(34)..(36): Xaa is C or S
XXAPTQLSNITVQIMDDSSNVIIGEMSNMVVRAXGX

SEQ ID NO: 29272 - protein, 42 aa, Artificial Sequence
  Non-cyclic GFR-binding peptide
  MOD_RES (4)..(41): Xaa is C or S
SVKXQPSRVHHEPLTVLYYEYVRKKPKLEQLSNRLEEHLEXA

SEQ ID NO: 29273 - protein, 39 aa, Artificial Sequence
  Non-cyclic GFR-binding peptide
  MOD_RES (6)..(6): Xaa is C or S
  MOD_RES (20)..(21)..(22)..(23)..(24): Xaa is A or G
  MOD_RES (25)..(26)..(27)..(28): Xaa is A or G or absent
DEGLEXVPTEEEPLPMVYYXXXXXXXXXEQLSNFLQHNK

SEQ ID NO: 29274 - protein, 35 aa, Artificial Sequence
  Non-cyclic GFR-binding peptide
  MOD_RES (1)..(2): Xaa is C or S
  MOD_RES (16)..(17)..(18)..(19)..(20): Xaa is A or G
  MOD_RES (21)..(22)..(23)..(24): Xaa is A or G or absent
XXAPTQLRSVKVAKVXXXXXXXXXKEVQVNMVVRA

SEQ ID NO: 29275 - protein, 40 aa, Artificial Sequence
  Non-cyclic GFR-binding peptide
  MOD_RES (4)..(5)..(37)..(39): Xaa is C or S
PKPXXAPTQLRSVKVAKVDDSSNVIKEVQVNMVVRAXGXH

SEQ ID NO: 29276 - protein, 34 aa, Artificial Sequence
  Non-cyclic GFR-binding peptide
  MOD_RES (1)..(33): Xaa is C or S
XAPTQLRSVKVAKVDDSSNVIKEVQVNMVVRAXG

SEQ ID NO: 29277 - protein, 37 aa, Artificial Sequence
  Non-cyclic GFR-binding peptide
  MOD_RES (3)..(35)..(37): Xaa is C or S
PTXAPTKLRPVQVRKIDDSSNVIKKATVNMVVRSXGX

SEQ ID NO: 29278 - protein, 35 aa, Artificial Sequence
  Non-cyclic GFR-binding peptide
  MOD_RES (35)..(35): Xaa is C or S
  MOD_RES (14)..(15)..(16)..(17)..(18): Xaa is A or G
  MOD_RES (19)..(20)..(21)..(22): Xaa is A or G or absent
SRVHHEPLTVLYYXXXXXXXXXEQLSNRLEEHLEX

SEQ ID NO: 29279 - protein, 41 aa, Artificial Sequence
  Non-cyclic GFR-binding peptide
  MOD_RES (6)..(7)..(39)..(41): Xaa is C or S
TVPKPXXAPTQLRPVQVRKIDDSSNVIKKATVNMVVRAXGX

SEQ ID NO: 29280 - protein, 36 aa, Artificial Sequence
  Non-cyclic GFR-binding peptide
  MOD_RES (5)..(6): Xaa is C or S
IPKAXXVPTELSNITMQIMDENEKVVIGEMSDMVVE

SEQ ID NO: 29281 - protein, 40 aa, Artificial Sequence
  Non-cyclic GFR-binding peptide
  MOD_RES (2)..(3)..(37)..(39): Xaa is C or S
  MOD_RES (17)..(18)..(19)..(20)..(21): Xaa is A or G
  MOD_RES (22)..(23)..(24)..(25): Xaa is A or G or absent
AXXVPTELRPVQMRKIXXXXXXXXXKKATVDMVVEGXGXR

SEQ ID NO: 29282 - protein, 41 aa, Artificial Sequence
  Non-cyclic GFR-binding peptide
  MOD_RES (3)..(40): Xaa is C or S
  MOD_RES (19)..(20)..(21)..(22)..(23): Xaa is A or G
  MOD_RES (24)..(25)..(26)..(27): Xaa is A or G or absent
VKXQPSRVHHEPLPVVYYXXXXXXXXXEQLSNRLEEHLEXA

SEQ ID NO: 29283 - protein, 37 aa, Artificial Sequence
  Non-cyclic GFR-binding peptide
  MOD_RES (2)..(3)..(36): Xaa is C or S
  MOD_RES (17)..(18)..(19)..(20)..(21): Xaa is A or G
  MOD_RES (22)..(23)..(24)..(25): Xaa is A or G or absent
PXXVSQDLRPVQIRKIXXXXXXXXXKKATVMIVKSXK

SEQ ID NO: 29284 - protein, 34 aa, Artificial Sequence
  Non-cyclic GFR-binding peptide
  MOD_RES (1)..(32)..(34): Xaa is C or S
XVPQALSNITIQIMVGRKPKVIGEMSMIVRSXKX

SEQ ID NO: 29285 - protein, 39 aa, Artificial Sequence
  Non-cyclic GFR-binding peptide
  MOD_RES (5)..(6)..(38): Xaa is C or S
VPKPXXAPTQLSNITVQIMDDSSNVIIGEMSNMVVRAXG

SEQ ID NO: 29286 - protein, 42 aa, Artificial Sequence
  Non-cyclic GFR-binding peptide
  MOD_RES (6)..(7)..(40)..(42): Xaa is C or S
  MOD_RES (21)..(22)..(23)..(24)..(25): Xaa is A or G
  MOD_RES (26)..(27)..(28)..(29): Xaa is A or G or absent
ASASPXXVSQDLRPVQIRKIXXXXXXXXXKKATVMIVKSXKX

SEQ ID NO: 29287 - protein, 36 aa, Artificial Sequence
  Non-cyclic GFR-binding peptide
  MOD_RES (2)..(3)..(36): Xaa is C or S
  MOD_RES (17)..(18)..(19)..(20)..(21): Xaa is A or G
  MOD_RES (22)..(23)..(24)..(25): Xaa is A or G or absent
PXXVPQALSNITIQIMXXXXXXXXXIGEMSMIVRSX

SEQ ID NO: 29288 - protein, 44 aa, Artificial Sequence
  Non-cyclic GFR-binding peptide
  MOD_RES (4)..(41)..(43): Xaa is C or S
SVKXQPSRVHHEPLTVLYYEYVRKKPKLEQLSNRLEEHLEXAXA

SEQ ID NO: 29289 - protein, 40 aa, Artificial Sequence
  Non-cyclic GFR-binding peptide
  MOD_RES (3)..(4)..(38)..(40): Xaa is C or S
  MOD_RES (18)..(19)..(20)..(21)..(22): Xaa is A or G
  MOD_RES (23)..(24)..(25)..(26): Xaa is A or G or absent
KAXXVPTELSNITMQIMXXXXXXXXXIGEMSDMVVEGXGX

SEQ ID NO: 29290 - protein, 33 aa, Artificial Sequence
  Non-cyclic GFR-binding peptide
  MOD_RES (1)..(1): Xaa is C or S
  MOD_RES (15)..(16)..(17)..(18)..(19): Xaa is A or G
  MOD_RES (20)..(21)..(22)..(23): Xaa is A or G or absent
XVPTELSNITMQIMXXXXXXXXXIGEMSDMVVE

SEQ ID NO: 29291 - protein, 40 aa, Artificial Sequence
  Non-cyclic GFR-binding peptide
  MOD_RES (5)..(6)..(38)..(40): Xaa is C or S
IPKAXXVPTELRSVKMAKVDEYDKVVKEVQVEMVVEGXGX

SEQ ID NO: 29292 - protein, 34 aa, Artificial Sequence
  Non-cyclic GFR-binding peptide
  MOD_RES (14)..(15)..(16)..(17)..(18): Xaa is A or G
  MOD_RES (19)..(20)..(21)..(22): Xaa is A or G or absent
SRVHHEPLTVLYYXXXXXXXXXEQLSNRLEEHLE

SEQ ID NO: 29293 - protein, 42 aa, Artificial Sequence
  Non-cyclic GFR-binding peptide
  MOD_RES (6)..(7)..(41): Xaa is C or S
  MOD_RES (21)..(22)..(23)..(24)..(25): Xaa is A or G
  MOD_RES (26)..(27)..(28)..(29): Xaa is A or G or absent
KIPKAXXVPTELRPVQMRKIXXXXXXXXXKKATVDMVVEGXG

SEQ ID NO: 29294 - protein, 35 aa, Artificial Sequence
  Non-cyclic GFR-binding peptide
  MOD_RES (1)..(35): Xaa is C or S
  MOD_RES (15)..(16)..(17)..(18)..(19): Xaa is A or G
  MOD_RES (20)..(21)..(22)..(23): Xaa is A or G or absent
XAPTKLRSVKVAKVXXXXXXXXXKEVQVNMVVRSX

SEQ ID NO: 29295 - protein, 35 aa, Artificial Sequence
  Non-cyclic GFR-binding peptide
  MOD_RES (2)..(3)..(34): Xaa is C or S
PXXVPQALRPVQIRKIVGRKPKVKKATVMIVRSXK

SEQ ID NO: 29296 - protein, 35 aa, Artificial Sequence
  Non-cyclic GFR-binding peptide
  MOD_RES (15)..(16)..(17)..(18)..(19): Xaa is A or G
  MOD_RES (20)..(21)..(22)..(23): Xaa is A or G or absent
PSRVHHEPLPVVYYXXXXXXXXXEQLSNRLEEHLE

SEQ ID NO: 29297 - protein, 39 aa, Artificial Sequence
  Non-cyclic GFR-binding peptide
  MOD_RES (37)..(39): Xaa is C or S
QPSRVHHEPLTVLYYEYVRKKPKLEQLSNRLEEHLEXAX

SEQ ID NO: 29298 - protein, 42 aa, Artificial Sequence
  Non-cyclic GFR-binding peptide
  MOD_RES (6)..(7)..(40)..(42): Xaa is C or S
  MOD_RES (21)..(22)..(23)..(24)..(25): Xaa is A or G
  MOD_RES (26)..(27)..(28)..(29): Xaa is A or G or absent
ASAAPXXVPQALRPVQIRKIXXXXXXXXXKKATVMIVRSXKX

SEQ ID NO: 29299 - protein, 36 aa, Artificial Sequence
  Non-cyclic GFR-binding peptide
  MOD_RES (4)..(36): Xaa is C or S
KPTXAPTKLRPVQVRKIDDSSNVIKKATVNMVVRSX

SEQ ID NO: 29300 - protein, 41 aa, Artificial Sequence
  Non-cyclic GFR-binding peptide
  MOD_RES (5)..(6)..(38)..(40): Xaa is C or S
IPKAXXVPTELSNITMQIMDENEKVVIGEMSDMVVEGXGXR

SEQ ID NO: 29301 - protein, 39 aa, Artificial Sequence
  Non-cyclic GFR-binding peptide
  MOD_RES (36)..(38): Xaa is C or S
  MOD_RES (15)..(16)..(17)..(18)..(19): Xaa is A or G
  MOD_RES (20)..(21)..(22)..(23): Xaa is A or G or absent
PTQVQLEPLPVVYYXXXXXXXXXEQLSNTLEDHLAXKXE

SEQ ID NO: 29302 - protein, 35 aa, Artificial Sequence
  Non-cyclic GFR-binding peptide
  MOD_RES (1)..(33)..(35): Xaa is C or S
XVPTELRPVQMRKIDENEKVVKKATVDMVVEGXGX

SEQ ID NO: 29303 - protein, 42 aa, Artificial Sequence
  Non-cyclic GFR-binding peptide
  MOD_RES (5)..(39)..(41): Xaa is C or S
  MOD_RES (19)..(20)..(21)..(22)..(23): Xaa is A or G
  MOD_RES (24)..(25)..(26)..(27): Xaa is A or G or absent
TKPTXAPTKLSNITVQIMXXXXXXXXXIGEMSNMVVRSXGXH

SEQ ID NO: 29304 - protein, 35 aa, Artificial Sequence
  Non-cyclic GFR-binding peptide
  MOD_RES (3)..(3): Xaa is C or S
  MOD_RES (17)..(18)..(19)..(20)..(21): Xaa is A or G
  MOD_RES (22)..(23)..(24)..(25): Xaa is A or G or absent
PTXAPTKLRSVKVAKVXXXXXXXXXKEVQVNMVVR

SEQ ID NO: 29305 - protein, 39 aa, Artificial Sequence
  Non-cyclic GFR-binding peptide
  MOD_RES (5)..(39): Xaa is C or S
  MOD_RES (19)..(20)..(21)..(22)..(23): Xaa is A or G
  MOD_RES (24)..(25)..(26)..(27): Xaa is A or G or absent
EGLEXVPTEEEPLTMLYYXXXXXXXXXEQLSNFLQHNKX

SEQ ID NO: 29306 - protein, 37 aa, Artificial Sequence
  Non-cyclic GFR-binding peptide
  MOD_RES (1)..(35)..(37): Xaa is C or S
  MOD_RES (15)..(16)..(17)..(18)..(19): Xaa is A or G
  MOD_RES (20)..(21)..(22)..(23): Xaa is A or G or absent
XVPTELRSVKMAKVXXXXXXXXXKEVQVEMVVEGXGX

SEQ ID NO: 29307 - protein, 35 aa, Artificial Sequence
  Non-cyclic GFR-binding peptide
  MOD_RES (4)..(5): Xaa is C or S
AAPXXVPQALRSVKIAKVVGRKPKVKEVQVMIVRS

SEQ ID NO: 29308 - protein, 42 aa, Artificial Sequence
  Non-cyclic GFR-binding peptide
  MOD_RES (6)..(7)..(41): Xaa is C or S
  MOD_RES (21)..(22)..(23)..(24)..(25): Xaa is A or G
  MOD_RES (26)..(27)..(28)..(29): Xaa is A or G or absent
SIPKAXXVPTELSNITMQIMXXXXXXXXXIGEMSEMVVEGXG

SEQ ID NO: 29309 - protein, 35 aa, Artificial Sequence
  Non-cyclic GFR-binding peptide
  MOD_RES (1)..(2)..(34): Xaa is C or S
XXAPTKLSNITVQIMDDSSNVIIGEMSNMVVRSXG

SEQ ID NO: 29310 - protein, 39 aa, Artificial Sequence
  Non-cyclic GFR-binding peptide
  MOD_RES (4)..(5)..(36)..(38): Xaa is C or S
AAPXXVPQALRSVKIAKVVGRKPKVKEVQVMIVRSXKXS

SEQ ID NO: 29311 - protein, 40 aa, Artificial Sequence
  Non-cyclic GFR-binding peptide
  MOD_RES (4)..(5)..(38)..(40): Xaa is C or S
  MOD_RES (19)..(20)..(21)..(22)..(23): Xaa is A or G
  MOD_RES (24)..(25)..(26)..(27): Xaa is A or G or absent
AAPXXVPQALRSVKIAKVXXXXXXXXXKEVQVMIVRSXKX

SEQ ID NO: 29312 - protein, 37 aa, Artificial Sequence
  Non-cyclic GFR-binding peptide
  MOD_RES (4)..(5): Xaa is C or S
  MOD_RES (19)..(20)..(21)..(22)..(23): Xaa is A or G
  MOD_RES (24)..(25)..(26)..(27): Xaa is A or G or absent
PKPXXAPTQLRPVQVRKIXXXXXXXXXKKATVNMVVR

SEQ ID NO: 29313 - protein, 35 aa, Artificial Sequence
  Non-cyclic GFR-binding peptide
  MOD_RES (3)..(35): Xaa is C or S
PTXAPTKLRSVKVAKVDDSSNVIKEVQVNMVVRSX

SEQ ID NO: 29314 - protein, 32 aa, Artificial Sequence
  Non-cyclic GFR-binding peptide
  MOD_RES (14)..(15)..(16)..(17)..(18): Xaa is A or G
  MOD_RES (19)..(20)..(21)..(22): Xaa is A or G or absent
VPTELRSVKMAKVXXXXXXXXXKEVQVEMVVE

SEQ ID NO: 29315 - protein, 35 aa, Artificial Sequence
  Non-cyclic GFR-binding peptide
  MOD_RES (1)..(34): Xaa is C or S
  MOD_RES (15)..(16)..(17)..(18)..(19): Xaa is A or G
  MOD_RES (20)..(21)..(22)..(23): Xaa is A or G or absent
XVPQDLRPVQIRKIXXXXXXXXXKKATVMVVKSXK

SEQ ID NO: 29316 - protein, 36 aa, Artificial Sequence
  Non-cyclic GFR-binding peptide
  MOD_RES (3)..(35): Xaa is C or S
PTXAPTKLRPVQVRKIDDSSNVIKKATVNMVVRSXG

SEQ ID NO: 29317 - protein, 34 aa, Artificial Sequence
  Non-cyclic GFR-binding peptide
  MOD_RES (34)..(34): Xaa is C or S
  MOD_RES (14)..(15)..(16)..(17)..(18): Xaa is A or G
  MOD_RES (19)..(20)..(21)..(22): Xaa is A or G or absent
VPTELRPVQMRKIXXXXXXXXXKKATVDMVVEGX

SEQ ID NO: 29318 - protein, 36 aa, Artificial Sequence
  Non-cyclic GFR-binding peptide
  MOD_RES (1)..(35): Xaa is C or S
  MOD_RES (15)..(16)..(17)..(18)..(19): Xaa is A or G
  MOD_RES (20)..(21)..(22)..(23): Xaa is A or G or absent
XAPTQLSNITVQIMXXXXXXXXXIGEMSNMVVRAXG

SEQ ID NO: 29319 - protein, 34 aa, Artificial Sequence
  Non-cyclic GFR-binding peptide
  MOD_RES (1)..(34): Xaa is C or S
  MOD_RES (15)..(16)..(17)..(18)..(19): Xaa is A or G
  MOD_RES (20)..(21)..(22)..(23): Xaa is A or G or absent
XVSQDLRPVQIRKIXXXXXXXXXKKATVMIVKSX

SEQ ID NO: 29320 - protein, 37 aa, Artificial Sequence
  Non-cyclic GFR-binding peptide
  MOD_RES (1)..(2)..(36): Xaa is C or S
  MOD_RES (16)..(17)..(18)..(19)..(20): Xaa is A or G
  MOD_RES (21)..(22)..(23)..(24): Xaa is A or G or absent
XXVPTELRPVQMRKIXXXXXXXXXKKATVEMVVEGXG

SEQ ID NO: 29321 - protein, 33 aa, Artificial Sequence
  Non-cyclic GFR-binding peptide
  MOD_RES (1)..(33): Xaa is C or S
XAPTQLRPVQVRKIDDSSNVIKKATVNMVVRAX

SEQ ID NO: 29322 - protein, 35 aa, Artificial Sequence
  Non-cyclic GFR-binding peptide
  MOD_RES (2)..(3)..(35): Xaa is C or S
AXXVPTELSNITMQIMDENEKVVIGEMSDMVVEGX

SEQ ID NO: 29323 - protein, 42 aa, Artificial Sequence
  Non-cyclic GFR-binding peptide
  MOD_RES (3)..(40)..(42): Xaa is C or S
  MOD_RES (19)..(20)..(21)..(22)..(23): Xaa is A or G
  MOD_RES (24)..(25)..(26)..(27): Xaa is A or G or absent
VKXQPSRVHHEPLPVVYYXXXXXXXXXEQLSNRLEEHLEXAX

SEQ ID NO: 29324 - protein, 37 aa, Artificial Sequence
  Non-cyclic GFR-binding peptide
  MOD_RES (5)..(6): Xaa is C or S
VPKPXXAPTQLRSVKVAKVDDSSNVIKEVQVNMVVRA

SEQ ID NO: 29325 - protein, 36 aa, Artificial Sequence
  Non-cyclic GFR-binding peptide
  MOD_RES (1)..(1): Xaa is C or S
  MOD_RES (17)..(18)..(19)..(20)..(21): Xaa is A or G
  MOD_RES (22)..(23)..(24)..(25): Xaa is A or G or absent
XQPSRVHHEPLPVVYYXXXXXXXXXEQLSNRLEEHL

SEQ ID NO: 29326 - protein, 36 aa, Artificial Sequence
  Non-cyclic GFR-binding peptide
  MOD_RES (2)..(3)..(35): Xaa is C or S
PXXAPTQLRSVKVAKVDDSSNVIKEVQVNMVVRAXG

SEQ ID NO: 29327 - protein, 38 aa, Artificial Sequence
  Non-cyclic GFR-binding peptide
  MOD_RES (1)..(35)..(37): Xaa is C or S
  MOD_RES (15)..(16)..(17)..(18)..(19): Xaa is A or G
  MOD_RES (20)..(21)..(22)..(23): Xaa is A or G or absent
XAPTKLRSVKVAKVXXXXXXXXXKEVQVNMVVRSXGXH

SEQ ID NO: 29328 - protein, 42 aa, Artificial Sequence
  Non-cyclic GFR-binding peptide
  MOD_RES (5)..(6)..(39)..(41): Xaa is C or S
  MOD_RES (20)..(21)..(22)..(23)..(24): Xaa is A or G
  MOD_RES (25)..(26)..(27)..(28): Xaa is A or G or absent
SAAPXXVPQALRPVQIRKIXXXXXXXXXKKATVMIVRSXKXS

SEQ ID NO: 29329 - protein, 36 aa, Artificial Sequence
  Non-cyclic GFR-binding peptide
RPTQVQLEPLPVVYYEIVRKKPIFEQLSNTLEDHLA

SEQ ID NO: 29330 - protein, 33 aa, Artificial Sequence
  Non-cyclic GFR-binding peptide
  MOD_RES (1)..(33): Xaa is C or S
XVPTELRSVKMAKVDENEKVVKEVQVDMVVEGX

SEQ ID NO: 29331 - protein, 40 aa, Artificial Sequence
  Non-cyclic GFR-binding peptide
  MOD_RES (4)..(5)..(38)..(40): Xaa is C or S
  MOD_RES (19)..(20)..(21)..(22)..(23): Xaa is A or G
  MOD_RES (24)..(25)..(26)..(27): Xaa is A or G or absent
ASPXXVSQDLRSVKIAKVXXXXXXXXXKEVQVMIVKSXKX

SEQ ID NO: 29332 - protein, 37 aa, Artificial Sequence
  Non-cyclic GFR-binding peptide
  MOD_RES (3)..(4)..(36): Xaa is C or S
KPXXAPTKLRPVQVRKIDDSSNVIKKATVNMVVRSXG

SEQ ID NO: 29333 - protein, 43 aa, Artificial Sequence
  Non-cyclic GFR-binding peptide
  MOD_RES (6)..(7)..(40)..(42): Xaa is C or S
  MOD_RES (21)..(22)..(23)..(24)..(25): Xaa is A or G
  MOD_RES (26)..(27)..(28)..(29): Xaa is A or G or absent
ASASPXXVSQDLRPVQIRKIXXXXXXXXXKKATVMIVKSXKXS

SEQ ID NO: 29334 - protein, 39 aa, Artificial Sequence
  Non-cyclic GFR-binding peptide
  MOD_RES (2)..(39): Xaa is C or S
KXQPSRVHHEPLPVVYYEYVRKKPKLEQLSNRLEEHLEX

SEQ ID NO: 29335 - protein, 38 aa, Artificial Sequence
  Non-cyclic GFR-binding peptide
  MOD_RES (2)..(36)..(38): Xaa is C or S
  MOD_RES (16)..(17)..(18)..(19)..(20): Xaa is A or G
  MOD_RES (21)..(22)..(23)..(24): Xaa is A or G or absent
EXVPTEEEPLPMVYYXXXXXXXXXEQLSNFLQHNKXEX

SEQ ID NO: 29336 - protein, 41 aa, Artificial Sequence
  Non-cyclic GFR-binding peptide
  MOD_RES (5)..(6)..(38)..(40): Xaa is C or S
VPKPXXAPTKLRSVKVAKVDDSSNVIKEVQVNMVVRSXGXH

SEQ ID NO: 29337 - protein, 35 aa, Artificial Sequence
  Non-cyclic GFR-binding peptide
  MOD_RES (1)..(33)..(35): Xaa is C or S
XAPTQLRSVKVAKVDDSSNVIKEVQVNMVVRAXGX

SEQ ID NO: 29338 - protein, 32 aa, Artificial Sequence
  Non-cyclic GFR-binding peptide
  MOD_RES (14)..(15)..(16)..(17)..(18): Xaa is A or G
  MOD_RES (19)..(20)..(21)..(22): Xaa is A or G or absent
VPQALRSVKIAKVXXXXXXXXXKEVQVMIVRS

SEQ ID NO: 29339 - protein, 42 aa, Artificial Sequence
  Non-cyclic GFR-binding peptide
  MOD_RES (5)..(6)..(40)..(42): Xaa is C or S
  MOD_RES (20)..(21)..(22)..(23)..(24): Xaa is A or G
  MOD_RES (25)..(26)..(27)..(28): Xaa is A or G or absent
IPKAXXVPTELRPVQMRKIXXXXXXXXXKKATVDMVVEGXGX

SEQ ID NO: 29340 - protein, 40 aa, Artificial Sequence
  Non-cyclic GFR-binding peptide
  MOD_RES (3)..(37)..(39): Xaa is C or S
  MOD_RES (17)..(18)..(19)..(20)..(21): Xaa is A or G
  MOD_RES (22)..(23)..(24)..(25): Xaa is A or G or absent
LEXVPTEEEPLPMVYYXXXXXXXXXEQLSNFLQHNKXEXR

SEQ ID NO: 29341 - protein, 39 aa, Artificial Sequence
  Non-cyclic GFR-binding peptide
  MOD_RES (3)..(4)..(37)..(39): Xaa is C or S
  MOD_RES (18)..(19)..(20)..(21)..(22): Xaa is A or G
  MOD_RES (23)..(24)..(25)..(26): Xaa is A or G or absent
SPXXVPQDLRPVQIRKIXXXXXXXXXKKATVMVVKSXKX

SEQ ID NO: 29342 - protein, 38 aa, Artificial Sequence
  Non-cyclic GFR-binding peptide
  MOD_RES (3)..(4)..(35)..(37): Xaa is C or S
SPXXVSQDLSNITIQIMIGKTPKIIGEMSMIVKSXKXS

SEQ ID NO: 29343 - protein, 41 aa, Artificial Sequence
  Non-cyclic GFR-binding peptide
  MOD_RES (5)..(5): Xaa is C or S
  MOD_RES (21)..(22)..(23)..(24)..(25): Xaa is A or G
  MOD_RES (26)..(27)..(28)..(29): Xaa is A or G or absent
RNVQXRPTQVQLEPLTVLYYXXXXXXXXXEQLSNTLEDHLA

SEQ ID NO: 29344 - protein, 39 aa, Artificial Sequence
  Non-cyclic GFR-binding peptide
  MOD_RES (2)..(3)..(37)..(39): Xaa is C or S
  MOD_RES (17)..(18)..(19)..(20)..(21): Xaa is A or G
  MOD_RES (22)..(23)..(24)..(25): Xaa is A or G or absent
PXXAPTKLRPVQVRKIXXXXXXXXXKKATVNMVVRSXGX

SEQ ID NO: 29345 - protein, 34 aa, Artificial Sequence
  Non-cyclic GFR-binding peptide
  MOD_RES (34)..(34): Xaa is C or S
VPTEEEPLTMLYYRIKPHQGQHEQLSNFLQHNKX

SEQ ID NO: 29346 - protein, 41 aa, Artificial Sequence
  Non-cyclic GFR-binding peptide
  MOD_RES (4)..(5)..(39)..(41): Xaa is C or S
  MOD_RES (19)..(20)..(21)..(22)..(23): Xaa is A or G
  MOD_RES (24)..(25)..(26)..(27): Xaa is A or G or absent
PKAXXVPTELRSVKMAKVXXXXXXXXXKEVQVDMVVEGXGX

SEQ ID NO: 29347 - protein, 32 aa, Artificial Sequence
  Non-cyclic GFR-binding peptide
  MOD_RES (32)..(32): Xaa is C or S
APTQLSNITVQIMDDSSNVIIGEMSNMVVRAX

SEQ ID NO: 29348 - protein, 39 aa, Artificial Sequence
  Non-cyclic GFR-binding peptide
  MOD_RES (6)..(7)..(39): Xaa is C or S
YVPKPXXAPTKLSNITVQIMDDSSNVIIGEMSNMVVRSX

SEQ ID NO: 29349 - protein, 38 aa, Artificial Sequence
  Non-cyclic GFR-binding peptide
  MOD_RES (2)..(3)..(35)..(37): Xaa is C or S
PXXAPTKLSNITVQIMDDSSNVIIGEMSNMVVRSXGXH

SEQ ID NO: 29350 - protein, 39 aa, Artificial Sequence
  Non-cyclic GFR-binding peptide
  MOD_RES (3)..(4)..(38): Xaa is C or S
  MOD_RES (18)..(19)..(20)..(21)..(22): Xaa is A or G
  MOD_RES (23)..(24)..(25)..(26): Xaa is A or G or absent
KAXXVPTELRPVQMRKIXXXXXXXXXKKATVDMVVEGXG

SEQ ID NO: 29351 - protein, 34 aa, Artificial Sequence
  Non-cyclic GFR-binding peptide
TQVQLEPLTVLYYEIVRKKPIFEQLSNTLEDHLA

SEQ ID NO: 29352 - protein, 40 aa, Artificial Sequence
  Non-cyclic GFR-binding peptide
  MOD_RES (7)..(7): Xaa is C or S
  MOD_RES (21)..(22)..(23)..(24)..(25): Xaa is A or G
  MOD_RES (26)..(27)..(28)..(29): Xaa is A or G or absent
NDEGLEXVPTEEEPLPMVYYXXXXXXXXXEQLSNFLQHNK

SEQ ID NO: 29353 - protein, 36 aa, Artificial Sequence
  Non-cyclic GFR-binding peptide
  MOD_RES (33)..(35): Xaa is C or S
  MOD_RES (14)..(15)..(16)..(17)..(18): Xaa is A or G
  MOD_RES (19)..(20)..(21)..(22): Xaa is A or G or absent
VPQDLRPVQIRKIXXXXXXXXXKKATVMVVKSXKXS

SEQ ID NO: 29354 - protein, 41 aa, Artificial Sequence
  Non-cyclic GFR-binding peptide
  MOD_RES (6)..(40): Xaa is C or S
  MOD_RES (20)..(21)..(22)..(23)..(24): Xaa is A or G
  MOD_RES (25)..(26)..(27)..(28): Xaa is A or G or absent
DEGLEXVPTEEEPLPMVYYXXXXXXXXXEQLSNFLQHNKXE

SEQ ID NO: 29355 - protein, 33 aa, Artificial Sequence
  Non-cyclic GFR-binding peptide
  MOD_RES (1)..(2): Xaa is C or S
XXAPTKLSNITVQIMDDSSNVIIGEMSNMVVRS

SEQ ID NO: 29356 - protein, 39 aa, Artificial Sequence
  Non-cyclic GFR-binding peptide
  MOD_RES (4)..(5)..(38): Xaa is C or S
  MOD_RES (19)..(20)..(21)..(22)..(23): Xaa is A or G
  MOD_RES (24)..(25)..(26)..(27): Xaa is A or G or absent
ASPXXVSQDLRSVKIAKVXXXXXXXXXKEVQVMIVKSXK

SEQ ID NO: 29357 - protein, 40 aa, Artificial Sequence
  Non-cyclic GFR-binding peptide
  MOD_RES (6)..(7)..(40): Xaa is C or S
  MOD_RES (21)..(22)..(23)..(24)..(25): Xaa is A or G
  MOD_RES (26)..(27)..(28)..(29): Xaa is A or G or absent
ASAAPXXVPQALRSVKIAKVXXXXXXXXXKEVQVMIVRSX

SEQ ID NO: 29358 - protein, 35 aa, Artificial Sequence
  Non-cyclic GFR-binding peptide
RPTQVQLEPLPVVYYEIVRKKPIFEQLSNTLEDHL

SEQ ID NO: 29359 - protein, 33 aa, Artificial Sequence
  Non-cyclic GFR-binding peptide
  MOD_RES (1)..(1): Xaa is C or S
XVPTEEEPLTMLYYRIKPHQGQHEQLSNFLQHN

SEQ ID NO: 29360 - protein, 36 aa, Artificial Sequence
  Non-cyclic GFR-binding peptide
  MOD_RES (4)..(5)..(36): Xaa is C or S
ASPXXVPQDLRSVKIAKVVGRTPKVKEVQVMVVKSX

SEQ ID NO: 29361 - protein, 34 aa, Artificial Sequence
  Non-cyclic GFR-binding peptide
  MOD_RES (3)..(4): Xaa is C or S
KPXXAPTQLSNITVQIMDDSSNVIIGEMSNMVVR

SEQ ID NO: 29362 - protein, 40 aa, Artificial Sequence
  Non-cyclic GFR-binding peptide
  MOD_RES (5)..(5): Xaa is C or S
SSVKXQPSRVHHEPLTVLYYEYVRKKPKLEQLSNRLEEHL

SEQ ID NO: 29363 - protein, 37 aa, Artificial Sequence
  Non-cyclic GFR-binding peptide
  MOD_RES (5)..(37): Xaa is C or S
TKPTXAPTKLRPVQVRKIDDSSNVIKKATVNMVVRSX

SEQ ID NO: 29364 - protein, 35 aa, Artificial Sequence
  Non-cyclic GFR-binding peptide
  MOD_RES (1)..(35): Xaa is C or S
XVPTEEEPLTMLYYRIKPHQGQHEQLSNFLQHNKX

SEQ ID NO: 29365 - protein, 35 aa, Artificial Sequence
  Non-cyclic GFR-binding peptide
  MOD_RES (2)..(3): Xaa is C or S
  MOD_RES (17)..(18)..(19)..(20)..(21): Xaa is A or G
  MOD_RES (22)..(23)..(24)..(25): Xaa is A or G or absent
AXXVPTELSNITMQIMXXXXXXXXXIGEMSEMVVE

SEQ ID NO: 29366 - protein, 38 aa, Artificial Sequence
  Non-cyclic GFR-binding peptide
  MOD_RES (5)..(6): Xaa is C or S
  MOD_RES (20)..(21)..(22)..(23)..(24): Xaa is A or G
  MOD_RES (25)..(26)..(27)..(28): Xaa is A or G or absent
IPKAXXVPTELSNITMQIMXXXXXXXXXIGEMSDMVVE

SEQ ID NO: 29367 - protein, 35 aa, Artificial Sequence
  Non-cyclic GFR-binding peptide
  MOD_RES (33)..(35): Xaa is C or S
  MOD_RES (14)..(15)..(16)..(17)..(18): Xaa is A or G
  MOD_RES (19)..(20)..(21)..(22): Xaa is A or G or absent
VPQDLRPVQIRKIXXXXXXXXXKKATVMVVKSXKX

SEQ ID NO: 29368 - protein, 43 aa, Artificial Sequence
  Non-cyclic GFR-binding peptide
  MOD_RES (3)..(40)..(42): Xaa is C or S
VQXRPTQVQLEPLPVVYYEIVRKKPIFEQLSNTLEDHLAXKXE

SEQ ID NO: 29369 - protein, 38 aa, Artificial Sequence
  Non-cyclic GFR-binding peptide
  MOD_RES (6)..(7): Xaa is C or S
YVPKPXXAPTKLRSVKVAKVDDSSNVIKEVQVNMVVRS

SEQ ID NO: 29370 - protein, 33 aa, Artificial Sequence
  Non-cyclic GFR-binding peptide
  MOD_RES (1)..(1): Xaa is C or S
  MOD_RES (15)..(16)..(17)..(18)..(19): Xaa is A or G
  MOD_RES (20)..(21)..(22)..(23): Xaa is A or G or absent
XVPQDLSNITIQIMXXXXXXXXXIGEMSMVVKS

SEQ ID NO: 29371 - protein, 38 aa, Artificial Sequence
  Non-cyclic GFR-binding peptide
  MOD_RES (6)..(6): Xaa is C or S
  MOD_RES (20)..(21)..(22)..(23)..(24): Xaa is A or G
  MOD_RES (25)..(26)..(27)..(28): Xaa is A or G or absent
VTKPTXAPTKLRSVKVAKVXXXXXXXXXKEVQVNMVVR

SEQ ID NO: 29372 - protein, 42 aa, Artificial Sequence
  Non-cyclic GFR-binding peptide
  MOD_RES (6)..(40)..(42): Xaa is C or S
  MOD_RES (20)..(21)..(22)..(23)..(24): Xaa is A or G
  MOD_RES (25)..(26)..(27)..(28): Xaa is A or G or absent
VTKPTXAPTKLRPVQVRKIXXXXXXXXXKKATVNMVVRSXGX

SEQ ID NO: 29373 - protein, 35 aa, Artificial Sequence
  Non-cyclic GFR-binding peptide
  MOD_RES (33)..(35): Xaa is C or S
  MOD_RES (14)..(15)..(16)..(17)..(18): Xaa is A or G
  MOD_RES (19)..(20)..(21)..(22): Xaa is A or G or absent
VSQDLRSVKIAKVXXXXXXXXXKEVQVMIVKSXKX

SEQ ID NO: 29374 - protein, 37 aa, Artificial Sequence
  Non-cyclic GFR-binding peptide
  MOD_RES (3)..(4)..(36): Xaa is C or S
KAXXVPTELRSVKMAKVDEYDKVVKEVQVEMVVEGXG

SEQ ID NO: 29375 - protein, 37 aa, Artificial Sequence
  Non-cyclic GFR-binding peptide
  MOD_RES (2)..(2): Xaa is C or S
QXRPTQVQLEPLPVVYYEIVRKKPIFEQLSNTLEDHL

SEQ ID NO: 29376 - protein, 32 aa, Artificial Sequence
  Non-cyclic GFR-binding peptide
VPTEEEPLPMVYYRIKPHQGQHEQLSNFLQHN

SEQ ID NO: 29377 - protein, 34 aa, Artificial Sequence
  Non-cyclic GFR-binding peptide
  MOD_RES (1)..(2)..(34): Xaa is C or S
XXAPTQLRPVQVRKIDDSSNVIKKATVNMVVRAX

SEQ ID NO: 29378 - protein, 41 aa, Artificial Sequence
  Non-cyclic GFR-binding peptide
  MOD_RES (4)..(41): Xaa is C or S
  MOD_RES (20)..(21)..(22)..(23)..(24): Xaa is A or G
  MOD_RES (25)..(26)..(27)..(28): Xaa is A or G or absent
SVKXQPSRVHHEPLTVLYYXXXXXXXXXEQLSNRLEEHLEX

SEQ ID NO: 29379 - protein, 35 aa, Artificial Sequence
  Non-cyclic GFR-binding peptide
  MOD_RES (33)..(35): Xaa is C or S
  MOD_RES (14)..(15)..(16)..(17)..(18): Xaa is A or G
  MOD_RES (19)..(20)..(21)..(22): Xaa is A or G or absent
VPQALRPVQIRKIXXXXXXXXXKKATVMIVRSXKX

SEQ ID NO: 29380 - protein, 39 aa, Artificial Sequence
  Non-cyclic GFR-binding peptide
  MOD_RES (2)..(39): Xaa is C or S
  MOD_RES (18)..(19)..(20)..(21)..(22): Xaa is A or G
  MOD_RES (23)..(24)..(25)..(26): Xaa is A or G or absent
QXRPTQVQLEPLPVVYYXXXXXXXXXEQLSNTLEDHLAX

SEQ ID NO: 29381 - protein, 32 aa, Artificial Sequence
  Non-cyclic GFR-binding peptide
  MOD_RES (1)..(2): Xaa is C or S
XXVSQDLRPVQIRKIIGKTPKIKKATVMIVKS

SEQ ID NO: 29382 - protein, 33 aa, Artificial Sequence
  Non-cyclic GFR-binding peptide
  MOD_RES (31)..(33): Xaa is C or S
VPQALSNITIQIMVGRKPKVIGEMSMIVRSXKX

SEQ ID NO: 29383 - protein, 38 aa, Artificial Sequence
  Non-cyclic GFR-binding peptide
  MOD_RES (6)..(7): Xaa is C or S
SIPKAXXVPTELRSVKMAKVDEYDKVVKEVQVEMVVEG

SEQ ID NO: 29384 - protein, 40 aa, Artificial Sequence
  Non-cyclic GFR-binding peptide
  MOD_RES (3)..(4)..(38)..(40): Xaa is C or S
  MOD_RES (18)..(19)..(20)..(21)..(22): Xaa is A or G
  MOD_RES (23)..(24)..(25)..(26): Xaa is A or G or absent
KPXXAPTQLRPVQVRKIXXXXXXXXXKKATVNMVVRAXGX

SEQ ID NO: 29385 - protein, 38 aa, Artificial Sequence
  Non-cyclic GFR-binding peptide
  MOD_RES (7)..(7): Xaa is C or S
HVTKPTXAPTKLRSVKVAKVDDSSNVIKEVQVNMVVRS

SEQ ID NO: 29386 - protein, 37 aa, Artificial Sequence
  Non-cyclic GFR-binding peptide
  MOD_RES (2)..(3)..(37): Xaa is C or S
  MOD_RES (17)..(18)..(19)..(20)..(21): Xaa is A or G
  MOD_RES (22)..(23)..(24)..(25): Xaa is A or G or absent
PXXAPTKLRPVQVRKIXXXXXXXXXKKATVNMVVRSX

SEQ ID NO: 29387 - protein, 38 aa, Artificial Sequence
  Non-cyclic GFR-binding peptide
  MOD_RES (2)..(36)..(38): Xaa is C or S
EXVPTEEEPLTMLYYRIKPHQGQHEQLSNFLQHNKXEX

SEQ ID NO: 29388 - protein, 40 aa, Artificial Sequence
  Non-cyclic GFR-binding peptide
  MOD_RES (4)..(38)..(40): Xaa is C or S
  MOD_RES (18)..(19)..(20)..(21)..(22): Xaa is A or G
  MOD_RES (23)..(24)..(25)..(26): Xaa is A or G or absent
GLEXVPTEEEPLTMLYYXXXXXXXXXEQLSNFLQHNKXEX

SEQ ID NO: 29389 - protein, 38 aa, Artificial Sequence
  Non-cyclic GFR-binding peptide
  MOD_RES (1)..(2)..(36)..(38): Xaa is C or S
  MOD_RES (16)..(17)..(18)..(19)..(20): Xaa is A or G
  MOD_RES (21)..(22)..(23)..(24): Xaa is A or G or absent
XXVPTELSNITMQIMXXXXXXXXXIGEMSEMVVEGXGX

SEQ ID NO: 29390 - protein, 36 aa, Artificial Sequence
  Non-cyclic GFR-binding peptide
  MOD_RES (34)..(36): Xaa is C or S
VPTEEEPLTMLYYRIKPHQGQHEQLSNFLQHNKXEX

SEQ ID NO: 29391 - protein, 38 aa, Artificial Sequence
  Non-cyclic GFR-binding peptide
  MOD_RES (35)..(37): Xaa is C or S
SRVHHEPLTVLYYEYVRKKPKLEQLSNRLEEHLEXAXA

SEQ ID NO: 29392 - protein, 31 aa, Artificial Sequence
  Non-cyclic GFR-binding peptide
  MOD_RES (31)..(31): Xaa is C or S
VPQDLRPVQIRKIVGRTPKVKKATVMVVKSX

SEQ ID NO: 29393 - protein, 41 aa, Artificial Sequence
  Non-cyclic GFR-binding peptide
  MOD_RES (5)..(6)..(38)..(40): Xaa is C or S
IPKAXXVPTELRSVKMAKVDENEKVVKEVQVDMVVEGXGXR

SEQ ID NO: 29394 - protein, 39 aa, Artificial Sequence
  Non-cyclic GFR-binding peptide
  MOD_RES (6)..(7): Xaa is C or S
  MOD_RES (21)..(22)..(23)..(24)..(25): Xaa is A or G
  MOD_RES (26)..(27)..(28)..(29): Xaa is A or G or absent
YVPKPXXAPTKLSNITVQIMXXXXXXXXXIGEMSNMVVR

SEQ ID NO: 29395 - protein, 43 aa, Artificial Sequence
  Non-cyclic GFR-binding peptide
  MOD_RES (6)..(7)..(41)..(43): Xaa is C or S
  MOD_RES (21)..(22)..(23)..(24)..(25): Xaa is A or G
  MOD_RES (26)..(27)..(28)..(29): Xaa is A or G or absent
TVPKPXXAPTQLSNITVQIMXXXXXXXXXIGEMSNMVVRAXGX

SEQ ID NO: 29396 - protein, 32 aa, Artificial Sequence
  Non-cyclic GFR-binding peptide
  MOD_RES (1)..(32): Xaa is C or S
XVSQDLRPVQIRKIIGKTPKIKKATVMIVKSX

SEQ ID NO: 29397 - protein, 34 aa, Artificial Sequence
  Non-cyclic GFR-binding peptide
  MOD_RES (2)..(34): Xaa is C or S
TXAPTKLSNITVQIMDDSSNVIIGEMSNMVVRSX

SEQ ID NO: 29398 - protein, 35 aa, Artificial Sequence
  Non-cyclic GFR-binding peptide
  MOD_RES (32)..(34): Xaa is C or S
APTQLSNITVQIMDDSSNVIIGEMSNMVVRAXGXH

SEQ ID NO: 29399 - protein, 44 aa, Artificial Sequence
  Non-cyclic GFR-binding peptide
  MOD_RES (7)..(41)..(43): Xaa is C or S
  MOD_RES (21)..(22)..(23)..(24)..(25): Xaa is A or G
  MOD_RES (26)..(27)..(28)..(29): Xaa is A or G or absent
HVTKPTXAPTKLRPVQVRKIXXXXXXXXXKKATVNMVVRSXGXH

SEQ ID NO: 29400 - protein, 40 aa, Artificial Sequence
  Non-cyclic GFR-binding peptide
  MOD_RES (6)..(7)..(39): Xaa is C or S
SIPKAXXVPTELRSVKMAKVDEYDKVVKEVQVEMVVEGXG

SEQ ID NO: 29401 - protein, 31 aa, Artificial Sequence
  Non-cyclic GFR-binding peptide
  MOD_RES (1)..(1): Xaa is C or S
XVPTELSNITMQIMDENEKVVIGEMSDMVVE

SEQ ID NO: 29402 - protein, 38 aa, Artificial Sequence
  Non-cyclic GFR-binding peptide
  MOD_RES (1)..(38): Xaa is C or S
XRPTQVQLEPLTVLYYEIVRKKPIFEQLSNTLEDHLAX

SEQ ID NO: 29403 - protein, 39 aa, Artificial Sequence
  Non-cyclic GFR-binding peptide
  MOD_RES (5)..(6)..(39): Xaa is C or S
  MOD_RES (20)..(21)..(22)..(23)..(24): Xaa is A or G
  MOD_RES (25)..(26)..(27)..(28): Xaa is A or G or absent
SASPXXVPQDLRSVKIAKVXXXXXXXXXKEVQVMVVKSX

SEQ ID NO: 29404 - protein, 38 aa, Artificial Sequence
  Non-cyclic GFR-binding peptide
  MOD_RES (4)..(5): Xaa is C or S
  MOD_RES (19)..(20)..(21)..(22)..(23): Xaa is A or G
  MOD_RES (24)..(25)..(26)..(27): Xaa is A or G or absent
PKPXXAPTKLRSVKVAKVXXXXXXXXXKEVQVNMVVRS

SEQ ID NO: 29405 - protein, 34 aa, Artificial Sequence
  Non-cyclic GFR-binding peptide
  MOD_RES (2)..(34): Xaa is C or S
TXAPTKLRPVQVRKIDDSSNVIKKATVNMVVRSX

SEQ ID NO: 29406 - protein, 37 aa, Artificial Sequence
  Non-cyclic GFR-binding peptide
  MOD_RES (6)..(7): Xaa is C or S
TVPKPXXAPTQLRPVQVRKIDDSSNVIKKATVNMVVR

SEQ ID NO: 29407 - protein, 42 aa, Artificial Sequence
  Non-cyclic GFR-binding peptide
  MOD_RES (4)..(5)..(39)..(41): Xaa is C or S
  MOD_RES (19)..(20)..(21)..(22)..(23): Xaa is A or G
  MOD_RES (24)..(25)..(26)..(27): Xaa is A or G or absent
PKPXXAPTKLRPVQVRKIXXXXXXXXXKKATVNMVVRSXGXH

SEQ ID NO: 29408 - protein, 42 aa, Artificial Sequence
  Non-cyclic GFR-binding peptide
  MOD_RES (5)..(39)..(41): Xaa is C or S
  MOD_RES (19)..(20)..(21)..(22)..(23): Xaa is A or G
  MOD_RES (24)..(25)..(26)..(27): Xaa is A or G or absent
TKPTXAPTKLRSVKVAKVXXXXXXXXXKEVQVNMVVRSXGXH

SEQ ID NO: 29409 - protein, 37 aa, Artificial Sequence
  Non-cyclic GFR-binding peptide
  MOD_RES (1)..(2)..(34)..(36): Xaa is C or S
XXAPTQLSNITVQIMDDSSNVIIGEMSNMVVRAXGXH

SEQ ID NO: 29410 - protein, 38 aa, Artificial Sequence
  Non-cyclic GFR-binding peptide
  MOD_RES (1)..(38): Xaa is C or S
  MOD_RES (17)..(18)..(19)..(20)..(21): Xaa is A or G
  MOD_RES (22)..(23)..(24)..(25): Xaa is A or G or absent
XRPTQVQLEPLPVVYYXXXXXXXXXEQLSNTLEDHLAX

SEQ ID NO: 29411 - protein, 44 aa, Artificial Sequence
  Non-cyclic GFR-binding peptide
  MOD_RES (7)..(41)..(43): Xaa is C or S
  MOD_RES (21)..(22)..(23)..(24)..(25): Xaa is A or G
  MOD_RES (26)..(27)..(28)..(29): Xaa is A or G or absent
NDEGLEXVPTEEEPLTMLYYXXXXXXXXXEQLSNFLQHNKXEXR

SEQ ID NO: 29412 - protein, 39 aa, Artificial Sequence
  Non-cyclic GFR-binding peptide
  MOD_RES (37)..(39): Xaa is C or S
  MOD_RES (16)..(17)..(18)..(19)..(20): Xaa is A or G
  MOD_RES (21)..(22)..(23)..(24): Xaa is A or G or absent
QPSRVHHEPLPVVYYXXXXXXXXXEQLSNRLEEHLEXAX

SEQ ID NO: 29413 - protein, 40 aa, Artificial Sequence
  Non-cyclic GFR-binding peptide
  MOD_RES (5)..(6)..(37)..(39): Xaa is C or S
SASPXXVSQDLRPVQIRKIIGKTPKIKKATVMIVKSXKXS

SEQ ID NO: 29414 - protein, 36 aa, Artificial Sequence
  Non-cyclic GFR-binding peptide
  MOD_RES (2)..(3): Xaa is C or S
  MOD_RES (17)..(18)..(19)..(20)..(21): Xaa is A or G
  MOD_RES (22)..(23)..(24)..(25): Xaa is A or G or absent
PXXAPTKLSNITVQIMXXXXXXXXXIGEMSNMVVRS

SEQ ID NO: 29415 - protein, 35 aa, Artificial Sequence
  Non-cyclic GFR-binding peptide
  MOD_RES (1)..(32)..(34): Xaa is C or S
XVSQDLRSVKIAKVIGKTPKIKEVQVMIVKSXKXS

SEQ ID NO: 29416 - protein, 37 aa, Artificial Sequence
  Non-cyclic GFR-binding peptide
  MOD_RES (36)..(36): Xaa is C or S
PSRVHHEPLPVVYYEYVRKKPKLEQLSNRLEEHLEXA

SEQ ID NO: 29417 - protein, 41 aa, Artificial Sequence
  Non-cyclic GFR-binding peptide
  MOD_RES (5)..(6)..(38)..(40): Xaa is C or S
IPKAXXVPTELRPVQMRKIDEYDKVVKKATVEMVVEGXGXR

SEQ ID NO: 29418 - protein, 39 aa, Artificial Sequence
  Non-cyclic GFR-binding peptide
  MOD_RES (4)..(38): Xaa is C or S
  MOD_RES (18)..(19)..(20)..(21)..(22): Xaa is A or G
  MOD_RES (23)..(24)..(25)..(26): Xaa is A or G or absent
KPTXAPTKLRSVKVAKVXXXXXXXXXKEVQVNMVVRSXG

SEQ ID NO: 29419 - protein, 34 aa, Artificial Sequence
  Non-cyclic GFR-binding peptide
  MOD_RES (2)..(34): Xaa is C or S
TXAPTKLRSVKVAKVDDSSNVIKEVQVNMVVRSX

SEQ ID NO: 29420 - protein, 37 aa, Artificial Sequence
  Non-cyclic GFR-binding peptide
  MOD_RES (5)..(6): Xaa is C or S
VPKPXXAPTQLRPVQVRKIDDSSNVIKKATVNMVVRA

SEQ ID NO: 29421 - protein, 34 aa, Artificial Sequence
  Non-cyclic GFR-binding peptide
  MOD_RES (31)..(33): Xaa is C or S
VSQDLRPVQIRKIIGKTPKIKKATVMIVKSXKXS

SEQ ID NO: 29422 - protein, 34 aa, Artificial Sequence
  Non-cyclic GFR-binding peptide
  MOD_RES (1)..(34): Xaa is C or S
  MOD_RES (15)..(16)..(17)..(18)..(19): Xaa is A or G
  MOD_RES (20)..(21)..(22)..(23): Xaa is A or G or absent
XVPQALSNITIQIMXXXXXXXXXIGEMSMIVRSX

SEQ ID NO: 29423 - protein, 37 aa, Artificial Sequence
  Non-cyclic GFR-binding peptide
  MOD_RES (3)..(3): Xaa is C or S
  MOD_RES (19)..(20)..(21)..(22)..(23): Xaa is A or G
  MOD_RES (24)..(25)..(26)..(27): Xaa is A or G or absent
VQXRPTQVQLEPLPVVYYXXXXXXXXXEQLSNTLEDH

SEQ ID NO: 29424 - protein, 39 aa, Artificial Sequence
  Non-cyclic GFR-binding peptide
  MOD_RES (5)..(5): Xaa is C or S
SSVKXQPSRVHHEPLTVLYYEYVRKKPKLEQLSNRLEEH

SEQ ID NO: 29425 - protein, 39 aa, Artificial Sequence
  Non-cyclic GFR-binding peptide
  MOD_RES (6)..(7): Xaa is C or S
  MOD_RES (21)..(22)..(23)..(24)..(25): Xaa is A or G
  MOD_RES (26)..(27)..(28)..(29): Xaa is A or G or absent
ASASPXXVSQDLSNITIQIMXXXXXXXXXIGEMSMIVKS

SEQ ID NO: 29426 - protein, 39 aa, Artificial Sequence
  Non-cyclic GFR-binding peptide
  MOD_RES (6)..(7)..(39): Xaa is C or S
KIPKAXXVPTELRSVKMAKVDENEKVVKEVQVDMVVEGX

SEQ ID NO: 29427 - protein, 35 aa, Artificial Sequence
  Non-cyclic GFR-binding peptide
  MOD_RES (34)..(34): Xaa is C or S
  MOD_RES (14)..(15)..(16)..(17)..(18): Xaa is A or G
  MOD_RES (19)..(20)..(21)..(22): Xaa is A or G or absent
VPTELSNITMQIMXXXXXXXXXIGEMSDMVVEGXG

SEQ ID NO: 29428 - protein, 34 aa, Artificial Sequence
  Non-cyclic GFR-binding peptide
  MOD_RES (34)..(34): Xaa is C or S
  MOD_RES (14)..(15)..(16)..(17)..(18): Xaa is A or G
  MOD_RES (19)..(20)..(21)..(22): Xaa is A or G or absent
VPTELSNITMQIMXXXXXXXXXIGEMSEMVVEGX

SEQ ID NO: 29429 - protein, 39 aa, Artificial Sequence
  Non-cyclic GFR-binding peptide
  MOD_RES (3)..(4)..(38): Xaa is C or S
  MOD_RES (18)..(19)..(20)..(21)..(22): Xaa is A or G
  MOD_RES (23)..(24)..(25)..(26): Xaa is A or G or absent
KPXXAPTQLRPVQVRKIXXXXXXXXXKKATVNMVVRAXG

SEQ ID NO: 29430 - protein, 39 aa, Artificial Sequence
  Non-cyclic GFR-binding peptide
  MOD_RES (6)..(7)..(38): Xaa is C or S
ASAAPXXVPQALRPVQIRKIVGRKPKVKKATVMIVRSXK

SEQ ID NO: 29431 - protein, 34 aa, Artificial Sequence
  Non-cyclic GFR-binding peptide
  MOD_RES (1)..(2)..(33): Xaa is C or S
XXVPQALSNITIQIMVGRKPKVIGEMSMIVRSXK

SEQ ID NO: 29432 - protein, 37 aa, Artificial Sequence
  Non-cyclic GFR-binding peptide
  MOD_RES (6)..(7): Xaa is C or S
ASASPXXVSQDLRPVQIRKIIGKTPKIKKATVMIVKS

SEQ ID NO: 29433 - protein, 35 aa, Artificial Sequence
  Non-cyclic GFR-binding peptide
  MOD_RES (1)..(2)..(35): Xaa is C or S
  MOD_RES (16)..(17)..(18)..(19)..(20): Xaa is A or G
  MOD_RES (21)..(22)..(23)..(24): Xaa is A or G or absent
XXVSQDLSNITIQIMXXXXXXXXXIGEMSMIVKSX

SEQ ID NO: 29434 - protein, 40 aa, Artificial Sequence
  Non-cyclic GFR-binding peptide
  MOD_RES (4)..(5)..(37)..(39): Xaa is C or S
PKAXXVPTELRSVKMAKVDEYDKVVKEVQVEMVVEGXGXR

SEQ ID NO: 29435 - protein, 40 aa, Artificial Sequence
  Non-cyclic GFR-binding peptide
  MOD_RES (5)..(6)..(38)..(40): Xaa is C or S
VPKPXXAPTKLSNITVQIMDDSSNVIIGEMSNMVVRSXGX

SEQ ID NO: 29436 - protein, 41 aa, Artificial Sequence
  Non-cyclic GFR-binding peptide
  MOD_RES (6)..(7)..(41): Xaa is C or S
  MOD_RES (21)..(22)..(23)..(24)..(25): Xaa is A or G
  MOD_RES (26)..(27)..(28)..(29): Xaa is A or G or absent
SIPKAXXVPTELSNITMQIMXXXXXXXXXIGEMSEMVVEGX

SEQ ID NO: 29437 - protein, 37 aa, Artificial Sequence
  Non-cyclic GFR-binding peptide
  MOD_RES (2)..(3)..(35)..(37): Xaa is C or S
AXXVPTELRSVKMAKVDEYDKVVKEVQVEMVVEGXGX

SEQ ID NO: 29438 - protein, 38 aa, Artificial Sequence
  Non-cyclic GFR-binding peptide
  MOD_RES (1)..(35)..(37): Xaa is C or S
  MOD_RES (15)..(16)..(17)..(18)..(19): Xaa is A or G
  MOD_RES (20)..(21)..(22)..(23): Xaa is A or G or absent
XAPTKLSNITVQIMXXXXXXXXXIGEMSNMVVRSXGXH

SEQ ID NO: 29439 - protein, 40 aa, Artificial Sequence
  Non-cyclic GFR-binding peptide
  MOD_RES (7)..(7): Xaa is C or S
NDEGLEXVPTEEEPLTMLYYRIKPHQGQHEQLSNFLQHNK

SEQ ID NO: 29440 - protein, 37 aa, Artificial Sequence
  Non-cyclic GFR-binding peptide
  MOD_RES (1)..(2)..(35)..(37): Xaa is C or S
  MOD_RES (16)..(17)..(18)..(19)..(20): Xaa is A or G
  MOD_RES (21)..(22)..(23)..(24): Xaa is A or G or absent
XXVPQDLRPVQIRKIXXXXXXXXXKKATVMVVKSXKX

SEQ ID NO: 29441 - protein, 37 aa, Artificial Sequence
  Non-cyclic GFR-binding peptide
  MOD_RES (1)..(34)..(36): Xaa is C or S
  MOD_RES (15)..(16)..(17)..(18)..(19): Xaa is A or G
  MOD_RES (20)..(21)..(22)..(23): Xaa is A or G or absent
XVPQALSNITIQIMXXXXXXXXXIGEMSMIVRSXKXS

SEQ ID NO: 29442 - protein, 30 aa, Artificial Sequence
  Non-cyclic GFR-binding peptide
VPQDLRSVKIAKVVGRTPKVKEVQVMVVKS

SEQ ID NO: 29443 - protein, 36 aa, Artificial Sequence
  Non-cyclic GFR-binding peptide
  MOD_RES (36)..(36): Xaa is C or S
  MOD_RES (15)..(16)..(17)..(18)..(19): Xaa is A or G
  MOD_RES (20)..(21)..(22)..(23): Xaa is A or G or absent
PSRVHHEPLTVLYYXXXXXXXXXEQLSNRLEEHLEX

SEQ ID NO: 29444 - protein, 38 aa, Artificial Sequence
  Non-cyclic GFR-binding peptide
  MOD_RES (6)..(7): Xaa is C or S
TVPKPXXAPTQLRPVQVRKIDDSSNVIKKATVNMVVRA

SEQ ID NO: 29445 - protein, 33 aa, Artificial Sequence
  Non-cyclic GFR-binding peptide
  MOD_RES (3)..(3): Xaa is C or S
PTXAPTKLRSVKVAKVDDSSNVIKEVQVNMVVR

SEQ ID NO: 29446 - protein, 36 aa, Artificial Sequence
  Non-cyclic GFR-binding peptide
  MOD_RES (34)..(36): Xaa is C or S
  MOD_RES (14)..(15)..(16)..(17)..(18): Xaa is A or G
  MOD_RES (19)..(20)..(21)..(22): Xaa is A or G or absent
VPTELRPVQMRKIXXXXXXXXXKKATVEMVVEGXGX

SEQ ID NO: 29447 - protein, 40 aa, Artificial Sequence
  Non-cyclic GFR-binding peptide
  MOD_RES (6)..(7): Xaa is C or S
  MOD_RES (21)..(22)..(23)..(24)..(25): Xaa is A or G
  MOD_RES (26)..(27)..(28)..(29): Xaa is A or G or absent
TVPKPXXAPTQLSNITVQIMXXXXXXXXXIGEMSNMVVRA

SEQ ID NO: 29448 - protein, 38 aa, Artificial Sequence
  Non-cyclic GFR-binding peptide
  MOD_RES (3)..(4)..(36)..(38): Xaa is C or S
KAXXVPTELSNITMQIMDEYDKVVIGEMSEMVVEGXGX

SEQ ID NO: 29449 - protein, 33 aa, Artificial Sequence
  Non-cyclic GFR-binding peptide
  MOD_RES (1)..(32): Xaa is C or S
XVPQALSNITIQIMVGRKPKVIGEMSMIVRSXK

SEQ ID NO: 29450 - protein, 40 aa, Artificial Sequence
  Non-cyclic GFR-binding peptide
  MOD_RES (4)..(5)..(37)..(39): Xaa is C or S
PKAXXVPTELRPVQMRKIDENEKVVKKATVDMVVEGXGXR

SEQ ID NO: 29451 - protein, 39 aa, Artificial Sequence
  Non-cyclic GFR-binding peptide
  MOD_RES (4)..(5)..(36)..(38): Xaa is C or S
AAPXXVPQALRPVQIRKIVGRKPKVKKATVMIVRSXKXS

SEQ ID NO: 29452 - protein, 39 aa, Artificial Sequence
  Non-cyclic GFR-binding peptide
  MOD_RES (37)..(39): Xaa is C or S
RPTQVQLEPLTVLYYEIVRKKPIFEQLSNTLEDHLAXKX

SEQ ID NO: 29453 - protein, 34 aa, Artificial Sequence
  Non-cyclic GFR-binding peptide
  MOD_RES (1)..(2): Xaa is C or S
  MOD_RES (16)..(17)..(18)..(19)..(20): Xaa is A or G
  MOD_RES (21)..(22)..(23)..(24): Xaa is A or G or absent
XXVPQDLSNITIQIMXXXXXXXXXIGEMSMVVKS

SEQ ID NO: 29454 - protein, 43 aa, Artificial Sequence
  Non-cyclic GFR-binding peptide
  MOD_RES (6)..(40)..(42): Xaa is C or S
DEGLEXVPTEEEPLTMLYYRIKPHQGQHEQLSNFLQHNKXEXR

SEQ ID NO: 29455 - protein, 41 aa, Artificial Sequence
  Non-cyclic GFR-binding peptide
  MOD_RES (6)..(7)..(38)..(40): Xaa is C or S
ASASPXXVSQDLSNITIQIMIGKTPKIIGEMSMIVKSXKXS

SEQ ID NO: 29456 - protein, 36 aa, Artificial Sequence
  Non-cyclic GFR-binding peptide
  MOD_RES (1)..(2)..(33)..(35): Xaa is C or S
XXVSQDLSNITIQIMIGKTPKIIGEMSMIVKSXKXS

SEQ ID NO: 29457 - protein, 42 aa, Artificial Sequence
  Non-cyclic GFR-binding peptide
  MOD_RES (7)..(41): Xaa is C or S
  MOD_RES (21)..(22)..(23)..(24)..(25): Xaa is A or G
  MOD_RES (26)..(27)..(28)..(29): Xaa is A or G or absent
HVTKPTXAPTKLSNITVQIMXXXXXXXXXIGEMSNMVVRSXG

SEQ ID NO: 29458 - protein, 36 aa, Artificial Sequence
  Non-cyclic GFR-binding peptide
  MOD_RES (16)..(17)..(18)..(19)..(20): Xaa is A or G
  MOD_RES (21)..(22)..(23)..(24): Xaa is A or G or absent
QPSRVHHEPLPVVYYXXXXXXXXXEQLSNRLEEHLE

SEQ ID NO: 29459 - protein, 44 aa, Artificial Sequence
  Non-cyclic GFR-binding peptide
  MOD_RES (4)..(41)..(43): Xaa is C or S
  MOD_RES (20)..(21)..(22)..(23)..(24): Xaa is A or G
  MOD_RES (25)..(26)..(27)..(28): Xaa is A or G or absent
NVQXRPTQVQLEPLPVVYYXXXXXXXXXEQLSNTLEDHLAXKXE

SEQ ID NO: 29460 - protein, 42 aa, Artificial Sequence
  Non-cyclic GFR-binding peptide
  MOD_RES (6)..(7)..(41): Xaa is C or S
  MOD_RES (21)..(22)..(23)..(24)..(25): Xaa is A or G
  MOD_RES (26)..(27)..(28)..(29): Xaa is A or G or absent
YVPKPXXAPTKLSNITVQIMXXXXXXXXXIGEMSNMVVRSXG

SEQ ID NO: 29461 - protein, 37 aa, Artificial Sequence
  Non-cyclic GFR-binding peptide
  MOD_RES (36)..(36): Xaa is C or S
  MOD_RES (15)..(16)..(17)..(18)..(19): Xaa is A or G
  MOD_RES (20)..(21)..(22)..(23): Xaa is A or G or absent
PTQVQLEPLTVLYYXXXXXXXXXEQLSNTLEDHLAXK

SEQ ID NO: 29462 - protein, 38 aa, Artificial Sequence
  Non-cyclic GFR-binding peptide
  MOD_RES (2)..(2): Xaa is C or S
KXQPSRVHHEPLTVLYYEYVRKKPKLEQLSNRLEEHLE

SEQ ID NO: 29463 - protein, 40 aa, Artificial Sequence
  Non-cyclic GFR-binding peptide
  MOD_RES (4)..(5)..(38)..(40): Xaa is C or S
  MOD_RES (19)..(20)..(21)..(22)..(23): Xaa is A or G
  MOD_RES (24)..(25)..(26)..(27): Xaa is A or G or absent
AAPXXVPQALRPVQIRKIXXXXXXXXXKKATVMIVRSXKX

SEQ ID NO: 29464 - protein, 33 aa, Artificial Sequence
  Non-cyclic GFR-binding peptide
  MOD_RES (1)..(33): Xaa is C or S
XVPTELRPVQMRKIDENEKVVKKATVDMVVEGX

SEQ ID NO: 29465 - protein, 42 aa, Artificial Sequence
  Non-cyclic GFR-binding peptide
  MOD_RES (4)..(41): Xaa is C or S
NVQXRPTQVQLEPLPVVYYEIVRKKPIFEQLSNTLEDHLAXK

SEQ ID NO: 29466 - protein, 38 aa, Artificial Sequence
  Non-cyclic GFR-binding peptide
  MOD_RES (1)..(2)..(36)..(38): Xaa is C or S
  MOD_RES (16)..(17)..(18)..(19)..(20): Xaa is A or G
  MOD_RES (21)..(22)..(23)..(24): Xaa is A or G or absent
XXAPTKLSNITVQIMXXXXXXXXXIGEMSNMVVRSXGX

SEQ ID NO: 29467 - protein, 34 aa, Artificial Sequence
  Non-cyclic GFR-binding peptide
  MOD_RES (1)..(1): Xaa is C or S
  MOD_RES (15)..(16)..(17)..(18)..(19): Xaa is A or G
  MOD_RES (20)..(21)..(22)..(23): Xaa is A or G or absent
XVPTELRPVQMRKIXXXXXXXXXKKATVDMVVEG

SEQ ID NO: 29468 - protein, 41 aa, Artificial Sequence
  Non-cyclic GFR-binding peptide
  MOD_RES (4)..(5)..(39)..(41): Xaa is C or S
  MOD_RES (19)..(20)..(21)..(22)..(23): Xaa is A or G
  MOD_RES (24)..(25)..(26)..(27): Xaa is A or G or absent
PKAXXVPTELRPVQMRKIXXXXXXXXXKKATVEMVVEGXGX

SEQ ID NO: 29469 - protein, 36 aa, Artificial Sequence
  Non-cyclic GFR-binding peptide
  MOD_RES (1)..(2)..(36): Xaa is C or S
  MOD_RES (16)..(17)..(18)..(19)..(20): Xaa is A or G
  MOD_RES (21)..(22)..(23)..(24): Xaa is A or G or absent
XXAPTKLRPVQVRKIXXXXXXXXXKKATVNMVVRSX

SEQ ID NO: 29470 - protein, 35 aa, Artificial Sequence
  Non-cyclic GFR-binding peptide
  MOD_RES (16)..(17)..(18)..(19)..(20): Xaa is A or G
  MOD_RES (21)..(22)..(23)..(24): Xaa is A or G or absent
QPSRVHHEPLTVLYYXXXXXXXXXEQLSNRLEEHL

SEQ ID NO: 29471 - protein, 36 aa, Artificial Sequence
  Non-cyclic GFR-binding peptide
  MOD_RES (1)..(33)..(35): Xaa is C or S
XAPTKLRPVQVRKIDDSSNVIKKATVNMVVRSXGXH

SEQ ID NO: 29472 - protein, 38 aa, Artificial Sequence
  Non-cyclic GFR-binding peptide
  MOD_RES (4)..(5)..(38): Xaa is C or S
  MOD_RES (19)..(20)..(21)..(22)..(23): Xaa is A or G
  MOD_RES (24)..(25)..(26)..(27): Xaa is A or G or absent
ASPXXVPQDLRPVQIRKIXXXXXXXXXKKATVMVVKSX

SEQ ID NO: 29473 - protein, 35 aa, Artificial Sequence
  Non-cyclic GFR-binding peptide
  MOD_RES (34)..(34): Xaa is C or S
  MOD_RES (14)..(15)..(16)..(17)..(18): Xaa is A or G
  MOD_RES (19)..(20)..(21)..(22): Xaa is A or G or absent
APTQLRSVKVAKVXXXXXXXXXKEVQVNMVVRAXG

SEQ ID NO: 29474 - protein, 33 aa, Artificial Sequence
  Non-cyclic GFR-binding peptide
  MOD_RES (14)..(15)..(16)..(17)..(18): Xaa is A or G
  MOD_RES (19)..(20)..(21)..(22): Xaa is A or G or absent
VPTELSNITMQIMXXXXXXXXXIGEMSEMVVEG

SEQ ID NO: 29475 - protein, 35 aa, Artificial Sequence
  Non-cyclic GFR-binding peptide
  MOD_RES (1)..(34): Xaa is C or S
  MOD_RES (15)..(16)..(17)..(18)..(19): Xaa is A or G
  MOD_RES (20)..(21)..(22)..(23): Xaa is A or G or absent
XVSQDLRSVKIAKVXXXXXXXXXKEVQVMIVKSXK

SEQ ID NO: 29476 - protein, 30 aa, Artificial Sequence; identical to SEQ ID NO: 1159
  Non-cyclic GFR-binding peptide

SEQ ID NO: 29477 - protein, 39 aa, Artificial Sequence
  Non-cyclic GFR-binding peptide
  MOD_RES (7)..(7): Xaa is C or S
  MOD_RES (21)..(22)..(23)..(24)..(25): Xaa is A or G
  MOD_RES (26)..(27)..(28)..(29): Xaa is A or G or absent
HVTKPTXAPTKLRPVQVRKIXXXXXXXXXKKATVNMVVR

SEQ ID NO: 29478 - protein, 39 aa, Artificial Sequence
  Non-cyclic GFR-binding peptide
  MOD_RES (7)..(7): Xaa is C or S
  MOD_RES (21)..(22)..(23)..(24)..(25): Xaa is A or G
  MOD_RES (26)..(27)..(28)..(29): Xaa is A or G or absent
HVTKPTXAPTKLRSVKVAKVXXXXXXXXXKEVQVNMVVR

SEQ ID NO: 29479 - protein, 36 aa, Artificial Sequence
  Non-cyclic GFR-binding peptide
  MOD_RES (1)..(35): Xaa is C or S
  MOD_RES (15)..(16)..(17)..(18)..(19): Xaa is A or G
  MOD_RES (20)..(21)..(22)..(23): Xaa is A or G or absent
XVPTEEEPLPMVYYXXXXXXXXXEQLSNFLQHNKXE

SEQ ID NO: 29480 - protein, 38 aa, Artificial Sequence
  Non-cyclic GFR-binding peptide
  MOD_RES (3)..(3): Xaa is C or S
  MOD_RES (19)..(20)..(21)..(22)..(23): Xaa is A or G
  MOD_RES (24)..(25)..(26)..(27): Xaa is A or G or absent
VQXRPTQVQLEPLTVLYYXXXXXXXXXEQLSNTLEDHL

SEQ ID NO: 29481 - protein, 35 aa, Artificial Sequence
  Non-cyclic GFR-binding peptide
  MOD_RES (3)..(4): Xaa is C or S
KAXXVPTELRPVQMRKIDENEKVVKKATVDMVVEG

SEQ ID NO: 29482 - protein, 40 aa, Artificial Sequence
  Non-cyclic GFR-binding peptide
  MOD_RES (7)..(7): Xaa is C or S
  MOD_RES (21)..(22)..(23)..(24)..(25): Xaa is A or G
  MOD_RES (26)..(27)..(28)..(29): Xaa is A or G or absent
NDEGLEXVPTEEEPLTMLYYXXXXXXXXXEQLSNFLQHNK

SEQ ID NO: 29483 - protein, 41 aa, Artificial Sequence
  Non-cyclic GFR-binding peptide
  MOD_RES (4)..(41): Xaa is C or S
NVQXRPTQVQLEPLTVLYYEIVRKKPIFEQLSNTLEDHLAX

SEQ ID NO: 29484 - protein, 38 aa, Artificial Sequence
  Non-cyclic GFR-binding peptide
  MOD_RES (5)..(6)..(38): Xaa is C or S
VPKPXXAPTQLRPVQVRKIDDSSNVIKKATVNMVVRAX

SEQ ID NO: 29485 - protein, 33 aa, Artificial Sequence
  Non-cyclic GFR-binding peptide
  MOD_RES (32)..(32): Xaa is C or S
VPTELSNITMQIMDENEKVVIGEMSDMVVEGXG

SEQ ID NO: 29486 - protein, 41 aa, Artificial Sequence
  Non-cyclic GFR-binding peptide
  MOD_RES (5)..(6)..(40): Xaa is C or S
  MOD_RES (20)..(21)..(22)..(23)..(24): Xaa is A or G
  MOD_RES (25)..(26)..(27)..(28): Xaa is A or G or absent
IPKAXXVPTELRPVQMRKIXXXXXXXXXKKATVDMVVEGXG

SEQ ID NO: 29487 - protein, 36 aa, Artificial Sequence
  Non-cyclic GFR-binding peptide
  MOD_RES (34)..(36): Xaa is C or S
VPTEEEPLPMVYYRIKPHQGQHEQLSNFLQHNKXEX

SEQ ID NO: 29488 - protein, 40 aa, Artificial Sequence
  Non-cyclic GFR-binding peptide
  MOD_RES (6)..(7)..(40): Xaa is C or S
  MOD_RES (21)..(22)..(23)..(24)..(25): Xaa is A or G
  MOD_RES (26)..(27)..(28)..(29): Xaa is A or G or absent
ASAAPXXVPQALSNITIQIMXXXXXXXXXIGEMSMIVRSX

SEQ ID NO: 29489 - protein, 38 aa, Artificial Sequence
  Non-cyclic GFR-binding peptide
  MOD_RES (4)..(4): Xaa is C or S
SVKXQPSRVHHEPLTVLYYEYVRKKPKLEQLSNRLEEH

SEQ ID NO: 29490 - protein, 36 aa, Artificial Sequence
  Non-cyclic GFR-binding peptide
  MOD_RES (2)..(34)..(36): Xaa is C or S
TXAPTKLRPVQVRKIDDSSNVIKKATVNMVVRSXGX

SEQ ID NO: 29491 - protein, 37 aa, Artificial Sequence
  Non-cyclic GFR-binding peptide
  MOD_RES (5)..(6)..(37): Xaa is C or S
SAAPXXVPQALSNITIQIMVGRKPKVIGEMSMIVRSX

SEQ ID NO: 29492 - protein, 37 aa, Artificial Sequence
  Non-cyclic GFR-binding peptide
  MOD_RES (3)..(4): Xaa is C or S
  MOD_RES (18)..(19)..(20)..(21)..(22): Xaa is A or G
  MOD_RES (23)..(24)..(25)..(26): Xaa is A or G or absent
KAXXVPTELRPVQMRKIXXXXXXXXXKKATVEMVVEG

SEQ ID NO: 29493 - protein, 40 aa, Artificial Sequence
  Non-cyclic GFR-binding peptide
  MOD_RES (4)..(5)..(38)..(40): Xaa is C or S
  MOD_RES (19)..(20)..(21)..(22)..(23): Xaa is A or G
  MOD_RES (24)..(25)..(26)..(27): Xaa is A or G or absent
ASPXXVSQDLRPVQIRKIXXXXXXXXXKKATVMIVKSXKX

SEQ ID NO: 29494 - protein, 38 aa, Artificial Sequence
  Non-cyclic GFR-binding peptide
  MOD_RES (4)..(4): Xaa is C or S
SVKXQPSRVHHEPLPVVYYEYVRKKPKLEQLSNRLEEH

SEQ ID NO: 29495 - protein, 40 aa, Artificial Sequence
  Non-cyclic GFR-binding peptide
  MOD_RES (6)..(7)..(39): Xaa is C or S
TVPKPXXAPTQLRSVKVAKVDDSSNVIKEVQVNMVVRAXG

SEQ ID NO: 29496 - protein, 37 aa, Artificial Sequence
  Non-cyclic GFR-binding peptide
  MOD_RES (1)..(35)..(37): Xaa is C or S
  MOD_RES (15)..(16)..(17)..(18)..(19): Xaa is A or G
  MOD_RES (20)..(21)..(22)..(23): Xaa is A or G or absent
XVPTEEEPLPMVYYXXXXXXXXXEQLSNFLQHNKXEX

SEQ ID NO: 29497 - protein, 36 aa, Artificial Sequence
  Non-cyclic GFR-binding peptide
  MOD_RES (1)..(2)..(35): Xaa is C or S
  MOD_RES (16)..(17)..(18)..(19)..(20): Xaa is A or G
  MOD_RES (21)..(22)..(23)..(24): Xaa is A or G or absent
XXVPQDLRSVKIAKVXXXXXXXXXKEVQVMVVKSXK

SEQ ID NO: 29498 - protein, 33 aa, Artificial Sequence
  Non-cyclic GFR-binding peptide
  MOD_RES (1)..(32): Xaa is C or S
XVPQALRSVKIAKVVGRKPKVKEVQVMIVRSXK

SEQ ID NO: 29499 - protein, 40 aa, Artificial Sequence
  Non-cyclic GFR-binding peptide
  MOD_RES (4)..(4): Xaa is C or S
  MOD_RES (20)..(21)..(22)..(23)..(24): Xaa is A or G
  MOD_RES (25)..(26)..(27)..(28): Xaa is A or G or absent
NVQXRPTQVQLEPLTVLYYXXXXXXXXXEQLSNTLEDHLA

SEQ ID NO: 29500 - protein, 38 aa, Artificial Sequence
  Non-cyclic GFR-binding peptide
  MOD_RES (2)..(3)..(35)..(37): Xaa is C or S
PXXAPTKLRSVKVAKVDDSSNVIKEVQVNMVVRSXGXH

SEQ ID NO: 29501 - protein, 39 aa, Artificial Sequence
  Non-cyclic GFR-binding peptide
  MOD_RES (5)..(5): Xaa is C or S
  MOD_RES (21)..(22)..(23)..(24)..(25): Xaa is A or G
  MOD_RES (26)..(27)..(28)..(29): Xaa is A or G or absent
SSVKXQPSRVHHEPLPVVYYXXXXXXXXXEQLSNRLEEH

SEQ ID NO: 29502 - protein, 34 aa, Artificial Sequence
  Non-cyclic GFR-binding peptide
  MOD_RES (1)..(2): Xaa is C or S
  MOD_RES (16)..(17)..(18)..(19)..(20): Xaa is A or G
  MOD_RES (21)..(22)..(23)..(24): Xaa is A or G or absent
XXVPTELRPVQMRKIXXXXXXXXXKKATVDMVVE

SEQ ID NO: 29503 - protein, 40 aa, Artificial Sequence
  Non-cyclic GFR-binding peptide
  MOD_RES (6)..(7)..(38)..(40): Xaa is C or S
ASAAPXXVPQALRSVKIAKVVGRKPKVKEVQVMIVRSXKX

SEQ ID NO: 29504 - protein, 36 aa, Artificial Sequence
  Non-cyclic GFR-binding peptide
  MOD_RES (16)..(17)..(18)..(19)..(20): Xaa is A or G
  MOD_RES (21)..(22)..(23)..(24): Xaa is A or G or absent
RPTQVQLEPLPVVYYXXXXXXXXXEQLSNTLEDHLA

SEQ ID NO: 29505 - protein, 38 aa, Artificial Sequence
  Non-cyclic GFR-binding peptide
  MOD_RES (35)..(37): Xaa is C or S
  MOD_RES (14)..(15)..(16)..(17)..(18): Xaa is A or G
  MOD_RES (19)..(20)..(21)..(22): Xaa is A or G or absent
TQVQLEPLPVVYYXXXXXXXXXEQLSNTLEDHLAXKXE

SEQ ID NO: 29506 - protein, 41 aa, Artificial Sequence
  Non-cyclic GFR-binding peptide
  MOD_RES (5)..(5): Xaa is C or S
RNVQXRPTQVQLEPLTVLYYEIVRKKPIFEQLSNTLEDHLA

SEQ ID NO: 29507 - protein, 37 aa, Artificial Sequence
  Non-cyclic GFR-binding peptide
  MOD_RES (4)..(5): Xaa is C or S
  MOD_RES (19)..(20)..(21)..(22)..(23): Xaa is A or G
  MOD_RES (24)..(25)..(26)..(27): Xaa is A or G or absent
AAPXXVPQALRSVKIAKVXXXXXXXXXKEVQVMIVRS

SEQ ID NO: 29508 - protein, 32 aa, Artificial Sequence
  Non-cyclic GFR-binding peptide
  MOD_RES (1)..(2): Xaa is C or S
XXVPQDLRPVQIRKIVGRTPKVKKATVMVVKS

SEQ ID NO: 29509 - protein, 36 aa, Artificial Sequence
  Non-cyclic GFR-binding peptide
  MOD_RES (2)..(3)..(36): Xaa is C or S
  MOD_RES (17)..(18)..(19)..(20)..(21): Xaa is A or G
  MOD_RES (22)..(23)..(24)..(25): Xaa is A or G or absent
PXXVSQDLRPVQIRKIXXXXXXXXXKKATVMIVKSX

SEQ ID NO: 29510 - protein, 31 aa, Artificial Sequence
  Non-cyclic GFR-binding peptide
  MOD_RES (1)..(1): Xaa is C or S
XVPQDLRPVQIRKIVGRTPKVKKATVMVVKS

SEQ ID NO: 29511 - protein, 36 aa, Artificial Sequence
  Non-cyclic GFR-binding peptide
  MOD_RES (3)..(4)..(36): Xaa is C or S
KAXXVPTELRSVKMAKVDEYDKVVKEVQVEMVVEGX

SEQ ID NO: 29512 - protein, 42 aa, Artificial Sequence
  Non-cyclic GFR-binding peptide
  MOD_RES (4)..(5)..(39)..(41): Xaa is C or S
  MOD_RES (19)..(20)..(21)..(22)..(23): Xaa is A or G
  MOD_RES (24)..(25)..(26)..(27): Xaa is A or G or absent
PKAXXVPTELRPVQMRKIXXXXXXXXXKKATVDMVVEGXGXR

SEQ ID NO: 29513 - protein, 38 aa, Artificial Sequence
  Non-cyclic GFR-binding peptide
  MOD_RES (4)..(5): Xaa is C or S
  MOD_RES (19)..(20)..(21)..(22)..(23): Xaa is A or G
  MOD_RES (24)..(25)..(26)..(27): Xaa is A or G or absent
PKPXXAPTKLRPVQVRKIXXXXXXXXXKKATVNMVVRS

SEQ ID NO: 29514 - protein, 37 aa, Artificial Sequence
  Non-cyclic GFR-binding peptide
  MOD_RES (3)..(4)..(36): Xaa is C or S
KPXXAPTQLRPVQVRKIDDSSNVIKKATVNMVVRAXG

SEQ ID NO: 29515 - protein, 36 aa, Artificial Sequence
  Non-cyclic GFR-binding peptide
  MOD_RES (34)..(36): Xaa is C or S
  MOD_RES (14)..(15)..(16)..(17)..(18): Xaa is A or G
  MOD_RES (19)..(20)..(21)..(22): Xaa is A or G or absent
APTKLSNITVQIMXXXXXXXXXIGEMSNMVVRSXGX

SEQ ID NO: 29516 - protein, 41 aa, Artificial Sequence
  Non-cyclic GFR-binding peptide
  MOD_RES (6)..(7)..(40): Xaa is C or S
  MOD_RES (21)..(22)..(23)..(24)..(25): Xaa is A or G
  MOD_RES (26)..(27)..(28)..(29): Xaa is A or G or absent
ASASPXXVSQDLRPVQIRKIXXXXXXXXXKKATVMIVKSXK

SEQ ID NO: 29517 - protein, 41 aa, Artificial Sequence
  Non-cyclic GFR-binding peptide
  MOD_RES (7)..(39)..(41): Xaa is C or S
HVTKPTXAPTKLSNITVQIMDDSSNVIIGEMSNMVVRSXGX

SEQ ID NO: 29518 - protein, 37 aa, Artificial Sequence
  Non-cyclic GFR-binding peptide
  MOD_RES (2)..(3)..(35)..(37): Xaa is C or S
AXXVPTELRSVKMAKVDENEKVVKEVQVDMVVEGXGX

SEQ ID NO: 29519 - protein, 34 aa, Artificial Sequence
  Non-cyclic GFR-binding peptide
  MOD_RES (32)..(34): Xaa is C or S
APTQLRPVQVRKIDDSSNVIKKATVNMVVRAXGX

SEQ ID NO: 29520 - protein, 36 aa, Artificial Sequence
  Non-cyclic GFR-binding peptide
  MOD_RES (3)..(4)..(35): Xaa is C or S
SPXXVPQDLSNITIQIMVGRTPKVIGEMSMVVKSXK

SEQ ID NO: 29521 - protein, 38 aa, Artificial Sequence
  Non-cyclic GFR-binding peptide
  MOD_RES (2)..(2): Xaa is C or S
  MOD_RES (18)..(19)..(20)..(21)..(22): Xaa is A or G
  MOD_RES (23)..(24)..(25)..(26): Xaa is A or G or absent
QXRPTQVQLEPLTVLYYXXXXXXXXXEQLSNTLEDHLA

SEQ ID NO: 29522 - protein, 40 aa, Artificial Sequence
  Non-cyclic GFR-binding peptide
  MOD_RES (4)..(38)..(40): Xaa is C or S
  MOD_RES (18)..(19)..(20)..(21)..(22): Xaa is A or G
  MOD_RES (23)..(24)..(25)..(26): Xaa is A or G or absent
GLEXVPTEEEPLPMVYYXXXXXXXXXEQLSNFLQHNKXEX

SEQ ID NO: 29523 - protein, 41 aa, Artificial Sequence
  Non-cyclic GFR-binding peptide
  MOD_RES (4)..(5)..(39)..(41): Xaa is C or S
  MOD_RES (19)..(20)..(21)..(22)..(23): Xaa is A or G
  MOD_RES (24)..(25)..(26)..(27): Xaa is A or G or absent
PKPXXAPTQLRPVQVRKIXXXXXXXXXKKATVNMVVRAXGX

SEQ ID NO: 29524 - protein, 41 aa, Artificial Sequence
  Non-cyclic GFR-binding peptide
  MOD_RES (4)..(5)..(39)..(41): Xaa is C or S
  MOD_RES (19)..(20)..(21)..(22)..(23): Xaa is A or G
  MOD_RES (24)..(25)..(26)..(27): Xaa is A or G or absent
PKAXXVPTELRSVKMAKVXXXXXXXXXKEVQVEMVVEGXGX

SEQ ID NO: 29525 - protein, 39 aa, Artificial Sequence
  Non-cyclic GFR-binding peptide
  MOD_RES (36)..(38): Xaa is C or S
PSRVHHEPLTVLYYEYVRKKPKLEQLSNRLEEHLEXAXA

SEQ ID NO: 29526 - protein, 33 aa, Artificial Sequence
  Non-cyclic GFR-binding peptide
  MOD_RES (1)..(1): Xaa is C or S
  MOD_RES (15)..(16)..(17)..(18)..(19): Xaa is A or G
  MOD_RES (20)..(21)..(22)..(23): Xaa is A or G or absent
XVPQALRSVKIAKVXXXXXXXXXKEVQVMIVRS

SEQ ID NO: 29527 - protein, 40 aa, Artificial Sequence
  Non-cyclic GFR-binding peptide
  MOD_RES (4)..(4): Xaa is C or S
  MOD_RES (20)..(21)..(22)..(23)..(24): Xaa is A or G
  MOD_RES (25)..(26)..(27)..(28): Xaa is A or G or absent
NVQXRPTQVQLEPLPVVYYXXXXXXXXXEQLSNTLEDHLA

SEQ ID NO: 29528 - protein, 37 aa, Artificial Sequence
  Non-cyclic GFR-binding peptide
  MOD_RES (1)..(35)..(37): Xaa is C or S
  MOD_RES (15)..(16)..(17)..(18)..(19): Xaa is A or G
  MOD_RES (20)..(21)..(22)..(23): Xaa is A or G or absent
XVPTELRPVQMRKIXXXXXXXXXKKATVDMVVEGXGX

SEQ ID NO: 29529 - protein, 35 aa, Artificial Sequence
  Non-cyclic GFR-binding peptide
  MOD_RES (3)..(4): Xaa is C or S
KPXXAPTQLSNITVQIMDDSSNVIIGEMSNMVVRA

SEQ ID NO: 29530 - protein, 37 aa, Artificial Sequence
  Non-cyclic GFR-binding peptide
  MOD_RES (1)..(2)..(35)..(37): Xaa is C or S
  MOD_RES (16)..(17)..(18)..(19)..(20): Xaa is A or G
  MOD_RES (21)..(22)..(23)..(24): Xaa is A or G or absent
XXVPQDLRSVKIAKVXXXXXXXXXKEVQVMVVKSXKX

SEQ ID NO: 29531 - protein, 32 aa, Artificial Sequence
  Non-cyclic GFR-binding peptide
  MOD_RES (14)..(15)..(16)..(17)..(18): Xaa is A or G
  MOD_RES (19)..(20)..(21)..(22): Xaa is A or G or absent
VPQDLSNITIQIMXXXXXXXXXIGEMSMVVKS

SEQ ID NO: 29532 - protein, 38 aa, Artificial Sequence
  Non-cyclic GFR-binding peptide
  MOD_RES (2)..(3)..(36)..(38): Xaa is C or S
  MOD_RES (17)..(18)..(19)..(20)..(21): Xaa is A or G
  MOD_RES (22)..(23)..(24)..(25): Xaa is A or G or absent
PXXVSQDLRPVQIRKIXXXXXXXXXKKATVMIVKSXKX

SEQ ID NO: 29533 - protein, 37 aa, Artificial Sequence
  Non-cyclic GFR-binding peptide
  MOD_RES (3)..(4)..(37): Xaa is C or S
  MOD_RES (18)..(19)..(20)..(21)..(22): Xaa is A or G
  MOD_RES (23)..(24)..(25)..(26): Xaa is A or G or absent
SPXXVPQDLRSVKIAKVXXXXXXXXXKEVQVMVVKSX

SEQ ID NO: 29534 - protein, 40 aa, Artificial Sequence
  Non-cyclic GFR-binding peptide
  MOD_RES (6)..(7)..(40): Xaa is C or S
  MOD_RES (21)..(22)..(23)..(24)..(25): Xaa is A or G
  MOD_RES (26)..(27)..(28)..(29): Xaa is A or G or absent
ASASPXXVSQDLSNITIQIMXXXXXXXXXIGEMSMIVKSX

SEQ ID NO: 29535 - protein, 40 aa, Artificial Sequence
  Non-cyclic GFR-binding peptide
  MOD_RES (5)..(6)..(40): Xaa is C or S
  MOD_RES (20)..(21)..(22)..(23)..(24): Xaa is A or G
  MOD_RES (25)..(26)..(27)..(28): Xaa is A or G or absent
VPKPXXAPTKLRSVKVAKVXXXXXXXXXKEVQVNMVVRSX

SEQ ID NO: 29536 - protein, 37 aa, Artificial Sequence
  Non-cyclic GFR-binding peptide
  MOD_RES (6)..(7): Xaa is C or S
YVPKPXXAPTKLRPVQVRKIDDSSNVIKKATVNMVVR

SEQ ID NO: 29537 - protein, 39 aa, Artificial Sequence
  Non-cyclic GFR-binding peptide
  MOD_RES (4)..(5)..(38): Xaa is C or S
  MOD_RES (19)..(20)..(21)..(22)..(23): Xaa is A or G
  MOD_RES (24)..(25)..(26)..(27): Xaa is A or G or absent
ASPXXVPQDLSNITIQIMXXXXXXXXXIGEMSMVVKSXK

SEQ ID NO: 29538 - protein, 34 aa, Artificial Sequence
  Non-cyclic GFR-binding peptide
  MOD_RES (33)..(33): Xaa is C or S
  MOD_RES (14)..(15)..(16)..(17)..(18): Xaa is A or G
  MOD_RES (19)..(20)..(21)..(22): Xaa is A or G or absent
VSQDLRSVKIAKVXXXXXXXXXKEVQVMIVKSXK

SEQ ID NO: 29539 - protein, 40 aa, Artificial Sequence
  Non-cyclic GFR-binding peptide
  MOD_RES (5)..(6)..(37)..(39): Xaa is C or S
SAAPXXVPQALRPVQIRKIVGRKPKVKKATVMIVRSXKXS

SEQ ID NO: 29540 - protein, 40 aa, Artificial Sequence
  Non-cyclic GFR-binding peptide
  MOD_RES (37)..(39): Xaa is C or S
QPSRVHHEPLTVLYYEYVRKKPKLEQLSNRLEEHLEXAXA

SEQ ID NO: 29541 - protein, 37 aa, Artificial Sequence
  Non-cyclic GFR-binding peptide
  MOD_RES (4)..(36): Xaa is C or S
KPTXAPTKLSNITVQIMDDSSNVIIGEMSNMVVRSXG

SEQ ID NO: 29542 - protein, 42 aa, Artificial Sequence
  Non-cyclic GFR-binding peptide
  MOD_RES (4)..(41): Xaa is C or S
  MOD_RES (20)..(21)..(22)..(23)..(24): Xaa is A or G
  MOD_RES (25)..(26)..(27)..(28): Xaa is A or G or absent
NVQXRPTQVQLEPLPVVYYXXXXXXXXXEQLSNTLEDHLAXK

SEQ ID NO: 29543 - protein, 41 aa, Artificial Sequence
  Non-cyclic GFR-binding peptide
  MOD_RES (6)..(7)..(38)..(40): Xaa is C or S
ASASPXXVSQDLRSVKIAKVIGKTPKIKEVQVMIVKSXKXS

SEQ ID NO: 29544 - protein, 33 aa, Artificial Sequence
  Non-cyclic GFR-binding peptide
  MOD_RES (14)..(15)..(16)..(17)..(18): Xaa is A or G
  MOD_RES (19)..(20)..(21)..(22): Xaa is A or G or absent
VPTEEEPLTMLYYXXXXXXXXXEQLSNFLQHNK

SEQ ID NO: 29545 - protein, 37 aa, Artificial Sequence
  Non-cyclic GFR-binding peptide
  MOD_RES (4)..(5): Xaa is C or S
  MOD_RES (19)..(20)..(21)..(22)..(23): Xaa is A or G
  MOD_RES (24)..(25)..(26)..(27): Xaa is A or G or absent
PKPXXAPTKLSNITVQIMXXXXXXXXXIGEMSNMVVR

SEQ ID NO: 29546 - protein, 40 aa, Artificial Sequence
  Non-cyclic GFR-binding peptide
  MOD_RES (3)..(37)..(39): Xaa is C or S
LEXVPTEEEPLTMLYYRIKPHQGQHEQLSNFLQHNKXEXR

SEQ ID NO: 29547 - protein, 38 aa, Artificial Sequence
  Non-cyclic GFR-binding peptide
  MOD_RES (5)..(6): Xaa is C or S
  MOD_RES (20)..(21)..(22)..(23)..(24): Xaa is A or G
  MOD_RES (25)..(26)..(27)..(28): Xaa is A or G or absent
VPKPXXAPTKLRPVQVRKIXXXXXXXXXKKATVNMVVR

SEQ ID NO: 29548 - protein, 41 aa, Artificial Sequence
  Non-cyclic GFR-binding peptide
  MOD_RES (4)..(5)..(39)..(41): Xaa is C or S
  MOD_RES (19)..(20)..(21)..(22)..(23): Xaa is A or G
  MOD_RES (24)..(25)..(26)..(27): Xaa is A or G or absent
PKPXXAPTQLSNITVQIMXXXXXXXXXIGEMSNMVVRAXGX

SEQ ID NO: 29549 - protein, 31 aa, Artificial Sequence
  Non-cyclic GFR-binding peptide
  MOD_RES (31)..(31): Xaa is C or S
VSQDLRPVQIRKIIGKTPKIKKATVMIVKSX

SEQ ID NO: 29550 - protein, 37 aa, Artificial Sequence
  Non-cyclic GFR-binding peptide
  MOD_RES (2)..(3)..(37): Xaa is C or S
  MOD_RES (17)..(18)..(19)..(20)..(21): Xaa is A or G
  MOD_RES (22)..(23)..(24)..(25): Xaa is A or G or absent
AXXVPTELSNITMQIMXXXXXXXXXIGEMSEMVVEGX

SEQ ID NO: 29551 - protein, 30 aa, Artificial Sequence
  Non-cyclic GFR-binding peptide
VSQDLRPVQIRKIIGKTPKIKKATVMIVKS

SEQ ID NO: 29552 - protein, 39 aa, Artificial Sequence
  Non-cyclic GFR-binding peptide
  MOD_RES (3)..(4)..(37)..(39): Xaa is C or S
  MOD_RES (18)..(19)..(20)..(21)..(22): Xaa is A or G
  MOD_RES (23)..(24)..(25)..(26): Xaa is A or G or absent
APXXVPQALRSVKIAKVXXXXXXXXXKEVQVMIVRSXKX

SEQ ID NO: 29553 - protein, 30 aa, Artificial Sequence; identical to SEQ ID NO: 1140
  Non-cyclic GFR-binding peptide

SEQ ID NO: 29554 - protein, 33 aa, Artificial Sequence
  Non-cyclic GFR-binding peptide
  MOD_RES (1)..(2): Xaa is C or S
XXVPTELRPVQMRKIDEYDKVVKKATVEMVVEG

SEQ ID NO: 29555 - protein, 38 aa, Artificial Sequence
  Non-cyclic GFR-binding peptide
  MOD_RES (4)..(38): Xaa is C or S
GLEXVPTEEEPLPMVYYRIKPHQGQHEQLSNFLQHNKX

SEQ ID NO: 29556 - protein, 33 aa, Artificial Sequence
  Non-cyclic GFR-binding peptide
  MOD_RES (1)..(33): Xaa is C or S
XVPTELSNITMQIMDENEKVVIGEMSDMVVEGX

SEQ ID NO: 29557 - protein, 39 aa, Artificial Sequence
  Non-cyclic GFR-binding peptide
  MOD_RES (6)..(7)..(39): Xaa is C or S
TVPKPXXAPTQLRPVQVRKIDDSSNVIKKATVNMVVRAX

SEQ ID NO: 29558 - protein, 42 aa, Artificial Sequence
  Non-cyclic GFR-binding peptide
  MOD_RES (6)..(7)..(39)..(41): Xaa is C or S
SIPKAXXVPTELSNITMQIMDEYDKVVIGEMSEMVVEGXGXR

SEQ ID NO: 29559 - protein, 37 aa, Artificial Sequence
  Non-cyclic GFR-binding peptide
  MOD_RES (6)..(7): Xaa is C or S
TVPKPXXAPTQLRSVKVAKVDDSSNVIKEVQVNMVVR

SEQ ID NO: 29560 - protein, 40 aa, Artificial Sequence
  Non-cyclic GFR-binding peptide
  MOD_RES (5)..(6)..(40): Xaa is C or S
  MOD_RES (20)..(21)..(22)..(23)..(24): Xaa is A or G
  MOD_RES (25)..(26)..(27)..(28): Xaa is A or G or absent
VPKPXXAPTQLSNITVQIMXXXXXXXXXIGEMSNMVVRAX

SEQ ID NO: 29561 - protein, 34 aa, Artificial Sequence
  Non-cyclic GFR-binding peptide
  MOD_RES (3)..(4): Xaa is C or S
SPXXVPQDLRPVQIRKIVGRTPKVKKATVMVVKS

SEQ ID NO: 29562 - protein, 41 aa, Artificial Sequence
  Non-cyclic GFR-binding peptide
  MOD_RES (5)..(5): Xaa is C or S
RNVQXRPTQVQLEPLPVVYYEIVRKKPIFEQLSNTLEDHLA

SEQ ID NO: 29563 - protein, 39 aa, Artificial Sequence
  Non-cyclic GFR-binding peptide
  MOD_RES (3)..(4)..(37)..(39): Xaa is C or S
  MOD_RES (18)..(19)..(20)..(21)..(22): Xaa is A or G
  MOD_RES (23)..(24)..(25)..(26): Xaa is A or G or absent
SPXXVSQDLRSVKIAKVXXXXXXXXXKEVQVMIVKSXKX

SEQ ID NO: 29564 - protein, 32 aa, Artificial Sequence
  Non-cyclic GFR-binding peptide
  MOD_RES (32)..(32): Xaa is C or S
APTKLRPVQVRKIDDSSNVIKKATVNMVVRSX

SEQ ID NO: 29565 - protein, 32 aa, Artificial Sequence
  Non-cyclic GFR-binding peptide
VPTEEEPLTMLYYRIKPHQGQHEQLSNFLQHN

SEQ ID NO: 29566 - protein, 36 aa, Artificial Sequence
  Non-cyclic GFR-binding peptide
  MOD_RES (4)..(5): Xaa is C or S
PKAXXVPTELSNITMQIMDEYDKVVIGEMSEMVVEG

SEQ ID NO: 29567 - protein, 38 aa, Artificial Sequence
  Non-cyclic GFR-binding peptide
  MOD_RES (3)..(37): Xaa is C or S
  MOD_RES (17)..(18)..(19)..(20)..(21): Xaa is A or G
  MOD_RES (22)..(23)..(24)..(25): Xaa is A or G or absent
PTXAPTKLRPVQVRKIXXXXXXXXXKKATVNMVVRSXG

SEQ ID NO: 29568 - protein, 39 aa, Artificial Sequence
  Non-cyclic GFR-binding peptide
  MOD_RES (3)..(4)..(38): Xaa is C or S
  MOD_RES (18)..(19)..(20)..(21)..(22): Xaa is A or G
  MOD_RES (23)..(24)..(25)..(26): Xaa is A or G or absent
KAXXVPTELRPVQMRKIXXXXXXXXXKKATVEMVVEGXG

SEQ ID NO: 29569 - protein, 36 aa, Artificial Sequence
  Non-cyclic GFR-binding peptide
  MOD_RES (6)..(6): Xaa is C or S
VTKPTXAPTKLSNITVQIMDDSSNVIIGEMSNMVVR

SEQ ID NO: 29570 - protein, 40 aa, Artificial Sequence
  Non-cyclic GFR-binding peptide
  MOD_RES (5)..(37)..(39): Xaa is C or S
TKPTXAPTKLSNITVQIMDDSSNVIIGEMSNMVVRSXGXH

SEQ ID NO: 29571 - protein, 39 aa, Artificial Sequence
  Non-cyclic GFR-binding peptide
  MOD_RES (5)..(39): Xaa is C or S
EGLEXVPTEEEPLPMVYYRIKPHQGQHEQLSNFLQHNKX

SEQ ID NO: 29572 - protein, 40 aa, Artificial Sequence
  Non-cyclic GFR-binding peptide
  MOD_RES (37)..(39): Xaa is C or S
  MOD_RES (16)..(17)..(18)..(19)..(20): Xaa is A or G
  MOD_RES (21)..(22)..(23)..(24): Xaa is A or G or absent
RPTQVQLEPLPVVYYXXXXXXXXXEQLSNTLEDHLAXKXE

SEQ ID NO: 29573 - protein, 34 aa, Artificial Sequence
  Non-cyclic GFR-binding peptide
  MOD_RES (2)..(3)..(34): Xaa is C or S
PXXVSQDLRSVKIAKVIGKTPKIKEVQVMIVKSX

SEQ ID NO: 29574 - protein, 42 aa, Artificial Sequence
  Non-cyclic GFR-binding peptide
  MOD_RES (2)..(39)..(41): Xaa is C or S
QXRPTQVQLEPLPVVYYEIVRKKPIFEQLSNTLEDHLAXKXE

SEQ ID NO: 29575 - protein, 37 aa, Artificial Sequence
  Non-cyclic GFR-binding peptide
  MOD_RES (2)..(36): Xaa is C or S
  MOD_RES (16)..(17)..(18)..(19)..(20): Xaa is A or G
  MOD_RES (21)..(22)..(23)..(24): Xaa is A or G or absent
EXVPTEEEPLTMLYYXXXXXXXXXEQLSNFLQHNKXE

SEQ ID NO: 29576 - protein, 35 aa, Artificial Sequence
  Non-cyclic GFR-binding peptide
  MOD_RES (1)..(35): Xaa is C or S
  MOD_RES (15)..(16)..(17)..(18)..(19): Xaa is A or G
  MOD_RES (20)..(21)..(22)..(23): Xaa is A or G or absent
XVPTELRPVQMRKIXXXXXXXXXKKATVDMVVEGX

SEQ ID NO: 29577 - protein, 43 aa, Artificial Sequence
  Non-cyclic GFR-binding peptide
  MOD_RES (6)..(40)..(42): Xaa is C or S
  MOD_RES (20)..(21)..(22)..(23)..(24): Xaa is A or G
  MOD_RES (25)..(26)..(27)..(28): Xaa is A or G or absent
VTKPTXAPTKLSNITVQIMXXXXXXXXXIGEMSNMVVRSXGXH

SEQ ID NO: 29578 - protein, 38 aa, Artificial Sequence
  Non-cyclic GFR-binding peptide
  MOD_RES (2)..(3)..(37): Xaa is C or S
  MOD_RES (17)..(18)..(19)..(20)..(21): Xaa is A or G
  MOD_RES (22)..(23)..(24)..(25): Xaa is A or G or absent
AXXVPTELRPVQMRKIXXXXXXXXXKKATVDMVVEGXG

SEQ ID NO: 29579 - protein, 36 aa, Artificial Sequence
  Non-cyclic GFR-binding peptide
  MOD_RES (4)..(5)..(36): Xaa is C or S
ASPXXVSQDLRSVKIAKVIGKTPKIKEVQVMIVKSX

SEQ ID NO: 29580 - protein, 34 aa, Artificial Sequence
  Non-cyclic GFR-binding peptide
  MOD_RES (14)..(15)..(16)..(17)..(18): Xaa is A or G
  MOD_RES (19)..(20)..(21)..(22): Xaa is A or G or absent
TQVQLEPLPVVYYXXXXXXXXXEQLSNTLEDHLA

SEQ ID NO: 29581 - protein, 36 aa, Artificial Sequence
  Non-cyclic GFR-binding peptide
  MOD_RES (1)..(2)..(33)..(35): Xaa is C or S
XXVPQDLRPVQIRKIVGRTPKVKKATVMVVKSXKXS

SEQ ID NO: 29582 - protein, 35 aa, Artificial Sequence
  Non-cyclic GFR-binding peptide
  MOD_RES (1)..(32)..(34): Xaa is C or S
XVPQALRPVQIRKIVGRKPKVKKATVMIVRSXKXS

SEQ ID NO: 29583 - protein, 39 aa, Artificial Sequence
  Non-cyclic GFR-binding peptide
  MOD_RES (2)..(36)..(38): Xaa is C or S
EXVPTEEEPLPMVYYRIKPHQGQHEQLSNFLQHNKXEXR

SEQ ID NO: 29584 - protein, 41 aa, Artificial Sequence
  Non-cyclic GFR-binding peptide
  MOD_RES (3)..(4)..(38)..(40): Xaa is C or S
  MOD_RES (18)..(19)..(20)..(21)..(22): Xaa is A or G
  MOD_RES (23)..(24)..(25)..(26): Xaa is A or G or absent
KPXXAPTQLRSVKVAKVXXXXXXXXXKEVQVNMVVRAXGXH

SEQ ID NO: 29585 - protein, 39 aa, Artificial Sequence
  Non-cyclic GFR-binding peptide
  MOD_RES (6)..(7): Xaa is C or S
  MOD_RES (21)..(22)..(23)..(24)..(25): Xaa is A or G
  MOD_RES (26)..(27)..(28)..(29): Xaa is A or G or absent
KIPKAXXVPTELRSVKMAKVXXXXXXXXXKEVQVDMVVE

SEQ ID NO: 29586 - protein, 33 aa, Artificial Sequence
  Non-cyclic GFR-binding peptide
TQVQLEPLPVVYYEIVRKKPIFEQLSNTLEDHL

SEQ ID NO: 29587 - protein, 38 aa, Artificial Sequence
  Non-cyclic GFR-binding peptide
  MOD_RES (4)..(38): Xaa is C or S
  MOD_RES (18)..(19)..(20)..(21)..(22): Xaa is A or G
  MOD_RES (23)..(24)..(25)..(26): Xaa is A or G or absent
KPTXAPTKLRSVKVAKVXXXXXXXXXKEVQVNMVVRSX

SEQ ID NO: 29588 - protein, 39 aa, Artificial Sequence
  Non-cyclic GFR-binding peptide
  MOD_RES (6)..(7)..(39): Xaa is C or S
SIPKAXXVPTELRPVQMRKIDEYDKVVKKATVEMVVEGX

SEQ ID NO: 29589 - protein, 38 aa, Artificial Sequence
  Non-cyclic GFR-binding peptide
  MOD_RES (4)..(38): Xaa is C or S
  MOD_RES (18)..(19)..(20)..(21)..(22): Xaa is A or G
  MOD_RES (23)..(24)..(25)..(26): Xaa is A or G or absent
GLEXVPTEEEPLPMVYYXXXXXXXXXEQLSNFLQHNKX

SEQ ID NO: 29590 - protein, 34 aa, Artificial Sequence
  Non-cyclic GFR-binding peptide
  MOD_RES (3)..(4): Xaa is C or S
KPXXAPTKLRSVKVAKVDDSSNVIKEVQVNMVVR

SEQ ID NO: 29591 - protein, 42 aa, Artificial Sequence
  Non-cyclic GFR-binding peptide
  MOD_RES (6)..(7)..(39)..(41): Xaa is C or S
KIPKAXXVPTELRPVQMRKIDENEKVVKKATVDMVVEGXGXR

SEQ ID NO: 29592 - protein, 41 aa, Artificial Sequence
  Non-cyclic GFR-binding peptide
  MOD_RES (5)..(6)..(40): Xaa is C or S
  MOD_RES (20)..(21)..(22)..(23)..(24): Xaa is A or G
  MOD_RES (25)..(26)..(27)..(28): Xaa is A or G or absent
VPKPXXAPTQLRPVQVRKIXXXXXXXXXKKATVNMVVRAXG

SEQ ID NO: 29593 - protein, 32 aa, Artificial Sequence
  Non-cyclic GFR-binding peptide
  MOD_RES (32)..(32): Xaa is C or S
VPTELSNITMQIMDENEKVVIGEMSDMVVEGX

SEQ ID NO: 29594 - protein, 41 aa, Artificial Sequence
  Non-cyclic GFR-binding peptide
  MOD_RES (6)..(40): Xaa is C or S
  MOD_RES (20)..(21)..(22)..(23)..(24): Xaa is A or G
  MOD_RES (25)..(26)..(27)..(28): Xaa is A or G or absent
VTKPTXAPTKLRPVQVRKIXXXXXXXXXKKATVNMVVRSXG

SEQ ID NO: 29595 - protein, 37 aa, Artificial Sequence
  Non-cyclic GFR-binding peptide
  MOD_RES (2)..(3)..(34)..(36): Xaa is C or S
PXXVPQALSNITIQIMVGRKPKVIGEMSMIVRSXKXS

SEQ ID NO: 29596 - protein, 34 aa, Artificial Sequence
  Non-cyclic GFR-binding peptide
  MOD_RES (2)..(3): Xaa is C or S
AXXVPTELRSVKMAKVDEYDKVVKEVQVEMVVEG

SEQ ID NO: 29597 - protein, 40 aa, Artificial Sequence
  Non-cyclic GFR-binding peptide
  MOD_RES (3)..(4)..(38)..(40): Xaa is C or S
  MOD_RES (18)..(19)..(20)..(21)..(22): Xaa is A or G
  MOD_RES (23)..(24)..(25)..(26): Xaa is A or G or absent
KPXXAPTQLRSVKVAKVXXXXXXXXXKEVQVNMVVRAXGX

SEQ ID NO: 29598 - protein, 39 aa, Artificial Sequence
  Non-cyclic GFR-binding peptide
  MOD_RES (5)..(5): Xaa is C or S
  MOD_RES (21)..(22)..(23)..(24)..(25): Xaa is A or G
  MOD_RES (26)..(27)..(28)..(29): Xaa is A or G or absent
RNVQXRPTQVQLEPLTVLYYXXXXXXXXXEQLSNTLEDH

SEQ ID NO: 29599 - protein, 37 aa, Artificial Sequence
  Non-cyclic GFR-binding peptide
  MOD_RES (1)..(34)..(36): Xaa is C or S
  MOD_RES (15)..(16)..(17)..(18)..(19): Xaa is A or G
  MOD_RES (20)..(21)..(22)..(23): Xaa is A or G or absent
XVPQDLRSVKIAKVXXXXXXXXXKEVQVMVVKSXKXS

SEQ ID NO: 29600 - protein, 40 aa, Artificial Sequence
  Non-cyclic GFR-binding peptide
  MOD_RES (6)..(7)..(38)..(40): Xaa is C or S
ASAAPXXVPQALRPVQIRKIVGRKPKVKKATVMIVRSXKX

SEQ ID NO: 29601 - protein, 37 aa, Artificial Sequence
  Non-cyclic GFR-binding peptide
  MOD_RES (1)..(2)..(35)..(37): Xaa is C or S
  MOD_RES (16)..(17)..(18)..(19)..(20): Xaa is A or G
  MOD_RES (21)..(22)..(23)..(24): Xaa is A or G or absent
XXVSQDLRSVKIAKVXXXXXXXXXKEVQVMIVKSXKX

SEQ ID NO: 29602 - protein, 38 aa, Artificial Sequence
  Non-cyclic GFR-binding peptide
  MOD_RES (6)..(7): Xaa is C or S
KIPKAXXVPTELRPVQMRKIDENEKVVKKATVDMVVEG

SEQ ID NO: 29603 - protein, 36 aa, Artificial Sequence
  Non-cyclic GFR-binding peptide
QPSRVHHEPLTVLYYEYVRKKPKLEQLSNRLEEHLE

SEQ ID NO: 29604 - protein, 33 aa, Artificial Sequence
  Non-cyclic GFR-binding peptide
  MOD_RES (1)..(1): Xaa is C or S
  MOD_RES (15)..(16)..(17)..(18)..(19): Xaa is A or G
  MOD_RES (20)..(21)..(22)..(23): Xaa is A or G or absent
XVSQDLRPVQIRKIXXXXXXXXXKKATVMIVKS

SEQ ID NO: 29605 - protein, 39 aa, Artificial Sequence
  Non-cyclic GFR-binding peptide
  MOD_RES (4)..(5)..(37)..(39): Xaa is C or S
PKPXXAPTQLSNITVQIMDDSSNVIIGEMSNMVVRAXGX

SEQ ID NO: 29606 - protein, 34 aa, Artificial Sequence
  Non-cyclic GFR-binding peptide
  MOD_RES (1)..(33): Xaa is C or S
XVPTELSNITMQIMDENEKVVIGEMSDMVVEGXG

SEQ ID NO: 29607 - protein, 38 aa, Artificial Sequence
  Non-cyclic GFR-binding peptide
  MOD_RES (3)..(3): Xaa is C or S
VKXQPSRVHHEPLTVLYYEYVRKKPKLEQLSNRLEEHL

SEQ ID NO: 29608 - protein, 33 aa, Artificial Sequence
  Non-cyclic GFR-binding peptide
  MOD_RES (32)..(32): Xaa is C or S
APTKLSNITVQIMDDSSNVIIGEMSNMVVRSXG

SEQ ID NO: 29609 - protein, 38 aa, Artificial Sequence
  Non-cyclic GFR-binding peptide
  MOD_RES (3)..(4)..(36)..(38): Xaa is C or S
KPXXAPTQLSNITVQIMDDSSNVIIGEMSNMVVRAXGX

SEQ ID NO: 29610 - protein, 40 aa, Artificial Sequence
  Non-cyclic GFR-binding peptide
  MOD_RES (7)..(7): Xaa is C or S
  MOD_RES (21)..(22)..(23)..(24)..(25): Xaa is A or G
  MOD_RES (26)..(27)..(28)..(29): Xaa is A or G or absent
HVTKPTXAPTKLRPVQVRKIXXXXXXXXXKKATVNMVVRS

SEQ ID NO: 29611 - protein, 41 aa, Artificial Sequence
  Non-cyclic GFR-binding peptide
  MOD_RES (6)..(7)..(39)..(41): Xaa is C or S
SIPKAXXVPTELRPVQMRKIDEYDKVVKKATVEMVVEGXGX

SEQ ID NO: 29612 - protein, 31 aa, Artificial Sequence
  Non-cyclic GFR-binding peptide
  MOD_RES (1)..(1): Xaa is C or S
XVPQDLRSVKIAKVVGRTPKVKEVQVMVVKS

SEQ ID NO: 29613 - protein, 40 aa, Artificial Sequence
  Non-cyclic GFR-binding peptide
  MOD_RES (3)..(4)..(37)..(39): Xaa is C or S
  MOD_RES (18)..(19)..(20)..(21)..(22): Xaa is A or G
  MOD_RES (23)..(24)..(25)..(26): Xaa is A or G or absent
SPXXVSQDLRSVKIAKVXXXXXXXXXKEVQVMIVKSXKXS

SEQ ID NO: 29614 - protein, 38 aa, Artificial Sequence
  Non-cyclic GFR-binding peptide
  MOD_RES (3)..(4)..(37): Xaa is C or S
  MOD_RES (18)..(19)..(20)..(21)..(22): Xaa is A or G
  MOD_RES (23)..(24)..(25)..(26): Xaa is A or G or absent
APXXVPQALRSVKIAKVXXXXXXXXXKEVQVMIVRSXK

SEQ ID NO: 29615 - protein, 38 aa, Artificial Sequence
  Non-cyclic GFR-binding peptide
  MOD_RES (4)..(5)..(37): Xaa is C or S
PKPXXAPTKLRSVKVAKVDDSSNVIKEVQVNMVVRSXG

SEQ ID NO: 29616 - protein, 38 aa, Artificial Sequence
  Non-cyclic GFR-binding peptide
  MOD_RES (1)..(35)..(37): Xaa is C or S
  MOD_RES (15)..(16)..(17)..(18)..(19): Xaa is A or G
  MOD_RES (20)..(21)..(22)..(23): Xaa is A or G or absent
XVPTELSNITMQIMXXXXXXXXXIGEMSEMVVEGXGXR

SEQ ID NO: 29617 - protein, 33 aa, Artificial Sequence
  Non-cyclic GFR-binding peptide
  MOD_RES (2)..(3): Xaa is C or S
AXXVPTELSNITMQIMDEYDKVVIGEMSEMVVE

SEQ ID NO: 29618 - protein, 40 aa, Artificial Sequence
  Non-cyclic GFR-binding peptide
  MOD_RES (5)..(5): Xaa is C or S
  MOD_RES (21)..(22)..(23)..(24)..(25): Xaa is A or G
  MOD_RES (26)..(27)..(28)..(29): Xaa is A or G or absent
SSVKXQPSRVHHEPLPVVYYXXXXXXXXXEQLSNRLEEHL

SEQ ID NO: 29619 - protein, 35 aa, Artificial Sequence
  Non-cyclic GFR-binding peptide
  MOD_RES (33)..(35): Xaa is C or S
  MOD_RES (14)..(15)..(16)..(17)..(18): Xaa is A or G
  MOD_RES (19)..(20)..(21)..(22): Xaa is A or G or absent
VSQDLRPVQIRKIXXXXXXXXXKKATVMIVKSXKX

SEQ ID NO: 29620 - protein, 35 aa, Artificial Sequence
  Non-cyclic GFR-binding peptide
  MOD_RES (1)..(34): Xaa is C or S
  MOD_RES (15)..(16)..(17)..(18)..(19): Xaa is A or G
  MOD_RES (20)..(21)..(22)..(23): Xaa is A or G or absent
XVPQALSNITIQIMXXXXXXXXXIGEMSMIVRSXK

SEQ ID NO: 29621 - protein, 39 aa, Artificial Sequence
  Non-cyclic GFR-binding peptide
  MOD_RES (5)..(5): Xaa is C or S
RNVQXRPTQVQLEPLTVLYYEIVRKKPIFEQLSNTLEDH

SEQ ID NO: 29622 - protein, 37 aa, Artificial Sequence
  Non-cyclic GFR-binding peptide
  MOD_RES (2)..(34)..(36): Xaa is C or S
TXAPTKLRPVQVRKIDDSSNVIKKATVNMVVRSXGXH

SEQ ID NO: 29623 - protein, 38 aa, Artificial Sequence
  Non-cyclic GFR-binding peptide
  MOD_RES (5)..(6)..(38): Xaa is C or S
VPKPXXAPTQLRSVKVAKVDDSSNVIKEVQVNMVVRAX

SEQ ID NO: 29624 - protein, 39 aa, Artificial Sequence
  Non-cyclic GFR-binding peptide
  MOD_RES (4)..(5)..(36)..(38): Xaa is C or S
ASPXXVSQDLRSVKIAKVIGKTPKIKEVQVMIVKSXKXS

SEQ ID NO: 29625 - protein, 39 aa, Artificial Sequence
  Non-cyclic GFR-binding peptide
  MOD_RES (6)..(7)..(39): Xaa is C or S
YVPKPXXAPTKLRSVKVAKVDDSSNVIKEVQVNMVVRSX

SEQ ID NO: 29626 - protein, 39 aa, Artificial Sequence
  Non-cyclic GFR-binding peptide
  MOD_RES (3)..(37)..(39): Xaa is C or S
LEXVPTEEEPLPMVYYRIKPHQGQHEQLSNFLQHNKXEX

SEQ ID NO: 29627 - protein, 38 aa, Artificial Sequence
  Non-cyclic GFR-binding peptide
  MOD_RES (3)..(3): Xaa is C or S
  MOD_RES (19)..(20)..(21)..(22)..(23): Xaa is A or G
  MOD_RES (24)..(25)..(26)..(27): Xaa is A or G or absent
VQXRPTQVQLEPLPVVYYXXXXXXXXXEQLSNTLEDHL

SEQ ID NO: 29628 - protein, 39 aa, Artificial Sequence
  Non-cyclic GFR-binding peptide
  MOD_RES (5)..(6)..(39): Xaa is C or S
  MOD_RES (20)..(21)..(22)..(23)..(24): Xaa is A or G
  MOD_RES (25)..(26)..(27)..(28): Xaa is A or G or absent
SASPXXVPQDLRPVQIRKIXXXXXXXXXKKATVMVVKSX

SEQ ID NO: 29629 - protein, 35 aa, Artificial Sequence
  Non-cyclic GFR-binding peptide
  MOD_RES (1)..(2)..(34): Xaa is C or S
XXAPTQLSNITVQIMDDSSNVIIGEMSNMVVRAXG

SEQ ID NO: 29630 - protein, 32 aa, Artificial Sequence
  Non-cyclic GFR-binding peptide
  MOD_RES (14)..(15)..(16)..(17)..(18): Xaa is A or G
  MOD_RES (19)..(20)..(21)..(22): Xaa is A or G or absent
VPTELRPVQMRKIXXXXXXXXXKKATVEMVVE

SEQ ID NO: 29631 - protein, 37 aa, Artificial Sequence
  Non-cyclic GFR-binding peptide
  MOD_RES (3)..(37): Xaa is C or S
  MOD_RES (17)..(18)..(19)..(20)..(21): Xaa is A or G
  MOD_RES (22)..(23)..(24)..(25): Xaa is A or G or absent
PTXAPTKLSNITVQIMXXXXXXXXXIGEMSNMVVRSX

SEQ ID NO: 29632 - protein, 37 aa, Artificial Sequence
  Non-cyclic GFR-binding peptide
  MOD_RES (2)..(3)..(34)..(36): Xaa is C or S
PXXVPQDLRPVQIRKIVGRTPKVKKATVMVVKSXKXS

SEQ ID NO: 29633 - protein, 32 aa, Artificial Sequence
  Non-cyclic GFR-binding peptide
  MOD_RES (14)..(15)..(16)..(17)..(18): Xaa is A or G
  MOD_RES (19)..(20)..(21)..(22): Xaa is A or G or absent
APTKLRSVKVAKVXXXXXXXXXKEVQVNMVVR

SEQ ID NO: 29634 - protein, 34 aa, Artificial Sequence
  Non-cyclic GFR-binding peptide
  MOD_RES (1)..(2)..(34): Xaa is C or S
XXVPTELRSVKMAKVDENEKVVKEVQVDMVVEGX

SEQ ID NO: 29635 - protein, 39 aa, Artificial Sequence
  Non-cyclic GFR-binding peptide
  MOD_RES (5)..(39): Xaa is C or S
  MOD_RES (19)..(20)..(21)..(22)..(23): Xaa is A or G
  MOD_RES (24)..(25)..(26)..(27): Xaa is A or G or absent
EGLEXVPTEEEPLPMVYYXXXXXXXXXEQLSNFLQHNKX

SEQ ID NO: 29636 - protein, 36 aa, Artificial Sequence
  Non-cyclic GFR-binding peptide
  MOD_RES (2)..(3)..(36): Xaa is C or S
  MOD_RES (17)..(18)..(19)..(20)..(21): Xaa is A or G
  MOD_RES (22)..(23)..(24)..(25): Xaa is A or G or absent
PXXVSQDLRSVKIAKVXXXXXXXXXKEVQVMIVKSX

SEQ ID NO: 29637 - protein, 41 aa, Artificial Sequence
  Non-cyclic GFR-binding peptide
  MOD_RES (4)..(5)..(39)..(41): Xaa is C or S
  MOD_RES (19)..(20)..(21)..(22)..(23): Xaa is A or G
  MOD_RES (24)..(25)..(26)..(27): Xaa is A or G or absent
PKPXXAPTQLRSVKVAKVXXXXXXXXXKEVQVNMVVRAXGX

SEQ ID NO: 29638 - protein, 37 aa, Artificial Sequence
  Non-cyclic GFR-binding peptide
  MOD_RES (1)..(35)..(37): Xaa is C or S
  MOD_RES (15)..(16)..(17)..(18)..(19): Xaa is A or G
  MOD_RES (20)..(21)..(22)..(23): Xaa is A or G or absent
XVPTELRSVKMAKVXXXXXXXXXKEVQVDMVVEGXGX

SEQ ID NO: 29639 - protein, 39 aa, Artificial Sequence
  Non-cyclic GFR-binding peptide
  MOD_RES (5)..(6): Xaa is C or S
  MOD_RES (20)..(21)..(22)..(23)..(24): Xaa is A or G
  MOD_RES (25)..(26)..(27)..(28): Xaa is A or G or absent
IPKAXXVPTELRSVKMAKVXXXXXXXXXKEVQVEMVVEG

SEQ ID NO: 29640 - protein, 37 aa, Artificial Sequence
  Non-cyclic GFR-binding peptide
  MOD_RES (3)..(3): Xaa is C or S
VQXRPTQVQLEPLPVVYYEIVRKKPIFEQLSNTLEDH

SEQ ID NO: 29641 - protein, 37 aa, Artificial Sequence
  Non-cyclic GFR-binding peptide
  MOD_RES (1)..(2)..(35)..(37): Xaa is C or S
  MOD_RES (16)..(17)..(18)..(19)..(20): Xaa is A or G
  MOD_RES (21)..(22)..(23)..(24): Xaa is A or G or absent
XXVPQALRPVQIRKIXXXXXXXXXKKATVMIVRSXKX

SEQ ID NO: 29642 - protein, 40 aa, Artificial Sequence
  Non-cyclic GFR-binding peptide
  MOD_RES (5)..(6)..(38)..(40): Xaa is C or S
IPKAXXVPTELSNITMQIMDEYDKVVIGEMSEMVVEGXGX

SEQ ID NO: 29643 - protein, 42 aa, Artificial Sequence
  Non-cyclic GFR-binding peptide
  MOD_RES (5)..(39)..(41): Xaa is C or S
EGLEXVPTEEEPLTMLYYRIKPHQGQHEQLSNFLQHNKXEXR

SEQ ID NO: 29644 - protein, 35 aa, Artificial Sequence
  Non-cyclic GFR-binding peptide
  MOD_RES (4)..(4): Xaa is C or S
KPTXAPTKLRSVKVAKVDDSSNVIKEVQVNMVVRS

SEQ ID NO: 29645 - protein, 38 aa, Artificial Sequence
  Non-cyclic GFR-binding peptide
  MOD_RES (5)..(5): Xaa is C or S
  MOD_RES (19)..(20)..(21)..(22)..(23): Xaa is A or G
  MOD_RES (24)..(25)..(26)..(27): Xaa is A or G or absent
TKPTXAPTKLSNITVQIMXXXXXXXXXIGEMSNMVVRS

SEQ ID NO: 29646 - protein, 40 aa, Artificial Sequence
  Non-cyclic GFR-binding peptide
  MOD_RES (4)..(5)..(39): Xaa is C or S
  MOD_RES (19)..(20)..(21)..(22)..(23): Xaa is A or G
  MOD_RES (24)..(25)..(26)..(27): Xaa is A or G or absent
PKPXXAPTKLSNITVQIMXXXXXXXXXIGEMSNMVVRSXG

SEQ ID NO: 29647 - protein, 41 aa, Artificial Sequence
  Non-cyclic GFR-binding peptide
  MOD_RES (2)..(39)..(41): Xaa is C or S
  MOD_RES (18)..(19)..(20)..(21)..(22): Xaa is A or G
  MOD_RES (23)..(24)..(25)..(26): Xaa is A or G or absent
QXRPTQVQLEPLTVLYYXXXXXXXXXEQLSNTLEDHLAXKX

SEQ ID NO: 29648 - protein, 43 aa, Artificial Sequence
  Non-cyclic GFR-binding peptide
  MOD_RES (5)..(42): Xaa is C or S
SSVKXQPSRVHHEPLPVVYYEYVRKKPKLEQLSNRLEEHLEXA

SEQ ID NO: 29649 - protein, 35 aa, Artificial Sequence
  Non-cyclic GFR-binding peptide
  MOD_RES (16)..(17)..(18)..(19)..(20): Xaa is A or G
  MOD_RES (21)..(22)..(23)..(24): Xaa is A or G or absent
QPSRVHHEPLPVVYYXXXXXXXXXEQLSNRLEEHL

SEQ ID NO: 29650 - protein, 31 aa, Artificial Sequence
  Non-cyclic GFR-binding peptide
  MOD_RES (1)..(1): Xaa is C or S
XAPTQLSNITVQIMDDSSNVIIGEMSNMVVR

SEQ ID NO: 29651 - protein, 38 aa, Artificial Sequence
  Non-cyclic GFR-binding peptide
  MOD_RES (1)..(35)..(37): Xaa is C or S
  MOD_RES (15)..(16)..(17)..(18)..(19): Xaa is A or G
  MOD_RES (20)..(21)..(22)..(23): Xaa is A or G or absent
XVPTEEEPLPMVYYXXXXXXXXXEQLSNFLQHNKXEXR

SEQ ID NO: 29652 - protein, 41 aa, Artificial Sequence
  Non-cyclic GFR-binding peptide
  MOD_RES (3)..(4)..(38)..(40): Xaa is C or S
  MOD_RES (18)..(19)..(20)..(21)..(22): Xaa is A or G
  MOD_RES (23)..(24)..(25)..(26): Xaa is A or G or absent
KAXXVPTELRSVKMAKVXXXXXXXXXKEVQVEMVVEGXGXR

SEQ ID NO: 29653 - protein, 38 aa, Artificial Sequence
  Non-cyclic GFR-binding peptide
  MOD_RES (5)..(6)..(38): Xaa is C or S
VPKPXXAPTKLRPVQVRKIDDSSNVIKKATVNMVVRSX

SEQ ID NO: 29654 - protein, 40 aa, Artificial Sequence
  Non-cyclic GFR-binding peptide
  MOD_RES (37)..(39): Xaa is C or S
QPSRVHHEPLPVVYYEYVRKKPKLEQLSNRLEEHLEXAXA

SEQ ID NO: 29655 - protein, 33 aa, Artificial Sequence
  Non-cyclic GFR-binding peptide
  MOD_RES (1)..(32): Xaa is C or S
XVPQALRPVQIRKIVGRKPKVKKATVMIVRSXK

SEQ ID NO: 29656 - protein, 35 aa, Artificial Sequence
  Non-cyclic GFR-binding peptide
  MOD_RES (3)..(4): Xaa is C or S
KAXXVPTELSNITMQIMDEYDKVVIGEMSEMVVEG

SEQ ID NO: 29657 - protein, 37 aa, Artificial Sequence
  Non-cyclic GFR-binding peptide
  MOD_RES (2)..(3)..(36): Xaa is C or S
  MOD_RES (17)..(18)..(19)..(20)..(21): Xaa is A or G
  MOD_RES (22)..(23)..(24)..(25): Xaa is A or G or absent
PXXVPQALRSVKIAKVXXXXXXXXXKEVQVMIVRSXK

SEQ ID NO: 29658 - protein, 38 aa, Artificial Sequence
  Non-cyclic GFR-binding peptide
  MOD_RES (2)..(3)..(37): Xaa is C or S
  MOD_RES (17)..(18)..(19)..(20)..(21): Xaa is A or G
  MOD_RES (22)..(23)..(24)..(25): Xaa is A or G or absent
PXXAPTQLRPVQVRKIXXXXXXXXXKKATVNMVVRAXG

SEQ ID NO: 29659 - protein, 37 aa, Artificial Sequence
  Non-cyclic GFR-binding peptide
  MOD_RES (37)..(37): Xaa is C or S
QPSRVHHEPLPVVYYEYVRKKPKLEQLSNRLEEHLEX

SEQ ID NO: 29660 - protein, 36 aa, Artificial Sequence
  Non-cyclic GFR-binding peptide
  MOD_RES (34)..(36): Xaa is C or S
  MOD_RES (14)..(15)..(16)..(17)..(18): Xaa is A or G
  MOD_RES (19)..(20)..(21)..(22): Xaa is A or G or absent
APTKLRPVQVRKIXXXXXXXXXKKATVNMVVRSXGX

SEQ ID NO: 29661 - protein, 38 aa, Artificial Sequence
  Non-cyclic GFR-binding peptide
  MOD_RES (35)..(37): Xaa is C or S
TQVQLEPLTVLYYEIVRKKPIFEQLSNTLEDHLAXKXE

SEQ ID NO: 29662 - protein, 33 aa, Artificial Sequence
  Non-cyclic GFR-binding peptide
  MOD_RES (1)..(1): Xaa is C or S
  MOD_RES (15)..(16)..(17)..(18)..(19): Xaa is A or G
  MOD_RES (20)..(21)..(22)..(23): Xaa is A or G or absent
XVPTELRSVKMAKVXXXXXXXXXKEVQVEMVVE

SEQ ID NO: 29663 - protein, 36 aa, Artificial Sequence
  Non-cyclic GFR-binding peptide
  MOD_RES (3)..(4): Xaa is C or S
  MOD_RES (18)..(19)..(20)..(21)..(22): Xaa is A or G
  MOD_RES (23)..(24)..(25)..(26): Xaa is A or G or absent
KAXXVPTELSNITMQIMXXXXXXXXXIGEMSEMVVE

SEQ ID NO: 29664 - protein, 39 aa, Artificial Sequence
  Non-cyclic GFR-binding peptide
  MOD_RES (5)..(5): Xaa is C or S
RNVQXRPTQVQLEPLPVVYYEIVRKKPIFEQLSNTLEDH

SEQ ID NO: 29665 - protein, 39 aa, Artificial Sequence
  Non-cyclic GFR-binding peptide
  MOD_RES (4)..(5)..(37)..(39): Xaa is C or S
PKPXXAPTKLSNITVQIMDDSSNVIIGEMSNMVVRSXGX

SEQ ID NO: 29666 - protein, 33 aa, Artificial Sequence
  Non-cyclic GFR-binding peptide
  MOD_RES (1)..(1): Xaa is C or S
  MOD_RES (15)..(16)..(17)..(18)..(19): Xaa is A or G
  MOD_RES (20)..(21)..(22)..(23): Xaa is A or G or absent
XVPTELRPVQMRKIXXXXXXXXXKKATVEMVVE

SEQ ID NO: 29667 - protein, 31 aa, Artificial Sequence
  Non-cyclic GFR-binding peptide
  MOD_RES (1)..(1): Xaa is C or S
XVSQDLRPVQIRKIIGKTPKIKKATVMIVKS

SEQ ID NO: 29668 - protein, 40 aa, Artificial Sequence
  Non-cyclic GFR-binding peptide
  MOD_RES (5)..(39): Xaa is C or S
  MOD_RES (19)..(20)..(21)..(22)..(23): Xaa is A or G
  MOD_RES (24)..(25)..(26)..(27): Xaa is A or G or absent
TKPTXAPTKLRSVKVAKVXXXXXXXXXKEVQVNMVVRSXG

SEQ ID NO: 29669 - protein, 36 aa, Artificial Sequence
  Non-cyclic GFR-binding peptide
  MOD_RES (1)..(2)..(35): Xaa is C or S
  MOD_RES (16)..(17)..(18)..(19)..(20): Xaa is A or G
  MOD_RES (21)..(22)..(23)..(24): Xaa is A or G or absent
XXVSQDLRPVQIRKIXXXXXXXXXKKATVMIVKSXK

SEQ ID NO: 29670 - protein, 37 aa, Artificial Sequence
  Non-cyclic GFR-binding peptide
  MOD_RES (4)..(5): Xaa is C or S
  MOD_RES (19)..(20)..(21)..(22)..(23): Xaa is A or G
  MOD_RES (24)..(25)..(26)..(27): Xaa is A or G or absent
PKPXXAPTQLRSVKVAKVXXXXXXXXXKEVQVNMVVR

SEQ ID NO: 29671 - protein, 32 aa, Artificial Sequence
  Non-cyclic GFR-binding peptide
  MOD_RES (14)..(15)..(16)..(17)..(18): Xaa is A or G
  MOD_RES (19)..(20)..(21)..(22): Xaa is A or G or absent
VPQALRPVQIRKIXXXXXXXXXKKATVMIVRS

SEQ ID NO: 29672 - protein, 37 aa, Artificial Sequence
  Non-cyclic GFR-binding peptide
  MOD_RES (35)..(37): Xaa is C or S
SRVHHEPLPVVYYEYVRKKPKLEQLSNRLEEHLEXAX

SEQ ID NO: 29673 - protein, 36 aa, Artificial Sequence
  Non-cyclic GFR-binding peptide
  MOD_RES (3)..(4)..(36): Xaa is C or S
KAXXVPTELRPVQMRKIDEYDKVVKKATVEMVVEGX

SEQ ID NO: 29674 - protein, 39 aa, Artificial Sequence
  Non-cyclic GFR-binding peptide
  MOD_RES (3)..(4)..(38): Xaa is C or S
  MOD_RES (18)..(19)..(20)..(21)..(22): Xaa is A or G
  MOD_RES (23)..(24)..(25)..(26): Xaa is A or G or absent
KPXXAPTKLSNITVQIMXXXXXXXXXIGEMSNMVVRSXG

SEQ ID NO: 29675 - protein, 41 aa, Artificial Sequence
  Non-cyclic GFR-binding peptide
  MOD_RES (5)..(6)..(39)..(41): Xaa is C or S
  MOD_RES (20)..(21)..(22)..(23)..(24): Xaa is A or G
  MOD_RES (25)..(26)..(27)..(28): Xaa is A or G or absent
SASPXXVSQDLSNITIQIMXXXXXXXXXIGEMSMIVKSXKX

SEQ ID NO: 29676 - protein, 38 aa, Artificial Sequence
  Non-cyclic GFR-binding peptide
  MOD_RES (4)..(5)..(38): Xaa is C or S
  MOD_RES (19)..(20)..(21)..(22)..(23): Xaa is A or G
  MOD_RES (24)..(25)..(26)..(27): Xaa is A or G or absent
ASPXXVPQDLRSVKIAKVXXXXXXXXXKEVQVMVVKSX

SEQ ID NO: 29677 - protein, 40 aa, Artificial Sequence
  Non-cyclic GFR-binding peptide
  MOD_RES (4)..(5)..(37)..(39): Xaa is C or S
PKAXXVPTELSNITMQIMDEYDKVVIGEMSEMVVEGXGXR

SEQ ID NO: 29678 - protein, 34 aa, Artificial Sequence
  Non-cyclic GFR-binding peptide
  MOD_RES (34)..(34): Xaa is C or S
  MOD_RES (14)..(15)..(16)..(17)..(18): Xaa is A or G
  MOD_RES (19)..(20)..(21)..(22): Xaa is A or G or absent
APTKLRSVKVAKVXXXXXXXXXKEVQVNMVVRSX

SEQ ID NO: 29679 - protein, 37 aa, Artificial Sequence
  Non-cyclic GFR-binding peptide
  MOD_RES (34)..(36): Xaa is C or S
  MOD_RES (14)..(15)..(16)..(17)..(18): Xaa is A or G
  MOD_RES (19)..(20)..(21)..(22): Xaa is A or G or absent
APTQLSNITVQIMXXXXXXXXXIGEMSNMVVRAXGXH

SEQ ID NO: 29680 - protein, 42 aa, Artificial Sequence
  Non-cyclic GFR-binding peptide
  MOD_RES (6)..(40)..(42): Xaa is C or S
  MOD_RES (20)..(21)..(22)..(23)..(24): Xaa is A or G
  MOD_RES (25)..(26)..(27)..(28): Xaa is A or G or absent
VTKPTXAPTKLSNITVQIMXXXXXXXXXIGEMSNMVVRSXGX

SEQ ID NO: 29681 - protein, 39 aa, Artificial Sequence
  Non-cyclic GFR-binding peptide
  MOD_RES (6)..(38): Xaa is C or S
VTKPTXAPTKLRSVKVAKVDDSSNVIKEVQVNMVVRSXG

SEQ ID NO: 29682 - protein, 37 aa, Artificial Sequence
  Non-cyclic GFR-binding peptide
  MOD_RES (3)..(4): Xaa is C or S
  MOD_RES (18)..(19)..(20)..(21)..(22): Xaa is A or G
  MOD_RES (23)..(24)..(25)..(26): Xaa is A or G or absent
KPXXAPTKLRSVKVAKVXXXXXXXXXKEVQVNMVVRS

SEQ ID NO: 29683 - protein, 41 aa, Artificial Sequence
  Non-cyclic GFR-binding peptide
  MOD_RES (6)..(38)..(40): Xaa is C or S
VTKPTXAPTKLRSVKVAKVDDSSNVIKEVQVNMVVRSXGXH

SEQ ID NO: 29684 - protein, 38 aa, Artificial Sequence
  Non-cyclic GFR-binding peptide
  MOD_RES (3)..(4)..(37): Xaa is C or S
  MOD_RES (18)..(19)..(20)..(21)..(22): Xaa is A or G
  MOD_RES (23)..(24)..(25)..(26): Xaa is A or G or absent
SPXXVSQDLRSVKIAKVXXXXXXXXXKEVQVMIVKSXK

SEQ ID NO: 29685 - protein, 40 aa, Artificial Sequence
  Non-cyclic GFR-binding peptide
  MOD_RES (6)..(7): Xaa is C or S
  MOD_RES (21)..(22)..(23)..(24)..(25): Xaa is A or G
  MOD_RES (26)..(27)..(28)..(29): Xaa is A or G or absent
KIPKAXXVPTELRSVKMAKVXXXXXXXXXKEVQVDMVVEG

SEQ ID NO: 29686 - protein, 35 aa, Artificial Sequence
  Non-cyclic GFR-binding peptide
  MOD_RES (32)..(34): Xaa is C or S
APTKLRSVKVAKVDDSSNVIKEVQVNMVVRSXGXH

SEQ ID NO: 29687 - protein, 39 aa, Artificial Sequence
  Non-cyclic GFR-binding peptide
  MOD_RES (1)..(38): Xaa is C or S
  MOD_RES (17)..(18)..(19)..(20)..(21): Xaa is A or G
  MOD_RES (22)..(23)..(24)..(25): Xaa is A or G or absent
XQPSRVHHEPLTVLYYXXXXXXXXXEQLSNRLEEHLEXA

SEQ ID NO: 29688 - protein, 37 aa, Artificial Sequence
  Non-cyclic GFR-binding peptide
  MOD_RES (7)..(7): Xaa is C or S
HVTKPTXAPTKLRSVKVAKVDDSSNVIKEVQVNMVVR

SEQ ID NO: 29689 - protein, 37 aa, Artificial Sequence
  Non-cyclic GFR-binding peptide
  MOD_RES (37)..(37): Xaa is C or S
RPTQVQLEPLPVVYYEIVRKKPIFEQLSNTLEDHLAX

SEQ ID NO: 29690 - protein, 40 aa, Artificial Sequence
  Non-cyclic GFR-binding peptide
  MOD_RES (4)..(5)..(39): Xaa is C or S
  MOD_RES (19)..(20)..(21)..(22)..(23): Xaa is A or G
  MOD_RES (24)..(25)..(26)..(27): Xaa is A or G or absent
PKAXXVPTELRPVQMRKIXXXXXXXXXKKATVEMVVEGXG

SEQ ID NO: 29691 - protein, 39 aa, Artificial Sequence
  Non-cyclic GFR-binding peptide
  MOD_RES (5)..(39): Xaa is C or S
  MOD_RES (19)..(20)..(21)..(22)..(23): Xaa is A or G
  MOD_RES (24)..(25)..(26)..(27): Xaa is A or G or absent
TKPTXAPTKLRSVKVAKVXXXXXXXXXKEVQVNMVVRSX

SEQ ID NO: 29692 - protein, 38 aa, Artificial Sequence
  Non-cyclic GFR-binding peptide
  MOD_RES (2)..(2): Xaa is C or S
QXRPTQVQLEPLTVLYYEIVRKKPIFEQLSNTLEDHLA

SEQ ID NO: 29693 - protein, 37 aa, Artificial Sequence
  Non-cyclic GFR-binding peptide
  MOD_RES (4)..(5): Xaa is C or S
  MOD_RES (19)..(20)..(21)..(22)..(23): Xaa is A or G
  MOD_RES (24)..(25)..(26)..(27): Xaa is A or G or absent
PKAXXVPTELSNITMQIMXXXXXXXXXIGEMSDMVVE

SEQ ID NO: 29694 - protein, 34 aa, Artificial Sequence
  Non-cyclic GFR-binding peptide
  MOD_RES (2)..(3)..(34): Xaa is C or S
PXXVPQALSNITIQIMVGRKPKVIGEMSMIVRSX

SEQ ID NO: 29695 - protein, 36 aa, Artificial Sequence
  Non-cyclic GFR-binding peptide
  MOD_RES (1)..(35): Xaa is C or S
  MOD_RES (15)..(16)..(17)..(18)..(19): Xaa is A or G
  MOD_RES (20)..(21)..(22)..(23): Xaa is A or G or absent
XAPTKLRSVKVAKVXXXXXXXXXKEVQVNMVVRSXG

SEQ ID NO: 29696 - protein, 37 aa, Artificial Sequence
  Non-cyclic GFR-binding peptide
  MOD_RES (5)..(6): Xaa is C or S
VPKPXXAPTKLSNITVQIMDDSSNVIIGEMSNMVVRS

SEQ ID NO: 29697 - protein, 35 aa, Artificial Sequence
  Non-cyclic GFR-binding peptide
  MOD_RES (4)..(5): Xaa is C or S
PKPXXAPTQLSNITVQIMDDSSNVIIGEMSNMVVR

SEQ ID NO: 29698 - protein, 38 aa, Artificial Sequence
  Non-cyclic GFR-binding peptide
  MOD_RES (37)..(37): Xaa is C or S
RPTQVQLEPLPVVYYEIVRKKPIFEQLSNTLEDHLAXK

SEQ ID NO: 29699 - protein, 34 aa, Artificial Sequence
  Non-cyclic GFR-binding peptide
  MOD_RES (1)..(1): Xaa is C or S
  MOD_RES (15)..(16)..(17)..(18)..(19): Xaa is A or G
  MOD_RES (20)..(21)..(22)..(23): Xaa is A or G or absent
XAPTKLSNITVQIMXXXXXXXXXIGEMSNMVVRS

SEQ ID NO: 29700 - protein, 37 aa, Artificial Sequence
  Non-cyclic GFR-binding peptide
  MOD_RES (1)..(2)..(36): Xaa is C or S
  MOD_RES (16)..(17)..(18)..(19)..(20): Xaa is A or G
  MOD_RES (21)..(22)..(23)..(24): Xaa is A or G or absent
XXAPTQLRPVQVRKIXXXXXXXXXKKATVNMVVRAXG

SEQ ID NO: 29701 - protein, 40 aa, Artificial Sequence
  Non-cyclic GFR-binding peptide
  MOD_RES (6)..(7)..(39): Xaa is C or S
KIPKAXXVPTELRPVQMRKIDENEKVVKKATVDMVVEGXG

SEQ ID NO: 29702 - protein, 42 aa, Artificial Sequence
  Non-cyclic GFR-binding peptide
  MOD_RES (6)..(7)..(41): Xaa is C or S
  MOD_RES (21)..(22)..(23)..(24)..(25): Xaa is A or G
  MOD_RES (26)..(27)..(28)..(29): Xaa is A or G or absent
KIPKAXXVPTELRSVKMAKVXXXXXXXXXKEVQVDMVVEGXG

SEQ ID NO: 29703 - protein, 39 aa, Artificial Sequence
  Non-cyclic GFR-binding peptide
  MOD_RES (1)..(2)..(36)..(38): Xaa is C or S
  MOD_RES (16)..(17)..(18)..(19)..(20): Xaa is A or G
  MOD_RES (21)..(22)..(23)..(24): Xaa is A or G or absent
XXVPTELRPVQMRKIXXXXXXXXXKKATVDMVVEGXGXR

SEQ ID NO: 29704 - protein, 41 aa, Artificial Sequence
  Non-cyclic GFR-binding peptide
  MOD_RES (2)..(39)..(41): Xaa is C or S
QXRPTQVQLEPLTVLYYEIVRKKPIFEQLSNTLEDHLAXKX

SEQ ID NO: 29705 - protein, 33 aa, Artificial Sequence
  Non-cyclic GFR-binding peptide
  MOD_RES (1)..(2): Xaa is C or S
XXAPTQLRPVQVRKIDDSSNVIKKATVNMVVRA

SEQ ID NO: 29706 - protein, 37 aa, Artificial Sequence
  Non-cyclic GFR-binding peptide
  MOD_RES (1)..(2)..(36): Xaa is C or S
  MOD_RES (16)..(17)..(18)..(19)..(20): Xaa is A or G
  MOD_RES (21)..(22)..(23)..(24): Xaa is A or G or absent
XXVPTELRPVQMRKIXXXXXXXXXKKATVDMVVEGXG

SEQ ID NO: 29707 - protein, 35 aa, Artificial Sequence
  Non-cyclic GFR-binding peptide
  MOD_RES (2)..(3)..(35): Xaa is C or S
PXXAPTQLRPVQVRKIDDSSNVIKKATVNMVVRAX

SEQ ID NO: 29708 - protein, 39 aa, Artificial Sequence
  Non-cyclic GFR-binding peptide
  MOD_RES (5)..(6): Xaa is C or S
  MOD_RES (20)..(21)..(22)..(23)..(24): Xaa is A or G
  MOD_RES (25)..(26)..(27)..(28): Xaa is A or G or absent
IPKAXXVPTELRPVQMRKIXXXXXXXXXKKATVEMVVEG

SEQ ID NO: 29709 - protein, 38 aa, Artificial Sequence
  Non-cyclic GFR-binding peptide
  MOD_RES (35)..(37): Xaa is C or S
  MOD_RES (14)..(15)..(16)..(17)..(18): Xaa is A or G
  MOD_RES (19)..(20)..(21)..(22): Xaa is A or G or absent
TQVQLEPLTVLYYXXXXXXXXXEQLSNTLEDHLAXKXE

SEQ ID NO: 29710 - protein, 33 aa, Artificial Sequence
  Non-cyclic GFR-binding peptide
  MOD_RES (1)..(33): Xaa is C or S
XAPTQLSNITVQIMDDSSNVIIGEMSNMVVRAX

SEQ ID NO: 29711 - protein, 35 aa, Artificial Sequence
  Non-cyclic GFR-binding peptide
  MOD_RES (2)..(3)..(35): Xaa is C or S
AXXVPTELRPVQMRKIDENEKVVKKATVDMVVEGX

SEQ ID NO: 29712 - protein, 40 aa, Artificial Sequence
  Non-cyclic GFR-binding peptide
  MOD_RES (5)..(6)..(39): Xaa is C or S
  MOD_RES (20)..(21)..(22)..(23)..(24): Xaa is A or G
  MOD_RES (25)..(26)..(27)..(28): Xaa is A or G or absent
SAAPXXVPQALRPVQIRKIXXXXXXXXXKKATVMIVRSXK

SEQ ID NO: 29713 - protein, 44 aa, Artificial Sequence
  Non-cyclic GFR-binding peptide
  MOD_RES (5)..(42)..(44): Xaa is C or S
SSVKXQPSRVHHEPLPVVYYEYVRKKPKLEQLSNRLEEHLEXAX

SEQ ID NO: 29714 - protein, 40 aa, Artificial Sequence
  Non-cyclic GFR-binding peptide
  MOD_RES (7)..(7): Xaa is C or S
  MOD_RES (21)..(22)..(23)..(24)..(25): Xaa is A or G
  MOD_RES (26)..(27)..(28)..(29): Xaa is A or G or absent
HVTKPTXAPTKLRSVKVAKVXXXXXXXXXKEVQVNMVVRS

SEQ ID NO: 29715 - protein, 35 aa, Artificial Sequence
  Non-cyclic GFR-binding peptide
  MOD_RES (34)..(34): Xaa is C or S
  MOD_RES (14)..(15)..(16)..(17)..(18): Xaa is A or G
  MOD_RES (19)..(20)..(21)..(22): Xaa is A or G or absent
VPTEEEPLTMLYYXXXXXXXXXEQLSNFLQHNKXE

SEQ ID NO: 29716 - protein, 43 aa, Artificial Sequence
  Non-cyclic GFR-binding peptide
  MOD_RES (4)..(41)..(43): Xaa is C or S
SVKXQPSRVHHEPLPVVYYEYVRKKPKLEQLSNRLEEHLEXAX

SEQ ID NO: 29717 - protein, 35 aa, Artificial Sequence
  Non-cyclic GFR-binding peptide
  MOD_RES (1)..(2)..(34): Xaa is C or S
XXVPTELRPVQMRKIDEYDKVVKKATVEMVVEGXG

SEQ ID NO: 29718 - protein, 37 aa, Artificial Sequence
  Non-cyclic GFR-binding peptide
  MOD_RES (34)..(36): Xaa is C or S
  MOD_RES (14)..(15)..(16)..(17)..(18): Xaa is A or G
  MOD_RES (19)..(20)..(21)..(22): Xaa is A or G or absent
VPTELRPVQMRKIXXXXXXXXXKKATVDMVVEGXGXR

SEQ ID NO: 29719 - protein, 40 aa, Artificial Sequence
  Non-cyclic GFR-binding peptide
  MOD_RES (2)..(39): Xaa is C or S
  MOD_RES (18)..(19)..(20)..(21)..(22): Xaa is A or G
  MOD_RES (23)..(24)..(25)..(26): Xaa is A or G or absent
QXRPTQVQLEPLTVLYYXXXXXXXXXEQLSNTLEDHLAXK

SEQ ID NO: 29720 - protein, 37 aa, Artificial Sequence
  Non-cyclic GFR-binding peptide
  MOD_RES (3)..(3): Xaa is C or S
VQXRPTQVQLEPLTVLYYEIVRKKPIFEQLSNTLEDH

SEQ ID NO: 29721 - protein, 38 aa, Artificial Sequence
  Non-cyclic GFR-binding peptide
  MOD_RES (5)..(6): Xaa is C or S
  MOD_RES (20)..(21)..(22)..(23)..(24): Xaa is A or G
  MOD_RES (25)..(26)..(27)..(28): Xaa is A or G or absent
VPKPXXAPTKLRSVKVAKVXXXXXXXXXKEVQVNMVVR

SEQ ID NO: 29722 - protein, 42 aa, Artificial Sequence
  Non-cyclic GFR-binding peptide
  MOD_RES (5)..(6)..(40)..(42): Xaa is C or S
  MOD_RES (20)..(21)..(22)..(23)..(24): Xaa is A or G
  MOD_RES (25)..(26)..(27)..(28): Xaa is A or G or absent
IPKAXXVPTELSNITMQIMXXXXXXXXXIGEMSDMVVEGXGX

SEQ ID NO: 29723 - protein, 43 aa, Artificial Sequence
  Non-cyclic GFR-binding peptide
  MOD_RES (7)..(41)..(43): Xaa is C or S
NDEGLEXVPTEEEPLPMVYYRIKPHQGQHEQLSNFLQHNKXEX

SEQ ID NO: 29724 - protein, 42 aa, Artificial Sequence
  Non-cyclic GFR-binding peptide
  MOD_RES (4)..(41): Xaa is C or S
  MOD_RES (20)..(21)..(22)..(23)..(24): Xaa is A or G
  MOD_RES (25)..(26)..(27)..(28): Xaa is A or G or absent
SVKXQPSRVHHEPLPVVYYXXXXXXXXXEQLSNRLEEHLEXA

SEQ ID NO: 29725 - protein, 40 aa, Artificial Sequence
  Non-cyclic GFR-binding peptide
  MOD_RES (4)..(4): Xaa is C or S
NVQXRPTQVQLEPLTVLYYEIVRKKPIFEQLSNTLEDHLA

SEQ ID NO: 29726 - protein, 41 aa, Artificial Sequence
  Non-cyclic GFR-binding peptide
  MOD_RES (7)..(41): Xaa is C or S
  MOD_RES (21)..(22)..(23)..(24)..(25): Xaa is A or G
  MOD_RES (26)..(27)..(28)..(29): Xaa is A or G or absent
HVTKPTXAPTKLRPVQVRKIXXXXXXXXXKKATVNMVVRSX

SEQ ID NO: 29727 - protein, 42 aa, Artificial Sequence
  Non-cyclic GFR-binding peptide
  MOD_RES (6)..(7)..(40)..(42): Xaa is C or S
  MOD_RES (21)..(22)..(23)..(24)..(25): Xaa is A or G
  MOD_RES (26)..(27)..(28)..(29): Xaa is A or G or absent
ASASPXXVPQDLRPVQIRKIXXXXXXXXXKKATVMVVKSXKX

SEQ ID NO: 29728 - protein, 33 aa, Artificial Sequence
  Non-cyclic GFR-binding peptide
  MOD_RES (1)..(2)..(33): Xaa is C or S
XXVPQDLRSVKIAKVVGRTPKVKEVQVMVVKSX

SEQ ID NO: 29729 - protein, 38 aa, Artificial Sequence
  Non-cyclic GFR-binding peptide
  MOD_RES (4)..(5)..(37): Xaa is C or S
PKAXXVPTELRSVKMAKVDENEKVVKEVQVDMVVEGXG

SEQ ID NO: 29730 - protein, 35 aa, Artificial Sequence
  Non-cyclic GFR-binding peptide
  MOD_RES (3)..(4)..(35): Xaa is C or S
APXXVPQALRPVQIRKIVGRKPKVKKATVMIVRSX

SEQ ID NO: 29731 - protein, 32 aa, Artificial Sequence
  Non-cyclic GFR-binding peptide
  MOD_RES (31)..(31): Xaa is C or S
VPQALRPVQIRKIVGRKPKVKKATVMIVRSXK

SEQ ID NO: 29732 - protein, 38 aa, Artificial Sequence
  Non-cyclic GFR-binding peptide
  MOD_RES (3)..(4)..(35)..(37): Xaa is C or S
SPXXVPQDLRPVQIRKIVGRTPKVKKATVMVVKSXKXS

SEQ ID NO: 29733 - protein, 34 aa, Artificial Sequence
  Non-cyclic GFR-binding peptide
  MOD_RES (1)..(2)..(34): Xaa is C or S
XXAPTQLRSVKVAKVDDSSNVIKEVQVNMVVRAX

SEQ ID NO: 29734 - protein, 33 aa, Artificial Sequence
  Non-cyclic GFR-binding peptide
  MOD_RES (2)..(3): Xaa is C or S
PXXVPQALRPVQIRKIVGRKPKVKKATVMIVRS

SEQ ID NO: 29735 - protein, 39 aa, Artificial Sequence
  Non-cyclic GFR-binding peptide
  MOD_RES (3)..(4)..(36)..(38): Xaa is C or S
KPXXAPTKLRSVKVAKVDDSSNVIKEVQVNMVVRSXGXH

SEQ ID NO: 29736 - protein, 30 aa, Artificial Sequence; identical to SEQ ID NO: 1098
  Non-cyclic GFR-binding peptide

SEQ ID NO: 29737 - protein, 41 aa, Artificial Sequence
  Non-cyclic GFR-binding peptide
  MOD_RES (5)..(6)..(39)..(41): Xaa is C or S
  MOD_RES (20)..(21)..(22)..(23)..(24): Xaa is A or G
  MOD_RES (25)..(26)..(27)..(28): Xaa is A or G or absent
SAAPXXVPQALSNITIQIMXXXXXXXXXIGEMSMIVRSXKX

SEQ ID NO: 29738 - protein, 42 aa, Artificial Sequence
  Non-cyclic GFR-binding peptide
  MOD_RES (3)..(40)..(42): Xaa is C or S
VKXQPSRVHHEPLTVLYYEYVRKKPKLEQLSNRLEEHLEXAX

SEQ ID NO: 29739 - protein, 40 aa, Artificial Sequence
  Non-cyclic GFR-binding peptide
  MOD_RES (6)..(40): Xaa is C or S
  MOD_RES (20)..(21)..(22)..(23)..(24): Xaa is A or G
  MOD_RES (25)..(26)..(27)..(28): Xaa is A or G or absent
VTKPTXAPTKLRPVQVRKIXXXXXXXXXKKATVNMVVRSX

SEQ ID NO: 29740 - protein, 36 aa, Artificial Sequence
  Non-cyclic GFR-binding peptide
  MOD_RES (4)..(5): Xaa is C or S
PKAXXVPTELRSVKMAKVDENEKVVKEVQVDMVVEG

SEQ ID NO: 29741 - protein, 40 aa, Artificial Sequence
  Non-cyclic GFR-binding peptide
  MOD_RES (6)..(7): Xaa is C or S
  MOD_RES (21)..(22)..(23)..(24)..(25): Xaa is A or G
  MOD_RES (26)..(27)..(28)..(29): Xaa is A or G or absent
SIPKAXXVPTELRPVQMRKIXXXXXXXXXKKATVEMVVEG

SEQ ID NO: 29742 - protein, 44 aa, Artificial Sequence
  Non-cyclic GFR-binding peptide
  MOD_RES (4)..(41)..(43): Xaa is C or S
  MOD_RES (20)..(21)..(22)..(23)..(24): Xaa is A or G
  MOD_RES (25)..(26)..(27)..(28): Xaa is A or G or absent
NVQXRPTQVQLEPLTVLYYXXXXXXXXXEQLSNTLEDHLAXKXE

SEQ ID NO: 29743 - protein, 38 aa, Artificial Sequence
  Non-cyclic GFR-binding peptide
  MOD_RES (3)..(4)..(36)..(38): Xaa is C or S
KAXXVPTELRSVKMAKVDENEKVVKEVQVDMVVEGXGX

SEQ ID NO: 29744 - protein, 38 aa, Artificial Sequence
  Non-cyclic GFR-binding peptide
  MOD_RES (3)..(4)..(36)..(38): Xaa is C or S
KAXXVPTELRSVKMAKVDEYDKVVKEVQVEMVVEGXGX

SEQ ID NO: 29745 - protein, 40 aa, Artificial Sequence
  Non-cyclic GFR-binding peptide
  MOD_RES (4)..(5)..(38)..(40): Xaa is C or S
  MOD_RES (19)..(20)..(21)..(22)..(23): Xaa is A or G
  MOD_RES (24)..(25)..(26)..(27): Xaa is A or G or absent
ASPXXVPQDLRPVQIRKIXXXXXXXXXKKATVMVVKSXKX

SEQ ID NO: 29746 - protein, 40 aa, Artificial Sequence
  Non-cyclic GFR-binding peptide
  MOD_RES (7)..(7): Xaa is C or S
NDEGLEXVPTEEEPLPMVYYRIKPHQGQHEQLSNFLQHNK

SEQ ID NO: 29747 - protein, 33 aa, Artificial Sequence
  Non-cyclic GFR-binding peptide
  MOD_RES (32)..(32): Xaa is C or S
APTQLSNITVQIMDDSSNVIIGEMSNMVVRAXG

SEQ ID NO: 29748 - protein, 42 aa, Artificial Sequence
  Non-cyclic GFR-binding peptide
  MOD_RES (6)..(7)..(41): Xaa is C or S
  MOD_RES (21)..(22)..(23)..(24)..(25): Xaa is A or G
  MOD_RES (26)..(27)..(28)..(29): Xaa is A or G or absent
TVPKPXXAPTQLSNITVQIMXXXXXXXXXIGEMSNMVVRAXG

SEQ ID NO: 29749 - protein, 39 aa, Artificial Sequence
  Non-cyclic GFR-binding peptide
  MOD_RES (6)..(7): Xaa is C or S
  MOD_RES (21)..(22)..(23)..(24)..(25): Xaa is A or G
  MOD_RES (26)..(27)..(28)..(29): Xaa is A or G or absent
TVPKPXXAPTQLSNITVQIMXXXXXXXXXIGEMSNMVVR

SEQ ID NO: 29750 - protein, 36 aa, Artificial Sequence
  Non-cyclic GFR-binding peptide
  MOD_RES (1)..(2)..(33)..(35): Xaa is C or S
XXVPQALSNITIQIMVGRKPKVIGEMSMIVRSXKXS

SEQ ID NO: 29751 - protein, 34 aa, Artificial Sequence
  Non-cyclic GFR-binding peptide
  MOD_RES (1)..(1): Xaa is C or S
  MOD_RES (15)..(16)..(17)..(18)..(19): Xaa is A or G
  MOD_RES (20)..(21)..(22)..(23): Xaa is A or G or absent
XVPTEEEPLPMVYYXXXXXXXXXEQLSNFLQHNK

SEQ ID NO: 29752 - protein, 42 aa, Artificial Sequence
  Non-cyclic GFR-binding peptide
  MOD_RES (3)..(40)..(42): Xaa is C or S
  MOD_RES (19)..(20)..(21)..(22)..(23): Xaa is A or G
  MOD_RES (24)..(25)..(26)..(27): Xaa is A or G or absent
VQXRPTQVQLEPLPVVYYXXXXXXXXXEQLSNTLEDHLAXKX

SEQ ID NO: 29753 - protein, 38 aa, Artificial Sequence
  Non-cyclic GFR-binding peptide
  MOD_RES (3)..(4)..(38): Xaa is C or S
  MOD_RES (18)..(19)..(20)..(21)..(22): Xaa is A or G
  MOD_RES (23)..(24)..(25)..(26): Xaa is A or G or absent
KPXXAPTKLRSVKVAKVXXXXXXXXXKEVQVNMVVRSX

SEQ ID NO: 29754 - protein, 44 aa, Artificial Sequence
  Non-cyclic GFR-binding peptide
  MOD_RES (6)..(7)..(41)..(43): Xaa is C or S
  MOD_RES (21)..(22)..(23)..(24)..(25): Xaa is A or G
  MOD_RES (26)..(27)..(28)..(29): Xaa is A or G or absent
KIPKAXXVPTELRPVQMRKIXXXXXXXXXKKATVDMVVEGXGXR

SEQ ID NO: 29755 - protein, 35 aa, Artificial Sequence
  Non-cyclic GFR-binding peptide
  MOD_RES (34)..(34): Xaa is C or S
VPTEEEPLTMLYYRIKPHQGQHEQLSNFLQHNKXE

SEQ ID NO: 29756 - protein, 36 aa, Artificial Sequence
  Non-cyclic GFR-binding peptide
  MOD_RES (2)..(3)..(36): Xaa is C or S
  MOD_RES (17)..(18)..(19)..(20)..(21): Xaa is A or G
  MOD_RES (22)..(23)..(24)..(25): Xaa is A or G or absent
PXXVPQDLSNITIQIMXXXXXXXXXIGEMSMVVKSX

SEQ ID NO: 29757 - protein, 38 aa, Artificial Sequence
  Non-cyclic GFR-binding peptide
  MOD_RES (4)..(5)..(37): Xaa is C or S
PKPXXAPTQLRPVQVRKIDDSSNVIKKATVNMVVRAXG

SEQ ID NO: 29758 - protein, 34 aa, Artificial Sequence
  Non-cyclic GFR-binding peptide
TQVQLEPLPVVYYEIVRKKPIFEQLSNTLEDHLA

SEQ ID NO: 29759 - protein, 41 aa, Artificial Sequence
  Non-cyclic GFR-binding peptide
  MOD_RES (5)..(5): Xaa is C or S
  MOD_RES (21)..(22)..(23)..(24)..(25): Xaa is A or G
  MOD_RES (26)..(27)..(28)..(29): Xaa is A or G or absent
RNVQXRPTQVQLEPLPVVYYXXXXXXXXXEQLSNTLEDHLA

SEQ ID NO: 29760 - protein, 36 aa, Artificial Sequence
  Non-cyclic GFR-binding peptide
  MOD_RES (1)..(2)..(36): Xaa is C or S
  MOD_RES (16)..(17)..(18)..(19)..(20): Xaa is A or G
  MOD_RES (21)..(22)..(23)..(24): Xaa is A or G or absent
XXAPTQLRSVKVAKVXXXXXXXXXKEVQVNMVVRAX

SEQ ID NO: 29761 - protein, 43 aa, Artificial Sequence
  Non-cyclic GFR-binding peptide
  MOD_RES (7)..(41)..(43): Xaa is C or S
  MOD_RES (21)..(22)..(23)..(24)..(25): Xaa is A or G
  MOD_RES (26)..(27)..(28)..(29): Xaa is A or G or absent
HVTKPTXAPTKLRPVQVRKIXXXXXXXXXKKATVNMVVRSXGX

SEQ ID NO: 29762 - protein, 36 aa, Artificial Sequence
  Non-cyclic GFR-binding peptide
  MOD_RES (1)..(2)..(36): Xaa is C or S
  MOD_RES (16)..(17)..(18)..(19)..(20): Xaa is A or G
  MOD_RES (21)..(22)..(23)..(24): Xaa is A or G or absent
XXVPTELRSVKMAKVXXXXXXXXXKEVQVEMVVEGX

SEQ ID NO: 29763 - protein, 43 aa, Artificial Sequence
  Non-cyclic GFR-binding peptide
  MOD_RES (6)..(7)..(40)..(42): Xaa is C or S
  MOD_RES (21)..(22)..(23)..(24)..(25): Xaa is A or G
  MOD_RES (26)..(27)..(28)..(29): Xaa is A or G or absent
ASASPXXVSQDLRSVKIAKVXXXXXXXXXKEVQVMIVKSXKXS

SEQ ID NO: 29764 - protein, 37 aa, Artificial Sequence
  Non-cyclic GFR-binding peptide
  MOD_RES (6)..(7): Xaa is C or S
ASASPXXVSQDLRSVKIAKVIGKTPKIKEVQVMIVKS

SEQ ID NO: 29765 - protein, 38 aa, Artificial Sequence
  Non-cyclic GFR-binding peptide
  MOD_RES (3)..(4)..(36)..(38): Xaa is C or S
KPXXAPTKLSNITVQIMDDSSNVIIGEMSNMVVRSXGX

SEQ ID NO: 29766 - protein, 37 aa, Artificial Sequence
  Non-cyclic GFR-binding peptide
  MOD_RES (4)..(5): Xaa is C or S
  MOD_RES (19)..(20)..(21)..(22)..(23): Xaa is A or G
  MOD_RES (24)..(25)..(26)..(27): Xaa is A or G or absent
ASPXXVSQDLRSVKIAKVXXXXXXXXXKEVQVMIVKS

SEQ ID NO: 29767 - protein, 43 aa, Artificial Sequence
  Non-cyclic GFR-binding peptide
  MOD_RES (5)..(6)..(40)..(42): Xaa is C or S
  MOD_RES (20)..(21)..(22)..(23)..(24): Xaa is A or G
  MOD_RES (25)..(26)..(27)..(28): Xaa is A or G or absent
IPKAXXVPTELRSVKMAKVXXXXXXXXXKEVQVEMVVEGXGXR

SEQ ID NO: 29768 - protein, 42 aa, Artificial Sequence
  Non-cyclic GFR-binding peptide
  MOD_RES (6)..(7)..(40)..(42): Xaa is C or S
  MOD_RES (21)..(22)..(23)..(24)..(25): Xaa is A or G
  MOD_RES (26)..(27)..(28)..(29): Xaa is A or G or absent
ASASPXXVSQDLRSVKIAKVXXXXXXXXXKEVQVMIVKSXKX

SEQ ID NO: 29769 - protein, 41 aa, Artificial Sequence
  Non-cyclic GFR-binding peptide
  MOD_RES (6)..(7)..(41): Xaa is C or S
  MOD_RES (21)..(22)..(23)..(24)..(25): Xaa is A or G
  MOD_RES (26)..(27)..(28)..(29): Xaa is A or G or absent
TVPKPXXAPTQLRPVQVRKIXXXXXXXXXKKATVNMVVRAX

SEQ ID NO: 29770 - protein, 37 aa, Artificial Sequence
  Non-cyclic GFR-binding peptide
  MOD_RES (4)..(4): Xaa is C or S
GLEXVPTEEEPLTMLYYRIKPHQGQHEQLSNFLQHNK

SEQ ID NO: 29771 - protein, 33 aa, Artificial Sequence
  Non-cyclic GFR-binding peptide
  MOD_RES (14)..(15)..(16)..(17)..(18): Xaa is A or G
  MOD_RES (19)..(20)..(21)..(22): Xaa is A or G or absent
VPTEEEPLPMVYYXXXXXXXXXEQLSNFLQHNK

SEQ ID NO: 29772 - protein, 40 aa, Artificial Sequence
  Non-cyclic GFR-binding peptide
  MOD_RES (5)..(6)..(39): Xaa is C or S
  MOD_RES (20)..(21)..(22)..(23)..(24): Xaa is A or G
  MOD_RES (25)..(26)..(27)..(28): Xaa is A or G or absent
SASPXXVSQDLRPVQIRKIXXXXXXXXXKKATVMIVKSXK

SEQ ID NO: 29773 - protein, 33 aa, Artificial Sequence
  Non-cyclic GFR-binding peptide
  MOD_RES (1)..(33): Xaa is C or S
XAPTQLRSVKVAKVDDSSNVIKEVQVNMVVRAX

SEQ ID NO: 29774 - protein, 30 aa, Artificial Sequence
  Non-cyclic GFR-binding peptide
VPQALSNITIQIMVGRKPKVIGEMSMIVRS

SEQ ID NO: 29775 - protein, 33 aa, Artificial Sequence
  Non-cyclic GFR-binding peptide
  MOD_RES (2)..(2): Xaa is C or S
TXAPTKLRSVKVAKVDDSSNVIKEVQVNMVVRS

SEQ ID NO: 29776 - protein, 36 aa, Artificial Sequence
  Non-cyclic GFR-binding peptide
  MOD_RES (3)..(4)..(35): Xaa is C or S
SPXXVSQDLSNITIQIMIGKTPKIIGEMSMIVKSXK

SEQ ID NO: 29777 - protein, 37 aa, Artificial Sequence
  Non-cyclic GFR-binding peptide
  MOD_RES (5)..(6): Xaa is C or S
IPKAXXVPTELSNITMQIMDENEKVVIGEMSDMVVEG

SEQ ID NO: 29778 - protein, 37 aa, Artificial Sequence
  Non-cyclic GFR-binding peptide
  MOD_RES (7)..(7): Xaa is C or S
HVTKPTXAPTKLRPVQVRKIDDSSNVIKKATVNMVVR

SEQ ID NO: 29779 - protein, 42 aa, Artificial Sequence
  Non-cyclic GFR-binding peptide
  MOD_RES (6)..(40)..(42): Xaa is C or S
  MOD_RES (20)..(21)..(22)..(23)..(24): Xaa is A or G
  MOD_RES (25)..(26)..(27)..(28): Xaa is A or G or absent
VTKPTXAPTKLRSVKVAKVXXXXXXXXXKEVQVNMVVRSXGX

SEQ ID NO: 29780 - protein, 33 aa, Artificial Sequence
  Non-cyclic GFR-binding peptide
  MOD_RES (2)..(3): Xaa is C or S
AXXVPTELRSVKMAKVDENEKVVKEVQVDMVVE

SEQ ID NO: 29781 - protein, 33 aa, Artificial Sequence
  Non-cyclic GFR-binding peptide
  MOD_RES (2)..(3): Xaa is C or S
PXXVPQALRSVKIAKVVGRKPKVKEVQVMIVRS

SEQ ID NO: 29782 - protein, 35 aa, Artificial Sequence
  Non-cyclic GFR-binding peptide
  MOD_RES (32)..(34): Xaa is C or S
APTKLSNITVQIMDDSSNVIIGEMSNMVVRSXGXH

SEQ ID NO: 29783 - protein, 38 aa, Artificial Sequence
  Non-cyclic GFR-binding peptide
  MOD_RES (4)..(38): Xaa is C or S
GLEXVPTEEEPLTMLYYRIKPHQGQHEQLSNFLQHNKX

SEQ ID NO: 29784 - protein, 32 aa, Artificial Sequence
  Non-cyclic GFR-binding peptide
  MOD_RES (1)..(2): Xaa is C or S
XXVSQDLRSVKIAKVIGKTPKIKEVQVMIVKS

SEQ ID NO: 29785 - protein, 36 aa, Artificial Sequence
  Non-cyclic GFR-binding peptide
  MOD_RES (2)..(2): Xaa is C or S
KXQPSRVHHEPLPVVYYEYVRKKPKLEQLSNRLEEH

SEQ ID NO: 29786 - protein, 36 aa, Artificial Sequence
  Non-cyclic GFR-binding peptide
  MOD_RES (3)..(4): Xaa is C or S
  MOD_RES (18)..(19)..(20)..(21)..(22): Xaa is A or G
  MOD_RES (23)..(24)..(25)..(26): Xaa is A or G or absent
SPXXVPQDLRPVQIRKIXXXXXXXXXKKATVMVVKS

SEQ ID NO: 29787 - protein, 38 aa, Artificial Sequence
  Non-cyclic GFR-binding peptide
  MOD_RES (37)..(37): Xaa is C or S
  MOD_RES (16)..(17)..(18)..(19)..(20): Xaa is A or G
  MOD_RES (21)..(22)..(23)..(24): Xaa is A or G or absent
RPTQVQLEPLPVVYYXXXXXXXXXEQLSNTLEDHLAXK

SEQ ID NO: 29788 - protein, 38 aa, Artificial Sequence
  Non-cyclic GFR-binding peptide
  MOD_RES (36)..(38): Xaa is C or S
PSRVHHEPLPVVYYEYVRKKPKLEQLSNRLEEHLEXAX

SEQ ID NO: 29789 - protein, 36 aa, Artificial Sequence
  Non-cyclic GFR-binding peptide
RPTQVQLEPLTVLYYEIVRKKPIFEQLSNTLEDHLA

SEQ ID NO: 29790 - protein, 33 aa, Artificial Sequence
  Non-cyclic GFR-binding peptide
  MOD_RES (1)..(33): Xaa is C or S
XAPTKLRPVQVRKIDDSSNVIKKATVNMVVRSX

SEQ ID NO: 29791 - protein, 33 aa, Artificial Sequence
  Non-cyclic GFR-binding peptide
  MOD_RES (33)..(33): Xaa is C or S
  MOD_RES (14)..(15)..(16)..(17)..(18): Xaa is A or G
  MOD_RES (19)..(20)..(21)..(22): Xaa is A or G or absent
VSQDLSNITIQIMXXXXXXXXXIGEMSMIVKSX

SEQ ID NO: 29792 - protein, 38 aa, Artificial Sequence
  Non-cyclic GFR-binding peptide
  MOD_RES (3)..(3): Xaa is C or S
  MOD_RES (19)..(20)..(21)..(22)..(23): Xaa is A or G
  MOD_RES (24)..(25)..(26)..(27): Xaa is A or G or absent
VKXQPSRVHHEPLTVLYYXXXXXXXXXEQLSNRLEEHL

SEQ ID NO: 29793 - protein, 35 aa, Artificial Sequence
  Non-cyclic GFR-binding peptide
PSRVHHEPLTVLYYEYVRKKPKLEQLSNRLEEHLE

SEQ ID NO: 29794 - protein, 31 aa, Artificial Sequence
  Non-cyclic GFR-binding peptide
APTKLRPVQVRKIDDSSNVIKKATVNMVVRS

SEQ ID NO: 29795 - protein, 38 aa, Artificial Sequence
  Non-cyclic GFR-binding peptide
  MOD_RES (4)..(5): Xaa is C or S
  MOD_RES (19)..(20)..(21)..(22)..(23): Xaa is A or G
  MOD_RES (24)..(25)..(26)..(27): Xaa is A or G or absent
PKAXXVPTELRSVKMAKVXXXXXXXXXKEVQVEMVVEG

SEQ ID NO: 29796 - protein, 38 aa, Artificial Sequence
  Non-cyclic GFR-binding peptide
  MOD_RES (4)..(38): Xaa is C or S
  MOD_RES (18)..(19)..(20)..(21)..(22): Xaa is A or G
  MOD_RES (23)..(24)..(25)..(26): Xaa is A or G or absent
GLEXVPTEEEPLTMLYYXXXXXXXXXEQLSNFLQHNKX

SEQ ID NO: 29797 - protein, 42 aa, Artificial Sequence
  Non-cyclic GFR-binding peptide
  MOD_RES (6)..(7)..(39)..(41): Xaa is C or S
SIPKAXXVPTELRSVKMAKVDEYDKVVKEVQVEMVVEGXGXR

SEQ ID NO: 29798 - protein, 38 aa, Artificial Sequence
  Non-cyclic GFR-binding peptide
  MOD_RES (4)..(5)..(37): Xaa is C or S
PKPXXAPTKLRPVQVRKIDDSSNVIKKATVNMVVRSXG

SEQ ID NO: 29799 - protein, 38 aa, Artificial Sequence
  Non-cyclic GFR-binding peptide
  MOD_RES (5)..(6)..(37): Xaa is C or S
SAAPXXVPQALRPVQIRKIVGRKPKVKKATVMIVRSXK

SEQ ID NO: 29800 - protein, 41 aa, Artificial Sequence
  Non-cyclic GFR-binding peptide
  MOD_RES (2)..(39)..(41): Xaa is C or S
  MOD_RES (18)..(19)..(20)..(21)..(22): Xaa is A or G
  MOD_RES (23)..(24)..(25)..(26): Xaa is A or G or absent
KXQPSRVHHEPLTVLYYXXXXXXXXXEQLSNRLEEHLEXAX

SEQ ID NO: 29801 - protein, 36 aa, Artificial Sequence
  Non-cyclic GFR-binding peptide
  MOD_RES (2)..(3): Xaa is C or S
  MOD_RES (17)..(18)..(19)..(20)..(21): Xaa is A or G
  MOD_RES (22)..(23)..(24)..(25): Xaa is A or G or absent
AXXVPTELSNITMQIMXXXXXXXXXIGEMSEMVVEG

SEQ ID NO: 29802 - protein, 36 aa, Artificial Sequence
  Non-cyclic GFR-binding peptide
  MOD_RES (2)..(2): Xaa is C or S
KXQPSRVHHEPLTVLYYEYVRKKPKLEQLSNRLEEH

SEQ ID NO: 29803 - protein, 40 aa, Artificial Sequence
  Non-cyclic GFR-binding peptide
  MOD_RES (5)..(5): Xaa is C or S
SSVKXQPSRVHHEPLPVVYYEYVRKKPKLEQLSNRLEEHL

SEQ ID NO: 29804 - protein, 38 aa, Artificial Sequence
  Non-cyclic GFR-binding peptide
  MOD_RES (3)..(4)..(38): Xaa is C or S
  MOD_RES (18)..(19)..(20)..(21)..(22): Xaa is A or G
  MOD_RES (23)..(24)..(25)..(26): Xaa is A or G or absent
KAXXVPTELRSVKMAKVXXXXXXXXXKEVQVDMVVEGX

SEQ ID NO: 29805 - protein, 39 aa, Artificial Sequence
  Non-cyclic GFR-binding peptide
  MOD_RES (4)..(5)..(37)..(39): Xaa is C or S
PKAXXVPTELRSVKMAKVDENEKVVKEVQVDMVVEGXGX

SEQ ID NO: 29806 - protein, 36 aa, Artificial Sequence
  Non-cyclic GFR-binding peptide
  MOD_RES (3)..(4): Xaa is C or S
  MOD_RES (18)..(19)..(20)..(21)..(22): Xaa is A or G
  MOD_RES (23)..(24)..(25)..(26): Xaa is A or G or absent
SPXXVPQDLRSVKIAKVXXXXXXXXXKEVQVMVVKS

SEQ ID NO: 29807 - protein, 36 aa, Artificial Sequence
  Non-cyclic GFR-binding peptide
  MOD_RES (1)..(2)..(34)..(36): Xaa is C or S
XXVPTELSNITMQIMDEYDKVVIGEMSEMVVEGXGX

SEQ ID NO: 29808 - protein, 37 aa, Artificial Sequence
  Non-cyclic GFR-binding peptide
  MOD_RES (1)..(2)..(34)..(36): Xaa is C or S
XXAPTQLRSVKVAKVDDSSNVIKEVQVNMVVRAXGXH

SEQ ID NO: 29809 - protein, 37 aa, Artificial Sequence
  Non-cyclic GFR-binding peptide
  MOD_RES (4)..(5): Xaa is C or S
  MOD_RES (19)..(20)..(21)..(22)..(23): Xaa is A or G
  MOD_RES (24)..(25)..(26)..(27): Xaa is A or G or absent
ASPXXVPQDLSNITIQIMXXXXXXXXXIGEMSMVVKS

SEQ ID NO: 29810 - protein, 36 aa, Artificial Sequence
  Non-cyclic GFR-binding peptide
  MOD_RES (4)..(36): Xaa is C or S
KPTXAPTKLRSVKVAKVDDSSNVIKEVQVNMVVRSX

SEQ ID NO: 29811 - protein, 38 aa, Artificial Sequence
  Non-cyclic GFR-binding peptide
  MOD_RES (3)..(4)..(38): Xaa is C or S
  MOD_RES (18)..(19)..(20)..(21)..(22): Xaa is A or G
  MOD_RES (23)..(24)..(25)..(26): Xaa is A or G or absent
KPXXAPTQLSNITVQIMXXXXXXXXXIGEMSNMVVRAX

SEQ ID NO: 29812 - protein, 39 aa, Artificial Sequence
  Non-cyclic GFR-binding peptide
  MOD_RES (1)..(38): Xaa is C or S
XQPSRVHHEPLPVVYYEYVRKKPKLEQLSNRLEEHLEXA

SEQ ID NO: 29813 - protein, 36 aa, Artificial Sequence
  Non-cyclic GFR-binding peptide
  MOD_RES (1)..(2)..(36): Xaa is C or S
  MOD_RES (16)..(17)..(18)..(19)..(20): Xaa is A or G
  MOD_RES (21)..(22)..(23)..(24): Xaa is A or G or absent
XXVPTELSNITMQIMXXXXXXXXXIGEMSDMVVEGX

SEQ ID NO: 29814 - protein, 43 aa, Artificial Sequence
  Non-cyclic GFR-binding peptide
  MOD_RES (7)..(41)..(43): Xaa is C or S
  MOD_RES (21)..(22)..(23)..(24)..(25): Xaa is A or G
  MOD_RES (26)..(27)..(28)..(29): Xaa is A or G or absent
HVTKPTXAPTKLSNITVQIMXXXXXXXXXIGEMSNMVVRSXGX

SEQ ID NO: 29815 - protein, 33 aa, Artificial Sequence
  Non-cyclic GFR-binding peptide
  MOD_RES (14)..(15)..(16)..(17)..(18): Xaa is A or G
  MOD_RES (19)..(20)..(21)..(22): Xaa is A or G or absent
APTKLSNITVQIMXXXXXXXXXIGEMSNMVVRS

SEQ ID NO: 29816 - protein, 41 aa, Artificial Sequence
  Non-cyclic GFR-binding peptide
  MOD_RES (5)..(6)..(38)..(40): Xaa is C or S
VPKPXXAPTKLSNITVQIMDDSSNVIIGEMSNMVVRSXGXH

SEQ ID NO: 29817 - protein, 41 aa, Artificial Sequence
  Non-cyclic GFR-binding peptide
  MOD_RES (5)..(6)..(40): Xaa is C or S
  MOD_RES (20)..(21)..(22)..(23)..(24): Xaa is A or G
  MOD_RES (25)..(26)..(27)..(28): Xaa is A or G or absent
IPKAXXVPTELRPVQMRKIXXXXXXXXXKKATVEMVVEGXG

SEQ ID NO: 29818 - protein, 35 aa, Artificial Sequence
  Non-cyclic GFR-binding peptide
  MOD_RES (3)..(35): Xaa is C or S
PTXAPTKLRPVQVRKIDDSSNVIKKATVNMVVRSX

SEQ ID NO: 29819 - protein, 37 aa, Artificial Sequence
  Non-cyclic GFR-binding peptide
  MOD_RES (2)..(2): Xaa is C or S
QXRPTQVQLEPLTVLYYEIVRKKPIFEQLSNTLEDHL

SEQ ID NO: 29820 - protein, 32 aa, Artificial Sequence
  Non-cyclic GFR-binding peptide
  MOD_RES (14)..(15)..(16)..(17)..(18): Xaa is A or G
  MOD_RES (19)..(20)..(21)..(22): Xaa is A or G or absent
APTQLSNITVQIMXXXXXXXXXIGEMSNMVVR

SEQ ID NO: 29821 - protein, 37 aa, Artificial Sequence
  Non-cyclic GFR-binding peptide
  MOD_RES (2)..(3)..(35)..(37): Xaa is C or S
AXXVPTELSNITMQIMDEYDKVVIGEMSEMVVEGXGX

SEQ ID NO: 29822 - protein, 42 aa, Artificial Sequence
  Non-cyclic GFR-binding peptide
  MOD_RES (5)..(6)..(40)..(42): Xaa is C or S
  MOD_RES (20)..(21)..(22)..(23)..(24): Xaa is A or G
  MOD_RES (25)..(26)..(27)..(28): Xaa is A or G or absent
IPKAXXVPTELRSVKMAKVXXXXXXXXXKEVQVDMVVEGXGX

SEQ ID NO: 29823 - protein, 41 aa, Artificial Sequence
  Non-cyclic GFR-binding peptide
  MOD_RES (6)..(7)..(41): Xaa is C or S
  MOD_RES (21)..(22)..(23)..(24)..(25): Xaa is A or G
  MOD_RES (26)..(27)..(28)..(29): Xaa is A or G or absent
KIPKAXXVPTELRPVQMRKIXXXXXXXXXKKATVDMVVEGX

SEQ ID NO: 29824 - protein, 39 aa, Artificial Sequence
  Non-cyclic GFR-binding peptide
  MOD_RES (4)..(36)..(38): Xaa is C or S
KPTXAPTKLRPVQVRKIDDSSNVIKKATVNMVVRSXGXH

SEQ ID NO: 29825 - protein, 37 aa, Artificial Sequence
  Non-cyclic GFR-binding peptide
  MOD_RES (1)..(35)..(37): Xaa is C or S
  MOD_RES (15)..(16)..(17)..(18)..(19): Xaa is A or G
  MOD_RES (20)..(21)..(22)..(23): Xaa is A or G or absent
XVPTELSNITMQIMXXXXXXXXXIGEMSDMVVEGXGX

SEQ ID NO: 29826 - protein, 37 aa, Artificial Sequence
  Non-cyclic GFR-binding peptide
  MOD_RES (2)..(3)..(37): Xaa is C or S
  MOD_RES (17)..(18)..(19)..(20)..(21): Xaa is A or G
  MOD_RES (22)..(23)..(24)..(25): Xaa is A or G or absent
PXXAPTQLRSVKVAKVXXXXXXXXXKEVQVNMVVRAX

SEQ ID NO: 29827 - protein, 37 aa, Artificial Sequence
  Non-cyclic GFR-binding peptide
  MOD_RES (34)..(36): Xaa is C or S
  MOD_RES (14)..(15)..(16)..(17)..(18): Xaa is A or G
  MOD_RES (19)..(20)..(21)..(22): Xaa is A or G or absent
APTQLRSVKVAKVXXXXXXXXXKEVQVNMVVRAXGXH

SEQ ID NO: 29828 - protein, 32 aa, Artificial Sequence
  Non-cyclic GFR-binding peptide
  MOD_RES (2)..(2): Xaa is C or S
TXAPTKLSNITVQIMDDSSNVIIGEMSNMVVR

SEQ ID NO: 29829 - protein, 43 aa, Artificial Sequence
  Non-cyclic GFR-binding peptide
  MOD_RES (7)..(41)..(43): Xaa is C or S
NDEGLEXVPTEEEPLTMLYYRIKPHQGQHEQLSNFLQHNKXEX

SEQ ID NO: 29830 - protein, 39 aa, Artificial Sequence
  Non-cyclic GFR-binding peptide
  MOD_RES (36)..(38): Xaa is C or S
PTQVQLEPLTVLYYEIVRKKPIFEQLSNTLEDHLAXKXE

SEQ ID NO: 29831 - protein, 42 aa, Artificial Sequence
  Non-cyclic GFR-binding peptide
  MOD_RES (6)..(7)..(40)..(42): Xaa is C or S
  MOD_RES (21)..(22)..(23)..(24)..(25): Xaa is A or G
  MOD_RES (26)..(27)..(28)..(29): Xaa is A or G or absent
ASAAPXXVPQALRSVKIAKVXXXXXXXXXKEVQVMIVRSXKX

SEQ ID NO: 29832 - protein, 38 aa, Artificial Sequence
  Non-cyclic GFR-binding peptide
  MOD_RES (5)..(6): Xaa is C or S
  MOD_RES (20)..(21)..(22)..(23)..(24): Xaa is A or G
  MOD_RES (25)..(26)..(27)..(28): Xaa is A or G or absent
VPKPXXAPTQLSNITVQIMXXXXXXXXXIGEMSNMVVR

SEQ ID NO: 29833 - protein, 36 aa, Artificial Sequence
  Non-cyclic GFR-binding peptide
  MOD_RES (36)..(36): Xaa is C or S
  MOD_RES (15)..(16)..(17)..(18)..(19): Xaa is A or G
  MOD_RES (20)..(21)..(22)..(23): Xaa is A or G or absent
PTQVQLEPLPVVYYXXXXXXXXXEQLSNTLEDHLAX

SEQ ID NO: 29834 - protein, 37 aa, Artificial Sequence
  Non-cyclic GFR-binding peptide
  MOD_RES (2)..(3)..(35)..(37): Xaa is C or S
AXXVPTELSNITMQIMDENEKVVIGEMSDMVVEGXGX

SEQ ID NO: 29835 - protein, 40 aa, Artificial Sequence
  Non-cyclic GFR-binding peptide
  MOD_RES (6)..(7): Xaa is C or S
  MOD_RES (21)..(22)..(23)..(24)..(25): Xaa is A or G
  MOD_RES (26)..(27)..(28)..(29): Xaa is A or G or absent
KIPKAXXVPTELRPVQMRKIXXXXXXXXXKKATVDMVVEG

SEQ ID NO: 29836 - protein, 41 aa, Artificial Sequence
  Non-cyclic GFR-binding peptide
  MOD_RES (5)..(5): Xaa is C or S
  MOD_RES (21)..(22)..(23)..(24)..(25): Xaa is A or G
  MOD_RES (26)..(27)..(28)..(29): Xaa is A or G or absent
SSVKXQPSRVHHEPLTVLYYXXXXXXXXXEQLSNRLEEHLE

SEQ ID NO: 29837 - protein, 39 aa, Artificial Sequence
  Non-cyclic GFR-binding peptide
  MOD_RES (5)..(6): Xaa is C or S
  MOD_RES (20)..(21)..(22)..(23)..(24): Xaa is A or G
  MOD_RES (25)..(26)..(27)..(28): Xaa is A or G or absent
VPKPXXAPTKLSNITVQIMXXXXXXXXXIGEMSNMVVRS

SEQ ID NO: 29838 - protein, 35 aa, Artificial Sequence
  Non-cyclic GFR-binding peptide
  MOD_RES (4)..(5): Xaa is C or S
ASPXXVPQDLSNITIQIMVGRTPKVIGEMSMVVKS

SEQ ID NO: 29839 - protein, 41 aa, Artificial Sequence
  Non-cyclic GFR-binding peptide
  MOD_RES (6)..(7)..(40): Xaa is C or S
  MOD_RES (21)..(22)..(23)..(24)..(25): Xaa is A or G
  MOD_RES (26)..(27)..(28)..(29): Xaa is A or G or absent
ASAAPXXVPQALRPVQIRKIXXXXXXXXXKKATVMIVRSXK

SEQ ID NO: 29840 - protein, 31 aa, Artificial Sequence
  Non-cyclic GFR-binding peptide
  MOD_RES (1)..(1): Xaa is C or S
XVSQDLRSVKIAKVIGKTPKIKEVQVMIVKS

SEQ ID NO: 29841 - protein, 34 aa, Artificial Sequence
  Non-cyclic GFR-binding peptide
  MOD_RES (1)..(2)..(34): Xaa is C or S
XXAPTQLSNITVQIMDDSSNVIIGEMSNMVVRAX

SEQ ID NO: 29842 - protein, 35 aa, Artificial Sequence
  Non-cyclic GFR-binding peptide
  MOD_RES (2)..(34): Xaa is C or S
TXAPTKLRSVKVAKVDDSSNVIKEVQVNMVVRSXG

SEQ ID NO: 29843 - protein, 39 aa, Artificial Sequence
  Non-cyclic GFR-binding peptide
  MOD_RES (4)..(5)..(37)..(39): Xaa is C or S
PKAXXVPTELRSVKMAKVDEYDKVVKEVQVEMVVEGXGX

SEQ ID NO: 29844 - protein, 38 aa, Artificial Sequence
  Non-cyclic GFR-binding peptide
  MOD_RES (3)..(3): Xaa is C or S
VKXQPSRVHHEPLPVVYYEYVRKKPKLEQLSNRLEEHL

SEQ ID NO: 29845 - protein, 31 aa, Artificial Sequence
  Non-cyclic GFR-binding peptide
VPTELRPVQMRKIDENEKVVKKATVDMVVEG

SEQ ID NO: 29846 - protein, 34 aa, Artificial Sequence
  Non-cyclic GFR-binding peptide
  MOD_RES (1)..(34): Xaa is C or S
  MOD_RES (15)..(16)..(17)..(18)..(19): Xaa is A or G
  MOD_RES (20)..(21)..(22)..(23): Xaa is A or G or absent
XVSQDLRSVKIAKVXXXXXXXXXKEVQVMIVKSX

SEQ ID NO: 29847 - protein, 37 aa, Artificial Sequence
  Non-cyclic GFR-binding peptide
  MOD_RES (3)..(4)..(36): Xaa is C or S
KAXXVPTELRPVQMRKIDENEKVVKKATVDMVVEGXG

SEQ ID NO: 29848 - protein, 41 aa, Artificial Sequence
  Non-cyclic GFR-binding peptide
  MOD_RES (6)..(38)..(40): Xaa is C or S
VTKPTXAPTKLSNITVQIMDDSSNVIIGEMSNMVVRSXGXH

SEQ ID NO: 29849 - protein, 39 aa, Artificial Sequence
  Non-cyclic GFR-binding peptide
  MOD_RES (6)..(38): Xaa is C or S
VTKPTXAPTKLRPVQVRKIDDSSNVIKKATVNMVVRSXG

SEQ ID NO: 29850 - protein, 35 aa, Artificial Sequence
  Non-cyclic GFR-binding peptide
  MOD_RES (32)..(34): Xaa is C or S
VPTELSNITMQIMDENEKVVIGEMSDMVVEGXGXR

SEQ ID NO: 29851 - protein, 30 aa, Artificial Sequence; identical to SEQ ID NO: 1158
  Non-cyclic GFR-binding peptide

SEQ ID NO: 29852 - protein, 38 aa, Artificial Sequence
  Non-cyclic GFR-binding peptide
  MOD_RES (2)..(3)..(35)..(37): Xaa is C or S
AXXVPTELRPVQMRKIDEYDKVVKKATVEMVVEGXGXR

SEQ ID NO: 29853 - protein, 36 aa, Artificial Sequence
  Non-cyclic GFR-binding peptide
  MOD_RES (4)..(36): Xaa is C or S
KPTXAPTKLSNITVQIMDDSSNVIIGEMSNMVVRSX

SEQ ID NO: 29854 - protein, 34 aa, Artificial Sequence
  Non-cyclic GFR-binding peptide
  MOD_RES (31)..(33): Xaa is C or S
VPQDLRSVKIAKVVGRTPKVKEVQVMVVKSXKXS

SEQ ID NO: 29855 - protein, 41 aa, Artificial Sequence
  Non-cyclic GFR-binding peptide
  MOD_RES (3)..(4)..(38)..(40): Xaa is C or S
  MOD_RES (18)..(19)..(20)..(21)..(22): Xaa is A or G
  MOD_RES (23)..(24)..(25)..(26): Xaa is A or G or absent
KAXXVPTELSNITMQIMXXXXXXXXXIGEMSEMVVEGXGXR

SEQ ID NO: 29856 - protein, 37 aa, Artificial Sequence
  Non-cyclic GFR-binding peptide
  MOD_RES (34)..(36): Xaa is C or S
  MOD_RES (14)..(15)..(16)..(17)..(18): Xaa is A or G
  MOD_RES (19)..(20)..(21)..(22): Xaa is A or G or absent
VPTELRSVKMAKVXXXXXXXXXKEVQVEMVVEGXGXR

SEQ ID NO: 29857 - protein, 39 aa, Artificial Sequence
  Non-cyclic GFR-binding peptide
  MOD_RES (6)..(7)..(38): Xaa is C or S
ASASPXXVSQDLRPVQIRKIIGKTPKIKKATVMIVKSXK

SEQ ID NO: 29858 - protein, 37 aa, Artificial Sequence
  Non-cyclic GFR-binding peptide
  MOD_RES (6)..(7): Xaa is C or S
ASASPXXVSQDLSNITIQIMIGKTPKIIGEMSMIVKS

SEQ ID NO: 29859 - protein, 37 aa, Artificial Sequence
  Non-cyclic GFR-binding peptide
  MOD_RES (34)..(36): Xaa is C or S
  MOD_RES (14)..(15)..(16)..(17)..(18): Xaa is A or G
  MOD_RES (19)..(20)..(21)..(22): Xaa is A or G or absent
VPTELSNITMQIMXXXXXXXXXIGEMSDMVVEGXGXR

SEQ ID NO: 29860 - protein, 38 aa, Artificial Sequence
  Non-cyclic GFR-binding peptide
  MOD_RES (5)..(6): Xaa is C or S
  MOD_RES (20)..(21)..(22)..(23)..(24): Xaa is A or G
  MOD_RES (25)..(26)..(27)..(28): Xaa is A or G or absent
SASPXXVSQDLSNITIQIMXXXXXXXXXIGEMSMIVKS

SEQ ID NO: 29861 - protein, 32 aa, Artificial Sequence
  Non-cyclic GFR-binding peptide
  MOD_RES (14)..(15)..(16)..(17)..(18): Xaa is A or G
  MOD_RES (19)..(20)..(21)..(22): Xaa is A or G or absent
VPQDLRSVKIAKVXXXXXXXXXKEVQVMVVKS

SEQ ID NO: 29862 - protein, 36 aa, Artificial Sequence
  Non-cyclic GFR-binding peptide
  MOD_RES (3)..(4): Xaa is C or S
  MOD_RES (18)..(19)..(20)..(21)..(22): Xaa is A or G
  MOD_RES (23)..(24)..(25)..(26): Xaa is A or G or absent
KAXXVPTELRPVQMRKIXXXXXXXXXKKATVDMVVE

SEQ ID NO: 29863 - protein, 37 aa, Artificial Sequence
  Non-cyclic GFR-binding peptide
  MOD_RES (1)..(35)..(37): Xaa is C or S
XVPTEEEPLPMVYYRIKPHQGQHEQLSNFLQHNKXEX

SEQ ID NO: 29864 - protein, 35 aa, Artificial Sequence
  Non-cyclic GFR-binding peptide
  MOD_RES (35)..(35): Xaa is C or S
  MOD_RES (14)..(15)..(16)..(17)..(18): Xaa is A or G
  MOD_RES (19)..(20)..(21)..(22): Xaa is A or G or absent
TQVQLEPLTVLYYXXXXXXXXXEQLSNTLEDHLAX

SEQ ID NO: 29865 - protein, 41 aa, Artificial Sequence
  Non-cyclic GFR-binding peptide
  MOD_RES (7)..(39)..(41): Xaa is C or S
HVTKPTXAPTKLRPVQVRKIDDSSNVIKKATVNMVVRSXGX

SEQ ID NO: 29866 - protein, 36 aa, Artificial Sequence
  Non-cyclic GFR-binding peptide
  MOD_RES (5)..(6): Xaa is C or S
VPKPXXAPTKLRPVQVRKIDDSSNVIKKATVNMVVR

SEQ ID NO: 29867 - protein, 37 aa, Artificial Sequence
  Non-cyclic GFR-binding peptide
  MOD_RES (2)..(3)..(37): Xaa is C or S
  MOD_RES (17)..(18)..(19)..(20)..(21): Xaa is A or G
  MOD_RES (22)..(23)..(24)..(25): Xaa is A or G or absent
PXXAPTQLRPVQVRKIXXXXXXXXXKKATVNMVVRAX

SEQ ID NO: 29868 - protein, 40 aa, Artificial Sequence
  Non-cyclic GFR-binding peptide
  MOD_RES (5)..(5): Xaa is C or S
RNVQXRPTQVQLEPLTVLYYEIVRKKPIFEQLSNTLEDHL

SEQ ID NO: 29869 - protein, 39 aa, Artificial Sequence
  Non-cyclic GFR-binding peptide
  MOD_RES (4)..(5)..(39): Xaa is C or S
  MOD_RES (19)..(20)..(21)..(22)..(23): Xaa is A or G
  MOD_RES (24)..(25)..(26)..(27): Xaa is A or G or absent
PKAXXVPTELRSVKMAKVXXXXXXXXXKEVQVEMVVEGX

SEQ ID NO: 29870 - protein, 40 aa, Artificial Sequence
  Non-cyclic GFR-binding peptide
  MOD_RES (3)..(37)..(39): Xaa is C or S
  MOD_RES (17)..(18)..(19)..(20)..(21): Xaa is A or G
  MOD_RES (22)..(23)..(24)..(25): Xaa is A or G or absent
PTXAPTKLRPVQVRKIXXXXXXXXXKKATVNMVVRSXGXH

SEQ ID NO: 29871 - protein, 32 aa, Artificial Sequence
  Non-cyclic GFR-binding peptide
  MOD_RES (14)..(15)..(16)..(17)..(18): Xaa is A or G
  MOD_RES (19)..(20)..(21)..(22): Xaa is A or G or absent
SRVHHEPLTVLYYXXXXXXXXXEQLSNRLEEH

SEQ ID NO: 29872 - protein, 37 aa, Artificial Sequence
  Non-cyclic GFR-binding peptide
  MOD_RES (35)..(37): Xaa is C or S
SRVHHEPLTVLYYEYVRKKPKLEQLSNRLEEHLEXAX

SEQ ID NO: 29873 - protein, 32 aa, Artificial Sequence
  Non-cyclic GFR-binding peptide
  MOD_RES (1)..(32): Xaa is C or S
XVSQDLSNITIQIMIGKTPKIIGEMSMIVKSX

SEQ ID NO: 29874 - protein, 34 aa, Artificial Sequence
  Non-cyclic GFR-binding peptide
  MOD_RES (2)..(3): Xaa is C or S
PXXAPTKLSNITVQIMDDSSNVIIGEMSNMVVRS

SEQ ID NO: 29875 - protein, 32 aa, Artificial Sequence
  Non-cyclic GFR-binding peptide
  MOD_RES (32)..(32): Xaa is C or S
VPTELRPVQMRKIDENEKVVKKATVDMVVEGX

SEQ ID NO: 29876 - protein, 37 aa, Artificial Sequence
  Non-cyclic GFR-binding peptide
  MOD_RES (2)..(36): Xaa is C or S
  MOD_RES (16)..(17)..(18)..(19)..(20): Xaa is A or G
  MOD_RES (21)..(22)..(23)..(24): Xaa is A or G or absent
TXAPTKLSNITVQIMXXXXXXXXXIGEMSNMVVRSXG

SEQ ID NO: 29877 - protein, 32 aa, Artificial Sequence
  Non-cyclic GFR-binding peptide
  MOD_RES (1)..(1): Xaa is C or S
XVPTELRPVQMRKIDENEKVVKKATVDMVVEG

SEQ ID NO: 29878 - protein, 36 aa, Artificial Sequence
  Non-cyclic GFR-binding peptide
  MOD_RES (1)..(1): Xaa is C or S
  MOD_RES (17)..(18)..(19)..(20)..(21): Xaa is A or G
  MOD_RES (22)..(23)..(24)..(25): Xaa is A or G or absent
XRPTQVQLEPLPVVYYXXXXXXXXXEQLSNTLEDHL

SEQ ID NO: 29879 - protein, 40 aa, Artificial Sequence
  Non-cyclic GFR-binding peptide
  MOD_RES (3)..(40): Xaa is C or S
  MOD_RES (19)..(20)..(21)..(22)..(23): Xaa is A or G
  MOD_RES (24)..(25)..(26)..(27): Xaa is A or G or absent
VQXRPTQVQLEPLTVLYYXXXXXXXXXEQLSNTLEDHLAX

SEQ ID NO: 29880 - protein, 34 aa, Artificial Sequence
  Non-cyclic GFR-binding peptide
  MOD_RES (1)..(1): Xaa is C or S
  MOD_RES (15)..(16)..(17)..(18)..(19): Xaa is A or G
  MOD_RES (20)..(21)..(22)..(23): Xaa is A or G or absent
XVPTELRSVKMAKVXXXXXXXXXKEVQVDMVVEG

SEQ ID NO: 29881 - protein, 34 aa, Artificial Sequence
  Non-cyclic GFR-binding peptide
  MOD_RES (2)..(3): Xaa is C or S
PXXAPTQLRPVQVRKIDDSSNVIKKATVNMVVRA

SEQ ID NO: 29882 - protein, 37 aa, Artificial Sequence
  Non-cyclic GFR-binding peptide
  MOD_RES (34)..(36): Xaa is C or S
  MOD_RES (14)..(15)..(16)..(17)..(18): Xaa is A or G
  MOD_RES (19)..(20)..(21)..(22): Xaa is A or G or absent
VPTELRPVQMRKIXXXXXXXXXKKATVEMVVEGXGXR

SEQ ID NO: 29883 - protein, 40 aa, Artificial Sequence
  Non-cyclic GFR-binding peptide
  MOD_RES (3)..(4)..(37)..(39): Xaa is C or S
  MOD_RES (18)..(19)..(20)..(21)..(22): Xaa is A or G
  MOD_RES (23)..(24)..(25)..(26): Xaa is A or G or absent
APXXVPQALRSVKIAKVXXXXXXXXXKEVQVMIVRSXKXS

SEQ ID NO: 29884 - protein, 35 aa, Artificial Sequence
  Non-cyclic GFR-binding peptide
  MOD_RES (1)..(32)..(34): Xaa is C or S
XVPQDLRPVQIRKIVGRTPKVKKATVMVVKSXKXS

SEQ ID NO: 29885 - protein, 34 aa, Artificial Sequence
  Non-cyclic GFR-binding peptide
  MOD_RES (1)..(2)..(34): Xaa is C or S
XXVPTELRPVQMRKIDEYDKVVKKATVEMVVEGX

SEQ ID NO: 29886 - protein, 39 aa, Artificial Sequence
  Non-cyclic GFR-binding peptide
  MOD_RES (6)..(6): Xaa is C or S
  MOD_RES (20)..(21)..(22)..(23)..(24): Xaa is A or G
  MOD_RES (25)..(26)..(27)..(28): Xaa is A or G or absent
VTKPTXAPTKLRPVQVRKIXXXXXXXXXKKATVNMVVRS

SEQ ID NO: 29887 - protein, 40 aa, Artificial Sequence
  Non-cyclic GFR-binding peptide
  MOD_RES (1)..(38)..(40): Xaa is C or S
  MOD_RES (17)..(18)..(19)..(20)..(21): Xaa is A or G
  MOD_RES (22)..(23)..(24)..(25): Xaa is A or G or absent
XRPTQVQLEPLTVLYYXXXXXXXXXEQLSNTLEDHLAXKX

SEQ ID NO: 29888 - protein, 36 aa, Artificial Sequence
  Non-cyclic GFR-binding peptide
  MOD_RES (2)..(2): Xaa is C or S
QXRPTQVQLEPLPVVYYEIVRKKPIFEQLSNTLEDH

SEQ ID NO: 29889 - protein, 40 aa, Artificial Sequence
  Non-cyclic GFR-binding peptide
  MOD_RES (3)..(37)..(39): Xaa is C or S
  MOD_RES (17)..(18)..(19)..(20)..(21): Xaa is A or G
  MOD_RES (22)..(23)..(24)..(25): Xaa is A or G or absent
PTXAPTKLRSVKVAKVXXXXXXXXXKEVQVNMVVRSXGXH

SEQ ID NO: 29890 - protein, 38 aa, Artificial Sequence
  Non-cyclic GFR-binding peptide
  MOD_RES (1)..(2)..(36)..(38): Xaa is C or S
  MOD_RES (16)..(17)..(18)..(19)..(20): Xaa is A or G
  MOD_RES (21)..(22)..(23)..(24): Xaa is A or G or absent
XXAPTKLRSVKVAKVXXXXXXXXXKEVQVNMVVRSXGX

SEQ ID NO: 29891 - protein, 36 aa, Artificial Sequence
  Non-cyclic GFR-binding peptide
  MOD_RES (3)..(4)..(36): Xaa is C or S
KAXXVPTELSNITMQIMDEYDKVVIGEMSEMVVEGX

SEQ ID NO: 29892 - protein, 39 aa, Artificial Sequence
  Non-cyclic GFR-binding peptide
  MOD_RES (4)..(5)..(36)..(38): Xaa is C or S
ASPXXVSQDLSNITIQIMIGKTPKIIGEMSMIVKSXKXS

SEQ ID NO: 29893 - protein, 37 aa, Artificial Sequence
  Non-cyclic GFR-binding peptide
  MOD_RES (35)..(37): Xaa is C or S
TQVQLEPLTVLYYEIVRKKPIFEQLSNTLEDHLAXKX

SEQ ID NO: 29894 - protein, 34 aa, Artificial Sequence
  Non-cyclic GFR-binding peptide
  MOD_RES (1)..(34): Xaa is C or S
  MOD_RES (15)..(16)..(17)..(18)..(19): Xaa is A or G
  MOD_RES (20)..(21)..(22)..(23): Xaa is A or G or absent
XVSQDLSNITIQIMXXXXXXXXXIGEMSMIVKSX

SEQ ID NO: 29895 - protein, 37 aa, Artificial Sequence
  Non-cyclic GFR-binding peptide
  MOD_RES (1)..(2)..(35)..(37): Xaa is C or S
  MOD_RES (16)..(17)..(18)..(19)..(20): Xaa is A or G
  MOD_RES (21)..(22)..(23)..(24): Xaa is A or G or absent
XXVPQALRSVKIAKVXXXXXXXXXKEVQVMIVRSXKX

SEQ ID NO: 29896 - protein, 33 aa, Artificial Sequence
  Non-cyclic GFR-binding peptide
  MOD_RES (33)..(33): Xaa is C or S
  MOD_RES (14)..(15)..(16)..(17)..(18): Xaa is A or G
  MOD_RES (19)..(20)..(21)..(22): Xaa is A or G or absent
VPQDLSNITIQIMXXXXXXXXXIGEMSMVVKSX

SEQ ID NO: 29897 - protein, 42 aa, Artificial Sequence
  Non-cyclic GFR-binding peptide
  MOD_RES (6)..(7)..(41): Xaa is C or S
  MOD_RES (21)..(22)..(23)..(24)..(25): Xaa is A or G
  MOD_RES (26)..(27)..(28)..(29): Xaa is A or G or absent
SIPKAXXVPTELRSVKMAKVXXXXXXXXXKEVQVEMVVEGXG

SEQ ID NO: 29898 - protein, 40 aa, Artificial Sequence
  Non-cyclic GFR-binding peptide
  MOD_RES (5)..(6)..(39): Xaa is C or S
  MOD_RES (20)..(21)..(22)..(23)..(24): Xaa is A or G
  MOD_RES (25)..(26)..(27)..(28): Xaa is A or G or absent
SAAPXXVPQALSNITIQIMXXXXXXXXXIGEMSMIVRSXK

SEQ ID NO: 29899 - protein, 36 aa, Artificial Sequence
  Non-cyclic GFR-binding peptide
  MOD_RES (3)..(4)..(35): Xaa is C or S
SPXXVSQDLRPVQIRKIIGKTPKIKKATVMIVKSXK

SEQ ID NO: 29900 - protein, 42 aa, Artificial Sequence
  Non-cyclic GFR-binding peptide
  MOD_RES (7)..(39)..(41): Xaa is C or S
HVTKPTXAPTKLRPVQVRKIDDSSNVIKKATVNMVVRSXGXH

SEQ ID NO: 29901 - protein, 44 aa, Artificial Sequence
  Non-cyclic GFR-binding peptide
  MOD_RES (5)..(42)..(44): Xaa is C or S
  MOD_RES (21)..(22)..(23)..(24)..(25): Xaa is A or G
  MOD_RES (26)..(27)..(28)..(29): Xaa is A or G or absent
SSVKXQPSRVHHEPLPVVYYXXXXXXXXXEQLSNRLEEHLEXAX

SEQ ID NO: 29902 - protein, 35 aa, Artificial Sequence
  Non-cyclic GFR-binding peptide
  MOD_RES (1)..(33)..(35): Xaa is C or S
XAPTKLRSVKVAKVDDSSNVIKEVQVNMVVRSXGX

SEQ ID NO: 29903 - protein, 37 aa, Artificial Sequence
  Non-cyclic GFR-binding peptide
  MOD_RES (1)..(2)..(36): Xaa is C or S
  MOD_RES (16)..(17)..(18)..(19)..(20): Xaa is A or G
  MOD_RES (21)..(22)..(23)..(24): Xaa is A or G or absent
XXAPTKLRPVQVRKIXXXXXXXXXKKATVNMVVRSXG

SEQ ID NO: 29904 - protein, 38 aa, Artificial Sequence
  Non-cyclic GFR-binding peptide
  MOD_RES (4)..(5)..(37): Xaa is C or S
PKPXXAPTQLRSVKVAKVDDSSNVIKEVQVNMVVRAXG

SEQ ID NO: 29905 - protein, 37 aa, Artificial Sequence
  Non-cyclic GFR-binding peptide
  MOD_RES (1)..(35)..(37): Xaa is C or S
  MOD_RES (15)..(16)..(17)..(18)..(19): Xaa is A or G
  MOD_RES (20)..(21)..(22)..(23): Xaa is A or G or absent
XVPTEEEPLTMLYYXXXXXXXXXEQLSNFLQHNKXEX

SEQ ID NO: 29906 - protein, 40 aa, Artificial Sequence
  Non-cyclic GFR-binding peptide
  MOD_RES (6)..(7)..(39): Xaa is C or S
SIPKAXXVPTELSNITMQIMDEYDKVVIGEMSEMVVEGXG

SEQ ID NO: 29907 - protein, 37 aa, Artificial Sequence
  Non-cyclic GFR-binding peptide
  MOD_RES (5)..(6): Xaa is C or S
IPKAXXVPTELRPVQMRKIDENEKVVKKATVDMVVEG

SEQ ID NO: 29908 - protein, 36 aa, Artificial Sequence
  Non-cyclic GFR-binding peptide
  MOD_RES (33)..(35): Xaa is C or S
  MOD_RES (14)..(15)..(16)..(17)..(18): Xaa is A or G
  MOD_RES (19)..(20)..(21)..(22): Xaa is A or G or absent
VPQALSNITIQIMXXXXXXXXXIGEMSMIVRSXKXS

SEQ ID NO: 29909 - protein, 39 aa, Artificial Sequence
  Non-cyclic GFR-binding peptide
  MOD_RES (5)..(37)..(39): Xaa is C or S
TKPTXAPTKLRSVKVAKVDDSSNVIKEVQVNMVVRSXGX

SEQ ID NO: 29910 - protein, 33 aa, Artificial Sequence
  Non-cyclic GFR-binding peptide
  MOD_RES (1)..(1): Xaa is C or S
  MOD_RES (15)..(16)..(17)..(18)..(19): Xaa is A or G
  MOD_RES (20)..(21)..(22)..(23): Xaa is A or G or absent
XVPTELSNITMQIMXXXXXXXXXIGEMSEMVVE

SEQ ID NO: 29911 - protein, 35 aa, Artificial Sequence
  Non-cyclic GFR-binding peptide
  MOD_RES (2)..(3)..(35): Xaa is C or S
PXXAPTKLRSVKVAKVDDSSNVIKEVQVNMVVRSX

SEQ ID NO: 29912 - protein, 38 aa, Artificial Sequence
  Non-cyclic GFR-binding peptide
  MOD_RES (5)..(6): Xaa is C or S
  MOD_RES (20)..(21)..(22)..(23)..(24): Xaa is A or G
  MOD_RES (25)..(26)..(27)..(28): Xaa is A or G or absent
VPKPXXAPTQLRPVQVRKIXXXXXXXXXKKATVNMVVR

SEQ ID NO: 29913 - protein, 35 aa, Artificial Sequence
  Non-cyclic GFR-binding peptide
  MOD_RES (35)..(35): Xaa is C or S
TQVQLEPLTVLYYEIVRKKPIFEQLSNTLEDHLAX

SEQ ID NO: 29914 - protein, 40 aa, Artificial Sequence
  Non-cyclic GFR-binding peptide
  MOD_RES (3)..(40): Xaa is C or S
VQXRPTQVQLEPLTVLYYEIVRKKPIFEQLSNTLEDHLAX

SEQ ID NO: 29915 - protein, 38 aa, Artificial Sequence
  Non-cyclic GFR-binding peptide
  MOD_RES (6)..(7): Xaa is C or S
TVPKPXXAPTQLSNITVQIMDDSSNVIIGEMSNMVVRA

SEQ ID NO: 29916 - protein, 38 aa, Artificial Sequence
  Non-cyclic GFR-binding peptide
  MOD_RES (4)..(5): Xaa is C or S
  MOD_RES (19)..(20)..(21)..(22)..(23): Xaa is A or G
  MOD_RES (24)..(25)..(26)..(27): Xaa is A or G or absent
PKAXXVPTELRPVQMRKIXXXXXXXXXKKATVEMVVEG

SEQ ID NO: 29917 - protein, 33 aa, Artificial Sequence
  Non-cyclic GFR-binding peptide
  MOD_RES (1)..(32): Xaa is C or S
XVPQDLSNITIQIMVGRTPKVIGEMSMVVKSXK

SEQ ID NO: 29918 - protein, 38 aa, Artificial Sequence
  Non-cyclic GFR-binding peptide
  MOD_RES (4)..(36)..(38): Xaa is C or S
KPTXAPTKLRSVKVAKVDDSSNVIKEVQVNMVVRSXGX

SEQ ID NO: 29919 - protein, 37 aa, Artificial Sequence
  Non-cyclic GFR-binding peptide
  MOD_RES (5)..(6)..(37): Xaa is C or S
SASPXXVPQDLRSVKIAKVVGRTPKVKEVQVMVVKSX

SEQ ID NO: 29920 - protein, 35 aa, Artificial Sequence
  Non-cyclic GFR-binding peptide
  MOD_RES (2)..(3): Xaa is C or S
  MOD_RES (17)..(18)..(19)..(20)..(21): Xaa is A or G
  MOD_RES (22)..(23)..(24)..(25): Xaa is A or G or absent
AXXVPTELRPVQMRKIXXXXXXXXXKKATVDMVVE

SEQ ID NO: 29921 - protein, 35 aa, Artificial Sequence
  Non-cyclic GFR-binding peptide
  MOD_RES (3)..(3): Xaa is C or S
  MOD_RES (17)..(18)..(19)..(20)..(21): Xaa is A or G
  MOD_RES (22)..(23)..(24)..(25): Xaa is A or G or absent
LEXVPTEEEPLTMLYYXXXXXXXXXEQLSNFLQHN

SEQ ID NO: 29922 - protein, 32 aa, Artificial Sequence
  Non-cyclic GFR-binding peptide
  MOD_RES (1)..(32): Xaa is C or S
XVSQDLRSVKIAKVIGKTPKIKEVQVMIVKSX

SEQ ID NO: 29923 - protein, 37 aa, Artificial Sequence
  Non-cyclic GFR-binding peptide
  MOD_RES (34)..(36): Xaa is C or S
VPTEEEPLTMLYYRIKPHQGQHEQLSNFLQHNKXEXR

SEQ ID NO: 29924 - protein, 34 aa, Artificial Sequence
  Non-cyclic GFR-binding peptide
  MOD_RES (3)..(4): Xaa is C or S
KPXXAPTKLRPVQVRKIDDSSNVIKKATVNMVVR

SEQ ID NO: 29925 - protein, 37 aa, Artificial Sequence
  Non-cyclic GFR-binding peptide
  MOD_RES (1)..(2)..(34)..(36): Xaa is C or S
XXAPTQLRPVQVRKIDDSSNVIKKATVNMVVRAXGXH

SEQ ID NO: 29926 - protein, 33 aa, Artificial Sequence
  Non-cyclic GFR-binding peptide
  MOD_RES (1)..(1): Xaa is C or S
  MOD_RES (15)..(16)..(17)..(18)..(19): Xaa is A or G
  MOD_RES (20)..(21)..(22)..(23): Xaa is A or G or absent
XVPQALSNITIQIMXXXXXXXXXIGEMSMIVRS

SEQ ID NO: 29927 - protein, 40 aa, Artificial Sequence
  Non-cyclic GFR-binding peptide
  MOD_RES (4)..(5)..(39): Xaa is C or S
  MOD_RES (19)..(20)..(21)..(22)..(23): Xaa is A or G
  MOD_RES (24)..(25)..(26)..(27): Xaa is A or G or absent
PKAXXVPTELRSVKMAKVXXXXXXXXXKEVQVDMVVEGXG

SEQ ID NO: 29928 - protein, 36 aa, Artificial Sequence
  Non-cyclic GFR-binding peptide
  MOD_RES (1)..(2)..(33)..(35): Xaa is C or S
XXVPQDLSNITIQIMVGRTPKVIGEMSMVVKSXKXS

SEQ ID NO: 29929 - protein, 42 aa, Artificial Sequence
  Non-cyclic GFR-binding peptide
  MOD_RES (5)..(42): Xaa is C or S
SSVKXQPSRVHHEPLPVVYYEYVRKKPKLEQLSNRLEEHLEX

SEQ ID NO: 29930 - protein, 42 aa, Artificial Sequence
  Non-cyclic GFR-binding peptide
  MOD_RES (5)..(39)..(41): Xaa is C or S
  MOD_RES (19)..(20)..(21)..(22)..(23): Xaa is A or G
  MOD_RES (24)..(25)..(26)..(27): Xaa is A or G or absent
EGLEXVPTEEEPLPMVYYXXXXXXXXXEQLSNFLQHNKXEXR

SEQ ID NO: 29931 - protein, 33 aa, Artificial Sequence
  Non-cyclic GFR-binding peptide
  MOD_RES (32)..(32): Xaa is C or S
VPTELRPVQMRKIDEYDKVVKKATVEMVVEGXG

SEQ ID NO: 29932 - protein, 43 aa, Artificial Sequence
  Non-cyclic GFR-binding peptide
  MOD_RES (4)..(41)..(43): Xaa is C or S
SVKXQPSRVHHEPLTVLYYEYVRKKPKLEQLSNRLEEHLEXAX

SEQ ID NO: 29933 - protein, 40 aa, Artificial Sequence
  Non-cyclic GFR-binding peptide
  MOD_RES (4)..(5)..(38)..(40): Xaa is C or S
  MOD_RES (19)..(20)..(21)..(22)..(23): Xaa is A or G
  MOD_RES (24)..(25)..(26)..(27): Xaa is A or G or absent
AAPXXVPQALSNITIQIMXXXXXXXXXIGEMSMIVRSXKX

SEQ ID NO: 29934 - protein, 41 aa, Artificial Sequence
  Non-cyclic GFR-binding peptide
  MOD_RES (5)..(39)..(41): Xaa is C or S
  MOD_RES (19)..(20)..(21)..(22)..(23): Xaa is A or G
  MOD_RES (24)..(25)..(26)..(27): Xaa is A or G or absent
TKPTXAPTKLRSVKVAKVXXXXXXXXXKEVQVNMVVRSXGX

SEQ ID NO: 29935 - protein, 38 aa, Artificial Sequence
  Non-cyclic GFR-binding peptide
  MOD_RES (36)..(38): Xaa is C or S
  MOD_RES (15)..(16)..(17)..(18)..(19): Xaa is A or G
  MOD_RES (20)..(21)..(22)..(23): Xaa is A or G or absent
PTQVQLEPLTVLYYXXXXXXXXXEQLSNTLEDHLAXKX

SEQ ID NO: 29936 - protein, 36 aa, Artificial Sequence
  Non-cyclic GFR-binding peptide
  MOD_RES (2)..(3)..(35): Xaa is C or S
PXXAPTQLSNITVQIMDDSSNVIIGEMSNMVVRAXG

SEQ ID NO: 29937 - protein, 41 aa, Artificial Sequence
  Non-cyclic GFR-binding peptide
  MOD_RES (4)..(5)..(38)..(40): Xaa is C or S
  MOD_RES (19)..(20)..(21)..(22)..(23): Xaa is A or G
  MOD_RES (24)..(25)..(26)..(27): Xaa is A or G or absent
AAPXXVPQALRSVKIAKVXXXXXXXXXKEVQVMIVRSXKXS

SEQ ID NO: 29938 - protein, 34 aa, Artificial Sequence
  Non-cyclic GFR-binding peptide
  MOD_RES (2)..(2): Xaa is C or S
EXVPTEEEPLTMLYYRIKPHQGQHEQLSNFLQHN

SEQ ID NO: 29939 - protein, 42 aa, Artificial Sequence
  Non-cyclic GFR-binding peptide
  MOD_RES (6)..(7)..(39)..(41): Xaa is C or S
KIPKAXXVPTELSNITMQIMDENEKVVIGEMSDMVVEGXGXR

SEQ ID NO: 29940 - protein, 37 aa, Artificial Sequence
  Non-cyclic GFR-binding peptide
  MOD_RES (2)..(3)..(34)..(36): Xaa is C or S
PXXVPQALRPVQIRKIVGRKPKVKKATVMIVRSXKXS

SEQ ID NO: 29941 - protein, 34 aa, Artificial Sequence
  Non-cyclic GFR-binding peptide
  MOD_RES (1)..(1): Xaa is C or S
  MOD_RES (15)..(16)..(17)..(18)..(19): Xaa is A or G
  MOD_RES (20)..(21)..(22)..(23): Xaa is A or G or absent
XAPTQLRPVQVRKIXXXXXXXXXKKATVNMVVRA

SEQ ID NO: 29942 - protein, 39 aa, Artificial Sequence
  Non-cyclic GFR-binding peptide
  MOD_RES (4)..(4): Xaa is C or S
SVKXQPSRVHHEPLPVVYYEYVRKKPKLEQLSNRLEEHL

SEQ ID NO: 29943 - protein, 36 aa, Artificial Sequence
  Non-cyclic GFR-binding peptide
  MOD_RES (3)..(4)..(36): Xaa is C or S
KPXXAPTQLSNITVQIMDDSSNVIIGEMSNMVVRAX

SEQ ID NO: 29944 - protein, 42 aa, Artificial Sequence
  Non-cyclic GFR-binding peptide
  MOD_RES (4)..(5)..(39)..(41): Xaa is C or S
  MOD_RES (19)..(20)..(21)..(22)..(23): Xaa is A or G
  MOD_RES (24)..(25)..(26)..(27): Xaa is A or G or absent
PKAXXVPTELSNITMQIMXXXXXXXXXIGEMSEMVVEGXGXR

SEQ ID NO: 29945 - protein, 31 aa, Artificial Sequence
  Non-cyclic GFR-binding peptide
  MOD_RES (1)..(1): Xaa is C or S
XVPQDLSNITIQIMVGRTPKVIGEMSMVVKS

SEQ ID NO: 29946 - protein, 38 aa, Artificial Sequence
  Non-cyclic GFR-binding peptide
  MOD_RES (4)..(5)..(38): Xaa is C or S
  MOD_RES (19)..(20)..(21)..(22)..(23): Xaa is A or G
  MOD_RES (24)..(25)..(26)..(27): Xaa is A or G or absent
ASPXXVSQDLSNITIQIMXXXXXXXXXIGEMSMIVKSX

SEQ ID NO: 29947 - protein, 37 aa, Artificial Sequence
  Non-cyclic GFR-binding peptide
  MOD_RES (5)..(6)..(37): Xaa is C or S
SASPXXVPQDLSNITIQIMVGRTPKVIGEMSMVVKSX

SEQ ID NO: 29948 - protein, 39 aa, Artificial Sequence
  Non-cyclic GFR-binding peptide
  MOD_RES (4)..(5)..(39): Xaa is C or S
  MOD_RES (19)..(20)..(21)..(22)..(23): Xaa is A or G
  MOD_RES (24)..(25)..(26)..(27): Xaa is A or G or absent
PKPXXAPTKLSNITVQIMXXXXXXXXXIGEMSNMVVRSX

SEQ ID NO: 29949 - protein, 35 aa, Artificial Sequence
  Non-cyclic GFR-binding peptide
  MOD_RES (2)..(3): Xaa is C or S
  MOD_RES (17)..(18)..(19)..(20)..(21): Xaa is A or G
  MOD_RES (22)..(23)..(24)..(25): Xaa is A or G or absent
PXXVSQDLRPVQIRKIXXXXXXXXXKKATVMIVKS

SEQ ID NO: 29950 - protein, 42 aa, Artificial Sequence
  Non-cyclic GFR-binding peptide
  MOD_RES (6)..(7)..(41): Xaa is C or S
  MOD_RES (21)..(22)..(23)..(24)..(25): Xaa is A or G
  MOD_RES (26)..(27)..(28)..(29): Xaa is A or G or absent
KIPKAXXVPTELSNITMQIMXXXXXXXXXIGEMSDMVVEGXG

SEQ ID NO: 29951 - protein, 41 aa, Artificial Sequence
  Non-cyclic GFR-binding peptide
  MOD_RES (6)..(7)..(39)..(41): Xaa is C or S
KIPKAXXVPTELSNITMQIMDENEKVVIGEMSDMVVEGXGX

SEQ ID NO: 29952 - protein, 43 aa, Artificial Sequence
  Non-cyclic GFR-binding peptide
  MOD_RES (6)..(7)..(40)..(42): Xaa is C or S
  MOD_RES (21)..(22)..(23)..(24)..(25): Xaa is A or G
  MOD_RES (26)..(27)..(28)..(29): Xaa is A or G or absent
ASASPXXVSQDLSNITIQIMXXXXXXXXXIGEMSMIVKSXKXS

SEQ ID NO: 29953 - protein, 36 aa, Artificial Sequence
  Non-cyclic GFR-binding peptide
  MOD_RES (5)..(6): Xaa is C or S
IPKAXXVPTELRSVKMAKVDEYDKVVKEVQVEMVVE

SEQ ID NO: 29954 - protein, 33 aa, Artificial Sequence
  Non-cyclic GFR-binding peptide
  MOD_RES (1)..(1): Xaa is C or S
  MOD_RES (15)..(16)..(17)..(18)..(19): Xaa is A or G
  MOD_RES (20)..(21)..(22)..(23): Xaa is A or G or absent
XVSQDLRSVKIAKVXXXXXXXXXKEVQVMIVKS

SEQ ID NO: 29955 - protein, 39 aa, Artificial Sequence
  Non-cyclic GFR-binding peptide
  MOD_RES (5)..(37)..(39): Xaa is C or S
TKPTXAPTKLRPVQVRKIDDSSNVIKKATVNMVVRSXGX

SEQ ID NO: 29956 - protein, 44 aa, Artificial Sequence
  Non-cyclic GFR-binding peptide
  MOD_RES (5)..(42)..(44): Xaa is C or S
RNVQXRPTQVQLEPLTVLYYEIVRKKPIFEQLSNTLEDHLAXKX

SEQ ID NO: 29957 - protein, 35 aa, Artificial Sequence
  Non-cyclic GFR-binding peptide
  MOD_RES (4)..(5): Xaa is C or S
PKPXXAPTQLRPVQVRKIDDSSNVIKKATVNMVVR

SEQ ID NO: 29958 - protein, 38 aa, Artificial Sequence
  Non-cyclic GFR-binding peptide
  MOD_RES (2)..(3)..(36)..(38): Xaa is C or S
  MOD_RES (17)..(18)..(19)..(20)..(21): Xaa is A or G
  MOD_RES (22)..(23)..(24)..(25): Xaa is A or G or absent
PXXVSQDLRSVKIAKVXXXXXXXXXKEVQVMIVKSXKX

SEQ ID NO: 29959 - protein, 36 aa, Artificial Sequence
  Non-cyclic GFR-binding peptide
  MOD_RES (35)..(35): Xaa is C or S
  MOD_RES (14)..(15)..(16)..(17)..(18): Xaa is A or G
  MOD_RES (19)..(20)..(21)..(22): Xaa is A or G or absent
TQVQLEPLTVLYYXXXXXXXXXEQLSNTLEDHLAXK

SEQ ID NO: 29960 - protein, 41 aa, Artificial Sequence
  Non-cyclic GFR-binding peptide
  MOD_RES (6)..(7)..(40): Xaa is C or S
  MOD_RES (21)..(22)..(23)..(24)..(25): Xaa is A or G
  MOD_RES (26)..(27)..(28)..(29): Xaa is A or G or absent
ASASPXXVPQDLRSVKIAKVXXXXXXXXXKEVQVMVVKSXK

SEQ ID NO: 29961 - protein, 39 aa, Artificial Sequence
  Non-cyclic GFR-binding peptide
  MOD_RES (3)..(4)..(36)..(38): Xaa is C or S
KAXXVPTELRPVQMRKIDENEKVVKKATVDMVVEGXGXR

SEQ ID NO: 29962 - protein, 37 aa, Artificial Sequence
  Non-cyclic GFR-binding peptide
  MOD_RES (2)..(3)..(36): Xaa is C or S
  MOD_RES (17)..(18)..(19)..(20)..(21): Xaa is A or G
  MOD_RES (22)..(23)..(24)..(25): Xaa is A or G or absent
PXXVPQALRPVQIRKIXXXXXXXXXKKATVMIVRSXK

SEQ ID NO: 29963 - protein, 35 aa, Artificial Sequence
  Non-cyclic GFR-binding peptide
  MOD_RES (2)..(2): Xaa is C or S
  MOD_RES (16)..(17)..(18)..(19)..(20): Xaa is A or G
  MOD_RES (21)..(22)..(23)..(24): Xaa is A or G or absent
EXVPTEEEPLTMLYYXXXXXXXXXEQLSNFLQHNK

SEQ ID NO: 29964 - protein, 37 aa, Artificial Sequence
  Non-cyclic GFR-binding peptide
  MOD_RES (2)..(36): Xaa is C or S
  MOD_RES (16)..(17)..(18)..(19)..(20): Xaa is A or G
  MOD_RES (21)..(22)..(23)..(24): Xaa is A or G or absent
EXVPTEEEPLPMVYYXXXXXXXXXEQLSNFLQHNKXE

SEQ ID NO: 29965 - protein, 40 aa, Artificial Sequence
  Non-cyclic GFR-binding peptide
  MOD_RES (7)..(7): Xaa is C or S
  MOD_RES (21)..(22)..(23)..(24)..(25): Xaa is A or G
  MOD_RES (26)..(27)..(28)..(29): Xaa is A or G or absent
HVTKPTXAPTKLSNITVQIMXXXXXXXXXIGEMSNMVVRS

SEQ ID NO: 29966 - protein, 40 aa, Artificial Sequence
  Non-cyclic GFR-binding peptide
  MOD_RES (2)..(39): Xaa is C or S
KXQPSRVHHEPLTVLYYEYVRKKPKLEQLSNRLEEHLEXA

SEQ ID NO: 29967 - protein, 32 aa, Artificial Sequence
  Non-cyclic GFR-binding peptide
  MOD_RES (1)..(32): Xaa is C or S
XVPQALRSVKIAKVVGRKPKVKEVQVMIVRSX

SEQ ID NO: 29968 - protein, 34 aa, Artificial Sequence
  Non-cyclic GFR-binding peptide
PSRVHHEPLPVVYYEYVRKKPKLEQLSNRLEEHL

SEQ ID NO: 29969 - protein, 40 aa, Artificial Sequence
  Non-cyclic GFR-binding peptide
  MOD_RES (6)..(7)..(40): Xaa is C or S
  MOD_RES (21)..(22)..(23)..(24)..(25): Xaa is A or G
  MOD_RES (26)..(27)..(28)..(29): Xaa is A or G or absent
ASASPXXVPQDLRSVKIAKVXXXXXXXXXKEVQVMVVKSX

SEQ ID NO: 29970 - protein, 42 aa, Artificial Sequence
  Non-cyclic GFR-binding peptide
  MOD_RES (5)..(6)..(39)..(41): Xaa is C or S
  MOD_RES (20)..(21)..(22)..(23)..(24): Xaa is A or G
  MOD_RES (25)..(26)..(27)..(28): Xaa is A or G or absent
SAAPXXVPQALSNITIQIMXXXXXXXXXIGEMSMIVRSXKXS

SEQ ID NO: 29971 - protein, 40 aa, Artificial Sequence
  Non-cyclic GFR-binding peptide
  MOD_RES (5)..(6)..(40): Xaa is C or S
  MOD_RES (20)..(21)..(22)..(23)..(24): Xaa is A or G
  MOD_RES (25)..(26)..(27)..(28): Xaa is A or G or absent
VPKPXXAPTQLRSVKVAKVXXXXXXXXXKEVQVNMVVRAX

SEQ ID NO: 29972 - protein, 38 aa, Artificial Sequence
  Non-cyclic GFR-binding peptide
  MOD_RES (6)..(7)..(38): Xaa is C or S
ASAAPXXVPQALRSVKIAKVVGRKPKVKEVQVMIVRSX

SEQ ID NO: 29973 - protein, 42 aa, Artificial Sequence
  Non-cyclic GFR-binding peptide
  MOD_RES (7)..(41): Xaa is C or S
  MOD_RES (21)..(22)..(23)..(24)..(25): Xaa is A or G
  MOD_RES (26)..(27)..(28)..(29): Xaa is A or G or absent
NDEGLEXVPTEEEPLPMVYYXXXXXXXXXEQLSNFLQHNKXE

SEQ ID NO: 29974 - protein, 36 aa, Artificial Sequence
  Non-cyclic GFR-binding peptide
  MOD_RES (1)..(34)..(36): Xaa is C or S
  MOD_RES (15)..(16)..(17)..(18)..(19): Xaa is A or G
  MOD_RES (20)..(21)..(22)..(23): Xaa is A or G or absent
XVPQALRSVKIAKVXXXXXXXXXKEVQVMIVRSXKX

SEQ ID NO: 29975 - protein, 35 aa, Artificial Sequence
  Non-cyclic GFR-binding peptide
  MOD_RES (1)..(35): Xaa is C or S
  MOD_RES (15)..(16)..(17)..(18)..(19): Xaa is A or G
  MOD_RES (20)..(21)..(22)..(23): Xaa is A or G or absent
XVPTELRSVKMAKVXXXXXXXXXKEVQVDMVVEGX

SEQ ID NO: 29976 - protein, 34 aa, Artificial Sequence
  Non-cyclic GFR-binding peptide
RPTQVQLEPLTVLYYEIVRKKPIFEQLSNTLEDH

SEQ ID NO: 29977 - protein, 32 aa, Artificial Sequence
  Non-cyclic GFR-binding peptide
  MOD_RES (1)..(2): Xaa is C or S
XXVPTELRPVQMRKIDEYDKVVKKATVEMVVE

SEQ ID NO: 29978 - protein, 40 aa, Artificial Sequence
  Non-cyclic GFR-binding peptide
  MOD_RES (37)..(39): Xaa is C or S
  MOD_RES (16)..(17)..(18)..(19)..(20): Xaa is A or G
  MOD_RES (21)..(22)..(23)..(24): Xaa is A or G or absent
QPSRVHHEPLPVVYYXXXXXXXXXEQLSNRLEEHLEXAXA

SEQ ID NO: 29979 - protein, 36 aa, Artificial Sequence
  Non-cyclic GFR-binding peptide
  MOD_RES (3)..(4)..(36): Xaa is C or S
KAXXVPTELRPVQMRKIDENEKVVKKATVDMVVEGX

SEQ ID NO: 29980 - protein, 31 aa, Artificial Sequence
  Non-cyclic GFR-binding peptide
VPTELSNITMQIMDENEKVVIGEMSDMVVEG

SEQ ID NO: 29981 - protein, 33 aa, Artificial Sequence
  Non-cyclic GFR-binding peptide
  MOD_RES (14)..(15)..(16)..(17)..(18): Xaa is A or G
  MOD_RES (19)..(20)..(21)..(22): Xaa is A or G or absent
VPTELRPVQMRKIXXXXXXXXXKKATVDMVVEG

SEQ ID NO: 29982 - protein, 41 aa, Artificial Sequence
  Non-cyclic GFR-binding peptide
  MOD_RES (4)..(38)..(40): Xaa is C or S
  MOD_RES (18)..(19)..(20)..(21)..(22): Xaa is A or G
  MOD_RES (23)..(24)..(25)..(26): Xaa is A or G or absent
GLEXVPTEEEPLTMLYYXXXXXXXXXEQLSNFLQHNKXEXR

SEQ ID NO: 29983 - protein, 41 aa, Artificial Sequence
  Non-cyclic GFR-binding peptide
  MOD_RES (4)..(5)..(38)..(40): Xaa is C or S
  MOD_RES (19)..(20)..(21)..(22)..(23): Xaa is A or G
  MOD_RES (24)..(25)..(26)..(27): Xaa is A or G or absent
AAPXXVPQALRPVQIRKIXXXXXXXXXKKATVMIVRSXKXS

SEQ ID NO: 29984 - protein, 36 aa, Artificial Sequence
  Non-cyclic GFR-binding peptide
  MOD_RES (3)..(4)..(35): Xaa is C or S
SPXXVPQDLRPVQIRKIVGRTPKVKKATVMVVKSXK

SEQ ID NO: 29985 - protein, 32 aa, Artificial Sequence
  Non-cyclic GFR-binding peptide
  MOD_RES (14)..(15)..(16)..(17)..(18): Xaa is A or G
  MOD_RES (19)..(20)..(21)..(22): Xaa is A or G or absent
APTKLSNITVQIMXXXXXXXXXIGEMSNMVVR

SEQ ID NO: 29986 - protein, 33 aa, Artificial Sequence
  Non-cyclic GFR-binding peptide
  MOD_RES (1)..(1): Xaa is C or S
  MOD_RES (15)..(16)..(17)..(18)..(19): Xaa is A or G
  MOD_RES (20)..(21)..(22)..(23): Xaa is A or G or absent
XAPTKLRSVKVAKVXXXXXXXXXKEVQVNMVVR

SEQ ID NO: 29987 - protein, 37 aa, Artificial Sequence
  Non-cyclic GFR-binding peptide
  MOD_RES (5)..(5): Xaa is C or S
  MOD_RES (19)..(20)..(21)..(22)..(23): Xaa is A or G
  MOD_RES (24)..(25)..(26)..(27): Xaa is A or G or absent
TKPTXAPTKLRPVQVRKIXXXXXXXXXKKATVNMVVR

SEQ ID NO: 29988 - protein, 37 aa, Artificial Sequence
  Non-cyclic GFR-binding peptide
  MOD_RES (5)..(5): Xaa is C or S
  MOD_RES (19)..(20)..(21)..(22)..(23): Xaa is A or G
  MOD_RES (24)..(25)..(26)..(27): Xaa is A or G or absent
TKPTXAPTKLRSVKVAKVXXXXXXXXXKEVQVNMVVR

SEQ ID NO: 29989 - protein, 38 aa, Artificial Sequence
  Non-cyclic GFR-binding peptide
  MOD_RES (2)..(3)..(35)..(37): Xaa is C or S
PXXAPTQLSNITVQIMDDSSNVIIGEMSNMVVRAXGXH

SEQ ID NO: 29990 - protein, 36 aa, Artificial Sequence
  Non-cyclic GFR-binding peptide
  MOD_RES (33)..(35): Xaa is C or S
  MOD_RES (14)..(15)..(16)..(17)..(18): Xaa is A or G
  MOD_RES (19)..(20)..(21)..(22): Xaa is A or G or absent
VPQDLSNITIQIMXXXXXXXXXIGEMSMVVKSXKXS

SEQ ID NO: 29991 - protein, 31 aa, Artificial Sequence
  Non-cyclic GFR-binding peptide
VPTELSNITMQIMDEYDKVVIGEMSEMVVEG

SEQ ID NO: 29992 - protein, 38 aa, Artificial Sequence
  Non-cyclic GFR-binding peptide
  MOD_RES (1)..(35)..(37): Xaa is C or S
  MOD_RES (15)..(16)..(17)..(18)..(19): Xaa is A or G
  MOD_RES (20)..(21)..(22)..(23): Xaa is A or G or absent
XVPTELRPVQMRKIXXXXXXXXXKKATVEMVVEGXGXR

SEQ ID NO: 29993 - protein, 43 aa, Artificial Sequence
  Non-cyclic GFR-binding peptide
  MOD_RES (6)..(40)..(42): Xaa is C or S
  MOD_RES (20)..(21)..(22)..(23)..(24): Xaa is A or G
  MOD_RES (25)..(26)..(27)..(28): Xaa is A or G or absent
VTKPTXAPTKLRPVQVRKIXXXXXXXXXKKATVNMVVRSXGXH

SEQ ID NO: 29994 - protein, 41 aa, Artificial Sequence
  Non-cyclic GFR-binding peptide
  MOD_RES (5)..(39)..(41): Xaa is C or S
  MOD_RES (19)..(20)..(21)..(22)..(23): Xaa is A or G
  MOD_RES (24)..(25)..(26)..(27): Xaa is A or G or absent
TKPTXAPTKLRPVQVRKIXXXXXXXXXKKATVNMVVRSXGX

SEQ ID NO: 29995 - protein, 39 aa, Artificial Sequence
  Non-cyclic GFR-binding peptide
  MOD_RES (6)..(7)..(39): Xaa is C or S
TVPKPXXAPTQLSNITVQIMDDSSNVIIGEMSNMVVRAX

SEQ ID NO: 29996 - protein, 43 aa, Artificial Sequence
  Non-cyclic GFR-binding peptide
  MOD_RES (6)..(7)..(40)..(42): Xaa is C or S
  MOD_RES (21)..(22)..(23)..(24)..(25): Xaa is A or G
  MOD_RES (26)..(27)..(28)..(29): Xaa is A or G or absent
ASASPXXVPQDLRPVQIRKIXXXXXXXXXKKATVMVVKSXKXS

SEQ ID NO: 29997 - protein, 36 aa, Artificial Sequence
  Non-cyclic GFR-binding peptide
  MOD_RES (1)..(1): Xaa is C or S
XRPTQVQLEPLTVLYYEIVRKKPIFEQLSNTLEDHL

SEQ ID NO: 29998 - protein, 40 aa, Artificial Sequence
  Non-cyclic GFR-binding peptide
  MOD_RES (37)..(39): Xaa is C or S
RPTQVQLEPLTVLYYEIVRKKPIFEQLSNTLEDHLAXKXE

SEQ ID NO: 29999 - protein, 33 aa, Artificial Sequence
  Non-cyclic GFR-binding peptide
  MOD_RES (1)..(1): Xaa is C or S
  MOD_RES (15)..(16)..(17)..(18)..(19): Xaa is A or G
  MOD_RES (20)..(21)..(22)..(23): Xaa is A or G or absent
XAPTKLRPVQVRKIXXXXXXXXXKKATVNMVVR

SEQ ID NO: 30000 - protein, 37 aa, Artificial Sequence
  Non-cyclic GFR-binding peptide
  MOD_RES (1)..(2)..(34)..(36): Xaa is C or S
XXVPTELRSVKMAKVDEYDKVVKEVQVEMVVEGXGXR

SEQ ID NO: 30001 - protein, 42 aa, Artificial Sequence
  Non-cyclic GFR-binding peptide
  MOD_RES (4)..(41): Xaa is C or S
  MOD_RES (20)..(21)..(22)..(23)..(24): Xaa is A or G
  MOD_RES (25)..(26)..(27)..(28): Xaa is A or G or absent
SVKXQPSRVHHEPLTVLYYXXXXXXXXXEQLSNRLEEHLEXA

SEQ ID NO: 30002 - protein, 34 aa, Artificial Sequence
  Non-cyclic GFR-binding peptide
  MOD_RES (1)..(2): Xaa is C or S
  MOD_RES (16)..(17)..(18)..(19)..(20): Xaa is A or G
  MOD_RES (21)..(22)..(23)..(24): Xaa is A or G or absent
XXAPTQLSNITVQIMXXXXXXXXXIGEMSNMVVR

SEQ ID NO: 30003 - protein, 32 aa, Artificial Sequence
  Non-cyclic GFR-binding peptide
  MOD_RES (1)..(2): Xaa is C or S
XXVPQALRPVQIRKIVGRKPKVKKATVMIVRS

SEQ ID NO: 30004 - protein, 40 aa, Artificial Sequence
  Non-cyclic GFR-binding peptide
  MOD_RES (2)..(39): Xaa is C or S
QXRPTQVQLEPLTVLYYEIVRKKPIFEQLSNTLEDHLAXK

SEQ ID NO: 30005 - protein, 41 aa, Artificial Sequence
  Non-cyclic GFR-binding peptide
  MOD_RES (4)..(38)..(40): Xaa is C or S
  MOD_RES (18)..(19)..(20)..(21)..(22): Xaa is A or G
  MOD_RES (23)..(24)..(25)..(26): Xaa is A or G or absent
KPTXAPTKLSNITVQIMXXXXXXXXXIGEMSNMVVRSXGXH

SEQ ID NO: 30006 - protein, 40 aa, Artificial Sequence
  Non-cyclic GFR-binding peptide
  MOD_RES (6)..(7)..(39): Xaa is C or S
YVPKPXXAPTKLRPVQVRKIDDSSNVIKKATVNMVVRSXG

SEQ ID NO: 30007 - protein, 38 aa, Artificial Sequence
  Non-cyclic GFR-binding peptide
  MOD_RES (2)..(3)..(35)..(37): Xaa is C or S
AXXVPTELSNITMQIMDEYDKVVIGEMSEMVVEGXGXR

SEQ ID NO: 30008 - protein, 37 aa, Artificial Sequence
  Non-cyclic GFR-binding peptide
  MOD_RES (37)..(37): Xaa is C or S
  MOD_RES (16)..(17)..(18)..(19)..(20): Xaa is A or G
  MOD_RES (21)..(22)..(23)..(24): Xaa is A or G or absent
QPSRVHHEPLPVVYYXXXXXXXXXEQLSNRLEEHLEX

SEQ ID NO: 30009 - protein, 38 aa, Artificial Sequence
  Non-cyclic GFR-binding peptide
  MOD_RES (1)..(35)..(37): Xaa is C or S
  MOD_RES (15)..(16)..(17)..(18)..(19): Xaa is A or G
  MOD_RES (20)..(21)..(22)..(23): Xaa is A or G or absent
XVPTELRSVKMAKVXXXXXXXXXKEVQVDMVVEGXGXR

SEQ ID NO: 30010 - protein, 39 aa, Artificial Sequence
  Non-cyclic GFR-binding peptide
  MOD_RES (6)..(7): Xaa is C or S
  MOD_RES (21)..(22)..(23)..(24)..(25): Xaa is A or G
  MOD_RES (26)..(27)..(28)..(29): Xaa is A or G or absent
ASAAPXXVPQALSNITIQIMXXXXXXXXXIGEMSMIVRS

SEQ ID NO: 30011 - protein, 35 aa, Artificial Sequence
  Non-cyclic GFR-binding peptide
  MOD_RES (1)..(32)..(34): Xaa is C or S
XVPQDLRSVKIAKVVGRTPKVKEVQVMVVKSXKXS

SEQ ID NO: 30012 - protein, 37 aa, Artificial Sequence
  Non-cyclic GFR-binding peptide
  MOD_RES (4)..(5)..(36): Xaa is C or S
AAPXXVPQALRPVQIRKIVGRKPKVKKATVMIVRSXK

SEQ ID NO: 30013 - protein, 36 aa, Artificial Sequence
  Non-cyclic GFR-binding peptide
  MOD_RES (1)..(35): Xaa is C or S
  MOD_RES (15)..(16)..(17)..(18)..(19): Xaa is A or G
  MOD_RES (20)..(21)..(22)..(23): Xaa is A or G or absent
XAPTQLRSVKVAKVXXXXXXXXXKEVQVNMVVRAXG

SEQ ID NO: 30014 - protein, 40 aa, Artificial Sequence
  Non-cyclic GFR-binding peptide
  MOD_RES (4)..(5)..(39): Xaa is C or S
  MOD_RES (19)..(20)..(21)..(22)..(23): Xaa is A or G
  MOD_RES (24)..(25)..(26)..(27): Xaa is A or G or absent
PKPXXAPTQLRPVQVRKIXXXXXXXXXKKATVNMVVRAXG

SEQ ID NO: 30015 - protein, 34 aa, Artificial Sequence
  Non-cyclic GFR-binding peptide
  MOD_RES (34)..(34): Xaa is C or S
  MOD_RES (14)..(15)..(16)..(17)..(18): Xaa is A or G
  MOD_RES (19)..(20)..(21)..(22): Xaa is A or G or absent
VPTELSNITMQIMXXXXXXXXXIGEMSDMVVEGX

SEQ ID NO: 30016 - protein, 34 aa, Artificial Sequence
  Non-cyclic GFR-binding peptide
  MOD_RES (3)..(4): Xaa is C or S
KAXXVPTELRSVKMAKVDENEKVVKEVQVDMVVE

SEQ ID NO: 30017 - protein, 41 aa, Artificial Sequence
  Non-cyclic GFR-binding peptide
  MOD_RES (3)..(4)..(38)..(40): Xaa is C or S
  MOD_RES (18)..(19)..(20)..(21)..(22): Xaa is A or G
  MOD_RES (23)..(24)..(25)..(26): Xaa is A or G or absent
KPXXAPTKLRPVQVRKIXXXXXXXXXKKATVNMVVRSXGXH

SEQ ID NO: 30018 - protein, 38 aa, Artificial Sequence
  Non-cyclic GFR-binding peptide
  MOD_RES (5)..(6)..(37): Xaa is C or S
SAAPXXVPQALSNITIQIMVGRKPKVIGEMSMIVRSXK

SEQ ID NO: 30019 - protein, 34 aa, Artificial Sequence
  Non-cyclic GFR-binding peptide
  MOD_RES (16)..(17)..(18)..(19)..(20): Xaa is A or G
  MOD_RES (21)..(22)..(23)..(24): Xaa is A or G or absent
QPSRVHHEPLPVVYYXXXXXXXXXEQLSNRLEEH

SEQ ID NO: 30020 - protein, 36 aa, Artificial Sequence
  Non-cyclic GFR-binding peptide
  MOD_RES (1)..(33)..(35): Xaa is C or S
XAPTKLSNITVQIMDDSSNVIIGEMSNMVVRSXGXH

SEQ ID NO: 30021 - protein, 43 aa, Artificial Sequence
  Non-cyclic GFR-binding peptide
  MOD_RES (4)..(41)..(43): Xaa is C or S
NVQXRPTQVQLEPLPVVYYEIVRKKPIFEQLSNTLEDHLAXKX

SEQ ID NO: 30022 - protein, 42 aa, Artificial Sequence
  Non-cyclic GFR-binding peptide
  MOD_RES (6)..(7)..(41): Xaa is C or S
  MOD_RES (21)..(22)..(23)..(24)..(25): Xaa is A or G
  MOD_RES (26)..(27)..(28)..(29): Xaa is A or G or absent
TVPKPXXAPTQLRPVQVRKIXXXXXXXXXKKATVNMVVRAXG

SEQ ID NO: 30023 - protein, 35 aa, Artificial Sequence
  Non-cyclic GFR-binding peptide
PTQVQLEPLTVLYYEIVRKKPIFEQLSNTLEDHLA

SEQ ID NO: 30024 - protein, 38 aa, Artificial Sequence
  Non-cyclic GFR-binding peptide
  MOD_RES (5)..(6)..(38): Xaa is C or S
VPKPXXAPTQLSNITVQIMDDSSNVIIGEMSNMVVRAX

SEQ ID NO: 30025 - protein, 35 aa, Artificial Sequence
  Non-cyclic GFR-binding peptide
  MOD_RES (2)..(34): Xaa is C or S
TXAPTKLSNITVQIMDDSSNVIIGEMSNMVVRSXG

SEQ ID NO: 30026 - protein, 39 aa, Artificial Sequence
  Non-cyclic GFR-binding peptide
  MOD_RES (4)..(5)..(37)..(39): Xaa is C or S
PKAXXVPTELRPVQMRKIDEYDKVVKKATVEMVVEGXGX

SEQ ID NO: 30027 - protein, 35 aa, Artificial Sequence
  Non-cyclic GFR-binding peptide
  MOD_RES (33)..(35): Xaa is C or S
  MOD_RES (14)..(15)..(16)..(17)..(18): Xaa is A or G
  MOD_RES (19)..(20)..(21)..(22): Xaa is A or G or absent
VSQDLSNITIQIMXXXXXXXXXIGEMSMIVKSXKX

SEQ ID NO: 30028 - protein, 37 aa, Artificial Sequence
  Non-cyclic GFR-binding peptide
  MOD_RES (1)..(1): Xaa is C or S
  MOD_RES (17)..(18)..(19)..(20)..(21): Xaa is A or G
  MOD_RES (22)..(23)..(24)..(25): Xaa is A or G or absent
XRPTQVQLEPLPVVYYXXXXXXXXXEQLSNTLEDHLA

SEQ ID NO: 30029 - protein, 36 aa, Artificial Sequence
  Non-cyclic GFR-binding peptide
  MOD_RES (2)..(36): Xaa is C or S
  MOD_RES (16)..(17)..(18)..(19)..(20): Xaa is A or G
  MOD_RES (21)..(22)..(23)..(24): Xaa is A or G or absent
TXAPTKLRPVQVRKIXXXXXXXXXKKATVNMVVRSX

SEQ ID NO: 30030 - protein, 34 aa, Artificial Sequence
  Non-cyclic GFR-binding peptide
  MOD_RES (34)..(34): Xaa is C or S
  MOD_RES (14)..(15)..(16)..(17)..(18): Xaa is A or G
  MOD_RES (19)..(20)..(21)..(22): Xaa is A or G or absent
VPTEEEPLTMLYYXXXXXXXXXEQLSNFLQHNKX

SEQ ID NO: 30031 - protein, 37 aa, Artificial Sequence
  Non-cyclic GFR-binding peptide
  MOD_RES (3)..(4)..(36): Xaa is C or S
KAXXVPTELRSVKMAKVDENEKVVKEVQVDMVVEGXG

SEQ ID NO: 30032 - protein, 39 aa, Artificial Sequence
  Non-cyclic GFR-binding peptide
  MOD_RES (5)..(6)..(37)..(39): Xaa is C or S
SAAPXXVPQALRPVQIRKIVGRKPKVKKATVMIVRSXKX

SEQ ID NO: 30033 - protein, 38 aa, Artificial Sequence
  Non-cyclic GFR-binding peptide
  MOD_RES (1)..(35)..(37): Xaa is C or S
XVPTEEEPLTMLYYRIKPHQGQHEQLSNFLQHNKXEXR

SEQ ID NO: 30034 - protein, 36 aa, Artificial Sequence
  Non-cyclic GFR-binding peptide
  MOD_RES (3)..(3): Xaa is C or S
  MOD_RES (17)..(18)..(19)..(20)..(21): Xaa is A or G
  MOD_RES (22)..(23)..(24)..(25): Xaa is A or G or absent
PTXAPTKLSNITVQIMXXXXXXXXXIGEMSNMVVRS

SEQ ID NO: 30035 - protein, 39 aa, Artificial Sequence
  Non-cyclic GFR-binding peptide
  MOD_RES (37)..(39): Xaa is C or S
  MOD_RES (16)..(17)..(18)..(19)..(20): Xaa is A or G
  MOD_RES (21)..(22)..(23)..(24): Xaa is A or G or absent
RPTQVQLEPLPVVYYXXXXXXXXXEQLSNTLEDHLAXKX

SEQ ID NO: 30036 - protein, 39 aa, Artificial Sequence
  Non-cyclic GFR-binding peptide
  MOD_RES (6)..(7): Xaa is C or S
  MOD_RES (21)..(22)..(23)..(24)..(25): Xaa is A or G
  MOD_RES (26)..(27)..(28)..(29): Xaa is A or G or absent
KIPKAXXVPTELSNITMQIMXXXXXXXXXIGEMSDMVVE

SEQ ID NO: 30037 - protein, 36 aa, Artificial Sequence
  Non-cyclic GFR-binding peptide
  MOD_RES (6)..(6): Xaa is C or S
VTKPTXAPTKLRSVKVAKVDDSSNVIKEVQVNMVVR

SEQ ID NO: 30038 - protein, 40 aa, Artificial Sequence
  Non-cyclic GFR-binding peptide
  MOD_RES (5)..(5): Xaa is C or S
  MOD_RES (21)..(22)..(23)..(24)..(25): Xaa is A or G
  MOD_RES (26)..(27)..(28)..(29): Xaa is A or G or absent
RNVQXRPTQVQLEPLPVVYYXXXXXXXXXEQLSNTLEDHL

SEQ ID NO: 30039 - protein, 39 aa, Artificial Sequence
  Non-cyclic GFR-binding peptide
  MOD_RES (4)..(38): Xaa is C or S
  MOD_RES (18)..(19)..(20)..(21)..(22): Xaa is A or G
  MOD_RES (23)..(24)..(25)..(26): Xaa is A or G or absent
GLEXVPTEEEPLTMLYYXXXXXXXXXEQLSNFLQHNKXE

SEQ ID NO: 30040 - protein, 42 aa, Artificial Sequence
  Non-cyclic GFR-binding peptide
  MOD_RES (4)..(5)..(39)..(41): Xaa is C or S
  MOD_RES (19)..(20)..(21)..(22)..(23): Xaa is A or G
  MOD_RES (24)..(25)..(26)..(27): Xaa is A or G or absent
PKAXXVPTELSNITMQIMXXXXXXXXXIGEMSDMVVEGXGXR

SEQ ID NO: 30041 - protein, 36 aa, Artificial Sequence
  Non-cyclic GFR-binding peptide
  MOD_RES (5)..(6): Xaa is C or S
IPKAXXVPTELRPVQMRKIDENEKVVKKATVDMVVE

SEQ ID NO: 30042 - protein, 35 aa, Artificial Sequence
  Non-cyclic GFR-binding peptide
  MOD_RES (1)..(35): Xaa is C or S
XVPTEEEPLPMVYYRIKPHQGQHEQLSNFLQHNKX

SEQ ID NO: 30043 - protein, 38 aa, Artificial Sequence
  Non-cyclic GFR-binding peptide
  MOD_RES (2)..(3)..(37): Xaa is C or S
  MOD_RES (17)..(18)..(19)..(20)..(21): Xaa is A or G
  MOD_RES (22)..(23)..(24)..(25): Xaa is A or G or absent
AXXVPTELRSVKMAKVXXXXXXXXXKEVQVEMVVEGXG

SEQ ID NO: 30044 - protein, 40 aa, Artificial Sequence
  Non-cyclic GFR-binding peptide
  MOD_RES (5)..(6)..(37)..(39): Xaa is C or S
SAAPXXVPQALRSVKIAKVVGRKPKVKEVQVMIVRSXKXS

SEQ ID NO: 30045 - protein, 36 aa, Artificial Sequence
  Non-cyclic GFR-binding peptide
  MOD_RES (2)..(3)..(36): Xaa is C or S
  MOD_RES (17)..(18)..(19)..(20)..(21): Xaa is A or G
  MOD_RES (22)..(23)..(24)..(25): Xaa is A or G or absent
PXXVPQALRPVQIRKIXXXXXXXXXKKATVMIVRSX

SEQ ID NO: 30046 - protein, 38 aa, Artificial Sequence
  Non-cyclic GFR-binding peptide
  MOD_RES (2)..(3)..(37): Xaa is C or S
  MOD_RES (17)..(18)..(19)..(20)..(21): Xaa is A or G
  MOD_RES (22)..(23)..(24)..(25): Xaa is A or G or absent
PXXAPTKLRPVQVRKIXXXXXXXXXKKATVNMVVRSXG

SEQ ID NO: 30047 - protein, 42 aa, Artificial Sequence
  Non-cyclic GFR-binding peptide
  MOD_RES (2)..(39)..(41): Xaa is C or S
KXQPSRVHHEPLPVVYYEYVRKKPKLEQLSNRLEEHLEXAXA

SEQ ID NO: 30048 - protein, 35 aa, Artificial Sequence
  Non-cyclic GFR-binding peptide
  MOD_RES (1)..(2)..(35): Xaa is C or S
  MOD_RES (16)..(17)..(18)..(19)..(20): Xaa is A or G
  MOD_RES (21)..(22)..(23)..(24): Xaa is A or G or absent
XXVPQDLRSVKIAKVXXXXXXXXXKEVQVMVVKSX

SEQ ID NO: 30049 - protein, 33 aa, Artificial Sequence
  Non-cyclic GFR-binding peptide
  MOD_RES (31)..(33): Xaa is C or S
VPQDLRSVKIAKVVGRTPKVKEVQVMVVKSXKX

SEQ ID NO: 30050 - protein, 32 aa, Artificial Sequence
  Non-cyclic GFR-binding peptide
  MOD_RES (14)..(15)..(16)..(17)..(18): Xaa is A or G
  MOD_RES (19)..(20)..(21)..(22): Xaa is A or G or absent
VPTEEEPLTMLYYXXXXXXXXXEQLSNFLQHN

SEQ ID NO: 30051 - protein, 41 aa, Artificial Sequence
  Non-cyclic GFR-binding peptide
  MOD_RES (6)..(7)..(39)..(41): Xaa is C or S
YVPKPXXAPTKLSNITVQIMDDSSNVIIGEMSNMVVRSXGX

SEQ ID NO: 30052 - protein, 32 aa, Artificial Sequence
  Non-cyclic GFR-binding peptide
  MOD_RES (14)..(15)..(16)..(17)..(18): Xaa is A or G
  MOD_RES (19)..(20)..(21)..(22): Xaa is A or G or absent
VPQDLRPVQIRKIXXXXXXXXXKKATVMVVKS

SEQ ID NO: 30053 - protein, 34 aa, Artificial Sequence
  Non-cyclic GFR-binding peptide
  MOD_RES (31)..(33): Xaa is C or S
VPQALSNITIQIMVGRKPKVIGEMSMIVRSXKXS

SEQ ID NO: 30054 - protein, 38 aa, Artificial Sequence
  Non-cyclic GFR-binding peptide
  MOD_RES (1)..(2)..(36)..(38): Xaa is C or S
  MOD_RES (16)..(17)..(18)..(19)..(20): Xaa is A or G
  MOD_RES (21)..(22)..(23)..(24): Xaa is A or G or absent
XXVPTELRPVQMRKIXXXXXXXXXKKATVEMVVEGXGX

SEQ ID NO: 30055 - protein, 35 aa, Artificial Sequence
  Non-cyclic GFR-binding peptide
  MOD_RES (3)..(35): Xaa is C or S
PTXAPTKLSNITVQIMDDSSNVIIGEMSNMVVRSX

SEQ ID NO: 30056 - protein, 36 aa, Artificial Sequence
  Non-cyclic GFR-binding peptide
  MOD_RES (1)..(2)..(36): Xaa is C or S
  MOD_RES (16)..(17)..(18)..(19)..(20): Xaa is A or G
  MOD_RES (21)..(22)..(23)..(24): Xaa is A or G or absent
XXVPTELSNITMQIMXXXXXXXXXIGEMSEMVVEGX

SEQ ID NO: 30057 - protein, 34 aa, Artificial Sequence
  Non-cyclic GFR-binding peptide
  MOD_RES (2)..(2): Xaa is C or S
EXVPTEEEPLPMVYYRIKPHQGQHEQLSNFLQHN

SEQ ID NO: 30058 - protein, 37 aa, Artificial Sequence
  Non-cyclic GFR-binding peptide
  MOD_RES (34)..(36): Xaa is C or S
VPTEEEPLPMVYYRIKPHQGQHEQLSNFLQHNKXEXR

SEQ ID NO: 30059 - protein, 35 aa, Artificial Sequence
  Non-cyclic GFR-binding peptide
  MOD_RES (1)..(2): Xaa is C or S
  MOD_RES (16)..(17)..(18)..(19)..(20): Xaa is A or G
  MOD_RES (21)..(22)..(23)..(24): Xaa is A or G or absent
XXVPTELRPVQMRKIXXXXXXXXXKKATVDMVVEG

SEQ ID NO: 30060 - protein, 37 aa, Artificial Sequence
  Non-cyclic GFR-binding peptide
  MOD_RES (3)..(4)..(36): Xaa is C or S
KPXXAPTQLRSVKVAKVDDSSNVIKEVQVNMVVRAXG

SEQ ID NO: 30061 - protein, 32 aa, Artificial Sequence
  Non-cyclic GFR-binding peptide
  MOD_RES (1)..(1): Xaa is C or S
XVPTELRPVQMRKIDEYDKVVKKATVEMVVEG

SEQ ID NO: 30062 - protein, 41 aa, Artificial Sequence
  Non-cyclic GFR-binding peptide
  MOD_RES (3)..(4)..(38)..(40): Xaa is C or S
  MOD_RES (18)..(19)..(20)..(21)..(22): Xaa is A or G
  MOD_RES (23)..(24)..(25)..(26): Xaa is A or G or absent
KPXXAPTQLSNITVQIMXXXXXXXXXIGEMSNMVVRAXGXH

SEQ ID NO: 30063 - protein, 37 aa, Artificial Sequence
  Non-cyclic GFR-binding peptide
  MOD_RES (5)..(6): Xaa is C or S
VPKPXXAPTKLRSVKVAKVDDSSNVIKEVQVNMVVRS

SEQ ID NO: 30064 - protein, 34 aa, Artificial Sequence
  Non-cyclic GFR-binding peptide
  MOD_RES (1)..(2): Xaa is C or S
  MOD_RES (16)..(17)..(18)..(19)..(20): Xaa is A or G
  MOD_RES (21)..(22)..(23)..(24): Xaa is A or G or absent
XXVPTELRPVQMRKIXXXXXXXXXKKATVEMVVE

SEQ ID NO: 30065 - protein, 41 aa, Artificial Sequence
  Non-cyclic GFR-binding peptide
  MOD_RES (6)..(7)..(38)..(40): Xaa is C or S
ASAAPXXVPQALRSVKIAKVVGRKPKVKEVQVMIVRSXKXS

SEQ ID NO: 30066 - protein, 35 aa, Artificial Sequence
  Non-cyclic GFR-binding peptide
  MOD_RES (1)..(35): Xaa is C or S
  MOD_RES (15)..(16)..(17)..(18)..(19): Xaa is A or G
  MOD_RES (20)..(21)..(22)..(23): Xaa is A or G or absent
XVPTEEEPLTMLYYXXXXXXXXXEQLSNFLQHNKX

SEQ ID NO: 30067 - protein, 37 aa, Artificial Sequence
  Non-cyclic GFR-binding peptide
  MOD_RES (1)..(2)..(35)..(37): Xaa is C or S
  MOD_RES (16)..(17)..(18)..(19)..(20): Xaa is A or G
  MOD_RES (21)..(22)..(23)..(24): Xaa is A or G or absent
XXVSQDLSNITIQIMXXXXXXXXXIGEMSMIVKSXKX

SEQ ID NO: 30068 - protein, 34 aa, Artificial Sequence
  Non-cyclic GFR-binding peptide
  MOD_RES (1)..(1): Xaa is C or S
  MOD_RES (15)..(16)..(17)..(18)..(19): Xaa is A or G
  MOD_RES (20)..(21)..(22)..(23): Xaa is A or G or absent
XVPTEEEPLTMLYYXXXXXXXXXEQLSNFLQHNK

SEQ ID NO: 30069 - protein, 36 aa, Artificial Sequence
  Non-cyclic GFR-binding peptide
  MOD_RES (2)..(36): Xaa is C or S
EXVPTEEEPLTMLYYRIKPHQGQHEQLSNFLQHNKX

SEQ ID NO: 30070 - protein, 36 aa, Artificial Sequence
  Non-cyclic GFR-binding peptide
  MOD_RES (3)..(4): Xaa is C or S
  MOD_RES (18)..(19)..(20)..(21)..(22): Xaa is A or G
  MOD_RES (23)..(24)..(25)..(26): Xaa is A or G or absent
KPXXAPTKLRPVQVRKIXXXXXXXXXKKATVNMVVR

SEQ ID NO: 30071 - protein, 39 aa, Artificial Sequence
  Non-cyclic GFR-binding peptide
  MOD_RES (5)..(6)..(38): Xaa is C or S
VPKPXXAPTKLSNITVQIMDDSSNVIIGEMSNMVVRSXG

SEQ ID NO: 30072 - protein, 32 aa, Artificial Sequence
  Non-cyclic GFR-binding peptide
  MOD_RES (1)..(2): Xaa is C or S
XXAPTKLRSVKVAKVDDSSNVIKEVQVNMVVR

SEQ ID NO: 30073 - protein, 35 aa, Artificial Sequence
  Non-cyclic GFR-binding peptide
  MOD_RES (1)..(35): Xaa is C or S
  MOD_RES (15)..(16)..(17)..(18)..(19): Xaa is A or G
  MOD_RES (20)..(21)..(22)..(23): Xaa is A or G or absent
XVPTELSNITMQIMXXXXXXXXXIGEMSEMVVEGX

SEQ ID NO: 30074 - protein, 35 aa, Artificial Sequence
  Non-cyclic GFR-binding peptide
  MOD_RES (15)..(16)..(17)..(18)..(19): Xaa is A or G
  MOD_RES (20)..(21)..(22)..(23): Xaa is A or G or absent
PSRVHHEPLTVLYYXXXXXXXXXEQLSNRLEEHLE

SEQ ID NO: 30075 - protein, 36 aa, Artificial Sequence
  Non-cyclic GFR-binding peptide
  MOD_RES (2)..(3): Xaa is C or S
  MOD_RES (17)..(18)..(19)..(20)..(21): Xaa is A or G
  MOD_RES (22)..(23)..(24)..(25): Xaa is A or G or absent
PXXAPTKLRSVKVAKVXXXXXXXXXKEVQVNMVVRS

SEQ ID NO: 30076 - protein, 40 aa, Artificial Sequence
  Non-cyclic GFR-binding peptide
  MOD_RES (3)..(40): Xaa is C or S
VKXQPSRVHHEPLTVLYYEYVRKKPKLEQLSNRLEEHLEX

SEQ ID NO: 30077 - protein, 38 aa, Artificial Sequence
  Non-cyclic GFR-binding peptide
  MOD_RES (4)..(5)..(38): Xaa is C or S
  MOD_RES (19)..(20)..(21)..(22)..(23): Xaa is A or G
  MOD_RES (24)..(25)..(26)..(27): Xaa is A or G or absent
AAPXXVPQALRPVQIRKIXXXXXXXXXKKATVMIVRSX

SEQ ID NO: 30078 - protein, 37 aa, Artificial Sequence
  Non-cyclic GFR-binding peptide
  MOD_RES (6)..(7): Xaa is C or S
ASASPXXVPQDLRPVQIRKIVGRTPKVKKATVMVVKS

SEQ ID NO: 30079 - protein, 42 aa, Artificial Sequence
  Non-cyclic GFR-binding peptide
  MOD_RES (4)..(5)..(39)..(41): Xaa is C or S
  MOD_RES (19)..(20)..(21)..(22)..(23): Xaa is A or G
  MOD_RES (24)..(25)..(26)..(27): Xaa is A or G or absent
PKAXXVPTELRPVQMRKIXXXXXXXXXKKATVEMVVEGXGXR

SEQ ID NO: 30080 - protein, 37 aa, Artificial Sequence
  Non-cyclic GFR-binding peptide
  MOD_RES (1)..(34)..(36): Xaa is C or S
  MOD_RES (15)..(16)..(17)..(18)..(19): Xaa is A or G
  MOD_RES (20)..(21)..(22)..(23): Xaa is A or G or absent
XVPQALRPVQIRKIXXXXXXXXXKKATVMIVRSXKXS

SEQ ID NO: 30081 - protein, 38 aa, Artificial Sequence
  Non-cyclic GFR-binding peptide
  MOD_RES (3)..(4)..(35)..(37): Xaa is C or S
APXXVPQALRSVKIAKVVGRKPKVKEVQVMIVRSXKXS

SEQ ID NO: 30082 - protein, 37 aa, Artificial Sequence
  Non-cyclic GFR-binding peptide
  MOD_RES (6)..(7): Xaa is C or S
ASASPXXVPQDLRSVKIAKVVGRTPKVKEVQVMVVKS

SEQ ID NO: 30083 - protein, 32 aa, Artificial Sequence
  Non-cyclic GFR-binding peptide
  MOD_RES (32)..(32): Xaa is C or S
VPTELSNITMQIMDEYDKVVIGEMSEMVVEGX

SEQ ID NO: 30084 - protein, 35 aa, Artificial Sequence
  Non-cyclic GFR-binding peptide
  MOD_RES (2)..(3): Xaa is C or S
  MOD_RES (17)..(18)..(19)..(20)..(21): Xaa is A or G
  MOD_RES (22)..(23)..(24)..(25): Xaa is A or G or absent
AXXVPTELRSVKMAKVXXXXXXXXXKEVQVDMVVE

SEQ ID NO: 30085 - protein, 32 aa, Artificial Sequence
  Non-cyclic GFR-binding peptide
  MOD_RES (1)..(32): Xaa is C or S
XVPQALSNITIQIMVGRKPKVIGEMSMIVRSX

SEQ ID NO: 30086 - protein, 42 aa, Artificial Sequence
  Non-cyclic GFR-binding peptide
  MOD_RES (3)..(40)..(42): Xaa is C or S
VQXRPTQVQLEPLPVVYYEIVRKKPIFEQLSNTLEDHLAXKX

SEQ ID NO: 30087 - protein, 41 aa, Artificial Sequence
  Non-cyclic GFR-binding peptide
  MOD_RES (2)..(39)..(41): Xaa is C or S
  MOD_RES (18)..(19)..(20)..(21)..(22): Xaa is A or G
  MOD_RES (23)..(24)..(25)..(26): Xaa is A or G or absent
KXQPSRVHHEPLPVVYYXXXXXXXXXEQLSNRLEEHLEXAX

SEQ ID NO: 30088 - protein, 36 aa, Artificial Sequence
  Non-cyclic GFR-binding peptide
  MOD_RES (3)..(4): Xaa is C or S
  MOD_RES (18)..(19)..(20)..(21)..(22): Xaa is A or G
  MOD_RES (23)..(24)..(25)..(26): Xaa is A or G or absent
KAXXVPTELRSVKMAKVXXXXXXXXXKEVQVDMVVE

SEQ ID NO: 30089 - protein, 37 aa, Artificial Sequence
  Non-cyclic GFR-binding peptide
  MOD_RES (6)..(7): Xaa is C or S
ASAAPXXVPQALSNITIQIMVGRKPKVIGEMSMIVRS

SEQ ID NO: 30090 - protein, 41 aa, Artificial Sequence
  Non-cyclic GFR-binding peptide
  MOD_RES (4)..(38)..(40): Xaa is C or S
  MOD_RES (18)..(19)..(20)..(21)..(22): Xaa is A or G
  MOD_RES (23)..(24)..(25)..(26): Xaa is A or G or absent
GLEXVPTEEEPLPMVYYXXXXXXXXXEQLSNFLQHNKXEXR

SEQ ID NO: 30091 - protein, 32 aa, Artificial Sequence
  Non-cyclic GFR-binding peptide
  MOD_RES (14)..(15)..(16)..(17)..(18): Xaa is A or G
  MOD_RES (19)..(20)..(21)..(22): Xaa is A or G or absent
SRVHHEPLPVVYYXXXXXXXXXEQLSNRLEEH

SEQ ID NO: 30092 - protein, 40 aa, Artificial Sequence
  Non-cyclic GFR-binding peptide
  MOD_RES (1)..(38)..(40): Xaa is C or S
  MOD_RES (17)..(18)..(19)..(20)..(21): Xaa is A or G
  MOD_RES (22)..(23)..(24)..(25): Xaa is A or G or absent
XQPSRVHHEPLPVVYYXXXXXXXXXEQLSNRLEEHLEXAX

SEQ ID NO: 30093 - protein, 39 aa, Artificial Sequence
  Non-cyclic GFR-binding peptide
  MOD_RES (3)..(4)..(38): Xaa is C or S
  MOD_RES (18)..(19)..(20)..(21)..(22): Xaa is A or G
  MOD_RES (23)..(24)..(25)..(26): Xaa is A or G or absent
KAXXVPTELSNITMQIMXXXXXXXXXIGEMSDMVVEGXG

SEQ ID NO: 30094 - protein, 36 aa, Artificial Sequence
  Non-cyclic GFR-binding peptide
  MOD_RES (5)..(6): Xaa is C or S
SASPXXVPQDLSNITIQIMVGRTPKVIGEMSMVVKS

SEQ ID NO: 30095 - protein, 36 aa, Artificial Sequence
  Non-cyclic GFR-binding peptide
  MOD_RES (2)..(3): Xaa is C or S
  MOD_RES (17)..(18)..(19)..(20)..(21): Xaa is A or G
  MOD_RES (22)..(23)..(24)..(25): Xaa is A or G or absent
PXXAPTKLRPVQVRKIXXXXXXXXXKKATVNMVVRS

SEQ ID NO: 30096 - protein, 38 aa, Artificial Sequence
  Non-cyclic GFR-binding peptide
  MOD_RES (36)..(38): Xaa is C or S
  MOD_RES (15)..(16)..(17)..(18)..(19): Xaa is A or G
  MOD_RES (20)..(21)..(22)..(23): Xaa is A or G or absent
PSRVHHEPLPVVYYXXXXXXXXXEQLSNRLEEHLEXAX

SEQ ID NO: 30097 - protein, 35 aa, Artificial Sequence
  Non-cyclic GFR-binding peptide
  MOD_RES (2)..(3)..(35): Xaa is C or S
PXXAPTQLRSVKVAKVDDSSNVIKEVQVNMVVRAX

SEQ ID NO: 30098 - protein, 36 aa, Artificial Sequence
  Non-cyclic GFR-binding peptide
  MOD_RES (2)..(3)..(34)..(36): Xaa is C or S
PXXVPQDLSNITIQIMVGRTPKVIGEMSMVVKSXKX

SEQ ID NO: 30099 - protein, 38 aa, Artificial Sequence
  Non-cyclic GFR-binding peptide
  MOD_RES (1)..(2)..(36)..(38): Xaa is C or S
  MOD_RES (16)..(17)..(18)..(19)..(20): Xaa is A or G
  MOD_RES (21)..(22)..(23)..(24): Xaa is A or G or absent
XXAPTKLRPVQVRKIXXXXXXXXXKKATVNMVVRSXGX

SEQ ID NO: 30100 - protein, 38 aa, Artificial Sequence
  Non-cyclic GFR-binding peptide
  MOD_RES (5)..(6): Xaa is C or S
  MOD_RES (20)..(21)..(22)..(23)..(24): Xaa is A or G
  MOD_RES (25)..(26)..(27)..(28): Xaa is A or G or absent
SAAPXXVPQALRSVKIAKVXXXXXXXXXKEVQVMIVRS

SEQ ID NO: 30101 - protein, 35 aa, Artificial Sequence
  Non-cyclic GFR-binding peptide
  MOD_RES (2)..(3): Xaa is C or S
  MOD_RES (17)..(18)..(19)..(20)..(21): Xaa is A or G
  MOD_RES (22)..(23)..(24)..(25): Xaa is A or G or absent
PXXAPTKLRPVQVRKIXXXXXXXXXKKATVNMVVR

SEQ ID NO: 30102 - protein, 37 aa, Artificial Sequence
  Non-cyclic GFR-binding peptide
  MOD_RES (3)..(4)..(37): Xaa is C or S
  MOD_RES (18)..(19)..(20)..(21)..(22): Xaa is A or G
  MOD_RES (23)..(24)..(25)..(26): Xaa is A or G or absent
SPXXVSQDLRPVQIRKIXXXXXXXXXKKATVMIVKSX

SEQ ID NO: 30103 - protein, 34 aa, Artificial Sequence
  Non-cyclic GFR-binding peptide
  MOD_RES (3)..(4): Xaa is C or S
KAXXVPTELRSVKMAKVDEYDKVVKEVQVEMVVE

SEQ ID NO: 30104 - protein, 34 aa, Artificial Sequence
  Non-cyclic GFR-binding peptide
  MOD_RES (1)..(2)..(33): Xaa is C or S
XXVPQDLSNITIQIMVGRTPKVIGEMSMVVKSXK

SEQ ID NO: 30105 - protein, 44 aa, Artificial Sequence
  Non-cyclic GFR-binding peptide
  MOD_RES (5)..(42)..(44): Xaa is C or S
  MOD_RES (21)..(22)..(23)..(24)..(25): Xaa is A or G
  MOD_RES (26)..(27)..(28)..(29): Xaa is A or G or absent
SSVKXQPSRVHHEPLTVLYYXXXXXXXXXEQLSNRLEEHLEXAX

SEQ ID NO: 30106 - protein, 37 aa, Artificial Sequence
  Non-cyclic GFR-binding peptide
  MOD_RES (34)..(36): Xaa is C or S
  MOD_RES (14)..(15)..(16)..(17)..(18): Xaa is A or G
  MOD_RES (19)..(20)..(21)..(22): Xaa is A or G or absent
VPTELSNITMQIMXXXXXXXXXIGEMSEMVVEGXGXR

SEQ ID NO: 30107 - protein, 36 aa, Artificial Sequence
  Non-cyclic GFR-binding peptide
  MOD_RES (5)..(6): Xaa is C or S
SAAPXXVPQALRSVKIAKVVGRKPKVKEVQVMIVRS

SEQ ID NO: 30108 - protein, 36 aa, Artificial Sequence
  Non-cyclic GFR-binding peptide
  MOD_RES (1)..(2)..(33)..(35): Xaa is C or S
XXVPQALRSVKIAKVVGRKPKVKEVQVMIVRSXKXS

SEQ ID NO: 30109 - protein, 38 aa, Artificial Sequence
  Non-cyclic GFR-binding peptide
  MOD_RES (2)..(3)..(36)..(38): Xaa is C or S
  MOD_RES (17)..(18)..(19)..(20)..(21): Xaa is A or G
  MOD_RES (22)..(23)..(24)..(25): Xaa is A or G or absent
PXXVPQDLRPVQIRKIXXXXXXXXXKKATVMVVKSXKX

SEQ ID NO: 30110 - protein, 39 aa, Artificial Sequence
  Non-cyclic GFR-binding peptide
  MOD_RES (5)..(6)..(37)..(39): Xaa is C or S
SAAPXXVPQALRSVKIAKVVGRKPKVKEVQVMIVRSXKX

SEQ ID NO: 30111 - protein, 41 aa, Artificial Sequence
  Non-cyclic GFR-binding peptide
  MOD_RES (4)..(5)..(39)..(41): Xaa is C or S
  MOD_RES (19)..(20)..(21)..(22)..(23): Xaa is A or G
  MOD_RES (24)..(25)..(26)..(27): Xaa is A or G or absent
PKAXXVPTELSNITMQIMXXXXXXXXXIGEMSDMVVEGXGX

SEQ ID NO: 30112 - protein, 33 aa, Artificial Sequence
  Non-cyclic GFR-binding peptide
  MOD_RES (1)..(32): Xaa is C or S
XVSQDLRPVQIRKIIGKTPKIKKATVMIVKSXK

SEQ ID NO: 30113 - protein, 45 aa, Artificial Sequence
  Non-cyclic GFR-binding peptide
  MOD_RES (5)..(42)..(44): Xaa is C or S
  MOD_RES (21)..(22)..(23)..(24)..(25): Xaa is A or G
  MOD_RES (26)..(27)..(28)..(29): Xaa is A or G or absent
RNVQXRPTQVQLEPLTVLYYXXXXXXXXXEQLSNTLEDHLAXKXE

SEQ ID NO: 30114 - protein, 36 aa, Artificial Sequence
  Non-cyclic GFR-binding peptide
  MOD_RES (34)..(36): Xaa is C or S
  MOD_RES (14)..(15)..(16)..(17)..(18): Xaa is A or G
  MOD_RES (19)..(20)..(21)..(22): Xaa is A or G or absent
VPTELSNITMQIMXXXXXXXXXIGEMSDMVVEGXGX

SEQ ID NO: 30115 - protein, 35 aa, Artificial Sequence
  Non-cyclic GFR-binding peptide
  MOD_RES (3)..(4)..(35): Xaa is C or S
SPXXVSQDLSNITIQIMIGKTPKIIGEMSMIVKSX

SEQ ID NO: 30116 - protein, 36 aa, Artificial Sequence
  Non-cyclic GFR-binding peptide
  MOD_RES (5)..(6): Xaa is C or S
SAAPXXVPQALSNITIQIMVGRKPKVIGEMSMIVRS

SEQ ID NO: 30117 - protein, 34 aa, Artificial Sequence
  Non-cyclic GFR-binding peptide
  MOD_RES (2)..(3)..(34): Xaa is C or S
PXXVSQDLRPVQIRKIIGKTPKIKKATVMIVKSX

SEQ ID NO: 30118 - protein, 34 aa, Artificial Sequence
  Non-cyclic GFR-binding peptide
  MOD_RES (2)..(3): Xaa is C or S
PXXAPTQLRSVKVAKVDDSSNVIKEVQVNMVVRA

SEQ ID NO: 30119 - protein, 36 aa, Artificial Sequence
  Non-cyclic GFR-binding peptide
  MOD_RES (1)..(2)..(34)..(36): Xaa is C or S
XXAPTKLSNITVQIMDDSSNVIIGEMSNMVVRSXGX

SEQ ID NO: 30120 - protein, 36 aa, Artificial Sequence
  Non-cyclic GFR-binding peptide
  MOD_RES (1)..(2)..(36): Xaa is C or S
  MOD_RES (16)..(17)..(18)..(19)..(20): Xaa is A or G
  MOD_RES (21)..(22)..(23)..(24): Xaa is A or G or absent
XXVPTELRPVQMRKIXXXXXXXXXKKATVDMVVEGX

SEQ ID NO: 30121 - protein, 39 aa, Artificial Sequence
  Non-cyclic GFR-binding peptide
  MOD_RES (3)..(3): Xaa is C or S
VKXQPSRVHHEPLPVVYYEYVRKKPKLEQLSNRLEEHLE

SEQ ID NO: 30122 - protein, 39 aa, Artificial Sequence
  Non-cyclic GFR-binding peptide
  MOD_RES (5)..(6)..(38): Xaa is C or S
VPKPXXAPTQLRSVKVAKVDDSSNVIKEVQVNMVVRAXG

SEQ ID NO: 30123 - protein, 41 aa, Artificial Sequence
  Non-cyclic GFR-binding peptide
  MOD_RES (4)..(5)..(39)..(41): Xaa is C or S
  MOD_RES (19)..(20)..(21)..(22)..(23): Xaa is A or G
  MOD_RES (24)..(25)..(26)..(27): Xaa is A or G or absent
PKAXXVPTELSNITMQIMXXXXXXXXXIGEMSEMVVEGXGX

SEQ ID NO: 30124 - protein, 40 aa, Artificial Sequence
  Non-cyclic GFR-binding peptide
  MOD_RES (2)..(39): Xaa is C or S
QXRPTQVQLEPLPVVYYEIVRKKPIFEQLSNTLEDHLAXK

SEQ ID NO: 30125 - protein, 37 aa, Artificial Sequence
  Non-cyclic GFR-binding peptide
  MOD_RES (2)..(36): Xaa is C or S
EXVPTEEEPLPMVYYRIKPHQGQHEQLSNFLQHNKXE

SEQ ID NO: 30126 - protein, 36 aa, Artificial Sequence
  Non-cyclic GFR-binding peptide
  MOD_RES (34)..(36): Xaa is C or S
  MOD_RES (14)..(15)..(16)..(17)..(18): Xaa is A or G
  MOD_RES (19)..(20)..(21)..(22): Xaa is A or G or absent
VPTELSNITMQIMXXXXXXXXXIGEMSEMVVEGXGX

SEQ ID NO: 30127 - protein, 37 aa, Artificial Sequence
  Non-cyclic GFR-binding peptide
  MOD_RES (5)..(6): Xaa is C or S
IPKAXXVPTELRSVKMAKVDENEKVVKEVQVDMVVEG

SEQ ID NO: 30128 - protein, 36 aa, Artificial Sequence
  Non-cyclic GFR-binding peptide
  MOD_RES (1)..(34)..(36): Xaa is C or S
  MOD_RES (15)..(16)..(17)..(18)..(19): Xaa is A or G
  MOD_RES (20)..(21)..(22)..(23): Xaa is A or G or absent
XVSQDLSNITIQIMXXXXXXXXXIGEMSMIVKSXKX

SEQ ID NO: 30129 - protein, 38 aa, Artificial Sequence
  Non-cyclic GFR-binding peptide
  MOD_RES (1)..(35)..(37): Xaa is C or S
  MOD_RES (15)..(16)..(17)..(18)..(19): Xaa is A or G
  MOD_RES (20)..(21)..(22)..(23): Xaa is A or G or absent
XVPTELSNITMQIMXXXXXXXXXIGEMSDMVVEGXGXR

SEQ ID NO: 30130 - protein, 38 aa, Artificial Sequence
  Non-cyclic GFR-binding peptide
  MOD_RES (1)..(35)..(37): Xaa is C or S
  MOD_RES (15)..(16)..(17)..(18)..(19): Xaa is A or G
  MOD_RES (20)..(21)..(22)..(23): Xaa is A or G or absent
XVPTELRSVKMAKVXXXXXXXXXKEVQVEMVVEGXGXR

SEQ ID NO: 30131 - protein, 38 aa, Artificial Sequence
  Non-cyclic GFR-binding peptide
  MOD_RES (1)..(38): Xaa is C or S
XQPSRVHHEPLTVLYYEYVRKKPKLEQLSNRLEEHLEX

SEQ ID NO: 30132 - protein, 34 aa, Artificial Sequence
  Non-cyclic GFR-binding peptide
  MOD_RES (1)..(33): Xaa is C or S
XVPTELSNITMQIMDEYDKVVIGEMSEMVVEGXG

SEQ ID NO: 30133 - protein, 37 aa, Artificial Sequence
  Non-cyclic GFR-binding peptide
  MOD_RES (6)..(7): Xaa is C or S
SIPKAXXVPTELRPVQMRKIDEYDKVVKKATVEMVVE

SEQ ID NO: 30134 - protein, 42 aa, Artificial Sequence
  Non-cyclic GFR-binding peptide
  MOD_RES (6)..(7)..(41): Xaa is C or S
  MOD_RES (21)..(22)..(23)..(24)..(25): Xaa is A or G
  MOD_RES (26)..(27)..(28)..(29): Xaa is A or G or absent
YVPKPXXAPTKLRPVQVRKIXXXXXXXXXKKATVNMVVRSXG

SEQ ID NO: 30135 - protein, 43 aa, Artificial Sequence
  Non-cyclic GFR-binding peptide
  MOD_RES (6)..(40)..(42): Xaa is C or S
  MOD_RES (20)..(21)..(22)..(23)..(24): Xaa is A or G
  MOD_RES (25)..(26)..(27)..(28): Xaa is A or G or absent
VTKPTXAPTKLRSVKVAKVXXXXXXXXXKEVQVNMVVRSXGXH

SEQ ID NO: 30136 - protein, 37 aa, Artificial Sequence
  Non-cyclic GFR-binding peptide
  MOD_RES (2)..(3)..(34)..(36): Xaa is C or S
PXXVPQDLSNITIQIMVGRTPKVIGEMSMVVKSXKXS

SEQ ID NO: 30137 - protein, 38 aa, Artificial Sequence
  Non-cyclic GFR-binding peptide
  MOD_RES (36)..(38): Xaa is C or S
  MOD_RES (15)..(16)..(17)..(18)..(19): Xaa is A or G
  MOD_RES (20)..(21)..(22)..(23): Xaa is A or G or absent
PTQVQLEPLPVVYYXXXXXXXXXEQLSNTLEDHLAXKX

SEQ ID NO: 30138 - protein, 37 aa, Artificial Sequence
  Non-cyclic GFR-binding peptide
  MOD_RES (3)..(4)..(36): Xaa is C or S
KPXXAPTKLRSVKVAKVDDSSNVIKEVQVNMVVRSXG

SEQ ID NO: 30139 - protein, 34 aa, Artificial Sequence
  Non-cyclic GFR-binding peptide
QPSRVHHEPLTVLYYEYVRKKPKLEQLSNRLEEH

SEQ ID NO: 30140 - protein, 38 aa, Artificial Sequence
  Non-cyclic GFR-binding peptide
  MOD_RES (1)..(35)..(37): Xaa is C or S
XVPTEEEPLPMVYYRIKPHQGQHEQLSNFLQHNKXEXR

SEQ ID NO: 30141 - protein, 41 aa, Artificial Sequence
  Non-cyclic GFR-binding peptide
  MOD_RES (3)..(40): Xaa is C or S
  MOD_RES (19)..(20)..(21)..(22)..(23): Xaa is A or G
  MOD_RES (24)..(25)..(26)..(27): Xaa is A or G or absent
VQXRPTQVQLEPLPVVYYXXXXXXXXXEQLSNTLEDHLAXK

SEQ ID NO: 30142 - protein, 33 aa, Artificial Sequence
  Non-cyclic GFR-binding peptide
PTQVQLEPLTVLYYEIVRKKPIFEQLSNTLEDH

SEQ ID NO: 30143 - protein, 39 aa, Artificial Sequence
  Non-cyclic GFR-binding peptide
  MOD_RES (6)..(7)..(39): Xaa is C or S
KIPKAXXVPTELSNITMQIMDENEKVVIGEMSDMVVEGX

SEQ ID NO: 30144 - protein, 36 aa, Artificial Sequence
  Non-cyclic GFR-binding peptide
  MOD_RES (2)..(3): Xaa is C or S
  MOD_RES (17)..(18)..(19)..(20)..(21): Xaa is A or G
  MOD_RES (22)..(23)..(24)..(25): Xaa is A or G or absent
PXXAPTQLRSVKVAKVXXXXXXXXXKEVQVNMVVRA

SEQ ID NO: 30145 - protein, 32 aa, Artificial Sequence
  Non-cyclic GFR-binding peptide
  MOD_RES (32)..(32): Xaa is C or S
APTQLRPVQVRKIDDSSNVIKKATVNMVVRAX

SEQ ID NO: 30146 - protein, 33 aa, Artificial Sequence
  Non-cyclic GFR-binding peptide
PTQVQLEPLPVVYYEIVRKKPIFEQLSNTLEDH

SEQ ID NO: 30147 - protein, 34 aa, Artificial Sequence
  Non-cyclic GFR-binding peptide
  MOD_RES (32)..(34): Xaa is C or S
APTKLRPVQVRKIDDSSNVIKKATVNMVVRSXGX

SEQ ID NO: 30148 - protein, 36 aa, Artificial Sequence
  Non-cyclic GFR-binding peptide
  MOD_RES (34)..(36): Xaa is C or S
  MOD_RES (14)..(15)..(16)..(17)..(18): Xaa is A or G
  MOD_RES (19)..(20)..(21)..(22): Xaa is A or G or absent
APTKLRSVKVAKVXXXXXXXXXKEVQVNMVVRSXGX

SEQ ID NO: 30149 - protein, 37 aa, Artificial Sequence
  Non-cyclic GFR-binding peptide
  MOD_RES (1)..(1): Xaa is C or S
XRPTQVQLEPLPVVYYEIVRKKPIFEQLSNTLEDHLA

SEQ ID NO: 30150 - protein, 34 aa, Artificial Sequence
  Non-cyclic GFR-binding peptide
  MOD_RES (1)..(2)..(33): Xaa is C or S
XXVPQALRSVKIAKVVGRKPKVKEVQVMIVRSXK

SEQ ID NO: 30151 - protein, 36 aa, Artificial Sequence
  Non-cyclic GFR-binding peptide
  MOD_RES (5)..(6): Xaa is C or S
SASPXXVPQDLRSVKIAKVVGRTPKVKEVQVMVVKS

SEQ ID NO: 30152 - protein, 37 aa, Artificial Sequence
  Non-cyclic GFR-binding peptide
  MOD_RES (6)..(7): Xaa is C or S
ASAAPXXVPQALRSVKIAKVVGRKPKVKEVQVMIVRS

SEQ ID NO: 30153 - protein, 35 aa, Artificial Sequence
  Non-cyclic GFR-binding peptide
  MOD_RES (2)..(3)..(34): Xaa is C or S
PXXVPQDLRPVQIRKIVGRTPKVKKATVMVVKSXK

SEQ ID NO: 30154 - protein, 44 aa, Artificial Sequence
  Non-cyclic GFR-binding peptide
  MOD_RES (6)..(7)..(41)..(43): Xaa is C or S
  MOD_RES (21)..(22)..(23)..(24)..(25): Xaa is A or G
  MOD_RES (26)..(27)..(28)..(29): Xaa is A or G or absent
YVPKPXXAPTKLRPVQVRKIXXXXXXXXXKKATVNMVVRSXGXH

SEQ ID NO: 30155 - protein, 37 aa, Artificial Sequence
  Non-cyclic GFR-binding peptide
  MOD_RES (1)..(2)..(36): Xaa is C or S
  MOD_RES (16)..(17)..(18)..(19)..(20): Xaa is A or G
  MOD_RES (21)..(22)..(23)..(24): Xaa is A or G or absent
XXVPTELSNITMQIMXXXXXXXXXIGEMSEMVVEGXG

SEQ ID NO: 30156 - protein, 36 aa, Artificial Sequence
  Non-cyclic GFR-binding peptide
  MOD_RES (1)..(33)..(35): Xaa is C or S
XVPTELRSVKMAKVDEYDKVVKEVQVEMVVEGXGXR

SEQ ID NO: 30157 - protein, 34 aa, Artificial Sequence
  Non-cyclic GFR-binding peptide
  MOD_RES (32)..(34): Xaa is C or S
APTQLRSVKVAKVDDSSNVIKEVQVNMVVRAXGX

SEQ ID NO: 30158 - protein, 35 aa, Artificial Sequence
  Non-cyclic GFR-binding peptide
  MOD_RES (34)..(34): Xaa is C or S
  MOD_RES (14)..(15)..(16)..(17)..(18): Xaa is A or G
  MOD_RES (19)..(20)..(21)..(22): Xaa is A or G or absent
APTQLSNITVQIMXXXXXXXXXIGEMSNMVVRAXG

SEQ ID NO: 30159 - protein, 37 aa, Artificial Sequence
  Non-cyclic GFR-binding peptide
  MOD_RES (5)..(6): Xaa is C or S
VPKPXXAPTKLRPVQVRKIDDSSNVIKKATVNMVVRS

SEQ ID NO: 30160 - protein, 38 aa, Artificial Sequence
  Non-cyclic GFR-binding peptide
  MOD_RES (6)..(38): Xaa is C or S
VTKPTXAPTKLRSVKVAKVDDSSNVIKEVQVNMVVRSX

SEQ ID NO: 30161 - protein, 34 aa, Artificial Sequence
  Non-cyclic GFR-binding peptide
  MOD_RES (1)..(2): Xaa is C or S
  MOD_RES (16)..(17)..(18)..(19)..(20): Xaa is A or G
  MOD_RES (21)..(22)..(23)..(24): Xaa is A or G or absent
XXVPQALRSVKIAKVXXXXXXXXXKEVQVMIVRS

SEQ ID NO: 30162 - protein, 32 aa, Artificial Sequence
  Non-cyclic GFR-binding peptide
  MOD_RES (14)..(15)..(16)..(17)..(18): Xaa is A or G
  MOD_RES (19)..(20)..(21)..(22): Xaa is A or G or absent
VPTEEEPLPMVYYXXXXXXXXXEQLSNFLQHN

SEQ ID NO: 30163 - protein, 36 aa, Artificial Sequence
  Non-cyclic GFR-binding peptide
  MOD_RES (3)..(35): Xaa is C or S
PTXAPTKLRSVKVAKVDDSSNVIKEVQVNMVVRSXG

SEQ ID NO: 30164 - protein, 39 aa, Artificial Sequence
  Non-cyclic GFR-binding peptide
  MOD_RES (2)..(39): Xaa is C or S
  MOD_RES (18)..(19)..(20)..(21)..(22): Xaa is A or G
  MOD_RES (23)..(24)..(25)..(26): Xaa is A or G or absent
QXRPTQVQLEPLTVLYYXXXXXXXXXEQLSNTLEDHLAX

SEQ ID NO: 30165 - protein, 37 aa, Artificial Sequence
  Non-cyclic GFR-binding peptide
  MOD_RES (1)..(34)..(36): Xaa is C or S
  MOD_RES (15)..(16)..(17)..(18)..(19): Xaa is A or G
  MOD_RES (20)..(21)..(22)..(23): Xaa is A or G or absent
XVSQDLSNITIQIMXXXXXXXXXIGEMSMIVKSXKXS

SEQ ID NO: 30166 - protein, 37 aa, Artificial Sequence
  Non-cyclic GFR-binding peptide
  MOD_RES (5)..(6): Xaa is C or S
IPKAXXVPTELRSVKMAKVDEYDKVVKEVQVEMVVEG

SEQ ID NO: 30167 - protein, 39 aa, Artificial Sequence
  Non-cyclic GFR-binding peptide
  MOD_RES (5)..(6)..(38): Xaa is C or S
IPKAXXVPTELRPVQMRKIDENEKVVKKATVDMVVEGXG

SEQ ID NO: 30168 - protein, 41 aa, Artificial Sequence
  Non-cyclic GFR-binding peptide
  MOD_RES (6)..(7)..(40): Xaa is C or S
  MOD_RES (21)..(22)..(23)..(24)..(25): Xaa is A or G
  MOD_RES (26)..(27)..(28)..(29): Xaa is A or G or absent
ASAAPXXVPQALSNITIQIMXXXXXXXXXIGEMSMIVRSXK

SEQ ID NO: 30169 - protein, 36 aa, Artificial Sequence
  Non-cyclic GFR-binding peptide
  MOD_RES (6)..(6): Xaa is C or S
VTKPTXAPTKLRPVQVRKIDDSSNVIKKATVNMVVR

SEQ ID NO: 30170 - protein, 38 aa, Artificial Sequence
  Non-cyclic GFR-binding peptide
  MOD_RES (3)..(3): Xaa is C or S
VQXRPTQVQLEPLPVVYYEIVRKKPIFEQLSNTLEDHL

SEQ ID NO: 30171 - protein, 36 aa, Artificial Sequence
  Non-cyclic GFR-binding peptide
  MOD_RES (1)..(1): Xaa is C or S
XQPSRVHHEPLPVVYYEYVRKKPKLEQLSNRLEEHL

SEQ ID NO: 30172 - protein, 35 aa, Artificial Sequence
  Non-cyclic GFR-binding peptide
QPSRVHHEPLPVVYYEYVRKKPKLEQLSNRLEEHL

SEQ ID NO: 30173 - protein, 36 aa, Artificial Sequence
  Non-cyclic GFR-binding peptide
  MOD_RES (1)..(2)..(36): Xaa is C or S
  MOD_RES (16)..(17)..(18)..(19)..(20): Xaa is A or G
  MOD_RES (21)..(22)..(23)..(24): Xaa is A or G or absent
XXVPTELRSVKMAKVXXXXXXXXXKEVQVDMVVEGX

SEQ ID NO: 30174 - protein, 34 aa, Artificial Sequence
  Non-cyclic GFR-binding peptide
  MOD_RES (3)..(4): Xaa is C or S
KAXXVPTELSNITMQIMDEYDKVVIGEMSEMVVE

SEQ ID NO: 30175 - protein, 39 aa, Artificial Sequence
  Non-cyclic GFR-binding peptide
  MOD_RES (1)..(2)..(36)..(38): Xaa is C or S
  MOD_RES (16)..(17)..(18)..(19)..(20): Xaa is A or G
  MOD_RES (21)..(22)..(23)..(24): Xaa is A or G or absent
XXVPTELRPVQMRKIXXXXXXXXXKKATVEMVVEGXGXR

SEQ ID NO: 30176 - protein, 40 aa, Artificial Sequence
  Non-cyclic GFR-binding peptide
  MOD_RES (5)..(6)..(38)..(40): Xaa is C or S
VPKPXXAPTQLSNITVQIMDDSSNVIIGEMSNMVVRAXGX

SEQ ID NO: 30177 - protein, 33 aa, Artificial Sequence
  Non-cyclic GFR-binding peptide
  MOD_RES (1)..(33): Xaa is C or S
XVPTELRPVQMRKIDEYDKVVKKATVEMVVEGX

SEQ ID NO: 30178 - protein, 43 aa, Artificial Sequence
  Non-cyclic GFR-binding peptide
  MOD_RES (6)..(7)..(40)..(42): Xaa is C or S
  MOD_RES (21)..(22)..(23)..(24)..(25): Xaa is A or G
  MOD_RES (26)..(27)..(28)..(29): Xaa is A or G or absent
ASAAPXXVPQALSNITIQIMXXXXXXXXXIGEMSMIVRSXKXS

SEQ ID NO: 30179 - protein, 36 aa, Artificial Sequence
  Non-cyclic GFR-binding peptide
  MOD_RES (2)..(3)..(34)..(36): Xaa is C or S
PXXVSQDLRPVQIRKIIGKTPKIKKATVMIVKSXKX

SEQ ID NO: 30180 - protein, 43 aa, Artificial Sequence
  Non-cyclic GFR-binding peptide
  MOD_RES (7)..(41)..(43): Xaa is C or S
  MOD_RES (21)..(22)..(23)..(24)..(25): Xaa is A or G
  MOD_RES (26)..(27)..(28)..(29): Xaa is A or G or absent
NDEGLEXVPTEEEPLTMLYYXXXXXXXXXEQLSNFLQHNKXEX

SEQ ID NO: 30181 - protein, 36 aa, Artificial Sequence
  Non-cyclic GFR-binding peptide
  MOD_RES (36)..(36): Xaa is C or S
  MOD_RES (15)..(16)..(17)..(18)..(19): Xaa is A or G
  MOD_RES (20)..(21)..(22)..(23): Xaa is A or G or absent
PSRVHHEPLPVVYYXXXXXXXXXEQLSNRLEEHLEX

SEQ ID NO: 30182 - protein, 36 aa, Artificial Sequence
  Non-cyclic GFR-binding peptide
  MOD_RES (4)..(5): Xaa is C or S
PKPXXAPTQLSNITVQIMDDSSNVIIGEMSNMVVRA

SEQ ID NO: 30183 - protein, 40 aa, Artificial Sequence
  Non-cyclic GFR-binding peptide
  MOD_RES (1)..(38)..(40): Xaa is C or S
  MOD_RES (17)..(18)..(19)..(20)..(21): Xaa is A or G
  MOD_RES (22)..(23)..(24)..(25): Xaa is A or G or absent
XRPTQVQLEPLPVVYYXXXXXXXXXEQLSNTLEDHLAXKX

SEQ ID NO: 30184 - protein, 32 aa, Artificial Sequence
  Non-cyclic GFR-binding peptide
  MOD_RES (14)..(15)..(16)..(17)..(18): Xaa is A or G
  MOD_RES (19)..(20)..(21)..(22): Xaa is A or G or absent
TQVQLEPLTVLYYXXXXXXXXXEQLSNTLEDH

SEQ ID NO: 30185 - protein, 35 aa, Artificial Sequence
  Non-cyclic GFR-binding peptide
  MOD_RES (33)..(35): Xaa is C or S
  MOD_RES (14)..(15)..(16)..(17)..(18): Xaa is A or G
  MOD_RES (19)..(20)..(21)..(22): Xaa is A or G or absent
VPQALRSVKIAKVXXXXXXXXXKEVQVMIVRSXKX

SEQ ID NO: 30186 - protein, 36 aa, Artificial Sequence
  Non-cyclic GFR-binding peptide
  MOD_RES (2)..(3)..(34)..(36): Xaa is C or S
PXXVPQDLRPVQIRKIVGRTPKVKKATVMVVKSXKX

SEQ ID NO: 30187 - protein, 34 aa, Artificial Sequence
  Non-cyclic GFR-binding peptide
  MOD_RES (1)..(2): Xaa is C or S
  MOD_RES (16)..(17)..(18)..(19)..(20): Xaa is A or G
  MOD_RES (21)..(22)..(23)..(24): Xaa is A or G or absent
XXVPQALRPVQIRKIXXXXXXXXXKKATVMIVRS

SEQ ID NO: 30188 - protein, 38 aa, Artificial Sequence
  Non-cyclic GFR-binding peptide
  MOD_RES (6)..(7)..(38): Xaa is C or S
ASAAPXXVPQALSNITIQIMVGRKPKVIGEMSMIVRSX

SEQ ID NO: 30189 - protein, 32 aa, Artificial Sequence
  Non-cyclic GFR-binding peptide
  MOD_RES (14)..(15)..(16)..(17)..(18): Xaa is A or G
  MOD_RES (19)..(20)..(21)..(22): Xaa is A or G or absent
TQVQLEPLPVVYYXXXXXXXXXEQLSNTLEDH

SEQ ID NO: 30190 - protein, 35 aa, Artificial Sequence
  Non-cyclic GFR-binding peptide
  MOD_RES (34)..(34): Xaa is C or S
  MOD_RES (14)..(15)..(16)..(17)..(18): Xaa is A or G
  MOD_RES (19)..(20)..(21)..(22): Xaa is A or G or absent
VPTELRSVKMAKVXXXXXXXXXKEVQVDMVVEGXG

SEQ ID NO: 30191 - protein, 41 aa, Artificial Sequence
  Non-cyclic GFR-binding peptide
  MOD_RES (3)..(4)..(38)..(40): Xaa is C or S
  MOD_RES (18)..(19)..(20)..(21)..(22): Xaa is A or G
  MOD_RES (23)..(24)..(25)..(26): Xaa is A or G or absent
KPXXAPTKLRSVKVAKVXXXXXXXXXKEVQVNMVVRSXGXH

SEQ ID NO: 30192 - protein, 36 aa, Artificial Sequence
  Non-cyclic GFR-binding peptide
  MOD_RES (1)..(2)..(34)..(36): Xaa is C or S
XXVPTELRSVKMAKVDENEKVVKEVQVDMVVEGXGX

SEQ ID NO: 30193 - protein, 36 aa, Artificial Sequence
  Non-cyclic GFR-binding peptide
  MOD_RES (34)..(36): Xaa is C or S
  MOD_RES (14)..(15)..(16)..(17)..(18): Xaa is A or G
  MOD_RES (19)..(20)..(21)..(22): Xaa is A or G or absent
APTQLRPVQVRKIXXXXXXXXXKKATVNMVVRAXGX

SEQ ID NO: 30194 - protein, 33 aa, Artificial Sequence
  Non-cyclic GFR-binding peptide
  MOD_RES (2)..(3): Xaa is C or S
PXXVPQDLRPVQIRKIVGRTPKVKKATVMVVKS

SEQ ID NO: 30195 - protein, 38 aa, Artificial Sequence
  Non-cyclic GFR-binding peptide
  MOD_RES (3)..(4)..(38): Xaa is C or S
  MOD_RES (18)..(19)..(20)..(21)..(22): Xaa is A or G
  MOD_RES (23)..(24)..(25)..(26): Xaa is A or G or absent
KPXXAPTQLRSVKVAKVXXXXXXXXXKEVQVNMVVRAX

SEQ ID NO: 30196 - protein, 34 aa, Artificial Sequence
  Non-cyclic GFR-binding peptide
  MOD_RES (3)..(3): Xaa is C or S
PTXAPTKLSNITVQIMDDSSNVIIGEMSNMVVRS

SEQ ID NO: 30197 - protein, 37 aa, Artificial Sequence
  Non-cyclic GFR-binding peptide
  MOD_RES (4)..(5): Xaa is C or S
  MOD_RES (19)..(20)..(21)..(22)..(23): Xaa is A or G
  MOD_RES (24)..(25)..(26)..(27): Xaa is A or G or absent
AAPXXVPQALRPVQIRKIXXXXXXXXXKKATVMIVRS

SEQ ID NO: 30198 - protein, 36 aa, Artificial Sequence
  Non-cyclic GFR-binding peptide
  MOD_RES (1)..(33)..(35): Xaa is C or S
XVPTELRPVQMRKIDENEKVVKKATVDMVVEGXGXR

SEQ ID NO: 30199 - protein, 39 aa, Artificial Sequence
  Non-cyclic GFR-binding peptide
  MOD_RES (2)..(36)..(38): Xaa is C or S
  MOD_RES (16)..(17)..(18)..(19)..(20): Xaa is A or G
  MOD_RES (21)..(22)..(23)..(24): Xaa is A or G or absent
EXVPTEEEPLTMLYYXXXXXXXXXEQLSNFLQHNKXEXR

SEQ ID NO: 30200 - protein, 41 aa, Artificial Sequence
  Non-cyclic GFR-binding peptide
  MOD_RES (6)..(7)..(40): Xaa is C or S
  MOD_RES (21)..(22)..(23)..(24)..(25): Xaa is A or G
  MOD_RES (26)..(27)..(28)..(29): Xaa is A or G or absent
ASASPXXVSQDLSNITIQIMXXXXXXXXXIGEMSMIVKSXK

SEQ ID NO: 30201 - protein, 33 aa, Artificial Sequence
  Non-cyclic GFR-binding peptide
  MOD_RES (3)..(3): Xaa is C or S
PTXAPTKLSNITVQIMDDSSNVIIGEMSNMVVR

SEQ ID NO: 30202 - protein, 34 aa, Artificial Sequence
  Non-cyclic GFR-binding peptide
  MOD_RES (34)..(34): Xaa is C or S
  MOD_RES (14)..(15)..(16)..(17)..(18): Xaa is A or G
  MOD_RES (19)..(20)..(21)..(22): Xaa is A or G or absent
VPTELRSVKMAKVXXXXXXXXXKEVQVDMVVEGX

SEQ ID NO: 30203 - protein, 39 aa, Artificial Sequence
  Non-cyclic GFR-binding peptide
  MOD_RES (2)..(3)..(36)..(38): Xaa is C or S
  MOD_RES (17)..(18)..(19)..(20)..(21): Xaa is A or G
  MOD_RES (22)..(23)..(24)..(25): Xaa is A or G or absent
PXXVSQDLRSVKIAKVXXXXXXXXXKEVQVMIVKSXKXS

SEQ ID NO: 30204 - protein, 30 aa, Artificial Sequence
  Non-cyclic GFR-binding peptide
VPQALRPVQIRKIVGRKPKVKKATVMIVRS

SEQ ID NO: 30205 - protein, 33 aa, Artificial Sequence
  Non-cyclic GFR-binding peptide
PSRVHHEPLPVVYYEYVRKKPKLEQLSNRLEEH

SEQ ID NO: 30206 - protein, 36 aa, Artificial Sequence
  Non-cyclic GFR-binding peptide
  MOD_RES (2)..(36): Xaa is C or S
  MOD_RES (16)..(17)..(18)..(19)..(20): Xaa is A or G
  MOD_RES (21)..(22)..(23)..(24): Xaa is A or G or absent
TXAPTKLRSVKVAKVXXXXXXXXXKEVQVNMVVRSX

SEQ ID NO: 30207 - protein, 36 aa, Artificial Sequence
  Non-cyclic GFR-binding peptide
  MOD_RES (2)..(36): Xaa is C or S
EXVPTEEEPLPMVYYRIKPHQGQHEQLSNFLQHNKX

SEQ ID NO: 30208 - protein, 32 aa, Artificial Sequence
  Non-cyclic GFR-binding peptide
  MOD_RES (1)..(32): Xaa is C or S
XVPQDLRPVQIRKIVGRTPKVKKATVMVVKSX

SEQ ID NO: 30209 - protein, 33 aa, Artificial Sequence
  Non-cyclic GFR-binding peptide
SRVHHEPLTVLYYEYVRKKPKLEQLSNRLEEHL

SEQ ID NO: 30210 - protein, 33 aa, Artificial Sequence
  Non-cyclic GFR-binding peptide
  MOD_RES (2)..(3): Xaa is C or S
PXXAPTKLSNITVQIMDDSSNVIIGEMSNMVVR

SEQ ID NO: 30211 - protein, 37 aa, Artificial Sequence
  Non-cyclic GFR-binding peptide
  MOD_RES (1)..(34)..(36): Xaa is C or S
  MOD_RES (15)..(16)..(17)..(18)..(19): Xaa is A or G
  MOD_RES (20)..(21)..(22)..(23): Xaa is A or G or absent
XVPQDLRPVQIRKIXXXXXXXXXKKATVMVVKSXKXS

SEQ ID NO: 30212 - protein, 41 aa, Artificial Sequence
  Non-cyclic GFR-binding peptide
  MOD_RES (4)..(5)..(38)..(40): Xaa is C or S
  MOD_RES (19)..(20)..(21)..(22)..(23): Xaa is A or G
  MOD_RES (24)..(25)..(26)..(27): Xaa is A or G or absent
ASPXXVSQDLRPVQIRKIXXXXXXXXXKKATVMIVKSXKXS

SEQ ID NO: 30213 - protein, 42 aa, Artificial Sequence
  Non-cyclic GFR-binding peptide
  MOD_RES (5)..(6)..(40)..(42): Xaa is C or S
  MOD_RES (20)..(21)..(22)..(23)..(24): Xaa is A or G
  MOD_RES (25)..(26)..(27)..(28): Xaa is A or G or absent
IPKAXXVPTELSNITMQIMXXXXXXXXXIGEMSEMVVEGXGX

SEQ ID NO: 30214 - protein, 34 aa, Artificial Sequence
  Non-cyclic GFR-binding peptide
  MOD_RES (1)..(33): Xaa is C or S
XAPTKLRPVQVRKIDDSSNVIKKATVNMVVRSXG

SEQ ID NO: 30215 - protein, 33 aa, Artificial Sequence
  Non-cyclic GFR-binding peptide
  MOD_RES (1)..(32): Xaa is C or S
XVPQDLRPVQIRKIVGRTPKVKKATVMVVKSXK

SEQ ID NO: 30216 - protein, 38 aa, Artificial Sequence
  Non-cyclic GFR-binding peptide
  MOD_RES (1)..(2)..(35)..(37): Xaa is C or S
  MOD_RES (16)..(17)..(18)..(19)..(20): Xaa is A or G
  MOD_RES (21)..(22)..(23)..(24): Xaa is A or G or absent
XXVPQDLSNITIQIMXXXXXXXXXIGEMSMVVKSXKXS

SEQ ID NO: 30217 - protein, 41 aa, Artificial Sequence
  Non-cyclic GFR-binding peptide
  MOD_RES (5)..(6)..(38)..(40): Xaa is C or S
IPKAXXVPTELRPVQMRKIDENEKVVKKATVDMVVEGXGXR

SEQ ID NO: 30218 - protein, 40 aa, Artificial Sequence
  Non-cyclic GFR-binding peptide
  MOD_RES (3)..(4)..(37)..(39): Xaa is C or S
  MOD_RES (18)..(19)..(20)..(21)..(22): Xaa is A or G
  MOD_RES (23)..(24)..(25)..(26): Xaa is A or G or absent
SPXXVSQDLRPVQIRKIXXXXXXXXXKKATVMIVKSXKXS

SEQ ID NO: 30219 - protein, 34 aa, Artificial Sequence
  Non-cyclic GFR-binding peptide
  MOD_RES (2)..(3): Xaa is C or S
PXXAPTKLRSVKVAKVDDSSNVIKEVQVNMVVRS

SEQ ID NO: 30220 - protein, 34 aa, Artificial Sequence
  Non-cyclic GFR-binding peptide
  MOD_RES (16)..(17)..(18)..(19)..(20): Xaa is A or G
  MOD_RES (21)..(22)..(23)..(24): Xaa is A or G or absent
QPSRVHHEPLTVLYYXXXXXXXXXEQLSNRLEEH

SEQ ID NO: 30221 - protein, 36 aa, Artificial Sequence
  Non-cyclic GFR-binding peptide
  MOD_RES (34)..(36): Xaa is C or S
  MOD_RES (14)..(15)..(16)..(17)..(18): Xaa is A or G
  MOD_RES (19)..(20)..(21)..(22): Xaa is A or G or absent
VPTELRSVKMAKVXXXXXXXXXKEVQVEMVVEGXGX

SEQ ID NO: 30222 - protein, 40 aa, Artificial Sequence
  Non-cyclic GFR-binding peptide
  MOD_RES (3)..(4)..(38)..(40): Xaa is C or S
  MOD_RES (18)..(19)..(20)..(21)..(22): Xaa is A or G
  MOD_RES (23)..(24)..(25)..(26): Xaa is A or G or absent
KPXXAPTKLRSVKVAKVXXXXXXXXXKEVQVNMVVRSXGX

SEQ ID NO: 30223 - protein, 41 aa, Artificial Sequence
  Non-cyclic GFR-binding peptide
  MOD_RES (5)..(6)..(38)..(40): Xaa is C or S
VPKPXXAPTQLRPVQVRKIDDSSNVIKKATVNMVVRAXGXH

SEQ ID NO: 30224 - protein, 36 aa, Artificial Sequence
  Non-cyclic GFR-binding peptide
  MOD_RES (3)..(4)..(35): Xaa is C or S
APXXVPQALSNITIQIMVGRKPKVIGEMSMIVRSXK

SEQ ID NO: 30225 - protein, 35 aa, Artificial Sequence
  Non-cyclic GFR-binding peptide
  MOD_RES (4)..(5): Xaa is C or S
PKPXXAPTQLRSVKVAKVDDSSNVIKEVQVNMVVR

SEQ ID NO: 30226 - protein, 40 aa, Artificial Sequence
  Non-cyclic GFR-binding peptide
  MOD_RES (5)..(6)..(39): Xaa is C or S
  MOD_RES (20)..(21)..(22)..(23)..(24): Xaa is A or G
  MOD_RES (25)..(26)..(27)..(28): Xaa is A or G or absent
SASPXXVPQDLRSVKIAKVXXXXXXXXXKEVQVMVVKSXK

SEQ ID NO: 30227 - protein, 38 aa, Artificial Sequence
  Non-cyclic GFR-binding peptide
  MOD_RES (3)..(4)..(38): Xaa is C or S
  MOD_RES (18)..(19)..(20)..(21)..(22): Xaa is A or G
  MOD_RES (23)..(24)..(25)..(26): Xaa is A or G or absent
KPXXAPTKLRPVQVRKIXXXXXXXXXKKATVNMVVRSX

SEQ ID NO: 30228 - protein, 41 aa, Artificial Sequence
  Non-cyclic GFR-binding peptide
  MOD_RES (5)..(6)..(39)..(41): Xaa is C or S
  MOD_RES (20)..(21)..(22)..(23)..(24): Xaa is A or G
  MOD_RES (25)..(26)..(27)..(28): Xaa is A or G or absent
SASPXXVSQDLRSVKIAKVXXXXXXXXXKEVQVMIVKSXKX

SEQ ID NO: 30229 - protein, 34 aa, Artificial Sequence
  Non-cyclic GFR-binding peptide
  MOD_RES (1)..(2): Xaa is C or S
  MOD_RES (16)..(17)..(18)..(19)..(20): Xaa is A or G
  MOD_RES (21)..(22)..(23)..(24): Xaa is A or G or absent
XXVPTELRSVKMAKVXXXXXXXXXKEVQVEMVVE

SEQ ID NO: 30230 - protein, 36 aa, Artificial Sequence
  Non-cyclic GFR-binding peptide
  MOD_RES (4)..(5): Xaa is C or S
PKPXXAPTQLRPVQVRKIDDSSNVIKKATVNMVVRA

SEQ ID NO: 30231 - protein, 39 aa, Artificial Sequence
  Non-cyclic GFR-binding peptide
  MOD_RES (37)..(39): Xaa is C or S
  MOD_RES (16)..(17)..(18)..(19)..(20): Xaa is A or G
  MOD_RES (21)..(22)..(23)..(24): Xaa is A or G or absent
RPTQVQLEPLTVLYYXXXXXXXXXEQLSNTLEDHLAXKX

SEQ ID NO: 30232 - protein, 33 aa, Artificial Sequence
  Non-cyclic GFR-binding peptide
  MOD_RES (33)..(33): Xaa is C or S
  MOD_RES (14)..(15)..(16)..(17)..(18): Xaa is A or G
  MOD_RES (19)..(20)..(21)..(22): Xaa is A or G or absent
VPQALRPVQIRKIXXXXXXXXXKKATVMIVRSX

SEQ ID NO: 30233 - protein, 38 aa, Artificial Sequence
  Non-cyclic GFR-binding peptide
  MOD_RES (2)..(2): Xaa is C or S
KXQPSRVHHEPLPVVYYEYVRKKPKLEQLSNRLEEHLE

SEQ ID NO: 30234 - protein, 39 aa, Artificial Sequence
  Non-cyclic GFR-binding peptide
  MOD_RES (2)..(3)..(36)..(38): Xaa is C or S
  MOD_RES (17)..(18)..(19)..(20)..(21): Xaa is A or G
  MOD_RES (22)..(23)..(24)..(25): Xaa is A or G or absent
PXXVPQDLRPVQIRKIXXXXXXXXXKKATVMVVKSXKXS

SEQ ID NO: 30235 - protein, 37 aa, Artificial Sequence
  Non-cyclic GFR-binding peptide
  MOD_RES (3)..(4)..(37): Xaa is C or S
  MOD_RES (18)..(19)..(20)..(21)..(22): Xaa is A or G
  MOD_RES (23)..(24)..(25)..(26): Xaa is A or G or absent
SPXXVSQDLRSVKIAKVXXXXXXXXXKEVQVMIVKSX

SEQ ID NO: 30236 - protein, 38 aa, Artificial Sequence
  Non-cyclic GFR-binding peptide
  MOD_RES (3)..(4)..(36)..(38): Xaa is C or S
KAXXVPTELSNITMQIMDENEKVVIGEMSDMVVEGXGX

SEQ ID NO: 30237 - protein, 34 aa, Artificial Sequence
  Non-cyclic GFR-binding peptide
  MOD_RES (2)..(2): Xaa is C or S
  MOD_RES (16)..(17)..(18)..(19)..(20): Xaa is A or G
  MOD_RES (21)..(22)..(23)..(24): Xaa is A or G or absent
EXVPTEEEPLPMVYYXXXXXXXXXEQLSNFLQHN

SEQ ID NO: 30238 - protein, 39 aa, Artificial Sequence
  Non-cyclic GFR-binding peptide
  MOD_RES (5)..(6)..(38): Xaa is C or S
IPKAXXVPTELRPVQMRKIDEYDKVVKKATVEMVVEGXG

SEQ ID NO: 30239 - protein, 34 aa, Artificial Sequence
  Non-cyclic GFR-binding peptide
  MOD_RES (3)..(4): Xaa is C or S
KAXXVPTELSNITMQIMDENEKVVIGEMSDMVVE

SEQ ID NO: 30240 - protein, 36 aa, Artificial Sequence
  Non-cyclic GFR-binding peptide
  MOD_RES (2)..(3)..(34)..(36): Xaa is C or S
PXXVSQDLRSVKIAKVIGKTPKIKEVQVMIVKSXKX

SEQ ID NO: 30241 - protein, 42 aa, Artificial Sequence
  Non-cyclic GFR-binding peptide
  MOD_RES (5)..(6)..(39)..(41): Xaa is C or S
  MOD_RES (20)..(21)..(22)..(23)..(24): Xaa is A or G
  MOD_RES (25)..(26)..(27)..(28): Xaa is A or G or absent
SASPXXVSQDLRSVKIAKVXXXXXXXXXKEVQVMIVKSXKXS

SEQ ID NO: 30242 - protein, 44 aa, Artificial Sequence
  Non-cyclic GFR-binding peptide
  MOD_RES (7)..(41)..(43): Xaa is C or S
NDEGLEXVPTEEEPLTMLYYRIKPHQGQHEQLSNFLQHNKXEXR

SEQ ID NO: 30243 - protein, 40 aa, Artificial Sequence
  Non-cyclic GFR-binding peptide
  MOD_RES (1)..(38)..(40): Xaa is C or S
  MOD_RES (17)..(18)..(19)..(20)..(21): Xaa is A or G
  MOD_RES (22)..(23)..(24)..(25): Xaa is A or G or absent
XQPSRVHHEPLTVLYYXXXXXXXXXEQLSNRLEEHLEXAX

SEQ ID NO: 30244 - protein, 40 aa, Artificial Sequence
  Non-cyclic GFR-binding peptide
  MOD_RES (5)..(39): Xaa is C or S
  MOD_RES (19)..(20)..(21)..(22)..(23): Xaa is A or G
  MOD_RES (24)..(25)..(26)..(27): Xaa is A or G or absent
EGLEXVPTEEEPLPMVYYXXXXXXXXXEQLSNFLQHNKXE

SEQ ID NO: 30245 - protein, 39 aa, Artificial Sequence
  Non-cyclic GFR-binding peptide
  MOD_RES (1)..(2)..(36)..(38): Xaa is C or S
  MOD_RES (16)..(17)..(18)..(19)..(20): Xaa is A or G
  MOD_RES (21)..(22)..(23)..(24): Xaa is A or G or absent
XXVPTELRSVKMAKVXXXXXXXXXKEVQVEMVVEGXGXR

SEQ ID NO: 30246 - protein, 36 aa, Artificial Sequence
  Non-cyclic GFR-binding peptide
  MOD_RES (2)..(3)..(34)..(36): Xaa is C or S
PXXVPQALRSVKIAKVVGRKPKVKEVQVMIVRSXKX

SEQ ID NO: 30247 - protein, 36 aa, Artificial Sequence
  Non-cyclic GFR-binding peptide
  MOD_RES (1)..(33)..(35): Xaa is C or S
XVPTELSNITMQIMDEYDKVVIGEMSEMVVEGXGXR

SEQ ID NO: 30248 - protein, 42 aa, Artificial Sequence
  Non-cyclic GFR-binding peptide
  MOD_RES (4)..(5)..(39)..(41): Xaa is C or S
  MOD_RES (19)..(20)..(21)..(22)..(23): Xaa is A or G
  MOD_RES (24)..(25)..(26)..(27): Xaa is A or G or absent
PKAXXVPTELRSVKMAKVXXXXXXXXXKEVQVDMVVEGXGXR

SEQ ID NO: 30249 - protein, 38 aa, Artificial Sequence
  Non-cyclic GFR-binding peptide
  MOD_RES (6)..(7): Xaa is C or S
TVPKPXXAPTQLRSVKVAKVDDSSNVIKEVQVNMVVRA

SEQ ID NO: 30250 - protein, 39 aa, Artificial Sequence
  Non-cyclic GFR-binding peptide
  MOD_RES (2)..(39): Xaa is C or S
  MOD_RES (18)..(19)..(20)..(21)..(22): Xaa is A or G
  MOD_RES (23)..(24)..(25)..(26): Xaa is A or G or absent
KXQPSRVHHEPLPVVYYXXXXXXXXXEQLSNRLEEHLEX

SEQ ID NO: 30251 - protein, 35 aa, Artificial Sequence
  Non-cyclic GFR-binding peptide
  MOD_RES (1)..(35): Xaa is C or S
  MOD_RES (15)..(16)..(17)..(18)..(19): Xaa is A or G
  MOD_RES (20)..(21)..(22)..(23): Xaa is A or G or absent
XAPTKLSNITVQIMXXXXXXXXXIGEMSNMVVRSX

SEQ ID NO: 30252 - protein, 34 aa, Artificial Sequence
  Non-cyclic GFR-binding peptide
  MOD_RES (3)..(3): Xaa is C or S
PTXAPTKLRPVQVRKIDDSSNVIKKATVNMVVRS

SEQ ID NO: 30253 - protein, 36 aa, Artificial Sequence
  Non-cyclic GFR-binding peptide
  MOD_RES (2)..(3): Xaa is C or S
  MOD_RES (17)..(18)..(19)..(20)..(21): Xaa is A or G
  MOD_RES (22)..(23)..(24)..(25): Xaa is A or G or absent
PXXAPTQLRPVQVRKIXXXXXXXXXKKATVNMVVRA

SEQ ID NO: 30254 - protein, 31 aa, Artificial Sequence
  Non-cyclic GFR-binding peptide
  MOD_RES (1)..(1): Xaa is C or S
XAPTQLRSVKVAKVDDSSNVIKEVQVNMVVR

SEQ ID NO: 30255 - protein, 32 aa, Artificial Sequence
  Non-cyclic GFR-binding peptide
  MOD_RES (1)..(2): Xaa is C or S
XXAPTKLSNITVQIMDDSSNVIIGEMSNMVVR

SEQ ID NO: 30256 - protein, 38 aa, Artificial Sequence
  Non-cyclic GFR-binding peptide
  MOD_RES (2)..(2): Xaa is C or S
  MOD_RES (18)..(19)..(20)..(21)..(22): Xaa is A or G
  MOD_RES (23)..(24)..(25)..(26): Xaa is A or G or absent
QXRPTQVQLEPLPVVYYXXXXXXXXXEQLSNTLEDHLA

SEQ ID NO: 30257 - protein, 36 aa, Artificial Sequence
  Non-cyclic GFR-binding peptide
  MOD_RES (4)..(5): Xaa is C or S
PKPXXAPTKLSNITVQIMDDSSNVIIGEMSNMVVRS

SEQ ID NO: 30258 - protein, 38 aa, Artificial Sequence
  Non-cyclic GFR-binding peptide
  MOD_RES (1)..(2)..(35)..(37): Xaa is C or S
  MOD_RES (16)..(17)..(18)..(19)..(20): Xaa is A or G
  MOD_RES (21)..(22)..(23)..(24): Xaa is A or G or absent
XXVPQDLRPVQIRKIXXXXXXXXXKKATVMVVKSXKXS

SEQ ID NO: 30259 - protein, 32 aa, Artificial Sequence
  Non-cyclic GFR-binding peptide
  MOD_RES (14)..(15)..(16)..(17)..(18): Xaa is A or G
  MOD_RES (19)..(20)..(21)..(22): Xaa is A or G or absent
VPTELSNITMQIMXXXXXXXXXIGEMSDMVVE

SEQ ID NO: 30260 - protein, 34 aa, Artificial Sequence
  Non-cyclic GFR-binding peptide
PTQVQLEPLPVVYYEIVRKKPIFEQLSNTLEDHL

SEQ ID NO: 30261 - protein, 37 aa, Artificial Sequence
  Non-cyclic GFR-binding peptide
  MOD_RES (1)..(2)..(34)..(36): Xaa is C or S
XXVPTELRPVQMRKIDENEKVVKKATVDMVVEGXGXR

SEQ ID NO: 30262 - protein, 33 aa, Artificial Sequence
  Non-cyclic GFR-binding peptide
  MOD_RES (2)..(3): Xaa is C or S
PXXVSQDLSNITIQIMIGKTPKIIGEMSMIVKS

SEQ ID NO: 30263 - protein, 34 aa, Artificial Sequence
  Non-cyclic GFR-binding peptide
  MOD_RES (1)..(2)..(34): Xaa is C or S
XXVPTELRPVQMRKIDENEKVVKKATVDMVVEGX

SEQ ID NO: 30264 - protein, 39 aa, Artificial Sequence
  Non-cyclic GFR-binding peptide
  MOD_RES (1)..(2)..(36)..(38): Xaa is C or S
  MOD_RES (16)..(17)..(18)..(19)..(20): Xaa is A or G
  MOD_RES (21)..(22)..(23)..(24): Xaa is A or G or absent
XXVPTELSNITMQIMXXXXXXXXXIGEMSDMVVEGXGXR

SEQ ID NO: 30265 - protein, 39 aa, Artificial Sequence
  Non-cyclic GFR-binding peptide
  MOD_RES (4)..(5)..(39): Xaa is C or S
  MOD_RES (19)..(20)..(21)..(22)..(23): Xaa is A or G
  MOD_RES (24)..(25)..(26)..(27): Xaa is A or G or absent
PKPXXAPTKLRSVKVAKVXXXXXXXXXKEVQVNMVVRSX

SEQ ID NO: 30266 - protein, 39 aa, Artificial Sequence
  Non-cyclic GFR-binding peptide
  MOD_RES (6)..(7)..(38): Xaa is C or S
ASAAPXXVPQALSNITIQIMVGRKPKVIGEMSMIVRSXK

SEQ ID NO: 30267 - protein, 35 aa, Artificial Sequence
  Non-cyclic GFR-binding peptide
  MOD_RES (1)..(2): Xaa is C or S
  MOD_RES (16)..(17)..(18)..(19)..(20): Xaa is A or G
  MOD_RES (21)..(22)..(23)..(24): Xaa is A or G or absent
XXAPTQLRPVQVRKIXXXXXXXXXKKATVNMVVRA

SEQ ID NO: 30268 - protein, 39 aa, Artificial Sequence
  Non-cyclic GFR-binding peptide
  MOD_RES (4)..(5)..(37)..(39): Xaa is C or S
PKAXXVPTELSNITMQIMDENEKVVIGEMSDMVVEGXGX

SEQ ID NO: 30269 - protein, 42 aa, Artificial Sequence
  Non-cyclic GFR-binding peptide
  MOD_RES (6)..(40)..(42): Xaa is C or S
DEGLEXVPTEEEPLTMLYYRIKPHQGQHEQLSNFLQHNKXEX

SEQ ID NO: 30270 - protein, 39 aa, Artificial Sequence
  Non-cyclic GFR-binding peptide
  MOD_RES (3)..(4)..(38): Xaa is C or S
  MOD_RES (18)..(19)..(20)..(21)..(22): Xaa is A or G
  MOD_RES (23)..(24)..(25)..(26): Xaa is A or G or absent
KAXXVPTELRSVKMAKVXXXXXXXXXKEVQVEMVVEGXG

SEQ ID NO: 30271 - protein, 36 aa, Artificial Sequence
  Non-cyclic GFR-binding peptide
  MOD_RES (3)..(4): Xaa is C or S
  MOD_RES (18)..(19)..(20)..(21)..(22): Xaa is A or G
  MOD_RES (23)..(24)..(25)..(26): Xaa is A or G or absent
KPXXAPTKLRSVKVAKVXXXXXXXXXKEVQVNMVVR

SEQ ID NO: 30272 - protein, 38 aa, Artificial Sequence
  Non-cyclic GFR-binding peptide
  MOD_RES (2)..(3)..(35)..(37): Xaa is C or S
PXXAPTQLRSVKVAKVDDSSNVIKEVQVNMVVRAXGXH

SEQ ID NO: 30273 - protein, 34 aa, Artificial Sequence
  Non-cyclic GFR-binding peptide
  MOD_RES (1)..(2): Xaa is C or S
  MOD_RES (16)..(17)..(18)..(19)..(20): Xaa is A or G
  MOD_RES (21)..(22)..(23)..(24): Xaa is A or G or absent
XXAPTKLSNITVQIMXXXXXXXXXIGEMSNMVVR

SEQ ID NO: 30274 - protein, 36 aa, Artificial Sequence
  Non-cyclic GFR-binding peptide
  MOD_RES (34)..(36): Xaa is C or S
  MOD_RES (14)..(15)..(16)..(17)..(18): Xaa is A or G
  MOD_RES (19)..(20)..(21)..(22): Xaa is A or G or absent
APTQLRSVKVAKVXXXXXXXXXKEVQVNMVVRAXGX

SEQ ID NO: 30275 - protein, 38 aa, Artificial Sequence
  Non-cyclic GFR-binding peptide
  MOD_RES (2)..(3)..(37): Xaa is C or S
  MOD_RES (17)..(18)..(19)..(20)..(21): Xaa is A or G
  MOD_RES (22)..(23)..(24)..(25): Xaa is A or G or absent
AXXVPTELRSVKMAKVXXXXXXXXXKEVQVDMVVEGXG

SEQ ID NO: 30276 - protein, 31 aa, Artificial Sequence
  Non-cyclic GFR-binding peptide
  MOD_RES (31)..(31): Xaa is C or S
VPQDLSNITIQIMVGRTPKVIGEMSMVVKSX

SEQ ID NO: 30277 - protein, 42 aa, Artificial Sequence
  Non-cyclic GFR-binding peptide
  MOD_RES (5)..(6)..(40)..(42): Xaa is C or S
  MOD_RES (20)..(21)..(22)..(23)..(24): Xaa is A or G
  MOD_RES (25)..(26)..(27)..(28): Xaa is A or G or absent
IPKAXXVPTELRSVKMAKVXXXXXXXXXKEVQVEMVVEGXGX

SEQ ID NO: 30278 - protein, 35 aa, Artificial Sequence
  Non-cyclic GFR-binding peptide
  MOD_RES (1)..(33)..(35): Xaa is C or S
XVPTELSNITMQIMDEYDKVVIGEMSEMVVEGXGX

SEQ ID NO: 30279 - protein, 40 aa, Artificial Sequence
  Non-cyclic GFR-binding peptide
  MOD_RES (2)..(39): Xaa is C or S
KXQPSRVHHEPLPVVYYEYVRKKPKLEQLSNRLEEHLEXA

SEQ ID NO: 30280 - protein, 37 aa, Artificial Sequence
  Non-cyclic GFR-binding peptide
  MOD_RES (1)..(34)..(36): Xaa is C or S
  MOD_RES (15)..(16)..(17)..(18)..(19): Xaa is A or G
  MOD_RES (20)..(21)..(22)..(23): Xaa is A or G or absent
XVSQDLRPVQIRKIXXXXXXXXXKKATVMIVKSXKXS

SEQ ID NO: 30281 - protein, 41 aa, Artificial Sequence
  Non-cyclic GFR-binding peptide
  MOD_RES (6)..(7)..(38)..(40): Xaa is C or S
ASAAPXXVPQALRPVQIRKIVGRKPKVKKATVMIVRSXKXS

SEQ ID NO: 30282 - protein, 41 aa, Artificial Sequence
  Non-cyclic GFR-binding peptide
  MOD_RES (7)..(41): Xaa is C or S
  MOD_RES (21)..(22)..(23)..(24)..(25): Xaa is A or G
  MOD_RES (26)..(27)..(28)..(29): Xaa is A or G or absent
HVTKPTXAPTKLRSVKVAKVXXXXXXXXXKEVQVNMVVRSX

SEQ ID NO: 30283 - protein, 34 aa, Artificial Sequence
  Non-cyclic GFR-binding peptide
  MOD_RES (1)..(34): Xaa is C or S
  MOD_RES (15)..(16)..(17)..(18)..(19): Xaa is A or G
  MOD_RES (20)..(21)..(22)..(23): Xaa is A or G or absent
XVPQDLRSVKIAKVXXXXXXXXXKEVQVMVVKSX

SEQ ID NO: 30284 - protein, 37 aa, Artificial Sequence
  Non-cyclic GFR-binding peptide
  MOD_RES (2)..(2): Xaa is C or S
  MOD_RES (18)..(19)..(20)..(21)..(22): Xaa is A or G
  MOD_RES (23)..(24)..(25)..(26): Xaa is A or G or absent
QXRPTQVQLEPLPVVYYXXXXXXXXXEQLSNTLEDHL

SEQ ID NO: 30285 - protein, 36 aa, Artificial Sequence
  Non-cyclic GFR-binding peptide
  MOD_RES (4)..(5)..(36): Xaa is C or S
ASPXXVSQDLSNITIQIMIGKTPKIIGEMSMIVKSX

SEQ ID NO: 30286 - protein, 39 aa, Artificial Sequence
  Non-cyclic GFR-binding peptide
  MOD_RES (4)..(5)..(36)..(38): Xaa is C or S
ASPXXVPQDLSNITIQIMVGRTPKVIGEMSMVVKSXKXS

SEQ ID NO: 30287 - protein, 40 aa, Artificial Sequence
  Non-cyclic GFR-binding peptide
  MOD_RES (6)..(7)..(40): Xaa is C or S
  MOD_RES (21)..(22)..(23)..(24)..(25): Xaa is A or G
  MOD_RES (26)..(27)..(28)..(29): Xaa is A or G or absent
ASASPXXVPQDLRPVQIRKIXXXXXXXXXKKATVMVVKSX

SEQ ID NO: 30288 - protein, 36 aa, Artificial Sequence
  Non-cyclic GFR-binding peptide
  MOD_RES (2)..(3)..(35): Xaa is C or S
PXXAPTKLSNITVQIMDDSSNVIIGEMSNMVVRSXG

SEQ ID NO: 30289 - protein, 32 aa, Artificial Sequence
  Non-cyclic GFR-binding peptide
  MOD_RES (1)..(1): Xaa is C or S
XVPTELRSVKMAKVDENEKVVKEVQVDMVVEG

SEQ ID NO: 30290 - protein, 40 aa, Artificial Sequence
  Non-cyclic GFR-binding peptide
  MOD_RES (2)..(3)..(37)..(39): Xaa is C or S
  MOD_RES (17)..(18)..(19)..(20)..(21): Xaa is A or G
  MOD_RES (22)..(23)..(24)..(25): Xaa is A or G or absent
AXXVPTELSNITMQIMXXXXXXXXXIGEMSEMVVEGXGXR

SEQ ID NO: 30291 - protein, 41 aa, Artificial Sequence
  Non-cyclic GFR-binding peptide
  MOD_RES (6)..(7)..(41): Xaa is C or S
  MOD_RES (21)..(22)..(23)..(24)..(25): Xaa is A or G
  MOD_RES (26)..(27)..(28)..(29): Xaa is A or G or absent
TVPKPXXAPTQLRSVKVAKVXXXXXXXXXKEVQVNMVVRAX

SEQ ID NO: 30292 - protein, 37 aa, Artificial Sequence
  Non-cyclic GFR-binding peptide
  MOD_RES (3)..(3): Xaa is C or S
  MOD_RES (19)..(20)..(21)..(22)..(23): Xaa is A or G
  MOD_RES (24)..(25)..(26)..(27): Xaa is A or G or absent
VQXRPTQVQLEPLTVLYYXXXXXXXXXEQLSNTLEDH

SEQ ID NO: 30293 - protein, 39 aa, Artificial Sequence
  Non-cyclic GFR-binding peptide
  MOD_RES (2)..(3)..(36)..(38): Xaa is C or S
  MOD_RES (17)..(18)..(19)..(20)..(21): Xaa is A or G
  MOD_RES (22)..(23)..(24)..(25): Xaa is A or G or absent
PXXVPQDLRSVKIAKVXXXXXXXXXKEVQVMVVKSXKXS

SEQ ID NO: 30294 - protein, 42 aa, Artificial Sequence
  Non-cyclic GFR-binding peptide
  MOD_RES (3)..(40)..(42): Xaa is C or S
  MOD_RES (19)..(20)..(21)..(22)..(23): Xaa is A or G
  MOD_RES (24)..(25)..(26)..(27): Xaa is A or G or absent
VKXQPSRVHHEPLTVLYYXXXXXXXXXEQLSNRLEEHLEXAX

SEQ ID NO: 30295 - protein, 35 aa, Artificial Sequence
  Non-cyclic GFR-binding peptide
  MOD_RES (1)..(32)..(34): Xaa is C or S
XVSQDLRPVQIRKIIGKTPKIKKATVMIVKSXKXS

SEQ ID NO: 30296 - protein, 38 aa, Artificial Sequence
  Non-cyclic GFR-binding peptide
  MOD_RES (5)..(6): Xaa is C or S
  MOD_RES (20)..(21)..(22)..(23)..(24): Xaa is A or G
  MOD_RES (25)..(26)..(27)..(28): Xaa is A or G or absent
SAAPXXVPQALRPVQIRKIXXXXXXXXXKKATVMIVRS

SEQ ID NO: 30297 - protein, 35 aa, Artificial Sequence
  Non-cyclic GFR-binding peptide
  MOD_RES (2)..(3): Xaa is C or S
  MOD_RES (17)..(18)..(19)..(20)..(21): Xaa is A or G
  MOD_RES (22)..(23)..(24)..(25): Xaa is A or G or absent
PXXAPTKLRSVKVAKVXXXXXXXXXKEVQVNMVVR

SEQ ID NO: 30298 - protein, 36 aa, Artificial Sequence
  Non-cyclic GFR-binding peptide
  MOD_RES (1)..(35): Xaa is C or S
  MOD_RES (15)..(16)..(17)..(18)..(19): Xaa is A or G
  MOD_RES (20)..(21)..(22)..(23): Xaa is A or G or absent
XVPTELRPVQMRKIXXXXXXXXXKKATVEMVVEGXG

SEQ ID NO: 30299 - protein, 43 aa, Artificial Sequence
  Non-cyclic GFR-binding peptide
  MOD_RES (5)..(42): Xaa is C or S
  MOD_RES (21)..(22)..(23)..(24)..(25): Xaa is A or G
  MOD_RES (26)..(27)..(28)..(29): Xaa is A or G or absent
RNVQXRPTQVQLEPLTVLYYXXXXXXXXXEQLSNTLEDHLAXK

SEQ ID NO: 30300 - protein, 33 aa, Artificial Sequence
  Non-cyclic GFR-binding peptide
  MOD_RES (1)..(1): Xaa is C or S
  MOD_RES (15)..(16)..(17)..(18)..(19): Xaa is A or G
  MOD_RES (20)..(21)..(22)..(23): Xaa is A or G or absent
XVPTELRPVQMRKIXXXXXXXXXKKATVDMVVE

SEQ ID NO: 30301 - protein, 36 aa, Artificial Sequence
  Non-cyclic GFR-binding peptide
  MOD_RES (1)..(34)..(36): Xaa is C or S
  MOD_RES (15)..(16)..(17)..(18)..(19): Xaa is A or G
  MOD_RES (20)..(21)..(22)..(23): Xaa is A or G or absent
XVPQDLRSVKIAKVXXXXXXXXXKEVQVMVVKSXKX

SEQ ID NO: 30302 - protein, 42 aa, Artificial Sequence
  Non-cyclic GFR-binding peptide
  MOD_RES (6)..(7)..(39)..(41): Xaa is C or S
YVPKPXXAPTKLSNITVQIMDDSSNVIIGEMSNMVVRSXGXH

SEQ ID NO: 30303 - protein, 34 aa, Artificial Sequence
  Non-cyclic GFR-binding peptide
  MOD_RES (31)..(33): Xaa is C or S
VPQDLRPVQIRKIVGRTPKVKKATVMVVKSXKXS

SEQ ID NO: 30304 - protein, 37 aa, Artificial Sequence
  Non-cyclic GFR-binding peptide
  MOD_RES (2)..(3)..(34)..(36): Xaa is C or S
PXXVSQDLSNITIQIMIGKTPKIIGEMSMIVKSXKXS

SEQ ID NO: 30305 - protein, 36 aa, Artificial Sequence
  Non-cyclic GFR-binding peptide
  MOD_RES (5)..(6): Xaa is C or S
IPKAXXVPTELSNITMQIMDEYDKVVIGEMSEMVVE

SEQ ID NO: 30306 - protein, 41 aa, Artificial Sequence
  Non-cyclic GFR-binding peptide
  MOD_RES (5)..(6)..(40): Xaa is C or S
  MOD_RES (20)..(21)..(22)..(23)..(24): Xaa is A or G
  MOD_RES (25)..(26)..(27)..(28): Xaa is A or G or absent
VPKPXXAPTQLRSVKVAKVXXXXXXXXXKEVQVNMVVRAXG

SEQ ID NO: 30307 - protein, 31 aa, Artificial Sequence
  Non-cyclic GFR-binding peptide
  MOD_RES (31)..(31): Xaa is C or S
VPQDLRSVKIAKVVGRTPKVKEVQVMVVKSX

SEQ ID NO: 30308 - protein, 39 aa, Artificial Sequence
  Non-cyclic GFR-binding peptide
  MOD_RES (2)..(39): Xaa is C or S
QXRPTQVQLEPLTVLYYEIVRKKPIFEQLSNTLEDHLAX

SEQ ID NO: 30309 - protein, 38 aa, Artificial Sequence
  Non-cyclic GFR-binding peptide
  MOD_RES (3)..(35)..(37): Xaa is C or S
PTXAPTKLRPVQVRKIDDSSNVIKKATVNMVVRSXGXH

SEQ ID NO: 30310 - protein, 35 aa, Artificial Sequence
  Non-cyclic GFR-binding peptide
  MOD_RES (2)..(3): Xaa is C or S
  MOD_RES (17)..(18)..(19)..(20)..(21): Xaa is A or G
  MOD_RES (22)..(23)..(24)..(25): Xaa is A or G or absent
PXXVPQDLSNITIQIMXXXXXXXXXIGEMSMVVKS

SEQ ID NO: 30311 - protein, 35 aa, Artificial Sequence
  Non-cyclic GFR-binding peptide
  MOD_RES (3)..(3): Xaa is C or S
  MOD_RES (17)..(18)..(19)..(20)..(21): Xaa is A or G
  MOD_RES (22)..(23)..(24)..(25): Xaa is A or G or absent
PTXAPTKLSNITVQIMXXXXXXXXXIGEMSNMVVR

SEQ ID NO: 30312 - protein, 39 aa, Artificial Sequence
  Non-cyclic GFR-binding peptide
  MOD_RES (5)..(5): Xaa is C or S
SSVKXQPSRVHHEPLPVVYYEYVRKKPKLEQLSNRLEEH

SEQ ID NO: 30313 - protein, 39 aa, Artificial Sequence
  Non-cyclic GFR-binding peptide
  MOD_RES (4)..(4): Xaa is C or S
NVQXRPTQVQLEPLTVLYYEIVRKKPIFEQLSNTLEDHL

SEQ ID NO: 30314 - protein, 33 aa, Artificial Sequence
  Non-cyclic GFR-binding peptide
  MOD_RES (31)..(33): Xaa is C or S
VSQDLRSVKIAKVIGKTPKIKEVQVMIVKSXKX

SEQ ID NO: 30315 - protein, 37 aa, Artificial Sequence
  Non-cyclic GFR-binding peptide
  MOD_RES (1)..(2)..(34)..(36): Xaa is C or S
XXAPTKLRSVKVAKVDDSSNVIKEVQVNMVVRSXGXH

SEQ ID NO: 30316 - protein, 37 aa, Artificial Sequence
  Non-cyclic GFR-binding peptide
  MOD_RES (3)..(4): Xaa is C or S
  MOD_RES (18)..(19)..(20)..(21)..(22): Xaa is A or G
  MOD_RES (23)..(24)..(25)..(26): Xaa is A or G or absent
KPXXAPTQLSNITVQIMXXXXXXXXXIGEMSNMVVRA

SEQ ID NO: 30317 - protein, 37 aa, Artificial Sequence
  Non-cyclic GFR-binding peptide
  MOD_RES (2)..(3)..(35)..(37): Xaa is C or S
PXXAPTKLSNITVQIMDDSSNVIIGEMSNMVVRSXGX

SEQ ID NO: 30318 - protein, 34 aa, Artificial Sequence
  Non-cyclic GFR-binding peptide
  MOD_RES (34)..(34): Xaa is C or S
  MOD_RES (14)..(15)..(16)..(17)..(18): Xaa is A or G
  MOD_RES (19)..(20)..(21)..(22): Xaa is A or G or absent
VPTEEEPLPMVYYXXXXXXXXXEQLSNFLQHNKX

SEQ ID NO: 30319 - protein, 35 aa, Artificial Sequence
  Non-cyclic GFR-binding peptide
  MOD_RES (1)..(34): Xaa is C or S
  MOD_RES (15)..(16)..(17)..(18)..(19): Xaa is A or G
  MOD_RES (20)..(21)..(22)..(23): Xaa is A or G or absent
XVPQDLSNITIQIMXXXXXXXXXIGEMSMVVKSXK

SEQ ID NO: 30320 - protein, 33 aa, Artificial Sequence
  Non-cyclic GFR-binding peptide
  MOD_RES (1)..(2): Xaa is C or S
XXAPTQLSNITVQIMDDSSNVIIGEMSNMVVRA

SEQ ID NO: 30321 - protein, 35 aa, Artificial Sequence
  Non-cyclic GFR-binding peptide
  MOD_RES (4)..(5): Xaa is C or S
PKAXXVPTELRPVQMRKIDEYDKVVKKATVEMVVE

SEQ ID NO: 30322 - protein, 44 aa, Artificial Sequence
  Non-cyclic GFR-binding peptide
  MOD_RES (4)..(41)..(43): Xaa is C or S
  MOD_RES (20)..(21)..(22)..(23)..(24): Xaa is A or G
  MOD_RES (25)..(26)..(27)..(28): Xaa is A or G or absent
SVKXQPSRVHHEPLTVLYYXXXXXXXXXEQLSNRLEEHLEXAXA

SEQ ID NO: 30323 - protein, 37 aa, Artificial Sequence
  Non-cyclic GFR-binding peptide
  MOD_RES (5)..(6): Xaa is C or S
IPKAXXVPTELRPVQMRKIDEYDKVVKKATVEMVVEG

SEQ ID NO: 30324 - protein, 39 aa, Artificial Sequence
  Non-cyclic GFR-binding peptide
  MOD_RES (6)..(7): Xaa is C or S
  MOD_RES (21)..(22)..(23)..(24)..(25): Xaa is A or G
  MOD_RES (26)..(27)..(28)..(29): Xaa is A or G or absent
ASASPXXVPQDLSNITIQIMXXXXXXXXXIGEMSMVVKS

SEQ ID NO: 30325 - protein, 42 aa, Artificial Sequence
  Non-cyclic GFR-binding peptide
  MOD_RES (5)..(6)..(39)..(41): Xaa is C or S
  MOD_RES (20)..(21)..(22)..(23)..(24): Xaa is A or G
  MOD_RES (25)..(26)..(27)..(28): Xaa is A or G or absent
SASPXXVPQDLRSVKIAKVXXXXXXXXXKEVQVMVVKSXKXS

SEQ ID NO: 30326 - protein, 31 aa, Artificial Sequence
  Non-cyclic GFR-binding peptide
VPTELRSVKMAKVDENEKVVKEVQVDMVVEG

SEQ ID NO: 30327 - protein, 39 aa, Artificial Sequence
  Non-cyclic GFR-binding peptide
  MOD_RES (3)..(4)..(36)..(38): Xaa is C or S
KPXXAPTQLRSVKVAKVDDSSNVIKEVQVNMVVRAXGXH

SEQ ID NO: 30328 - protein, 38 aa, Artificial Sequence
  Non-cyclic GFR-binding peptide
  MOD_RES (36)..(38): Xaa is C or S
  MOD_RES (15)..(16)..(17)..(18)..(19): Xaa is A or G
  MOD_RES (20)..(21)..(22)..(23): Xaa is A or G or absent
PSRVHHEPLTVLYYXXXXXXXXXEQLSNRLEEHLEXAX

SEQ ID NO: 30329 - protein, 35 aa, Artificial Sequence
  Non-cyclic GFR-binding peptide
  MOD_RES (3)..(3): Xaa is C or S
  MOD_RES (17)..(18)..(19)..(20)..(21): Xaa is A or G
  MOD_RES (22)..(23)..(24)..(25): Xaa is A or G or absent
LEXVPTEEEPLPMVYYXXXXXXXXXEQLSNFLQHN

SEQ ID NO: 30330 - protein, 37 aa, Artificial Sequence
  Non-cyclic GFR-binding peptide
  MOD_RES (3)..(4): Xaa is C or S
  MOD_RES (18)..(19)..(20)..(21)..(22): Xaa is A or G
  MOD_RES (23)..(24)..(25)..(26): Xaa is A or G or absent
KAXXVPTELRPVQMRKIXXXXXXXXXKKATVDMVVEG

SEQ ID NO: 30331 - protein, 42 aa, Artificial Sequence
  Non-cyclic GFR-binding peptide
  MOD_RES (5)..(6)..(39)..(41): Xaa is C or S
  MOD_RES (20)..(21)..(22)..(23)..(24): Xaa is A or G
  MOD_RES (25)..(26)..(27)..(28): Xaa is A or G or absent
SASPXXVSQDLSNITIQIMXXXXXXXXXIGEMSMIVKSXKXS

SEQ ID NO: 30332 - protein, 35 aa, Artificial Sequence
  Non-cyclic GFR-binding peptide
  MOD_RES (1)..(2): Xaa is C or S
  MOD_RES (16)..(17)..(18)..(19)..(20): Xaa is A or G
  MOD_RES (21)..(22)..(23)..(24): Xaa is A or G or absent
XXVPTELRSVKMAKVXXXXXXXXXKEVQVDMVVEG

SEQ ID NO: 30333 - protein, 41 aa, Artificial Sequence
  Non-cyclic GFR-binding peptide
  MOD_RES (5)..(39)..(41): Xaa is C or S
EGLEXVPTEEEPLPMVYYRIKPHQGQHEQLSNFLQHNKXEX

SEQ ID NO: 30334 - protein, 36 aa, Artificial Sequence
  Non-cyclic GFR-binding peptide
  MOD_RES (2)..(3)..(34)..(36): Xaa is C or S
PXXVSQDLSNITIQIMIGKTPKIIGEMSMIVKSXKX

SEQ ID NO: 30335 - protein, 41 aa, Artificial Sequence
  Non-cyclic GFR-binding peptide
  MOD_RES (4)..(41): Xaa is C or S
  MOD_RES (20)..(21)..(22)..(23)..(24): Xaa is A or G
  MOD_RES (25)..(26)..(27)..(28): Xaa is A or G or absent
NVQXRPTQVQLEPLTVLYYXXXXXXXXXEQLSNTLEDHLAX

SEQ ID NO: 30336 - protein, 33 aa, Artificial Sequence
  Non-cyclic GFR-binding peptide
  MOD_RES (2)..(3): Xaa is C or S
PXXVPQALSNITIQIMVGRKPKVIGEMSMIVRS

SEQ ID NO: 30337 - protein, 41 aa, Artificial Sequence
  Non-cyclic GFR-binding peptide
  MOD_RES (7)..(41): Xaa is C or S
NDEGLEXVPTEEEPLTMLYYRIKPHQGQHEQLSNFLQHNKX

SEQ ID NO: 30338 - protein, 35 aa, Artificial Sequence
  Non-cyclic GFR-binding peptide
  MOD_RES (1)..(33)..(35): Xaa is C or S
XAPTQLSNITVQIMDDSSNVIIGEMSNMVVRAXGX

SEQ ID NO: 30339 - protein, 33 aa, Artificial Sequence
  Non-cyclic GFR-binding peptide
  MOD_RES (33)..(33): Xaa is C or S
  MOD_RES (14)..(15)..(16)..(17)..(18): Xaa is A or G
  MOD_RES (19)..(20)..(21)..(22): Xaa is A or G or absent
VSQDLRSVKIAKVXXXXXXXXXKEVQVMIVKSX

SEQ ID NO: 30340 - protein, 41 aa, Artificial Sequence
  Non-cyclic GFR-binding peptide
  MOD_RES (5)..(6)..(39)..(41): Xaa is C or S
  MOD_RES (20)..(21)..(22)..(23)..(24): Xaa is A or G
  MOD_RES (25)..(26)..(27)..(28): Xaa is A or G or absent
SASPXXVPQDLSNITIQIMXXXXXXXXXIGEMSMVVKSXKX

SEQ ID NO: 30341 - protein, 39 aa, Artificial Sequence
  Non-cyclic GFR-binding peptide
  MOD_RES (6)..(6): Xaa is C or S
  MOD_RES (20)..(21)..(22)..(23)..(24): Xaa is A or G
  MOD_RES (25)..(26)..(27)..(28): Xaa is A or G or absent
VTKPTXAPTKLRSVKVAKVXXXXXXXXXKEVQVNMVVRS

SEQ ID NO: 30342 - protein, 32 aa, Artificial Sequence
  Non-cyclic GFR-binding peptide
  MOD_RES (1)..(2): Xaa is C or S
XXAPTKLRPVQVRKIDDSSNVIKKATVNMVVR

SEQ ID NO: 30343 - protein, 31 aa, Artificial Sequence
  Non-cyclic GFR-binding peptide
VPTELRSVKMAKVDEYDKVVKEVQVEMVVEG

SEQ ID NO: 30344 - protein, 42 aa, Artificial Sequence
  Non-cyclic GFR-binding peptide
  MOD_RES (5)..(6)..(40)..(42): Xaa is C or S
  MOD_RES (20)..(21)..(22)..(23)..(24): Xaa is A or G
  MOD_RES (25)..(26)..(27)..(28): Xaa is A or G or absent
IPKAXXVPTELRPVQMRKIXXXXXXXXXKKATVEMVVEGXGX

SEQ ID NO: 30345 - protein, 33 aa, Artificial Sequence
  Non-cyclic GFR-binding peptide
VPTEEEPLPMVYYRIKPHQGQHEQLSNFLQHNK

SEQ ID NO: 30346 - protein, 37 aa, Artificial Sequence
  Non-cyclic GFR-binding peptide
  MOD_RES (1)..(34)..(36): Xaa is C or S
  MOD_RES (15)..(16)..(17)..(18)..(19): Xaa is A or G
  MOD_RES (20)..(21)..(22)..(23): Xaa is A or G or absent
XVPQALRSVKIAKVXXXXXXXXXKEVQVMIVRSXKXS

SEQ ID NO: 30347 - protein, 39 aa, Artificial Sequence
  Non-cyclic GFR-binding peptide
  MOD_RES (4)..(5)..(39): Xaa is C or S
  MOD_RES (19)..(20)..(21)..(22)..(23): Xaa is A or G
  MOD_RES (24)..(25)..(26)..(27): Xaa is A or G or absent
PKAXXVPTELRPVQMRKIXXXXXXXXXKKATVEMVVEGX

SEQ ID NO: 30348 - protein, 37 aa, Artificial Sequence
  Non-cyclic GFR-binding peptide
  MOD_RES (6)..(7): Xaa is C or S
ASASPXXVPQDLSNITIQIMVGRTPKVIGEMSMVVKS

SEQ ID NO: 30349 - protein, 34 aa, Artificial Sequence
  Non-cyclic GFR-binding peptide
  MOD_RES (34)..(34): Xaa is C or S
VPTEEEPLPMVYYRIKPHQGQHEQLSNFLQHNKX

SEQ ID NO: 30350 - protein, 35 aa, Artificial Sequence
  Non-cyclic GFR-binding peptide
RPTQVQLEPLTVLYYEIVRKKPIFEQLSNTLEDHL

SEQ ID NO: 30351 - protein, 34 aa, Artificial Sequence
  Non-cyclic GFR-binding peptide
  MOD_RES (1)..(1): Xaa is C or S
  MOD_RES (15)..(16)..(17)..(18)..(19): Xaa is A or G
  MOD_RES (20)..(21)..(22)..(23): Xaa is A or G or absent
XVPTELRPVQMRKIXXXXXXXXXKKATVEMVVEG

SEQ ID NO: 30352 - protein, 38 aa, Artificial Sequence
  Non-cyclic GFR-binding peptide
  MOD_RES (4)..(5): Xaa is C or S
  MOD_RES (19)..(20)..(21)..(22)..(23): Xaa is A or G
  MOD_RES (24)..(25)..(26)..(27): Xaa is A or G or absent
PKAXXVPTELRSVKMAKVXXXXXXXXXKEVQVDMVVEG

SEQ ID NO: 30353 - protein, 40 aa, Artificial Sequence
  Non-cyclic GFR-binding peptide
  MOD_RES (4)..(38)..(40): Xaa is C or S
GLEXVPTEEEPLPMVYYRIKPHQGQHEQLSNFLQHNKXEX

SEQ ID NO: 30354 - protein, 38 aa, Artificial Sequence
  Non-cyclic GFR-binding peptide
  MOD_RES (1)..(2)..(35)..(37): Xaa is C or S
  MOD_RES (16)..(17)..(18)..(19)..(20): Xaa is A or G
  MOD_RES (21)..(22)..(23)..(24): Xaa is A or G or absent
XXVPQDLRSVKIAKVXXXXXXXXXKEVQVMVVKSXKXS

SEQ ID NO: 30355 - protein, 36 aa, Artificial Sequence
  Non-cyclic GFR-binding peptide
  MOD_RES (2)..(3): Xaa is C or S
  MOD_RES (17)..(18)..(19)..(20)..(21): Xaa is A or G
  MOD_RES (22)..(23)..(24)..(25): Xaa is A or G or absent
AXXVPTELSNITMQIMXXXXXXXXXIGEMSDMVVEG

SEQ ID NO: 30356 - protein, 32 aa, Artificial Sequence
  Non-cyclic GFR-binding peptide
  MOD_RES (31)..(31): Xaa is C or S
VPQALRSVKIAKVVGRKPKVKEVQVMIVRSXK

SEQ ID NO: 30357 - protein, 41 aa, Artificial Sequence
  Non-cyclic GFR-binding peptide
  MOD_RES (6)..(7)..(40): Xaa is C or S
  MOD_RES (21)..(22)..(23)..(24)..(25): Xaa is A or G
  MOD_RES (26)..(27)..(28)..(29): Xaa is A or G or absent
ASASPXXVPQDLSNITIQIMXXXXXXXXXIGEMSMVVKSXK

SEQ ID NO: 30358 - protein, 36 aa, Artificial Sequence
  Non-cyclic GFR-binding peptide
  MOD_RES (1)..(2)..(35): Xaa is C or S
  MOD_RES (16)..(17)..(18)..(19)..(20): Xaa is A or G
  MOD_RES (21)..(22)..(23)..(24): Xaa is A or G or absent
XXVSQDLSNITIQIMXXXXXXXXXIGEMSMIVKSXK

SEQ ID NO: 30359 - protein, 41 aa, Artificial Sequence
  Non-cyclic GFR-binding peptide
  MOD_RES (4)..(38)..(40): Xaa is C or S
  MOD_RES (18)..(19)..(20)..(21)..(22): Xaa is A or G
  MOD_RES (23)..(24)..(25)..(26): Xaa is A or G or absent
KPTXAPTKLRPVQVRKIXXXXXXXXXKKATVNMVVRSXGXH

SEQ ID NO: 30360 - protein, 37 aa, Artificial Sequence
  Non-cyclic GFR-binding peptide
  MOD_RES (2)..(2): Xaa is C or S
KXQPSRVHHEPLPVVYYEYVRKKPKLEQLSNRLEEHL

SEQ ID NO: 30361 - protein, 37 aa, Artificial Sequence
  Non-cyclic GFR-binding peptide
  MOD_RES (6)..(7): Xaa is C or S
ASAAPXXVPQALRPVQIRKIVGRKPKVKKATVMIVRS

SEQ ID NO: 30362 - protein, 40 aa, Artificial Sequence
  Non-cyclic GFR-binding peptide
  MOD_RES (6)..(7)..(39): Xaa is C or S
TVPKPXXAPTQLSNITVQIMDDSSNVIIGEMSNMVVRAXG

SEQ ID NO: 30363 - protein, 36 aa, Artificial Sequence
  Non-cyclic GFR-binding peptide
  MOD_RES (5)..(6): Xaa is C or S
SASPXXVPQDLRPVQIRKIVGRTPKVKKATVMVVKS

SEQ ID NO: 30364 - protein, 34 aa, Artificial Sequence
  Non-cyclic GFR-binding peptide
  MOD_RES (2)..(3)..(34): Xaa is C or S
PXXVPQALRPVQIRKIVGRKPKVKKATVMIVRSX

SEQ ID NO: 30365 - protein, 34 aa, Artificial Sequence
  Non-cyclic GFR-binding peptide
  MOD_RES (1)..(32)..(34): Xaa is C or S
XVPQDLRSVKIAKVVGRTPKVKEVQVMVVKSXKX

SEQ ID NO: 30366 - protein, 37 aa, Artificial Sequence
  Non-cyclic GFR-binding peptide
  MOD_RES (3)..(4)..(36): Xaa is C or S
KAXXVPTELSNITMQIMDEYDKVVIGEMSEMVVEGXG

SEQ ID NO: 30367 - protein, 33 aa, Artificial Sequence
  Non-cyclic GFR-binding peptide
  MOD_RES (1)..(1): Xaa is C or S
  MOD_RES (15)..(16)..(17)..(18)..(19): Xaa is A or G
  MOD_RES (20)..(21)..(22)..(23): Xaa is A or G or absent
XVPTELRSVKMAKVXXXXXXXXXKEVQVDMVVE

SEQ ID NO: 30368 - protein, 39 aa, Artificial Sequence
  Non-cyclic GFR-binding peptide
  MOD_RES (7)..(39): Xaa is C or S
HVTKPTXAPTKLSNITVQIMDDSSNVIIGEMSNMVVRSX

SEQ ID NO: 30369 - protein, 37 aa, Artificial Sequence
  Non-cyclic GFR-binding peptide
  MOD_RES (36)..(36): Xaa is C or S
  MOD_RES (15)..(16)..(17)..(18)..(19): Xaa is A or G
  MOD_RES (20)..(21)..(22)..(23): Xaa is A or G or absent
PTQVQLEPLPVVYYXXXXXXXXXEQLSNTLEDHLAXK

SEQ ID NO: 30370 - protein, 31 aa, Artificial Sequence
  Non-cyclic GFR-binding peptide
APTKLRSVKVAKVDDSSNVIKEVQVNMVVRS

SEQ ID NO: 30371 - protein, 40 aa, Artificial Sequence
  Non-cyclic GFR-binding peptide
  MOD_RES (37)..(39): Xaa is C or S
  MOD_RES (16)..(17)..(18)..(19)..(20): Xaa is A or G
  MOD_RES (21)..(22)..(23)..(24): Xaa is A or G or absent
RPTQVQLEPLTVLYYXXXXXXXXXEQLSNTLEDHLAXKXE

SEQ ID NO: 30372 - protein, 38 aa, Artificial Sequence
  Non-cyclic GFR-binding peptide
  MOD_RES (5)..(5): Xaa is C or S
  MOD_RES (19)..(20)..(21)..(22)..(23): Xaa is A or G
  MOD_RES (24)..(25)..(26)..(27): Xaa is A or G or absent
EGLEXVPTEEEPLTMLYYXXXXXXXXXEQLSNFLQHNK

SEQ ID NO: 30373 - protein, 38 aa, Artificial Sequence
  Non-cyclic GFR-binding peptide
  MOD_RES (5)..(6)..(37): Xaa is C or S
SASPXXVPQDLRPVQIRKIVGRTPKVKKATVMVVKSXK

SEQ ID NO: 30374 - protein, 39 aa, Artificial Sequence
  Non-cyclic GFR-binding peptide
  MOD_RES (1)..(38): Xaa is C or S
XRPTQVQLEPLPVVYYEIVRKKPIFEQLSNTLEDHLAXK

SEQ ID NO: 30375 - protein, 44 aa, Artificial Sequence
  Non-cyclic GFR-binding peptide
  MOD_RES (6)..(7)..(41)..(43): Xaa is C or S
  MOD_RES (21)..(22)..(23)..(24)..(25): Xaa is A or G
  MOD_RES (26)..(27)..(28)..(29): Xaa is A or G or absent
YVPKPXXAPTKLRSVKVAKVXXXXXXXXXKEVQVNMVVRSXGXH

SEQ ID NO: 30376 - protein, 38 aa, Artificial Sequence
  Non-cyclic GFR-binding peptide
  MOD_RES (5)..(6)..(37): Xaa is C or S
SASPXXVSQDLRPVQIRKIIGKTPKIKKATVMIVKSXK

SEQ ID NO: 30377 - protein, 34 aa, Artificial Sequence
  Non-cyclic GFR-binding peptide
  MOD_RES (33)..(33): Xaa is C or S
  MOD_RES (14)..(15)..(16)..(17)..(18): Xaa is A or G
  MOD_RES (19)..(20)..(21)..(22): Xaa is A or G or absent
VPQDLSNITIQIMXXXXXXXXXIGEMSMVVKSXK

SEQ ID NO: 30378 - protein, 38 aa, Artificial Sequence
  Non-cyclic GFR-binding peptide
  MOD_RES (35)..(37): Xaa is C or S
  MOD_RES (14)..(15)..(16)..(17)..(18): Xaa is A or G
  MOD_RES (19)..(20)..(21)..(22): Xaa is A or G or absent
SRVHHEPLTVLYYXXXXXXXXXEQLSNRLEEHLEXAXA

SEQ ID NO: 30379 - protein, 39 aa, Artificial Sequence
  Non-cyclic GFR-binding peptide
  MOD_RES (5)..(6)..(37)..(39): Xaa is C or S
SAAPXXVPQALSNITIQIMVGRKPKVIGEMSMIVRSXKX

SEQ ID NO: 30380 - protein, 39 aa, Artificial Sequence
  Non-cyclic GFR-binding peptide
  MOD_RES (5)..(6): Xaa is C or S
  MOD_RES (20)..(21)..(22)..(23)..(24): Xaa is A or G
  MOD_RES (25)..(26)..(27)..(28): Xaa is A or G or absent
VPKPXXAPTQLSNITVQIMXXXXXXXXXIGEMSNMVVRA

SEQ ID NO: 30381 - protein, 39 aa, Artificial Sequence
  Non-cyclic GFR-binding peptide
  MOD_RES (3)..(3): Xaa is C or S
  MOD_RES (19)..(20)..(21)..(22)..(23): Xaa is A or G
  MOD_RES (24)..(25)..(26)..(27): Xaa is A or G or absent
VKXQPSRVHHEPLTVLYYXXXXXXXXXEQLSNRLEEHLE

SEQ ID NO: 30382 - protein, 34 aa, Artificial Sequence
  Non-cyclic GFR-binding peptide
SRVHHEPLPVVYYEYVRKKPKLEQLSNRLEEHLE

SEQ ID NO: 30383 - protein, 42 aa, Artificial Sequence
  Non-cyclic GFR-binding peptide
  MOD_RES (6)..(7)..(39)..(41): Xaa is C or S
YVPKPXXAPTKLRPVQVRKIDDSSNVIKKATVNMVVRSXGXH

SEQ ID NO: 30384 - protein, 38 aa, Artificial Sequence
  Non-cyclic GFR-binding peptide
  MOD_RES (5)..(6)..(38): Xaa is C or S
VPKPXXAPTKLSNITVQIMDDSSNVIIGEMSNMVVRSX

SEQ ID NO: 30385 - protein, 39 aa, Artificial Sequence
  Non-cyclic GFR-binding peptide
  MOD_RES (5)..(6)..(38): Xaa is C or S
IPKAXXVPTELRSVKMAKVDEYDKVVKEVQVEMVVEGXG

SEQ ID NO: 30386 - protein, 36 aa, Artificial Sequence
  Non-cyclic GFR-binding peptide
  MOD_RES (5)..(6): Xaa is C or S
SAAPXXVPQALRPVQIRKIVGRKPKVKKATVMIVRS

SEQ ID NO: 30387 - protein, 38 aa, Artificial Sequence
  Non-cyclic GFR-binding peptide
  MOD_RES (4)..(5)..(37): Xaa is C or S
PKAXXVPTELSNITMQIMDEYDKVVIGEMSEMVVEGXG

SEQ ID NO: 30388 - protein, 37 aa, Artificial Sequence
  Non-cyclic GFR-binding peptide
  MOD_RES (5)..(6)..(37): Xaa is C or S
SAAPXXVPQALRPVQIRKIVGRKPKVKKATVMIVRSX

SEQ ID NO: 30389 - protein, 36 aa, Artificial Sequence
  Non-cyclic GFR-binding peptide
  MOD_RES (2)..(3)..(35): Xaa is C or S
AXXVPTELSNITMQIMDENEKVVIGEMSDMVVEGXG

SEQ ID NO: 30390 - protein, 35 aa, Artificial Sequence
  Non-cyclic GFR-binding peptide
  MOD_RES (3)..(3): Xaa is C or S
LEXVPTEEEPLTMLYYRIKPHQGQHEQLSNFLQHN

SEQ ID NO: 30391 - protein, 39 aa, Artificial Sequence
  Non-cyclic GFR-binding peptide
  MOD_RES (6)..(7)..(39): Xaa is C or S
KIPKAXXVPTELRPVQMRKIDENEKVVKKATVDMVVEGX

SEQ ID NO: 30392 - protein, 39 aa, Artificial Sequence
  Non-cyclic GFR-binding peptide
  MOD_RES (2)..(36)..(38): Xaa is C or S
  MOD_RES (16)..(17)..(18)..(19)..(20): Xaa is A or G
  MOD_RES (21)..(22)..(23)..(24): Xaa is A or G or absent
TXAPTKLSNITVQIMXXXXXXXXXIGEMSNMVVRSXGXH

SEQ ID NO: 30393 - protein, 35 aa, Artificial Sequence
  Non-cyclic GFR-binding peptide
  MOD_RES (32)..(34): Xaa is C or S
VPTELRSVKMAKVDEYDKVVKEVQVEMVVEGXGXR

SEQ ID NO: 30394 - protein, 35 aa, Artificial Sequence
  Non-cyclic GFR-binding peptide
  MOD_RES (1)..(1): Xaa is C or S
  MOD_RES (17)..(18)..(19)..(20)..(21): Xaa is A or G
  MOD_RES (22)..(23)..(24)..(25): Xaa is A or G or absent
XRPTQVQLEPLPVVYYXXXXXXXXXEQLSNTLEDH

SEQ ID NO: 30395 - protein, 38 aa, Artificial Sequence
  Non-cyclic GFR-binding peptide
  MOD_RES (6)..(7): Xaa is C or S
YVPKPXXAPTKLSNITVQIMDDSSNVIIGEMSNMVVRS

SEQ ID NO: 30396 - protein, 38 aa, Artificial Sequence
  Non-cyclic GFR-binding peptide
  MOD_RES (4)..(36)..(38): Xaa is C or S
KPTXAPTKLRPVQVRKIDDSSNVIKKATVNMVVRSXGX

SEQ ID NO: 30397 - protein, 33 aa, Artificial Sequence
  Non-cyclic GFR-binding peptide
  MOD_RES (32)..(32): Xaa is C or S
VPTELRSVKMAKVDEYDKVVKEVQVEMVVEGXG

SEQ ID NO: 30398 - protein, 41 aa, Artificial Sequence
  Non-cyclic GFR-binding peptide
  MOD_RES (5)..(5): Xaa is C or S
  MOD_RES (21)..(22)..(23)..(24)..(25): Xaa is A or G
  MOD_RES (26)..(27)..(28)..(29): Xaa is A or G or absent
SSVKXQPSRVHHEPLPVVYYXXXXXXXXXEQLSNRLEEHLE

SEQ ID NO: 30399 - protein, 38 aa, Artificial Sequence
  Non-cyclic GFR-binding peptide
  MOD_RES (4)..(38): Xaa is C or S
  MOD_RES (18)..(19)..(20)..(21)..(22): Xaa is A or G
  MOD_RES (23)..(24)..(25)..(26): Xaa is A or G or absent
KPTXAPTKLRPVQVRKIXXXXXXXXXKKATVNMVVRSX

SEQ ID NO: 30400 - protein, 37 aa, Artificial Sequence
  Non-cyclic GFR-binding peptide
  MOD_RES (1)..(2)..(34)..(36): Xaa is C or S
XXAPTKLSNITVQIMDDSSNVIIGEMSNMVVRSXGXH

SEQ ID NO: 30401 - protein, 35 aa, Artificial Sequence
  Non-cyclic GFR-binding peptide
  MOD_RES (1)..(33)..(35): Xaa is C or S
XAPTKLRPVQVRKIDDSSNVIKKATVNMVVRSXGX

SEQ ID NO: 30402 - protein, 44 aa, Artificial Sequence
  Non-cyclic GFR-binding peptide
  MOD_RES (6)..(7)..(41)..(43): Xaa is C or S
  MOD_RES (21)..(22)..(23)..(24)..(25): Xaa is A or G
  MOD_RES (26)..(27)..(28)..(29): Xaa is A or G or absent
YVPKPXXAPTKLSNITVQIMXXXXXXXXXIGEMSNMVVRSXGXH

SEQ ID NO: 30403 - protein, 42 aa, Artificial Sequence
  Non-cyclic GFR-binding peptide
  MOD_RES (4)..(5)..(39)..(41): Xaa is C or S
  MOD_RES (19)..(20)..(21)..(22)..(23): Xaa is A or G
  MOD_RES (24)..(25)..(26)..(27): Xaa is A or G or absent
PKAXXVPTELRSVKMAKVXXXXXXXXXKEVQVEMVVEGXGXR

SEQ ID NO: 30404 - protein, 37 aa, Artificial Sequence
  Non-cyclic GFR-binding peptide
  MOD_RES (4)..(5)..(36): Xaa is C or S
ASPXXVSQDLRSVKIAKVIGKTPKIKEVQVMIVKSXK

SEQ ID NO: 30405 - protein, 36 aa, Artificial Sequence
  Non-cyclic GFR-binding peptide
  MOD_RES (1)..(2)..(35): Xaa is C or S
  MOD_RES (16)..(17)..(18)..(19)..(20): Xaa is A or G
  MOD_RES (21)..(22)..(23)..(24): Xaa is A or G or absent
XXVPQDLSNITIQIMXXXXXXXXXIGEMSMVVKSXK

SEQ ID NO: 30406 - protein, 36 aa, Artificial Sequence
  Non-cyclic GFR-binding peptide
  MOD_RES (33)..(35): Xaa is C or S
  MOD_RES (14)..(15)..(16)..(17)..(18): Xaa is A or G
  MOD_RES (19)..(20)..(21)..(22): Xaa is A or G or absent
VPQDLRSVKIAKVXXXXXXXXXKEVQVMVVKSXKXS

SEQ ID NO: 30407 - protein, 38 aa, Artificial Sequence
  Non-cyclic GFR-binding peptide
  MOD_RES (7)..(7): Xaa is C or S
HVTKPTXAPTKLSNITVQIMDDSSNVIIGEMSNMVVRS

SEQ ID NO: 30408 - protein, 42 aa, Artificial Sequence
  Non-cyclic GFR-binding peptide
  MOD_RES (2)..(39)..(41): Xaa is C or S
QXRPTQVQLEPLTVLYYEIVRKKPIFEQLSNTLEDHLAXKXE

SEQ ID NO: 30409 - protein, 39 aa, Artificial Sequence
  Non-cyclic GFR-binding peptide
  MOD_RES (5)..(6)..(39): Xaa is C or S
  MOD_RES (20)..(21)..(22)..(23)..(24): Xaa is A or G
  MOD_RES (25)..(26)..(27)..(28): Xaa is A or G or absent
SASPXXVPQDLSNITIQIMXXXXXXXXXIGEMSMVVKSX

SEQ ID NO: 30410 - protein, 35 aa, Artificial Sequence
  Non-cyclic GFR-binding peptide
  MOD_RES (2)..(3)..(34): Xaa is C or S
PXXVPQALSNITIQIMVGRKPKVIGEMSMIVRSXK

SEQ ID NO: 30411 - protein, 40 aa, Artificial Sequence
  Non-cyclic GFR-binding peptide
  MOD_RES (5)..(6)..(39): Xaa is C or S
  MOD_RES (20)..(21)..(22)..(23)..(24): Xaa is A or G
  MOD_RES (25)..(26)..(27)..(28): Xaa is A or G or absent
SASPXXVSQDLRSVKIAKVXXXXXXXXXKEVQVMIVKSXK

SEQ ID NO: 30412 - protein, 42 aa, Artificial Sequence
  Non-cyclic GFR-binding peptide
  MOD_RES (6)..(40)..(42): Xaa is C or S
DEGLEXVPTEEEPLPMVYYRIKPHQGQHEQLSNFLQHNKXEX

SEQ ID NO: 30413 - protein, 45 aa, Artificial Sequence
  Non-cyclic GFR-binding peptide
  MOD_RES (5)..(42)..(44): Xaa is C or S
RNVQXRPTQVQLEPLTVLYYEIVRKKPIFEQLSNTLEDHLAXKXE

SEQ ID NO: 30414 - protein, 31 aa, Artificial Sequence
  Non-cyclic GFR-binding peptide
  MOD_RES (1)..(1): Xaa is C or S
XAPTQLRPVQVRKIDDSSNVIKKATVNMVVR

SEQ ID NO: 30415 - protein, 32 aa, Artificial Sequence
  Non-cyclic GFR-binding peptide
  MOD_RES (1)..(2): Xaa is C or S
XXVPQALSNITIQIMVGRKPKVIGEMSMIVRS

SEQ ID NO: 30416 - protein, 40 aa, Artificial Sequence
  Non-cyclic GFR-binding peptide
  MOD_RES (3)..(40): Xaa is C or S
  MOD_RES (19)..(20)..(21)..(22)..(23): Xaa is A or G
  MOD_RES (24)..(25)..(26)..(27): Xaa is A or G or absent
VKXQPSRVHHEPLTVLYYXXXXXXXXXEQLSNRLEEHLEX

SEQ ID NO: 30417 - protein, 35 aa, Artificial Sequence
  Non-cyclic GFR-binding peptide
  MOD_RES (32)..(34): Xaa is C or S
APTQLRPVQVRKIDDSSNVIKKATVNMVVRAXGXH

SEQ ID NO: 30418 - protein, 38 aa, Artificial Sequence
  Non-cyclic GFR-binding peptide
  MOD_RES (4)..(5): Xaa is C or S
  MOD_RES (19)..(20)..(21)..(22)..(23): Xaa is A or G
  MOD_RES (24)..(25)..(26)..(27): Xaa is A or G or absent
PKPXXAPTQLRPVQVRKIXXXXXXXXXKKATVNMVVRA

SEQ ID NO: 30419 - protein, 35 aa, Artificial Sequence
  Non-cyclic GFR-binding peptide
  MOD_RES (4)..(5): Xaa is C or S
ASPXXVPQDLRSVKIAKVVGRTPKVKEVQVMVVKS

SEQ ID NO: 30420 - protein, 35 aa, Artificial Sequence
  Non-cyclic GFR-binding peptide
PSRVHHEPLPVVYYEYVRKKPKLEQLSNRLEEHLE

SEQ ID NO: 30421 - protein, 33 aa, Artificial Sequence
  Non-cyclic GFR-binding peptide
  MOD_RES (14)..(15)..(16)..(17)..(18): Xaa is A or G
  MOD_RES (19)..(20)..(21)..(22): Xaa is A or G or absent
VPTELRSVKMAKVXXXXXXXXXKEVQVDMVVEG

SEQ ID NO: 30422 - protein, 38 aa, Artificial Sequence
  Non-cyclic GFR-binding peptide
  MOD_RES (4)..(5): Xaa is C or S
  MOD_RES (19)..(20)..(21)..(22)..(23): Xaa is A or G
  MOD_RES (24)..(25)..(26)..(27): Xaa is A or G or absent
PKAXXVPTELSNITMQIMXXXXXXXXXIGEMSDMVVEG

SEQ ID NO: 30423 - protein, 38 aa, Artificial Sequence
  Non-cyclic GFR-binding peptide
  MOD_RES (5)..(6): Xaa is C or S
  MOD_RES (20)..(21)..(22)..(23)..(24): Xaa is A or G
  MOD_RES (25)..(26)..(27)..(28): Xaa is A or G or absent
SASPXXVPQDLRSVKIAKVXXXXXXXXXKEVQVMVVKS

SEQ ID NO: 30424 - protein, 44 aa, Artificial Sequence
  Non-cyclic GFR-binding peptide
  MOD_RES (6)..(7)..(41)..(43): Xaa is C or S
  MOD_RES (21)..(22)..(23)..(24)..(25): Xaa is A or G
  MOD_RES (26)..(27)..(28)..(29): Xaa is A or G or absent
TVPKPXXAPTQLRSVKVAKVXXXXXXXXXKEVQVNMVVRAXGXH

SEQ ID NO: 30425 - protein, 41 aa, Artificial Sequence
  Non-cyclic GFR-binding peptide
  MOD_RES (6)..(7)..(38)..(40): Xaa is C or S
ASASPXXVPQDLRPVQIRKIVGRTPKVKKATVMVVKSXKXS

SEQ ID NO: 30426 - protein, 38 aa, Artificial Sequence
  Non-cyclic GFR-binding peptide
  MOD_RES (6)..(7): Xaa is C or S
SIPKAXXVPTELSNITMQIMDEYDKVVIGEMSEMVVEG

SEQ ID NO: 30427 - protein, 40 aa, Artificial Sequence
  Non-cyclic GFR-binding peptide
  MOD_RES (5)..(6)..(40): Xaa is C or S
  MOD_RES (20)..(21)..(22)..(23)..(24): Xaa is A or G
  MOD_RES (25)..(26)..(27)..(28): Xaa is A or G or absent
VPKPXXAPTQLRPVQVRKIXXXXXXXXXKKATVNMVVRAX

SEQ ID NO: 30428 - protein, 35 aa, Artificial Sequence
  Non-cyclic GFR-binding peptide
  MOD_RES (2)..(3)..(35): Xaa is C or S
AXXVPTELRSVKMAKVDEYDKVVKEVQVEMVVEGX

SEQ ID NO: 30429 - protein, 41 aa, Artificial Sequence
  Non-cyclic GFR-binding peptide
  MOD_RES (7)..(39)..(41): Xaa is C or S
HVTKPTXAPTKLRSVKVAKVDDSSNVIKEVQVNMVVRSXGX

SEQ ID NO: 30430 - protein, 31 aa, Artificial Sequence
  Non-cyclic GFR-binding peptide
  MOD_RES (1)..(1): Xaa is C or S
XVSQDLSNITIQIMIGKTPKIIGEMSMIVKS

SEQ ID NO: 30431 - protein, 34 aa, Artificial Sequence
  Non-cyclic GFR-binding peptide
  MOD_RES (1)..(1): Xaa is C or S
  MOD_RES (15)..(16)..(17)..(18)..(19): Xaa is A or G
  MOD_RES (20)..(21)..(22)..(23): Xaa is A or G or absent
XAPTQLRSVKVAKVXXXXXXXXXKEVQVNMVVRA

SEQ ID NO: 30432 - protein, 39 aa, Artificial Sequence
  Non-cyclic GFR-binding peptide
  MOD_RES (6)..(7)..(38): Xaa is C or S
ASAAPXXVPQALRSVKIAKVVGRKPKVKEVQVMIVRSXK

SEQ ID NO: 30433 - protein, 36 aa, Artificial Sequence
  Non-cyclic GFR-binding peptide
  MOD_RES (1)..(2)..(33)..(35): Xaa is C or S
XXVSQDLRSVKIAKVIGKTPKIKEVQVMIVKSXKXS

SEQ ID NO: 30434 - protein, 40 aa, Artificial Sequence
  Non-cyclic GFR-binding peptide
  MOD_RES (5)..(6)..(38)..(40): Xaa is C or S
VPKPXXAPTKLRSVKVAKVDDSSNVIKEVQVNMVVRSXGX

SEQ ID NO: 30435 - protein, 34 aa, Artificial Sequence
  Non-cyclic GFR-binding peptide
  MOD_RES (1)..(33): Xaa is C or S
XAPTKLRSVKVAKVDDSSNVIKEVQVNMVVRSXG

SEQ ID NO: 30436 - protein, 37 aa, Artificial Sequence
  Non-cyclic GFR-binding peptide
  MOD_RES (2)..(3)..(34)..(36): Xaa is C or S
PXXVPQALRSVKIAKVVGRKPKVKEVQVMIVRSXKXS

SEQ ID NO: 30437 - protein, 40 aa, Artificial Sequence
  Non-cyclic GFR-binding peptide
  MOD_RES (4)..(5)..(38)..(40): Xaa is C or S
  MOD_RES (19)..(20)..(21)..(22)..(23): Xaa is A or G
  MOD_RES (24)..(25)..(26)..(27): Xaa is A or G or absent
ASPXXVPQDLRSVKIAKVXXXXXXXXXKEVQVMVVKSXKX

SEQ ID NO: 30438 - protein, 36 aa, Artificial Sequence
  Non-cyclic GFR-binding peptide
  MOD_RES (5)..(6): Xaa is C or S
SASPXXVSQDLSNITIQIMIGKTPKIIGEMSMIVKS

SEQ ID NO: 30439 - protein, 37 aa, Artificial Sequence
  Non-cyclic GFR-binding peptide
  MOD_RES (6)..(7): Xaa is C or S
SIPKAXXVPTELRSVKMAKVDEYDKVVKEVQVEMVVE

SEQ ID NO: 30440 - protein, 33 aa, Artificial Sequence
  Non-cyclic GFR-binding peptide
  MOD_RES (14)..(15)..(16)..(17)..(18): Xaa is A or G
  MOD_RES (19)..(20)..(21)..(22): Xaa is A or G or absent
APTQLRPVQVRKIXXXXXXXXXKKATVNMVVRA

SEQ ID NO: 30441 - protein, 35 aa, Artificial Sequence
  Non-cyclic GFR-binding peptide
  MOD_RES (2)..(3): Xaa is C or S
  MOD_RES (17)..(18)..(19)..(20)..(21): Xaa is A or G
  MOD_RES (22)..(23)..(24)..(25): Xaa is A or G or absent
PXXVSQDLRSVKIAKVXXXXXXXXXKEVQVMIVKS

SEQ ID NO: 30442 - protein, 35 aa, Artificial Sequence
  Non-cyclic GFR-binding peptide
  MOD_RES (1)..(33)..(35): Xaa is C or S
XVPTELRSVKMAKVDEYDKVVKEVQVEMVVEGXGX

SEQ ID NO: 30443 - protein, 34 aa, Artificial Sequence
  Non-cyclic GFR-binding peptide
  MOD_RES (2)..(3): Xaa is C or S
AXXVPTELSNITMQIMDENEKVVIGEMSDMVVEG

SEQ ID NO: 30444 - protein, 38 aa, Artificial Sequence
  Non-cyclic GFR-binding peptide
  MOD_RES (5)..(6)..(38): Xaa is C or S
IPKAXXVPTELSNITMQIMDENEKVVIGEMSDMVVEGX

SEQ ID NO: 30445 - protein, 37 aa, Artificial Sequence
  Non-cyclic GFR-binding peptide
  MOD_RES (35)..(37): Xaa is C or S
TQVQLEPLPVVYYEIVRKKPIFEQLSNTLEDHLAXKX

SEQ ID NO: 30446 - protein, 36 aa, Artificial Sequence
  Non-cyclic GFR-binding peptide
  MOD_RES (1)..(35): Xaa is C or S
XVPTEEEPLTMLYYRIKPHQGQHEQLSNFLQHNKXE

SEQ ID NO: 30447 - protein, 32 aa, Artificial Sequence
  Non-cyclic GFR-binding peptide
  MOD_RES (1)..(1): Xaa is C or S
XVPTELRSVKMAKVDEYDKVVKEVQVEMVVEG

SEQ ID NO: 30448 - protein, 39 aa, Artificial Sequence
  Non-cyclic GFR-binding peptide
  MOD_RES (4)..(5)..(39): Xaa is C or S
  MOD_RES (19)..(20)..(21)..(22)..(23): Xaa is A or G
  MOD_RES (24)..(25)..(26)..(27): Xaa is A or G or absent
PKAXXVPTELRSVKMAKVXXXXXXXXXKEVQVDMVVEGX

SEQ ID NO: 30449 - protein, 36 aa, Artificial Sequence
  Non-cyclic GFR-binding peptide
  MOD_RES (2)..(3)..(34)..(36): Xaa is C or S
PXXVPQDLRSVKIAKVVGRTPKVKEVQVMVVKSXKX

SEQ ID NO: 30450 - protein, 34 aa, Artificial Sequence
  Non-cyclic GFR-binding peptide
  MOD_RES (32)..(34): Xaa is C or S
VPTELRPVQMRKIDEYDKVVKKATVEMVVEGXGX

SEQ ID NO: 30451 - protein, 38 aa, Artificial Sequence
  Non-cyclic GFR-binding peptide
  MOD_RES (2)..(3)..(37): Xaa is C or S
  MOD_RES (17)..(18)..(19)..(20)..(21): Xaa is A or G
  MOD_RES (22)..(23)..(24)..(25): Xaa is A or G or absent
PXXAPTKLSNITVQIMXXXXXXXXXIGEMSNMVVRSXG

SEQ ID NO: 30452 - protein, 33 aa, Artificial Sequence
  Non-cyclic GFR-binding peptide
  MOD_RES (1)..(33): Xaa is C or S
XAPTKLRSVKVAKVDDSSNVIKEVQVNMVVRSX

SEQ ID NO: 30453 - protein, 35 aa, Artificial Sequence
  Non-cyclic GFR-binding peptide
  MOD_RES (33)..(35): Xaa is C or S
  MOD_RES (14)..(15)..(16)..(17)..(18): Xaa is A or G
  MOD_RES (19)..(20)..(21)..(22): Xaa is A or G or absent
VPQDLRSVKIAKVXXXXXXXXXKEVQVMVVKSXKX

SEQ ID NO: 30454 - protein, 34 aa, Artificial Sequence
  Non-cyclic GFR-binding peptide
  MOD_RES (1)..(33): Xaa is C or S
XAPTQLRPVQVRKIDDSSNVIKKATVNMVVRAXG

SEQ ID NO: 30455 - protein, 35 aa, Artificial Sequence
  Non-cyclic GFR-binding peptide
  MOD_RES (2)..(3)..(35): Xaa is C or S
AXXVPTELRSVKMAKVDENEKVVKEVQVDMVVEGX

SEQ ID NO: 30456 - protein, 35 aa, Artificial Sequence
  Non-cyclic GFR-binding peptide
  MOD_RES (3)..(4)..(35): Xaa is C or S
SPXXVPQDLRPVQIRKIVGRTPKVKKATVMVVKSX

SEQ ID NO: 30457 - protein, 37 aa, Artificial Sequence
  Non-cyclic GFR-binding peptide
  MOD_RES (2)..(36): Xaa is C or S
  MOD_RES (16)..(17)..(18)..(19)..(20): Xaa is A or G
  MOD_RES (21)..(22)..(23)..(24): Xaa is A or G or absent
TXAPTKLRSVKVAKVXXXXXXXXXKEVQVNMVVRSXG

SEQ ID NO: 30458 - protein, 40 aa, Artificial Sequence
  Non-cyclic GFR-binding peptide
  MOD_RES (4)..(5)..(37)..(39): Xaa is C or S
PKPXXAPTKLRPVQVRKIDDSSNVIKKATVNMVVRSXGXH

SEQ ID NO: 30459 - protein, 39 aa, Artificial Sequence
  Non-cyclic GFR-binding peptide
  MOD_RES (2)..(3)..(36)..(38): Xaa is C or S
  MOD_RES (17)..(18)..(19)..(20)..(21): Xaa is A or G
  MOD_RES (22)..(23)..(24)..(25): Xaa is A or G or absent
PXXVSQDLRPVQIRKIXXXXXXXXXKKATVMIVKSXKXS

SEQ ID NO: 30460 - protein, 36 aa, Artificial Sequence
  Non-cyclic GFR-binding peptide
  MOD_RES (36)..(36): Xaa is C or S
PSRVHHEPLTVLYYEYVRKKPKLEQLSNRLEEHLEX

SEQ ID NO: 30461 - protein, 39 aa, Artificial Sequence
  Non-cyclic GFR-binding peptide
  MOD_RES (5)..(6)..(39): Xaa is C or S
  MOD_RES (20)..(21)..(22)..(23)..(24): Xaa is A or G
  MOD_RES (25)..(26)..(27)..(28): Xaa is A or G or absent
SAAPXXVPQALSNITIQIMXXXXXXXXXIGEMSMIVRSX

SEQ ID NO: 30462 - protein, 36 aa, Artificial Sequence
  Non-cyclic GFR-binding peptide
  MOD_RES (5)..(6): Xaa is C or S
IPKAXXVPTELRSVKMAKVDENEKVVKEVQVDMVVE

SEQ ID NO: 30463 - protein, 42 aa, Artificial Sequence
  Non-cyclic GFR-binding peptide
  MOD_RES (7)..(41): Xaa is C or S
NDEGLEXVPTEEEPLPMVYYRIKPHQGQHEQLSNFLQHNKXE

SEQ ID NO: 30464 - protein, 39 aa, Artificial Sequence
  Non-cyclic GFR-binding peptide
  MOD_RES (2)..(39): Xaa is C or S
KXQPSRVHHEPLTVLYYEYVRKKPKLEQLSNRLEEHLEX

SEQ ID NO: 30465 - protein, 38 aa, Artificial Sequence
  Non-cyclic GFR-binding peptide
  MOD_RES (2)..(3)..(36)..(38): Xaa is C or S
  MOD_RES (17)..(18)..(19)..(20)..(21): Xaa is A or G
  MOD_RES (22)..(23)..(24)..(25): Xaa is A or G or absent
PXXVPQALRPVQIRKIXXXXXXXXXKKATVMIVRSXKX

SEQ ID NO: 30466 - protein, 35 aa, Artificial Sequence
  Non-cyclic GFR-binding peptide
  MOD_RES (1)..(34): Xaa is C or S
  MOD_RES (15)..(16)..(17)..(18)..(19): Xaa is A or G
  MOD_RES (20)..(21)..(22)..(23): Xaa is A or G or absent
XVSQDLSNITIQIMXXXXXXXXXIGEMSMIVKSXK

SEQ ID NO: 30467 - protein, 39 aa, Artificial Sequence
  Non-cyclic GFR-binding peptide
  MOD_RES (6)..(7): Xaa is C or S
  MOD_RES (21)..(22)..(23)..(24)..(25): Xaa is A or G
  MOD_RES (26)..(27)..(28)..(29): Xaa is A or G or absent
ASASPXXVPQDLRSVKIAKVXXXXXXXXXKEVQVMVVKS

SEQ ID NO: 30468 - protein, 36 aa, Artificial Sequence
  Non-cyclic GFR-binding peptide
  MOD_RES (3)..(4)..(35): Xaa is C or S
APXXVPQALRSVKIAKVVGRKPKVKEVQVMIVRSXK

SEQ ID NO: 30469 - protein, 42 aa, Artificial Sequence
  Non-cyclic GFR-binding peptide
  MOD_RES (5)..(6)..(39)..(41): Xaa is C or S
  MOD_RES (20)..(21)..(22)..(23)..(24): Xaa is A or G
  MOD_RES (25)..(26)..(27)..(28): Xaa is A or G or absent
SASPXXVSQDLRPVQIRKIXXXXXXXXXKKATVMIVKSXKXS

SEQ ID NO: 30470 - protein, 39 aa, Artificial Sequence
  Non-cyclic GFR-binding peptide
  MOD_RES (6)..(7): Xaa is C or S
  MOD_RES (21)..(22)..(23)..(24)..(25): Xaa is A or G
  MOD_RES (26)..(27)..(28)..(29): Xaa is A or G or absent
SIPKAXXVPTELRPVQMRKIXXXXXXXXXKKATVEMVVE

SEQ ID NO: 30471 - protein, 34 aa, Artificial Sequence
  Non-cyclic GFR-binding peptide
  MOD_RES (2)..(3): Xaa is C or S
PXXAPTQLSNITVQIMDDSSNVIIGEMSNMVVRA

SEQ ID NO: 30472 - protein, 37 aa, Artificial Sequence
  Non-cyclic GFR-binding peptide
  MOD_RES (37)..(37): Xaa is C or S
  MOD_RES (16)..(17)..(18)..(19)..(20): Xaa is A or G
  MOD_RES (21)..(22)..(23)..(24): Xaa is A or G or absent
RPTQVQLEPLPVVYYXXXXXXXXXEQLSNTLEDHLAX

SEQ ID NO: 30473 - protein, 41 aa, Artificial Sequence
  Non-cyclic GFR-binding peptide
  MOD_RES (3)..(40): Xaa is C or S
  MOD_RES (19)..(20)..(21)..(22)..(23): Xaa is A or G
  MOD_RES (24)..(25)..(26)..(27): Xaa is A or G or absent
VQXRPTQVQLEPLTVLYYXXXXXXXXXEQLSNTLEDHLAXK

SEQ ID NO: 30474 - protein, 41 aa, Artificial Sequence
  Non-cyclic GFR-binding peptide
  MOD_RES (4)..(5)..(38)..(40): Xaa is C or S
  MOD_RES (19)..(20)..(21)..(22)..(23): Xaa is A or G
  MOD_RES (24)..(25)..(26)..(27): Xaa is A or G or absent
ASPXXVSQDLRSVKIAKVXXXXXXXXXKEVQVMIVKSXKXS

SEQ ID NO: 30475 - protein, 37 aa, Artificial Sequence
  Non-cyclic GFR-binding peptide
  MOD_RES (2)..(3)..(37): Xaa is C or S
  MOD_RES (17)..(18)..(19)..(20)..(21): Xaa is A or G
  MOD_RES (22)..(23)..(24)..(25): Xaa is A or G or absent
AXXVPTELSNITMQIMXXXXXXXXXIGEMSDMVVEGX

SEQ ID NO: 30476 - protein, 43 aa, Artificial Sequence
  Non-cyclic GFR-binding peptide
  MOD_RES (6)..(40)..(42): Xaa is C or S
  MOD_RES (20)..(21)..(22)..(23)..(24): Xaa is A or G
  MOD_RES (25)..(26)..(27)..(28): Xaa is A or G or absent
DEGLEXVPTEEEPLPMVYYXXXXXXXXXEQLSNFLQHNKXEXR

SEQ ID NO: 30477 - protein, 36 aa, Artificial Sequence
  Non-cyclic GFR-binding peptide
  MOD_RES (3)..(4)..(36): Xaa is C or S
KPXXAPTKLSNITVQIMDDSSNVIIGEMSNMVVRSX

SEQ ID NO: 30478 - protein, 36 aa, Artificial Sequence
  Non-cyclic GFR-binding peptide
  MOD_RES (4)..(5)..(36): Xaa is C or S
ASPXXVPQDLRPVQIRKIVGRTPKVKKATVMVVKSX

SEQ ID NO: 30479 - protein, 41 aa, Artificial Sequence
  Non-cyclic GFR-binding peptide
  MOD_RES (6)..(7)..(40): Xaa is C or S
  MOD_RES (21)..(22)..(23)..(24)..(25): Xaa is A or G
  MOD_RES (26)..(27)..(28)..(29): Xaa is A or G or absent
ASAAPXXVPQALRSVKIAKVXXXXXXXXXKEVQVMIVRSXK

SEQ ID NO: 30480 - protein, 38 aa, Artificial Sequence
  Non-cyclic GFR-binding peptide
  MOD_RES (2)..(3)..(35)..(37): Xaa is C or S
AXXVPTELRPVQMRKIDENEKVVKKATVDMVVEGXGXR

SEQ ID NO: 30481 - protein, 40 aa, Artificial Sequence
  Non-cyclic GFR-binding peptide
  MOD_RES (2)..(3)..(37)..(39): Xaa is C or S
  MOD_RES (17)..(18)..(19)..(20)..(21): Xaa is A or G
  MOD_RES (22)..(23)..(24)..(25): Xaa is A or G or absent
AXXVPTELRSVKMAKVXXXXXXXXXKEVQVEMVVEGXGXR

SEQ ID NO: 30482 - protein, 36 aa, Artificial Sequence
  Non-cyclic GFR-binding peptide
  MOD_RES (1)..(2)..(36): Xaa is C or S
  MOD_RES (16)..(17)..(18)..(19)..(20): Xaa is A or G
  MOD_RES (21)..(22)..(23)..(24): Xaa is A or G or absent
XXAPTKLSNITVQIMXXXXXXXXXIGEMSNMVVRSX

SEQ ID NO: 30483 - protein, 44 aa, Artificial Sequence
  Non-cyclic GFR-binding peptide
  MOD_RES (6)..(7)..(41)..(43): Xaa is C or S
  MOD_RES (21)..(22)..(23)..(24)..(25): Xaa is A or G
  MOD_RES (26)..(27)..(28)..(29): Xaa is A or G or absent
SIPKAXXVPTELSNITMQIMXXXXXXXXXIGEMSEMVVEGXGXR

SEQ ID NO: 30484 - protein, 39 aa, Artificial Sequence
  Non-cyclic GFR-binding peptide
  MOD_RES (6)..(7)..(38): Xaa is C or S
ASASPXXVPQDLRPVQIRKIVGRTPKVKKATVMVVKSXK

SEQ ID NO: 30485 - protein, 39 aa, Artificial Sequence
  Non-cyclic GFR-binding peptide
  MOD_RES (6)..(7): Xaa is C or S
  MOD_RES (21)..(22)..(23)..(24)..(25): Xaa is A or G
  MOD_RES (26)..(27)..(28)..(29): Xaa is A or G or absent
SIPKAXXVPTELRSVKMAKVXXXXXXXXXKEVQVEMVVE

SEQ ID NO: 30486 - protein, 39 aa, Artificial Sequence
  Non-cyclic GFR-binding peptide
  MOD_RES (2)..(3)..(37)..(39): Xaa is C or S
  MOD_RES (17)..(18)..(19)..(20)..(21): Xaa is A or G
  MOD_RES (22)..(23)..(24)..(25): Xaa is A or G or absent
AXXVPTELSNITMQIMXXXXXXXXXIGEMSDMVVEGXGX

SEQ ID NO: 30487 - protein, 36 aa, Artificial Sequence
  Non-cyclic GFR-binding peptide
  MOD_RES (2)..(2): Xaa is C or S
  MOD_RES (18)..(19)..(20)..(21)..(22): Xaa is A or G
  MOD_RES (23)..(24)..(25)..(26): Xaa is A or G or absent
KXQPSRVHHEPLPVVYYXXXXXXXXXEQLSNRLEEH

SEQ ID NO: 30488 - protein, 36 aa, Artificial Sequence
  Non-cyclic GFR-binding peptide
  MOD_RES (1)..(33)..(35): Xaa is C or S
XAPTQLRPVQVRKIDDSSNVIKKATVNMVVRAXGXH

SEQ ID NO: 30489 - protein, 38 aa, Artificial Sequence
  Non-cyclic GFR-binding peptide
  MOD_RES (1)..(2)..(36)..(38): Xaa is C or S
  MOD_RES (16)..(17)..(18)..(19)..(20): Xaa is A or G
  MOD_RES (21)..(22)..(23)..(24): Xaa is A or G or absent
XXVPTELRSVKMAKVXXXXXXXXXKEVQVEMVVEGXGX

SEQ ID NO: 30490 - protein, 30 aa, Artificial Sequence
  Non-cyclic GFR-binding peptide
APTQLSNITVQIMDDSSNVIIGEMSNMVVR

SEQ ID NO: 30491 - protein, 38 aa, Artificial Sequence
  Non-cyclic GFR-binding peptide
  MOD_RES (1)..(2)..(35)..(37): Xaa is C or S
  MOD_RES (16)..(17)..(18)..(19)..(20): Xaa is A or G
  MOD_RES (21)..(22)..(23)..(24): Xaa is A or G or absent
XXVSQDLSNITIQIMXXXXXXXXXIGEMSMIVKSXKXS

SEQ ID NO: 30492 - protein, 42 aa, Artificial Sequence
  Non-cyclic GFR-binding peptide
  MOD_RES (3)..(40)..(42): Xaa is C or S
VQXRPTQVQLEPLTVLYYEIVRKKPIFEQLSNTLEDHLAXKX

SEQ ID NO: 30493 - protein, 38 aa, Artificial Sequence
  Non-cyclic GFR-binding peptide
  MOD_RES (5)..(6): Xaa is C or S
  MOD_RES (20)..(21)..(22)..(23)..(24): Xaa is A or G
  MOD_RES (25)..(26)..(27)..(28): Xaa is A or G or absent
SASPXXVPQDLRPVQIRKIXXXXXXXXXKKATVMVVKS

SEQ ID NO: 30494 - protein, 39 aa, Artificial Sequence
  Non-cyclic GFR-binding peptide
  MOD_RES (6)..(7)..(39): Xaa is C or S
YVPKPXXAPTKLRPVQVRKIDDSSNVIKKATVNMVVRSX

SEQ ID NO: 30495 - protein, 38 aa, Artificial Sequence
  Non-cyclic GFR-binding peptide
  MOD_RES (1)..(35)..(37): Xaa is C or S
  MOD_RES (15)..(16)..(17)..(18)..(19): Xaa is A or G
  MOD_RES (20)..(21)..(22)..(23): Xaa is A or G or absent
XVPTELRPVQMRKIXXXXXXXXXKKATVDMVVEGXGXR

SEQ ID NO: 30496 - protein, 43 aa, Artificial Sequence
  Non-cyclic GFR-binding peptide
  MOD_RES (6)..(7)..(41)..(43): Xaa is C or S
  MOD_RES (21)..(22)..(23)..(24)..(25): Xaa is A or G
  MOD_RES (26)..(27)..(28)..(29): Xaa is A or G or absent
YVPKPXXAPTKLSNITVQIMXXXXXXXXXIGEMSNMVVRSXGX

SEQ ID NO: 30497 - protein, 35 aa, Artificial Sequence
  Non-cyclic GFR-binding peptide
  MOD_RES (32)..(34): Xaa is C or S
VPTELSNITMQIMDEYDKVVIGEMSEMVVEGXGXR

SEQ ID NO: 30498 - protein, 38 aa, Artificial Sequence
  Non-cyclic GFR-binding peptide
  MOD_RES (6)..(7)..(38): Xaa is C or S
ASAAPXXVPQALRPVQIRKIVGRKPKVKKATVMIVRSX

SEQ ID NO: 30499 - protein, 35 aa, Artificial Sequence
  Non-cyclic GFR-binding peptide
  MOD_RES (1)..(2)..(33)..(35): Xaa is C or S
XXVPQDLRSVKIAKVVGRTPKVKEVQVMVVKSXKX

SEQ ID NO: 30500 - protein, 36 aa, Artificial Sequence
  Non-cyclic GFR-binding peptide
  MOD_RES (36)..(36): Xaa is C or S
PSRVHHEPLPVVYYEYVRKKPKLEQLSNRLEEHLEX

SEQ ID NO: 30501 - protein, 41 aa, Artificial Sequence
  Non-cyclic GFR-binding peptide
  MOD_RES (6)..(40): Xaa is C or S
DEGLEXVPTEEEPLTMLYYRIKPHQGQHEQLSNFLQHNKXE

SEQ ID NO: 30502 - protein, 43 aa, Artificial Sequence
  Non-cyclic GFR-binding peptide
  MOD_RES (5)..(42): Xaa is C or S
  MOD_RES (21)..(22)..(23)..(24)..(25): Xaa is A or G
  MOD_RES (26)..(27)..(28)..(29): Xaa is A or G or absent
RNVQXRPTQVQLEPLPVVYYXXXXXXXXXEQLSNTLEDHLAXK

SEQ ID NO: 30503 - protein, 39 aa, Artificial Sequence
  Non-cyclic GFR-binding peptide
  MOD_RES (4)..(38): Xaa is C or S
GLEXVPTEEEPLTMLYYRIKPHQGQHEQLSNFLQHNKXE

SEQ ID NO: 30504 - protein, 38 aa, Artificial Sequence
  Non-cyclic GFR-binding peptide
  MOD_RES (2)..(2): Xaa is C or S
QXRPTQVQLEPLPVVYYEIVRKKPIFEQLSNTLEDHLA

SEQ ID NO: 30505 - protein, 35 aa, Artificial Sequence
  Non-cyclic GFR-binding peptide
  MOD_RES (2)..(3): Xaa is C or S
  MOD_RES (17)..(18)..(19)..(20)..(21): Xaa is A or G
  MOD_RES (22)..(23)..(24)..(25): Xaa is A or G or absent
PXXVPQALSNITIQIMXXXXXXXXXIGEMSMIVRS

SEQ ID NO: 30506 - protein, 41 aa, Artificial Sequence
  Non-cyclic GFR-binding peptide
  MOD_RES (1)..(38)..(40): Xaa is C or S
  MOD_RES (17)..(18)..(19)..(20)..(21): Xaa is A or G
  MOD_RES (22)..(23)..(24)..(25): Xaa is A or G or absent
XQPSRVHHEPLPVVYYXXXXXXXXXEQLSNRLEEHLEXAXA

SEQ ID NO: 30507 - protein, 41 aa, Artificial Sequence
  Non-cyclic GFR-binding peptide
  MOD_RES (6)..(7)..(40): Xaa is C or S
  MOD_RES (21)..(22)..(23)..(24)..(25): Xaa is A or G
  MOD_RES (26)..(27)..(28)..(29): Xaa is A or G or absent
ASASPXXVSQDLRSVKIAKVXXXXXXXXXKEVQVMIVKSXK

SEQ ID NO: 30508 - protein, 35 aa, Artificial Sequence
  Non-cyclic GFR-binding peptide
  MOD_RES (15)..(16)..(17)..(18)..(19): Xaa is A or G
  MOD_RES (20)..(21)..(22)..(23): Xaa is A or G or absent
PTQVQLEPLTVLYYXXXXXXXXXEQLSNTLEDHLA

SEQ ID NO: 30509 - protein, 44 aa, Artificial Sequence
  Non-cyclic GFR-binding peptide
  MOD_RES (5)..(42)..(44): Xaa is C or S
RNVQXRPTQVQLEPLPVVYYEIVRKKPIFEQLSNTLEDHLAXKX

SEQ ID NO: 30510 - protein, 40 aa, Artificial Sequence
  Non-cyclic GFR-binding peptide
  MOD_RES (5)..(6)..(39): Xaa is C or S
  MOD_RES (20)..(21)..(22)..(23)..(24): Xaa is A or G
  MOD_RES (25)..(26)..(27)..(28): Xaa is A or G or absent
SAAPXXVPQALRSVKIAKVXXXXXXXXXKEVQVMIVRSXK

SEQ ID NO: 30511 - protein, 38 aa, Artificial Sequence
  Non-cyclic GFR-binding peptide
  MOD_RES (5)..(6)..(38): Xaa is C or S
IPKAXXVPTELRSVKMAKVDENEKVVKEVQVDMVVEGX

SEQ ID NO: 30512 - protein, 39 aa, Artificial Sequence
  Non-cyclic GFR-binding peptide
  MOD_RES (3)..(4)..(37)..(39): Xaa is C or S
  MOD_RES (18)..(19)..(20)..(21)..(22): Xaa is A or G
  MOD_RES (23)..(24)..(25)..(26): Xaa is A or G or absent
SPXXVPQDLRSVKIAKVXXXXXXXXXKEVQVMVVKSXKX

SEQ ID NO: 30513 - protein, 37 aa, Artificial Sequence
  Non-cyclic GFR-binding peptide
  MOD_RES (2)..(2): Xaa is C or S
  MOD_RES (18)..(19)..(20)..(21)..(22): Xaa is A or G
  MOD_RES (23)..(24)..(25)..(26): Xaa is A or G or absent
KXQPSRVHHEPLPVVYYXXXXXXXXXEQLSNRLEEHL

SEQ ID NO: 30514 - protein, 38 aa, Artificial Sequence
  Non-cyclic GFR-binding peptide
  MOD_RES (1)..(38): Xaa is C or S
  MOD_RES (17)..(18)..(19)..(20)..(21): Xaa is A or G
  MOD_RES (22)..(23)..(24)..(25): Xaa is A or G or absent
XQPSRVHHEPLTVLYYXXXXXXXXXEQLSNRLEEHLEX

SEQ ID NO: 30515 - protein, 43 aa, Artificial Sequence
  Non-cyclic GFR-binding peptide
  MOD_RES (3)..(40)..(42): Xaa is C or S
  MOD_RES (19)..(20)..(21)..(22)..(23): Xaa is A or G
  MOD_RES (24)..(25)..(26)..(27): Xaa is A or G or absent
VQXRPTQVQLEPLPVVYYXXXXXXXXXEQLSNTLEDHLAXKXE

SEQ ID NO: 30516 - protein, 36 aa, Artificial Sequence
  Non-cyclic GFR-binding peptide
  MOD_RES (35)..(35): Xaa is C or S
  MOD_RES (14)..(15)..(16)..(17)..(18): Xaa is A or G
  MOD_RES (19)..(20)..(21)..(22): Xaa is A or G or absent
SRVHHEPLPVVYYXXXXXXXXXEQLSNRLEEHLEXA

SEQ ID NO: 30517 - protein, 39 aa, Artificial Sequence
  Non-cyclic GFR-binding peptide
  MOD_RES (2)..(3)..(36)..(38): Xaa is C or S
  MOD_RES (17)..(18)..(19)..(20)..(21): Xaa is A or G
  MOD_RES (22)..(23)..(24)..(25): Xaa is A or G or absent
PXXVSQDLSNITIQIMXXXXXXXXXIGEMSMIVKSXKXS

SEQ ID NO: 30518 - protein, 34 aa, Artificial Sequence
  Non-cyclic GFR-binding peptide
  MOD_RES (3)..(4): Xaa is C or S
KPXXAPTKLSNITVQIMDDSSNVIIGEMSNMVVR

SEQ ID NO: 30519 - protein, 33 aa, Artificial Sequence
  Non-cyclic GFR-binding peptide
PSRVHHEPLTVLYYEYVRKKPKLEQLSNRLEEH

SEQ ID NO: 30520 - protein, 37 aa, Artificial Sequence
  Non-cyclic GFR-binding peptide
  MOD_RES (4)..(4): Xaa is C or S
  MOD_RES (18)..(19)..(20)..(21)..(22): Xaa is A or G
  MOD_RES (23)..(24)..(25)..(26): Xaa is A or G or absent
GLEXVPTEEEPLTMLYYXXXXXXXXXEQLSNFLQHNK

SEQ ID NO: 30521 - protein, 40 aa, Artificial Sequence
  Non-cyclic GFR-binding peptide
  MOD_RES (6)..(7)..(40): Xaa is C or S
  MOD_RES (21)..(22)..(23)..(24)..(25): Xaa is A or G
  MOD_RES (26)..(27)..(28)..(29): Xaa is A or G or absent
ASAAPXXVPQALRPVQIRKIXXXXXXXXXKKATVMIVRSX

SEQ ID NO: 30522 - protein, 36 aa, Artificial Sequence
  Non-cyclic GFR-binding peptide
  MOD_RES (2)..(3)..(34)..(36): Xaa is C or S
PXXVPQALRPVQIRKIVGRKPKVKKATVMIVRSXKX

SEQ ID NO: 30523 - protein, 37 aa, Artificial Sequence
  Non-cyclic GFR-binding peptide
  MOD_RES (1)..(35)..(37): Xaa is C or S
  MOD_RES (15)..(16)..(17)..(18)..(19): Xaa is A or G
  MOD_RES (20)..(21)..(22)..(23): Xaa is A or G or absent
XVPTELRPVQMRKIXXXXXXXXXKKATVEMVVEGXGX

SEQ ID NO: 30524 - protein, 36 aa, Artificial Sequence
  Non-cyclic GFR-binding peptide
  MOD_RES (2)..(3)..(36): Xaa is C or S
  MOD_RES (17)..(18)..(19)..(20)..(21): Xaa is A or G
  MOD_RES (22)..(23)..(24)..(25): Xaa is A or G or absent
PXXVPQALRSVKIAKVXXXXXXXXXKEVQVMIVRSX

SEQ ID NO: 30525 - protein, 37 aa, Artificial Sequence
  Non-cyclic GFR-binding peptide
  MOD_RES (4)..(4): Xaa is C or S
  MOD_RES (18)..(19)..(20)..(21)..(22): Xaa is A or G
  MOD_RES (23)..(24)..(25)..(26): Xaa is A or G or absent
KPTXAPTKLSNITVQIMXXXXXXXXXIGEMSNMVVRS

SEQ ID NO: 30526 - protein, 39 aa, Artificial Sequence
  Non-cyclic GFR-binding peptide
  MOD_RES (1)..(2)..(36)..(38): Xaa is C or S
  MOD_RES (16)..(17)..(18)..(19)..(20): Xaa is A or G
  MOD_RES (21)..(22)..(23)..(24): Xaa is A or G or absent
XXVPTELSNITMQIMXXXXXXXXXIGEMSEMVVEGXGXR

SEQ ID NO: 30527 - protein, 33 aa, Artificial Sequence
  Non-cyclic GFR-binding peptide
  MOD_RES (14)..(15)..(16)..(17)..(18): Xaa is A or G
  MOD_RES (19)..(20)..(21)..(22): Xaa is A or G or absent
SRVHHEPLPVVYYXXXXXXXXXEQLSNRLEEHL

SEQ ID NO: 30528 - protein, 35 aa, Artificial Sequence
  Non-cyclic GFR-binding peptide
  MOD_RES (2)..(3): Xaa is C or S
  MOD_RES (17)..(18)..(19)..(20)..(21): Xaa is A or G
  MOD_RES (22)..(23)..(24)..(25): Xaa is A or G or absent
PXXAPTQLRSVKVAKVXXXXXXXXXKEVQVNMVVR

SEQ ID NO: 30529 - protein, 34 aa, Artificial Sequence
  Non-cyclic GFR-binding peptide
  MOD_RES (2)..(2): Xaa is C or S
  MOD_RES (16)..(17)..(18)..(19)..(20): Xaa is A or G
  MOD_RES (21)..(22)..(23)..(24): Xaa is A or G or absent
TXAPTKLSNITVQIMXXXXXXXXXIGEMSNMVVR

SEQ ID NO: 30530 - protein, 35 aa, Artificial Sequence
  Non-cyclic GFR-binding peptide
  MOD_RES (1)..(1): Xaa is C or S
  MOD_RES (17)..(18)..(19)..(20)..(21): Xaa is A or G
  MOD_RES (22)..(23)..(24)..(25): Xaa is A or G or absent
XRPTQVQLEPLTVLYYXXXXXXXXXEQLSNTLEDH

SEQ ID NO: 30531 - protein, 38 aa, Artificial Sequence
  Non-cyclic GFR-binding peptide
  MOD_RES (1)..(2)..(36)..(38): Xaa is C or S
  MOD_RES (16)..(17)..(18)..(19)..(20): Xaa is A or G
  MOD_RES (21)..(22)..(23)..(24): Xaa is A or G or absent
XXAPTQLRSVKVAKVXXXXXXXXXKEVQVNMVVRAXGX

SEQ ID NO: 30532 - protein, 35 aa, Artificial Sequence
  Non-cyclic GFR-binding peptide
  MOD_RES (1)..(2)..(35): Xaa is C or S
  MOD_RES (16)..(17)..(18)..(19)..(20): Xaa is A or G
  MOD_RES (21)..(22)..(23)..(24): Xaa is A or G or absent
XXVPQDLRPVQIRKIXXXXXXXXXKKATVMVVKSX

SEQ ID NO: 30533 - protein, 40 aa, Artificial Sequence
  Non-cyclic GFR-binding peptide
  MOD_RES (6)..(7)..(39): Xaa is C or S
YVPKPXXAPTKLRSVKVAKVDDSSNVIKEVQVNMVVRSXG

SEQ ID NO: 30534 - protein, 40 aa, Artificial Sequence
  Non-cyclic GFR-binding peptide
  MOD_RES (3)..(37)..(39): Xaa is C or S
  MOD_RES (17)..(18)..(19)..(20)..(21): Xaa is A or G
  MOD_RES (22)..(23)..(24)..(25): Xaa is A or G or absent
PTXAPTKLSNITVQIMXXXXXXXXXIGEMSNMVVRSXGXH

SEQ ID NO: 30535 - protein, 35 aa, Artificial Sequence
  Non-cyclic GFR-binding peptide
  MOD_RES (1)..(2)..(34): Xaa is C or S
XXVPTELSNITMQIMDENEKVVIGEMSDMVVEGXG

SEQ ID NO: 30536 - protein, 40 aa, Artificial Sequence
  Non-cyclic GFR-binding peptide
  MOD_RES (3)..(4)..(38)..(40): Xaa is C or S
  MOD_RES (18)..(19)..(20)..(21)..(22): Xaa is A or G
  MOD_RES (23)..(24)..(25)..(26): Xaa is A or G or absent
KPXXAPTKLRPVQVRKIXXXXXXXXXKKATVNMVVRSXGX

SEQ ID NO: 30537 - protein, 35 aa, Artificial Sequence
  Non-cyclic GFR-binding peptide
  MOD_RES (34)..(34): Xaa is C or S
  MOD_RES (14)..(15)..(16)..(17)..(18): Xaa is A or G
  MOD_RES (19)..(20)..(21)..(22): Xaa is A or G or absent
APTKLRSVKVAKVXXXXXXXXXKEVQVNMVVRSXG

SEQ ID NO: 30538 - protein, 42 aa, Artificial Sequence
  Non-cyclic GFR-binding peptide
  MOD_RES (5)..(6)..(39)..(41): Xaa is C or S
  MOD_RES (20)..(21)..(22)..(23)..(24): Xaa is A or G
  MOD_RES (25)..(26)..(27)..(28): Xaa is A or G or absent
SASPXXVPQDLRPVQIRKIXXXXXXXXXKKATVMVVKSXKXS

SEQ ID NO: 30539 - protein, 37 aa, Artificial Sequence
  Non-cyclic GFR-binding peptide
  MOD_RES (3)..(37): Xaa is C or S
LEXVPTEEEPLTMLYYRIKPHQGQHEQLSNFLQHNKX

SEQ ID NO: 30540 - protein, 35 aa, Artificial Sequence
  Non-cyclic GFR-binding peptide
  MOD_RES (2)..(3): Xaa is C or S
  MOD_RES (17)..(18)..(19)..(20)..(21): Xaa is A or G
  MOD_RES (22)..(23)..(24)..(25): Xaa is A or G or absent
PXXAPTQLRPVQVRKIXXXXXXXXXKKATVNMVVR

SEQ ID NO: 30541 - protein, 36 aa, Artificial Sequence
  Non-cyclic GFR-binding peptide
  MOD_RES (3)..(3): Xaa is C or S
  MOD_RES (17)..(18)..(19)..(20)..(21): Xaa is A or G
  MOD_RES (22)..(23)..(24)..(25): Xaa is A or G or absent
LEXVPTEEEPLPMVYYXXXXXXXXXEQLSNFLQHNK

SEQ ID NO: 30542 - protein, 40 aa, Artificial Sequence
  Non-cyclic GFR-binding peptide
  MOD_RES (6)..(7)..(38)..(40): Xaa is C or S
ASAAPXXVPQALSNITIQIMVGRKPKVIGEMSMIVRSXKX

SEQ ID NO: 30543 - protein, 38 aa, Artificial Sequence
  Non-cyclic GFR-binding peptide
  MOD_RES (5)..(6)..(38): Xaa is C or S
IPKAXXVPTELRSVKMAKVDEYDKVVKEVQVEMVVEGX

SEQ ID NO: 30544 - protein, 33 aa, Artificial Sequence
  Non-cyclic GFR-binding peptide
  MOD_RES (2)..(3): Xaa is C or S
AXXVPTELSNITMQIMDENEKVVIGEMSDMVVE

SEQ ID NO: 30545 - protein, 40 aa, Artificial Sequence
  Non-cyclic GFR-binding peptide
  MOD_RES (4)..(5)..(39): Xaa is C or S
  MOD_RES (19)..(20)..(21)..(22)..(23): Xaa is A or G
  MOD_RES (24)..(25)..(26)..(27): Xaa is A or G or absent
PKAXXVPTELRSVKMAKVXXXXXXXXXKEVQVEMVVEGXG

SEQ ID NO: 30546 - protein, 41 aa, Artificial Sequence
  Non-cyclic GFR-binding peptide
  MOD_RES (6)..(7)..(38)..(40): Xaa is C or S
ASASPXXVPQDLRSVKIAKVVGRTPKVKEVQVMVVKSXKXS

SEQ ID NO: 30547 - protein, 39 aa, Artificial Sequence
  Non-cyclic GFR-binding peptide
  MOD_RES (7)..(39): Xaa is C or S
HVTKPTXAPTKLRPVQVRKIDDSSNVIKKATVNMVVRSX

SEQ ID NO: 30548 - protein, 37 aa, Artificial Sequence
  Non-cyclic GFR-binding peptide
  MOD_RES (3)..(4)..(37): Xaa is C or S
  MOD_RES (18)..(19)..(20)..(21)..(22): Xaa is A or G
  MOD_RES (23)..(24)..(25)..(26): Xaa is A or G or absent
SPXXVPQDLSNITIQIMXXXXXXXXXIGEMSMVVKSX

SEQ ID NO: 30549 - protein, 41 aa, Artificial Sequence
  Non-cyclic GFR-binding peptide
  MOD_RES (5)..(6)..(38)..(40): Xaa is C or S
IPKAXXVPTELRSVKMAKVDEYDKVVKEVQVEMVVEGXGXR

SEQ ID NO: 30550 - protein, 35 aa, Artificial Sequence
  Non-cyclic GFR-binding peptide
  MOD_RES (2)..(3): Xaa is C or S
  MOD_RES (17)..(18)..(19)..(20)..(21): Xaa is A or G
  MOD_RES (22)..(23)..(24)..(25): Xaa is A or G or absent
AXXVPTELRPVQMRKIXXXXXXXXXKKATVEMVVE

SEQ ID NO: 30551 - protein, 38 aa, Artificial Sequence
  Non-cyclic GFR-binding peptide
  MOD_RES (4)..(5)..(37): Xaa is C or S
PKAXXVPTELSNITMQIMDENEKVVIGEMSDMVVEGXG

SEQ ID NO: 30552 - protein, 34 aa, Artificial Sequence
  Non-cyclic GFR-binding peptide
  MOD_RES (2)..(3): Xaa is C or S
AXXVPTELSNITMQIMDEYDKVVIGEMSEMVVEG

SEQ ID NO: 30553 - protein, 36 aa, Artificial Sequence
  Non-cyclic GFR-binding peptide
  MOD_RES (2)..(3)..(35): Xaa is C or S
AXXVPTELRPVQMRKIDEYDKVVKKATVEMVVEGXG

SEQ ID NO: 30554 - protein, 37 aa, Artificial Sequence
  Non-cyclic GFR-binding peptide
  MOD_RES (3)..(4): Xaa is C or S
  MOD_RES (18)..(19)..(20)..(21)..(22): Xaa is A or G
  MOD_RES (23)..(24)..(25)..(26): Xaa is A or G or absent
KAXXVPTELSNITMQIMXXXXXXXXXIGEMSEMVVEG

SEQ ID NO: 30555 - protein, 36 aa, Artificial Sequence
  Non-cyclic GFR-binding peptide
  MOD_RES (1)..(2)..(35): Xaa is C or S
  MOD_RES (16)..(17)..(18)..(19)..(20): Xaa is A or G
  MOD_RES (21)..(22)..(23)..(24): Xaa is A or G or absent
XXVSQDLRSVKIAKVXXXXXXXXXKEVQVMIVKSXK

SEQ ID NO: 30556 - protein, 39 aa, Artificial Sequence
  Non-cyclic GFR-binding peptide
  MOD_RES (3)..(4)..(36)..(38): Xaa is C or S
KAXXVPTELSNITMQIMDEYDKVVIGEMSEMVVEGXGXR

SEQ ID NO: 30557 - protein, 41 aa, Artificial Sequence
  Non-cyclic GFR-binding peptide
  MOD_RES (1)..(38)..(40): Xaa is C or S
XRPTQVQLEPLTVLYYEIVRKKPIFEQLSNTLEDHLAXKXE

SEQ ID NO: 30558 - protein, 36 aa, Artificial Sequence
  Non-cyclic GFR-binding peptide
  MOD_RES (1)..(2)..(36): Xaa is C or S
  MOD_RES (16)..(17)..(18)..(19)..(20): Xaa is A or G
  MOD_RES (21)..(22)..(23)..(24): Xaa is A or G or absent
XXVPTELRPVQMRKIXXXXXXXXXKKATVEMVVEGX

SEQ ID NO: 30559 - protein, 34 aa, Artificial Sequence
  Non-cyclic GFR-binding peptide
  MOD_RES (32)..(34): Xaa is C or S
APTQLSNITVQIMDDSSNVIIGEMSNMVVRAXGX

SEQ ID NO: 30560 - protein, 32 aa, Artificial Sequence
  Non-cyclic GFR-binding peptide
  MOD_RES (1)..(1): Xaa is C or S
XAPTKLRPVQVRKIDDSSNVIKKATVNMVVRS

SEQ ID NO: 30561 - protein, 41 aa, Artificial Sequence
  Non-cyclic GFR-binding peptide
  MOD_RES (5)..(6)..(39)..(41): Xaa is C or S
  MOD_RES (20)..(21)..(22)..(23)..(24): Xaa is A or G
  MOD_RES (25)..(26)..(27)..(28): Xaa is A or G or absent
SASPXXVPQDLRPVQIRKIXXXXXXXXXKKATVMVVKSXKX

SEQ ID NO: 30562 - protein, 37 aa, Artificial Sequence
  Non-cyclic GFR-binding peptide
  MOD_RES (34)..(36): Xaa is C or S
  MOD_RES (14)..(15)..(16)..(17)..(18): Xaa is A or G
  MOD_RES (19)..(20)..(21)..(22): Xaa is A or G or absent
APTKLRPVQVRKIXXXXXXXXXKKATVNMVVRSXGXH

SEQ ID NO: 30563 - protein, 32 aa, Artificial Sequence
  Non-cyclic GFR-binding peptide
  MOD_RES (1)..(2): Xaa is C or S
XXVPTELSNITMQIMDEYDKVVIGEMSEMVVE

SEQ ID NO: 30564 - protein, 37 aa, Artificial Sequence
  Non-cyclic GFR-binding peptide
  MOD_RES (1)..(1): Xaa is C or S
XQPSRVHHEPLTVLYYEYVRKKPKLEQLSNRLEEHLE

SEQ ID NO: 30565 - protein, 36 aa, Artificial Sequence
  Non-cyclic GFR-binding peptide
  MOD_RES (1)..(35): Xaa is C or S
  MOD_RES (15)..(16)..(17)..(18)..(19): Xaa is A or G
  MOD_RES (20)..(21)..(22)..(23): Xaa is A or G or absent
XVPTELRSVKMAKVXXXXXXXXXKEVQVDMVVEGXG

SEQ ID NO: 30566 - protein, 40 aa, Artificial Sequence
  Non-cyclic GFR-binding peptide
  MOD_RES (6)..(7)..(38)..(40): Xaa is C or S
ASASPXXVSQDLSNITIQIMIGKTPKIIGEMSMIVKSXKX

SEQ ID NO: 30567 - protein, 40 aa, Artificial Sequence
  Non-cyclic GFR-binding peptide
  MOD_RES (5)..(39): Xaa is C or S
EGLEXVPTEEEPLPMVYYRIKPHQGQHEQLSNFLQHNKXE

SEQ ID NO: 30568 - protein, 38 aa, Artificial Sequence
  Non-cyclic GFR-binding peptide
  MOD_RES (3)..(4)..(36)..(38): Xaa is C or S
KAXXVPTELRPVQMRKIDENEKVVKKATVDMVVEGXGX

SEQ ID NO: 30569 - protein, 37 aa, Artificial Sequence
  Non-cyclic GFR-binding peptide
  MOD_RES (34)..(36): Xaa is C or S
  MOD_RES (14)..(15)..(16)..(17)..(18): Xaa is A or G
  MOD_RES (19)..(20)..(21)..(22): Xaa is A or G or absent
APTKLRSVKVAKVXXXXXXXXXKEVQVNMVVRSXGXH

SEQ ID NO: 30570 - protein, 35 aa, Artificial Sequence
  Non-cyclic GFR-binding peptide
  MOD_RES (2)..(2): Xaa is C or S
EXVPTEEEPLPMVYYRIKPHQGQHEQLSNFLQHNK

SEQ ID NO: 30571 - protein, 33 aa, Artificial Sequence
  Non-cyclic GFR-binding peptide
  MOD_RES (1)..(33): Xaa is C or S
XVPTELSNITMQIMDEYDKVVIGEMSEMVVEGX

SEQ ID NO: 30572 - protein, 36 aa, Artificial Sequence
  Non-cyclic GFR-binding peptide
  MOD_RES (33)..(35): Xaa is C or S
  MOD_RES (14)..(15)..(16)..(17)..(18): Xaa is A or G
  MOD_RES (19)..(20)..(21)..(22): Xaa is A or G or absent
VPQALRSVKIAKVXXXXXXXXXKEVQVMIVRSXKXS

SEQ ID NO: 30573 - protein, 34 aa, Artificial Sequence
  Non-cyclic GFR-binding peptide
  MOD_RES (1)..(1): Xaa is C or S
XVPTEEEPLTMLYYRIKPHQGQHEQLSNFLQHNK

SEQ ID NO: 30574 - protein, 34 aa, Artificial Sequence
  Non-cyclic GFR-binding peptide
  MOD_RES (1)..(2)..(33): Xaa is C or S
XXVPQDLRSVKIAKVVGRTPKVKEVQVMVVKSXK

SEQ ID NO: 30575 - protein, 39 aa, Artificial Sequence
  Non-cyclic GFR-binding peptide
  MOD_RES (7)..(39): Xaa is C or S
HVTKPTXAPTKLRSVKVAKVDDSSNVIKEVQVNMVVRSX

SEQ ID NO: 30576 - protein, 36 aa, Artificial Sequence
  Non-cyclic GFR-binding peptide
  MOD_RES (33)..(35): Xaa is C or S
  MOD_RES (14)..(15)..(16)..(17)..(18): Xaa is A or G
  MOD_RES (19)..(20)..(21)..(22): Xaa is A or G or absent
VSQDLSNITIQIMXXXXXXXXXIGEMSMIVKSXKXS

SEQ ID NO: 30577 - protein, 35 aa, Artificial Sequence
  Non-cyclic GFR-binding peptide
  MOD_RES (3)..(4)..(35): Xaa is C or S
SPXXVPQDLRSVKIAKVVGRTPKVKEVQVMVVKSX

SEQ ID NO: 30578 - protein, 36 aa, Artificial Sequence
  Non-cyclic GFR-binding peptide
  MOD_RES (2)..(2): Xaa is C or S
  MOD_RES (18)..(19)..(20)..(21)..(22): Xaa is A or G
  MOD_RES (23)..(24)..(25)..(26): Xaa is A or G or absent
KXQPSRVHHEPLTVLYYXXXXXXXXXEQLSNRLEEH

SEQ ID NO: 30579 - protein, 37 aa, Artificial Sequence
  Non-cyclic GFR-binding peptide
  MOD_RES (36)..(36): Xaa is C or S
PSRVHHEPLTVLYYEYVRKKPKLEQLSNRLEEHLEXA

SEQ ID NO: 30580 - protein, 33 aa, Artificial Sequence
  Non-cyclic GFR-binding peptide
  MOD_RES (1)..(2)..(33): Xaa is C or S
XXVPQALRPVQIRKIVGRKPKVKKATVMIVRSX

SEQ ID NO: 30581 - protein, 35 aa, Artificial Sequence
  Non-cyclic GFR-binding peptide
  MOD_RES (1)..(35): Xaa is C or S
  MOD_RES (15)..(16)..(17)..(18)..(19): Xaa is A or G
  MOD_RES (20)..(21)..(22)..(23): Xaa is A or G or absent
XVPTELRPVQMRKIXXXXXXXXXKKATVEMVVEGX

SEQ ID NO: 30582 - protein, 41 aa, Artificial Sequence
  Non-cyclic GFR-binding peptide
  MOD_RES (5)..(5): Xaa is C or S
SSVKXQPSRVHHEPLTVLYYEYVRKKPKLEQLSNRLEEHLE

SEQ ID NO: 30583 - protein, 41 aa, Artificial Sequence
  Non-cyclic GFR-binding peptide
  MOD_RES (7)..(41): Xaa is C or S
  MOD_RES (21)..(22)..(23)..(24)..(25): Xaa is A or G
  MOD_RES (26)..(27)..(28)..(29): Xaa is A or G or absent
HVTKPTXAPTKLSNITVQIMXXXXXXXXXIGEMSNMVVRSX

SEQ ID NO: 30584 - protein, 34 aa, Artificial Sequence
  Non-cyclic GFR-binding peptide
  MOD_RES (1)..(32)..(34): Xaa is C or S
XVSQDLRSVKIAKVIGKTPKIKEVQVMIVKSXKX

SEQ ID NO: 30585 - protein, 42 aa, Artificial Sequence
  Non-cyclic GFR-binding peptide
  MOD_RES (4)..(5)..(39)..(41): Xaa is C or S
  MOD_RES (19)..(20)..(21)..(22)..(23): Xaa is A or G
  MOD_RES (24)..(25)..(26)..(27): Xaa is A or G or absent
PKPXXAPTKLSNITVQIMXXXXXXXXXIGEMSNMVVRSXGXH

SEQ ID NO: 30586 - protein, 32 aa, Artificial Sequence
  Non-cyclic GFR-binding peptide
  MOD_RES (1)..(32): Xaa is C or S
XVPQALRPVQIRKIVGRKPKVKKATVMIVRSX

SEQ ID NO: 30587 - protein, 39 aa, Artificial Sequence
  Non-cyclic GFR-binding peptide
  MOD_RES (5)..(6)..(37)..(39): Xaa is C or S
SASPXXVPQDLSNITIQIMVGRTPKVIGEMSMVVKSXKX

SEQ ID NO: 30588 - protein, 36 aa, Artificial Sequence
  Non-cyclic GFR-binding peptide
  MOD_RES (1)..(2)..(35): Xaa is C or S
  MOD_RES (16)..(17)..(18)..(19)..(20): Xaa is A or G
  MOD_RES (21)..(22)..(23)..(24): Xaa is A or G or absent
XXVPQDLRPVQIRKIXXXXXXXXXKKATVMVVKSXK

SEQ ID NO: 30589 - protein, 33 aa, Artificial Sequence
  Non-cyclic GFR-binding peptide
  MOD_RES (31)..(33): Xaa is C or S
VSQDLRPVQIRKIIGKTPKIKKATVMIVKSXKX

SEQ ID NO: 30590 - protein, 38 aa, Artificial Sequence
  Non-cyclic GFR-binding peptide
  MOD_RES (4)..(38): Xaa is C or S
  MOD_RES (18)..(19)..(20)..(21)..(22): Xaa is A or G
  MOD_RES (23)..(24)..(25)..(26): Xaa is A or G or absent
KPTXAPTKLSNITVQIMXXXXXXXXXIGEMSNMVVRSX

SEQ ID NO: 30591 - protein, 41 aa, Artificial Sequence
  Non-cyclic GFR-binding peptide
  MOD_RES (3)..(4)..(38)..(40): Xaa is C or S
  MOD_RES (18)..(19)..(20)..(21)..(22): Xaa is A or G
  MOD_RES (23)..(24)..(25)..(26): Xaa is A or G or absent
KAXXVPTELRSVKMAKVXXXXXXXXXKEVQVDMVVEGXGXR

SEQ ID NO: 30592 - protein, 39 aa, Artificial Sequence
  Non-cyclic GFR-binding peptide
  MOD_RES (5)..(6)..(38): Xaa is C or S
VPKPXXAPTKLRSVKVAKVDDSSNVIKEVQVNMVVRSXG

SEQ ID NO: 30593 - protein, 40 aa, Artificial Sequence
  Non-cyclic GFR-binding peptide
  MOD_RES (7)..(39): Xaa is C or S
HVTKPTXAPTKLSNITVQIMDDSSNVIIGEMSNMVVRSXG

SEQ ID NO: 30594 - protein, 33 aa, Artificial Sequence
  Non-cyclic GFR-binding peptide
  MOD_RES (32)..(32): Xaa is C or S
APTQLRSVKVAKVDDSSNVIKEVQVNMVVRAXG

SEQ ID NO: 30595 - protein, 38 aa, Artificial Sequence
  Non-cyclic GFR-binding peptide
  MOD_RES (3)..(4)..(35)..(37): Xaa is C or S
SPXXVPQDLRSVKIAKVVGRTPKVKEVQVMVVKSXKXS

SEQ ID NO: 30596 - protein, 37 aa, Artificial Sequence
  Non-cyclic GFR-binding peptide
  MOD_RES (4)..(5): Xaa is C or S
  MOD_RES (19)..(20)..(21)..(22)..(23): Xaa is A or G
  MOD_RES (24)..(25)..(26)..(27): Xaa is A or G or absent
PKPXXAPTKLRSVKVAKVXXXXXXXXXKEVQVNMVVR

SEQ ID NO: 30597 - protein, 40 aa, Artificial Sequence
  Non-cyclic GFR-binding peptide
  MOD_RES (3)..(4)..(37)..(39): Xaa is C or S
  MOD_RES (18)..(19)..(20)..(21)..(22): Xaa is A or G
  MOD_RES (23)..(24)..(25)..(26): Xaa is A or G or absent
APXXVPQALSNITIQIMXXXXXXXXXIGEMSMIVRSXKXS

SEQ ID NO: 30598 - protein, 41 aa, Artificial Sequence
  Non-cyclic GFR-binding peptide
  MOD_RES (4)..(41): Xaa is C or S
SVKXQPSRVHHEPLPVVYYEYVRKKPKLEQLSNRLEEHLEX

SEQ ID NO: 30599 - protein, 37 aa, Artificial Sequence
  Non-cyclic GFR-binding peptide
  MOD_RES (2)..(3)..(34)..(36): Xaa is C or S
PXXVSQDLRSVKIAKVIGKTPKIKEVQVMIVKSXKXS

SEQ ID NO: 30600 - protein, 33 aa, Artificial Sequence
  Non-cyclic GFR-binding peptide
  MOD_RES (14)..(15)..(16)..(17)..(18): Xaa is A or G
  MOD_RES (19)..(20)..(21)..(22): Xaa is A or G or absent
APTKLRPVQVRKIXXXXXXXXXKKATVNMVVRS

SEQ ID NO: 30601 - protein, 34 aa, Artificial Sequence
  Non-cyclic GFR-binding peptide
  MOD_RES (3)..(4): Xaa is C or S
KAXXVPTELRPVQMRKIDEYDKVVKKATVEMVVE

SEQ ID NO: 30602 - protein, 36 aa, Artificial Sequence
  Non-cyclic GFR-binding peptide
  MOD_RES (3)..(35): Xaa is C or S
PTXAPTKLSNITVQIMDDSSNVIIGEMSNMVVRSXG

SEQ ID NO: 30603 - protein, 36 aa, Artificial Sequence
  Non-cyclic GFR-binding peptide
  MOD_RES (3)..(4): Xaa is C or S
  MOD_RES (18)..(19)..(20)..(21)..(22): Xaa is A or G
  MOD_RES (23)..(24)..(25)..(26): Xaa is A or G or absent
KAXXVPTELRPVQMRKIXXXXXXXXXKKATVEMVVE

SEQ ID NO: 30604 - protein, 36 aa, Artificial Sequence
  Non-cyclic GFR-binding peptide
  MOD_RES (4)..(5)..(36): Xaa is C or S
AAPXXVPQALRPVQIRKIVGRKPKVKKATVMIVRSX

SEQ ID NO: 30605 - protein, 41 aa, Artificial Sequence
  Non-cyclic GFR-binding peptide
  MOD_RES (6)..(7)..(38)..(40): Xaa is C or S
ASAAPXXVPQALSNITIQIMVGRKPKVIGEMSMIVRSXKXS

SEQ ID NO: 30606 - protein, 36 aa, Artificial Sequence
  Non-cyclic GFR-binding peptide
  MOD_RES (2)..(3)..(36): Xaa is C or S
  MOD_RES (17)..(18)..(19)..(20)..(21): Xaa is A or G
  MOD_RES (22)..(23)..(24)..(25): Xaa is A or G or absent
PXXVPQDLRPVQIRKIXXXXXXXXXKKATVMVVKSX

SEQ ID NO: 30607 - protein, 38 aa, Artificial Sequence
  Non-cyclic GFR-binding peptide
  MOD_RES (3)..(37): Xaa is C or S
LEXVPTEEEPLPMVYYRIKPHQGQHEQLSNFLQHNKXE

SEQ ID NO: 30608 - protein, 35 aa, Artificial Sequence
  Non-cyclic GFR-binding peptide
  MOD_RES (1)..(32)..(34): Xaa is C or S
XVPQALSNITIQIMVGRKPKVIGEMSMIVRSXKXS

SEQ ID NO: 30609 - protein, 34 aa, Artificial Sequence
  Non-cyclic GFR-binding peptide
  MOD_RES (1)..(32)..(34): Xaa is C or S
XVPQDLRPVQIRKIVGRTPKVKKATVMVVKSXKX

SEQ ID NO: 30610 - protein, 35 aa, Artificial Sequence
  Non-cyclic GFR-binding peptide
  MOD_RES (34)..(34): Xaa is C or S
  MOD_RES (14)..(15)..(16)..(17)..(18): Xaa is A or G
  MOD_RES (19)..(20)..(21)..(22): Xaa is A or G or absent
APTKLSNITVQIMXXXXXXXXXIGEMSNMVVRSXG

SEQ ID NO: 30611 - protein, 43 aa, Artificial Sequence
  Non-cyclic GFR-binding peptide
  MOD_RES (3)..(40)..(42): Xaa is C or S
VKXQPSRVHHEPLPVVYYEYVRKKPKLEQLSNRLEEHLEXAXA

SEQ ID NO: 30612 - protein, 40 aa, Artificial Sequence
  Non-cyclic GFR-binding peptide
  MOD_RES (4)..(5)..(37)..(39): Xaa is C or S
PKAXXVPTELRSVKMAKVDENEKVVKEVQVDMVVEGXGXR

SEQ ID NO: 30613 - protein, 36 aa, Artificial Sequence
  Non-cyclic GFR-binding peptide
  MOD_RES (33)..(35): Xaa is C or S
  MOD_RES (14)..(15)..(16)..(17)..(18): Xaa is A or G
  MOD_RES (19)..(20)..(21)..(22): Xaa is A or G or absent
VPQALRPVQIRKIXXXXXXXXXKKATVMIVRSXKXS

SEQ ID NO: 30614 - protein, 35 aa, Artificial Sequence
  Non-cyclic GFR-binding peptide
  MOD_RES (3)..(4): Xaa is C or S
KPXXAPTQLRSVKVAKVDDSSNVIKEVQVNMVVRA

SEQ ID NO: 30615 - protein, 35 aa, Artificial Sequence
  Non-cyclic GFR-binding peptide
  MOD_RES (2)..(2): Xaa is C or S
  MOD_RES (16)..(17)..(18)..(19)..(20): Xaa is A or G
  MOD_RES (21)..(22)..(23)..(24): Xaa is A or G or absent
TXAPTKLRPVQVRKIXXXXXXXXXKKATVNMVVRS

SEQ ID NO: 30616 - protein, 33 aa, Artificial Sequence
  Non-cyclic GFR-binding peptide
  MOD_RES (1)..(2): Xaa is C or S
XXVPTELRSVKMAKVDEYDKVVKEVQVEMVVEG

SEQ ID NO: 30617 - protein, 33 aa, Artificial Sequence
  Non-cyclic GFR-binding peptide
  MOD_RES (2)..(3): Xaa is C or S
PXXVPQDLSNITIQIMVGRTPKVIGEMSMVVKS

SEQ ID NO: 30618 - protein, 44 aa, Artificial Sequence
  Non-cyclic GFR-binding peptide
  MOD_RES (4)..(41)..(43): Xaa is C or S
SVKXQPSRVHHEPLPVVYYEYVRKKPKLEQLSNRLEEHLEXAXA

SEQ ID NO: 30619 - protein, 36 aa, Artificial Sequence
  Non-cyclic GFR-binding peptide
  MOD_RES (3)..(4)..(35): Xaa is C or S
APXXVPQALRPVQIRKIVGRKPKVKKATVMIVRSXK

SEQ ID NO: 30620 - protein, 44 aa, Artificial Sequence
  Non-cyclic GFR-binding peptide
  MOD_RES (6)..(7)..(41)..(43): Xaa is C or S
  MOD_RES (21)..(22)..(23)..(24)..(25): Xaa is A or G
  MOD_RES (26)..(27)..(28)..(29): Xaa is A or G or absent
KIPKAXXVPTELSNITMQIMXXXXXXXXXIGEMSDMVVEGXGXR

SEQ ID NO: 30621 - protein, 41 aa, Artificial Sequence
  Non-cyclic GFR-binding peptide
  MOD_RES (4)..(5)..(38)..(40): Xaa is C or S
  MOD_RES (19)..(20)..(21)..(22)..(23): Xaa is A or G
  MOD_RES (24)..(25)..(26)..(27): Xaa is A or G or absent
AAPXXVPQALSNITIQIMXXXXXXXXXIGEMSMIVRSXKXS

SEQ ID NO: 30622 - protein, 37 aa, Artificial Sequence
  Non-cyclic GFR-binding peptide
  MOD_RES (6)..(6): Xaa is C or S
VTKPTXAPTKLSNITVQIMDDSSNVIIGEMSNMVVRS

SEQ ID NO: 30623 - protein, 39 aa, Artificial Sequence
  Non-cyclic GFR-binding peptide
  MOD_RES (3)..(4)..(38): Xaa is C or S
  MOD_RES (18)..(19)..(20)..(21)..(22): Xaa is A or G
  MOD_RES (23)..(24)..(25)..(26): Xaa is A or G or absent
KPXXAPTQLRSVKVAKVXXXXXXXXXKEVQVNMVVRAXG

SEQ ID NO: 30624 - protein, 36 aa, Artificial Sequence
  Non-cyclic GFR-binding peptide
  MOD_RES (3)..(3): Xaa is C or S
LEXVPTEEEPLTMLYYRIKPHQGQHEQLSNFLQHNK

SEQ ID NO: 30625 - protein, 40 aa, Artificial Sequence
  Non-cyclic GFR-binding peptide
  MOD_RES (5)..(6)..(38)..(40): Xaa is C or S
VPKPXXAPTKLRPVQVRKIDDSSNVIKKATVNMVVRSXGX

SEQ ID NO: 30626 - protein, 37 aa, Artificial Sequence
  Non-cyclic GFR-binding peptide
  MOD_RES (3)..(4)..(37): Xaa is C or S
  MOD_RES (18)..(19)..(20)..(21)..(22): Xaa is A or G
  MOD_RES (23)..(24)..(25)..(26): Xaa is A or G or absent
SPXXVSQDLSNITIQIMXXXXXXXXXIGEMSMIVKSX

SEQ ID NO: 30627 - protein, 34 aa, Artificial Sequence
  Non-cyclic GFR-binding peptide
  MOD_RES (1)..(1): Xaa is C or S
  MOD_RES (15)..(16)..(17)..(18)..(19): Xaa is A or G
  MOD_RES (20)..(21)..(22)..(23): Xaa is A or G or absent
XAPTKLRSVKVAKVXXXXXXXXXKEVQVNMVVRS

SEQ ID NO: 30628 - protein, 34 aa, Artificial Sequence
  Non-cyclic GFR-binding peptide
  MOD_RES (34)..(34): Xaa is C or S
  MOD_RES (14)..(15)..(16)..(17)..(18): Xaa is A or G
  MOD_RES (19)..(20)..(21)..(22): Xaa is A or G or absent
APTQLRPVQVRKIXXXXXXXXXKKATVNMVVRAX

SEQ ID NO: 30629 - protein, 39 aa, Artificial Sequence
  Non-cyclic GFR-binding peptide
  MOD_RES (2)..(36)..(38): Xaa is C or S
  MOD_RES (16)..(17)..(18)..(19)..(20): Xaa is A or G
  MOD_RES (21)..(22)..(23)..(24): Xaa is A or G or absent
TXAPTKLRPVQVRKIXXXXXXXXXKKATVNMVVRSXGXH

SEQ ID NO: 30630 - protein, 34 aa, Artificial Sequence
  Non-cyclic GFR-binding peptide
  MOD_RES (1)..(2): Xaa is C or S
  MOD_RES (16)..(17)..(18)..(19)..(20): Xaa is A or G
  MOD_RES (21)..(22)..(23)..(24): Xaa is A or G or absent
XXVPTELSNITMQIMXXXXXXXXXIGEMSDMVVE

SEQ ID NO: 30631 - protein, 44 aa, Artificial Sequence
  Non-cyclic GFR-binding peptide
  MOD_RES (6)..(7)..(41)..(43): Xaa is C or S
  MOD_RES (21)..(22)..(23)..(24)..(25): Xaa is A or G
  MOD_RES (26)..(27)..(28)..(29): Xaa is A or G or absent
TVPKPXXAPTQLSNITVQIMXXXXXXXXXIGEMSNMVVRAXGXH

SEQ ID NO: 30632 - protein, 34 aa, Artificial Sequence
  Non-cyclic GFR-binding peptide
PTQVQLEPLTVLYYEIVRKKPIFEQLSNTLEDHL

SEQ ID NO: 30633 - protein, 37 aa, Artificial Sequence
  Non-cyclic GFR-binding peptide
  MOD_RES (1)..(35)..(37): Xaa is C or S
  MOD_RES (15)..(16)..(17)..(18)..(19): Xaa is A or G
  MOD_RES (20)..(21)..(22)..(23): Xaa is A or G or absent
XAPTKLRPVQVRKIXXXXXXXXXKKATVNMVVRSXGX

SEQ ID NO: 30634 - protein, 37 aa, Artificial Sequence
  Non-cyclic GFR-binding peptide
  MOD_RES (35)..(37): Xaa is C or S
  MOD_RES (14)..(15)..(16)..(17)..(18): Xaa is A or G
  MOD_RES (19)..(20)..(21)..(22): Xaa is A or G or absent
TQVQLEPLPVVYYXXXXXXXXXEQLSNTLEDHLAXKX

SEQ ID NO: 30635 - protein, 34 aa, Artificial Sequence
  Non-cyclic GFR-binding peptide
  MOD_RES (34)..(34): Xaa is C or S
  MOD_RES (14)..(15)..(16)..(17)..(18): Xaa is A or G
  MOD_RES (19)..(20)..(21)..(22): Xaa is A or G or absent
APTKLSNITVQIMXXXXXXXXXIGEMSNMVVRSX

SEQ ID NO: 30636 - protein, 34 aa, Artificial Sequence
  Non-cyclic GFR-binding peptide
  MOD_RES (34)..(34): Xaa is C or S
  MOD_RES (14)..(15)..(16)..(17)..(18): Xaa is A or G
  MOD_RES (19)..(20)..(21)..(22): Xaa is A or G or absent
VPTELRSVKMAKVXXXXXXXXXKEVQVEMVVEGX

SEQ ID NO: 30637 - protein, 38 aa, Artificial Sequence
  Non-cyclic GFR-binding peptide
  MOD_RES (1)..(38): Xaa is C or S
XRPTQVQLEPLPVVYYEIVRKKPIFEQLSNTLEDHLAX

SEQ ID NO: 30638 - protein, 35 aa, Artificial Sequence
  Non-cyclic GFR-binding peptide
  MOD_RES (1)..(2): Xaa is C or S
  MOD_RES (16)..(17)..(18)..(19)..(20): Xaa is A or G
  MOD_RES (21)..(22)..(23)..(24): Xaa is A or G or absent
XXVPTELRPVQMRKIXXXXXXXXXKKATVEMVVEG

SEQ ID NO: 30639 - protein, 41 aa, Artificial Sequence
  Non-cyclic GFR-binding peptide
  MOD_RES (5)..(6)..(39)..(41): Xaa is C or S
  MOD_RES (20)..(21)..(22)..(23)..(24): Xaa is A or G
  MOD_RES (25)..(26)..(27)..(28): Xaa is A or G or absent
SASPXXVSQDLRPVQIRKIXXXXXXXXXKKATVMIVKSXKX

SEQ ID NO: 30640 - protein, 35 aa, Artificial Sequence
  Non-cyclic GFR-binding peptide
  MOD_RES (1)..(2)..(34): Xaa is C or S
XXAPTKLRPVQVRKIDDSSNVIKKATVNMVVRSXG

SEQ ID NO: 30641 - protein, 38 aa, Artificial Sequence
  Non-cyclic GFR-binding peptide
  MOD_RES (5)..(5): Xaa is C or S
  MOD_RES (19)..(20)..(21)..(22)..(23): Xaa is A or G
  MOD_RES (24)..(25)..(26)..(27): Xaa is A or G or absent
TKPTXAPTKLRPVQVRKIXXXXXXXXXKKATVNMVVRS

SEQ ID NO: 30642 - protein, 33 aa, Artificial Sequence
  Non-cyclic GFR-binding peptide
  MOD_RES (1)..(2)..(33): Xaa is C or S
XXVSQDLRPVQIRKIIGKTPKIKKATVMIVKSX

SEQ ID NO: 30643 - protein, 35 aa, Artificial Sequence
  Non-cyclic GFR-binding peptide
  MOD_RES (4)..(4): Xaa is C or S
KPTXAPTKLSNITVQIMDDSSNVIIGEMSNMVVRS

SEQ ID NO: 30644 - protein, 40 aa, Artificial Sequence
  Non-cyclic GFR-binding peptide
  MOD_RES (5)..(6)..(40): Xaa is C or S
  MOD_RES (20)..(21)..(22)..(23)..(24): Xaa is A or G
  MOD_RES (25)..(26)..(27)..(28): Xaa is A or G or absent
VPKPXXAPTKLRPVQVRKIXXXXXXXXXKKATVNMVVRSX

SEQ ID NO: 30645 - protein, 36 aa, Artificial Sequence
  Non-cyclic GFR-binding peptide
  MOD_RES (3)..(4): Xaa is C or S
  MOD_RES (18)..(19)..(20)..(21)..(22): Xaa is A or G
  MOD_RES (23)..(24)..(25)..(26): Xaa is A or G or absent
SPXXVPQDLSNITIQIMXXXXXXXXXIGEMSMVVKS

SEQ ID NO: 30646 - protein, 38 aa, Artificial Sequence
  Non-cyclic GFR-binding peptide
  MOD_RES (6)..(7): Xaa is C or S
SIPKAXXVPTELRPVQMRKIDEYDKVVKKATVEMVVEG

SEQ ID NO: 30647 - protein, 38 aa, Artificial Sequence
  Non-cyclic GFR-binding peptide
  MOD_RES (1)..(38): Xaa is C or S
  MOD_RES (17)..(18)..(19)..(20)..(21): Xaa is A or G
  MOD_RES (22)..(23)..(24)..(25): Xaa is A or G or absent
XRPTQVQLEPLTVLYYXXXXXXXXXEQLSNTLEDHLAX

SEQ ID NO: 30648 - protein, 38 aa, Artificial Sequence
  Non-cyclic GFR-binding peptide
  MOD_RES (3)..(4)..(36)..(38): Xaa is C or S
KAXXVPTELRPVQMRKIDEYDKVVKKATVEMVVEGXGX

SEQ ID NO: 30649 - protein, 37 aa, Artificial Sequence
  Non-cyclic GFR-binding peptide
  MOD_RES (2)..(3)..(36): Xaa is C or S
  MOD_RES (17)..(18)..(19)..(20)..(21): Xaa is A or G
  MOD_RES (22)..(23)..(24)..(25): Xaa is A or G or absent
PXXVPQALSNITIQIMXXXXXXXXXIGEMSMIVRSXK

SEQ ID NO: 30650 - protein, 40 aa, Artificial Sequence
  Non-cyclic GFR-binding peptide
  MOD_RES (3)..(4)..(38)..(40): Xaa is C or S
  MOD_RES (18)..(19)..(20)..(21)..(22): Xaa is A or G
  MOD_RES (23)..(24)..(25)..(26): Xaa is A or G or absent
KAXXVPTELSNITMQIMXXXXXXXXXIGEMSEMVVEGXGX

SEQ ID NO: 30651 - protein, 36 aa, Artificial Sequence
  Non-cyclic GFR-binding peptide
  MOD_RES (2)..(36): Xaa is C or S
  MOD_RES (16)..(17)..(18)..(19)..(20): Xaa is A or G
  MOD_RES (21)..(22)..(23)..(24): Xaa is A or G or absent
TXAPTKLSNITVQIMXXXXXXXXXIGEMSNMVVRSX

SEQ ID NO: 30652 - protein, 37 aa, Artificial Sequence
  Non-cyclic GFR-binding peptide
  MOD_RES (1)..(2)..(34)..(36): Xaa is C or S
XXAPTKLRPVQVRKIDDSSNVIKKATVNMVVRSXGXH

SEQ ID NO: 30653 - protein, 37 aa, Artificial Sequence
  Non-cyclic GFR-binding peptide
  MOD_RES (4)..(5): Xaa is C or S
  MOD_RES (19)..(20)..(21)..(22)..(23): Xaa is A or G
  MOD_RES (24)..(25)..(26)..(27): Xaa is A or G or absent
PKPXXAPTQLSNITVQIMXXXXXXXXXIGEMSNMVVR

SEQ ID NO: 30654 - protein, 38 aa, Artificial Sequence
  Non-cyclic GFR-binding peptide
  MOD_RES (35)..(37): Xaa is C or S
  MOD_RES (14)..(15)..(16)..(17)..(18): Xaa is A or G
  MOD_RES (19)..(20)..(21)..(22): Xaa is A or G or absent
SRVHHEPLPVVYYXXXXXXXXXEQLSNRLEEHLEXAXA

SEQ ID NO: 30655 - protein, 36 aa, Artificial Sequence
  Non-cyclic GFR-binding peptide
  MOD_RES (1)..(2)..(33)..(35): Xaa is C or S
XXVSQDLRPVQIRKIIGKTPKIKKATVMIVKSXKXS

SEQ ID NO: 30656 - protein, 37 aa, Artificial Sequence
  Non-cyclic GFR-binding peptide
  MOD_RES (4)..(5)..(37): Xaa is C or S
PKPXXAPTQLRSVKVAKVDDSSNVIKEVQVNMVVRAX

SEQ ID NO: 30657 - protein, 41 aa, Artificial Sequence
  Non-cyclic GFR-binding peptide
  MOD_RES (5)..(39)..(41): Xaa is C or S
  MOD_RES (19)..(20)..(21)..(22)..(23): Xaa is A or G
  MOD_RES (24)..(25)..(26)..(27): Xaa is A or G or absent
EGLEXVPTEEEPLPMVYYXXXXXXXXXEQLSNFLQHNKXEX

SEQ ID NO: 30658 - protein, 42 aa, Artificial Sequence
  Non-cyclic GFR-binding peptide
  MOD_RES (6)..(7)..(39)..(41): Xaa is C or S
TVPKPXXAPTQLRPVQVRKIDDSSNVIKKATVNMVVRAXGXH

SEQ ID NO: 30659 - protein, 36 aa, Artificial Sequence
  Non-cyclic GFR-binding peptide
  MOD_RES (3)..(4): Xaa is C or S
  MOD_RES (18)..(19)..(20)..(21)..(22): Xaa is A or G
  MOD_RES (23)..(24)..(25)..(26): Xaa is A or G or absent
KAXXVPTELRSVKMAKVXXXXXXXXXKEVQVEMVVE

SEQ ID NO: 30660 - protein, 41 aa, Artificial Sequence
  Non-cyclic GFR-binding peptide
  MOD_RES (1)..(38)..(40): Xaa is C or S
  MOD_RES (17)..(18)..(19)..(20)..(21): Xaa is A or G
  MOD_RES (22)..(23)..(24)..(25): Xaa is A or G or absent
XQPSRVHHEPLTVLYYXXXXXXXXXEQLSNRLEEHLEXAXA

SEQ ID NO: 30661 - protein, 42 aa, Artificial Sequence
  Non-cyclic GFR-binding peptide
  MOD_RES (5)..(6)..(40)..(42): Xaa is C or S
  MOD_RES (20)..(21)..(22)..(23)..(24): Xaa is A or G
  MOD_RES (25)..(26)..(27)..(28): Xaa is A or G or absent
VPKPXXAPTKLRSVKVAKVXXXXXXXXXKEVQVNMVVRSXGX

SEQ ID NO: 30662 - protein, 30 aa, Artificial Sequence
  Non-cyclic GFR-binding peptide
VPQALRSVKIAKVVGRKPKVKEVQVMIVRS

SEQ ID NO: 30663 - protein, 37 aa, Artificial Sequence
  Non-cyclic GFR-binding peptide
  MOD_RES (4)..(4): Xaa is C or S
  MOD_RES (18)..(19)..(20)..(21)..(22): Xaa is A or G
  MOD_RES (23)..(24)..(25)..(26): Xaa is A or G or absent
KPTXAPTKLRSVKVAKVXXXXXXXXXKEVQVNMVVRS

SEQ ID NO: 30664 - protein, 33 aa, Artificial Sequence
  Non-cyclic GFR-binding peptide
  MOD_RES (1)..(2): Xaa is C or S
XXAPTQLRSVKVAKVDDSSNVIKEVQVNMVVRA

SEQ ID NO: 30665 - protein, 39 aa, Artificial Sequence
  Non-cyclic GFR-binding peptide
  MOD_RES (5)..(6): Xaa is C or S
  MOD_RES (20)..(21)..(22)..(23)..(24): Xaa is A or G
  MOD_RES (25)..(26)..(27)..(28): Xaa is A or G or absent
IPKAXXVPTELSNITMQIMXXXXXXXXXIGEMSDMVVEG

SEQ ID NO: 30666 - protein, 35 aa, Artificial Sequence
  Non-cyclic GFR-binding peptide
  MOD_RES (34)..(34): Xaa is C or S
  MOD_RES (14)..(15)..(16)..(17)..(18): Xaa is A or G
  MOD_RES (19)..(20)..(21)..(22): Xaa is A or G or absent
APTQLRPVQVRKIXXXXXXXXXKKATVNMVVRAXG

SEQ ID NO: 30667 - protein, 37 aa, Artificial Sequence
  Non-cyclic GFR-binding peptide
  MOD_RES (4)..(5)..(37): Xaa is C or S
PKPXXAPTKLRPVQVRKIDDSSNVIKKATVNMVVRSX

SEQ ID NO: 30668 - protein, 41 aa, Artificial Sequence
  Non-cyclic GFR-binding peptide
  MOD_RES (4)..(41): Xaa is C or S
  MOD_RES (20)..(21)..(22)..(23)..(24): Xaa is A or G
  MOD_RES (25)..(26)..(27)..(28): Xaa is A or G or absent
NVQXRPTQVQLEPLPVVYYXXXXXXXXXEQLSNTLEDHLAX

SEQ ID NO: 30669 - protein, 38 aa, Artificial Sequence
  Non-cyclic GFR-binding peptide
  MOD_RES (6)..(6): Xaa is C or S
  MOD_RES (20)..(21)..(22)..(23)..(24): Xaa is A or G
  MOD_RES (25)..(26)..(27)..(28): Xaa is A or G or absent
DEGLEXVPTEEEPLPMVYYXXXXXXXXXEQLSNFLQHN

SEQ ID NO: 30670 - protein, 33 aa, Artificial Sequence
  Non-cyclic GFR-binding peptide
  MOD_RES (2)..(3): Xaa is C or S
PXXVPQDLRSVKIAKVVGRTPKVKEVQVMVVKS

SEQ ID NO: 30671 - protein, 37 aa, Artificial Sequence
  Non-cyclic GFR-binding peptide
  MOD_RES (4)..(5)..(36): Xaa is C or S
ASPXXVPQDLRSVKIAKVVGRTPKVKEVQVMVVKSXK

SEQ ID NO: 30672 - protein, 41 aa, Artificial Sequence
  Non-cyclic GFR-binding peptide
  MOD_RES (5)..(6)..(39)..(41): Xaa is C or S
  MOD_RES (20)..(21)..(22)..(23)..(24): Xaa is A or G
  MOD_RES (25)..(26)..(27)..(28): Xaa is A or G or absent
SAAPXXVPQALRPVQIRKIXXXXXXXXXKKATVMIVRSXKX

SEQ ID NO: 30673 - protein, 41 aa, Artificial Sequence
  Non-cyclic GFR-binding peptide
  MOD_RES (3)..(40): Xaa is C or S
  MOD_RES (19)..(20)..(21)..(22)..(23): Xaa is A or G
  MOD_RES (24)..(25)..(26)..(27): Xaa is A or G or absent
VKXQPSRVHHEPLTVLYYXXXXXXXXXEQLSNRLEEHLEXA

SEQ ID NO: 30674 - protein, 31 aa, Artificial Sequence
  Non-cyclic GFR-binding peptide
APTQLRPVQVRKIDDSSNVIKKATVNMVVRA

SEQ ID NO: 30675 - protein, 39 aa, Artificial Sequence
  Non-cyclic GFR-binding peptide
  MOD_RES (1)..(2)..(36)..(38): Xaa is C or S
  MOD_RES (16)..(17)..(18)..(19)..(20): Xaa is A or G
  MOD_RES (21)..(22)..(23)..(24): Xaa is A or G or absent
XXAPTKLSNITVQIMXXXXXXXXXIGEMSNMVVRSXGXH

SEQ ID NO: 30676 - protein, 41 aa, Artificial Sequence
  Non-cyclic GFR-binding peptide
  MOD_RES (6)..(40): Xaa is C or S
  MOD_RES (20)..(21)..(22)..(23)..(24): Xaa is A or G
  MOD_RES (25)..(26)..(27)..(28): Xaa is A or G or absent
DEGLEXVPTEEEPLTMLYYXXXXXXXXXEQLSNFLQHNKXE

SEQ ID NO: 30677 - protein, 39 aa, Artificial Sequence
  Non-cyclic GFR-binding peptide
  MOD_RES (6)..(7): Xaa is C or S
  MOD_RES (21)..(22)..(23)..(24)..(25): Xaa is A or G
  MOD_RES (26)..(27)..(28)..(29): Xaa is A or G or absent
ASASPXXVSQDLRPVQIRKIXXXXXXXXXKKATVMIVKS

SEQ ID NO: 30678 - protein, 38 aa, Artificial Sequence
  Non-cyclic GFR-binding peptide
  MOD_RES (37)..(37): Xaa is C or S
RPTQVQLEPLTVLYYEIVRKKPIFEQLSNTLEDHLAXK

SEQ ID NO: 30679 - protein, 35 aa, Artificial Sequence
  Non-cyclic GFR-binding peptide
  MOD_RES (3)..(4): Xaa is C or S
KAXXVPTELRSVKMAKVDEYDKVVKEVQVEMVVEG

SEQ ID NO: 30680 - protein, 37 aa, Artificial Sequence
  Non-cyclic GFR-binding peptide
  MOD_RES (3)..(4)..(35)..(37): Xaa is C or S
APXXVPQALSNITIQIMVGRKPKVIGEMSMIVRSXKX

SEQ ID NO: 30681 - protein, 40 aa, Artificial Sequence
  Non-cyclic GFR-binding peptide
  MOD_RES (5)..(6)..(37)..(39): Xaa is C or S
SASPXXVPQDLRPVQIRKIVGRTPKVKKATVMVVKSXKXS

SEQ ID NO: 30682 - protein, 36 aa, Artificial Sequence
  Non-cyclic GFR-binding peptide
  MOD_RES (3)..(4): Xaa is C or S
  MOD_RES (18)..(19)..(20)..(21)..(22): Xaa is A or G
  MOD_RES (23)..(24)..(25)..(26): Xaa is A or G or absent
KPXXAPTQLRSVKVAKVXXXXXXXXXKEVQVNMVVR

SEQ ID NO: 30683 - protein, 45 aa, Artificial Sequence
  Non-cyclic GFR-binding peptide
  MOD_RES (5)..(42)..(44): Xaa is C or S
SSVKXQPSRVHHEPLTVLYYEYVRKKPKLEQLSNRLEEHLEXAXA

SEQ ID NO: 30684 - protein, 34 aa, Artificial Sequence
  Non-cyclic GFR-binding peptide
  MOD_RES (1)..(2)..(33): Xaa is C or S
XXVSQDLRSVKIAKVIGKTPKIKEVQVMIVKSXK

SEQ ID NO: 30685 - protein, 37 aa, Artificial Sequence
  Non-cyclic GFR-binding peptide
  MOD_RES (5)..(6)..(37): Xaa is C or S
SAAPXXVPQALRSVKIAKVVGRKPKVKEVQVMIVRSX

SEQ ID NO: 30686 - protein, 39 aa, Artificial Sequence
  Non-cyclic GFR-binding peptide
  MOD_RES (3)..(37)..(39): Xaa is C or S
  MOD_RES (17)..(18)..(19)..(20)..(21): Xaa is A or G
  MOD_RES (22)..(23)..(24)..(25): Xaa is A or G or absent
LEXVPTEEEPLPMVYYXXXXXXXXXEQLSNFLQHNKXEX

SEQ ID NO: 30687 - protein, 41 aa, Artificial Sequence
  Non-cyclic GFR-binding peptide
  MOD_RES (6)..(7)..(39)..(41): Xaa is C or S
KIPKAXXVPTELRSVKMAKVDENEKVVKEVQVDMVVEGXGX

SEQ ID NO: 30688 - protein, 43 aa, Artificial Sequence
  Non-cyclic GFR-binding peptide
  MOD_RES (4)..(41)..(43): Xaa is C or S
  MOD_RES (20)..(21)..(22)..(23)..(24): Xaa is A or G
  MOD_RES (25)..(26)..(27)..(28): Xaa is A or G or absent
NVQXRPTQVQLEPLPVVYYXXXXXXXXXEQLSNTLEDHLAXKX

SEQ ID NO: 30689 - protein, 40 aa, Artificial Sequence
  Non-cyclic GFR-binding peptide
  MOD_RES (5)..(6)..(37)..(39): Xaa is C or S
SAAPXXVPQALSNITIQIMVGRKPKVIGEMSMIVRSXKXS

SEQ ID NO: 30690 - protein, 31 aa, Artificial Sequence
  Non-cyclic GFR-binding peptide
  MOD_RES (1)..(1): Xaa is C or S
XVPTELRSVKMAKVDENEKVVKEVQVDMVVE

SEQ ID NO: 30691 - protein, 34 aa, Artificial Sequence
  Non-cyclic GFR-binding peptide
  MOD_RES (32)..(34): Xaa is C or S
VPTELSNITMQIMDENEKVVIGEMSDMVVEGXGX

SEQ ID NO: 30692 - protein, 42 aa, Artificial Sequence
  Non-cyclic GFR-binding peptide
  MOD_RES (2)..(39)..(41): Xaa is C or S
  MOD_RES (18)..(19)..(20)..(21)..(22): Xaa is A or G
  MOD_RES (23)..(24)..(25)..(26): Xaa is A or G or absent
KXQPSRVHHEPLTVLYYXXXXXXXXXEQLSNRLEEHLEXAXA

SEQ ID NO: 30693 - protein, 39 aa, Artificial Sequence
  Non-cyclic GFR-binding peptide
  MOD_RES (6)..(7): Xaa is C or S
  MOD_RES (21)..(22)..(23)..(24)..(25): Xaa is A or G
  MOD_RES (26)..(27)..(28)..(29): Xaa is A or G or absent
TVPKPXXAPTQLRPVQVRKIXXXXXXXXXKKATVNMVVR

SEQ ID NO: 30694 - protein, 37 aa, Artificial Sequence
  Non-cyclic GFR-binding peptide
  MOD_RES (4)..(5): Xaa is C or S
  MOD_RES (19)..(20)..(21)..(22)..(23): Xaa is A or G
  MOD_RES (24)..(25)..(26)..(27): Xaa is A or G or absent
PKAXXVPTELSNITMQIMXXXXXXXXXIGEMSEMVVE

SEQ ID NO: 30695 - protein, 34 aa, Artificial Sequence
  Non-cyclic GFR-binding peptide
  MOD_RES (1)..(34): Xaa is C or S
  MOD_RES (15)..(16)..(17)..(18)..(19): Xaa is A or G
  MOD_RES (20)..(21)..(22)..(23): Xaa is A or G or absent
XVPQDLRPVQIRKIXXXXXXXXXKKATVMVVKSX

SEQ ID NO: 30696 - protein, 38 aa, Artificial Sequence
  Non-cyclic GFR-binding peptide
  MOD_RES (37)..(37): Xaa is C or S
  MOD_RES (16)..(17)..(18)..(19)..(20): Xaa is A or G
  MOD_RES (21)..(22)..(23)..(24): Xaa is A or G or absent
RPTQVQLEPLTVLYYXXXXXXXXXEQLSNTLEDHLAXK

SEQ ID NO: 30697 - protein, 35 aa, Artificial Sequence
  Non-cyclic GFR-binding peptide
  MOD_RES (3)..(3): Xaa is C or S
LEXVPTEEEPLPMVYYRIKPHQGQHEQLSNFLQHN

SEQ ID NO: 30698 - protein, 43 aa, Artificial Sequence
  Non-cyclic GFR-binding peptide
  MOD_RES (6)..(40)..(42): Xaa is C or S
  MOD_RES (20)..(21)..(22)..(23)..(24): Xaa is A or G
  MOD_RES (25)..(26)..(27)..(28): Xaa is A or G or absent
DEGLEXVPTEEEPLTMLYYXXXXXXXXXEQLSNFLQHNKXEXR

SEQ ID NO: 30699 - protein, 41 aa, Artificial Sequence
  Non-cyclic GFR-binding peptide
  MOD_RES (5)..(6)..(40): Xaa is C or S
  MOD_RES (20)..(21)..(22)..(23)..(24): Xaa is A or G
  MOD_RES (25)..(26)..(27)..(28): Xaa is A or G or absent
IPKAXXVPTELRSVKMAKVXXXXXXXXXKEVQVDMVVEGXG

SEQ ID NO: 30700 - protein, 36 aa, Artificial Sequence
  Non-cyclic GFR-binding peptide
  MOD_RES (34)..(36): Xaa is C or S
  MOD_RES (14)..(15)..(16)..(17)..(18): Xaa is A or G
  MOD_RES (19)..(20)..(21)..(22): Xaa is A or G or absent
VPTELRSVKMAKVXXXXXXXXXKEVQVDMVVEGXGX

SEQ ID NO: 30701 - protein, 36 aa, Artificial Sequence
  Non-cyclic GFR-binding peptide
  MOD_RES (2)..(34)..(36): Xaa is C or S
TXAPTKLSNITVQIMDDSSNVIIGEMSNMVVRSXGX

SEQ ID NO: 30702 - protein, 34 aa, Artificial Sequence
  Non-cyclic GFR-binding peptide
  MOD_RES (2)..(3)..(34): Xaa is C or S
PXXVPQDLRPVQIRKIVGRTPKVKKATVMVVKSX

SEQ ID NO: 30703 - protein, 34 aa, Artificial Sequence
  Non-cyclic GFR-binding peptide
  MOD_RES (33)..(33): Xaa is C or S
  MOD_RES (14)..(15)..(16)..(17)..(18): Xaa is A or G
  MOD_RES (19)..(20)..(21)..(22): Xaa is A or G or absent
VPQDLRSVKIAKVXXXXXXXXXKEVQVMVVKSXK

SEQ ID NO: 30704 - protein, 43 aa, Artificial Sequence
  Non-cyclic GFR-binding peptide
  MOD_RES (6)..(7)..(40)..(42): Xaa is C or S
  MOD_RES (21)..(22)..(23)..(24)..(25): Xaa is A or G
  MOD_RES (26)..(27)..(28)..(29): Xaa is A or G or absent
ASASPXXVPQDLSNITIQIMXXXXXXXXXIGEMSMVVKSXKXS

SEQ ID NO: 30705 - protein, 42 aa, Artificial Sequence
  Non-cyclic GFR-binding peptide
  MOD_RES (4)..(41): Xaa is C or S
NVQXRPTQVQLEPLTVLYYEIVRKKPIFEQLSNTLEDHLAXK

SEQ ID NO: 30706 - protein, 39 aa, Artificial Sequence
  Non-cyclic GFR-binding peptide
  MOD_RES (6)..(7): Xaa is C or S
  MOD_RES (21)..(22)..(23)..(24)..(25): Xaa is A or G
  MOD_RES (26)..(27)..(28)..(29): Xaa is A or G or absent
TVPKPXXAPTQLRSVKVAKVXXXXXXXXXKEVQVNMVVR

SEQ ID NO: 30707 - protein, 37 aa, Artificial Sequence
  Non-cyclic GFR-binding peptide
  MOD_RES (4)..(4): Xaa is C or S
  MOD_RES (18)..(19)..(20)..(21)..(22): Xaa is A or G
  MOD_RES (23)..(24)..(25)..(26): Xaa is A or G or absent
GLEXVPTEEEPLPMVYYXXXXXXXXXEQLSNFLQHNK

SEQ ID NO: 30708 - protein, 39 aa, Artificial Sequence
  Non-cyclic GFR-binding peptide
  MOD_RES (4)..(5)..(38): Xaa is C or S
  MOD_RES (19)..(20)..(21)..(22)..(23): Xaa is A or G
  MOD_RES (24)..(25)..(26)..(27): Xaa is A or G or absent
ASPXXVPQDLRSVKIAKVXXXXXXXXXKEVQVMVVKSXK

SEQ ID NO: 30709 - protein, 37 aa, Artificial Sequence
  Non-cyclic GFR-binding peptide
  MOD_RES (4)..(5): Xaa is C or S
  MOD_RES (19)..(20)..(21)..(22)..(23): Xaa is A or G
  MOD_RES (24)..(25)..(26)..(27): Xaa is A or G or absent
ASPXXVSQDLSNITIQIMXXXXXXXXXIGEMSMIVKS

SEQ ID NO: 30710 - protein, 31 aa, Artificial Sequence
  Non-cyclic GFR-binding peptide
APTKLSNITVQIMDDSSNVIIGEMSNMVVRS

SEQ ID NO: 30711 - protein, 40 aa, Artificial Sequence
  Non-cyclic GFR-binding peptide
  MOD_RES (2)..(3)..(37)..(39): Xaa is C or S
  MOD_RES (17)..(18)..(19)..(20)..(21): Xaa is A or G
  MOD_RES (22)..(23)..(24)..(25): Xaa is A or G or absent
AXXVPTELSNITMQIMXXXXXXXXXIGEMSDMVVEGXGXR

SEQ ID NO: 30712 - protein, 37 aa, Artificial Sequence
  Non-cyclic GFR-binding peptide
  MOD_RES (1)..(2)..(35)..(37): Xaa is C or S
  MOD_RES (16)..(17)..(18)..(19)..(20): Xaa is A or G
  MOD_RES (21)..(22)..(23)..(24): Xaa is A or G or absent
XXVPQALSNITIQIMXXXXXXXXXIGEMSMIVRSXKX

SEQ ID NO: 30713 - protein, 38 aa, Artificial Sequence
  Non-cyclic GFR-binding peptide
  MOD_RES (2)..(36)..(38): Xaa is C or S
  MOD_RES (16)..(17)..(18)..(19)..(20): Xaa is A or G
  MOD_RES (21)..(22)..(23)..(24): Xaa is A or G or absent
TXAPTKLSNITVQIMXXXXXXXXXIGEMSNMVVRSXGX

SEQ ID NO: 30714 - protein, 38 aa, Artificial Sequence
  Non-cyclic GFR-binding peptide
  MOD_RES (5)..(6): Xaa is C or S
  MOD_RES (20)..(21)..(22)..(23)..(24): Xaa is A or G
  MOD_RES (25)..(26)..(27)..(28): Xaa is A or G or absent
SAAPXXVPQALSNITIQIMXXXXXXXXXIGEMSMIVRS

SEQ ID NO: 30715 - protein, 41 aa, Artificial Sequence
  Non-cyclic GFR-binding peptide
  MOD_RES (6)..(38)..(40): Xaa is C or S
VTKPTXAPTKLRPVQVRKIDDSSNVIKKATVNMVVRSXGXH

SEQ ID NO: 30716 - protein, 37 aa, Artificial Sequence
  Non-cyclic GFR-binding peptide
  MOD_RES (3)..(4)..(36): Xaa is C or S
KPXXAPTKLSNITVQIMDDSSNVIIGEMSNMVVRSXG

SEQ ID NO: 30717 - protein, 35 aa, Artificial Sequence
  Non-cyclic GFR-binding peptide
  MOD_RES (1)..(2): Xaa is C or S
  MOD_RES (16)..(17)..(18)..(19)..(20): Xaa is A or G
  MOD_RES (21)..(22)..(23)..(24): Xaa is A or G or absent
XXVPTELSNITMQIMXXXXXXXXXIGEMSDMVVEG

SEQ ID NO: 30718 - protein, 39 aa, Artificial Sequence
  Non-cyclic GFR-binding peptide
  MOD_RES (1)..(2)..(36)..(38): Xaa is C or S
  MOD_RES (16)..(17)..(18)..(19)..(20): Xaa is A or G
  MOD_RES (21)..(22)..(23)..(24): Xaa is A or G or absent
XXVPTELRSVKMAKVXXXXXXXXXKEVQVDMVVEGXGXR

SEQ ID NO: 30719 - protein, 36 aa, Artificial Sequence
  Non-cyclic GFR-binding peptide
  MOD_RES (1)..(2)..(33)..(35): Xaa is C or S
XXVPQDLRSVKIAKVVGRTPKVKEVQVMVVKSXKXS

SEQ ID NO: 30720 - protein, 32 aa, Artificial Sequence
  Non-cyclic GFR-binding peptide
  MOD_RES (1)..(2): Xaa is C or S
XXVPTELRSVKMAKVDENEKVVKEVQVDMVVE

SEQ ID NO: 30721 - protein, 38 aa, Artificial Sequence
  Non-cyclic GFR-binding peptide
  MOD_RES (3)..(4)..(38): Xaa is C or S
  MOD_RES (18)..(19)..(20)..(21)..(22): Xaa is A or G
  MOD_RES (23)..(24)..(25)..(26): Xaa is A or G or absent
KPXXAPTKLSNITVQIMXXXXXXXXXIGEMSNMVVRSX

SEQ ID NO: 30722 - protein, 32 aa, Artificial Sequence
  Non-cyclic GFR-binding peptide
  MOD_RES (31)..(31): Xaa is C or S
VSQDLRSVKIAKVIGKTPKIKEVQVMIVKSXK

SEQ ID NO: 30723 - protein, 34 aa, Artificial Sequence
  Non-cyclic GFR-binding peptide
  MOD_RES (2)..(3): Xaa is C or S
AXXVPTELRSVKMAKVDENEKVVKEVQVDMVVEG

SEQ ID NO: 30724 - protein, 39 aa, Artificial Sequence
  Non-cyclic GFR-binding peptide
  MOD_RES (3)..(4)..(36)..(38): Xaa is C or S
KAXXVPTELSNITMQIMDENEKVVIGEMSDMVVEGXGXR

SEQ ID NO: 30725 - protein, 35 aa, Artificial Sequence
  Non-cyclic GFR-binding peptide
  MOD_RES (1)..(34): Xaa is C or S
  MOD_RES (15)..(16)..(17)..(18)..(19): Xaa is A or G
  MOD_RES (20)..(21)..(22)..(23): Xaa is A or G or absent
XVPQDLRSVKIAKVXXXXXXXXXKEVQVMVVKSXK

SEQ ID NO: 30726 - protein, 39 aa, Artificial Sequence
  Non-cyclic GFR-binding peptide
  MOD_RES (2)..(3)..(37)..(39): Xaa is C or S
  MOD_RES (17)..(18)..(19)..(20)..(21): Xaa is A or G
  MOD_RES (22)..(23)..(24)..(25): Xaa is A or G or absent
PXXAPTQLSNITVQIMXXXXXXXXXIGEMSNMVVRAXGX

SEQ ID NO: 30727 - protein, 40 aa, Artificial Sequence
  Non-cyclic GFR-binding peptide
  MOD_RES (2)..(3)..(37)..(39): Xaa is C or S
  MOD_RES (17)..(18)..(19)..(20)..(21): Xaa is A or G
  MOD_RES (22)..(23)..(24)..(25): Xaa is A or G or absent
PXXAPTQLRSVKVAKVXXXXXXXXXKEVQVNMVVRAXGXH

SEQ ID NO: 30728 - protein, 40 aa, Artificial Sequence
  Non-cyclic GFR-binding peptide
  MOD_RES (2)..(39): Xaa is C or S
  MOD_RES (18)..(19)..(20)..(21)..(22): Xaa is A or G
  MOD_RES (23)..(24)..(25)..(26): Xaa is A or G or absent
KXQPSRVHHEPLPVVYYXXXXXXXXXEQLSNRLEEHLEXA

SEQ ID NO: 30729 - protein, 44 aa, Artificial Sequence
  Non-cyclic GFR-binding peptide
  MOD_RES (5)..(42)..(44): Xaa is C or S
  MOD_RES (21)..(22)..(23)..(24)..(25): Xaa is A or G
  MOD_RES (26)..(27)..(28)..(29): Xaa is A or G or absent
RNVQXRPTQVQLEPLPVVYYXXXXXXXXXEQLSNTLEDHLAXKX

SEQ ID NO: 30730 - protein, 32 aa, Artificial Sequence
  Non-cyclic GFR-binding peptide
  MOD_RES (1)..(2): Xaa is C or S
XXVPTELRSVKMAKVDEYDKVVKEVQVEMVVE

SEQ ID NO: 30731 - protein, 37 aa, Artificial Sequence
  Non-cyclic GFR-binding peptide
  MOD_RES (7)..(7): Xaa is C or S
HVTKPTXAPTKLSNITVQIMDDSSNVIIGEMSNMVVR

SEQ ID NO: 30732 - protein, 40 aa, Artificial Sequence
  Non-cyclic GFR-binding peptide
  MOD_RES (4)..(5)..(37)..(39): Xaa is C or S
PKAXXVPTELSNITMQIMDENEKVVIGEMSDMVVEGXGXR

SEQ ID NO: 30733 - protein, 35 aa, Artificial Sequence
  Non-cyclic GFR-binding peptide
  MOD_RES (2)..(3): Xaa is C or S
  MOD_RES (17)..(18)..(19)..(20)..(21): Xaa is A or G
  MOD_RES (22)..(23)..(24)..(25): Xaa is A or G or absent
AXXVPTELRSVKMAKVXXXXXXXXXKEVQVEMVVE

SEQ ID NO: 30734 - protein, 41 aa, Artificial Sequence
  Non-cyclic GFR-binding peptide
  MOD_RES (5)..(6)..(40): Xaa is C or S
  MOD_RES (20)..(21)..(22)..(23)..(24): Xaa is A or G
  MOD_RES (25)..(26)..(27)..(28): Xaa is A or G or absent
VPKPXXAPTKLRPVQVRKIXXXXXXXXXKKATVNMVVRSXG

SEQ ID NO: 30735 - protein, 34 aa, Artificial Sequence
  Non-cyclic GFR-binding peptide
  MOD_RES (2)..(2): Xaa is C or S
  MOD_RES (16)..(17)..(18)..(19)..(20): Xaa is A or G
  MOD_RES (21)..(22)..(23)..(24): Xaa is A or G or absent
EXVPTEEEPLTMLYYXXXXXXXXXEQLSNFLQHN

SEQ ID NO: 30736 - protein, 34 aa, Artificial Sequence
  Non-cyclic GFR-binding peptide
  MOD_RES (3)..(4): Xaa is C or S
APXXVPQALRPVQIRKIVGRKPKVKKATVMIVRS

SEQ ID NO: 30737 - protein, 36 aa, Artificial Sequence
  Non-cyclic GFR-binding peptide
  MOD_RES (3)..(4): Xaa is C or S
  MOD_RES (18)..(19)..(20)..(21)..(22): Xaa is A or G
  MOD_RES (23)..(24)..(25)..(26): Xaa is A or G or absent
APXXVPQALRSVKIAKVXXXXXXXXXKEVQVMIVRS

SEQ ID NO: 30738 - protein, 37 aa, Artificial Sequence
  Non-cyclic GFR-binding peptide
  MOD_RES (2)..(3)..(37): Xaa is C or S
  MOD_RES (17)..(18)..(19)..(20)..(21): Xaa is A or G
  MOD_RES (22)..(23)..(24)..(25): Xaa is A or G or absent
PXXAPTQLSNITVQIMXXXXXXXXXIGEMSNMVVRAX

SEQ ID NO: 30739 - protein, 33 aa, Artificial Sequence
  Non-cyclic GFR-binding peptide
  MOD_RES (2)..(3): Xaa is C or S
PXXAPTKLRSVKVAKVDDSSNVIKEVQVNMVVR

SEQ ID NO: 30740 - protein, 36 aa, Artificial Sequence
  Non-cyclic GFR-binding peptide
  MOD_RES (1)..(34)..(36): Xaa is C or S
  MOD_RES (15)..(16)..(17)..(18)..(19): Xaa is A or G
  MOD_RES (20)..(21)..(22)..(23): Xaa is A or G or absent
XVPQALSNITIQIMXXXXXXXXXIGEMSMIVRSXKX

SEQ ID NO: 30741 - protein, 33 aa, Artificial Sequence
  Non-cyclic GFR-binding peptide
  MOD_RES (14)..(15)..(16)..(17)..(18): Xaa is A or G
  MOD_RES (19)..(20)..(21)..(22): Xaa is A or G or absent
SRVHHEPLTVLYYXXXXXXXXXEQLSNRLEEHL

SEQ ID NO: 30742 - protein, 37 aa, Artificial Sequence
  Non-cyclic GFR-binding peptide
  MOD_RES (6)..(7): Xaa is C or S
KIPKAXXVPTELSNITMQIMDENEKVVIGEMSDMVVE

SEQ ID NO: 30743 - protein, 33 aa, Artificial Sequence
  Non-cyclic GFR-binding peptide
  MOD_RES (33)..(33): Xaa is C or S
  MOD_RES (14)..(15)..(16)..(17)..(18): Xaa is A or G
  MOD_RES (19)..(20)..(21)..(22): Xaa is A or G or absent
VSQDLRPVQIRKIXXXXXXXXXKKATVMIVKSX

SEQ ID NO: 30744 - protein, 39 aa, Artificial Sequence
  Non-cyclic GFR-binding peptide
  MOD_RES (4)..(4): Xaa is C or S
  MOD_RES (20)..(21)..(22)..(23)..(24): Xaa is A or G
  MOD_RES (25)..(26)..(27)..(28): Xaa is A or G or absent
SVKXQPSRVHHEPLPVVYYXXXXXXXXXEQLSNRLEEHL

SEQ ID NO: 30745 - protein, 40 aa, Artificial Sequence
  Non-cyclic GFR-binding peptide
  MOD_RES (5)..(6)..(38)..(40): Xaa is C or S
IPKAXXVPTELRPVQMRKIDENEKVVKKATVDMVVEGXGX

SEQ ID NO: 30746 - protein, 38 aa, Artificial Sequence
  Non-cyclic GFR-binding peptide
  MOD_RES (4)..(5)..(36)..(38): Xaa is C or S
ASPXXVSQDLRPVQIRKIIGKTPKIKKATVMIVKSXKX

SEQ ID NO: 30747 - protein, 36 aa, Artificial Sequence
  Non-cyclic GFR-binding peptide
  MOD_RES (4)..(4): Xaa is C or S
  MOD_RES (18)..(19)..(20)..(21)..(22): Xaa is A or G
  MOD_RES (23)..(24)..(25)..(26): Xaa is A or G or absent
KPTXAPTKLRPVQVRKIXXXXXXXXXKKATVNMVVR

SEQ ID NO: 30748 - protein, 39 aa, Artificial Sequence
  Non-cyclic GFR-binding peptide
  MOD_RES (4)..(5)..(38): Xaa is C or S
  MOD_RES (19)..(20)..(21)..(22)..(23): Xaa is A or G
  MOD_RES (24)..(25)..(26)..(27): Xaa is A or G or absent
ASPXXVPQDLRPVQIRKIXXXXXXXXXKKATVMVVKSXK

SEQ ID NO: 30749 - protein, 38 aa, Artificial Sequence
  Non-cyclic GFR-binding peptide
  MOD_RES (3)..(4)..(38): Xaa is C or S
  MOD_RES (18)..(19)..(20)..(21)..(22): Xaa is A or G
  MOD_RES (23)..(24)..(25)..(26): Xaa is A or G or absent
KAXXVPTELRSVKMAKVXXXXXXXXXKEVQVEMVVEGX

SEQ ID NO: 30750 - protein, 40 aa, Artificial Sequence
  Non-cyclic GFR-binding peptide
  MOD_RES (4)..(5)..(39): Xaa is C or S
  MOD_RES (19)..(20)..(21)..(22)..(23): Xaa is A or G
  MOD_RES (24)..(25)..(26)..(27): Xaa is A or G or absent
PKPXXAPTKLRSVKVAKVXXXXXXXXXKEVQVNMVVRSXG

SEQ ID NO: 30751 - protein, 36 aa, Artificial Sequence
  Non-cyclic GFR-binding peptide
  MOD_RES (36)..(36): Xaa is C or S
PTQVQLEPLPVVYYEIVRKKPIFEQLSNTLEDHLAX

SEQ ID NO: 30752 - protein, 34 aa, Artificial Sequence
  Non-cyclic GFR-binding peptide
  MOD_RES (1)..(2)..(33): Xaa is C or S
XXVSQDLRPVQIRKIIGKTPKIKKATVMIVKSXK

SEQ ID NO: 30753 - protein, 39 aa, Artificial Sequence
  Non-cyclic GFR-binding peptide
  MOD_RES (5)..(6)..(39): Xaa is C or S
  MOD_RES (20)..(21)..(22)..(23)..(24): Xaa is A or G
  MOD_RES (25)..(26)..(27)..(28): Xaa is A or G or absent
SAAPXXVPQALRPVQIRKIXXXXXXXXXKKATVMIVRSX

SEQ ID NO: 30754 - protein, 43 aa, Artificial Sequence
  Non-cyclic GFR-binding peptide
  MOD_RES (3)..(40)..(42): Xaa is C or S
  MOD_RES (19)..(20)..(21)..(22)..(23): Xaa is A or G
  MOD_RES (24)..(25)..(26)..(27): Xaa is A or G or absent
VQXRPTQVQLEPLTVLYYXXXXXXXXXEQLSNTLEDHLAXKXE

SEQ ID NO: 30755 - protein, 39 aa, Artificial Sequence
  Non-cyclic GFR-binding peptide
  MOD_RES (5)..(6)..(39): Xaa is C or S
  MOD_RES (20)..(21)..(22)..(23)..(24): Xaa is A or G
  MOD_RES (25)..(26)..(27)..(28): Xaa is A or G or absent
SASPXXVSQDLRSVKIAKVXXXXXXXXXKEVQVMIVKSX

SEQ ID NO: 30756 - protein, 32 aa, Artificial Sequence
  Non-cyclic GFR-binding peptide
  MOD_RES (31)..(31): Xaa is C or S
VSQDLRPVQIRKIIGKTPKIKKATVMIVKSXK

SEQ ID NO: 30757 - protein, 35 aa, Artificial Sequence
  Non-cyclic GFR-binding peptide
  MOD_RES (1)..(35): Xaa is C or S
  MOD_RES (15)..(16)..(17)..(18)..(19): Xaa is A or G
  MOD_RES (20)..(21)..(22)..(23): Xaa is A or G or absent
XAPTKLRPVQVRKIXXXXXXXXXKKATVNMVVRSX

SEQ ID NO: 30758 - protein, 37 aa, Artificial Sequence
  Non-cyclic GFR-binding peptide
  MOD_RES (2)..(3)..(35)..(37): Xaa is C or S
PXXAPTQLRPVQVRKIDDSSNVIKKATVNMVVRAXGX

SEQ ID NO: 30759 - protein, 35 aa, Artificial Sequence
  Non-cyclic GFR-binding peptide
  MOD_RES (2)..(3)..(34): Xaa is C or S
PXXVSQDLSNITIQIMIGKTPKIIGEMSMIVKSXK

SEQ ID NO: 30760 - protein, 39 aa, Artificial Sequence
  Non-cyclic GFR-binding peptide
  MOD_RES (5)..(39): Xaa is C or S
  MOD_RES (19)..(20)..(21)..(22)..(23): Xaa is A or G
  MOD_RES (24)..(25)..(26)..(27): Xaa is A or G or absent
TKPTXAPTKLRPVQVRKIXXXXXXXXXKKATVNMVVRSX

SEQ ID NO: 30761 - protein, 38 aa, Artificial Sequence
  Non-cyclic GFR-binding peptide
  MOD_RES (3)..(4)..(37): Xaa is C or S
  MOD_RES (18)..(19)..(20)..(21)..(22): Xaa is A or G
  MOD_RES (23)..(24)..(25)..(26): Xaa is A or G or absent
SPXXVSQDLSNITIQIMXXXXXXXXXIGEMSMIVKSXK

SEQ ID NO: 30762 - protein, 38 aa, Artificial Sequence
  Non-cyclic GFR-binding peptide
  MOD_RES (3)..(4)..(38): Xaa is C or S
  MOD_RES (18)..(19)..(20)..(21)..(22): Xaa is A or G
  MOD_RES (23)..(24)..(25)..(26): Xaa is A or G or absent
KPXXAPTQLRPVQVRKIXXXXXXXXXKKATVNMVVRAX

SEQ ID NO: 30763 - protein, 42 aa, Artificial Sequence
  Non-cyclic GFR-binding peptide
  MOD_RES (6)..(7)..(40)..(42): Xaa is C or S
  MOD_RES (21)..(22)..(23)..(24)..(25): Xaa is A or G
  MOD_RES (26)..(27)..(28)..(29): Xaa is A or G or absent
ASASPXXVPQDLSNITIQIMXXXXXXXXXIGEMSMVVKSXKX

SEQ ID NO: 30764 - protein, 34 aa, Artificial Sequence
  Non-cyclic GFR-binding peptide
  MOD_RES (1)..(2): Xaa is C or S
  MOD_RES (16)..(17)..(18)..(19)..(20): Xaa is A or G
  MOD_RES (21)..(22)..(23)..(24): Xaa is A or G or absent
XXVSQDLSNITIQIMXXXXXXXXXIGEMSMIVKS

SEQ ID NO: 30765 - protein, 39 aa, Artificial Sequence
  Non-cyclic GFR-binding peptide
  MOD_RES (2)..(3)..(37)..(39): Xaa is C or S
  MOD_RES (17)..(18)..(19)..(20)..(21): Xaa is A or G
  MOD_RES (22)..(23)..(24)..(25): Xaa is A or G or absent
AXXVPTELRSVKMAKVXXXXXXXXXKEVQVEMVVEGXGX

SEQ ID NO: 30766 - protein, 32 aa, Artificial Sequence
  Non-cyclic GFR-binding peptide
  MOD_RES (2)..(2): Xaa is C or S
TXAPTKLRPVQVRKIDDSSNVIKKATVNMVVR

SEQ ID NO: 30767 - protein, 34 aa, Artificial Sequence
  Non-cyclic GFR-binding peptide
  MOD_RES (32)..(34): Xaa is C or S
VPTELSNITMQIMDEYDKVVIGEMSEMVVEGXGX

SEQ ID NO: 30768 - protein, 38 aa, Artificial Sequence
  Non-cyclic GFR-binding peptide
  MOD_RES (5)..(6): Xaa is C or S
  MOD_RES (20)..(21)..(22)..(23)..(24): Xaa is A or G
  MOD_RES (25)..(26)..(27)..(28): Xaa is A or G or absent
VPKPXXAPTKLSNITVQIMXXXXXXXXXIGEMSNMVVR

SEQ ID NO: 30769 - protein, 37 aa, Artificial Sequence
  Non-cyclic GFR-binding peptide
  MOD_RES (1)..(1): Xaa is C or S
  MOD_RES (17)..(18)..(19)..(20)..(21): Xaa is A or G
  MOD_RES (22)..(23)..(24)..(25): Xaa is A or G or absent
XQPSRVHHEPLTVLYYXXXXXXXXXEQLSNRLEEHLE

SEQ ID NO: 30770 - protein, 42 aa, Artificial Sequence
  Non-cyclic GFR-binding peptide
  MOD_RES (6)..(40)..(42): Xaa is C or S
  MOD_RES (20)..(21)..(22)..(23)..(24): Xaa is A or G
  MOD_RES (25)..(26)..(27)..(28): Xaa is A or G or absent
DEGLEXVPTEEEPLTMLYYXXXXXXXXXEQLSNFLQHNKXEX

SEQ ID NO: 30771 - protein, 38 aa, Artificial Sequence
  Non-cyclic GFR-binding peptide
  MOD_RES (6)..(6): Xaa is C or S
  MOD_RES (20)..(21)..(22)..(23)..(24): Xaa is A or G
  MOD_RES (25)..(26)..(27)..(28): Xaa is A or G or absent
DEGLEXVPTEEEPLTMLYYXXXXXXXXXEQLSNFLQHN

SEQ ID NO: 30772 - protein, 40 aa, Artificial Sequence
  Non-cyclic GFR-binding peptide
  MOD_RES (4)..(5)..(37)..(39): Xaa is C or S
PKPXXAPTQLRPVQVRKIDDSSNVIKKATVNMVVRAXGXH

SEQ ID NO: 30773 - protein, 37 aa, Artificial Sequence
  Non-cyclic GFR-binding peptide
  MOD_RES (2)..(3)..(37): Xaa is C or S
  MOD_RES (17)..(18)..(19)..(20)..(21): Xaa is A or G
  MOD_RES (22)..(23)..(24)..(25): Xaa is A or G or absent
AXXVPTELRSVKMAKVXXXXXXXXXKEVQVDMVVEGX

SEQ ID NO: 30774 - protein, 38 aa, Artificial Sequence
  Non-cyclic GFR-binding peptide
  MOD_RES (1)..(2)..(36)..(38): Xaa is C or S
  MOD_RES (16)..(17)..(18)..(19)..(20): Xaa is A or G
  MOD_RES (21)..(22)..(23)..(24): Xaa is A or G or absent
XXAPTQLRPVQVRKIXXXXXXXXXKKATVNMVVRAXGX

SEQ ID NO: 30775 - protein, 39 aa, Artificial Sequence
  Non-cyclic GFR-binding peptide
  MOD_RES (5)..(6)..(38): Xaa is C or S
VPKPXXAPTQLRPVQVRKIDDSSNVIKKATVNMVVRAXG

SEQ ID NO: 30776 - protein, 43 aa, Artificial Sequence
  Non-cyclic GFR-binding peptide
  MOD_RES (5)..(6)..(40)..(42): Xaa is C or S
  MOD_RES (20)..(21)..(22)..(23)..(24): Xaa is A or G
  MOD_RES (25)..(26)..(27)..(28): Xaa is A or G or absent
IPKAXXVPTELRPVQMRKIXXXXXXXXXKKATVEMVVEGXGXR

SEQ ID NO: 30777 - protein, 36 aa, Artificial Sequence
  Non-cyclic GFR-binding peptide
  MOD_RES (4)..(5): Xaa is C or S
PKAXXVPTELSNITMQIMDENEKVVIGEMSDMVVEG

SEQ ID NO: 30778 - protein, 36 aa, Artificial Sequence
  Non-cyclic GFR-binding peptide
  MOD_RES (1)..(34)..(36): Xaa is C or S
  MOD_RES (15)..(16)..(17)..(18)..(19): Xaa is A or G
  MOD_RES (20)..(21)..(22)..(23): Xaa is A or G or absent
XVPQDLRPVQIRKIXXXXXXXXXKKATVMVVKSXKX

SEQ ID NO: 30779 - protein, 37 aa, Artificial Sequence
  Non-cyclic GFR-binding peptide
  MOD_RES (4)..(5)..(36): Xaa is C or S
ASPXXVSQDLRPVQIRKIIGKTPKIKKATVMIVKSXK

SEQ ID NO: 30780 - protein, 38 aa, Artificial Sequence
  Non-cyclic GFR-binding peptide
  MOD_RES (4)..(4): Xaa is C or S
NVQXRPTQVQLEPLTVLYYEIVRKKPIFEQLSNTLEDH

SEQ ID NO: 30781 - protein, 36 aa, Artificial Sequence
  Non-cyclic GFR-binding peptide
  MOD_RES (35)..(35): Xaa is C or S
  MOD_RES (14)..(15)..(16)..(17)..(18): Xaa is A or G
  MOD_RES (19)..(20)..(21)..(22): Xaa is A or G or absent
SRVHHEPLTVLYYXXXXXXXXXEQLSNRLEEHLEXA

SEQ ID NO: 30782 - protein, 44 aa, Artificial Sequence
  Non-cyclic GFR-binding peptide
  MOD_RES (6)..(7)..(41)..(43): Xaa is C or S
  MOD_RES (21)..(22)..(23)..(24)..(25): Xaa is A or G
  MOD_RES (26)..(27)..(28)..(29): Xaa is A or G or absent
TVPKPXXAPTQLRPVQVRKIXXXXXXXXXKKATVNMVVRAXGXH

SEQ ID NO: 30783 - protein, 35 aa, Artificial Sequence
  Non-cyclic GFR-binding peptide
  MOD_RES (4)..(5): Xaa is C or S
ASPXXVPQDLRPVQIRKIVGRTPKVKKATVMVVKS

SEQ ID NO: 30784 - protein, 39 aa, Artificial Sequence
  Non-cyclic GFR-binding peptide
  MOD_RES (3)..(4)..(36)..(38): Xaa is C or S
KAXXVPTELRSVKMAKVDEYDKVVKEVQVEMVVEGXGXR

SEQ ID NO: 30785 - protein, 39 aa, Artificial Sequence
  Non-cyclic GFR-binding peptide
  MOD_RES (1)..(38): Xaa is C or S
XQPSRVHHEPLTVLYYEYVRKKPKLEQLSNRLEEHLEXA

SEQ ID NO: 30786 - protein, 42 aa, Artificial Sequence
  Non-cyclic GFR-binding peptide
  MOD_RES (4)..(5)..(39)..(41): Xaa is C or S
  MOD_RES (19)..(20)..(21)..(22)..(23): Xaa is A or G
  MOD_RES (24)..(25)..(26)..(27): Xaa is A or G or absent
PKPXXAPTKLRSVKVAKVXXXXXXXXXKEVQVNMVVRSXGXH

SEQ ID NO: 30787 - protein, 41 aa, Artificial Sequence
  Non-cyclic GFR-binding peptide
  MOD_RES (7)..(41): Xaa is C or S
NDEGLEXVPTEEEPLPMVYYRIKPHQGQHEQLSNFLQHNKX

SEQ ID NO: 30788 - protein, 33 aa, Artificial Sequence
  Non-cyclic GFR-binding peptide
  MOD_RES (14)..(15)..(16)..(17)..(18): Xaa is A or G
  MOD_RES (19)..(20)..(21)..(22): Xaa is A or G or absent
TQVQLEPLTVLYYXXXXXXXXXEQLSNTLEDHL

SEQ ID NO: 30789 - protein, 45 aa, Artificial Sequence
  Non-cyclic GFR-binding peptide
  MOD_RES (5)..(42)..(44): Xaa is C or S
SSVKXQPSRVHHEPLPVVYYEYVRKKPKLEQLSNRLEEHLEXAXA

SEQ ID NO: 30790 - protein, 37 aa, Artificial Sequence
  Non-cyclic GFR-binding peptide
  MOD_RES (34)..(36): Xaa is C or S
  MOD_RES (14)..(15)..(16)..(17)..(18): Xaa is A or G
  MOD_RES (19)..(20)..(21)..(22): Xaa is A or G or absent
APTKLSNITVQIMXXXXXXXXXIGEMSNMVVRSXGXH

SEQ ID NO: 30791 - protein, 40 aa, Artificial Sequence
  Non-cyclic GFR-binding peptide
  MOD_RES (2)..(3)..(37)..(39): Xaa is C or S
  MOD_RES (17)..(18)..(19)..(20)..(21): Xaa is A or G
  MOD_RES (22)..(23)..(24)..(25): Xaa is A or G or absent
AXXVPTELRPVQMRKIXXXXXXXXXKKATVEMVVEGXGXR

SEQ ID NO: 30792 - protein, 38 aa, Artificial Sequence
  Non-cyclic GFR-binding peptide
  MOD_RES (6)..(7)..(38): Xaa is C or S
ASASPXXVPQDLSNITIQIMVGRTPKVIGEMSMVVKSX

SEQ ID NO: 30793 - protein, 32 aa, Artificial Sequence
  Non-cyclic GFR-binding peptide
  MOD_RES (1)..(1): Xaa is C or S
XVPTELSNITMQIMDEYDKVVIGEMSEMVVEG

SEQ ID NO: 30794 - protein, 35 aa, Artificial Sequence
  Non-cyclic GFR-binding peptide
  MOD_RES (34)..(34): Xaa is C or S
  MOD_RES (14)..(15)..(16)..(17)..(18): Xaa is A or G
  MOD_RES (19)..(20)..(21)..(22): Xaa is A or G or absent
VPTELRPVQMRKIXXXXXXXXXKKATVEMVVEGXG

SEQ ID NO: 30795 - protein, 37 aa, Artificial Sequence
  Non-cyclic GFR-binding peptide
  MOD_RES (1)..(1): Xaa is C or S
  MOD_RES (17)..(18)..(19)..(20)..(21): Xaa is A or G
  MOD_RES (22)..(23)..(24)..(25): Xaa is A or G or absent
XRPTQVQLEPLTVLYYXXXXXXXXXEQLSNTLEDHLA

SEQ ID NO: 30796 - protein, 37 aa, Artificial Sequence
  Non-cyclic GFR-binding peptide
  MOD_RES (3)..(4)..(35)..(37): Xaa is C or S
SPXXVSQDLRPVQIRKIIGKTPKIKKATVMIVKSXKX

SEQ ID NO: 30797 - protein, 37 aa, Artificial Sequence
  Non-cyclic GFR-binding peptide
  MOD_RES (5)..(37): Xaa is C or S
TKPTXAPTKLRSVKVAKVDDSSNVIKEVQVNMVVRSX

SEQ ID NO: 30798 - protein, 41 aa, Artificial Sequence
  Non-cyclic GFR-binding peptide
  MOD_RES (3)..(4)..(38)..(40): Xaa is C or S
  MOD_RES (18)..(19)..(20)..(21)..(22): Xaa is A or G
  MOD_RES (23)..(24)..(25)..(26): Xaa is A or G or absent
KAXXVPTELSNITMQIMXXXXXXXXXIGEMSDMVVEGXGXR

SEQ ID NO: 30799 - protein, 34 aa, Artificial Sequence
  Non-cyclic GFR-binding peptide
  MOD_RES (33)..(33): Xaa is C or S
  MOD_RES (14)..(15)..(16)..(17)..(18): Xaa is A or G
  MOD_RES (19)..(20)..(21)..(22): Xaa is A or G or absent
VPQALRPVQIRKIXXXXXXXXXKKATVMIVRSXK

SEQ ID NO: 30800 - protein, 30 aa, Artificial Sequence
  Non-cyclic GFR-binding peptide
APTKLSNITVQIMDDSSNVIIGEMSNMVVR

SEQ ID NO: 30801 - protein, 42 aa, Artificial Sequence
  Non-cyclic GFR-binding peptide
  MOD_RES (5)..(39)..(41): Xaa is C or S
  MOD_RES (19)..(20)..(21)..(22)..(23): Xaa is A or G
  MOD_RES (24)..(25)..(26)..(27): Xaa is A or G or absent
TKPTXAPTKLRPVQVRKIXXXXXXXXXKKATVNMVVRSXGXH

SEQ ID NO: 30802 - protein, 36 aa, Artificial Sequence
  Non-cyclic GFR-binding peptide
  MOD_RES (5)..(6): Xaa is C or S
VPKPXXAPTKLRSVKVAKVDDSSNVIKEVQVNMVVR

SEQ ID NO: 30803 - protein, 38 aa, Artificial Sequence
  Non-cyclic GFR-binding peptide
  MOD_RES (4)..(5)..(36)..(38): Xaa is C or S
ASPXXVPQDLRPVQIRKIVGRTPKVKKATVMVVKSXKX

SEQ ID NO: 30804 - protein, 35 aa, Artificial Sequence
  Non-cyclic GFR-binding peptide
  MOD_RES (1)..(2)..(35): Xaa is C or S
  MOD_RES (16)..(17)..(18)..(19)..(20): Xaa is A or G
  MOD_RES (21)..(22)..(23)..(24): Xaa is A or G or absent
XXVPQALSNITIQIMXXXXXXXXXIGEMSMIVRSX

SEQ ID NO: 30805 - protein, 42 aa, Artificial Sequence
  Non-cyclic GFR-binding peptide
  MOD_RES (3)..(40)..(42): Xaa is C or S
VKXQPSRVHHEPLPVVYYEYVRKKPKLEQLSNRLEEHLEXAX

SEQ ID NO: 30806 - protein, 41 aa, Artificial Sequence
  Non-cyclic GFR-binding peptide
  MOD_RES (6)..(7)..(39)..(41): Xaa is C or S
KIPKAXXVPTELRPVQMRKIDENEKVVKKATVDMVVEGXGX

SEQ ID NO: 30807 - protein, 34 aa, Artificial Sequence
  Non-cyclic GFR-binding peptide
  MOD_RES (1)..(1): Xaa is C or S
  MOD_RES (15)..(16)..(17)..(18)..(19): Xaa is A or G
  MOD_RES (20)..(21)..(22)..(23): Xaa is A or G or absent
XVPTELRSVKMAKVXXXXXXXXXKEVQVEMVVEG

SEQ ID NO: 30808 - protein, 39 aa, Artificial Sequence
  Non-cyclic GFR-binding peptide
  MOD_RES (36)..(38): Xaa is C or S
  MOD_RES (15)..(16)..(17)..(18)..(19): Xaa is A or G
  MOD_RES (20)..(21)..(22)..(23): Xaa is A or G or absent
PSRVHHEPLPVVYYXXXXXXXXXEQLSNRLEEHLEXAXA

SEQ ID NO: 30809 - protein, 44 aa, Artificial Sequence
  Non-cyclic GFR-binding peptide
  MOD_RES (6)..(7)..(41)..(43): Xaa is C or S
  MOD_RES (21)..(22)..(23)..(24)..(25): Xaa is A or G
  MOD_RES (26)..(27)..(28)..(29): Xaa is A or G or absent
SIPKAXXVPTELRPVQMRKIXXXXXXXXXKKATVEMVVEGXGXR

SEQ ID NO: 30810 - protein, 32 aa, Artificial Sequence
  Non-cyclic GFR-binding peptide
  MOD_RES (31)..(31): Xaa is C or S
VSQDLSNITIQIMIGKTPKIIGEMSMIVKSXK

SEQ ID NO: 30811 - protein, 40 aa, Artificial Sequence
  Non-cyclic GFR-binding peptide
  MOD_RES (5)..(6)..(39): Xaa is C or S
  MOD_RES (20)..(21)..(22)..(23)..(24): Xaa is A or G
  MOD_RES (25)..(26)..(27)..(28): Xaa is A or G or absent
SASPXXVSQDLSNITIQIMXXXXXXXXXIGEMSMIVKSXK

SEQ ID NO: 30812 - protein, 36 aa, Artificial Sequence
  Non-cyclic GFR-binding peptide
  MOD_RES (34)..(36): Xaa is C or S
  MOD_RES (14)..(15)..(16)..(17)..(18): Xaa is A or G
  MOD_RES (19)..(20)..(21)..(22): Xaa is A or G or absent
APTQLSNITVQIMXXXXXXXXXIGEMSNMVVRAXGX

SEQ ID NO: 30813 - protein, 37 aa, Artificial Sequence
  Non-cyclic GFR-binding peptide
  MOD_RES (3)..(37): Xaa is C or S
LEXVPTEEEPLPMVYYRIKPHQGQHEQLSNFLQHNKX

SEQ ID NO: 30814 - protein, 37 aa, Artificial Sequence
  Non-cyclic GFR-binding peptide
  MOD_RES (2)..(3)..(34)..(36): Xaa is C or S
PXXVSQDLRPVQIRKIIGKTPKIKKATVMIVKSXKXS

SEQ ID NO: 30815 - protein, 35 aa, Artificial Sequence
  Non-cyclic GFR-binding peptide
  MOD_RES (1)..(34): Xaa is C or S
  MOD_RES (15)..(16)..(17)..(18)..(19): Xaa is A or G
  MOD_RES (20)..(21)..(22)..(23): Xaa is A or G or absent
XVSQDLRPVQIRKIXXXXXXXXXKKATVMIVKSXK

SEQ ID NO: 30816 - protein, 36 aa, Artificial Sequence
  Non-cyclic GFR-binding peptide
  MOD_RES (5)..(6): Xaa is C or S
VPKPXXAPTKLSNITVQIMDDSSNVIIGEMSNMVVR

SEQ ID NO: 30817 - protein, 34 aa, Artificial Sequence
  Non-cyclic GFR-binding peptide
  MOD_RES (1)..(33): Xaa is C or S
XVPTELRSVKMAKVDENEKVVKEVQVDMVVEGXG

SEQ ID NO: 30818 - protein, 38 aa, Artificial Sequence
  Non-cyclic GFR-binding peptide
  MOD_RES (2)..(3)..(37): Xaa is C or S
  MOD_RES (17)..(18)..(19)..(20)..(21): Xaa is A or G
  MOD_RES (22)..(23)..(24)..(25): Xaa is A or G or absent
AXXVPTELSNITMQIMXXXXXXXXXIGEMSEMVVEGXG

SEQ ID NO: 30819 - protein, 39 aa, Artificial Sequence
  Non-cyclic GFR-binding peptide
  MOD_RES (5)..(37)..(39): Xaa is C or S
TKPTXAPTKLSNITVQIMDDSSNVIIGEMSNMVVRSXGX

SEQ ID NO: 30820 - protein, 37 aa, Artificial Sequence
  Non-cyclic GFR-binding peptide
  MOD_RES (4)..(5)..(37): Xaa is C or S
PKPXXAPTQLRPVQVRKIDDSSNVIKKATVNMVVRAX

SEQ ID NO: 30821 - protein, 40 aa, Artificial Sequence
  Non-cyclic GFR-binding peptide
  MOD_RES (2)..(3)..(37)..(39): Xaa is C or S
  MOD_RES (17)..(18)..(19)..(20)..(21): Xaa is A or G
  MOD_RES (22)..(23)..(24)..(25): Xaa is A or G or absent
AXXVPTELRSVKMAKVXXXXXXXXXKEVQVDMVVEGXGXR

SEQ ID NO: 30822 - protein, 37 aa, Artificial Sequence
  Non-cyclic GFR-binding peptide
  MOD_RES (5)..(6)..(37): Xaa is C or S
SASPXXVSQDLSNITIQIMIGKTPKIIGEMSMIVKSX

SEQ ID NO: 30823 - protein, 40 aa, Artificial Sequence
  Non-cyclic GFR-binding peptide
  MOD_RES (4)..(4): Xaa is C or S
SVKXQPSRVHHEPLTVLYYEYVRKKPKLEQLSNRLEEHLE

SEQ ID NO: 30824 - protein, 34 aa, Artificial Sequence
  Non-cyclic GFR-binding peptide
  MOD_RES (15)..(16)..(17)..(18)..(19): Xaa is A or G
  MOD_RES (20)..(21)..(22)..(23): Xaa is A or G or absent
PTQVQLEPLPVVYYXXXXXXXXXEQLSNTLEDHL

SEQ ID NO: 30825 - protein, 41 aa, Artificial Sequence
  Non-cyclic GFR-binding peptide
  MOD_RES (6)..(7)..(41): Xaa is C or S
  MOD_RES (21)..(22)..(23)..(24)..(25): Xaa is A or G
  MOD_RES (26)..(27)..(28)..(29): Xaa is A or G or absent
TVPKPXXAPTQLSNITVQIMXXXXXXXXXIGEMSNMVVRAX

SEQ ID NO: 30826 - protein, 34 aa, Artificial Sequence
  Non-cyclic GFR-binding peptide
  MOD_RES (31)..(33): Xaa is C or S
VSQDLRSVKIAKVIGKTPKIKEVQVMIVKSXKXS

SEQ ID NO: 30827 - protein, 30 aa, Artificial Sequence
  Non-cyclic GFR-binding peptide
VPQDLSNITIQIMVGRTPKVIGEMSMVVKS

SEQ ID NO: 30828 - protein, 40 aa, Artificial Sequence
  Non-cyclic GFR-binding peptide
  MOD_RES (3)..(37)..(39): Xaa is C or S
  MOD_RES (17)..(18)..(19)..(20)..(21): Xaa is A or G
  MOD_RES (22)..(23)..(24)..(25): Xaa is A or G or absent
LEXVPTEEEPLTMLYYXXXXXXXXXEQLSNFLQHNKXEXR

SEQ ID NO: 30829 - protein, 41 aa, Artificial Sequence
  Non-cyclic GFR-binding peptide
  MOD_RES (4)..(41): Xaa is C or S
NVQXRPTQVQLEPLPVVYYEIVRKKPIFEQLSNTLEDHLAX

SEQ ID NO: 30830 - protein, 36 aa, Artificial Sequence
  Non-cyclic GFR-binding peptide
  MOD_RES (1)..(35): Xaa is C or S
  MOD_RES (15)..(16)..(17)..(18)..(19): Xaa is A or G
  MOD_RES (20)..(21)..(22)..(23): Xaa is A or G or absent
XVPTELRPVQMRKIXXXXXXXXXKKATVDMVVEGXG

SEQ ID NO: 30831 - protein, 34 aa, Artificial Sequence
  Non-cyclic GFR-binding peptide
  MOD_RES (1)..(1): Xaa is C or S
  MOD_RES (15)..(16)..(17)..(18)..(19): Xaa is A or G
  MOD_RES (20)..(21)..(22)..(23): Xaa is A or G or absent
XVPTELSNITMQIMXXXXXXXXXIGEMSDMVVEG

SEQ ID NO: 30832 - protein, 41 aa, Artificial Sequence
  Non-cyclic GFR-binding peptide
  MOD_RES (6)..(7)..(39)..(41): Xaa is C or S
SIPKAXXVPTELRSVKMAKVDEYDKVVKEVQVEMVVEGXGX

SEQ ID NO: 30833 - protein, 36 aa, Artificial Sequence
  Non-cyclic GFR-binding peptide
  MOD_RES (34)..(36): Xaa is C or S
  MOD_RES (14)..(15)..(16)..(17)..(18): Xaa is A or G
  MOD_RES (19)..(20)..(21)..(22): Xaa is A or G or absent
VPTELRPVQMRKIXXXXXXXXXKKATVDMVVEGXGX

SEQ ID NO: 30834 - protein, 35 aa, Artificial Sequence
  Non-cyclic GFR-binding peptide
  MOD_RES (1)..(2)..(35): Xaa is C or S
  MOD_RES (16)..(17)..(18)..(19)..(20): Xaa is A or G
  MOD_RES (21)..(22)..(23)..(24): Xaa is A or G or absent
XXVPQALRSVKIAKVXXXXXXXXXKEVQVMIVRSX

SEQ ID NO: 30835 - protein, 41 aa, Artificial Sequence
  Non-cyclic GFR-binding peptide
  MOD_RES (1)..(38)..(40): Xaa is C or S
  MOD_RES (17)..(18)..(19)..(20)..(21): Xaa is A or G
  MOD_RES (22)..(23)..(24)..(25): Xaa is A or G or absent
XRPTQVQLEPLTVLYYXXXXXXXXXEQLSNTLEDHLAXKXE

SEQ ID NO: 30836 - protein, 41 aa, Artificial Sequence
  Non-cyclic GFR-binding peptide
  MOD_RES (1)..(38)..(40): Xaa is C or S
XRPTQVQLEPLPVVYYEIVRKKPIFEQLSNTLEDHLAXKXE

SEQ ID NO: 30837 - protein, 38 aa, Artificial Sequence
  Non-cyclic GFR-binding peptide
  MOD_RES (5)..(6)..(37): Xaa is C or S
SASPXXVPQDLSNITIQIMVGRTPKVIGEMSMVVKSXK

SEQ ID NO: 30838 - protein, 35 aa, Artificial Sequence
  Non-cyclic GFR-binding peptide
  MOD_RES (3)..(4): Xaa is C or S
KAXXVPTELRPVQMRKIDEYDKVVKKATVEMVVEG

SEQ ID NO: 30839 - protein, 36 aa, Artificial Sequence
  Non-cyclic GFR-binding peptide
  MOD_RES (3)..(4)..(36): Xaa is C or S
KPXXAPTQLRPVQVRKIDDSSNVIKKATVNMVVRAX

SEQ ID NO: 30840 - protein, 37 aa, Artificial Sequence
  Non-cyclic GFR-binding peptide
  MOD_RES (4)..(5)..(37): Xaa is C or S
PKAXXVPTELRSVKMAKVDENEKVVKEVQVDMVVEGX

SEQ ID NO: 30841 - protein, 37 aa, Artificial Sequence
  Non-cyclic GFR-binding peptide
  MOD_RES (2)..(3)..(35)..(37): Xaa is C or S
PXXAPTQLRSVKVAKVDDSSNVIKEVQVNMVVRAXGX

SEQ ID NO: 30842 - protein, 37 aa, Artificial Sequence
  Non-cyclic GFR-binding peptide
  MOD_RES (2)..(3)..(36): Xaa is C or S
  MOD_RES (17)..(18)..(19)..(20)..(21): Xaa is A or G
  MOD_RES (22)..(23)..(24)..(25): Xaa is A or G or absent
PXXVPQDLRPVQIRKIXXXXXXXXXKKATVMVVKSXK

SEQ ID NO: 30843 - protein, 36 aa, Artificial Sequence
  Non-cyclic GFR-binding peptide
  MOD_RES (2)..(36): Xaa is C or S
  MOD_RES (16)..(17)..(18)..(19)..(20): Xaa is A or G
  MOD_RES (21)..(22)..(23)..(24): Xaa is A or G or absent
EXVPTEEEPLTMLYYXXXXXXXXXEQLSNFLQHNKX

SEQ ID NO: 30844 - protein, 33 aa, Artificial Sequence
  Non-cyclic GFR-binding peptide
  MOD_RES (33)..(33): Xaa is C or S
  MOD_RES (14)..(15)..(16)..(17)..(18): Xaa is A or G
  MOD_RES (19)..(20)..(21)..(22): Xaa is A or G or absent
VPQDLRPVQIRKIXXXXXXXXXKKATVMVVKSX

SEQ ID NO: 30845 - protein, 36 aa, Artificial Sequence
  Non-cyclic GFR-binding peptide
  MOD_RES (1)..(35): Xaa is C or S
  MOD_RES (15)..(16)..(17)..(18)..(19): Xaa is A or G
  MOD_RES (20)..(21)..(22)..(23): Xaa is A or G or absent
XVPTEEEPLTMLYYXXXXXXXXXEQLSNFLQHNKXE

SEQ ID NO: 30846 - protein, 40 aa, Artificial Sequence
  Non-cyclic GFR-binding peptide
  MOD_RES (5)..(6)..(38)..(40): Xaa is C or S
IPKAXXVPTELRPVQMRKIDEYDKVVKKATVEMVVEGXGX

SEQ ID NO: 30847 - protein, 33 aa, Artificial Sequence
  Non-cyclic GFR-binding peptide
  MOD_RES (32)..(32): Xaa is C or S
VPTELRPVQMRKIDENEKVVKKATVDMVVEGXG

SEQ ID NO: 30848 - protein, 34 aa, Artificial Sequence
  Non-cyclic GFR-binding peptide
  MOD_RES (15)..(16)..(17)..(18)..(19): Xaa is A or G
  MOD_RES (20)..(21)..(22)..(23): Xaa is A or G or absent
PSRVHHEPLPVVYYXXXXXXXXXEQLSNRLEEHL

SEQ ID NO: 30849 - protein, 40 aa, Artificial Sequence
  Non-cyclic GFR-binding peptide
  MOD_RES (6)..(40): Xaa is C or S
  MOD_RES (20)..(21)..(22)..(23)..(24): Xaa is A or G
  MOD_RES (25)..(26)..(27)..(28): Xaa is A or G or absent
DEGLEXVPTEEEPLPMVYYXXXXXXXXXEQLSNFLQHNKX

SEQ ID NO: 30850 - protein, 39 aa, Artificial Sequence
  Non-cyclic GFR-binding peptide
  MOD_RES (2)..(39): Xaa is C or S
  MOD_RES (18)..(19)..(20)..(21)..(22): Xaa is A or G
  MOD_RES (23)..(24)..(25)..(26): Xaa is A or G or absent
KXQPSRVHHEPLTVLYYXXXXXXXXXEQLSNRLEEHLEX

SEQ ID NO: 30851 - protein, 32 aa, Artificial Sequence
  Non-cyclic GFR-binding peptide
  MOD_RES (1)..(1): Xaa is C or S
XAPTQLSNITVQIMDDSSNVIIGEMSNMVVRA

SEQ ID NO: 30852 - protein, 34 aa, Artificial Sequence
  Non-cyclic GFR-binding peptide
QPSRVHHEPLPVVYYEYVRKKPKLEQLSNRLEEH

SEQ ID NO: 30853 - protein, 38 aa, Artificial Sequence
  Non-cyclic GFR-binding peptide
  MOD_RES (6)..(7)..(38): Xaa is C or S
ASASPXXVSQDLSNITIQIMIGKTPKIIGEMSMIVKSX

SEQ ID NO: 30854 - protein, 31 aa, Artificial Sequence
  Non-cyclic GFR-binding peptide
  MOD_RES (1)..(1): Xaa is C or S
XVPTELSNITMQIMDEYDKVVIGEMSEMVVE

SEQ ID NO: 30855 - protein, 38 aa, Artificial Sequence
  Non-cyclic GFR-binding peptide
  MOD_RES (3)..(4)..(37): Xaa is C or S
  MOD_RES (18)..(19)..(20)..(21)..(22): Xaa is A or G
  MOD_RES (23)..(24)..(25)..(26): Xaa is A or G or absent
SPXXVPQDLRSVKIAKVXXXXXXXXXKEVQVMVVKSXK

SEQ ID NO: 30856 - protein, 35 aa, Artificial Sequence
  Non-cyclic GFR-binding peptide
  MOD_RES (1)..(2)..(35): Xaa is C or S
  MOD_RES (16)..(17)..(18)..(19)..(20): Xaa is A or G
  MOD_RES (21)..(22)..(23)..(24): Xaa is A or G or absent
XXVPQDLSNITIQIMXXXXXXXXXIGEMSMVVKSX

SEQ ID NO: 30857 - protein, 35 aa, Artificial Sequence
  Non-cyclic GFR-binding peptide
  MOD_RES (35)..(35): Xaa is C or S
SRVHHEPLPVVYYEYVRKKPKLEQLSNRLEEHLEX

SEQ ID NO: 30858 - protein, 41 aa, Artificial Sequence
  Non-cyclic GFR-binding peptide
  MOD_RES (2)..(39)..(41): Xaa is C or S
QXRPTQVQLEPLPVVYYEIVRKKPIFEQLSNTLEDHLAXKX

SEQ ID NO: 30859 - protein, 37 aa, Artificial Sequence
  Non-cyclic GFR-binding peptide
  MOD_RES (6)..(7): Xaa is C or S
KIPKAXXVPTELRSVKMAKVDENEKVVKEVQVDMVVE

SEQ ID NO: 30860 - protein, 37 aa, Artificial Sequence
  Non-cyclic GFR-binding peptide
  MOD_RES (3)..(4)..(35)..(37): Xaa is C or S
SPXXVSQDLSNITIQIMIGKTPKIIGEMSMIVKSXKX

SEQ ID NO: 30861 - protein, 37 aa, Artificial Sequence
  Non-cyclic GFR-binding peptide
  MOD_RES (2)..(2): Xaa is C or S
KXQPSRVHHEPLTVLYYEYVRKKPKLEQLSNRLEEHL

SEQ ID NO: 30862 - protein, 41 aa, Artificial Sequence
  Non-cyclic GFR-binding peptide
  MOD_RES (3)..(4)..(38)..(40): Xaa is C or S
  MOD_RES (18)..(19)..(20)..(21)..(22): Xaa is A or G
  MOD_RES (23)..(24)..(25)..(26): Xaa is A or G or absent
KAXXVPTELRPVQMRKIXXXXXXXXXKKATVEMVVEGXGXR

SEQ ID NO: 30863 - protein, 38 aa, Artificial Sequence
  Non-cyclic GFR-binding peptide
  MOD_RES (37)..(37): Xaa is C or S
QPSRVHHEPLTVLYYEYVRKKPKLEQLSNRLEEHLEXA

SEQ ID NO: 30864 - protein, 38 aa, Artificial Sequence
  Non-cyclic GFR-binding peptide
  MOD_RES (6)..(6): Xaa is C or S
  MOD_RES (20)..(21)..(22)..(23)..(24): Xaa is A or G
  MOD_RES (25)..(26)..(27)..(28): Xaa is A or G or absent
VTKPTXAPTKLSNITVQIMXXXXXXXXXIGEMSNMVVR

SEQ ID NO: 30865 - protein, 42 aa, Artificial Sequence
  Non-cyclic GFR-binding peptide
  MOD_RES (7)..(41): Xaa is C or S
  MOD_RES (21)..(22)..(23)..(24)..(25): Xaa is A or G
  MOD_RES (26)..(27)..(28)..(29): Xaa is A or G or absent
HVTKPTXAPTKLRSVKVAKVXXXXXXXXXKEVQVNMVVRSXG

SEQ ID NO: 30866 - protein, 40 aa, Artificial Sequence
  Non-cyclic GFR-binding peptide
  MOD_RES (4)..(5)..(37)..(39): Xaa is C or S
PKAXXVPTELRPVQMRKIDEYDKVVKKATVEMVVEGXGXR

SEQ ID NO: 30867 - protein, 37 aa, Artificial Sequence
  Non-cyclic GFR-binding peptide
  MOD_RES (3)..(4)..(35)..(37): Xaa is C or S
SPXXVPQDLSNITIQIMVGRTPKVIGEMSMVVKSXKX

SEQ ID NO: 30868 - protein, 38 aa, Artificial Sequence
  Non-cyclic GFR-binding peptide
  MOD_RES (3)..(4)..(35)..(37): Xaa is C or S
SPXXVSQDLRPVQIRKIIGKTPKIKKATVMIVKSXKXS

SEQ ID NO: 30869 - protein, 36 aa, Artificial Sequence
  Non-cyclic GFR-binding peptide
  MOD_RES (5)..(6): Xaa is C or S
SASPXXVSQDLRPVQIRKIIGKTPKIKKATVMIVKS

SEQ ID NO: 30870 - protein, 36 aa, Artificial Sequence
  Non-cyclic GFR-binding peptide
  MOD_RES (1)..(33)..(35): Xaa is C or S
XAPTKLRSVKVAKVDDSSNVIKEVQVNMVVRSXGXH

SEQ ID NO: 30871 - protein, 35 aa, Artificial Sequence
  Non-cyclic GFR-binding peptide
  MOD_RES (4)..(5): Xaa is C or S
PKAXXVPTELRPVQMRKIDENEKVVKKATVDMVVE

SEQ ID NO: 30872 - protein, 32 aa, Artificial Sequence
  Non-cyclic GFR-binding peptide
SRVHHEPLPVVYYEYVRKKPKLEQLSNRLEEH

SEQ ID NO: 30873 - protein, 36 aa, Artificial Sequence
  Non-cyclic GFR-binding peptide
  MOD_RES (2)..(3): Xaa is C or S
  MOD_RES (17)..(18)..(19)..(20)..(21): Xaa is A or G
  MOD_RES (22)..(23)..(24)..(25): Xaa is A or G or absent
AXXVPTELRSVKMAKVXXXXXXXXXKEVQVDMVVEG

SEQ ID NO: 30874 - protein, 38 aa, Artificial Sequence
  Non-cyclic GFR-binding peptide
  MOD_RES (2)..(3)..(36)..(38): Xaa is C or S
  MOD_RES (17)..(18)..(19)..(20)..(21): Xaa is A or G
  MOD_RES (22)..(23)..(24)..(25): Xaa is A or G or absent
PXXVSQDLSNITIQIMXXXXXXXXXIGEMSMIVKSXKX

SEQ ID NO: 30875 - protein, 40 aa, Artificial Sequence
  Non-cyclic GFR-binding peptide
  MOD_RES (4)..(5)..(39): Xaa is C or S
  MOD_RES (19)..(20)..(21)..(22)..(23): Xaa is A or G
  MOD_RES (24)..(25)..(26)..(27): Xaa is A or G or absent
PKAXXVPTELSNITMQIMXXXXXXXXXIGEMSDMVVEGXG

SEQ ID NO: 30876 - protein, 42 aa, Artificial Sequence
  Non-cyclic GFR-binding peptide
  MOD_RES (2)..(39)..(41): Xaa is C or S
  MOD_RES (18)..(19)..(20)..(21)..(22): Xaa is A or G
  MOD_RES (23)..(24)..(25)..(26): Xaa is A or G or absent
QXRPTQVQLEPLTVLYYXXXXXXXXXEQLSNTLEDHLAXKXE

SEQ ID NO: 30877 - protein, 40 aa, Artificial Sequence
  Non-cyclic GFR-binding peptide
  MOD_RES (3)..(37)..(39): Xaa is C or S
LEXVPTEEEPLPMVYYRIKPHQGQHEQLSNFLQHNKXEXR

SEQ ID NO: 30878 - protein, 36 aa, Artificial Sequence
  Non-cyclic GFR-binding peptide
  MOD_RES (4)..(5)..(36): Xaa is C or S
ASPXXVPQDLSNITIQIMVGRTPKVIGEMSMVVKSX

SEQ ID NO: 30879 - protein, 36 aa, Artificial Sequence
  Non-cyclic GFR-binding peptide
  MOD_RES (1)..(2)..(36): Xaa is C or S
  MOD_RES (16)..(17)..(18)..(19)..(20): Xaa is A or G
  MOD_RES (21)..(22)..(23)..(24): Xaa is A or G or absent
XXAPTKLRSVKVAKVXXXXXXXXXKEVQVNMVVRSX

SEQ ID NO: 30880 - protein, 33 aa, Artificial Sequence
  Non-cyclic GFR-binding peptide
  MOD_RES (14)..(15)..(16)..(17)..(18): Xaa is A or G
  MOD_RES (19)..(20)..(21)..(22): Xaa is A or G or absent
VPTELRPVQMRKIXXXXXXXXXKKATVEMVVEG

SEQ ID NO: 30881 - protein, 42 aa, Artificial Sequence
  Non-cyclic GFR-binding peptide
  MOD_RES (5)..(6)..(40)..(42): Xaa is C or S
  MOD_RES (20)..(21)..(22)..(23)..(24): Xaa is A or G
  MOD_RES (25)..(26)..(27)..(28): Xaa is A or G or absent
VPKPXXAPTKLRPVQVRKIXXXXXXXXXKKATVNMVVRSXGX

SEQ ID NO: 30882 - protein, 42 aa, Artificial Sequence
  Non-cyclic GFR-binding peptide
  MOD_RES (5)..(42): Xaa is C or S
RNVQXRPTQVQLEPLTVLYYEIVRKKPIFEQLSNTLEDHLAX

SEQ ID NO: 30883 - protein, 38 aa, Artificial Sequence
  Non-cyclic GFR-binding peptide
  MOD_RES (4)..(5)..(36)..(38): Xaa is C or S
AAPXXVPQALSNITIQIMVGRKPKVIGEMSMIVRSXKX

SEQ ID NO: 30884 - protein, 39 aa, Artificial Sequence
  Non-cyclic GFR-binding peptide
  MOD_RES (3)..(4)..(38): Xaa is C or S
  MOD_RES (18)..(19)..(20)..(21)..(22): Xaa is A or G
  MOD_RES (23)..(24)..(25)..(26): Xaa is A or G or absent
KAXXVPTELRSVKMAKVXXXXXXXXXKEVQVDMVVEGXG

SEQ ID NO: 30885 - protein, 39 aa, Artificial Sequence
  Non-cyclic GFR-binding peptide
  MOD_RES (3)..(37)..(39): Xaa is C or S
  MOD_RES (17)..(18)..(19)..(20)..(21): Xaa is A or G
  MOD_RES (22)..(23)..(24)..(25): Xaa is A or G or absent
PTXAPTKLRPVQVRKIXXXXXXXXXKKATVNMVVRSXGX

SEQ ID NO: 30886 - protein, 44 aa, Artificial Sequence
  Non-cyclic GFR-binding peptide
  MOD_RES (7)..(41)..(43): Xaa is C or S
NDEGLEXVPTEEEPLPMVYYRIKPHQGQHEQLSNFLQHNKXEXR

SEQ ID NO: 30887 - protein, 32 aa, Artificial Sequence
  Non-cyclic GFR-binding peptide
SRVHHEPLTVLYYEYVRKKPKLEQLSNRLEEH

SEQ ID NO: 30888 - protein, 33 aa, Artificial Sequence
  Non-cyclic GFR-binding peptide
  MOD_RES (2)..(2): Xaa is C or S
TXAPTKLSNITVQIMDDSSNVIIGEMSNMVVRS

SEQ ID NO: 30889 - protein, 41 aa, Artificial Sequence
  Non-cyclic GFR-binding peptide
  MOD_RES (3)..(4)..(38)..(40): Xaa is C or S
  MOD_RES (18)..(19)..(20)..(21)..(22): Xaa is A or G
  MOD_RES (23)..(24)..(25)..(26): Xaa is A or G or absent
KPXXAPTKLSNITVQIMXXXXXXXXXIGEMSNMVVRSXGXH

SEQ ID NO: 30890 - protein, 44 aa, Artificial Sequence
  Non-cyclic GFR-binding peptide
  MOD_RES (4)..(41)..(43): Xaa is C or S
  MOD_RES (20)..(21)..(22)..(23)..(24): Xaa is A or G
  MOD_RES (25)..(26)..(27)..(28): Xaa is A or G or absent
SVKXQPSRVHHEPLPVVYYXXXXXXXXXEQLSNRLEEHLEXAXA

SEQ ID NO: 30891 - protein, 36 aa, Artificial Sequence
  Non-cyclic GFR-binding peptide
  MOD_RES (5)..(6): Xaa is C or S
IPKAXXVPTELRPVQMRKIDEYDKVVKKATVEMVVE

SEQ ID NO: 30892 - protein, 38 aa, Artificial Sequence
  Non-cyclic GFR-binding peptide
  MOD_RES (1)..(2)..(36)..(38): Xaa is C or S
  MOD_RES (16)..(17)..(18)..(19)..(20): Xaa is A or G
  MOD_RES (21)..(22)..(23)..(24): Xaa is A or G or absent
XXVPTELSNITMQIMXXXXXXXXXIGEMSDMVVEGXGX

SEQ ID NO: 30893 - protein, 40 aa, Artificial Sequence
  Non-cyclic GFR-binding peptide
  MOD_RES (3)..(40): Xaa is C or S
VKXQPSRVHHEPLPVVYYEYVRKKPKLEQLSNRLEEHLEX

SEQ ID NO: 30894 - protein, 37 aa, Artificial Sequence
  Non-cyclic GFR-binding peptide
  MOD_RES (4)..(36): Xaa is C or S
KPTXAPTKLRPVQVRKIDDSSNVIKKATVNMVVRSXG

SEQ ID NO: 30895 - protein, 33 aa, Artificial Sequence
  Non-cyclic GFR-binding peptide
  MOD_RES (1)..(1): Xaa is C or S
  MOD_RES (15)..(16)..(17)..(18)..(19): Xaa is A or G
  MOD_RES (20)..(21)..(22)..(23): Xaa is A or G or absent
XAPTQLRSVKVAKVXXXXXXXXXKEVQVNMVVR

SEQ ID NO: 30896 - protein, 35 aa, Artificial Sequence
  Non-cyclic GFR-binding peptide
  MOD_RES (1)..(2)..(35): Xaa is C or S
  MOD_RES (16)..(17)..(18)..(19)..(20): Xaa is A or G
  MOD_RES (21)..(22)..(23)..(24): Xaa is A or G or absent
XXVSQDLRPVQIRKIXXXXXXXXXKKATVMIVKSX

SEQ ID NO: 30897 - protein, 43 aa, Artificial Sequence
  Non-cyclic GFR-binding peptide
  MOD_RES (6)..(7)..(40)..(42): Xaa is C or S
  MOD_RES (21)..(22)..(23)..(24)..(25): Xaa is A or G
  MOD_RES (26)..(27)..(28)..(29): Xaa is A or G or absent
ASAAPXXVPQALRPVQIRKIXXXXXXXXXKKATVMIVRSXKXS

SEQ ID NO: 30898 - protein, 39 aa, Artificial Sequence
  Non-cyclic GFR-binding peptide
  MOD_RES (1)..(2)..(36)..(38): Xaa is C or S
  MOD_RES (16)..(17)..(18)..(19)..(20): Xaa is A or G
  MOD_RES (21)..(22)..(23)..(24): Xaa is A or G or absent
XXAPTKLRSVKVAKVXXXXXXXXXKEVQVNMVVRSXGXH

SEQ ID NO: 30899 - protein, 36 aa, Artificial Sequence
  Non-cyclic GFR-binding peptide
  MOD_RES (34)..(36): Xaa is C or S
  MOD_RES (14)..(15)..(16)..(17)..(18): Xaa is A or G
  MOD_RES (19)..(20)..(21)..(22): Xaa is A or G or absent
VPTEEEPLTMLYYXXXXXXXXXEQLSNFLQHNKXEX

SEQ ID NO: 30900 - protein, 37 aa, Artificial Sequence
  Non-cyclic GFR-binding peptide
  MOD_RES (6)..(7): Xaa is C or S
SIPKAXXVPTELSNITMQIMDEYDKVVIGEMSEMVVE

SEQ ID NO: 30901 - protein, 36 aa, Artificial Sequence
  Non-cyclic GFR-binding peptide
  MOD_RES (3)..(3): Xaa is C or S
LEXVPTEEEPLPMVYYRIKPHQGQHEQLSNFLQHNK

SEQ ID NO: 30902 - protein, 36 aa, Artificial Sequence
  Non-cyclic GFR-binding peptide
  MOD_RES (3)..(4): Xaa is C or S
  MOD_RES (18)..(19)..(20)..(21)..(22): Xaa is A or G
  MOD_RES (23)..(24)..(25)..(26): Xaa is A or G or absent
APXXVPQALRPVQIRKIXXXXXXXXXKKATVMIVRS

SEQ ID NO: 30903 - protein, 38 aa, Artificial Sequence
  Non-cyclic GFR-binding peptide
  MOD_RES (3)..(37): Xaa is C or S
  MOD_RES (17)..(18)..(19)..(20)..(21): Xaa is A or G
  MOD_RES (22)..(23)..(24)..(25): Xaa is A or G or absent
LEXVPTEEEPLPMVYYXXXXXXXXXEQLSNFLQHNKXE

SEQ ID NO: 30904 - protein, 41 aa, Artificial Sequence
  Non-cyclic GFR-binding peptide
  MOD_RES (5)..(6)..(40): Xaa is C or S
  MOD_RES (20)..(21)..(22)..(23)..(24): Xaa is A or G
  MOD_RES (25)..(26)..(27)..(28): Xaa is A or G or absent
VPKPXXAPTQLSNITVQIMXXXXXXXXXIGEMSNMVVRAXG

SEQ ID NO: 30905 - protein, 35 aa, Artificial Sequence
  Non-cyclic GFR-binding peptide
  MOD_RES (15)..(16)..(17)..(18)..(19): Xaa is A or G
  MOD_RES (20)..(21)..(22)..(23): Xaa is A or G or absent
PTQVQLEPLPVVYYXXXXXXXXXEQLSNTLEDHLA

SEQ ID NO: 30906 - protein, 39 aa, Artificial Sequence
  Non-cyclic GFR-binding peptide
  MOD_RES (4)..(5)..(38): Xaa is C or S
  MOD_RES (19)..(20)..(21)..(22)..(23): Xaa is A or G
  MOD_RES (24)..(25)..(26)..(27): Xaa is A or G or absent
AAPXXVPQALSNITIQIMXXXXXXXXXIGEMSMIVRSXK

SEQ ID NO: 30907 - protein, 33 aa, Artificial Sequence
  Non-cyclic GFR-binding peptide
  MOD_RES (1)..(1): Xaa is C or S
  MOD_RES (15)..(16)..(17)..(18)..(19): Xaa is A or G
  MOD_RES (20)..(21)..(22)..(23): Xaa is A or G or absent
XVPQDLRPVQIRKIXXXXXXXXXKKATVMVVKS

SEQ ID NO: 30908 - protein, 41 aa, Artificial Sequence
  Non-cyclic GFR-binding peptide
  MOD_RES (4)..(38)..(40): Xaa is C or S
  MOD_RES (18)..(19)..(20)..(21)..(22): Xaa is A or G
  MOD_RES (23)..(24)..(25)..(26): Xaa is A or G or absent
KPTXAPTKLRSVKVAKVXXXXXXXXXKEVQVNMVVRSXGXH

SEQ ID NO: 30909 - protein, 36 aa, Artificial Sequence
  Non-cyclic GFR-binding peptide
  MOD_RES (3)..(4): Xaa is C or S
  MOD_RES (18)..(19)..(20)..(21)..(22): Xaa is A or G
  MOD_RES (23)..(24)..(25)..(26): Xaa is A or G or absent
SPXXVSQDLRSVKIAKVXXXXXXXXXKEVQVMIVKS

SEQ ID NO: 30910 - protein, 37 aa, Artificial Sequence
  Non-cyclic GFR-binding peptide
  MOD_RES (4)..(5): Xaa is C or S
  MOD_RES (19)..(20)..(21)..(22)..(23): Xaa is A or G
  MOD_RES (24)..(25)..(26)..(27): Xaa is A or G or absent
PKAXXVPTELRPVQMRKIXXXXXXXXXKKATVDMVVE

SEQ ID NO: 30911 - protein, 38 aa, Artificial Sequence
  Non-cyclic GFR-binding peptide
  MOD_RES (2)..(3)..(37): Xaa is C or S
  MOD_RES (17)..(18)..(19)..(20)..(21): Xaa is A or G
  MOD_RES (22)..(23)..(24)..(25): Xaa is A or G or absent
PXXAPTQLSNITVQIMXXXXXXXXXIGEMSNMVVRAXG

SEQ ID NO: 30912 - protein, 37 aa, Artificial Sequence
  Non-cyclic GFR-binding peptide
  MOD_RES (3)..(4)..(36): Xaa is C or S
KPXXAPTQLSNITVQIMDDSSNVIIGEMSNMVVRAXG

SEQ ID NO: 30913 - protein, 35 aa, Artificial Sequence
  Non-cyclic GFR-binding peptide
  MOD_RES (4)..(5): Xaa is C or S
PKAXXVPTELSNITMQIMDEYDKVVIGEMSEMVVE

SEQ ID NO: 30914 - protein, 44 aa, Artificial Sequence
  Non-cyclic GFR-binding peptide
  MOD_RES (7)..(41)..(43): Xaa is C or S
  MOD_RES (21)..(22)..(23)..(24)..(25): Xaa is A or G
  MOD_RES (26)..(27)..(28)..(29): Xaa is A or G or absent
HVTKPTXAPTKLSNITVQIMXXXXXXXXXIGEMSNMVVRSXGXH

SEQ ID NO: 30915 - protein, 38 aa, Artificial Sequence
  Non-cyclic GFR-binding peptide
  MOD_RES (1)..(2)..(36)..(38): Xaa is C or S
  MOD_RES (16)..(17)..(18)..(19)..(20): Xaa is A or G
  MOD_RES (21)..(22)..(23)..(24): Xaa is A or G or absent
XXVPTELRPVQMRKIXXXXXXXXXKKATVDMVVEGXGX

SEQ ID NO: 30916 - protein, 43 aa, Artificial Sequence
  Non-cyclic GFR-binding peptide
  MOD_RES (5)..(42): Xaa is C or S
  MOD_RES (21)..(22)..(23)..(24)..(25): Xaa is A or G
  MOD_RES (26)..(27)..(28)..(29): Xaa is A or G or absent
SSVKXQPSRVHHEPLPVVYYXXXXXXXXXEQLSNRLEEHLEXA

SEQ ID NO: 30917 - protein, 38 aa, Artificial Sequence
  Non-cyclic GFR-binding peptide
  MOD_RES (36)..(38): Xaa is C or S
PTQVQLEPLTVLYYEIVRKKPIFEQLSNTLEDHLAXKX

SEQ ID NO: 30918 - protein, 38 aa, Artificial Sequence
  Non-cyclic GFR-binding peptide
  MOD_RES (3)..(4)..(35)..(37): Xaa is C or S
APXXVPQALRPVQIRKIVGRKPKVKKATVMIVRSXKXS

SEQ ID NO: 30919 - protein, 40 aa, Artificial Sequence
  Non-cyclic GFR-binding peptide
  MOD_RES (6)..(38)..(40): Xaa is C or S
VTKPTXAPTKLSNITVQIMDDSSNVIIGEMSNMVVRSXGX

SEQ ID NO: 30920 - protein, 34 aa, Artificial Sequence
  Non-cyclic GFR-binding peptide
  MOD_RES (33)..(33): Xaa is C or S
  MOD_RES (14)..(15)..(16)..(17)..(18): Xaa is A or G
  MOD_RES (19)..(20)..(21)..(22): Xaa is A or G or absent
VPQALRSVKIAKVXXXXXXXXXKEVQVMIVRSXK

SEQ ID NO: 30921 - protein, 38 aa, Artificial Sequence
  Non-cyclic GFR-binding peptide
  MOD_RES (2)..(3)..(37): Xaa is C or S
  MOD_RES (17)..(18)..(19)..(20)..(21): Xaa is A or G
  MOD_RES (22)..(23)..(24)..(25): Xaa is A or G or absent
AXXVPTELSNITMQIMXXXXXXXXXIGEMSDMVVEGXG

SEQ ID NO: 30922 - protein, 36 aa, Artificial Sequence
  Non-cyclic GFR-binding peptide
  MOD_RES (36)..(36): Xaa is C or S
  MOD_RES (15)..(16)..(17)..(18)..(19): Xaa is A or G
  MOD_RES (20)..(21)..(22)..(23): Xaa is A or G or absent
PTQVQLEPLTVLYYXXXXXXXXXEQLSNTLEDHLAX

SEQ ID NO: 30923 - protein, 31 aa, Artificial Sequence
  Non-cyclic GFR-binding peptide
  MOD_RES (1)..(1): Xaa is C or S
XVPQALRPVQIRKIVGRKPKVKKATVMIVRS

SEQ ID NO: 30924 - protein, 33 aa, Artificial Sequence
  Non-cyclic GFR-binding peptide
  MOD_RES (32)..(32): Xaa is C or S
VPTELRSVKMAKVDENEKVVKEVQVDMVVEGXG

SEQ ID NO: 30925 - protein, 39 aa, Artificial Sequence
  Non-cyclic GFR-binding peptide
  MOD_RES (6)..(6): Xaa is C or S
  MOD_RES (20)..(21)..(22)..(23)..(24): Xaa is A or G
  MOD_RES (25)..(26)..(27)..(28): Xaa is A or G or absent
VTKPTXAPTKLSNITVQIMXXXXXXXXXIGEMSNMVVRS

SEQ ID NO: 30926 - protein, 41 aa, Artificial Sequence
  Non-cyclic GFR-binding peptide
  MOD_RES (5)..(6)..(39)..(41): Xaa is C or S
  MOD_RES (20)..(21)..(22)..(23)..(24): Xaa is A or G
  MOD_RES (25)..(26)..(27)..(28): Xaa is A or G or absent
SAAPXXVPQALRSVKIAKVXXXXXXXXXKEVQVMIVRSXKX

SEQ ID NO: 30927 - protein, 40 aa, Artificial Sequence
  Non-cyclic GFR-binding peptide
  MOD_RES (2)..(3)..(37)..(39): Xaa is C or S
  MOD_RES (17)..(18)..(19)..(20)..(21): Xaa is A or G
  MOD_RES (22)..(23)..(24)..(25): Xaa is A or G or absent
PXXAPTQLSNITVQIMXXXXXXXXXIGEMSNMVVRAXGXH

SEQ ID NO: 30928 - protein, 45 aa, Artificial Sequence
  Non-cyclic GFR-binding peptide
  MOD_RES (5)..(42)..(44): Xaa is C or S
  MOD_RES (21)..(22)..(23)..(24)..(25): Xaa is A or G
  MOD_RES (26)..(27)..(28)..(29): Xaa is A or G or absent
SSVKXQPSRVHHEPLTVLYYXXXXXXXXXEQLSNRLEEHLEXAXA

SEQ ID NO: 30929 - protein, 41 aa, Artificial Sequence
  Non-cyclic GFR-binding peptide
  MOD_RES (5)..(6)..(38)..(40): Xaa is C or S
VPKPXXAPTKLRPVQVRKIDDSSNVIKKATVNMVVRSXGXH

SEQ ID NO: 30930 - protein, 34 aa, Artificial Sequence
  Non-cyclic GFR-binding peptide
PSRVHHEPLTVLYYEYVRKKPKLEQLSNRLEEHL

SEQ ID NO: 30931 - protein, 39 aa, Artificial Sequence
  Non-cyclic GFR-binding peptide
  MOD_RES (3)..(4)..(38): Xaa is C or S
  MOD_RES (18)..(19)..(20)..(21)..(22): Xaa is A or G
  MOD_RES (23)..(24)..(25)..(26): Xaa is A or G or absent
KPXXAPTKLRPVQVRKIXXXXXXXXXKKATVNMVVRSXG

SEQ ID NO: 30932 - protein, 37 aa, Artificial Sequence
  Non-cyclic GFR-binding peptide
  MOD_RES (3)..(4): Xaa is C or S
  MOD_RES (18)..(19)..(20)..(21)..(22): Xaa is A or G
  MOD_RES (23)..(24)..(25)..(26): Xaa is A or G or absent
KPXXAPTKLSNITVQIMXXXXXXXXXIGEMSNMVVRS

SEQ ID NO: 30933 - protein, 39 aa, Artificial Sequence
  Non-cyclic GFR-binding peptide
  MOD_RES (3)..(4)..(37)..(39): Xaa is C or S
  MOD_RES (18)..(19)..(20)..(21)..(22): Xaa is A or G
  MOD_RES (23)..(24)..(25)..(26): Xaa is A or G or absent
SPXXVSQDLSNITIQIMXXXXXXXXXIGEMSMIVKSXKX

SEQ ID NO: 30934 - protein, 30 aa, Artificial Sequence
  Non-cyclic GFR-binding peptide
VPTELRSVKMAKVDEYDKVVKEVQVEMVVE

SEQ ID NO: 30935 - protein, 36 aa, Artificial Sequence
  Non-cyclic GFR-binding peptide
  MOD_RES (35)..(35): Xaa is C or S
  MOD_RES (14)..(15)..(16)..(17)..(18): Xaa is A or G
  MOD_RES (19)..(20)..(21)..(22): Xaa is A or G or absent
TQVQLEPLPVVYYXXXXXXXXXEQLSNTLEDHLAXK

SEQ ID NO: 30936 - protein, 40 aa, Artificial Sequence
  Non-cyclic GFR-binding peptide
  MOD_RES (4)..(4): Xaa is C or S
SVKXQPSRVHHEPLPVVYYEYVRKKPKLEQLSNRLEEHLE

SEQ ID NO: 30937 - protein, 43 aa, Artificial Sequence
  Non-cyclic GFR-binding peptide
  MOD_RES (3)..(40)..(42): Xaa is C or S
  MOD_RES (19)..(20)..(21)..(22)..(23): Xaa is A or G
  MOD_RES (24)..(25)..(26)..(27): Xaa is A or G or absent
VKXQPSRVHHEPLPVVYYXXXXXXXXXEQLSNRLEEHLEXAXA

SEQ ID NO: 30938 - protein, 32 aa, Artificial Sequence
  Non-cyclic GFR-binding peptide
  MOD_RES (1)..(2): Xaa is C or S
XXVPQALRSVKIAKVVGRKPKVKEVQVMIVRS

SEQ ID NO: 30939 - protein, 34 aa, Artificial Sequence
  Non-cyclic GFR-binding peptide
  MOD_RES (31)..(33): Xaa is C or S
VPQALRSVKIAKVVGRKPKVKEVQVMIVRSXKXS

SEQ ID NO: 30940 - protein, 42 aa, Artificial Sequence
  Non-cyclic GFR-binding peptide
  MOD_RES (5)..(42): Xaa is C or S
  MOD_RES (21)..(22)..(23)..(24)..(25): Xaa is A or G
  MOD_RES (26)..(27)..(28)..(29): Xaa is A or G or absent
SSVKXQPSRVHHEPLPVVYYXXXXXXXXXEQLSNRLEEHLEX

SEQ ID NO: 30941 - protein, 36 aa, Artificial Sequence
  Non-cyclic GFR-binding peptide
  MOD_RES (3)..(4)..(36): Xaa is C or S
KAXXVPTELSNITMQIMDENEKVVIGEMSDMVVEGX

SEQ ID NO: 30942 - protein, 40 aa, Artificial Sequence
  Non-cyclic GFR-binding peptide
  MOD_RES (4)..(5)..(39): Xaa is C or S
  MOD_RES (19)..(20)..(21)..(22)..(23): Xaa is A or G
  MOD_RES (24)..(25)..(26)..(27): Xaa is A or G or absent
PKAXXVPTELSNITMQIMXXXXXXXXXIGEMSEMVVEGXG

SEQ ID NO: 30943 - protein, 35 aa, Artificial Sequence
  Non-cyclic GFR-binding peptide
  MOD_RES (1)..(2)..(34): Xaa is C or S
XXAPTQLRPVQVRKIDDSSNVIKKATVNMVVRAXG

SEQ ID NO: 30944 - protein, 41 aa, Artificial Sequence
  Non-cyclic GFR-binding peptide
  MOD_RES (3)..(4)..(38)..(40): Xaa is C or S
  MOD_RES (18)..(19)..(20)..(21)..(22): Xaa is A or G
  MOD_RES (23)..(24)..(25)..(26): Xaa is A or G or absent
KPXXAPTQLRPVQVRKIXXXXXXXXXKKATVNMVVRAXGXH

SEQ ID NO: 30945 - protein, 41 aa, Artificial Sequence
  Non-cyclic GFR-binding peptide
  MOD_RES (5)..(6)..(40): Xaa is C or S
  MOD_RES (20)..(21)..(22)..(23)..(24): Xaa is A or G
  MOD_RES (25)..(26)..(27)..(28): Xaa is A or G or absent
VPKPXXAPTKLRSVKVAKVXXXXXXXXXKEVQVNMVVRSXG

SEQ ID NO: 30946 - protein, 32 aa, Artificial Sequence
  Non-cyclic GFR-binding peptide
  MOD_RES (14)..(15)..(16)..(17)..(18): Xaa is A or G
  MOD_RES (19)..(20)..(21)..(22): Xaa is A or G or absent
APTQLRPVQVRKIXXXXXXXXXKKATVNMVVR

SEQ ID NO: 30947 - protein, 41 aa, Artificial Sequence
  Non-cyclic GFR-binding peptide
  MOD_RES (6)..(7)..(41): Xaa is C or S
  MOD_RES (21)..(22)..(23)..(24)..(25): Xaa is A or G
  MOD_RES (26)..(27)..(28)..(29): Xaa is A or G or absent
SIPKAXXVPTELRSVKMAKVXXXXXXXXXKEVQVEMVVEGX

SEQ ID NO: 30948 - protein, 36 aa, Artificial Sequence
  Non-cyclic GFR-binding peptide
  MOD_RES (4)..(4): Xaa is C or S
  MOD_RES (18)..(19)..(20)..(21)..(22): Xaa is A or G
  MOD_RES (23)..(24)..(25)..(26): Xaa is A or G or absent
KPTXAPTKLRSVKVAKVXXXXXXXXXKEVQVNMVVR

SEQ ID NO: 30949 - protein, 34 aa, Artificial Sequence
  Non-cyclic GFR-binding peptide
  MOD_RES (2)..(3)..(34): Xaa is C or S
PXXVSQDLSNITIQIMIGKTPKIIGEMSMIVKSX

SEQ ID NO: 30950 - protein, 39 aa, Artificial Sequence
  Non-cyclic GFR-binding peptide
  MOD_RES (3)..(37)..(39): Xaa is C or S
  MOD_RES (17)..(18)..(19)..(20)..(21): Xaa is A or G
  MOD_RES (22)..(23)..(24)..(25): Xaa is A or G or absent
LEXVPTEEEPLTMLYYXXXXXXXXXEQLSNFLQHNKXEX

SEQ ID NO: 30951 - protein, 33 aa, Artificial Sequence
  Non-cyclic GFR-binding peptide
  MOD_RES (32)..(32): Xaa is C or S
APTKLRPVQVRKIDDSSNVIKKATVNMVVRSXG

SEQ ID NO: 30952 - protein, 38 aa, Artificial Sequence
  Non-cyclic GFR-binding peptide
  MOD_RES (1)..(2)..(36)..(38): Xaa is C or S
  MOD_RES (16)..(17)..(18)..(19)..(20): Xaa is A or G
  MOD_RES (21)..(22)..(23)..(24): Xaa is A or G or absent
XXVPTELRSVKMAKVXXXXXXXXXKEVQVDMVVEGXGX

SEQ ID NO: 30953 - protein, 34 aa, Artificial Sequence
  Non-cyclic GFR-binding peptide
  MOD_RES (1)..(32)..(34): Xaa is C or S
XVSQDLRPVQIRKIIGKTPKIKKATVMIVKSXKX

SEQ ID NO: 30954 - protein, 39 aa, Artificial Sequence
  Non-cyclic GFR-binding peptide
  MOD_RES (2)..(3)..(37)..(39): Xaa is C or S
  MOD_RES (17)..(18)..(19)..(20)..(21): Xaa is A or G
  MOD_RES (22)..(23)..(24)..(25): Xaa is A or G or absent
AXXVPTELSNITMQIMXXXXXXXXXIGEMSEMVVEGXGX

SEQ ID NO: 30955 - protein, 34 aa, Artificial Sequence
  Non-cyclic GFR-binding peptide
  MOD_RES (1)..(34): Xaa is C or S
  MOD_RES (15)..(16)..(17)..(18)..(19): Xaa is A or G
  MOD_RES (20)..(21)..(22)..(23): Xaa is A or G or absent
XVPQALRPVQIRKIXXXXXXXXXKKATVMIVRSX

SEQ ID NO: 30956 - protein, 35 aa, Artificial Sequence
  Non-cyclic GFR-binding peptide
  MOD_RES (2)..(2): Xaa is C or S
EXVPTEEEPLTMLYYRIKPHQGQHEQLSNFLQHNK

SEQ ID NO: 30957 - protein, 35 aa, Artificial Sequence
  Non-cyclic GFR-binding peptide
  MOD_RES (2)..(2): Xaa is C or S
  MOD_RES (16)..(17)..(18)..(19)..(20): Xaa is A or G
  MOD_RES (21)..(22)..(23)..(24): Xaa is A or G or absent
TXAPTKLRSVKVAKVXXXXXXXXXKEVQVNMVVRS

SEQ ID NO: 30958 - protein, 38 aa, Artificial Sequence
  Non-cyclic GFR-binding peptide
  MOD_RES (4)..(5): Xaa is C or S
  MOD_RES (19)..(20)..(21)..(22)..(23): Xaa is A or G
  MOD_RES (24)..(25)..(26)..(27): Xaa is A or G or absent
PKAXXVPTELSNITMQIMXXXXXXXXXIGEMSEMVVEG

SEQ ID NO: 30959 - protein, 38 aa, Artificial Sequence
  Non-cyclic GFR-binding peptide
  MOD_RES (4)..(4): Xaa is C or S
  MOD_RES (20)..(21)..(22)..(23)..(24): Xaa is A or G
  MOD_RES (25)..(26)..(27)..(28): Xaa is A or G or absent
NVQXRPTQVQLEPLTVLYYXXXXXXXXXEQLSNTLEDH

SEQ ID NO: 30960 - protein, 36 aa, Artificial Sequence
  Non-cyclic GFR-binding peptide
  MOD_RES (1)..(2)..(34)..(36): Xaa is C or S
XXAPTQLRPVQVRKIDDSSNVIKKATVNMVVRAXGX

SEQ ID NO: 30961 - protein, 33 aa, Artificial Sequence
  Non-cyclic GFR-binding peptide
  MOD_RES (33)..(33): Xaa is C or S
  MOD_RES (14)..(15)..(16)..(17)..(18): Xaa is A or G
  MOD_RES (19)..(20)..(21)..(22): Xaa is A or G or absent
VPQDLRSVKIAKVXXXXXXXXXKEVQVMVVKSX

SEQ ID NO: 30962 - protein, 37 aa, Artificial Sequence
  Non-cyclic GFR-binding peptide
  MOD_RES (3)..(35)..(37): Xaa is C or S
PTXAPTKLSNITVQIMDDSSNVIIGEMSNMVVRSXGX

SEQ ID NO: 30963 - protein, 37 aa, Artificial Sequence
  Non-cyclic GFR-binding peptide
  MOD_RES (3)..(3): Xaa is C or S
VKXQPSRVHHEPLTVLYYEYVRKKPKLEQLSNRLEEH

SEQ ID NO: 30964 - protein, 33 aa, Artificial Sequence
  Non-cyclic GFR-binding peptide
  MOD_RES (31)..(33): Xaa is C or S
VPQDLRPVQIRKIVGRTPKVKKATVMVVKSXKX

SEQ ID NO: 30965 - protein, 41 aa, Artificial Sequence
  Non-cyclic GFR-binding peptide
  MOD_RES (5)..(39)..(41): Xaa is C or S
  MOD_RES (19)..(20)..(21)..(22)..(23): Xaa is A or G
  MOD_RES (24)..(25)..(26)..(27): Xaa is A or G or absent
EGLEXVPTEEEPLTMLYYXXXXXXXXXEQLSNFLQHNKXEX

SEQ ID NO: 30966 - protein, 33 aa, Artificial Sequence
  Non-cyclic GFR-binding peptide
  MOD_RES (1)..(1): Xaa is C or S
  MOD_RES (15)..(16)..(17)..(18)..(19): Xaa is A or G
  MOD_RES (20)..(21)..(22)..(23): Xaa is A or G or absent
XAPTKLSNITVQIMXXXXXXXXXIGEMSNMVVR

SEQ ID NO: 30967 - protein, 34 aa, Artificial Sequence
  Non-cyclic GFR-binding peptide
  MOD_RES (1)..(2)..(34): Xaa is C or S
XXVPTELSNITMQIMDEYDKVVIGEMSEMVVEGX

SEQ ID NO: 30968 - protein, 34 aa, Artificial Sequence
  Non-cyclic GFR-binding peptide
  MOD_RES (32)..(34): Xaa is C or S
APTKLRSVKVAKVDDSSNVIKEVQVNMVVRSXGX

SEQ ID NO: 30969 - protein, 37 aa, Artificial Sequence
  Non-cyclic GFR-binding peptide
  MOD_RES (4)..(5)..(37): Xaa is C or S
PKAXXVPTELRPVQMRKIDENEKVVKKATVDMVVEGX

SEQ ID NO: 30970 - protein, 36 aa, Artificial Sequence
  Non-cyclic GFR-binding peptide
  MOD_RES (2)..(34)..(36): Xaa is C or S
TXAPTKLRSVKVAKVDDSSNVIKEVQVNMVVRSXGX

SEQ ID NO: 30971 - protein, 39 aa, Artificial Sequence
  Non-cyclic GFR-binding peptide
  MOD_RES (5)..(6)..(37)..(39): Xaa is C or S
SASPXXVSQDLSNITIQIMIGKTPKIIGEMSMIVKSXKX

SEQ ID NO: 30972 - protein, 40 aa, Artificial Sequence
  Non-cyclic GFR-binding peptide
  MOD_RES (6)..(7)..(38)..(40): Xaa is C or S
ASASPXXVPQDLSNITIQIMVGRTPKVIGEMSMVVKSXKX

SEQ ID NO: 30973 - protein, 38 aa, Artificial Sequence
  Non-cyclic GFR-binding peptide
  MOD_RES (4)..(4): Xaa is C or S
NVQXRPTQVQLEPLPVVYYEIVRKKPIFEQLSNTLEDH

SEQ ID NO: 30974 - protein, 42 aa, Artificial Sequence
  Non-cyclic GFR-binding peptide
  MOD_RES (7)..(41): Xaa is C or S
  MOD_RES (21)..(22)..(23)..(24)..(25): Xaa is A or G
  MOD_RES (26)..(27)..(28)..(29): Xaa is A or G or absent
HVTKPTXAPTKLRPVQVRKIXXXXXXXXXKKATVNMVVRSXG

SEQ ID NO: 30975 - protein, 36 aa, Artificial Sequence
  Non-cyclic GFR-binding peptide
  MOD_RES (5)..(5): Xaa is C or S
TKPTXAPTKLRPVQVRKIDDSSNVIKKATVNMVVRS

SEQ ID NO: 30976 - protein, 39 aa, Artificial Sequence
  Non-cyclic GFR-binding peptide
  MOD_RES (6)..(6): Xaa is C or S
DEGLEXVPTEEEPLPMVYYRIKPHQGQHEQLSNFLQHNK

SEQ ID NO: 30977 - protein, 37 aa, Artificial Sequence
  Non-cyclic GFR-binding peptide
  MOD_RES (3)..(37): Xaa is C or S
  MOD_RES (17)..(18)..(19)..(20)..(21): Xaa is A or G
  MOD_RES (22)..(23)..(24)..(25): Xaa is A or G or absent
PTXAPTKLRPVQVRKIXXXXXXXXXKKATVNMVVRSX

SEQ ID NO: 30978 - protein, 38 aa, Artificial Sequence
  Non-cyclic GFR-binding peptide
  MOD_RES (1)..(2)..(35)..(37): Xaa is C or S
  MOD_RES (16)..(17)..(18)..(19)..(20): Xaa is A or G
  MOD_RES (21)..(22)..(23)..(24): Xaa is A or G or absent
XXVPQALRSVKIAKVXXXXXXXXXKEVQVMIVRSXKXS

SEQ ID NO: 30979 - protein, 40 aa, Artificial Sequence
  Non-cyclic GFR-binding peptide
  MOD_RES (6)..(7)..(40): Xaa is C or S
  MOD_RES (21)..(22)..(23)..(24)..(25): Xaa is A or G
  MOD_RES (26)..(27)..(28)..(29): Xaa is A or G or absent
ASASPXXVSQDLRPVQIRKIXXXXXXXXXKKATVMIVKSX

SEQ ID NO: 30980 - protein, 34 aa, Artificial Sequence
  Non-cyclic GFR-binding peptide
  MOD_RES (34)..(34): Xaa is C or S
  MOD_RES (14)..(15)..(16)..(17)..(18): Xaa is A or G
  MOD_RES (19)..(20)..(21)..(22): Xaa is A or G or absent
APTQLRSVKVAKVXXXXXXXXXKEVQVNMVVRAX

SEQ ID NO: 30981 - protein, 38 aa, Artificial Sequence
  Non-cyclic GFR-binding peptide
  MOD_RES (5)..(6): Xaa is C or S
  MOD_RES (20)..(21)..(22)..(23)..(24): Xaa is A or G
  MOD_RES (25)..(26)..(27)..(28): Xaa is A or G or absent
IPKAXXVPTELRSVKMAKVXXXXXXXXXKEVQVEMVVE

SEQ ID NO: 30982 - protein, 38 aa, Artificial Sequence
  Non-cyclic GFR-binding peptide
  MOD_RES (5)..(6)..(38): Xaa is C or S
IPKAXXVPTELRPVQMRKIDENEKVVKKATVDMVVEGX

SEQ ID NO: 30983 - protein, 35 aa, Artificial Sequence
  Non-cyclic GFR-binding peptide
  MOD_RES (16)..(17)..(18)..(19)..(20): Xaa is A or G
  MOD_RES (21)..(22)..(23)..(24): Xaa is A or G or absent
RPTQVQLEPLPVVYYXXXXXXXXXEQLSNTLEDHL

SEQ ID NO: 30984 - protein, 34 aa, Artificial Sequence
  Non-cyclic GFR-binding peptide
  MOD_RES (1)..(2): Xaa is C or S
  MOD_RES (16)..(17)..(18)..(19)..(20): Xaa is A or G
  MOD_RES (21)..(22)..(23)..(24): Xaa is A or G or absent
XXVPQDLRPVQIRKIXXXXXXXXXKKATVMVVKS

SEQ ID NO: 30985 - protein, 34 aa, Artificial Sequence
  Non-cyclic GFR-binding peptide
  MOD_RES (1)..(33): Xaa is C or S
XVPTELRSVKMAKVDEYDKVVKEVQVEMVVEGXG

SEQ ID NO: 30986 - protein, 37 aa, Artificial Sequence
  Non-cyclic GFR-binding peptide
  MOD_RES (5)..(6): Xaa is C or S
VPKPXXAPTQLSNITVQIMDDSSNVIIGEMSNMVVRA

SEQ ID NO: 30987 - protein, 39 aa, Artificial Sequence
  Non-cyclic GFR-binding peptide
  MOD_RES (5)..(6): Xaa is C or S
  MOD_RES (20)..(21)..(22)..(23)..(24): Xaa is A or G
  MOD_RES (25)..(26)..(27)..(28): Xaa is A or G or absent
VPKPXXAPTKLRSVKVAKVXXXXXXXXXKEVQVNMVVRS

SEQ ID NO: 30988 - protein, 40 aa, Artificial Sequence
  Non-cyclic GFR-binding peptide
  MOD_RES (5)..(6)..(40): Xaa is C or S
  MOD_RES (20)..(21)..(22)..(23)..(24): Xaa is A or G
  MOD_RES (25)..(26)..(27)..(28): Xaa is A or G or absent
IPKAXXVPTELRSVKMAKVXXXXXXXXXKEVQVEMVVEGX

SEQ ID NO: 30989 - protein, 40 aa, Artificial Sequence
  Non-cyclic GFR-binding peptide
  MOD_RES (4)..(5)..(39): Xaa is C or S
  MOD_RES (19)..(20)..(21)..(22)..(23): Xaa is A or G
  MOD_RES (24)..(25)..(26)..(27): Xaa is A or G or absent
PKPXXAPTKLRPVQVRKIXXXXXXXXXKKATVNMVVRSXG

SEQ ID NO: 30990 - protein, 34 aa, Artificial Sequence
  Non-cyclic GFR-binding peptide
  MOD_RES (1)..(33): Xaa is C or S
XVPTELRPVQMRKIDENEKVVKKATVDMVVEGXG

SEQ ID NO: 30991 - protein, 44 aa, Artificial Sequence
  Non-cyclic GFR-binding peptide
  MOD_RES (6)..(7)..(41)..(43): Xaa is C or S
  MOD_RES (21)..(22)..(23)..(24)..(25): Xaa is A or G
  MOD_RES (26)..(27)..(28)..(29): Xaa is A or G or absent
KIPKAXXVPTELRSVKMAKVXXXXXXXXXKEVQVDMVVEGXGXR

SEQ ID NO: 30992 - protein, 39 aa, Artificial Sequence
  Non-cyclic GFR-binding peptide
  MOD_RES (3)..(3): Xaa is C or S
VQXRPTQVQLEPLTVLYYEIVRKKPIFEQLSNTLEDHLA

SEQ ID NO: 30993 - protein, 33 aa, Artificial Sequence
  Non-cyclic GFR-binding peptide
  MOD_RES (1)..(1): Xaa is C or S
  MOD_RES (15)..(16)..(17)..(18)..(19): Xaa is A or G
  MOD_RES (20)..(21)..(22)..(23): Xaa is A or G or absent
XVSQDLSNITIQIMXXXXXXXXXIGEMSMIVKS

SEQ ID NO: 30994 - protein, 32 aa, Artificial Sequence
  Non-cyclic GFR-binding peptide
  MOD_RES (32)..(32): Xaa is C or S
VPTELRPVQMRKIDEYDKVVKKATVEMVVEGX

SEQ ID NO: 30995 - protein, 35 aa, Artificial Sequence
  Non-cyclic GFR-binding peptide
  MOD_RES (3)..(4)..(35): Xaa is C or S
SPXXVSQDLRSVKIAKVIGKTPKIKEVQVMIVKSX

SEQ ID NO: 30996 - protein, 37 aa, Artificial Sequence
  Non-cyclic GFR-binding peptide
  MOD_RES (3)..(4)..(35)..(37): Xaa is C or S
SPXXVPQDLRPVQIRKIVGRTPKVKKATVMVVKSXKX

SEQ ID NO: 30997 - protein, 37 aa, Artificial Sequence
  Non-cyclic GFR-binding peptide
  MOD_RES (2)..(3)..(35)..(37): Xaa is C or S
AXXVPTELRPVQMRKIDEYDKVVKKATVEMVVEGXGX

SEQ ID NO: 30998 - protein, 38 aa, Artificial Sequence
  Non-cyclic GFR-binding peptide
  MOD_RES (5)..(6): Xaa is C or S
  MOD_RES (20)..(21)..(22)..(23)..(24): Xaa is A or G
  MOD_RES (25)..(26)..(27)..(28): Xaa is A or G or absent
IPKAXXVPTELRPVQMRKIXXXXXXXXXKKATVEMVVE

SEQ ID NO: 30999 - protein, 42 aa, Artificial Sequence
  Non-cyclic GFR-binding peptide
  MOD_RES (6)..(7)..(40)..(42): Xaa is C or S
  MOD_RES (21)..(22)..(23)..(24)..(25): Xaa is A or G
  MOD_RES (26)..(27)..(28)..(29): Xaa is A or G or absent
ASASPXXVSQDLSNITIQIMXXXXXXXXXIGEMSMIVKSXKX

SEQ ID NO: 31000 - protein, 42 aa, Artificial Sequence
  Non-cyclic GFR-binding peptide
  MOD_RES (7)..(39)..(41): Xaa is C or S
HVTKPTXAPTKLSNITVQIMDDSSNVIIGEMSNMVVRSXGXH

SEQ ID NO: 31001 - protein, 36 aa, Artificial Sequence
  Non-cyclic GFR-binding peptide
  MOD_RES (2)..(3)..(34)..(36): Xaa is C or S
PXXVPQALSNITIQIMVGRKPKVIGEMSMIVRSXKX

SEQ ID NO: 31002 - protein, 34 aa, Artificial Sequence
  Non-cyclic GFR-binding peptide
  MOD_RES (1)..(2): Xaa is C or S
  MOD_RES (16)..(17)..(18)..(19)..(20): Xaa is A or G
  MOD_RES (21)..(22)..(23)..(24): Xaa is A or G or absent
XXVPQDLRSVKIAKVXXXXXXXXXKEVQVMVVKS

SEQ ID NO: 31003 - protein, 36 aa, Artificial Sequence
  Non-cyclic GFR-binding peptide
  MOD_RES (1)..(2)..(34)..(36): Xaa is C or S
XXVPTELRPVQMRKIDEYDKVVKKATVEMVVEGXGX

SEQ ID NO: 31004 - protein, 35 aa, Artificial Sequence
  Non-cyclic GFR-binding peptide
  MOD_RES (34)..(34): Xaa is C or S
  MOD_RES (14)..(15)..(16)..(17)..(18): Xaa is A or G
  MOD_RES (19)..(20)..(21)..(22): Xaa is A or G or absent
VPTEEEPLPMVYYXXXXXXXXXEQLSNFLQHNKXE

SEQ ID NO: 31005 - protein, 41 aa, Artificial Sequence
  Non-cyclic GFR-binding peptide
  MOD_RES (4)..(5)..(39)..(41): Xaa is C or S
  MOD_RES (19)..(20)..(21)..(22)..(23): Xaa is A or G
  MOD_RES (24)..(25)..(26)..(27): Xaa is A or G or absent
PKPXXAPTKLRPVQVRKIXXXXXXXXXKKATVNMVVRSXGX

SEQ ID NO: 31006 - protein, 35 aa, Artificial Sequence
  Non-cyclic GFR-binding peptide
  MOD_RES (2)..(3)..(34): Xaa is C or S
PXXVPQDLSNITIQIMVGRTPKVIGEMSMVVKSXK

SEQ ID NO: 31007 - protein, 30 aa, Artificial Sequence
  Non-cyclic GFR-binding peptide
VSQDLSNITIQIMIGKTPKIIGEMSMIVKS

SEQ ID NO: 31008 - protein, 39 aa, Artificial Sequence
  Non-cyclic GFR-binding peptide
  MOD_RES (6)..(7)..(38): Xaa is C or S
ASASPXXVPQDLSNITIQIMVGRTPKVIGEMSMVVKSXK

SEQ ID NO: 31009 - protein, 39 aa, Artificial Sequence
  Non-cyclic GFR-binding peptide
  MOD_RES (3)..(4)..(38): Xaa is C or S
  MOD_RES (18)..(19)..(20)..(21)..(22): Xaa is A or G
  MOD_RES (23)..(24)..(25)..(26): Xaa is A or G or absent
KAXXVPTELSNITMQIMXXXXXXXXXIGEMSEMVVEGXG

SEQ ID NO: 31010 - protein, 39 aa, Artificial Sequence
  Non-cyclic GFR-binding peptide
  MOD_RES (4)..(5)..(39): Xaa is C or S
  MOD_RES (19)..(20)..(21)..(22)..(23): Xaa is A or G
  MOD_RES (24)..(25)..(26)..(27): Xaa is A or G or absent
PKAXXVPTELSNITMQIMXXXXXXXXXIGEMSEMVVEGX

SEQ ID NO: 31011 - protein, 40 aa, Artificial Sequence
  Non-cyclic GFR-binding peptide
  MOD_RES (3)..(40): Xaa is C or S
  MOD_RES (19)..(20)..(21)..(22)..(23): Xaa is A or G
  MOD_RES (24)..(25)..(26)..(27): Xaa is A or G or absent
VQXRPTQVQLEPLPVVYYXXXXXXXXXEQLSNTLEDHLAX

SEQ ID NO: 31012 - protein, 42 aa, Artificial Sequence
  Non-cyclic GFR-binding peptide
  MOD_RES (6)..(7)..(40)..(42): Xaa is C or S
  MOD_RES (21)..(22)..(23)..(24)..(25): Xaa is A or G
  MOD_RES (26)..(27)..(28)..(29): Xaa is A or G or absent
ASAAPXXVPQALSNITIQIMXXXXXXXXXIGEMSMIVRSXKX

SEQ ID NO: 31013 - protein, 33 aa, Artificial Sequence
  Non-cyclic GFR-binding peptide
  MOD_RES (2)..(3): Xaa is C or S
PXXVSQDLRPVQIRKIIGKTPKIKKATVMIVKS

SEQ ID NO: 31014 - protein, 37 aa, Artificial Sequence
  Non-cyclic GFR-binding peptide
  MOD_RES (3)..(3): Xaa is C or S
VKXQPSRVHHEPLPVVYYEYVRKKPKLEQLSNRLEEH

SEQ ID NO: 31015 - protein, 36 aa, Artificial Sequence
  Non-cyclic GFR-binding peptide
  MOD_RES (3)..(3): Xaa is C or S
  MOD_RES (17)..(18)..(19)..(20)..(21): Xaa is A or G
  MOD_RES (22)..(23)..(24)..(25): Xaa is A or G or absent
PTXAPTKLRPVQVRKIXXXXXXXXXKKATVNMVVRS

SEQ ID NO: 31016 - protein, 34 aa, Artificial Sequence
  Non-cyclic GFR-binding peptide
RPTQVQLEPLPVVYYEIVRKKPIFEQLSNTLEDH

SEQ ID NO: 31017 - protein, 34 aa, Artificial Sequence
  Non-cyclic GFR-binding peptide
  MOD_RES (3)..(4): Xaa is C or S
SPXXVPQDLSNITIQIMVGRTPKVIGEMSMVVKS

SEQ ID NO: 31018 - protein, 43 aa, Artificial Sequence
  Non-cyclic GFR-binding peptide
  MOD_RES (5)..(6)..(40)..(42): Xaa is C or S
  MOD_RES (20)..(21)..(22)..(23)..(24): Xaa is A or G
  MOD_RES (25)..(26)..(27)..(28): Xaa is A or G or absent
IPKAXXVPTELSNITMQIMXXXXXXXXXIGEMSDMVVEGXGXR

SEQ ID NO: 31019 - protein, 41 aa, Artificial Sequence
  Non-cyclic GFR-binding peptide
  MOD_RES (4)..(5)..(39)..(41): Xaa is C or S
  MOD_RES (19)..(20)..(21)..(22)..(23): Xaa is A or G
  MOD_RES (24)..(25)..(26)..(27): Xaa is A or G or absent
PKPXXAPTKLSNITVQIMXXXXXXXXXIGEMSNMVVRSXGX

SEQ ID NO: 31020 - protein, 33 aa, Artificial Sequence
  Non-cyclic GFR-binding peptide
  MOD_RES (1)..(32): Xaa is C or S
XVPQDLRSVKIAKVVGRTPKVKEVQVMVVKSXK

SEQ ID NO: 31021 - protein, 39 aa, Artificial Sequence
  Non-cyclic GFR-binding peptide
  MOD_RES (4)..(36)..(38): Xaa is C or S
KPTXAPTKLSNITVQIMDDSSNVIIGEMSNMVVRSXGXH

SEQ ID NO: 31022 - protein, 36 aa, Artificial Sequence
  Non-cyclic GFR-binding peptide
  MOD_RES (3)..(4)..(36): Xaa is C or S
KPXXAPTKLRPVQVRKIDDSSNVIKKATVNMVVRSX

SEQ ID NO: 31023 - protein, 34 aa, Artificial Sequence
  Non-cyclic GFR-binding peptide
  MOD_RES (2)..(3)..(34): Xaa is C or S
PXXVPQDLSNITIQIMVGRTPKVIGEMSMVVKSX

SEQ ID NO: 31024 - protein, 36 aa, Artificial Sequence
  Non-cyclic GFR-binding peptide
  MOD_RES (3)..(4)..(36): Xaa is C or S
KPXXAPTQLRSVKVAKVDDSSNVIKEVQVNMVVRAX

SEQ ID NO: 31025 - protein, 39 aa, Artificial Sequence
  Non-cyclic GFR-binding peptide
  MOD_RES (2)..(3)..(36)..(38): Xaa is C or S
  MOD_RES (17)..(18)..(19)..(20)..(21): Xaa is A or G
  MOD_RES (22)..(23)..(24)..(25): Xaa is A or G or absent
PXXVPQALRSVKIAKVXXXXXXXXXKEVQVMIVRSXKXS

SEQ ID NO: 31026 - protein, 39 aa, Artificial Sequence
  Non-cyclic GFR-binding peptide
  MOD_RES (5)..(6)..(39): Xaa is C or S
  MOD_RES (20)..(21)..(22)..(23)..(24): Xaa is A or G
  MOD_RES (25)..(26)..(27)..(28): Xaa is A or G or absent
SASPXXVSQDLSNITIQIMXXXXXXXXXIGEMSMIVKSX

SEQ ID NO: 31027 - protein, 35 aa, Artificial Sequence
  Non-cyclic GFR-binding peptide
  MOD_RES (5)..(5): Xaa is C or S
TKPTXAPTKLRSVKVAKVDDSSNVIKEVQVNMVVR

SEQ ID NO: 31028 - protein, 41 aa, Artificial Sequence
  Non-cyclic GFR-binding peptide
  MOD_RES (6)..(40): Xaa is C or S
  MOD_RES (20)..(21)..(22)..(23)..(24): Xaa is A or G
  MOD_RES (25)..(26)..(27)..(28): Xaa is A or G or absent
VTKPTXAPTKLSNITVQIMXXXXXXXXXIGEMSNMVVRSXG

SEQ ID NO: 31029 - protein, 37 aa, Artificial Sequence
  Non-cyclic GFR-binding peptide
  MOD_RES (2)..(3)..(35)..(37): Xaa is C or S
AXXVPTELRPVQMRKIDENEKVVKKATVDMVVEGXGX

SEQ ID NO: 31030 - protein, 43 aa, Artificial Sequence
  Non-cyclic GFR-binding peptide
  MOD_RES (5)..(6)..(40)..(42): Xaa is C or S
  MOD_RES (20)..(21)..(22)..(23)..(24): Xaa is A or G
  MOD_RES (25)..(26)..(27)..(28): Xaa is A or G or absent
VPKPXXAPTKLRPVQVRKIXXXXXXXXXKKATVNMVVRSXGXH

SEQ ID NO: 31031 - protein, 36 aa, Artificial Sequence
  Non-cyclic GFR-binding peptide
  MOD_RES (3)..(4): Xaa is C or S
  MOD_RES (18)..(19)..(20)..(21)..(22): Xaa is A or G
  MOD_RES (23)..(24)..(25)..(26): Xaa is A or G or absent
KPXXAPTQLRPVQVRKIXXXXXXXXXKKATVNMVVR

SEQ ID NO: 31032 - protein, 36 aa, Artificial Sequence
  Non-cyclic GFR-binding peptide
  MOD_RES (5)..(6): Xaa is C or S
SASPXXVSQDLRSVKIAKVIGKTPKIKEVQVMIVKS

SEQ ID NO: 31033 - protein, 38 aa, Artificial Sequence
  Non-cyclic GFR-binding peptide
  MOD_RES (4)..(5)..(36)..(38): Xaa is C or S
ASPXXVPQDLSNITIQIMVGRTPKVIGEMSMVVKSXKX

SEQ ID NO: 31034 - protein, 38 aa, Artificial Sequence
  Non-cyclic GFR-binding peptide
  MOD_RES (4)..(5)..(36)..(38): Xaa is C or S
ASPXXVPQDLRSVKIAKVVGRTPKVKEVQVMVVKSXKX

SEQ ID NO: 31035 - protein, 38 aa, Artificial Sequence
  Non-cyclic GFR-binding peptide
  MOD_RES (3)..(37): Xaa is C or S
  MOD_RES (17)..(18)..(19)..(20)..(21): Xaa is A or G
  MOD_RES (22)..(23)..(24)..(25): Xaa is A or G or absent
PTXAPTKLSNITVQIMXXXXXXXXXIGEMSNMVVRSXG

SEQ ID NO: 31036 - protein, 36 aa, Artificial Sequence
  Non-cyclic GFR-binding peptide
  MOD_RES (1)..(2)..(34)..(36): Xaa is C or S
XXVPTELRPVQMRKIDENEKVVKKATVDMVVEGXGX

SEQ ID NO: 31037 - protein, 33 aa, Artificial Sequence
  Non-cyclic GFR-binding peptide
  MOD_RES (1)..(33): Xaa is C or S
XVPTELRSVKMAKVDEYDKVVKEVQVEMVVEGX

SEQ ID NO: 31038 - protein, 34 aa, Artificial Sequence
  Non-cyclic GFR-binding peptide
  MOD_RES (15)..(16)..(17)..(18)..(19): Xaa is A or G
  MOD_RES (20)..(21)..(22)..(23): Xaa is A or G or absent
PSRVHHEPLTVLYYXXXXXXXXXEQLSNRLEEHL

SEQ ID NO: 31039 - protein, 33 aa, Artificial Sequence
  Non-cyclic GFR-binding peptide
  MOD_RES (1)..(32): Xaa is C or S
XVSQDLRSVKIAKVIGKTPKIKEVQVMIVKSXK

SEQ ID NO: 31040 - protein, 37 aa, Artificial Sequence
  Non-cyclic GFR-binding peptide
  MOD_RES (1)..(34)..(36): Xaa is C or S
  MOD_RES (15)..(16)..(17)..(18)..(19): Xaa is A or G
  MOD_RES (20)..(21)..(22)..(23): Xaa is A or G or absent
XVSQDLRSVKIAKVXXXXXXXXXKEVQVMIVKSXKXS

SEQ ID NO: 31041 - protein, 35 aa, Artificial Sequence
  Non-cyclic GFR-binding peptide
  MOD_RES (32)..(34): Xaa is C or S
VPTELRPVQMRKIDENEKVVKKATVDMVVEGXGXR

SEQ ID NO: 31042 - protein, 39 aa, Artificial Sequence
  Non-cyclic GFR-binding peptide
  MOD_RES (6)..(7)..(38): Xaa is C or S
ASASPXXVSQDLSNITIQIMIGKTPKIIGEMSMIVKSXK

SEQ ID NO: 31043 - protein, 36 aa, Artificial Sequence
  Non-cyclic GFR-binding peptide
  MOD_RES (1)..(2)..(34)..(36): Xaa is C or S
XXAPTKLRPVQVRKIDDSSNVIKKATVNMVVRSXGX

SEQ ID NO: 31044 - protein, 38 aa, Artificial Sequence
  Non-cyclic GFR-binding peptide
  MOD_RES (2)..(3)..(36)..(38): Xaa is C or S
  MOD_RES (17)..(18)..(19)..(20)..(21): Xaa is A or G
  MOD_RES (22)..(23)..(24)..(25): Xaa is A or G or absent
PXXVPQALRSVKIAKVXXXXXXXXXKEVQVMIVRSXKX

SEQ ID NO: 31045 - protein, 34 aa, Artificial Sequence
  Non-cyclic GFR-binding peptide
  MOD_RES (16)..(17)..(18)..(19)..(20): Xaa is A or G
  MOD_RES (21)..(22)..(23)..(24): Xaa is A or G or absent
RPTQVQLEPLTVLYYXXXXXXXXXEQLSNTLEDH

SEQ ID NO: 31046 - protein, 37 aa, Artificial Sequence
  Non-cyclic GFR-binding peptide
  MOD_RES (4)..(5)..(37): Xaa is C or S
PKPXXAPTQLSNITVQIMDDSSNVIIGEMSNMVVRAX

SEQ ID NO: 31047 - protein, 40 aa, Artificial Sequence
  Non-cyclic GFR-binding peptide
  MOD_RES (4)..(38)..(40): Xaa is C or S
  MOD_RES (18)..(19)..(20)..(21)..(22): Xaa is A or G
  MOD_RES (23)..(24)..(25)..(26): Xaa is A or G or absent
KPTXAPTKLRSVKVAKVXXXXXXXXXKEVQVNMVVRSXGX

SEQ ID NO: 31048 - protein, 34 aa, Artificial Sequence
  Non-cyclic GFR-binding peptide
  MOD_RES (16)..(17)..(18)..(19)..(20): Xaa is A or G
  MOD_RES (21)..(22)..(23)..(24): Xaa is A or G or absent
RPTQVQLEPLPVVYYXXXXXXXXXEQLSNTLEDH

SEQ ID NO: 31049 - protein, 38 aa, Artificial Sequence
  Non-cyclic GFR-binding peptide
  MOD_RES (5)..(37): Xaa is C or S
TKPTXAPTKLRSVKVAKVDDSSNVIKEVQVNMVVRSXG

SEQ ID NO: 31050 - protein, 40 aa, Artificial Sequence
  Non-cyclic GFR-binding peptide
  MOD_RES (5)..(6)..(40): Xaa is C or S
  MOD_RES (20)..(21)..(22)..(23)..(24): Xaa is A or G
  MOD_RES (25)..(26)..(27)..(28): Xaa is A or G or absent
IPKAXXVPTELSNITMQIMXXXXXXXXXIGEMSDMVVEGX

SEQ ID NO: 31051 - protein, 41 aa, Artificial Sequence
  Non-cyclic GFR-binding peptide
  MOD_RES (1)..(38)..(40): Xaa is C or S
XQPSRVHHEPLTVLYYEYVRKKPKLEQLSNRLEEHLEXAXA

SEQ ID NO: 31052 - protein, 36 aa, Artificial Sequence
  Non-cyclic GFR-binding peptide
  MOD_RES (1)..(33)..(35): Xaa is C or S
XVPTELSNITMQIMDENEKVVIGEMSDMVVEGXGXR

SEQ ID NO: 31053 - protein, 37 aa, Artificial Sequence
  Non-cyclic GFR-binding peptide
  MOD_RES (1)..(1): Xaa is C or S
  MOD_RES (17)..(18)..(19)..(20)..(21): Xaa is A or G
  MOD_RES (22)..(23)..(24)..(25): Xaa is A or G or absent
XQPSRVHHEPLPVVYYXXXXXXXXXEQLSNRLEEHLE

SEQ ID NO: 31054 - protein, 37 aa, Artificial Sequence
  Non-cyclic GFR-binding peptide
  MOD_RES (1)..(2)..(36): Xaa is C or S
  MOD_RES (16)..(17)..(18)..(19)..(20): Xaa is A or G
  MOD_RES (21)..(22)..(23)..(24): Xaa is A or G or absent
XXAPTQLSNITVQIMXXXXXXXXXIGEMSNMVVRAXG

SEQ ID NO: 31055 - protein, 39 aa, Artificial Sequence
  Non-cyclic GFR-binding peptide
  MOD_RES (5)..(6): Xaa is C or S
  MOD_RES (20)..(21)..(22)..(23)..(24): Xaa is A or G
  MOD_RES (25)..(26)..(27)..(28): Xaa is A or G or absent
IPKAXXVPTELSNITMQIMXXXXXXXXXIGEMSEMVVEG

SEQ ID NO: 31056 - protein, 37 aa, Artificial Sequence
  Non-cyclic GFR-binding peptide
  MOD_RES (2)..(3)..(37): Xaa is C or S
  MOD_RES (17)..(18)..(19)..(20)..(21): Xaa is A or G
  MOD_RES (22)..(23)..(24)..(25): Xaa is A or G or absent
AXXVPTELRPVQMRKIXXXXXXXXXKKATVEMVVEGX

SEQ ID NO: 31057 - protein, 39 aa, Artificial Sequence
  Non-cyclic GFR-binding peptide
  MOD_RES (4)..(5)..(39): Xaa is C or S
  MOD_RES (19)..(20)..(21)..(22)..(23): Xaa is A or G
  MOD_RES (24)..(25)..(26)..(27): Xaa is A or G or absent
PKPXXAPTKLRPVQVRKIXXXXXXXXXKKATVNMVVRSX

SEQ ID NO: 31058 - protein, 36 aa, Artificial Sequence
  Non-cyclic GFR-binding peptide
  MOD_RES (3)..(4): Xaa is C or S
  MOD_RES (18)..(19)..(20)..(21)..(22): Xaa is A or G
  MOD_RES (23)..(24)..(25)..(26): Xaa is A or G or absent
SPXXVSQDLRPVQIRKIXXXXXXXXXKKATVMIVKS

SEQ ID NO: 31059 - protein, 35 aa, Artificial Sequence
  Non-cyclic GFR-binding peptide
  MOD_RES (1)..(2)..(34): Xaa is C or S
XXVPTELSNITMQIMDEYDKVVIGEMSEMVVEGXG

SEQ ID NO: 31060 - protein, 33 aa, Artificial Sequence
  Non-cyclic GFR-binding peptide
  MOD_RES (1)..(1): Xaa is C or S
  MOD_RES (15)..(16)..(17)..(18)..(19): Xaa is A or G
  MOD_RES (20)..(21)..(22)..(23): Xaa is A or G or absent
XAPTQLRPVQVRKIXXXXXXXXXKKATVNMVVR

SEQ ID NO: 31061 - protein, 39 aa, Artificial Sequence
  Non-cyclic GFR-binding peptide
  MOD_RES (1)..(2)..(36)..(38): Xaa is C or S
  MOD_RES (16)..(17)..(18)..(19)..(20): Xaa is A or G
  MOD_RES (21)..(22)..(23)..(24): Xaa is A or G or absent
XXAPTQLRPVQVRKIXXXXXXXXXKKATVNMVVRAXGXH

SEQ ID NO: 31062 - protein, 40 aa, Artificial Sequence
  Non-cyclic GFR-binding peptide
  MOD_RES (1)..(38)..(40): Xaa is C or S
XRPTQVQLEPLPVVYYEIVRKKPIFEQLSNTLEDHLAXKX

SEQ ID NO: 31063 - protein, 41 aa, Artificial Sequence
  Non-cyclic GFR-binding peptide
  MOD_RES (4)..(5)..(39)..(41): Xaa is C or S
  MOD_RES (19)..(20)..(21)..(22)..(23): Xaa is A or G
  MOD_RES (24)..(25)..(26)..(27): Xaa is A or G or absent
PKPXXAPTKLRSVKVAKVXXXXXXXXXKEVQVNMVVRSXGX

SEQ ID NO: 31064 - protein, 35 aa, Artificial Sequence
  Non-cyclic GFR-binding peptide
  MOD_RES (32)..(34): Xaa is C or S
APTKLRPVQVRKIDDSSNVIKKATVNMVVRSXGXH

SEQ ID NO: 31065 - protein, 36 aa, Artificial Sequence
  Non-cyclic GFR-binding peptide
  MOD_RES (2)..(3): Xaa is C or S
  MOD_RES (17)..(18)..(19)..(20)..(21): Xaa is A or G
  MOD_RES (22)..(23)..(24)..(25): Xaa is A or G or absent
AXXVPTELRSVKMAKVXXXXXXXXXKEVQVEMVVEG

SEQ ID NO: 31066 - protein, 32 aa, Artificial Sequence
  Non-cyclic GFR-binding peptide
  MOD_RES (31)..(31): Xaa is C or S
VPQDLSNITIQIMVGRTPKVIGEMSMVVKSXK

SEQ ID NO: 31067 - protein, 33 aa, Artificial Sequence
  Non-cyclic GFR-binding peptide
  MOD_RES (32)..(32): Xaa is C or S
APTQLRPVQVRKIDDSSNVIKKATVNMVVRAXG

SEQ ID NO: 31068 - protein, 41 aa, Artificial Sequence
  Non-cyclic GFR-binding peptide
  MOD_RES (6)..(7)..(39)..(41): Xaa is C or S
YVPKPXXAPTKLRPVQVRKIDDSSNVIKKATVNMVVRSXGX

SEQ ID NO: 31069 - protein, 42 aa, Artificial Sequence
  Non-cyclic GFR-binding peptide
  MOD_RES (5)..(39)..(41): Xaa is C or S
  MOD_RES (19)..(20)..(21)..(22)..(23): Xaa is A or G
  MOD_RES (24)..(25)..(26)..(27): Xaa is A or G or absent
EGLEXVPTEEEPLTMLYYXXXXXXXXXEQLSNFLQHNKXEXR

SEQ ID NO: 31070 - protein, 37 aa, Artificial Sequence
  Non-cyclic GFR-binding peptide
  MOD_RES (2)..(34)..(36): Xaa is C or S
TXAPTKLSNITVQIMDDSSNVIIGEMSNMVVRSXGXH

SEQ ID NO: 31071 - protein, 37 aa, Artificial Sequence
  Non-cyclic GFR-binding peptide
  MOD_RES (1)..(2)..(36): Xaa is C or S
  MOD_RES (16)..(17)..(18)..(19)..(20): Xaa is A or G
  MOD_RES (21)..(22)..(23)..(24): Xaa is A or G or absent
XXVPTELSNITMQIMXXXXXXXXXIGEMSDMVVEGXG

SEQ ID NO: 31072 - protein, 39 aa, Artificial Sequence
  Non-cyclic GFR-binding peptide
  MOD_RES (3)..(37)..(39): Xaa is C or S
  MOD_RES (17)..(18)..(19)..(20)..(21): Xaa is A or G
  MOD_RES (22)..(23)..(24)..(25): Xaa is A or G or absent
PTXAPTKLRSVKVAKVXXXXXXXXXKEVQVNMVVRSXGX

SEQ ID NO: 31073 - protein, 37 aa, Artificial Sequence
  Non-cyclic GFR-binding peptide
  MOD_RES (4)..(5): Xaa is C or S
  MOD_RES (19)..(20)..(21)..(22)..(23): Xaa is A or G
  MOD_RES (24)..(25)..(26)..(27): Xaa is A or G or absent
PKAXXVPTELRSVKMAKVXXXXXXXXXKEVQVDMVVE

SEQ ID NO: 31074 - protein, 35 aa, Artificial Sequence
  Non-cyclic GFR-binding peptide
  MOD_RES (1)..(2): Xaa is C or S
  MOD_RES (16)..(17)..(18)..(19)..(20): Xaa is A or G
  MOD_RES (21)..(22)..(23)..(24): Xaa is A or G or absent
XXAPTKLRSVKVAKVXXXXXXXXXKEVQVNMVVRS

SEQ ID NO: 31075 - protein, 41 aa, Artificial Sequence
  Non-cyclic GFR-binding peptide
  MOD_RES (6)..(7)..(40): Xaa is C or S
  MOD_RES (21)..(22)..(23)..(24)..(25): Xaa is A or G
  MOD_RES (26)..(27)..(28)..(29): Xaa is A or G or absent
ASASPXXVPQDLRPVQIRKIXXXXXXXXXKKATVMVVKSXK

SEQ ID NO: 31076 - protein, 33 aa, Artificial Sequence
  Non-cyclic GFR-binding peptide
  MOD_RES (1)..(32): Xaa is C or S
XVSQDLSNITIQIMIGKTPKIIGEMSMIVKSXK

SEQ ID NO: 31077 - protein, 39 aa, Artificial Sequence
  Non-cyclic GFR-binding peptide
  MOD_RES (3)..(3): Xaa is C or S
  MOD_RES (19)..(20)..(21)..(22)..(23): Xaa is A or G
  MOD_RES (24)..(25)..(26)..(27): Xaa is A or G or absent
VKXQPSRVHHEPLPVVYYXXXXXXXXXEQLSNRLEEHLE

SEQ ID NO: 31078 - protein, 38 aa, Artificial Sequence
  Non-cyclic GFR-binding peptide
  MOD_RES (5)..(5): Xaa is C or S
EGLEXVPTEEEPLPMVYYRIKPHQGQHEQLSNFLQHNK

SEQ ID NO: 31079 - protein, 39 aa, Artificial Sequence
  Non-cyclic GFR-binding peptide
  MOD_RES (2)..(36)..(38): Xaa is C or S
  MOD_RES (16)..(17)..(18)..(19)..(20): Xaa is A or G
  MOD_RES (21)..(22)..(23)..(24): Xaa is A or G or absent
EXVPTEEEPLPMVYYXXXXXXXXXEQLSNFLQHNKXEXR

SEQ ID NO: 31080 - protein, 36 aa, Artificial Sequence
  Non-cyclic GFR-binding peptide
  MOD_RES (2)..(2): Xaa is C or S
QXRPTQVQLEPLTVLYYEIVRKKPIFEQLSNTLEDH

SEQ ID NO: 31081 - protein, 40 aa, Artificial Sequence
  Non-cyclic GFR-binding peptide
  MOD_RES (6)..(7)..(39): Xaa is C or S
KIPKAXXVPTELSNITMQIMDENEKVVIGEMSDMVVEGXG

SEQ ID NO: 31082 - protein, 37 aa, Artificial Sequence
  Non-cyclic GFR-binding peptide
  MOD_RES (4)..(5)..(36): Xaa is C or S
AAPXXVPQALSNITIQIMVGRKPKVIGEMSMIVRSXK

SEQ ID NO: 31083 - protein, 34 aa, Artificial Sequence
  Non-cyclic GFR-binding peptide
  MOD_RES (32)..(34): Xaa is C or S
VPTELRSVKMAKVDENEKVVKEVQVDMVVEGXGX

SEQ ID NO: 31084 - protein, 36 aa, Artificial Sequence
  Non-cyclic GFR-binding peptide
  MOD_RES (35)..(35): Xaa is C or S
TQVQLEPLPVVYYEIVRKKPIFEQLSNTLEDHLAXK

SEQ ID NO: 31085 - protein, 37 aa, Artificial Sequence
  Non-cyclic GFR-binding peptide
  MOD_RES (34)..(36): Xaa is C or S
  MOD_RES (14)..(15)..(16)..(17)..(18): Xaa is A or G
  MOD_RES (19)..(20)..(21)..(22): Xaa is A or G or absent
VPTELRSVKMAKVXXXXXXXXXKEVQVDMVVEGXGXR

SEQ ID NO: 31086 - protein, 35 aa, Artificial Sequence
  Non-cyclic GFR-binding peptide
  MOD_RES (4)..(5): Xaa is C or S
PKAXXVPTELRSVKMAKVDENEKVVKEVQVDMVVE

SEQ ID NO: 31087 - protein, 30 aa, Artificial Sequence
  Non-cyclic GFR-binding peptide
VPTELRPVQMRKIDEYDKVVKKATVEMVVE

SEQ ID NO: 31088 - protein, 32 aa, Artificial Sequence
  Non-cyclic GFR-binding peptide
  MOD_RES (14)..(15)..(16)..(17)..(18): Xaa is A or G
  MOD_RES (19)..(20)..(21)..(22): Xaa is A or G or absent
VSQDLSNITIQIMXXXXXXXXXIGEMSMIVKS

SEQ ID NO: 31089 - protein, 37 aa, Artificial Sequence
  Non-cyclic GFR-binding peptide
  MOD_RES (4)..(5): Xaa is C or S
  MOD_RES (19)..(20)..(21)..(22)..(23): Xaa is A or G
  MOD_RES (24)..(25)..(26)..(27): Xaa is A or G or absent
PKPXXAPTKLRPVQVRKIXXXXXXXXXKKATVNMVVR

SEQ ID NO: 31090 - protein, 42 aa, Artificial Sequence
  Non-cyclic GFR-binding peptide
  MOD_RES (6)..(7)..(39)..(41): Xaa is C or S
SIPKAXXVPTELRPVQMRKIDEYDKVVKKATVEMVVEGXGXR

SEQ ID NO: 31091 - protein, 38 aa, Artificial Sequence
  Non-cyclic GFR-binding peptide
  MOD_RES (1)..(2)..(35)..(37): Xaa is C or S
  MOD_RES (16)..(17)..(18)..(19)..(20): Xaa is A or G
  MOD_RES (21)..(22)..(23)..(24): Xaa is A or G or absent
XXVPQALSNITIQIMXXXXXXXXXIGEMSMIVRSXKXS

SEQ ID NO: 31092 - protein, 35 aa, Artificial Sequence
  Non-cyclic GFR-binding peptide
  MOD_RES (1)..(35): Xaa is C or S
  MOD_RES (15)..(16)..(17)..(18)..(19): Xaa is A or G
  MOD_RES (20)..(21)..(22)..(23): Xaa is A or G or absent
XVPTELSNITMQIMXXXXXXXXXIGEMSDMVVEGX

SEQ ID NO: 31093 - protein, 35 aa, Artificial Sequence
  Non-cyclic GFR-binding peptide
  MOD_RES (1)..(35): Xaa is C or S
  MOD_RES (15)..(16)..(17)..(18)..(19): Xaa is A or G
  MOD_RES (20)..(21)..(22)..(23): Xaa is A or G or absent
XAPTQLRSVKVAKVXXXXXXXXXKEVQVNMVVRAX

SEQ ID NO: 31094 - protein, 39 aa, Artificial Sequence
  Non-cyclic GFR-binding peptide
  MOD_RES (6)..(7)..(38): Xaa is C or S
ASASPXXVPQDLRSVKIAKVVGRTPKVKEVQVMVVKSXK

SEQ ID NO: 31095 - protein, 38 aa, Artificial Sequence
  Non-cyclic GFR-binding peptide
  MOD_RES (4)..(5)..(37): Xaa is C or S
PKPXXAPTQLSNITVQIMDDSSNVIIGEMSNMVVRAXG

SEQ ID NO: 31096 - protein, 39 aa, Artificial Sequence
  Non-cyclic GFR-binding peptide
  MOD_RES (4)..(5)..(39): Xaa is C or S
  MOD_RES (19)..(20)..(21)..(22)..(23): Xaa is A or G
  MOD_RES (24)..(25)..(26)..(27): Xaa is A or G or absent
PKAXXVPTELRPVQMRKIXXXXXXXXXKKATVDMVVEGX

SEQ ID NO: 31097 - protein, 33 aa, Artificial Sequence
  Non-cyclic GFR-binding peptide
  MOD_RES (15)..(16)..(17)..(18)..(19): Xaa is A or G
  MOD_RES (20)..(21)..(22)..(23): Xaa is A or G or absent
PSRVHHEPLPVVYYXXXXXXXXXEQLSNRLEEH

SEQ ID NO: 31098 - protein, 40 aa, Artificial Sequence
  Non-cyclic GFR-binding peptide
  MOD_RES (4)..(5)..(39): Xaa is C or S
  MOD_RES (19)..(20)..(21)..(22)..(23): Xaa is A or G
  MOD_RES (24)..(25)..(26)..(27): Xaa is A or G or absent
PKPXXAPTQLSNITVQIMXXXXXXXXXIGEMSNMVVRAXG

SEQ ID NO: 31099 - protein, 38 aa, Artificial Sequence
  Non-cyclic GFR-binding peptide
  MOD_RES (4)..(5)..(38): Xaa is C or S
  MOD_RES (19)..(20)..(21)..(22)..(23): Xaa is A or G
  MOD_RES (24)..(25)..(26)..(27): Xaa is A or G or absent
AAPXXVPQALRSVKIAKVXXXXXXXXXKEVQVMIVRSX

SEQ ID NO: 31100 - protein, 36 aa, Artificial Sequence
  Non-cyclic GFR-binding peptide
  MOD_RES (1)..(2)..(33)..(35): Xaa is C or S
XXVPQALRPVQIRKIVGRKPKVKKATVMIVRSXKXS

SEQ ID NO: 31101 - protein, 40 aa, Artificial Sequence
  Non-cyclic GFR-binding peptide
  MOD_RES (5)..(37)..(39): Xaa is C or S
TKPTXAPTKLRPVQVRKIDDSSNVIKKATVNMVVRSXGXH

SEQ ID NO: 31102 - protein, 32 aa, Artificial Sequence
  Non-cyclic GFR-binding peptide
  MOD_RES (14)..(15)..(16)..(17)..(18): Xaa is A or G
  MOD_RES (19)..(20)..(21)..(22): Xaa is A or G or absent
APTQLRSVKVAKVXXXXXXXXXKEVQVNMVVR

SEQ ID NO: 31103 - protein, 38 aa, Artificial Sequence
  Non-cyclic GFR-binding peptide
  MOD_RES (5)..(6): Xaa is C or S
  MOD_RES (20)..(21)..(22)..(23)..(24): Xaa is A or G
  MOD_RES (25)..(26)..(27)..(28): Xaa is A or G or absent
VPKPXXAPTQLRSVKVAKVXXXXXXXXXKEVQVNMVVR

SEQ ID NO: 31104 - protein, 40 aa, Artificial Sequence
  Non-cyclic GFR-binding peptide
  MOD_RES (5)..(6)..(39): Xaa is C or S
  MOD_RES (20)..(21)..(22)..(23)..(24): Xaa is A or G
  MOD_RES (25)..(26)..(27)..(28): Xaa is A or G or absent
SASPXXVPQDLRPVQIRKIXXXXXXXXXKKATVMVVKSXK

SEQ ID NO: 31105 - protein, 40 aa, Artificial Sequence
  Non-cyclic GFR-binding peptide
  MOD_RES (6)..(40): Xaa is C or S
DEGLEXVPTEEEPLTMLYYRIKPHQGQHEQLSNFLQHNKX

SEQ ID NO: 31106 - protein, 37 aa, Artificial Sequence
  Non-cyclic GFR-binding peptide
  MOD_RES (1)..(2)..(35)..(37): Xaa is C or S
  MOD_RES (16)..(17)..(18)..(19)..(20): Xaa is A or G
  MOD_RES (21)..(22)..(23)..(24): Xaa is A or G or absent
XXVPQDLSNITIQIMXXXXXXXXXIGEMSMVVKSXKX

SEQ ID NO: 31107 - protein, 32 aa, Artificial Sequence
  Non-cyclic GFR-binding peptide
  MOD_RES (14)..(15)..(16)..(17)..(18): Xaa is A or G
  MOD_RES (19)..(20)..(21)..(22): Xaa is A or G or absent
VPQALSNITIQIMXXXXXXXXXIGEMSMIVRS

SEQ ID NO: 31108 - protein, 34 aa, Artificial Sequence
  Non-cyclic GFR-binding peptide
  MOD_RES (1)..(1): Xaa is C or S
  MOD_RES (15)..(16)..(17)..(18)..(19): Xaa is A or G
  MOD_RES (20)..(21)..(22)..(23): Xaa is A or G or absent
XAPTKLRPVQVRKIXXXXXXXXXKKATVNMVVRS

SEQ ID NO: 31109 - protein, 40 aa, Artificial Sequence
  Non-cyclic GFR-binding peptide
  MOD_RES (6)..(7): Xaa is C or S
  MOD_RES (21)..(22)..(23)..(24)..(25): Xaa is A or G
  MOD_RES (26)..(27)..(28)..(29): Xaa is A or G or absent
SIPKAXXVPTELSNITMQIMXXXXXXXXXIGEMSEMVVEG

SEQ ID NO: 31110 - protein, 39 aa, Artificial Sequence
  Non-cyclic GFR-binding peptide
  MOD_RES (3)..(3): Xaa is C or S
  MOD_RES (19)..(20)..(21)..(22)..(23): Xaa is A or G
  MOD_RES (24)..(25)..(26)..(27): Xaa is A or G or absent
VQXRPTQVQLEPLTVLYYXXXXXXXXXEQLSNTLEDHLA

SEQ ID NO: 31111 - protein, 37 aa, Artificial Sequence
  Non-cyclic GFR-binding peptide
  MOD_RES (4)..(5)..(36): Xaa is C or S
ASPXXVPQDLRPVQIRKIVGRTPKVKKATVMVVKSXK

SEQ ID NO: 31112 - protein, 42 aa, Artificial Sequence
  Non-cyclic GFR-binding peptide
  MOD_RES (6)..(7)..(39)..(41): Xaa is C or S
KIPKAXXVPTELRSVKMAKVDENEKVVKEVQVDMVVEGXGXR

SEQ ID NO: 31113 - protein, 35 aa, Artificial Sequence
  Non-cyclic GFR-binding peptide
  MOD_RES (2)..(3)..(35): Xaa is C or S
AXXVPTELRPVQMRKIDEYDKVVKKATVEMVVEGX

SEQ ID NO: 31114 - protein, 37 aa, Artificial Sequence
  Non-cyclic GFR-binding peptide
  MOD_RES (3)..(35)..(37): Xaa is C or S
PTXAPTKLRSVKVAKVDDSSNVIKEVQVNMVVRSXGX

SEQ ID NO: 31115 - protein, 35 aa, Artificial Sequence
  Non-cyclic GFR-binding peptide
  MOD_RES (4)..(5): Xaa is C or S
AAPXXVPQALSNITIQIMVGRKPKVIGEMSMIVRS

SEQ ID NO: 31116 - protein, 34 aa, Artificial Sequence
  Non-cyclic GFR-binding peptide
  MOD_RES (31)..(33): Xaa is C or S
VSQDLSNITIQIMIGKTPKIIGEMSMIVKSXKXS

SEQ ID NO: 31117 - protein, 39 aa, Artificial Sequence
  Non-cyclic GFR-binding peptide
  MOD_RES (2)..(3)..(36)..(38): Xaa is C or S
  MOD_RES (17)..(18)..(19)..(20)..(21): Xaa is A or G
  MOD_RES (22)..(23)..(24)..(25): Xaa is A or G or absent
PXXVPQALRPVQIRKIXXXXXXXXXKKATVMIVRSXKXS

SEQ ID NO: 31118 - protein, 37 aa, Artificial Sequence
  Non-cyclic GFR-binding peptide
  MOD_RES (37)..(37): Xaa is C or S
RPTQVQLEPLTVLYYEIVRKKPIFEQLSNTLEDHLAX

SEQ ID NO: 31119 - protein, 40 aa, Artificial Sequence
  Non-cyclic GFR-binding peptide
  MOD_RES (6)..(40): Xaa is C or S
  MOD_RES (20)..(21)..(22)..(23)..(24): Xaa is A or G
  MOD_RES (25)..(26)..(27)..(28): Xaa is A or G or absent
DEGLEXVPTEEEPLTMLYYXXXXXXXXXEQLSNFLQHNKX

SEQ ID NO: 31120 - protein, 41 aa, Artificial Sequence
  Non-cyclic GFR-binding peptide
  MOD_RES (5)..(6)..(38)..(40): Xaa is C or S
IPKAXXVPTELSNITMQIMDEYDKVVIGEMSEMVVEGXGXR

SEQ ID NO: 31121 - protein, 33 aa, Artificial Sequence
  Non-cyclic GFR-binding peptide
  MOD_RES (1)..(2): Xaa is C or S
XXVPTELRPVQMRKIDENEKVVKKATVDMVVEG

SEQ ID NO: 31122 - protein, 35 aa, Artificial Sequence
  Non-cyclic GFR-binding peptide
  MOD_RES (1)..(2)..(34): Xaa is C or S
XXAPTQLRSVKVAKVDDSSNVIKEVQVNMVVRAXG

SEQ ID NO: 31123 - protein, 33 aa, Artificial Sequence
  Non-cyclic GFR-binding peptide
  MOD_RES (1)..(2)..(33): Xaa is C or S
XXVPQDLSNITIQIMVGRTPKVIGEMSMVVKSX

SEQ ID NO: 31124 - protein, 38 aa, Artificial Sequence
  Non-cyclic GFR-binding peptide
  MOD_RES (5)..(5): Xaa is C or S
EGLEXVPTEEEPLTMLYYRIKPHQGQHEQLSNFLQHNK

SEQ ID NO: 31125 - protein, 44 aa, Artificial Sequence
  Non-cyclic GFR-binding peptide
  MOD_RES (7)..(41)..(43): Xaa is C or S
  MOD_RES (21)..(22)..(23)..(24)..(25): Xaa is A or G
  MOD_RES (26)..(27)..(28)..(29): Xaa is A or G or absent
HVTKPTXAPTKLRSVKVAKVXXXXXXXXXKEVQVNMVVRSXGXH

SEQ ID NO: 31126 - protein, 37 aa, Artificial Sequence
  Non-cyclic GFR-binding peptide
  MOD_RES (37)..(37): Xaa is C or S
QPSRVHHEPLTVLYYEYVRKKPKLEQLSNRLEEHLEX

SEQ ID NO: 31127 - protein, 39 aa, Artificial Sequence
  Non-cyclic GFR-binding peptide
  MOD_RES (4)..(5)..(37)..(39): Xaa is C or S
PKPXXAPTQLRPVQVRKIDDSSNVIKKATVNMVVRAXGX

SEQ ID NO: 31128 - protein, 41 aa, Artificial Sequence
  Non-cyclic GFR-binding peptide
  MOD_RES (1)..(38)..(40): Xaa is C or S
  MOD_RES (17)..(18)..(19)..(20)..(21): Xaa is A or G
  MOD_RES (22)..(23)..(24)..(25): Xaa is A or G or absent
XRPTQVQLEPLPVVYYXXXXXXXXXEQLSNTLEDHLAXKXE

SEQ ID NO: 31129 - protein, 33 aa, Artificial Sequence
  Non-cyclic GFR-binding peptide
  MOD_RES (15)..(16)..(17)..(18)..(19): Xaa is A or G
  MOD_RES (20)..(21)..(22)..(23): Xaa is A or G or absent
PSRVHHEPLTVLYYXXXXXXXXXEQLSNRLEEH

SEQ ID NO: 31130 - protein, 37 aa, Artificial Sequence
  Non-cyclic GFR-binding peptide
  MOD_RES (4)..(36): Xaa is C or S
KPTXAPTKLRSVKVAKVDDSSNVIKEVQVNMVVRSXG

SEQ ID NO: 31131 - protein, 34 aa, Artificial Sequence
  Non-cyclic GFR-binding peptide
  MOD_RES (1)..(2)..(33): Xaa is C or S
XXVSQDLSNITIQIMIGKTPKIIGEMSMIVKSXK

SEQ ID NO: 31132 - protein, 35 aa, Artificial Sequence
  Non-cyclic GFR-binding peptide
PTQVQLEPLPVVYYEIVRKKPIFEQLSNTLEDHLA

SEQ ID NO: 31133 - protein, 38 aa, Artificial Sequence
  Non-cyclic GFR-binding peptide
  MOD_RES (3)..(4)..(36)..(38): Xaa is C or S
KPXXAPTKLRPVQVRKIDDSSNVIKKATVNMVVRSXGX

SEQ ID NO: 31134 - protein, 42 aa, Artificial Sequence
  Non-cyclic GFR-binding peptide
  MOD_RES (2)..(39)..(41): Xaa is C or S
  MOD_RES (18)..(19)..(20)..(21)..(22): Xaa is A or G
  MOD_RES (23)..(24)..(25)..(26): Xaa is A or G or absent
KXQPSRVHHEPLPVVYYXXXXXXXXXEQLSNRLEEHLEXAXA

SEQ ID NO: 31135 - protein, 36 aa, Artificial Sequence
  Non-cyclic GFR-binding peptide
  MOD_RES (1)..(35): Xaa is C or S
  MOD_RES (15)..(16)..(17)..(18)..(19): Xaa is A or G
  MOD_RES (20)..(21)..(22)..(23): Xaa is A or G or absent
XVPTELRSVKMAKVXXXXXXXXXKEVQVEMVVEGXG

SEQ ID NO: 31136 - protein, 35 aa, Artificial Sequence
  Non-cyclic GFR-binding peptide
  MOD_RES (1)..(35): Xaa is C or S
  MOD_RES (15)..(16)..(17)..(18)..(19): Xaa is A or G
  MOD_RES (20)..(21)..(22)..(23): Xaa is A or G or absent
XVPTELRSVKMAKVXXXXXXXXXKEVQVEMVVEGX

SEQ ID NO: 31137 - protein, 34 aa, Artificial Sequence
  Non-cyclic GFR-binding peptide
  MOD_RES (32)..(34): Xaa is C or S
VPTELRSVKMAKVDEYDKVVKEVQVEMVVEGXGX

SEQ ID NO: 31138 - protein, 38 aa, Artificial Sequence
  Non-cyclic GFR-binding peptide
  MOD_RES (3)..(4)..(36)..(38): Xaa is C or S
KPXXAPTQLRPVQVRKIDDSSNVIKKATVNMVVRAXGX

SEQ ID NO: 31139 - protein, 41 aa, Artificial Sequence
  Non-cyclic GFR-binding peptide
  MOD_RES (5)..(6)..(40): Xaa is C or S
  MOD_RES (20)..(21)..(22)..(23)..(24): Xaa is A or G
  MOD_RES (25)..(26)..(27)..(28): Xaa is A or G or absent
IPKAXXVPTELSNITMQIMXXXXXXXXXIGEMSEMVVEGXG

SEQ ID NO: 31140 - protein, 37 aa, Artificial Sequence
  Non-cyclic GFR-binding peptide
  MOD_RES (4)..(5): Xaa is C or S
  MOD_RES (19)..(20)..(21)..(22)..(23): Xaa is A or G
  MOD_RES (24)..(25)..(26)..(27): Xaa is A or G or absent
ASPXXVPQDLRSVKIAKVXXXXXXXXXKEVQVMVVKS

SEQ ID NO: 31141 - protein, 38 aa, Artificial Sequence
  Non-cyclic GFR-binding peptide
  MOD_RES (4)..(5)..(37): Xaa is C or S
PKPXXAPTKLSNITVQIMDDSSNVIIGEMSNMVVRSXG

SEQ ID NO: 31142 - protein, 38 aa, Artificial Sequence
  Non-cyclic GFR-binding peptide
  MOD_RES (2)..(3)..(37): Xaa is C or S
  MOD_RES (17)..(18)..(19)..(20)..(21): Xaa is A or G
  MOD_RES (22)..(23)..(24)..(25): Xaa is A or G or absent
PXXAPTKLRSVKVAKVXXXXXXXXXKEVQVNMVVRSXG

SEQ ID NO: 31143 - protein, 32 aa, Artificial Sequence
  Non-cyclic GFR-binding peptide
  MOD_RES (31)..(31): Xaa is C or S
VPQDLRSVKIAKVVGRTPKVKEVQVMVVKSXK

SEQ ID NO: 31144 - protein, 32 aa, Artificial Sequence
  Non-cyclic GFR-binding peptide
  MOD_RES (14)..(15)..(16)..(17)..(18): Xaa is A or G
  MOD_RES (19)..(20)..(21)..(22): Xaa is A or G or absent
VPTELSNITMQIMXXXXXXXXXIGEMSEMVVE

SEQ ID NO: 31145 - protein, 37 aa, Artificial Sequence
  Non-cyclic GFR-binding peptide
  MOD_RES (5)..(6)..(37): Xaa is C or S
SASPXXVPQDLRPVQIRKIVGRTPKVKKATVMVVKSX

SEQ ID NO: 31146 - protein, 31 aa, Artificial Sequence
  Non-cyclic GFR-binding peptide
  MOD_RES (1)..(1): Xaa is C or S
XVPQALRSVKIAKVVGRKPKVKEVQVMIVRS

SEQ ID NO: 31147 - protein, 35 aa, Artificial Sequence
  Non-cyclic GFR-binding peptide
  MOD_RES (1)..(2)..(34): Xaa is C or S
XXAPTKLRSVKVAKVDDSSNVIKEVQVNMVVRSXG

SEQ ID NO: 31148 - protein, 42 aa, Artificial Sequence
  Non-cyclic GFR-binding peptide
  MOD_RES (4)..(41): Xaa is C or S
SVKXQPSRVHHEPLPVVYYEYVRKKPKLEQLSNRLEEHLEXA

SEQ ID NO: 31149 - protein, 39 aa, Artificial Sequence
  Non-cyclic GFR-binding peptide
  MOD_RES (37)..(39): Xaa is C or S
  MOD_RES (16)..(17)..(18)..(19)..(20): Xaa is A or G
  MOD_RES (21)..(22)..(23)..(24): Xaa is A or G or absent
QPSRVHHEPLTVLYYXXXXXXXXXEQLSNRLEEHLEXAX

SEQ ID NO: 31150 - protein, 43 aa, Artificial Sequence
  Non-cyclic GFR-binding peptide
  MOD_RES (4)..(41)..(43): Xaa is C or S
NVQXRPTQVQLEPLTVLYYEIVRKKPIFEQLSNTLEDHLAXKX

SEQ ID NO: 31151 - protein, 40 aa, Artificial Sequence
  Non-cyclic GFR-binding peptide
  MOD_RES (4)..(38)..(40): Xaa is C or S
  MOD_RES (18)..(19)..(20)..(21)..(22): Xaa is A or G
  MOD_RES (23)..(24)..(25)..(26): Xaa is A or G or absent
KPTXAPTKLRPVQVRKIXXXXXXXXXKKATVNMVVRSXGX

SEQ ID NO: 31152 - protein, 36 aa, Artificial Sequence
  Non-cyclic GFR-binding peptide
  MOD_RES (3)..(3): Xaa is C or S
  MOD_RES (17)..(18)..(19)..(20)..(21): Xaa is A or G
  MOD_RES (22)..(23)..(24)..(25): Xaa is A or G or absent
PTXAPTKLRSVKVAKVXXXXXXXXXKEVQVNMVVRS

SEQ ID NO: 31153 - protein, 35 aa, Artificial Sequence
  Non-cyclic GFR-binding peptide
  MOD_RES (1)..(1): Xaa is C or S
  MOD_RES (17)..(18)..(19)..(20)..(21): Xaa is A or G
  MOD_RES (22)..(23)..(24)..(25): Xaa is A or G or absent
XQPSRVHHEPLPVVYYXXXXXXXXXEQLSNRLEEH

SEQ ID NO: 31154 - protein, 39 aa, Artificial Sequence
  Non-cyclic GFR-binding peptide
  MOD_RES (3)..(4)..(36)..(38): Xaa is C or S
KPXXAPTKLRPVQVRKIDDSSNVIKKATVNMVVRSXGXH

SEQ ID NO: 31155 - protein, 39 aa, Artificial Sequence
  Non-cyclic GFR-binding peptide
  MOD_RES (1)..(38): Xaa is C or S
  MOD_RES (17)..(18)..(19)..(20)..(21): Xaa is A or G
  MOD_RES (22)..(23)..(24)..(25): Xaa is A or G or absent
XQPSRVHHEPLPVVYYXXXXXXXXXEQLSNRLEEHLEXA

SEQ ID NO: 31156 - protein, 34 aa, Artificial Sequence
  Non-cyclic GFR-binding peptide
  MOD_RES (3)..(4): Xaa is C or S
KAXXVPTELRPVQMRKIDENEKVVKKATVDMVVE

SEQ ID NO: 31157 - protein, 37 aa, Artificial Sequence
  Non-cyclic GFR-binding peptide
  MOD_RES (3)..(4)..(37): Xaa is C or S
  MOD_RES (18)..(19)..(20)..(21)..(22): Xaa is A or G
  MOD_RES (23)..(24)..(25)..(26): Xaa is A or G or absent
APXXVPQALRSVKIAKVXXXXXXXXXKEVQVMIVRSX

SEQ ID NO: 31158 - protein, 35 aa, Artificial Sequence
  Non-cyclic GFR-binding peptide
  MOD_RES (1)..(1): Xaa is C or S
  MOD_RES (17)..(18)..(19)..(20)..(21): Xaa is A or G
  MOD_RES (22)..(23)..(24)..(25): Xaa is A or G or absent
XQPSRVHHEPLTVLYYXXXXXXXXXEQLSNRLEEH

SEQ ID NO: 31159 - protein, 41 aa, Artificial Sequence
  Non-cyclic GFR-binding peptide
  MOD_RES (6)..(7)..(39)..(41): Xaa is C or S
SIPKAXXVPTELSNITMQIMDEYDKVVIGEMSEMVVEGXGX

SEQ ID NO: 31160 - protein, 37 aa, Artificial Sequence
  Non-cyclic GFR-binding peptide
  MOD_RES (4)..(5): Xaa is C or S
  MOD_RES (19)..(20)..(21)..(22)..(23): Xaa is A or G
  MOD_RES (24)..(25)..(26)..(27): Xaa is A or G or absent
ASPXXVPQDLRPVQIRKIXXXXXXXXXKKATVMVVKS

SEQ ID NO: 31161 - protein, 33 aa, Artificial Sequence
  Non-cyclic GFR-binding peptide
  MOD_RES (14)..(15)..(16)..(17)..(18): Xaa is A or G
  MOD_RES (19)..(20)..(21)..(22): Xaa is A or G or absent
TQVQLEPLPVVYYXXXXXXXXXEQLSNTLEDHL

SEQ ID NO: 31162 - protein, 31 aa, Artificial Sequence
  Non-cyclic GFR-binding peptide
  MOD_RES (31)..(31): Xaa is C or S
VPQALRPVQIRKIVGRKPKVKKATVMIVRSX

SEQ ID NO: 31163 - protein, 35 aa, Artificial Sequence
  Non-cyclic GFR-binding peptide
  MOD_RES (1)..(2)..(33)..(35): Xaa is C or S
XXVPQALSNITIQIMVGRKPKVIGEMSMIVRSXKX

SEQ ID NO: 31164 - protein, 39 aa, Artificial Sequence
  Non-cyclic GFR-binding peptide
  MOD_RES (5)..(6): Xaa is C or S
  MOD_RES (20)..(21)..(22)..(23)..(24): Xaa is A or G
  MOD_RES (25)..(26)..(27)..(28): Xaa is A or G or absent
VPKPXXAPTKLRPVQVRKIXXXXXXXXXKKATVNMVVRS

SEQ ID NO: 31165 - protein, 36 aa, Artificial Sequence
  Non-cyclic GFR-binding peptide
  MOD_RES (2)..(3): Xaa is C or S
  MOD_RES (17)..(18)..(19)..(20)..(21): Xaa is A or G
  MOD_RES (22)..(23)..(24)..(25): Xaa is A or G or absent
AXXVPTELRPVQMRKIXXXXXXXXXKKATVEMVVEG

SEQ ID NO: 31166 - protein, 40 aa, Artificial Sequence
  Non-cyclic GFR-binding peptide
  MOD_RES (6)..(7): Xaa is C or S
  MOD_RES (21)..(22)..(23)..(24)..(25): Xaa is A or G
  MOD_RES (26)..(27)..(28)..(29): Xaa is A or G or absent
KIPKAXXVPTELSNITMQIMXXXXXXXXXIGEMSDMVVEG

SEQ ID NO: 31167 - protein, 33 aa, Artificial Sequence
  Non-cyclic GFR-binding peptide
  MOD_RES (2)..(3): Xaa is C or S
PXXVSQDLRSVKIAKVIGKTPKIKEVQVMIVKS

SEQ ID NO: 31168 - protein, 38 aa, Artificial Sequence
  Non-cyclic GFR-binding peptide
  MOD_RES (5)..(6)..(37): Xaa is C or S
SASPXXVSQDLSNITIQIMIGKTPKIIGEMSMIVKSXK

SEQ ID NO: 31169 - protein, 39 aa, Artificial Sequence
  Non-cyclic GFR-binding peptide
  MOD_RES (2)..(3)..(37)..(39): Xaa is C or S
  MOD_RES (17)..(18)..(19)..(20)..(21): Xaa is A or G
  MOD_RES (22)..(23)..(24)..(25): Xaa is A or G or absent
AXXVPTELRPVQMRKIXXXXXXXXXKKATVEMVVEGXGX

SEQ ID NO: 31170 - protein, 33 aa, Artificial Sequence
  Non-cyclic GFR-binding peptide
  MOD_RES (33)..(33): Xaa is C or S
  MOD_RES (14)..(15)..(16)..(17)..(18): Xaa is A or G
  MOD_RES (19)..(20)..(21)..(22): Xaa is A or G or absent
VPQALRSVKIAKVXXXXXXXXXKEVQVMIVRSX

SEQ ID NO: 31171 - protein, 31 aa, Artificial Sequence
  Non-cyclic GFR-binding peptide
  MOD_RES (1)..(1): Xaa is C or S
XVPTELRPVQMRKIDENEKVVKKATVDMVVE

SEQ ID NO: 31172 - protein, 39 aa, Artificial Sequence
  Non-cyclic GFR-binding peptide
  MOD_RES (4)..(4): Xaa is C or S
  MOD_RES (20)..(21)..(22)..(23)..(24): Xaa is A or G
  MOD_RES (25)..(26)..(27)..(28): Xaa is A or G or absent
NVQXRPTQVQLEPLPVVYYXXXXXXXXXEQLSNTLEDHL

SEQ ID NO: 31173 - protein, 36 aa, Artificial Sequence
  Non-cyclic GFR-binding peptide
  MOD_RES (1)..(34)..(36): Xaa is C or S
  MOD_RES (15)..(16)..(17)..(18)..(19): Xaa is A or G
  MOD_RES (20)..(21)..(22)..(23): Xaa is A or G or absent
XVSQDLRPVQIRKIXXXXXXXXXKKATVMIVKSXKX

SEQ ID NO: 31174 - protein, 34 aa, Artificial Sequence
  Non-cyclic GFR-binding peptide
  MOD_RES (3)..(3): Xaa is C or S
PTXAPTKLRSVKVAKVDDSSNVIKEVQVNMVVRS

SEQ ID NO: 31175 - protein, 37 aa, Artificial Sequence
  Non-cyclic GFR-binding peptide
  MOD_RES (1)..(2)..(34)..(36): Xaa is C or S
XXVPTELSNITMQIMDEYDKVVIGEMSEMVVEGXGXR

SEQ ID NO: 31176 - protein, 38 aa, Artificial Sequence
  Non-cyclic GFR-binding peptide
  MOD_RES (1)..(35)..(37): Xaa is C or S
  MOD_RES (15)..(16)..(17)..(18)..(19): Xaa is A or G
  MOD_RES (20)..(21)..(22)..(23): Xaa is A or G or absent
XAPTKLRPVQVRKIXXXXXXXXXKKATVNMVVRSXGXH

SEQ ID NO: 31177 - protein, 36 aa, Artificial Sequence
  Non-cyclic GFR-binding peptide
  MOD_RES (34)..(36): Xaa is C or S
  MOD_RES (14)..(15)..(16)..(17)..(18): Xaa is A or G
  MOD_RES (19)..(20)..(21)..(22): Xaa is A or G or absent
VPTEEEPLPMVYYXXXXXXXXXEQLSNFLQHNKXEX

SEQ ID NO: 31178 - protein, 40 aa, Artificial Sequence
  Non-cyclic GFR-binding peptide
  MOD_RES (4)..(5)..(38)..(40): Xaa is C or S
  MOD_RES (19)..(20)..(21)..(22)..(23): Xaa is A or G
  MOD_RES (24)..(25)..(26)..(27): Xaa is A or G or absent
ASPXXVSQDLSNITIQIMXXXXXXXXXIGEMSMIVKSXKX

SEQ ID NO: 31179 - protein, 34 aa, Artificial Sequence
  Non-cyclic GFR-binding peptide
SRVHHEPLTVLYYEYVRKKPKLEQLSNRLEEHLE

SEQ ID NO: 31180 - protein, 36 aa, Artificial Sequence
  Non-cyclic GFR-binding peptide
  MOD_RES (4)..(5): Xaa is C or S
PKPXXAPTQLRSVKVAKVDDSSNVIKEVQVNMVVRA

SEQ ID NO: 31181 - protein, 39 aa, Artificial Sequence
  Non-cyclic GFR-binding peptide
  MOD_RES (2)..(3)..(36)..(38): Xaa is C or S
  MOD_RES (17)..(18)..(19)..(20)..(21): Xaa is A or G
  MOD_RES (22)..(23)..(24)..(25): Xaa is A or G or absent
PXXVPQALSNITIQIMXXXXXXXXXIGEMSMIVRSXKXS

SEQ ID NO: 31182 - protein, 35 aa, Artificial Sequence
  Non-cyclic GFR-binding peptide
  MOD_RES (3)..(4): Xaa is C or S
KPXXAPTKLSNITVQIMDDSSNVIIGEMSNMVVRS

SEQ ID NO: 31183 - protein, 37 aa, Artificial Sequence
  Non-cyclic GFR-binding peptide
  MOD_RES (5)..(6)..(37): Xaa is C or S
SASPXXVSQDLRPVQIRKIIGKTPKIKKATVMIVKSX

SEQ ID NO: 31184 - protein, 39 aa, Artificial Sequence
  Non-cyclic GFR-binding peptide
  MOD_RES (4)..(5)..(37)..(39): Xaa is C or S
PKPXXAPTKLRPVQVRKIDDSSNVIKKATVNMVVRSXGX

SEQ ID NO: 31185 - protein, 33 aa, Artificial Sequence
  Non-cyclic GFR-binding peptide
  MOD_RES (1)..(2): Xaa is C or S
XXAPTKLRPVQVRKIDDSSNVIKKATVNMVVRS

SEQ ID NO: 31186 - protein, 38 aa, Artificial Sequence
  Non-cyclic GFR-binding peptide
  MOD_RES (5)..(6)..(37): Xaa is C or S
SASPXXVSQDLRSVKIAKVIGKTPKIKEVQVMIVKSXK

SEQ ID NO: 31187 - protein, 34 aa, Artificial Sequence
  Non-cyclic GFR-binding peptide
  MOD_RES (2)..(3)..(34): Xaa is C or S
PXXVPQALRSVKIAKVVGRKPKVKEVQVMIVRSX

SEQ ID NO: 31188 - protein, 37 aa, Artificial Sequence
  Non-cyclic GFR-binding peptide
  MOD_RES (5)..(6): Xaa is C or S
IPKAXXVPTELSNITMQIMDEYDKVVIGEMSEMVVEG

SEQ ID NO: 31189 - protein, 37 aa, Artificial Sequence
  Non-cyclic GFR-binding peptide
  MOD_RES (3)..(4)..(35)..(37): Xaa is C or S
SPXXVPQDLRSVKIAKVVGRTPKVKEVQVMVVKSXKX

SEQ ID NO: 31190 - protein, 37 aa, Artificial Sequence
  Non-cyclic GFR-binding peptide
  MOD_RES (3)..(4)..(36): Xaa is C or S
KAXXVPTELSNITMQIMDENEKVVIGEMSDMVVEGXG

SEQ ID NO: 31191 - protein, 39 aa, Artificial Sequence
  Non-cyclic GFR-binding peptide
  MOD_RES (6)..(38): Xaa is C or S
VTKPTXAPTKLSNITVQIMDDSSNVIIGEMSNMVVRSXG

SEQ ID NO: 31192 - protein, 37 aa, Artificial Sequence
  Non-cyclic GFR-binding peptide
  MOD_RES (3)..(4)..(35)..(37): Xaa is C or S
SPXXVSQDLRSVKIAKVIGKTPKIKEVQVMIVKSXKX

SEQ ID NO: 31193 - protein, 35 aa, Artificial Sequence
  Non-cyclic GFR-binding peptide
  MOD_RES (34)..(34): Xaa is C or S
VPTEEEPLPMVYYRIKPHQGQHEQLSNFLQHNKXE

SEQ ID NO: 31194 - protein, 35 aa, Artificial Sequence
  Non-cyclic GFR-binding peptide
  MOD_RES (2)..(3)..(34): Xaa is C or S
PXXVSQDLRPVQIRKIIGKTPKIKKATVMIVKSXK

SEQ ID NO: 31195 - protein, 41 aa, Artificial Sequence
  Non-cyclic GFR-binding peptide
  MOD_RES (6)..(7)..(41): Xaa is C or S
  MOD_RES (21)..(22)..(23)..(24)..(25): Xaa is A or G
  MOD_RES (26)..(27)..(28)..(29): Xaa is A or G or absent
YVPKPXXAPTKLRPVQVRKIXXXXXXXXXKKATVNMVVRSX

SEQ ID NO: 31196 - protein, 34 aa, Artificial Sequence
  Non-cyclic GFR-binding peptide
  MOD_RES (3)..(4): Xaa is C or S
SPXXVSQDLSNITIQIMIGKTPKIIGEMSMIVKS

SEQ ID NO: 31197 - protein, 38 aa, Artificial Sequence
  Non-cyclic GFR-binding peptide
  MOD_RES (6)..(7)..(38): Xaa is C or S
ASASPXXVSQDLRPVQIRKIIGKTPKIKKATVMIVKSX

SEQ ID NO: 31198 - protein, 43 aa, Artificial Sequence
  Non-cyclic GFR-binding peptide
  MOD_RES (6)..(7)..(40)..(42): Xaa is C or S
  MOD_RES (21)..(22)..(23)..(24)..(25): Xaa is A or G
  MOD_RES (26)..(27)..(28)..(29): Xaa is A or G or absent
ASASPXXVPQDLRSVKIAKVXXXXXXXXXKEVQVMVVKSXKXS

SEQ ID NO: 31199 - protein, 38 aa, Artificial Sequence
  Non-cyclic GFR-binding peptide
  MOD_RES (2)..(3)..(35)..(37): Xaa is C or S
AXXVPTELRSVKMAKVDEYDKVVKEVQVEMVVEGXGXR

SEQ ID NO: 31200 - protein, 39 aa, Artificial Sequence
  Non-cyclic GFR-binding peptide
  MOD_RES (4)..(36)..(38): Xaa is C or S
KPTXAPTKLRSVKVAKVDDSSNVIKEVQVNMVVRSXGXH

SEQ ID NO: 31201 - protein, 39 aa, Artificial Sequence
  Non-cyclic GFR-binding peptide
  MOD_RES (3)..(4)..(37)..(39): Xaa is C or S
  MOD_RES (18)..(19)..(20)..(21)..(22): Xaa is A or G
  MOD_RES (23)..(24)..(25)..(26): Xaa is A or G or absent
APXXVPQALSNITIQIMXXXXXXXXXIGEMSMIVRSXKX

SEQ ID NO: 31202 - protein, 37 aa, Artificial Sequence
  Non-cyclic GFR-binding peptide
  MOD_RES (4)..(5)..(36): Xaa is C or S
AAPXXVPQALRSVKIAKVVGRKPKVKEVQVMIVRSXK

SEQ ID NO: 31203 - protein, 31 aa, Artificial Sequence
  Non-cyclic GFR-binding peptide
VPTELRPVQMRKIDEYDKVVKKATVEMVVEG

SEQ ID NO: 31204 - protein, 38 aa, Artificial Sequence
  Non-cyclic GFR-binding peptide
  MOD_RES (5)..(37): Xaa is C or S
TKPTXAPTKLRPVQVRKIDDSSNVIKKATVNMVVRSXG

SEQ ID NO: 31205 - protein, 36 aa, Artificial Sequence
  Non-cyclic GFR-binding peptide
  MOD_RES (5)..(6): Xaa is C or S
VPKPXXAPTQLSNITVQIMDDSSNVIIGEMSNMVVR

SEQ ID NO: 31206 - protein, 38 aa, Artificial Sequence
  Non-cyclic GFR-binding peptide
  MOD_RES (1)..(2)..(35)..(37): Xaa is C or S
  MOD_RES (16)..(17)..(18)..(19)..(20): Xaa is A or G
  MOD_RES (21)..(22)..(23)..(24): Xaa is A or G or absent
XXVPQALRPVQIRKIXXXXXXXXXKKATVMIVRSXKXS

SEQ ID NO: 31207 - protein, 39 aa, Artificial Sequence
  Non-cyclic GFR-binding peptide
  MOD_RES (4)..(5)..(38): Xaa is C or S
  MOD_RES (19)..(20)..(21)..(22)..(23): Xaa is A or G
  MOD_RES (24)..(25)..(26)..(27): Xaa is A or G or absent
ASPXXVSQDLSNITIQIMXXXXXXXXXIGEMSMIVKSXK

SEQ ID NO: 31208 - protein, 39 aa, Artificial Sequence
  Non-cyclic GFR-binding peptide
  MOD_RES (6)..(6): Xaa is C or S
DEGLEXVPTEEEPLTMLYYRIKPHQGQHEQLSNFLQHNK

SEQ ID NO: 31209 - protein, 40 aa, Artificial Sequence
  Non-cyclic GFR-binding peptide
  MOD_RES (4)..(38)..(40): Xaa is C or S
  MOD_RES (18)..(19)..(20)..(21)..(22): Xaa is A or G
  MOD_RES (23)..(24)..(25)..(26): Xaa is A or G or absent
KPTXAPTKLSNITVQIMXXXXXXXXXIGEMSNMVVRSXGX

SEQ ID NO: 31210 - protein, 32 aa, Artificial Sequence
  Non-cyclic GFR-binding peptide
  MOD_RES (1)..(2): Xaa is C or S
XXVPTELRPVQMRKIDENEKVVKKATVDMVVE

SEQ ID NO: 31211 - protein, 40 aa, Artificial Sequence
  Non-cyclic GFR-binding peptide
  MOD_RES (3)..(4)..(37)..(39): Xaa is C or S
  MOD_RES (18)..(19)..(20)..(21)..(22): Xaa is A or G
  MOD_RES (23)..(24)..(25)..(26): Xaa is A or G or absent
APXXVPQALRPVQIRKIXXXXXXXXXKKATVMIVRSXKXS

SEQ ID NO: 31212 - protein, 38 aa, Artificial Sequence
  Non-cyclic GFR-binding peptide
  MOD_RES (1)..(3)..(37)..(38): Xaa is C or S
  MOD_RES (15)..(16)..(17)..(18)..(19): Xaa is A or G
  MOD_RES (20)..(21)..(22)..(23): Xaa is A or G or absent
XGXRDVVMGRYKKLXXXXXXXXXFYLMSIANMKTPTXX

SEQ ID NO: 31213 - protein, 38 aa, Artificial Sequence
  Non-cyclic GFR-binding peptide
  MOD_RES (32)..(33): Xaa is C or S
RDVVMGRYKKLIIQQKDNFYLMSIANMKTPTXXPGASG

SEQ ID NO: 31214 - protein, 36 aa, Artificial Sequence
  Non-cyclic GFR-binding peptide
  MOD_RES (33)..(34): Xaa is C or S
  MOD_RES (11)..(12)..(13)..(14)..(15): Xaa is A or G
  MOD_RES (16)..(17)..(18)..(19): Xaa is A or G or absent
EEVIMRYKKLXXXXXXXXXFYLMSIANTKVPAXXTS

SEQ ID NO: 31215 - protein, 41 aa, Artificial Sequence
  Non-cyclic GFR-binding peptide
  MOD_RES (2)..(36)..(37): Xaa is C or S
  MOD_RES (14)..(15)..(16)..(17)..(18): Xaa is A or G
  MOD_RES (19)..(20)..(21)..(22): Xaa is A or G or absent
GXRDVVMGRYKKLXXXXXXXXXFYLMSIANMKTPTXXPGAS

SEQ ID NO: 31216 - protein, 39 aa, Artificial Sequence
  Non-cyclic GFR-binding peptide
  MOD_RES (1)..(3)..(36)..(37): Xaa is C or S
  MOD_RES (14)..(15)..(16)..(17)..(18): Xaa is A or G
  MOD_RES (19)..(20)..(21)..(22): Xaa is A or G or absent
XGXEEVIMRYKKLXXXXXXXXXFYLMSIANTKVPAXXTS

SEQ ID NO: 31217 - protein, 31 aa, Artificial Sequence
  Non-cyclic GFR-binding peptide
  MOD_RES (1)..(1): Xaa is C or S
XEEVIMRYKKLLLVRGNDFYLMSIANTKVPA

SEQ ID NO: 31218 - protein, 39 aa, Artificial Sequence
  Non-cyclic GFR-binding peptide
  MOD_RES (2)..(35)..(36): Xaa is C or S
  MOD_RES (13)..(14)..(15)..(16)..(17): Xaa is A or G
  MOD_RES (18)..(19)..(20)..(21): Xaa is A or G or absent
GXEEVIMRYKKLXXXXXXXXXFYLMSIANTKVPAXXTSP

SEQ ID NO: 31219 - protein, 37 aa, Artificial Sequence
  Non-cyclic GFR-binding peptide
  MOD_RES (2)..(4)..(36)..(37): Xaa is C or S
SXGXRDVVMGRYKKLIIQQKDNFYLMSIANMKTPTXX

SEQ ID NO: 31220 - protein, 37 aa, Artificial Sequence
  Non-cyclic GFR-binding peptide
  MOD_RES (2)..(34)..(35): Xaa is C or S
GXRDVVMGRYKKLIIQQKDNFYLMSIANMKTPTXXPG

SEQ ID NO: 31221 - protein, 40 aa, Artificial Sequence
  Non-cyclic GFR-binding peptide
  MOD_RES (2)..(4)..(36)..(37): Xaa is C or S
SXGXRDVVMGRYKKLIIQQKDNFYLMSIANMKTPTXXPGA

SEQ ID NO: 31222 - protein, 41 aa, Artificial Sequence
  Non-cyclic GFR-binding peptide
  MOD_RES (1)..(3)..(35)..(36): Xaa is C or S
XGXRDVVMGRYKKLIIQQKDNFYLMSIANMKTPTXXPGASG

SEQ ID NO: 31223 - protein, 34 aa, Artificial Sequence
  Non-cyclic GFR-binding peptide
  MOD_RES (1)..(32)..(33): Xaa is C or S
XEEVIMRYKKLLLVRGNDFYLMSIANTKVPAXXT

SEQ ID NO: 31224 - protein, 35 aa, Artificial Sequence
  Non-cyclic GFR-binding peptide
  MOD_RES (2)..(34)..(35): Xaa is C or S
GXRDVVMGRYKKLIIQQKDNFYLMSIANMKTPTXX

SEQ ID NO: 31225 - protein, 35 aa, Artificial Sequence
  Non-cyclic GFR-binding peptide
  MOD_RES (1)..(34)..(35): Xaa is C or S
  MOD_RES (12)..(13)..(14)..(15)..(16): Xaa is A or G
  MOD_RES (17)..(18)..(19)..(20): Xaa is A or G or absent
XEEVIMRYKKLXXXXXXXXXFYLMSIANTKVPAXX

SEQ ID NO: 31226 - protein, 32 aa, Artificial Sequence
  Non-cyclic GFR-binding peptide
  MOD_RES (32)..(32): Xaa is C or S
RDVVMGRYKKLIIQQKDNFYLMSIANMKTPTX

SEQ ID NO: 31227 - protein, 37 aa, Artificial Sequence
  Non-cyclic GFR-binding peptide
  MOD_RES (34)..(35): Xaa is C or S
  MOD_RES (12)..(13)..(14)..(15)..(16): Xaa is A or G
  MOD_RES (17)..(18)..(19)..(20): Xaa is A or G or absent
RDVVMGRYKKLXXXXXXXXXFYLMSIANMKTPTXXPG

SEQ ID NO: 31228 - protein, 42 aa, Artificial Sequence
  Non-cyclic GFR-binding peptide
  MOD_RES (2)..(36)..(37): Xaa is C or S
  MOD_RES (14)..(15)..(16)..(17)..(18): Xaa is A or G
  MOD_RES (19)..(20)..(21)..(22): Xaa is A or G or absent
GXRDVVMGRYKKLXXXXXXXXXFYLMSIANMKTPTXXPGASG

SEQ ID NO: 31229 - protein, 34 aa, Artificial Sequence
  Non-cyclic GFR-binding peptide
  MOD_RES (2)..(4): Xaa is C or S
LXGXEEVIMRYKKLLLVRGNDFYLMSIANTKVPA

SEQ ID NO: 31230 - protein, 39 aa, Artificial Sequence
  Non-cyclic GFR-binding peptide
  MOD_RES (2)..(36)..(37): Xaa is C or S
  MOD_RES (14)..(15)..(16)..(17)..(18): Xaa is A or G
  MOD_RES (19)..(20)..(21)..(22): Xaa is A or G or absent
GXRDVVMGRYKKLXXXXXXXXXFYLMSIANMKTPTXXPG

SEQ ID NO: 31231 - protein, 40 aa, Artificial Sequence
  Non-cyclic GFR-binding peptide
  MOD_RES (1)..(3)..(35)..(36): Xaa is C or S
XGXRDVVMGRYKKLIIQQKDNFYLMSIANMKTPTXXPGAS

SEQ ID NO: 31232 - protein, 37 aa, Artificial Sequence
  Non-cyclic GFR-binding peptide
  MOD_RES (1)..(3)..(37): Xaa is C or S
  MOD_RES (15)..(16)..(17)..(18)..(19): Xaa is A or G
  MOD_RES (20)..(21)..(22)..(23): Xaa is A or G or absent
XGXRDVVMGRYKKLXXXXXXXXXFYLMSIANMKTPTX

SEQ ID NO: 31233 - protein, 33 aa, Artificial Sequence
  Non-cyclic GFR-binding peptide
  MOD_RES (12)..(13)..(14)..(15)..(16): Xaa is A or G
  MOD_RES (17)..(18)..(19)..(20): Xaa is A or G or absent
RDVVMGRYKKLXXXXXXXXXFYLMSIANMKTPT

SEQ ID NO: 31234 - protein, 39 aa, Artificial Sequence
  Non-cyclic GFR-binding peptide
  MOD_RES (1)..(3)..(37)..(38): Xaa is C or S
  MOD_RES (15)..(16)..(17)..(18)..(19): Xaa is A or G
  MOD_RES (20)..(21)..(22)..(23): Xaa is A or G or absent
XGXRDVVMGRYKKLXXXXXXXXXFYLMSIANMKTPTXXP

SEQ ID NO: 31235 - protein, 38 aa, Artificial Sequence
  Non-cyclic GFR-binding peptide
  MOD_RES (2)..(36)..(37): Xaa is C or S
  MOD_RES (14)..(15)..(16)..(17)..(18): Xaa is A or G
  MOD_RES (19)..(20)..(21)..(22): Xaa is A or G or absent
GXRDVVMGRYKKLXXXXXXXXXFYLMSIANMKTPTXXP

SEQ ID NO: 31236 - protein, 34 aa, Artificial Sequence
  Non-cyclic GFR-binding peptide
  MOD_RES (31)..(32): Xaa is C or S
DVVMGRYKKLIIQQKDNFYLMSIANMKTPTXXPG

SEQ ID NO: 31237 - protein, 37 aa, Artificial Sequence
  Non-cyclic GFR-binding peptide
  MOD_RES (1)..(34)..(35): Xaa is C or S
  MOD_RES (12)..(13)..(14)..(15)..(16): Xaa is A or G
  MOD_RES (17)..(18)..(19)..(20): Xaa is A or G or absent
XEEVIMRYKKLXXXXXXXXXFYLMSIANTKVPAXXTS

SEQ ID NO: 31238 - protein, 38 aa, Artificial Sequence
  Non-cyclic GFR-binding peptide
  MOD_RES (2)..(34)..(35): Xaa is C or S
GXRDVVMGRYKKLIIQQKDNFYLMSIANMKTPTXXPGA

SEQ ID NO: 31239 - protein, 36 aa, Artificial Sequence
  Non-cyclic GFR-binding peptide
  MOD_RES (31)..(32): Xaa is C or S
EEVIMRYKKLLLVRGNDFYLMSIANTKVPAXXTSPV

SEQ ID NO: 31240 - protein, 41 aa, Artificial Sequence
  Non-cyclic GFR-binding peptide
  MOD_RES (1)..(3)..(36)..(37): Xaa is C or S
  MOD_RES (14)..(15)..(16)..(17)..(18): Xaa is A or G
  MOD_RES (19)..(20)..(21)..(22): Xaa is A or G or absent
XGXEEVIMRYKKLXXXXXXXXXFYLMSIANTKVPAXXTSPV

SEQ ID NO: 31241 - protein, 37 aa, Artificial Sequence
  Non-cyclic GFR-binding peptide
  MOD_RES (1)..(35)..(36): Xaa is C or S
  MOD_RES (13)..(14)..(15)..(16)..(17): Xaa is A or G
  MOD_RES (18)..(19)..(20)..(21): Xaa is A or G or absent
XRDVVMGRYKKLXXXXXXXXXFYLMSIANMKTPTXXP

SEQ ID NO: 31242 - protein, 36 aa, Artificial Sequence
  Non-cyclic GFR-binding peptide
  MOD_RES (31)..(32): Xaa is C or S
DVVMGRYKKLIIQQKDNFYLMSIANMKTPTXXPGAS

SEQ ID NO: 31243 - protein, 44 aa, Artificial Sequence
  Non-cyclic GFR-binding peptide
  MOD_RES (2)..(4)..(38)..(39): Xaa is C or S
  MOD_RES (16)..(17)..(18)..(19)..(20): Xaa is A or G
  MOD_RES (21)..(22)..(23)..(24): Xaa is A or G or absent
SXGXRDVVMGRYKKLXXXXXXXXXFYLMSIANMKTPTXXPGASG

SEQ ID NO: 31244 - protein, 35 aa, Artificial Sequence
  Non-cyclic GFR-binding peptide
  MOD_RES (2)..(4): Xaa is C or S
SXGXRDVVMGRYKKLIIQQKDNFYLMSIANMKTPT

SEQ ID NO: 31245 - protein, 35 aa, Artificial Sequence
  Non-cyclic GFR-binding peptide
  MOD_RES (32)..(33): Xaa is C or S
RDVVMGRYKKLIIQQKDNFYLMSIANMKTPTXXPG

SEQ ID NO: 31246 - protein, 34 aa, Artificial Sequence
  Non-cyclic GFR-binding peptide
  MOD_RES (31)..(32): Xaa is C or S
EEVIMRYKKLLLVRGNDFYLMSIANTKVPAXXTS

SEQ ID NO: 31247 - protein, 35 aa, Artificial Sequence
  Non-cyclic GFR-binding peptide
  MOD_RES (2)..(35): Xaa is C or S
  MOD_RES (13)..(14)..(15)..(16)..(17): Xaa is A or G
  MOD_RES (18)..(19)..(20)..(21): Xaa is A or G or absent
GXEEVIMRYKKLXXXXXXXXXFYLMSIANTKVPAX

SEQ ID NO: 31248 - protein, 41 aa, Artificial Sequence
  Non-cyclic GFR-binding peptide
  MOD_RES (2)..(35)..(36): Xaa is C or S
  MOD_RES (13)..(14)..(15)..(16)..(17): Xaa is A or G
  MOD_RES (18)..(19)..(20)..(21): Xaa is A or G or absent
GXEEVIMRYKKLXXXXXXXXXFYLMSIANTKVPAXXTSPVR

SEQ ID NO: 31249 - protein, 30 aa, Artificial Sequence
  Non-cyclic GFR-binding peptide
EEVIMRYKKLLLVRGNDFYLMSIANTKVPA

SEQ ID NO: 31250 - protein, 40 aa, Artificial Sequence
  Non-cyclic GFR-binding peptide
  MOD_RES (2)..(35)..(36): Xaa is C or S
  MOD_RES (13)..(14)..(15)..(16)..(17): Xaa is A or G
  MOD_RES (18)..(19)..(20)..(21): Xaa is A or G or absent
GXEEVIMRYKKLXXXXXXXXXFYLMSIANTKVPAXXTSPV

SEQ ID NO: 31251 - protein, 39 aa, Artificial Sequence
  Non-cyclic GFR-binding peptide
  MOD_RES (1)..(35)..(36): Xaa is C or S
  MOD_RES (13)..(14)..(15)..(16)..(17): Xaa is A or G
  MOD_RES (18)..(19)..(20)..(21): Xaa is A or G or absent
XRDVVMGRYKKLXXXXXXXXXFYLMSIANMKTPTXXPGA

SEQ ID NO: 31252 - protein, 37 aa, Artificial Sequence
  Non-cyclic GFR-binding peptide
  MOD_RES (1)..(33)..(34): Xaa is C or S
XRDVVMGRYKKLIIQQKDNFYLMSIANMKTPTXXPGA

SEQ ID NO: 31253 - protein, 34 aa, Artificial Sequence
  Non-cyclic GFR-binding peptide
  MOD_RES (32)..(33): Xaa is C or S
RDVVMGRYKKLIIQQKDNFYLMSIANMKTPTXXP

SEQ ID NO: 31254 - protein, 34 aa, Artificial Sequence
  Non-cyclic GFR-binding peptide
  MOD_RES (33)..(34): Xaa is C or S
  MOD_RES (11)..(12)..(13)..(14)..(15): Xaa is A or G
  MOD_RES (16)..(17)..(18)..(19): Xaa is A or G or absent
DVVMGRYKKLXXXXXXXXXFYLMSIANMKTPTXX

SEQ ID NO: 31255 - protein, 38 aa, Artificial Sequence
  Non-cyclic GFR-binding peptide
  MOD_RES (34)..(35): Xaa is C or S
  MOD_RES (12)..(13)..(14)..(15)..(16): Xaa is A or G
  MOD_RES (17)..(18)..(19)..(20): Xaa is A or G or absent
RDVVMGRYKKLXXXXXXXXXFYLMSIANMKTPTXXPGA

SEQ ID NO: 31256 - protein, 38 aa, Artificial Sequence
  Non-cyclic GFR-binding peptide
  MOD_RES (1)..(3)..(35)..(36): Xaa is C or S
XGXRDVVMGRYKKLIIQQKDNFYLMSIANMKTPTXXPG

SEQ ID NO: 31257 - protein, 35 aa, Artificial Sequence
  Non-cyclic GFR-binding peptide
  MOD_RES (33)..(34): Xaa is C or S
  MOD_RES (11)..(12)..(13)..(14)..(15): Xaa is A or G
  MOD_RES (16)..(17)..(18)..(19): Xaa is A or G or absent
EEVIMRYKKLXXXXXXXXXFYLMSIANTKVPAXXT

SEQ ID NO: 31258 - protein, 34 aa, Artificial Sequence
  Non-cyclic GFR-binding peptide
  MOD_RES (1)..(33)..(34): Xaa is C or S
XRDVVMGRYKKLIIQQKDNFYLMSIANMKTPTXX

SEQ ID NO: 31259 - protein, 32 aa, Artificial Sequence
  Non-cyclic GFR-binding peptide
  MOD_RES (11)..(12)..(13)..(14)..(15): Xaa is A or G
  MOD_RES (16)..(17)..(18)..(19): Xaa is A or G or absent
EEVIMRYKKLXXXXXXXXXFYLMSIANTKVPA

SEQ ID NO: 31260 - protein, 38 aa, Artificial Sequence
  Non-cyclic GFR-binding peptide
  MOD_RES (2)..(4)..(35)..(36): Xaa is C or S
LXGXEEVIMRYKKLLLVRGNDFYLMSIANTKVPAXXTS

SEQ ID NO: 31261 - protein, 34 aa, Artificial Sequence
  Non-cyclic GFR-binding peptide
  MOD_RES (1)..(1): Xaa is C or S
  MOD_RES (13)..(14)..(15)..(16)..(17): Xaa is A or G
  MOD_RES (18)..(19)..(20)..(21): Xaa is A or G or absent
XRDVVMGRYKKLXXXXXXXXXFYLMSIANMKTPT

SEQ ID NO: 31262 - protein, 39 aa, Artificial Sequence
  Non-cyclic GFR-binding peptide
  MOD_RES (2)..(4)..(35)..(36): Xaa is C or S
LXGXEEVIMRYKKLLLVRGNDFYLMSIANTKVPAXXTSP

SEQ ID NO: 31263 - protein, 31 aa, Artificial Sequence
  Non-cyclic GFR-binding peptide
RDVVMGRYKKLIIQQKDNFYLMSIANMKTPT

SEQ ID NO: 31264 - protein, 33 aa, Artificial Sequence
  Non-cyclic GFR-binding peptide
  MOD_RES (1)..(3): Xaa is C or S
XGXEEVIMRYKKLLLVRGNDFYLMSIANTKVPA

SEQ ID NO: 31265 - protein, 33 aa, Artificial Sequence
  Non-cyclic GFR-binding peptide
  MOD_RES (31)..(32): Xaa is C or S
DVVMGRYKKLIIQQKDNFYLMSIANMKTPTXXP

SEQ ID NO: 31266 - protein, 36 aa, Artificial Sequence
  Non-cyclic GFR-binding peptide
  MOD_RES (33)..(34): Xaa is C or S
  MOD_RES (11)..(12)..(13)..(14)..(15): Xaa is A or G
  MOD_RES (16)..(17)..(18)..(19): Xaa is A or G or absent
DVVMGRYKKLXXXXXXXXXFYLMSIANMKTPTXXPG

SEQ ID NO: 31267 - protein, 38 aa, Artificial Sequence
  Non-cyclic GFR-binding peptide
  MOD_RES (2)..(4)..(37)..(38): Xaa is C or S
  MOD_RES (15)..(16)..(17)..(18)..(19): Xaa is A or G
  MOD_RES (20)..(21)..(22)..(23): Xaa is A or G or absent
LXGXEEVIMRYKKLXXXXXXXXXFYLMSIANTKVPAXX

SEQ ID NO: 31268 - protein, 36 aa, Artificial Sequence
  Non-cyclic GFR-binding peptide
  MOD_RES (1)..(33)..(34): Xaa is C or S
XRDVVMGRYKKLIIQQKDNFYLMSIANMKTPTXXPG

SEQ ID NO: 31269 - protein, 37 aa, Artificial Sequence
  Non-cyclic GFR-binding peptide
  MOD_RES (1)..(3)..(35)..(36): Xaa is C or S
XGXRDVVMGRYKKLIIQQKDNFYLMSIANMKTPTXXP

SEQ ID NO: 31270 - protein, 36 aa, Artificial Sequence
  Non-cyclic GFR-binding peptide
  MOD_RES (1)..(32)..(33): Xaa is C or S
XEEVIMRYKKLLLVRGNDFYLMSIANTKVPAXXTSP

SEQ ID NO: 31271 - protein, 38 aa, Artificial Sequence
  Non-cyclic GFR-binding peptide
  MOD_RES (33)..(34): Xaa is C or S
  MOD_RES (11)..(12)..(13)..(14)..(15): Xaa is A or G
  MOD_RES (16)..(17)..(18)..(19): Xaa is A or G or absent
DVVMGRYKKLXXXXXXXXXFYLMSIANMKTPTXXPGAS

SEQ ID NO: 31272 - protein, 32 aa, Artificial Sequence
  Non-cyclic GFR-binding peptide
  MOD_RES (31)..(32): Xaa is C or S
DVVMGRYKKLIIQQKDNFYLMSIANMKTPTXX

SEQ ID NO: 31273 - protein, 39 aa, Artificial Sequence
  Non-cyclic GFR-binding peptide
  MOD_RES (1)..(3)..(35)..(36): Xaa is C or S
XGXRDVVMGRYKKLIIQQKDNFYLMSIANMKTPTXXPGA

SEQ ID NO: 31274 - protein, 37 aa, Artificial Sequence
  Non-cyclic GFR-binding peptide
  MOD_RES (31)..(32): Xaa is C or S
EEVIMRYKKLLLVRGNDFYLMSIANTKVPAXXTSPVR

SEQ ID NO: 31275 - protein, 32 aa, Artificial Sequence
  Non-cyclic GFR-binding peptide
  MOD_RES (1)..(1): Xaa is C or S
XRDVVMGRYKKLIIQQKDNFYLMSIANMKTPT

SEQ ID NO: 31276 - protein, 41 aa, Artificial Sequence
  Non-cyclic GFR-binding peptide
  MOD_RES (2)..(4)..(37)..(38): Xaa is C or S
  MOD_RES (15)..(16)..(17)..(18)..(19): Xaa is A or G
  MOD_RES (20)..(21)..(22)..(23): Xaa is A or G or absent
LXGXEEVIMRYKKLXXXXXXXXXFYLMSIANTKVPAXXTSP

SEQ ID NO: 31277 - protein, 41 aa, Artificial Sequence
  Non-cyclic GFR-binding peptide
  MOD_RES (2)..(4)..(35)..(36): Xaa is C or S
LXGXEEVIMRYKKLLLVRGNDFYLMSIANTKVPAXXTSPVR

SEQ ID NO: 31278 - protein, 36 aa, Artificial Sequence
  Non-cyclic GFR-binding peptide
  MOD_RES (1)..(34)..(35): Xaa is C or S
  MOD_RES (12)..(13)..(14)..(15)..(16): Xaa is A or G
  MOD_RES (17)..(18)..(19)..(20): Xaa is A or G or absent
XEEVIMRYKKLXXXXXXXXXFYLMSIANTKVPAXXT

SEQ ID NO: 31279 - protein, 34 aa, Artificial Sequence
  Non-cyclic GFR-binding peptide
  MOD_RES (1)..(3)..(34): Xaa is C or S
XGXEEVIMRYKKLLLVRGNDFYLMSIANTKVPAX

SEQ ID NO: 31280 - protein, 37 aa, Artificial Sequence
  Non-cyclic GFR-binding peptide
  MOD_RES (2)..(4)..(35)..(36): Xaa is C or S
LXGXEEVIMRYKKLLLVRGNDFYLMSIANTKVPAXXT

SEQ ID NO: 31281 - protein, 35 aa, Artificial Sequence
  Non-cyclic GFR-binding peptide
  MOD_RES (1)..(3)..(34)..(35): Xaa is C or S
XGXEEVIMRYKKLLLVRGNDFYLMSIANTKVPAXX

SEQ ID NO: 31282 - protein, 36 aa, Artificial Sequence
  Non-cyclic GFR-binding peptide
  MOD_RES (2)..(4)..(35)..(36): Xaa is C or S
LXGXEEVIMRYKKLLLVRGNDFYLMSIANTKVPAXX

SEQ ID NO: 31283 - protein, 36 aa, Artificial Sequence
  Non-cyclic GFR-binding peptide
  MOD_RES (1)..(3): Xaa is C or S
  MOD_RES (15)..(16)..(17)..(18)..(19): Xaa is A or G
  MOD_RES (20)..(21)..(22)..(23): Xaa is A or G or absent
XGXRDVVMGRYKKLXXXXXXXXXFYLMSIANMKTPT

SEQ ID NO: 31284 - protein, 36 aa, Artificial Sequence
  Non-cyclic GFR-binding peptide
  MOD_RES (2)..(35)..(36): Xaa is C or S
  MOD_RES (13)..(14)..(15)..(16)..(17): Xaa is A or G
  MOD_RES (18)..(19)..(20)..(21): Xaa is A or G or absent
GXEEVIMRYKKLXXXXXXXXXFYLMSIANTKVPAXX

SEQ ID NO: 31285 - protein, 38 aa, Artificial Sequence
  Non-cyclic GFR-binding peptide
  MOD_RES (1)..(33)..(34): Xaa is C or S
XRDVVMGRYKKLIIQQKDNFYLMSIANMKTPTXXPGAS

SEQ ID NO: 31286 - protein, 40 aa, Artificial Sequence
  Non-cyclic GFR-binding peptide
  MOD_RES (2)..(36)..(37): Xaa is C or S
  MOD_RES (14)..(15)..(16)..(17)..(18): Xaa is A or G
  MOD_RES (19)..(20)..(21)..(22): Xaa is A or G or absent
GXRDVVMGRYKKLXXXXXXXXXFYLMSIANMKTPTXXPGA

SEQ ID NO: 31287 - protein, 34 aa, Artificial Sequence
  Non-cyclic GFR-binding peptide
  MOD_RES (2)..(34): Xaa is C or S
GXRDVVMGRYKKLIIQQKDNFYLMSIANMKTPTX

SEQ ID NO: 31288 - protein, 37 aa, Artificial Sequence
  Non-cyclic GFR-binding peptide
  MOD_RES (2)..(33)..(34): Xaa is C or S
GXEEVIMRYKKLLLVRGNDFYLMSIANTKVPAXXTSP

SEQ ID NO: 31289 - protein, 42 aa, Artificial Sequence
  Non-cyclic GFR-binding peptide
  MOD_RES (2)..(4)..(38)..(39): Xaa is C or S
  MOD_RES (16)..(17)..(18)..(19)..(20): Xaa is A or G
  MOD_RES (21)..(22)..(23)..(24): Xaa is A or G or absent
SXGXRDVVMGRYKKLXXXXXXXXXFYLMSIANMKTPTXXPGA

SEQ ID NO: 31290 - protein, 37 aa, Artificial Sequence
  Non-cyclic GFR-binding peptide
  MOD_RES (2)..(36)..(37): Xaa is C or S
  MOD_RES (14)..(15)..(16)..(17)..(18): Xaa is A or G
  MOD_RES (19)..(20)..(21)..(22): Xaa is A or G or absent
GXRDVVMGRYKKLXXXXXXXXXFYLMSIANMKTPTXX

SEQ ID NO: 31291 - protein, 34 aa, Artificial Sequence
  Non-cyclic GFR-binding peptide
  MOD_RES (34)..(34): Xaa is C or S
  MOD_RES (12)..(13)..(14)..(15)..(16): Xaa is A or G
  MOD_RES (17)..(18)..(19)..(20): Xaa is A or G or absent
RDVVMGRYKKLXXXXXXXXXFYLMSIANMKTPTX

SEQ ID NO: 31292 - protein, 34 aa, Artificial Sequence
  Non-cyclic GFR-binding peptide
  MOD_RES (2)..(33)..(34): Xaa is C or S
GXEEVIMRYKKLLLVRGNDFYLMSIANTKVPAXX

SEQ ID NO: 31293 - protein, 33 aa, Artificial Sequence
  Non-cyclic GFR-binding peptide
  MOD_RES (32)..(33): Xaa is C or S
RDVVMGRYKKLIIQQKDNFYLMSIANMKTPTXX

SEQ ID NO: 31294 - protein, 36 aa, Artificial Sequence
  Non-cyclic GFR-binding peptide
  MOD_RES (32)..(33): Xaa is C or S
RDVVMGRYKKLIIQQKDNFYLMSIANMKTPTXXPGA

SEQ ID NO: 31295 - protein, 39 aa, Artificial Sequence
  Non-cyclic GFR-binding peptide
  MOD_RES (34)..(35): Xaa is C or S
  MOD_RES (12)..(13)..(14)..(15)..(16): Xaa is A or G
  MOD_RES (17)..(18)..(19)..(20): Xaa is A or G or absent
RDVVMGRYKKLXXXXXXXXXFYLMSIANMKTPTXXPGAS

SEQ ID NO: 31296 - protein, 38 aa, Artificial Sequence
  Non-cyclic GFR-binding peptide
  MOD_RES (1)..(34)..(35): Xaa is C or S
  MOD_RES (12)..(13)..(14)..(15)..(16): Xaa is A or G
  MOD_RES (17)..(18)..(19)..(20): Xaa is A or G or absent
XEEVIMRYKKLXXXXXXXXXFYLMSIANTKVPAXXTSP

SEQ ID NO: 31297 - protein, 33 aa, Artificial Sequence
  Non-cyclic GFR-binding peptide
  MOD_RES (1)..(33): Xaa is C or S
XRDVVMGRYKKLIIQQKDNFYLMSIANMKTPTX

SEQ ID NO: 31298 - protein, 34 aa, Artificial Sequence
  Non-cyclic GFR-binding peptide
  MOD_RES (33)..(34): Xaa is C or S
  MOD_RES (11)..(12)..(13)..(14)..(15): Xaa is A or G
  MOD_RES (16)..(17)..(18)..(19): Xaa is A or G or absent
EEVIMRYKKLXXXXXXXXXFYLMSIANTKVPAXX

SEQ ID NO: 31299 - protein, 39 aa, Artificial Sequence
  Non-cyclic GFR-binding peptide
  MOD_RES (2)..(4)..(36)..(37): Xaa is C or S
SXGXRDVVMGRYKKLIIQQKDNFYLMSIANMKTPTXXPG

SEQ ID NO: 31300 - protein, 37 aa, Artificial Sequence
  Non-cyclic GFR-binding peptide
  MOD_RES (31)..(32): Xaa is C or S
DVVMGRYKKLIIQQKDNFYLMSIANMKTPTXXPGASG

SEQ ID NO: 31301 - protein, 38 aa, Artificial Sequence
  Non-cyclic GFR-binding peptide
  MOD_RES (2)..(33)..(34): Xaa is C or S
GXEEVIMRYKKLLLVRGNDFYLMSIANTKVPAXXTSPV

SEQ ID NO: 31302 - protein, 34 aa, Artificial Sequence
  Non-cyclic GFR-binding peptide
  MOD_RES (1)..(34): Xaa is C or S
  MOD_RES (12)..(13)..(14)..(15)..(16): Xaa is A or G
  MOD_RES (17)..(18)..(19)..(20): Xaa is A or G or absent
XEEVIMRYKKLXXXXXXXXXFYLMSIANTKVPAX

SEQ ID NO: 31303 - protein, 38 aa, Artificial Sequence
  Non-cyclic GFR-binding peptide
  MOD_RES (1)..(35)..(36): Xaa is C or S
  MOD_RES (13)..(14)..(15)..(16)..(17): Xaa is A or G
  MOD_RES (18)..(19)..(20)..(21): Xaa is A or G or absent
XRDVVMGRYKKLXXXXXXXXXFYLMSIANMKTPTXXPG

SEQ ID NO: 31304 - protein, 39 aa, Artificial Sequence
  Non-cyclic GFR-binding peptide
  MOD_RES (1)..(33)..(34): Xaa is C or S
XRDVVMGRYKKLIIQQKDNFYLMSIANMKTPTXXPGASG

SEQ ID NO: 31305 - protein, 40 aa, Artificial Sequence
  Non-cyclic GFR-binding peptide
  MOD_RES (2)..(4)..(38)..(39): Xaa is C or S
  MOD_RES (16)..(17)..(18)..(19)..(20): Xaa is A or G
  MOD_RES (21)..(22)..(23)..(24): Xaa is A or G or absent
SXGXRDVVMGRYKKLXXXXXXXXXFYLMSIANMKTPTXXP

SEQ ID NO: 31306 - protein, 36 aa, Artificial Sequence
  Non-cyclic GFR-binding peptide
  MOD_RES (1)..(3)..(34)..(35): Xaa is C or S
XGXEEVIMRYKKLLLVRGNDFYLMSIANTKVPAXXT

SEQ ID NO: 31307 - protein, 38 aa, Artificial Sequence
  Non-cyclic GFR-binding peptide
  MOD_RES (2)..(35)..(36): Xaa is C or S
  MOD_RES (13)..(14)..(15)..(16)..(17): Xaa is A or G
  MOD_RES (18)..(19)..(20)..(21): Xaa is A or G or absent
GXEEVIMRYKKLXXXXXXXXXFYLMSIANTKVPAXXTS

SEQ ID NO: 31308 - protein, 39 aa, Artificial Sequence
  Non-cyclic GFR-binding peptide
  MOD_RES (2)..(4)..(38)..(39): Xaa is C or S
  MOD_RES (16)..(17)..(18)..(19)..(20): Xaa is A or G
  MOD_RES (21)..(22)..(23)..(24): Xaa is A or G or absent
SXGXRDVVMGRYKKLXXXXXXXXXFYLMSIANMKTPTXX

SEQ ID NO: 31309 - protein, 40 aa, Artificial Sequence
  Non-cyclic GFR-binding peptide
  MOD_RES (1)..(3)..(37)..(38): Xaa is C or S
  MOD_RES (15)..(16)..(17)..(18)..(19): Xaa is A or G
  MOD_RES (20)..(21)..(22)..(23): Xaa is A or G or absent
XGXRDVVMGRYKKLXXXXXXXXXFYLMSIANMKTPTXXPG

SEQ ID NO: 31310 - protein, 38 aa, Artificial Sequence
  Non-cyclic GFR-binding peptide
  MOD_RES (1)..(32)..(33): Xaa is C or S
XEEVIMRYKKLLLVRGNDFYLMSIANTKVPAXXTSPVR

SEQ ID NO: 31311 - protein, 40 aa, Artificial Sequence
  Non-cyclic GFR-binding peptide
  MOD_RES (34)..(35): Xaa is C or S
  MOD_RES (12)..(13)..(14)..(15)..(16): Xaa is A or G
  MOD_RES (17)..(18)..(19)..(20): Xaa is A or G or absent
RDVVMGRYKKLXXXXXXXXXFYLMSIANMKTPTXXPGASG

SEQ ID NO: 31312 - protein, 35 aa, Artificial Sequence
  Non-cyclic GFR-binding peptide
  MOD_RES (31)..(32): Xaa is C or S
DVVMGRYKKLIIQQKDNFYLMSIANMKTPTXXPGA

SEQ ID NO: 31313 - protein, 35 aa, Artificial Sequence
  Non-cyclic GFR-binding peptide
  MOD_RES (33)..(34): Xaa is C or S
  MOD_RES (11)..(12)..(13)..(14)..(15): Xaa is A or G
  MOD_RES (16)..(17)..(18)..(19): Xaa is A or G or absent
DVVMGRYKKLXXXXXXXXXFYLMSIANMKTPTXXP

SEQ ID NO: 31314 - protein, 33 aa, Artificial Sequence
  Non-cyclic GFR-binding peptide
  MOD_RES (2)..(33): Xaa is C or S
GXEEVIMRYKKLLLVRGNDFYLMSIANTKVPAX

SEQ ID NO: 31315 - protein, 30 aa, Artificial Sequence
  Non-cyclic GFR-binding peptide
DVVMGRYKKLIIQQKDNFYLMSIANMKTPT

SEQ ID NO: 31316 - protein, 34 aa, Artificial Sequence
  Non-cyclic GFR-binding peptide
  MOD_RES (1)..(3): Xaa is C or S
XGXRDVVMGRYKKLIIQQKDNFYLMSIANMKTPT

SEQ ID NO: 31317 - protein, 40 aa, Artificial Sequence
  Non-cyclic GFR-binding peptide
  MOD_RES (1)..(3)..(36)..(37): Xaa is C or S
  MOD_RES (14)..(15)..(16)..(17)..(18): Xaa is A or G
  MOD_RES (19)..(20)..(21)..(22): Xaa is A or G or absent
XGXEEVIMRYKKLXXXXXXXXXFYLMSIANTKVPAXXTSP

SEQ ID NO: 31318 - protein, 39 aa, Artificial Sequence
  Non-cyclic GFR-binding peptide
  MOD_RES (2)..(4)..(37)..(38): Xaa is C or S
  MOD_RES (15)..(16)..(17)..(18)..(19): Xaa is A or G
  MOD_RES (20)..(21)..(22)..(23): Xaa is A or G or absent
LXGXEEVIMRYKKLXXXXXXXXXFYLMSIANTKVPAXXT

SEQ ID NO: 31319 - protein, 31 aa, Artificial Sequence
  Non-cyclic GFR-binding peptide
  MOD_RES (31)..(31): Xaa is C or S
DVVMGRYKKLIIQQKDNFYLMSIANMKTPTX

SEQ ID NO: 31320 - protein, 38 aa, Artificial Sequence
  Non-cyclic GFR-binding peptide
  MOD_RES (1)..(3)..(36)..(37): Xaa is C or S
  MOD_RES (14)..(15)..(16)..(17)..(18): Xaa is A or G
  MOD_RES (19)..(20)..(21)..(22): Xaa is A or G or absent
XGXEEVIMRYKKLXXXXXXXXXFYLMSIANTKVPAXXT

SEQ ID NO: 31321 - protein, 36 aa, Artificial Sequence
  Non-cyclic GFR-binding peptide
  MOD_RES (34)..(35): Xaa is C or S
  MOD_RES (12)..(13)..(14)..(15)..(16): Xaa is A or G
  MOD_RES (17)..(18)..(19)..(20): Xaa is A or G or absent
RDVVMGRYKKLXXXXXXXXXFYLMSIANMKTPTXXP

SEQ ID NO: 31322 - protein, 35 aa, Artificial Sequence
  Non-cyclic GFR-binding peptide
  MOD_RES (1)..(3): Xaa is C or S
  MOD_RES (14)..(15)..(16)..(17)..(18): Xaa is A or G
  MOD_RES (19)..(20)..(21)..(22): Xaa is A or G or absent
XGXEEVIMRYKKLXXXXXXXXXFYLMSIANTKVPA

SEQ ID NO: 31323 - protein, 37 aa, Artificial Sequence
  Non-cyclic GFR-binding peptide
  MOD_RES (33)..(34): Xaa is C or S
  MOD_RES (11)..(12)..(13)..(14)..(15): Xaa is A or G
  MOD_RES (16)..(17)..(18)..(19): Xaa is A or G or absent
DVVMGRYKKLXXXXXXXXXFYLMSIANMKTPTXXPGA

SEQ ID NO: 31324 - protein, 42 aa, Artificial Sequence
  Non-cyclic GFR-binding peptide
  MOD_RES (2)..(4)..(36)..(37): Xaa is C or S
SXGXRDVVMGRYKKLIIQQKDNFYLMSIANMKTPTXXPGASG

SEQ ID NO: 31325 - protein, 36 aa, Artificial Sequence
  Non-cyclic GFR-binding peptide
  MOD_RES (1)..(3)..(36): Xaa is C or S
  MOD_RES (14)..(15)..(16)..(17)..(18): Xaa is A or G
  MOD_RES (19)..(20)..(21)..(22): Xaa is A or G or absent
XGXEEVIMRYKKLXXXXXXXXXFYLMSIANTKVPAX

SEQ ID NO: 31326 - protein, 36 aa, Artificial Sequence
  Non-cyclic GFR-binding peptide
  MOD_RES (2)..(33)..(34): Xaa is C or S
GXEEVIMRYKKLLLVRGNDFYLMSIANTKVPAXXTS

SEQ ID NO: 31327 - protein, 37 aa, Artificial Sequence
  Non-cyclic GFR-binding peptide
  MOD_RES (2)..(35)..(36): Xaa is C or S
  MOD_RES (13)..(14)..(15)..(16)..(17): Xaa is A or G
  MOD_RES (18)..(19)..(20)..(21): Xaa is A or G or absent
GXEEVIMRYKKLXXXXXXXXXFYLMSIANTKVPAXXT

SEQ ID NO: 31328 - protein, 35 aa, Artificial Sequence
  Non-cyclic GFR-binding peptide
  MOD_RES (2)..(2): Xaa is C or S
  MOD_RES (14)..(15)..(16)..(17)..(18): Xaa is A or G
  MOD_RES (19)..(20)..(21)..(22): Xaa is A or G or absent
GXRDVVMGRYKKLXXXXXXXXXFYLMSIANMKTPT

SEQ ID NO: 31329 - protein, 40 aa, Artificial Sequence
  Non-cyclic GFR-binding peptide
  MOD_RES (2)..(34)..(35): Xaa is C or S
GXRDVVMGRYKKLIIQQKDNFYLMSIANMKTPTXXPGASG

SEQ ID NO: 31330 - protein, 33 aa, Artificial Sequence
  Non-cyclic GFR-binding peptide
  MOD_RES (33)..(33): Xaa is C or S
  MOD_RES (11)..(12)..(13)..(14)..(15): Xaa is A or G
  MOD_RES (16)..(17)..(18)..(19): Xaa is A or G or absent
EEVIMRYKKLXXXXXXXXXFYLMSIANTKVPAX

SEQ ID NO: 31331 - protein, 35 aa, Artificial Sequence
  Non-cyclic GFR-binding peptide
  MOD_RES (34)..(35): Xaa is C or S
  MOD_RES (12)..(13)..(14)..(15)..(16): Xaa is A or G
  MOD_RES (17)..(18)..(19)..(20): Xaa is A or G or absent
RDVVMGRYKKLXXXXXXXXXFYLMSIANMKTPTXX

SEQ ID NO: 31332 - protein, 36 aa, Artificial Sequence
  Non-cyclic GFR-binding peptide
  MOD_RES (1)..(3)..(35)..(36): Xaa is C or S
XGXRDVVMGRYKKLIIQQKDNFYLMSIANMKTPTXX

SEQ ID NO: 31333 - protein, 39 aa, Artificial Sequence
  Non-cyclic GFR-binding peptide
  MOD_RES (2)..(33)..(34): Xaa is C or S
GXEEVIMRYKKLLLVRGNDFYLMSIANTKVPAXXTSPVR

SEQ ID NO: 31334 - protein, 38 aa, Artificial Sequence
  Non-cyclic GFR-binding peptide
  MOD_RES (33)..(34): Xaa is C or S
  MOD_RES (11)..(12)..(13)..(14)..(15): Xaa is A or G
  MOD_RES (16)..(17)..(18)..(19): Xaa is A or G or absent
EEVIMRYKKLXXXXXXXXXFYLMSIANTKVPAXXTSPV

SEQ ID NO: 31335 - protein, 39 aa, Artificial Sequence
  Non-cyclic GFR-binding peptide
  MOD_RES (33)..(34): Xaa is C or S
  MOD_RES (11)..(12)..(13)..(14)..(15): Xaa is A or G
  MOD_RES (16)..(17)..(18)..(19): Xaa is A or G or absent
DVVMGRYKKLXXXXXXXXXFYLMSIANMKTPTXXPGASG

SEQ ID NO: 31336 - protein, 37 aa, Artificial Sequence
  Non-cyclic GFR-binding peptide
  MOD_RES (1)..(3)..(34)..(35): Xaa is C or S
XGXEEVIMRYKKLLLVRGNDFYLMSIANTKVPAXXTS

SEQ ID NO: 31337 - protein, 40 aa, Artificial Sequence
  Non-cyclic GFR-binding peptide
  MOD_RES (2)..(4)..(37)..(38): Xaa is C or S
  MOD_RES (15)..(16)..(17)..(18)..(19): Xaa is A or G
  MOD_RES (20)..(21)..(22)..(23): Xaa is A or G or absent
LXGXEEVIMRYKKLXXXXXXXXXFYLMSIANTKVPAXXTS

SEQ ID NO: 31338 - protein, 33 aa, Artificial Sequence
  Non-cyclic GFR-binding peptide
  MOD_RES (31)..(32): Xaa is C or S
EEVIMRYKKLLLVRGNDFYLMSIANTKVPAXXT

SEQ ID NO: 31339 - protein, 43 aa, Artificial Sequence
  Non-cyclic GFR-binding peptide
  MOD_RES (2)..(4)..(38)..(39): Xaa is C or S
  MOD_RES (16)..(17)..(18)..(19)..(20): Xaa is A or G
  MOD_RES (21)..(22)..(23)..(24): Xaa is A or G or absent
SXGXRDVVMGRYKKLXXXXXXXXXFYLMSIANMKTPTXXPGAS

SEQ ID NO: 31340 - protein, 35 aa, Artificial Sequence
  Non-cyclic GFR-binding peptide
  MOD_RES (1)..(35): Xaa is C or S
  MOD_RES (13)..(14)..(15)..(16)..(17): Xaa is A or G
  MOD_RES (18)..(19)..(20)..(21): Xaa is A or G or absent
XRDVVMGRYKKLXXXXXXXXXFYLMSIANMKTPTX

SEQ ID NO: 31341 - protein, 38 aa, Artificial Sequence
  Non-cyclic GFR-binding peptide
  MOD_RES (1)..(3)..(34)..(35): Xaa is C or S
XGXEEVIMRYKKLLLVRGNDFYLMSIANTKVPAXXTSP

SEQ ID NO: 31342 - protein, 34 aa, Artificial Sequence
  Non-cyclic GFR-binding peptide
  MOD_RES (2)..(2): Xaa is C or S
  MOD_RES (13)..(14)..(15)..(16)..(17): Xaa is A or G
  MOD_RES (18)..(19)..(20)..(21): Xaa is A or G or absent
GXEEVIMRYKKLXXXXXXXXXFYLMSIANTKVPA

SEQ ID NO: 31343 - protein, 37 aa, Artificial Sequence
  Non-cyclic GFR-binding peptide
  MOD_RES (1)..(32)..(33): Xaa is C or S
XEEVIMRYKKLLLVRGNDFYLMSIANTKVPAXXTSPV

SEQ ID NO: 31344 - protein, 41 aa, Artificial Sequence
  Non-cyclic GFR-binding peptide
  MOD_RES (2)..(4)..(36)..(37): Xaa is C or S
SXGXRDVVMGRYKKLIIQQKDNFYLMSIANMKTPTXXPGAS

SEQ ID NO: 31345 - protein, 33 aa, Artificial Sequence
  Non-cyclic GFR-binding peptide
  MOD_RES (2)..(2): Xaa is C or S
GXRDVVMGRYKKLIIQQKDNFYLMSIANMKTPT

SEQ ID NO: 31346 - protein, 37 aa, Artificial Sequence
  Non-cyclic GFR-binding peptide
  MOD_RES (32)..(33): Xaa is C or S
RDVVMGRYKKLIIQQKDNFYLMSIANMKTPTXXPGAS

SEQ ID NO: 31347 - protein, 32 aa, Artificial Sequence
  Non-cyclic GFR-binding peptide
  MOD_RES (2)..(2): Xaa is C or S
GXEEVIMRYKKLLLVRGNDFYLMSIANTKVPA

SEQ ID NO: 31348 - protein, 42 aa, Artificial Sequence
  Non-cyclic GFR-binding peptide
  MOD_RES (1)..(3)..(37)..(38): Xaa is C or S
  MOD_RES (15)..(16)..(17)..(18)..(19): Xaa is A or G
  MOD_RES (20)..(21)..(22)..(23): Xaa is A or G or absent
XGXRDVVMGRYKKLXXXXXXXXXFYLMSIANMKTPTXXPGAS

SEQ ID NO: 31349 - protein, 40 aa, Artificial Sequence
  Non-cyclic GFR-binding peptide
  MOD_RES (1)..(34)..(35): Xaa is C or S
  MOD_RES (12)..(13)..(14)..(15)..(16): Xaa is A or G
  MOD_RES (17)..(18)..(19)..(20): Xaa is A or G or absent
XEEVIMRYKKLXXXXXXXXXFYLMSIANTKVPAXXTSPVR

SEQ ID NO: 31350 - protein, 36 aa, Artificial Sequence
  Non-cyclic GFR-binding peptide
  MOD_RES (2)..(34)..(35): Xaa is C or S
GXRDVVMGRYKKLIIQQKDNFYLMSIANMKTPTXXP

SEQ ID NO: 31351 - protein, 37 aa, Artificial Sequence
  Non-cyclic GFR-binding peptide
  MOD_RES (2)..(4)..(37): Xaa is C or S
  MOD_RES (15)..(16)..(17)..(18)..(19): Xaa is A or G
  MOD_RES (20)..(21)..(22)..(23): Xaa is A or G or absent
LXGXEEVIMRYKKLXXXXXXXXXFYLMSIANTKVPAX

SEQ ID NO: 31352 - protein, 40 aa, Artificial Sequence
  Non-cyclic GFR-binding peptide
  MOD_RES (2)..(4)..(35)..(36): Xaa is C or S
LXGXEEVIMRYKKLLLVRGNDFYLMSIANTKVPAXXTSPV

SEQ ID NO: 31353 - protein, 38 aa, Artificial Sequence
  Non-cyclic GFR-binding peptide
  MOD_RES (2)..(4)..(38): Xaa is C or S
  MOD_RES (16)..(17)..(18)..(19)..(20): Xaa is A or G
  MOD_RES (21)..(22)..(23)..(24): Xaa is A or G or absent
SXGXRDVVMGRYKKLXXXXXXXXXFYLMSIANMKTPTX

SEQ ID NO: 31354 - protein, 39 aa, Artificial Sequence
  Non-cyclic GFR-binding peptide
  MOD_RES (33)..(34): Xaa is C or S
  MOD_RES (11)..(12)..(13)..(14)..(15): Xaa is A or G
  MOD_RES (16)..(17)..(18)..(19): Xaa is A or G or absent
EEVIMRYKKLXXXXXXXXXFYLMSIANTKVPAXXTSPVR

SEQ ID NO: 31355 - protein, 39 aa, Artificial Sequence
  Non-cyclic GFR-binding peptide
  MOD_RES (2)..(34)..(35): Xaa is C or S
GXRDVVMGRYKKLIIQQKDNFYLMSIANMKTPTXXPGAS

SEQ ID NO: 31356 - protein, 33 aa, Artificial Sequence
  Non-cyclic GFR-binding peptide
  MOD_RES (1)..(1): Xaa is C or S
  MOD_RES (12)..(13)..(14)..(15)..(16): Xaa is A or G
  MOD_RES (17)..(18)..(19)..(20): Xaa is A or G or absent
XEEVIMRYKKLXXXXXXXXXFYLMSIANTKVPA

SEQ ID NO: 31357 - protein, 39 aa, Artificial Sequence
  Non-cyclic GFR-binding peptide
  MOD_RES (1)..(3)..(34)..(35): Xaa is C or S
XGXEEVIMRYKKLLLVRGNDFYLMSIANTKVPAXXTSPV

SEQ ID NO: 31358 - protein, 41 aa, Artificial Sequence
  Non-cyclic GFR-binding peptide
  MOD_RES (1)..(35)..(36): Xaa is C or S
  MOD_RES (13)..(14)..(15)..(16)..(17): Xaa is A or G
  MOD_RES (18)..(19)..(20)..(21): Xaa is A or G or absent
XRDVVMGRYKKLXXXXXXXXXFYLMSIANMKTPTXXPGASG

SEQ ID NO: 31359 - protein, 37 aa, Artificial Sequence
  Non-cyclic GFR-binding peptide
  MOD_RES (2)..(4): Xaa is C or S
  MOD_RES (16)..(17)..(18)..(19)..(20): Xaa is A or G
  MOD_RES (21)..(22)..(23)..(24): Xaa is A or G or absent
SXGXRDVVMGRYKKLXXXXXXXXXFYLMSIANMKTPT

SEQ ID NO: 31360 - protein, 35 aa, Artificial Sequence
  Non-cyclic GFR-binding peptide
  MOD_RES (1)..(33)..(34): Xaa is C or S
XRDVVMGRYKKLIIQQKDNFYLMSIANMKTPTXXP

SEQ ID NO: 31361 - protein, 35 aa, Artificial Sequence
  Non-cyclic GFR-binding peptide
  MOD_RES (2)..(33)..(34): Xaa is C or S
GXEEVIMRYKKLLLVRGNDFYLMSIANTKVPAXXT

SEQ ID NO: 31362 - protein, 32 aa, Artificial Sequence
  Non-cyclic GFR-binding peptide
  MOD_RES (1)..(32): Xaa is C or S
XEEVIMRYKKLLLVRGNDFYLMSIANTKVPAX

SEQ ID NO: 31363 - protein, 36 aa, Artificial Sequence
  Non-cyclic GFR-binding peptide
  MOD_RES (2)..(36): Xaa is C or S
  MOD_RES (14)..(15)..(16)..(17)..(18): Xaa is A or G
  MOD_RES (19)..(20)..(21)..(22): Xaa is A or G or absent
GXRDVVMGRYKKLXXXXXXXXXFYLMSIANMKTPTX

SEQ ID NO: 31364 - protein, 42 aa, Artificial Sequence
  Non-cyclic GFR-binding peptide
  MOD_RES (1)..(3)..(36)..(37): Xaa is C or S
  MOD_RES (14)..(15)..(16)..(17)..(18): Xaa is A or G
  MOD_RES (19)..(20)..(21)..(22): Xaa is A or G or absent
XGXEEVIMRYKKLXXXXXXXXXFYLMSIANTKVPAXXTSPVR

SEQ ID NO: 31365 - protein, 35 aa, Artificial Sequence
  Non-cyclic GFR-binding peptide
  MOD_RES (2)..(4)..(35): Xaa is C or S
LXGXEEVIMRYKKLLLVRGNDFYLMSIANTKVPAX

SEQ ID NO: 31366 - protein, 41 aa, Artificial Sequence
  Non-cyclic GFR-binding peptide
  MOD_RES (1)..(3)..(37)..(38): Xaa is C or S
  MOD_RES (15)..(16)..(17)..(18)..(19): Xaa is A or G
  MOD_RES (20)..(21)..(22)..(23): Xaa is A or G or absent
XGXRDVVMGRYKKLXXXXXXXXXFYLMSIANMKTPTXXPGA

SEQ ID NO: 31367 - protein, 35 aa, Artificial Sequence
  Non-cyclic GFR-binding peptide
  MOD_RES (31)..(32): Xaa is C or S
EEVIMRYKKLLLVRGNDFYLMSIANTKVPAXXTSP

SEQ ID NO: 31368 - protein, 43 aa, Artificial Sequence
  Non-cyclic GFR-binding peptide
  MOD_RES (1)..(3)..(37)..(38): Xaa is C or S
  MOD_RES (15)..(16)..(17)..(18)..(19): Xaa is A or G
  MOD_RES (20)..(21)..(22)..(23): Xaa is A or G or absent
XGXRDVVMGRYKKLXXXXXXXXXFYLMSIANMKTPTXXPGASG

SEQ ID NO: 31369 - protein, 42 aa, Artificial Sequence
  Non-cyclic GFR-binding peptide
  MOD_RES (2)..(4)..(37)..(38): Xaa is C or S
  MOD_RES (15)..(16)..(17)..(18)..(19): Xaa is A or G
  MOD_RES (20)..(21)..(22)..(23): Xaa is A or G or absent
LXGXEEVIMRYKKLXXXXXXXXXFYLMSIANTKVPAXXTSPV

SEQ ID NO: 31370 - protein, 43 aa, Artificial Sequence
  Non-cyclic GFR-binding peptide
  MOD_RES (2)..(4)..(37)..(38): Xaa is C or S
  MOD_RES (15)..(16)..(17)..(18)..(19): Xaa is A or G
  MOD_RES (20)..(21)..(22)..(23): Xaa is A or G or absent
LXGXEEVIMRYKKLXXXXXXXXXFYLMSIANTKVPAXXTSPVR

SEQ ID NO: 31371 - protein, 35 aa, Artificial Sequence
  Non-cyclic GFR-binding peptide
  MOD_RES (1)..(32)..(33): Xaa is C or S
XEEVIMRYKKLLLVRGNDFYLMSIANTKVPAXXTS

SEQ ID NO: 31372 - protein, 39 aa, Artificial Sequence
  Non-cyclic GFR-binding peptide
  MOD_RES (1)..(34)..(35): Xaa is C or S
  MOD_RES (12)..(13)..(14)..(15)..(16): Xaa is A or G
  MOD_RES (17)..(18)..(19)..(20): Xaa is A or G or absent
XEEVIMRYKKLXXXXXXXXXFYLMSIANTKVPAXXTSPV

SEQ ID NO: 31373 - protein, 36 aa, Artificial Sequence
  Non-cyclic GFR-binding peptide
  MOD_RES (2)..(4)..(36): Xaa is C or S
SXGXRDVVMGRYKKLIIQQKDNFYLMSIANMKTPTX

SEQ ID NO: 31374 - protein, 32 aa, Artificial Sequence
  Non-cyclic GFR-binding peptide
  MOD_RES (31)..(32): Xaa is C or S
EEVIMRYKKLLLVRGNDFYLMSIANTKVPAXX

SEQ ID NO: 31375 - protein, 35 aa, Artificial Sequence
  Non-cyclic GFR-binding peptide
  MOD_RES (1)..(3)..(35): Xaa is C or S
XGXRDVVMGRYKKLIIQQKDNFYLMSIANMKTPTX

SEQ ID NO: 31376 - protein, 40 aa, Artificial Sequence
  Non-cyclic GFR-binding peptide
  MOD_RES (1)..(3)..(34)..(35): Xaa is C or S
XGXEEVIMRYKKLLLVRGNDFYLMSIANTKVPAXXTSPVR

SEQ ID NO: 31377 - protein, 36 aa, Artificial Sequence
  Non-cyclic GFR-binding peptide
  MOD_RES (1)..(35)..(36): Xaa is C or S
  MOD_RES (13)..(14)..(15)..(16)..(17): Xaa is A or G
  MOD_RES (18)..(19)..(20)..(21): Xaa is A or G or absent
XRDVVMGRYKKLXXXXXXXXXFYLMSIANMKTPTXX

SEQ ID NO: 31378 - protein, 33 aa, Artificial Sequence
  Non-cyclic GFR-binding peptide
  MOD_RES (33)..(33): Xaa is C or S
  MOD_RES (11)..(12)..(13)..(14)..(15): Xaa is A or G
  MOD_RES (16)..(17)..(18)..(19): Xaa is A or G or absent
DVVMGRYKKLXXXXXXXXXFYLMSIANMKTPTX

SEQ ID NO: 31379 - protein, 37 aa, Artificial Sequence
  Non-cyclic GFR-binding peptide
  MOD_RES (1)..(3)..(36)..(37): Xaa is C or S
  MOD_RES (14)..(15)..(16)..(17)..(18): Xaa is A or G
  MOD_RES (19)..(20)..(21)..(22): Xaa is A or G or absent
XGXEEVIMRYKKLXXXXXXXXXFYLMSIANTKVPAXX

SEQ ID NO: 31380 - protein, 38 aa, Artificial Sequence
  Non-cyclic GFR-binding peptide
  MOD_RES (2)..(4)..(36)..(37): Xaa is C or S
SXGXRDVVMGRYKKLIIQQKDNFYLMSIANMKTPTXXP

SEQ ID NO: 31381 - protein, 33 aa, Artificial Sequence
  Non-cyclic GFR-binding peptide
  MOD_RES (1)..(32)..(33): Xaa is C or S
XEEVIMRYKKLLLVRGNDFYLMSIANTKVPAXX

SEQ ID NO: 31382 - protein, 37 aa, Artificial Sequence
  Non-cyclic GFR-binding peptide
  MOD_RES (33)..(34): Xaa is C or S
  MOD_RES (11)..(12)..(13)..(14)..(15): Xaa is A or G
  MOD_RES (16)..(17)..(18)..(19): Xaa is A or G or absent
EEVIMRYKKLXXXXXXXXXFYLMSIANTKVPAXXTSP

SEQ ID NO: 31383 - protein, 32 aa, Artificial Sequence
  Non-cyclic GFR-binding peptide
  MOD_RES (11)..(12)..(13)..(14)..(15): Xaa is A or G
  MOD_RES (16)..(17)..(18)..(19): Xaa is A or G or absent
DVVMGRYKKLXXXXXXXXXFYLMSIANMKTPT

SEQ ID NO: 31384 - protein, 41 aa, Artificial Sequence
  Non-cyclic GFR-binding peptide
  MOD_RES (2)..(4)..(38)..(39): Xaa is C or S
  MOD_RES (16)..(17)..(18)..(19)..(20): Xaa is A or G
  MOD_RES (21)..(22)..(23)..(24): Xaa is A or G or absent
SXGXRDVVMGRYKKLXXXXXXXXXFYLMSIANMKTPTXXPG

SEQ ID NO: 31385 - protein, 31 aa, Artificial Sequence
  Non-cyclic GFR-binding peptide
  MOD_RES (31)..(31): Xaa is C or S
EEVIMRYKKLLLVRGNDFYLMSIANTKVPAX

SEQ ID NO: 31386 - protein, 38 aa, Artificial Sequence
  Non-cyclic GFR-binding peptide
  MOD_RES (1)..(2)..(36)..(38): Xaa is C or S
  MOD_RES (16)..(17)..(18)..(19)..(20): Xaa is A or G
  MOD_RES (21)..(22)..(23)..(24): Xaa is A or G or absent
XXTPTKMNAISMLYFXXXXXXXXXLKKYRGMVVDRXGX

SEQ ID NO: 31387 - protein, 38 aa, Artificial Sequence
  Non-cyclic GFR-binding peptide
  MOD_RES (6)..(7): Xaa is C or S
GSAGPXXTPTKMNAISMLYFNDKQQIILKKYRGMVVDR

SEQ ID NO: 31388 - protein, 36 aa, Artificial Sequence
  Non-cyclic GFR-binding peptide
  MOD_RES (3)..(4): Xaa is C or S
  MOD_RES (18)..(19)..(20)..(21)..(22): Xaa is A or G
  MOD_RES (23)..(24)..(25)..(26): Xaa is A or G or absent
STXXAPVKTNAISMLYFXXXXXXXXXLKKYRMIVEE

SEQ ID NO: 31389 - protein, 41 aa, Artificial Sequence
  Non-cyclic GFR-binding peptide
  MOD_RES (5)..(6)..(40): Xaa is C or S
  MOD_RES (20)..(21)..(22)..(23)..(24): Xaa is A or G
  MOD_RES (25)..(26)..(27)..(28): Xaa is A or G or absent
SAGPXXTPTKMNAISMLYFXXXXXXXXXLKKYRGMVVDRXG

SEQ ID NO: 31390 - protein, 39 aa, Artificial Sequence
  Non-cyclic GFR-binding peptide
  MOD_RES (3)..(4)..(37)..(39): Xaa is C or S
  MOD_RES (18)..(19)..(20)..(21)..(22): Xaa is A or G
  MOD_RES (23)..(24)..(25)..(26): Xaa is A or G or absent
STXXAPVKTNAISMLYFXXXXXXXXXLKKYRMIVEEXGX

SEQ ID NO: 31391 - protein, 31 aa, Artificial Sequence
  Non-cyclic GFR-binding peptide
  MOD_RES (31)..(31): Xaa is C or S
APVKTNAISMLYFDNGRVLLLKKYRMIVEEX

SEQ ID NO: 31392 - protein, 39 aa, Artificial Sequence
  Non-cyclic GFR-binding peptide
  MOD_RES (4)..(5)..(38): Xaa is C or S
  MOD_RES (19)..(20)..(21)..(22)..(23): Xaa is A or G
  MOD_RES (24)..(25)..(26)..(27): Xaa is A or G or absent
PSTXXAPVKTNAISMLYFXXXXXXXXXLKKYRMIVEEXG

SEQ ID NO: 31393 - protein, 37 aa, Artificial Sequence
  Non-cyclic GFR-binding peptide
  MOD_RES (1)..(2)..(34)..(36): Xaa is C or S
XXTPTKMNAISMLYFNDKQQIILKKYRGMVVDRXGXS

SEQ ID NO: 31394 - protein, 37 aa, Artificial Sequence
  Non-cyclic GFR-binding peptide
  MOD_RES (3)..(4)..(36): Xaa is C or S
GPXXTPTKMNAISMLYFNDKQQIILKKYRGMVVDRXG

SEQ ID NO: 31395 - protein, 40 aa, Artificial Sequence
  Non-cyclic GFR-binding peptide
  MOD_RES (4)..(5)..(37)..(39): Xaa is C or S
AGPXXTPTKMNAISMLYFNDKQQIILKKYRGMVVDRXGXS

SEQ ID NO: 31396 - protein, 41 aa, Artificial Sequence
  Non-cyclic GFR-binding peptide
  MOD_RES (6)..(7)..(39)..(41): Xaa is C or S
GSAGPXXTPTKMNAISMLYFNDKQQIILKKYRGMVVDRXGX

SEQ ID NO: 31397 - protein, 34 aa, Artificial Sequence
  Non-cyclic GFR-binding peptide
  MOD_RES (2)..(3)..(34): Xaa is C or S
TXXAPVKTNAISMLYFDNGRVLLLKKYRMIVEEX

SEQ ID NO: 31398 - protein, 35 aa, Artificial Sequence
  Non-cyclic GFR-binding peptide
  MOD_RES (1)..(2)..(34): Xaa is C or S
XXTPTKMNAISMLYFNDKQQIILKKYRGMVVDRXG

SEQ ID NO: 31399 - protein, 35 aa, Artificial Sequence
  Non-cyclic GFR-binding peptide
  MOD_RES (1)..(2)..(35): Xaa is C or S
  MOD_RES (16)..(17)..(18)..(19)..(20): Xaa is A or G
  MOD_RES (21)..(22)..(23)..(24): Xaa is A or G or absent
XXAPVKTNAISMLYFXXXXXXXXXLKKYRMIVEEX

SEQ ID NO: 31400 - protein, 32 aa, Artificial Sequence
  Non-cyclic GFR-binding peptide
  MOD_RES (1)..(1): Xaa is C or S
XTPTKMNAISMLYFNDKQQIILKKYRGMVVDR

SEQ ID NO: 31401 - protein, 37 aa, Artificial Sequence
  Non-cyclic GFR-binding peptide
  MOD_RES (3)..(4): Xaa is C or S
  MOD_RES (18)..(19)..(20)..(21)..(22): Xaa is A or G
  MOD_RES (23)..(24)..(25)..(26): Xaa is A or G or absent
GPXXTPTKMNAISMLYFXXXXXXXXXLKKYRGMVVDR

SEQ ID NO: 31402 - protein, 42 aa, Artificial Sequence
  Non-cyclic GFR-binding peptide
  MOD_RES (6)..(7)..(41): Xaa is C or S
  MOD_RES (21)..(22)..(23)..(24)..(25): Xaa is A or G
  MOD_RES (26)..(27)..(28)..(29): Xaa is A or G or absent
GSAGPXXTPTKMNAISMLYFXXXXXXXXXLKKYRGMVVDRXG

SEQ ID NO: 31403 - protein, 34 aa, Artificial Sequence
  Non-cyclic GFR-binding peptide
  MOD_RES (31)..(33): Xaa is C or S
APVKTNAISMLYFDNGRVLLLKKYRMIVEEXGXL

SEQ ID NO: 31404 - protein, 39 aa, Artificial Sequence
  Non-cyclic GFR-binding peptide
  MOD_RES (3)..(4)..(38): Xaa is C or S
  MOD_RES (18)..(19)..(20)..(21)..(22): Xaa is A or G
  MOD_RES (23)..(24)..(25)..(26): Xaa is A or G or absent
GPXXTPTKMNAISMLYFXXXXXXXXXLKKYRGMVVDRXG

SEQ ID NO: 31405 - protein, 40 aa, Artificial Sequence
  Non-cyclic GFR-binding peptide
  MOD_RES (5)..(6)..(38)..(40): Xaa is C or S
SAGPXXTPTKMNAISMLYFNDKQQIILKKYRGMVVDRXGX

SEQ ID NO: 31406 - protein, 37 aa, Artificial Sequence
  Non-cyclic GFR-binding peptide
  MOD_RES (1)..(35)..(37): Xaa is C or S
  MOD_RES (15)..(16)..(17)..(18)..(19): Xaa is A or G
  MOD_RES (20)..(21)..(22)..(23): Xaa is A or G or absent
XTPTKMNAISMLYFXXXXXXXXXLKKYRGMVVDRXGX

SEQ ID NO: 31407 - protein, 33 aa, Artificial Sequence
  Non-cyclic GFR-binding peptide
  MOD_RES (14)..(15)..(16)..(17)..(18): Xaa is A or G
  MOD_RES (19)..(20)..(21)..(22): Xaa is A or G or absent
TPTKMNAISMLYFXXXXXXXXXLKKYRGMVVDR

SEQ ID NO: 31408 - protein, 39 aa, Artificial Sequence
  Non-cyclic GFR-binding peptide
  MOD_RES (2)..(3)..(37)..(39): Xaa is C or S
  MOD_RES (17)..(18)..(19)..(20)..(21): Xaa is A or G
  MOD_RES (22)..(23)..(24)..(25): Xaa is A or G or absent
PXXTPTKMNAISMLYFXXXXXXXXXLKKYRGMVVDRXGX

SEQ ID NO: 31409 - protein, 38 aa, Artificial Sequence
  Non-cyclic GFR-binding peptide
  MOD_RES (2)..(3)..(37): Xaa is C or S
  MOD_RES (17)..(18)..(19)..(20)..(21): Xaa is A or G
  MOD_RES (22)..(23)..(24)..(25): Xaa is A or G or absent
PXXTPTKMNAISMLYFXXXXXXXXXLKKYRGMVVDRXG

SEQ ID NO: 31410 - protein, 34 aa, Artificial Sequence
  Non-cyclic GFR-binding peptide
  MOD_RES (3)..(4): Xaa is C or S
GPXXTPTKMNAISMLYFNDKQQIILKKYRGMVVD

SEQ ID NO: 31411 - protein, 37 aa, Artificial Sequence
  Non-cyclic GFR-binding peptide
  MOD_RES (3)..(4)..(37): Xaa is C or S
  MOD_RES (18)..(19)..(20)..(21)..(22): Xaa is A or G
  MOD_RES (23)..(24)..(25)..(26): Xaa is A or G or absent
STXXAPVKTNAISMLYFXXXXXXXXXLKKYRMIVEEX

SEQ ID NO: 31412 - protein, 38 aa, Artificial Sequence
  Non-cyclic GFR-binding peptide
  MOD_RES (4)..(5)..(37): Xaa is C or S
AGPXXTPTKMNAISMLYFNDKQQIILKKYRGMVVDRXG

SEQ ID NO: 31413 - protein, 36 aa, Artificial Sequence
  Non-cyclic GFR-binding peptide
  MOD_RES (5)..(6): Xaa is C or S
VPSTXXAPVKTNAISMLYFDNGRVLLLKKYRMIVEE

SEQ ID NO: 31414 - protein, 41 aa, Artificial Sequence
  Non-cyclic GFR-binding peptide
  MOD_RES (5)..(6)..(39)..(41): Xaa is C or S
  MOD_RES (20)..(21)..(22)..(23)..(24): Xaa is A or G
  MOD_RES (25)..(26)..(27)..(28): Xaa is A or G or absent
VPSTXXAPVKTNAISMLYFXXXXXXXXXLKKYRMIVEEXGX

SEQ ID NO: 31415 - protein, 37 aa, Artificial Sequence
  Non-cyclic GFR-binding peptide
  MOD_RES (2)..(3)..(37): Xaa is C or S
  MOD_RES (17)..(18)..(19)..(20)..(21): Xaa is A or G
  MOD_RES (22)..(23)..(24)..(25): Xaa is A or G or absent
PXXTPTKMNAISMLYFXXXXXXXXXLKKYRGMVVDRX

SEQ ID NO: 31416 - protein, 36 aa, Artificial Sequence
  Non-cyclic GFR-binding peptide
  MOD_RES (33)..(35): Xaa is C or S
  MOD_RES (14)..(15)..(16)..(17)..(18): Xaa is A or G
  MOD_RES (19)..(20)..(21)..(22): Xaa is A or G or absent
APVKTNAISMLYFXXXXXXXXXLKKYRMIVEEXGXL

SEQ ID NO: 31417 - protein, 36 aa, Artificial Sequence
  Non-cyclic GFR-binding peptide
  MOD_RES (5)..(6): Xaa is C or S
SAGPXXTPTKMNAISMLYFNDKQQIILKKYRGMVVD

SEQ ID NO: 31418 - protein, 44 aa, Artificial Sequence
  Non-cyclic GFR-binding peptide
  MOD_RES (6)..(7)..(41)..(43): Xaa is C or S
  MOD_RES (21)..(22)..(23)..(24)..(25): Xaa is A or G
  MOD_RES (26)..(27)..(28)..(29): Xaa is A or G or absent
GSAGPXXTPTKMNAISMLYFXXXXXXXXXLKKYRGMVVDRXGXS

SEQ ID NO: 31419 - protein, 35 aa, Artificial Sequence
  Non-cyclic GFR-binding peptide
  MOD_RES (32)..(34): Xaa is C or S
TPTKMNAISMLYFNDKQQIILKKYRGMVVDRXGXS

SEQ ID NO: 31420 - protein, 35 aa, Artificial Sequence
  Non-cyclic GFR-binding peptide
  MOD_RES (3)..(4): Xaa is C or S
GPXXTPTKMNAISMLYFNDKQQIILKKYRGMVVDR

SEQ ID NO: 31421 - protein, 34 aa, Artificial Sequence
  Non-cyclic GFR-binding peptide
  MOD_RES (3)..(4): Xaa is C or S
STXXAPVKTNAISMLYFDNGRVLLLKKYRMIVEE

SEQ ID NO: 31422 - protein, 35 aa, Artificial Sequence
  Non-cyclic GFR-binding peptide
  MOD_RES (1)..(34): Xaa is C or S
  MOD_RES (15)..(16)..(17)..(18)..(19): Xaa is A or G
  MOD_RES (20)..(21)..(22)..(23): Xaa is A or G or absent
XAPVKTNAISMLYFXXXXXXXXXLKKYRMIVEEXG

SEQ ID NO: 31423 - protein, 41 aa, Artificial Sequence
  Non-cyclic GFR-binding peptide
  MOD_RES (6)..(7)..(40): Xaa is C or S
  MOD_RES (21)..(22)..(23)..(24)..(25): Xaa is A or G
  MOD_RES (26)..(27)..(28)..(29): Xaa is A or G or absent
RVPSTXXAPVKTNAISMLYFXXXXXXXXXLKKYRMIVEEXG

SEQ ID NO: 31424 - protein, 30 aa, Artificial Sequence
  Non-cyclic GFR-binding peptide
APVKTNAISMLYFDNGRVLLLKKYRMIVEE

SEQ ID NO: 31425 - protein, 40 aa, Artificial Sequence
  Non-cyclic GFR-binding peptide
  MOD_RES (5)..(6)..(39): Xaa is C or S
  MOD_RES (20)..(21)..(22)..(23)..(24): Xaa is A or G
  MOD_RES (25)..(26)..(27)..(28): Xaa is A or G or absent
VPSTXXAPVKTNAISMLYFXXXXXXXXXLKKYRMIVEEXG

SEQ ID NO: 31426 - protein, 39 aa, Artificial Sequence
  Non-cyclic GFR-binding peptide
  MOD_RES (4)..(5)..(39): Xaa is C or S
  MOD_RES (19)..(20)..(21)..(22)..(23): Xaa is A or G
  MOD_RES (24)..(25)..(26)..(27): Xaa is A or G or absent
AGPXXTPTKMNAISMLYFXXXXXXXXXLKKYRGMVVDRX

SEQ ID NO: 31427 - protein, 37 aa, Artificial Sequence
  Non-cyclic GFR-binding peptide
  MOD_RES (4)..(5)..(37): Xaa is C or S
AGPXXTPTKMNAISMLYFNDKQQIILKKYRGMVVDRX

SEQ ID NO: 31428 - protein, 34 aa, Artificial Sequence
  Non-cyclic GFR-binding peptide
  MOD_RES (2)..(3): Xaa is C or S
PXXTPTKMNAISMLYFNDKQQIILKKYRGMVVDR

SEQ ID NO: 31429 - protein, 34 aa, Artificial Sequence
  Non-cyclic GFR-binding peptide
  MOD_RES (1)..(2): Xaa is C or S
  MOD_RES (16)..(17)..(18)..(19)..(20): Xaa is A or G
  MOD_RES (21)..(22)..(23)..(24): Xaa is A or G or absent
XXTPTKMNAISMLYFXXXXXXXXXLKKYRGMVVD

SEQ ID NO: 31430 - protein, 38 aa, Artificial Sequence
  Non-cyclic GFR-binding peptide
  MOD_RES (4)..(5): Xaa is C or S
  MOD_RES (19)..(20)..(21)..(22)..(23): Xaa is A or G
  MOD_RES (24)..(25)..(26)..(27): Xaa is A or G or absent
AGPXXTPTKMNAISMLYFXXXXXXXXXLKKYRGMVVDR

SEQ ID NO: 31431 - protein, 38 aa, Artificial Sequence
  Non-cyclic GFR-binding peptide
  MOD_RES (3)..(4)..(36)..(38): Xaa is C or S
GPXXTPTKMNAISMLYFNDKQQIILKKYRGMVVDRXGX

SEQ ID NO: 31432 - protein, 35 aa, Artificial Sequence
  Non-cyclic GFR-binding peptide
  MOD_RES (2)..(3): Xaa is C or S
  MOD_RES (17)..(18)..(19)..(20)..(21): Xaa is A or G
  MOD_RES (22)..(23)..(24)..(25): Xaa is A or G or absent
TXXAPVKTNAISMLYFXXXXXXXXXLKKYRMIVEE

SEQ ID NO: 31433 - protein, 34 aa, Artificial Sequence
  Non-cyclic GFR-binding peptide
  MOD_RES (1)..(2)..(34): Xaa is C or S
XXTPTKMNAISMLYFNDKQQIILKKYRGMVVDRX

SEQ ID NO: 31434 - protein, 32 aa, Artificial Sequence
  Non-cyclic GFR-binding peptide
  MOD_RES (14)..(15)..(16)..(17)..(18): Xaa is A or G
  MOD_RES (19)..(20)..(21)..(22): Xaa is A or G or absent
APVKTNAISMLYFXXXXXXXXXLKKYRMIVEE

SEQ ID NO: 31435 - protein, 38 aa, Artificial Sequence
  Non-cyclic GFR-binding peptide
  MOD_RES (3)..(4)..(35)..(37): Xaa is C or S
STXXAPVKTNAISMLYFDNGRVLLLKKYRMIVEEXGXL

SEQ ID NO: 31436 - protein, 34 aa, Artificial Sequence
  Non-cyclic GFR-binding peptide
  MOD_RES (34)..(34): Xaa is C or S
  MOD_RES (14)..(15)..(16)..(17)..(18): Xaa is A or G
  MOD_RES (19)..(20)..(21)..(22): Xaa is A or G or absent
TPTKMNAISMLYFXXXXXXXXXLKKYRGMVVDRX

SEQ ID NO: 31437 - protein, 39 aa, Artificial Sequence
  Non-cyclic GFR-binding peptide
  MOD_RES (4)..(5)..(36)..(38): Xaa is C or S
PSTXXAPVKTNAISMLYFDNGRVLLLKKYRMIVEEXGXL

SEQ ID NO: 31438 - protein, 31 aa, Artificial Sequence
  Non-cyclic GFR-binding peptide
TPTKMNAISMLYFNDKQQIILKKYRGMVVDR

SEQ ID NO: 31439 - protein, 33 aa, Artificial Sequence
  Non-cyclic GFR-binding peptide
  MOD_RES (31)..(33): Xaa is C or S
APVKTNAISMLYFDNGRVLLLKKYRMIVEEXGX

SEQ ID NO: 31440 - protein, 33 aa, Artificial Sequence
  Non-cyclic GFR-binding peptide
  MOD_RES (2)..(3): Xaa is C or S
PXXTPTKMNAISMLYFNDKQQIILKKYRGMVVD

SEQ ID NO: 31441 - protein, 36 aa, Artificial Sequence
  Non-cyclic GFR-binding peptide
  MOD_RES (3)..(4): Xaa is C or S
  MOD_RES (18)..(19)..(20)..(21)..(22): Xaa is A or G
  MOD_RES (23)..(24)..(25)..(26): Xaa is A or G or absent
GPXXTPTKMNAISMLYFXXXXXXXXXLKKYRGMVVD

SEQ ID NO: 31442 - protein, 38 aa, Artificial Sequence
  Non-cyclic GFR-binding peptide
  MOD_RES (1)..(2)..(35)..(37): Xaa is C or S
  MOD_RES (16)..(17)..(18)..(19)..(20): Xaa is A or G
  MOD_RES (21)..(22)..(23)..(24): Xaa is A or G or absent
XXAPVKTNAISMLYFXXXXXXXXXLKKYRMIVEEXGXL

SEQ ID NO: 31443 - protein, 36 aa, Artificial Sequence
  Non-cyclic GFR-binding peptide
  MOD_RES (3)..(4)..(36): Xaa is C or S
GPXXTPTKMNAISMLYFNDKQQIILKKYRGMVVDRX

SEQ ID NO: 31444 - protein, 37 aa, Artificial Sequence
  Non-cyclic GFR-binding peptide
  MOD_RES (2)..(3)..(35)..(37): Xaa is C or S
PXXTPTKMNAISMLYFNDKQQIILKKYRGMVVDRXGX

SEQ ID NO: 31445 - protein, 36 aa, Artificial Sequence
  Non-cyclic GFR-binding peptide
  MOD_RES (4)..(5)..(36): Xaa is C or S
PSTXXAPVKTNAISMLYFDNGRVLLLKKYRMIVEEX

SEQ ID NO: 31446 - protein, 38 aa, Artificial Sequence
  Non-cyclic GFR-binding peptide
  MOD_RES (5)..(6): Xaa is C or S
  MOD_RES (20)..(21)..(22)..(23)..(24): Xaa is A or G
  MOD_RES (25)..(26)..(27)..(28): Xaa is A or G or absent
SAGPXXTPTKMNAISMLYFXXXXXXXXXLKKYRGMVVD

SEQ ID NO: 31447 - protein, 32 aa, Artificial Sequence
  Non-cyclic GFR-binding peptide
  MOD_RES (1)..(2): Xaa is C or S
XXTPTKMNAISMLYFNDKQQIILKKYRGMVVD

SEQ ID NO: 31448 - protein, 39 aa, Artificial Sequence
  Non-cyclic GFR-binding peptide
  MOD_RES (4)..(5)..(37)..(39): Xaa is C or S
AGPXXTPTKMNAISMLYFNDKQQIILKKYRGMVVDRXGX

SEQ ID NO: 31449 - protein, 37 aa, Artificial Sequence
  Non-cyclic GFR-binding peptide
  MOD_RES (6)..(7): Xaa is C or S
RVPSTXXAPVKTNAISMLYFDNGRVLLLKKYRMIVEE

SEQ ID NO: 31450 - protein, 32 aa, Artificial Sequence
  Non-cyclic GFR-binding peptide
  MOD_RES (32)..(32): Xaa is C or S
TPTKMNAISMLYFNDKQQIILKKYRGMVVDRX

SEQ ID NO: 31451 - protein, 41 aa, Artificial Sequence
  Non-cyclic GFR-binding peptide
  MOD_RES (4)..(5)..(38)..(40): Xaa is C or S
  MOD_RES (19)..(20)..(21)..(22)..(23): Xaa is A or G
  MOD_RES (24)..(25)..(26)..(27): Xaa is A or G or absent
PSTXXAPVKTNAISMLYFXXXXXXXXXLKKYRMIVEEXGXL

SEQ ID NO: 31452 - protein, 41 aa, Artificial Sequence
  Non-cyclic GFR-binding peptide
  MOD_RES (6)..(7)..(38)..(40): Xaa is C or S
RVPSTXXAPVKTNAISMLYFDNGRVLLLKKYRMIVEEXGXL

SEQ ID NO: 31453 - protein, 36 aa, Artificial Sequence
  Non-cyclic GFR-binding peptide
  MOD_RES (2)..(3)..(36): Xaa is C or S
  MOD_RES (17)..(18)..(19)..(20)..(21): Xaa is A or G
  MOD_RES (22)..(23)..(24)..(25): Xaa is A or G or absent
TXXAPVKTNAISMLYFXXXXXXXXXLKKYRMIVEEX

SEQ ID NO: 31454 - protein, 34 aa, Artificial Sequence
  Non-cyclic GFR-binding peptide
  MOD_RES (1)..(32)..(34): Xaa is C or S
XAPVKTNAISMLYFDNGRVLLLKKYRMIVEEXGX

SEQ ID NO: 31455 - protein, 37 aa, Artificial Sequence
  Non-cyclic GFR-binding peptide
  MOD_RES (2)..(3)..(34)..(36): Xaa is C or S
TXXAPVKTNAISMLYFDNGRVLLLKKYRMIVEEXGXL

SEQ ID NO: 31456 - protein, 35 aa, Artificial Sequence
  Non-cyclic GFR-binding peptide
  MOD_RES (1)..(2)..(33)..(35): Xaa is C or S
XXAPVKTNAISMLYFDNGRVLLLKKYRMIVEEXGX

SEQ ID NO: 31457 - protein, 36 aa, Artificial Sequence
  Non-cyclic GFR-binding peptide
  MOD_RES (1)..(2)..(33)..(35): Xaa is C or S
XXAPVKTNAISMLYFDNGRVLLLKKYRMIVEEXGXL

SEQ ID NO: 31458 - protein, 36 aa, Artificial Sequence
  Non-cyclic GFR-binding peptide
  MOD_RES (34)..(36): Xaa is C or S
  MOD_RES (14)..(15)..(16)..(17)..(18): Xaa is A or G
  MOD_RES (19)..(20)..(21)..(22): Xaa is A or G or absent
TPTKMNAISMLYFXXXXXXXXXLKKYRGMVVDRXGX

SEQ ID NO: 31459 - protein, 36 aa, Artificial Sequence
  Non-cyclic GFR-binding peptide
  MOD_RES (1)..(2)..(35): Xaa is C or S
  MOD_RES (16)..(17)..(18)..(19)..(20): Xaa is A or G
  MOD_RES (21)..(22)..(23)..(24): Xaa is A or G or absent
XXAPVKTNAISMLYFXXXXXXXXXLKKYRMIVEEXG

SEQ ID NO: 31460 - protein, 38 aa, Artificial Sequence
  Non-cyclic GFR-binding peptide
  MOD_RES (5)..(6)..(38): Xaa is C or S
SAGPXXTPTKMNAISMLYFNDKQQIILKKYRGMVVDRX

SEQ ID NO: 31461 - protein, 40 aa, Artificial Sequence
  Non-cyclic GFR-binding peptide
  MOD_RES (4)..(5)..(39): Xaa is C or S
  MOD_RES (19)..(20)..(21)..(22)..(23): Xaa is A or G
  MOD_RES (24)..(25)..(26)..(27): Xaa is A or G or absent
AGPXXTPTKMNAISMLYFXXXXXXXXXLKKYRGMVVDRXG

SEQ ID NO: 31462 - protein, 34 aa, Artificial Sequence
  Non-cyclic GFR-binding peptide
  MOD_RES (1)..(33): Xaa is C or S
XTPTKMNAISMLYFNDKQQIILKKYRGMVVDRXG

SEQ ID NO: 31463 - protein, 37 aa, Artificial Sequence
  Non-cyclic GFR-binding peptide
  MOD_RES (4)..(5)..(36): Xaa is C or S
PSTXXAPVKTNAISMLYFDNGRVLLLKKYRMIVEEXG

SEQ ID NO: 31464 - protein, 42 aa, Artificial Sequence
  Non-cyclic GFR-binding peptide
  MOD_RES (4)..(5)..(39)..(41): Xaa is C or S
  MOD_RES (19)..(20)..(21)..(22)..(23): Xaa is A or G
  MOD_RES (24)..(25)..(26)..(27): Xaa is A or G or absent
AGPXXTPTKMNAISMLYFXXXXXXXXXLKKYRGMVVDRXGXS

SEQ ID NO: 31465 - protein, 37 aa, Artificial Sequence
  Non-cyclic GFR-binding peptide
  MOD_RES (1)..(2)..(36): Xaa is C or S
  MOD_RES (16)..(17)..(18)..(19)..(20): Xaa is A or G
  MOD_RES (21)..(22)..(23)..(24): Xaa is A or G or absent
XXTPTKMNAISMLYFXXXXXXXXXLKKYRGMVVDRXG

SEQ ID NO: 31466 - protein, 34 aa, Artificial Sequence
  Non-cyclic GFR-binding peptide
  MOD_RES (1)..(1): Xaa is C or S
  MOD_RES (15)..(16)..(17)..(18)..(19): Xaa is A or G
  MOD_RES (20)..(21)..(22)..(23): Xaa is A or G or absent
XTPTKMNAISMLYFXXXXXXXXXLKKYRGMVVDR

SEQ ID NO: 31467 - protein, 34 aa, Artificial Sequence
  Non-cyclic GFR-binding peptide
  MOD_RES (1)..(2)..(33): Xaa is C or S
XXAPVKTNAISMLYFDNGRVLLLKKYRMIVEEXG

SEQ ID NO: 31468 - protein, 33 aa, Artificial Sequence
  Non-cyclic GFR-binding peptide
  MOD_RES (1)..(2): Xaa is C or S
XXTPTKMNAISMLYFNDKQQIILKKYRGMVVDR

SEQ ID NO: 31469 - protein, 36 aa, Artificial Sequence
  Non-cyclic GFR-binding peptide
  MOD_RES (4)..(5): Xaa is C or S
AGPXXTPTKMNAISMLYFNDKQQIILKKYRGMVVDR

SEQ ID NO: 31470 - protein, 39 aa, Artificial Sequence
  Non-cyclic GFR-binding peptide
  MOD_RES (5)..(6): Xaa is C or S
  MOD_RES (20)..(21)..(22)..(23)..(24): Xaa is A or G
  MOD_RES (25)..(26)..(27)..(28): Xaa is A or G or absent
SAGPXXTPTKMNAISMLYFXXXXXXXXXLKKYRGMVVDR

SEQ ID NO: 31471 - protein, 38 aa, Artificial Sequence
  Non-cyclic GFR-binding peptide
  MOD_RES (4)..(5)..(38): Xaa is C or S
  MOD_RES (19)..(20)..(21)..(22)..(23): Xaa is A or G
  MOD_RES (24)..(25)..(26)..(27): Xaa is A or G or absent
PSTXXAPVKTNAISMLYFXXXXXXXXXLKKYRMIVEEX

SEQ ID NO: 31472 - protein, 33 aa, Artificial Sequence
  Non-cyclic GFR-binding peptide
  MOD_RES (1)..(33): Xaa is C or S
XTPTKMNAISMLYFNDKQQIILKKYRGMVVDRX

SEQ ID NO: 31473 - protein, 34 aa, Artificial Sequence
  Non-cyclic GFR-binding peptide
  MOD_RES (1)..(2): Xaa is C or S
  MOD_RES (16)..(17)..(18)..(19)..(20): Xaa is A or G
  MOD_RES (21)..(22)..(23)..(24): Xaa is A or G or absent
XXAPVKTNAISMLYFXXXXXXXXXLKKYRMIVEE

SEQ ID NO: 31474 - protein, 39 aa, Artificial Sequence
  Non-cyclic GFR-binding peptide
  MOD_RES (3)..(4)..(36)..(38): Xaa is C or S
GPXXTPTKMNAISMLYFNDKQQIILKKYRGMVVDRXGXS

SEQ ID NO: 31475 - protein, 37 aa, Artificial Sequence
  Non-cyclic GFR-binding peptide
  MOD_RES (6)..(7): Xaa is C or S
GSAGPXXTPTKMNAISMLYFNDKQQIILKKYRGMVVD

SEQ ID NO: 31476 - protein, 38 aa, Artificial Sequence
  Non-cyclic GFR-binding peptide
  MOD_RES (5)..(6)..(37): Xaa is C or S
VPSTXXAPVKTNAISMLYFDNGRVLLLKKYRMIVEEXG

SEQ ID NO: 31477 - protein, 34 aa, Artificial Sequence
  Non-cyclic GFR-binding peptide
  MOD_RES (1)..(34): Xaa is C or S
  MOD_RES (15)..(16)..(17)..(18)..(19): Xaa is A or G
  MOD_RES (20)..(21)..(22)..(23): Xaa is A or G or absent
XAPVKTNAISMLYFXXXXXXXXXLKKYRMIVEEX

SEQ ID NO: 31478 - protein, 38 aa, Artificial Sequence
  Non-cyclic GFR-binding peptide
  MOD_RES (3)..(4)..(38): Xaa is C or S
  MOD_RES (18)..(19)..(20)..(21)..(22): Xaa is A or G
  MOD_RES (23)..(24)..(25)..(26): Xaa is A or G or absent
GPXXTPTKMNAISMLYFXXXXXXXXXLKKYRGMVVDRX

SEQ ID NO: 31479 - protein, 39 aa, Artificial Sequence
  Non-cyclic GFR-binding peptide
  MOD_RES (6)..(7)..(39): Xaa is C or S
GSAGPXXTPTKMNAISMLYFNDKQQIILKKYRGMVVDRX

SEQ ID NO: 31480 - protein, 40 aa, Artificial Sequence
  Non-cyclic GFR-binding peptide
  MOD_RES (2)..(3)..(37)..(39): Xaa is C or S
  MOD_RES (17)..(18)..(19)..(20)..(21): Xaa is A or G
  MOD_RES (22)..(23)..(24)..(25): Xaa is A or G or absent
PXXTPTKMNAISMLYFXXXXXXXXXLKKYRGMVVDRXGXS

SEQ ID NO: 31481 - protein, 36 aa, Artificial Sequence
  Non-cyclic GFR-binding peptide
  MOD_RES (2)..(3)..(34)..(36): Xaa is C or S
TXXAPVKTNAISMLYFDNGRVLLLKKYRMIVEEXGX

SEQ ID NO: 31482 - protein, 38 aa, Artificial Sequence
  Non-cyclic GFR-binding peptide
  MOD_RES (3)..(4)..(37): Xaa is C or S
  MOD_RES (18)..(19)..(20)..(21)..(22): Xaa is A or G
  MOD_RES (23)..(24)..(25)..(26): Xaa is A or G or absent
STXXAPVKTNAISMLYFXXXXXXXXXLKKYRMIVEEXG

SEQ ID NO: 31483 - protein, 39 aa, Artificial Sequence
  Non-cyclic GFR-binding peptide
  MOD_RES (1)..(2)..(36)..(38): Xaa is C or S
  MOD_RES (16)..(17)..(18)..(19)..(20): Xaa is A or G
  MOD_RES (21)..(22)..(23)..(24): Xaa is A or G or absent
XXTPTKMNAISMLYFXXXXXXXXXLKKYRGMVVDRXGXS

SEQ ID NO: 31484 - protein, 40 aa, Artificial Sequence
  Non-cyclic GFR-binding peptide
  MOD_RES (3)..(4)..(38)..(40): Xaa is C or S
  MOD_RES (18)..(19)..(20)..(21)..(22): Xaa is A or G
  MOD_RES (23)..(24)..(25)..(26): Xaa is A or G or absent
GPXXTPTKMNAISMLYFXXXXXXXXXLKKYRGMVVDRXGX

SEQ ID NO: 31485 - protein, 38 aa, Artificial Sequence
  Non-cyclic GFR-binding peptide
  MOD_RES (6)..(7)..(38): Xaa is C or S
RVPSTXXAPVKTNAISMLYFDNGRVLLLKKYRMIVEEX

SEQ ID NO: 31486 - protein, 40 aa, Artificial Sequence
  Non-cyclic GFR-binding peptide
  MOD_RES (6)..(7): Xaa is C or S
  MOD_RES (21)..(22)..(23)..(24)..(25): Xaa is A or G
  MOD_RES (26)..(27)..(28)..(29): Xaa is A or G or absent
GSAGPXXTPTKMNAISMLYFXXXXXXXXXLKKYRGMVVDR

SEQ ID NO: 31487 - protein, 35 aa, Artificial Sequence
  Non-cyclic GFR-binding peptide
  MOD_RES (4)..(5): Xaa is C or S
AGPXXTPTKMNAISMLYFNDKQQIILKKYRGMVVD

SEQ ID NO: 31488 - protein, 35 aa, Artificial Sequence
  Non-cyclic GFR-binding peptide
  MOD_RES (2)..(3): Xaa is C or S
  MOD_RES (17)..(18)..(19)..(20)..(21): Xaa is A or G
  MOD_RES (22)..(23)..(24)..(25): Xaa is A or G or absent
PXXTPTKMNAISMLYFXXXXXXXXXLKKYRGMVVD

SEQ ID NO: 31489 - protein, 33 aa, Artificial Sequence
  Non-cyclic GFR-binding peptide
  MOD_RES (1)..(32): Xaa is C or S
XAPVKTNAISMLYFDNGRVLLLKKYRMIVEEXG

SEQ ID NO: 31490 - protein, 30 aa, Artificial Sequence
  Non-cyclic GFR-binding peptide
TPTKMNAISMLYFNDKQQIILKKYRGMVVD

SEQ ID NO: 31491 - protein, 34 aa, Artificial Sequence
  Non-cyclic GFR-binding peptide
  MOD_RES (32)..(34): Xaa is C or S
TPTKMNAISMLYFNDKQQIILKKYRGMVVDRXGX

SEQ ID NO: 31492 - protein, 40 aa, Artificial Sequence
  Non-cyclic GFR-binding peptide
  MOD_RES (4)..(5)..(38)..(40): Xaa is C or S
  MOD_RES (19)..(20)..(21)..(22)..(23): Xaa is A or G
  MOD_RES (24)..(25)..(26)..(27): Xaa is A or G or absent
PSTXXAPVKTNAISMLYFXXXXXXXXXLKKYRMIVEEXGX

SEQ ID NO: 31493 - protein, 40 aa, Artificial Sequence
  Non-cyclic GFR-binding peptide
  MOD_RES (5)..(6)..(40): Xaa is C or S
  MOD_RES (20)..(21)..(22)..(23)..(24): Xaa is A or G
  MOD_RES (25)..(26)..(27)..(28): Xaa is A or G or absent
SAGPXXTPTKMNAISMLYFXXXXXXXXXLKKYRGMVVDRX

SEQ ID NO: 31494 - protein, 39 aa, Artificial Sequence
  Non-cyclic GFR-binding peptide
  MOD_RES (2)..(3)..(36)..(38): Xaa is C or S
  MOD_RES (17)..(18)..(19)..(20)..(21): Xaa is A or G
  MOD_RES (22)..(23)..(24)..(25): Xaa is A or G or absent
TXXAPVKTNAISMLYFXXXXXXXXXLKKYRMIVEEXGXL

SEQ ID NO: 31495 - protein, 31 aa, Artificial Sequence
  Non-cyclic GFR-binding peptide
  MOD_RES (1)..(1): Xaa is C or S
XTPTKMNAISMLYFNDKQQIILKKYRGMVVD

SEQ ID NO: 31496 - protein, 38 aa, Artificial Sequence
  Non-cyclic GFR-binding peptide
  MOD_RES (2)..(3)..(36)..(38): Xaa is C or S
  MOD_RES (17)..(18)..(19)..(20)..(21): Xaa is A or G
  MOD_RES (22)..(23)..(24)..(25): Xaa is A or G or absent
TXXAPVKTNAISMLYFXXXXXXXXXLKKYRMIVEEXGX

SEQ ID NO: 31497 - protein, 36 aa, Artificial Sequence
  Non-cyclic GFR-binding peptide
  MOD_RES (2)..(3): Xaa is C or S
  MOD_RES (17)..(18)..(19)..(20)..(21): Xaa is A or G
  MOD_RES (22)..(23)..(24)..(25): Xaa is A or G or absent
PXXTPTKMNAISMLYFXXXXXXXXXLKKYRGMVVDR

SEQ ID NO: 31498 - protein, 35 aa, Artificial Sequence
  Non-cyclic GFR-binding peptide
  MOD_RES (33)..(35): Xaa is C or S
  MOD_RES (14)..(15)..(16)..(17)..(18): Xaa is A or G
  MOD_RES (19)..(20)..(21)..(22): Xaa is A or G or absent
APVKTNAISMLYFXXXXXXXXXLKKYRMIVEEXGX

SEQ ID NO: 31499 - protein, 37 aa, Artificial Sequence
  Non-cyclic GFR-binding peptide
  MOD_RES (4)..(5): Xaa is C or S
  MOD_RES (19)..(20)..(21)..(22)..(23): Xaa is A or G
  MOD_RES (24)..(25)..(26)..(27): Xaa is A or G or absent
AGPXXTPTKMNAISMLYFXXXXXXXXXLKKYRGMVVD

SEQ ID NO: 31500 - protein, 36 aa, Artificial Sequence
  Non-cyclic GFR-binding peptide
  MOD_RES (1)..(34)..(36): Xaa is C or S
  MOD_RES (15)..(16)..(17)..(18)..(19): Xaa is A or G
  MOD_RES (20)..(21)..(22)..(23): Xaa is A or G or absent
XAPVKTNAISMLYFXXXXXXXXXLKKYRMIVEEXGX

SEQ ID NO: 31501 - protein, 36 aa, Artificial Sequence
  Non-cyclic GFR-binding peptide
  MOD_RES (3)..(4)..(35): Xaa is C or S
STXXAPVKTNAISMLYFDNGRVLLLKKYRMIVEEXG

SEQ ID NO: 31502 - protein, 37 aa, Artificial Sequence
  Non-cyclic GFR-binding peptide
  MOD_RES (2)..(3)..(36): Xaa is C or S
  MOD_RES (17)..(18)..(19)..(20)..(21): Xaa is A or G
  MOD_RES (22)..(23)..(24)..(25): Xaa is A or G or absent
TXXAPVKTNAISMLYFXXXXXXXXXLKKYRMIVEEXG

SEQ ID NO: 31503 - protein, 35 aa, Artificial Sequence
  Non-cyclic GFR-binding peptide
  MOD_RES (34)..(34): Xaa is C or S
  MOD_RES (14)..(15)..(16)..(17)..(18): Xaa is A or G
  MOD_RES (19)..(20)..(21)..(22): Xaa is A or G or absent
TPTKMNAISMLYFXXXXXXXXXLKKYRGMVVDRXG

SEQ ID NO: 31504 - protein, 40 aa, Artificial Sequence
  Non-cyclic GFR-binding peptide
  MOD_RES (6)..(7)..(39): Xaa is C or S
GSAGPXXTPTKMNAISMLYFNDKQQIILKKYRGMVVDRXG

SEQ ID NO: 31505 - protein, 33 aa, Artificial Sequence
  Non-cyclic GFR-binding peptide
  MOD_RES (1)..(1): Xaa is C or S
  MOD_RES (15)..(16)..(17)..(18)..(19): Xaa is A or G
  MOD_RES (20)..(21)..(22)..(23): Xaa is A or G or absent
XAPVKTNAISMLYFXXXXXXXXXLKKYRMIVEE

SEQ ID NO: 31506 - protein, 35 aa, Artificial Sequence
  Non-cyclic GFR-binding peptide
  MOD_RES (1)..(2): Xaa is C or S
  MOD_RES (16)..(17)..(18)..(19)..(20): Xaa is A or G
  MOD_RES (21)..(22)..(23)..(24): Xaa is A or G or absent
XXTPTKMNAISMLYFXXXXXXXXXLKKYRGMVVDR

SEQ ID NO: 31507 - protein, 36 aa, Artificial Sequence
  Non-cyclic GFR-binding peptide
  MOD_RES (1)..(2)..(34)..(36): Xaa is C or S
XXTPTKMNAISMLYFNDKQQIILKKYRGMVVDRXGX

SEQ ID NO: 31508 - protein, 39 aa, Artificial Sequence
  Non-cyclic GFR-binding peptide
  MOD_RES (6)..(7)..(38): Xaa is C or S
RVPSTXXAPVKTNAISMLYFDNGRVLLLKKYRMIVEEXG

SEQ ID NO: 31509 - protein, 38 aa, Artificial Sequence
  Non-cyclic GFR-binding peptide
  MOD_RES (5)..(6): Xaa is C or S
  MOD_RES (20)..(21)..(22)..(23)..(24): Xaa is A or G
  MOD_RES (25)..(26)..(27)..(28): Xaa is A or G or absent
VPSTXXAPVKTNAISMLYFXXXXXXXXXLKKYRMIVEE

SEQ ID NO: 31510 - protein, 39 aa, Artificial Sequence
  Non-cyclic GFR-binding peptide
  MOD_RES (6)..(7): Xaa is C or S
  MOD_RES (21)..(22)..(23)..(24)..(25): Xaa is A or G
  MOD_RES (26)..(27)..(28)..(29): Xaa is A or G or absent
GSAGPXXTPTKMNAISMLYFXXXXXXXXXLKKYRGMVVD

SEQ ID NO: 31511 - protein, 37 aa, Artificial Sequence
  Non-cyclic GFR-binding peptide
  MOD_RES (3)..(4)..(35)..(37): Xaa is C or S
STXXAPVKTNAISMLYFDNGRVLLLKKYRMIVEEXGX

SEQ ID NO: 31512 - protein, 40 aa, Artificial Sequence
  Non-cyclic GFR-binding peptide
  MOD_RES (3)..(4)..(37)..(39): Xaa is C or S
  MOD_RES (18)..(19)..(20)..(21)..(22): Xaa is A or G
  MOD_RES (23)..(24)..(25)..(26): Xaa is A or G or absent
STXXAPVKTNAISMLYFXXXXXXXXXLKKYRMIVEEXGXL

SEQ ID NO: 31513 - protein, 33 aa, Artificial Sequence
  Non-cyclic GFR-binding peptide
  MOD_RES (2)..(3): Xaa is C or S
TXXAPVKTNAISMLYFDNGRVLLLKKYRMIVEE

SEQ ID NO: 31514 - protein, 43 aa, Artificial Sequence
  Non-cyclic GFR-binding peptide
  MOD_RES (5)..(6)..(40)..(42): Xaa is C or S
  MOD_RES (20)..(21)..(22)..(23)..(24): Xaa is A or G
  MOD_RES (25)..(26)..(27)..(28): Xaa is A or G or absent
SAGPXXTPTKMNAISMLYFXXXXXXXXXLKKYRGMVVDRXGXS

SEQ ID NO: 31515 - protein, 35 aa, Artificial Sequence
  Non-cyclic GFR-binding peptide
  MOD_RES (1)..(35): Xaa is C or S
  MOD_RES (15)..(16)..(17)..(18)..(19): Xaa is A or G
  MOD_RES (20)..(21)..(22)..(23): Xaa is A or G or absent
XTPTKMNAISMLYFXXXXXXXXXLKKYRGMVVDRX

SEQ ID NO: 31516 - protein, 38 aa, Artificial Sequence
  Non-cyclic GFR-binding peptide
  MOD_RES (4)..(5)..(36)..(38): Xaa is C or S
PSTXXAPVKTNAISMLYFDNGRVLLLKKYRMIVEEXGX

SEQ ID NO: 31517 - protein, 34 aa, Artificial Sequence
  Non-cyclic GFR-binding peptide
  MOD_RES (33)..(33): Xaa is C or S
  MOD_RES (14)..(15)..(16)..(17)..(18): Xaa is A or G
  MOD_RES (19)..(20)..(21)..(22): Xaa is A or G or absent
APVKTNAISMLYFXXXXXXXXXLKKYRMIVEEXG

SEQ ID NO: 31518 - protein, 37 aa, Artificial Sequence
  Non-cyclic GFR-binding peptide
  MOD_RES (5)..(6)..(37): Xaa is C or S
VPSTXXAPVKTNAISMLYFDNGRVLLLKKYRMIVEEX

SEQ ID NO: 31519 - protein, 41 aa, Artificial Sequence
  Non-cyclic GFR-binding peptide
  MOD_RES (5)..(6)..(38)..(40): Xaa is C or S
SAGPXXTPTKMNAISMLYFNDKQQIILKKYRGMVVDRXGXS

SEQ ID NO: 31520 - protein, 33 aa, Artificial Sequence
  Non-cyclic GFR-binding peptide
  MOD_RES (32)..(32): Xaa is C or S
TPTKMNAISMLYFNDKQQIILKKYRGMVVDRXG

SEQ ID NO: 31521 - protein, 37 aa, Artificial Sequence
  Non-cyclic GFR-binding peptide
  MOD_RES (5)..(6): Xaa is C or S
SAGPXXTPTKMNAISMLYFNDKQQIILKKYRGMVVDR

SEQ ID NO: 31522 - protein, 32 aa, Artificial Sequence
  Non-cyclic GFR-binding peptide
  MOD_RES (31)..(31): Xaa is C or S
APVKTNAISMLYFDNGRVLLLKKYRMIVEEXG

SEQ ID NO: 31523 - protein, 42 aa, Artificial Sequence
  Non-cyclic GFR-binding peptide
  MOD_RES (5)..(6)..(40)..(42): Xaa is C or S
  MOD_RES (20)..(21)..(22)..(23)..(24): Xaa is A or G
  MOD_RES (25)..(26)..(27)..(28): Xaa is A or G or absent
SAGPXXTPTKMNAISMLYFXXXXXXXXXLKKYRGMVVDRXGX

SEQ ID NO: 31524 - protein, 40 aa, Artificial Sequence
  Non-cyclic GFR-binding peptide
  MOD_RES (6)..(7)..(40): Xaa is C or S
  MOD_RES (21)..(22)..(23)..(24)..(25): Xaa is A or G
  MOD_RES (26)..(27)..(28)..(29): Xaa is A or G or absent
RVPSTXXAPVKTNAISMLYFXXXXXXXXXLKKYRMIVEEX

SEQ ID NO: 31525 - protein, 36 aa, Artificial Sequence
  Non-cyclic GFR-binding peptide
  MOD_RES (2)..(3)..(35): Xaa is C or S
PXXTPTKMNAISMLYFNDKQQIILKKYRGMVVDRXG

SEQ ID NO: 31526 - protein, 37 aa, Artificial Sequence
  Non-cyclic GFR-binding peptide
  MOD_RES (1)..(34)..(36): Xaa is C or S
  MOD_RES (15)..(16)..(17)..(18)..(19): Xaa is A or G
  MOD_RES (20)..(21)..(22)..(23): Xaa is A or G or absent
XAPVKTNAISMLYFXXXXXXXXXLKKYRMIVEEXGXL

SEQ ID NO: 31527 - protein, 40 aa, Artificial Sequence
  Non-cyclic GFR-binding peptide
  MOD_RES (5)..(6)..(37)..(39): Xaa is C or S
VPSTXXAPVKTNAISMLYFDNGRVLLLKKYRMIVEEXGXL

SEQ ID NO: 31528 - protein, 38 aa, Artificial Sequence
  Non-cyclic GFR-binding peptide
  MOD_RES (1)..(35)..(37): Xaa is C or S
  MOD_RES (15)..(16)..(17)..(18)..(19): Xaa is A or G
  MOD_RES (20)..(21)..(22)..(23): Xaa is A or G or absent
XTPTKMNAISMLYFXXXXXXXXXLKKYRGMVVDRXGXS

SEQ ID NO: 31529 - protein, 39 aa, Artificial Sequence
  Non-cyclic GFR-binding peptide
  MOD_RES (6)..(7): Xaa is C or S
  MOD_RES (21)..(22)..(23)..(24)..(25): Xaa is A or G
  MOD_RES (26)..(27)..(28)..(29): Xaa is A or G or absent
RVPSTXXAPVKTNAISMLYFXXXXXXXXXLKKYRMIVEE

SEQ ID NO: 31530 - protein, 39 aa, Artificial Sequence
  Non-cyclic GFR-binding peptide
  MOD_RES (5)..(6)..(38): Xaa is C or S
SAGPXXTPTKMNAISMLYFNDKQQIILKKYRGMVVDRXG

SEQ ID NO: 31531 - protein, 33 aa, Artificial Sequence
  Non-cyclic GFR-binding peptide
  MOD_RES (33)..(33): Xaa is C or S
  MOD_RES (14)..(15)..(16)..(17)..(18): Xaa is A or G
  MOD_RES (19)..(20)..(21)..(22): Xaa is A or G or absent
APVKTNAISMLYFXXXXXXXXXLKKYRMIVEEX

SEQ ID NO: 31532 - protein, 39 aa, Artificial Sequence
  Non-cyclic GFR-binding peptide
  MOD_RES (5)..(6)..(37)..(39): Xaa is C or S
VPSTXXAPVKTNAISMLYFDNGRVLLLKKYRMIVEEXGX

SEQ ID NO: 31533 - protein, 41 aa, Artificial Sequence
  Non-cyclic GFR-binding peptide
  MOD_RES (6)..(7)..(41): Xaa is C or S
  MOD_RES (21)..(22)..(23)..(24)..(25): Xaa is A or G
  MOD_RES (26)..(27)..(28)..(29): Xaa is A or G or absent
GSAGPXXTPTKMNAISMLYFXXXXXXXXXLKKYRGMVVDRX

SEQ ID NO: 31534 - protein, 37 aa, Artificial Sequence
  Non-cyclic GFR-binding peptide
  MOD_RES (34)..(36): Xaa is C or S
  MOD_RES (14)..(15)..(16)..(17)..(18): Xaa is A or G
  MOD_RES (19)..(20)..(21)..(22): Xaa is A or G or absent
TPTKMNAISMLYFXXXXXXXXXLKKYRGMVVDRXGXS

SEQ ID NO: 31535 - protein, 35 aa, Artificial Sequence
  Non-cyclic GFR-binding peptide
  MOD_RES (2)..(3)..(35): Xaa is C or S
PXXTPTKMNAISMLYFNDKQQIILKKYRGMVVDRX

SEQ ID NO: 31536 - protein, 35 aa, Artificial Sequence
  Non-cyclic GFR-binding peptide
  MOD_RES (2)..(3)..(34): Xaa is C or S
TXXAPVKTNAISMLYFDNGRVLLLKKYRMIVEEXG

SEQ ID NO: 31537 - protein, 32 aa, Artificial Sequence
  Non-cyclic GFR-binding peptide
  MOD_RES (1)..(32): Xaa is C or S
XAPVKTNAISMLYFDNGRVLLLKKYRMIVEEX

SEQ ID NO: 31538 - protein, 36 aa, Artificial Sequence
  Non-cyclic GFR-binding peptide
  MOD_RES (1)..(35): Xaa is C or S
  MOD_RES (15)..(16)..(17)..(18)..(19): Xaa is A or G
  MOD_RES (20)..(21)..(22)..(23): Xaa is A or G or absent
XTPTKMNAISMLYFXXXXXXXXXLKKYRGMVVDRXG

SEQ ID NO: 31539 - protein, 42 aa, Artificial Sequence
  Non-cyclic GFR-binding peptide
  MOD_RES (6)..(7)..(40)..(42): Xaa is C or S
  MOD_RES (21)..(22)..(23)..(24)..(25): Xaa is A or G
  MOD_RES (26)..(27)..(28)..(29): Xaa is A or G or absent
RVPSTXXAPVKTNAISMLYFXXXXXXXXXLKKYRMIVEEXGX

SEQ ID NO: 31540 - protein, 35 aa, Artificial Sequence
  Non-cyclic GFR-binding peptide
  MOD_RES (1)..(32)..(34): Xaa is C or S
XAPVKTNAISMLYFDNGRVLLLKKYRMIVEEXGXL

SEQ ID NO: 31541 - protein, 41 aa, Artificial Sequence
  Non-cyclic GFR-binding peptide
  MOD_RES (4)..(5)..(39)..(41): Xaa is C or S
  MOD_RES (19)..(20)..(21)..(22)..(23): Xaa is A or G
  MOD_RES (24)..(25)..(26)..(27): Xaa is A or G or absent
AGPXXTPTKMNAISMLYFXXXXXXXXXLKKYRGMVVDRXGX

SEQ ID NO: 31542 - protein, 35 aa, Artificial Sequence
  Non-cyclic GFR-binding peptide
  MOD_RES (4)..(5): Xaa is C or S
PSTXXAPVKTNAISMLYFDNGRVLLLKKYRMIVEE

SEQ ID NO: 31543 - protein, 43 aa, Artificial Sequence
  Non-cyclic GFR-binding peptide
  MOD_RES (6)..(7)..(41)..(43): Xaa is C or S
  MOD_RES (21)..(22)..(23)..(24)..(25): Xaa is A or G
  MOD_RES (26)..(27)..(28)..(29): Xaa is A or G or absent
GSAGPXXTPTKMNAISMLYFXXXXXXXXXLKKYRGMVVDRXGX

SEQ ID NO: 31544 - protein, 42 aa, Artificial Sequence
  Non-cyclic GFR-binding peptide
  MOD_RES (5)..(6)..(39)..(41): Xaa is C or S
  MOD_RES (20)..(21)..(22)..(23)..(24): Xaa is A or G
  MOD_RES (25)..(26)..(27)..(28): Xaa is A or G or absent
VPSTXXAPVKTNAISMLYFXXXXXXXXXLKKYRMIVEEXGXL

SEQ ID NO: 31545 - protein, 43 aa, Artificial Sequence
  Non-cyclic GFR-binding peptide
  MOD_RES (6)..(7)..(40)..(42): Xaa is C or S
  MOD_RES (21)..(22)..(23)..(24)..(25): Xaa is A or G
  MOD_RES (26)..(27)..(28)..(29): Xaa is A or G or absent
RVPSTXXAPVKTNAISMLYFXXXXXXXXXLKKYRMIVEEXGXL

SEQ ID NO: 31546 - protein, 35 aa, Artificial Sequence
  Non-cyclic GFR-binding peptide
  MOD_RES (3)..(4)..(35): Xaa is C or S
STXXAPVKTNAISMLYFDNGRVLLLKKYRMIVEEX

SEQ ID NO: 31547 - protein, 39 aa, Artificial Sequence
  Non-cyclic GFR-binding peptide
  MOD_RES (5)..(6)..(39): Xaa is C or S
  MOD_RES (20)..(21)..(22)..(23)..(24): Xaa is A or G
  MOD_RES (25)..(26)..(27)..(28): Xaa is A or G or absent
VPSTXXAPVKTNAISMLYFXXXXXXXXXLKKYRMIVEEX

SEQ ID NO: 31548 - protein, 36 aa, Artificial Sequence
  Non-cyclic GFR-binding peptide
  MOD_RES (1)..(33)..(35): Xaa is C or S
XTPTKMNAISMLYFNDKQQIILKKYRGMVVDRXGXS

SEQ ID NO: 31549 - protein, 32 aa, Artificial Sequence
  Non-cyclic GFR-binding peptide
  MOD_RES (1)..(2): Xaa is C or S
XXAPVKTNAISMLYFDNGRVLLLKKYRMIVEE

SEQ ID NO: 31550 - protein, 35 aa, Artificial Sequence
  Non-cyclic GFR-binding peptide
  MOD_RES (1)..(33)..(35): Xaa is C or S
XTPTKMNAISMLYFNDKQQIILKKYRGMVVDRXGX

SEQ ID NO: 31551 - protein, 40 aa, Artificial Sequence
  Non-cyclic GFR-binding peptide
  MOD_RES (6)..(7)..(38)..(40): Xaa is C or S
RVPSTXXAPVKTNAISMLYFDNGRVLLLKKYRMIVEEXGX

SEQ ID NO: 31552 - protein, 36 aa, Artificial Sequence
  Non-cyclic GFR-binding peptide
  MOD_RES (1)..(2)..(36): Xaa is C or S
  MOD_RES (16)..(17)..(18)..(19)..(20): Xaa is A or G
  MOD_RES (21)..(22)..(23)..(24): Xaa is A or G or absent
XXTPTKMNAISMLYFXXXXXXXXXLKKYRGMVVDRX

SEQ ID NO: 31553 - protein, 33 aa, Artificial Sequence
  Non-cyclic GFR-binding peptide
  MOD_RES (1)..(1): Xaa is C or S
  MOD_RES (15)..(16)..(17)..(18)..(19): Xaa is A or G
  MOD_RES (20)..(21)..(22)..(23): Xaa is A or G or absent
XTPTKMNAISMLYFXXXXXXXXXLKKYRGMVVD

SEQ ID NO: 31554 - protein, 37 aa, Artificial Sequence
  Non-cyclic GFR-binding peptide
  MOD_RES (1)..(2)..(35)..(37): Xaa is C or S
  MOD_RES (16)..(17)..(18)..(19)..(20): Xaa is A or G
  MOD_RES (21)..(22)..(23)..(24): Xaa is A or G or absent
XXAPVKTNAISMLYFXXXXXXXXXLKKYRMIVEEXGX

SEQ ID NO: 31555 - protein, 38 aa, Artificial Sequence
  Non-cyclic GFR-binding peptide
  MOD_RES (2)..(3)..(35)..(37): Xaa is C or S
PXXTPTKMNAISMLYFNDKQQIILKKYRGMVVDRXGXS

SEQ ID NO: 31556 - protein, 33 aa, Artificial Sequence
  Non-cyclic GFR-binding peptide
  MOD_RES (1)..(2)..(33): Xaa is C or S
XXAPVKTNAISMLYFDNGRVLLLKKYRMIVEEX

SEQ ID NO: 31557 - protein, 37 aa, Artificial Sequence
  Non-cyclic GFR-binding peptide
  MOD_RES (4)..(5): Xaa is C or S
  MOD_RES (19)..(20)..(21)..(22)..(23): Xaa is A or G
  MOD_RES (24)..(25)..(26)..(27): Xaa is A or G or absent
PSTXXAPVKTNAISMLYFXXXXXXXXXLKKYRMIVEE

SEQ ID NO: 31558 - protein, 32 aa, Artificial Sequence
  Non-cyclic GFR-binding peptide
  MOD_RES (14)..(15)..(16)..(17)..(18): Xaa is A or G
  MOD_RES (19)..(20)..(21)..(22): Xaa is A or G or absent
TPTKMNAISMLYFXXXXXXXXXLKKYRGMVVD

SEQ ID NO: 31559 - protein, 41 aa, Artificial Sequence
  Non-cyclic GFR-binding peptide
  MOD_RES (3)..(4)..(38)..(40): Xaa is C or S
  MOD_RES (18)..(19)..(20)..(21)..(22): Xaa is A or G
  MOD_RES (23)..(24)..(25)..(26): Xaa is A or G or absent
GPXXTPTKMNAISMLYFXXXXXXXXXLKKYRGMVVDRXGXS

SEQ ID NO: 31560 - protein, 31 aa, Artificial Sequence
  Non-cyclic GFR-binding peptide
  MOD_RES (1)..(1): Xaa is C or S
XAPVKTNAISMLYFDNGRVLLLKKYRMIVEE

SEQ ID NO: 31561 - protein, 31 aa, Artificial Sequence
  Non-cyclic GFR-binding peptide
  MOD_RES (31)..(31): Xaa is C or S
SRVIMPIKGYVKPKRGVFYLINIPSLAQPVX

SEQ ID NO: 31562 - protein, 36 aa, Artificial Sequence
  Non-cyclic GFR-binding peptide
  MOD_RES (31)..(32): Xaa is C or S
EVTMNEYKFKVVNKNEDLYLISIPEMKEPVXXPEPI

SEQ ID NO: 31563 - protein, 32 aa, Artificial Sequence
  Non-cyclic GFR-binding peptide
  MOD_RES (31)..(32): Xaa is C or S
EVTMNRHKRLVVNKNEDYYLISTASMKEPVXX

SEQ ID NO: 31564 - protein, 38 aa, Artificial Sequence
  Non-cyclic GFR-binding peptide
  MOD_RES (33)..(34): Xaa is C or S
  MOD_RES (11)..(12)..(13)..(14)..(15): Xaa is A or G
  MOD_RES (16)..(17)..(18)..(19): Xaa is A or G or absent
SKVVMPIKGYXXXXXXXXXFYLINIPSLDQPVXXPSAS

SEQ ID NO: 31565 - protein, 39 aa, Artificial Sequence
  Non-cyclic GFR-binding peptide
  MOD_RES (1)..(33)..(34): Xaa is C or S
XSEVTMNRYKKLVVNKNEDFYLISIANMKEPVXXPEPIG

SEQ ID NO: 31566 - protein, 33 aa, Artificial Sequence
  Non-cyclic GFR-binding peptide
  MOD_RES (1)..(33): Xaa is C or S
XSEVVMDYHYKLVVNNASDKYLISIPSLRTPVX

SEQ ID NO: 31567 - protein, 32 aa, Artificial Sequence
  Non-cyclic GFR-binding peptide
  MOD_RES (32)..(32): Xaa is C or S
SEVVMDEYKFKVVNNASDLYLISIPELRTPVX

SEQ ID NO: 31568 - protein, 33 aa, Artificial Sequence
  Non-cyclic GFR-binding peptide
  MOD_RES (1)..(32)..(33): Xaa is C or S
XSRVIMPIKGYVKPKRGVFYLINIPSLAQPVXX

SEQ ID NO: 31569 - protein, 43 aa, Artificial Sequence
  Non-cyclic GFR-binding peptide
  MOD_RES (1)..(3)..(37)..(38): Xaa is C or S
  MOD_RES (15)..(16)..(17)..(18)..(19): Xaa is A or G
  MOD_RES (20)..(21)..(22)..(23): Xaa is A or G or absent
XGXRDVVMGRHKRLXXXXXXXXXYYLMSTASMKTPTXXPGASG

SEQ ID NO: 31570 - protein, 39 aa, Artificial Sequence
  Non-cyclic GFR-binding peptide
  MOD_RES (34)..(35): Xaa is C or S
  MOD_RES (12)..(13)..(14)..(15)..(16): Xaa is A or G
  MOD_RES (17)..(18)..(19)..(20): Xaa is A or G or absent
ESVAMGRHKRLXXXXXXXXXYYLISTASLKTPVXXAKSA

SEQ ID NO: 31571 - protein, 44 aa, Artificial Sequence
  Non-cyclic GFR-binding peptide
  MOD_RES (2)..(4)..(38)..(39): Xaa is C or S
  MOD_RES (16)..(17)..(18)..(19)..(20): Xaa is A or G
  MOD_RES (21)..(22)..(23)..(24): Xaa is A or G or absent
SXGXRDVVMGEYKFKXXXXXXXXXLYLMSIPEMKTPTXXPGASG

SEQ ID NO: 31572 - protein, 38 aa, Artificial Sequence
  Non-cyclic GFR-binding peptide
  MOD_RES (1)..(3)..(37)..(38): Xaa is C or S
  MOD_RES (15)..(16)..(17)..(18)..(19): Xaa is A or G
  MOD_RES (20)..(21)..(22)..(23): Xaa is A or G or absent
XGXSEVVMDEYKFKXXXXXXXXXLYLISIPELRTPVXX

SEQ ID NO: 31573 - protein, 34 aa, Artificial Sequence
  Non-cyclic GFR-binding peptide
  MOD_RES (1)..(32)..(33): Xaa is C or S
XSKVVMPIKGYVKPTRGVFYLINIPSLDQPVXXP

SEQ ID NO: 31574 - protein, 37 aa, Artificial Sequence
  Non-cyclic GFR-binding peptide
  MOD_RES (32)..(33): Xaa is C or S
SEVTMNRYKKLVVNKNEDFYLISIANMKEPVXXPEPI

SEQ ID NO: 31575 - protein, 35 aa, Artificial Sequence
  Non-cyclic GFR-binding peptide
  MOD_RES (32)..(33): Xaa is C or S
SEVTMNRHKRLVVNKNEDYYLISTASMKEPVXXPE

SEQ ID NO: 31576 - protein, 37 aa, Artificial Sequence
  Non-cyclic GFR-binding peptide
  MOD_RES (31)..(32): Xaa is C or S
DVVMGYHYKLIIQQKDNKYLMSIPSMKTPTXXPGASG

SEQ ID NO: 31577 - protein, 37 aa, Artificial Sequence
  Non-cyclic GFR-binding peptide
  MOD_RES (33)..(34): Xaa is C or S
  MOD_RES (11)..(12)..(13)..(14)..(15): Xaa is A or G
  MOD_RES (16)..(17)..(18)..(19): Xaa is A or G or absent
EVVMDRHKRLXXXXXXXXXYYLISTASLRAPVXXSAP

SEQ ID NO: 31578 - protein, 38 aa, Artificial Sequence
  Non-cyclic GFR-binding peptide
  MOD_RES (2)..(35)..(36): Xaa is C or S
  MOD_RES (13)..(14)..(15)..(16)..(17): Xaa is A or G
  MOD_RES (18)..(19)..(20)..(21): Xaa is A or G or absent
GXEEVIMRHKRLXXXXXXXXXYYLMSTASTKVPAXXTS

SEQ ID NO: 31579 - protein, 30 aa, Artificial Sequence
  Non-cyclic GFR-binding peptide
SKVIMPIKGYIKPTKGIFYLINIPSLDQSV

SEQ ID NO: 31580 - protein, 34 aa, Artificial Sequence
  Non-cyclic GFR-binding peptide
  MOD_RES (31)..(32): Xaa is C or S
SKVVMPIKGYVKPTRGVFYLINIPSLDQPVXXPS

SEQ ID NO: 31581 - protein, 37 aa, Artificial Sequence
  Non-cyclic GFR-binding peptide
  MOD_RES (32)..(33): Xaa is C or S
SEVTMNEYKFKVVNKNEDLYLISIPEMKEPVXXPEPI

SEQ ID NO: 31582 - protein, 34 aa, Artificial Sequence
  Non-cyclic GFR-binding peptide
  MOD_RES (1)..(34): Xaa is C or S
  MOD_RES (12)..(13)..(14)..(15)..(16): Xaa is A or G
  MOD_RES (17)..(18)..(19)..(20): Xaa is A or G or absent
XEEVIMRHKRLXXXXXXXXXYYLMSTASTKVPAX

SEQ ID NO: 31583 - protein, 41 aa, Artificial Sequence
  Non-cyclic GFR-binding peptide
  MOD_RES (2)..(36)..(37): Xaa is C or S
  MOD_RES (14)..(15)..(16)..(17)..(18): Xaa is A or G
  MOD_RES (19)..(20)..(21)..(22): Xaa is A or G or absent
AXSEVTMNYHYKLXXXXXXXXXKYLISIPSMKEPVXXPEPI

SEQ ID NO: 31584 - protein, 39 aa, Artificial Sequence
  Non-cyclic GFR-binding peptide
  MOD_RES (33)..(34): Xaa is C or S
  MOD_RES (11)..(12)..(13)..(14)..(15): Xaa is A or G
  MOD_RES (16)..(17)..(18)..(19): Xaa is A or G or absent
EVVMDRHKRLXXXXXXXXXYYLISTASLRAPVXXSAPAA

SEQ ID NO: 31585 - protein, 36 aa, Artificial Sequence
  Non-cyclic GFR-binding peptide
  MOD_RES (33)..(34): Xaa is C or S
  MOD_RES (11)..(12)..(13)..(14)..(15): Xaa is A or G
  MOD_RES (16)..(17)..(18)..(19): Xaa is A or G or absent
EVTMNYHYKLXXXXXXXXXKYLISIPSMKEPVXXPE

SEQ ID NO: 31586 - protein, 33 aa, Artificial Sequence
  Non-cyclic GFR-binding peptide
  MOD_RES (32)..(33): Xaa is C or S
SEVTMNRHKRLVVNKNEDYYLISTASMKEPVXX

SEQ ID NO: 31587 - protein, 41 aa, Artificial Sequence
  Non-cyclic GFR-binding peptide
  MOD_RES (2)..(4)..(38)..(39): Xaa is C or S
  MOD_RES (16)..(17)..(18)..(19)..(20): Xaa is A or G
  MOD_RES (21)..(22)..(23)..(24): Xaa is A or G or absent
RXAXSEVTMNRYKKLXXXXXXXXXFYLISIANMKEPVXXPE

SEQ ID NO: 31588 - protein, 42 aa, Artificial Sequence
  Non-cyclic GFR-binding peptide
  MOD_RES (2)..(36)..(37): Xaa is C or S
  MOD_RES (14)..(15)..(16)..(17)..(18): Xaa is A or G
  MOD_RES (19)..(20)..(21)..(22): Xaa is A or G or absent
AXSEVTMNPIKGYXXXXXXXXXFYLINIPSMKEPVXXPEPIG

SEQ ID NO: 31589 - protein, 40 aa, Artificial Sequence
  Non-cyclic GFR-binding peptide
  MOD_RES (2)..(4)..(38)..(39): Xaa is C or S
  MOD_RES (16)..(17)..(18)..(19)..(20): Xaa is A or G
  MOD_RES (21)..(22)..(23)..(24): Xaa is A or G or absent
RXAXSEVTMNRYKKLXXXXXXXXXFYLISIANMKEPVXXP

SEQ ID NO: 31590 - protein, 33 aa, Artificial Sequence
  Non-cyclic GFR-binding peptide
  MOD_RES (12)..(13)..(14)..(15)..(16): Xaa is A or G
  MOD_RES (17)..(18)..(19)..(20): Xaa is A or G or absent
SEVVMDYHYKLXXXXXXXXXKYLISIPSLRTPV

SEQ ID NO: 31591 - protein, 37 aa, Artificial Sequence
  Non-cyclic GFR-binding peptide
  MOD_RES (2)..(33)..(34): Xaa is C or S
KXSKVVMPIKGYVKPTRGVFYLINIPSLDQPVXXPSA

SEQ ID NO: 31592 - protein, 34 aa, Artificial Sequence
  Non-cyclic GFR-binding peptide
  MOD_RES (1)..(33)..(34): Xaa is C or S
XSEVTMNPIKGYVVNKNEDFYLINIPSMKEPVXX

SEQ ID NO: 31593 - protein, 31 aa, Artificial Sequence
  Non-cyclic GFR-binding peptide
  MOD_RES (31)..(31): Xaa is C or S
DVVMGYHYKLIIQQKDNKYLMSIPSMKTPTX

SEQ ID NO: 31594 - protein, 42 aa, Artificial Sequence
  Non-cyclic GFR-binding peptide
  MOD_RES (2)..(4)..(36)..(37): Xaa is C or S
RXGXSEVVMDRHKRLVVNNASDYYLISTASLRTPVXXTPPTS

SEQ ID NO: 31595 - protein, 34 aa, Artificial Sequence
  Non-cyclic GFR-binding peptide
  MOD_RES (1)..(3)..(34): Xaa is C or S
XKXSRVIMPIKGYVKPKRGVFYLINIPSLAQPVX

SEQ ID NO: 31596 - protein, 38 aa, Artificial Sequence
  Non-cyclic GFR-binding peptide
  MOD_RES (1)..(3)..(35)..(36): Xaa is C or S
XGXSEVVMDRHKRLVVNNASDYYLISTASLRTPVXXTP

SEQ ID NO: 31597 - protein, 40 aa, Artificial Sequence
  Non-cyclic GFR-binding peptide
  MOD_RES (2)..(34)..(35): Xaa is C or S
GXRDVVMGYHYKLIIQQKDNKYLMSIPSMKTPTXXPGASG

SEQ ID NO: 31598 - protein, 40 aa, Artificial Sequence
  Non-cyclic GFR-binding peptide
  MOD_RES (2)..(4)..(38)..(39): Xaa is C or S
  MOD_RES (16)..(17)..(18)..(19)..(20): Xaa is A or G
  MOD_RES (21)..(22)..(23)..(24): Xaa is A or G or absent
RXAXSEVTMNEYKFKXXXXXXXXXLYLISIPEMKEPVXXP

SEQ ID NO: 31599 - protein, 37 aa, Artificial Sequence
  Non-cyclic GFR-binding peptide
  MOD_RES (2)..(4)..(36)..(37): Xaa is C or S
RXAXSEVTMNEYKFKVVNKNEDLYLISIPEMKEPVXX

SEQ ID NO: 31600 - protein, 37 aa, Artificial Sequence
  Non-cyclic GFR-binding peptide
  MOD_RES (1)..(3)..(35)..(36): Xaa is C or S
XGXSEVVMDEYKFKVVNNASDLYLISIPELRTPVXXT

SEQ ID NO: 31601 - protein, 34 aa, Artificial Sequence
  Non-cyclic GFR-binding peptide
  MOD_RES (1)..(3)..(34): Xaa is C or S
XGXEEVIMYHYKLLLVRGNDKYLMSIPSTKVPAX

SEQ ID NO: 31602 - protein, 36 aa, Artificial Sequence
  Non-cyclic GFR-binding peptide
  MOD_RES (1)..(32)..(33): Xaa is C or S
XSRVIMPIKGYVKPKRGVFYLINIPSLAQPVXXPAA

SEQ ID NO: 31603 - protein, 38 aa, Artificial Sequence
  Non-cyclic GFR-binding peptide
  MOD_RES (32)..(33): Xaa is C or S
SRVVMNYHYKLIVNSSDDKYLVSIPSLKTPAXXPKPVH

SEQ ID NO: 31604 - protein, 40 aa, Artificial Sequence
  Non-cyclic GFR-binding peptide
  MOD_RES (2)..(34)..(35): Xaa is C or S
AXSEVTMNRYKKLVVNKNEDFYLISIANMKEPVXXPEPIG

SEQ ID NO: 31605 - protein, 34 aa, Artificial Sequence
  Non-cyclic GFR-binding peptide
  MOD_RES (32)..(33): Xaa is C or S
SEVVMDEYKFKVVNNASDLYLISIPELRTPVXXT

SEQ ID NO: 31606 - protein, 36 aa, Artificial Sequence
  Non-cyclic GFR-binding peptide
  MOD_RES (2)..(4)..(36): Xaa is C or S
RXAXSEVTMNYHYKLVVNKNEDKYLISIPSMKEPVX

SEQ ID NO: 31607 - protein, 41 aa, Artificial Sequence
  Non-cyclic GFR-binding peptide
  MOD_RES (2)..(36)..(37): Xaa is C or S
  MOD_RES (14)..(15)..(16)..(17)..(18): Xaa is A or G
  MOD_RES (19)..(20)..(21)..(22): Xaa is A or G or absent
AXSEVTMNEYKFKXXXXXXXXXLYLISIPEMKEPVXXPEPI

SEQ ID NO: 31608 - protein, 34 aa, Artificial Sequence
  Non-cyclic GFR-binding peptide
  MOD_RES (2)..(4): Xaa is C or S
SXKXSKVIMPIKGYIKPTKGIFYLINIPSLDQSV

SEQ ID NO: 31609 - protein, 37 aa, Artificial Sequence
  Non-cyclic GFR-binding peptide
  MOD_RES (2)..(36)..(37): Xaa is C or S
  MOD_RES (14)..(15)..(16)..(17)..(18): Xaa is A or G
  MOD_RES (19)..(20)..(21)..(22): Xaa is A or G or absent
AXSEVTMNEYKFKXXXXXXXXXLYLISIPEMKEPVXX

SEQ ID NO: 31610 - protein, 34 aa, Artificial Sequence
  Non-cyclic GFR-binding peptide
  MOD_RES (1)..(3): Xaa is C or S
XGXRDVVMGRHKRLIIQQKDNYYLMSTASMKTPT

SEQ ID NO: 31611 - protein, 37 aa, Artificial Sequence
  Non-cyclic GFR-binding peptide
  MOD_RES (2)..(34)..(35): Xaa is C or S
GXSEVVMDRHKRLVVNNASDYYLISTASLRTPVXXTP

SEQ ID NO: 31612 - protein, 37 aa, Artificial Sequence
  Non-cyclic GFR-binding peptide
  MOD_RES (2)..(4)..(36)..(37): Xaa is C or S
SXGXRDVVMGRHKRLIIQQKDNYYLMSTASMKTPTXX

SEQ ID NO: 31613 - protein, 37 aa, Artificial Sequence
  Non-cyclic GFR-binding peptide
  MOD_RES (1)..(3)..(34)..(35): Xaa is C or S
XGXEEVIMEYKFKLLVRGNDLYLMSIPETKVPAXXTS

SEQ ID NO: 31614 - protein, 38 aa, Artificial Sequence
  Non-cyclic GFR-binding peptide
  MOD_RES (2)..(4)..(37)..(38): Xaa is C or S
  MOD_RES (15)..(16)..(17)..(18)..(19): Xaa is A or G
  MOD_RES (20)..(21)..(22)..(23): Xaa is A or G or absent
LXGXEEVIMEYKFKXXXXXXXXXLYLMSIPETKVPAXX

SEQ ID NO: 31615 - protein, 33 aa, Artificial Sequence
  Non-cyclic GFR-binding peptide
  MOD_RES (1)..(1): Xaa is C or S
  MOD_RES (12)..(13)..(14)..(15)..(16): Xaa is A or G
  MOD_RES (17)..(18)..(19)..(20): Xaa is A or G or absent
XEEVIMEYKFKXXXXXXXXXLYLMSIPETKVPA

SEQ ID NO: 31616 - protein, 33 aa, Artificial Sequence
  Non-cyclic GFR-binding peptide
  MOD_RES (12)..(13)..(14)..(15)..(16): Xaa is A or G
  MOD_RES (17)..(18)..(19)..(20): Xaa is A or G or absent
SEVVMDEYKFKXXXXXXXXXLYLISIPELRTPV

SEQ ID NO: 31617 - protein, 37 aa, Artificial Sequence
  Non-cyclic GFR-binding peptide
  MOD_RES (1)..(3)..(34)..(35): Xaa is C or S
XKXSRVIMPIKGYVKPKRGVFYLINIPSLAQPVXXPA

SEQ ID NO: 31618 - protein, 36 aa, Artificial Sequence
  Non-cyclic GFR-binding peptide
  MOD_RES (31)..(32): Xaa is C or S
EEVIMEYKFKLLVRGNDLYLMSIPETKVPAXXTSPV

SEQ ID NO: 31619 - protein, 35 aa, Artificial Sequence
  Non-cyclic GFR-binding peptide
  MOD_RES (1)..(33)..(34): Xaa is C or S
XSEVVMDRHKRLVVNNASDYYLISTASLRTPVXXT

SEQ ID NO: 31620 - protein, 36 aa, Artificial Sequence
  Non-cyclic GFR-binding peptide
  MOD_RES (2)..(34)..(35): Xaa is C or S
GXSEVVMDEYKFKVVNNASDLYLISIPELRTPVXXT

SEQ ID NO: 31621 - protein, 31 aa, Artificial Sequence
  Non-cyclic GFR-binding peptide
  MOD_RES (31)..(31): Xaa is C or S
DVVMGRHKRLIIQQKDNYYLMSTASMKTPTX

SEQ ID NO: 31622 - protein, 41 aa, Artificial Sequence
  Non-cyclic GFR-binding peptide
  MOD_RES (2)..(36)..(37): Xaa is C or S
  MOD_RES (14)..(15)..(16)..(17)..(18): Xaa is A or G
  MOD_RES (19)..(20)..(21)..(22): Xaa is A or G or absent
GXRDVVMGRHKRLXXXXXXXXXYYLMSTASMKTPTXXPGAS

SEQ ID NO: 31623 - protein, 37 aa, Artificial Sequence
  Non-cyclic GFR-binding peptide
  MOD_RES (1)..(33)..(34): Xaa is C or S
XSEVVMDRHKRLVVNNASDYYLISTASLRTPVXXTPP

SEQ ID NO: 31624 - protein, 38 aa, Artificial Sequence
  Non-cyclic GFR-binding peptide
  MOD_RES (1)..(33)..(34): Xaa is C or S
XSEVTMNYHYKLVVNKNEDKYLISIPSMKEPVXXPEPI

SEQ ID NO: 31625 - protein, 36 aa, Artificial Sequence
  Non-cyclic GFR-binding peptide
  MOD_RES (33)..(34): Xaa is C or S
  MOD_RES (11)..(12)..(13)..(14)..(15): Xaa is A or G
  MOD_RES (16)..(17)..(18)..(19): Xaa is A or G or absent
EVTMNRHKRLXXXXXXXXXYYLISTASMKEPVXXPE

SEQ ID NO: 31626 - protein, 37 aa, Artificial Sequence
  Non-cyclic GFR-binding peptide
  MOD_RES (1)..(3)..(37): Xaa is C or S
  MOD_RES (15)..(16)..(17)..(18)..(19): Xaa is A or G
  MOD_RES (20)..(21)..(22)..(23): Xaa is A or G or absent
XGXSEVVMDYHYKLXXXXXXXXXKYLISIPSLRTPVX

SEQ ID NO: 31627 - protein, 38 aa, Artificial Sequence
  Non-cyclic GFR-binding peptide
  MOD_RES (2)..(36)..(37): Xaa is C or S
  MOD_RES (14)..(15)..(16)..(17)..(18): Xaa is A or G
  MOD_RES (19)..(20)..(21)..(22): Xaa is A or G or absent
GXRDVVMGYHYKLXXXXXXXXXKYLMSIPSMKTPTXXP

SEQ ID NO: 31628 - protein, 39 aa, Artificial Sequence
  Non-cyclic GFR-binding peptide
  MOD_RES (2)..(4)..(37)..(38): Xaa is C or S
  MOD_RES (15)..(16)..(17)..(18)..(19): Xaa is A or G
  MOD_RES (20)..(21)..(22)..(23): Xaa is A or G or absent
SXKXSKVIMPIKGYXXXXXXXXXFYLINIPSLDQSVXXP

SEQ ID NO: 31629 - protein, 34 aa, Artificial Sequence
  Non-cyclic GFR-binding peptide
  MOD_RES (1)..(33)..(34): Xaa is C or S
XRDVVMGYHYKLIIQQKDNKYLMSIPSMKTPTXX

SEQ ID NO: 31630 - protein, 38 aa, Artificial Sequence
  Non-cyclic GFR-binding peptide
  MOD_RES (2)..(36)..(37): Xaa is C or S
  MOD_RES (14)..(15)..(16)..(17)..(18): Xaa is A or G
  MOD_RES (19)..(20)..(21)..(22): Xaa is A or G or absent
AXSEVTMNYHYKLXXXXXXXXXKYLISIPSMKEPVXXP

SEQ ID NO: 31631 - protein, 39 aa, Artificial Sequence
  Non-cyclic GFR-binding peptide
  MOD_RES (1)..(33)..(34): Xaa is C or S
XSEVTMNEYKFKVVNKNEDLYLISIPEMKEPVXXPEPIG

SEQ ID NO: 31632 - protein, 32 aa, Artificial Sequence
  Non-cyclic GFR-binding peptide
  MOD_RES (31)..(32): Xaa is C or S
EVTMNEYKFKVVNKNEDLYLISIPEMKEPVXX

SEQ ID NO: 31633 - protein, 38 aa, Artificial Sequence
  Non-cyclic GFR-binding peptide
  MOD_RES (33)..(34): Xaa is C or S
  MOD_RES (11)..(12)..(13)..(14)..(15): Xaa is A or G
  MOD_RES (16)..(17)..(18)..(19): Xaa is A or G or absent
DVVMGEYKFKXXXXXXXXXLYLMSIPEMKTPTXXPGAS

SEQ ID NO: 31634 - protein, 36 aa, Artificial Sequence
  Non-cyclic GFR-binding peptide
  MOD_RES (31)..(32): Xaa is C or S
EVTMNRHKRLVVNKNEDYYLISTASMKEPVXXPEPI

SEQ ID NO: 31635 - protein, 39 aa, Artificial Sequence
  Non-cyclic GFR-binding peptide
  MOD_RES (1)..(35)..(36): Xaa is C or S
  MOD_RES (13)..(14)..(15)..(16)..(17): Xaa is A or G
  MOD_RES (18)..(19)..(20)..(21): Xaa is A or G or absent
XRDVVMGRHKRLXXXXXXXXXYYLMSTASMKTPTXXPGA

SEQ ID NO: 31636 - protein, 41 aa, Artificial Sequence
  Non-cyclic GFR-binding peptide
  MOD_RES (2)..(4)..(38)..(39): Xaa is C or S
  MOD_RES (16)..(17)..(18)..(19)..(20): Xaa is A or G
  MOD_RES (21)..(22)..(23)..(24): Xaa is A or G or absent
RXAXSEVTMNEYKFKXXXXXXXXXLYLISIPEMKEPVXXPE

SEQ ID NO: 31637 - protein, 35 aa, Artificial Sequence
  Non-cyclic GFR-binding peptide
  MOD_RES (33)..(34): Xaa is C or S
  MOD_RES (11)..(12)..(13)..(14)..(15): Xaa is A or G
  MOD_RES (16)..(17)..(18)..(19): Xaa is A or G or absent
EVVMDRHKRLXXXXXXXXXYYLISTASLRAPVXXS

SEQ ID NO: 31638 - protein, 40 aa, Artificial Sequence
  Non-cyclic GFR-binding peptide
  MOD_RES (2)..(34)..(35): Xaa is C or S
AXSEVTMNEYKFKVVNKNEDLYLISIPEMKEPVXXPEPIG

SEQ ID NO: 31639 - protein, 41 aa, Artificial Sequence
  Non-cyclic GFR-binding peptide
  MOD_RES (1)..(3)..(35)..(36): Xaa is C or S
XAXSEVTMNEYKFKVVNKNEDLYLISIPEMKEPVXXPEPIG

SEQ ID NO: 31640 - protein, 35 aa, Artificial Sequence
  Non-cyclic GFR-binding peptide
  MOD_RES (1)..(32)..(33): Xaa is C or S
XSRVIMPIKGYVKPKRGVFYLINIPSLAQPVXXPA

SEQ ID NO: 31641 - protein, 37 aa, Artificial Sequence
  Non-cyclic GFR-binding peptide
  MOD_RES (34)..(35): Xaa is C or S
  MOD_RES (12)..(13)..(14)..(15)..(16): Xaa is A or G
  MOD_RES (17)..(18)..(19)..(20): Xaa is A or G or absent
SEVTMNRYKKLXXXXXXXXXFYLISIANMKEPVXXPE

SEQ ID NO: 31642 - protein, 39 aa, Artificial Sequence
  Non-cyclic GFR-binding peptide
  MOD_RES (2)..(34)..(35): Xaa is C or S
GXSEVVMDRHKRLVVNNASDYYLISTASLRTPVXXTPPT

SEQ ID NO: 31643 - protein, 37 aa, Artificial Sequence
  Non-cyclic GFR-binding peptide
  MOD_RES (1)..(34)..(35): Xaa is C or S
  MOD_RES (12)..(13)..(14)..(15)..(16): Xaa is A or G
  MOD_RES (17)..(18)..(19)..(20): Xaa is A or G or absent
XEEVIMYHYKLXXXXXXXXXKYLMSIPSTKVPAXXTS

SEQ ID NO: 31644 - protein, 34 aa, Artificial Sequence
  Non-cyclic GFR-binding peptide
  MOD_RES (32)..(33): Xaa is C or S
RDVVMGEYKFKIIQQKDNLYLMSIPEMKTPTXXP

SEQ ID NO: 31645 - protein, 39 aa, Artificial Sequence
  Non-cyclic GFR-binding peptide
  MOD_RES (1)..(35)..(36): Xaa is C or S
  MOD_RES (13)..(14)..(15)..(16)..(17): Xaa is A or G
  MOD_RES (18)..(19)..(20)..(21): Xaa is A or G or absent
XSEVTMNEYKFKXXXXXXXXXLYLISIPEMKEPVXXPEP

SEQ ID NO: 31646 - protein, 40 aa, Artificial Sequence
  Non-cyclic GFR-binding peptide
  MOD_RES (2)..(4)..(35)..(36): Xaa is C or S
SXKXSKVIMPIKGYIKPTKGIFYLINIPSLDQSVXXPSAS

SEQ ID NO: 31647 - protein, 38 aa, Artificial Sequence
  Non-cyclic GFR-binding peptide
  MOD_RES (2)..(33)..(34): Xaa is C or S
GXEEVIMYHYKLLLVRGNDKYLMSIPSTKVPAXXTSPV

SEQ ID NO: 31648 - protein, 39 aa, Artificial Sequence
  Non-cyclic GFR-binding peptide
  MOD_RES (1)..(33)..(34): Xaa is C or S
XRDVVMGEYKFKIIQQKDNLYLMSIPEMKTPTXXPGASG

SEQ ID NO: 31649 - protein, 40 aa, Artificial Sequence
  Non-cyclic GFR-binding peptide
  MOD_RES (34)..(35): Xaa is C or S
  MOD_RES (12)..(13)..(14)..(15)..(16): Xaa is A or G
  MOD_RES (17)..(18)..(19)..(20): Xaa is A or G or absent
SEVTMNPIKGYXXXXXXXXXFYLINIPSMKEPVXXPEPIG

SEQ ID NO: 31650 - protein, 32 aa, Artificial Sequence
  Non-cyclic GFR-binding peptide
  MOD_RES (32)..(32): Xaa is C or S
ESVAMGRHKRLYTVVGKDYYLISTASLKTPVX

SEQ ID NO: 31651 - protein, 40 aa, Artificial Sequence
  Non-cyclic GFR-binding peptide
  MOD_RES (1)..(3)..(36)..(37): Xaa is C or S
  MOD_RES (14)..(15)..(16)..(17)..(18): Xaa is A or G
  MOD_RES (19)..(20)..(21)..(22): Xaa is A or G or absent
XGXEEVIMEYKFKXXXXXXXXXLYLMSIPETKVPAXXTSP

SEQ ID NO: 31652 - protein, 30 aa, Artificial Sequence
  Non-cyclic GFR-binding peptide
EVTMNPIKGYVVNKNEDFYLINIPSMKEPV

SEQ ID NO: 31653 - protein, 38 aa, Artificial Sequence
  Non-cyclic GFR-binding peptide
  MOD_RES (1)..(33)..(34): Xaa is C or S
XRDVVMGYHYKLIIQQKDNKYLMSIPSMKTPTXXPGAS

SEQ ID NO: 31654 - protein, 39 aa, Artificial Sequence
  Non-cyclic GFR-binding peptide
  MOD_RES (1)..(3)..(35)..(36): Xaa is C or S
XGXSEVVMDEYKFKVVNNASDLYLISIPELRTPVXXTPP

SEQ ID NO: 31655 - protein, 38 aa, Artificial Sequence
  Non-cyclic GFR-binding peptide
  MOD_RES (2)..(4)..(36)..(37): Xaa is C or S
RXGXSEVVMDYHYKLVVNNASDKYLISIPSLRTPVXXT

SEQ ID NO: 31656 - protein, 38 aa, Artificial Sequence
  Non-cyclic GFR-binding peptide
  MOD_RES (1)..(35)..(36): Xaa is C or S
  MOD_RES (13)..(14)..(15)..(16)..(17): Xaa is A or G
  MOD_RES (18)..(19)..(20)..(21): Xaa is A or G or absent
XSEVVMDYHYKLXXXXXXXXXKYLISIPSLRTPVXXTP

SEQ ID NO: 31657 - protein, 35 aa, Artificial Sequence
  Non-cyclic GFR-binding peptide
  MOD_RES (1)..(3)..(34)..(35): Xaa is C or S
XKXSRVIMPIKGYVKPKRGVFYLINIPSLAQPVXX

SEQ ID NO: 31658 - protein, 35 aa, Artificial Sequence
  Non-cyclic GFR-binding peptide
  MOD_RES (2)..(4): Xaa is C or S
RXAXSEVTMNYHYKLVVNKNEDKYLISIPSMKEPV

SEQ ID NO: 31659 - protein, 39 aa, Artificial Sequence
  Non-cyclic GFR-binding peptide
  MOD_RES (1)..(3)..(36)..(37): Xaa is C or S
  MOD_RES (14)..(15)..(16)..(17)..(18): Xaa is A or G
  MOD_RES (19)..(20)..(21)..(22): Xaa is A or G or absent
XGXEEVIMEYKFKXXXXXXXXXLYLMSIPETKVPAXXTS

SEQ ID NO: 31660 - protein, 36 aa, Artificial Sequence
  Non-cyclic GFR-binding peptide
  MOD_RES (1)..(3)..(35)..(36): Xaa is C or S
XGXSEVVMDRHKRLVVNNASDYYLISTASLRTPVXX

SEQ ID NO: 31661 - protein, 36 aa, Artificial Sequence
  Non-cyclic GFR-binding peptide
  MOD_RES (2)..(4)..(36): Xaa is C or S
RXGXSEVVMDEYKFKVVNNASDLYLISIPELRTPVX

SEQ ID NO: 31662 - protein, 39 aa, Artificial Sequence
  Non-cyclic GFR-binding peptide
  MOD_RES (2)..(36)..(37): Xaa is C or S
  MOD_RES (14)..(15)..(16)..(17)..(18): Xaa is A or G
  MOD_RES (19)..(20)..(21)..(22): Xaa is A or G or absent
AXSEVTMNPIKGYXXXXXXXXXFYLINIPSMKEPVXXPE

SEQ ID NO: 31663 - protein, 36 aa, Artificial Sequence
  Non-cyclic GFR-binding peptide
  MOD_RES (1)..(3)..(35)..(36): Xaa is C or S
XAXSEVTMNPIKGYVVNKNEDFYLINIPSMKEPVXX

SEQ ID NO: 31664 - protein, 38 aa, Artificial Sequence
  Non-cyclic GFR-binding peptide
  MOD_RES (2)..(34)..(35): Xaa is C or S
GXRDVVMGEYKFKIIQQKDNLYLMSIPEMKTPTXXPGA

SEQ ID NO: 31665 - protein, 35 aa, Artificial Sequence
  Non-cyclic GFR-binding peptide
  MOD_RES (32)..(33): Xaa is C or S
SEVVMDYHYKLVVNNASDKYLISIPSLRTPVXXTP

SEQ ID NO: 31666 - protein, 38 aa, Artificial Sequence
  Non-cyclic GFR-binding peptide
  MOD_RES (2)..(4)..(38): Xaa is C or S
  MOD_RES (16)..(17)..(18)..(19)..(20): Xaa is A or G
  MOD_RES (21)..(22)..(23)..(24): Xaa is A or G or absent
RXAXSEVTMNRHKRLXXXXXXXXXYYLISTASMKEPVX

SEQ ID NO: 31667 - protein, 36 aa, Artificial Sequence
  Non-cyclic GFR-binding peptide
  MOD_RES (1)..(32)..(33): Xaa is C or S
XEEVIMYHYKLLLVRGNDKYLMSIPSTKVPAXXTSP

SEQ ID NO: 31668 - protein, 35 aa, Artificial Sequence
  Non-cyclic GFR-binding peptide
  MOD_RES (33)..(34): Xaa is C or S
  MOD_RES (11)..(12)..(13)..(14)..(15): Xaa is A or G
  MOD_RES (16)..(17)..(18)..(19): Xaa is A or G or absent
EEVIMRHKRLXXXXXXXXXYYLMSTASTKVPAXXT

SEQ ID NO: 31669 - protein, 37 aa, Artificial Sequence
  Non-cyclic GFR-binding peptide
  MOD_RES (1)..(3)..(37): Xaa is C or S
  MOD_RES (15)..(16)..(17)..(18)..(19): Xaa is A or G
  MOD_RES (20)..(21)..(22)..(23): Xaa is A or G or absent
XAXSEVTMNPIKGYXXXXXXXXXFYLINIPSMKEPVX

SEQ ID NO: 31670 - protein, 41 aa, Artificial Sequence
  Non-cyclic GFR-binding peptide
  MOD_RES (2)..(4)..(38)..(39): Xaa is C or S
  MOD_RES (16)..(17)..(18)..(19)..(20): Xaa is A or G
  MOD_RES (21)..(22)..(23)..(24): Xaa is A or G or absent
RXGXSEVVMDYHYKLXXXXXXXXXKYLISIPSLRTPVXXTP

SEQ ID NO: 31671 - protein, 37 aa, Artificial Sequence
  Non-cyclic GFR-binding peptide
  MOD_RES (2)..(4)..(37): Xaa is C or S
  MOD_RES (15)..(16)..(17)..(18)..(19): Xaa is A or G
  MOD_RES (20)..(21)..(22)..(23): Xaa is A or G or absent
LXGXEEVIMYHYKLXXXXXXXXXKYLMSIPSTKVPAX

SEQ ID NO: 31672 - protein, 31 aa, Artificial Sequence
  Non-cyclic GFR-binding peptide
  MOD_RES (1)..(1): Xaa is C or S
XSRVIMPIKGYVKPKRGVFYLINIPSLAQPV

SEQ ID NO: 31673 - protein, 37 aa, Artificial Sequence
  Non-cyclic GFR-binding peptide
  MOD_RES (2)..(4): Xaa is C or S
  MOD_RES (16)..(17)..(18)..(19)..(20): Xaa is A or G
  MOD_RES (21)..(22)..(23)..(24): Xaa is A or G or absent
RXAXSEVTMNYHYKLXXXXXXXXXKYLISIPSMKEPV

SEQ ID NO: 31674 - protein, 37 aa, Artificial Sequence
  Non-cyclic GFR-binding peptide
  MOD_RES (2)..(34)..(35): Xaa is C or S
GXRDVVMGRHKRLIIQQKDNYYLMSTASMKTPTXXPG

SEQ ID NO: 31675 - protein, 36 aa, Artificial Sequence
  Non-cyclic GFR-binding peptide
  MOD_RES (1)..(35)..(36): Xaa is C or S
  MOD_RES (13)..(14)..(15)..(16)..(17): Xaa is A or G
  MOD_RES (18)..(19)..(20)..(21): Xaa is A or G or absent
XRDVVMGEYKFKXXXXXXXXXLYLMSIPEMKTPTXX

SEQ ID NO: 31676 - protein, 38 aa, Artificial Sequence
  Non-cyclic GFR-binding peptide
  MOD_RES (1)..(3)..(35)..(36): Xaa is C or S
XAXSEVTMNEYKFKVVNKNEDLYLISIPEMKEPVXXPE

SEQ ID NO: 31677 - protein, 39 aa, Artificial Sequence
  Non-cyclic GFR-binding peptide
  MOD_RES (2)..(4)..(38)..(39): Xaa is C or S
  MOD_RES (16)..(17)..(18)..(19)..(20): Xaa is A or G
  MOD_RES (21)..(22)..(23)..(24): Xaa is A or G or absent
RXAXSEVTMNRYKKLXXXXXXXXXFYLISIANMKEPVXX

SEQ ID NO: 31678 - protein, 40 aa, Artificial Sequence
  Non-cyclic GFR-binding peptide
  MOD_RES (1)..(35)..(36): Xaa is C or S
  MOD_RES (13)..(14)..(15)..(16)..(17): Xaa is A or G
  MOD_RES (18)..(19)..(20)..(21): Xaa is A or G or absent
XSEVVMDEYKFKXXXXXXXXXLYLISIPELRTPVXXTPPT

SEQ ID NO: 31679 - protein, 37 aa, Artificial Sequence
  Non-cyclic GFR-binding peptide
  MOD_RES (1)..(35)..(36): Xaa is C or S
  MOD_RES (13)..(14)..(15)..(16)..(17): Xaa is A or G
  MOD_RES (18)..(19)..(20)..(21): Xaa is A or G or absent
XSEVTMNEYKFKXXXXXXXXXLYLISIPEMKEPVXXP

SEQ ID NO: 31680 - protein, 32 aa, Artificial Sequence
  Non-cyclic GFR-binding peptide
  MOD_RES (11)..(12)..(13)..(14)..(15): Xaa is A or G
  MOD_RES (16)..(17)..(18)..(19): Xaa is A or G or absent
EVVMDYHYKLXXXXXXXXXKYLISIPSLRTPV

SEQ ID NO: 31681 - protein, 32 aa, Artificial Sequence
  Non-cyclic GFR-binding peptide
  MOD_RES (11)..(12)..(13)..(14)..(15): Xaa is A or G
  MOD_RES (16)..(17)..(18)..(19): Xaa is A or G or absent
EVVMDEYKFKXXXXXXXXXLYLISIPELRTPV

SEQ ID NO: 31682 - protein, 38 aa, Artificial Sequence
  Non-cyclic GFR-binding peptide
  MOD_RES (1)..(35)..(36): Xaa is C or S
  MOD_RES (13)..(14)..(15)..(16)..(17): Xaa is A or G
  MOD_RES (18)..(19)..(20)..(21): Xaa is A or G or absent
XSEVTMNPIKGYXXXXXXXXXFYLINIPSMKEPVXXPE

SEQ ID NO: 31683 - protein, 35 aa, Artificial Sequence
  Non-cyclic GFR-binding peptide
  MOD_RES (1)..(33)..(34): Xaa is C or S
XSEVVMDEYKFKVVNNASDLYLISIPELRTPVXXT

SEQ ID NO: 31684 - protein, 36 aa, Artificial Sequence
  Non-cyclic GFR-binding peptide
  MOD_RES (2)..(35)..(36): Xaa is C or S
  MOD_RES (13)..(14)..(15)..(16)..(17): Xaa is A or G
  MOD_RES (18)..(19)..(20)..(21): Xaa is A or G or absent
KXSKVVMPIKGYXXXXXXXXXFYLINIPSLDQPVXX

SEQ ID NO: 31685 - protein, 37 aa, Artificial Sequence
  Non-cyclic GFR-binding peptide
  MOD_RES (2)..(36)..(37): Xaa is C or S
  MOD_RES (14)..(15)..(16)..(17)..(18): Xaa is A or G
  MOD_RES (19)..(20)..(21)..(22): Xaa is A or G or absent
GXRDVVMGYHYKLXXXXXXXXXKYLMSIPSMKTPTXX

SEQ ID NO: 31686 - protein, 37 aa, Artificial Sequence
  Non-cyclic GFR-binding peptide
  MOD_RES (31)..(32): Xaa is C or S
RVVMNEYKFKIVNSSDDLYLVSIPELKTPAXXPKPVH

SEQ ID NO: 31687 - protein, 40 aa, Artificial Sequence
  Non-cyclic GFR-binding peptide
  MOD_RES (2)..(34)..(35): Xaa is C or S
GXSRVVMNYHYKLIVNSSDDKYLVSIPSLKTPAXXPKPVH

SEQ ID NO: 31688 - protein, 33 aa, Artificial Sequence
  Non-cyclic GFR-binding peptide
  MOD_RES (1)..(3): Xaa is C or S
XGXEEVIMYHYKLLLVRGNDKYLMSIPSTKVPA

SEQ ID NO: 31689 - protein, 39 aa, Artificial Sequence
  Non-cyclic GFR-binding peptide
  MOD_RES (34)..(35): Xaa is C or S
  MOD_RES (12)..(13)..(14)..(15)..(16): Xaa is A or G
  MOD_RES (17)..(18)..(19)..(20): Xaa is A or G or absent
SEVTMNRHKRLXXXXXXXXXYYLISTASMKEPVXXPEPI

SEQ ID NO: 31690 - protein, 35 aa, Artificial Sequence
  Non-cyclic GFR-binding peptide
  MOD_RES (2)..(35): Xaa is C or S
  MOD_RES (13)..(14)..(15)..(16)..(17): Xaa is A or G
  MOD_RES (18)..(19)..(20)..(21): Xaa is A or G or absent
KXSKVVMPIKGYXXXXXXXXXFYLINIPSLDQPVX

SEQ ID NO: 31691 - protein, 38 aa, Artificial Sequence
  Non-cyclic GFR-binding peptide
  MOD_RES (2)..(4)..(38): Xaa is C or S
  MOD_RES (16)..(17)..(18)..(19)..(20): Xaa is A or G
  MOD_RES (21)..(22)..(23)..(24): Xaa is A or G or absent
SXGXRDVVMGYHYKLXXXXXXXXXKYLMSIPSMKTPTX

SEQ ID NO: 31692 - protein, 37 aa, Artificial Sequence
  Non-cyclic GFR-binding peptide
  MOD_RES (32)..(33): Xaa is C or S
RDVVMGRHKRLIIQQKDNYYLMSTASMKTPTXXPGAS

SEQ ID NO: 31693 - protein, 37 aa, Artificial Sequence
  Non-cyclic GFR-binding peptide
  MOD_RES (34)..(35): Xaa is C or S
  MOD_RES (12)..(13)..(14)..(15)..(16): Xaa is A or G
  MOD_RES (17)..(18)..(19)..(20): Xaa is A or G or absent
RDVVMGRHKRLXXXXXXXXXYYLMSTASMKTPTXXPG

SEQ ID NO: 31694 - protein, 33 aa, Artificial Sequence
  Non-cyclic GFR-binding peptide
  MOD_RES (33)..(33): Xaa is C or S
  MOD_RES (11)..(12)..(13)..(14)..(15): Xaa is A or G
  MOD_RES (16)..(17)..(18)..(19): Xaa is A or G or absent
SKVIMPIKGYXXXXXXXXXFYLINIPSLDQSVX

SEQ ID NO: 31695 - protein, 34 aa, Artificial Sequence
  Non-cyclic GFR-binding peptide
  MOD_RES (1)..(34): Xaa is C or S
  MOD_RES (12)..(13)..(14)..(15)..(16): Xaa is A or G
  MOD_RES (17)..(18)..(19)..(20): Xaa is A or G or absent
XSRVIMPIKGYXXXXXXXXXFYLINIPSLAQPVX

SEQ ID NO: 31696 - protein, 37 aa, Artificial Sequence
  Non-cyclic GFR-binding peptide
  MOD_RES (2)..(36)..(37): Xaa is C or S
  MOD_RES (14)..(15)..(16)..(17)..(18): Xaa is A or G
  MOD_RES (19)..(20)..(21)..(22): Xaa is A or G or absent
GXRDVVMGEYKFKXXXXXXXXXLYLMSIPEMKTPTXX

SEQ ID NO: 31697 - protein, 36 aa, Artificial Sequence
  Non-cyclic GFR-binding peptide
  MOD_RES (1)..(3)..(34)..(35): Xaa is C or S
XGXEEVIMRHKRLLLVRGNDYYLMSTASTKVPAXXT

SEQ ID NO: 31698 - protein, 37 aa, Artificial Sequence
  Non-cyclic GFR-binding peptide
  MOD_RES (32)..(33): Xaa is C or S
SEVTMNPIKGYVVNKNEDFYLINIPSMKEPVXXPEPI

SEQ ID NO: 31699 - protein, 34 aa, Artificial Sequence
  Non-cyclic GFR-binding peptide
  MOD_RES (1)..(3): Xaa is C or S
XGXRDVVMGYHYKLIIQQKDNKYLMSIPSMKTPT

SEQ ID NO: 31700 - protein, 41 aa, Artificial Sequence
  Non-cyclic GFR-binding peptide
  MOD_RES (2)..(36)..(37): Xaa is C or S
  MOD_RES (14)..(15)..(16)..(17)..(18): Xaa is A or G
  MOD_RES (19)..(20)..(21)..(22): Xaa is A or G or absent
GXSEVVMDYHYKLXXXXXXXXXKYLISIPSLRTPVXXTPPT

SEQ ID NO: 31701 - protein, 41 aa, Artificial Sequence
  Non-cyclic GFR-binding peptide
  MOD_RES (1)..(3)..(35)..(36): Xaa is C or S
XGXESVAMGRHKRLYTVVGKDYYLISTASLKTPVXXAKSAK

SEQ ID NO: 31702 - protein, 38 aa, Artificial Sequence
  Non-cyclic GFR-binding peptide
  MOD_RES (1)..(35)..(36): Xaa is C or S
  MOD_RES (13)..(14)..(15)..(16)..(17): Xaa is A or G
  MOD_RES (18)..(19)..(20)..(21): Xaa is A or G or absent
XRDVVMGEYKFKXXXXXXXXXLYLMSIPEMKTPTXXPG

SEQ ID NO: 31703 - protein, 41 aa, Artificial Sequence
  Non-cyclic GFR-binding peptide
  MOD_RES (1)..(3)..(35)..(36): Xaa is C or S
XGXSEVVMDYHYKLVVNNASDKYLISIPSLRTPVXXTPPTS

SEQ ID NO: 31704 - protein, 39 aa, Artificial Sequence
  Non-cyclic GFR-binding peptide
  MOD_RES (1)..(3)..(37)..(38): Xaa is C or S
  MOD_RES (15)..(16)..(17)..(18)..(19): Xaa is A or G
  MOD_RES (20)..(21)..(22)..(23): Xaa is A or G or absent
XGXRDVVMGEYKFKXXXXXXXXXLYLMSIPEMKTPTXXP

SEQ ID NO: 31705 - protein, 37 aa, Artificial Sequence
  Non-cyclic GFR-binding peptide
  MOD_RES (32)..(33): Xaa is C or S
RDVVMGEYKFKIIQQKDNLYLMSIPEMKTPTXXPGAS

SEQ ID NO: 31706 - protein, 36 aa, Artificial Sequence
  Non-cyclic GFR-binding peptide
  MOD_RES (33)..(34): Xaa is C or S
  MOD_RES (11)..(12)..(13)..(14)..(15): Xaa is A or G
  MOD_RES (16)..(17)..(18)..(19): Xaa is A or G or absent
EEVIMEYKFKXXXXXXXXXLYLMSIPETKVPAXXTS

SEQ ID NO: 31707 - protein, 38 aa, Artificial Sequence
  Non-cyclic GFR-binding peptide
  MOD_RES (1)..(33)..(34): Xaa is C or S
XSEVVMDEYKFKVVNNASDLYLISIPELRTPVXXTPPT

SEQ ID NO: 31708 - protein, 38 aa, Artificial Sequence
  Non-cyclic GFR-binding peptide
  MOD_RES (1)..(35)..(36): Xaa is C or S
  MOD_RES (13)..(14)..(15)..(16)..(17): Xaa is A or G
  MOD_RES (18)..(19)..(20)..(21): Xaa is A or G or absent
XAEVVMDRHKRLXXXXXXXXXYYLISTASLRAPVXXSA

SEQ ID NO: 31709 - protein, 35 aa, Artificial Sequence
  Non-cyclic GFR-binding peptide
  MOD_RES (1)..(34)..(35): Xaa is C or S
  MOD_RES (12)..(13)..(14)..(15)..(16): Xaa is A or G
  MOD_RES (17)..(18)..(19)..(20): Xaa is A or G or absent
XSKVIMPIKGYXXXXXXXXXFYLINIPSLDQSVXX

SEQ ID NO: 31710 - protein, 36 aa, Artificial Sequence
  Non-cyclic GFR-binding peptide
  MOD_RES (31)..(32): Xaa is C or S
EEVIMRHKRLLLVRGNDYYLMSTASTKVPAXXTSPV

SEQ ID NO: 31711 - protein, 30 aa, Artificial Sequence
  Non-cyclic GFR-binding peptide
DVVMGEYKFKIIQQKDNLYLMSIPEMKTPT

SEQ ID NO: 31712 - protein, 36 aa, Artificial Sequence
  Non-cyclic GFR-binding peptide
  MOD_RES (32)..(33): Xaa is C or S
SEVVMDEYKFKVVNNASDLYLISIPELRTPVXXTPP

SEQ ID NO: 31713 - protein, 31 aa, Artificial Sequence
  Non-cyclic GFR-binding peptide
  MOD_RES (31)..(31): Xaa is C or S
EVTMNPIKGYVVNKNEDFYLINIPSMKEPVX

SEQ ID NO: 31714 - protein, 37 aa, Artificial Sequence
  Non-cyclic GFR-binding peptide
  MOD_RES (1)..(35)..(36): Xaa is C or S
  MOD_RES (13)..(14)..(15)..(16)..(17): Xaa is A or G
  MOD_RES (18)..(19)..(20)..(21): Xaa is A or G or absent
XSEVVMDYHYKLXXXXXXXXXKYLISIPSLRTPVXXT

SEQ ID NO: 31715 - protein, 32 aa, Artificial Sequence
  Non-cyclic GFR-binding peptide
  MOD_RES (11)..(12)..(13)..(14)..(15): Xaa is A or G
  MOD_RES (16)..(17)..(18)..(19): Xaa is A or G or absent
EVVMDRHKRLXXXXXXXXXYYLISTASLRTPV

SEQ ID NO: 31716 - protein, 36 aa, Artificial Sequence
  Non-cyclic GFR-binding peptide
  MOD_RES (1)..(32)..(33): Xaa is C or S
XEEVIMEYKFKLLVRGNDLYLMSIPETKVPAXXTSP

SEQ ID NO: 31717 - protein, 38 aa, Artificial Sequence
  Non-cyclic GFR-binding peptide
  MOD_RES (34)..(35): Xaa is C or S
  MOD_RES (12)..(13)..(14)..(15)..(16): Xaa is A or G
  MOD_RES (17)..(18)..(19)..(20): Xaa is A or G or absent
AEVVMDRHKRLXXXXXXXXXYYLISTASLRAPVXXSAP

SEQ ID NO: 31718 - protein, 35 aa, Artificial Sequence
  Non-cyclic GFR-binding peptide
  MOD_RES (1)..(3)..(35): Xaa is C or S
XGXAEVVMDRHKRLVVNNAADYYLISTASLRAPVX

SEQ ID NO: 31719 - protein, 35 aa, Artificial Sequence
  Non-cyclic GFR-binding peptide
  MOD_RES (1)..(3)..(35): Xaa is C or S
XAXSEVTMNEYKFKVVNKNEDLYLISIPEMKEPVX

SEQ ID NO: 31720 - protein, 35 aa, Artificial Sequence
  Non-cyclic GFR-binding peptide
  MOD_RES (33)..(34): Xaa is C or S
  MOD_RES (11)..(12)..(13)..(14)..(15): Xaa is A or G
  MOD_RES (16)..(17)..(18)..(19): Xaa is A or G or absent
EEVIMEYKFKXXXXXXXXXLYLMSIPETKVPAXXT

SEQ ID NO: 31721 - protein, 35 aa, Artificial Sequence
  Non-cyclic GFR-binding peptide
  MOD_RES (1)..(35): Xaa is C or S
  MOD_RES (13)..(14)..(15)..(16)..(17): Xaa is A or G
  MOD_RES (18)..(19)..(20)..(21): Xaa is A or G or absent
XRDVVMGEYKFKXXXXXXXXXLYLMSIPEMKTPTX

SEQ ID NO: 31722 - protein, 41 aa, Artificial Sequence
  Non-cyclic GFR-binding peptide
  MOD_RES (1)..(35)..(36): Xaa is C or S
  MOD_RES (13)..(14)..(15)..(16)..(17): Xaa is A or G
  MOD_RES (18)..(19)..(20)..(21): Xaa is A or G or absent
XSEVTMNYHYKLXXXXXXXXXKYLISIPSMKEPVXXPEPIG

SEQ ID NO: 31723 - protein, 36 aa, Artificial Sequence
  Non-cyclic GFR-binding peptide
  MOD_RES (1)..(3): Xaa is C or S
  MOD_RES (15)..(16)..(17)..(18)..(19): Xaa is A or G
  MOD_RES (20)..(21)..(22)..(23): Xaa is A or G or absent
XAXSEVTMNEYKFKXXXXXXXXXLYLISIPEMKEPV

SEQ ID NO: 31724 - protein, 41 aa, Artificial Sequence
  Non-cyclic GFR-binding peptide
  MOD_RES (1)..(3)..(37)..(38): Xaa is C or S
  MOD_RES (15)..(16)..(17)..(18)..(19): Xaa is A or G
  MOD_RES (20)..(21)..(22)..(23): Xaa is A or G or absent
XGXSEVVMDRHKRLXXXXXXXXXYYLISTASLRTPVXXTPP

SEQ ID NO: 31725 - protein, 35 aa, Artificial Sequence
  Non-cyclic GFR-binding peptide
  MOD_RES (1)..(3): Xaa is C or S
  MOD_RES (14)..(15)..(16)..(17)..(18): Xaa is A or G
  MOD_RES (19)..(20)..(21)..(22): Xaa is A or G or absent
XKXSRVIMPIKGYXXXXXXXXXFYLINIPSLAQPV

SEQ ID NO: 31726 - protein, 40 aa, Artificial Sequence
  Non-cyclic GFR-binding peptide
  MOD_RES (2)..(4)..(36)..(37): Xaa is C or S
RXAXSEVTMNYHYKLVVNKNEDKYLISIPSMKEPVXXPEP

SEQ ID NO: 31727 - protein, 36 aa, Artificial Sequence
  Non-cyclic GFR-binding peptide
  MOD_RES (2)..(36): Xaa is C or S
  MOD_RES (14)..(15)..(16)..(17)..(18): Xaa is A or G
  MOD_RES (19)..(20)..(21)..(22): Xaa is A or G or absent
GXRDVVMGRHKRLXXXXXXXXXYYLMSTASMKTPTX

SEQ ID NO: 31728 - protein, 42 aa, Artificial Sequence
  Non-cyclic GFR-binding peptide
  MOD_RES (1)..(3)..(37)..(38): Xaa is C or S
  MOD_RES (15)..(16)..(17)..(18)..(19): Xaa is A or G
  MOD_RES (20)..(21)..(22)..(23): Xaa is A or G or absent
XAXSEVTMNEYKFKXXXXXXXXXLYLISIPEMKEPVXXPEPI

SEQ ID NO: 31729 - protein, 37 aa, Artificial Sequence
  Non-cyclic GFR-binding peptide
  MOD_RES (2)..(4): Xaa is C or S
  MOD_RES (16)..(17)..(18)..(19)..(20): Xaa is A or G
  MOD_RES (21)..(22)..(23)..(24): Xaa is A or G or absent
SXGXRDVVMGRHKRLXXXXXXXXXYYLMSTASMKTPT

SEQ ID NO: 31730 - protein, 39 aa, Artificial Sequence
  Non-cyclic GFR-binding peptide
  MOD_RES (2)..(4)..(37)..(38): Xaa is C or S
  MOD_RES (15)..(16)..(17)..(18)..(19): Xaa is A or G
  MOD_RES (20)..(21)..(22)..(23): Xaa is A or G or absent
LXGXEEVIMRHKRLXXXXXXXXXYYLMSTASTKVPAXXT

SEQ ID NO: 31731 - protein, 39 aa, Artificial Sequence
  Non-cyclic GFR-binding peptide
  MOD_RES (1)..(35)..(36): Xaa is C or S
  MOD_RES (13)..(14)..(15)..(16)..(17): Xaa is A or G
  MOD_RES (18)..(19)..(20)..(21): Xaa is A or G or absent
XRDVVMGYHYKLXXXXXXXXXKYLMSIPSMKTPTXXPGA

SEQ ID NO: 31732 - protein, 37 aa, Artificial Sequence
  Non-cyclic GFR-binding peptide
  MOD_RES (2)..(4): Xaa is C or S
  MOD_RES (16)..(17)..(18)..(19)..(20): Xaa is A or G
  MOD_RES (21)..(22)..(23)..(24): Xaa is A or G or absent
RXGXAEVVMDRHKRLXXXXXXXXXYYLISTASLRAPV

SEQ ID NO: 31733 - protein, 34 aa, Artificial Sequence
  Non-cyclic GFR-binding peptide
  MOD_RES (33)..(34): Xaa is C or S
  MOD_RES (11)..(12)..(13)..(14)..(15): Xaa is A or G
  MOD_RES (16)..(17)..(18)..(19): Xaa is A or G or absent
DVVMGEYKFKXXXXXXXXXLYLMSIPEMKTPTXX

SEQ ID NO: 31734 - protein, 35 aa, Artificial Sequence
  Non-cyclic GFR-binding peptide
  MOD_RES (2)..(34)..(35): Xaa is C or S
GXRDVVMGYHYKLIIQQKDNKYLMSIPSMKTPTXX

SEQ ID NO: 31735 - protein, 43 aa, Artificial Sequence
  Non-cyclic GFR-binding peptide
  MOD_RES (1)..(3)..(37)..(38): Xaa is C or S
  MOD_RES (15)..(16)..(17)..(18)..(19): Xaa is A or G
  MOD_RES (20)..(21)..(22)..(23): Xaa is A or G or absent
XGXSRVVMNRHKRLXXXXXXXXXYYLVSTASLKTPAXXPKPVH

SEQ ID NO: 31736 - protein, 42 aa, Artificial Sequence
  Non-cyclic GFR-binding peptide
  MOD_RES (2)..(4)..(36)..(37): Xaa is C or S
HXGXSRVVMNRHKRLIVNSSDDYYLVSTASLKTPAXXPKPVH

SEQ ID NO: 31737 - protein, 34 aa, Artificial Sequence
  Non-cyclic GFR-binding peptide
  MOD_RES (1)..(1): Xaa is C or S
  MOD_RES (13)..(14)..(15)..(16)..(17): Xaa is A or G
  MOD_RES (18)..(19)..(20)..(21): Xaa is A or G or absent
XRDVVMGEYKFKXXXXXXXXXLYLMSIPEMKTPT

SEQ ID NO: 31738 - protein, 35 aa, Artificial Sequence
  Non-cyclic GFR-binding peptide
  MOD_RES (2)..(33)..(34): Xaa is C or S
GXEEVIMYHYKLLLVRGNDKYLMSIPSTKVPAXXT

SEQ ID NO: 31739 - protein, 34 aa, Artificial Sequence
  Non-cyclic GFR-binding peptide
  MOD_RES (32)..(33): Xaa is C or S
RDVVMGRHKRLIIQQKDNYYLMSTASMKTPTXXP

SEQ ID NO: 31740 - protein, 36 aa, Artificial Sequence
  Non-cyclic GFR-binding peptide
  MOD_RES (31)..(32): Xaa is C or S
EEVIMYHYKLLLVRGNDKYLMSIPSTKVPAXXTSPV

SEQ ID NO: 31741 - protein, 39 aa, Artificial Sequence
  Non-cyclic GFR-binding peptide
  MOD_RES (2)..(36)..(37): Xaa is C or S
  MOD_RES (14)..(15)..(16)..(17)..(18): Xaa is A or G
  MOD_RES (19)..(20)..(21)..(22): Xaa is A or G or absent
AXSEVTMNRHKRLXXXXXXXXXYYLISTASMKEPVXXPE

SEQ ID NO: 31742 - protein, 41 aa, Artificial Sequence
  Non-cyclic GFR-binding peptide
  MOD_RES (1)..(35)..(36): Xaa is C or S
  MOD_RES (13)..(14)..(15)..(16)..(17): Xaa is A or G
  MOD_RES (18)..(19)..(20)..(21): Xaa is A or G or absent
XSRVVMNRHKRLXXXXXXXXXYYLVSTASLKTPAXXPKPVH

SEQ ID NO: 31743 - protein, 34 aa, Artificial Sequence
  Non-cyclic GFR-binding peptide
  MOD_RES (2)..(34): Xaa is C or S
AXSEVTMNPIKGYVVNKNEDFYLINIPSMKEPVX

SEQ ID NO: 31744 - protein, 32 aa, Artificial Sequence
  Non-cyclic GFR-binding peptide
  MOD_RES (11)..(12)..(13)..(14)..(15): Xaa is A or G
  MOD_RES (16)..(17)..(18)..(19): Xaa is A or G or absent
SKVVMPIKGYXXXXXXXXXFYLINIPSLDQPV

SEQ ID NO: 31745 - protein, 38 aa, Artificial Sequence
  Non-cyclic GFR-binding peptide
  MOD_RES (2)..(4)..(35)..(36): Xaa is C or S
SXKXSKVVMPIKGYVKPTRGVFYLINIPSLDQPVXXPS

SEQ ID NO: 31746 - protein, 37 aa, Artificial Sequence
  Non-cyclic GFR-binding peptide
  MOD_RES (1)..(34)..(35): Xaa is C or S
  MOD_RES (12)..(13)..(14)..(15)..(16): Xaa is A or G
  MOD_RES (17)..(18)..(19)..(20): Xaa is A or G or absent
XSKVVMPIKGYXXXXXXXXXFYLINIPSLDQPVXXPS

SEQ ID NO: 31747 - protein, 40 aa, Artificial Sequence
  Non-cyclic GFR-binding peptide
  MOD_RES (1)..(34)..(35): Xaa is C or S
  MOD_RES (12)..(13)..(14)..(15)..(16): Xaa is A or G
  MOD_RES (17)..(18)..(19)..(20): Xaa is A or G or absent
XEEVIMRHKRLXXXXXXXXXYYLMSTASTKVPAXXTSPVR

SEQ ID NO: 31748 - protein, 38 aa, Artificial Sequence
  Non-cyclic GFR-binding peptide
  MOD_RES (2)..(34)..(35): Xaa is C or S
AXSEVTMNRHKRLVVNKNEDYYLISTASMKEPVXXPEP

SEQ ID NO: 31749 - protein, 35 aa, Artificial Sequence
  Non-cyclic GFR-binding peptide
  MOD_RES (33)..(34): Xaa is C or S
  MOD_RES (11)..(12)..(13)..(14)..(15): Xaa is A or G
  MOD_RES (16)..(17)..(18)..(19): Xaa is A or G or absent
EEVIMYHYKLXXXXXXXXXKYLMSIPSTKVPAXXT

SEQ ID NO: 31750 - protein, 38 aa, Artificial Sequence
  Non-cyclic GFR-binding peptide
  MOD_RES (2)..(36)..(37): Xaa is C or S
  MOD_RES (14)..(15)..(16)..(17)..(18): Xaa is A or G
  MOD_RES (19)..(20)..(21)..(22): Xaa is A or G or absent
GXRDVVMGEYKFKXXXXXXXXXLYLMSIPEMKTPTXXP

SEQ ID NO: 31751 - protein, 37 aa, Artificial Sequence
  Non-cyclic GFR-binding peptide
  MOD_RES (2)..(4): Xaa is C or S
  MOD_RES (16)..(17)..(18)..(19)..(20): Xaa is A or G
  MOD_RES (21)..(22)..(23)..(24): Xaa is A or G or absent
SXGXRDVVMGEYKFKXXXXXXXXXLYLMSIPEMKTPT

SEQ ID NO: 31752 - protein, 40 aa, Artificial Sequence
  Non-cyclic GFR-binding peptide
  MOD_RES (2)..(4)..(36)..(37): Xaa is C or S
RXGXESVAMGRHKRLYTVVGKDYYLISTASLKTPVXXAKS

SEQ ID NO: 31753 - protein, 37 aa, Artificial Sequence
  Non-cyclic GFR-binding peptide
  MOD_RES (1)..(3)..(37): Xaa is C or S
  MOD_RES (15)..(16)..(17)..(18)..(19): Xaa is A or G
  MOD_RES (20)..(21)..(22)..(23): Xaa is A or G or absent
XGXRDVVMGEYKFKXXXXXXXXXLYLMSIPEMKTPTX

SEQ ID NO: 31754 - protein, 35 aa, Artificial Sequence
  Non-cyclic GFR-binding peptide
  MOD_RES (1)..(3)..(35): Xaa is C or S
XGXSEVVMDYHYKLVVNNASDKYLISIPSLRTPVX

SEQ ID NO: 31755 - protein, 37 aa, Artificial Sequence
  Non-cyclic GFR-binding peptide
  MOD_RES (31)..(32): Xaa is C or S
DVVMGEYKFKIIQQKDNLYLMSIPEMKTPTXXPGASG

SEQ ID NO: 31756 - protein, 30 aa, Artificial Sequence
  Non-cyclic GFR-binding peptide
EVTMNYHYKLVVNKNEDKYLISIPSMKEPV

SEQ ID NO: 31757 - protein, 35 aa, Artificial Sequence
  Non-cyclic GFR-binding peptide
  MOD_RES (1)..(3)..(34)..(35): Xaa is C or S
XGXEEVIMYHYKLLLVRGNDKYLMSIPSTKVPAXX

SEQ ID NO: 31758 - protein, 38 aa, Artificial Sequence
  Non-cyclic GFR-binding peptide
  MOD_RES (2)..(36)..(37): Xaa is C or S
  MOD_RES (14)..(15)..(16)..(17)..(18): Xaa is A or G
  MOD_RES (19)..(20)..(21)..(22): Xaa is A or G or absent
GXAEVVMDRHKRLXXXXXXXXXYYLISTASLRAPVXXS

SEQ ID NO: 31759 - protein, 34 aa, Artificial Sequence
  Non-cyclic GFR-binding peptide
  MOD_RES (1)..(33)..(34): Xaa is C or S
XSEVVMDYHYKLVVNNASDKYLISIPSLRTPVXX

SEQ ID NO: 31760 - protein, 35 aa, Artificial Sequence
  Non-cyclic GFR-binding peptide
  MOD_RES (2)..(2): Xaa is C or S
  MOD_RES (14)..(15)..(16)..(17)..(18): Xaa is A or G
  MOD_RES (19)..(20)..(21)..(22): Xaa is A or G or absent
AXSEVTMNRYKKLXXXXXXXXXFYLISIANMKEPV

SEQ ID NO: 31761 - protein, 33 aa, Artificial Sequence
  Non-cyclic GFR-binding peptide
  MOD_RES (12)..(13)..(14)..(15)..(16): Xaa is A or G
  MOD_RES (17)..(18)..(19)..(20): Xaa is A or G or absent
RDVVMGRHKRLXXXXXXXXXYYLMSTASMKTPT

SEQ ID NO: 31762 - protein, 37 aa, Artificial Sequence
  Non-cyclic GFR-binding peptide
  MOD_RES (2)..(36)..(37): Xaa is C or S
  MOD_RES (14)..(15)..(16)..(17)..(18): Xaa is A or G
  MOD_RES (19)..(20)..(21)..(22): Xaa is A or G or absent
AXSEVTMNYHYKLXXXXXXXXXKYLISIPSMKEPVXX

SEQ ID NO: 31763 - protein, 39 aa, Artificial Sequence
  Non-cyclic GFR-binding peptide
  MOD_RES (1)..(3)..(37)..(38): Xaa is C or S
  MOD_RES (15)..(16)..(17)..(18)..(19): Xaa is A or G
  MOD_RES (20)..(21)..(22)..(23): Xaa is A or G or absent
XGXSEVVMDRHKRLXXXXXXXXXYYLISTASLRTPVXXT

SEQ ID NO: 31764 - protein, 38 aa, Artificial Sequence
  Non-cyclic GFR-binding peptide
  MOD_RES (2)..(4)..(36)..(37): Xaa is C or S
RXAXSEVTMNPIKGYVVNKNEDFYLINIPSMKEPVXXP

SEQ ID NO: 31765 - protein, 38 aa, Artificial Sequence
  Non-cyclic GFR-binding peptide
  MOD_RES (2)..(34)..(35): Xaa is C or S
GXSEVVMDRHKRLVVNNASDYYLISTASLRTPVXXTPP

SEQ ID NO: 31766 - protein, 41 aa, Artificial Sequence
  Non-cyclic GFR-binding peptide
  MOD_RES (2)..(36)..(37): Xaa is C or S
  MOD_RES (14)..(15)..(16)..(17)..(18): Xaa is A or G
  MOD_RES (19)..(20)..(21)..(22): Xaa is A or G or absent
GXSEVVMDEYKFKXXXXXXXXXLYLISIPELRTPVXXTPPT

SEQ ID NO: 31767 - protein, 40 aa, Artificial Sequence
  Non-cyclic GFR-binding peptide
  MOD_RES (1)..(35)..(36): Xaa is C or S
  MOD_RES (13)..(14)..(15)..(16)..(17): Xaa is A or G
  MOD_RES (18)..(19)..(20)..(21): Xaa is A or G or absent
XSEVTMNPIKGYXXXXXXXXXFYLINIPSMKEPVXXPEPI

SEQ ID NO: 31768 - protein, 31 aa, Artificial Sequence
  Non-cyclic GFR-binding peptide
RDVVMGRHKRLIIQQKDNYYLMSTASMKTPT

SEQ ID NO: 31769 - protein, 38 aa, Artificial Sequence
  Non-cyclic GFR-binding peptide
  MOD_RES (2)..(36)..(37): Xaa is C or S
  MOD_RES (14)..(15)..(16)..(17)..(18): Xaa is A or G
  MOD_RES (19)..(20)..(21)..(22): Xaa is A or G or absent
AXSEVTMNEYKFKXXXXXXXXXLYLISIPEMKEPVXXP

SEQ ID NO: 31770 - protein, 38 aa, Artificial Sequence
  Non-cyclic GFR-binding peptide
  MOD_RES (2)..(35)..(36): Xaa is C or S
  MOD_RES (13)..(14)..(15)..(16)..(17): Xaa is A or G
  MOD_RES (18)..(19)..(20)..(21): Xaa is A or G or absent
GXEEVIMYHYKLXXXXXXXXXKYLMSIPSTKVPAXXTS

SEQ ID NO: 31771 - protein, 37 aa, Artificial Sequence
  Non-cyclic GFR-binding peptide
  MOD_RES (1)..(33)..(34): Xaa is C or S
XSEVVMDEYKFKVVNNASDLYLISIPELRTPVXXTPP

SEQ ID NO: 31772 - protein, 36 aa, Artificial Sequence
  Non-cyclic GFR-binding peptide
  MOD_RES (2)..(35)..(36): Xaa is C or S
  MOD_RES (13)..(14)..(15)..(16)..(17): Xaa is A or G
  MOD_RES (18)..(19)..(20)..(21): Xaa is A or G or absent
KXSKVIMPIKGYXXXXXXXXXFYLINIPSLDQSVXX

SEQ ID NO: 31773 - protein, 32 aa, Artificial Sequence
  Non-cyclic GFR-binding peptide
  MOD_RES (32)..(32): Xaa is C or S
SEVVMDRHKRLVVNNASDYYLISTASLRTPVX

SEQ ID NO: 31774 - protein, 39 aa, Artificial Sequence
  Non-cyclic GFR-binding peptide
  MOD_RES (2)..(4)..(36)..(37): Xaa is C or S
RXGXAEVVMDRHKRLVVNNAADYYLISTASLRAPVXXSA

SEQ ID NO: 31775 - protein, 30 aa, Artificial Sequence
  Non-cyclic GFR-binding peptide
SRVIMPIKGYVKPKRGVFYLINIPSLAQPV

SEQ ID NO: 31776 - protein, 39 aa, Artificial Sequence
  Non-cyclic GFR-binding peptide
  MOD_RES (2)..(4)..(38)..(39): Xaa is C or S
  MOD_RES (16)..(17)..(18)..(19)..(20): Xaa is A or G
  MOD_RES (21)..(22)..(23)..(24): Xaa is A or G or absent
SXGXRDVVMGYHYKLXXXXXXXXXKYLMSIPSMKTPTXX

SEQ ID NO: 31777 - protein, 37 aa, Artificial Sequence
  Non-cyclic GFR-binding peptide
  MOD_RES (2)..(34)..(35): Xaa is C or S
GXRDVVMGEYKFKIIQQKDNLYLMSIPEMKTPTXXPG

SEQ ID NO: 31778 - protein, 39 aa, Artificial Sequence
  Non-cyclic GFR-binding peptide
  MOD_RES (33)..(34): Xaa is C or S
  MOD_RES (11)..(12)..(13)..(14)..(15): Xaa is A or G
  MOD_RES (16)..(17)..(18)..(19): Xaa is A or G or absent
EVTMNYHYKLXXXXXXXXXKYLISIPSMKEPVXXPEPIG

SEQ ID NO: 31779 - protein, 33 aa, Artificial Sequence
  Non-cyclic GFR-binding peptide
  MOD_RES (12)..(13)..(14)..(15)..(16): Xaa is A or G
  MOD_RES (17)..(18)..(19)..(20): Xaa is A or G or absent
SEVTMNEYKFKXXXXXXXXXLYLISIPEMKEPV

SEQ ID NO: 31780 - protein, 38 aa, Artificial Sequence
  Non-cyclic GFR-binding peptide
  MOD_RES (1)..(32)..(33): Xaa is C or S
XSKVVMPIKGYVKPTRGVFYLINIPSLDQPVXXPSASA

SEQ ID NO: 31781 - protein, 37 aa, Artificial Sequence
  Non-cyclic GFR-binding peptide
  MOD_RES (2)..(34)..(35): Xaa is C or S
AXSEVTMNRHKRLVVNKNEDYYLISTASMKEPVXXPE

SEQ ID NO: 31782 - protein, 33 aa, Artificial Sequence
  Non-cyclic GFR-binding peptide
  MOD_RES (32)..(33): Xaa is C or S
RDVVMGEYKFKIIQQKDNLYLMSIPEMKTPTXX

SEQ ID NO: 31783 - protein, 35 aa, Artificial Sequence
  Non-cyclic GFR-binding peptide
  MOD_RES (1)..(35): Xaa is C or S
  MOD_RES (13)..(14)..(15)..(16)..(17): Xaa is A or G
  MOD_RES (18)..(19)..(20)..(21): Xaa is A or G or absent
XSEVTMNEYKFKXXXXXXXXXLYLISIPEMKEPVX

SEQ ID NO: 31784 - protein, 40 aa, Artificial Sequence
  Non-cyclic GFR-binding peptide
  MOD_RES (2)..(36)..(37): Xaa is C or S
  MOD_RES (14)..(15)..(16)..(17)..(18): Xaa is A or G
  MOD_RES (19)..(20)..(21)..(22): Xaa is A or G or absent
GXRDVVMGRHKRLXXXXXXXXXYYLMSTASMKTPTXXPGA

SEQ ID NO: 31785 - protein, 39 aa, Artificial Sequence
  Non-cyclic GFR-binding peptide
  MOD_RES (33)..(34): Xaa is C or S
  MOD_RES (11)..(12)..(13)..(14)..(15): Xaa is A or G
  MOD_RES (16)..(17)..(18)..(19): Xaa is A or G or absent
EVTMNEYKFKXXXXXXXXXLYLISIPEMKEPVXXPEPIG

SEQ ID NO: 31786 - protein, 41 aa, Artificial Sequence
  Non-cyclic GFR-binding peptide
  MOD_RES (1)..(3)..(35)..(36): Xaa is C or S
XGXSRVVMNEYKFKIVNSSDDLYLVSIPELKTPAXXPKPVH

SEQ ID NO: 31787 - protein, 41 aa, Artificial Sequence
  Non-cyclic GFR-binding peptide
  MOD_RES (1)..(3)..(36)..(37): Xaa is C or S
  MOD_RES (14)..(15)..(16)..(17)..(18): Xaa is A or G
  MOD_RES (19)..(20)..(21)..(22): Xaa is A or G or absent
XKXSKVVMPIKGYXXXXXXXXXFYLINIPSLDQPVXXPSAS

SEQ ID NO: 31788 - protein, 34 aa, Artificial Sequence
  Non-cyclic GFR-binding peptide
  MOD_RES (31)..(32): Xaa is C or S
DVVMGEYKFKIIQQKDNLYLMSIPEMKTPTXXPG

SEQ ID NO: 31789 - protein, 35 aa, Artificial Sequence
  Non-cyclic GFR-binding peptide
  MOD_RES (1)..(33)..(34): Xaa is C or S
XAEVVMDRHKRLVVNNAADYYLISTASLRAPVXXS

SEQ ID NO: 31790 - protein, 36 aa, Artificial Sequence
  Non-cyclic GFR-binding peptide
  MOD_RES (1)..(34)..(35): Xaa is C or S
  MOD_RES (12)..(13)..(14)..(15)..(16): Xaa is A or G
  MOD_RES (17)..(18)..(19)..(20): Xaa is A or G or absent
XEEVIMRHKRLXXXXXXXXXYYLMSTASTKVPAXXT

SEQ ID NO: 31791 - protein, 36 aa, Artificial Sequence
  Non-cyclic GFR-binding peptide
  MOD_RES (1)..(3)..(35)..(36): Xaa is C or S
XGXSEVVMDYHYKLVVNNASDKYLISIPSLRTPVXX

SEQ ID NO: 31792 - protein, 38 aa, Artificial Sequence
  Non-cyclic GFR-binding peptide
  MOD_RES (1)..(3)..(34)..(35): Xaa is C or S
XKXSKVIMPIKGYIKPTKGIFYLINIPSLDQSVXXPSA

SEQ ID NO: 31793 - protein, 39 aa, Artificial Sequence
  Non-cyclic GFR-binding peptide
  MOD_RES (34)..(35): Xaa is C or S
  MOD_RES (12)..(13)..(14)..(15)..(16): Xaa is A or G
  MOD_RES (17)..(18)..(19)..(20): Xaa is A or G or absent
SEVTMNRYKKLXXXXXXXXXFYLISIANMKEPVXXPEPI

SEQ ID NO: 31794 - protein, 32 aa, Artificial Sequence
  Non-cyclic GFR-binding peptide
  MOD_RES (11)..(12)..(13)..(14)..(15): Xaa is A or G
  MOD_RES (16)..(17)..(18)..(19): Xaa is A or G or absent
DVVMGYHYKLXXXXXXXXXKYLMSIPSMKTPT

SEQ ID NO: 31795 - protein, 38 aa, Artificial Sequence
  Non-cyclic GFR-binding peptide
  MOD_RES (2)..(4)..(38): Xaa is C or S
  MOD_RES (16)..(17)..(18)..(19)..(20): Xaa is A or G
  MOD_RES (21)..(22)..(23)..(24): Xaa is A or G or absent
RXAXSEVTMNRYKKLXXXXXXXXXFYLISIANMKEPVX

SEQ ID NO: 31796 - protein, 36 aa, Artificial Sequence
  Non-cyclic GFR-binding peptide
  MOD_RES (2)..(4)..(36): Xaa is C or S
SXGXRDVVMGYHYKLIIQQKDNKYLMSIPSMKTPTX

SEQ ID NO: 31797 - protein, 33 aa, Artificial Sequence
  Non-cyclic GFR-binding peptide
  MOD_RES (31)..(32): Xaa is C or S
EVTMNRHKRLVVNKNEDYYLISTASMKEPVXXP

SEQ ID NO: 31798 - protein, 34 aa, Artificial Sequence
  Non-cyclic GFR-binding peptide
  MOD_RES (2)..(34): Xaa is C or S
AXSEVTMNRHKRLVVNKNEDYYLISTASMKEPVX

SEQ ID NO: 31799 - protein, 37 aa, Artificial Sequence
  Non-cyclic GFR-binding peptide
  MOD_RES (32)..(33): Xaa is C or S
SEVTMNRHKRLVVNKNEDYYLISTASMKEPVXXPEPI

SEQ ID NO: 31800 - protein, 35 aa, Artificial Sequence
  Non-cyclic GFR-binding peptide
  MOD_RES (32)..(33): Xaa is C or S
SEVTMNEYKFKVVNKNEDLYLISIPEMKEPVXXPE

SEQ ID NO: 31801 - protein, 36 aa, Artificial Sequence
  Non-cyclic GFR-binding peptide
  MOD_RES (1)..(33)..(34): Xaa is C or S
XSEVVMDEYKFKVVNNASDLYLISIPELRTPVXXTP

SEQ ID NO: 31802 - protein, 34 aa, Artificial Sequence
  Non-cyclic GFR-binding peptide
  MOD_RES (2)..(33)..(34): Xaa is C or S
KXSRVIMPIKGYVKPKRGVFYLINIPSLAQPVXX

SEQ ID NO: 31803 - protein, 36 aa, Artificial Sequence
  Non-cyclic GFR-binding peptide
  MOD_RES (2)..(36): Xaa is C or S
  MOD_RES (14)..(15)..(16)..(17)..(18): Xaa is A or G
  MOD_RES (19)..(20)..(21)..(22): Xaa is A or G or absent
AXSEVTMNRHKRLXXXXXXXXXYYLISTASMKEPVX

SEQ ID NO: 31804 - protein, 38 aa, Artificial Sequence
  Non-cyclic GFR-binding peptide
  MOD_RES (2)..(4)..(38): Xaa is C or S
  MOD_RES (16)..(17)..(18)..(19)..(20): Xaa is A or G
  MOD_RES (21)..(22)..(23)..(24): Xaa is A or G or absent
RXGXESVAMGRHKRLXXXXXXXXXYYLISTASLKTPVX

SEQ ID NO: 31805 - protein, 33 aa, Artificial Sequence
  Non-cyclic GFR-binding peptide
  MOD_RES (32)..(33): Xaa is C or S
SEVTMNEYKFKVVNKNEDLYLISIPEMKEPVXX

SEQ ID NO: 31806 - protein, 34 aa, Artificial Sequence
  Non-cyclic GFR-binding peptide
  MOD_RES (2)..(34): Xaa is C or S
GXSEVVMDEYKFKVVNNASDLYLISIPELRTPVX

SEQ ID NO: 31807 - protein, 34 aa, Artificial Sequence
  Non-cyclic GFR-binding peptide
  MOD_RES (33)..(34): Xaa is C or S
  MOD_RES (11)..(12)..(13)..(14)..(15): Xaa is A or G
  MOD_RES (16)..(17)..(18)..(19): Xaa is A or G or absent
EVVMDYHYKLXXXXXXXXXKYLISIPSLRTPVXX

SEQ ID NO: 31808 - protein, 35 aa, Artificial Sequence
  Non-cyclic GFR-binding peptide
  MOD_RES (2)..(4): Xaa is C or S
RXGXSEVVMDRHKRLVVNNASDYYLISTASLRTPV

SEQ ID NO: 31809 - protein, 34 aa, Artificial Sequence
  Non-cyclic GFR-binding peptide
  MOD_RES (2)..(34): Xaa is C or S
GXRDVVMGRHKRLIIQQKDNYYLMSTASMKTPTX

SEQ ID NO: 31810 - protein, 37 aa, Artificial Sequence
  Non-cyclic GFR-binding peptide
  MOD_RES (2)..(4)..(37): Xaa is C or S
  MOD_RES (15)..(16)..(17)..(18)..(19): Xaa is A or G
  MOD_RES (20)..(21)..(22)..(23): Xaa is A or G or absent
LXGXEEVIMEYKFKXXXXXXXXXLYLMSIPETKVPAX

SEQ ID NO: 31811 - protein, 39 aa, Artificial Sequence
  Non-cyclic GFR-binding peptide
  MOD_RES (1)..(3)..(35)..(36): Xaa is C or S
XGXSEVVMDRHKRLVVNNASDYYLISTASLRTPVXXTPP

SEQ ID NO: 31812 - protein, 32 aa, Artificial Sequence
  Non-cyclic GFR-binding peptide
  MOD_RES (31)..(32): Xaa is C or S
EVTMNPIKGYVVNKNEDFYLINIPSMKEPVXX

SEQ ID NO: 31813 - protein, 42 aa, Artificial Sequence
  Non-cyclic GFR-binding peptide
  MOD_RES (2)..(4)..(38)..(39): Xaa is C or S
  MOD_RES (16)..(17)..(18)..(19)..(20): Xaa is A or G
  MOD_RES (21)..(22)..(23)..(24): Xaa is A or G or absent
SXGXRDVVMGYHYKLXXXXXXXXXKYLMSIPSMKTPTXXPGA

SEQ ID NO: 31814 - protein, 38 aa, Artificial Sequence
  Non-cyclic GFR-binding peptide
  MOD_RES (2)..(4)..(36)..(37): Xaa is C or S
RXGXESVAMGRHKRLYTVVGKDYYLISTASLKTPVXXA

SEQ ID NO: 31815 - protein, 37 aa, Artificial Sequence
  Non-cyclic GFR-binding peptide
  MOD_RES (2)..(4)..(36)..(37): Xaa is C or S
SXGXRDVVMGEYKFKIIQQKDNLYLMSIPEMKTPTXX

SEQ ID NO: 31816 - protein, 32 aa, Artificial Sequence
  Non-cyclic GFR-binding peptide
  MOD_RES (1)..(32): Xaa is C or S
XEEVIMRHKRLLLVRGNDYYLMSTASTKVPAX

SEQ ID NO: 31817 - protein, 42 aa, Artificial Sequence
  Non-cyclic GFR-binding peptide
  MOD_RES (2)..(4)..(37)..(38): Xaa is C or S
  MOD_RES (15)..(16)..(17)..(18)..(19): Xaa is A or G
  MOD_RES (20)..(21)..(22)..(23): Xaa is A or G or absent
SXKXSRVIMPIKGYXXXXXXXXXFYLINIPSLAQPVXXPAAS

SEQ ID NO: 31818 - protein, 35 aa, Artificial Sequence
  Non-cyclic GFR-binding peptide
  MOD_RES (34)..(35): Xaa is C or S
  MOD_RES (12)..(13)..(14)..(15)..(16): Xaa is A or G
  MOD_RES (17)..(18)..(19)..(20): Xaa is A or G or absent
RDVVMGYHYKLXXXXXXXXXKYLMSIPSMKTPTXX

SEQ ID NO: 31819 - protein, 32 aa, Artificial Sequence
  Non-cyclic GFR-binding peptide
  MOD_RES (11)..(12)..(13)..(14)..(15): Xaa is A or G
  MOD_RES (16)..(17)..(18)..(19): Xaa is A or G or absent
DVVMGRHKRLXXXXXXXXXYYLMSTASMKTPT

SEQ ID NO: 31820 - protein, 43 aa, Artificial Sequence
  Non-cyclic GFR-binding peptide
  MOD_RES (1)..(3)..(37)..(38): Xaa is C or S
  MOD_RES (15)..(16)..(17)..(18)..(19): Xaa is A or G
  MOD_RES (20)..(21)..(22)..(23): Xaa is A or G or absent
XGXESVAMGRHKRLXXXXXXXXXYYLISTASLKTPVXXAKSAK

SEQ ID NO: 31821 - protein, 30 aa, Artificial Sequence; identical to SEQ ID NO: 1933
  Non-cyclic GFR-binding peptide

SEQ ID NO: 31822 - protein, 40 aa, Artificial Sequence
  Non-cyclic GFR-binding peptide
  MOD_RES (1)..(34)..(35): Xaa is C or S
  MOD_RES (12)..(13)..(14)..(15)..(16): Xaa is A or G
  MOD_RES (17)..(18)..(19)..(20): Xaa is A or G or absent
XEEVIMEYKFKXXXXXXXXXLYLMSIPETKVPAXXTSPVR

SEQ ID NO: 31823 - protein, 34 aa, Artificial Sequence
  Non-cyclic GFR-binding peptide
  MOD_RES (31)..(32): Xaa is C or S
DVVMGRHKRLIIQQKDNYYLMSTASMKTPTXXPG

SEQ ID NO: 31824 - protein, 44 aa, Artificial Sequence
  Non-cyclic GFR-binding peptide
  MOD_RES (2)..(4)..(38)..(39): Xaa is C or S
  MOD_RES (16)..(17)..(18)..(19)..(20): Xaa is A or G
  MOD_RES (21)..(22)..(23)..(24): Xaa is A or G or absent
RXAXSEVTMNYHYKLXXXXXXXXXKYLISIPSMKEPVXXPEPIG

SEQ ID NO: 31825 - protein, 35 aa, Artificial Sequence
  Non-cyclic GFR-binding peptide
  MOD_RES (33)..(34): Xaa is C or S
  MOD_RES (11)..(12)..(13)..(14)..(15): Xaa is A or G
  MOD_RES (16)..(17)..(18)..(19): Xaa is A or G or absent
DVVMGYHYKLXXXXXXXXXKYLMSIPSMKTPTXXP

SEQ ID NO: 31826 - protein, 40 aa, Artificial Sequence
  Non-cyclic GFR-binding peptide
  MOD_RES (2)..(34)..(35): Xaa is C or S
GXAEVVMDRHKRLVVNNAADYYLISTASLRAPVXXSAPAA

SEQ ID NO: 31827 - protein, 34 aa, Artificial Sequence
  Non-cyclic GFR-binding peptide
  MOD_RES (34)..(34): Xaa is C or S
  MOD_RES (12)..(13)..(14)..(15)..(16): Xaa is A or G
  MOD_RES (17)..(18)..(19)..(20): Xaa is A or G or absent
RDVVMGEYKFKXXXXXXXXXLYLMSIPEMKTPTX

SEQ ID NO: 31828 - protein, 33 aa, Artificial Sequence
  Non-cyclic GFR-binding peptide
  MOD_RES (12)..(13)..(14)..(15)..(16): Xaa is A or G
  MOD_RES (17)..(18)..(19)..(20): Xaa is A or G or absent
SEVTMNYHYKLXXXXXXXXXKYLISIPSMKEPV

SEQ ID NO: 31829 - protein, 34 aa, Artificial Sequence
  Non-cyclic GFR-binding peptide
  MOD_RES (33)..(34): Xaa is C or S
  MOD_RES (11)..(12)..(13)..(14)..(15): Xaa is A or G
  MOD_RES (16)..(17)..(18)..(19): Xaa is A or G or absent
EVVMDEYKFKXXXXXXXXXLYLISIPELRTPVXX

SEQ ID NO: 31830 - protein, 40 aa, Artificial Sequence
  Non-cyclic GFR-binding peptide
  MOD_RES (2)..(4)..(35)..(36): Xaa is C or S
LXGXEEVIMRHKRLLLVRGNDYYLMSTASTKVPAXXTSPV

SEQ ID NO: 31831 - protein, 40 aa, Artificial Sequence
  Non-cyclic GFR-binding peptide
  MOD_RES (34)..(35): Xaa is C or S
  MOD_RES (12)..(13)..(14)..(15)..(16): Xaa is A or G
  MOD_RES (17)..(18)..(19)..(20): Xaa is A or G or absent
SEVVMDRHKRLXXXXXXXXXYYLISTASLRTPVXXTPPTS

SEQ ID NO: 31832 - protein, 41 aa, Artificial Sequence
  Non-cyclic GFR-binding peptide
  MOD_RES (1)..(3)..(36)..(37): Xaa is C or S
  MOD_RES (14)..(15)..(16)..(17)..(18): Xaa is A or G
  MOD_RES (19)..(20)..(21)..(22): Xaa is A or G or absent
XKXSRVIMPIKGYXXXXXXXXXFYLINIPSLAQPVXXPAAS

SEQ ID NO: 31833 - protein, 34 aa, Artificial Sequence
  Non-cyclic GFR-binding peptide
  MOD_RES (2)..(2): Xaa is C or S
  MOD_RES (13)..(14)..(15)..(16)..(17): Xaa is A or G
  MOD_RES (18)..(19)..(20)..(21): Xaa is A or G or absent
GXEEVIMRHKRLXXXXXXXXXYYLMSTASTKVPA

SEQ ID NO: 31834 - protein, 38 aa, Artificial Sequence
  Non-cyclic GFR-binding peptide
  MOD_RES (2)..(34)..(35): Xaa is C or S
GXESVAMGRHKRLYTVVGKDYYLISTASLKTPVXXAKS

SEQ ID NO: 31835 - protein, 42 aa, Artificial Sequence
  Non-cyclic GFR-binding peptide
  MOD_RES (2)..(4)..(38)..(39): Xaa is C or S
  MOD_RES (16)..(17)..(18)..(19)..(20): Xaa is A or G
  MOD_RES (21)..(22)..(23)..(24): Xaa is A or G or absent
RXGXESVAMGRHKRLXXXXXXXXXYYLISTASLKTPVXXAKS

SEQ ID NO: 31836 - protein, 34 aa, Artificial Sequence
  Non-cyclic GFR-binding peptide
  MOD_RES (33)..(34): Xaa is C or S
  MOD_RES (11)..(12)..(13)..(14)..(15): Xaa is A or G
  MOD_RES (16)..(17)..(18)..(19): Xaa is A or G or absent
EVVMDRHKRLXXXXXXXXXYYLISTASLRAPVXX

SEQ ID NO: 31837 - protein, 34 aa, Artificial Sequence
  Non-cyclic GFR-binding peptide
  MOD_RES (33)..(34): Xaa is C or S
  MOD_RES (11)..(12)..(13)..(14)..(15): Xaa is A or G
  MOD_RES (16)..(17)..(18)..(19): Xaa is A or G or absent
EVVMDRHKRLXXXXXXXXXYYLISTASLRTPVXX

SEQ ID NO: 31838 - protein, 36 aa, Artificial Sequence
  Non-cyclic GFR-binding peptide
  MOD_RES (2)..(33)..(34): Xaa is C or S
GXEEVIMRHKRLLLVRGNDYYLMSTASTKVPAXXTS

SEQ ID NO: 31839 - protein, 39 aa, Artificial Sequence
  Non-cyclic GFR-binding peptide
  MOD_RES (2)..(35)..(36): Xaa is C or S
  MOD_RES (13)..(14)..(15)..(16)..(17): Xaa is A or G
  MOD_RES (18)..(19)..(20)..(21): Xaa is A or G or absent
KXSKVVMPIKGYXXXXXXXXXFYLINIPSLDQPVXXPSA

SEQ ID NO: 31840 - protein, 38 aa, Artificial Sequence
  Non-cyclic GFR-binding peptide
  MOD_RES (33)..(34): Xaa is C or S
  MOD_RES (11)..(12)..(13)..(14)..(15): Xaa is A or G
  MOD_RES (16)..(17)..(18)..(19): Xaa is A or G or absent
EVVMDRHKRLXXXXXXXXXYYLISTASLRAPVXXSAPA

SEQ ID NO: 31841 - protein, 36 aa, Artificial Sequence
  Non-cyclic GFR-binding peptide
  MOD_RES (1)..(3)..(36): Xaa is C or S
  MOD_RES (14)..(15)..(16)..(17)..(18): Xaa is A or G
  MOD_RES (19)..(20)..(21)..(22): Xaa is A or G or absent
XKXSKVIMPIKGYXXXXXXXXXFYLINIPSLDQSVX

SEQ ID NO: 31842 - protein, 31 aa, Artificial Sequence
  Non-cyclic GFR-binding peptide
SEVVMDYHYKLVVNNASDKYLISIPSLRTPV

SEQ ID NO: 31843 - protein, 39 aa, Artificial Sequence
  Non-cyclic GFR-binding peptide
  MOD_RES (2)..(34)..(35): Xaa is C or S
GXRDVVMGRHKRLIIQQKDNYYLMSTASMKTPTXXPGAS

SEQ ID NO: 31844 - protein, 34 aa, Artificial Sequence
  Non-cyclic GFR-binding peptide
  MOD_RES (34)..(34): Xaa is C or S
  MOD_RES (12)..(13)..(14)..(15)..(16): Xaa is A or G
  MOD_RES (17)..(18)..(19)..(20): Xaa is A or G or absent
RDVVMGYHYKLXXXXXXXXXKYLMSIPSMKTPTX

SEQ ID NO: 31845 - protein, 41 aa, Artificial Sequence
  Non-cyclic GFR-binding peptide
  MOD_RES (2)..(4)..(35)..(36): Xaa is C or S
LXGXEEVIMYHYKLLLVRGNDKYLMSIPSTKVPAXXTSPVR

SEQ ID NO: 31846 - protein, 35 aa, Artificial Sequence
  Non-cyclic GFR-binding peptide
  MOD_RES (1)..(3): Xaa is C or S
  MOD_RES (14)..(15)..(16)..(17)..(18): Xaa is A or G
  MOD_RES (19)..(20)..(21)..(22): Xaa is A or G or absent
XGXEEVIMEYKFKXXXXXXXXXLYLMSIPETKVPA

SEQ ID NO: 31847 - protein, 32 aa, Artificial Sequence
  Non-cyclic GFR-binding peptide
  MOD_RES (1)..(1): Xaa is C or S
XSEVTMNRHKRLVVNKNEDYYLISTASMKEPV

SEQ ID NO: 31848 - protein, 42 aa, Artificial Sequence
  Non-cyclic GFR-binding peptide
  MOD_RES (2)..(36)..(37): Xaa is C or S
  MOD_RES (14)..(15)..(16)..(17)..(18): Xaa is A or G
  MOD_RES (19)..(20)..(21)..(22): Xaa is A or G or absent
GXSRVVMNEYKFKXXXXXXXXXLYLVSIPELKTPAXXPKPVH

SEQ ID NO: 31849 - protein, 40 aa, Artificial Sequence
  Non-cyclic GFR-binding peptide
  MOD_RES (2)..(36)..(37): Xaa is C or S
  MOD_RES (14)..(15)..(16)..(17)..(18): Xaa is A or G
  MOD_RES (19)..(20)..(21)..(22): Xaa is A or G or absent
AXSEVTMNPIKGYXXXXXXXXXFYLINIPSMKEPVXXPEP

SEQ ID NO: 31850 - protein, 37 aa, Artificial Sequence
  Non-cyclic GFR-binding peptide
  MOD_RES (32)..(33): Xaa is C or S
SEVVMDYHYKLVVNNASDKYLISIPSLRTPVXXTPPT

SEQ ID NO: 31851 - protein, 33 aa, Artificial Sequence
  Non-cyclic GFR-binding peptide
  MOD_RES (2)..(33): Xaa is C or S
KXSRVIMPIKGYVKPKRGVFYLINIPSLAQPVX

SEQ ID NO: 31852 - protein, 35 aa, Artificial Sequence
  Non-cyclic GFR-binding peptide
  MOD_RES (34)..(35): Xaa is C or S
  MOD_RES (12)..(13)..(14)..(15)..(16): Xaa is A or G
  MOD_RES (17)..(18)..(19)..(20): Xaa is A or G or absent
SEVVMDRHKRLXXXXXXXXXYYLISTASLRTPVXX

SEQ ID NO: 31853 - protein, 38 aa, Artificial Sequence
  Non-cyclic GFR-binding peptide
  MOD_RES (1)..(3)..(37)..(38): Xaa is C or S
  MOD_RES (15)..(16)..(17)..(18)..(19): Xaa is A or G
  MOD_RES (20)..(21)..(22)..(23): Xaa is A or G or absent
XAXSEVTMNEYKFKXXXXXXXXXLYLISIPEMKEPVXX

SEQ ID NO: 31854 - protein, 36 aa, Artificial Sequence
  Non-cyclic GFR-binding peptide
  MOD_RES (31)..(32): Xaa is C or S
EVTMNPIKGYVVNKNEDFYLINIPSMKEPVXXPEPI

SEQ ID NO: 31855 - protein, 31 aa, Artificial Sequence
  Non-cyclic GFR-binding peptide
SEVVMDEYKFKVVNNASDLYLISIPELRTPV

SEQ ID NO: 31856 - protein, 37 aa, Artificial Sequence
  Non-cyclic GFR-binding peptide
  MOD_RES (1)..(33)..(34): Xaa is C or S
XRDVVMGEYKFKIIQQKDNLYLMSIPEMKTPTXXPGA

SEQ ID NO: 31857 - protein, 39 aa, Artificial Sequence
  Non-cyclic GFR-binding peptide
  MOD_RES (2)..(34)..(35): Xaa is C or S
GXSEVVMDEYKFKVVNNASDLYLISIPELRTPVXXTPPT

SEQ ID NO: 31858 - protein, 37 aa, Artificial Sequence
  Non-cyclic GFR-binding peptide
  MOD_RES (1)..(3)..(37): Xaa is C or S
  MOD_RES (15)..(16)..(17)..(18)..(19): Xaa is A or G
  MOD_RES (20)..(21)..(22)..(23): Xaa is A or G or absent
XAXSEVTMNYHYKLXXXXXXXXXKYLISIPSMKEPVX

SEQ ID NO: 31859 - protein, 44 aa, Artificial Sequence
  Non-cyclic GFR-binding peptide
  MOD_RES (2)..(4)..(38)..(39): Xaa is C or S
  MOD_RES (16)..(17)..(18)..(19)..(20): Xaa is A or G
  MOD_RES (21)..(22)..(23)..(24): Xaa is A or G or absent
HXGXSRVVMNYHYKLXXXXXXXXXKYLVSIPSLKTPAXXPKPVH

SEQ ID NO: 31860 - protein, 38 aa, Artificial Sequence
  Non-cyclic GFR-binding peptide
  MOD_RES (2)..(4)..(38): Xaa is C or S
  MOD_RES (16)..(17)..(18)..(19)..(20): Xaa is A or G
  MOD_RES (21)..(22)..(23)..(24): Xaa is A or G or absent
RXAXSEVTMNEYKFKXXXXXXXXXLYLISIPEMKEPVX

SEQ ID NO: 31861 - protein, 36 aa, Artificial Sequence
  Non-cyclic GFR-binding peptide
  MOD_RES (1)..(32)..(33): Xaa is C or S
XEEVIMRHKRLLLVRGNDYYLMSTASTKVPAXXTSP

SEQ ID NO: 31862 - protein, 34 aa, Artificial Sequence
  Non-cyclic GFR-binding peptide
  MOD_RES (34)..(34): Xaa is C or S
  MOD_RES (12)..(13)..(14)..(15)..(16): Xaa is A or G
  MOD_RES (17)..(18)..(19)..(20): Xaa is A or G or absent
SEVVMDRHKRLXXXXXXXXXYYLISTASLRTPVX

SEQ ID NO: 31863 - protein, 33 aa, Artificial Sequence
  Non-cyclic GFR-binding peptide
  MOD_RES (1)..(33): Xaa is C or S
XRDVVMGYHYKLIIQQKDNKYLMSIPSMKTPTX

SEQ ID NO: 31864 - protein, 37 aa, Artificial Sequence
  Non-cyclic GFR-binding peptide
  MOD_RES (31)..(32): Xaa is C or S
SVAMGRHKRLYTVVGKDYYLISTASLKTPVXXAKSAK

SEQ ID NO: 31865 - protein, 36 aa, Artificial Sequence
  Non-cyclic GFR-binding peptide
  MOD_RES (34)..(35): Xaa is C or S
  MOD_RES (12)..(13)..(14)..(15)..(16): Xaa is A or G
  MOD_RES (17)..(18)..(19)..(20): Xaa is A or G or absent
SEVTMNYHYKLXXXXXXXXXKYLISIPSMKEPVXXP

SEQ ID NO: 31866 - protein, 42 aa, Artificial Sequence
  Non-cyclic GFR-binding peptide
  MOD_RES (2)..(4)..(36)..(37): Xaa is C or S
SXGXRDVVMGRHKRLIIQQKDNYYLMSTASMKTPTXXPGASG

SEQ ID NO: 31867 - protein, 43 aa, Artificial Sequence
  Non-cyclic GFR-binding peptide
  MOD_RES (2)..(4)..(38)..(39): Xaa is C or S
  MOD_RES (16)..(17)..(18)..(19)..(20): Xaa is A or G
  MOD_RES (21)..(22)..(23)..(24): Xaa is A or G or absent
RXAXSEVTMNPIKGYXXXXXXXXXFYLINIPSMKEPVXXPEPI

SEQ ID NO: 31868 - protein, 35 aa, Artificial Sequence
  Non-cyclic GFR-binding peptide
  MOD_RES (33)..(34): Xaa is C or S
  MOD_RES (11)..(12)..(13)..(14)..(15): Xaa is A or G
  MOD_RES (16)..(17)..(18)..(19): Xaa is A or G or absent
EVTMNRHKRLXXXXXXXXXYYLISTASMKEPVXXP

SEQ ID NO: 31869 - protein, 36 aa, Artificial Sequence
  Non-cyclic GFR-binding peptide
  MOD_RES (32)..(33): Xaa is C or S
SEVVMDRHKRLVVNNASDYYLISTASLRTPVXXTPP

SEQ ID NO: 31870 - protein, 37 aa, Artificial Sequence
  Non-cyclic GFR-binding peptide
  MOD_RES (1)..(3)..(35)..(36): Xaa is C or S
XGXSEVVMDRHKRLVVNNASDYYLISTASLRTPVXXT

SEQ ID NO: 31871 - protein, 37 aa, Artificial Sequence
  Non-cyclic GFR-binding peptide
  MOD_RES (2)..(33)..(34): Xaa is C or S
GXEEVIMYHYKLLLVRGNDKYLMSIPSTKVPAXXTSP

SEQ ID NO: 31872 - protein, 43 aa, Artificial Sequence
  Non-cyclic GFR-binding peptide
  MOD_RES (1)..(3)..(37)..(38): Xaa is C or S
  MOD_RES (15)..(16)..(17)..(18)..(19): Xaa is A or G
  MOD_RES (20)..(21)..(22)..(23): Xaa is A or G or absent
XGXAEVVMDRHKRLXXXXXXXXXYYLISTASLRAPVXXSAPAA

SEQ ID NO: 31873 - protein, 35 aa, Artificial Sequence
  Non-cyclic GFR-binding peptide
  MOD_RES (31)..(32): Xaa is C or S
EVTMNRYKKLVVNKNEDFYLISIANMKEPVXXPEP

SEQ ID NO: 31874 - protein, 32 aa, Artificial Sequence
  Non-cyclic GFR-binding peptide
  MOD_RES (2)..(2): Xaa is C or S
GXEEVIMEYKFKLLVRGNDLYLMSIPETKVPA

SEQ ID NO: 31875 - protein, 43 aa, Artificial Sequence
  Non-cyclic GFR-binding peptide
  MOD_RES (2)..(4)..(38)..(39): Xaa is C or S
  MOD_RES (16)..(17)..(18)..(19)..(20): Xaa is A or G
  MOD_RES (21)..(22)..(23)..(24): Xaa is A or G or absent
RXAXSEVTMNRHKRLXXXXXXXXXYYLISTASMKEPVXXPEPI

SEQ ID NO: 31876 - protein, 37 aa, Artificial Sequence
  Non-cyclic GFR-binding peptide
  MOD_RES (2)..(4): Xaa is C or S
  MOD_RES (16)..(17)..(18)..(19)..(20): Xaa is A or G
  MOD_RES (21)..(22)..(23)..(24): Xaa is A or G or absent
RXGXSEVVMDYHYKLXXXXXXXXXKYLISIPSLRTPV

SEQ ID NO: 31877 - protein, 35 aa, Artificial Sequence
  Non-cyclic GFR-binding peptide
  MOD_RES (33)..(34): Xaa is C or S
  MOD_RES (11)..(12)..(13)..(14)..(15): Xaa is A or G
  MOD_RES (16)..(17)..(18)..(19): Xaa is A or G or absent
DVVMGRHKRLXXXXXXXXXYYLMSTASMKTPTXXP

SEQ ID NO: 31878 - protein, 33 aa, Artificial Sequence
  Non-cyclic GFR-binding peptide
  MOD_RES (31)..(32): Xaa is C or S
EVTMNEYKFKVVNKNEDLYLISIPEMKEPVXXP

SEQ ID NO: 31879 - protein, 39 aa, Artificial Sequence
  Non-cyclic GFR-binding peptide
  MOD_RES (2)..(4)..(36)..(37): Xaa is C or S
RXGXSEVVMDYHYKLVVNNASDKYLISIPSLRTPVXXTP

SEQ ID NO: 31880 - protein, 36 aa, Artificial Sequence
  Non-cyclic GFR-binding peptide
  MOD_RES (2)..(34)..(35): Xaa is C or S
GXSEVVMDYHYKLVVNNASDKYLISIPSLRTPVXXT

SEQ ID NO: 31881 - protein, 35 aa, Artificial Sequence
  Non-cyclic GFR-binding peptide
  MOD_RES (1)..(32)..(33): Xaa is C or S
XSKVVMPIKGYVKPTRGVFYLINIPSLDQPVXXPS

SEQ ID NO: 31882 - protein, 42 aa, Artificial Sequence
  Non-cyclic GFR-binding peptide
  MOD_RES (2)..(4)..(38)..(39): Xaa is C or S
  MOD_RES (16)..(17)..(18)..(19)..(20): Xaa is A or G
  MOD_RES (21)..(22)..(23)..(24): Xaa is A or G or absent
RXAXSEVTMNRYKKLXXXXXXXXXFYLISIANMKEPVXXPEP

SEQ ID NO: 31883 - protein, 33 aa, Artificial Sequence
  Non-cyclic GFR-binding peptide
  MOD_RES (33)..(33): Xaa is C or S
  MOD_RES (11)..(12)..(13)..(14)..(15): Xaa is A or G
  MOD_RES (16)..(17)..(18)..(19): Xaa is A or G or absent
EVVMDEYKFKXXXXXXXXXLYLISIPELRTPVX

SEQ ID NO: 31884 - protein, 38 aa, Artificial Sequence
  Non-cyclic GFR-binding peptide
  MOD_RES (2)..(4)..(38): Xaa is C or S
  MOD_RES (16)..(17)..(18)..(19)..(20): Xaa is A or G
  MOD_RES (21)..(22)..(23)..(24): Xaa is A or G or absent
RXGXSEVVMDRHKRLXXXXXXXXXYYLISTASLRTPVX

SEQ ID NO: 31885 - protein, 36 aa, Artificial Sequence
  Non-cyclic GFR-binding peptide
  MOD_RES (1)..(35)..(36): Xaa is C or S
  MOD_RES (13)..(14)..(15)..(16)..(17): Xaa is A or G
  MOD_RES (18)..(19)..(20)..(21): Xaa is A or G or absent
XSEVTMNPIKGYXXXXXXXXXFYLINIPSMKEPVXX

SEQ ID NO: 31886 - protein, 35 aa, Artificial Sequence
  Non-cyclic GFR-binding peptide
  MOD_RES (31)..(32): Xaa is C or S
SKVVMPIKGYVKPTRGVFYLINIPSLDQPVXXPSA

SEQ ID NO: 31887 - protein, 40 aa, Artificial Sequence
  Non-cyclic GFR-binding peptide
  MOD_RES (1)..(3)..(34)..(35): Xaa is C or S
XKXSRVIMPIKGYVKPKRGVFYLINIPSLAQPVXXPAASA

SEQ ID NO: 31888 - protein, 42 aa, Artificial Sequence
  Non-cyclic GFR-binding peptide
  MOD_RES (2)..(4)..(37)..(38): Xaa is C or S
  MOD_RES (15)..(16)..(17)..(18)..(19): Xaa is A or G
  MOD_RES (20)..(21)..(22)..(23): Xaa is A or G or absent
SXKXSKVVMPIKGYXXXXXXXXXFYLINIPSLDQPVXXPSAS

SEQ ID NO: 31889 - protein, 34 aa, Artificial Sequence
  Non-cyclic GFR-binding peptide
  MOD_RES (1)..(1): Xaa is C or S
  MOD_RES (13)..(14)..(15)..(16)..(17): Xaa is A or G
  MOD_RES (18)..(19)..(20)..(21): Xaa is A or G or absent
XSEVTMNEYKFKXXXXXXXXXLYLISIPEMKEPV

SEQ ID NO: 31890 - protein, 40 aa, Artificial Sequence
  Non-cyclic GFR-binding peptide
  MOD_RES (1)..(3)..(34)..(35): Xaa is C or S
XGXEEVIMEYKFKLLVRGNDLYLMSIPETKVPAXXTSPVR

SEQ ID NO: 31891 - protein, 41 aa, Artificial Sequence
  Non-cyclic GFR-binding peptide
  MOD_RES (1)..(3)..(37)..(38): Xaa is C or S
  MOD_RES (15)..(16)..(17)..(18)..(19): Xaa is A or G
  MOD_RES (20)..(21)..(22)..(23): Xaa is A or G or absent
XGXAEVVMDRHKRLXXXXXXXXXYYLISTASLRAPVXXSAP

SEQ ID NO: 31892 - protein, 42 aa, Artificial Sequence
  Non-cyclic GFR-binding peptide
  MOD_RES (2)..(4)..(38)..(39): Xaa is C or S
  MOD_RES (16)..(17)..(18)..(19)..(20): Xaa is A or G
  MOD_RES (21)..(22)..(23)..(24): Xaa is A or G or absent
RXAXSEVTMNEYKFKXXXXXXXXXLYLISIPEMKEPVXXPEP

SEQ ID NO: 31893 - protein, 34 aa, Artificial Sequence
  Non-cyclic GFR-binding peptide
  MOD_RES (2)..(2): Xaa is C or S
  MOD_RES (13)..(14)..(15)..(16)..(17): Xaa is A or G
  MOD_RES (18)..(19)..(20)..(21): Xaa is A or G or absent
KXSKVVMPIKGYXXXXXXXXXFYLINIPSLDQPV

SEQ ID NO: 31894 - protein, 39 aa, Artificial Sequence
  Non-cyclic GFR-binding peptide
  MOD_RES (34)..(35): Xaa is C or S
  MOD_RES (12)..(13)..(14)..(15)..(16): Xaa is A or G
  MOD_RES (17)..(18)..(19)..(20): Xaa is A or G or absent
RDVVMGYHYKLXXXXXXXXXKYLMSIPSMKTPTXXPGAS

SEQ ID NO: 31895 - protein, 38 aa, Artificial Sequence
  Non-cyclic GFR-binding peptide
  MOD_RES (2)..(4)..(37)..(38): Xaa is C or S
  MOD_RES (15)..(16)..(17)..(18)..(19): Xaa is A or G
  MOD_RES (20)..(21)..(22)..(23): Xaa is A or G or absent
SXKXSKVIMPIKGYXXXXXXXXXFYLINIPSLDQSVXX

SEQ ID NO: 31896 - protein, 41 aa, Artificial Sequence
  Non-cyclic GFR-binding peptide
  MOD_RES (2)..(4)..(38)..(39): Xaa is C or S
  MOD_RES (16)..(17)..(18)..(19)..(20): Xaa is A or G
  MOD_RES (21)..(22)..(23)..(24): Xaa is A or G or absent
RXAXSEVTMNRHKRLXXXXXXXXXYYLISTASMKEPVXXPE

SEQ ID NO: 31897 - protein, 34 aa, Artificial Sequence
  Non-cyclic GFR-binding peptide
  MOD_RES (31)..(32): Xaa is C or S
DVVMGYHYKLIIQQKDNKYLMSIPSMKTPTXXPG

SEQ ID NO: 31898 - protein, 34 aa, Artificial Sequence
  Non-cyclic GFR-binding peptide
  MOD_RES (2)..(34): Xaa is C or S
GXESVAMGRHKRLYTVVGKDYYLISTASLKTPVX

SEQ ID NO: 31899 - protein, 35 aa, Artificial Sequence
  Non-cyclic GFR-binding peptide
  MOD_RES (2)..(35): Xaa is C or S
  MOD_RES (13)..(14)..(15)..(16)..(17): Xaa is A or G
  MOD_RES (18)..(19)..(20)..(21): Xaa is A or G or absent
GXEEVIMRHKRLXXXXXXXXXYYLMSTASTKVPAX

SEQ ID NO: 31900 - protein, 35 aa, Artificial Sequence
  Non-cyclic GFR-binding peptide
  MOD_RES (2)..(2): Xaa is C or S
  MOD_RES (14)..(15)..(16)..(17)..(18): Xaa is A or G
  MOD_RES (19)..(20)..(21)..(22): Xaa is A or G or absent
GXRDVVMGEYKFKXXXXXXXXXLYLMSIPEMKTPT

SEQ ID NO: 31901 - protein, 38 aa, Artificial Sequence
  Non-cyclic GFR-binding peptide
  MOD_RES (34)..(35): Xaa is C or S
  MOD_RES (12)..(13)..(14)..(15)..(16): Xaa is A or G
  MOD_RES (17)..(18)..(19)..(20): Xaa is A or G or absent
SEVVMDRHKRLXXXXXXXXXYYLISTASLRTPVXXTPP

SEQ ID NO: 31902 - protein, 33 aa, Artificial Sequence
  Non-cyclic GFR-binding peptide
  MOD_RES (33)..(33): Xaa is C or S
  MOD_RES (11)..(12)..(13)..(14)..(15): Xaa is A or G
  MOD_RES (16)..(17)..(18)..(19): Xaa is A or G or absent
EVTMNRYKKLXXXXXXXXXFYLISIANMKEPVX

SEQ ID NO: 31903 - protein, 33 aa, Artificial Sequence
  Non-cyclic GFR-binding peptide
  MOD_RES (32)..(33): Xaa is C or S
RDVVMGYHYKLIIQQKDNKYLMSIPSMKTPTXX

SEQ ID NO: 31904 - protein, 38 aa, Artificial Sequence
  Non-cyclic GFR-binding peptide
  MOD_RES (2)..(4)..(38): Xaa is C or S
  MOD_RES (16)..(17)..(18)..(19)..(20): Xaa is A or G
  MOD_RES (21)..(22)..(23)..(24): Xaa is A or G or absent
RXGXSEVVMDEYKFKXXXXXXXXXLYLISIPELRTPVX

SEQ ID NO: 31905 - protein, 34 aa, Artificial Sequence
  Non-cyclic GFR-binding peptide
  MOD_RES (2)..(34): Xaa is C or S
GXSEVVMDYHYKLVVNNASDKYLISIPSLRTPVX

SEQ ID NO: 31906 - protein, 39 aa, Artificial Sequence
  Non-cyclic GFR-binding peptide
  MOD_RES (34)..(35): Xaa is C or S
  MOD_RES (12)..(13)..(14)..(15)..(16): Xaa is A or G
  MOD_RES (17)..(18)..(19)..(20): Xaa is A or G or absent
RDVVMGEYKFKXXXXXXXXXLYLMSIPEMKTPTXXPGAS

SEQ ID NO: 31907 - protein, 35 aa, Artificial Sequence
  Non-cyclic GFR-binding peptide
  MOD_RES (1)..(34)..(35): Xaa is C or S
  MOD_RES (12)..(13)..(14)..(15)..(16): Xaa is A or G
  MOD_RES (17)..(18)..(19)..(20): Xaa is A or G or absent
XSKVVMPIKGYXXXXXXXXXFYLINIPSLDQPVXX

SEQ ID NO: 31908 - protein, 37 aa, Artificial Sequence
  Non-cyclic GFR-binding peptide
  MOD_RES (2)..(4)..(36)..(37): Xaa is C or S
RXGXSEVVMDYHYKLVVNNASDKYLISIPSLRTPVXX

SEQ ID NO: 31909 - protein, 36 aa, Artificial Sequence
  Non-cyclic GFR-binding peptide
  MOD_RES (1)..(33)..(34): Xaa is C or S
XESVAMGRHKRLYTVVGKDYYLISTASLKTPVXXAK

SEQ ID NO: 31910 - protein, 43 aa, Artificial Sequence
  Non-cyclic GFR-binding peptide
  MOD_RES (2)..(4)..(37)..(38): Xaa is C or S
  MOD_RES (15)..(16)..(17)..(18)..(19): Xaa is A or G
  MOD_RES (20)..(21)..(22)..(23): Xaa is A or G or absent
SXKXSKVIMPIKGYXXXXXXXXXFYLINIPSLDQSVXXPSASA

SEQ ID NO: 31911 - protein, 35 aa, Artificial Sequence
  Non-cyclic GFR-binding peptide
  MOD_RES (2)..(34)..(35): Xaa is C or S
AXSEVTMNYHYKLVVNKNEDKYLISIPSMKEPVXX

SEQ ID NO: 31912 - protein, 41 aa, Artificial Sequence
  Non-cyclic GFR-binding peptide
  MOD_RES (2)..(4)..(35)..(36): Xaa is C or S
SXKXSRVIMPIKGYVKPKRGVFYLINIPSLAQPVXXPAASA

SEQ ID NO: 31913 - protein, 40 aa, Artificial Sequence
  Non-cyclic GFR-binding peptide
  MOD_RES (1)..(34)..(35): Xaa is C or S
  MOD_RES (12)..(13)..(14)..(15)..(16): Xaa is A or G
  MOD_RES (17)..(18)..(19)..(20): Xaa is A or G or absent
XSKVVMPIKGYXXXXXXXXXFYLINIPSLDQPVXXPSASA

SEQ ID NO: 31914 - protein, 39 aa, Artificial Sequence
  Non-cyclic GFR-binding peptide
  MOD_RES (34)..(35): Xaa is C or S
  MOD_RES (12)..(13)..(14)..(15)..(16): Xaa is A or G
  MOD_RES (17)..(18)..(19)..(20): Xaa is A or G or absent
SEVVMDRHKRLXXXXXXXXXYYLISTASLRTPVXXTPPT

SEQ ID NO: 31915 - protein, 36 aa, Artificial Sequence
  Non-cyclic GFR-binding peptide
  MOD_RES (2)..(36): Xaa is C or S
  MOD_RES (14)..(15)..(16)..(17)..(18): Xaa is A or G
  MOD_RES (19)..(20)..(21)..(22): Xaa is A or G or absent
AXSEVTMNPIKGYXXXXXXXXXFYLINIPSMKEPVX

SEQ ID NO: 31916 - protein, 33 aa, Artificial Sequence
  Non-cyclic GFR-binding peptide
  MOD_RES (31)..(32): Xaa is C or S
EVTMNYHYKLVVNKNEDKYLISIPSMKEPVXXP

SEQ ID NO: 31917 - protein, 35 aa, Artificial Sequence
  Non-cyclic GFR-binding peptide
  MOD_RES (33)..(34): Xaa is C or S
  MOD_RES (11)..(12)..(13)..(14)..(15): Xaa is A or G
  MOD_RES (16)..(17)..(18)..(19): Xaa is A or G or absent
EVTMNYHYKLXXXXXXXXXKYLISIPSMKEPVXXP

SEQ ID NO: 31918 - protein, 37 aa, Artificial Sequence
  Non-cyclic GFR-binding peptide
  MOD_RES (2)..(35)..(36): Xaa is C or S
  MOD_RES (13)..(14)..(15)..(16)..(17): Xaa is A or G
  MOD_RES (18)..(19)..(20)..(21): Xaa is A or G or absent
GXEEVIMEYKFKXXXXXXXXXLYLMSIPETKVPAXXT

SEQ ID NO: 31919 - protein, 40 aa, Artificial Sequence
  Non-cyclic GFR-binding peptide
  MOD_RES (2)..(4)..(36)..(37): Xaa is C or S
RXGXAEVVMDRHKRLVVNNAADYYLISTASLRAPVXXSAP

SEQ ID NO: 31920 - protein, 34 aa, Artificial Sequence
  Non-cyclic GFR-binding peptide
  MOD_RES (33)..(34): Xaa is C or S
  MOD_RES (11)..(12)..(13)..(14)..(15): Xaa is A or G
  MOD_RES (16)..(17)..(18)..(19): Xaa is A or G or absent
DVVMGYHYKLXXXXXXXXXKYLMSIPSMKTPTXX

SEQ ID NO: 31921 - protein, 41 aa, Artificial Sequence
  Non-cyclic GFR-binding peptide
  MOD_RES (2)..(4)..(38)..(39): Xaa is C or S
  MOD_RES (16)..(17)..(18)..(19)..(20): Xaa is A or G
  MOD_RES (21)..(22)..(23)..(24): Xaa is A or G or absent
SXGXRDVVMGRHKRLXXXXXXXXXYYLMSTASMKTPTXXPG

SEQ ID NO: 31922 - protein, 37 aa, Artificial Sequence
  Non-cyclic GFR-binding peptide
  MOD_RES (1)..(35)..(36): Xaa is C or S
  MOD_RES (13)..(14)..(15)..(16)..(17): Xaa is A or G
  MOD_RES (18)..(19)..(20)..(21): Xaa is A or G or absent
XSEVTMNRYKKLXXXXXXXXXFYLISIANMKEPVXXP

SEQ ID NO: 31923 - protein, 39 aa, Artificial Sequence
  Non-cyclic GFR-binding peptide
  MOD_RES (2)..(4)..(36)..(37): Xaa is C or S
SXGXRDVVMGYHYKLIIQQKDNKYLMSIPSMKTPTXXPG

SEQ ID NO: 31924 - protein, 36 aa, Artificial Sequence
  Non-cyclic GFR-binding peptide
  MOD_RES (1)..(3)..(34)..(35): Xaa is C or S
XKXSRVIMPIKGYVKPKRGVFYLINIPSLAQPVXXP

SEQ ID NO: 31925 - protein, 36 aa, Artificial Sequence
  Non-cyclic GFR-binding peptide
  MOD_RES (34)..(35): Xaa is C or S
  MOD_RES (12)..(13)..(14)..(15)..(16): Xaa is A or G
  MOD_RES (17)..(18)..(19)..(20): Xaa is A or G or absent
RDVVMGEYKFKXXXXXXXXXLYLMSIPEMKTPTXXP

SEQ ID NO: 31926 - protein, 35 aa, Artificial Sequence
  Non-cyclic GFR-binding peptide
  MOD_RES (34)..(35): Xaa is C or S
  MOD_RES (12)..(13)..(14)..(15)..(16): Xaa is A or G
  MOD_RES (17)..(18)..(19)..(20): Xaa is A or G or absent
RDVVMGEYKFKXXXXXXXXXLYLMSIPEMKTPTXX

SEQ ID NO: 31927 - protein, 43 aa, Artificial Sequence
  Non-cyclic GFR-binding peptide
  MOD_RES (2)..(4)..(37)..(38): Xaa is C or S
  MOD_RES (15)..(16)..(17)..(18)..(19): Xaa is A or G
  MOD_RES (20)..(21)..(22)..(23): Xaa is A or G or absent
LXGXEEVIMYHYKLXXXXXXXXXKYLMSIPSTKVPAXXTSPVR

SEQ ID NO: 31928 - protein, 39 aa, Artificial Sequence
  Non-cyclic GFR-binding peptide
  MOD_RES (2)..(35)..(36): Xaa is C or S
  MOD_RES (13)..(14)..(15)..(16)..(17): Xaa is A or G
  MOD_RES (18)..(19)..(20)..(21): Xaa is A or G or absent
GXEEVIMYHYKLXXXXXXXXXKYLMSIPSTKVPAXXTSP

SEQ ID NO: 31929 - protein, 40 aa, Artificial Sequence
  Non-cyclic GFR-binding peptide
  MOD_RES (2)..(35)..(36): Xaa is C or S
  MOD_RES (13)..(14)..(15)..(16)..(17): Xaa is A or G
  MOD_RES (18)..(19)..(20)..(21): Xaa is A or G or absent
GXEEVIMRHKRLXXXXXXXXXYYLMSTASTKVPAXXTSPV

SEQ ID NO: 31930 - protein, 35 aa, Artificial Sequence
  Non-cyclic GFR-binding peptide
  MOD_RES (1)..(3)..(34)..(35): Xaa is C or S
XGXEEVIMEYKFKLLVRGNDLYLMSIPETKVPAXX

SEQ ID NO: 31931 - protein, 37 aa, Artificial Sequence
  Non-cyclic GFR-binding peptide
  MOD_RES (1)..(3)..(35)..(36): Xaa is C or S
XGXAEVVMDRHKRLVVNNAADYYLISTASLRAPVXXS

SEQ ID NO: 31932 - protein, 36 aa, Artificial Sequence
  Non-cyclic GFR-binding peptide
  MOD_RES (2)..(33)..(34): Xaa is C or S
GXEEVIMYHYKLLLVRGNDKYLMSIPSTKVPAXXTS

SEQ ID NO: 31933 - protein, 36 aa, Artificial Sequence
  Non-cyclic GFR-binding peptide
  MOD_RES (32)..(33): Xaa is C or S
RDVVMGEYKFKIIQQKDNLYLMSIPEMKTPTXXPGA

SEQ ID NO: 31934 - protein, 37 aa, Artificial Sequence
  Non-cyclic GFR-binding peptide
  MOD_RES (1)..(33)..(34): Xaa is C or S
XSEVTMNPIKGYVVNKNEDFYLINIPSMKEPVXXPEP

SEQ ID NO: 31935 - protein, 32 aa, Artificial Sequence
  Non-cyclic GFR-binding peptide
  MOD_RES (31)..(32): Xaa is C or S
SRVIMPIKGYVKPKRGVFYLINIPSLAQPVXX

SEQ ID NO: 31936 - protein, 36 aa, Artificial Sequence
  Non-cyclic GFR-binding peptide
  MOD_RES (31)..(32): Xaa is C or S
EVVMDEYKFKVVNNASDLYLISIPELRTPVXXTPPT

SEQ ID NO: 31937 - protein, 35 aa, Artificial Sequence
  Non-cyclic GFR-binding peptide
  MOD_RES (2)..(2): Xaa is C or S
  MOD_RES (14)..(15)..(16)..(17)..(18): Xaa is A or G
  MOD_RES (19)..(20)..(21)..(22): Xaa is A or G or absent
GXRDVVMGYHYKLXXXXXXXXXKYLMSIPSMKTPT

SEQ ID NO: 31938 - protein, 35 aa, Artificial Sequence
  Non-cyclic GFR-binding peptide
  MOD_RES (33)..(34): Xaa is C or S
  MOD_RES (11)..(12)..(13)..(14)..(15): Xaa is A or G
  MOD_RES (16)..(17)..(18)..(19): Xaa is A or G or absent
EVTMNEYKFKXXXXXXXXXLYLISIPEMKEPVXXP

SEQ ID NO: 31939 - protein, 36 aa, Artificial Sequence
  Non-cyclic GFR-binding peptide
  MOD_RES (2)..(33)..(34): Xaa is C or S
KXSKVVMPIKGYVKPTRGVFYLINIPSLDQPVXXPS

SEQ ID NO: 31940 - protein, 40 aa, Artificial Sequence
  Non-cyclic GFR-binding peptide
  MOD_RES (34)..(35): Xaa is C or S
  MOD_RES (12)..(13)..(14)..(15)..(16): Xaa is A or G
  MOD_RES (17)..(18)..(19)..(20): Xaa is A or G or absent
SRVVMNRHKRLXXXXXXXXXYYLVSTASLKTPAXXPKPVH

SEQ ID NO: 31941 - protein, 36 aa, Artificial Sequence
  Non-cyclic GFR-binding peptide
  MOD_RES (1)..(33)..(34): Xaa is C or S
XSEVTMNPIKGYVVNKNEDFYLINIPSMKEPVXXPE

SEQ ID NO: 31942 - protein, 40 aa, Artificial Sequence
  Non-cyclic GFR-binding peptide
  MOD_RES (2)..(4)..(36)..(37): Xaa is C or S
SXGXRDVVMGYHYKLIIQQKDNKYLMSIPSMKTPTXXPGA

SEQ ID NO: 31943 - protein, 37 aa, Artificial Sequence
  Non-cyclic GFR-binding peptide
  MOD_RES (1)..(3)..(37): Xaa is C or S
  MOD_RES (15)..(16)..(17)..(18)..(19): Xaa is A or G
  MOD_RES (20)..(21)..(22)..(23): Xaa is A or G or absent
XAXSEVTMNRYKKLXXXXXXXXXFYLISIANMKEPVX

SEQ ID NO: 31944 - protein, 37 aa, Artificial Sequence
  Non-cyclic GFR-binding peptide
  MOD_RES (1)..(3)..(35)..(36): Xaa is C or S
XAXSEVTMNPIKGYVVNKNEDFYLINIPSMKEPVXXP

SEQ ID NO: 31945 - protein, 34 aa, Artificial Sequence
  Non-cyclic GFR-binding peptide
  MOD_RES (2)..(2): Xaa is C or S
  MOD_RES (13)..(14)..(15)..(16)..(17): Xaa is A or G
  MOD_RES (18)..(19)..(20)..(21): Xaa is A or G or absent
KXSRVIMPIKGYXXXXXXXXXFYLINIPSLAQPV

SEQ ID NO: 31946 - protein, 35 aa, Artificial Sequence
  Non-cyclic GFR-binding peptide
  MOD_RES (2)..(2): Xaa is C or S
  MOD_RES (14)..(15)..(16)..(17)..(18): Xaa is A or G
  MOD_RES (19)..(20)..(21)..(22): Xaa is A or G or absent
GXESVAMGRHKRLXXXXXXXXXYYLISTASLKTPV

SEQ ID NO: 31947 - protein, 41 aa, Artificial Sequence
  Non-cyclic GFR-binding peptide
  MOD_RES (1)..(3)..(35)..(36): Xaa is C or S
XGXAEVVMDRHKRLVVNNAADYYLISTASLRAPVXXSAPAA

SEQ ID NO: 31948 - protein, 35 aa, Artificial Sequence
  Non-cyclic GFR-binding peptide
  MOD_RES (2)..(4): Xaa is C or S
RXGXSEVVMDEYKFKVVNNASDLYLISIPELRTPV

SEQ ID NO: 31949 - protein, 37 aa, Artificial Sequence
  Non-cyclic GFR-binding peptide
  MOD_RES (2)..(4)..(36)..(37): Xaa is C or S
RXAXSEVTMNPIKGYVVNKNEDFYLINIPSMKEPVXX

SEQ ID NO: 31950 - protein, 36 aa, Artificial Sequence
  Non-cyclic GFR-binding peptide
  MOD_RES (34)..(35): Xaa is C or S
  MOD_RES (12)..(13)..(14)..(15)..(16): Xaa is A or G
  MOD_RES (17)..(18)..(19)..(20): Xaa is A or G or absent
RDVVMGYHYKLXXXXXXXXXKYLMSIPSMKTPTXXP

SEQ ID NO: 31951 - protein, 37 aa, Artificial Sequence
  Non-cyclic GFR-binding peptide
  MOD_RES (1)..(33)..(34): Xaa is C or S
XRDVVMGRHKRLIIQQKDNYYLMSTASMKTPTXXPGA

SEQ ID NO: 31952 - protein, 37 aa, Artificial Sequence
  Non-cyclic GFR-binding peptide
  MOD_RES (1)..(35)..(36): Xaa is C or S
  MOD_RES (13)..(14)..(15)..(16)..(17): Xaa is A or G
  MOD_RES (18)..(19)..(20)..(21): Xaa is A or G or absent
XRDVVMGRHKRLXXXXXXXXXYYLMSTASMKTPTXXP

SEQ ID NO: 31953 - protein, 40 aa, Artificial Sequence
  Non-cyclic GFR-binding peptide
  MOD_RES (2)..(4)..(37)..(38): Xaa is C or S
  MOD_RES (15)..(16)..(17)..(18)..(19): Xaa is A or G
  MOD_RES (20)..(21)..(22)..(23): Xaa is A or G or absent
SXKXSKVIMPIKGYXXXXXXXXXFYLINIPSLDQSVXXPS

SEQ ID NO: 31954 - protein, 35 aa, Artificial Sequence
  Non-cyclic GFR-binding peptide
  MOD_RES (1)..(33)..(34): Xaa is C or S
XRDVVMGYHYKLIIQQKDNKYLMSIPSMKTPTXXP

SEQ ID NO: 31955 - protein, 36 aa, Artificial Sequence
  Non-cyclic GFR-binding peptide
  MOD_RES (32)..(33): Xaa is C or S
RDVVMGRHKRLIIQQKDNYYLMSTASMKTPTXXPGA

SEQ ID NO: 31956 - protein, 41 aa, Artificial Sequence
  Non-cyclic GFR-binding peptide
  MOD_RES (1)..(3)..(35)..(36): Xaa is C or S
XGXSEVVMDRHKRLVVNNASDYYLISTASLRTPVXXTPPTS

SEQ ID NO: 31957 - protein, 42 aa, Artificial Sequence
  Non-cyclic GFR-binding peptide
  MOD_RES (2)..(36)..(37): Xaa is C or S
  MOD_RES (14)..(15)..(16)..(17)..(18): Xaa is A or G
  MOD_RES (19)..(20)..(21)..(22): Xaa is A or G or absent
AXSEVTMNYHYKLXXXXXXXXXKYLISIPSMKEPVXXPEPIG

SEQ ID NO: 31958 - protein, 32 aa, Artificial Sequence
  Non-cyclic GFR-binding peptide
  MOD_RES (11)..(12)..(13)..(14)..(15): Xaa is A or G
  MOD_RES (16)..(17)..(18)..(19): Xaa is A or G or absent
EVVMDRHKRLXXXXXXXXXYYLISTASLRAPV

SEQ ID NO: 31959 - protein, 32 aa, Artificial Sequence
  Non-cyclic GFR-binding peptide
  MOD_RES (1)..(1): Xaa is C or S
XSEVTMNEYKFKVVNKNEDLYLISIPEMKEPV

SEQ ID NO: 31960 - protein, 36 aa, Artificial Sequence
  Non-cyclic GFR-binding peptide
  MOD_RES (1)..(3)..(35)..(36): Xaa is C or S
XGXSEVVMDEYKFKVVNNASDLYLISIPELRTPVXX

SEQ ID NO: 31961 - protein, 39 aa, Artificial Sequence
  Non-cyclic GFR-binding peptide
  MOD_RES (1)..(35)..(36): Xaa is C or S
  MOD_RES (13)..(14)..(15)..(16)..(17): Xaa is A or G
  MOD_RES (18)..(19)..(20)..(21): Xaa is A or G or absent
XAEVVMDRHKRLXXXXXXXXXYYLISTASLRAPVXXSAP

SEQ ID NO: 31962 - protein, 42 aa, Artificial Sequence
  Non-cyclic GFR-binding peptide
  MOD_RES (1)..(3)..(37)..(38): Xaa is C or S
  MOD_RES (15)..(16)..(17)..(18)..(19): Xaa is A or G
  MOD_RES (20)..(21)..(22)..(23): Xaa is A or G or absent
XAXSEVTMNYHYKLXXXXXXXXXKYLISIPSMKEPVXXPEPI

SEQ ID NO: 31963 - protein, 40 aa, Artificial Sequence
  Non-cyclic GFR-binding peptide
  MOD_RES (1)..(3)..(37)..(38): Xaa is C or S
  MOD_RES (15)..(16)..(17)..(18)..(19): Xaa is A or G
  MOD_RES (20)..(21)..(22)..(23): Xaa is A or G or absent
XGXSEVVMDRHKRLXXXXXXXXXYYLISTASLRTPVXXTP

SEQ ID NO: 31964 - protein, 37 aa, Artificial Sequence
  Non-cyclic GFR-binding peptide
  MOD_RES (31)..(32): Xaa is C or S
EVTMNRYKKLVVNKNEDFYLISIANMKEPVXXPEPIG

SEQ ID NO: 31965 - protein, 36 aa, Artificial Sequence
  Non-cyclic GFR-binding peptide
  MOD_RES (1)..(3): Xaa is C or S
  MOD_RES (15)..(16)..(17)..(18)..(19): Xaa is A or G
  MOD_RES (20)..(21)..(22)..(23): Xaa is A or G or absent
XGXSEVVMDEYKFKXXXXXXXXXLYLISIPELRTPV

SEQ ID NO: 31966 - protein, 35 aa, Artificial Sequence
  Non-cyclic GFR-binding peptide
  MOD_RES (1)..(3)..(34)..(35): Xaa is C or S
XKXSKVIMPIKGYIKPTKGIFYLINIPSLDQSVXX

SEQ ID NO: 31967 - protein, 39 aa, Artificial Sequence
  Non-cyclic GFR-binding peptide
  MOD_RES (2)..(4)..(35)..(36): Xaa is C or S
SXKXSKVIMPIKGYIKPTKGIFYLINIPSLDQSVXXPSA

SEQ ID NO: 31968 - protein, 34 aa, Artificial Sequence
  Non-cyclic GFR-binding peptide
  MOD_RES (33)..(34): Xaa is C or S
  MOD_RES (11)..(12)..(13)..(14)..(15): Xaa is A or G
  MOD_RES (16)..(17)..(18)..(19): Xaa is A or G or absent
EEVIMYHYKLXXXXXXXXXKYLMSIPSTKVPAXX

SEQ ID NO: 31969 - protein, 32 aa, Artificial Sequence
  Non-cyclic GFR-binding peptide
  MOD_RES (11)..(12)..(13)..(14)..(15): Xaa is A or G
  MOD_RES (16)..(17)..(18)..(19): Xaa is A or G or absent
EVTMNRYKKLXXXXXXXXXFYLISIANMKEPV

SEQ ID NO: 31970 - protein, 38 aa, Artificial Sequence
  Non-cyclic GFR-binding peptide
  MOD_RES (2)..(36)..(37): Xaa is C or S
  MOD_RES (14)..(15)..(16)..(17)..(18): Xaa is A or G
  MOD_RES (19)..(20)..(21)..(22): Xaa is A or G or absent
AXSEVTMNRYKKLXXXXXXXXXFYLISIANMKEPVXXP

SEQ ID NO: 31971 - protein, 39 aa, Artificial Sequence
  Non-cyclic GFR-binding peptide
  MOD_RES (33)..(34): Xaa is C or S
  MOD_RES (11)..(12)..(13)..(14)..(15): Xaa is A or G
  MOD_RES (16)..(17)..(18)..(19): Xaa is A or G or absent
EVTMNRHKRLXXXXXXXXXYYLISTASMKEPVXXPEPIG

SEQ ID NO: 31972 - protein, 40 aa, Artificial Sequence
  Non-cyclic GFR-binding peptide
  MOD_RES (2)..(34)..(35): Xaa is C or S
GXSRVVMNEYKFKIVNSSDDLYLVSIPELKTPAXXPKPVH

SEQ ID NO: 31973 - protein, 35 aa, Artificial Sequence
  Non-cyclic GFR-binding peptide
  MOD_RES (1)..(34)..(35): Xaa is C or S
  MOD_RES (12)..(13)..(14)..(15)..(16): Xaa is A or G
  MOD_RES (17)..(18)..(19)..(20): Xaa is A or G or absent
XEEVIMYHYKLXXXXXXXXXKYLMSIPSTKVPAXX

SEQ ID NO: 31974 - protein, 36 aa, Artificial Sequence
  Non-cyclic GFR-binding peptide
  MOD_RES (34)..(35): Xaa is C or S
  MOD_RES (12)..(13)..(14)..(15)..(16): Xaa is A or G
  MOD_RES (17)..(18)..(19)..(20): Xaa is A or G or absent
SEVTMNEYKFKXXXXXXXXXLYLISIPEMKEPVXXP

SEQ ID NO: 31975 - protein, 38 aa, Artificial Sequence
  Non-cyclic GFR-binding peptide
  MOD_RES (1)..(34)..(35): Xaa is C or S
  MOD_RES (12)..(13)..(14)..(15)..(16): Xaa is A or G
  MOD_RES (17)..(18)..(19)..(20): Xaa is A or G or absent
XSKVIMPIKGYXXXXXXXXXFYLINIPSLDQSVXXPSA

SEQ ID NO: 31976 - protein, 42 aa, Artificial Sequence
  Non-cyclic GFR-binding peptide
  MOD_RES (1)..(3)..(37)..(38): Xaa is C or S
  MOD_RES (15)..(16)..(17)..(18)..(19): Xaa is A or G
  MOD_RES (20)..(21)..(22)..(23): Xaa is A or G or absent
XGXSEVVMDYHYKLXXXXXXXXXKYLISIPSLRTPVXXTPPT

SEQ ID NO: 31977 - protein, 42 aa, Artificial Sequence
  Non-cyclic GFR-binding peptide
  MOD_RES (2)..(4)..(36)..(37): Xaa is C or S
HXGXSRVVMNEYKFKIVNSSDDLYLVSIPELKTPAXXPKPVH

SEQ ID NO: 31978 - protein, 42 aa, Artificial Sequence
  Non-cyclic GFR-binding peptide
  MOD_RES (2)..(36)..(37): Xaa is C or S
  MOD_RES (14)..(15)..(16)..(17)..(18): Xaa is A or G
  MOD_RES (19)..(20)..(21)..(22): Xaa is A or G or absent
GXSRVVMNYHYKLXXXXXXXXXKYLVSIPSLKTPAXXPKPVH

SEQ ID NO: 31979 - protein, 34 aa, Artificial Sequence
  Non-cyclic GFR-binding peptide
  MOD_RES (33)..(34): Xaa is C or S
  MOD_RES (11)..(12)..(13)..(14)..(15): Xaa is A or G
  MOD_RES (16)..(17)..(18)..(19): Xaa is A or G or absent
DVVMGRHKRLXXXXXXXXXYYLMSTASMKTPTXX

SEQ ID NO: 31980 - protein, 35 aa, Artificial Sequence
  Non-cyclic GFR-binding peptide
  MOD_RES (1)..(3)..(34)..(35): Xaa is C or S
XKXSKVVMPIKGYVKPTRGVFYLINIPSLDQPVXX

SEQ ID NO: 31981 - protein, 33 aa, Artificial Sequence
  Non-cyclic GFR-binding peptide
  MOD_RES (31)..(32): Xaa is C or S
EVTMNRYKKLVVNKNEDFYLISIANMKEPVXXP

SEQ ID NO: 31982 - protein, 39 aa, Artificial Sequence
  Non-cyclic GFR-binding peptide
  MOD_RES (33)..(34): Xaa is C or S
  MOD_RES (11)..(12)..(13)..(14)..(15): Xaa is A or G
  MOD_RES (16)..(17)..(18)..(19): Xaa is A or G or absent
SRVIMPIKGYXXXXXXXXXFYLINIPSLAQPVXXPAASA

SEQ ID NO: 31983 - protein, 42 aa, Artificial Sequence
  Non-cyclic GFR-binding peptide
  MOD_RES (2)..(4)..(38)..(39): Xaa is C or S
  MOD_RES (16)..(17)..(18)..(19)..(20): Xaa is A or G
  MOD_RES (21)..(22)..(23)..(24): Xaa is A or G or absent
RXGXAEVVMDRHKRLXXXXXXXXXYYLISTASLRAPVXXSAP

SEQ ID NO: 31984 - protein, 37 aa, Artificial Sequence
  Non-cyclic GFR-binding peptide
  MOD_RES (33)..(34): Xaa is C or S
  MOD_RES (11)..(12)..(13)..(14)..(15): Xaa is A or G
  MOD_RES (16)..(17)..(18)..(19): Xaa is A or G or absent
EEVIMEYKFKXXXXXXXXXLYLMSIPETKVPAXXTSP

SEQ ID NO: 31985 - protein, 42 aa, Artificial Sequence
  Non-cyclic GFR-binding peptide
  MOD_RES (1)..(3)..(37)..(38): Xaa is C or S
  MOD_RES (15)..(16)..(17)..(18)..(19): Xaa is A or G
  MOD_RES (20)..(21)..(22)..(23): Xaa is A or G or absent
XAXSEVTMNPIKGYXXXXXXXXXFYLINIPSMKEPVXXPEPI

SEQ ID NO: 31986 - protein, 36 aa, Artificial Sequence
  Non-cyclic GFR-binding peptide
  MOD_RES (2)..(35)..(36): Xaa is C or S
  MOD_RES (13)..(14)..(15)..(16)..(17): Xaa is A or G
  MOD_RES (18)..(19)..(20)..(21): Xaa is A or G or absent
GXEEVIMEYKFKXXXXXXXXXLYLMSIPETKVPAXX

SEQ ID NO: 31987 - protein, 41 aa, Artificial Sequence
  Non-cyclic GFR-binding peptide
  MOD_RES (2)..(4)..(38)..(39): Xaa is C or S
  MOD_RES (16)..(17)..(18)..(19)..(20): Xaa is A or G
  MOD_RES (21)..(22)..(23)..(24): Xaa is A or G or absent
SXGXRDVVMGEYKFKXXXXXXXXXLYLMSIPEMKTPTXXPG

SEQ ID NO: 31988 - protein, 36 aa, Artificial Sequence
  Non-cyclic GFR-binding peptide
  MOD_RES (1)..(35)..(36): Xaa is C or S
  MOD_RES (13)..(14)..(15)..(16)..(17): Xaa is A or G
  MOD_RES (18)..(19)..(20)..(21): Xaa is A or G or absent
XAEVVMDRHKRLXXXXXXXXXYYLISTASLRAPVXX

SEQ ID NO: 31989 - protein, 39 aa, Artificial Sequence
  Non-cyclic GFR-binding peptide
  MOD_RES (33)..(34): Xaa is C or S
  MOD_RES (11)..(12)..(13)..(14)..(15): Xaa is A or G
  MOD_RES (16)..(17)..(18)..(19): Xaa is A or G or absent
DVVMGRHKRLXXXXXXXXXYYLMSTASMKTPTXXPGASG

SEQ ID NO: 31990 - protein, 38 aa, Artificial Sequence
  Non-cyclic GFR-binding peptide
  MOD_RES (33)..(34): Xaa is C or S
  MOD_RES (11)..(12)..(13)..(14)..(15): Xaa is A or G
  MOD_RES (16)..(17)..(18)..(19): Xaa is A or G or absent
SRVIMPIKGYXXXXXXXXXFYLINIPSLAQPVXXPAAS

SEQ ID NO: 31991 - protein, 32 aa, Artificial Sequence
  Non-cyclic GFR-binding peptide
  MOD_RES (11)..(12)..(13)..(14)..(15): Xaa is A or G
  MOD_RES (16)..(17)..(18)..(19): Xaa is A or G or absent
DVVMGEYKFKXXXXXXXXXLYLMSIPEMKTPT

SEQ ID NO: 31992 - protein, 40 aa, Artificial Sequence
  Non-cyclic GFR-binding peptide
  MOD_RES (1)..(3)..(36)..(37): Xaa is C or S
  MOD_RES (14)..(15)..(16)..(17)..(18): Xaa is A or G
  MOD_RES (19)..(20)..(21)..(22): Xaa is A or G or absent
XGXEEVIMRHKRLXXXXXXXXXYYLMSTASTKVPAXXTSP

SEQ ID NO: 31993 - protein, 41 aa, Artificial Sequence
  Non-cyclic GFR-binding peptide
  MOD_RES (2)..(36)..(37): Xaa is C or S
  MOD_RES (14)..(15)..(16)..(17)..(18): Xaa is A or G
  MOD_RES (19)..(20)..(21)..(22): Xaa is A or G or absent
AXSEVTMNPIKGYXXXXXXXXXFYLINIPSMKEPVXXPEPI

SEQ ID NO: 31994 - protein, 35 aa, Artificial Sequence
  Non-cyclic GFR-binding peptide
  MOD_RES (1)..(35): Xaa is C or S
  MOD_RES (13)..(14)..(15)..(16)..(17): Xaa is A or G
  MOD_RES (18)..(19)..(20)..(21): Xaa is A or G or absent
XSEVVMDYHYKLXXXXXXXXXKYLISIPSLRTPVX

SEQ ID NO: 31995 - protein, 35 aa, Artificial Sequence
  Non-cyclic GFR-binding peptide
  MOD_RES (2)..(33)..(34): Xaa is C or S
GXEEVIMEYKFKLLVRGNDLYLMSIPETKVPAXXT

SEQ ID NO: 31996 - protein, 39 aa, Artificial Sequence
  Non-cyclic GFR-binding peptide
  MOD_RES (2)..(4)..(36)..(37): Xaa is C or S
RXGXESVAMGRHKRLYTVVGKDYYLISTASLKTPVXXAK

SEQ ID NO: 31997 - protein, 39 aa, Artificial Sequence
  Non-cyclic GFR-binding peptide
  MOD_RES (1)..(33)..(34): Xaa is C or S
XSEVTMNYHYKLVVNKNEDKYLISIPSMKEPVXXPEPIG

SEQ ID NO: 31998 - protein, 40 aa, Artificial Sequence
  Non-cyclic GFR-binding peptide
  MOD_RES (2)..(34)..(35): Xaa is C or S
AXSEVTMNPIKGYVVNKNEDFYLINIPSMKEPVXXPEPIG

SEQ ID NO: 31999 - protein, 39 aa, Artificial Sequence
  Non-cyclic GFR-binding peptide
  MOD_RES (34)..(35): Xaa is C or S
  MOD_RES (12)..(13)..(14)..(15)..(16): Xaa is A or G
  MOD_RES (17)..(18)..(19)..(20): Xaa is A or G or absent
SEVVMDEYKFKXXXXXXXXXLYLISIPELRTPVXXTPPT

SEQ ID NO: 32000 - protein, 36 aa, Artificial Sequence
  Non-cyclic GFR-binding peptide
  MOD_RES (1)..(33)..(34): Xaa is C or S
XRDVVMGEYKFKIIQQKDNLYLMSIPEMKTPTXXPG

SEQ ID NO: 32001 - protein, 36 aa, Artificial Sequence
  Non-cyclic GFR-binding peptide
  MOD_RES (32)..(33): Xaa is C or S
SEVTMNEYKFKVVNKNEDLYLISIPEMKEPVXXPEP

SEQ ID NO: 32002 - protein, 40 aa, Artificial Sequence
  Non-cyclic GFR-binding peptide
  MOD_RES (2)..(4)..(36)..(37): Xaa is C or S
RXAXSEVTMNPIKGYVVNKNEDFYLINIPSMKEPVXXPEP

SEQ ID NO: 32003 - protein, 40 aa, Artificial Sequence
  Non-cyclic GFR-binding peptide
  MOD_RES (1)..(3)..(37)..(38): Xaa is C or S
  MOD_RES (15)..(16)..(17)..(18)..(19): Xaa is A or G
  MOD_RES (20)..(21)..(22)..(23): Xaa is A or G or absent
XGXAEVVMDRHKRLXXXXXXXXXYYLISTASLRAPVXXSA

SEQ ID NO: 32004 - protein, 39 aa, Artificial Sequence
  Non-cyclic GFR-binding peptide
  MOD_RES (2)..(36)..(37): Xaa is C or S
  MOD_RES (14)..(15)..(16)..(17)..(18): Xaa is A or G
  MOD_RES (19)..(20)..(21)..(22): Xaa is A or G or absent
GXRDVVMGEYKFKXXXXXXXXXLYLMSIPEMKTPTXXPG

SEQ ID NO: 32005 - protein, 37 aa, Artificial Sequence
  Non-cyclic GFR-binding peptide
  MOD_RES (1)..(35)..(36): Xaa is C or S
  MOD_RES (13)..(14)..(15)..(16)..(17): Xaa is A or G
  MOD_RES (18)..(19)..(20)..(21): Xaa is A or G or absent
XESVAMGRHKRLXXXXXXXXXYYLISTASLKTPVXXA

SEQ ID NO: 32006 - protein, 32 aa, Artificial Sequence
  Non-cyclic GFR-binding peptide
  MOD_RES (1)..(32): Xaa is C or S
XEEVIMYHYKLLLVRGNDKYLMSIPSTKVPAX

SEQ ID NO: 32007 - protein, 37 aa, Artificial Sequence
  Non-cyclic GFR-binding peptide
  MOD_RES (2)..(36)..(37): Xaa is C or S
  MOD_RES (14)..(15)..(16)..(17)..(18): Xaa is A or G
  MOD_RES (19)..(20)..(21)..(22): Xaa is A or G or absent
AXSEVTMNPIKGYXXXXXXXXXFYLINIPSMKEPVXX

SEQ ID NO: 32008 - protein, 37 aa, Artificial Sequence
  Non-cyclic GFR-binding peptide
  MOD_RES (1)..(3)..(36)..(37): Xaa is C or S
  MOD_RES (14)..(15)..(16)..(17)..(18): Xaa is A or G
  MOD_RES (19)..(20)..(21)..(22): Xaa is A or G or absent
XGXEEVIMYHYKLXXXXXXXXXKYLMSIPSTKVPAXX

SEQ ID NO: 32009 - protein, 41 aa, Artificial Sequence
  Non-cyclic GFR-binding peptide
  MOD_RES (2)..(4)..(37)..(38): Xaa is C or S
  MOD_RES (15)..(16)..(17)..(18)..(19): Xaa is A or G
  MOD_RES (20)..(21)..(22)..(23): Xaa is A or G or absent
SXKXSKVVMPIKGYXXXXXXXXXFYLINIPSLDQPVXXPSA

SEQ ID NO: 32010 - protein, 36 aa, Artificial Sequence
  Non-cyclic GFR-binding peptide
  MOD_RES (2)..(34)..(35): Xaa is C or S
GXRDVVMGYHYKLIIQQKDNKYLMSIPSMKTPTXXP

SEQ ID NO: 32011 - protein, 38 aa, Artificial Sequence
  Non-cyclic GFR-binding peptide
  MOD_RES (2)..(33)..(34): Xaa is C or S
GXEEVIMEYKFKLLVRGNDLYLMSIPETKVPAXXTSPV

SEQ ID NO: 32012 - protein, 36 aa, Artificial Sequence
  Non-cyclic GFR-binding peptide
  MOD_RES (31)..(32): Xaa is C or S
SKVVMPIKGYVKPTRGVFYLINIPSLDQPVXXPSAS

SEQ ID NO: 32013 - protein, 39 aa, Artificial Sequence
  Non-cyclic GFR-binding peptide
  MOD_RES (2)..(36)..(37): Xaa is C or S
  MOD_RES (14)..(15)..(16)..(17)..(18): Xaa is A or G
  MOD_RES (19)..(20)..(21)..(22): Xaa is A or G or absent
GXRDVVMGYHYKLXXXXXXXXXKYLMSIPSMKTPTXXPG

SEQ ID NO: 32014 - protein, 34 aa, Artificial Sequence
  Non-cyclic GFR-binding peptide
  MOD_RES (1)..(3): Xaa is C or S
XAXSEVTMNYHYKLVVNKNEDKYLISIPSMKEPV

SEQ ID NO: 32015 - protein, 36 aa, Artificial Sequence
  Non-cyclic GFR-binding peptide
  MOD_RES (2)..(34)..(35): Xaa is C or S
AXSEVTMNYHYKLVVNKNEDKYLISIPSMKEPVXXP

SEQ ID NO: 32016 - protein, 32 aa, Artificial Sequence
  Non-cyclic GFR-binding peptide
  MOD_RES (31)..(32): Xaa is C or S
EVVMDRHKRLVVNNASDYYLISTASLRTPVXX

SEQ ID NO: 32017 - protein, 39 aa, Artificial Sequence
  Non-cyclic GFR-binding peptide
  MOD_RES (2)..(34)..(35): Xaa is C or S
AXSEVTMNRHKRLVVNKNEDYYLISTASMKEPVXXPEPI

SEQ ID NO: 32018 - protein, 33 aa, Artificial Sequence
  Non-cyclic GFR-binding peptide
  MOD_RES (31)..(32): Xaa is C or S
EEVIMYHYKLLLVRGNDKYLMSIPSTKVPAXXT

SEQ ID NO: 32019 - protein, 36 aa, Artificial Sequence
  Non-cyclic GFR-binding peptide
  MOD_RES (31)..(32): Xaa is C or S
EVTMNRYKKLVVNKNEDFYLISIANMKEPVXXPEPI

SEQ ID NO: 32020 - protein, 33 aa, Artificial Sequence
  Non-cyclic GFR-binding peptide
  MOD_RES (32)..(33): Xaa is C or S
RDVVMGRHKRLIIQQKDNYYLMSTASMKTPTXX

SEQ ID NO: 32021 - protein, 36 aa, Artificial Sequence
  Non-cyclic GFR-binding peptide
  MOD_RES (2)..(4)..(35)..(36): Xaa is C or S
SXKXSKVIMPIKGYIKPTKGIFYLINIPSLDQSVXX

SEQ ID NO: 32022 - protein, 36 aa, Artificial Sequence
  Non-cyclic GFR-binding peptide
  MOD_RES (1)..(3)..(35)..(36): Xaa is C or S
XGXRDVVMGRHKRLIIQQKDNYYLMSTASMKTPTXX

SEQ ID NO: 32023 - protein, 34 aa, Artificial Sequence
  Non-cyclic GFR-binding peptide
  MOD_RES (2)..(33)..(34): Xaa is C or S
KXSKVIMPIKGYIKPTKGIFYLINIPSLDQSVXX

SEQ ID NO: 32024 - protein, 34 aa, Artificial Sequence
  Non-cyclic GFR-binding peptide
  MOD_RES (32)..(33): Xaa is C or S
ESVAMGRHKRLYTVVGKDYYLISTASLKTPVXXA

SEQ ID NO: 32025 - protein, 34 aa, Artificial Sequence
  Non-cyclic GFR-binding peptide
  MOD_RES (1)..(33)..(34): Xaa is C or S
XSEVVMDEYKFKVVNNASDLYLISIPELRTPVXX

SEQ ID NO: 32026 - protein, 37 aa, Artificial Sequence
  Non-cyclic GFR-binding peptide
  MOD_RES (31)..(32): Xaa is C or S
EVVMDYHYKLVVNNASDKYLISIPSLRTPVXXTPPTS

SEQ ID NO: 32027 - protein, 39 aa, Artificial Sequence
  Non-cyclic GFR-binding peptide
  MOD_RES (33)..(34): Xaa is C or S
  MOD_RES (11)..(12)..(13)..(14)..(15): Xaa is A or G
  MOD_RES (16)..(17)..(18)..(19): Xaa is A or G or absent
DVVMGEYKFKXXXXXXXXXLYLMSIPEMKTPTXXPGASG

SEQ ID NO: 32028 - protein, 42 aa, Artificial Sequence
  Non-cyclic GFR-binding peptide
  MOD_RES (2)..(4)..(38)..(39): Xaa is C or S
  MOD_RES (16)..(17)..(18)..(19)..(20): Xaa is A or G
  MOD_RES (21)..(22)..(23)..(24): Xaa is A or G or absent
RXGXSEVVMDYHYKLXXXXXXXXXKYLISIPSLRTPVXXTPP

SEQ ID NO: 32029 - protein, 43 aa, Artificial Sequence
  Non-cyclic GFR-binding peptide
  MOD_RES (2)..(4)..(38)..(39): Xaa is C or S
  MOD_RES (16)..(17)..(18)..(19)..(20): Xaa is A or G
  MOD_RES (21)..(22)..(23)..(24): Xaa is A or G or absent
RXGXSEVVMDRHKRLXXXXXXXXXYYLISTASLRTPVXXTPPT

SEQ ID NO: 32030 - protein, 39 aa, Artificial Sequence
  Non-cyclic GFR-binding peptide
  MOD_RES (33)..(34): Xaa is C or S
  MOD_RES (11)..(12)..(13)..(14)..(15): Xaa is A or G
  MOD_RES (16)..(17)..(18)..(19): Xaa is A or G or absent
DVVMGYHYKLXXXXXXXXXKYLMSIPSMKTPTXXPGASG

SEQ ID NO: 32031 - protein, 40 aa, Artificial Sequence
  Non-cyclic GFR-binding peptide
  MOD_RES (1)..(35)..(36): Xaa is C or S
  MOD_RES (13)..(14)..(15)..(16)..(17): Xaa is A or G
  MOD_RES (18)..(19)..(20)..(21): Xaa is A or G or absent
XRDVVMGYHYKLXXXXXXXXXKYLMSIPSMKTPTXXPGAS

SEQ ID NO: 32032 - protein, 39 aa, Artificial Sequence
  Non-cyclic GFR-binding peptide
  MOD_RES (1)..(3)..(34)..(35): Xaa is C or S
XGXEEVIMRHKRLLLVRGNDYYLMSTASTKVPAXXTSPV

SEQ ID NO: 32033 - protein, 43 aa, Artificial Sequence
  Non-cyclic GFR-binding peptide
  MOD_RES (1)..(3)..(37)..(38): Xaa is C or S
  MOD_RES (15)..(16)..(17)..(18)..(19): Xaa is A or G
  MOD_RES (20)..(21)..(22)..(23): Xaa is A or G or absent
XGXSEVVMDYHYKLXXXXXXXXXKYLISIPSLRTPVXXTPPTS

SEQ ID NO: 32034 - protein, 37 aa, Artificial Sequence
  Non-cyclic GFR-binding peptide
  MOD_RES (1)..(3)..(37): Xaa is C or S
  MOD_RES (15)..(16)..(17)..(18)..(19): Xaa is A or G
  MOD_RES (20)..(21)..(22)..(23): Xaa is A or G or absent
XAXSEVTMNEYKFKXXXXXXXXXLYLISIPEMKEPVX

SEQ ID NO: 32035 - protein, 37 aa, Artificial Sequence
  Non-cyclic GFR-binding peptide
  MOD_RES (1)..(34)..(35): Xaa is C or S
  MOD_RES (12)..(13)..(14)..(15)..(16): Xaa is A or G
  MOD_RES (17)..(18)..(19)..(20): Xaa is A or G or absent
XEEVIMEYKFKXXXXXXXXXLYLMSIPETKVPAXXTS

SEQ ID NO: 32036 - protein, 38 aa, Artificial Sequence
  Non-cyclic GFR-binding peptide
  MOD_RES (1)..(33)..(34): Xaa is C or S
XSEVTMNRYKKLVVNKNEDFYLISIANMKEPVXXPEPI

SEQ ID NO: 32037 - protein, 32 aa, Artificial Sequence
  Non-cyclic GFR-binding peptide
  MOD_RES (31)..(32): Xaa is C or S
DVVMGYHYKLIIQQKDNKYLMSIPSMKTPTXX

SEQ ID NO: 32038 - protein, 40 aa, Artificial Sequence
  Non-cyclic GFR-binding peptide
  MOD_RES (2)..(35)..(36): Xaa is C or S
  MOD_RES (13)..(14)..(15)..(16)..(17): Xaa is A or G
  MOD_RES (18)..(19)..(20)..(21): Xaa is A or G or absent
GXEEVIMEYKFKXXXXXXXXXLYLMSIPETKVPAXXTSPV

SEQ ID NO: 32039 - protein, 34 aa, Artificial Sequence
  Non-cyclic GFR-binding peptide
  MOD_RES (33)..(34): Xaa is C or S
  MOD_RES (11)..(12)..(13)..(14)..(15): Xaa is A or G
  MOD_RES (16)..(17)..(18)..(19): Xaa is A or G or absent
EEVIMRHKRLXXXXXXXXXYYLMSTASTKVPAXX

SEQ ID NO: 32040 - protein, 40 aa, Artificial Sequence
  Non-cyclic GFR-binding peptide
  MOD_RES (1)..(34)..(35): Xaa is C or S
  MOD_RES (12)..(13)..(14)..(15)..(16): Xaa is A or G
  MOD_RES (17)..(18)..(19)..(20): Xaa is A or G or absent
XSRVIMPIKGYXXXXXXXXXFYLINIPSLAQPVXXPAASA

SEQ ID NO: 32041 - protein, 37 aa, Artificial Sequence
  Non-cyclic GFR-binding peptide
  MOD_RES (1)..(3)..(37): Xaa is C or S
  MOD_RES (15)..(16)..(17)..(18)..(19): Xaa is A or G
  MOD_RES (20)..(21)..(22)..(23): Xaa is A or G or absent
XGXAEVVMDRHKRLXXXXXXXXXYYLISTASLRAPVX

SEQ ID NO: 32042 - protein, 37 aa, Artificial Sequence
  Non-cyclic GFR-binding peptide
  MOD_RES (33)..(34): Xaa is C or S
  MOD_RES (11)..(12)..(13)..(14)..(15): Xaa is A or G
  MOD_RES (16)..(17)..(18)..(19): Xaa is A or G or absent
EEVIMRHKRLXXXXXXXXXYYLMSTASTKVPAXXTSP

SEQ ID NO: 32043 - protein, 38 aa, Artificial Sequence
  Non-cyclic GFR-binding peptide
  MOD_RES (1)..(3)..(35)..(36): Xaa is C or S
XAXSEVTMNYHYKLVVNKNEDKYLISIPSMKEPVXXPE

SEQ ID NO: 32044 - protein, 35 aa, Artificial Sequence
  Non-cyclic GFR-binding peptide
  MOD_RES (2)..(35): Xaa is C or S
  MOD_RES (13)..(14)..(15)..(16)..(17): Xaa is A or G
  MOD_RES (18)..(19)..(20)..(21): Xaa is A or G or absent
GXEEVIMYHYKLXXXXXXXXXKYLMSIPSTKVPAX

SEQ ID NO: 32045 - protein, 39 aa, Artificial Sequence
  Non-cyclic GFR-binding peptide
  MOD_RES (34)..(35): Xaa is C or S
  MOD_RES (12)..(13)..(14)..(15)..(16): Xaa is A or G
  MOD_RES (17)..(18)..(19)..(20): Xaa is A or G or absent
AEVVMDRHKRLXXXXXXXXXYYLISTASLRAPVXXSAPA

SEQ ID NO: 32046 - protein, 40 aa, Artificial Sequence
  Non-cyclic GFR-binding peptide
  MOD_RES (1)..(35)..(36): Xaa is C or S
  MOD_RES (13)..(14)..(15)..(16)..(17): Xaa is A or G
  MOD_RES (18)..(19)..(20)..(21): Xaa is A or G or absent
XSEVVMDRHKRLXXXXXXXXXYYLISTASLRTPVXXTPPT

SEQ ID NO: 32047 - protein, 32 aa, Artificial Sequence
  Non-cyclic GFR-binding peptide
  MOD_RES (31)..(32): Xaa is C or S
EVVMDEYKFKVVNNASDLYLISIPELRTPVXX

SEQ ID NO: 32048 - protein, 39 aa, Artificial Sequence
  Non-cyclic GFR-binding peptide
  MOD_RES (2)..(4)..(38)..(39): Xaa is C or S
  MOD_RES (16)..(17)..(18)..(19)..(20): Xaa is A or G
  MOD_RES (21)..(22)..(23)..(24): Xaa is A or G or absent
RXGXSEVVMDRHKRLXXXXXXXXXYYLISTASLRTPVXX

SEQ ID NO: 32049 - protein, 41 aa, Artificial Sequence
  Non-cyclic GFR-binding peptide
  MOD_RES (2)..(36)..(37): Xaa is C or S
  MOD_RES (14)..(15)..(16)..(17)..(18): Xaa is A or G
  MOD_RES (19)..(20)..(21)..(22): Xaa is A or G or absent
GXAEVVMDRHKRLXXXXXXXXXYYLISTASLRAPVXXSAPA

SEQ ID NO: 32050 - protein, 40 aa, Artificial Sequence
  Non-cyclic GFR-binding peptide
  MOD_RES (34)..(35): Xaa is C or S
  MOD_RES (12)..(13)..(14)..(15)..(16): Xaa is A or G
  MOD_RES (17)..(18)..(19)..(20): Xaa is A or G or absent
SEVTMNYHYKLXXXXXXXXXKYLISIPSMKEPVXXPEPIG

SEQ ID NO: 32051 - protein, 35 aa, Artificial Sequence
  Non-cyclic GFR-binding peptide
  MOD_RES (2)..(2): Xaa is C or S
  MOD_RES (14)..(15)..(16)..(17)..(18): Xaa is A or G
  MOD_RES (19)..(20)..(21)..(22): Xaa is A or G or absent
GXAEVVMDRHKRLXXXXXXXXXYYLISTASLRAPV

SEQ ID NO: 32052 - protein, 36 aa, Artificial Sequence
  Non-cyclic GFR-binding peptide
  MOD_RES (1)..(35)..(36): Xaa is C or S
  MOD_RES (13)..(14)..(15)..(16)..(17): Xaa is A or G
  MOD_RES (18)..(19)..(20)..(21): Xaa is A or G or absent
XSEVVMDYHYKLXXXXXXXXXKYLISIPSLRTPVXX

SEQ ID NO: 32053 - protein, 34 aa, Artificial Sequence
  Non-cyclic GFR-binding peptide
  MOD_RES (1)..(1): Xaa is C or S
  MOD_RES (13)..(14)..(15)..(16)..(17): Xaa is A or G
  MOD_RES (18)..(19)..(20)..(21): Xaa is A or G or absent
XRDVVMGRHKRLXXXXXXXXXYYLMSTASMKTPT

SEQ ID NO: 32054 - protein, 37 aa, Artificial Sequence
  Non-cyclic GFR-binding peptide
  MOD_RES (31)..(32): Xaa is C or S
EVVMDRHKRLVVNNASDYYLISTASLRTPVXXTPPTS

SEQ ID NO: 32055 - protein, 36 aa, Artificial Sequence
  Non-cyclic GFR-binding peptide
  MOD_RES (1)..(35)..(36): Xaa is C or S
  MOD_RES (13)..(14)..(15)..(16)..(17): Xaa is A or G
  MOD_RES (18)..(19)..(20)..(21): Xaa is A or G or absent
XSEVTMNRYKKLXXXXXXXXXFYLISIANMKEPVXX

SEQ ID NO: 32056 - protein, 39 aa, Artificial Sequence
  Non-cyclic GFR-binding peptide
  MOD_RES (33)..(34): Xaa is C or S
  MOD_RES (11)..(12)..(13)..(14)..(15): Xaa is A or G
  MOD_RES (16)..(17)..(18)..(19): Xaa is A or G or absent
RVVMNRHKRLXXXXXXXXXYYLVSTASLKTPAXXPKPVH

SEQ ID NO: 32057 - protein, 41 aa, Artificial Sequence
  Non-cyclic GFR-binding peptide
  MOD_RES (2)..(4)..(36)..(37): Xaa is C or S
RXGXSEVVMDYHYKLVVNNASDKYLISIPSLRTPVXXTPPT

SEQ ID NO: 32058 - protein, 41 aa, Artificial Sequence
  Non-cyclic GFR-binding peptide
  MOD_RES (1)..(3)..(37)..(38): Xaa is C or S
  MOD_RES (15)..(16)..(17)..(18)..(19): Xaa is A or G
  MOD_RES (20)..(21)..(22)..(23): Xaa is A or G or absent
XAXSEVTMNYHYKLXXXXXXXXXKYLISIPSMKEPVXXPEP

SEQ ID NO: 32059 - protein, 36 aa, Artificial Sequence
  Non-cyclic GFR-binding peptide
  MOD_RES (1)..(3)..(35)..(36): Xaa is C or S
XGXAEVVMDRHKRLVVNNAADYYLISTASLRAPVXX

SEQ ID NO: 32060 - protein, 33 aa, Artificial Sequence
  Non-cyclic GFR-binding peptide
  MOD_RES (2)..(2): Xaa is C or S
GXRDVVMGYHYKLIIQQKDNKYLMSIPSMKTPT

SEQ ID NO: 32061 - protein, 34 aa, Artificial Sequence
  Non-cyclic GFR-binding peptide
  MOD_RES (1)..(33)..(34): Xaa is C or S
XAEVVMDRHKRLVVNNAADYYLISTASLRAPVXX

SEQ ID NO: 32062 - protein, 36 aa, Artificial Sequence
  Non-cyclic GFR-binding peptide
  MOD_RES (32)..(33): Xaa is C or S
RDVVMGYHYKLIIQQKDNKYLMSIPSMKTPTXXPGA

SEQ ID NO: 32063 - protein, 41 aa, Artificial Sequence
  Non-cyclic GFR-binding peptide
  MOD_RES (1)..(3)..(36)..(37): Xaa is C or S
  MOD_RES (14)..(15)..(16)..(17)..(18): Xaa is A or G
  MOD_RES (19)..(20)..(21)..(22): Xaa is A or G or absent
XGXEEVIMYHYKLXXXXXXXXXKYLMSIPSTKVPAXXTSPV

SEQ ID NO: 32064 - protein, 37 aa, Artificial Sequence
  Non-cyclic GFR-binding peptide
  MOD_RES (1)..(3)..(35)..(36): Xaa is C or S
XAXSEVTMNEYKFKVVNKNEDLYLISIPEMKEPVXXP

SEQ ID NO: 32065 - protein, 34 aa, Artificial Sequence
  Non-cyclic GFR-binding peptide
  MOD_RES (2)..(2): Xaa is C or S
  MOD_RES (13)..(14)..(15)..(16)..(17): Xaa is A or G
  MOD_RES (18)..(19)..(20)..(21): Xaa is A or G or absent
GXEEVIMYHYKLXXXXXXXXXKYLMSIPSTKVPA

SEQ ID NO: 32066 - protein, 39 aa, Artificial Sequence
  Non-cyclic GFR-binding peptide
  MOD_RES (1)..(3)..(37)..(38): Xaa is C or S
  MOD_RES (15)..(16)..(17)..(18)..(19): Xaa is A or G
  MOD_RES (20)..(21)..(22)..(23): Xaa is A or G or absent
XAXSEVTMNEYKFKXXXXXXXXXLYLISIPEMKEPVXXP

SEQ ID NO: 32067 - protein, 37 aa, Artificial Sequence
  Non-cyclic GFR-binding peptide
  MOD_RES (2)..(4)..(35)..(36): Xaa is C or S
LXGXEEVIMYHYKLLLVRGNDKYLMSIPSTKVPAXXT

SEQ ID NO: 32068 - protein, 40 aa, Artificial Sequence
  Non-cyclic GFR-binding peptide
  MOD_RES (2)..(4)..(38)..(39): Xaa is C or S
  MOD_RES (16)..(17)..(18)..(19)..(20): Xaa is A or G
  MOD_RES (21)..(22)..(23)..(24): Xaa is A or G or absent
RXGXSEVVMDRHKRLXXXXXXXXXYYLISTASLRTPVXXT

SEQ ID NO: 32069 - protein, 41 aa, Artificial Sequence
  Non-cyclic GFR-binding peptide
  MOD_RES (2)..(4)..(36)..(37): Xaa is C or S
RXAXSEVTMNPIKGYVVNKNEDFYLINIPSMKEPVXXPEPI

SEQ ID NO: 32070 - protein, 34 aa, Artificial Sequence
  Non-cyclic GFR-binding peptide
  MOD_RES (2)..(34): Xaa is C or S
GXAEVVMDRHKRLVVNNAADYYLISTASLRAPVX

SEQ ID NO: 32071 - protein, 38 aa, Artificial Sequence
  Non-cyclic GFR-binding peptide
  MOD_RES (33)..(34): Xaa is C or S
  MOD_RES (11)..(12)..(13)..(14)..(15): Xaa is A or G
  MOD_RES (16)..(17)..(18)..(19): Xaa is A or G or absent
SKVIMPIKGYXXXXXXXXXFYLINIPSLDQSVXXPSAS

SEQ ID NO: 32072 - protein, 42 aa, Artificial Sequence
  Non-cyclic GFR-binding peptide
  MOD_RES (2)..(4)..(38)..(39): Xaa is C or S
  MOD_RES (16)..(17)..(18)..(19)..(20): Xaa is A or G
  MOD_RES (21)..(22)..(23)..(24): Xaa is A or G or absent
RXAXSEVTMNRHKRLXXXXXXXXXYYLISTASMKEPVXXPEP

SEQ ID NO: 32073 - protein, 37 aa, Artificial Sequence
  Non-cyclic GFR-binding peptide
  MOD_RES (2)..(36)..(37): Xaa is C or S
  MOD_RES (14)..(15)..(16)..(17)..(18): Xaa is A or G
  MOD_RES (19)..(20)..(21)..(22): Xaa is A or G or absent
AXSEVTMNRYKKLXXXXXXXXXFYLISIANMKEPVXX

SEQ ID NO: 32074 - protein, 41 aa, Artificial Sequence
  Non-cyclic GFR-binding peptide
  MOD_RES (1)..(35)..(36): Xaa is C or S
  MOD_RES (13)..(14)..(15)..(16)..(17): Xaa is A or G
  MOD_RES (18)..(19)..(20)..(21): Xaa is A or G or absent
XSRVVMNEYKFKXXXXXXXXXLYLVSIPELKTPAXXPKPVH

SEQ ID NO: 32075 - protein, 39 aa, Artificial Sequence
  Non-cyclic GFR-binding peptide
  MOD_RES (1)..(35)..(36): Xaa is C or S
  MOD_RES (13)..(14)..(15)..(16)..(17): Xaa is A or G
  MOD_RES (18)..(19)..(20)..(21): Xaa is A or G or absent
XSEVTMNPIKGYXXXXXXXXXFYLINIPSMKEPVXXPEP

SEQ ID NO: 32076 - protein, 33 aa, Artificial Sequence
  Non-cyclic GFR-binding peptide
  MOD_RES (1)..(1): Xaa is C or S
  MOD_RES (12)..(13)..(14)..(15)..(16): Xaa is A or G
  MOD_RES (17)..(18)..(19)..(20): Xaa is A or G or absent
XEEVIMYHYKLXXXXXXXXXKYLMSIPSTKVPA

SEQ ID NO: 32077 - protein, 41 aa, Artificial Sequence
  Non-cyclic GFR-binding peptide
  MOD_RES (1)..(3)..(35)..(36): Xaa is C or S
XAXSEVTMNYHYKLVVNKNEDKYLISIPSMKEPVXXPEPIG

SEQ ID NO: 32078 - protein, 40 aa, Artificial Sequence
  Non-cyclic GFR-binding peptide
  MOD_RES (1)..(3)..(37)..(38): Xaa is C or S
  MOD_RES (15)..(16)..(17)..(18)..(19): Xaa is A or G
  MOD_RES (20)..(21)..(22)..(23): Xaa is A or G or absent
XGXRDVVMGEYKFKXXXXXXXXXLYLMSIPEMKTPTXXPG

SEQ ID NO: 32079 - protein, 40 aa, Artificial Sequence
  Non-cyclic GFR-binding peptide
  MOD_RES (1)..(35)..(36): Xaa is C or S
  MOD_RES (13)..(14)..(15)..(16)..(17): Xaa is A or G
  MOD_RES (18)..(19)..(20)..(21): Xaa is A or G or absent
XESVAMGRHKRLXXXXXXXXXYYLISTASLKTPVXXAKSA

SEQ ID NO: 32080 - protein, 37 aa, Artificial Sequence
  Non-cyclic GFR-binding peptide
  MOD_RES (31)..(32): Xaa is C or S
SKVIMPIKGYIKPTKGIFYLINIPSLDQSVXXPSASA

SEQ ID NO: 32081 - protein, 33 aa, Artificial Sequence
  Non-cyclic GFR-binding peptide
  MOD_RES (2)..(33): Xaa is C or S
KXSKVIMPIKGYIKPTKGIFYLINIPSLDQSVX

SEQ ID NO: 32082 - protein, 34 aa, Artificial Sequence
  Non-cyclic GFR-binding peptide
  MOD_RES (33)..(34): Xaa is C or S
  MOD_RES (11)..(12)..(13)..(14)..(15): Xaa is A or G
  MOD_RES (16)..(17)..(18)..(19): Xaa is A or G or absent
EEVIMEYKFKXXXXXXXXXLYLMSIPETKVPAXX

SEQ ID NO: 32083 - protein, 37 aa, Artificial Sequence
  Non-cyclic GFR-binding peptide
  MOD_RES (1)..(32)..(33): Xaa is C or S
XSKVVMPIKGYVKPTRGVFYLINIPSLDQPVXXPSAS

SEQ ID NO: 32084 - protein, 33 aa, Artificial Sequence
  Non-cyclic GFR-binding peptide
  MOD_RES (32)..(33): Xaa is C or S
SEVVMDYHYKLVVNNASDKYLISIPSLRTPVXX

SEQ ID NO: 32085 - protein, 33 aa, Artificial Sequence
  Non-cyclic GFR-binding peptide
  MOD_RES (1)..(33): Xaa is C or S
XAEVVMDRHKRLVVNNAADYYLISTASLRAPVX

SEQ ID NO: 32086 - protein, 39 aa, Artificial Sequence
  Non-cyclic GFR-binding peptide
  MOD_RES (1)..(33)..(34): Xaa is C or S
XRDVVMGYHYKLIIQQKDNKYLMSIPSMKTPTXXPGASG

SEQ ID NO: 32087 - protein, 31 aa, Artificial Sequence
  Non-cyclic GFR-binding peptide
  MOD_RES (31)..(31): Xaa is C or S
SVAMGRHKRLYTVVGKDYYLISTASLKTPVX

SEQ ID NO: 32088 - protein, 38 aa, Artificial Sequence
  Non-cyclic GFR-binding peptide
  MOD_RES (32)..(33): Xaa is C or S
SRVVMNEYKFKIVNSSDDLYLVSIPELKTPAXXPKPVH

SEQ ID NO: 32089 - protein, 38 aa, Artificial Sequence
  Non-cyclic GFR-binding peptide
  MOD_RES (2)..(4)..(38): Xaa is C or S
  MOD_RES (16)..(17)..(18)..(19)..(20): Xaa is A or G
  MOD_RES (21)..(22)..(23)..(24): Xaa is A or G or absent
RXAXSEVTMNPIKGYXXXXXXXXXFYLINIPSMKEPVX

SEQ ID NO: 32090 - protein, 43 aa, Artificial Sequence
  Non-cyclic GFR-binding peptide
  MOD_RES (2)..(4)..(38)..(39): Xaa is C or S
  MOD_RES (16)..(17)..(18)..(19)..(20): Xaa is A or G
  MOD_RES (21)..(22)..(23)..(24): Xaa is A or G or absent
RXAXSEVTMNEYKFKXXXXXXXXXLYLISIPEMKEPVXXPEPI

SEQ ID NO: 32091 - protein, 38 aa, Artificial Sequence
  Non-cyclic GFR-binding peptide
  MOD_RES (2)..(34)..(35): Xaa is C or S
AXSEVTMNRYKKLVVNKNEDFYLISIANMKEPVXXPEP

SEQ ID NO: 32092 - protein, 36 aa, Artificial Sequence
  Non-cyclic GFR-binding peptide
  MOD_RES (2)..(35)..(36): Xaa is C or S
  MOD_RES (13)..(14)..(15)..(16)..(17): Xaa is A or G
  MOD_RES (18)..(19)..(20)..(21): Xaa is A or G or absent
GXEEVIMRHKRLXXXXXXXXXYYLMSTASTKVPAXX

SEQ ID NO: 32093 - protein, 38 aa, Artificial Sequence
  Non-cyclic GFR-binding peptide
  MOD_RES (1)..(3)..(36)..(37): Xaa is C or S
  MOD_RES (14)..(15)..(16)..(17)..(18): Xaa is A or G
  MOD_RES (19)..(20)..(21)..(22): Xaa is A or G or absent
XKXSRVIMPIKGYXXXXXXXXXFYLINIPSLAQPVXXP

SEQ ID NO: 32094 - protein, 37 aa, Artificial Sequence
  Non-cyclic GFR-binding peptide
  MOD_RES (31)..(32): Xaa is C or S
EVTMNEYKFKVVNKNEDLYLISIPEMKEPVXXPEPIG

SEQ ID NO: 32095 - protein, 38 aa, Artificial Sequence
  Non-cyclic GFR-binding peptide
  MOD_RES (34)..(35): Xaa is C or S
  MOD_RES (12)..(13)..(14)..(15)..(16): Xaa is A or G
  MOD_RES (17)..(18)..(19)..(20): Xaa is A or G or absent
SEVTMNRYKKLXXXXXXXXXFYLISIANMKEPVXXPEP

SEQ ID NO: 32096 - protein, 38 aa, Artificial Sequence
  Non-cyclic GFR-binding peptide
  MOD_RES (2)..(34)..(35): Xaa is C or S
GXRDVVMGRHKRLIIQQKDNYYLMSTASMKTPTXXPGA

SEQ ID NO: 32097 - protein, 37 aa, Artificial Sequence
  Non-cyclic GFR-binding peptide
  MOD_RES (1)..(3)..(35)..(36): Xaa is C or S
XGXSEVVMDYHYKLVVNNASDKYLISIPSLRTPVXXT

SEQ ID NO: 32098 - protein, 38 aa, Artificial Sequence
  Non-cyclic GFR-binding peptide
  MOD_RES (2)..(34)..(35): Xaa is C or S
GXAEVVMDRHKRLVVNNAADYYLISTASLRAPVXXSAP

SEQ ID NO: 32099 - protein, 32 aa, Artificial Sequence
  Non-cyclic GFR-binding peptide
  MOD_RES (1)..(32): Xaa is C or S
XSRVIMPIKGYVKPKRGVFYLINIPSLAQPVX

SEQ ID NO: 32100 - protein, 36 aa, Artificial Sequence
  Non-cyclic GFR-binding peptide
  MOD_RES (2)..(36): Xaa is C or S
  MOD_RES (14)..(15)..(16)..(17)..(18): Xaa is A or G
  MOD_RES (19)..(20)..(21)..(22): Xaa is A or G or absent
GXRDVVMGYHYKLXXXXXXXXXKYLMSIPSMKTPTX

SEQ ID NO: 32101 - protein, 36 aa, Artificial Sequence
  Non-cyclic GFR-binding peptide
  MOD_RES (2)..(36): Xaa is C or S
  MOD_RES (14)..(15)..(16)..(17)..(18): Xaa is A or G
  MOD_RES (19)..(20)..(21)..(22): Xaa is A or G or absent
GXSEVVMDYHYKLXXXXXXXXXKYLISIPSLRTPVX

SEQ ID NO: 32102 - protein, 40 aa, Artificial Sequence
  Non-cyclic GFR-binding peptide
  MOD_RES (34)..(35): Xaa is C or S
  MOD_RES (12)..(13)..(14)..(15)..(16): Xaa is A or G
  MOD_RES (17)..(18)..(19)..(20): Xaa is A or G or absent
SRVVMNYHYKLXXXXXXXXXKYLVSIPSLKTPAXXPKPVH

SEQ ID NO: 32103 - protein, 36 aa, Artificial Sequence
  Non-cyclic GFR-binding peptide
  MOD_RES (1)..(3)..(34)..(35): Xaa is C or S
XGXEEVIMYHYKLLLVRGNDKYLMSIPSTKVPAXXT

SEQ ID NO: 32104 - protein, 34 aa, Artificial Sequence
  Non-cyclic GFR-binding peptide
  MOD_RES (34)..(34): Xaa is C or S
  MOD_RES (12)..(13)..(14)..(15)..(16): Xaa is A or G
  MOD_RES (17)..(18)..(19)..(20): Xaa is A or G or absent
RDVVMGRHKRLXXXXXXXXXYYLMSTASMKTPTX

SEQ ID NO: 32105 - protein, 37 aa, Artificial Sequence
  Non-cyclic GFR-binding peptide
  MOD_RES (34)..(35): Xaa is C or S
  MOD_RES (12)..(13)..(14)..(15)..(16): Xaa is A or G
  MOD_RES (17)..(18)..(19)..(20): Xaa is A or G or absent
SEVVMDEYKFKXXXXXXXXXLYLISIPELRTPVXXTP

SEQ ID NO: 32106 - protein, 35 aa, Artificial Sequence
  Non-cyclic GFR-binding peptide
  MOD_RES (1)..(33)..(34): Xaa is C or S
XSEVTMNYHYKLVVNKNEDKYLISIPSMKEPVXXP

SEQ ID NO: 32107 - protein, 33 aa, Artificial Sequence
  Non-cyclic GFR-binding peptide
  MOD_RES (2)..(33): Xaa is C or S
GXEEVIMYHYKLLLVRGNDKYLMSIPSTKVPAX

SEQ ID NO: 32108 - protein, 33 aa, Artificial Sequence
  Non-cyclic GFR-binding peptide
  MOD_RES (1)..(1): Xaa is C or S
  MOD_RES (12)..(13)..(14)..(15)..(16): Xaa is A or G
  MOD_RES (17)..(18)..(19)..(20): Xaa is A or G or absent
XSRVIMPIKGYXXXXXXXXXFYLINIPSLAQPV

SEQ ID NO: 32109 - protein, 40 aa, Artificial Sequence
  Non-cyclic GFR-binding peptide
  MOD_RES (2)..(34)..(35): Xaa is C or S
GXRDVVMGEYKFKIIQQKDNLYLMSIPEMKTPTXXPGASG

SEQ ID NO: 32110 - protein, 31 aa, Artificial Sequence
  Non-cyclic GFR-binding peptide
  MOD_RES (31)..(31): Xaa is C or S
SKVVMPIKGYVKPTRGVFYLINIPSLDQPVX

SEQ ID NO: 32111 - protein, 37 aa, Artificial Sequence
  Non-cyclic GFR-binding peptide
  MOD_RES (1)..(35)..(36): Xaa is C or S
  MOD_RES (13)..(14)..(15)..(16)..(17): Xaa is A or G
  MOD_RES (18)..(19)..(20)..(21): Xaa is A or G or absent
XSEVTMNPIKGYXXXXXXXXXFYLINIPSMKEPVXXP

SEQ ID NO: 32112 - protein, 38 aa, Artificial Sequence
  Non-cyclic GFR-binding peptide
  MOD_RES (34)..(35): Xaa is C or S
  MOD_RES (12)..(13)..(14)..(15)..(16): Xaa is A or G
  MOD_RES (17)..(18)..(19)..(20): Xaa is A or G or absent
RDVVMGYHYKLXXXXXXXXXKYLMSIPSMKTPTXXPGA

SEQ ID NO: 32113 - protein, 35 aa, Artificial Sequence
  Non-cyclic GFR-binding peptide
  MOD_RES (33)..(34): Xaa is C or S
  MOD_RES (11)..(12)..(13)..(14)..(15): Xaa is A or G
  MOD_RES (16)..(17)..(18)..(19): Xaa is A or G or absent
EVVMDYHYKLXXXXXXXXXKYLISIPSLRTPVXXT

SEQ ID NO: 32114 - protein, 35 aa, Artificial Sequence
  Non-cyclic GFR-binding peptide
  MOD_RES (33)..(34): Xaa is C or S
  MOD_RES (11)..(12)..(13)..(14)..(15): Xaa is A or G
  MOD_RES (16)..(17)..(18)..(19): Xaa is A or G or absent
EVVMDEYKFKXXXXXXXXXLYLISIPELRTPVXXT

SEQ ID NO: 32115 - protein, 37 aa, Artificial Sequence
  Non-cyclic GFR-binding peptide
  MOD_RES (33)..(34): Xaa is C or S
  MOD_RES (11)..(12)..(13)..(14)..(15): Xaa is A or G
  MOD_RES (16)..(17)..(18)..(19): Xaa is A or G or absent
EVTMNRHKRLXXXXXXXXXYYLISTASMKEPVXXPEP

SEQ ID NO: 32116 - protein, 35 aa, Artificial Sequence
  Non-cyclic GFR-binding peptide
  MOD_RES (2)..(4): Xaa is C or S
RXGXAEVVMDRHKRLVVNNAADYYLISTASLRAPV

SEQ ID NO: 32117 - protein, 40 aa, Artificial Sequence
  Non-cyclic GFR-binding peptide
  MOD_RES (2)..(4)..(35)..(36): Xaa is C or S
LXGXEEVIMEYKFKLLVRGNDLYLMSIPETKVPAXXTSPV

SEQ ID NO: 32118 - protein, 38 aa, Artificial Sequence
  Non-cyclic GFR-binding peptide
  MOD_RES (2)..(4)..(35)..(36): Xaa is C or S
SXKXSRVIMPIKGYVKPKRGVFYLINIPSLAQPVXXPA

SEQ ID NO: 32119 - protein, 40 aa, Artificial Sequence
  Non-cyclic GFR-binding peptide
  MOD_RES (2)..(4)..(38)..(39): Xaa is C or S
  MOD_RES (16)..(17)..(18)..(19)..(20): Xaa is A or G
  MOD_RES (21)..(22)..(23)..(24): Xaa is A or G or absent
RXGXSEVVMDYHYKLXXXXXXXXXKYLISIPSLRTPVXXT

SEQ ID NO: 32120 - protein, 37 aa, Artificial Sequence
  Non-cyclic GFR-binding peptide
  MOD_RES (1)..(3)..(37): Xaa is C or S
  MOD_RES (15)..(16)..(17)..(18)..(19): Xaa is A or G
  MOD_RES (20)..(21)..(22)..(23): Xaa is A or G or absent
XAXSEVTMNRHKRLXXXXXXXXXYYLISTASMKEPVX

SEQ ID NO: 32121 - protein, 35 aa, Artificial Sequence
  Non-cyclic GFR-binding peptide
  MOD_RES (1)..(3)..(35): Xaa is C or S
XAXSEVTMNYHYKLVVNKNEDKYLISIPSMKEPVX

SEQ ID NO: 32122 - protein, 40 aa, Artificial Sequence
  Non-cyclic GFR-binding peptide
  MOD_RES (2)..(4)..(38)..(39): Xaa is C or S
  MOD_RES (16)..(17)..(18)..(19)..(20): Xaa is A or G
  MOD_RES (21)..(22)..(23)..(24): Xaa is A or G or absent
SXGXRDVVMGRHKRLXXXXXXXXXYYLMSTASMKTPTXXP

SEQ ID NO: 32123 - protein, 34 aa, Artificial Sequence
  Non-cyclic GFR-binding peptide
  MOD_RES (33)..(34): Xaa is C or S
  MOD_RES (11)..(12)..(13)..(14)..(15): Xaa is A or G
  MOD_RES (16)..(17)..(18)..(19): Xaa is A or G or absent
EVTMNRYKKLXXXXXXXXXFYLISIANMKEPVXX

SEQ ID NO: 32124 - protein, 32 aa, Artificial Sequence
  Non-cyclic GFR-binding peptide
  MOD_RES (2)..(2): Xaa is C or S
KXSKVIMPIKGYIKPTKGIFYLINIPSLDQSV

SEQ ID NO: 32125 - protein, 35 aa, Artificial Sequence
  Non-cyclic GFR-binding peptide
  MOD_RES (1)..(32)..(33): Xaa is C or S
XEEVIMYHYKLLLVRGNDKYLMSIPSTKVPAXXTS

SEQ ID NO: 32126 - protein, 40 aa, Artificial Sequence
  Non-cyclic GFR-binding peptide
  MOD_RES (2)..(36)..(37): Xaa is C or S
  MOD_RES (14)..(15)..(16)..(17)..(18): Xaa is A or G
  MOD_RES (19)..(20)..(21)..(22): Xaa is A or G or absent
GXAEVVMDRHKRLXXXXXXXXXYYLISTASLRAPVXXSAP

SEQ ID NO: 32127 - protein, 33 aa, Artificial Sequence
  Non-cyclic GFR-binding peptide
  MOD_RES (31)..(32): Xaa is C or S
EEVIMEYKFKLLVRGNDLYLMSIPETKVPAXXT

SEQ ID NO: 32128 - protein, 39 aa, Artificial Sequence
  Non-cyclic GFR-binding peptide
  MOD_RES (1)..(3)..(37)..(38): Xaa is C or S
  MOD_RES (15)..(16)..(17)..(18)..(19): Xaa is A or G
  MOD_RES (20)..(21)..(22)..(23): Xaa is A or G or absent
XGXRDVVMGYHYKLXXXXXXXXXKYLMSIPSMKTPTXXP

SEQ ID NO: 32129 - protein, 36 aa, Artificial Sequence
  Non-cyclic GFR-binding peptide
  MOD_RES (33)..(34): Xaa is C or S
  MOD_RES (11)..(12)..(13)..(14)..(15): Xaa is A or G
  MOD_RES (16)..(17)..(18)..(19): Xaa is A or G or absent
EVVMDRHKRLXXXXXXXXXYYLISTASLRAPVXXSA

SEQ ID NO: 32130 - protein, 36 aa, Artificial Sequence
  Non-cyclic GFR-binding peptide
  MOD_RES (2)..(34)..(35): Xaa is C or S
GXSEVVMDRHKRLVVNNASDYYLISTASLRTPVXXT

SEQ ID NO: 32131 - protein, 37 aa, Artificial Sequence
  Non-cyclic GFR-binding peptide
  MOD_RES (2)..(34)..(35): Xaa is C or S
GXSEVVMDEYKFKVVNNASDLYLISIPELRTPVXXTP

SEQ ID NO: 32132 - protein, 38 aa, Artificial Sequence
  Non-cyclic GFR-binding peptide
  MOD_RES (1)..(34)..(35): Xaa is C or S
  MOD_RES (12)..(13)..(14)..(15)..(16): Xaa is A or G
  MOD_RES (17)..(18)..(19)..(20): Xaa is A or G or absent
XSRVIMPIKGYXXXXXXXXXFYLINIPSLAQPVXXPAA

SEQ ID NO: 32133 - protein, 42 aa, Artificial Sequence
  Non-cyclic GFR-binding peptide
  MOD_RES (1)..(3)..(37)..(38): Xaa is C or S
  MOD_RES (15)..(16)..(17)..(18)..(19): Xaa is A or G
  MOD_RES (20)..(21)..(22)..(23): Xaa is A or G or absent
XGXSEVVMDEYKFKXXXXXXXXXLYLISIPELRTPVXXTPPT

SEQ ID NO: 32134 - protein, 39 aa, Artificial Sequence
  Non-cyclic GFR-binding peptide
  MOD_RES (1)..(33)..(34): Xaa is C or S
XSEVVMDRHKRLVVNNASDYYLISTASLRTPVXXTPPTS

SEQ ID NO: 32135 - protein, 41 aa, Artificial Sequence
  Non-cyclic GFR-binding peptide
  MOD_RES (2)..(36)..(37): Xaa is C or S
  MOD_RES (14)..(15)..(16)..(17)..(18): Xaa is A or G
  MOD_RES (19)..(20)..(21)..(22): Xaa is A or G or absent
AXSEVTMNRHKRLXXXXXXXXXYYLISTASMKEPVXXPEPI

SEQ ID NO: 32136 - protein, 34 aa, Artificial Sequence
  Non-cyclic GFR-binding peptide
  MOD_RES (1)..(1): Xaa is C or S
  MOD_RES (13)..(14)..(15)..(16)..(17): Xaa is A or G
  MOD_RES (18)..(19)..(20)..(21): Xaa is A or G or absent
XRDVVMGYHYKLXXXXXXXXXKYLMSIPSMKTPT

SEQ ID NO: 32137 - protein, 43 aa, Artificial Sequence
  Non-cyclic GFR-binding peptide
  MOD_RES (1)..(3)..(37)..(38): Xaa is C or S
  MOD_RES (15)..(16)..(17)..(18)..(19): Xaa is A or G
  MOD_RES (20)..(21)..(22)..(23): Xaa is A or G or absent
XAXSEVTMNEYKFKXXXXXXXXXLYLISIPEMKEPVXXPEPIG

SEQ ID NO: 32138 - protein, 39 aa, Artificial Sequence
  Non-cyclic GFR-binding peptide
  MOD_RES (2)..(4)..(36)..(37): Xaa is C or S
RXAXSEVTMNRYKKLVVNKNEDFYLISIANMKEPVXXPE

SEQ ID NO: 32139 - protein, 35 aa, Artificial Sequence
  Non-cyclic GFR-binding peptide
  MOD_RES (1)..(32)..(33): Xaa is C or S
XEEVIMRHKRLLLVRGNDYYLMSTASTKVPAXXTS

SEQ ID NO: 32140 - protein, 39 aa, Artificial Sequence
  Non-cyclic GFR-binding peptide
  MOD_RES (2)..(36)..(37): Xaa is C or S
  MOD_RES (14)..(15)..(16)..(17)..(18): Xaa is A or G
  MOD_RES (19)..(20)..(21)..(22): Xaa is A or G or absent
GXAEVVMDRHKRLXXXXXXXXXYYLISTASLRAPVXXSA

SEQ ID NO: 32141 - protein, 36 aa, Artificial Sequence
  Non-cyclic GFR-binding peptide
  MOD_RES (1)..(3): Xaa is C or S
  MOD_RES (15)..(16)..(17)..(18)..(19): Xaa is A or G
  MOD_RES (20)..(21)..(22)..(23): Xaa is A or G or absent
XGXSEVVMDYHYKLXXXXXXXXXKYLISIPSLRTPV

SEQ ID NO: 32142 - protein, 40 aa, Artificial Sequence
  Non-cyclic GFR-binding peptide
  MOD_RES (2)..(34)..(35): Xaa is C or S
AXSEVTMNRHKRLVVNKNEDYYLISTASMKEPVXXPEPIG

SEQ ID NO: 32143 - protein, 36 aa, Artificial Sequence
  Non-cyclic GFR-binding peptide
  MOD_RES (1)..(33)..(34): Xaa is C or S
XRDVVMGRHKRLIIQQKDNYYLMSTASMKTPTXXPG

SEQ ID NO: 32144 - protein, 40 aa, Artificial Sequence
  Non-cyclic GFR-binding peptide
  MOD_RES (34)..(35): Xaa is C or S
  MOD_RES (12)..(13)..(14)..(15)..(16): Xaa is A or G
  MOD_RES (17)..(18)..(19)..(20): Xaa is A or G or absent
RDVVMGEYKFKXXXXXXXXXLYLMSIPEMKTPTXXPGASG

SEQ ID NO: 32145 - protein, 37 aa, Artificial Sequence
  Non-cyclic GFR-binding peptide
  MOD_RES (2)..(36)..(37): Xaa is C or S
  MOD_RES (14)..(15)..(16)..(17)..(18): Xaa is A or G
  MOD_RES (19)..(20)..(21)..(22): Xaa is A or G or absent
AXSEVTMNRHKRLXXXXXXXXXYYLISTASMKEPVXX

SEQ ID NO: 32146 - protein, 38 aa, Artificial Sequence
  Non-cyclic GFR-binding peptide
  MOD_RES (2)..(4)..(38): Xaa is C or S
  MOD_RES (16)..(17)..(18)..(19)..(20): Xaa is A or G
  MOD_RES (21)..(22)..(23)..(24): Xaa is A or G or absent
RXGXSEVVMDYHYKLXXXXXXXXXKYLISIPSLRTPVX

SEQ ID NO: 32147 - protein, 39 aa, Artificial Sequence
  Non-cyclic GFR-binding peptide
  MOD_RES (1)..(3)..(37)..(38): Xaa is C or S
  MOD_RES (15)..(16)..(17)..(18)..(19): Xaa is A or G
  MOD_RES (20)..(21)..(22)..(23): Xaa is A or G or absent
XGXAEVVMDRHKRLXXXXXXXXXYYLISTASLRAPVXXS

SEQ ID NO: 32148 - protein, 39 aa, Artificial Sequence
  Non-cyclic GFR-binding peptide
  MOD_RES (2)..(4)..(36)..(37): Xaa is C or S
RXGXSEVVMDEYKFKVVNNASDLYLISIPELRTPVXXTP

SEQ ID NO: 32149 - protein, 31 aa, Artificial Sequence
  Non-cyclic GFR-binding peptide
RDVVMGEYKFKIIQQKDNLYLMSIPEMKTPT

SEQ ID NO: 32150 - protein, 38 aa, Artificial Sequence
  Non-cyclic GFR-binding peptide
  MOD_RES (1)..(3)..(34)..(35): Xaa is C or S
XKXSKVVMPIKGYVKPTRGVFYLINIPSLDQPVXXPSA

SEQ ID NO: 32151 - protein, 36 aa, Artificial Sequence
  Non-cyclic GFR-binding peptide
  MOD_RES (2)..(34)..(35): Xaa is C or S
AXSEVTMNPIKGYVVNKNEDFYLINIPSMKEPVXXP

SEQ ID NO: 32152 - protein, 33 aa, Artificial Sequence
  Non-cyclic GFR-binding peptide
  MOD_RES (31)..(32): Xaa is C or S
DVVMGRHKRLIIQQKDNYYLMSTASMKTPTXXP

SEQ ID NO: 32153 - protein, 35 aa, Artificial Sequence
  Non-cyclic GFR-binding peptide
  MOD_RES (2)..(4): Xaa is C or S
RXAXSEVTMNPIKGYVVNKNEDFYLINIPSMKEPV

SEQ ID NO: 32154 - protein, 35 aa, Artificial Sequence
  Non-cyclic GFR-binding peptide
  MOD_RES (1)..(34)..(35): Xaa is C or S
  MOD_RES (12)..(13)..(14)..(15)..(16): Xaa is A or G
  MOD_RES (17)..(18)..(19)..(20): Xaa is A or G or absent
XEEVIMEYKFKXXXXXXXXXLYLMSIPETKVPAXX

SEQ ID NO: 32155 - protein, 39 aa, Artificial Sequence
  Non-cyclic GFR-binding peptide
  MOD_RES (33)..(34): Xaa is C or S
  MOD_RES (11)..(12)..(13)..(14)..(15): Xaa is A or G
  MOD_RES (16)..(17)..(18)..(19): Xaa is A or G or absent
EEVIMRHKRLXXXXXXXXXYYLMSTASTKVPAXXTSPVR

SEQ ID NO: 32156 - protein, 36 aa, Artificial Sequence
  Non-cyclic GFR-binding peptide
  MOD_RES (2)..(36): Xaa is C or S
  MOD_RES (14)..(15)..(16)..(17)..(18): Xaa is A or G
  MOD_RES (19)..(20)..(21)..(22): Xaa is A or G or absent
AXSEVTMNEYKFKXXXXXXXXXLYLISIPEMKEPVX

SEQ ID NO: 32157 - protein, 40 aa, Artificial Sequence
  Non-cyclic GFR-binding peptide
  MOD_RES (2)..(34)..(35): Xaa is C or S
GXSEVVMDYHYKLVVNNASDKYLISIPSLRTPVXXTPPTS

SEQ ID NO: 32158 - protein, 41 aa, Artificial Sequence
  Non-cyclic GFR-binding peptide
  MOD_RES (1)..(3)..(36)..(37): Xaa is C or S
  MOD_RES (14)..(15)..(16)..(17)..(18): Xaa is A or G
  MOD_RES (19)..(20)..(21)..(22): Xaa is A or G or absent
XGXEEVIMRHKRLXXXXXXXXXYYLMSTASTKVPAXXTSPV

SEQ ID NO: 32159 - protein, 37 aa, Artificial Sequence
  Non-cyclic GFR-binding peptide
  MOD_RES (2)..(4)..(35)..(36): Xaa is C or S
SXKXSKVVMPIKGYVKPTRGVFYLINIPSLDQPVXXP

SEQ ID NO: 32160 - protein, 37 aa, Artificial Sequence
  Non-cyclic GFR-binding peptide
  MOD_RES (1)..(32)..(33): Xaa is C or S
XEEVIMRHKRLLLVRGNDYYLMSTASTKVPAXXTSPV

SEQ ID NO: 32161 - protein, 33 aa, Artificial Sequence
  Non-cyclic GFR-binding peptide
  MOD_RES (1)..(32)..(33): Xaa is C or S
XSKVVMPIKGYVKPTRGVFYLINIPSLDQPVXX

SEQ ID NO: 32162 - protein, 33 aa, Artificial Sequence
  Non-cyclic GFR-binding peptide
  MOD_RES (1)..(3): Xaa is C or S
XGXEEVIMRHKRLLLVRGNDYYLMSTASTKVPA

SEQ ID NO: 32163 - protein, 34 aa, Artificial Sequence
  Non-cyclic GFR-binding peptide
  MOD_RES (1)..(3): Xaa is C or S
XGXSEVVMDRHKRLVVNNASDYYLISTASLRTPV

SEQ ID NO: 32164 - protein, 32 aa, Artificial Sequence
  Non-cyclic GFR-binding peptide
  MOD_RES (31)..(32): Xaa is C or S
DVVMGRHKRLIIQQKDNYYLMSTASMKTPTXX

SEQ ID NO: 32165 - protein, 40 aa, Artificial Sequence
  Non-cyclic GFR-binding peptide
  MOD_RES (2)..(35)..(36): Xaa is C or S
  MOD_RES (13)..(14)..(15)..(16)..(17): Xaa is A or G
  MOD_RES (18)..(19)..(20)..(21): Xaa is A or G or absent
GXEEVIMYHYKLXXXXXXXXXKYLMSIPSTKVPAXXTSPV

SEQ ID NO: 32166 - protein, 35 aa, Artificial Sequence
  Non-cyclic GFR-binding peptide
  MOD_RES (34)..(35): Xaa is C or S
  MOD_RES (12)..(13)..(14)..(15)..(16): Xaa is A or G
  MOD_RES (17)..(18)..(19)..(20): Xaa is A or G or absent
ESVAMGRHKRLXXXXXXXXXYYLISTASLKTPVXX

SEQ ID NO: 32167 - protein, 34 aa, Artificial Sequence
  Non-cyclic GFR-binding peptide
  MOD_RES (1)..(1): Xaa is C or S
  MOD_RES (13)..(14)..(15)..(16)..(17): Xaa is A or G
  MOD_RES (18)..(19)..(20)..(21): Xaa is A or G or absent
XSEVVMDEYKFKXXXXXXXXXLYLISIPELRTPV

SEQ ID NO: 32168 - protein, 42 aa, Artificial Sequence
  Non-cyclic GFR-binding peptide
  MOD_RES (2)..(4)..(38)..(39): Xaa is C or S
  MOD_RES (16)..(17)..(18)..(19)..(20): Xaa is A or G
  MOD_RES (21)..(22)..(23)..(24): Xaa is A or G or absent
RXAXSEVTMNYHYKLXXXXXXXXXKYLISIPSMKEPVXXPEP

SEQ ID NO: 32169 - protein, 38 aa, Artificial Sequence
  Non-cyclic GFR-binding peptide
  MOD_RES (2)..(34)..(35): Xaa is C or S
AXSEVTMNEYKFKVVNKNEDLYLISIPEMKEPVXXPEP

SEQ ID NO: 32170 - protein, 42 aa, Artificial Sequence
  Non-cyclic GFR-binding peptide
  MOD_RES (2)..(36)..(37): Xaa is C or S
  MOD_RES (14)..(15)..(16)..(17)..(18): Xaa is A or G
  MOD_RES (19)..(20)..(21)..(22): Xaa is A or G or absent
GXRDVVMGRHKRLXXXXXXXXXYYLMSTASMKTPTXXPGASG

SEQ ID NO: 32171 - protein, 38 aa, Artificial Sequence
  Non-cyclic GFR-binding peptide
  MOD_RES (1)..(3)..(37)..(38): Xaa is C or S
  MOD_RES (15)..(16)..(17)..(18)..(19): Xaa is A or G
  MOD_RES (20)..(21)..(22)..(23): Xaa is A or G or absent
XGXSEVVMDYHYKLXXXXXXXXXKYLISIPSLRTPVXX

SEQ ID NO: 32172 - protein, 41 aa, Artificial Sequence
  Non-cyclic GFR-binding peptide
  MOD_RES (2)..(36)..(37): Xaa is C or S
  MOD_RES (14)..(15)..(16)..(17)..(18): Xaa is A or G
  MOD_RES (19)..(20)..(21)..(22): Xaa is A or G or absent
GXSEVVMDRHKRLXXXXXXXXXYYLISTASLRTPVXXTPPT

SEQ ID NO: 32173 - protein, 32 aa, Artificial Sequence
  Non-cyclic GFR-binding peptide
  MOD_RES (1)..(1): Xaa is C or S
XAEVVMDRHKRLVVNNAADYYLISTASLRAPV

SEQ ID NO: 32174 - protein, 33 aa, Artificial Sequence
  Non-cyclic GFR-binding peptide
  MOD_RES (32)..(33): Xaa is C or S
AEVVMDRHKRLVVNNAADYYLISTASLRAPVXX

SEQ ID NO: 32175 - protein, 32 aa, Artificial Sequence
  Non-cyclic GFR-binding peptide
  MOD_RES (1)..(32): Xaa is C or S
XEEVIMEYKFKLLVRGNDLYLMSIPETKVPAX

SEQ ID NO: 32176 - protein, 39 aa, Artificial Sequence
  Non-cyclic GFR-binding peptide
  MOD_RES (1)..(35)..(36): Xaa is C or S
  MOD_RES (13)..(14)..(15)..(16)..(17): Xaa is A or G
  MOD_RES (18)..(19)..(20)..(21): Xaa is A or G or absent
XESVAMGRHKRLXXXXXXXXXYYLISTASLKTPVXXAKS

SEQ ID NO: 32177 - protein, 33 aa, Artificial Sequence
  Non-cyclic GFR-binding peptide
  MOD_RES (33)..(33): Xaa is C or S
  MOD_RES (11)..(12)..(13)..(14)..(15): Xaa is A or G
  MOD_RES (16)..(17)..(18)..(19): Xaa is A or G or absent
EVVMDYHYKLXXXXXXXXXKYLISIPSLRTPVX

SEQ ID NO: 32178 - protein, 44 aa, Artificial Sequence
  Non-cyclic GFR-binding peptide
  MOD_RES (2)..(4)..(38)..(39): Xaa is C or S
  MOD_RES (16)..(17)..(18)..(19)..(20): Xaa is A or G
  MOD_RES (21)..(22)..(23)..(24): Xaa is A or G or absent
RXGXESVAMGRHKRLXXXXXXXXXYYLISTASLKTPVXXAKSAK

SEQ ID NO: 32179 - protein, 37 aa, Artificial Sequence
  Non-cyclic GFR-binding peptide
  MOD_RES (2)..(4)..(36)..(37): Xaa is C or S
RXAXSEVTMNRYKKLVVNKNEDFYLISIANMKEPVXX

SEQ ID NO: 32180 - protein, 36 aa, Artificial Sequence
  Non-cyclic GFR-binding peptide
  MOD_RES (2)..(33)..(34): Xaa is C or S
KXSRVIMPIKGYVKPKRGVFYLINIPSLAQPVXXPA

SEQ ID NO: 32181 - protein, 40 aa, Artificial Sequence
  Non-cyclic GFR-binding peptide
  MOD_RES (1)..(35)..(36): Xaa is C or S
  MOD_RES (13)..(14)..(15)..(16)..(17): Xaa is A or G
  MOD_RES (18)..(19)..(20)..(21): Xaa is A or G or absent
XRDVVMGRHKRLXXXXXXXXXYYLMSTASMKTPTXXPGAS

SEQ ID NO: 32182 - protein, 34 aa, Artificial Sequence
  Non-cyclic GFR-binding peptide
  MOD_RES (32)..(33): Xaa is C or S
SEVTMNPIKGYVVNKNEDFYLINIPSMKEPVXXP

SEQ ID NO: 32183 - protein, 36 aa, Artificial Sequence
  Non-cyclic GFR-binding peptide
  MOD_RES (33)..(34): Xaa is C or S
  MOD_RES (11)..(12)..(13)..(14)..(15): Xaa is A or G
  MOD_RES (16)..(17)..(18)..(19): Xaa is A or G or absent
EVVMDRHKRLXXXXXXXXXYYLISTASLRTPVXXTP

SEQ ID NO: 32184 - protein, 42 aa, Artificial Sequence
  Non-cyclic GFR-binding peptide
  MOD_RES (2)..(4)..(37)..(38): Xaa is C or S
  MOD_RES (15)..(16)..(17)..(18)..(19): Xaa is A or G
  MOD_RES (20)..(21)..(22)..(23): Xaa is A or G or absent
LXGXEEVIMEYKFKXXXXXXXXXLYLMSIPETKVPAXXTSPV

SEQ ID NO: 32185 - protein, 37 aa, Artificial Sequence
  Non-cyclic GFR-binding peptide
  MOD_RES (2)..(35)..(36): Xaa is C or S
  MOD_RES (13)..(14)..(15)..(16)..(17): Xaa is A or G
  MOD_RES (18)..(19)..(20)..(21): Xaa is A or G or absent
KXSKVIMPIKGYXXXXXXXXXFYLINIPSLDQSVXXP

SEQ ID NO: 32186 - protein, 39 aa, Artificial Sequence
  Non-cyclic GFR-binding peptide
  MOD_RES (1)..(3)..(35)..(36): Xaa is C or S
XAXSEVTMNYHYKLVVNKNEDKYLISIPSMKEPVXXPEP

SEQ ID NO: 32187 - protein, 38 aa, Artificial Sequence
  Non-cyclic GFR-binding peptide
  MOD_RES (32)..(33): Xaa is C or S
RDVVMGYHYKLIIQQKDNKYLMSIPSMKTPTXXPGASG

SEQ ID NO: 32188 - protein, 37 aa, Artificial Sequence
  Non-cyclic GFR-binding peptide
  MOD_RES (1)..(35)..(36): Xaa is C or S
  MOD_RES (13)..(14)..(15)..(16)..(17): Xaa is A or G
  MOD_RES (18)..(19)..(20)..(21): Xaa is A or G or absent
XAEVVMDRHKRLXXXXXXXXXYYLISTASLRAPVXXS

SEQ ID NO: 32189 - protein, 34 aa, Artificial Sequence
  Non-cyclic GFR-binding peptide
  MOD_RES (33)..(34): Xaa is C or S
  MOD_RES (11)..(12)..(13)..(14)..(15): Xaa is A or G
  MOD_RES (16)..(17)..(18)..(19): Xaa is A or G or absent
EVTMNRHKRLXXXXXXXXXYYLISTASMKEPVXX

SEQ ID NO: 32190 - protein, 35 aa, Artificial Sequence
  Non-cyclic GFR-binding peptide
  MOD_RES (32)..(33): Xaa is C or S
SEVVMDRHKRLVVNNASDYYLISTASLRTPVXXTP

SEQ ID NO: 32191 - protein, 43 aa, Artificial Sequence
  Non-cyclic GFR-binding peptide
  MOD_RES (2)..(4)..(37)..(38): Xaa is C or S
  MOD_RES (15)..(16)..(17)..(18)..(19): Xaa is A or G
  MOD_RES (20)..(21)..(22)..(23): Xaa is A or G or absent
SXKXSRVIMPIKGYXXXXXXXXXFYLINIPSLAQPVXXPAASA

SEQ ID NO: 32192 - protein, 33 aa, Artificial Sequence
  Non-cyclic GFR-binding peptide
  MOD_RES (12)..(13)..(14)..(15)..(16): Xaa is A or G
  MOD_RES (17)..(18)..(19)..(20): Xaa is A or G or absent
ESVAMGRHKRLXXXXXXXXXYYLISTASLKTPV

SEQ ID NO: 32193 - protein, 41 aa, Artificial Sequence
  Non-cyclic GFR-binding peptide
  MOD_RES (1)..(3)..(35)..(36): Xaa is C or S
XGXRDVVMGEYKFKIIQQKDNLYLMSIPEMKTPTXXPGASG

SEQ ID NO: 32194 - protein, 35 aa, Artificial Sequence
  Non-cyclic GFR-binding peptide
  MOD_RES (34)..(35): Xaa is C or S
  MOD_RES (12)..(13)..(14)..(15)..(16): Xaa is A or G
  MOD_RES (17)..(18)..(19)..(20): Xaa is A or G or absent
SEVTMNYHYKLXXXXXXXXXKYLISIPSMKEPVXX

SEQ ID NO: 32195 - protein, 36 aa, Artificial Sequence
  Non-cyclic GFR-binding peptide
  MOD_RES (34)..(35): Xaa is C or S
  MOD_RES (12)..(13)..(14)..(15)..(16): Xaa is A or G
  MOD_RES (17)..(18)..(19)..(20): Xaa is A or G or absent
SEVTMNRHKRLXXXXXXXXXYYLISTASMKEPVXXP

SEQ ID NO: 32196 - protein, 34 aa, Artificial Sequence
  Non-cyclic GFR-binding peptide
  MOD_RES (1)..(3): Xaa is C or S
XAXSEVTMNRYKKLVVNKNEDFYLISIANMKEPV

SEQ ID NO: 32197 - protein, 39 aa, Artificial Sequence
  Non-cyclic GFR-binding peptide
  MOD_RES (2)..(4)..(37)..(38): Xaa is C or S
  MOD_RES (15)..(16)..(17)..(18)..(19): Xaa is A or G
  MOD_RES (20)..(21)..(22)..(23): Xaa is A or G or absent
LXGXEEVIMYHYKLXXXXXXXXXKYLMSIPSTKVPAXXT

SEQ ID NO: 32198 - protein, 35 aa, Artificial Sequence
  Non-cyclic GFR-binding peptide
  MOD_RES (32)..(33): Xaa is C or S
RDVVMGEYKFKIIQQKDNLYLMSIPEMKTPTXXPG

SEQ ID NO: 32199 - protein, 38 aa, Artificial Sequence
  Non-cyclic GFR-binding peptide
  MOD_RES (2)..(33)..(34): Xaa is C or S
KXSRVIMPIKGYVKPKRGVFYLINIPSLAQPVXXPAAS

SEQ ID NO: 32200 - protein, 34 aa, Artificial Sequence
  Non-cyclic GFR-binding peptide
  MOD_RES (32)..(33): Xaa is C or S
SEVTMNRHKRLVVNKNEDYYLISTASMKEPVXXP

SEQ ID NO: 32201 - protein, 39 aa, Artificial Sequence
  Non-cyclic GFR-binding peptide
  MOD_RES (2)..(36)..(37): Xaa is C or S
  MOD_RES (14)..(15)..(16)..(17)..(18): Xaa is A or G
  MOD_RES (19)..(20)..(21)..(22): Xaa is A or G or absent
AXSEVTMNEYKFKXXXXXXXXXLYLISIPEMKEPVXXPE

SEQ ID NO: 32202 - protein, 41 aa, Artificial Sequence
  Non-cyclic GFR-binding peptide
  MOD_RES (2)..(4)..(38)..(39): Xaa is C or S
  MOD_RES (16)..(17)..(18)..(19)..(20): Xaa is A or G
  MOD_RES (21)..(22)..(23)..(24): Xaa is A or G or absent
RXGXESVAMGRHKRLXXXXXXXXXYYLISTASLKTPVXXAK

SEQ ID NO: 32203 - protein, 35 aa, Artificial Sequence
  Non-cyclic GFR-binding peptide
  MOD_RES (1)..(3)..(34)..(35): Xaa is C or S
XGXEEVIMRHKRLLLVRGNDYYLMSTASTKVPAXX

SEQ ID NO: 32204 - protein, 37 aa, Artificial Sequence
  Non-cyclic GFR-binding peptide
  MOD_RES (33)..(34): Xaa is C or S
  MOD_RES (11)..(12)..(13)..(14)..(15): Xaa is A or G
  MOD_RES (16)..(17)..(18)..(19): Xaa is A or G or absent
DVVMGYHYKLXXXXXXXXXKYLMSIPSMKTPTXXPGA

SEQ ID NO: 32205 - protein, 35 aa, Artificial Sequence
  Non-cyclic GFR-binding peptide
  MOD_RES (1)..(35): Xaa is C or S
  MOD_RES (13)..(14)..(15)..(16)..(17): Xaa is A or G
  MOD_RES (18)..(19)..(20)..(21): Xaa is A or G or absent
XSEVVMDEYKFKXXXXXXXXXLYLISIPELRTPVX

SEQ ID NO: 32206 - protein, 32 aa, Artificial Sequence
  Non-cyclic GFR-binding peptide
  MOD_RES (11)..(12)..(13)..(14)..(15): Xaa is A or G
  MOD_RES (16)..(17)..(18)..(19): Xaa is A or G or absent
EEVIMRHKRLXXXXXXXXXYYLMSTASTKVPA

SEQ ID NO: 32207 - protein, 37 aa, Artificial Sequence
  Non-cyclic GFR-binding peptide
  MOD_RES (1)..(3)..(34)..(35): Xaa is C or S
XKXSKVIMPIKGYIKPTKGIFYLINIPSLDQSVXXPS

SEQ ID NO: 32208 - protein, 37 aa, Artificial Sequence
  Non-cyclic GFR-binding peptide
  MOD_RES (34)..(35): Xaa is C or S
  MOD_RES (12)..(13)..(14)..(15)..(16): Xaa is A or G
  MOD_RES (17)..(18)..(19)..(20): Xaa is A or G or absent
ESVAMGRHKRLXXXXXXXXXYYLISTASLKTPVXXAK

SEQ ID NO: 32209 - protein, 35 aa, Artificial Sequence
  Non-cyclic GFR-binding peptide
  MOD_RES (2)..(4): Xaa is C or S
RXGXESVAMGRHKRLYTVVGKDYYLISTASLKTPV

SEQ ID NO: 32210 - protein, 43 aa, Artificial Sequence
  Non-cyclic GFR-binding peptide
  MOD_RES (2)..(4)..(38)..(39): Xaa is C or S
  MOD_RES (16)..(17)..(18)..(19)..(20): Xaa is A or G
  MOD_RES (21)..(22)..(23)..(24): Xaa is A or G or absent
SXGXRDVVMGYHYKLXXXXXXXXXKYLMSIPSMKTPTXXPGAS

SEQ ID NO: 32211 - protein, 40 aa, Artificial Sequence
  Non-cyclic GFR-binding peptide
  MOD_RES (2)..(36)..(37): Xaa is C or S
  MOD_RES (14)..(15)..(16)..(17)..(18): Xaa is A or G
  MOD_RES (19)..(20)..(21)..(22): Xaa is A or G or absent
AXSEVTMNEYKFKXXXXXXXXXLYLISIPEMKEPVXXPEP

SEQ ID NO: 32212 - protein, 36 aa, Artificial Sequence
  Non-cyclic GFR-binding peptide
  MOD_RES (33)..(34): Xaa is C or S
  MOD_RES (11)..(12)..(13)..(14)..(15): Xaa is A or G
  MOD_RES (16)..(17)..(18)..(19): Xaa is A or G or absent
DVVMGYHYKLXXXXXXXXXKYLMSIPSMKTPTXXPG

SEQ ID NO: 32213 - protein, 38 aa, Artificial Sequence
  Non-cyclic GFR-binding peptide
  MOD_RES (2)..(36)..(37): Xaa is C or S
  MOD_RES (14)..(15)..(16)..(17)..(18): Xaa is A or G
  MOD_RES (19)..(20)..(21)..(22): Xaa is A or G or absent
GXRDVVMGRHKRLXXXXXXXXXYYLMSTASMKTPTXXP

SEQ ID NO: 32214 - protein, 39 aa, Artificial Sequence
  Non-cyclic GFR-binding peptide
  MOD_RES (1)..(33)..(34): Xaa is C or S
XSEVVMDEYKFKVVNNASDLYLISIPELRTPVXXTPPTS

SEQ ID NO: 32215 - protein, 34 aa, Artificial Sequence
  Non-cyclic GFR-binding peptide
  MOD_RES (34)..(34): Xaa is C or S
  MOD_RES (12)..(13)..(14)..(15)..(16): Xaa is A or G
  MOD_RES (17)..(18)..(19)..(20): Xaa is A or G or absent
SEVTMNYHYKLXXXXXXXXXKYLISIPSMKEPVX

SEQ ID NO: 32216 - protein, 34 aa, Artificial Sequence
  Non-cyclic GFR-binding peptide
  MOD_RES (1)..(1): Xaa is C or S
  MOD_RES (13)..(14)..(15)..(16)..(17): Xaa is A or G
  MOD_RES (18)..(19)..(20)..(21): Xaa is A or G or absent
XSEVVMDYHYKLXXXXXXXXXKYLISIPSLRTPV

SEQ ID NO: 32217 - protein, 35 aa, Artificial Sequence
  Non-cyclic GFR-binding peptide
  MOD_RES (31)..(32): Xaa is C or S
EVTMNEYKFKVVNKNEDLYLISIPEMKEPVXXPEP

SEQ ID NO: 32218 - protein, 39 aa, Artificial Sequence
  Non-cyclic GFR-binding peptide
  MOD_RES (1)..(34)..(35): Xaa is C or S
  MOD_RES (12)..(13)..(14)..(15)..(16): Xaa is A or G
  MOD_RES (17)..(18)..(19)..(20): Xaa is A or G or absent
XSKVVMPIKGYXXXXXXXXXFYLINIPSLDQPVXXPSAS

SEQ ID NO: 32219 - protein, 42 aa, Artificial Sequence
  Non-cyclic GFR-binding peptide
  MOD_RES (2)..(36)..(37): Xaa is C or S
  MOD_RES (14)..(15)..(16)..(17)..(18): Xaa is A or G
  MOD_RES (19)..(20)..(21)..(22): Xaa is A or G or absent
GXSEVVMDRHKRLXXXXXXXXXYYLISTASLRTPVXXTPPTS

SEQ ID NO: 32220 - protein, 31 aa, Artificial Sequence
  Non-cyclic GFR-binding peptide
SEVTMNYHYKLVVNKNEDKYLISIPSMKEPV

SEQ ID NO: 32221 - protein, 34 aa, Artificial Sequence
  Non-cyclic GFR-binding peptide
  MOD_RES (31)..(32): Xaa is C or S
EVTMNYHYKLVVNKNEDKYLISIPSMKEPVXXPE

SEQ ID NO: 32222 - protein, 39 aa, Artificial Sequence
  Non-cyclic GFR-binding peptide
  MOD_RES (2)..(4)..(38)..(39): Xaa is C or S
  MOD_RES (16)..(17)..(18)..(19)..(20): Xaa is A or G
  MOD_RES (21)..(22)..(23)..(24): Xaa is A or G or absent
RXGXSEVVMDEYKFKXXXXXXXXXLYLISIPELRTPVXX

SEQ ID NO: 32223 - protein, 40 aa, Artificial Sequence
  Non-cyclic GFR-binding peptide
  MOD_RES (2)..(36)..(37): Xaa is C or S
  MOD_RES (14)..(15)..(16)..(17)..(18): Xaa is A or G
  MOD_RES (19)..(20)..(21)..(22): Xaa is A or G or absent
AXSEVTMNRYKKLXXXXXXXXXFYLISIANMKEPVXXPEP

SEQ ID NO: 32224 - protein, 37 aa, Artificial Sequence
  Non-cyclic GFR-binding peptide
  MOD_RES (33)..(34): Xaa is C or S
  MOD_RES (11)..(12)..(13)..(14)..(15): Xaa is A or G
  MOD_RES (16)..(17)..(18)..(19): Xaa is A or G or absent
EVVMDYHYKLXXXXXXXXXKYLISIPSLRTPVXXTPP

SEQ ID NO: 32225 - protein, 38 aa, Artificial Sequence
  Non-cyclic GFR-binding peptide
  MOD_RES (1)..(3)..(35)..(36): Xaa is C or S
XGXRDVVMGYHYKLIIQQKDNKYLMSIPSMKTPTXXPG

SEQ ID NO: 32226 - protein, 37 aa, Artificial Sequence
  Non-cyclic GFR-binding peptide
  MOD_RES (1)..(3)..(37): Xaa is C or S
  MOD_RES (15)..(16)..(17)..(18)..(19): Xaa is A or G
  MOD_RES (20)..(21)..(22)..(23): Xaa is A or G or absent
XGXSEVVMDEYKFKXXXXXXXXXLYLISIPELRTPVX

SEQ ID NO: 32227 - protein, 34 aa, Artificial Sequence
  Non-cyclic GFR-binding peptide
  MOD_RES (1)..(1): Xaa is C or S
  MOD_RES (13)..(14)..(15)..(16)..(17): Xaa is A or G
  MOD_RES (18)..(19)..(20)..(21): Xaa is A or G or absent
XAEVVMDRHKRLXXXXXXXXXYYLISTASLRAPV

SEQ ID NO: 32228 - protein, 35 aa, Artificial Sequence
  Non-cyclic GFR-binding peptide
  MOD_RES (1)..(35): Xaa is C or S
  MOD_RES (13)..(14)..(15)..(16)..(17): Xaa is A or G
  MOD_RES (18)..(19)..(20)..(21): Xaa is A or G or absent
XRDVVMGYHYKLXXXXXXXXXKYLMSIPSMKTPTX

SEQ ID NO: 32229 - protein, 42 aa, Artificial Sequence
  Non-cyclic GFR-binding peptide
  MOD_RES (2)..(4)..(36)..(37): Xaa is C or S
RXGXSEVVMDEYKFKVVNNASDLYLISIPELRTPVXXTPPTS

SEQ ID NO: 32230 - protein, 41 aa, Artificial Sequence
  Non-cyclic GFR-binding peptide
  MOD_RES (1)..(3)..(36)..(37): Xaa is C or S
  MOD_RES (14)..(15)..(16)..(17)..(18): Xaa is A or G
  MOD_RES (19)..(20)..(21)..(22): Xaa is A or G or absent
XGXEEVIMEYKFKXXXXXXXXXLYLMSIPETKVPAXXTSPV

SEQ ID NO: 32231 - protein, 42 aa, Artificial Sequence
  Non-cyclic GFR-binding peptide
  MOD_RES (1)..(3)..(37)..(38): Xaa is C or S
  MOD_RES (15)..(16)..(17)..(18)..(19): Xaa is A or G
  MOD_RES (20)..(21)..(22)..(23): Xaa is A or G or absent
XGXSEVVMDRHKRLXXXXXXXXXYYLISTASLRTPVXXTPPT

SEQ ID NO: 32232 - protein, 35 aa, Artificial Sequence
  Non-cyclic GFR-binding peptide
  MOD_RES (33)..(34): Xaa is C or S
  MOD_RES (11)..(12)..(13)..(14)..(15): Xaa is A or G
  MOD_RES (16)..(17)..(18)..(19): Xaa is A or G or absent
DVVMGEYKFKXXXXXXXXXLYLMSIPEMKTPTXXP

SEQ ID NO: 32233 - protein, 33 aa, Artificial Sequence
  Non-cyclic GFR-binding peptide
  MOD_RES (32)..(33): Xaa is C or S
SEVTMNRYKKLVVNKNEDFYLISIANMKEPVXX

SEQ ID NO: 32234 - protein, 36 aa, Artificial Sequence
  Non-cyclic GFR-binding peptide
  MOD_RES (1)..(35)..(36): Xaa is C or S
  MOD_RES (13)..(14)..(15)..(16)..(17): Xaa is A or G
  MOD_RES (18)..(19)..(20)..(21): Xaa is A or G or absent
XSEVTMNEYKFKXXXXXXXXXLYLISIPEMKEPVXX

SEQ ID NO: 32235 - protein, 41 aa, Artificial Sequence
  Non-cyclic GFR-binding peptide
  MOD_RES (1)..(35)..(36): Xaa is C or S
  MOD_RES (13)..(14)..(15)..(16)..(17): Xaa is A or G
  MOD_RES (18)..(19)..(20)..(21): Xaa is A or G or absent
XSRVVMNYHYKLXXXXXXXXXKYLVSIPSLKTPAXXPKPVH

SEQ ID NO: 32236 - protein, 36 aa, Artificial Sequence
  Non-cyclic GFR-binding peptide
  MOD_RES (1)..(34)..(35): Xaa is C or S
  MOD_RES (12)..(13)..(14)..(15)..(16): Xaa is A or G
  MOD_RES (17)..(18)..(19)..(20): Xaa is A or G or absent
XSKVIMPIKGYXXXXXXXXXFYLINIPSLDQSVXXP

SEQ ID NO: 32237 - protein, 44 aa, Artificial Sequence
  Non-cyclic GFR-binding peptide
  MOD_RES (2)..(4)..(38)..(39): Xaa is C or S
  MOD_RES (16)..(17)..(18)..(19)..(20): Xaa is A or G
  MOD_RES (21)..(22)..(23)..(24): Xaa is A or G or absent
SXGXRDVVMGRHKRLXXXXXXXXXYYLMSTASMKTPTXXPGASG

SEQ ID NO: 32238 - protein, 38 aa, Artificial Sequence
  Non-cyclic GFR-binding peptide
  MOD_RES (32)..(33): Xaa is C or S
SEVTMNPIKGYVVNKNEDFYLINIPSMKEPVXXPEPIG

SEQ ID NO: 32239 - protein, 37 aa, Artificial Sequence
  Non-cyclic GFR-binding peptide
  MOD_RES (33)..(34): Xaa is C or S
  MOD_RES (11)..(12)..(13)..(14)..(15): Xaa is A or G
  MOD_RES (16)..(17)..(18)..(19): Xaa is A or G or absent
DVVMGEYKFKXXXXXXXXXLYLMSIPEMKTPTXXPGA

SEQ ID NO: 32240 - protein, 41 aa, Artificial Sequence
  Non-cyclic GFR-binding peptide
  MOD_RES (2)..(4)..(38)..(39): Xaa is C or S
  MOD_RES (16)..(17)..(18)..(19)..(20): Xaa is A or G
  MOD_RES (21)..(22)..(23)..(24): Xaa is A or G or absent
RXGXAEVVMDRHKRLXXXXXXXXXYYLISTASLRAPVXXSA

SEQ ID NO: 32241 - protein, 41 aa, Artificial Sequence
  Non-cyclic GFR-binding peptide
  MOD_RES (1)..(3)..(35)..(36): Xaa is C or S
XAXSEVTMNRYKKLVVNKNEDFYLISIANMKEPVXXPEPIG

SEQ ID NO: 32242 - protein, 35 aa, Artificial Sequence
  Non-cyclic GFR-binding peptide
  MOD_RES (31)..(32): Xaa is C or S
SRVIMPIKGYVKPKRGVFYLINIPSLAQPVXXPAA

SEQ ID NO: 32243 - protein, 39 aa, Artificial Sequence
  Non-cyclic GFR-binding peptide
  MOD_RES (1)..(3)..(35)..(36): Xaa is C or S
XAXSEVTMNEYKFKVVNKNEDLYLISIPEMKEPVXXPEP

SEQ ID NO: 32244 - protein, 38 aa, Artificial Sequence
  Non-cyclic GFR-binding peptide
  MOD_RES (1)..(33)..(34): Xaa is C or S
XAEVVMDRHKRLVVNNAADYYLISTASLRAPVXXSAPA

SEQ ID NO: 32245 - protein, 38 aa, Artificial Sequence
  Non-cyclic GFR-binding peptide
  MOD_RES (34)..(35): Xaa is C or S
  MOD_RES (12)..(13)..(14)..(15)..(16): Xaa is A or G
  MOD_RES (17)..(18)..(19)..(20): Xaa is A or G or absent
SEVVMDEYKFKXXXXXXXXXLYLISIPELRTPVXXTPP

SEQ ID NO: 32246 - protein, 41 aa, Artificial Sequence
  Non-cyclic GFR-binding peptide
  MOD_RES (1)..(35)..(36): Xaa is C or S
  MOD_RES (13)..(14)..(15)..(16)..(17): Xaa is A or G
  MOD_RES (18)..(19)..(20)..(21): Xaa is A or G or absent
XSEVTMNRHKRLXXXXXXXXXYYLISTASMKEPVXXPEPIG

SEQ ID NO: 32247 - protein, 34 aa, Artificial Sequence
  Non-cyclic GFR-binding peptide
  MOD_RES (2)..(33)..(34): Xaa is C or S
GXEEVIMYHYKLLLVRGNDKYLMSIPSTKVPAXX

SEQ ID NO: 32248 - protein, 39 aa, Artificial Sequence
  Non-cyclic GFR-binding peptide
  MOD_RES (1)..(35)..(36): Xaa is C or S
  MOD_RES (13)..(14)..(15)..(16)..(17): Xaa is A or G
  MOD_RES (18)..(19)..(20)..(21): Xaa is A or G or absent
XSEVTMNRHKRLXXXXXXXXXYYLISTASMKEPVXXPEP

SEQ ID NO: 32249 - protein, 38 aa, Artificial Sequence
  Non-cyclic GFR-binding peptide
  MOD_RES (2)..(4)..(36)..(37): Xaa is C or S
RXGXSEVVMDRHKRLVVNNASDYYLISTASLRTPVXXT

SEQ ID NO: 32250 - protein, 32 aa, Artificial Sequence
  Non-cyclic GFR-binding peptide
  MOD_RES (32)..(32): Xaa is C or S
RDVVMGRHKRLIIQQKDNYYLMSTASMKTPTX

SEQ ID NO: 32251 - protein, 38 aa, Artificial Sequence
  Non-cyclic GFR-binding peptide
  MOD_RES (34)..(35): Xaa is C or S
  MOD_RES (12)..(13)..(14)..(15)..(16): Xaa is A or G
  MOD_RES (17)..(18)..(19)..(20): Xaa is A or G or absent
SEVTMNEYKFKXXXXXXXXXLYLISIPEMKEPVXXPEP

SEQ ID NO: 32252 - protein, 34 aa, Artificial Sequence
  Non-cyclic GFR-binding peptide
  MOD_RES (1)..(3)..(34): Xaa is C or S
XKXSKVIMPIKGYIKPTKGIFYLINIPSLDQSVX

SEQ ID NO: 32253 - protein, 37 aa, Artificial Sequence
  Non-cyclic GFR-binding peptide
  MOD_RES (1)..(32)..(33): Xaa is C or S
XEEVIMYHYKLLLVRGNDKYLMSIPSTKVPAXXTSPV

SEQ ID NO: 32254 - protein, 38 aa, Artificial Sequence
  Non-cyclic GFR-binding peptide
  MOD_RES (33)..(34): Xaa is C or S
  MOD_RES (11)..(12)..(13)..(14)..(15): Xaa is A or G
  MOD_RES (16)..(17)..(18)..(19): Xaa is A or G or absent
EEVIMEYKFKXXXXXXXXXLYLMSIPETKVPAXXTSPV

SEQ ID NO: 32255 - protein, 37 aa, Artificial Sequence
  Non-cyclic GFR-binding peptide
  MOD_RES (1)..(3)..(35)..(36): Xaa is C or S
XGXRDVVMGEYKFKIIQQKDNLYLMSIPEMKTPTXXP

SEQ ID NO: 32256 - protein, 40 aa, Artificial Sequence
  Non-cyclic GFR-binding peptide
  MOD_RES (1)..(3)..(36)..(37): Xaa is C or S
  MOD_RES (14)..(15)..(16)..(17)..(18): Xaa is A or G
  MOD_RES (19)..(20)..(21)..(22): Xaa is A or G or absent
XGXEEVIMYHYKLXXXXXXXXXKYLMSIPSTKVPAXXTSP

SEQ ID NO: 32257 - protein, 36 aa, Artificial Sequence
  Non-cyclic GFR-binding peptide
  MOD_RES (33)..(34): Xaa is C or S
  MOD_RES (11)..(12)..(13)..(14)..(15): Xaa is A or G
  MOD_RES (16)..(17)..(18)..(19): Xaa is A or G or absent
SVAMGRHKRLXXXXXXXXXYYLISTASLKTPVXXAK

SEQ ID NO: 32258 - protein, 35 aa, Artificial Sequence
  Non-cyclic GFR-binding peptide
  MOD_RES (1)..(33)..(34): Xaa is C or S
XSEVTMNPIKGYVVNKNEDFYLINIPSMKEPVXXP

SEQ ID NO: 32259 - protein, 38 aa, Artificial Sequence
  Non-cyclic GFR-binding peptide
  MOD_RES (1)..(3)..(37)..(38): Xaa is C or S
  MOD_RES (15)..(16)..(17)..(18)..(19): Xaa is A or G
  MOD_RES (20)..(21)..(22)..(23): Xaa is A or G or absent
XGXAEVVMDRHKRLXXXXXXXXXYYLISTASLRAPVXX

SEQ ID NO: 32260 - protein, 38 aa, Artificial Sequence
  Non-cyclic GFR-binding peptide
  MOD_RES (2)..(33)..(34): Xaa is C or S
KXSKVVMPIKGYVKPTRGVFYLINIPSLDQPVXXPSAS

SEQ ID NO: 32261 - protein, 39 aa, Artificial Sequence
  Non-cyclic GFR-binding peptide
  MOD_RES (2)..(4)..(35)..(36): Xaa is C or S
SXKXSKVVMPIKGYVKPTRGVFYLINIPSLDQPVXXPSA

SEQ ID NO: 32262 - protein, 42 aa, Artificial Sequence
  Non-cyclic GFR-binding peptide
  MOD_RES (1)..(3)..(37)..(38): Xaa is C or S
  MOD_RES (15)..(16)..(17)..(18)..(19): Xaa is A or G
  MOD_RES (20)..(21)..(22)..(23): Xaa is A or G or absent
XAXSEVTMNRHKRLXXXXXXXXXYYLISTASMKEPVXXPEPI

SEQ ID NO: 32263 - protein, 33 aa, Artificial Sequence
  Non-cyclic GFR-binding peptide
  MOD_RES (32)..(33): Xaa is C or S
SEVVMDEYKFKVVNNASDLYLISIPELRTPVXX

SEQ ID NO: 32264 - protein, 37 aa, Artificial Sequence
  Non-cyclic GFR-binding peptide
  MOD_RES (2)..(33)..(34): Xaa is C or S
KXSRVIMPIKGYVKPKRGVFYLINIPSLAQPVXXPAA

SEQ ID NO: 32265 - protein, 39 aa, Artificial Sequence
  Non-cyclic GFR-binding peptide
  MOD_RES (2)..(4)..(37)..(38): Xaa is C or S
  MOD_RES (15)..(16)..(17)..(18)..(19): Xaa is A or G
  MOD_RES (20)..(21)..(22)..(23): Xaa is A or G or absent
SXKXSKVVMPIKGYXXXXXXXXXFYLINIPSLDQPVXXP

SEQ ID NO: 32266 - protein, 39 aa, Artificial Sequence
  Non-cyclic GFR-binding peptide
  MOD_RES (1)..(3)..(36)..(37): Xaa is C or S
  MOD_RES (14)..(15)..(16)..(17)..(18): Xaa is A or G
  MOD_RES (19)..(20)..(21)..(22): Xaa is A or G or absent
XKXSKVIMPIKGYXXXXXXXXXFYLINIPSLDQSVXXPS

SEQ ID NO: 32267 - protein, 34 aa, Artificial Sequence
  Non-cyclic GFR-binding peptide
  MOD_RES (1)..(3)..(34): Xaa is C or S
XGXEEVIMRHKRLLLVRGNDYYLMSTASTKVPAX

SEQ ID NO: 32268 - protein, 31 aa, Artificial Sequence
  Non-cyclic GFR-binding peptide
ESVAMGRHKRLYTVVGKDYYLISTASLKTPV

SEQ ID NO: 32269 - protein, 39 aa, Artificial Sequence
  Non-cyclic GFR-binding peptide
  MOD_RES (2)..(4)..(36)..(37): Xaa is C or S
RXAXSEVTMNYHYKLVVNKNEDKYLISIPSMKEPVXXPE

SEQ ID NO: 32270 - protein, 40 aa, Artificial Sequence
  Non-cyclic GFR-binding peptide
  MOD_RES (1)..(3)..(37)..(38): Xaa is C or S
  MOD_RES (15)..(16)..(17)..(18)..(19): Xaa is A or G
  MOD_RES (20)..(21)..(22)..(23): Xaa is A or G or absent
XGXRDVVMGYHYKLXXXXXXXXXKYLMSIPSMKTPTXXPG

SEQ ID NO: 32271 - protein, 41 aa, Artificial Sequence
  Non-cyclic GFR-binding peptide
  MOD_RES (2)..(35)..(36): Xaa is C or S
  MOD_RES (13)..(14)..(15)..(16)..(17): Xaa is A or G
  MOD_RES (18)..(19)..(20)..(21): Xaa is A or G or absent
GXEEVIMYHYKLXXXXXXXXXKYLMSIPSTKVPAXXTSPVR

SEQ ID NO: 32272 - protein, 34 aa, Artificial Sequence
  Non-cyclic GFR-binding peptide
  MOD_RES (34)..(34): Xaa is C or S
  MOD_RES (12)..(13)..(14)..(15)..(16): Xaa is A or G
  MOD_RES (17)..(18)..(19)..(20): Xaa is A or G or absent
ESVAMGRHKRLXXXXXXXXXYYLISTASLKTPVX

SEQ ID NO: 32273 - protein, 37 aa, Artificial Sequence
  Non-cyclic GFR-binding peptide
  MOD_RES (2)..(4): Xaa is C or S
  MOD_RES (16)..(17)..(18)..(19)..(20): Xaa is A or G
  MOD_RES (21)..(22)..(23)..(24): Xaa is A or G or absent
RXAXSEVTMNEYKFKXXXXXXXXXLYLISIPEMKEPV

SEQ ID NO: 32274 - protein, 38 aa, Artificial Sequence
  Non-cyclic GFR-binding peptide
  MOD_RES (32)..(33): Xaa is C or S
RDVVMGEYKFKIIQQKDNLYLMSIPEMKTPTXXPGASG

SEQ ID NO: 32275 - protein, 35 aa, Artificial Sequence
  Non-cyclic GFR-binding peptide
  MOD_RES (2)..(35): Xaa is C or S
  MOD_RES (13)..(14)..(15)..(16)..(17): Xaa is A or G
  MOD_RES (18)..(19)..(20)..(21): Xaa is A or G or absent
GXEEVIMEYKFKXXXXXXXXXLYLMSIPETKVPAX

SEQ ID NO: 32276 - protein, 35 aa, Artificial Sequence
  Non-cyclic GFR-binding peptide
  MOD_RES (2)..(35): Xaa is C or S
  MOD_RES (13)..(14)..(15)..(16)..(17): Xaa is A or G
  MOD_RES (18)..(19)..(20)..(21): Xaa is A or G or absent
KXSKVIMPIKGYXXXXXXXXXFYLINIPSLDQSVX

SEQ ID NO: 32277 - protein, 40 aa, Artificial Sequence
  Non-cyclic GFR-binding peptide
  MOD_RES (2)..(4)..(38)..(39): Xaa is C or S
  MOD_RES (16)..(17)..(18)..(19)..(20): Xaa is A or G
  MOD_RES (21)..(22)..(23)..(24): Xaa is A or G or absent
RXAXSEVTMNRHKRLXXXXXXXXXYYLISTASMKEPVXXP

SEQ ID NO: 32278 - protein, 38 aa, Artificial Sequence
  Non-cyclic GFR-binding peptide
  MOD_RES (33)..(34): Xaa is C or S
  MOD_RES (11)..(12)..(13)..(14)..(15): Xaa is A or G
  MOD_RES (16)..(17)..(18)..(19): Xaa is A or G or absent
EEVIMYHYKLXXXXXXXXXKYLMSIPSTKVPAXXTSPV

SEQ ID NO: 32279 - protein, 35 aa, Artificial Sequence
  Non-cyclic GFR-binding peptide
  MOD_RES (33)..(34): Xaa is C or S
  MOD_RES (11)..(12)..(13)..(14)..(15): Xaa is A or G
  MOD_RES (16)..(17)..(18)..(19): Xaa is A or G or absent
EVTMNRYKKLXXXXXXXXXFYLISIANMKEPVXXP

SEQ ID NO: 32280 - protein, 34 aa, Artificial Sequence
  Non-cyclic GFR-binding peptide
  MOD_RES (2)..(2): Xaa is C or S
  MOD_RES (13)..(14)..(15)..(16)..(17): Xaa is A or G
  MOD_RES (18)..(19)..(20)..(21): Xaa is A or G or absent
KXSKVIMPIKGYXXXXXXXXXFYLINIPSLDQSV

SEQ ID NO: 32281 - protein, 30 aa, Artificial Sequence
  Non-cyclic GFR-binding peptide
EEVIMEYKFKLLVRGNDLYLMSIPETKVPA

SEQ ID NO: 32282 - protein, 32 aa, Artificial Sequence
  Non-cyclic GFR-binding peptide
  MOD_RES (32)..(32): Xaa is C or S
SEVTMNRHKRLVVNKNEDYYLISTASMKEPVX

SEQ ID NO: 32283 - protein, 40 aa, Artificial Sequence
  Non-cyclic GFR-binding peptide
  MOD_RES (2)..(4)..(37)..(38): Xaa is C or S
  MOD_RES (15)..(16)..(17)..(18)..(19): Xaa is A or G
  MOD_RES (20)..(21)..(22)..(23): Xaa is A or G or absent
LXGXEEVIMRHKRLXXXXXXXXXYYLMSTASTKVPAXXTS

SEQ ID NO: 32284 - protein, 35 aa, Artificial Sequence
  Non-cyclic GFR-binding peptide
  MOD_RES (31)..(32): Xaa is C or S
EEVIMEYKFKLLVRGNDLYLMSIPETKVPAXXTSP

SEQ ID NO: 32285 - protein, 39 aa, Artificial Sequence
  Non-cyclic GFR-binding peptide
  MOD_RES (33)..(34): Xaa is C or S
  MOD_RES (11)..(12)..(13)..(14)..(15): Xaa is A or G
  MOD_RES (16)..(17)..(18)..(19): Xaa is A or G or absent
EVVMDRHKRLXXXXXXXXXYYLISTASLRTPVXXTPPTS

SEQ ID NO: 32286 - protein, 35 aa, Artificial Sequence
  Non-cyclic GFR-binding peptide
  MOD_RES (1)..(3): Xaa is C or S
  MOD_RES (14)..(15)..(16)..(17)..(18): Xaa is A or G
  MOD_RES (19)..(20)..(21)..(22): Xaa is A or G or absent
XKXSKVIMPIKGYXXXXXXXXXFYLINIPSLDQSV

SEQ ID NO: 32287 - protein, 36 aa, Artificial Sequence
  Non-cyclic GFR-binding peptide
  MOD_RES (1)..(35)..(36): Xaa is C or S
  MOD_RES (13)..(14)..(15)..(16)..(17): Xaa is A or G
  MOD_RES (18)..(19)..(20)..(21): Xaa is A or G or absent
XESVAMGRHKRLXXXXXXXXXYYLISTASLKTPVXX

SEQ ID NO: 32288 - protein, 43 aa, Artificial Sequence
  Non-cyclic GFR-binding peptide
  MOD_RES (2)..(4)..(38)..(39): Xaa is C or S
  MOD_RES (16)..(17)..(18)..(19)..(20): Xaa is A or G
  MOD_RES (21)..(22)..(23)..(24): Xaa is A or G or absent
RXGXAEVVMDRHKRLXXXXXXXXXYYLISTASLRAPVXXSAPA

SEQ ID NO: 32289 - protein, 33 aa, Artificial Sequence
  Non-cyclic GFR-binding peptide
  MOD_RES (31)..(32): Xaa is C or S
SRVIMPIKGYVKPKRGVFYLINIPSLAQPVXXP

SEQ ID NO: 32290 - protein, 37 aa, Artificial Sequence
  Non-cyclic GFR-binding peptide
  MOD_RES (1)..(33)..(34): Xaa is C or S
XSEVTMNEYKFKVVNKNEDLYLISIPEMKEPVXXPEP

SEQ ID NO: 32291 - protein, 42 aa, Artificial Sequence
  Non-cyclic GFR-binding peptide
  MOD_RES (2)..(4)..(36)..(37): Xaa is C or S
RXAXSEVTMNPIKGYVVNKNEDFYLINIPSMKEPVXXPEPIG

SEQ ID NO: 32292 - protein, 41 aa, Artificial Sequence
  Non-cyclic GFR-binding peptide
  MOD_RES (2)..(4)..(38)..(39): Xaa is C or S
  MOD_RES (16)..(17)..(18)..(19)..(20): Xaa is A or G
  MOD_RES (21)..(22)..(23)..(24): Xaa is A or G or absent
RXAXSEVTMNYHYKLXXXXXXXXXKYLISIPSMKEPVXXPE

SEQ ID NO: 32293 - protein, 37 aa, Artificial Sequence
  Non-cyclic GFR-binding peptide
  MOD_RES (33)..(34): Xaa is C or S
  MOD_RES (11)..(12)..(13)..(14)..(15): Xaa is A or G
  MOD_RES (16)..(17)..(18)..(19): Xaa is A or G or absent
SKVVMPIKGYXXXXXXXXXFYLINIPSLDQPVXXPSA

SEQ ID NO: 32294 - protein, 30 aa, Artificial Sequence
  Non-cyclic GFR-binding peptide
EVTMNRHKRLVVNKNEDYYLISTASMKEPV

SEQ ID NO: 32295 - protein, 38 aa, Artificial Sequence
  Non-cyclic GFR-binding peptide
  MOD_RES (1)..(3)..(34)..(35): Xaa is C or S
XGXEEVIMEYKFKLLVRGNDLYLMSIPETKVPAXXTSP

SEQ ID NO: 32296 - protein, 41 aa, Artificial Sequence
  Non-cyclic GFR-binding peptide
  MOD_RES (1)..(35)..(36): Xaa is C or S
  MOD_RES (13)..(14)..(15)..(16)..(17): Xaa is A or G
  MOD_RES (18)..(19)..(20)..(21): Xaa is A or G or absent
XESVAMGRHKRLXXXXXXXXXYYLISTASLKTPVXXAKSAK

SEQ ID NO: 32297 - protein, 32 aa, Artificial Sequence
  Non-cyclic GFR-binding peptide
  MOD_RES (2)..(2): Xaa is C or S
GXEEVIMYHYKLLLVRGNDKYLMSIPSTKVPA

SEQ ID NO: 32298 - protein, 37 aa, Artificial Sequence
  Non-cyclic GFR-binding peptide
  MOD_RES (1)..(3)..(35)..(36): Xaa is C or S
XGXRDVVMGYHYKLIIQQKDNKYLMSIPSMKTPTXXP

SEQ ID NO: 32299 - protein, 31 aa, Artificial Sequence
  Non-cyclic GFR-binding peptide
RDVVMGYHYKLIIQQKDNKYLMSIPSMKTPT

SEQ ID NO: 32300 - protein, 36 aa, Artificial Sequence
  Non-cyclic GFR-binding peptide
  MOD_RES (34)..(35): Xaa is C or S
  MOD_RES (12)..(13)..(14)..(15)..(16): Xaa is A or G
  MOD_RES (17)..(18)..(19)..(20): Xaa is A or G or absent
SEVTMNRYKKLXXXXXXXXXFYLISIANMKEPVXXP

SEQ ID NO: 32301 - protein, 33 aa, Artificial Sequence
  Non-cyclic GFR-binding peptide
  MOD_RES (1)..(3): Xaa is C or S
XKXSKVIMPIKGYIKPTKGIFYLINIPSLDQSV

SEQ ID NO: 32302 - protein, 36 aa, Artificial Sequence
  Non-cyclic GFR-binding peptide
  MOD_RES (2)..(4): Xaa is C or S
  MOD_RES (15)..(16)..(17)..(18)..(19): Xaa is A or G
  MOD_RES (20)..(21)..(22)..(23): Xaa is A or G or absent
SXKXSRVIMPIKGYXXXXXXXXXFYLINIPSLAQPV

SEQ ID NO: 32303 - protein, 37 aa, Artificial Sequence
  Non-cyclic GFR-binding peptide
  MOD_RES (31)..(32): Xaa is C or S
EVVMDRHKRLVVNNAADYYLISTASLRAPVXXSAPAA

SEQ ID NO: 32304 - protein, 38 aa, Artificial Sequence
  Non-cyclic GFR-binding peptide
  MOD_RES (2)..(33)..(34): Xaa is C or S
GXEEVIMRHKRLLLVRGNDYYLMSTASTKVPAXXTSPV

SEQ ID NO: 32305 - protein, 44 aa, Artificial Sequence
  Non-cyclic GFR-binding peptide
  MOD_RES (2)..(4)..(38)..(39): Xaa is C or S
  MOD_RES (16)..(17)..(18)..(19)..(20): Xaa is A or G
  MOD_RES (21)..(22)..(23)..(24): Xaa is A or G or absent
HXGXSRVVMNRHKRLXXXXXXXXXYYLVSTASLKTPAXXPKPVH

SEQ ID NO: 32306 - protein, 36 aa, Artificial Sequence
  Non-cyclic GFR-binding peptide
  MOD_RES (1)..(3)..(36): Xaa is C or S
  MOD_RES (14)..(15)..(16)..(17)..(18): Xaa is A or G
  MOD_RES (19)..(20)..(21)..(22): Xaa is A or G or absent
XKXSRVIMPIKGYXXXXXXXXXFYLINIPSLAQPVX

SEQ ID NO: 32307 - protein, 32 aa, Artificial Sequence
  Non-cyclic GFR-binding peptide
  MOD_RES (1)..(1): Xaa is C or S
XSEVVMDRHKRLVVNNASDYYLISTASLRTPV

SEQ ID NO: 32308 - protein, 34 aa, Artificial Sequence
  Non-cyclic GFR-binding peptide
  MOD_RES (1)..(34): Xaa is C or S
  MOD_RES (12)..(13)..(14)..(15)..(16): Xaa is A or G
  MOD_RES (17)..(18)..(19)..(20): Xaa is A or G or absent
XSKVVMPIKGYXXXXXXXXXFYLINIPSLDQPVX

SEQ ID NO: 32309 - protein, 43 aa, Artificial Sequence
  Non-cyclic GFR-binding peptide
  MOD_RES (1)..(3)..(37)..(38): Xaa is C or S
  MOD_RES (15)..(16)..(17)..(18)..(19): Xaa is A or G
  MOD_RES (20)..(21)..(22)..(23): Xaa is A or G or absent
XGXSEVVMDRHKRLXXXXXXXXXYYLISTASLRTPVXXTPPTS

SEQ ID NO: 32310 - protein, 35 aa, Artificial Sequence
  Non-cyclic GFR-binding peptide
  MOD_RES (2)..(34)..(35): Xaa is C or S
GXESVAMGRHKRLYTVVGKDYYLISTASLKTPVXX

SEQ ID NO: 32311 - protein, 39 aa, Artificial Sequence
  Non-cyclic GFR-binding peptide
  MOD_RES (2)..(4)..(37)..(38): Xaa is C or S
  MOD_RES (15)..(16)..(17)..(18)..(19): Xaa is A or G
  MOD_RES (20)..(21)..(22)..(23): Xaa is A or G or absent
SXKXSRVIMPIKGYXXXXXXXXXFYLINIPSLAQPVXXP

SEQ ID NO: 32312 - protein, 41 aa, Artificial Sequence
  Non-cyclic GFR-binding peptide
  MOD_RES (1)..(35)..(36): Xaa is C or S
  MOD_RES (13)..(14)..(15)..(16)..(17): Xaa is A or G
  MOD_RES (18)..(19)..(20)..(21): Xaa is A or G or absent
XRDVVMGYHYKLXXXXXXXXXKYLMSIPSMKTPTXXPGASG

SEQ ID NO: 32313 - protein, 34 aa, Artificial Sequence
  Non-cyclic GFR-binding peptide
  MOD_RES (31)..(32): Xaa is C or S
EEVIMYHYKLLLVRGNDKYLMSIPSTKVPAXXTS

SEQ ID NO: 32314 - protein, 36 aa, Artificial Sequence
  Non-cyclic GFR-binding peptide
  MOD_RES (2)..(4)..(36): Xaa is C or S
RXGXSEVVMDRHKRLVVNNASDYYLISTASLRTPVX

SEQ ID NO: 32315 - protein, 38 aa, Artificial Sequence
  Non-cyclic GFR-binding peptide
  MOD_RES (1)..(3)..(35)..(36): Xaa is C or S
XGXRDVVMGEYKFKIIQQKDNLYLMSIPEMKTPTXXPG

SEQ ID NO: 32316 - protein, 43 aa, Artificial Sequence
  Non-cyclic GFR-binding peptide
  MOD_RES (1)..(3)..(37)..(38): Xaa is C or S
  MOD_RES (15)..(16)..(17)..(18)..(19): Xaa is A or G
  MOD_RES (20)..(21)..(22)..(23): Xaa is A or G or absent
XGXSEVVMDEYKFKXXXXXXXXXLYLISIPELRTPVXXTPPTS

SEQ ID NO: 32317 - protein, 37 aa, Artificial Sequence
  Non-cyclic GFR-binding peptide
  MOD_RES (1)..(33)..(34): Xaa is C or S
XSEVTMNRHKRLVVNKNEDYYLISTASMKEPVXXPEP

SEQ ID NO: 32318 - protein, 40 aa, Artificial Sequence
  Non-cyclic GFR-binding peptide
  MOD_RES (2)..(4)..(38)..(39): Xaa is C or S
  MOD_RES (16)..(17)..(18)..(19)..(20): Xaa is A or G
  MOD_RES (21)..(22)..(23)..(24): Xaa is A or G or absent
SXGXRDVVMGEYKFKXXXXXXXXXLYLMSIPEMKTPTXXP

SEQ ID NO: 32319 - protein, 36 aa, Artificial Sequence
  Non-cyclic GFR-binding peptide
  MOD_RES (1)..(33)..(34): Xaa is C or S
XSEVTMNRHKRLVVNKNEDYYLISTASMKEPVXXPE

SEQ ID NO: 32320 - protein, 37 aa, Artificial Sequence
  Non-cyclic GFR-binding peptide
  MOD_RES (2)..(4)..(36)..(37): Xaa is C or S
SXGXRDVVMGYHYKLIIQQKDNKYLMSIPSMKTPTXX

SEQ ID NO: 32321 - protein, 39 aa, Artificial Sequence
  Non-cyclic GFR-binding peptide
  MOD_RES (33)..(34): Xaa is C or S
  MOD_RES (11)..(12)..(13)..(14)..(15): Xaa is A or G
  MOD_RES (16)..(17)..(18)..(19): Xaa is A or G or absent
SKVVMPIKGYXXXXXXXXXFYLINIPSLDQPVXXPSASA

SEQ ID NO: 32322 - protein, 36 aa, Artificial Sequence
  Non-cyclic GFR-binding peptide
  MOD_RES (2)..(4)..(35)..(36): Xaa is C or S
LXGXEEVIMYHYKLLLVRGNDKYLMSIPSTKVPAXX

SEQ ID NO: 32323 - protein, 39 aa, Artificial Sequence
  Non-cyclic GFR-binding peptide
  MOD_RES (1)..(3)..(34)..(35): Xaa is C or S
XGXEEVIMEYKFKLLVRGNDLYLMSIPETKVPAXXTSPV

SEQ ID NO: 32324 - protein, 39 aa, Artificial Sequence
  Non-cyclic GFR-binding peptide
  MOD_RES (2)..(4)..(36)..(37): Xaa is C or S
RXAXSEVTMNEYKFKVVNKNEDLYLISIPEMKEPVXXPE

SEQ ID NO: 32325 - protein, 36 aa, Artificial Sequence
  Non-cyclic GFR-binding peptide
  MOD_RES (2)..(36): Xaa is C or S
  MOD_RES (14)..(15)..(16)..(17)..(18): Xaa is A or G
  MOD_RES (19)..(20)..(21)..(22): Xaa is A or G or absent
GXAEVVMDRHKRLXXXXXXXXXYYLISTASLRAPVX

SEQ ID NO: 32326 - protein, 35 aa, Artificial Sequence
  Non-cyclic GFR-binding peptide
  MOD_RES (32)..(33): Xaa is C or S
SEVTMNRYKKLVVNKNEDFYLISIANMKEPVXXPE

SEQ ID NO: 32327 - protein, 34 aa, Artificial Sequence
  Non-cyclic GFR-binding peptide
  MOD_RES (32)..(33): Xaa is C or S
SEVVMDRHKRLVVNNASDYYLISTASLRTPVXXT

SEQ ID NO: 32328 - protein, 37 aa, Artificial Sequence
  Non-cyclic GFR-binding peptide
  MOD_RES (2)..(36)..(37): Xaa is C or S
  MOD_RES (14)..(15)..(16)..(17)..(18): Xaa is A or G
  MOD_RES (19)..(20)..(21)..(22): Xaa is A or G or absent
GXESVAMGRHKRLXXXXXXXXXYYLISTASLKTPVXX

SEQ ID NO: 32329 - protein, 32 aa, Artificial Sequence
  Non-cyclic GFR-binding peptide
  MOD_RES (11)..(12)..(13)..(14)..(15): Xaa is A or G
  MOD_RES (16)..(17)..(18)..(19): Xaa is A or G or absent
EVTMNRHKRLXXXXXXXXXYYLISTASMKEPV

SEQ ID NO: 32330 - protein, 35 aa, Artificial Sequence
  Non-cyclic GFR-binding peptide
  MOD_RES (2)..(34)..(35): Xaa is C or S
GXAEVVMDRHKRLVVNNAADYYLISTASLRAPVXX

SEQ ID NO: 32331 - protein, 38 aa, Artificial Sequence
  Non-cyclic GFR-binding peptide
  MOD_RES (2)..(35)..(36): Xaa is C or S
  MOD_RES (13)..(14)..(15)..(16)..(17): Xaa is A or G
  MOD_RES (18)..(19)..(20)..(21): Xaa is A or G or absent
KXSKVIMPIKGYXXXXXXXXXFYLINIPSLDQSVXXPS

SEQ ID NO: 32332 - protein, 39 aa, Artificial Sequence
  Non-cyclic GFR-binding peptide
  MOD_RES (33)..(34): Xaa is C or S
  MOD_RES (11)..(12)..(13)..(14)..(15): Xaa is A or G
  MOD_RES (16)..(17)..(18)..(19): Xaa is A or G or absent
EVTMNRYKKLXXXXXXXXXFYLISIANMKEPVXXPEPIG

SEQ ID NO: 32333 - protein, 40 aa, Artificial Sequence
  Non-cyclic GFR-binding peptide
  MOD_RES (2)..(4)..(35)..(36): Xaa is C or S
LXGXEEVIMYHYKLLLVRGNDKYLMSIPSTKVPAXXTSPV

SEQ ID NO: 32334 - protein, 38 aa, Artificial Sequence
  Non-cyclic GFR-binding peptide
  MOD_RES (1)..(35)..(36): Xaa is C or S
  MOD_RES (13)..(14)..(15)..(16)..(17): Xaa is A or G
  MOD_RES (18)..(19)..(20)..(21): Xaa is A or G or absent
XSEVTMNEYKFKXXXXXXXXXLYLISIPEMKEPVXXPE

SEQ ID NO: 32335 - protein, 41 aa, Artificial Sequence
  Non-cyclic GFR-binding peptide
  MOD_RES (2)..(35)..(36): Xaa is C or S
  MOD_RES (13)..(14)..(15)..(16)..(17): Xaa is A or G
  MOD_RES (18)..(19)..(20)..(21): Xaa is A or G or absent
GXEEVIMRHKRLXXXXXXXXXYYLMSTASTKVPAXXTSPVR

SEQ ID NO: 32336 - protein, 36 aa, Artificial Sequence
  Non-cyclic GFR-binding peptide
  MOD_RES (2)..(4)..(36): Xaa is C or S
RXGXAEVVMDRHKRLVVNNAADYYLISTASLRAPVX

SEQ ID NO: 32337 - protein, 35 aa, Artificial Sequence
  Non-cyclic GFR-binding peptide
  MOD_RES (1)..(33)..(34): Xaa is C or S
XSEVTMNRYKKLVVNKNEDFYLISIANMKEPVXXP

SEQ ID NO: 32338 - protein, 38 aa, Artificial Sequence
  Non-cyclic GFR-binding peptide
  MOD_RES (2)..(34)..(35): Xaa is C or S
AXSEVTMNPIKGYVVNKNEDFYLINIPSMKEPVXXPEP

SEQ ID NO: 32339 - protein, 43 aa, Artificial Sequence
  Non-cyclic GFR-binding peptide
  MOD_RES (2)..(4)..(38)..(39): Xaa is C or S
  MOD_RES (16)..(17)..(18)..(19)..(20): Xaa is A or G
  MOD_RES (21)..(22)..(23)..(24): Xaa is A or G or absent
RXAXSEVTMNRYKKLXXXXXXXXXFYLISIANMKEPVXXPEPI

SEQ ID NO: 32340 - protein, 36 aa, Artificial Sequence
  Non-cyclic GFR-binding peptide
  MOD_RES (33)..(34): Xaa is C or S
  MOD_RES (11)..(12)..(13)..(14)..(15): Xaa is A or G
  MOD_RES (16)..(17)..(18)..(19): Xaa is A or G or absent
EEVIMYHYKLXXXXXXXXXKYLMSIPSTKVPAXXTS

SEQ ID NO: 32341 - protein, 43 aa, Artificial Sequence
  Non-cyclic GFR-binding peptide
  MOD_RES (1)..(3)..(37)..(38): Xaa is C or S
  MOD_RES (15)..(16)..(17)..(18)..(19): Xaa is A or G
  MOD_RES (20)..(21)..(22)..(23): Xaa is A or G or absent
XAXSEVTMNYHYKLXXXXXXXXXKYLISIPSMKEPVXXPEPIG

SEQ ID NO: 32342 - protein, 39 aa, Artificial Sequence
  Non-cyclic GFR-binding peptide
  MOD_RES (1)..(34)..(35): Xaa is C or S
  MOD_RES (12)..(13)..(14)..(15)..(16): Xaa is A or G
  MOD_RES (17)..(18)..(19)..(20): Xaa is A or G or absent
XEEVIMRHKRLXXXXXXXXXYYLMSTASTKVPAXXTSPV

SEQ ID NO: 32343 - protein, 37 aa, Artificial Sequence
  Non-cyclic GFR-binding peptide
  MOD_RES (31)..(32): Xaa is C or S
EVVMDEYKFKVVNNASDLYLISIPELRTPVXXTPPTS

SEQ ID NO: 32344 - protein, 37 aa, Artificial Sequence
  Non-cyclic GFR-binding peptide
  MOD_RES (1)..(3)..(37): Xaa is C or S
  MOD_RES (15)..(16)..(17)..(18)..(19): Xaa is A or G
  MOD_RES (20)..(21)..(22)..(23): Xaa is A or G or absent
XGXRDVVMGYHYKLXXXXXXXXXKYLMSIPSMKTPTX

SEQ ID NO: 32345 - protein, 38 aa, Artificial Sequence
  Non-cyclic GFR-binding peptide
  MOD_RES (32)..(33): Xaa is C or S
SEVVMDRHKRLVVNNASDYYLISTASLRTPVXXTPPTS

SEQ ID NO: 32346 - protein, 36 aa, Artificial Sequence
  Non-cyclic GFR-binding peptide
  MOD_RES (34)..(35): Xaa is C or S
  MOD_RES (12)..(13)..(14)..(15)..(16): Xaa is A or G
  MOD_RES (17)..(18)..(19)..(20): Xaa is A or G or absent
SEVVMDRHKRLXXXXXXXXXYYLISTASLRTPVXXT

SEQ ID NO: 32347 - protein, 32 aa, Artificial Sequence
  Non-cyclic GFR-binding peptide
  MOD_RES (1)..(1): Xaa is C or S
XSEVVMDEYKFKVVNNASDLYLISIPELRTPV

SEQ ID NO: 32348 - protein, 40 aa, Artificial Sequence
  Non-cyclic GFR-binding peptide
  MOD_RES (1)..(3)..(35)..(36): Xaa is C or S
XGXSEVVMDRHKRLVVNNASDYYLISTASLRTPVXXTPPT

SEQ ID NO: 32349 - protein, 35 aa, Artificial Sequence
  Non-cyclic GFR-binding peptide
  MOD_RES (2)..(33)..(34): Xaa is C or S
GXEEVIMRHKRLLLVRGNDYYLMSTASTKVPAXXT

SEQ ID NO: 32350 - protein, 39 aa, Artificial Sequence
  Non-cyclic GFR-binding peptide
  MOD_RES (1)..(35)..(36): Xaa is C or S
  MOD_RES (13)..(14)..(15)..(16)..(17): Xaa is A or G
  MOD_RES (18)..(19)..(20)..(21): Xaa is A or G or absent
XSEVTMNYHYKLXXXXXXXXXKYLISIPSMKEPVXXPEP

SEQ ID NO: 32351 - protein, 31 aa, Artificial Sequence
  Non-cyclic GFR-binding peptide
  MOD_RES (31)..(31): Xaa is C or S
DVVMGEYKFKIIQQKDNLYLMSIPEMKTPTX

SEQ ID NO: 32352 - protein, 40 aa, Artificial Sequence
  Non-cyclic GFR-binding peptide
  MOD_RES (2)..(36)..(37): Xaa is C or S
  MOD_RES (14)..(15)..(16)..(17)..(18): Xaa is A or G
  MOD_RES (19)..(20)..(21)..(22): Xaa is A or G or absent
GXSEVVMDRHKRLXXXXXXXXXYYLISTASLRTPVXXTPP

SEQ ID NO: 32353 - protein, 44 aa, Artificial Sequence
  Non-cyclic GFR-binding peptide
  MOD_RES (2)..(4)..(38)..(39): Xaa is C or S
  MOD_RES (16)..(17)..(18)..(19)..(20): Xaa is A or G
  MOD_RES (21)..(22)..(23)..(24): Xaa is A or G or absent
RXGXAEVVMDRHKRLXXXXXXXXXYYLISTASLRAPVXXSAPAA

SEQ ID NO: 32354 - protein, 36 aa, Artificial Sequence
  Non-cyclic GFR-binding peptide
  MOD_RES (1)..(3): Xaa is C or S
  MOD_RES (15)..(16)..(17)..(18)..(19): Xaa is A or G
  MOD_RES (20)..(21)..(22)..(23): Xaa is A or G or absent
XGXAEVVMDRHKRLXXXXXXXXXYYLISTASLRAPV

SEQ ID NO: 32355 - protein, 32 aa, Artificial Sequence
  Non-cyclic GFR-binding peptide
  MOD_RES (2)..(2): Xaa is C or S
KXSKVVMPIKGYVKPTRGVFYLINIPSLDQPV

SEQ ID NO: 32356 - protein, 30 aa, Artificial Sequence
  Non-cyclic GFR-binding peptide
EEVIMRHKRLLLVRGNDYYLMSTASTKVPA

SEQ ID NO: 32357 - protein, 33 aa, Artificial Sequence
  Non-cyclic GFR-binding peptide
  MOD_RES (12)..(13)..(14)..(15)..(16): Xaa is A or G
  MOD_RES (17)..(18)..(19)..(20): Xaa is A or G or absent
AEVVMDRHKRLXXXXXXXXXYYLISTASLRAPV

SEQ ID NO: 32358 - protein, 37 aa, Artificial Sequence
  Non-cyclic GFR-binding peptide
  MOD_RES (31)..(32): Xaa is C or S
DVVMGRHKRLIIQQKDNYYLMSTASMKTPTXXPGASG

SEQ ID NO: 32359 - protein, 38 aa, Artificial Sequence
  Non-cyclic GFR-binding peptide
  MOD_RES (2)..(4)..(38): Xaa is C or S
  MOD_RES (16)..(17)..(18)..(19)..(20): Xaa is A or G
  MOD_RES (21)..(22)..(23)..(24): Xaa is A or G or absent
RXGXAEVVMDRHKRLXXXXXXXXXYYLISTASLRAPVX

SEQ ID NO: 32360 - protein, 34 aa, Artificial Sequence
  Non-cyclic GFR-binding peptide
  MOD_RES (1)..(3): Xaa is C or S
XGXRDVVMGEYKFKIIQQKDNLYLMSIPEMKTPT

SEQ ID NO: 32361 - protein, 35 aa, Artificial Sequence
  Non-cyclic GFR-binding peptide
  MOD_RES (1)..(35): Xaa is C or S
  MOD_RES (13)..(14)..(15)..(16)..(17): Xaa is A or G
  MOD_RES (18)..(19)..(20)..(21): Xaa is A or G or absent
XAEVVMDRHKRLXXXXXXXXXYYLISTASLRAPVX

SEQ ID NO: 32362 - protein, 41 aa, Artificial Sequence
  Non-cyclic GFR-binding peptide
  MOD_RES (2)..(4)..(38)..(39): Xaa is C or S
  MOD_RES (16)..(17)..(18)..(19)..(20): Xaa is A or G
  MOD_RES (21)..(22)..(23)..(24): Xaa is A or G or absent
SXGXRDVVMGYHYKLXXXXXXXXXKYLMSIPSMKTPTXXPG

SEQ ID NO: 32363 - protein, 36 aa, Artificial Sequence
  Non-cyclic GFR-binding peptide
  MOD_RES (1)..(35)..(36): Xaa is C or S
  MOD_RES (13)..(14)..(15)..(16)..(17): Xaa is A or G
  MOD_RES (18)..(19)..(20)..(21): Xaa is A or G or absent
XSEVVMDRHKRLXXXXXXXXXYYLISTASLRTPVXX

SEQ ID NO: 32364 - protein, 34 aa, Artificial Sequence
  Non-cyclic GFR-binding peptide
  MOD_RES (2)..(4): Xaa is C or S
LXGXEEVIMRHKRLLLVRGNDYYLMSTASTKVPA

SEQ ID NO: 32365 - protein, 37 aa, Artificial Sequence
  Non-cyclic GFR-binding peptide
  MOD_RES (2)..(34)..(35): Xaa is C or S
GXRDVVMGYHYKLIIQQKDNKYLMSIPSMKTPTXXPG

SEQ ID NO: 32366 - protein, 41 aa, Artificial Sequence
  Non-cyclic GFR-binding peptide
  MOD_RES (1)..(35)..(36): Xaa is C or S
  MOD_RES (13)..(14)..(15)..(16)..(17): Xaa is A or G
  MOD_RES (18)..(19)..(20)..(21): Xaa is A or G or absent
XSEVVMDEYKFKXXXXXXXXXLYLISIPELRTPVXXTPPTS

SEQ ID NO: 32367 - protein, 39 aa, Artificial Sequence
  Non-cyclic GFR-binding peptide
  MOD_RES (2)..(4)..(38)..(39): Xaa is C or S
  MOD_RES (16)..(17)..(18)..(19)..(20): Xaa is A or G
  MOD_RES (21)..(22)..(23)..(24): Xaa is A or G or absent
RXAXSEVTMNPIKGYXXXXXXXXXFYLINIPSMKEPVXX

SEQ ID NO: 32368 - protein, 38 aa, Artificial Sequence
  Non-cyclic GFR-binding peptide
  MOD_RES (1)..(3)..(37)..(38): Xaa is C or S
  MOD_RES (15)..(16)..(17)..(18)..(19): Xaa is A or G
  MOD_RES (20)..(21)..(22)..(23): Xaa is A or G or absent
XAXSEVTMNYHYKLXXXXXXXXXKYLISIPSMKEPVXX

SEQ ID NO: 32369 - protein, 38 aa, Artificial Sequence
  Non-cyclic GFR-binding peptide
  MOD_RES (33)..(34): Xaa is C or S
  MOD_RES (11)..(12)..(13)..(14)..(15): Xaa is A or G
  MOD_RES (16)..(17)..(18)..(19): Xaa is A or G or absent
EVTMNRHKRLXXXXXXXXXYYLISTASMKEPVXXPEPI

SEQ ID NO: 32370 - protein, 35 aa, Artificial Sequence
  Non-cyclic GFR-binding peptide
  MOD_RES (32)..(33): Xaa is C or S
ESVAMGRHKRLYTVVGKDYYLISTASLKTPVXXAK

SEQ ID NO: 32371 - protein, 39 aa, Artificial Sequence
  Non-cyclic GFR-binding peptide
  MOD_RES (2)..(35)..(36): Xaa is C or S
  MOD_RES (13)..(14)..(15)..(16)..(17): Xaa is A or G
  MOD_RES (18)..(19)..(20)..(21): Xaa is A or G or absent
KXSRVIMPIKGYXXXXXXXXXFYLINIPSLAQPVXXPAA

SEQ ID NO: 32372 - protein, 36 aa, Artificial Sequence
  Non-cyclic GFR-binding peptide
  MOD_RES (1)..(32)..(33): Xaa is C or S
XSKVIMPIKGYIKPTKGIFYLINIPSLDQSVXXPSA

SEQ ID NO: 32373 - protein, 32 aa, Artificial Sequence
  Non-cyclic GFR-binding peptide
  MOD_RES (32)..(32): Xaa is C or S
SEVVMDYHYKLVVNNASDKYLISIPSLRTPVX

SEQ ID NO: 32374 - protein, 34 aa, Artificial Sequence
  Non-cyclic GFR-binding peptide
  MOD_RES (2)..(2): Xaa is C or S
  MOD_RES (13)..(14)..(15)..(16)..(17): Xaa is A or G
  MOD_RES (18)..(19)..(20)..(21): Xaa is A or G or absent
GXEEVIMEYKFKXXXXXXXXXLYLMSIPETKVPA

SEQ ID NO: 32375 - protein, 33 aa, Artificial Sequence
  Non-cyclic GFR-binding peptide
  MOD_RES (31)..(32): Xaa is C or S
EEVIMRHKRLLLVRGNDYYLMSTASTKVPAXXT

SEQ ID NO: 32376 - protein, 38 aa, Artificial Sequence
  Non-cyclic GFR-binding peptide
  MOD_RES (33)..(34): Xaa is C or S
  MOD_RES (11)..(12)..(13)..(14)..(15): Xaa is A or G
  MOD_RES (16)..(17)..(18)..(19): Xaa is A or G or absent
DVVMGRHKRLXXXXXXXXXYYLMSTASMKTPTXXPGAS

SEQ ID NO: 32377 - protein, 35 aa, Artificial Sequence
  Non-cyclic GFR-binding peptide
  MOD_RES (1)..(35): Xaa is C or S
  MOD_RES (13)..(14)..(15)..(16)..(17): Xaa is A or G
  MOD_RES (18)..(19)..(20)..(21): Xaa is A or G or absent
XRDVVMGRHKRLXXXXXXXXXYYLMSTASMKTPTX

SEQ ID NO: 32378 - protein, 37 aa, Artificial Sequence
  Non-cyclic GFR-binding peptide
  MOD_RES (34)..(35): Xaa is C or S
  MOD_RES (12)..(13)..(14)..(15)..(16): Xaa is A or G
  MOD_RES (17)..(18)..(19)..(20): Xaa is A or G or absent
SEVTMNEYKFKXXXXXXXXXLYLISIPEMKEPVXXPE

SEQ ID NO: 32379 - protein, 39 aa, Artificial Sequence
  Non-cyclic GFR-binding peptide
  MOD_RES (2)..(34)..(35): Xaa is C or S
AXSEVTMNRYKKLVVNKNEDFYLISIANMKEPVXXPEPI

SEQ ID NO: 32380 - protein, 40 aa, Artificial Sequence
  Non-cyclic GFR-binding peptide
  MOD_RES (34)..(35): Xaa is C or S
  MOD_RES (12)..(13)..(14)..(15)..(16): Xaa is A or G
  MOD_RES (17)..(18)..(19)..(20): Xaa is A or G or absent
SEVVMDYHYKLXXXXXXXXXKYLISIPSLRTPVXXTPPTS

SEQ ID NO: 32381 - protein, 40 aa, Artificial Sequence
  Non-cyclic GFR-binding peptide
  MOD_RES (34)..(35): Xaa is C or S
  MOD_RES (12)..(13)..(14)..(15)..(16): Xaa is A or G
  MOD_RES (17)..(18)..(19)..(20): Xaa is A or G or absent
SEVTMNRHKRLXXXXXXXXXYYLISTASMKEPVXXPEPIG

SEQ ID NO: 32382 - protein, 36 aa, Artificial Sequence
  Non-cyclic GFR-binding peptide
  MOD_RES (2)..(35)..(36): Xaa is C or S
  MOD_RES (13)..(14)..(15)..(16)..(17): Xaa is A or G
  MOD_RES (18)..(19)..(20)..(21): Xaa is A or G or absent
GXEEVIMYHYKLXXXXXXXXXKYLMSIPSTKVPAXX

SEQ ID NO: 32383 - protein, 38 aa, Artificial Sequence
  Non-cyclic GFR-binding peptide
  MOD_RES (1)..(33)..(34): Xaa is C or S
XSEVVMDYHYKLVVNNASDKYLISIPSLRTPVXXTPPT

SEQ ID NO: 32384 - protein, 36 aa, Artificial Sequence
  Non-cyclic GFR-binding peptide
  MOD_RES (2)..(36): Xaa is C or S
  MOD_RES (14)..(15)..(16)..(17)..(18): Xaa is A or G
  MOD_RES (19)..(20)..(21)..(22): Xaa is A or G or absent
AXSEVTMNRYKKLXXXXXXXXXFYLISIANMKEPVX

SEQ ID NO: 32385 - protein, 33 aa, Artificial Sequence
  Non-cyclic GFR-binding peptide
  MOD_RES (2)..(33): Xaa is C or S
KXSKVVMPIKGYVKPTRGVFYLINIPSLDQPVX

SEQ ID NO: 32386 - protein, 35 aa, Artificial Sequence
  Non-cyclic GFR-binding peptide
  MOD_RES (2)..(2): Xaa is C or S
  MOD_RES (14)..(15)..(16)..(17)..(18): Xaa is A or G
  MOD_RES (19)..(20)..(21)..(22): Xaa is A or G or absent
GXRDVVMGRHKRLXXXXXXXXXYYLMSTASMKTPT

SEQ ID NO: 32387 - protein, 36 aa, Artificial Sequence
  Non-cyclic GFR-binding peptide
  MOD_RES (1)..(33)..(34): Xaa is C or S
XSEVVMDYHYKLVVNNASDKYLISIPSLRTPVXXTP

SEQ ID NO: 32388 - protein, 41 aa, Artificial Sequence
  Non-cyclic GFR-binding peptide
  MOD_RES (2)..(4)..(35)..(36): Xaa is C or S
SXKXSKVVMPIKGYVKPTRGVFYLINIPSLDQPVXXPSASA

SEQ ID NO: 32389 - protein, 34 aa, Artificial Sequence
  Non-cyclic GFR-binding peptide
  MOD_RES (31)..(32): Xaa is C or S
EEVIMEYKFKLLVRGNDLYLMSIPETKVPAXXTS

SEQ ID NO: 32390 - protein, 39 aa, Artificial Sequence
  Non-cyclic GFR-binding peptide
  MOD_RES (34)..(35): Xaa is C or S
  MOD_RES (12)..(13)..(14)..(15)..(16): Xaa is A or G
  MOD_RES (17)..(18)..(19)..(20): Xaa is A or G or absent
SEVTMNYHYKLXXXXXXXXXKYLISIPSMKEPVXXPEPI

SEQ ID NO: 32391 - protein, 39 aa, Artificial Sequence
  Non-cyclic GFR-binding peptide
  MOD_RES (1)..(3)..(37)..(38): Xaa is C or S
  MOD_RES (15)..(16)..(17)..(18)..(19): Xaa is A or G
  MOD_RES (20)..(21)..(22)..(23): Xaa is A or G or absent
XGXSEVVMDEYKFKXXXXXXXXXLYLISIPELRTPVXXT

SEQ ID NO: 32392 - protein, 40 aa, Artificial Sequence
  Non-cyclic GFR-binding peptide
  MOD_RES (1)..(3)..(35)..(36): Xaa is C or S
XGXESVAMGRHKRLYTVVGKDYYLISTASLKTPVXXAKSA

SEQ ID NO: 32393 - protein, 38 aa, Artificial Sequence
  Non-cyclic GFR-binding peptide
  MOD_RES (2)..(33)..(34): Xaa is C or S
KXSKVIMPIKGYIKPTKGIFYLINIPSLDQSVXXPSAS

SEQ ID NO: 32394 - protein, 32 aa, Artificial Sequence
  Non-cyclic GFR-binding peptide
  MOD_RES (31)..(32): Xaa is C or S
DVVMGEYKFKIIQQKDNLYLMSIPEMKTPTXX

SEQ ID NO: 32395 - protein, 34 aa, Artificial Sequence
  Non-cyclic GFR-binding peptide
  MOD_RES (34)..(34): Xaa is C or S
  MOD_RES (12)..(13)..(14)..(15)..(16): Xaa is A or G
  MOD_RES (17)..(18)..(19)..(20): Xaa is A or G or absent
AEVVMDRHKRLXXXXXXXXXYYLISTASLRAPVX

SEQ ID NO: 32396 - protein, 37 aa, Artificial Sequence
  Non-cyclic GFR-binding peptide
  MOD_RES (1)..(33)..(34): Xaa is C or S
XSEVVMDYHYKLVVNNASDKYLISIPSLRTPVXXTPP

SEQ ID NO: 32397 - protein, 33 aa, Artificial Sequence
  Non-cyclic GFR-binding peptide
  MOD_RES (1)..(33): Xaa is C or S
XSEVVMDRHKRLVVNNASDYYLISTASLRTPVX

SEQ ID NO: 32398 - protein, 42 aa, Artificial Sequence
  Non-cyclic GFR-binding peptide
  MOD_RES (1)..(3)..(36)..(37): Xaa is C or S
  MOD_RES (14)..(15)..(16)..(17)..(18): Xaa is A or G
  MOD_RES (19)..(20)..(21)..(22): Xaa is A or G or absent
XKXSKVIMPIKGYXXXXXXXXXFYLINIPSLDQSVXXPSASA

SEQ ID NO: 32399 - protein, 36 aa, Artificial Sequence
  Non-cyclic GFR-binding peptide
  MOD_RES (1)..(3): Xaa is C or S
  MOD_RES (15)..(16)..(17)..(18)..(19): Xaa is A or G
  MOD_RES (20)..(21)..(22)..(23): Xaa is A or G or absent
XAXSEVTMNYHYKLXXXXXXXXXKYLISIPSMKEPV

SEQ ID NO: 32400 - protein, 34 aa, Artificial Sequence
  Non-cyclic GFR-binding peptide
  MOD_RES (1)..(33)..(34): Xaa is C or S
XSEVVMDRHKRLVVNNASDYYLISTASLRTPVXX

SEQ ID NO: 32401 - protein, 30 aa, Artificial Sequence
  Non-cyclic GFR-binding peptide
EEVIMYHYKLLLVRGNDKYLMSIPSTKVPA

SEQ ID NO: 32402 - protein, 40 aa, Artificial Sequence
  Non-cyclic GFR-binding peptide
  MOD_RES (2)..(4)..(38)..(39): Xaa is C or S
  MOD_RES (16)..(17)..(18)..(19)..(20): Xaa is A or G
  MOD_RES (21)..(22)..(23)..(24): Xaa is A or G or absent
RXGXESVAMGRHKRLXXXXXXXXXYYLISTASLKTPVXXA

SEQ ID NO: 32403 - protein, 36 aa, Artificial Sequence
  Non-cyclic GFR-binding peptide
  MOD_RES (1)..(33)..(34): Xaa is C or S
XSEVTMNEYKFKVVNKNEDLYLISIPEMKEPVXXPE

SEQ ID NO: 32404 - protein, 37 aa, Artificial Sequence
  Non-cyclic GFR-binding peptide
  MOD_RES (1)..(3)..(34)..(35): Xaa is C or S
XGXEEVIMYHYKLLLVRGNDKYLMSIPSTKVPAXXTS

SEQ ID NO: 32405 - protein, 40 aa, Artificial Sequence
  Non-cyclic GFR-binding peptide
  MOD_RES (1)..(3)..(36)..(37): Xaa is C or S
  MOD_RES (14)..(15)..(16)..(17)..(18): Xaa is A or G
  MOD_RES (19)..(20)..(21)..(22): Xaa is A or G or absent
XKXSKVIMPIKGYXXXXXXXXXFYLINIPSLDQSVXXPSA

SEQ ID NO: 32406 - protein, 40 aa, Artificial Sequence
  Non-cyclic GFR-binding peptide
  MOD_RES (1)..(3)..(35)..(36): Xaa is C or S
XAXSEVTMNRHKRLVVNKNEDYYLISTASMKEPVXXPEPI

SEQ ID NO: 32407 - protein, 38 aa, Artificial Sequence
  Non-cyclic GFR-binding peptide
  MOD_RES (34)..(35): Xaa is C or S
  MOD_RES (12)..(13)..(14)..(15)..(16): Xaa is A or G
  MOD_RES (17)..(18)..(19)..(20): Xaa is A or G or absent
RDVVMGRHKRLXXXXXXXXXYYLMSTASMKTPTXXPGA

SEQ ID NO: 32408 - protein, 33 aa, Artificial Sequence
  Non-cyclic GFR-binding peptide
  MOD_RES (1)..(33): Xaa is C or S
XSEVVMDEYKFKVVNNASDLYLISIPELRTPVX

SEQ ID NO: 32409 - protein, 42 aa, Artificial Sequence
  Non-cyclic GFR-binding peptide
  MOD_RES (2)..(4)..(37)..(38): Xaa is C or S
  MOD_RES (15)..(16)..(17)..(18)..(19): Xaa is A or G
  MOD_RES (20)..(21)..(22)..(23): Xaa is A or G or absent
LXGXEEVIMRHKRLXXXXXXXXXYYLMSTASTKVPAXXTSPV

SEQ ID NO: 32410 - protein, 39 aa, Artificial Sequence
  Non-cyclic GFR-binding peptide
  MOD_RES (2)..(36)..(37): Xaa is C or S
  MOD_RES (14)..(15)..(16)..(17)..(18): Xaa is A or G
  MOD_RES (19)..(20)..(21)..(22): Xaa is A or G or absent
GXRDVVMGRHKRLXXXXXXXXXYYLMSTASMKTPTXXPG

SEQ ID NO: 32411 - protein, 35 aa, Artificial Sequence
  Non-cyclic GFR-binding peptide
  MOD_RES (34)..(35): Xaa is C or S
  MOD_RES (12)..(13)..(14)..(15)..(16): Xaa is A or G
  MOD_RES (17)..(18)..(19)..(20): Xaa is A or G or absent
AEVVMDRHKRLXXXXXXXXXYYLISTASLRAPVXX

SEQ ID NO: 32412 - protein, 39 aa, Artificial Sequence
  Non-cyclic GFR-binding peptide
  MOD_RES (2)..(34)..(35): Xaa is C or S
AXSEVTMNPIKGYVVNKNEDFYLINIPSMKEPVXXPEPI

SEQ ID NO: 32413 - protein, 33 aa, Artificial Sequence
  Non-cyclic GFR-binding peptide
  MOD_RES (1)..(3): Xaa is C or S
XGXEEVIMEYKFKLLVRGNDLYLMSIPETKVPA

SEQ ID NO: 32414 - protein, 33 aa, Artificial Sequence
  Non-cyclic GFR-binding peptide
  MOD_RES (1)..(3): Xaa is C or S
XKXSRVIMPIKGYVKPKRGVFYLINIPSLAQPV

SEQ ID NO: 32415 - protein, 37 aa, Artificial Sequence
  Non-cyclic GFR-binding peptide
  MOD_RES (1)..(3)..(35)..(36): Xaa is C or S
XAXSEVTMNRYKKLVVNKNEDFYLISIANMKEPVXXP

SEQ ID NO: 32416 - protein, 34 aa, Artificial Sequence
  Non-cyclic GFR-binding peptide
  MOD_RES (2)..(33)..(34): Xaa is C or S
KXSKVVMPIKGYVKPTRGVFYLINIPSLDQPVXX

SEQ ID NO: 32417 - protein, 36 aa, Artificial Sequence
  Non-cyclic GFR-binding peptide
  MOD_RES (2)..(35)..(36): Xaa is C or S
  MOD_RES (13)..(14)..(15)..(16)..(17): Xaa is A or G
  MOD_RES (18)..(19)..(20)..(21): Xaa is A or G or absent
KXSRVIMPIKGYXXXXXXXXXFYLINIPSLAQPVXX

SEQ ID NO: 32418 - protein, 42 aa, Artificial Sequence
  Non-cyclic GFR-binding peptide
  MOD_RES (1)..(3)..(36)..(37): Xaa is C or S
  MOD_RES (14)..(15)..(16)..(17)..(18): Xaa is A or G
  MOD_RES (19)..(20)..(21)..(22): Xaa is A or G or absent
XGXEEVIMRHKRLXXXXXXXXXYYLMSTASTKVPAXXTSPVR

SEQ ID NO: 32419 - protein, 30 aa, Artificial Sequence
  Non-cyclic GFR-binding peptide
EVVMDRHKRLVVNNAADYYLISTASLRAPV

SEQ ID NO: 32420 - protein, 38 aa, Artificial Sequence
  Non-cyclic GFR-binding peptide
  MOD_RES (32)..(33): Xaa is C or S
ESVAMGRHKRLYTVVGKDYYLISTASLKTPVXXAKSAK

SEQ ID NO: 32421 - protein, 39 aa, Artificial Sequence
  Non-cyclic GFR-binding peptide
  MOD_RES (2)..(33)..(34): Xaa is C or S
GXEEVIMYHYKLLLVRGNDKYLMSIPSTKVPAXXTSPVR

SEQ ID NO: 32422 - protein, 37 aa, Artificial Sequence
  Non-cyclic GFR-binding peptide
  MOD_RES (1)..(3)..(36)..(37): Xaa is C or S
  MOD_RES (14)..(15)..(16)..(17)..(18): Xaa is A or G
  MOD_RES (19)..(20)..(21)..(22): Xaa is A or G or absent
XGXEEVIMRHKRLXXXXXXXXXYYLMSTASTKVPAXX

SEQ ID NO: 32423 - protein, 41 aa, Artificial Sequence
  Non-cyclic GFR-binding peptide
  MOD_RES (2)..(36)..(37): Xaa is C or S
  MOD_RES (14)..(15)..(16)..(17)..(18): Xaa is A or G
  MOD_RES (19)..(20)..(21)..(22): Xaa is A or G or absent
GXRDVVMGEYKFKXXXXXXXXXLYLMSIPEMKTPTXXPGAS

SEQ ID NO: 32424 - protein, 39 aa, Artificial Sequence
  Non-cyclic GFR-binding peptide
  MOD_RES (1)..(3)..(35)..(36): Xaa is C or S
XGXESVAMGRHKRLYTVVGKDYYLISTASLKTPVXXAKS

SEQ ID NO: 32425 - protein, 39 aa, Artificial Sequence
  Non-cyclic GFR-binding peptide
  MOD_RES (1)..(3)..(37)..(38): Xaa is C or S
  MOD_RES (15)..(16)..(17)..(18)..(19): Xaa is A or G
  MOD_RES (20)..(21)..(22)..(23): Xaa is A or G or absent
XAXSEVTMNYHYKLXXXXXXXXXKYLISIPSMKEPVXXP

SEQ ID NO: 32426 - protein, 44 aa, Artificial Sequence
  Non-cyclic GFR-binding peptide
  MOD_RES (2)..(4)..(38)..(39): Xaa is C or S
  MOD_RES (16)..(17)..(18)..(19)..(20): Xaa is A or G
  MOD_RES (21)..(22)..(23)..(24): Xaa is A or G or absent
RXAXSEVTMNPIKGYXXXXXXXXXFYLINIPSMKEPVXXPEPIG

SEQ ID NO: 32427 - protein, 36 aa, Artificial Sequence
  Non-cyclic GFR-binding peptide
  MOD_RES (32)..(33): Xaa is C or S
SEVVMDYHYKLVVNNASDKYLISIPSLRTPVXXTPP

SEQ ID NO: 32428 - protein, 34 aa, Artificial Sequence
  Non-cyclic GFR-binding peptide
  MOD_RES (1)..(3)..(34): Xaa is C or S
XGXEEVIMEYKFKLLVRGNDLYLMSIPETKVPAX

SEQ ID NO: 32429 - protein, 39 aa, Artificial Sequence
  Non-cyclic GFR-binding peptide
  MOD_RES (2)..(4)..(38)..(39): Xaa is C or S
  MOD_RES (16)..(17)..(18)..(19)..(20): Xaa is A or G
  MOD_RES (21)..(22)..(23)..(24): Xaa is A or G or absent
RXGXESVAMGRHKRLXXXXXXXXXYYLISTASLKTPVXX

SEQ ID NO: 32430 - protein, 42 aa, Artificial Sequence
  Non-cyclic GFR-binding peptide
  MOD_RES (2)..(4)..(36)..(37): Xaa is C or S
RXGXSEVVMDYHYKLVVNNASDKYLISIPSLRTPVXXTPPTS

SEQ ID NO: 32431 - protein, 36 aa, Artificial Sequence
  Non-cyclic GFR-binding peptide
  MOD_RES (2)..(4)..(36): Xaa is C or S
RXAXSEVTMNRHKRLVVNKNEDYYLISTASMKEPVX

SEQ ID NO: 32432 - protein, 35 aa, Artificial Sequence
  Non-cyclic GFR-binding peptide
  MOD_RES (2)..(2): Xaa is C or S
  MOD_RES (14)..(15)..(16)..(17)..(18): Xaa is A or G
  MOD_RES (19)..(20)..(21)..(22): Xaa is A or G or absent
GXSEVVMDRHKRLXXXXXXXXXYYLISTASLRTPV

SEQ ID NO: 32433 - protein, 35 aa, Artificial Sequence
  Non-cyclic GFR-binding peptide
  MOD_RES (1)..(3)..(35): Xaa is C or S
XGXSEVVMDRHKRLVVNNASDYYLISTASLRTPVX

SEQ ID NO: 32434 - protein, 39 aa, Artificial Sequence
  Non-cyclic GFR-binding peptide
  MOD_RES (2)..(34)..(35): Xaa is C or S
GXRDVVMGYHYKLIIQQKDNKYLMSIPSMKTPTXXPGAS

SEQ ID NO: 32435 - protein, 40 aa, Artificial Sequence
  Non-cyclic GFR-binding peptide
  MOD_RES (1)..(3)..(35)..(36): Xaa is C or S
XAXSEVTMNPIKGYVVNKNEDFYLINIPSMKEPVXXPEPI

SEQ ID NO: 32436 - protein, 41 aa, Artificial Sequence
  Non-cyclic GFR-binding peptide
  MOD_RES (1)..(3)..(37)..(38): Xaa is C or S
  MOD_RES (15)..(16)..(17)..(18)..(19): Xaa is A or G
  MOD_RES (20)..(21)..(22)..(23): Xaa is A or G or absent
XAXSEVTMNEYKFKXXXXXXXXXLYLISIPEMKEPVXXPEP

SEQ ID NO: 32437 - protein, 35 aa, Artificial Sequence
  Non-cyclic GFR-binding peptide
  MOD_RES (32)..(33): Xaa is C or S
RDVVMGYHYKLIIQQKDNKYLMSIPSMKTPTXXPG

SEQ ID NO: 32438 - protein, 41 aa, Artificial Sequence
  Non-cyclic GFR-binding peptide
  MOD_RES (1)..(35)..(36): Xaa is C or S
  MOD_RES (13)..(14)..(15)..(16)..(17): Xaa is A or G
  MOD_RES (18)..(19)..(20)..(21): Xaa is A or G or absent
XRDVVMGRHKRLXXXXXXXXXYYLMSTASMKTPTXXPGASG

SEQ ID NO: 32439 - protein, 34 aa, Artificial Sequence
  Non-cyclic GFR-binding peptide
  MOD_RES (1)..(1): Xaa is C or S
  MOD_RES (13)..(14)..(15)..(16)..(17): Xaa is A or G
  MOD_RES (18)..(19)..(20)..(21): Xaa is A or G or absent
XSEVTMNRYKKLXXXXXXXXXFYLISIANMKEPV

SEQ ID NO: 32440 - protein, 37 aa, Artificial Sequence
  Non-cyclic GFR-binding peptide
  MOD_RES (2)..(35)..(36): Xaa is C or S
  MOD_RES (13)..(14)..(15)..(16)..(17): Xaa is A or G
  MOD_RES (18)..(19)..(20)..(21): Xaa is A or G or absent
KXSRVIMPIKGYXXXXXXXXXFYLINIPSLAQPVXXP

SEQ ID NO: 32441 - protein, 39 aa, Artificial Sequence
  Non-cyclic GFR-binding peptide
  MOD_RES (2)..(36)..(37): Xaa is C or S
  MOD_RES (14)..(15)..(16)..(17)..(18): Xaa is A or G
  MOD_RES (19)..(20)..(21)..(22): Xaa is A or G or absent
GXSEVVMDRHKRLXXXXXXXXXYYLISTASLRTPVXXTP

SEQ ID NO: 32442 - protein, 34 aa, Artificial Sequence
  Non-cyclic GFR-binding peptide
  MOD_RES (1)..(34): Xaa is C or S
  MOD_RES (12)..(13)..(14)..(15)..(16): Xaa is A or G
  MOD_RES (17)..(18)..(19)..(20): Xaa is A or G or absent
XEEVIMEYKFKXXXXXXXXXLYLMSIPETKVPAX

SEQ ID NO: 32443 - protein, 36 aa, Artificial Sequence
  Non-cyclic GFR-binding peptide
  MOD_RES (33)..(34): Xaa is C or S
  MOD_RES (11)..(12)..(13)..(14)..(15): Xaa is A or G
  MOD_RES (16)..(17)..(18)..(19): Xaa is A or G or absent
EVTMNEYKFKXXXXXXXXXLYLISIPEMKEPVXXPE

SEQ ID NO: 32444 - protein, 32 aa, Artificial Sequence
  Non-cyclic GFR-binding peptide
  MOD_RES (31)..(32): Xaa is C or S
EVVMDYHYKLVVNNASDKYLISIPSLRTPVXX

SEQ ID NO: 32445 - protein, 37 aa, Artificial Sequence
  Non-cyclic GFR-binding peptide
  MOD_RES (1)..(3)..(36)..(37): Xaa is C or S
  MOD_RES (14)..(15)..(16)..(17)..(18): Xaa is A or G
  MOD_RES (19)..(20)..(21)..(22): Xaa is A or G or absent
XKXSKVVMPIKGYXXXXXXXXXFYLINIPSLDQPVXX

SEQ ID NO: 32446 - protein, 32 aa, Artificial Sequence
  Non-cyclic GFR-binding peptide
  MOD_RES (31)..(32): Xaa is C or S
EVTMNRYKKLVVNKNEDFYLISIANMKEPVXX

SEQ ID NO: 32447 - protein, 35 aa, Artificial Sequence
  Non-cyclic GFR-binding peptide
  MOD_RES (1)..(35): Xaa is C or S
  MOD_RES (13)..(14)..(15)..(16)..(17): Xaa is A or G
  MOD_RES (18)..(19)..(20)..(21): Xaa is A or G or absent
XSEVTMNRYKKLXXXXXXXXXFYLISIANMKEPVX

SEQ ID NO: 32448 - protein, 31 aa, Artificial Sequence
  Non-cyclic GFR-binding peptide
  MOD_RES (31)..(31): Xaa is C or S
EVVMDYHYKLVVNNASDKYLISIPSLRTPVX

SEQ ID NO: 32449 - protein, 32 aa, Artificial Sequence
  Non-cyclic GFR-binding peptide
  MOD_RES (1)..(32): Xaa is C or S
XSKVVMPIKGYVKPTRGVFYLINIPSLDQPVX

SEQ ID NO: 32450 - protein, 31 aa, Artificial Sequence
  Non-cyclic GFR-binding peptide
  MOD_RES (1)..(1): Xaa is C or S
XSKVVMPIKGYVKPTRGVFYLINIPSLDQPV

SEQ ID NO: 32451 - protein, 38 aa, Artificial Sequence
  Non-cyclic GFR-binding peptide
  MOD_RES (1)..(35)..(36): Xaa is C or S
  MOD_RES (13)..(14)..(15)..(16)..(17): Xaa is A or G
  MOD_RES (18)..(19)..(20)..(21): Xaa is A or G or absent
XSEVVMDRHKRLXXXXXXXXXYYLISTASLRTPVXXTP

SEQ ID NO: 32452 - protein, 36 aa, Artificial Sequence
  Non-cyclic GFR-binding peptide
  MOD_RES (1)..(3)..(35)..(36): Xaa is C or S
XAXSEVTMNYHYKLVVNKNEDKYLISIPSMKEPVXX

SEQ ID NO: 32453 - protein, 36 aa, Artificial Sequence
  Non-cyclic GFR-binding peptide
  MOD_RES (1)..(3): Xaa is C or S
  MOD_RES (15)..(16)..(17)..(18)..(19): Xaa is A or G
  MOD_RES (20)..(21)..(22)..(23): Xaa is A or G or absent
XAXSEVTMNRHKRLXXXXXXXXXYYLISTASMKEPV

SEQ ID NO: 32454 - protein, 31 aa, Artificial Sequence
  Non-cyclic GFR-binding peptide
  MOD_RES (31)..(31): Xaa is C or S
EVTMNRYKKLVVNKNEDFYLISIANMKEPVX

SEQ ID NO: 32455 - protein, 38 aa, Artificial Sequence
  Non-cyclic GFR-binding peptide
  MOD_RES (1)..(3)..(34)..(35): Xaa is C or S
XGXEEVIMRHKRLLLVRGNDYYLMSTASTKVPAXXTSP

SEQ ID NO: 32456 - protein, 42 aa, Artificial Sequence
  Non-cyclic GFR-binding peptide
  MOD_RES (2)..(36)..(37): Xaa is C or S
  MOD_RES (14)..(15)..(16)..(17)..(18): Xaa is A or G
  MOD_RES (19)..(20)..(21)..(22): Xaa is A or G or absent
GXRDVVMGEYKFKXXXXXXXXXLYLMSIPEMKTPTXXPGASG

SEQ ID NO: 32457 - protein, 34 aa, Artificial Sequence
  Non-cyclic GFR-binding peptide
  MOD_RES (1)..(3): Xaa is C or S
XAXSEVTMNEYKFKVVNKNEDLYLISIPEMKEPV

SEQ ID NO: 32458 - protein, 40 aa, Artificial Sequence
  Non-cyclic GFR-binding peptide
  MOD_RES (1)..(3)..(34)..(35): Xaa is C or S
XKXSKVIMPIKGYIKPTKGIFYLINIPSLDQSVXXPSASA

SEQ ID NO: 32459 - protein, 33 aa, Artificial Sequence
  Non-cyclic GFR-binding peptide
  MOD_RES (33)..(33): Xaa is C or S
  MOD_RES (11)..(12)..(13)..(14)..(15): Xaa is A or G
  MOD_RES (16)..(17)..(18)..(19): Xaa is A or G or absent
EEVIMYHYKLXXXXXXXXXKYLMSIPSTKVPAX

SEQ ID NO: 32460 - protein, 37 aa, Artificial Sequence
  Non-cyclic GFR-binding peptide
  MOD_RES (2)..(4)..(36)..(37): Xaa is C or S
RXAXSEVTMNYHYKLVVNKNEDKYLISIPSMKEPVXX

SEQ ID NO: 32461 - protein, 39 aa, Artificial Sequence
  Non-cyclic GFR-binding peptide
  MOD_RES (1)..(3)..(34)..(35): Xaa is C or S
XKXSKVVMPIKGYVKPTRGVFYLINIPSLDQPVXXPSAS

SEQ ID NO: 32462 - protein, 33 aa, Artificial Sequence
  Non-cyclic GFR-binding peptide
  MOD_RES (33)..(33): Xaa is C or S
  MOD_RES (11)..(12)..(13)..(14)..(15): Xaa is A or G
  MOD_RES (16)..(17)..(18)..(19): Xaa is A or G or absent
EEVIMEYKFKXXXXXXXXXLYLMSIPETKVPAX

SEQ ID NO: 32463 - protein, 40 aa, Artificial Sequence
  Non-cyclic GFR-binding peptide
  MOD_RES (2)..(4)..(37)..(38): Xaa is C or S
  MOD_RES (15)..(16)..(17)..(18)..(19): Xaa is A or G
  MOD_RES (20)..(21)..(22)..(23): Xaa is A or G or absent
LXGXEEVIMYHYKLXXXXXXXXXKYLMSIPSTKVPAXXTS

SEQ ID NO: 32464 - protein, 34 aa, Artificial Sequence
  Non-cyclic GFR-binding peptide
  MOD_RES (32)..(33): Xaa is C or S
AEVVMDRHKRLVVNNAADYYLISTASLRAPVXXS

SEQ ID NO: 32465 - protein, 40 aa, Artificial Sequence
  Non-cyclic GFR-binding peptide
  MOD_RES (1)..(3)..(35)..(36): Xaa is C or S
XAXSEVTMNYHYKLVVNKNEDKYLISIPSMKEPVXXPEPI

SEQ ID NO: 32466 - protein, 37 aa, Artificial Sequence
  Non-cyclic GFR-binding peptide
  MOD_RES (2)..(33)..(34): Xaa is C or S
KXSKVIMPIKGYIKPTKGIFYLINIPSLDQSVXXPSA

SEQ ID NO: 32467 - protein, 33 aa, Artificial Sequence
  Non-cyclic GFR-binding peptide
  MOD_RES (33)..(33): Xaa is C or S
  MOD_RES (11)..(12)..(13)..(14)..(15): Xaa is A or G
  MOD_RES (16)..(17)..(18)..(19): Xaa is A or G or absent
EVTMNYHYKLXXXXXXXXXKYLISIPSMKEPVX

SEQ ID NO: 32468 - protein, 32 aa, Artificial Sequence
  Non-cyclic GFR-binding peptide
  MOD_RES (31)..(32): Xaa is C or S
EEVIMEYKFKLLVRGNDLYLMSIPETKVPAXX

SEQ ID NO: 32469 - protein, 33 aa, Artificial Sequence
  Non-cyclic GFR-binding peptide
  MOD_RES (33)..(33): Xaa is C or S
  MOD_RES (11)..(12)..(13)..(14)..(15): Xaa is A or G
  MOD_RES (16)..(17)..(18)..(19): Xaa is A or G or absent
EVTMNEYKFKXXXXXXXXXLYLISIPEMKEPVX

SEQ ID NO: 32470 - protein, 35 aa, Artificial Sequence
  Non-cyclic GFR-binding peptide
  MOD_RES (2)..(34)..(35): Xaa is C or S
AXSEVTMNPIKGYVVNKNEDFYLINIPSMKEPVXX

SEQ ID NO: 32471 - protein, 44 aa, Artificial Sequence
  Non-cyclic GFR-binding peptide
  MOD_RES (2)..(4)..(38)..(39): Xaa is C or S
  MOD_RES (16)..(17)..(18)..(19)..(20): Xaa is A or G
  MOD_RES (21)..(22)..(23)..(24): Xaa is A or G or absent
HXGXSRVVMNEYKFKXXXXXXXXXLYLVSIPELKTPAXXPKPVH

SEQ ID NO: 32472 - protein, 39 aa, Artificial Sequence
  Non-cyclic GFR-binding peptide
  MOD_RES (1)..(3)..(35)..(36): Xaa is C or S
XGXAEVVMDRHKRLVVNNAADYYLISTASLRAPVXXSAP

SEQ ID NO: 32473 - protein, 39 aa, Artificial Sequence
  Non-cyclic GFR-binding peptide
  MOD_RES (2)..(4)..(38)..(39): Xaa is C or S
  MOD_RES (16)..(17)..(18)..(19)..(20): Xaa is A or G
  MOD_RES (21)..(22)..(23)..(24): Xaa is A or G or absent
RXGXAEVVMDRHKRLXXXXXXXXXYYLISTASLRAPVXX

SEQ ID NO: 32474 - protein, 38 aa, Artificial Sequence
  Non-cyclic GFR-binding peptide
  MOD_RES (2)..(4)..(36)..(37): Xaa is C or S
SXGXRDVVMGYHYKLIIQQKDNKYLMSIPSMKTPTXXP

SEQ ID NO: 32475 - protein, 39 aa, Artificial Sequence
  Non-cyclic GFR-binding peptide
  MOD_RES (2)..(36)..(37): Xaa is C or S
  MOD_RES (14)..(15)..(16)..(17)..(18): Xaa is A or G
  MOD_RES (19)..(20)..(21)..(22): Xaa is A or G or absent
AXSEVTMNRYKKLXXXXXXXXXFYLISIANMKEPVXXPE

SEQ ID NO: 32476 - protein, 35 aa, Artificial Sequence
  Non-cyclic GFR-binding peptide
  MOD_RES (2)..(2): Xaa is C or S
  MOD_RES (14)..(15)..(16)..(17)..(18): Xaa is A or G
  MOD_RES (19)..(20)..(21)..(22): Xaa is A or G or absent
AXSEVTMNPIKGYXXXXXXXXXFYLINIPSMKEPV

SEQ ID NO: 32477 - protein, 40 aa, Artificial Sequence
  Non-cyclic GFR-binding peptide
  MOD_RES (2)..(36)..(37): Xaa is C or S
  MOD_RES (14)..(15)..(16)..(17)..(18): Xaa is A or G
  MOD_RES (19)..(20)..(21)..(22): Xaa is A or G or absent
GXSEVVMDYHYKLXXXXXXXXXKYLISIPSLRTPVXXTPP

SEQ ID NO: 32478 - protein, 31 aa, Artificial Sequence
  Non-cyclic GFR-binding peptide
  MOD_RES (31)..(31): Xaa is C or S
EVVMDEYKFKVVNNASDLYLISIPELRTPVX

SEQ ID NO: 32479 - protein, 37 aa, Artificial Sequence
  Non-cyclic GFR-binding peptide
  MOD_RES (1)..(34)..(35): Xaa is C or S
  MOD_RES (12)..(13)..(14)..(15)..(16): Xaa is A or G
  MOD_RES (17)..(18)..(19)..(20): Xaa is A or G or absent
XEEVIMRHKRLXXXXXXXXXYYLMSTASTKVPAXXTS

SEQ ID NO: 32480 - protein, 34 aa, Artificial Sequence
  Non-cyclic GFR-binding peptide
  MOD_RES (33)..(34): Xaa is C or S
  MOD_RES (11)..(12)..(13)..(14)..(15): Xaa is A or G
  MOD_RES (16)..(17)..(18)..(19): Xaa is A or G or absent
SRVIMPIKGYXXXXXXXXXFYLINIPSLAQPVXX

SEQ ID NO: 32481 - protein, 33 aa, Artificial Sequence
  Non-cyclic GFR-binding peptide
  MOD_RES (12)..(13)..(14)..(15)..(16): Xaa is A or G
  MOD_RES (17)..(18)..(19)..(20): Xaa is A or G or absent
SEVTMNRYKKLXXXXXXXXXFYLISIANMKEPV

SEQ ID NO: 32482 - protein, 39 aa, Artificial Sequence
  Non-cyclic GFR-binding peptide
  MOD_RES (1)..(3)..(35)..(36): Xaa is C or S
XGXRDVVMGYHYKLIIQQKDNKYLMSIPSMKTPTXXPGA

SEQ ID NO: 32483 - protein, 41 aa, Artificial Sequence
  Non-cyclic GFR-binding peptide
  MOD_RES (2)..(35)..(36): Xaa is C or S
  MOD_RES (13)..(14)..(15)..(16)..(17): Xaa is A or G
  MOD_RES (18)..(19)..(20)..(21): Xaa is A or G or absent
GXEEVIMEYKFKXXXXXXXXXLYLMSIPETKVPAXXTSPVR

SEQ ID NO: 32484 - protein, 33 aa, Artificial Sequence
  Non-cyclic GFR-binding peptide
  MOD_RES (31)..(32): Xaa is C or S
EVVMDYHYKLVVNNASDKYLISIPSLRTPVXXT

SEQ ID NO: 32485 - protein, 37 aa, Artificial Sequence
  Non-cyclic GFR-binding peptide
  MOD_RES (2)..(4): Xaa is C or S
  MOD_RES (16)..(17)..(18)..(19)..(20): Xaa is A or G
  MOD_RES (21)..(22)..(23)..(24): Xaa is A or G or absent
RXAXSEVTMNRHKRLXXXXXXXXXYYLISTASMKEPV

SEQ ID NO: 32486 - protein, 39 aa, Artificial Sequence
  Non-cyclic GFR-binding peptide
  MOD_RES (2)..(4)..(36)..(37): Xaa is C or S
RXGXSEVVMDRHKRLVVNNASDYYLISTASLRTPVXXTP

SEQ ID NO: 32487 - protein, 39 aa, Artificial Sequence
  Non-cyclic GFR-binding peptide
  MOD_RES (2)..(4)..(37)..(38): Xaa is C or S
  MOD_RES (15)..(16)..(17)..(18)..(19): Xaa is A or G
  MOD_RES (20)..(21)..(22)..(23): Xaa is A or G or absent
LXGXEEVIMEYKFKXXXXXXXXXLYLMSIPETKVPAXXT

SEQ ID NO: 32488 - protein, 39 aa, Artificial Sequence
  Non-cyclic GFR-binding peptide
  MOD_RES (1)..(3)..(37)..(38): Xaa is C or S
  MOD_RES (15)..(16)..(17)..(18)..(19): Xaa is A or G
  MOD_RES (20)..(21)..(22)..(23): Xaa is A or G or absent
XGXESVAMGRHKRLXXXXXXXXXYYLISTASLKTPVXXA

SEQ ID NO: 32489 - protein, 43 aa, Artificial Sequence
  Non-cyclic GFR-binding peptide
  MOD_RES (1)..(3)..(37)..(38): Xaa is C or S
  MOD_RES (15)..(16)..(17)..(18)..(19): Xaa is A or G
  MOD_RES (20)..(21)..(22)..(23): Xaa is A or G or absent
XAXSEVTMNRYKKLXXXXXXXXXFYLISIANMKEPVXXPEPIG

SEQ ID NO: 32490 - protein, 39 aa, Artificial Sequence
  Non-cyclic GFR-binding peptide
  MOD_RES (2)..(35)..(36): Xaa is C or S
  MOD_RES (13)..(14)..(15)..(16)..(17): Xaa is A or G
  MOD_RES (18)..(19)..(20)..(21): Xaa is A or G or absent
GXEEVIMEYKFKXXXXXXXXXLYLMSIPETKVPAXXTSP

SEQ ID NO: 32491 - protein, 37 aa, Artificial Sequence
  Non-cyclic GFR-binding peptide
  MOD_RES (2)..(34)..(35): Xaa is C or S
AXSEVTMNYHYKLVVNKNEDKYLISIPSMKEPVXXPE

SEQ ID NO: 32492 - protein, 36 aa, Artificial Sequence
  Non-cyclic GFR-binding peptide
  MOD_RES (2)..(36): Xaa is C or S
  MOD_RES (14)..(15)..(16)..(17)..(18): Xaa is A or G
  MOD_RES (19)..(20)..(21)..(22): Xaa is A or G or absent
GXSEVVMDRHKRLXXXXXXXXXYYLISTASLRTPVX

SEQ ID NO: 32493 - protein, 41 aa, Artificial Sequence
  Non-cyclic GFR-binding peptide
  MOD_RES (2)..(35)..(36): Xaa is C or S
  MOD_RES (13)..(14)..(15)..(16)..(17): Xaa is A or G
  MOD_RES (18)..(19)..(20)..(21): Xaa is A or G or absent
KXSKVIMPIKGYXXXXXXXXXFYLINIPSLDQSVXXPSASA

SEQ ID NO: 32494 - protein, 37 aa, Artificial Sequence
  Non-cyclic GFR-binding peptide
  MOD_RES (32)..(33): Xaa is C or S
SEVVMDRHKRLVVNNASDYYLISTASLRTPVXXTPPT

SEQ ID NO: 32495 - protein, 39 aa, Artificial Sequence
  Non-cyclic GFR-binding peptide
  MOD_RES (34)..(35): Xaa is C or S
  MOD_RES (12)..(13)..(14)..(15)..(16): Xaa is A or G
  MOD_RES (17)..(18)..(19)..(20): Xaa is A or G or absent
SEVTMNEYKFKXXXXXXXXXLYLISIPEMKEPVXXPEPI

SEQ ID NO: 32496 - protein, 41 aa, Artificial Sequence
  Non-cyclic GFR-binding peptide
  MOD_RES (1)..(35)..(36): Xaa is C or S
  MOD_RES (13)..(14)..(15)..(16)..(17): Xaa is A or G
  MOD_RES (18)..(19)..(20)..(21): Xaa is A or G or absent
XSEVVMDYHYKLXXXXXXXXXKYLISIPSLRTPVXXTPPTS

SEQ ID NO: 32497 - protein, 35 aa, Artificial Sequence
  Non-cyclic GFR-binding peptide
  MOD_RES (33)..(34): Xaa is C or S
  MOD_RES (11)..(12)..(13)..(14)..(15): Xaa is A or G
  MOD_RES (16)..(17)..(18)..(19): Xaa is A or G or absent
SKVIMPIKGYXXXXXXXXXFYLINIPSLDQSVXXP

SEQ ID NO: 32498 - protein, 40 aa, Artificial Sequence
  Non-cyclic GFR-binding peptide
  MOD_RES (1)..(35)..(36): Xaa is C or S
  MOD_RES (13)..(14)..(15)..(16)..(17): Xaa is A or G
  MOD_RES (18)..(19)..(20)..(21): Xaa is A or G or absent
XSEVTMNRHKRLXXXXXXXXXYYLISTASMKEPVXXPEPI

SEQ ID NO: 32499 - protein, 35 aa, Artificial Sequence
  Non-cyclic GFR-binding peptide
  MOD_RES (2)..(4): Xaa is C or S
RXAXSEVTMNEYKFKVVNKNEDLYLISIPEMKEPV

SEQ ID NO: 32500 - protein, 37 aa, Artificial Sequence
  Non-cyclic GFR-binding peptide
  MOD_RES (2)..(4)..(35)..(36): Xaa is C or S
LXGXEEVIMEYKFKLLVRGNDLYLMSIPETKVPAXXT

SEQ ID NO: 32501 - protein, 35 aa, Artificial Sequence
  Non-cyclic GFR-binding peptide
  MOD_RES (2)..(4): Xaa is C or S
SXGXRDVVMGRHKRLIIQQKDNYYLMSTASMKTPT

SEQ ID NO: 32502 - protein, 41 aa, Artificial Sequence
  Non-cyclic GFR-binding peptide
  MOD_RES (2)..(4)..(36)..(37): Xaa is C or S
SXGXRDVVMGRHKRLIIQQKDNYYLMSTASMKTPTXXPGAS

SEQ ID NO: 32503 - protein, 34 aa, Artificial Sequence
  Non-cyclic GFR-binding peptide
  MOD_RES (34)..(34): Xaa is C or S
  MOD_RES (12)..(13)..(14)..(15)..(16): Xaa is A or G
  MOD_RES (17)..(18)..(19)..(20): Xaa is A or G or absent
SEVTMNPIKGYXXXXXXXXXFYLINIPSMKEPVX

SEQ ID NO: 32504 - protein, 40 aa, Artificial Sequence
  Non-cyclic GFR-binding peptide
  MOD_RES (2)..(35)..(36): Xaa is C or S
  MOD_RES (13)..(14)..(15)..(16)..(17): Xaa is A or G
  MOD_RES (18)..(19)..(20)..(21): Xaa is A or G or absent
KXSRVIMPIKGYXXXXXXXXXFYLINIPSLAQPVXXPAAS

SEQ ID NO: 32505 - protein, 40 aa, Artificial Sequence
  Non-cyclic GFR-binding peptide
  MOD_RES (2)..(4)..(36)..(37): Xaa is C or S
RXAXSEVTMNEYKFKVVNKNEDLYLISIPEMKEPVXXPEP

SEQ ID NO: 32506 - protein, 33 aa, Artificial Sequence
  Non-cyclic GFR-binding peptide
  MOD_RES (2)..(33): Xaa is C or S
GXEEVIMEYKFKLLVRGNDLYLMSIPETKVPAX

SEQ ID NO: 32507 - protein, 43 aa, Artificial Sequence
  Non-cyclic GFR-binding peptide
  MOD_RES (1)..(3)..(37)..(38): Xaa is C or S
  MOD_RES (15)..(16)..(17)..(18)..(19): Xaa is A or G
  MOD_RES (20)..(21)..(22)..(23): Xaa is A or G or absent
XGXSRVVMNEYKFKXXXXXXXXXLYLVSIPELKTPAXXPKPVH

SEQ ID NO: 32508 - protein, 35 aa, Artificial Sequence
  Non-cyclic GFR-binding peptide
  MOD_RES (1)..(33)..(34): Xaa is C or S
XSEVTMNRHKRLVVNKNEDYYLISTASMKEPVXXP

SEQ ID NO: 32509 - protein, 38 aa, Artificial Sequence
  Non-cyclic GFR-binding peptide
  MOD_RES (2)..(4)..(35)..(36): Xaa is C or S
LXGXEEVIMYHYKLLLVRGNDKYLMSIPSTKVPAXXTS

SEQ ID NO: 32510 - protein, 41 aa, Artificial Sequence
  Non-cyclic GFR-binding peptide
  MOD_RES (2)..(4)..(35)..(36): Xaa is C or S
SXKXSKVIMPIKGYIKPTKGIFYLINIPSLDQSVXXPSASA

SEQ ID NO: 32511 - protein, 36 aa, Artificial Sequence
  Non-cyclic GFR-binding peptide
  MOD_RES (32)..(33): Xaa is C or S
AEVVMDRHKRLVVNNAADYYLISTASLRAPVXXSAP

SEQ ID NO: 32512 - protein, 38 aa, Artificial Sequence
  Non-cyclic GFR-binding peptide
  MOD_RES (1)..(32)..(33): Xaa is C or S
XEEVIMYHYKLLLVRGNDKYLMSIPSTKVPAXXTSPVR

SEQ ID NO: 32513 - protein, 42 aa, Artificial Sequence
  Non-cyclic GFR-binding peptide
  MOD_RES (2)..(36)..(37): Xaa is C or S
  MOD_RES (14)..(15)..(16)..(17)..(18): Xaa is A or G
  MOD_RES (19)..(20)..(21)..(22): Xaa is A or G or absent
AXSEVTMNRYKKLXXXXXXXXXFYLISIANMKEPVXXPEPIG

SEQ ID NO: 32514 - protein, 40 aa, Artificial Sequence
  Non-cyclic GFR-binding peptide
  MOD_RES (1)..(3)..(35)..(36): Xaa is C or S
XGXSEVVMDEYKFKVVNNASDLYLISIPELRTPVXXTPPT

SEQ ID NO: 32515 - protein, 37 aa, Artificial Sequence
  Non-cyclic GFR-binding peptide
  MOD_RES (34)..(35): Xaa is C or S
  MOD_RES (12)..(13)..(14)..(15)..(16): Xaa is A or G
  MOD_RES (17)..(18)..(19)..(20): Xaa is A or G or absent
RDVVMGYHYKLXXXXXXXXXKYLMSIPSMKTPTXXPG

SEQ ID NO: 32516 - protein, 38 aa, Artificial Sequence
  Non-cyclic GFR-binding peptide
  MOD_RES (33)..(34): Xaa is C or S
  MOD_RES (11)..(12)..(13)..(14)..(15): Xaa is A or G
  MOD_RES (16)..(17)..(18)..(19): Xaa is A or G or absent
EVTMNPIKGYXXXXXXXXXFYLINIPSMKEPVXXPEPI

SEQ ID NO: 32517 - protein, 38 aa, Artificial Sequence
  Non-cyclic GFR-binding peptide
  MOD_RES (1)..(32)..(33): Xaa is C or S
XSKVIMPIKGYIKPTKGIFYLINIPSLDQSVXXPSASA

SEQ ID NO: 32518 - protein, 36 aa, Artificial Sequence
  Non-cyclic GFR-binding peptide
  MOD_RES (1)..(35)..(36): Xaa is C or S
  MOD_RES (13)..(14)..(15)..(16)..(17): Xaa is A or G
  MOD_RES (18)..(19)..(20)..(21): Xaa is A or G or absent
XSEVTMNRHKRLXXXXXXXXXYYLISTASMKEPVXX

SEQ ID NO: 32519 - protein, 32 aa, Artificial Sequence
  Non-cyclic GFR-binding peptide
  MOD_RES (1)..(1): Xaa is C or S
XRDVVMGYHYKLIIQQKDNKYLMSIPSMKTPT

SEQ ID NO: 32520 - protein, 40 aa, Artificial Sequence
  Non-cyclic GFR-binding peptide
  MOD_RES (1)..(3)..(34)..(35): Xaa is C or S
XGXEEVIMRHKRLLLVRGNDYYLMSTASTKVPAXXTSPVR

SEQ ID NO: 32521 - protein, 36 aa, Artificial Sequence
  Non-cyclic GFR-binding peptide
  MOD_RES (1)..(33)..(34): Xaa is C or S
XRDVVMGYHYKLIIQQKDNKYLMSIPSMKTPTXXPG

SEQ ID NO: 32522 - protein, 33 aa, Artificial Sequence
  Non-cyclic GFR-binding peptide
  MOD_RES (33)..(33): Xaa is C or S
  MOD_RES (11)..(12)..(13)..(14)..(15): Xaa is A or G
  MOD_RES (16)..(17)..(18)..(19): Xaa is A or G or absent
EVTMNRHKRLXXXXXXXXXYYLISTASMKEPVX

SEQ ID NO: 32523 - protein, 41 aa, Artificial Sequence
  Non-cyclic GFR-binding peptide
  MOD_RES (1)..(35)..(36): Xaa is C or S
  MOD_RES (13)..(14)..(15)..(16)..(17): Xaa is A or G
  MOD_RES (18)..(19)..(20)..(21): Xaa is A or G or absent
XSEVTMNEYKFKXXXXXXXXXLYLISIPEMKEPVXXPEPIG

SEQ ID NO: 32524 - protein, 42 aa, Artificial Sequence
  Non-cyclic GFR-binding peptide
  MOD_RES (2)..(4)..(38)..(39): Xaa is C or S
  MOD_RES (16)..(17)..(18)..(19)..(20): Xaa is A or G
  MOD_RES (21)..(22)..(23)..(24): Xaa is A or G or absent
RXAXSEVTMNPIKGYXXXXXXXXXFYLINIPSMKEPVXXPEP

SEQ ID NO: 32525 - protein, 32 aa, Artificial Sequence
  Non-cyclic GFR-binding peptide
  MOD_RES (32)..(32): Xaa is C or S
SEVTMNRYKKLVVNKNEDFYLISIANMKEPVX

SEQ ID NO: 32526 - protein, 33 aa, Artificial Sequence
  Non-cyclic GFR-binding peptide
  MOD_RES (1)..(32)..(33): Xaa is C or S
XSKVIMPIKGYIKPTKGIFYLINIPSLDQSVXX

SEQ ID NO: 32527 - protein, 32 aa, Artificial Sequence
  Non-cyclic GFR-binding peptide
  MOD_RES (31)..(32): Xaa is C or S
SKVVMPIKGYVKPTRGVFYLINIPSLDQPVXX

SEQ ID NO: 32528 - protein, 38 aa, Artificial Sequence
  Non-cyclic GFR-binding peptide
  MOD_RES (2)..(4)..(37)..(38): Xaa is C or S
  MOD_RES (15)..(16)..(17)..(18)..(19): Xaa is A or G
  MOD_RES (20)..(21)..(22)..(23): Xaa is A or G or absent
SXKXSKVVMPIKGYXXXXXXXXXFYLINIPSLDQPVXX

SEQ ID NO: 32529 - protein, 36 aa, Artificial Sequence
  Non-cyclic GFR-binding peptide
  MOD_RES (2)..(34)..(35): Xaa is C or S
AXSEVTMNEYKFKVVNKNEDLYLISIPEMKEPVXXP

SEQ ID NO: 32530 - protein, 38 aa, Artificial Sequence
  Non-cyclic GFR-binding peptide
  MOD_RES (2)..(4)..(38): Xaa is C or S
  MOD_RES (16)..(17)..(18)..(19)..(20): Xaa is A or G
  MOD_RES (21)..(22)..(23)..(24): Xaa is A or G or absent
RXAXSEVTMNYHYKLXXXXXXXXXKYLISIPSMKEPVX

SEQ ID NO: 32531 - protein, 38 aa, Artificial Sequence
  Non-cyclic GFR-binding peptide
  MOD_RES (2)..(4)..(36)..(37): Xaa is C or S
RXGXAEVVMDRHKRLVVNNAADYYLISTASLRAPVXXS

SEQ ID NO: 32532 - protein, 37 aa, Artificial Sequence
  Non-cyclic GFR-binding peptide
  MOD_RES (31)..(32): Xaa is C or S
EVTMNPIKGYVVNKNEDFYLINIPSMKEPVXXPEPIG

SEQ ID NO: 32533 - protein, 42 aa, Artificial Sequence
  Non-cyclic GFR-binding peptide
  MOD_RES (2)..(4)..(37)..(38): Xaa is C or S
  MOD_RES (15)..(16)..(17)..(18)..(19): Xaa is A or G
  MOD_RES (20)..(21)..(22)..(23): Xaa is A or G or absent
SXKXSKVIMPIKGYXXXXXXXXXFYLINIPSLDQSVXXPSAS

SEQ ID NO: 32534 - protein, 33 aa, Artificial Sequence
  Non-cyclic GFR-binding peptide
  MOD_RES (1)..(32)..(33): Xaa is C or S
XEEVIMEYKFKLLVRGNDLYLMSIPETKVPAXX

SEQ ID NO: 32535 - protein, 38 aa, Artificial Sequence
  Non-cyclic GFR-binding peptide
  MOD_RES (1)..(3)..(37)..(38): Xaa is C or S
  MOD_RES (15)..(16)..(17)..(18)..(19): Xaa is A or G
  MOD_RES (20)..(21)..(22)..(23): Xaa is A or G or absent
XAXSEVTMNRHKRLXXXXXXXXXYYLISTASMKEPVXX

SEQ ID NO: 32536 - protein, 38 aa, Artificial Sequence
  Non-cyclic GFR-binding peptide
  MOD_RES (32)..(33): Xaa is C or S
SEVTMNRHKRLVVNKNEDYYLISTASMKEPVXXPEPIG

SEQ ID NO: 32537 - protein, 39 aa, Artificial Sequence
  Non-cyclic GFR-binding peptide
  MOD_RES (2)..(4)..(35)..(36): Xaa is C or S
LXGXEEVIMRHKRLLLVRGNDYYLMSTASTKVPAXXTSP

SEQ ID NO: 32538 - protein, 38 aa, Artificial Sequence
  Non-cyclic GFR-binding peptide
  MOD_RES (2)..(34)..(35): Xaa is C or S
AXSEVTMNYHYKLVVNKNEDKYLISIPSMKEPVXXPEP

SEQ ID NO: 32539 - protein, 38 aa, Artificial Sequence
  Non-cyclic GFR-binding peptide
  MOD_RES (1)..(3)..(36)..(37): Xaa is C or S
  MOD_RES (14)..(15)..(16)..(17)..(18): Xaa is A or G
  MOD_RES (19)..(20)..(21)..(22): Xaa is A or G or absent
XKXSKVIMPIKGYXXXXXXXXXFYLINIPSLDQSVXXP

SEQ ID NO: 32540 - protein, 39 aa, Artificial Sequence
  Non-cyclic GFR-binding peptide
  MOD_RES (2)..(4)..(35)..(36): Xaa is C or S
SXKXSRVIMPIKGYVKPKRGVFYLINIPSLAQPVXXPAA

SEQ ID NO: 32541 - protein, 37 aa, Artificial Sequence
  Non-cyclic GFR-binding peptide
  MOD_RES (1)..(33)..(34): Xaa is C or S
XESVAMGRHKRLYTVVGKDYYLISTASLKTPVXXAKS

SEQ ID NO: 32542 - protein, 36 aa, Artificial Sequence
  Non-cyclic GFR-binding peptide
  MOD_RES (2)..(34)..(35): Xaa is C or S
GXRDVVMGEYKFKIIQQKDNLYLMSIPEMKTPTXXP

SEQ ID NO: 32543 - protein, 36 aa, Artificial Sequence
  Non-cyclic GFR-binding peptide
  MOD_RES (34)..(35): Xaa is C or S
  MOD_RES (12)..(13)..(14)..(15)..(16): Xaa is A or G
  MOD_RES (17)..(18)..(19)..(20): Xaa is A or G or absent
ESVAMGRHKRLXXXXXXXXXYYLISTASLKTPVXXA

SEQ ID NO: 32544 - protein, 34 aa, Artificial Sequence
  Non-cyclic GFR-binding peptide
  MOD_RES (2)..(34): Xaa is C or S
AXSEVTMNYHYKLVVNKNEDKYLISIPSMKEPVX

SEQ ID NO: 32545 - protein, 31 aa, Artificial Sequence
  Non-cyclic GFR-binding peptide
  MOD_RES (31)..(31): Xaa is C or S
EVVMDRHKRLVVNNASDYYLISTASLRTPVX

SEQ ID NO: 32546 - protein, 33 aa, Artificial Sequence
  Non-cyclic GFR-binding peptide
  MOD_RES (12)..(13)..(14)..(15)..(16): Xaa is A or G
  MOD_RES (17)..(18)..(19)..(20): Xaa is A or G or absent
RDVVMGYHYKLXXXXXXXXXKYLMSIPSMKTPT

SEQ ID NO: 32547 - protein, 38 aa, Artificial Sequence
  Non-cyclic GFR-binding peptide
  MOD_RES (33)..(34): Xaa is C or S
  MOD_RES (11)..(12)..(13)..(14)..(15): Xaa is A or G
  MOD_RES (16)..(17)..(18)..(19): Xaa is A or G or absent
EVVMDRHKRLXXXXXXXXXYYLISTASLRTPVXXTPPT

SEQ ID NO: 32548 - protein, 34 aa, Artificial Sequence
  Non-cyclic GFR-binding peptide
  MOD_RES (1)..(1): Xaa is C or S
  MOD_RES (13)..(14)..(15)..(16)..(17): Xaa is A or G
  MOD_RES (18)..(19)..(20)..(21): Xaa is A or G or absent
XSEVTMNYHYKLXXXXXXXXXKYLISIPSMKEPV

SEQ ID NO: 32549 - protein, 40 aa, Artificial Sequence
  Non-cyclic GFR-binding peptide
  MOD_RES (1)..(3)..(37)..(38): Xaa is C or S
  MOD_RES (15)..(16)..(17)..(18)..(19): Xaa is A or G
  MOD_RES (20)..(21)..(22)..(23): Xaa is A or G or absent
XGXESVAMGRHKRLXXXXXXXXXYYLISTASLKTPVXXAK

SEQ ID NO: 32550 - protein, 41 aa, Artificial Sequence
  Non-cyclic GFR-binding peptide
  MOD_RES (1)..(3)..(37)..(38): Xaa is C or S
  MOD_RES (15)..(16)..(17)..(18)..(19): Xaa is A or G
  MOD_RES (20)..(21)..(22)..(23): Xaa is A or G or absent
XGXSEVVMDYHYKLXXXXXXXXXKYLISIPSLRTPVXXTPP

SEQ ID NO: 32551 - protein, 38 aa, Artificial Sequence
  Non-cyclic GFR-binding peptide
  MOD_RES (32)..(33): Xaa is C or S
RDVVMGRHKRLIIQQKDNYYLMSTASMKTPTXXPGASG

SEQ ID NO: 32552 - protein, 39 aa, Artificial Sequence
  Non-cyclic GFR-binding peptide
  MOD_RES (2)..(4)..(36)..(37): Xaa is C or S
RXAXSEVTMNRHKRLVVNKNEDYYLISTASMKEPVXXPE

SEQ ID NO: 32553 - protein, 35 aa, Artificial Sequence
  Non-cyclic GFR-binding peptide
  MOD_RES (1)..(35): Xaa is C or S
  MOD_RES (13)..(14)..(15)..(16)..(17): Xaa is A or G
  MOD_RES (18)..(19)..(20)..(21): Xaa is A or G or absent
XSEVTMNYHYKLXXXXXXXXXKYLISIPSMKEPVX

SEQ ID NO: 32554 - protein, 38 aa, Artificial Sequence
  Non-cyclic GFR-binding peptide
  MOD_RES (2)..(4)..(35)..(36): Xaa is C or S
SXKXSKVIMPIKGYIKPTKGIFYLINIPSLDQSVXXPS

SEQ ID NO: 32555 - protein, 35 aa, Artificial Sequence
  Non-cyclic GFR-binding peptide
  MOD_RES (34)..(35): Xaa is C or S
  MOD_RES (12)..(13)..(14)..(15)..(16): Xaa is A or G
  MOD_RES (17)..(18)..(19)..(20): Xaa is A or G or absent
SEVVMDEYKFKXXXXXXXXXLYLISIPELRTPVXX

SEQ ID NO: 32556 - protein, 38 aa, Artificial Sequence
  Non-cyclic GFR-binding peptide
  MOD_RES (1)..(34)..(35): Xaa is C or S
  MOD_RES (12)..(13)..(14)..(15)..(16): Xaa is A or G
  MOD_RES (17)..(18)..(19)..(20): Xaa is A or G or absent
XEEVIMRHKRLXXXXXXXXXYYLMSTASTKVPAXXTSP

SEQ ID NO: 32557 - protein, 40 aa, Artificial Sequence
  Non-cyclic GFR-binding peptide
  MOD_RES (2)..(4)..(37)..(38): Xaa is C or S
  MOD_RES (15)..(16)..(17)..(18)..(19): Xaa is A or G
  MOD_RES (20)..(21)..(22)..(23): Xaa is A or G or absent
SXKXSRVIMPIKGYXXXXXXXXXFYLINIPSLAQPVXXPA

SEQ ID NO: 32558 - protein, 36 aa, Artificial Sequence
  Non-cyclic GFR-binding peptide
  MOD_RES (2)..(4)..(35)..(36): Xaa is C or S
LXGXEEVIMRHKRLLLVRGNDYYLMSTASTKVPAXX

SEQ ID NO: 32559 - protein, 38 aa, Artificial Sequence
  Non-cyclic GFR-binding peptide
  MOD_RES (2)..(4)..(37)..(38): Xaa is C or S
  MOD_RES (15)..(16)..(17)..(18)..(19): Xaa is A or G
  MOD_RES (20)..(21)..(22)..(23): Xaa is A or G or absent
SXKXSRVIMPIKGYXXXXXXXXXFYLINIPSLAQPVXX

SEQ ID NO: 32560 - protein, 39 aa, Artificial Sequence
  Non-cyclic GFR-binding peptide
  MOD_RES (2)..(4)..(38)..(39): Xaa is C or S
  MOD_RES (16)..(17)..(18)..(19)..(20): Xaa is A or G
  MOD_RES (21)..(22)..(23)..(24): Xaa is A or G or absent
SXGXRDVVMGEYKFKXXXXXXXXXLYLMSIPEMKTPTXX

SEQ ID NO: 32561 - protein, 34 aa, Artificial Sequence
  Non-cyclic GFR-binding peptide
  MOD_RES (32)..(33): Xaa is C or S
SEVTMNYHYKLVVNKNEDKYLISIPSMKEPVXXP

SEQ ID NO: 32562 - protein, 39 aa, Artificial Sequence
  Non-cyclic GFR-binding peptide
  MOD_RES (1)..(33)..(34): Xaa is C or S
XSEVTMNPIKGYVVNKNEDFYLINIPSMKEPVXXPEPIG

SEQ ID NO: 32563 - protein, 40 aa, Artificial Sequence
  Non-cyclic GFR-binding peptide
  MOD_RES (1)..(3)..(35)..(36): Xaa is C or S
XGXAEVVMDRHKRLVVNNAADYYLISTASLRAPVXXSAPA

SEQ ID NO: 32564 - protein, 34 aa, Artificial Sequence
  Non-cyclic GFR-binding peptide
  MOD_RES (2)..(34): Xaa is C or S
GXRDVVMGYHYKLIIQQKDNKYLMSIPSMKTPTX

SEQ ID NO: 32565 - protein, 32 aa, Artificial Sequence
  Non-cyclic GFR-binding peptide
  MOD_RES (31)..(32): Xaa is C or S
SVAMGRHKRLYTVVGKDYYLISTASLKTPVXX

SEQ ID NO: 32566 - protein, 35 aa, Artificial Sequence
  Non-cyclic GFR-binding peptide
  MOD_RES (1)..(33)..(34): Xaa is C or S
XRDVVMGEYKFKIIQQKDNLYLMSIPEMKTPTXXP

SEQ ID NO: 32567 - protein, 39 aa, Artificial Sequence
  Non-cyclic GFR-binding peptide
  MOD_RES (2)..(34)..(35): Xaa is C or S
AXSEVTMNEYKFKVVNKNEDLYLISIPEMKEPVXXPEPI

SEQ ID NO: 32568 - protein, 34 aa, Artificial Sequence
  Non-cyclic GFR-binding peptide
  MOD_RES (31)..(32): Xaa is C or S
EEVIMRHKRLLLVRGNDYYLMSTASTKVPAXXTS

SEQ ID NO: 32569 - protein, 32 aa, Artificial Sequence
  Non-cyclic GFR-binding peptide
  MOD_RES (2)..(2): Xaa is C or S
KXSRVIMPIKGYVKPKRGVFYLINIPSLAQPV

SEQ ID NO: 32570 - protein, 32 aa, Artificial Sequence
  Non-cyclic GFR-binding peptide
  MOD_RES (31)..(32): Xaa is C or S
EEVIMYHYKLLLVRGNDKYLMSIPSTKVPAXX

SEQ ID NO: 32571 - protein, 38 aa, Artificial Sequence
  Non-cyclic GFR-binding peptide
  MOD_RES (1)..(35)..(36): Xaa is C or S
  MOD_RES (13)..(14)..(15)..(16)..(17): Xaa is A or G
  MOD_RES (18)..(19)..(20)..(21): Xaa is A or G or absent
XSEVVMDEYKFKXXXXXXXXXLYLISIPELRTPVXXTP

SEQ ID NO: 32572 - protein, 35 aa, Artificial Sequence
  Non-cyclic GFR-binding peptide
  MOD_RES (34)..(35): Xaa is C or S
  MOD_RES (12)..(13)..(14)..(15)..(16): Xaa is A or G
  MOD_RES (17)..(18)..(19)..(20): Xaa is A or G or absent
SEVVMDYHYKLXXXXXXXXXKYLISIPSLRTPVXX

SEQ ID NO: 32573 - protein, 32 aa, Artificial Sequence
  Non-cyclic GFR-binding peptide
  MOD_RES (11)..(12)..(13)..(14)..(15): Xaa is A or G
  MOD_RES (16)..(17)..(18)..(19): Xaa is A or G or absent
SRVIMPIKGYXXXXXXXXXFYLINIPSLAQPV

SEQ ID NO: 32574 - protein, 41 aa, Artificial Sequence
  Non-cyclic GFR-binding peptide
  MOD_RES (2)..(4)..(36)..(37): Xaa is C or S
RXAXSEVTMNYHYKLVVNKNEDKYLISIPSMKEPVXXPEPI

SEQ ID NO: 32575 - protein, 35 aa, Artificial Sequence
  Non-cyclic GFR-binding peptide
  MOD_RES (2)..(4)..(35): Xaa is C or S
SXKXSRVIMPIKGYVKPKRGVFYLINIPSLAQPVX

SEQ ID NO: 32576 - protein, 34 aa, Artificial Sequence
  Non-cyclic GFR-binding peptide
  MOD_RES (1)..(34): Xaa is C or S
  MOD_RES (12)..(13)..(14)..(15)..(16): Xaa is A or G
  MOD_RES (17)..(18)..(19)..(20): Xaa is A or G or absent
XEEVIMYHYKLXXXXXXXXXKYLMSIPSTKVPAX

SEQ ID NO: 32577 - protein, 39 aa, Artificial Sequence
  Non-cyclic GFR-binding peptide
  MOD_RES (2)..(4)..(36)..(37): Xaa is C or S
SXGXRDVVMGEYKFKIIQQKDNLYLMSIPEMKTPTXXPG

SEQ ID NO: 32578 - protein, 35 aa, Artificial Sequence
  Non-cyclic GFR-binding peptide
  MOD_RES (1)..(3)..(35): Xaa is C or S
XGXRDVVMGRHKRLIIQQKDNYYLMSTASMKTPTX

SEQ ID NO: 32579 - protein, 36 aa, Artificial Sequence
  Non-cyclic GFR-binding peptide
  MOD_RES (1)..(33)..(34): Xaa is C or S
XSEVTMNRYKKLVVNKNEDFYLISIANMKEPVXXPE

SEQ ID NO: 32580 - protein, 33 aa, Artificial Sequence
  Non-cyclic GFR-binding peptide
  MOD_RES (2)..(2): Xaa is C or S
AXSEVTMNEYKFKVVNKNEDLYLISIPEMKEPV

SEQ ID NO: 32581 - protein, 41 aa, Artificial Sequence
  Non-cyclic GFR-binding peptide
  MOD_RES (2)..(4)..(38)..(39): Xaa is C or S
  MOD_RES (16)..(17)..(18)..(19)..(20): Xaa is A or G
  MOD_RES (21)..(22)..(23)..(24): Xaa is A or G or absent
RXGXSEVVMDRHKRLXXXXXXXXXYYLISTASLRTPVXXTP

SEQ ID NO: 32582 - protein, 38 aa, Artificial Sequence
  Non-cyclic GFR-binding peptide
  MOD_RES (1)..(3)..(37)..(38): Xaa is C or S
  MOD_RES (15)..(16)..(17)..(18)..(19): Xaa is A or G
  MOD_RES (20)..(21)..(22)..(23): Xaa is A or G or absent
XGXSEVVMDRHKRLXXXXXXXXXYYLISTASLRTPVXX

SEQ ID NO: 32583 - protein, 40 aa, Artificial Sequence
  Non-cyclic GFR-binding peptide
  MOD_RES (2)..(35)..(36): Xaa is C or S
  MOD_RES (13)..(14)..(15)..(16)..(17): Xaa is A or G
  MOD_RES (18)..(19)..(20)..(21): Xaa is A or G or absent
KXSKVIMPIKGYXXXXXXXXXFYLINIPSLDQSVXXPSAS

SEQ ID NO: 32584 - protein, 37 aa, Artificial Sequence
  Non-cyclic GFR-binding peptide
  MOD_RES (2)..(4): Xaa is C or S
  MOD_RES (16)..(17)..(18)..(19)..(20): Xaa is A or G
  MOD_RES (21)..(22)..(23)..(24): Xaa is A or G or absent
SXGXRDVVMGYHYKLXXXXXXXXXKYLMSIPSMKTPT

SEQ ID NO: 32585 - protein, 33 aa, Artificial Sequence
  Non-cyclic GFR-binding peptide
  MOD_RES (31)..(32): Xaa is C or S
EVVMDRHKRLVVNNASDYYLISTASLRTPVXXT

SEQ ID NO: 32586 - protein, 33 aa, Artificial Sequence
  Non-cyclic GFR-binding peptide
  MOD_RES (32)..(33): Xaa is C or S
ESVAMGRHKRLYTVVGKDYYLISTASLKTPVXX

SEQ ID NO: 32587 - protein, 34 aa, Artificial Sequence
  Non-cyclic GFR-binding peptide
  MOD_RES (31)..(32): Xaa is C or S
EVTMNEYKFKVVNKNEDLYLISIPEMKEPVXXPE

SEQ ID NO: 32588 - protein, 43 aa, Artificial Sequence
  Non-cyclic GFR-binding peptide
  MOD_RES (1)..(3)..(37)..(38): Xaa is C or S
  MOD_RES (15)..(16)..(17)..(18)..(19): Xaa is A or G
  MOD_RES (20)..(21)..(22)..(23): Xaa is A or G or absent
XGXRDVVMGEYKFKXXXXXXXXXLYLMSIPEMKTPTXXPGASG

SEQ ID NO: 32589 - protein, 38 aa, Artificial Sequence
  Non-cyclic GFR-binding peptide
  MOD_RES (1)..(32)..(33): Xaa is C or S
XEEVIMEYKFKLLVRGNDLYLMSIPETKVPAXXTSPVR

SEQ ID NO: 32590 - protein, 33 aa, Artificial Sequence
  Non-cyclic GFR-binding peptide
  MOD_RES (2)..(2): Xaa is C or S
GXESVAMGRHKRLYTVVGKDYYLISTASLKTPV

SEQ ID NO: 32591 - protein, 33 aa, Artificial Sequence
  Non-cyclic GFR-binding peptide
  MOD_RES (12)..(13)..(14)..(15)..(16): Xaa is A or G
  MOD_RES (17)..(18)..(19)..(20): Xaa is A or G or absent
SEVVMDRHKRLXXXXXXXXXYYLISTASLRTPV

SEQ ID NO: 32592 - protein, 37 aa, Artificial Sequence
  Non-cyclic GFR-binding peptide
  MOD_RES (2)..(33)..(34): Xaa is C or S
GXEEVIMEYKFKLLVRGNDLYLMSIPETKVPAXXTSP

SEQ ID NO: 32593 - protein, 40 aa, Artificial Sequence
  Non-cyclic GFR-binding peptide
  MOD_RES (1)..(3)..(37)..(38): Xaa is C or S
  MOD_RES (15)..(16)..(17)..(18)..(19): Xaa is A or G
  MOD_RES (20)..(21)..(22)..(23): Xaa is A or G or absent
XAXSEVTMNRYKKLXXXXXXXXXFYLISIANMKEPVXXPE

SEQ ID NO: 32594 - protein, 38 aa, Artificial Sequence
  Non-cyclic GFR-binding peptide
  MOD_RES (2)..(4)..(37)..(38): Xaa is C or S
  MOD_RES (15)..(16)..(17)..(18)..(19): Xaa is A or G
  MOD_RES (20)..(21)..(22)..(23): Xaa is A or G or absent
LXGXEEVIMRHKRLXXXXXXXXXYYLMSTASTKVPAXX

SEQ ID NO: 32595 - protein, 31 aa, Artificial Sequence
  Non-cyclic GFR-binding peptide
  MOD_RES (1)..(1): Xaa is C or S
XEEVIMEYKFKLLVRGNDLYLMSIPETKVPA

SEQ ID NO: 32596 - protein, 35 aa, Artificial Sequence
  Non-cyclic GFR-binding peptide
  MOD_RES (31)..(32): Xaa is C or S
SKVIMPIKGYIKPTKGIFYLINIPSLDQSVXXPSA

SEQ ID NO: 32597 - protein, 32 aa, Artificial Sequence
  Non-cyclic GFR-binding peptide
  MOD_RES (32)..(32): Xaa is C or S
SEVTMNPIKGYVVNKNEDFYLINIPSMKEPVX

SEQ ID NO: 32598 - protein, 40 aa, Artificial Sequence
  Non-cyclic GFR-binding peptide
  MOD_RES (34)..(35): Xaa is C or S
  MOD_RES (12)..(13)..(14)..(15)..(16): Xaa is A or G
  MOD_RES (17)..(18)..(19)..(20): Xaa is A or G or absent
ESVAMGRHKRLXXXXXXXXXYYLISTASLKTPVXXAKSAK

SEQ ID NO: 32599 - protein, 40 aa, Artificial Sequence
  Non-cyclic GFR-binding peptide
  MOD_RES (34)..(35): Xaa is C or S
  MOD_RES (12)..(13)..(14)..(15)..(16): Xaa is A or G
  MOD_RES (17)..(18)..(19)..(20): Xaa is A or G or absent
SEVVMDEYKFKXXXXXXXXXLYLISIPELRTPVXXTPPTS

SEQ ID NO: 32600 - protein, 36 aa, Artificial Sequence
  Non-cyclic GFR-binding peptide
  MOD_RES (34)..(35): Xaa is C or S
  MOD_RES (12)..(13)..(14)..(15)..(16): Xaa is A or G
  MOD_RES (17)..(18)..(19)..(20): Xaa is A or G or absent
SEVTMNPIKGYXXXXXXXXXFYLINIPSMKEPVXXP

SEQ ID NO: 32601 - protein, 38 aa, Artificial Sequence
  Non-cyclic GFR-binding peptide
  MOD_RES (2)..(36)..(37): Xaa is C or S
  MOD_RES (14)..(15)..(16)..(17)..(18): Xaa is A or G
  MOD_RES (19)..(20)..(21)..(22): Xaa is A or G or absent
GXSEVVMDEYKFKXXXXXXXXXLYLISIPELRTPVXXT

SEQ ID NO: 32602 - protein, 36 aa, Artificial Sequence
  Non-cyclic GFR-binding peptide
  MOD_RES (2)..(4)..(36): Xaa is C or S
RXGXSEVVMDYHYKLVVNNASDKYLISIPSLRTPVX

SEQ ID NO: 32603 - protein, 38 aa, Artificial Sequence
  Non-cyclic GFR-binding peptide
  MOD_RES (33)..(34): Xaa is C or S
  MOD_RES (11)..(12)..(13)..(14)..(15): Xaa is A or G
  MOD_RES (16)..(17)..(18)..(19): Xaa is A or G or absent
EVVMDEYKFKXXXXXXXXXLYLISIPELRTPVXXTPPT

SEQ ID NO: 32604 - protein, 33 aa, Artificial Sequence
  Non-cyclic GFR-binding peptide
  MOD_RES (2)..(2): Xaa is C or S
AXSEVTMNRYKKLVVNKNEDFYLISIANMKEPV

SEQ ID NO: 32605 - protein, 41 aa, Artificial Sequence
  Non-cyclic GFR-binding peptide
  MOD_RES (2)..(35)..(36): Xaa is C or S
  MOD_RES (13)..(14)..(15)..(16)..(17): Xaa is A or G
  MOD_RES (18)..(19)..(20)..(21): Xaa is A or G or absent
KXSRVIMPIKGYXXXXXXXXXFYLINIPSLAQPVXXPAASA

SEQ ID NO: 32606 - protein, 42 aa, Artificial Sequence
  Non-cyclic GFR-binding peptide
  MOD_RES (1)..(3)..(36)..(37): Xaa is C or S
  MOD_RES (14)..(15)..(16)..(17)..(18): Xaa is A or G
  MOD_RES (19)..(20)..(21)..(22): Xaa is A or G or absent
XGXEEVIMEYKFKXXXXXXXXXLYLMSIPETKVPAXXTSPVR

SEQ ID NO: 32607 - protein, 31 aa, Artificial Sequence
  Non-cyclic GFR-binding peptide
SEVTMNEYKFKVVNKNEDLYLISIPEMKEPV

SEQ ID NO: 32608 - protein, 36 aa, Artificial Sequence
  Non-cyclic GFR-binding peptide
  MOD_RES (2)..(4): Xaa is C or S
  MOD_RES (15)..(16)..(17)..(18)..(19): Xaa is A or G
  MOD_RES (20)..(21)..(22)..(23): Xaa is A or G or absent
SXKXSKVVMPIKGYXXXXXXXXXFYLINIPSLDQPV

SEQ ID NO: 32609 - protein, 38 aa, Artificial Sequence
  Non-cyclic GFR-binding peptide
  MOD_RES (2)..(4)..(36)..(37): Xaa is C or S
RXGXSEVVMDEYKFKVVNNASDLYLISIPELRTPVXXT

SEQ ID NO: 32610 - protein, 38 aa, Artificial Sequence
  Non-cyclic GFR-binding peptide
  MOD_RES (33)..(34): Xaa is C or S
  MOD_RES (11)..(12)..(13)..(14)..(15): Xaa is A or G
  MOD_RES (16)..(17)..(18)..(19): Xaa is A or G or absent
EVVMDYHYKLXXXXXXXXXKYLISIPSLRTPVXXTPPT

SEQ ID NO: 32611 - protein, 43 aa, Artificial Sequence
  Non-cyclic GFR-binding peptide
  MOD_RES (2)..(4)..(38)..(39): Xaa is C or S
  MOD_RES (16)..(17)..(18)..(19)..(20): Xaa is A or G
  MOD_RES (21)..(22)..(23)..(24): Xaa is A or G or absent
SXGXRDVVMGEYKFKXXXXXXXXXLYLMSIPEMKTPTXXPGAS

SEQ ID NO: 32612 - protein, 37 aa, Artificial Sequence
  Non-cyclic GFR-binding peptide
  MOD_RES (1)..(34)..(35): Xaa is C or S
  MOD_RES (12)..(13)..(14)..(15)..(16): Xaa is A or G
  MOD_RES (17)..(18)..(19)..(20): Xaa is A or G or absent
XSRVIMPIKGYXXXXXXXXXFYLINIPSLAQPVXXPA

SEQ ID NO: 32613 - protein, 37 aa, Artificial Sequence
  Non-cyclic GFR-binding peptide
  MOD_RES (2)..(4)..(36)..(37): Xaa is C or S
RXGXSEVVMDEYKFKVVNNASDLYLISIPELRTPVXX

SEQ ID NO: 32614 - protein, 31 aa, Artificial Sequence
  Non-cyclic GFR-binding peptide
AEVVMDRHKRLVVNNAADYYLISTASLRAPV

SEQ ID NO: 32615 - protein, 37 aa, Artificial Sequence
  Non-cyclic GFR-binding peptide
  MOD_RES (2)..(4): Xaa is C or S
  MOD_RES (16)..(17)..(18)..(19)..(20): Xaa is A or G
  MOD_RES (21)..(22)..(23)..(24): Xaa is A or G or absent
RXGXSEVVMDEYKFKXXXXXXXXXLYLISIPELRTPV

SEQ ID NO: 32616 - protein, 35 aa, Artificial Sequence
  Non-cyclic GFR-binding peptide
  MOD_RES (31)..(32): Xaa is C or S
EVTMNYHYKLVVNKNEDKYLISIPSMKEPVXXPEP

SEQ ID NO: 32617 - protein, 34 aa, Artificial Sequence
  Non-cyclic GFR-binding peptide
  MOD_RES (31)..(32): Xaa is C or S
EVTMNRHKRLVVNKNEDYYLISTASMKEPVXXPE

SEQ ID NO: 32618 - protein, 36 aa, Artificial Sequence
  Non-cyclic GFR-binding peptide
  MOD_RES (1)..(34)..(35): Xaa is C or S
  MOD_RES (12)..(13)..(14)..(15)..(16): Xaa is A or G
  MOD_RES (17)..(18)..(19)..(20): Xaa is A or G or absent
XEEVIMYHYKLXXXXXXXXXKYLMSIPSTKVPAXXT

SEQ ID NO: 32619 - protein, 36 aa, Artificial Sequence
  Non-cyclic GFR-binding peptide
  MOD_RES (1)..(35)..(36): Xaa is C or S
  MOD_RES (13)..(14)..(15)..(16)..(17): Xaa is A or G
  MOD_RES (18)..(19)..(20)..(21): Xaa is A or G or absent
XSEVTMNYHYKLXXXXXXXXXKYLISIPSMKEPVXX

SEQ ID NO: 32620 - protein, 41 aa, Artificial Sequence
  Non-cyclic GFR-binding peptide
  MOD_RES (2)..(4)..(38)..(39): Xaa is C or S
  MOD_RES (16)..(17)..(18)..(19)..(20): Xaa is A or G
  MOD_RES (21)..(22)..(23)..(24): Xaa is A or G or absent
RXGXSEVVMDEYKFKXXXXXXXXXLYLISIPELRTPVXXTP

SEQ ID NO: 32621 - protein, 40 aa, Artificial Sequence
  Non-cyclic GFR-binding peptide
  MOD_RES (2)..(4)..(36)..(37): Xaa is C or S
RXGXSEVVMDRHKRLVVNNASDYYLISTASLRTPVXXTPP

SEQ ID NO: 32622 - protein, 40 aa, Artificial Sequence
  Non-cyclic GFR-binding peptide
  MOD_RES (2)..(4)..(35)..(36): Xaa is C or S
SXKXSKVVMPIKGYVKPTRGVFYLINIPSLDQPVXXPSAS

SEQ ID NO: 32623 - protein, 40 aa, Artificial Sequence
  Non-cyclic GFR-binding peptide
  MOD_RES (2)..(4)..(38)..(39): Xaa is C or S
  MOD_RES (16)..(17)..(18)..(19)..(20): Xaa is A or G
  MOD_RES (21)..(22)..(23)..(24): Xaa is A or G or absent
RXAXSEVTMNYHYKLXXXXXXXXXKYLISIPSMKEPVXXP

SEQ ID NO: 32624 - protein, 34 aa, Artificial Sequence
  Non-cyclic GFR-binding peptide
  MOD_RES (1)..(1): Xaa is C or S
  MOD_RES (13)..(14)..(15)..(16)..(17): Xaa is A or G
  MOD_RES (18)..(19)..(20)..(21): Xaa is A or G or absent
XSEVTMNRHKRLXXXXXXXXXYYLISTASMKEPV

SEQ ID NO: 32625 - protein, 32 aa, Artificial Sequence
  Non-cyclic GFR-binding peptide
  MOD_RES (32)..(32): Xaa is C or S
SEVTMNEYKFKVVNKNEDLYLISIPEMKEPVX

SEQ ID NO: 32626 - protein, 40 aa, Artificial Sequence
  Non-cyclic GFR-binding peptide
  MOD_RES (2)..(36)..(37): Xaa is C or S
  MOD_RES (14)..(15)..(16)..(17)..(18): Xaa is A or G
  MOD_RES (19)..(20)..(21)..(22): Xaa is A or G or absent
GXRDVVMGYHYKLXXXXXXXXXKYLMSIPSMKTPTXXPGA

SEQ ID NO: 32627 - protein, 37 aa, Artificial Sequence
  Non-cyclic GFR-binding peptide
  MOD_RES (34)..(35): Xaa is C or S
  MOD_RES (12)..(13)..(14)..(15)..(16): Xaa is A or G
  MOD_RES (17)..(18)..(19)..(20): Xaa is A or G or absent
SEVTMNPIKGYXXXXXXXXXFYLINIPSMKEPVXXPE

SEQ ID NO: 32628 - protein, 33 aa, Artificial Sequence
  Non-cyclic GFR-binding peptide
  MOD_RES (2)..(2): Xaa is C or S
GXAEVVMDRHKRLVVNNAADYYLISTASLRAPV

SEQ ID NO: 32629 - protein, 38 aa, Artificial Sequence
  Non-cyclic GFR-binding peptide
  MOD_RES (34)..(35): Xaa is C or S
  MOD_RES (12)..(13)..(14)..(15)..(16): Xaa is A or G
  MOD_RES (17)..(18)..(19)..(20): Xaa is A or G or absent
SEVTMNPIKGYXXXXXXXXXFYLINIPSMKEPVXXPEP

SEQ ID NO: 32630 - protein, 37 aa, Artificial Sequence
  Non-cyclic GFR-binding peptide
  MOD_RES (1)..(3)..(35)..(36): Xaa is C or S
XAXSEVTMNYHYKLVVNKNEDKYLISIPSMKEPVXXP

SEQ ID NO: 32631 - protein, 33 aa, Artificial Sequence
  Non-cyclic GFR-binding peptide
  MOD_RES (1)..(32)..(33): Xaa is C or S
XEEVIMRHKRLLLVRGNDYYLMSTASTKVPAXX

SEQ ID NO: 32632 - protein, 36 aa, Artificial Sequence
  Non-cyclic GFR-binding peptide
  MOD_RES (2)..(4)..(36): Xaa is C or S
RXAXSEVTMNEYKFKVVNKNEDLYLISIPEMKEPVX

SEQ ID NO: 32633 - protein, 41 aa, Artificial Sequence
  Non-cyclic GFR-binding peptide
  MOD_RES (1)..(35)..(36): Xaa is C or S
  MOD_RES (13)..(14)..(15)..(16)..(17): Xaa is A or G
  MOD_RES (18)..(19)..(20)..(21): Xaa is A or G or absent
XSEVVMDRHKRLXXXXXXXXXYYLISTASLRTPVXXTPPTS

SEQ ID NO: 32634 - protein, 37 aa, Artificial Sequence
  Non-cyclic GFR-binding peptide
  MOD_RES (1)..(35)..(36): Xaa is C or S
  MOD_RES (13)..(14)..(15)..(16)..(17): Xaa is A or G
  MOD_RES (18)..(19)..(20)..(21): Xaa is A or G or absent
XSEVVMDEYKFKXXXXXXXXXLYLISIPELRTPVXXT

SEQ ID NO: 32635 - protein, 36 aa, Artificial Sequence
  Non-cyclic GFR-binding peptide
  MOD_RES (2)..(4)..(35)..(36): Xaa is C or S
LXGXEEVIMEYKFKLLVRGNDLYLMSIPETKVPAXX

SEQ ID NO: 32636 - protein, 35 aa, Artificial Sequence
  Non-cyclic GFR-binding peptide
  MOD_RES (2)..(34)..(35): Xaa is C or S
GXSEVVMDYHYKLVVNNASDKYLISIPSLRTPVXX

SEQ ID NO: 32637 - protein, 35 aa, Artificial Sequence
  Non-cyclic GFR-binding peptide
  MOD_RES (31)..(32): Xaa is C or S
EEVIMYHYKLLLVRGNDKYLMSIPSTKVPAXXTSP

SEQ ID NO: 32638 - protein, 37 aa, Artificial Sequence
  Non-cyclic GFR-binding peptide
  MOD_RES (2)..(4)..(37): Xaa is C or S
  MOD_RES (15)..(16)..(17)..(18)..(19): Xaa is A or G
  MOD_RES (20)..(21)..(22)..(23): Xaa is A or G or absent
SXKXSRVIMPIKGYXXXXXXXXXFYLINIPSLAQPVX

SEQ ID NO: 32639 - protein, 32 aa, Artificial Sequence
  Non-cyclic GFR-binding peptide
  MOD_RES (31)..(32): Xaa is C or S
EEVIMRHKRLLLVRGNDYYLMSTASTKVPAXX

SEQ ID NO: 32640 - protein, 35 aa, Artificial Sequence
  Non-cyclic GFR-binding peptide
  MOD_RES (31)..(32): Xaa is C or S
EVTMNPIKGYVVNKNEDFYLINIPSMKEPVXXPEP

SEQ ID NO: 32641 - protein, 36 aa, Artificial Sequence
  Non-cyclic GFR-binding peptide
  MOD_RES (2)..(4)..(36): Xaa is C or S
SXGXRDVVMGRHKRLIIQQKDNYYLMSTASMKTPTX

SEQ ID NO: 32642 - protein, 39 aa, Artificial Sequence
  Non-cyclic GFR-binding peptide
  MOD_RES (1)..(34)..(35): Xaa is C or S
  MOD_RES (12)..(13)..(14)..(15)..(16): Xaa is A or G
  MOD_RES (17)..(18)..(19)..(20): Xaa is A or G or absent
XSRVIMPIKGYXXXXXXXXXFYLINIPSLAQPVXXPAAS

SEQ ID NO: 32643 - protein, 40 aa, Artificial Sequence
  Non-cyclic GFR-binding peptide
  MOD_RES (2)..(35)..(36): Xaa is C or S
  MOD_RES (13)..(14)..(15)..(16)..(17): Xaa is A or G
  MOD_RES (18)..(19)..(20)..(21): Xaa is A or G or absent
KXSKVVMPIKGYXXXXXXXXXFYLINIPSLDQPVXXPSAS

SEQ ID NO: 32644 - protein, 37 aa, Artificial Sequence
  Non-cyclic GFR-binding peptide
  MOD_RES (33)..(34): Xaa is C or S
  MOD_RES (11)..(12)..(13)..(14)..(15): Xaa is A or G
  MOD_RES (16)..(17)..(18)..(19): Xaa is A or G or absent
SRVIMPIKGYXXXXXXXXXFYLINIPSLAQPVXXPAA

SEQ ID NO: 32645 - protein, 33 aa, Artificial Sequence
  Non-cyclic GFR-binding peptide
  MOD_RES (33)..(33): Xaa is C or S
  MOD_RES (11)..(12)..(13)..(14)..(15): Xaa is A or G
  MOD_RES (16)..(17)..(18)..(19): Xaa is A or G or absent
EEVIMRHKRLXXXXXXXXXYYLMSTASTKVPAX

SEQ ID NO: 32646 - protein, 37 aa, Artificial Sequence
  Non-cyclic GFR-binding peptide
  MOD_RES (1)..(3)..(35)..(36): Xaa is C or S
XGXESVAMGRHKRLYTVVGKDYYLISTASLKTPVXXA

SEQ ID NO: 32647 - protein, 35 aa, Artificial Sequence
  Non-cyclic GFR-binding peptide
  MOD_RES (2)..(34)..(35): Xaa is C or S
AXSEVTMNRHKRLVVNKNEDYYLISTASMKEPVXX

SEQ ID NO: 32648 - protein, 42 aa, Artificial Sequence
  Non-cyclic GFR-binding peptide
  MOD_RES (1)..(3)..(36)..(37): Xaa is C or S
  MOD_RES (14)..(15)..(16)..(17)..(18): Xaa is A or G
  MOD_RES (19)..(20)..(21)..(22): Xaa is A or G or absent
XGXEEVIMYHYKLXXXXXXXXXKYLMSIPSTKVPAXXTSPVR

SEQ ID NO: 32649 - protein, 35 aa, Artificial Sequence
  Non-cyclic GFR-binding peptide
  MOD_RES (2)..(4): Xaa is C or S
RXGXSEVVMDYHYKLVVNNASDKYLISIPSLRTPV

SEQ ID NO: 32650 - protein, 36 aa, Artificial Sequence
  Non-cyclic GFR-binding peptide
  MOD_RES (33)..(34): Xaa is C or S
  MOD_RES (11)..(12)..(13)..(14)..(15): Xaa is A or G
  MOD_RES (16)..(17)..(18)..(19): Xaa is A or G or absent
EVTMNRYKKLXXXXXXXXXFYLISIANMKEPVXXPE

SEQ ID NO: 32651 - protein, 35 aa, Artificial Sequence
  Non-cyclic GFR-binding peptide
  MOD_RES (31)..(32): Xaa is C or S
EVVMDYHYKLVVNNASDKYLISIPSLRTPVXXTPP

SEQ ID NO: 32652 - protein, 36 aa, Artificial Sequence
  Non-cyclic GFR-binding peptide
  MOD_RES (32)..(33): Xaa is C or S
ESVAMGRHKRLYTVVGKDYYLISTASLKTPVXXAKS

SEQ ID NO: 32653 - protein, 33 aa, Artificial Sequence
  Non-cyclic GFR-binding peptide
  MOD_RES (1)..(32)..(33): Xaa is C or S
XEEVIMYHYKLLLVRGNDKYLMSIPSTKVPAXX

SEQ ID NO: 32654 - protein, 37 aa, Artificial Sequence
  Non-cyclic GFR-binding peptide
  MOD_RES (2)..(36)..(37): Xaa is C or S
  MOD_RES (14)..(15)..(16)..(17)..(18): Xaa is A or G
  MOD_RES (19)..(20)..(21)..(22): Xaa is A or G or absent
GXSEVVMDYHYKLXXXXXXXXXKYLISIPSLRTPVXX

SEQ ID NO: 32655 - protein, 32 aa, Artificial Sequence
  Non-cyclic GFR-binding peptide
  MOD_RES (32)..(32): Xaa is C or S
AEVVMDRHKRLVVNNAADYYLISTASLRAPVX

SEQ ID NO: 32656 - protein, 35 aa, Artificial Sequence
  Non-cyclic GFR-binding peptide
  MOD_RES (1)..(35): Xaa is C or S
  MOD_RES (13)..(14)..(15)..(16)..(17): Xaa is A or G
  MOD_RES (18)..(19)..(20)..(21): Xaa is A or G or absent
XSEVTMNRHKRLXXXXXXXXXYYLISTASMKEPVX

SEQ ID NO: 32657 - protein, 34 aa, Artificial Sequence
  Non-cyclic GFR-binding peptide
  MOD_RES (31)..(32): Xaa is C or S
EVVMDRHKRLVVNNASDYYLISTASLRTPVXXTP

SEQ ID NO: 32658 - protein, 38 aa, Artificial Sequence
  Non-cyclic GFR-binding peptide
  MOD_RES (34)..(35): Xaa is C or S
  MOD_RES (12)..(13)..(14)..(15)..(16): Xaa is A or G
  MOD_RES (17)..(18)..(19)..(20): Xaa is A or G or absent
SEVTMNRHKRLXXXXXXXXXYYLISTASMKEPVXXPEP

SEQ ID NO: 32659 - protein, 36 aa, Artificial Sequence
  Non-cyclic GFR-binding peptide
  MOD_RES (2)..(36): Xaa is C or S
  MOD_RES (14)..(15)..(16)..(17)..(18): Xaa is A or G
  MOD_RES (19)..(20)..(21)..(22): Xaa is A or G or absent
GXESVAMGRHKRLXXXXXXXXXYYLISTASLKTPVX

SEQ ID NO: 32660 - protein, 38 aa, Artificial Sequence
  Non-cyclic GFR-binding peptide
  MOD_RES (2)..(36)..(37): Xaa is C or S
  MOD_RES (14)..(15)..(16)..(17)..(18): Xaa is A or G
  MOD_RES (19)..(20)..(21)..(22): Xaa is A or G or absent
GXSEVVMDYHYKLXXXXXXXXXKYLISIPSLRTPVXXT

SEQ ID NO: 32661 - protein, 38 aa, Artificial Sequence
  Non-cyclic GFR-binding peptide
  MOD_RES (1)..(35)..(36): Xaa is C or S
  MOD_RES (13)..(14)..(15)..(16)..(17): Xaa is A or G
  MOD_RES (18)..(19)..(20)..(21): Xaa is A or G or absent
XRDVVMGYHYKLXXXXXXXXXKYLMSIPSMKTPTXXPG

SEQ ID NO: 32662 - protein, 37 aa, Artificial Sequence
  Non-cyclic GFR-binding peptide
  MOD_RES (32)..(33): Xaa is C or S
ESVAMGRHKRLYTVVGKDYYLISTASLKTPVXXAKSA

SEQ ID NO: 32663 - protein, 31 aa, Artificial Sequence
  Non-cyclic GFR-binding peptide
SEVTMNPIKGYVVNKNEDFYLINIPSMKEPV

SEQ ID NO: 32664 - protein, 37 aa, Artificial Sequence
  Non-cyclic GFR-binding peptide
  MOD_RES (33)..(34): Xaa is C or S
  MOD_RES (11)..(12)..(13)..(14)..(15): Xaa is A or G
  MOD_RES (16)..(17)..(18)..(19): Xaa is A or G or absent
SVAMGRHKRLXXXXXXXXXYYLISTASLKTPVXXAKS

SEQ ID NO: 32665 - protein, 36 aa, Artificial Sequence
  Non-cyclic GFR-binding peptide
  MOD_RES (1)..(3)..(35)..(36): Xaa is C or S
XGXRDVVMGEYKFKIIQQKDNLYLMSIPEMKTPTXX

SEQ ID NO: 32666 - protein, 36 aa, Artificial Sequence
  Non-cyclic GFR-binding peptide
  MOD_RES (1)..(3): Xaa is C or S
  MOD_RES (15)..(16)..(17)..(18)..(19): Xaa is A or G
  MOD_RES (20)..(21)..(22)..(23): Xaa is A or G or absent
XGXSEVVMDRHKRLXXXXXXXXXYYLISTASLRTPV

SEQ ID NO: 32667 - protein, 33 aa, Artificial Sequence
  Non-cyclic GFR-binding peptide
  MOD_RES (1)..(33): Xaa is C or S
XSEVTMNRYKKLVVNKNEDFYLISIANMKEPVX

SEQ ID NO: 32668 - protein, 34 aa, Artificial Sequence
  Non-cyclic GFR-binding peptide
  MOD_RES (1)..(33)..(34): Xaa is C or S
XSEVTMNRYKKLVVNKNEDFYLISIANMKEPVXX

SEQ ID NO: 32669 - protein, 36 aa, Artificial Sequence
  Non-cyclic GFR-binding peptide
  MOD_RES (33)..(34): Xaa is C or S
  MOD_RES (11)..(12)..(13)..(14)..(15): Xaa is A or G
  MOD_RES (16)..(17)..(18)..(19): Xaa is A or G or absent
SRVIMPIKGYXXXXXXXXXFYLINIPSLAQPVXXPA

SEQ ID NO: 32670 - protein, 36 aa, Artificial Sequence
  Non-cyclic GFR-binding peptide
  MOD_RES (1)..(3)..(35)..(36): Xaa is C or S
XGXESVAMGRHKRLYTVVGKDYYLISTASLKTPVXX

SEQ ID NO: 32671 - protein, 42 aa, Artificial Sequence
  Non-cyclic GFR-binding peptide
  MOD_RES (2)..(36)..(37): Xaa is C or S
  MOD_RES (14)..(15)..(16)..(17)..(18): Xaa is A or G
  MOD_RES (19)..(20)..(21)..(22): Xaa is A or G or absent
GXRDVVMGYHYKLXXXXXXXXXKYLMSIPSMKTPTXXPGASG

SEQ ID NO: 32672 - protein, 39 aa, Artificial Sequence
  Non-cyclic GFR-binding peptide
  MOD_RES (34)..(35): Xaa is C or S
  MOD_RES (12)..(13)..(14)..(15)..(16): Xaa is A or G
  MOD_RES (17)..(18)..(19)..(20): Xaa is A or G or absent
RDVVMGRHKRLXXXXXXXXXYYLMSTASMKTPTXXPGAS

SEQ ID NO: 32673 - protein, 41 aa, Artificial Sequence
  Non-cyclic GFR-binding peptide
  MOD_RES (2)..(35)..(36): Xaa is C or S
  MOD_RES (13)..(14)..(15)..(16)..(17): Xaa is A or G
  MOD_RES (18)..(19)..(20)..(21): Xaa is A or G or absent
KXSKVVMPIKGYXXXXXXXXXFYLINIPSLDQPVXXPSASA

SEQ ID NO: 32674 - protein, 33 aa, Artificial Sequence
  Non-cyclic GFR-binding peptide
  MOD_RES (32)..(33): Xaa is C or S
SEVVMDRHKRLVVNNASDYYLISTASLRTPVXX

SEQ ID NO: 32675 - protein, 41 aa, Artificial Sequence
  Non-cyclic GFR-binding peptide
  MOD_RES (1)..(3)..(37)..(38): Xaa is C or S
  MOD_RES (15)..(16)..(17)..(18)..(19): Xaa is A or G
  MOD_RES (20)..(21)..(22)..(23): Xaa is A or G or absent
XAXSEVTMNRHKRLXXXXXXXXXYYLISTASMKEPVXXPEP

SEQ ID NO: 32676 - protein, 40 aa, Artificial Sequence
  Non-cyclic GFR-binding peptide
  MOD_RES (1)..(3)..(37)..(38): Xaa is C or S
  MOD_RES (15)..(16)..(17)..(18)..(19): Xaa is A or G
  MOD_RES (20)..(21)..(22)..(23): Xaa is A or G or absent
XGXSEVVMDEYKFKXXXXXXXXXLYLISIPELRTPVXXTP

SEQ ID NO: 32677 - protein, 38 aa, Artificial Sequence
  Non-cyclic GFR-binding peptide
  MOD_RES (1)..(35)..(36): Xaa is C or S
  MOD_RES (13)..(14)..(15)..(16)..(17): Xaa is A or G
  MOD_RES (18)..(19)..(20)..(21): Xaa is A or G or absent
XSEVTMNRHKRLXXXXXXXXXYYLISTASMKEPVXXPE

SEQ ID NO: 32678 - protein, 37 aa, Artificial Sequence
  Non-cyclic GFR-binding peptide
  MOD_RES (33)..(34): Xaa is C or S
  MOD_RES (11)..(12)..(13)..(14)..(15): Xaa is A or G
  MOD_RES (16)..(17)..(18)..(19): Xaa is A or G or absent
EVVMDEYKFKXXXXXXXXXLYLISIPELRTPVXXTPP

SEQ ID NO: 32679 - protein, 41 aa, Artificial Sequence
  Non-cyclic GFR-binding peptide
  MOD_RES (1)..(3)..(37)..(38): Xaa is C or S
  MOD_RES (15)..(16)..(17)..(18)..(19): Xaa is A or G
  MOD_RES (20)..(21)..(22)..(23): Xaa is A or G or absent
XGXSEVVMDEYKFKXXXXXXXXXLYLISIPELRTPVXXTPP

SEQ ID NO: 32680 - protein, 41 aa, Artificial Sequence
  Non-cyclic GFR-binding peptide
  MOD_RES (1)..(3)..(35)..(36): Xaa is C or S
XGXSRVVMNYHYKLIVNSSDDKYLVSIPSLKTPAXXPKPVH

SEQ ID NO: 32681 - protein, 44 aa, Artificial Sequence
  Non-cyclic GFR-binding peptide
  MOD_RES (2)..(4)..(38)..(39): Xaa is C or S
  MOD_RES (16)..(17)..(18)..(19)..(20): Xaa is A or G
  MOD_RES (21)..(22)..(23)..(24): Xaa is A or G or absent
RXGXSEVVMDEYKFKXXXXXXXXXLYLISIPELRTPVXXTPPTS

SEQ ID NO: 32682 - protein, 39 aa, Artificial Sequence
  Non-cyclic GFR-binding peptide
  MOD_RES (33)..(34): Xaa is C or S
  MOD_RES (11)..(12)..(13)..(14)..(15): Xaa is A or G
  MOD_RES (16)..(17)..(18)..(19): Xaa is A or G or absent
SVAMGRHKRLXXXXXXXXXYYLISTASLKTPVXXAKSAK

SEQ ID NO: 32683 - protein, 36 aa, Artificial Sequence
  Non-cyclic GFR-binding peptide
  MOD_RES (1)..(3): Xaa is C or S
  MOD_RES (15)..(16)..(17)..(18)..(19): Xaa is A or G
  MOD_RES (20)..(21)..(22)..(23): Xaa is A or G or absent
XGXRDVVMGYHYKLXXXXXXXXXKYLMSIPSMKTPT

SEQ ID NO: 32684 - protein, 36 aa, Artificial Sequence
  Non-cyclic GFR-binding peptide
  MOD_RES (31)..(32): Xaa is C or S
EVVMDRHKRLVVNNAADYYLISTASLRAPVXXSAPA

SEQ ID NO: 32685 - protein, 37 aa, Artificial Sequence
  Non-cyclic GFR-binding peptide
  MOD_RES (2)..(34)..(35): Xaa is C or S
GXSEVVMDYHYKLVVNNASDKYLISIPSLRTPVXXTP

SEQ ID NO: 32686 - protein, 36 aa, Artificial Sequence
  Non-cyclic GFR-binding peptide
  MOD_RES (33)..(34): Xaa is C or S
  MOD_RES (11)..(12)..(13)..(14)..(15): Xaa is A or G
  MOD_RES (16)..(17)..(18)..(19): Xaa is A or G or absent
SKVVMPIKGYXXXXXXXXXFYLINIPSLDQPVXXPS

SEQ ID NO: 32687 - protein, 37 aa, Artificial Sequence
  Non-cyclic GFR-binding peptide
  MOD_RES (31)..(32): Xaa is C or S
EVTMNYHYKLVVNKNEDKYLISIPSMKEPVXXPEPIG

SEQ ID NO: 32688 - protein, 36 aa, Artificial Sequence
  Non-cyclic GFR-binding peptide
  MOD_RES (2)..(4)..(36): Xaa is C or S
SXGXRDVVMGEYKFKIIQQKDNLYLMSIPEMKTPTX

SEQ ID NO: 32689 - protein, 41 aa, Artificial Sequence
  Non-cyclic GFR-binding peptide
  MOD_RES (1)..(3)..(36)..(37): Xaa is C or S
  MOD_RES (14)..(15)..(16)..(17)..(18): Xaa is A or G
  MOD_RES (19)..(20)..(21)..(22): Xaa is A or G or absent
XKXSKVIMPIKGYXXXXXXXXXFYLINIPSLDQSVXXPSAS

SEQ ID NO: 32690 - protein, 37 aa, Artificial Sequence
  Non-cyclic GFR-binding peptide
  MOD_RES (2)..(4): Xaa is C or S
  MOD_RES (16)..(17)..(18)..(19)..(20): Xaa is A or G
  MOD_RES (21)..(22)..(23)..(24): Xaa is A or G or absent
RXAXSEVTMNRYKKLXXXXXXXXXFYLISIANMKEPV

SEQ ID NO: 32691 - protein, 40 aa, Artificial Sequence
  Non-cyclic GFR-binding peptide
  MOD_RES (1)..(3)..(35)..(36): Xaa is C or S
XGXRDVVMGEYKFKIIQQKDNLYLMSIPEMKTPTXXPGAS

SEQ ID NO: 32692 - protein, 42 aa, Artificial Sequence
  Non-cyclic GFR-binding peptide
  MOD_RES (1)..(3)..(37)..(38): Xaa is C or S
  MOD_RES (15)..(16)..(17)..(18)..(19): Xaa is A or G
  MOD_RES (20)..(21)..(22)..(23): Xaa is A or G or absent
XAXSEVTMNRYKKLXXXXXXXXXFYLISIANMKEPVXXPEPI

SEQ ID NO: 32693 - protein, 40 aa, Artificial Sequence
  Non-cyclic GFR-binding peptide
  MOD_RES (2)..(34)..(35): Xaa is C or S
GXRDVVMGRHKRLIIQQKDNYYLMSTASMKTPTXXPGASG

SEQ ID NO: 32694 - protein, 40 aa, Artificial Sequence
  Non-cyclic GFR-binding peptide
  MOD_RES (1)..(3)..(37)..(38): Xaa is C or S
  MOD_RES (15)..(16)..(17)..(18)..(19): Xaa is A or G
  MOD_RES (20)..(21)..(22)..(23): Xaa is A or G or absent
XAXSEVTMNYHYKLXXXXXXXXXKYLISIPSMKEPVXXPE

SEQ ID NO: 32695 - protein, 37 aa, Artificial Sequence
  Non-cyclic GFR-binding peptide
  MOD_RES (1)..(33)..(34): Xaa is C or S
XSEVTMNRYKKLVVNKNEDFYLISIANMKEPVXXPEP

SEQ ID NO: 32696 - protein, 35 aa, Artificial Sequence
  Non-cyclic GFR-binding peptide
  MOD_RES (2)..(4)..(35): Xaa is C or S
LXGXEEVIMRHKRLLLVRGNDYYLMSTASTKVPAX

SEQ ID NO: 32697 - protein, 36 aa, Artificial Sequence
  Non-cyclic GFR-binding peptide
  MOD_RES (2)..(4): Xaa is C or S
  MOD_RES (15)..(16)..(17)..(18)..(19): Xaa is A or G
  MOD_RES (20)..(21)..(22)..(23): Xaa is A or G or absent
LXGXEEVIMRHKRLXXXXXXXXXYYLMSTASTKVPA

SEQ ID NO: 32698 - protein, 34 aa, Artificial Sequence
  Non-cyclic GFR-binding peptide
  MOD_RES (34)..(34): Xaa is C or S
  MOD_RES (12)..(13)..(14)..(15)..(16): Xaa is A or G
  MOD_RES (17)..(18)..(19)..(20): Xaa is A or G or absent
SEVVMDYHYKLXXXXXXXXXKYLISIPSLRTPVX

SEQ ID NO: 32699 - protein, 41 aa, Artificial Sequence
  Non-cyclic GFR-binding peptide
  MOD_RES (1)..(3)..(35)..(36): Xaa is C or S
XGXRDVVMGYHYKLIIQQKDNKYLMSIPSMKTPTXXPGASG

SEQ ID NO: 32700 - protein, 34 aa, Artificial Sequence
  Non-cyclic GFR-binding peptide
  MOD_RES (31)..(32): Xaa is C or S
SVAMGRHKRLYTVVGKDYYLISTASLKTPVXXAK

SEQ ID NO: 32701 - protein, 35 aa, Artificial Sequence
  Non-cyclic GFR-binding peptide
  MOD_RES (1)..(33)..(34): Xaa is C or S
XRDVVMGRHKRLIIQQKDNYYLMSTASMKTPTXXP

SEQ ID NO: 32702 - protein, 40 aa, Artificial Sequence
  Non-cyclic GFR-binding peptide
  MOD_RES (1)..(3)..(35)..(36): Xaa is C or S
XGXRDVVMGYHYKLIIQQKDNKYLMSIPSMKTPTXXPGAS

SEQ ID NO: 32703 - protein, 36 aa, Artificial Sequence
  Non-cyclic GFR-binding peptide
  MOD_RES (2)..(34)..(35): Xaa is C or S
GXRDVVMGRHKRLIIQQKDNYYLMSTASMKTPTXXP

SEQ ID NO: 32704 - protein, 40 aa, Artificial Sequence
  Non-cyclic GFR-binding peptide
  MOD_RES (1)..(3)..(35)..(36): Xaa is C or S
XAXSEVTMNRYKKLVVNKNEDFYLISIANMKEPVXXPEPI

SEQ ID NO: 32705 - protein, 33 aa, Artificial Sequence
  Non-cyclic GFR-binding peptide
  MOD_RES (2)..(2): Xaa is C or S
AXSEVTMNRHKRLVVNKNEDYYLISTASMKEPV

SEQ ID NO: 32706 - protein, 39 aa, Artificial Sequence
  Non-cyclic GFR-binding peptide
  MOD_RES (33)..(34): Xaa is C or S
  MOD_RES (11)..(12)..(13)..(14)..(15): Xaa is A or G
  MOD_RES (16)..(17)..(18)..(19): Xaa is A or G or absent
SKVIMPIKGYXXXXXXXXXFYLINIPSLDQSVXXPSASA

SEQ ID NO: 32707 - protein, 37 aa, Artificial Sequence
  Non-cyclic GFR-binding peptide
  MOD_RES (1)..(33)..(34): Xaa is C or S
XSEVTMNYHYKLVVNKNEDKYLISIPSMKEPVXXPEP

SEQ ID NO: 32708 - protein, 39 aa, Artificial Sequence
  Non-cyclic GFR-binding peptide
  MOD_RES (2)..(34)..(35): Xaa is C or S
GXSEVVMDYHYKLVVNNASDKYLISIPSLRTPVXXTPPT

SEQ ID NO: 32709 - protein, 36 aa, Artificial Sequence
  Non-cyclic GFR-binding peptide
  MOD_RES (2)..(4)..(35)..(36): Xaa is C or S
SXKXSRVIMPIKGYVKPKRGVFYLINIPSLAQPVXX

SEQ ID NO: 32710 - protein, 36 aa, Artificial Sequence
  Non-cyclic GFR-binding peptide
  MOD_RES (2)..(34)..(35): Xaa is C or S
AXSEVTMNRHKRLVVNKNEDYYLISTASMKEPVXXP

SEQ ID NO: 32711 - protein, 40 aa, Artificial Sequence
  Non-cyclic GFR-binding peptide
  MOD_RES (2)..(4)..(36)..(37): Xaa is C or S
SXGXRDVVMGEYKFKIIQQKDNLYLMSIPEMKTPTXXPGA

SEQ ID NO: 32712 - protein, 35 aa, Artificial Sequence
  Non-cyclic GFR-binding peptide
  MOD_RES (31)..(32): Xaa is C or S
EVTMNRHKRLVVNKNEDYYLISTASMKEPVXXPEP

SEQ ID NO: 32713 - protein, 39 aa, Artificial Sequence
  Non-cyclic GFR-binding peptide
  MOD_RES (2)..(36)..(37): Xaa is C or S
  MOD_RES (14)..(15)..(16)..(17)..(18): Xaa is A or G
  MOD_RES (19)..(20)..(21)..(22): Xaa is A or G or absent
GXSEVVMDYHYKLXXXXXXXXXKYLISIPSLRTPVXXTP

SEQ ID NO: 32714 - protein, 41 aa, Artificial Sequence
  Non-cyclic GFR-binding peptide
  MOD_RES (2)..(4)..(37)..(38): Xaa is C or S
  MOD_RES (15)..(16)..(17)..(18)..(19): Xaa is A or G
  MOD_RES (20)..(21)..(22)..(23): Xaa is A or G or absent
SXKXSKVIMPIKGYXXXXXXXXXFYLINIPSLDQSVXXPSA

SEQ ID NO: 32715 - protein, 31 aa, Artificial Sequence
  Non-cyclic GFR-binding peptide
  MOD_RES (1)..(1): Xaa is C or S
XEEVIMRHKRLLLVRGNDYYLMSTASTKVPA

SEQ ID NO: 32716 - protein, 41 aa, Artificial Sequence
  Non-cyclic GFR-binding peptide
  MOD_RES (2)..(4)..(36)..(37): Xaa is C or S
RXGXESVAMGRHKRLYTVVGKDYYLISTASLKTPVXXAKSA

SEQ ID NO: 32717 - protein, 39 aa, Artificial Sequence
  Non-cyclic GFR-binding peptide
  MOD_RES (2)..(36)..(37): Xaa is C or S
  MOD_RES (14)..(15)..(16)..(17)..(18): Xaa is A or G
  MOD_RES (19)..(20)..(21)..(22): Xaa is A or G or absent
GXSEVVMDEYKFKXXXXXXXXXLYLISIPELRTPVXXTP

SEQ ID NO: 32718 - protein, 40 aa, Artificial Sequence
  Non-cyclic GFR-binding peptide
  MOD_RES (1)..(35)..(36): Xaa is C or S
  MOD_RES (13)..(14)..(15)..(16)..(17): Xaa is A or G
  MOD_RES (18)..(19)..(20)..(21): Xaa is A or G or absent
XSEVTMNYHYKLXXXXXXXXXKYLISIPSMKEPVXXPEPI

SEQ ID NO: 32719 - protein, 35 aa, Artificial Sequence
  Non-cyclic GFR-binding peptide
  MOD_RES (34)..(35): Xaa is C or S
  MOD_RES (12)..(13)..(14)..(15)..(16): Xaa is A or G
  MOD_RES (17)..(18)..(19)..(20): Xaa is A or G or absent
RDVVMGRHKRLXXXXXXXXXYYLMSTASMKTPTXX

SEQ ID NO: 32720 - protein, 39 aa, Artificial Sequence
  Non-cyclic GFR-binding peptide
  MOD_RES (1)..(3)..(35)..(36): Xaa is C or S
XGXRDVVMGRHKRLIIQQKDNYYLMSTASMKTPTXXPGA

SEQ ID NO: 32721 - protein, 39 aa, Artificial Sequence
  Non-cyclic GFR-binding peptide
  MOD_RES (2)..(34)..(35): Xaa is C or S
AXSEVTMNYHYKLVVNKNEDKYLISIPSMKEPVXXPEPI

SEQ ID NO: 32722 - protein, 43 aa, Artificial Sequence
  Non-cyclic GFR-binding peptide
  MOD_RES (2)..(4)..(38)..(39): Xaa is C or S
  MOD_RES (16)..(17)..(18)..(19)..(20): Xaa is A or G
  MOD_RES (21)..(22)..(23)..(24): Xaa is A or G or absent
RXGXSEVVMDEYKFKXXXXXXXXXLYLISIPELRTPVXXTPPT

SEQ ID NO: 32723 - protein, 33 aa, Artificial Sequence
  Non-cyclic GFR-binding peptide
  MOD_RES (31)..(32): Xaa is C or S
DVVMGYHYKLIIQQKDNKYLMSIPSMKTPTXXP

SEQ ID NO: 32724 - protein, 37 aa, Artificial Sequence
  Non-cyclic GFR-binding peptide
  MOD_RES (2)..(4)..(37): Xaa is C or S
  MOD_RES (15)..(16)..(17)..(18)..(19): Xaa is A or G
  MOD_RES (20)..(21)..(22)..(23): Xaa is A or G or absent
SXKXSKVVMPIKGYXXXXXXXXXFYLINIPSLDQPVX

SEQ ID NO: 32725 - protein, 40 aa, Artificial Sequence
  Non-cyclic GFR-binding peptide
  MOD_RES (1)..(35)..(36): Xaa is C or S
  MOD_RES (13)..(14)..(15)..(16)..(17): Xaa is A or G
  MOD_RES (18)..(19)..(20)..(21): Xaa is A or G or absent
XSEVVMDYHYKLXXXXXXXXXKYLISIPSLRTPVXXTPPT

SEQ ID NO: 32726 - protein, 36 aa, Artificial Sequence
  Non-cyclic GFR-binding peptide
  MOD_RES (34)..(35): Xaa is C or S
  MOD_RES (12)..(13)..(14)..(15)..(16): Xaa is A or G
  MOD_RES (17)..(18)..(19)..(20): Xaa is A or G or absent
SEVVMDYHYKLXXXXXXXXXKYLISIPSLRTPVXXT

SEQ ID NO: 32727 - protein, 38 aa, Artificial Sequence
  Non-cyclic GFR-binding peptide
  MOD_RES (1)..(3)..(34)..(35): Xaa is C or S
XGXEEVIMYHYKLLLVRGNDKYLMSIPSTKVPAXXTSP

SEQ ID NO: 32728 - protein, 33 aa, Artificial Sequence
  Non-cyclic GFR-binding peptide
  MOD_RES (1)..(1): Xaa is C or S
  MOD_RES (12)..(13)..(14)..(15)..(16): Xaa is A or G
  MOD_RES (17)..(18)..(19)..(20): Xaa is A or G or absent
XSKVVMPIKGYXXXXXXXXXFYLINIPSLDQPV

SEQ ID NO: 32729 - protein, 36 aa, Artificial Sequence
  Non-cyclic GFR-binding peptide
  MOD_RES (2)..(33)..(34): Xaa is C or S
KXSKVIMPIKGYIKPTKGIFYLINIPSLDQSVXXPS

SEQ ID NO: 32730 - protein, 37 aa, Artificial Sequence
  Non-cyclic GFR-binding peptide
  MOD_RES (1)..(33)..(34): Xaa is C or S
XRDVVMGYHYKLIIQQKDNKYLMSIPSMKTPTXXPGA

SEQ ID NO: 32731 - protein, 32 aa, Artificial Sequence
  Non-cyclic GFR-binding peptide
  MOD_RES (1)..(1): Xaa is C or S
XSEVVMDYHYKLVVNNASDKYLISIPSLRTPV

SEQ ID NO: 32732 - protein, 42 aa, Artificial Sequence
  Non-cyclic GFR-binding peptide
  MOD_RES (2)..(4)..(36)..(37): Xaa is C or S
HXGXSRVVMNYHYKLIVNSSDDKYLVSIPSLKTPAXXPKPVH

SEQ ID NO: 32733 - protein, 35 aa, Artificial Sequence
  Non-cyclic GFR-binding peptide
  MOD_RES (32)..(33): Xaa is C or S
AEVVMDRHKRLVVNNAADYYLISTASLRAPVXXSA

SEQ ID NO: 32734 - protein, 36 aa, Artificial Sequence
  Non-cyclic GFR-binding peptide
  MOD_RES (31)..(32): Xaa is C or S
DVVMGEYKFKIIQQKDNLYLMSIPEMKTPTXXPGAS

SEQ ID NO: 32735 - protein, 35 aa, Artificial Sequence
  Non-cyclic GFR-binding peptide
  MOD_RES (31)..(32): Xaa is C or S
EEVIMRHKRLLLVRGNDYYLMSTASTKVPAXXTSP

SEQ ID NO: 32736 - protein, 39 aa, Artificial Sequence
  Non-cyclic GFR-binding peptide
  MOD_RES (1)..(3)..(37)..(38): Xaa is C or S
  MOD_RES (15)..(16)..(17)..(18)..(19): Xaa is A or G
  MOD_RES (20)..(21)..(22)..(23): Xaa is A or G or absent
XGXSEVVMDYHYKLXXXXXXXXXKYLISIPSLRTPVXXT

SEQ ID NO: 32737 - protein, 33 aa, Artificial Sequence
  Non-cyclic GFR-binding peptide
  MOD_RES (33)..(33): Xaa is C or S
  MOD_RES (11)..(12)..(13)..(14)..(15): Xaa is A or G
  MOD_RES (16)..(17)..(18)..(19): Xaa is A or G or absent
DVVMGRHKRLXXXXXXXXXYYLMSTASMKTPTX

SEQ ID NO: 32738 - protein, 34 aa, Artificial Sequence
  Non-cyclic GFR-binding peptide
  MOD_RES (1)..(1): Xaa is C or S
  MOD_RES (13)..(14)..(15)..(16)..(17): Xaa is A or G
  MOD_RES (18)..(19)..(20)..(21): Xaa is A or G or absent
XESVAMGRHKRLXXXXXXXXXYYLISTASLKTPV

SEQ ID NO: 32739 - protein, 37 aa, Artificial Sequence
  Non-cyclic GFR-binding peptide
  MOD_RES (32)..(33): Xaa is C or S
SEVVMDEYKFKVVNNASDLYLISIPELRTPVXXTPPT

SEQ ID NO: 32740 - protein, 34 aa, Artificial Sequence
  Non-cyclic GFR-binding peptide
  MOD_RES (34)..(34): Xaa is C or S
  MOD_RES (12)..(13)..(14)..(15)..(16): Xaa is A or G
  MOD_RES (17)..(18)..(19)..(20): Xaa is A or G or absent
SEVVMDEYKFKXXXXXXXXXLYLISIPELRTPVX

SEQ ID NO: 32741 - protein, 35 aa, Artificial Sequence
  Non-cyclic GFR-binding peptide
  MOD_RES (1)..(3)..(35): Xaa is C or S
XGXRDVVMGEYKFKIIQQKDNLYLMSIPEMKTPTX

SEQ ID NO: 32742 - protein, 34 aa, Artificial Sequence
  Non-cyclic GFR-binding peptide
  MOD_RES (31)..(32): Xaa is C or S
EVVMDRHKRLVVNNAADYYLISTASLRAPVXXSA

SEQ ID NO: 32743 - protein, 42 aa, Artificial Sequence
  Non-cyclic GFR-binding peptide
  MOD_RES (2)..(36)..(37): Xaa is C or S
  MOD_RES (14)..(15)..(16)..(17)..(18): Xaa is A or G
  MOD_RES (19)..(20)..(21)..(22): Xaa is A or G or absent
GXSEVVMDEYKFKXXXXXXXXXLYLISIPELRTPVXXTPPTS

SEQ ID NO: 32744 - protein, 41 aa, Artificial Sequence
  Non-cyclic GFR-binding peptide
  MOD_RES (2)..(4)..(38)..(39): Xaa is C or S
  MOD_RES (16)..(17)..(18)..(19)..(20): Xaa is A or G
  MOD_RES (21)..(22)..(23)..(24): Xaa is A or G or absent
RXAXSEVTMNPIKGYXXXXXXXXXFYLINIPSMKEPVXXPE

SEQ ID NO: 32745 - protein, 37 aa, Artificial Sequence
  Non-cyclic GFR-binding peptide
  MOD_RES (33)..(34): Xaa is C or S
  MOD_RES (11)..(12)..(13)..(14)..(15): Xaa is A or G
  MOD_RES (16)..(17)..(18)..(19): Xaa is A or G or absent
DVVMGRHKRLXXXXXXXXXYYLMSTASMKTPTXXPGA

SEQ ID NO: 32746 - protein, 33 aa, Artificial Sequence
  Non-cyclic GFR-binding peptide
  MOD_RES (31)..(32): Xaa is C or S
SKVVMPIKGYVKPTRGVFYLINIPSLDQPVXXP

SEQ ID NO: 32747 - protein, 40 aa, Artificial Sequence
  Non-cyclic GFR-binding peptide
  MOD_RES (2)..(4)..(38)..(39): Xaa is C or S
  MOD_RES (16)..(17)..(18)..(19)..(20): Xaa is A or G
  MOD_RES (21)..(22)..(23)..(24): Xaa is A or G or absent
RXGXSEVVMDEYKFKXXXXXXXXXLYLISIPELRTPVXXT

SEQ ID NO: 32748 - protein, 35 aa, Artificial Sequence
  Non-cyclic GFR-binding peptide
  MOD_RES (1)..(35): Xaa is C or S
  MOD_RES (13)..(14)..(15)..(16)..(17): Xaa is A or G
  MOD_RES (18)..(19)..(20)..(21): Xaa is A or G or absent
XESVAMGRHKRLXXXXXXXXXYYLISTASLKTPVX

SEQ ID NO: 32749 - protein, 37 aa, Artificial Sequence
  Non-cyclic GFR-binding peptide
  MOD_RES (1)..(32)..(33): Xaa is C or S
XSRVIMPIKGYVKPKRGVFYLINIPSLAQPVXXPAAS

SEQ ID NO: 32750 - protein, 36 aa, Artificial Sequence
  Non-cyclic GFR-binding peptide
  MOD_RES (33)..(34): Xaa is C or S
  MOD_RES (11)..(12)..(13)..(14)..(15): Xaa is A or G
  MOD_RES (16)..(17)..(18)..(19): Xaa is A or G or absent
DVVMGEYKFKXXXXXXXXXLYLMSIPEMKTPTXXPG

SEQ ID NO: 32751 - protein, 39 aa, Artificial Sequence
  Non-cyclic GFR-binding peptide
  MOD_RES (2)..(34)..(35): Xaa is C or S
GXESVAMGRHKRLYTVVGKDYYLISTASLKTPVXXAKSA

SEQ ID NO: 32752 - protein, 38 aa, Artificial Sequence
  Non-cyclic GFR-binding peptide
  MOD_RES (2)..(34)..(35): Xaa is C or S
GXSEVVMDYHYKLVVNNASDKYLISIPSLRTPVXXTPP

SEQ ID NO: 32753 - protein, 34 aa, Artificial Sequence
  Non-cyclic GFR-binding peptide
  MOD_RES (2)..(33)..(34): Xaa is C or S
GXEEVIMRHKRLLLVRGNDYYLMSTASTKVPAXX

SEQ ID NO: 32754 - protein, 36 aa, Artificial Sequence
  Non-cyclic GFR-binding peptide
  MOD_RES (1)..(3)..(35)..(36): Xaa is C or S
XAXSEVTMNRHKRLVVNKNEDYYLISTASMKEPVXX

SEQ ID NO: 32755 - protein, 35 aa, Artificial Sequence
  Non-cyclic GFR-binding peptide
  MOD_RES (31)..(32): Xaa is C or S
EVVMDRHKRLVVNNASDYYLISTASLRTPVXXTPP

SEQ ID NO: 32756 - protein, 35 aa, Artificial Sequence
  Non-cyclic GFR-binding peptide
  MOD_RES (1)..(35): Xaa is C or S
  MOD_RES (13)..(14)..(15)..(16)..(17): Xaa is A or G
  MOD_RES (18)..(19)..(20)..(21): Xaa is A or G or absent
XSEVVMDRHKRLXXXXXXXXXYYLISTASLRTPVX

SEQ ID NO: 32757 - protein, 42 aa, Artificial Sequence
  Non-cyclic GFR-binding peptide
  MOD_RES (2)..(36)..(37): Xaa is C or S
  MOD_RES (14)..(15)..(16)..(17)..(18): Xaa is A or G
  MOD_RES (19)..(20)..(21)..(22): Xaa is A or G or absent
GXSEVVMDYHYKLXXXXXXXXXKYLISIPSLRTPVXXTPPTS

SEQ ID NO: 32758 - protein, 37 aa, Artificial Sequence
  Non-cyclic GFR-binding peptide
  MOD_RES (1)..(3)..(36)..(37): Xaa is C or S
  MOD_RES (14)..(15)..(16)..(17)..(18): Xaa is A or G
  MOD_RES (19)..(20)..(21)..(22): Xaa is A or G or absent
XGXEEVIMEYKFKXXXXXXXXXLYLMSIPETKVPAXX

SEQ ID NO: 32759 - protein, 33 aa, Artificial Sequence
  Non-cyclic GFR-binding peptide
  MOD_RES (2)..(33): Xaa is C or S
GXEEVIMRHKRLLLVRGNDYYLMSTASTKVPAX

SEQ ID NO: 32760 - protein, 37 aa, Artificial Sequence
  Non-cyclic GFR-binding peptide
  MOD_RES (2)..(33)..(34): Xaa is C or S
GXEEVIMRHKRLLLVRGNDYYLMSTASTKVPAXXTSP

SEQ ID NO: 32761 - protein, 35 aa, Artificial Sequence
  Non-cyclic GFR-binding peptide
  MOD_RES (1)..(33)..(34): Xaa is C or S
XSEVTMNEYKFKVVNKNEDLYLISIPEMKEPVXXP

SEQ ID NO: 32762 - protein, 39 aa, Artificial Sequence
  Non-cyclic GFR-binding peptide
  MOD_RES (1)..(35)..(36): Xaa is C or S
  MOD_RES (13)..(14)..(15)..(16)..(17): Xaa is A or G
  MOD_RES (18)..(19)..(20)..(21): Xaa is A or G or absent
XSEVVMDEYKFKXXXXXXXXXLYLISIPELRTPVXXTPP

SEQ ID NO: 32763 - protein, 40 aa, Artificial Sequence
  Non-cyclic GFR-binding peptide
  MOD_RES (2)..(4)..(37)..(38): Xaa is C or S
  MOD_RES (15)..(16)..(17)..(18)..(19): Xaa is A or G
  MOD_RES (20)..(21)..(22)..(23): Xaa is A or G or absent
LXGXEEVIMEYKFKXXXXXXXXXLYLMSIPETKVPAXXTS

SEQ ID NO: 32764 - protein, 37 aa, Artificial Sequence
  Non-cyclic GFR-binding peptide
  MOD_RES (1)..(35)..(36): Xaa is C or S
  MOD_RES (13)..(14)..(15)..(16)..(17): Xaa is A or G
  MOD_RES (18)..(19)..(20)..(21): Xaa is A or G or absent
XSEVTMNYHYKLXXXXXXXXXKYLISIPSMKEPVXXP

SEQ ID NO: 32765 - protein, 37 aa, Artificial Sequence
  Non-cyclic GFR-binding peptide
  MOD_RES (1)..(32)..(33): Xaa is C or S
XSKVIMPIKGYIKPTKGIFYLINIPSLDQSVXXPSAS

SEQ ID NO: 32766 - protein, 33 aa, Artificial Sequence
  Non-cyclic GFR-binding peptide
  MOD_RES (31)..(32): Xaa is C or S
EVVMDEYKFKVVNNASDLYLISIPELRTPVXXT

SEQ ID NO: 32767 - protein, 40 aa, Artificial Sequence
  Non-cyclic GFR-binding peptide
  MOD_RES (1)..(3)..(34)..(35): Xaa is C or S
XGXEEVIMYHYKLLLVRGNDKYLMSIPSTKVPAXXTSPVR

SEQ ID NO: 32768 - protein, 38 aa, Artificial Sequence
  Non-cyclic GFR-binding peptide
  MOD_RES (1)..(3)..(37)..(38): Xaa is C or S
  MOD_RES (15)..(16)..(17)..(18)..(19): Xaa is A or G
  MOD_RES (20)..(21)..(22)..(23): Xaa is A or G or absent
XGXRDVVMGYHYKLXXXXXXXXXKYLMSIPSMKTPTXX

SEQ ID NO: 32769 - protein, 33 aa, Artificial Sequence
  Non-cyclic GFR-binding peptide
  MOD_RES (33)..(33): Xaa is C or S
  MOD_RES (11)..(12)..(13)..(14)..(15): Xaa is A or G
  MOD_RES (16)..(17)..(18)..(19): Xaa is A or G or absent
DVVMGYHYKLXXXXXXXXXKYLMSIPSMKTPTX

SEQ ID NO: 32770 - protein, 37 aa, Artificial Sequence
  Non-cyclic GFR-binding peptide
  MOD_RES (33)..(34): Xaa is C or S
  MOD_RES (11)..(12)..(13)..(14)..(15): Xaa is A or G
  MOD_RES (16)..(17)..(18)..(19): Xaa is A or G or absent
EVTMNRYKKLXXXXXXXXXFYLISIANMKEPVXXPEP

SEQ ID NO: 32771 - protein, 38 aa, Artificial Sequence
  Non-cyclic GFR-binding peptide
  MOD_RES (1)..(35)..(36): Xaa is C or S
  MOD_RES (13)..(14)..(15)..(16)..(17): Xaa is A or G
  MOD_RES (18)..(19)..(20)..(21): Xaa is A or G or absent
XSEVTMNYHYKLXXXXXXXXXKYLISIPSMKEPVXXPE

SEQ ID NO: 32772 - protein, 36 aa, Artificial Sequence
  Non-cyclic GFR-binding peptide
  MOD_RES (1)..(35)..(36): Xaa is C or S
  MOD_RES (13)..(14)..(15)..(16)..(17): Xaa is A or G
  MOD_RES (18)..(19)..(20)..(21): Xaa is A or G or absent
XRDVVMGYHYKLXXXXXXXXXKYLMSIPSMKTPTXX

SEQ ID NO: 32773 - protein, 34 aa, Artificial Sequence
  Non-cyclic GFR-binding peptide
  MOD_RES (1)..(1): Xaa is C or S
  MOD_RES (13)..(14)..(15)..(16)..(17): Xaa is A or G
  MOD_RES (18)..(19)..(20)..(21): Xaa is A or G or absent
XSEVVMDRHKRLXXXXXXXXXYYLISTASLRTPV

SEQ ID NO: 32774 - protein, 34 aa, Artificial Sequence
  Non-cyclic GFR-binding peptide
  MOD_RES (1)..(32)..(33): Xaa is C or S
XEEVIMEYKFKLLVRGNDLYLMSIPETKVPAXXT

SEQ ID NO: 32775 - protein, 38 aa, Artificial Sequence
  Non-cyclic GFR-binding peptide
  MOD_RES (1)..(32)..(33): Xaa is C or S
XEEVIMRHKRLLLVRGNDYYLMSTASTKVPAXXTSPVR

SEQ ID NO: 32776 - protein, 40 aa, Artificial Sequence
  Non-cyclic GFR-binding peptide
  MOD_RES (2)..(4)..(36)..(37): Xaa is C or S
RXAXSEVTMNRHKRLVVNKNEDYYLISTASMKEPVXXPEP

SEQ ID NO: 32777 - protein, 40 aa, Artificial Sequence
  Non-cyclic GFR-binding peptide
  MOD_RES (2)..(4)..(38)..(39): Xaa is C or S
  MOD_RES (16)..(17)..(18)..(19)..(20): Xaa is A or G
  MOD_RES (21)..(22)..(23)..(24): Xaa is A or G or absent
RXGXAEVVMDRHKRLXXXXXXXXXYYLISTASLRAPVXXS

SEQ ID NO: 32778 - protein, 39 aa, Artificial Sequence
  Non-cyclic GFR-binding peptide
  MOD_RES (1)..(34)..(35): Xaa is C or S
  MOD_RES (12)..(13)..(14)..(15)..(16): Xaa is A or G
  MOD_RES (17)..(18)..(19)..(20): Xaa is A or G or absent
XEEVIMYHYKLXXXXXXXXXKYLMSIPSTKVPAXXTSPV

SEQ ID NO: 32779 - protein, 38 aa, Artificial Sequence
  Non-cyclic GFR-binding peptide
  MOD_RES (1)..(3)..(35)..(36): Xaa is C or S
XGXAEVVMDRHKRLVVNNAADYYLISTASLRAPVXXSA

SEQ ID NO: 32780 - protein, 42 aa, Artificial Sequence
  Non-cyclic GFR-binding peptide
  MOD_RES (2)..(4)..(36)..(37): Xaa is C or S
SXGXRDVVMGEYKFKIIQQKDNLYLMSIPEMKTPTXXPGASG

SEQ ID NO: 32781 - protein, 34 aa, Artificial Sequence
  Non-cyclic GFR-binding peptide
  MOD_RES (2)..(34): Xaa is C or S
AXSEVTMNRYKKLVVNKNEDFYLISIANMKEPVX

SEQ ID NO: 32782 - protein, 37 aa, Artificial Sequence
  Non-cyclic GFR-binding peptide
  MOD_RES (33)..(34): Xaa is C or S
  MOD_RES (11)..(12)..(13)..(14)..(15): Xaa is A or G
  MOD_RES (16)..(17)..(18)..(19): Xaa is A or G or absent
SKVIMPIKGYXXXXXXXXXFYLINIPSLDQSVXXPSA

SEQ ID NO: 32783 - protein, 44 aa, Artificial Sequence
  Non-cyclic GFR-binding peptide
  MOD_RES (2)..(4)..(38)..(39): Xaa is C or S
  MOD_RES (16)..(17)..(18)..(19)..(20): Xaa is A or G
  MOD_RES (21)..(22)..(23)..(24): Xaa is A or G or absent
SXGXRDVVMGYHYKLXXXXXXXXXKYLMSIPSMKTPTXXPGASG

SEQ ID NO: 32784 - protein, 38 aa, Artificial Sequence
  Non-cyclic GFR-binding peptide
  MOD_RES (2)..(4)..(35)..(36): Xaa is C or S
LXGXEEVIMRHKRLLLVRGNDYYLMSTASTKVPAXXTS

SEQ ID NO: 32785 - protein, 36 aa, Artificial Sequence
  Non-cyclic GFR-binding peptide
  MOD_RES (31)..(32): Xaa is C or S
DVVMGYHYKLIIQQKDNKYLMSIPSMKTPTXXPGAS

SEQ ID NO: 32786 - protein, 37 aa, Artificial Sequence
  Non-cyclic GFR-binding peptide
  MOD_RES (1)..(3)..(37): Xaa is C or S
  MOD_RES (15)..(16)..(17)..(18)..(19): Xaa is A or G
  MOD_RES (20)..(21)..(22)..(23): Xaa is A or G or absent
XGXSEVVMDRHKRLXXXXXXXXXYYLISTASLRTPVX

SEQ ID NO: 32787 - protein, 43 aa, Artificial Sequence
  Non-cyclic GFR-binding peptide
  MOD_RES (1)..(3)..(37)..(38): Xaa is C or S
  MOD_RES (15)..(16)..(17)..(18)..(19): Xaa is A or G
  MOD_RES (20)..(21)..(22)..(23): Xaa is A or G or absent
XGXSRVVMNYHYKLXXXXXXXXXKYLVSIPSLKTPAXXPKPVH

SEQ ID NO: 32788 - protein, 41 aa, Artificial Sequence
  Non-cyclic GFR-binding peptide
  MOD_RES (1)..(35)..(36): Xaa is C or S
  MOD_RES (13)..(14)..(15)..(16)..(17): Xaa is A or G
  MOD_RES (18)..(19)..(20)..(21): Xaa is A or G or absent
XRDVVMGEYKFKXXXXXXXXXLYLMSIPEMKTPTXXPGASG

SEQ ID NO: 32789 - protein, 39 aa, Artificial Sequence
  Non-cyclic GFR-binding peptide
  MOD_RES (1)..(34)..(35): Xaa is C or S
  MOD_RES (12)..(13)..(14)..(15)..(16): Xaa is A or G
  MOD_RES (17)..(18)..(19)..(20): Xaa is A or G or absent
XEEVIMEYKFKXXXXXXXXXLYLMSIPETKVPAXXTSPV

SEQ ID NO: 32790 - protein, 33 aa, Artificial Sequence
  Non-cyclic GFR-binding peptide
  MOD_RES (33)..(33): Xaa is C or S
  MOD_RES (11)..(12)..(13)..(14)..(15): Xaa is A or G
  MOD_RES (16)..(17)..(18)..(19): Xaa is A or G or absent
SVAMGRHKRLXXXXXXXXXYYLISTASLKTPVX

SEQ ID NO: 32791 - protein, 34 aa, Artificial Sequence
  Non-cyclic GFR-binding peptide
  MOD_RES (2)..(34): Xaa is C or S
AXSEVTMNEYKFKVVNKNEDLYLISIPEMKEPVX

SEQ ID NO: 32792 - protein, 34 aa, Artificial Sequence
  Non-cyclic GFR-binding peptide
  MOD_RES (33)..(34): Xaa is C or S
  MOD_RES (11)..(12)..(13)..(14)..(15): Xaa is A or G
  MOD_RES (16)..(17)..(18)..(19): Xaa is A or G or absent
SKVIMPIKGYXXXXXXXXXFYLINIPSLDQSVXX

SEQ ID NO: 32793 - protein, 39 aa, Artificial Sequence
  Non-cyclic GFR-binding peptide
  MOD_RES (1)..(34)..(35): Xaa is C or S
  MOD_RES (12)..(13)..(14)..(15)..(16): Xaa is A or G
  MOD_RES (17)..(18)..(19)..(20): Xaa is A or G or absent
XSKVIMPIKGYXXXXXXXXXFYLINIPSLDQSVXXPSAS

SEQ ID NO: 32794 - protein, 38 aa, Artificial Sequence
  Non-cyclic GFR-binding peptide
  MOD_RES (2)..(4)..(36)..(37): Xaa is C or S
RXAXSEVTMNRHKRLVVNKNEDYYLISTASMKEPVXXP

SEQ ID NO: 32795 - protein, 38 aa, Artificial Sequence
  Non-cyclic GFR-binding peptide
  MOD_RES (1)..(35)..(36): Xaa is C or S
  MOD_RES (13)..(14)..(15)..(16)..(17): Xaa is A or G
  MOD_RES (18)..(19)..(20)..(21): Xaa is A or G or absent
XSEVTMNRYKKLXXXXXXXXXFYLISIANMKEPVXXPE

SEQ ID NO: 32796 - protein, 40 aa, Artificial Sequence
  Non-cyclic GFR-binding peptide
  MOD_RES (1)..(35)..(36): Xaa is C or S
  MOD_RES (13)..(14)..(15)..(16)..(17): Xaa is A or G
  MOD_RES (18)..(19)..(20)..(21): Xaa is A or G or absent
XSEVTMNRYKKLXXXXXXXXXFYLISIANMKEPVXXPEPI

SEQ ID NO: 32797 - protein, 35 aa, Artificial Sequence
  Non-cyclic GFR-binding peptide
  MOD_RES (2)..(4)..(35): Xaa is C or S
SXKXSKVIMPIKGYIKPTKGIFYLINIPSLDQSVX

SEQ ID NO: 32798 - protein, 42 aa, Artificial Sequence
  Non-cyclic GFR-binding peptide
  MOD_RES (2)..(4)..(37)..(38): Xaa is C or S
  MOD_RES (15)..(16)..(17)..(18)..(19): Xaa is A or G
  MOD_RES (20)..(21)..(22)..(23): Xaa is A or G or absent
LXGXEEVIMYHYKLXXXXXXXXXKYLMSIPSTKVPAXXTSPV

SEQ ID NO: 32799 - protein, 37 aa, Artificial Sequence
  Non-cyclic GFR-binding peptide
  MOD_RES (1)..(3)..(35)..(36): Xaa is C or S
XAXSEVTMNRHKRLVVNKNEDYYLISTASMKEPVXXP

SEQ ID NO: 32800 - protein, 33 aa, Artificial Sequence
  Non-cyclic GFR-binding peptide
  MOD_RES (2)..(2): Xaa is C or S
GXSEVVMDYHYKLVVNNASDKYLISIPSLRTPV

SEQ ID NO: 32801 - protein, 37 aa, Artificial Sequence
  Non-cyclic GFR-binding peptide
  MOD_RES (2)..(4)..(36)..(37): Xaa is C or S
RXGXESVAMGRHKRLYTVVGKDYYLISTASLKTPVXX

SEQ ID NO: 32802 - protein, 35 aa, Artificial Sequence
  Non-cyclic GFR-binding peptide
  MOD_RES (1)..(3)..(35): Xaa is C or S
XAXSEVTMNRYKKLVVNKNEDFYLISIANMKEPVX

SEQ ID NO: 32803 - protein, 38 aa, Artificial Sequence
  Non-cyclic GFR-binding peptide
  MOD_RES (2)..(4)..(38): Xaa is C or S
  MOD_RES (16)..(17)..(18)..(19)..(20): Xaa is A or G
  MOD_RES (21)..(22)..(23)..(24): Xaa is A or G or absent
SXGXRDVVMGRHKRLXXXXXXXXXYYLMSTASMKTPTX

SEQ ID NO: 32804 - protein, 39 aa, Artificial Sequence
  Non-cyclic GFR-binding peptide
  MOD_RES (1)..(33)..(34): Xaa is C or S
XSRVVMNYHYKLIVNSSDDKYLVSIPSLKTPAXXPKPVH

SEQ ID NO: 32805 - protein, 39 aa, Artificial Sequence
  Non-cyclic GFR-binding peptide
  MOD_RES (1)..(3)..(34)..(35): Xaa is C or S
XKXSKVIMPIKGYIKPTKGIFYLINIPSLDQSVXXPSAS

SEQ ID NO: 32806 - protein, 34 aa, Artificial Sequence
  Non-cyclic GFR-binding peptide
  MOD_RES (1)..(3): Xaa is C or S
XGXESVAMGRHKRLYTVVGKDYYLISTASLKTPV

SEQ ID NO: 32807 - protein, 38 aa, Artificial Sequence
  Non-cyclic GFR-binding peptide
  MOD_RES (32)..(33): Xaa is C or S
SEVTMNEYKFKVVNKNEDLYLISIPEMKEPVXXPEPIG

SEQ ID NO: 32808 - protein, 36 aa, Artificial Sequence
  Non-cyclic GFR-binding peptide
  MOD_RES (2)..(34)..(35): Xaa is C or S
GXESVAMGRHKRLYTVVGKDYYLISTASLKTPVXXA

SEQ ID NO: 32809 - protein, 36 aa, Artificial Sequence
  Non-cyclic GFR-binding peptide
  MOD_RES (1)..(3)..(34)..(35): Xaa is C or S
XKXSKVIMPIKGYIKPTKGIFYLINIPSLDQSVXXP

SEQ ID NO: 32810 - protein, 35 aa, Artificial Sequence
  Non-cyclic GFR-binding peptide
  MOD_RES (33)..(34): Xaa is C or S
  MOD_RES (11)..(12)..(13)..(14)..(15): Xaa is A or G
  MOD_RES (16)..(17)..(18)..(19): Xaa is A or G or absent
SRVIMPIKGYXXXXXXXXXFYLINIPSLAQPVXXP

SEQ ID NO: 32811 - protein, 39 aa, Artificial Sequence
  Non-cyclic GFR-binding peptide
  MOD_RES (1)..(3)..(37)..(38): Xaa is C or S
  MOD_RES (15)..(16)..(17)..(18)..(19): Xaa is A or G
  MOD_RES (20)..(21)..(22)..(23): Xaa is A or G or absent
XAXSEVTMNRHKRLXXXXXXXXXYYLISTASMKEPVXXP

SEQ ID NO: 32812 - protein, 31 aa, Artificial Sequence
  Non-cyclic GFR-binding peptide
SEVTMNRYKKLVVNKNEDFYLISIANMKEPV

SEQ ID NO: 32813 - protein, 36 aa, Artificial Sequence
  Non-cyclic GFR-binding peptide
  MOD_RES (2)..(34)..(35): Xaa is C or S
GXAEVVMDRHKRLVVNNAADYYLISTASLRAPVXXS

SEQ ID NO: 32814 - protein, 36 aa, Artificial Sequence
  Non-cyclic GFR-binding peptide
  MOD_RES (2)..(34)..(35): Xaa is C or S
AXSEVTMNRYKKLVVNKNEDFYLISIANMKEPVXXP

SEQ ID NO: 32815 - protein, 33 aa, Artificial Sequence
  Non-cyclic GFR-binding peptide
  MOD_RES (32)..(33): Xaa is C or S
SEVTMNYHYKLVVNKNEDKYLISIPSMKEPVXX

SEQ ID NO: 32816 - protein, 34 aa, Artificial Sequence
  Non-cyclic GFR-binding peptide
  MOD_RES (2)..(33)..(34): Xaa is C or S
GXEEVIMEYKFKLLVRGNDLYLMSIPETKVPAXX

SEQ ID NO: 32817 - protein, 35 aa, Artificial Sequence
  Non-cyclic GFR-binding peptide
  MOD_RES (33)..(34): Xaa is C or S
  MOD_RES (11)..(12)..(13)..(14)..(15): Xaa is A or G
  MOD_RES (16)..(17)..(18)..(19): Xaa is A or G or absent
EVVMDRHKRLXXXXXXXXXYYLISTASLRTPVXXT

SEQ ID NO: 32818 - protein, 36 aa, Artificial Sequence
  Non-cyclic GFR-binding peptide
  MOD_RES (32)..(33): Xaa is C or S
SEVTMNPIKGYVVNKNEDFYLINIPSMKEPVXXPEP

SEQ ID NO: 32819 - protein, 35 aa, Artificial Sequence
  Non-cyclic GFR-binding peptide
  MOD_RES (2)..(4): Xaa is C or S
RXAXSEVTMNRHKRLVVNKNEDYYLISTASMKEPV

SEQ ID NO: 32820 - protein, 40 aa, Artificial Sequence
  Non-cyclic GFR-binding peptide
  MOD_RES (1)..(3)..(34)..(35): Xaa is C or S
XKXSKVVMPIKGYVKPTRGVFYLINIPSLDQPVXXPSASA

SEQ ID NO: 32821 - protein, 36 aa, Artificial Sequence
  Non-cyclic GFR-binding peptide
  MOD_RES (32)..(33): Xaa is C or S
SEVTMNYHYKLVVNKNEDKYLISIPSMKEPVXXPEP

SEQ ID NO: 32822 - protein, 34 aa, Artificial Sequence
  Non-cyclic GFR-binding peptide
  MOD_RES (2)..(4): Xaa is C or S
SXKXSKVVMPIKGYVKPTRGVFYLINIPSLDQPV

SEQ ID NO: 32823 - protein, 42 aa, Artificial Sequence
  Non-cyclic GFR-binding peptide
  MOD_RES (2)..(4)..(36)..(37): Xaa is C or S
RXAXSEVTMNRHKRLVVNKNEDYYLISTASMKEPVXXPEPIG

SEQ ID NO: 32824 - protein, 30 aa, Artificial Sequence
  Non-cyclic GFR-binding peptide
SVAMGRHKRLYTVVGKDYYLISTASLKTPV

SEQ ID NO: 32825 - protein, 38 aa, Artificial Sequence
  Non-cyclic GFR-binding peptide
  MOD_RES (2)..(4)..(38): Xaa is C or S
  MOD_RES (16)..(17)..(18)..(19)..(20): Xaa is A or G
  MOD_RES (21)..(22)..(23)..(24): Xaa is A or G or absent
SXGXRDVVMGEYKFKXXXXXXXXXLYLMSIPEMKTPTX

SEQ ID NO: 32826 - protein, 35 aa, Artificial Sequence
  Non-cyclic GFR-binding peptide
  MOD_RES (2)..(2): Xaa is C or S
  MOD_RES (14)..(15)..(16)..(17)..(18): Xaa is A or G
  MOD_RES (19)..(20)..(21)..(22): Xaa is A or G or absent
GXSEVVMDYHYKLXXXXXXXXXKYLISIPSLRTPV

SEQ ID NO: 32827 - protein, 34 aa, Artificial Sequence
  Non-cyclic GFR-binding peptide
  MOD_RES (31)..(32): Xaa is C or S
SRVIMPIKGYVKPKRGVFYLINIPSLAQPVXXPA

SEQ ID NO: 32828 - protein, 35 aa, Artificial Sequence
  Non-cyclic GFR-binding peptide
  MOD_RES (32)..(33): Xaa is C or S
SEVTMNYHYKLVVNKNEDKYLISIPSMKEPVXXPE

SEQ ID NO: 32829 - protein, 34 aa, Artificial Sequence
  Non-cyclic GFR-binding peptide
  MOD_RES (32)..(33): Xaa is C or S
SEVTMNRYKKLVVNKNEDFYLISIANMKEPVXXP

SEQ ID NO: 32830 - protein, 36 aa, Artificial Sequence
  Non-cyclic GFR-binding peptide
  MOD_RES (1)..(3)..(34)..(35): Xaa is C or S
XKXSKVVMPIKGYVKPTRGVFYLINIPSLDQPVXXP

SEQ ID NO: 32831 - protein, 36 aa, Artificial Sequence
  Non-cyclic GFR-binding peptide
  MOD_RES (1)..(3)..(34)..(35): Xaa is C or S
XGXEEVIMEYKFKLLVRGNDLYLMSIPETKVPAXXT

SEQ ID NO: 32832 - protein, 41 aa, Artificial Sequence
  Non-cyclic GFR-binding peptide
  MOD_RES (2)..(4)..(37)..(38): Xaa is C or S
  MOD_RES (15)..(16)..(17)..(18)..(19): Xaa is A or G
  MOD_RES (20)..(21)..(22)..(23): Xaa is A or G or absent
LXGXEEVIMYHYKLXXXXXXXXXKYLMSIPSTKVPAXXTSP

SEQ ID NO: 32833 - protein, 35 aa, Artificial Sequence
  Non-cyclic GFR-binding peptide
  MOD_RES (2)..(4)..(35): Xaa is C or S
LXGXEEVIMYHYKLLLVRGNDKYLMSIPSTKVPAX

SEQ ID NO: 32834 - protein, 32 aa, Artificial Sequence
  Non-cyclic GFR-binding peptide
  MOD_RES (11)..(12)..(13)..(14)..(15): Xaa is A or G
  MOD_RES (16)..(17)..(18)..(19): Xaa is A or G or absent
SVAMGRHKRLXXXXXXXXXYYLISTASLKTPV

SEQ ID NO: 32835 - protein, 34 aa, Artificial Sequence
  Non-cyclic GFR-binding peptide
  MOD_RES (1)..(33)..(34): Xaa is C or S
XSEVTMNRHKRLVVNKNEDYYLISTASMKEPVXX

SEQ ID NO: 32836 - protein, 31 aa, Artificial Sequence
  Non-cyclic GFR-binding peptide
  MOD_RES (1)..(1): Xaa is C or S
XEEVIMYHYKLLLVRGNDKYLMSIPSTKVPA

SEQ ID NO: 32837 - protein, 43 aa, Artificial Sequence
  Non-cyclic GFR-binding peptide
  MOD_RES (1)..(3)..(37)..(38): Xaa is C or S
  MOD_RES (15)..(16)..(17)..(18)..(19): Xaa is A or G
  MOD_RES (20)..(21)..(22)..(23): Xaa is A or G or absent
XAXSEVTMNRHKRLXXXXXXXXXYYLISTASMKEPVXXPEPIG

SEQ ID NO: 32838 - protein, 38 aa, Artificial Sequence
  Non-cyclic GFR-binding peptide
  MOD_RES (2)..(35)..(36): Xaa is C or S
  MOD_RES (13)..(14)..(15)..(16)..(17): Xaa is A or G
  MOD_RES (18)..(19)..(20)..(21): Xaa is A or G or absent
KXSKVVMPIKGYXXXXXXXXXFYLINIPSLDQPVXXPS

SEQ ID NO: 32839 - protein, 40 aa, Artificial Sequence
  Non-cyclic GFR-binding peptide
  MOD_RES (34)..(35): Xaa is C or S
  MOD_RES (12)..(13)..(14)..(15)..(16): Xaa is A or G
  MOD_RES (17)..(18)..(19)..(20): Xaa is A or G or absent
RDVVMGRHKRLXXXXXXXXXYYLMSTASMKTPTXXPGASG

SEQ ID NO: 32840 - protein, 39 aa, Artificial Sequence
  Non-cyclic GFR-binding peptide
  MOD_RES (33)..(34): Xaa is C or S
  MOD_RES (11)..(12)..(13)..(14)..(15): Xaa is A or G
  MOD_RES (16)..(17)..(18)..(19): Xaa is A or G or absent
EEVIMEYKFKXXXXXXXXXLYLMSIPETKVPAXXTSPVR

SEQ ID NO: 32841 - protein, 38 aa, Artificial Sequence
  Non-cyclic GFR-binding peptide
  MOD_RES (1)..(3)..(35)..(36): Xaa is C or S
XAXSEVTMNRYKKLVVNKNEDFYLISIANMKEPVXXPE

SEQ ID NO: 32842 - protein, 35 aa, Artificial Sequence
  Non-cyclic GFR-binding peptide
  MOD_RES (1)..(34)..(35): Xaa is C or S
  MOD_RES (12)..(13)..(14)..(15)..(16): Xaa is A or G
  MOD_RES (17)..(18)..(19)..(20): Xaa is A or G or absent
XSRVIMPIKGYXXXXXXXXXFYLINIPSLAQPVXX

SEQ ID NO: 32843 - protein, 40 aa, Artificial Sequence
  Non-cyclic GFR-binding peptide
  MOD_RES (34)..(35): Xaa is C or S
  MOD_RES (12)..(13)..(14)..(15)..(16): Xaa is A or G
  MOD_RES (17)..(18)..(19)..(20): Xaa is A or G or absent
SEVTMNRYKKLXXXXXXXXXFYLISIANMKEPVXXPEPIG

SEQ ID NO: 32844 - protein, 37 aa, Artificial Sequence
  Non-cyclic GFR-binding peptide
  MOD_RES (1)..(34)..(35): Xaa is C or S
  MOD_RES (12)..(13)..(14)..(15)..(16): Xaa is A or G
  MOD_RES (17)..(18)..(19)..(20): Xaa is A or G or absent
XSKVIMPIKGYXXXXXXXXXFYLINIPSLDQSVXXPS

SEQ ID NO: 32845 - protein, 36 aa, Artificial Sequence
  Non-cyclic GFR-binding peptide
  MOD_RES (2)..(4)..(36): Xaa is C or S
RXAXSEVTMNRYKKLVVNKNEDFYLISIANMKEPVX

SEQ ID NO: 32846 - protein, 32 aa, Artificial Sequence
  Non-cyclic GFR-binding peptide
  MOD_RES (32)..(32): Xaa is C or S
RDVVMGYHYKLIIQQKDNKYLMSIPSMKTPTX

SEQ ID NO: 32847 - protein, 32 aa, Artificial Sequence
  Non-cyclic GFR-binding peptide
  MOD_RES (32)..(32): Xaa is C or S
SEVTMNYHYKLVVNKNEDKYLISIPSMKEPVX

SEQ ID NO: 32848 - protein, 37 aa, Artificial Sequence
  Non-cyclic GFR-binding peptide
  MOD_RES (31)..(32): Xaa is C or S
EVTMNRHKRLVVNKNEDYYLISTASMKEPVXXPEPIG

SEQ ID NO: 32849 - protein, 35 aa, Artificial Sequence
  Non-cyclic GFR-binding peptide
  MOD_RES (1)..(3)..(35): Xaa is C or S
XGXRDVVMGYHYKLIIQQKDNKYLMSIPSMKTPTX

SEQ ID NO: 32850 - protein, 39 aa, Artificial Sequence
  Non-cyclic GFR-binding peptide
  MOD_RES (1)..(3)..(35)..(36): Xaa is C or S
XAXSEVTMNRYKKLVVNKNEDFYLISIANMKEPVXXPEP

SEQ ID NO: 32851 - protein, 34 aa, Artificial Sequence
  Non-cyclic GFR-binding peptide
  MOD_RES (1)..(33)..(34): Xaa is C or S
XSEVTMNEYKFKVVNKNEDLYLISIPEMKEPVXX

SEQ ID NO: 32852 - protein, 33 aa, Artificial Sequence
  Non-cyclic GFR-binding peptide
  MOD_RES (31)..(32): Xaa is C or S
DVVMGEYKFKIIQQKDNLYLMSIPEMKTPTXXP

SEQ ID NO: 32853 - protein, 36 aa, Artificial Sequence
  Non-cyclic GFR-binding peptide
  MOD_RES (33)..(34): Xaa is C or S
  MOD_RES (11)..(12)..(13)..(14)..(15): Xaa is A or G
  MOD_RES (16)..(17)..(18)..(19): Xaa is A or G or absent
EVTMNPIKGYXXXXXXXXXFYLINIPSMKEPVXXPE

SEQ ID NO: 32854 - protein, 39 aa, Artificial Sequence
  Non-cyclic GFR-binding peptide
  MOD_RES (2)..(4)..(38)..(39): Xaa is C or S
  MOD_RES (16)..(17)..(18)..(19)..(20): Xaa is A or G
  MOD_RES (21)..(22)..(23)..(24): Xaa is A or G or absent
RXAXSEVTMNYHYKLXXXXXXXXXKYLISIPSMKEPVXX

SEQ ID NO: 32855 - protein, 35 aa, Artificial Sequence
  Non-cyclic GFR-binding peptide
  MOD_RES (2)..(35): Xaa is C or S
  MOD_RES (13)..(14)..(15)..(16)..(17): Xaa is A or G
  MOD_RES (18)..(19)..(20)..(21): Xaa is A or G or absent
KXSRVIMPIKGYXXXXXXXXXFYLINIPSLAQPVX

SEQ ID NO: 32856 - protein, 37 aa, Artificial Sequence
  Non-cyclic GFR-binding peptide
  MOD_RES (1)..(3)..(37): Xaa is C or S
  MOD_RES (15)..(16)..(17)..(18)..(19): Xaa is A or G
  MOD_RES (20)..(21)..(22)..(23): Xaa is A or G or absent
XGXRDVVMGRHKRLXXXXXXXXXYYLMSTASMKTPTX

SEQ ID NO: 32857 - protein, 40 aa, Artificial Sequence
  Non-cyclic GFR-binding peptide
  MOD_RES (1)..(3)..(35)..(36): Xaa is C or S
XGXRDVVMGRHKRLIIQQKDNYYLMSTASMKTPTXXPGAS

SEQ ID NO: 32858 - protein, 35 aa, Artificial Sequence
  Non-cyclic GFR-binding peptide
  MOD_RES (2)..(2): Xaa is C or S
  MOD_RES (14)..(15)..(16)..(17)..(18): Xaa is A or G
  MOD_RES (19)..(20)..(21)..(22): Xaa is A or G or absent
GXSEVVMDEYKFKXXXXXXXXXLYLISIPELRTPV

SEQ ID NO: 32859 - protein, 33 aa, Artificial Sequence
  Non-cyclic GFR-binding peptide
  MOD_RES (1)..(33): Xaa is C or S
XSEVTMNRHKRLVVNKNEDYYLISTASMKEPVX

SEQ ID NO: 32860 - protein, 33 aa, Artificial Sequence
  Non-cyclic GFR-binding peptide
  MOD_RES (1)..(33): Xaa is C or S
XSEVTMNEYKFKVVNKNEDLYLISIPEMKEPVX

SEQ ID NO: 32861 - protein, 36 aa, Artificial Sequence
  Non-cyclic GFR-binding peptide
  MOD_RES (1)..(35)..(36): Xaa is C or S
  MOD_RES (13)..(14)..(15)..(16)..(17): Xaa is A or G
  MOD_RES (18)..(19)..(20)..(21): Xaa is A or G or absent
XRDVVMGRHKRLXXXXXXXXXYYLMSTASMKTPTXX

SEQ ID NO: 32862 - protein, 35 aa, Artificial Sequence
  Non-cyclic GFR-binding peptide
  MOD_RES (1)..(3): Xaa is C or S
  MOD_RES (14)..(15)..(16)..(17)..(18): Xaa is A or G
  MOD_RES (19)..(20)..(21)..(22): Xaa is A or G or absent
XGXEEVIMYHYKLXXXXXXXXXKYLMSIPSTKVPA

SEQ ID NO: 32863 - protein, 36 aa, Artificial Sequence
  Non-cyclic GFR-binding peptide
  MOD_RES (31)..(32): Xaa is C or S
DVVMGRHKRLIIQQKDNYYLMSTASMKTPTXXPGAS

SEQ ID NO: 32864 - protein, 37 aa, Artificial Sequence
  Non-cyclic GFR-binding peptide
  MOD_RES (2)..(36)..(37): Xaa is C or S
  MOD_RES (14)..(15)..(16)..(17)..(18): Xaa is A or G
  MOD_RES (19)..(20)..(21)..(22): Xaa is A or G or absent
GXAEVVMDRHKRLXXXXXXXXXYYLISTASLRAPVXX

SEQ ID NO: 32865 - protein, 41 aa, Artificial Sequence
  Non-cyclic GFR-binding peptide
  MOD_RES (1)..(35)..(36): Xaa is C or S
  MOD_RES (13)..(14)..(15)..(16)..(17): Xaa is A or G
  MOD_RES (18)..(19)..(20)..(21): Xaa is A or G or absent
XSEVTMNPIKGYXXXXXXXXXFYLINIPSMKEPVXXPEPIG

SEQ ID NO: 32866 - protein, 33 aa, Artificial Sequence
  Non-cyclic GFR-binding peptide
  MOD_RES (33)..(33): Xaa is C or S
  MOD_RES (11)..(12)..(13)..(14)..(15): Xaa is A or G
  MOD_RES (16)..(17)..(18)..(19): Xaa is A or G or absent
EVVMDRHKRLXXXXXXXXXYYLISTASLRAPVX

SEQ ID NO: 32867 - protein, 39 aa, Artificial Sequence
  Non-cyclic GFR-binding peptide
  MOD_RES (2)..(4)..(38)..(39): Xaa is C or S
  MOD_RES (16)..(17)..(18)..(19)..(20): Xaa is A or G
  MOD_RES (21)..(22)..(23)..(24): Xaa is A or G or absent
RXGXSEVVMDYHYKLXXXXXXXXXKYLISIPSLRTPVXX

SEQ ID NO: 32868 - protein, 40 aa, Artificial Sequence
  Non-cyclic GFR-binding peptide
  MOD_RES (2)..(36)..(37): Xaa is C or S
  MOD_RES (14)..(15)..(16)..(17)..(18): Xaa is A or G
  MOD_RES (19)..(20)..(21)..(22): Xaa is A or G or absent
GXSEVVMDEYKFKXXXXXXXXXLYLISIPELRTPVXXTPP

SEQ ID NO: 32869 - protein, 37 aa, Artificial Sequence
  Non-cyclic GFR-binding peptide
  MOD_RES (32)..(33): Xaa is C or S
RDVVMGYHYKLIIQQKDNKYLMSIPSMKTPTXXPGAS

SEQ ID NO: 32870 - protein, 40 aa, Artificial Sequence
  Non-cyclic GFR-binding peptide
  MOD_RES (2)..(34)..(35): Xaa is C or S
GXSEVVMDEYKFKVVNNASDLYLISIPELRTPVXXTPPTS

SEQ ID NO: 32871 - protein, 34 aa, Artificial Sequence
  Non-cyclic GFR-binding peptide
  MOD_RES (1)..(3): Xaa is C or S
XGXAEVVMDRHKRLVVNNAADYYLISTASLRAPV

SEQ ID NO: 32872 - protein, 40 aa, Artificial Sequence
  Non-cyclic GFR-binding peptide
  MOD_RES (1)..(3)..(37)..(38): Xaa is C or S
  MOD_RES (15)..(16)..(17)..(18)..(19): Xaa is A or G
  MOD_RES (20)..(21)..(22)..(23): Xaa is A or G or absent
XAXSEVTMNPIKGYXXXXXXXXXFYLINIPSMKEPVXXPE

SEQ ID NO: 32873 - protein, 41 aa, Artificial Sequence
  Non-cyclic GFR-binding peptide
  MOD_RES (2)..(4)..(35)..(36): Xaa is C or S
LXGXEEVIMEYKFKLLVRGNDLYLMSIPETKVPAXXTSPVR

SEQ ID NO: 32874 - protein, 40 aa, Artificial Sequence
  Non-cyclic GFR-binding peptide
  MOD_RES (2)..(34)..(35): Xaa is C or S
GXSRVVMNRHKRLIVNSSDDYYLVSTASLKTPAXXPKPVH

SEQ ID NO: 32875 - protein, 42 aa, Artificial Sequence
  Non-cyclic GFR-binding peptide
  MOD_RES (1)..(3)..(37)..(38): Xaa is C or S
  MOD_RES (15)..(16)..(17)..(18)..(19): Xaa is A or G
  MOD_RES (20)..(21)..(22)..(23): Xaa is A or G or absent
XGXRDVVMGYHYKLXXXXXXXXXKYLMSIPSMKTPTXXPGAS

SEQ ID NO: 32876 - protein, 35 aa, Artificial Sequence
  Non-cyclic GFR-binding peptide
  MOD_RES (31)..(32): Xaa is C or S
EVVMDRHKRLVVNNAADYYLISTASLRAPVXXSAP

SEQ ID NO: 32877 - protein, 33 aa, Artificial Sequence
  Non-cyclic GFR-binding peptide
  MOD_RES (12)..(13)..(14)..(15)..(16): Xaa is A or G
  MOD_RES (17)..(18)..(19)..(20): Xaa is A or G or absent
RDVVMGEYKFKXXXXXXXXXLYLMSIPEMKTPT

SEQ ID NO: 32878 - protein, 38 aa, Artificial Sequence
  Non-cyclic GFR-binding peptide
  MOD_RES (1)..(3)..(34)..(35): Xaa is C or S
XKXSRVIMPIKGYVKPKRGVFYLINIPSLAQPVXXPAA

SEQ ID NO: 32879 - protein, 41 aa, Artificial Sequence
  Non-cyclic GFR-binding peptide
  MOD_RES (1)..(3)..(37)..(38): Xaa is C or S
  MOD_RES (15)..(16)..(17)..(18)..(19): Xaa is A or G
  MOD_RES (20)..(21)..(22)..(23): Xaa is A or G or absent
XAXSEVTMNRYKKLXXXXXXXXXFYLISIANMKEPVXXPEP

SEQ ID NO: 32880 - protein, 35 aa, Artificial Sequence
  Non-cyclic GFR-binding peptide
  MOD_RES (2)..(2): Xaa is C or S
  MOD_RES (14)..(15)..(16)..(17)..(18): Xaa is A or G
  MOD_RES (19)..(20)..(21)..(22): Xaa is A or G or absent
AXSEVTMNEYKFKXXXXXXXXXLYLISIPEMKEPV

SEQ ID NO: 32881 - protein, 40 aa, Artificial Sequence
  Non-cyclic GFR-binding peptide
  MOD_RES (2)..(34)..(35): Xaa is C or S
GXSEVVMDRHKRLVVNNASDYYLISTASLRTPVXXTPPTS

SEQ ID NO: 32882 - protein, 33 aa, Artificial Sequence
  Non-cyclic GFR-binding peptide
  MOD_RES (33)..(33): Xaa is C or S
  MOD_RES (11)..(12)..(13)..(14)..(15): Xaa is A or G
  MOD_RES (16)..(17)..(18)..(19): Xaa is A or G or absent
DVVMGEYKFKXXXXXXXXXLYLMSIPEMKTPTX

SEQ ID NO: 32883 - protein, 41 aa, Artificial Sequence
  Non-cyclic GFR-binding peptide
  MOD_RES (2)..(4)..(37)..(38): Xaa is C or S
  MOD_RES (15)..(16)..(17)..(18)..(19): Xaa is A or G
  MOD_RES (20)..(21)..(22)..(23): Xaa is A or G or absent
LXGXEEVIMRHKRLXXXXXXXXXYYLMSTASTKVPAXXTSP

SEQ ID NO: 32884 - protein, 34 aa, Artificial Sequence
  Non-cyclic GFR-binding peptide
  MOD_RES (1)..(3): Xaa is C or S
XAXSEVTMNPIKGYVVNKNEDFYLINIPSMKEPV

SEQ ID NO: 32885 - protein, 34 aa, Artificial Sequence
  Non-cyclic GFR-binding peptide
  MOD_RES (33)..(34): Xaa is C or S
  MOD_RES (11)..(12)..(13)..(14)..(15): Xaa is A or G
  MOD_RES (16)..(17)..(18)..(19): Xaa is A or G or absent
EVTMNYHYKLXXXXXXXXXKYLISIPSMKEPVXX

SEQ ID NO: 32886 - protein, 42 aa, Artificial Sequence
  Non-cyclic GFR-binding peptide
  MOD_RES (2)..(4)..(38)..(39): Xaa is C or S
  MOD_RES (16)..(17)..(18)..(19)..(20): Xaa is A or G
  MOD_RES (21)..(22)..(23)..(24): Xaa is A or G or absent
RXGXSEVVMDRHKRLXXXXXXXXXYYLISTASLRTPVXXTPP

SEQ ID NO: 32887 - protein, 38 aa, Artificial Sequence
  Non-cyclic GFR-binding peptide
  MOD_RES (32)..(33): Xaa is C or S
SEVVMDYHYKLVVNNASDKYLISIPSLRTPVXXTPPTS

SEQ ID NO: 32888 - protein, 34 aa, Artificial Sequence
  Non-cyclic GFR-binding peptide
  MOD_RES (33)..(34): Xaa is C or S
  MOD_RES (11)..(12)..(13)..(14)..(15): Xaa is A or G
  MOD_RES (16)..(17)..(18)..(19): Xaa is A or G or absent
EVTMNEYKFKXXXXXXXXXLYLISIPEMKEPVXX

SEQ ID NO: 32889 - protein, 39 aa, Artificial Sequence
  Non-cyclic GFR-binding peptide
  MOD_RES (34)..(35): Xaa is C or S
  MOD_RES (12)..(13)..(14)..(15)..(16): Xaa is A or G
  MOD_RES (17)..(18)..(19)..(20): Xaa is A or G or absent
SEVTMNPIKGYXXXXXXXXXFYLINIPSMKEPVXXPEPI

SEQ ID NO: 32890 - protein, 33 aa, Artificial Sequence
  Non-cyclic GFR-binding peptide
  MOD_RES (1)..(1): Xaa is C or S
  MOD_RES (12)..(13)..(14)..(15)..(16): Xaa is A or G
  MOD_RES (17)..(18)..(19)..(20): Xaa is A or G or absent
XEEVIMRHKRLXXXXXXXXXYYLMSTASTKVPA

SEQ ID NO: 32891 - protein, 37 aa, Artificial Sequence
  Non-cyclic GFR-binding peptide
  MOD_RES (2)..(35)..(36): Xaa is C or S
  MOD_RES (13)..(14)..(15)..(16)..(17): Xaa is A or G
  MOD_RES (18)..(19)..(20)..(21): Xaa is A or G or absent
KXSKVVMPIKGYXXXXXXXXXFYLINIPSLDQPVXXP

SEQ ID NO: 32892 - protein, 41 aa, Artificial Sequence
  Non-cyclic GFR-binding peptide
  MOD_RES (1)..(3)..(37)..(38): Xaa is C or S
  MOD_RES (15)..(16)..(17)..(18)..(19): Xaa is A or G
  MOD_RES (20)..(21)..(22)..(23): Xaa is A or G or absent
XGXRDVVMGRHKRLXXXXXXXXXYYLMSTASMKTPTXXPGA

SEQ ID NO: 32893 - protein, 42 aa, Artificial Sequence
  Non-cyclic GFR-binding peptide
  MOD_RES (2)..(36)..(37): Xaa is C or S
  MOD_RES (14)..(15)..(16)..(17)..(18): Xaa is A or G
  MOD_RES (19)..(20)..(21)..(22): Xaa is A or G or absent
GXAEVVMDRHKRLXXXXXXXXXYYLISTASLRAPVXXSAPAA

SEQ ID NO: 32894 - protein, 44 aa, Artificial Sequence
  Non-cyclic GFR-binding peptide
  MOD_RES (2)..(4)..(38)..(39): Xaa is C or S
  MOD_RES (16)..(17)..(18)..(19)..(20): Xaa is A or G
  MOD_RES (21)..(22)..(23)..(24): Xaa is A or G or absent
RXGXSEVVMDRHKRLXXXXXXXXXYYLISTASLRTPVXXTPPTS

SEQ ID NO: 32895 - protein, 41 aa, Artificial Sequence
  Non-cyclic GFR-binding peptide
  MOD_RES (1)..(3)..(37)..(38): Xaa is C or S
  MOD_RES (15)..(16)..(17)..(18)..(19): Xaa is A or G
  MOD_RES (20)..(21)..(22)..(23): Xaa is A or G or absent
XGXESVAMGRHKRLXXXXXXXXXYYLISTASLKTPVXXAKS

SEQ ID NO: 32896 - protein, 36 aa, Artificial Sequence
  Non-cyclic GFR-binding peptide
  MOD_RES (2)..(36): Xaa is C or S
  MOD_RES (14)..(15)..(16)..(17)..(18): Xaa is A or G
  MOD_RES (19)..(20)..(21)..(22): Xaa is A or G or absent
GXSEVVMDEYKFKXXXXXXXXXLYLISIPELRTPVX

SEQ ID NO: 32897 - protein, 38 aa, Artificial Sequence
  Non-cyclic GFR-binding peptide
  MOD_RES (1)..(34)..(35): Xaa is C or S
  MOD_RES (12)..(13)..(14)..(15)..(16): Xaa is A or G
  MOD_RES (17)..(18)..(19)..(20): Xaa is A or G or absent
XEEVIMEYKFKXXXXXXXXXLYLMSIPETKVPAXXTSP

SEQ ID NO: 32898 - protein, 36 aa, Artificial Sequence
  Non-cyclic GFR-binding peptide
  MOD_RES (31)..(32): Xaa is C or S
EVVMDRHKRLVVNNASDYYLISTASLRTPVXXTPPT

SEQ ID NO: 32899 - protein, 37 aa, Artificial Sequence
  Non-cyclic GFR-binding peptide
  MOD_RES (31)..(32): Xaa is C or S
SRVIMPIKGYVKPKRGVFYLINIPSLAQPVXXPAASA

SEQ ID NO: 32900 - protein, 37 aa, Artificial Sequence
  Non-cyclic GFR-binding peptide
  MOD_RES (34)..(35): Xaa is C or S
  MOD_RES (12)..(13)..(14)..(15)..(16): Xaa is A or G
  MOD_RES (17)..(18)..(19)..(20): Xaa is A or G or absent
SEVVMDRHKRLXXXXXXXXXYYLISTASLRTPVXXTP

SEQ ID NO: 32901 - protein, 41 aa, Artificial Sequence
  Non-cyclic GFR-binding peptide
  MOD_RES (1)..(3)..(37)..(38): Xaa is C or S
  MOD_RES (15)..(16)..(17)..(18)..(19): Xaa is A or G
  MOD_RES (20)..(21)..(22)..(23): Xaa is A or G or absent
XAXSEVTMNPIKGYXXXXXXXXXFYLINIPSMKEPVXXPEP

SEQ ID NO: 32902 - protein, 41 aa, Artificial Sequence
  Non-cyclic GFR-binding peptide
  MOD_RES (2)..(4)..(35)..(36): Xaa is C or S
LXGXEEVIMRHKRLLLVRGNDYYLMSTASTKVPAXXTSPVR

SEQ ID NO: 32903 - protein, 40 aa, Artificial Sequence
  Non-cyclic GFR-binding peptide
  MOD_RES (2)..(4)..(36)..(37): Xaa is C or S
SXGXRDVVMGRHKRLIIQQKDNYYLMSTASMKTPTXXPGA

SEQ ID NO: 32904 - protein, 36 aa, Artificial Sequence
  Non-cyclic GFR-binding peptide
  MOD_RES (1)..(3)..(36): Xaa is C or S
  MOD_RES (14)..(15)..(16)..(17)..(18): Xaa is A or G
  MOD_RES (19)..(20)..(21)..(22): Xaa is A or G or absent
XGXEEVIMYHYKLXXXXXXXXXKYLMSIPSTKVPAX

SEQ ID NO: 32905 - protein, 36 aa, Artificial Sequence
  Non-cyclic GFR-binding peptide
  MOD_RES (34)..(35): Xaa is C or S
  MOD_RES (12)..(13)..(14)..(15)..(16): Xaa is A or G
  MOD_RES (17)..(18)..(19)..(20): Xaa is A or G or absent
RDVVMGRHKRLXXXXXXXXXYYLMSTASMKTPTXXP

SEQ ID NO: 32906 - protein, 35 aa, Artificial Sequence
  Non-cyclic GFR-binding peptide
  MOD_RES (31)..(32): Xaa is C or S
DVVMGRHKRLIIQQKDNYYLMSTASMKTPTXXPGA

SEQ ID NO: 32907 - protein, 38 aa, Artificial Sequence
  Non-cyclic GFR-binding peptide
  MOD_RES (1)..(3)..(36)..(37): Xaa is C or S
  MOD_RES (14)..(15)..(16)..(17)..(18): Xaa is A or G
  MOD_RES (19)..(20)..(21)..(22): Xaa is A or G or absent
XGXEEVIMYHYKLXXXXXXXXXKYLMSIPSTKVPAXXT

SEQ ID NO: 32908 - protein, 35 aa, Artificial Sequence
  Non-cyclic GFR-binding peptide
  MOD_RES (2)..(2): Xaa is C or S
  MOD_RES (14)..(15)..(16)..(17)..(18): Xaa is A or G
  MOD_RES (19)..(20)..(21)..(22): Xaa is A or G or absent
AXSEVTMNYHYKLXXXXXXXXXKYLISIPSMKEPV

SEQ ID NO: 32909 - protein, 35 aa, Artificial Sequence
  Non-cyclic GFR-binding peptide
  MOD_RES (1)..(3)..(35): Xaa is C or S
XAXSEVTMNRHKRLVVNKNEDYYLISTASMKEPVX

SEQ ID NO: 32910 - protein, 37 aa, Artificial Sequence
  Non-cyclic GFR-binding peptide
  MOD_RES (33)..(34): Xaa is C or S
  MOD_RES (11)..(12)..(13)..(14)..(15): Xaa is A or G
  MOD_RES (16)..(17)..(18)..(19): Xaa is A or G or absent
EEVIMYHYKLXXXXXXXXXKYLMSIPSTKVPAXXTSP

SEQ ID NO: 32911 - protein, 35 aa, Artificial Sequence
  Non-cyclic GFR-binding peptide
  MOD_RES (2)..(34)..(35): Xaa is C or S
AXSEVTMNRYKKLVVNKNEDFYLISIANMKEPVXX

SEQ ID NO: 32912 - protein, 38 aa, Artificial Sequence
  Non-cyclic GFR-binding peptide
  MOD_RES (1)..(3)..(35)..(36): Xaa is C or S
XAXSEVTMNPIKGYVVNKNEDFYLINIPSMKEPVXXPE

SEQ ID NO: 32913 - protein, 40 aa, Artificial Sequence
  Non-cyclic GFR-binding peptide
  MOD_RES (1)..(3)..(35)..(36): Xaa is C or S
XGXSEVVMDYHYKLVVNNASDKYLISIPSLRTPVXXTPPT

SEQ ID NO: 32914 - protein, 39 aa, Artificial Sequence
  Non-cyclic GFR-binding peptide
  MOD_RES (1)..(35)..(36): Xaa is C or S
  MOD_RES (13)..(14)..(15)..(16)..(17): Xaa is A or G
  MOD_RES (18)..(19)..(20)..(21): Xaa is A or G or absent
XSEVVMDRHKRLXXXXXXXXXYYLISTASLRTPVXXTPP

SEQ ID NO: 32915 - protein, 39 aa, Artificial Sequence
  Non-cyclic GFR-binding peptide
  MOD_RES (1)..(33)..(34): Xaa is C or S
XSRVVMNEYKFKIVNSSDDLYLVSIPELKTPAXXPKPVH

SEQ ID NO: 32916 - protein, 40 aa, Artificial Sequence
  Non-cyclic GFR-binding peptide
  MOD_RES (34)..(35): Xaa is C or S
  MOD_RES (12)..(13)..(14)..(15)..(16): Xaa is A or G
  MOD_RES (17)..(18)..(19)..(20): Xaa is A or G or absent
SEVTMNEYKFKXXXXXXXXXLYLISIPEMKEPVXXPEPIG

SEQ ID NO: 32917 - protein, 35 aa, Artificial Sequence
  Non-cyclic GFR-binding peptide
  MOD_RES (1)..(32)..(33): Xaa is C or S
XEEVIMEYKFKLLVRGNDLYLMSIPETKVPAXXTS

SEQ ID NO: 32918 - protein, 38 aa, Artificial Sequence
  Non-cyclic GFR-binding peptide
  MOD_RES (2)..(4)..(35)..(36): Xaa is C or S
LXGXEEVIMEYKFKLLVRGNDLYLMSIPETKVPAXXTS

SEQ ID NO: 32919 - protein, 33 aa, Artificial Sequence
  Non-cyclic GFR-binding peptide
  MOD_RES (31)..(32): Xaa is C or S
EVTMNPIKGYVVNKNEDFYLINIPSMKEPVXXP

SEQ ID NO: 32920 - protein, 37 aa, Artificial Sequence
  Non-cyclic GFR-binding peptide
  MOD_RES (1)..(35)..(36): Xaa is C or S
  MOD_RES (13)..(14)..(15)..(16)..(17): Xaa is A or G
  MOD_RES (18)..(19)..(20)..(21): Xaa is A or G or absent
XSEVTMNRHKRLXXXXXXXXXYYLISTASMKEPVXXP

SEQ ID NO: 32921 - protein, 37 aa, Artificial Sequence
  Non-cyclic GFR-binding peptide
  MOD_RES (2)..(4): Xaa is C or S
  MOD_RES (16)..(17)..(18)..(19)..(20): Xaa is A or G
  MOD_RES (21)..(22)..(23)..(24): Xaa is A or G or absent
RXAXSEVTMNPIKGYXXXXXXXXXFYLINIPSMKEPV

SEQ ID NO: 32922 - protein, 36 aa, Artificial Sequence
  Non-cyclic GFR-binding peptide
  MOD_RES (1)..(3): Xaa is C or S
  MOD_RES (15)..(16)..(17)..(18)..(19): Xaa is A or G
  MOD_RES (20)..(21)..(22)..(23): Xaa is A or G or absent
XAXSEVTMNRYKKLXXXXXXXXXFYLISIANMKEPV

SEQ ID NO: 32923 - protein, 37 aa, Artificial Sequence
  Non-cyclic GFR-binding peptide
  MOD_RES (1)..(3)..(35)..(36): Xaa is C or S
XGXRDVVMGRHKRLIIQQKDNYYLMSTASMKTPTXXP

SEQ ID NO: 32924 - protein, 39 aa, Artificial Sequence
  Non-cyclic GFR-binding peptide
  MOD_RES (2)..(36)..(37): Xaa is C or S
  MOD_RES (14)..(15)..(16)..(17)..(18): Xaa is A or G
  MOD_RES (19)..(20)..(21)..(22): Xaa is A or G or absent
AXSEVTMNYHYKLXXXXXXXXXKYLISIPSMKEPVXXPE

SEQ ID NO: 32925 - protein, 35 aa, Artificial Sequence
  Non-cyclic GFR-binding peptide
  MOD_RES (2)..(33)..(34): Xaa is C or S
KXSRVIMPIKGYVKPKRGVFYLINIPSLAQPVXXP

SEQ ID NO: 32926 - protein, 39 aa, Artificial Sequence
  Non-cyclic GFR-binding peptide
  MOD_RES (2)..(34)..(35): Xaa is C or S
GXAEVVMDRHKRLVVNNAADYYLISTASLRAPVXXSAPA

SEQ ID NO: 32927 - protein, 39 aa, Artificial Sequence
  Non-cyclic GFR-binding peptide
  MOD_RES (2)..(33)..(34): Xaa is C or S
GXEEVIMRHKRLLLVRGNDYYLMSTASTKVPAXXTSPVR

SEQ ID NO: 32928 - protein, 40 aa, Artificial Sequence
  Non-cyclic GFR-binding peptide
  MOD_RES (2)..(4)..(37)..(38): Xaa is C or S
  MOD_RES (15)..(16)..(17)..(18)..(19): Xaa is A or G
  MOD_RES (20)..(21)..(22)..(23): Xaa is A or G or absent
SXKXSKVVMPIKGYXXXXXXXXXFYLINIPSLDQPVXXPS

SEQ ID NO: 32929 - protein, 36 aa, Artificial Sequence
  Non-cyclic GFR-binding peptide
  MOD_RES (34)..(35): Xaa is C or S
  MOD_RES (12)..(13)..(14)..(15)..(16): Xaa is A or G
  MOD_RES (17)..(18)..(19)..(20): Xaa is A or G or absent
AEVVMDRHKRLXXXXXXXXXYYLISTASLRAPVXXS

SEQ ID NO: 32930 - protein, 40 aa, Artificial Sequence
  Non-cyclic GFR-binding peptide
  MOD_RES (1)..(3)..(35)..(36): Xaa is C or S
XAXSEVTMNEYKFKVVNKNEDLYLISIPEMKEPVXXPEPI

SEQ ID NO: 32931 - protein, 39 aa, Artificial Sequence
  Non-cyclic GFR-binding peptide
  MOD_RES (33)..(34): Xaa is C or S
  MOD_RES (11)..(12)..(13)..(14)..(15): Xaa is A or G
  MOD_RES (16)..(17)..(18)..(19): Xaa is A or G or absent
EVTMNPIKGYXXXXXXXXXFYLINIPSMKEPVXXPEPIG

SEQ ID NO: 32932 - protein, 38 aa, Artificial Sequence
  Non-cyclic GFR-binding peptide
  MOD_RES (1)..(33)..(34): Xaa is C or S
XRDVVMGRHKRLIIQQKDNYYLMSTASMKTPTXXPGAS

SEQ ID NO: 32933 - protein, 40 aa, Artificial Sequence
  Non-cyclic GFR-binding peptide
  MOD_RES (1)..(3)..(37)..(38): Xaa is C or S
  MOD_RES (15)..(16)..(17)..(18)..(19): Xaa is A or G
  MOD_RES (20)..(21)..(22)..(23): Xaa is A or G or absent
XAXSEVTMNEYKFKXXXXXXXXXLYLISIPEMKEPVXXPE

SEQ ID NO: 32934 - protein, 37 aa, Artificial Sequence
  Non-cyclic GFR-binding peptide
  MOD_RES (2)..(36)..(37): Xaa is C or S
  MOD_RES (14)..(15)..(16)..(17)..(18): Xaa is A or G
  MOD_RES (19)..(20)..(21)..(22): Xaa is A or G or absent
GXRDVVMGRHKRLXXXXXXXXXYYLMSTASMKTPTXX

SEQ ID NO: 32935 - protein, 36 aa, Artificial Sequence
  Non-cyclic GFR-binding peptide
  MOD_RES (2)..(33)..(34): Xaa is C or S
GXEEVIMEYKFKLLVRGNDLYLMSIPETKVPAXXTS

SEQ ID NO: 32936 - protein, 37 aa, Artificial Sequence
  Non-cyclic GFR-binding peptide
  MOD_RES (31)..(32): Xaa is C or S
SKVVMPIKGYVKPTRGVFYLINIPSLDQPVXXPSASA

SEQ ID NO: 32937 - protein, 38 aa, Artificial Sequence
  Non-cyclic GFR-binding peptide
  MOD_RES (1)..(3)..(37)..(38): Xaa is C or S
  MOD_RES (15)..(16)..(17)..(18)..(19): Xaa is A or G
  MOD_RES (20)..(21)..(22)..(23): Xaa is A or G or absent
XGXRDVVMGRHKRLXXXXXXXXXYYLMSTASMKTPTXX

SEQ ID NO: 32938 - protein, 39 aa, Artificial Sequence
  Non-cyclic GFR-binding peptide
  MOD_RES (1)..(3)..(35)..(36): Xaa is C or S
XGXSEVVMDYHYKLVVNNASDKYLISIPSLRTPVXXTPP

SEQ ID NO: 32939 - protein, 35 aa, Artificial Sequence
  Non-cyclic GFR-binding peptide
  MOD_RES (2)..(4)..(35): Xaa is C or S
LXGXEEVIMEYKFKLLVRGNDLYLMSIPETKVPAX

SEQ ID NO: 32940 - protein, 42 aa, Artificial Sequence
  Non-cyclic GFR-binding peptide
  MOD_RES (2)..(36)..(37): Xaa is C or S
  MOD_RES (14)..(15)..(16)..(17)..(18): Xaa is A or G
  MOD_RES (19)..(20)..(21)..(22): Xaa is A or G or absent
AXSEVTMNEYKFKXXXXXXXXXLYLISIPEMKEPVXXPEPIG

SEQ ID NO: 32941 - protein, 36 aa, Artificial Sequence
  Non-cyclic GFR-binding peptide
  MOD_RES (1)..(3)..(35)..(36): Xaa is C or S
XAXSEVTMNEYKFKVVNKNEDLYLISIPEMKEPVXX

SEQ ID NO: 32942 - protein, 31 aa, Artificial Sequence
  Non-cyclic GFR-binding peptide
  MOD_RES (31)..(31): Xaa is C or S
EEVIMEYKFKLLVRGNDLYLMSIPETKVPAX

SEQ ID NO: 32943 - protein, 34 aa, Artificial Sequence
  Non-cyclic GFR-binding peptide
  MOD_RES (32)..(33): Xaa is C or S
RDVVMGYHYKLIIQQKDNKYLMSIPSMKTPTXXP

SEQ ID NO: 32944 - protein, 40 aa, Artificial Sequence
  Non-cyclic GFR-binding peptide
  MOD_RES (34)..(35): Xaa is C or S
  MOD_RES (12)..(13)..(14)..(15)..(16): Xaa is A or G
  MOD_RES (17)..(18)..(19)..(20): Xaa is A or G or absent
AEVVMDRHKRLXXXXXXXXXYYLISTASLRAPVXXSAPAA

SEQ ID NO: 32945 - protein, 35 aa, Artificial Sequence
  Non-cyclic GFR-binding peptide
  MOD_RES (1)..(33)..(34): Xaa is C or S
XSEVVMDYHYKLVVNNASDKYLISIPSLRTPVXXT

SEQ ID NO: 32946 - protein, 42 aa, Artificial Sequence
  Non-cyclic GFR-binding peptide
  MOD_RES (1)..(3)..(37)..(38): Xaa is C or S
  MOD_RES (15)..(16)..(17)..(18)..(19): Xaa is A or G
  MOD_RES (20)..(21)..(22)..(23): Xaa is A or G or absent
XGXESVAMGRHKRLXXXXXXXXXYYLISTASLKTPVXXAKSA

SEQ ID NO: 32947 - protein, 40 aa, Artificial Sequence
  Non-cyclic GFR-binding peptide
  MOD_RES (1)..(3)..(37)..(38): Xaa is C or S
  MOD_RES (15)..(16)..(17)..(18)..(19): Xaa is A or G
  MOD_RES (20)..(21)..(22)..(23): Xaa is A or G or absent
XAXSEVTMNRHKRLXXXXXXXXXYYLISTASMKEPVXXPE

SEQ ID NO: 32948 - protein, 32 aa, Artificial Sequence
  Non-cyclic GFR-binding peptide
  MOD_RES (11)..(12)..(13)..(14)..(15): Xaa is A or G
  MOD_RES (16)..(17)..(18)..(19): Xaa is A or G or absent
EEVIMEYKFKXXXXXXXXXLYLMSIPETKVPA

SEQ ID NO: 32949 - protein, 39 aa, Artificial Sequence
  Non-cyclic GFR-binding peptide
  MOD_RES (1)..(3)..(34)..(35): Xaa is C or S
XKXSRVIMPIKGYVKPKRGVFYLINIPSLAQPVXXPAAS

SEQ ID NO: 32950 - protein, 39 aa, Artificial Sequence
  Non-cyclic GFR-binding peptide
  MOD_RES (33)..(34): Xaa is C or S
  MOD_RES (11)..(12)..(13)..(14)..(15): Xaa is A or G
  MOD_RES (16)..(17)..(18)..(19): Xaa is A or G or absent
EEVIMYHYKLXXXXXXXXXKYLMSIPSTKVPAXXTSPVR

SEQ ID NO: 32951 - protein, 42 aa, Artificial Sequence
  Non-cyclic GFR-binding peptide
  MOD_RES (2)..(4)..(38)..(39): Xaa is C or S
  MOD_RES (16)..(17)..(18)..(19)..(20): Xaa is A or G
  MOD_RES (21)..(22)..(23)..(24): Xaa is A or G or absent
SXGXRDVVMGEYKFKXXXXXXXXXLYLMSIPEMKTPTXXPGA

SEQ ID NO: 32952 - protein, 41 aa, Artificial Sequence
  Non-cyclic GFR-binding peptide
  MOD_RES (2)..(4)..(36)..(37): Xaa is C or S
RXAXSEVTMNRYKKLVVNKNEDFYLISIANMKEPVXXPEPI

SEQ ID NO: 32953 - protein, 36 aa, Artificial Sequence
  Non-cyclic GFR-binding peptide
  MOD_RES (1)..(3): Xaa is C or S
  MOD_RES (15)..(16)..(17)..(18)..(19): Xaa is A or G
  MOD_RES (20)..(21)..(22)..(23): Xaa is A or G or absent
XGXRDVVMGEYKFKXXXXXXXXXLYLMSIPEMKTPT

SEQ ID NO: 32954 - protein, 38 aa, Artificial Sequence
  Non-cyclic GFR-binding peptide
  MOD_RES (1)..(3)..(37)..(38): Xaa is C or S
  MOD_RES (15)..(16)..(17)..(18)..(19): Xaa is A or G
  MOD_RES (20)..(21)..(22)..(23): Xaa is A or G or absent
XAXSEVTMNRYKKLXXXXXXXXXFYLISIANMKEPVXX

SEQ ID NO: 32955 - protein, 39 aa, Artificial Sequence
  Non-cyclic GFR-binding peptide
  MOD_RES (2)..(34)..(35): Xaa is C or S
GXRDVVMGEYKFKIIQQKDNLYLMSIPEMKTPTXXPGAS

SEQ ID NO: 32956 - protein, 37 aa, Artificial Sequence
  Non-cyclic GFR-binding peptide
  MOD_RES (1)..(35)..(36): Xaa is C or S
  MOD_RES (13)..(14)..(15)..(16)..(17): Xaa is A or G
  MOD_RES (18)..(19)..(20)..(21): Xaa is A or G or absent
XRDVVMGEYKFKXXXXXXXXXLYLMSIPEMKTPTXXP

SEQ ID NO: 32957 - protein, 35 aa, Artificial Sequence
  Non-cyclic GFR-binding peptide
  MOD_RES (1)..(3)..(35): Xaa is C or S
XGXSEVVMDEYKFKVVNNASDLYLISIPELRTPVX

SEQ ID NO: 32958 - protein, 38 aa, Artificial Sequence
  Non-cyclic GFR-binding peptide
  MOD_RES (2)..(36)..(37): Xaa is C or S
  MOD_RES (14)..(15)..(16)..(17)..(18): Xaa is A or G
  MOD_RES (19)..(20)..(21)..(22): Xaa is A or G or absent
AXSEVTMNPIKGYXXXXXXXXXFYLINIPSMKEPVXXP

SEQ ID NO: 32959 - protein, 33 aa, Artificial Sequence
  Non-cyclic GFR-binding peptide
  MOD_RES (2)..(2): Xaa is C or S
AXSEVTMNYHYKLVVNKNEDKYLISIPSMKEPV

SEQ ID NO: 32960 - protein, 37 aa, Artificial Sequence
  Non-cyclic GFR-binding peptide
  MOD_RES (2)..(4)..(35)..(36): Xaa is C or S
SXKXSKVIMPIKGYIKPTKGIFYLINIPSLDQSVXXP

SEQ ID NO: 32961 - protein, 36 aa, Artificial Sequence
  Non-cyclic GFR-binding peptide
  MOD_RES (1)..(3): Xaa is C or S
  MOD_RES (15)..(16)..(17)..(18)..(19): Xaa is A or G
  MOD_RES (20)..(21)..(22)..(23): Xaa is A or G or absent
XGXRDVVMGRHKRLXXXXXXXXXYYLMSTASMKTPT

SEQ ID NO: 32962 - protein, 34 aa, Artificial Sequence
  Non-cyclic GFR-binding peptide
  MOD_RES (32)..(33): Xaa is C or S
SEVTMNEYKFKVVNKNEDLYLISIPEMKEPVXXP

SEQ ID NO: 32963 - protein, 36 aa, Artificial Sequence
  Non-cyclic GFR-binding peptide
  MOD_RES (1)..(34)..(35): Xaa is C or S
  MOD_RES (12)..(13)..(14)..(15)..(16): Xaa is A or G
  MOD_RES (17)..(18)..(19)..(20): Xaa is A or G or absent
XSRVIMPIKGYXXXXXXXXXFYLINIPSLAQPVXXP

SEQ ID NO: 32964 - protein, 41 aa, Artificial Sequence
  Non-cyclic GFR-binding peptide
  MOD_RES (2)..(4)..(36)..(37): Xaa is C or S
RXGXSEVVMDEYKFKVVNNASDLYLISIPELRTPVXXTPPT

SEQ ID NO: 32965 - protein, 36 aa, Artificial Sequence
  Non-cyclic GFR-binding peptide
  MOD_RES (2)..(4): Xaa is C or S
  MOD_RES (15)..(16)..(17)..(18)..(19): Xaa is A or G
  MOD_RES (20)..(21)..(22)..(23): Xaa is A or G or absent
SXKXSKVIMPIKGYXXXXXXXXXFYLINIPSLDQSV

SEQ ID NO: 32966 - protein, 33 aa, Artificial Sequence
  Non-cyclic GFR-binding peptide
  MOD_RES (31)..(32): Xaa is C or S
SKVIMPIKGYIKPTKGIFYLINIPSLDQSVXXP

SEQ ID NO: 32967 - protein, 40 aa, Artificial Sequence
  Non-cyclic GFR-binding peptide
  MOD_RES (2)..(4)..(36)..(37): Xaa is C or S
RXAXSEVTMNRYKKLVVNKNEDFYLISIANMKEPVXXPEP

SEQ ID NO: 32968 - protein, 39 aa, Artificial Sequence
  Non-cyclic GFR-binding peptide
  MOD_RES (33)..(34): Xaa is C or S
  MOD_RES (11)..(12)..(13)..(14)..(15): Xaa is A or G
  MOD_RES (16)..(17)..(18)..(19): Xaa is A or G or absent
RVVMNYHYKLXXXXXXXXXKYLVSIPSLKTPAXXPKPVH

SEQ ID NO: 32969 - protein, 44 aa, Artificial Sequence
  Non-cyclic GFR-binding peptide
  MOD_RES (2)..(4)..(38)..(39): Xaa is C or S
  MOD_RES (16)..(17)..(18)..(19)..(20): Xaa is A or G
  MOD_RES (21)..(22)..(23)..(24): Xaa is A or G or absent
RXGXSEVVMDYHYKLXXXXXXXXXKYLISIPSLRTPVXXTPPTS

SEQ ID NO: 32970 - protein, 35 aa, Artificial Sequence
  Non-cyclic GFR-binding peptide
  MOD_RES (1)..(32)..(33): Xaa is C or S
XSKVIMPIKGYIKPTKGIFYLINIPSLDQSVXXPS

SEQ ID NO: 32971 - protein, 38 aa, Artificial Sequence
  Non-cyclic GFR-binding peptide
  MOD_RES (1)..(33)..(34): Xaa is C or S
XRDVVMGEYKFKIIQQKDNLYLMSIPEMKTPTXXPGAS

SEQ ID NO: 32972 - protein, 41 aa, Artificial Sequence
  Non-cyclic GFR-binding peptide
  MOD_RES (2)..(36)..(37): Xaa is C or S
  MOD_RES (14)..(15)..(16)..(17)..(18): Xaa is A or G
  MOD_RES (19)..(20)..(21)..(22): Xaa is A or G or absent
GXRDVVMGYHYKLXXXXXXXXXKYLMSIPSMKTPTXXPGAS

SEQ ID NO: 32973 - protein, 35 aa, Artificial Sequence
  Non-cyclic GFR-binding peptide
  MOD_RES (32)..(33): Xaa is C or S
RDVVMGRHKRLIIQQKDNYYLMSTASMKTPTXXPG

SEQ ID NO: 32974 - protein, 37 aa, Artificial Sequence
  Non-cyclic GFR-binding peptide
  MOD_RES (33)..(34): Xaa is C or S
  MOD_RES (11)..(12)..(13)..(14)..(15): Xaa is A or G
  MOD_RES (16)..(17)..(18)..(19): Xaa is A or G or absent
EVTMNEYKFKXXXXXXXXXLYLISIPEMKEPVXXPEP

SEQ ID NO: 32975 - protein, 41 aa, Artificial Sequence
  Non-cyclic GFR-binding peptide
  MOD_RES (1)..(3)..(35)..(36): Xaa is C or S
XAXSEVTMNPIKGYVVNKNEDFYLINIPSMKEPVXXPEPIG

SEQ ID NO: 32976 - protein, 34 aa, Artificial Sequence
  Non-cyclic GFR-binding peptide
  MOD_RES (34)..(34): Xaa is C or S
  MOD_RES (12)..(13)..(14)..(15)..(16): Xaa is A or G
  MOD_RES (17)..(18)..(19)..(20): Xaa is A or G or absent
SEVTMNEYKFKXXXXXXXXXLYLISIPEMKEPVX

SEQ ID NO: 32977 - protein, 33 aa, Artificial Sequence
  Non-cyclic GFR-binding peptide
  MOD_RES (1)..(33): Xaa is C or S
XRDVVMGRHKRLIIQQKDNYYLMSTASMKTPTX

SEQ ID NO: 32978 - protein, 37 aa, Artificial Sequence
  Non-cyclic GFR-binding peptide
  MOD_RES (2)..(34)..(35): Xaa is C or S
GXESVAMGRHKRLYTVVGKDYYLISTASLKTPVXXAK

SEQ ID NO: 32979 - protein, 38 aa, Artificial Sequence
  Non-cyclic GFR-binding peptide
  MOD_RES (1)..(32)..(33): Xaa is C or S
XSRVIMPIKGYVKPKRGVFYLINIPSLAQPVXXPAASA

SEQ ID NO: 32980 - protein, 41 aa, Artificial Sequence
  Non-cyclic GFR-binding peptide
  MOD_RES (1)..(3)..(35)..(36): Xaa is C or S
XGXRDVVMGRHKRLIIQQKDNYYLMSTASMKTPTXXPGASG

SEQ ID NO: 32981 - protein, 39 aa, Artificial Sequence
  Non-cyclic GFR-binding peptide
  MOD_RES (2)..(4)..(36)..(37): Xaa is C or S
SXGXRDVVMGRHKRLIIQQKDNYYLMSTASMKTPTXXPG

SEQ ID NO: 32982 - protein, 41 aa, Artificial Sequence
  Non-cyclic GFR-binding peptide
  MOD_RES (1)..(3)..(35)..(36): Xaa is C or S
XGXSRVVMNRHKRLIVNSSDDYYLVSTASLKTPAXXPKPVH

SEQ ID NO: 32983 - protein, 34 aa, Artificial Sequence
  Non-cyclic GFR-binding peptide
  MOD_RES (34)..(34): Xaa is C or S
  MOD_RES (12)..(13)..(14)..(15)..(16): Xaa is A or G
  MOD_RES (17)..(18)..(19)..(20): Xaa is A or G or absent
SEVTMNRHKRLXXXXXXXXXYYLISTASMKEPVX

SEQ ID NO: 32984 - protein, 34 aa, Artificial Sequence
  Non-cyclic GFR-binding peptide
  MOD_RES (1)..(33)..(34): Xaa is C or S
XRDVVMGRHKRLIIQQKDNYYLMSTASMKTPTXX

SEQ ID NO: 32985 - protein, 31 aa, Artificial Sequence
  Non-cyclic GFR-binding peptide
  MOD_RES (31)..(31): Xaa is C or S
EVTMNEYKFKVVNKNEDLYLISIPEMKEPVX

SEQ ID NO: 32986 - protein, 40 aa, Artificial Sequence
  Non-cyclic GFR-binding peptide
  MOD_RES (1)..(3)..(37)..(38): Xaa is C or S
  MOD_RES (15)..(16)..(17)..(18)..(19): Xaa is A or G
  MOD_RES (20)..(21)..(22)..(23): Xaa is A or G or absent
XGXRDVVMGRHKRLXXXXXXXXXYYLMSTASMKTPTXXPG

SEQ ID NO: 32987 - protein, 43 aa, Artificial Sequence
  Non-cyclic GFR-binding peptide
  MOD_RES (2)..(4)..(38)..(39): Xaa is C or S
  MOD_RES (16)..(17)..(18)..(19)..(20): Xaa is A or G
  MOD_RES (21)..(22)..(23)..(24): Xaa is A or G or absent
RXGXSEVVMDYHYKLXXXXXXXXXKYLISIPSLRTPVXXTPPT

SEQ ID NO: 32988 - protein, 32 aa, Artificial Sequence
  Non-cyclic GFR-binding peptide
  MOD_RES (1)..(1): Xaa is C or S
XRDVVMGEYKFKIIQQKDNLYLMSIPEMKTPT

SEQ ID NO: 32989 - protein, 34 aa, Artificial Sequence
  Non-cyclic GFR-binding peptide
  MOD_RES (31)..(32): Xaa is C or S
EVTMNPIKGYVVNKNEDFYLINIPSMKEPVXXPE

SEQ ID NO: 32990 - protein, 36 aa, Artificial Sequence
  Non-cyclic GFR-binding peptide
  MOD_RES (31)..(32): Xaa is C or S
EVVMDYHYKLVVNNASDKYLISIPSLRTPVXXTPPT

SEQ ID NO: 32991 - protein, 35 aa, Artificial Sequence
  Non-cyclic GFR-binding peptide
  MOD_RES (1)..(3)..(35): Xaa is C or S
XGXESVAMGRHKRLYTVVGKDYYLISTASLKTPVX

SEQ ID NO: 32992 - protein, 38 aa, Artificial Sequence
  Non-cyclic GFR-binding peptide
  MOD_RES (2)..(36)..(37): Xaa is C or S
  MOD_RES (14)..(15)..(16)..(17)..(18): Xaa is A or G
  MOD_RES (19)..(20)..(21)..(22): Xaa is A or G or absent
GXESVAMGRHKRLXXXXXXXXXYYLISTASLKTPVXXA

SEQ ID NO: 32993 - protein, 38 aa, Artificial Sequence
  Non-cyclic GFR-binding peptide
  MOD_RES (33)..(34): Xaa is C or S
  MOD_RES (11)..(12)..(13)..(14)..(15): Xaa is A or G
  MOD_RES (16)..(17)..(18)..(19): Xaa is A or G or absent
EVTMNRYKKLXXXXXXXXXFYLISIANMKEPVXXPEPI

SEQ ID NO: 32994 - protein, 35 aa, Artificial Sequence
  Non-cyclic GFR-binding peptide
  MOD_RES (34)..(35): Xaa is C or S
  MOD_RES (12)..(13)..(14)..(15)..(16): Xaa is A or G
  MOD_RES (17)..(18)..(19)..(20): Xaa is A or G or absent
SEVTMNRHKRLXXXXXXXXXYYLISTASMKEPVXX

SEQ ID NO: 32995 - protein, 42 aa, Artificial Sequence
  Non-cyclic GFR-binding peptide
  MOD_RES (2)..(4)..(36)..(37): Xaa is C or S
RXAXSEVTMNEYKFKVVNKNEDLYLISIPEMKEPVXXPEPIG

SEQ ID NO: 32996 - protein, 36 aa, Artificial Sequence
  Non-cyclic GFR-binding peptide
  MOD_RES (2)..(4)..(35)..(36): Xaa is C or S
SXKXSKVVMPIKGYVKPTRGVFYLINIPSLDQPVXX

SEQ ID NO: 32997 - protein, 36 aa, Artificial Sequence
  Non-cyclic GFR-binding peptide
  MOD_RES (2)..(4)..(36): Xaa is C or S
RXGXESVAMGRHKRLYTVVGKDYYLISTASLKTPVX

SEQ ID NO: 32998 - protein, 37 aa, Artificial Sequence
  Non-cyclic GFR-binding peptide
  MOD_RES (31)..(32): Xaa is C or S
EEVIMRHKRLLLVRGNDYYLMSTASTKVPAXXTSPVR

SEQ ID NO: 32999 - protein, 36 aa, Artificial Sequence
  Non-cyclic GFR-binding peptide
  MOD_RES (33)..(34): Xaa is C or S
  MOD_RES (11)..(12)..(13)..(14)..(15): Xaa is A or G
  MOD_RES (16)..(17)..(18)..(19): Xaa is A or G or absent
EVVMDYHYKLXXXXXXXXXKYLISIPSLRTPVXXTP

SEQ ID NO: 33000 - protein, 38 aa, Artificial Sequence
  Non-cyclic GFR-binding peptide
  MOD_RES (1)..(33)..(34): Xaa is C or S
XSEVTMNPIKGYVVNKNEDFYLINIPSMKEPVXXPEPI

SEQ ID NO: 33001 - protein, 40 aa, Artificial Sequence
  Non-cyclic GFR-binding peptide
  MOD_RES (2)..(4)..(38)..(39): Xaa is C or S
  MOD_RES (16)..(17)..(18)..(19)..(20): Xaa is A or G
  MOD_RES (21)..(22)..(23)..(24): Xaa is A or G or absent
SXGXRDVVMGYHYKLXXXXXXXXXKYLMSIPSMKTPTXXP

SEQ ID NO: 33002 - protein, 32 aa, Artificial Sequence
  Non-cyclic GFR-binding peptide
  MOD_RES (1)..(1): Xaa is C or S
XRDVVMGRHKRLIIQQKDNYYLMSTASMKTPT

SEQ ID NO: 33003 - protein, 34 aa, Artificial Sequence
  Non-cyclic GFR-binding peptide
  MOD_RES (1)..(33)..(34): Xaa is C or S
XSEVTMNYHYKLVVNKNEDKYLISIPSMKEPVXX

SEQ ID NO: 33004 - protein, 41 aa, Artificial Sequence
  Non-cyclic GFR-binding peptide
  MOD_RES (2)..(4)..(36)..(37): Xaa is C or S
RXGXAEVVMDRHKRLVVNNAADYYLISTASLRAPVXXSAPA

SEQ ID NO: 33005 - protein, 31 aa, Artificial Sequence
  Non-cyclic GFR-binding peptide
  MOD_RES (31)..(31): Xaa is C or S
EEVIMRHKRLLLVRGNDYYLMSTASTKVPAX

SEQ ID NO: 33006 - protein, 33 aa, Artificial Sequence
  Non-cyclic GFR-binding peptide
  MOD_RES (32)..(33): Xaa is C or S
SEVTMNPIKGYVVNKNEDFYLINIPSMKEPVXX

SEQ ID NO: 33007 - protein, 37 aa, Artificial Sequence
  Non-cyclic GFR-binding peptide
  MOD_RES (1)..(35)..(36): Xaa is C or S
  MOD_RES (13)..(14)..(15)..(16)..(17): Xaa is A or G
  MOD_RES (18)..(19)..(20)..(21): Xaa is A or G or absent
XRDVVMGYHYKLXXXXXXXXXKYLMSIPSMKTPTXXP

SEQ ID NO: 33008 - protein, 37 aa, Artificial Sequence
  Non-cyclic GFR-binding peptide
  MOD_RES (34)..(35): Xaa is C or S
  MOD_RES (12)..(13)..(14)..(15)..(16): Xaa is A or G
  MOD_RES (17)..(18)..(19)..(20): Xaa is A or G or absent
SEVTMNYHYKLXXXXXXXXXKYLISIPSMKEPVXXPE

SEQ ID NO: 33009 - protein, 37 aa, Artificial Sequence
  Non-cyclic GFR-binding peptide
  MOD_RES (2)..(34)..(35): Xaa is C or S
AXSEVTMNEYKFKVVNKNEDLYLISIPEMKEPVXXPE

SEQ ID NO: 33010 - protein, 34 aa, Artificial Sequence
  Non-cyclic GFR-binding peptide
  MOD_RES (1)..(32)..(33): Xaa is C or S
XSRVIMPIKGYVKPKRGVFYLINIPSLAQPVXXP

SEQ ID NO: 33011 - protein, 41 aa, Artificial Sequence
  Non-cyclic GFR-binding peptide
  MOD_RES (1)..(3)..(35)..(36): Xaa is C or S
XGXSEVVMDEYKFKVVNNASDLYLISIPELRTPVXXTPPTS

SEQ ID NO: 33012 - protein, 38 aa, Artificial Sequence
  Non-cyclic GFR-binding peptide
  MOD_RES (1)..(33)..(34): Xaa is C or S
XSEVTMNEYKFKVVNKNEDLYLISIPEMKEPVXXPEPI

SEQ ID NO: 33013 - protein, 36 aa, Artificial Sequence
  Non-cyclic GFR-binding peptide
  MOD_RES (33)..(34): Xaa is C or S
  MOD_RES (11)..(12)..(13)..(14)..(15): Xaa is A or G
  MOD_RES (16)..(17)..(18)..(19): Xaa is A or G or absent
DVVMGRHKRLXXXXXXXXXYYLMSTASMKTPTXXPG

SEQ ID NO: 33014 - protein, 36 aa, Artificial Sequence
  Non-cyclic GFR-binding peptide
  MOD_RES (1)..(33)..(34): Xaa is C or S
XSEVVMDRHKRLVVNNASDYYLISTASLRTPVXXTP

SEQ ID NO: 33015 - protein, 35 aa, Artificial Sequence
  Non-cyclic GFR-binding peptide
  MOD_RES (34)..(35): Xaa is C or S
  MOD_RES (12)..(13)..(14)..(15)..(16): Xaa is A or G
  MOD_RES (17)..(18)..(19)..(20): Xaa is A or G or absent
SEVTMNEYKFKXXXXXXXXXLYLISIPEMKEPVXX

SEQ ID NO: 33016 - protein, 41 aa, Artificial Sequence
  Non-cyclic GFR-binding peptide
  MOD_RES (1)..(3)..(35)..(36): Xaa is C or S
XAXSEVTMNRHKRLVVNKNEDYYLISTASMKEPVXXPEPIG

SEQ ID NO: 33017 - protein, 39 aa, Artificial Sequence
  Non-cyclic GFR-binding peptide
  MOD_RES (1)..(35)..(36): Xaa is C or S
  MOD_RES (13)..(14)..(15)..(16)..(17): Xaa is A or G
  MOD_RES (18)..(19)..(20)..(21): Xaa is A or G or absent
XSEVVMDYHYKLXXXXXXXXXKYLISIPSLRTPVXXTPP

SEQ ID NO: 33018 - protein, 35 aa, Artificial Sequence
  Non-cyclic GFR-binding peptide
  MOD_RES (32)..(33): Xaa is C or S
SEVTMNPIKGYVVNKNEDFYLINIPSMKEPVXXPE

SEQ ID NO: 33019 - protein, 40 aa, Artificial Sequence
  Non-cyclic GFR-binding peptide
  MOD_RES (2)..(34)..(35): Xaa is C or S
AXSEVTMNYHYKLVVNKNEDKYLISIPSMKEPVXXPEPIG

SEQ ID NO: 33020 - protein, 34 aa, Artificial Sequence
  Non-cyclic GFR-binding peptide
  MOD_RES (33)..(34): Xaa is C or S
  MOD_RES (11)..(12)..(13)..(14)..(15): Xaa is A or G
  MOD_RES (16)..(17)..(18)..(19): Xaa is A or G or absent
SVAMGRHKRLXXXXXXXXXYYLISTASLKTPVXX

SEQ ID NO: 33021 - protein, 37 aa, Artificial Sequence
  Non-cyclic GFR-binding peptide
  MOD_RES (2)..(4): Xaa is C or S
  MOD_RES (16)..(17)..(18)..(19)..(20): Xaa is A or G
  MOD_RES (21)..(22)..(23)..(24): Xaa is A or G or absent
RXGXSEVVMDRHKRLXXXXXXXXXYYLISTASLRTPV

SEQ ID NO: 33022 - protein, 39 aa, Artificial Sequence
  Non-cyclic GFR-binding peptide
  MOD_RES (1)..(3)..(36)..(37): Xaa is C or S
  MOD_RES (14)..(15)..(16)..(17)..(18): Xaa is A or G
  MOD_RES (19)..(20)..(21)..(22): Xaa is A or G or absent
XGXEEVIMRHKRLXXXXXXXXXYYLMSTASTKVPAXXTS

SEQ ID NO: 33023 - protein, 36 aa, Artificial Sequence
  Non-cyclic GFR-binding peptide
  MOD_RES (31)..(32): Xaa is C or S
SKVIMPIKGYIKPTKGIFYLINIPSLDQSVXXPSAS

SEQ ID NO: 33024 - protein, 34 aa, Artificial Sequence
  Non-cyclic GFR-binding peptide
  MOD_RES (2)..(34): Xaa is C or S
GXSEVVMDRHKRLVVNNASDYYLISTASLRTPVX

SEQ ID NO: 33025 - protein, 33 aa, Artificial Sequence
  Non-cyclic GFR-binding peptide
  MOD_RES (31)..(32): Xaa is C or S
SVAMGRHKRLYTVVGKDYYLISTASLKTPVXXA

SEQ ID NO: 33026 - protein, 38 aa, Artificial Sequence
  Non-cyclic GFR-binding peptide
  MOD_RES (2)..(36)..(37): Xaa is C or S
  MOD_RES (14)..(15)..(16)..(17)..(18): Xaa is A or G
  MOD_RES (19)..(20)..(21)..(22): Xaa is A or G or absent
AXSEVTMNRHKRLXXXXXXXXXYYLISTASMKEPVXXP

SEQ ID NO: 33027 - protein, 37 aa, Artificial Sequence
  Non-cyclic GFR-binding peptide
  MOD_RES (2)..(4)..(35)..(36): Xaa is C or S
LXGXEEVIMRHKRLLLVRGNDYYLMSTASTKVPAXXT

SEQ ID NO: 33028 - protein, 39 aa, Artificial Sequence
  Non-cyclic GFR-binding peptide
  MOD_RES (2)..(33)..(34): Xaa is C or S
KXSRVIMPIKGYVKPKRGVFYLINIPSLAQPVXXPAASA

SEQ ID NO: 33029 - protein, 36 aa, Artificial Sequence
  Non-cyclic GFR-binding peptide
  MOD_RES (1)..(3)..(35)..(36): Xaa is C or S
XGXRDVVMGYHYKLIIQQKDNKYLMSIPSMKTPTXX

SEQ ID NO: 33030 - protein, 41 aa, Artificial Sequence
  Non-cyclic GFR-binding peptide
  MOD_RES (1)..(3)..(37)..(38): Xaa is C or S
  MOD_RES (15)..(16)..(17)..(18)..(19): Xaa is A or G
  MOD_RES (20)..(21)..(22)..(23): Xaa is A or G or absent
XGXRDVVMGEYKFKXXXXXXXXXLYLMSIPEMKTPTXXPGA

SEQ ID NO: 33031 - protein, 32 aa, Artificial Sequence
  Non-cyclic GFR-binding peptide
  MOD_RES (2)..(2): Xaa is C or S
GXEEVIMRHKRLLLVRGNDYYLMSTASTKVPA

SEQ ID NO: 33032 - protein, 38 aa, Artificial Sequence
  Non-cyclic GFR-binding peptide
  MOD_RES (2)..(4)..(36)..(37): Xaa is C or S
SXGXRDVVMGRHKRLIIQQKDNYYLMSTASMKTPTXXP

SEQ ID NO: 33033 - protein, 37 aa, Artificial Sequence
  Non-cyclic GFR-binding peptide
  MOD_RES (2)..(36)..(37): Xaa is C or S
  MOD_RES (14)..(15)..(16)..(17)..(18): Xaa is A or G
  MOD_RES (19)..(20)..(21)..(22): Xaa is A or G or absent
GXSEVVMDRHKRLXXXXXXXXXYYLISTASLRTPVXX

SEQ ID NO: 33034 - protein, 34 aa, Artificial Sequence
  Non-cyclic GFR-binding peptide
  MOD_RES (31)..(32): Xaa is C or S
EVTMNRYKKLVVNKNEDFYLISIANMKEPVXXPE

SEQ ID NO: 33035 - protein, 38 aa, Artificial Sequence
  Non-cyclic GFR-binding peptide
  MOD_RES (2)..(36)..(37): Xaa is C or S
  MOD_RES (14)..(15)..(16)..(17)..(18): Xaa is A or G
  MOD_RES (19)..(20)..(21)..(22): Xaa is A or G or absent
GXSEVVMDRHKRLXXXXXXXXXYYLISTASLRTPVXXT

SEQ ID NO: 33036 - protein, 37 aa, Artificial Sequence
  Non-cyclic GFR-binding peptide
  MOD_RES (1)..(3)..(37): Xaa is C or S
  MOD_RES (15)..(16)..(17)..(18)..(19): Xaa is A or G
  MOD_RES (20)..(21)..(22)..(23): Xaa is A or G or absent
XGXESVAMGRHKRLXXXXXXXXXYYLISTASLKTPVX

SEQ ID NO: 33037 - protein, 37 aa, Artificial Sequence
  Non-cyclic GFR-binding peptide
  MOD_RES (2)..(34)..(35): Xaa is C or S
GXAEVVMDRHKRLVVNNAADYYLISTASLRAPVXXSA

SEQ ID NO: 33038 - protein, 38 aa, Artificial Sequence
  Non-cyclic GFR-binding peptide
  MOD_RES (1)..(3)..(37)..(38): Xaa is C or S
  MOD_RES (15)..(16)..(17)..(18)..(19): Xaa is A or G
  MOD_RES (20)..(21)..(22)..(23): Xaa is A or G or absent
XGXRDVVMGEYKFKXXXXXXXXXLYLMSIPEMKTPTXX

SEQ ID NO: 33039 - protein, 41 aa, Artificial Sequence
  Non-cyclic GFR-binding peptide
  MOD_RES (2)..(4)..(37)..(38): Xaa is C or S
  MOD_RES (15)..(16)..(17)..(18)..(19): Xaa is A or G
  MOD_RES (20)..(21)..(22)..(23): Xaa is A or G or absent
LXGXEEVIMEYKFKXXXXXXXXXLYLMSIPETKVPAXXTSP

SEQ ID NO: 33040 - protein, 32 aa, Artificial Sequence
  Non-cyclic GFR-binding peptide
  MOD_RES (11)..(12)..(13)..(14)..(15): Xaa is A or G
  MOD_RES (16)..(17)..(18)..(19): Xaa is A or G or absent
EVTMNYHYKLXXXXXXXXXKYLISIPSMKEPV

SEQ ID NO: 33041 - protein, 36 aa, Artificial Sequence
  Non-cyclic GFR-binding peptide
  MOD_RES (1)..(35)..(36): Xaa is C or S
  MOD_RES (13)..(14)..(15)..(16)..(17): Xaa is A or G
  MOD_RES (18)..(19)..(20)..(21): Xaa is A or G or absent
XSEVVMDEYKFKXXXXXXXXXLYLISIPELRTPVXX

SEQ ID NO: 33042 - protein, 41 aa, Artificial Sequence
  Non-cyclic GFR-binding peptide
  MOD_RES (1)..(35)..(36): Xaa is C or S
  MOD_RES (13)..(14)..(15)..(16)..(17): Xaa is A or G
  MOD_RES (18)..(19)..(20)..(21): Xaa is A or G or absent
XSEVTMNRYKKLXXXXXXXXXFYLISIANMKEPVXXPEPIG

SEQ ID NO: 33043 - protein, 34 aa, Artificial Sequence
  Non-cyclic GFR-binding peptide
  MOD_RES (2)..(34): Xaa is C or S
GXRDVVMGEYKFKIIQQKDNLYLMSIPEMKTPTX

SEQ ID NO: 33044 - protein, 33 aa, Artificial Sequence
  Non-cyclic GFR-binding peptide
  MOD_RES (33)..(33): Xaa is C or S
  MOD_RES (11)..(12)..(13)..(14)..(15): Xaa is A or G
  MOD_RES (16)..(17)..(18)..(19): Xaa is A or G or absent
EVVMDRHKRLXXXXXXXXXYYLISTASLRTPVX

SEQ ID NO: 33045 - protein, 30 aa, Artificial Sequence
  Non-cyclic GFR-binding peptide
EVVMDYHYKLVVNNASDKYLISIPSLRTPV

SEQ ID NO: 33046 - protein, 39 aa, Artificial Sequence
  Non-cyclic GFR-binding peptide
  MOD_RES (2)..(35)..(36): Xaa is C or S
  MOD_RES (13)..(14)..(15)..(16)..(17): Xaa is A or G
  MOD_RES (18)..(19)..(20)..(21): Xaa is A or G or absent
GXEEVIMRHKRLXXXXXXXXXYYLMSTASTKVPAXXTSP

SEQ ID NO: 33047 - protein, 32 aa, Artificial Sequence
  Non-cyclic GFR-binding peptide
  MOD_RES (11)..(12)..(13)..(14)..(15): Xaa is A or G
  MOD_RES (16)..(17)..(18)..(19): Xaa is A or G or absent
EEVIMYHYKLXXXXXXXXXKYLMSIPSTKVPA

SEQ ID NO: 33048 - protein, 33 aa, Artificial Sequence
  Non-cyclic GFR-binding peptide
  MOD_RES (12)..(13)..(14)..(15)..(16): Xaa is A or G
  MOD_RES (17)..(18)..(19)..(20): Xaa is A or G or absent
SEVTMNRHKRLXXXXXXXXXYYLISTASMKEPV

SEQ ID NO: 33049 - protein, 42 aa, Artificial Sequence
  Non-cyclic GFR-binding peptide
  MOD_RES (2)..(4)..(36)..(37): Xaa is C or S
SXGXRDVVMGYHYKLIIQQKDNKYLMSIPSMKTPTXXPGASG

SEQ ID NO: 33050 - protein, 34 aa, Artificial Sequence
  Non-cyclic GFR-binding peptide
  MOD_RES (1)..(1): Xaa is C or S
  MOD_RES (13)..(14)..(15)..(16)..(17): Xaa is A or G
  MOD_RES (18)..(19)..(20)..(21): Xaa is A or G or absent
XSEVTMNPIKGYXXXXXXXXXFYLINIPSMKEPV

SEQ ID NO: 33051 - protein, 37 aa, Artificial Sequence
  Non-cyclic GFR-binding peptide
  MOD_RES (2)..(34)..(35): Xaa is C or S
AXSEVTMNRYKKLVVNKNEDFYLISIANMKEPVXXPE

SEQ ID NO: 33052 - protein, 36 aa, Artificial Sequence
  Non-cyclic GFR-binding peptide
  MOD_RES (1)..(33)..(34): Xaa is C or S
XSEVTMNYHYKLVVNKNEDKYLISIPSMKEPVXXPE

SEQ ID NO: 33053 - protein, 42 aa, Artificial Sequence
  Non-cyclic GFR-binding peptide
  MOD_RES (1)..(3)..(37)..(38): Xaa is C or S
  MOD_RES (15)..(16)..(17)..(18)..(19): Xaa is A or G
  MOD_RES (20)..(21)..(22)..(23): Xaa is A or G or absent
XGXRDVVMGEYKFKXXXXXXXXXLYLMSIPEMKTPTXXPGAS

SEQ ID NO: 33054 - protein, 34 aa, Artificial Sequence
  Non-cyclic GFR-binding peptide
  MOD_RES (1)..(3): Xaa is C or S
XAXSEVTMNRHKRLVVNKNEDYYLISTASMKEPV

SEQ ID NO: 33055 - protein, 37 aa, Artificial Sequence
  Non-cyclic GFR-binding peptide
  MOD_RES (2)..(4)..(36)..(37): Xaa is C or S
RXAXSEVTMNRHKRLVVNKNEDYYLISTASMKEPVXX

SEQ ID NO: 33056 - protein, 38 aa, Artificial Sequence
  Non-cyclic GFR-binding peptide
  MOD_RES (1)..(35)..(36): Xaa is C or S
  MOD_RES (13)..(14)..(15)..(16)..(17): Xaa is A or G
  MOD_RES (18)..(19)..(20)..(21): Xaa is A or G or absent
XESVAMGRHKRLXXXXXXXXXYYLISTASLKTPVXXAK

SEQ ID NO: 33057 - protein, 36 aa, Artificial Sequence
  Non-cyclic GFR-binding peptide
  MOD_RES (31)..(32): Xaa is C or S
SRVIMPIKGYVKPKRGVFYLINIPSLAQPVXXPAAS

SEQ ID NO: 33058 - protein, 38 aa, Artificial Sequence
  Non-cyclic GFR-binding peptide
  MOD_RES (1)..(3)..(36)..(37): Xaa is C or S
  MOD_RES (14)..(15)..(16)..(17)..(18): Xaa is A or G
  MOD_RES (19)..(20)..(21)..(22): Xaa is A or G or absent
XGXEEVIMEYKFKXXXXXXXXXLYLMSIPETKVPAXXT

SEQ ID NO: 33059 - protein, 37 aa, Artificial Sequence
  Non-cyclic GFR-binding peptide
  MOD_RES (34)..(35): Xaa is C or S
  MOD_RES (12)..(13)..(14)..(15)..(16): Xaa is A or G
  MOD_RES (17)..(18)..(19)..(20): Xaa is A or G or absent
SEVTMNRHKRLXXXXXXXXXYYLISTASMKEPVXXPE

SEQ ID NO: 33060 - protein, 38 aa, Artificial Sequence
  Non-cyclic GFR-binding peptide
  MOD_RES (1)..(3)..(36)..(37): Xaa is C or S
  MOD_RES (14)..(15)..(16)..(17)..(18): Xaa is A or G
  MOD_RES (19)..(20)..(21)..(22): Xaa is A or G or absent
XKXSKVVMPIKGYXXXXXXXXXFYLINIPSLDQPVXXP

SEQ ID NO: 33061 - protein, 43 aa, Artificial Sequence
  Non-cyclic GFR-binding peptide
  MOD_RES (2)..(4)..(38)..(39): Xaa is C or S
  MOD_RES (16)..(17)..(18)..(19)..(20): Xaa is A or G
  MOD_RES (21)..(22)..(23)..(24): Xaa is A or G or absent
SXGXRDVVMGRHKRLXXXXXXXXXYYLMSTASMKTPTXXPGAS

SEQ ID NO: 33062 - protein, 36 aa, Artificial Sequence
  Non-cyclic GFR-binding peptide
  MOD_RES (2)..(4): Xaa is C or S
  MOD_RES (15)..(16)..(17)..(18)..(19): Xaa is A or G
  MOD_RES (20)..(21)..(22)..(23): Xaa is A or G or absent
LXGXEEVIMYHYKLXXXXXXXXXKYLMSIPSTKVPA

SEQ ID NO: 33063 - protein, 44 aa, Artificial Sequence
  Non-cyclic GFR-binding peptide
  MOD_RES (2)..(4)..(38)..(39): Xaa is C or S
  MOD_RES (16)..(17)..(18)..(19)..(20): Xaa is A or G
  MOD_RES (21)..(22)..(23)..(24): Xaa is A or G or absent
RXAXSEVTMNRYKKLXXXXXXXXXFYLISIANMKEPVXXPEPIG

SEQ ID NO: 33064 - protein, 40 aa, Artificial Sequence
  Non-cyclic GFR-binding peptide
  MOD_RES (34)..(35): Xaa is C or S
  MOD_RES (12)..(13)..(14)..(15)..(16): Xaa is A or G
  MOD_RES (17)..(18)..(19)..(20): Xaa is A or G or absent
SRVVMNEYKFKXXXXXXXXXLYLVSIPELKTPAXXPKPVH

SEQ ID NO: 33065 - protein, 34 aa, Artificial Sequence
  Non-cyclic GFR-binding peptide
  MOD_RES (32)..(33): Xaa is C or S
SEVVMDYHYKLVVNNASDKYLISIPSLRTPVXXT

SEQ ID NO: 33066 - protein, 35 aa, Artificial Sequence
  Non-cyclic GFR-binding peptide
  MOD_RES (1)..(3): Xaa is C or S
  MOD_RES (14)..(15)..(16)..(17)..(18): Xaa is A or G
  MOD_RES (19)..(20)..(21)..(22): Xaa is A or G or absent
XKXSKVVMPIKGYXXXXXXXXXFYLINIPSLDQPV

SEQ ID NO: 33067 - protein, 40 aa, Artificial Sequence
  Non-cyclic GFR-binding peptide
  MOD_RES (2)..(36)..(37): Xaa is C or S
  MOD_RES (14)..(15)..(16)..(17)..(18): Xaa is A or G
  MOD_RES (19)..(20)..(21)..(22): Xaa is A or G or absent
AXSEVTMNRHKRLXXXXXXXXXYYLISTASMKEPVXXPEP

SEQ ID NO: 33068 - protein, 33 aa, Artificial Sequence
  Non-cyclic GFR-binding peptide
  MOD_RES (33)..(33): Xaa is C or S
  MOD_RES (11)..(12)..(13)..(14)..(15): Xaa is A or G
  MOD_RES (16)..(17)..(18)..(19): Xaa is A or G or absent
SRVIMPIKGYXXXXXXXXXFYLINIPSLAQPVX

SEQ ID NO: 33069 - protein, 31 aa, Artificial Sequence
  Non-cyclic GFR-binding peptide
SEVVMDRHKRLVVNNASDYYLISTASLRTPV

SEQ ID NO: 33070 - protein, 39 aa, Artificial Sequence
  Non-cyclic GFR-binding peptide
  MOD_RES (1)..(35)..(36): Xaa is C or S
  MOD_RES (13)..(14)..(15)..(16)..(17): Xaa is A or G
  MOD_RES (18)..(19)..(20)..(21): Xaa is A or G or absent
XSEVTMNRYKKLXXXXXXXXXFYLISIANMKEPVXXPEP

SEQ ID NO: 33071 - protein, 36 aa, Artificial Sequence
  Non-cyclic GFR-binding peptide
  MOD_RES (2)..(36): Xaa is C or S
  MOD_RES (14)..(15)..(16)..(17)..(18): Xaa is A or G
  MOD_RES (19)..(20)..(21)..(22): Xaa is A or G or absent
GXRDVVMGEYKFKXXXXXXXXXLYLMSIPEMKTPTX

SEQ ID NO: 33072 - protein, 43 aa, Artificial Sequence
  Non-cyclic GFR-binding peptide
  MOD_RES (2)..(4)..(37)..(38): Xaa is C or S
  MOD_RES (15)..(16)..(17)..(18)..(19): Xaa is A or G
  MOD_RES (20)..(21)..(22)..(23): Xaa is A or G or absent
LXGXEEVIMEYKFKXXXXXXXXXLYLMSIPETKVPAXXTSPVR

SEQ ID NO: 33073 - protein, 32 aa, Artificial Sequence
  Non-cyclic GFR-binding peptide
  MOD_RES (11)..(12)..(13)..(14)..(15): Xaa is A or G
  MOD_RES (16)..(17)..(18)..(19): Xaa is A or G or absent
EVTMNPIKGYXXXXXXXXXFYLINIPSMKEPV

SEQ ID NO: 33074 - protein, 39 aa, Artificial Sequence
  Non-cyclic GFR-binding peptide
  MOD_RES (2)..(33)..(34): Xaa is C or S
GXEEVIMEYKFKLLVRGNDLYLMSIPETKVPAXXTSPVR

SEQ ID NO: 33075 - protein, 38 aa, Artificial Sequence
  Non-cyclic GFR-binding peptide
  MOD_RES (1)..(33)..(34): Xaa is C or S
XSEVTMNRHKRLVVNKNEDYYLISTASMKEPVXXPEPI

SEQ ID NO: 33076 - protein, 30 aa, Artificial Sequence; identical to SEQ ID NO: 1941
  Non-cyclic GFR-binding peptide

SEQ ID NO: 33077 - protein, 38 aa, Artificial Sequence
  Non-cyclic GFR-binding peptide
  MOD_RES (2)..(4)..(36)..(37): Xaa is C or S
RXAXSEVTMNEYKFKVVNKNEDLYLISIPEMKEPVXXP

SEQ ID NO: 33078 - protein, 38 aa, Artificial Sequence
  Non-cyclic GFR-binding peptide
  MOD_RES (2)..(4)..(37)..(38): Xaa is C or S
  MOD_RES (15)..(16)..(17)..(18)..(19): Xaa is A or G
  MOD_RES (20)..(21)..(22)..(23): Xaa is A or G or absent
LXGXEEVIMYHYKLXXXXXXXXXKYLMSIPSTKVPAXX

SEQ ID NO: 33079 - protein, 32 aa, Artificial Sequence
  Non-cyclic GFR-binding peptide
  MOD_RES (11)..(12)..(13)..(14)..(15): Xaa is A or G
  MOD_RES (16)..(17)..(18)..(19): Xaa is A or G or absent
EVTMNEYKFKXXXXXXXXXLYLISIPEMKEPV

SEQ ID NO: 33080 - protein, 37 aa, Artificial Sequence
  Non-cyclic GFR-binding peptide
  MOD_RES (34)..(35): Xaa is C or S
  MOD_RES (12)..(13)..(14)..(15)..(16): Xaa is A or G
  MOD_RES (17)..(18)..(19)..(20): Xaa is A or G or absent
AEVVMDRHKRLXXXXXXXXXYYLISTASLRAPVXXSA

SEQ ID NO: 33081 - protein, 33 aa, Artificial Sequence
  Non-cyclic GFR-binding peptide
  MOD_RES (33)..(33): Xaa is C or S
  MOD_RES (11)..(12)..(13)..(14)..(15): Xaa is A or G
  MOD_RES (16)..(17)..(18)..(19): Xaa is A or G or absent
SKVVMPIKGYXXXXXXXXXFYLINIPSLDQPVX

SEQ ID NO: 33082 - protein, 38 aa, Artificial Sequence
  Non-cyclic GFR-binding peptide
  MOD_RES (2)..(34)..(35): Xaa is C or S
GXSEVVMDEYKFKVVNNASDLYLISIPELRTPVXXTPP

SEQ ID NO: 33083 - protein, 35 aa, Artificial Sequence
  Non-cyclic GFR-binding peptide
  MOD_RES (2)..(34)..(35): Xaa is C or S
AXSEVTMNEYKFKVVNKNEDLYLISIPEMKEPVXX

SEQ ID NO: 33084 - protein, 32 aa, Artificial Sequence
  Non-cyclic GFR-binding peptide
  MOD_RES (32)..(32): Xaa is C or S
RDVVMGEYKFKIIQQKDNLYLMSIPEMKTPTX

SEQ ID NO: 33085 - protein, 32 aa, Artificial Sequence
  Non-cyclic GFR-binding peptide
  MOD_RES (11)..(12)..(13)..(14)..(15): Xaa is A or G
  MOD_RES (16)..(17)..(18)..(19): Xaa is A or G or absent
SKVIMPIKGYXXXXXXXXXFYLINIPSLDQSV

SEQ ID NO: 33086 - protein, 38 aa, Artificial Sequence
  Non-cyclic GFR-binding peptide
  MOD_RES (34)..(35): Xaa is C or S
  MOD_RES (12)..(13)..(14)..(15)..(16): Xaa is A or G
  MOD_RES (17)..(18)..(19)..(20): Xaa is A or G or absent
RDVVMGEYKFKXXXXXXXXXLYLMSIPEMKTPTXXPGA

SEQ ID NO: 33087 - protein, 34 aa, Artificial Sequence
  Non-cyclic GFR-binding peptide
  MOD_RES (1)..(32)..(33): Xaa is C or S
XSKVIMPIKGYIKPTKGIFYLINIPSLDQSVXXP

SEQ ID NO: 33088 - protein, 38 aa, Artificial Sequence
  Non-cyclic GFR-binding peptide
  MOD_RES (32)..(33): Xaa is C or S
SEVTMNYHYKLVVNKNEDKYLISIPSMKEPVXXPEPIG

SEQ ID NO: 33089 - protein, 33 aa, Artificial Sequence
  Non-cyclic GFR-binding peptide
  MOD_RES (1)..(33): Xaa is C or S
XSEVTMNYHYKLVVNKNEDKYLISIPSMKEPVX

SEQ ID NO: 33090 - protein, 38 aa, Artificial Sequence
  Non-cyclic GFR-binding peptide
  MOD_RES (2)..(35)..(36): Xaa is C or S
  MOD_RES (13)..(14)..(15)..(16)..(17): Xaa is A or G
  MOD_RES (18)..(19)..(20)..(21): Xaa is A or G or absent
GXEEVIMEYKFKXXXXXXXXXLYLMSIPETKVPAXXTS

SEQ ID NO: 33091 - protein, 40 aa, Artificial Sequence
  Non-cyclic GFR-binding peptide
  MOD_RES (2)..(34)..(35): Xaa is C or S
GXESVAMGRHKRLYTVVGKDYYLISTASLKTPVXXAKSAK

SEQ ID NO: 33092 - protein, 36 aa, Artificial Sequence
  Non-cyclic GFR-binding peptide
  MOD_RES (32)..(33): Xaa is C or S
SEVTMNRYKKLVVNKNEDFYLISIANMKEPVXXPEP

SEQ ID NO: 33093 - protein, 31 aa, Artificial Sequence
  Non-cyclic GFR-binding peptide
SEVTMNRHKRLVVNKNEDYYLISTASMKEPV

SEQ ID NO: 33094 - protein, 39 aa, Artificial Sequence
  Non-cyclic GFR-binding peptide
  MOD_RES (1)..(33)..(34): Xaa is C or S
XSRVVMNRHKRLIVNSSDDYYLVSTASLKTPAXXPKPVH

SEQ ID NO: 33095 - protein, 36 aa, Artificial Sequence
  Non-cyclic GFR-binding peptide
  MOD_RES (2)..(4)..(36): Xaa is C or S
RXAXSEVTMNPIKGYVVNKNEDFYLINIPSMKEPVX

SEQ ID NO: 33096 - protein, 39 aa, Artificial Sequence
  Non-cyclic GFR-binding peptide
  MOD_RES (1)..(3)..(35)..(36): Xaa is C or S
XGXRDVVMGEYKFKIIQQKDNLYLMSIPEMKTPTXXPGA

SEQ ID NO: 33097 - protein, 37 aa, Artificial Sequence
  Non-cyclic GFR-binding peptide
  MOD_RES (33)..(34): Xaa is C or S
  MOD_RES (11)..(12)..(13)..(14)..(15): Xaa is A or G
  MOD_RES (16)..(17)..(18)..(19): Xaa is A or G or absent
EVTMNYHYKLXXXXXXXXXKYLISIPSMKEPVXXPEP

SEQ ID NO: 33098 - protein, 33 aa, Artificial Sequence
  Non-cyclic GFR-binding peptide
  MOD_RES (33)..(33): Xaa is C or S
  MOD_RES (11)..(12)..(13)..(14)..(15): Xaa is A or G
  MOD_RES (16)..(17)..(18)..(19): Xaa is A or G or absent
EVTMNPIKGYXXXXXXXXXFYLINIPSMKEPVX

SEQ ID NO: 33099 - protein, 40 aa, Artificial Sequence
  Non-cyclic GFR-binding peptide
  MOD_RES (2)..(4)..(35)..(36): Xaa is C or S
SXKXSRVIMPIKGYVKPKRGVFYLINIPSLAQPVXXPAAS

SEQ ID NO: 33100 - protein, 39 aa, Artificial Sequence
  Non-cyclic GFR-binding peptide
  MOD_RES (33)..(34): Xaa is C or S
  MOD_RES (11)..(12)..(13)..(14)..(15): Xaa is A or G
  MOD_RES (16)..(17)..(18)..(19): Xaa is A or G or absent
RVVMNEYKFKXXXXXXXXXLYLVSIPELKTPAXXPKPVH

SEQ ID NO: 33101 - protein, 37 aa, Artificial Sequence
  Non-cyclic GFR-binding peptide
  MOD_RES (1)..(3)..(34)..(35): Xaa is C or S
XKXSKVVMPIKGYVKPTRGVFYLINIPSLDQPVXXPS

SEQ ID NO: 33102 - protein, 36 aa, Artificial Sequence
  Non-cyclic GFR-binding peptide
  MOD_RES (31)..(32): Xaa is C or S
SVAMGRHKRLYTVVGKDYYLISTASLKTPVXXAKSA

SEQ ID NO: 33103 - protein, 35 aa, Artificial Sequence
  Non-cyclic GFR-binding peptide
  MOD_RES (1)..(3): Xaa is C or S
  MOD_RES (14)..(15)..(16)..(17)..(18): Xaa is A or G
  MOD_RES (19)..(20)..(21)..(22): Xaa is A or G or absent
XGXEEVIMRHKRLXXXXXXXXXYYLMSTASTKVPA

SEQ ID NO: 33104 - protein, 38 aa, Artificial Sequence
  Non-cyclic GFR-binding peptide
  MOD_RES (1)..(34)..(35): Xaa is C or S
  MOD_RES (12)..(13)..(14)..(15)..(16): Xaa is A or G
  MOD_RES (17)..(18)..(19)..(20): Xaa is A or G or absent
XSKVVMPIKGYXXXXXXXXXFYLINIPSLDQPVXXPSA

SEQ ID NO: 33105 - protein, 36 aa, Artificial Sequence
  Non-cyclic GFR-binding peptide
  MOD_RES (32)..(33): Xaa is C or S
SEVTMNRHKRLVVNKNEDYYLISTASMKEPVXXPEP

SEQ ID NO: 33106 - protein, 36 aa, Artificial Sequence
  Non-cyclic GFR-binding peptide
  MOD_RES (34)..(35): Xaa is C or S
  MOD_RES (12)..(13)..(14)..(15)..(16): Xaa is A or G
  MOD_RES (17)..(18)..(19)..(20): Xaa is A or G or absent
SEVVMDEYKFKXXXXXXXXXLYLISIPELRTPVXXT

SEQ ID NO: 33107 - protein, 34 aa, Artificial Sequence
  Non-cyclic GFR-binding peptide
  MOD_RES (1)..(3): Xaa is C or S
XGXSEVVMDYHYKLVVNNASDKYLISIPSLRTPV

SEQ ID NO: 33108 - protein, 35 aa, Artificial Sequence
  Non-cyclic GFR-binding peptide
  MOD_RES (1)..(35): Xaa is C or S
  MOD_RES (13)..(14)..(15)..(16)..(17): Xaa is A or G
  MOD_RES (18)..(19)..(20)..(21): Xaa is A or G or absent
XSEVTMNPIKGYXXXXXXXXXFYLINIPSMKEPVX

SEQ ID NO: 33109 - protein, 36 aa, Artificial Sequence
  Non-cyclic GFR-binding peptide
  MOD_RES (1)..(32)..(33): Xaa is C or S
XSKVVMPIKGYVKPTRGVFYLINIPSLDQPVXXPSA

SEQ ID NO: 33110 - protein, 38 aa, Artificial Sequence
  Non-cyclic GFR-binding peptide
  MOD_RES (33)..(34): Xaa is C or S
  MOD_RES (11)..(12)..(13)..(14)..(15): Xaa is A or G
  MOD_RES (16)..(17)..(18)..(19): Xaa is A or G or absent
EEVIMRHKRLXXXXXXXXXYYLMSTASTKVPAXXTSPV

SEQ ID NO: 33111 - protein, 36 aa, Artificial Sequence
  Non-cyclic GFR-binding peptide
  MOD_RES (1)..(3)..(35)..(36): Xaa is C or S
XAXSEVTMNRYKKLVVNKNEDFYLISIANMKEPVXX

SEQ ID NO: 33112 - protein, 37 aa, Artificial Sequence
  Non-cyclic GFR-binding peptide
  MOD_RES (31)..(32): Xaa is C or S
RVVMNYHYKLIVNSSDDKYLVSIPSLKTPAXXPKPVH

SEQ ID NO: 33113 - protein, 34 aa, Artificial Sequence
  Non-cyclic GFR-binding peptide
  MOD_RES (1)..(3): Xaa is C or S
XGXSEVVMDEYKFKVVNNASDLYLISIPELRTPV

SEQ ID NO: 33114 - protein, 37 aa, Artificial Sequence
  Non-cyclic GFR-binding peptide
  MOD_RES (2)..(4): Xaa is C or S
  MOD_RES (16)..(17)..(18)..(19)..(20): Xaa is A or G
  MOD_RES (21)..(22)..(23)..(24): Xaa is A or G or absent
RXGXESVAMGRHKRLXXXXXXXXXYYLISTASLKTPV

SEQ ID NO: 33115 - protein, 30 aa, Artificial Sequence
  Non-cyclic GFR-binding peptide
EVTMNRYKKLVVNKNEDFYLISIANMKEPV

SEQ ID NO: 33116 - protein, 36 aa, Artificial Sequence
  Non-cyclic GFR-binding peptide
  MOD_RES (1)..(34)..(35): Xaa is C or S
  MOD_RES (12)..(13)..(14)..(15)..(16): Xaa is A or G
  MOD_RES (17)..(18)..(19)..(20): Xaa is A or G or absent
XEEVIMEYKFKXXXXXXXXXLYLMSIPETKVPAXXT

SEQ ID NO: 33117 - protein, 35 aa, Artificial Sequence
  Non-cyclic GFR-binding peptide
  MOD_RES (2)..(33)..(34): Xaa is C or S
KXSKVIMPIKGYIKPTKGIFYLINIPSLDQSVXXP

SEQ ID NO: 33118 - protein, 42 aa, Artificial Sequence
  Non-cyclic GFR-binding peptide
  MOD_RES (2)..(36)..(37): Xaa is C or S
  MOD_RES (14)..(15)..(16)..(17)..(18): Xaa is A or G
  MOD_RES (19)..(20)..(21)..(22): Xaa is A or G or absent
GXESVAMGRHKRLXXXXXXXXXYYLISTASLKTPVXXAKSAK

SEQ ID NO: 33119 - protein, 31 aa, Artificial Sequence
  Non-cyclic GFR-binding peptide
  MOD_RES (31)..(31): Xaa is C or S
SKVIMPIKGYIKPTKGIFYLINIPSLDQSVX

SEQ ID NO: 33120 - protein, 33 aa, Artificial Sequence
  Non-cyclic GFR-binding peptide
  MOD_RES (2)..(2): Xaa is C or S
GXSEVVMDEYKFKVVNNASDLYLISIPELRTPV

SEQ ID NO: 33121 - protein, 34 aa, Artificial Sequence
  Non-cyclic GFR-binding peptide
  MOD_RES (1)..(33)..(34): Xaa is C or S
XESVAMGRHKRLYTVVGKDYYLISTASLKTPVXX

SEQ ID NO: 33122 - protein, 33 aa, Artificial Sequence
  Non-cyclic GFR-binding peptide
  MOD_RES (12)..(13)..(14)..(15)..(16): Xaa is A or G
  MOD_RES (17)..(18)..(19)..(20): Xaa is A or G or absent
SEVTMNPIKGYXXXXXXXXXFYLINIPSMKEPV

SEQ ID NO: 33123 - protein, 38 aa, Artificial Sequence
  Non-cyclic GFR-binding peptide
  MOD_RES (1)..(33)..(34): Xaa is C or S
XSEVVMDRHKRLVVNNASDYYLISTASLRTPVXXTPPT

SEQ ID NO: 33124 - protein, 35 aa, Artificial Sequence
  Non-cyclic GFR-binding peptide
  MOD_RES (2)..(4): Xaa is C or S
SXGXRDVVMGEYKFKIIQQKDNLYLMSIPEMKTPT

SEQ ID NO: 33125 - protein, 40 aa, Artificial Sequence
  Non-cyclic GFR-binding peptide
  MOD_RES (1)..(35)..(36): Xaa is C or S
  MOD_RES (13)..(14)..(15)..(16)..(17): Xaa is A or G
  MOD_RES (18)..(19)..(20)..(21): Xaa is A or G or absent
XAEVVMDRHKRLXXXXXXXXXYYLISTASLRAPVXXSAPA

SEQ ID NO: 33126 - protein, 40 aa, Artificial Sequence
  Non-cyclic GFR-binding peptide
  MOD_RES (2)..(36)..(37): Xaa is C or S
  MOD_RES (14)..(15)..(16)..(17)..(18): Xaa is A or G
  MOD_RES (19)..(20)..(21)..(22): Xaa is A or G or absent
AXSEVTMNYHYKLXXXXXXXXXKYLISIPSMKEPVXXPEP

SEQ ID NO: 33127 - protein, 41 aa, Artificial Sequence
  Non-cyclic GFR-binding peptide
  MOD_RES (2)..(4)..(36)..(37): Xaa is C or S
RXGXSEVVMDRHKRLVVNNASDYYLISTASLRTPVXXTPPT

SEQ ID NO: 33128 - protein, 35 aa, Artificial Sequence
  Non-cyclic GFR-binding peptide
  MOD_RES (2)..(4): Xaa is C or S
SXGXRDVVMGYHYKLIIQQKDNKYLMSIPSMKTPT

SEQ ID NO: 33129 - protein, 39 aa, Artificial Sequence
  Non-cyclic GFR-binding peptide
  MOD_RES (1)..(3)..(36)..(37): Xaa is C or S
  MOD_RES (14)..(15)..(16)..(17)..(18): Xaa is A or G
  MOD_RES (19)..(20)..(21)..(22): Xaa is A or G or absent
XKXSRVIMPIKGYXXXXXXXXXFYLINIPSLAQPVXXPA

SEQ ID NO: 33130 - protein, 39 aa, Artificial Sequence
  Non-cyclic GFR-binding peptide
  MOD_RES (1)..(3)..(34)..(35): Xaa is C or S
XGXEEVIMYHYKLLLVRGNDKYLMSIPSTKVPAXXTSPV

SEQ ID NO: 33131 - protein, 31 aa, Artificial Sequence
  Non-cyclic GFR-binding peptide
  MOD_RES (31)..(31): Xaa is C or S
EVVMDRHKRLVVNNAADYYLISTASLRAPVX

SEQ ID NO: 33132 - protein, 42 aa, Artificial Sequence
  Non-cyclic GFR-binding peptide
  MOD_RES (2)..(4)..(38)..(39): Xaa is C or S
  MOD_RES (16)..(17)..(18)..(19)..(20): Xaa is A or G
  MOD_RES (21)..(22)..(23)..(24): Xaa is A or G or absent
RXGXSEVVMDEYKFKXXXXXXXXXLYLISIPELRTPVXXTPP

SEQ ID NO: 33133 - protein, 38 aa, Artificial Sequence
  Non-cyclic GFR-binding peptide
  MOD_RES (1)..(3)..(35)..(36): Xaa is C or S
XGXSEVVMDEYKFKVVNNASDLYLISIPELRTPVXXTP

SEQ ID NO: 33134 - protein, 36 aa, Artificial Sequence
  Non-cyclic GFR-binding peptide
  MOD_RES (1)..(3)..(36): Xaa is C or S
  MOD_RES (14)..(15)..(16)..(17)..(18): Xaa is A or G
  MOD_RES (19)..(20)..(21)..(22): Xaa is A or G or absent
XKXSKVVMPIKGYXXXXXXXXXFYLINIPSLDQPVX

SEQ ID NO: 33135 - protein, 35 aa, Artificial Sequence
  Non-cyclic GFR-binding peptide
  MOD_RES (1)..(33)..(34): Xaa is C or S
XESVAMGRHKRLYTVVGKDYYLISTASLKTPVXXA

SEQ ID NO: 33136 - protein, 42 aa, Artificial Sequence
  Non-cyclic GFR-binding peptide
  MOD_RES (1)..(3)..(37)..(38): Xaa is C or S
  MOD_RES (15)..(16)..(17)..(18)..(19): Xaa is A or G
  MOD_RES (20)..(21)..(22)..(23): Xaa is A or G or absent
XGXRDVVMGRHKRLXXXXXXXXXYYLMSTASMKTPTXXPGAS

SEQ ID NO: 33137 - protein, 38 aa, Artificial Sequence
  Non-cyclic GFR-binding peptide
  MOD_RES (34)..(35): Xaa is C or S
  MOD_RES (12)..(13)..(14)..(15)..(16): Xaa is A or G
  MOD_RES (17)..(18)..(19)..(20): Xaa is A or G or absent
ESVAMGRHKRLXXXXXXXXXYYLISTASLKTPVXXAKS

SEQ ID NO: 33138 - protein, 37 aa, Artificial Sequence
  Non-cyclic GFR-binding peptide
  MOD_RES (2)..(4)..(35)..(36): Xaa is C or S
SXKXSRVIMPIKGYVKPKRGVFYLINIPSLAQPVXXP

SEQ ID NO: 33139 - protein, 34 aa, Artificial Sequence
  Non-cyclic GFR-binding peptide
  MOD_RES (2)..(4): Xaa is C or S
LXGXEEVIMYHYKLLLVRGNDKYLMSIPSTKVPA

SEQ ID NO: 33140 - protein, 39 aa, Artificial Sequence
  Non-cyclic GFR-binding peptide
  MOD_RES (1)..(3)..(35)..(36): Xaa is C or S
XAXSEVTMNPIKGYVVNKNEDFYLINIPSMKEPVXXPEP

SEQ ID NO: 33141 - protein, 38 aa, Artificial Sequence
  Non-cyclic GFR-binding peptide
  MOD_RES (1)..(3)..(35)..(36): Xaa is C or S
XAXSEVTMNRHKRLVVNKNEDYYLISTASMKEPVXXPE

SEQ ID NO: 33142 - protein, 41 aa, Artificial Sequence
  Non-cyclic GFR-binding peptide
  MOD_RES (2)..(36)..(37): Xaa is C or S
  MOD_RES (14)..(15)..(16)..(17)..(18): Xaa is A or G
  MOD_RES (19)..(20)..(21)..(22): Xaa is A or G or absent
GXESVAMGRHKRLXXXXXXXXXYYLISTASLKTPVXXAKSA

SEQ ID NO: 33143 - protein, 37 aa, Artificial Sequence
  Non-cyclic GFR-binding peptide
  MOD_RES (31)..(32): Xaa is C or S
EEVIMYHYKLLLVRGNDKYLMSIPSTKVPAXXTSPVR

SEQ ID NO: 33144 - protein, 33 aa, Artificial Sequence
  Non-cyclic GFR-binding peptide
  MOD_RES (1)..(33): Xaa is C or S
XRDVVMGEYKFKIIQQKDNLYLMSIPEMKTPTX

SEQ ID NO: 33145 - protein, 32 aa, Artificial Sequence
  Non-cyclic GFR-binding peptide
  MOD_RES (1)..(1): Xaa is C or S
XSEVTMNYHYKLVVNKNEDKYLISIPSMKEPV

SEQ ID NO: 33146 - protein, 35 aa, Artificial Sequence
  Non-cyclic GFR-binding peptide
  MOD_RES (31)..(32): Xaa is C or S
EVVMDEYKFKVVNNASDLYLISIPELRTPVXXTPP

SEQ ID NO: 33147 - protein, 37 aa, Artificial Sequence
  Non-cyclic GFR-binding peptide
  MOD_RES (33)..(34): Xaa is C or S
  MOD_RES (11)..(12)..(13)..(14)..(15): Xaa is A or G
  MOD_RES (16)..(17)..(18)..(19): Xaa is A or G or absent
EVVMDRHKRLXXXXXXXXXYYLISTASLRTPVXXTPP

SEQ ID NO: 33148 - protein, 43 aa, Artificial Sequence
  Non-cyclic GFR-binding peptide
  MOD_RES (2)..(4)..(38)..(39): Xaa is C or S
  MOD_RES (16)..(17)..(18)..(19)..(20): Xaa is A or G
  MOD_RES (21)..(22)..(23)..(24): Xaa is A or G or absent
RXGXESVAMGRHKRLXXXXXXXXXYYLISTASLKTPVXXAKSA

SEQ ID NO: 33149 - protein, 36 aa, Artificial Sequence
  Non-cyclic GFR-binding peptide
  MOD_RES (1)..(3): Xaa is C or S
  MOD_RES (15)..(16)..(17)..(18)..(19): Xaa is A or G
  MOD_RES (20)..(21)..(22)..(23): Xaa is A or G or absent
XGXESVAMGRHKRLXXXXXXXXXYYLISTASLKTPV

SEQ ID NO: 33150 - protein, 41 aa, Artificial Sequence
  Non-cyclic GFR-binding peptide
  MOD_RES (2)..(4)..(36)..(37): Xaa is C or S
RXAXSEVTMNRHKRLVVNKNEDYYLISTASMKEPVXXPEPI

SEQ ID NO: 33151 - protein, 39 aa, Artificial Sequence
  Non-cyclic GFR-binding peptide
  MOD_RES (1)..(35)..(36): Xaa is C or S
  MOD_RES (13)..(14)..(15)..(16)..(17): Xaa is A or G
  MOD_RES (18)..(19)..(20)..(21): Xaa is A or G or absent
XRDVVMGEYKFKXXXXXXXXXLYLMSIPEMKTPTXXPGA

SEQ ID NO: 33152 - protein, 38 aa, Artificial Sequence
  Non-cyclic GFR-binding peptide
  MOD_RES (32)..(33): Xaa is C or S
AEVVMDRHKRLVVNNAADYYLISTASLRAPVXXSAPAA

SEQ ID NO: 33153 - protein, 37 aa, Artificial Sequence
  Non-cyclic GFR-binding peptide
  MOD_RES (1)..(35)..(36): Xaa is C or S
  MOD_RES (13)..(14)..(15)..(16)..(17): Xaa is A or G
  MOD_RES (18)..(19)..(20)..(21): Xaa is A or G or absent
XSEVVMDRHKRLXXXXXXXXXYYLISTASLRTPVXXT

SEQ ID NO: 33154 - protein, 36 aa, Artificial Sequence
  Non-cyclic GFR-binding peptide
  MOD_RES (1)..(3)..(36): Xaa is C or S
  MOD_RES (14)..(15)..(16)..(17)..(18): Xaa is A or G
  MOD_RES (19)..(20)..(21)..(22): Xaa is A or G or absent
XGXEEVIMRHKRLXXXXXXXXXYYLMSTASTKVPAX

SEQ ID NO: 33155 - protein, 38 aa, Artificial Sequence
  Non-cyclic GFR-binding peptide
  MOD_RES (34)..(35): Xaa is C or S
  MOD_RES (12)..(13)..(14)..(15)..(16): Xaa is A or G
  MOD_RES (17)..(18)..(19)..(20): Xaa is A or G or absent
SEVVMDYHYKLXXXXXXXXXKYLISIPSLRTPVXXTPP

SEQ ID NO: 33156 - protein, 39 aa, Artificial Sequence
  Non-cyclic GFR-binding peptide
  MOD_RES (1)..(3)..(36)..(37): Xaa is C or S
  MOD_RES (14)..(15)..(16)..(17)..(18): Xaa is A or G
  MOD_RES (19)..(20)..(21)..(22): Xaa is A or G or absent
XKXSKVVMPIKGYXXXXXXXXXFYLINIPSLDQPVXXPS

SEQ ID NO: 33157 - protein, 39 aa, Artificial Sequence
  Non-cyclic GFR-binding peptide
  MOD_RES (2)..(35)..(36): Xaa is C or S
  MOD_RES (13)..(14)..(15)..(16)..(17): Xaa is A or G
  MOD_RES (18)..(19)..(20)..(21): Xaa is A or G or absent
KXSKVIMPIKGYXXXXXXXXXFYLINIPSLDQSVXXPSA

SEQ ID NO: 33158 - protein, 36 aa, Artificial Sequence
  Non-cyclic GFR-binding peptide
  MOD_RES (1)..(34)..(35): Xaa is C or S
  MOD_RES (12)..(13)..(14)..(15)..(16): Xaa is A or G
  MOD_RES (17)..(18)..(19)..(20): Xaa is A or G or absent
XSKVVMPIKGYXXXXXXXXXFYLINIPSLDQPVXXP

SEQ ID NO: 33159 - protein, 39 aa, Artificial Sequence
  Non-cyclic GFR-binding peptide
  MOD_RES (1)..(33)..(34): Xaa is C or S
XESVAMGRHKRLYTVVGKDYYLISTASLKTPVXXAKSAK

SEQ ID NO: 33160 - protein, 40 aa, Artificial Sequence
  Non-cyclic GFR-binding peptide
  MOD_RES (2)..(4)..(38)..(39): Xaa is C or S
  MOD_RES (16)..(17)..(18)..(19)..(20): Xaa is A or G
  MOD_RES (21)..(22)..(23)..(24): Xaa is A or G or absent
RXAXSEVTMNPIKGYXXXXXXXXXFYLINIPSMKEPVXXP

SEQ ID NO: 33161 - protein, 39 aa, Artificial Sequence
  Non-cyclic GFR-binding peptide
  MOD_RES (2)..(4)..(35)..(36): Xaa is C or S
LXGXEEVIMEYKFKLLVRGNDLYLMSIPETKVPAXXTSP

SEQ ID NO: 33162 - protein, 40 aa, Artificial Sequence
  Non-cyclic GFR-binding peptide
  MOD_RES (2)..(4)..(36)..(37): Xaa is C or S
RXGXSEVVMDEYKFKVVNNASDLYLISIPELRTPVXXTPP

SEQ ID NO: 33163 - protein, 32 aa, Artificial Sequence
  Non-cyclic GFR-binding peptide
  MOD_RES (1)..(1): Xaa is C or S
XSEVTMNRYKKLVVNKNEDFYLISIANMKEPV

SEQ ID NO: 33164 - protein, 34 aa, Artificial Sequence
  Non-cyclic GFR-binding peptide
  MOD_RES (1)..(3)..(34): Xaa is C or S
XKXSKVVMPIKGYVKPTRGVFYLINIPSLDQPVX

SEQ ID NO: 33165 - protein, 39 aa, Artificial Sequence
  Non-cyclic GFR-binding peptide
  MOD_RES (2)..(33)..(34): Xaa is C or S
KXSKVIMPIKGYIKPTKGIFYLINIPSLDQSVXXPSASA

SEQ ID NO: 33166 - protein, 37 aa, Artificial Sequence
  Non-cyclic GFR-binding peptide
  MOD_RES (2)..(4)..(36)..(37): Xaa is C or S
RXGXSEVVMDRHKRLVVNNASDYYLISTASLRTPVXX

SEQ ID NO: 33167 - protein, 42 aa, Artificial Sequence
  Non-cyclic GFR-binding peptide
  MOD_RES (2)..(4)..(38)..(39): Xaa is C or S
  MOD_RES (16)..(17)..(18)..(19)..(20): Xaa is A or G
  MOD_RES (21)..(22)..(23)..(24): Xaa is A or G or absent
SXGXRDVVMGRHKRLXXXXXXXXXYYLMSTASMKTPTXXPGA

SEQ ID NO: 33168 - protein, 38 aa, Artificial Sequence
  Non-cyclic GFR-binding peptide
  MOD_RES (2)..(4)..(36)..(37): Xaa is C or S
RXAXSEVTMNYHYKLVVNKNEDKYLISIPSMKEPVXXP

SEQ ID NO: 33169 - protein, 39 aa, Artificial Sequence
  Non-cyclic GFR-binding peptide
  MOD_RES (1)..(3)..(37)..(38): Xaa is C or S
  MOD_RES (15)..(16)..(17)..(18)..(19): Xaa is A or G
  MOD_RES (20)..(21)..(22)..(23): Xaa is A or G or absent
XAXSEVTMNRYKKLXXXXXXXXXFYLISIANMKEPVXXP

SEQ ID NO: 33170 - protein, 33 aa, Artificial Sequence
  Non-cyclic GFR-binding peptide
  MOD_RES (2)..(2): Xaa is C or S
AXSEVTMNPIKGYVVNKNEDFYLINIPSMKEPV

SEQ ID NO: 33171 - protein, 37 aa, Artificial Sequence
  Non-cyclic GFR-binding peptide
  MOD_RES (1)..(32)..(33): Xaa is C or S
XEEVIMEYKFKLLVRGNDLYLMSIPETKVPAXXTSPV

SEQ ID NO: 33172 - protein, 40 aa, Artificial Sequence
  Non-cyclic GFR-binding peptide
  MOD_RES (1)..(3)..(36)..(37): Xaa is C or S
  MOD_RES (14)..(15)..(16)..(17)..(18): Xaa is A or G
  MOD_RES (19)..(20)..(21)..(22): Xaa is A or G or absent
XKXSKVVMPIKGYXXXXXXXXXFYLINIPSLDQPVXXPSA

SEQ ID NO: 33173 - protein, 36 aa, Artificial Sequence
  Non-cyclic GFR-binding peptide
  MOD_RES (1)..(3)..(36): Xaa is C or S
  MOD_RES (14)..(15)..(16)..(17)..(18): Xaa is A or G
  MOD_RES (19)..(20)..(21)..(22): Xaa is A or G or absent
XGXEEVIMEYKFKXXXXXXXXXLYLMSIPETKVPAX

SEQ ID NO: 33174 - protein, 40 aa, Artificial Sequence
  Non-cyclic GFR-binding peptide
  MOD_RES (2)..(36)..(37): Xaa is C or S
  MOD_RES (14)..(15)..(16)..(17)..(18): Xaa is A or G
  MOD_RES (19)..(20)..(21)..(22): Xaa is A or G or absent
GXESVAMGRHKRLXXXXXXXXXYYLISTASLKTPVXXAKS

SEQ ID NO: 33175 - protein, 34 aa, Artificial Sequence
  Non-cyclic GFR-binding peptide
  MOD_RES (1)..(34): Xaa is C or S
  MOD_RES (12)..(13)..(14)..(15)..(16): Xaa is A or G
  MOD_RES (17)..(18)..(19)..(20): Xaa is A or G or absent
XSKVIMPIKGYXXXXXXXXXFYLINIPSLDQSVX

SEQ ID NO: 33176 - protein, 32 aa, Artificial Sequence
  Non-cyclic GFR-binding peptide
  MOD_RES (31)..(32): Xaa is C or S
EVVMDRHKRLVVNNAADYYLISTASLRAPVXX

SEQ ID NO: 33177 - protein, 31 aa, Artificial Sequence
  Non-cyclic GFR-binding peptide
  MOD_RES (31)..(31): Xaa is C or S
EEVIMYHYKLLLVRGNDKYLMSIPSTKVPAX

SEQ ID NO: 33178 - protein, 37 aa, Artificial Sequence
  Non-cyclic GFR-binding peptide
  MOD_RES (2)..(34)..(35): Xaa is C or S
AXSEVTMNPIKGYVVNKNEDFYLINIPSMKEPVXXPE

SEQ ID NO: 33179 - protein, 41 aa, Artificial Sequence
  Non-cyclic GFR-binding peptide
  MOD_RES (1)..(3)..(37)..(38): Xaa is C or S
  MOD_RES (15)..(16)..(17)..(18)..(19): Xaa is A or G
  MOD_RES (20)..(21)..(22)..(23): Xaa is A or G or absent
XGXRDVVMGYHYKLXXXXXXXXXKYLMSIPSMKTPTXXPGA

SEQ ID NO: 33180 - protein, 36 aa, Artificial Sequence
  Non-cyclic GFR-binding peptide
  MOD_RES (33)..(34): Xaa is C or S
  MOD_RES (11)..(12)..(13)..(14)..(15): Xaa is A or G
  MOD_RES (16)..(17)..(18)..(19): Xaa is A or G or absent
SKVIMPIKGYXXXXXXXXXFYLINIPSLDQSVXXPS

SEQ ID NO: 33181 - protein, 37 aa, Artificial Sequence
  Non-cyclic GFR-binding peptide
  MOD_RES (33)..(34): Xaa is C or S
  MOD_RES (11)..(12)..(13)..(14)..(15): Xaa is A or G
  MOD_RES (16)..(17)..(18)..(19): Xaa is A or G or absent
EVTMNPIKGYXXXXXXXXXFYLINIPSMKEPVXXPEP

SEQ ID NO: 33182 - protein, 38 aa, Artificial Sequence
  Non-cyclic GFR-binding peptide
  MOD_RES (1)..(3)..(37)..(38): Xaa is C or S
  MOD_RES (15)..(16)..(17)..(18)..(19): Xaa is A or G
  MOD_RES (20)..(21)..(22)..(23): Xaa is A or G or absent
XGXESVAMGRHKRLXXXXXXXXXYYLISTASLKTPVXX

SEQ ID NO: 33183 - protein, 38 aa, Artificial Sequence
  Non-cyclic GFR-binding peptide
  MOD_RES (1)..(3)..(35)..(36): Xaa is C or S
XGXSEVVMDYHYKLVVNNASDKYLISIPSLRTPVXXTP

SEQ ID NO: 33184 - protein, 35 aa, Artificial Sequence
  Non-cyclic GFR-binding peptide
  MOD_RES (34)..(35): Xaa is C or S
  MOD_RES (12)..(13)..(14)..(15)..(16): Xaa is A or G
  MOD_RES (17)..(18)..(19)..(20): Xaa is A or G or absent
SEVTMNPIKGYXXXXXXXXXFYLINIPSMKEPVXX

SEQ ID NO: 33185 - protein, 38 aa, Artificial Sequence
  Non-cyclic GFR-binding peptide
  MOD_RES (1)..(35)..(36): Xaa is C or S
  MOD_RES (13)..(14)..(15)..(16)..(17): Xaa is A or G
  MOD_RES (18)..(19)..(20)..(21): Xaa is A or G or absent
XRDVVMGRHKRLXXXXXXXXXYYLMSTASMKTPTXXPG

SEQ ID NO: 33186 - protein, 39 aa, Artificial Sequence
  Non-cyclic GFR-binding peptide
  MOD_RES (1)..(3)..(37)..(38): Xaa is C or S
  MOD_RES (15)..(16)..(17)..(18)..(19): Xaa is A or G
  MOD_RES (20)..(21)..(22)..(23): Xaa is A or G or absent
XGXRDVVMGRHKRLXXXXXXXXXYYLMSTASMKTPTXXP

SEQ ID NO: 33187 - protein, 35 aa, Artificial Sequence
  Non-cyclic GFR-binding peptide
  MOD_RES (1)..(34)..(35): Xaa is C or S
  MOD_RES (12)..(13)..(14)..(15)..(16): Xaa is A or G
  MOD_RES (17)..(18)..(19)..(20): Xaa is A or G or absent
XEEVIMRHKRLXXXXXXXXXYYLMSTASTKVPAXX

SEQ ID NO: 33188 - protein, 32 aa, Artificial Sequence
  Non-cyclic GFR-binding peptide
  MOD_RES (31)..(32): Xaa is C or S
SKVIMPIKGYIKPTKGIFYLINIPSLDQSVXX

SEQ ID NO: 33189 - protein, 34 aa, Artificial Sequence
  Non-cyclic GFR-binding peptide
  MOD_RES (31)..(32): Xaa is C or S
SKVIMPIKGYIKPTKGIFYLINIPSLDQSVXXPS

SEQ ID NO: 33190 - protein, 32 aa, Artificial Sequence
  Non-cyclic GFR-binding peptide
  MOD_RES (1)..(1): Xaa is C or S
XESVAMGRHKRLYTVVGKDYYLISTASLKTPV

SEQ ID NO: 33191 - protein, 30 aa, Artificial Sequence
  Non-cyclic GFR-binding peptide
DVVMGYHYKLIIQQKDNKYLMSIPSMKTPT

SEQ ID NO: 33192 - protein, 39 aa, Artificial Sequence
  Non-cyclic GFR-binding peptide
  MOD_RES (2)..(4)..(38)..(39): Xaa is C or S
  MOD_RES (16)..(17)..(18)..(19)..(20): Xaa is A or G
  MOD_RES (21)..(22)..(23)..(24): Xaa is A or G or absent
SXGXRDVVMGRHKRLXXXXXXXXXYYLMSTASMKTPTXX

SEQ ID NO: 33193 - protein, 35 aa, Artificial Sequence
  Non-cyclic GFR-binding peptide
  MOD_RES (32)..(33): Xaa is C or S
SEVVMDEYKFKVVNNASDLYLISIPELRTPVXXTP

SEQ ID NO: 33194 - protein, 36 aa, Artificial Sequence
  Non-cyclic GFR-binding peptide
  MOD_RES (2)..(36): Xaa is C or S
  MOD_RES (14)..(15)..(16)..(17)..(18): Xaa is A or G
  MOD_RES (19)..(20)..(21)..(22): Xaa is A or G or absent
AXSEVTMNYHYKLXXXXXXXXXKYLISIPSMKEPVX

SEQ ID NO: 33195 - protein, 33 aa, Artificial Sequence
  Non-cyclic GFR-binding peptide
  MOD_RES (2)..(2): Xaa is C or S
GXRDVVMGEYKFKIIQQKDNLYLMSIPEMKTPT

SEQ ID NO: 33196 - protein, 37 aa, Artificial Sequence
  Non-cyclic GFR-binding peptide
  MOD_RES (2)..(35)..(36): Xaa is C or S
  MOD_RES (13)..(14)..(15)..(16)..(17): Xaa is A or G
  MOD_RES (18)..(19)..(20)..(21): Xaa is A or G or absent
GXEEVIMRHKRLXXXXXXXXXYYLMSTASTKVPAXXT

SEQ ID NO: 33197 - protein, 35 aa, Artificial Sequence
  Non-cyclic GFR-binding peptide
  MOD_RES (33)..(34): Xaa is C or S
  MOD_RES (11)..(12)..(13)..(14)..(15): Xaa is A or G
  MOD_RES (16)..(17)..(18)..(19): Xaa is A or G or absent
SVAMGRHKRLXXXXXXXXXYYLISTASLKTPVXXA

SEQ ID NO: 33198 - protein, 41 aa, Artificial Sequence
  Non-cyclic GFR-binding peptide
  MOD_RES (2)..(4)..(36)..(37): Xaa is C or S
SXGXRDVVMGEYKFKIIQQKDNLYLMSIPEMKTPTXXPGAS

SEQ ID NO: 33199 - protein, 35 aa, Artificial Sequence
  Non-cyclic GFR-binding peptide
  MOD_RES (2)..(33)..(34): Xaa is C or S
KXSKVVMPIKGYVKPTRGVFYLINIPSLDQPVXXP

SEQ ID NO: 33200 - protein, 33 aa, Artificial Sequence
  Non-cyclic GFR-binding peptide
  MOD_RES (2)..(2): Xaa is C or S
GXRDVVMGRHKRLIIQQKDNYYLMSTASMKTPT

SEQ ID NO: 33201 - protein, 37 aa, Artificial Sequence
  Non-cyclic GFR-binding peptide
  MOD_RES (2)..(36)..(37): Xaa is C or S
  MOD_RES (14)..(15)..(16)..(17)..(18): Xaa is A or G
  MOD_RES (19)..(20)..(21)..(22): Xaa is A or G or absent
GXSEVVMDEYKFKXXXXXXXXXLYLISIPELRTPVXX

SEQ ID NO: 33202 - protein, 37 aa, Artificial Sequence
  Non-cyclic GFR-binding peptide
  MOD_RES (1)..(3)..(36)..(37): Xaa is C or S
  MOD_RES (14)..(15)..(16)..(17)..(18): Xaa is A or G
  MOD_RES (19)..(20)..(21)..(22): Xaa is A or G or absent
XKXSKVIMPIKGYXXXXXXXXXFYLINIPSLDQSVXX

SEQ ID NO: 33203 - protein, 38 aa, Artificial Sequence
  Non-cyclic GFR-binding peptide
  MOD_RES (34)..(35): Xaa is C or S
  MOD_RES (12)..(13)..(14)..(15)..(16): Xaa is A or G
  MOD_RES (17)..(18)..(19)..(20): Xaa is A or G or absent
SEVTMNYHYKLXXXXXXXXXKYLISIPSMKEPVXXPEP

SEQ ID NO: 33204 - protein, 40 aa, Artificial Sequence
  Non-cyclic GFR-binding peptide
  MOD_RES (2)..(4)..(36)..(37): Xaa is C or S
RXGXSEVVMDYHYKLVVNNASDKYLISIPSLRTPVXXTPP

SEQ ID NO: 33205 - protein, 42 aa, Artificial Sequence
  Non-cyclic GFR-binding peptide
  MOD_RES (1)..(3)..(36)..(37): Xaa is C or S
  MOD_RES (14)..(15)..(16)..(17)..(18): Xaa is A or G
  MOD_RES (19)..(20)..(21)..(22): Xaa is A or G or absent
XKXSKVVMPIKGYXXXXXXXXXFYLINIPSLDQPVXXPSASA

SEQ ID NO: 33206 - protein, 37 aa, Artificial Sequence
  Non-cyclic GFR-binding peptide
  MOD_RES (31)..(32): Xaa is C or S
RVVMNRHKRLIVNSSDDYYLVSTASLKTPAXXPKPVH

SEQ ID NO: 33207 - protein, 38 aa, Artificial Sequence
  Non-cyclic GFR-binding peptide
  MOD_RES (33)..(34): Xaa is C or S
  MOD_RES (11)..(12)..(13)..(14)..(15): Xaa is A or G
  MOD_RES (16)..(17)..(18)..(19): Xaa is A or G or absent
EVTMNEYKFKXXXXXXXXXLYLISIPEMKEPVXXPEPI

SEQ ID NO: 33208 - protein, 39 aa, Artificial Sequence
  Non-cyclic GFR-binding peptide
  MOD_RES (2)..(4)..(35)..(36): Xaa is C or S
LXGXEEVIMYHYKLLLVRGNDKYLMSIPSTKVPAXXTSP

SEQ ID NO: 33209 - protein, 40 aa, Artificial Sequence
  Non-cyclic GFR-binding peptide
  MOD_RES (2)..(36)..(37): Xaa is C or S
  MOD_RES (14)..(15)..(16)..(17)..(18): Xaa is A or G
  MOD_RES (19)..(20)..(21)..(22): Xaa is A or G or absent
GXRDVVMGEYKFKXXXXXXXXXLYLMSIPEMKTPTXXPGA

SEQ ID NO: 33210 - protein, 34 aa, Artificial Sequence
  Non-cyclic GFR-binding peptide
  MOD_RES (2)..(4): Xaa is C or S
LXGXEEVIMEYKFKLLVRGNDLYLMSIPETKVPA

SEQ ID NO: 33211 - protein, 35 aa, Artificial Sequence
  Non-cyclic GFR-binding peptide
  MOD_RES (2)..(4)..(35): Xaa is C or S
SXKXSKVVMPIKGYVKPTRGVFYLINIPSLDQPVX

SEQ ID NO: 33212 - protein, 40 aa, Artificial Sequence
  Non-cyclic GFR-binding peptide
  MOD_RES (1)..(34)..(35): Xaa is C or S
  MOD_RES (12)..(13)..(14)..(15)..(16): Xaa is A or G
  MOD_RES (17)..(18)..(19)..(20): Xaa is A or G or absent
XSKVIMPIKGYXXXXXXXXXFYLINIPSLDQSVXXPSASA

SEQ ID NO: 33213 - protein, 37 aa, Artificial Sequence
  Non-cyclic GFR-binding peptide
  MOD_RES (2)..(4)..(36)..(37): Xaa is C or S
RXGXAEVVMDRHKRLVVNNAADYYLISTASLRAPVXX

SEQ ID NO: 33214 - protein, 38 aa, Artificial Sequence
  Non-cyclic GFR-binding peptide
  MOD_RES (1)..(3)..(36)..(37): Xaa is C or S
  MOD_RES (14)..(15)..(16)..(17)..(18): Xaa is A or G
  MOD_RES (19)..(20)..(21)..(22): Xaa is A or G or absent
XGXEEVIMRHKRLXXXXXXXXXYYLMSTASTKVPAXXT

SEQ ID NO: 33215 - protein, 41 aa, Artificial Sequence
  Non-cyclic GFR-binding peptide
  MOD_RES (1)..(35)..(36): Xaa is C or S
  MOD_RES (13)..(14)..(15)..(16)..(17): Xaa is A or G
  MOD_RES (18)..(19)..(20)..(21): Xaa is A or G or absent
XAEVVMDRHKRLXXXXXXXXXYYLISTASLRAPVXXSAPAA

SEQ ID NO: 33216 - protein, 34 aa, Artificial Sequence
  Non-cyclic GFR-binding peptide
  MOD_RES (31)..(32): Xaa is C or S
EVVMDYHYKLVVNNASDKYLISIPSLRTPVXXTP

SEQ ID NO: 33217 - protein, 36 aa, Artificial Sequence
  Non-cyclic GFR-binding peptide
  MOD_RES (33)..(34): Xaa is C or S
  MOD_RES (11)..(12)..(13)..(14)..(15): Xaa is A or G
  MOD_RES (16)..(17)..(18)..(19): Xaa is A or G or absent
EVVMDEYKFKXXXXXXXXXLYLISIPELRTPVXXTP

SEQ ID NO: 33218 - protein, 40 aa, Artificial Sequence
  Non-cyclic GFR-binding peptide
  MOD_RES (1)..(35)..(36): Xaa is C or S
  MOD_RES (13)..(14)..(15)..(16)..(17): Xaa is A or G
  MOD_RES (18)..(19)..(20)..(21): Xaa is A or G or absent
XRDVVMGEYKFKXXXXXXXXXLYLMSIPEMKTPTXXPGAS

SEQ ID NO: 33219 - protein, 38 aa, Artificial Sequence
  Non-cyclic GFR-binding peptide
  MOD_RES (2)..(4)..(36)..(37): Xaa is C or S
RXAXSEVTMNRYKKLVVNKNEDFYLISIANMKEPVXXP

SEQ ID NO: 33220 - protein, 33 aa, Artificial Sequence
  Non-cyclic GFR-binding peptide
  MOD_RES (1)..(33): Xaa is C or S
XESVAMGRHKRLYTVVGKDYYLISTASLKTPVX

SEQ ID NO: 33221 - protein, 41 aa, Artificial Sequence
  Non-cyclic GFR-binding peptide
  MOD_RES (2)..(4)..(36)..(37): Xaa is C or S
SXGXRDVVMGYHYKLIIQQKDNKYLMSIPSMKTPTXXPGAS

SEQ ID NO: 33222 - protein, 43 aa, Artificial Sequence
  Non-cyclic GFR-binding peptide
  MOD_RES (2)..(4)..(37)..(38): Xaa is C or S
  MOD_RES (15)..(16)..(17)..(18)..(19): Xaa is A or G
  MOD_RES (20)..(21)..(22)..(23): Xaa is A or G or absent
SXKXSKVVMPIKGYXXXXXXXXXFYLINIPSLDQPVXXPSASA

SEQ ID NO: 33223 - protein, 35 aa, Artificial Sequence
  Non-cyclic GFR-binding peptide
  MOD_RES (31)..(32): Xaa is C or S
SVAMGRHKRLYTVVGKDYYLISTASLKTPVXXAKS

SEQ ID NO: 33224 - protein, 40 aa, Artificial Sequence
  Non-cyclic GFR-binding peptide
  MOD_RES (34)..(35): Xaa is C or S
  MOD_RES (12)..(13)..(14)..(15)..(16): Xaa is A or G
  MOD_RES (17)..(18)..(19)..(20): Xaa is A or G or absent
RDVVMGYHYKLXXXXXXXXXKYLMSIPSMKTPTXXPGASG

SEQ ID NO: 33225 - protein, 38 aa, Artificial Sequence
  Non-cyclic GFR-binding peptide
  MOD_RES (32)..(33): Xaa is C or S
SEVTMNRYKKLVVNKNEDFYLISIANMKEPVXXPEPIG

SEQ ID NO: 33226 - protein, 38 aa, Artificial Sequence
  Non-cyclic GFR-binding peptide
  MOD_RES (1)..(33)..(34): Xaa is C or S
XESVAMGRHKRLYTVVGKDYYLISTASLKTPVXXAKSA

SEQ ID NO: 33227 - protein, 38 aa, Artificial Sequence
  Non-cyclic GFR-binding peptide
  MOD_RES (1)..(34)..(35): Xaa is C or S
  MOD_RES (12)..(13)..(14)..(15)..(16): Xaa is A or G
  MOD_RES (17)..(18)..(19)..(20): Xaa is A or G or absent
XEEVIMYHYKLXXXXXXXXXKYLMSIPSTKVPAXXTSP

SEQ ID NO: 33228 - protein, 36 aa, Artificial Sequence
  Non-cyclic GFR-binding peptide
  MOD_RES (2)..(4): Xaa is C or S
  MOD_RES (15)..(16)..(17)..(18)..(19): Xaa is A or G
  MOD_RES (20)..(21)..(22)..(23): Xaa is A or G or absent
LXGXEEVIMEYKFKXXXXXXXXXLYLMSIPETKVPA

SEQ ID NO: 33229 - protein, 38 aa, Artificial Sequence
  Non-cyclic GFR-binding peptide
  MOD_RES (32)..(33): Xaa is C or S
SEVVMDEYKFKVVNNASDLYLISIPELRTPVXXTPPTS

SEQ ID NO: 33230 - protein, 31 aa, Artificial Sequence
  Non-cyclic GFR-binding peptide
  MOD_RES (1)..(1): Xaa is C or S
XSKVIMPIKGYIKPTKGIFYLINIPSLDQSV

SEQ ID NO: 33231 - protein, 39 aa, Artificial Sequence
  Non-cyclic GFR-binding peptide
  MOD_RES (2)..(4)..(38)..(39): Xaa is C or S
  MOD_RES (16)..(17)..(18)..(19)..(20): Xaa is A or G
  MOD_RES (21)..(22)..(23)..(24): Xaa is A or G or absent
RXAXSEVTMNEYKFKXXXXXXXXXLYLISIPEMKEPVXX

SEQ ID NO: 33232 - protein, 40 aa, Artificial Sequence
  Non-cyclic GFR-binding peptide
  MOD_RES (1)..(34)..(35): Xaa is C or S
  MOD_RES (12)..(13)..(14)..(15)..(16): Xaa is A or G
  MOD_RES (17)..(18)..(19)..(20): Xaa is A or G or absent
XEEVIMYHYKLXXXXXXXXXKYLMSIPSTKVPAXXTSPVR

SEQ ID NO: 33233 - protein, 42 aa, Artificial Sequence
  Non-cyclic GFR-binding peptide
  MOD_RES (2)..(36)..(37): Xaa is C or S
  MOD_RES (14)..(15)..(16)..(17)..(18): Xaa is A or G
  MOD_RES (19)..(20)..(21)..(22): Xaa is A or G or absent
AXSEVTMNRHKRLXXXXXXXXXYYLISTASMKEPVXXPEPIG

SEQ ID NO: 33234 - protein, 38 aa, Artificial Sequence
  Non-cyclic GFR-binding peptide
  MOD_RES (1)..(3)..(37)..(38): Xaa is C or S
  MOD_RES (15)..(16)..(17)..(18)..(19): Xaa is A or G
  MOD_RES (20)..(21)..(22)..(23): Xaa is A or G or absent
XAXSEVTMNPIKGYXXXXXXXXXFYLINIPSMKEPVXX

SEQ ID NO: 33235 - protein, 37 aa, Artificial Sequence
  Non-cyclic GFR-binding peptide
  MOD_RES (1)..(3)..(36)..(37): Xaa is C or S
  MOD_RES (14)..(15)..(16)..(17)..(18): Xaa is A or G
  MOD_RES (19)..(20)..(21)..(22): Xaa is A or G or absent
XKXSRVIMPIKGYXXXXXXXXXFYLINIPSLAQPVXX

SEQ ID NO: 33236 - protein, 42 aa, Artificial Sequence
  Non-cyclic GFR-binding peptide
  MOD_RES (1)..(3)..(37)..(38): Xaa is C or S
  MOD_RES (15)..(16)..(17)..(18)..(19): Xaa is A or G
  MOD_RES (20)..(21)..(22)..(23): Xaa is A or G or absent
XGXAEVVMDRHKRLXXXXXXXXXYYLISTASLRAPVXXSAPA

SEQ ID NO: 33237 - protein, 33 aa, Artificial Sequence
  Non-cyclic GFR-binding peptide
  MOD_RES (2)..(2): Xaa is C or S
GXSEVVMDRHKRLVVNNASDYYLISTASLRTPV

SEQ ID NO: 33238 - protein, 30 aa, Artificial Sequence
  Non-cyclic GFR-binding peptide
SKVVMPIKGYVKPTRGVFYLINIPSLDQPV

SEQ ID NO: 33239 - protein, 39 aa, Artificial Sequence
  Non-cyclic GFR-binding peptide
  MOD_RES (33)..(34): Xaa is C or S
  MOD_RES (11)..(12)..(13)..(14)..(15): Xaa is A or G
  MOD_RES (16)..(17)..(18)..(19): Xaa is A or G or absent
EVVMDYHYKLXXXXXXXXXKYLISIPSLRTPVXXTPPTS

SEQ ID NO: 33240 - protein, 39 aa, Artificial Sequence
  Non-cyclic GFR-binding peptide
  MOD_RES (2)..(4)..(36)..(37): Xaa is C or S
RXAXSEVTMNPIKGYVVNKNEDFYLINIPSMKEPVXXPE

SEQ ID NO: 33241 - protein, 38 aa, Artificial Sequence
  Non-cyclic GFR-binding peptide
  MOD_RES (33)..(34): Xaa is C or S
  MOD_RES (11)..(12)..(13)..(14)..(15): Xaa is A or G
  MOD_RES (16)..(17)..(18)..(19): Xaa is A or G or absent
EVTMNYHYKLXXXXXXXXXKYLISIPSMKEPVXXPEPI

SEQ ID NO: 33242 - protein, 39 aa, Artificial Sequence
  Non-cyclic GFR-binding peptide
  MOD_RES (1)..(33)..(34): Xaa is C or S
XAEVVMDRHKRLVVNNAADYYLISTASLRAPVXXSAPAA

SEQ ID NO: 33243 - protein, 39 aa, Artificial Sequence
  Non-cyclic GFR-binding peptide
  MOD_RES (2)..(4)..(38)..(39): Xaa is C or S
  MOD_RES (16)..(17)..(18)..(19)..(20): Xaa is A or G
  MOD_RES (21)..(22)..(23)..(24): Xaa is A or G or absent
RXAXSEVTMNRHKRLXXXXXXXXXYYLISTASMKEPVXX

SEQ ID NO: 33244 - protein, 30 aa, Artificial Sequence
  Non-cyclic GFR-binding peptide
EVVMDRHKRLVVNNASDYYLISTASLRTPV

SEQ ID NO: 33245 - protein, 39 aa, Artificial Sequence
  Non-cyclic GFR-binding peptide
  MOD_RES (1)..(3)..(36)..(37): Xaa is C or S
  MOD_RES (14)..(15)..(16)..(17)..(18): Xaa is A or G
  MOD_RES (19)..(20)..(21)..(22): Xaa is A or G or absent
XGXEEVIMYHYKLXXXXXXXXXKYLMSIPSTKVPAXXTS

SEQ ID NO: 33246 - protein, 39 aa, Artificial Sequence
  Non-cyclic GFR-binding peptide
  MOD_RES (1)..(33)..(34): Xaa is C or S
XRDVVMGRHKRLIIQQKDNYYLMSTASMKTPTXXPGASG

SEQ ID NO: 33247 - protein, 42 aa, Artificial Sequence
  Non-cyclic GFR-binding peptide
  MOD_RES (2)..(4)..(36)..(37): Xaa is C or S
RXAXSEVTMNRYKKLVVNKNEDFYLISIANMKEPVXXPEPIG

SEQ ID NO: 33248 - protein, 34 aa, Artificial Sequence
  Non-cyclic GFR-binding peptide
  MOD_RES (31)..(32): Xaa is C or S
EVVMDEYKFKVVNNASDLYLISIPELRTPVXXTP

SEQ ID NO: 33249 - protein, 32 aa, Artificial Sequence
  Non-cyclic GFR-binding peptide
  MOD_RES (31)..(32): Xaa is C or S
EVTMNYHYKLVVNKNEDKYLISIPSMKEPVXX

SEQ ID NO: 33250 - protein, 38 aa, Artificial Sequence
  Non-cyclic GFR-binding peptide
  MOD_RES (2)..(34)..(35): Xaa is C or S
GXRDVVMGYHYKLIIQQKDNKYLMSIPSMKTPTXXPGA

SEQ ID NO: 33251 - protein, 42 aa, Artificial Sequence
  Non-cyclic GFR-binding peptide
  MOD_RES (2)..(36)..(37): Xaa is C or S
  MOD_RES (14)..(15)..(16)..(17)..(18): Xaa is A or G
  MOD_RES (19)..(20)..(21)..(22): Xaa is A or G or absent
GXSRVVMNRHKRLXXXXXXXXXYYLVSTASLKTPAXXPKPVH

SEQ ID NO: 33252 - protein, 31 aa, Artificial Sequence
  Non-cyclic GFR-binding peptide
  MOD_RES (31)..(31): Xaa is C or S
EVTMNYHYKLVVNKNEDKYLISIPSMKEPVX

SEQ ID NO: 33253 - protein, 34 aa, Artificial Sequence
  Non-cyclic GFR-binding peptide
  MOD_RES (33)..(34): Xaa is C or S
  MOD_RES (11)..(12)..(13)..(14)..(15): Xaa is A or G
  MOD_RES (16)..(17)..(18)..(19): Xaa is A or G or absent
SKVVMPIKGYXXXXXXXXXFYLINIPSLDQPVXX

SEQ ID NO: 33254 - protein, 35 aa, Artificial Sequence
  Non-cyclic GFR-binding peptide
  MOD_RES (2)..(4): Xaa is C or S
RXAXSEVTMNRYKKLVVNKNEDFYLISIANMKEPV

SEQ ID NO: 33255 - protein, 41 aa, Artificial Sequence
  Non-cyclic GFR-binding peptide
  MOD_RES (2)..(4)..(36)..(37): Xaa is C or S
RXAXSEVTMNEYKFKVVNKNEDLYLISIPEMKEPVXXPEPI

SEQ ID NO: 33256 - protein, 33 aa, Artificial Sequence
  Non-cyclic GFR-binding peptide
  MOD_RES (1)..(3): Xaa is C or S
XKXSKVVMPIKGYVKPTRGVFYLINIPSLDQPV

SEQ ID NO: 33257 - protein, 34 aa, Artificial Sequence
  Non-cyclic GFR-binding peptide
  MOD_RES (1)..(32)..(33): Xaa is C or S
XEEVIMYHYKLLLVRGNDKYLMSIPSTKVPAXXT

SEQ ID NO: 33258 - protein, 37 aa, Artificial Sequence
  Non-cyclic GFR-binding peptide
  MOD_RES (2)..(4)..(37): Xaa is C or S
  MOD_RES (15)..(16)..(17)..(18)..(19): Xaa is A or G
  MOD_RES (20)..(21)..(22)..(23): Xaa is A or G or absent
LXGXEEVIMRHKRLXXXXXXXXXYYLMSTASTKVPAX

SEQ ID NO: 33259 - protein, 43 aa, Artificial Sequence
  Non-cyclic GFR-binding peptide
  MOD_RES (2)..(4)..(38)..(39): Xaa is C or S
  MOD_RES (16)..(17)..(18)..(19)..(20): Xaa is A or G
  MOD_RES (21)..(22)..(23)..(24): Xaa is A or G or absent
RXAXSEVTMNYHYKLXXXXXXXXXKYLISIPSMKEPVXXPEPI

SEQ ID NO: 33260 - protein, 37 aa, Artificial Sequence
  Non-cyclic GFR-binding peptide
  MOD_RES (32)..(33): Xaa is C or S
AEVVMDRHKRLVVNNAADYYLISTASLRAPVXXSAPA

SEQ ID NO: 33261 - protein, 40 aa, Artificial Sequence
  Non-cyclic GFR-binding peptide
  MOD_RES (1)..(3)..(37)..(38): Xaa is C or S
  MOD_RES (15)..(16)..(17)..(18)..(19): Xaa is A or G
  MOD_RES (20)..(21)..(22)..(23): Xaa is A or G or absent
XGXSEVVMDYHYKLXXXXXXXXXKYLISIPSLRTPVXXTP

SEQ ID NO: 33262 - protein, 40 aa, Artificial Sequence
  Non-cyclic GFR-binding peptide
  MOD_RES (1)..(35)..(36): Xaa is C or S
  MOD_RES (13)..(14)..(15)..(16)..(17): Xaa is A or G
  MOD_RES (18)..(19)..(20)..(21): Xaa is A or G or absent
XSEVTMNEYKFKXXXXXXXXXLYLISIPEMKEPVXXPEPI

SEQ ID NO: 33263 - protein, 33 aa, Artificial Sequence
  Non-cyclic GFR-binding peptide
  MOD_RES (1)..(33): Xaa is C or S
XSEVTMNPIKGYVVNKNEDFYLINIPSMKEPVX

SEQ ID NO: 33264 - protein, 36 aa, Artificial Sequence
  Non-cyclic GFR-binding peptide
  MOD_RES (1)..(33)..(34): Xaa is C or S
XAEVVMDRHKRLVVNNAADYYLISTASLRAPVXXSA

SEQ ID NO: 33265 - protein, 38 aa, Artificial Sequence
  Non-cyclic GFR-binding peptide
  MOD_RES (32)..(33): Xaa is C or S
SRVVMNRHKRLIVNSSDDYYLVSTASLKTPAXXPKPVH

SEQ ID NO: 33266 - protein, 34 aa, Artificial Sequence
  Non-cyclic GFR-binding peptide
  MOD_RES (1)..(33)..(34): Xaa is C or S
XRDVVMGEYKFKIIQQKDNLYLMSIPEMKTPTXX

SEQ ID NO: 33267 - protein, 38 aa, Artificial Sequence
  Non-cyclic GFR-binding peptide
  MOD_RES (1)..(3)..(35)..(36): Xaa is C or S
XGXRDVVMGRHKRLIIQQKDNYYLMSTASMKTPTXXPG

SEQ ID NO: 33268 - protein, 34 aa, Artificial Sequence
  Non-cyclic GFR-binding peptide
  MOD_RES (33)..(34): Xaa is C or S
  MOD_RES (11)..(12)..(13)..(14)..(15): Xaa is A or G
  MOD_RES (16)..(17)..(18)..(19): Xaa is A or G or absent
EVTMNPIKGYXXXXXXXXXFYLINIPSMKEPVXX

SEQ ID NO: 33269 - protein, 35 aa, Artificial Sequence
  Non-cyclic GFR-binding peptide
  MOD_RES (2)..(34)..(35): Xaa is C or S
GXSEVVMDRHKRLVVNNASDYYLISTASLRTPVXX

SEQ ID NO: 33270 - protein, 37 aa, Artificial Sequence
  Non-cyclic GFR-binding peptide
  MOD_RES (1)..(3)..(34)..(35): Xaa is C or S
XGXEEVIMRHKRLLLVRGNDYYLMSTASTKVPAXXTS

SEQ ID NO: 33271 - protein, 33 aa, Artificial Sequence
  Non-cyclic GFR-binding peptide
  MOD_RES (1)..(1): Xaa is C or S
  MOD_RES (12)..(13)..(14)..(15)..(16): Xaa is A or G
  MOD_RES (17)..(18)..(19)..(20): Xaa is A or G or absent
XSKVIMPIKGYXXXXXXXXXFYLINIPSLDQSV

SEQ ID NO: 33272 - protein, 35 aa, Artificial Sequence
  Non-cyclic GFR-binding peptide
  MOD_RES (33)..(34): Xaa is C or S
  MOD_RES (11)..(12)..(13)..(14)..(15): Xaa is A or G
  MOD_RES (16)..(17)..(18)..(19): Xaa is A or G or absent
EVTMNPIKGYXXXXXXXXXFYLINIPSMKEPVXXP

SEQ ID NO: 33273 - protein, 35 aa, Artificial Sequence
  Non-cyclic GFR-binding peptide
  MOD_RES (31)..(32): Xaa is C or S
DVVMGYHYKLIIQQKDNKYLMSIPSMKTPTXXPGA

SEQ ID NO: 33274 - protein, 30 aa, Artificial Sequence
  Non-cyclic GFR-binding peptide
DVVMGRHKRLIIQQKDNYYLMSTASMKTPT

SEQ ID NO: 33275 - protein, 35 aa, Artificial Sequence
  Non-cyclic GFR-binding peptide
  MOD_RES (34)..(35): Xaa is C or S
  MOD_RES (12)..(13)..(14)..(15)..(16): Xaa is A or G
  MOD_RES (17)..(18)..(19)..(20): Xaa is A or G or absent
SEVTMNRYKKLXXXXXXXXXFYLISIANMKEPVXX

SEQ ID NO: 33276 - protein, 38 aa, Artificial Sequence
  Non-cyclic GFR-binding peptide
  MOD_RES (33)..(34): Xaa is C or S
  MOD_RES (11)..(12)..(13)..(14)..(15): Xaa is A or G
  MOD_RES (16)..(17)..(18)..(19): Xaa is A or G or absent
DVVMGYHYKLXXXXXXXXXKYLMSIPSMKTPTXXPGAS

SEQ ID NO: 33277 - protein, 39 aa, Artificial Sequence
  Non-cyclic GFR-binding peptide
  MOD_RES (2)..(36)..(37): Xaa is C or S
  MOD_RES (14)..(15)..(16)..(17)..(18): Xaa is A or G
  MOD_RES (19)..(20)..(21)..(22): Xaa is A or G or absent
GXESVAMGRHKRLXXXXXXXXXYYLISTASLKTPVXXAK

SEQ ID NO: 33278 - protein, 42 aa, Artificial Sequence
  Non-cyclic GFR-binding peptide
  MOD_RES (2)..(4)..(36)..(37): Xaa is C or S
RXGXAEVVMDRHKRLVVNNAADYYLISTASLRAPVXXSAPAA

SEQ ID NO: 33279 - protein, 35 aa, Artificial Sequence
  Non-cyclic GFR-binding peptide
  MOD_RES (2)..(34)..(35): Xaa is C or S
GXSEVVMDEYKFKVVNNASDLYLISIPELRTPVXX

SEQ ID NO: 33280 - protein, 37 aa, Artificial Sequence
  Non-cyclic GFR-binding peptide
  MOD_RES (2)..(4)..(37): Xaa is C or S
  MOD_RES (15)..(16)..(17)..(18)..(19): Xaa is A or G
  MOD_RES (20)..(21)..(22)..(23): Xaa is A or G or absent
SXKXSKVIMPIKGYXXXXXXXXXFYLINIPSLDQSVX

SEQ ID NO: 33281 - protein, 41 aa, Artificial Sequence
  Non-cyclic GFR-binding peptide
  MOD_RES (2)..(4)..(37)..(38): Xaa is C or S
  MOD_RES (15)..(16)..(17)..(18)..(19): Xaa is A or G
  MOD_RES (20)..(21)..(22)..(23): Xaa is A or G or absent
SXKXSRVIMPIKGYXXXXXXXXXFYLINIPSLAQPVXXPAA

SEQ ID NO: 33282 - protein, 37 aa, Artificial Sequence
  Non-cyclic GFR-binding peptide
  MOD_RES (31)..(32): Xaa is C or S
EEVIMEYKFKLLVRGNDLYLMSIPETKVPAXXTSPVR

SEQ ID NO: 33283 - protein, 35 aa, Artificial Sequence
  Non-cyclic GFR-binding peptide
  MOD_RES (31)..(32): Xaa is C or S
DVVMGEYKFKIIQQKDNLYLMSIPEMKTPTXXPGA

SEQ ID NO: 33284 - protein, 39 aa, Artificial Sequence
  Non-cyclic GFR-binding peptide
  MOD_RES (1)..(33)..(34): Xaa is C or S
XSEVTMNRHKRLVVNKNEDYYLISTASMKEPVXXPEPIG

SEQ ID NO: 33285 - protein, 34 aa, Artificial Sequence
  Non-cyclic GFR-binding peptide
  MOD_RES (34)..(34): Xaa is C or S
  MOD_RES (12)..(13)..(14)..(15)..(16): Xaa is A or G
  MOD_RES (17)..(18)..(19)..(20): Xaa is A or G or absent
SEVTMNRYKKLXXXXXXXXXFYLISIANMKEPVX

SEQ ID NO: 33286 - protein, 42 aa, Artificial Sequence
  Non-cyclic GFR-binding peptide
  MOD_RES (2)..(4)..(36)..(37): Xaa is C or S
RXGXESVAMGRHKRLYTVVGKDYYLISTASLKTPVXXAKSAK

SEQ ID NO: 33287 - protein, 34 aa, Artificial Sequence
  Non-cyclic GFR-binding peptide
  MOD_RES (2)..(4): Xaa is C or S
SXKXSRVIMPIKGYVKPKRGVFYLINIPSLAQPV

SEQ ID NO: 33288 - protein, 38 aa, Artificial Sequence
  Non-cyclic GFR-binding peptide
  MOD_RES (33)..(34): Xaa is C or S
  MOD_RES (11)..(12)..(13)..(14)..(15): Xaa is A or G
  MOD_RES (16)..(17)..(18)..(19): Xaa is A or G or absent
SVAMGRHKRLXXXXXXXXXYYLISTASLKTPVXXAKSA

SEQ ID NO: 33289 - protein, 42 aa, Artificial Sequence
  Non-cyclic GFR-binding peptide
  MOD_RES (1)..(3)..(36)..(37): Xaa is C or S
  MOD_RES (14)..(15)..(16)..(17)..(18): Xaa is A or G
  MOD_RES (19)..(20)..(21)..(22): Xaa is A or G or absent
XKXSRVIMPIKGYXXXXXXXXXFYLINIPSLAQPVXXPAASA

SEQ ID NO: 33290 - protein, 38 aa, Artificial Sequence
  Non-cyclic GFR-binding peptide
  MOD_RES (2)..(4)..(36)..(37): Xaa is C or S
SXGXRDVVMGEYKFKIIQQKDNLYLMSIPEMKTPTXXP

SEQ ID NO: 33291 - protein, 35 aa, Artificial Sequence
  Non-cyclic GFR-binding peptide
  MOD_RES (33)..(34): Xaa is C or S
  MOD_RES (11)..(12)..(13)..(14)..(15): Xaa is A or G
  MOD_RES (16)..(17)..(18)..(19): Xaa is A or G or absent
SKVVMPIKGYXXXXXXXXXFYLINIPSLDQPVXXP

SEQ ID NO: 33292 - protein, 36 aa, Artificial Sequence
  Non-cyclic GFR-binding peptide
  MOD_RES (33)..(34): Xaa is C or S
  MOD_RES (11)..(12)..(13)..(14)..(15): Xaa is A or G
  MOD_RES (16)..(17)..(18)..(19): Xaa is A or G or absent
EEVIMRHKRLXXXXXXXXXYYLMSTASTKVPAXXTS

SEQ ID NO: 33293 - protein, 43 aa, Artificial Sequence
  Non-cyclic GFR-binding peptide
  MOD_RES (1)..(3)..(37)..(38): Xaa is C or S
  MOD_RES (15)..(16)..(17)..(18)..(19): Xaa is A or G
  MOD_RES (20)..(21)..(22)..(23): Xaa is A or G or absent
XGXRDVVMGYHYKLXXXXXXXXXKYLMSIPSMKTPTXXPGASG

SEQ ID NO: 33294 - protein, 31 aa, Artificial Sequence
  Non-cyclic GFR-binding peptide
  MOD_RES (31)..(31): Xaa is C or S
EVTMNRHKRLVVNKNEDYYLISTASMKEPVX

SEQ ID NO: 33295 - protein, 37 aa, Artificial Sequence
  Non-cyclic GFR-binding peptide
  MOD_RES (2)..(35)..(36): Xaa is C or S
  MOD_RES (13)..(14)..(15)..(16)..(17): Xaa is A or G
  MOD_RES (18)..(19)..(20)..(21): Xaa is A or G or absent
GXEEVIMYHYKLXXXXXXXXXKYLMSIPSTKVPAXXT

SEQ ID NO: 33296 - protein, 41 aa, Artificial Sequence
  Non-cyclic GFR-binding peptide
  MOD_RES (2)..(36)..(37): Xaa is C or S
  MOD_RES (14)..(15)..(16)..(17)..(18): Xaa is A or G
  MOD_RES (19)..(20)..(21)..(22): Xaa is A or G or absent
AXSEVTMNRYKKLXXXXXXXXXFYLISIANMKEPVXXPEPI

SEQ ID NO: 33297 - protein, 39 aa, Artificial Sequence
  Non-cyclic GFR-binding peptide
  MOD_RES (1)..(33)..(34): Xaa is C or S
XSEVVMDYHYKLVVNNASDKYLISIPSLRTPVXXTPPTS

SEQ ID NO: 33298 - protein, 37 aa, Artificial Sequence
  Non-cyclic GFR-binding peptide
  MOD_RES (34)..(35): Xaa is C or S
  MOD_RES (12)..(13)..(14)..(15)..(16): Xaa is A or G
  MOD_RES (17)..(18)..(19)..(20): Xaa is A or G or absent
SEVVMDYHYKLXXXXXXXXXKYLISIPSLRTPVXXTP

SEQ ID NO: 33299 - protein, 37 aa, Artificial Sequence
  Non-cyclic GFR-binding peptide
  MOD_RES (1)..(33)..(34): Xaa is C or S
XAEVVMDRHKRLVVNNAADYYLISTASLRAPVXXSAP

SEQ ID NO: 33300 - protein, 35 aa, Artificial Sequence
  Non-cyclic GFR-binding peptide
  MOD_RES (2)..(2): Xaa is C or S
  MOD_RES (14)..(15)..(16)..(17)..(18): Xaa is A or G
  MOD_RES (19)..(20)..(21)..(22): Xaa is A or G or absent
AXSEVTMNRHKRLXXXXXXXXXYYLISTASMKEPV

SEQ ID NO: 33301 - protein, 34 aa, Artificial Sequence
  Non-cyclic GFR-binding peptide
  MOD_RES (1)..(32)..(33): Xaa is C or S
XEEVIMRHKRLLLVRGNDYYLMSTASTKVPAXXT

SEQ ID NO: 33302 - protein, 32 aa, Artificial Sequence
  Non-cyclic GFR-binding peptide
  MOD_RES (1)..(32): Xaa is C or S
XSKVIMPIKGYIKPTKGIFYLINIPSLDQSVX

SEQ ID NO: 33303 - protein, 39 aa, Artificial Sequence
  Non-cyclic GFR-binding peptide
  MOD_RES (34)..(35): Xaa is C or S
  MOD_RES (12)..(13)..(14)..(15)..(16): Xaa is A or G
  MOD_RES (17)..(18)..(19)..(20): Xaa is A or G or absent
SEVVMDYHYKLXXXXXXXXXKYLISIPSLRTPVXXTPPT

SEQ ID NO: 33304 - protein, 33 aa, Artificial Sequence
  Non-cyclic GFR-binding peptide
  MOD_RES (31)..(32): Xaa is C or S
EVVMDRHKRLVVNNAADYYLISTASLRAPVXXS

SEQ ID NO: 33305 - protein, 43 aa, Artificial Sequence
  Non-cyclic GFR-binding peptide
  MOD_RES (1)..(3)..(37)..(38): Xaa is C or S
  MOD_RES (15)..(16)..(17)..(18)..(19): Xaa is A or G
  MOD_RES (20)..(21)..(22)..(23): Xaa is A or G or absent
XAXSEVTMNPIKGYXXXXXXXXXFYLINIPSMKEPVXXPEPIG

SEQ ID NO: 33306 - protein, 44 aa, Artificial Sequence
  Non-cyclic GFR-binding peptide
  MOD_RES (2)..(4)..(38)..(39): Xaa is C or S
  MOD_RES (16)..(17)..(18)..(19)..(20): Xaa is A or G
  MOD_RES (21)..(22)..(23)..(24): Xaa is A or G or absent
RXAXSEVTMNRHKRLXXXXXXXXXYYLISTASMKEPVXXPEPIG

SEQ ID NO: 33307 - protein, 42 aa, Artificial Sequence
  Non-cyclic GFR-binding peptide
  MOD_RES (2)..(4)..(36)..(37): Xaa is C or S
RXAXSEVTMNYHYKLVVNKNEDKYLISIPSMKEPVXXPEPIG

SEQ ID NO: 33308 - protein, 35 aa, Artificial Sequence
  Non-cyclic GFR-binding peptide
  MOD_RES (1)..(3)..(35): Xaa is C or S
XAXSEVTMNPIKGYVVNKNEDFYLINIPSMKEPVX

SEQ ID NO: 33309 - protein, 43 aa, Artificial Sequence
  Non-cyclic GFR-binding peptide
  MOD_RES (2)..(4)..(37)..(38): Xaa is C or S
  MOD_RES (15)..(16)..(17)..(18)..(19): Xaa is A or G
  MOD_RES (20)..(21)..(22)..(23): Xaa is A or G or absent
LXGXEEVIMRHKRLXXXXXXXXXYYLMSTASTKVPAXXTSPVR

SEQ ID NO: 33310 - protein, 44 aa, Artificial Sequence
  Non-cyclic GFR-binding peptide
  MOD_RES (2)..(4)..(38)..(39): Xaa is C or S
  MOD_RES (16)..(17)..(18)..(19)..(20): Xaa is A or G
  MOD_RES (21)..(22)..(23)..(24): Xaa is A or G or absent
RXAXSEVTMNEYKFKXXXXXXXXXLYLISIPEMKEPVXXPEPIG

SEQ ID NO: 33311 - protein, 37 aa, Artificial Sequence
  Non-cyclic GFR-binding peptide
  MOD_RES (32)..(33): Xaa is C or S
SEVTMNYHYKLVVNKNEDKYLISIPSMKEPVXXPEPI

SEQ ID NO: 33312 - protein, 39 aa, Artificial Sequence
  Non-cyclic GFR-binding peptide
  MOD_RES (1)..(3)..(35)..(36): Xaa is C or S
XAXSEVTMNRHKRLVVNKNEDYYLISTASMKEPVXXPEP

SEQ ID NO: 33313 - protein, 32 aa, Artificial Sequence
  Non-cyclic GFR-binding peptide
  MOD_RES (1)..(1): Xaa is C or S
XSEVTMNPIKGYVVNKNEDFYLINIPSMKEPV

SEQ ID NO: 33314 - protein, 35 aa, Artificial Sequence
  Non-cyclic GFR-binding peptide
  MOD_RES (2)..(34)..(35): Xaa is C or S
GXRDVVMGRHKRLIIQQKDNYYLMSTASMKTPTXX

SEQ ID NO: 33315 - protein, 39 aa, Artificial Sequence
  Non-cyclic GFR-binding peptide
  MOD_RES (1)..(3)..(37)..(38): Xaa is C or S
  MOD_RES (15)..(16)..(17)..(18)..(19): Xaa is A or G
  MOD_RES (20)..(21)..(22)..(23): Xaa is A or G or absent
XAXSEVTMNPIKGYXXXXXXXXXFYLINIPSMKEPVXXP

SEQ ID NO: 33316 - protein, 37 aa, Artificial Sequence
  Non-cyclic GFR-binding peptide
  MOD_RES (34)..(35): Xaa is C or S
  MOD_RES (12)..(13)..(14)..(15)..(16): Xaa is A or G
  MOD_RES (17)..(18)..(19)..(20): Xaa is A or G or absent
RDVVMGEYKFKXXXXXXXXXLYLMSIPEMKTPTXXPG

SEQ ID NO: 33317 - protein, 40 aa, Artificial Sequence
  Non-cyclic GFR-binding peptide
  MOD_RES (1)..(3)..(36)..(37): Xaa is C or S
  MOD_RES (14)..(15)..(16)..(17)..(18): Xaa is A or G
  MOD_RES (19)..(20)..(21)..(22): Xaa is A or G or absent
XKXSRVIMPIKGYXXXXXXXXXFYLINIPSLAQPVXXPAA

SEQ ID NO: 33318 - protein, 36 aa, Artificial Sequence
  Non-cyclic GFR-binding peptide
  MOD_RES (1)..(3): Xaa is C or S
  MOD_RES (15)..(16)..(17)..(18)..(19): Xaa is A or G
  MOD_RES (20)..(21)..(22)..(23): Xaa is A or G or absent
XAXSEVTMNPIKGYXXXXXXXXXFYLINIPSMKEPV

SEQ ID NO: 33319 - protein, 39 aa, Artificial Sequence
  Non-cyclic GFR-binding peptide
  MOD_RES (33)..(34): Xaa is C or S
  MOD_RES (11)..(12)..(13)..(14)..(15): Xaa is A or G
  MOD_RES (16)..(17)..(18)..(19): Xaa is A or G or absent
EVVMDEYKFKXXXXXXXXXLYLISIPELRTPVXXTPPTS

SEQ ID NO: 33320 - protein, 39 aa, Artificial Sequence
  Non-cyclic GFR-binding peptide
  MOD_RES (2)..(33)..(34): Xaa is C or S
KXSKVVMPIKGYVKPTRGVFYLINIPSLDQPVXXPSASA

SEQ ID NO: 33321 - protein, 35 aa, Artificial Sequence
  Non-cyclic GFR-binding peptide
  MOD_RES (2)..(34)..(35): Xaa is C or S
GXRDVVMGEYKFKIIQQKDNLYLMSIPEMKTPTXX

SEQ ID NO: 33322 - protein, 36 aa, Artificial Sequence
  Non-cyclic GFR-binding peptide
  MOD_RES (31)..(32): Xaa is C or S
EVTMNYHYKLVVNKNEDKYLISIPSMKEPVXXPEPI

SEQ ID NO: 33323 - protein, 38 aa, Artificial Sequence
  Non-cyclic GFR-binding peptide
  MOD_RES (2)..(35)..(36): Xaa is C or S
  MOD_RES (13)..(14)..(15)..(16)..(17): Xaa is A or G
  MOD_RES (18)..(19)..(20)..(21): Xaa is A or G or absent
KXSRVIMPIKGYXXXXXXXXXFYLINIPSLAQPVXXPA

SEQ ID NO: 33324 - protein, 31 aa, Artificial Sequence
  Non-cyclic GFR-binding peptide
  MOD_RES (1)..(1): Xaa is C or S
XVPQALSPINILYFVGRKPKVYGKIPMIVRS

SEQ ID NO: 33325 - protein, 36 aa, Artificial Sequence
  Non-cyclic GFR-binding peptide
  MOD_RES (5)..(6): Xaa is C or S
IPEPXXVPEKMEPISILYLDENKNVVKFKYENMTVE

SEQ ID NO: 33326 - protein, 32 aa, Artificial Sequence
  Non-cyclic GFR-binding peptide
  MOD_RES (1)..(2): Xaa is C or S
XXVPEKMSATSILYYDENKNVVLRKHRNMTVE

SEQ ID NO: 33327 - protein, 38 aa, Artificial Sequence
  Non-cyclic GFR-binding peptide
  MOD_RES (5)..(6): Xaa is C or S
  MOD_RES (20)..(21)..(22)..(23)..(24): Xaa is A or G
  MOD_RES (25)..(26)..(27)..(28): Xaa is A or G or absent
SASPXXVPQDLSPINILYFXXXXXXXXXYGKIPMVVKS

SEQ ID NO: 33328 - protein, 39 aa, Artificial Sequence
  Non-cyclic GFR-binding peptide
  MOD_RES (6)..(7)..(39): Xaa is C or S
GIPEPXXVPEKMNAISILYFDENKNVVLKKYRNMTVESX

SEQ ID NO: 33329 - protein, 33 aa, Artificial Sequence
  Non-cyclic GFR-binding peptide
  MOD_RES (1)..(33): Xaa is C or S
XVPTRLSPISILYKDSANNVVLKYHYDMVVESX

SEQ ID NO: 33330 - protein, 32 aa, Artificial Sequence
  Non-cyclic GFR-binding peptide
  MOD_RES (1)..(1): Xaa is C or S
XVPTRLEPISILYLDSANNVVKFKYEDMVVES

SEQ ID NO: 33331 - protein, 33 aa, Artificial Sequence
  Non-cyclic GFR-binding peptide
  MOD_RES (1)..(2)..(33): Xaa is C or S
XXVPQALSPINILYFVGRKPKVYGKIPMIVRSX

SEQ ID NO: 33332 - protein, 43 aa, Artificial Sequence
  Non-cyclic GFR-binding peptide
  MOD_RES (6)..(7)..(41)..(43): Xaa is C or S
  MOD_RES (21)..(22)..(23)..(24)..(25): Xaa is A or G
  MOD_RES (26)..(27)..(28)..(29): Xaa is A or G or absent
GSAGPXXTPTKMSATSMLYYXXXXXXXXXLRKHRGMVVDRXGX

SEQ ID NO: 33333 - protein, 39 aa, Artificial Sequence
  Non-cyclic GFR-binding peptide
  MOD_RES (5)..(6): Xaa is C or S
  MOD_RES (20)..(21)..(22)..(23)..(24): Xaa is A or G
  MOD_RES (25)..(26)..(27)..(28): Xaa is A or G or absent
ASKAXXVPTKLSATSILYYXXXXXXXXXLRKHRGMAVSE

SEQ ID NO: 33334 - protein, 44 aa, Artificial Sequence
  Non-cyclic GFR-binding peptide
  MOD_RES (6)..(7)..(41)..(43): Xaa is C or S
  MOD_RES (21)..(22)..(23)..(24)..(25): Xaa is A or G
  MOD_RES (26)..(27)..(28)..(29): Xaa is A or G or absent
GSAGPXXTPTKMEPISMLYLXXXXXXXXXKFKYEGMVVDRXGXS

SEQ ID NO: 33335 - protein, 38 aa, Artificial Sequence
  Non-cyclic GFR-binding peptide
  MOD_RES (1)..(2)..(36)..(38): Xaa is C or S
  MOD_RES (16)..(17)..(18)..(19)..(20): Xaa is A or G
  MOD_RES (21)..(22)..(23)..(24): Xaa is A or G or absent
XXVPTRLEPISILYLXXXXXXXXXKFKYEDMVVESXGX

SEQ ID NO: 33336 - protein, 34 aa, Artificial Sequence
  Non-cyclic GFR-binding peptide
  MOD_RES (2)..(3)..(34): Xaa is C or S
PXXVPQDLSPINILYFVGRTPKVYGKIPMVVKSX

SEQ ID NO: 33337 - protein, 37 aa, Artificial Sequence
  Non-cyclic GFR-binding peptide
  MOD_RES (5)..(6): Xaa is C or S
IPEPXXVPEKMNAISILYFDENKNVVLKKYRNMTVES

SEQ ID NO: 33338 - protein, 35 aa, Artificial Sequence
  Non-cyclic GFR-binding peptide
  MOD_RES (3)..(4): Xaa is C or S
EPXXVPEKMSATSILYYDENKNVVLRKHRNMTVES

SEQ ID NO: 33339 - protein, 37 aa, Artificial Sequence
  Non-cyclic GFR-binding peptide
  MOD_RES (6)..(7): Xaa is C or S
GSAGPXXTPTKMSPISMLYKNDKQQIILKYHYGMVVD

SEQ ID NO: 33340 - protein, 37 aa, Artificial Sequence
  Non-cyclic GFR-binding peptide
  MOD_RES (4)..(5): Xaa is C or S
  MOD_RES (19)..(20)..(21)..(22)..(23): Xaa is A or G
  MOD_RES (24)..(25)..(26)..(27): Xaa is A or G or absent
PASXXVPARLSATSILYYXXXXXXXXXLRKHRDMVVE

SEQ ID NO: 33341 - protein, 38 aa, Artificial Sequence
  Non-cyclic GFR-binding peptide
  MOD_RES (3)..(4)..(37): Xaa is C or S
  MOD_RES (18)..(19)..(20)..(21)..(22): Xaa is A or G
  MOD_RES (23)..(24)..(25)..(26): Xaa is A or G or absent
STXXAPVKTSATSMLYYXXXXXXXXXLRKHRMIVEEXG

SEQ ID NO: 33342 - protein, 30 aa, Artificial Sequence
  Non-cyclic GFR-binding peptide
VSQDLSPINILYFIGKTPKIYGKIPMIVKS

SEQ ID NO: 33343 - protein, 34 aa, Artificial Sequence
  Non-cyclic GFR-binding peptide
  MOD_RES (3)..(4): Xaa is C or S
SPXXVPQDLSPINILYFVGRTPKVYGKIPMVVKS

SEQ ID NO: 33344 - protein, 37 aa, Artificial Sequence
  Non-cyclic GFR-binding peptide
  MOD_RES (5)..(6): Xaa is C or S
IPEPXXVPEKMEPISILYLDENKNVVKFKYENMTVES

SEQ ID NO: 33345 - protein, 34 aa, Artificial Sequence
  Non-cyclic GFR-binding peptide
  MOD_RES (1)..(34): Xaa is C or S
  MOD_RES (15)..(16)..(17)..(18)..(19): Xaa is A or G
  MOD_RES (20)..(21)..(22)..(23): Xaa is A or G or absent
XAPVKTSATSMLYYXXXXXXXXXLRKHRMIVEEX

SEQ ID NO: 33346 - protein, 41 aa, Artificial Sequence
  Non-cyclic GFR-binding peptide
  MOD_RES (5)..(6)..(40): Xaa is C or S
  MOD_RES (20)..(21)..(22)..(23)..(24): Xaa is A or G
  MOD_RES (25)..(26)..(27)..(28): Xaa is A or G or absent
IPEPXXVPEKMSPISILYKXXXXXXXXXLKYHYNMTVESXA

SEQ ID NO: 33347 - protein, 39 aa, Artificial Sequence
  Non-cyclic GFR-binding peptide
  MOD_RES (6)..(7): Xaa is C or S
  MOD_RES (21)..(22)..(23)..(24)..(25): Xaa is A or G
  MOD_RES (26)..(27)..(28)..(29): Xaa is A or G or absent
AAPASXXVPARLSATSILYYXXXXXXXXXLRKHRDMVVE

SEQ ID NO: 33348 - protein, 36 aa, Artificial Sequence
  Non-cyclic GFR-binding peptide
  MOD_RES (3)..(4): Xaa is C or S
  MOD_RES (18)..(19)..(20)..(21)..(22): Xaa is A or G
  MOD_RES (23)..(24)..(25)..(26): Xaa is A or G or absent
EPXXVPEKMSPISILYKXXXXXXXXXLKYHYNMTVE

SEQ ID NO: 33349 - protein, 33 aa, Artificial Sequence
  Non-cyclic GFR-binding peptide
  MOD_RES (1)..(2): Xaa is C or S
XXVPEKMSATSILYYDENKNVVLRKHRNMTVES

SEQ ID NO: 33350 - protein, 41 aa, Artificial Sequence
  Non-cyclic GFR-binding peptide
  MOD_RES (3)..(4)..(38)..(40): Xaa is C or S
  MOD_RES (18)..(19)..(20)..(21)..(22): Xaa is A or G
  MOD_RES (23)..(24)..(25)..(26): Xaa is A or G or absent
EPXXVPEKMNAISILYFXXXXXXXXXLKKYRNMTVESXAXR

SEQ ID NO: 33351 - protein, 42 aa, Artificial Sequence
  Non-cyclic GFR-binding peptide
  MOD_RES (6)..(7)..(41): Xaa is C or S
  MOD_RES (21)..(22)..(23)..(24)..(25): Xaa is A or G
  MOD_RES (26)..(27)..(28)..(29): Xaa is A or G or absent
GIPEPXXVPEKMSPINILYFXXXXXXXXXYGKIPNMTVESXA

SEQ ID NO: 33352 - protein, 40 aa, Artificial Sequence
  Non-cyclic GFR-binding peptide
  MOD_RES (2)..(3)..(37)..(39): Xaa is C or S
  MOD_RES (17)..(18)..(19)..(20)..(21): Xaa is A or G
  MOD_RES (22)..(23)..(24)..(25): Xaa is A or G or absent
PXXVPEKMNAISILYFXXXXXXXXXLKKYRNMTVESXAXR

SEQ ID NO: 33353 - protein, 33 aa, Artificial Sequence
  Non-cyclic GFR-binding peptide
  MOD_RES (14)..(15)..(16)..(17)..(18): Xaa is A or G
  MOD_RES (19)..(20)..(21)..(22): Xaa is A or G or absent
VPTRLSPISILYKXXXXXXXXXLKYHYDMVVES

SEQ ID NO: 33354 - protein, 37 aa, Artificial Sequence
  Non-cyclic GFR-binding peptide
  MOD_RES (4)..(5)..(36): Xaa is C or S
ASPXXVPQDLSPINILYFVGRTPKVYGKIPMVVKSXK

SEQ ID NO: 33355 - protein, 34 aa, Artificial Sequence
  Non-cyclic GFR-binding peptide
  MOD_RES (1)..(2)..(34): Xaa is C or S
XXVPEKMSPINILYFDENKNVVYGKIPNMTVESX

SEQ ID NO: 33356 - protein, 31 aa, Artificial Sequence
  Non-cyclic GFR-binding peptide
  MOD_RES (1)..(1): Xaa is C or S
XTPTKMSPISMLYKNDKQQIILKYHYGMVVD

SEQ ID NO: 33357 - protein, 42 aa, Artificial Sequence
  Non-cyclic GFR-binding peptide
  MOD_RES (6)..(7)..(39)..(41): Xaa is C or S
STPPTXXVPTRLSATSILYYDSANNVVLRKHRDMVVESXGXR

SEQ ID NO: 33358 - protein, 34 aa, Artificial Sequence
  Non-cyclic GFR-binding peptide
  MOD_RES (1)..(32)..(34): Xaa is C or S
XVPQALSPINILYFVGRKPKVYGKIPMIVRSXKX

SEQ ID NO: 33359 - protein, 38 aa, Artificial Sequence
  Non-cyclic GFR-binding peptide
  MOD_RES (3)..(4)..(36)..(38): Xaa is C or S
PTXXVPTRLSATSILYYDSANNVVLRKHRDMVVESXGX

SEQ ID NO: 33360 - protein, 40 aa, Artificial Sequence
  Non-cyclic GFR-binding peptide
  MOD_RES (6)..(7)..(39): Xaa is C or S
GSAGPXXTPTKMSPISMLYKNDKQQIILKYHYGMVVDRXG

SEQ ID NO: 33361 - protein, 40 aa, Artificial Sequence
  Non-cyclic GFR-binding peptide
  MOD_RES (2)..(3)..(37)..(39): Xaa is C or S
  MOD_RES (17)..(18)..(19)..(20)..(21): Xaa is A or G
  MOD_RES (22)..(23)..(24)..(25): Xaa is A or G or absent
PXXVPEKMEPISILYLXXXXXXXXXKFKYENMTVESXAXR

SEQ ID NO: 33362 - protein, 37 aa, Artificial Sequence
  Non-cyclic GFR-binding peptide
  MOD_RES (1)..(2)..(34)..(36): Xaa is C or S
XXVPEKMEPISILYLDENKNVVKFKYENMTVESXAXR

SEQ ID NO: 33363 - protein, 37 aa, Artificial Sequence
  Non-cyclic GFR-binding peptide
  MOD_RES (2)..(3)..(35)..(37): Xaa is C or S
TXXVPTRLEPISILYLDSANNVVKFKYEDMVVESXGX

SEQ ID NO: 33364 - protein, 34 aa, Artificial Sequence
  Non-cyclic GFR-binding peptide
  MOD_RES (1)..(32)..(34): Xaa is C or S
XAPVKTSPISMLYKDNGRVLLLKYHYMIVEEXGX

SEQ ID NO: 33365 - protein, 36 aa, Artificial Sequence
  Non-cyclic GFR-binding peptide
  MOD_RES (4)..(5)..(36): Xaa is C or S
AAPXXVPQALSPINILYFVGRKPKVYGKIPMIVRSX

SEQ ID NO: 33366 - protein, 38 aa, Artificial Sequence
  Non-cyclic GFR-binding peptide
  MOD_RES (6)..(7): Xaa is C or S
HVPKPXXAPTKLSPISVLYKDDSSNVILKYHYNMVVRS

SEQ ID NO: 33367 - protein, 40 aa, Artificial Sequence
  Non-cyclic GFR-binding peptide
  MOD_RES (6)..(7)..(39): Xaa is C or S
GIPEPXXVPEKMNAISILYFDENKNVVLKKYRNMTVESXA

SEQ ID NO: 33368 - protein, 34 aa, Artificial Sequence
  Non-cyclic GFR-binding peptide
  MOD_RES (2)..(3): Xaa is C or S
TXXVPTRLEPISILYLDSANNVVKFKYEDMVVES

SEQ ID NO: 33369 - protein, 36 aa, Artificial Sequence
  Non-cyclic GFR-binding peptide
  MOD_RES (1)..(33)..(35): Xaa is C or S
XVPEKMSPISILYKDENKNVVLKYHYNMTVESXAXR

SEQ ID NO: 33370 - protein, 41 aa, Artificial Sequence
  Non-cyclic GFR-binding peptide
  MOD_RES (5)..(6)..(40): Xaa is C or S
  MOD_RES (20)..(21)..(22)..(23)..(24): Xaa is A or G
  MOD_RES (25)..(26)..(27)..(28): Xaa is A or G or absent
IPEPXXVPEKMEPISILYLXXXXXXXXXKFKYENMTVESXA

SEQ ID NO: 33371 - protein, 34 aa, Artificial Sequence
  Non-cyclic GFR-binding peptide
  MOD_RES (31)..(33): Xaa is C or S
VSQDLSPINILYFIGKTPKIYGKIPMIVKSXKXS

SEQ ID NO: 33372 - protein, 37 aa, Artificial Sequence
  Non-cyclic GFR-binding peptide
  MOD_RES (1)..(2)..(36): Xaa is C or S
  MOD_RES (16)..(17)..(18)..(19)..(20): Xaa is A or G
  MOD_RES (21)..(22)..(23)..(24): Xaa is A or G or absent
XXVPEKMEPISILYLXXXXXXXXXKFKYENMTVESXA

SEQ ID NO: 33373 - protein, 34 aa, Artificial Sequence
  Non-cyclic GFR-binding peptide
  MOD_RES (32)..(34): Xaa is C or S
TPTKMSATSMLYYNDKQQIILRKHRGMVVDRXGX

SEQ ID NO: 33374 - protein, 37 aa, Artificial Sequence
  Non-cyclic GFR-binding peptide
  MOD_RES (3)..(4)..(36): Xaa is C or S
PTXXVPTRLSATSILYYDSANNVVLRKHRDMVVESXG

SEQ ID NO: 33375 - protein, 37 aa, Artificial Sequence
  Non-cyclic GFR-binding peptide
  MOD_RES (1)..(2)..(34)..(36): Xaa is C or S
XXTPTKMSATSMLYYNDKQQIILRKHRGMVVDRXGXS

SEQ ID NO: 33376 - protein, 37 aa, Artificial Sequence
  Non-cyclic GFR-binding peptide
  MOD_RES (3)..(4)..(35)..(37): Xaa is C or S
STXXAPVKTEPISMLYLDNGRVLLKFKYEMIVEEXGX

SEQ ID NO: 33377 - protein, 38 aa, Artificial Sequence
  Non-cyclic GFR-binding peptide
  MOD_RES (3)..(4)..(36)..(38): Xaa is C or S
KAXXVPTKLSATSILYYDKGVVTYLRKHRGMAVSEXGX

SEQ ID NO: 33378 - protein, 38 aa, Artificial Sequence
  Non-cyclic GFR-binding peptide
  MOD_RES (1)..(2)..(35)..(37): Xaa is C or S
  MOD_RES (16)..(17)..(18)..(19)..(20): Xaa is A or G
  MOD_RES (21)..(22)..(23)..(24): Xaa is A or G or absent
XXAPVKTEPISMLYLXXXXXXXXXKFKYEMIVEEXGXL

SEQ ID NO: 33379 - protein, 33 aa, Artificial Sequence
  Non-cyclic GFR-binding peptide
  MOD_RES (33)..(33): Xaa is C or S
  MOD_RES (14)..(15)..(16)..(17)..(18): Xaa is A or G
  MOD_RES (19)..(20)..(21)..(22): Xaa is A or G or absent
APVKTEPISMLYLXXXXXXXXXKFKYEMIVEEX

SEQ ID NO: 33380 - protein, 33 aa, Artificial Sequence
  Non-cyclic GFR-binding peptide
  MOD_RES (14)..(15)..(16)..(17)..(18): Xaa is A or G
  MOD_RES (19)..(20)..(21)..(22): Xaa is A or G or absent
VPTRLEPISILYLXXXXXXXXXKFKYEDMVVES

SEQ ID NO: 33381 - protein, 37 aa, Artificial Sequence
  Non-cyclic GFR-binding peptide
  MOD_RES (3)..(4)..(35)..(37): Xaa is C or S
APXXVPQALSPINILYFVGRKPKVYGKIPMIVRSXKX

SEQ ID NO: 33382 - protein, 36 aa, Artificial Sequence
  Non-cyclic GFR-binding peptide
  MOD_RES (5)..(6): Xaa is C or S
VPSTXXAPVKTEPISMLYLDNGRVLLKFKYEMIVEE

SEQ ID NO: 33383 - protein, 35 aa, Artificial Sequence
  Non-cyclic GFR-binding peptide
  MOD_RES (2)..(3)..(35): Xaa is C or S
TXXVPTRLSATSILYYDSANNVVLRKHRDMVVESX

SEQ ID NO: 33384 - protein, 36 aa, Artificial Sequence
  Non-cyclic GFR-binding peptide
  MOD_RES (2)..(3)..(35): Xaa is C or S
TXXVPTRLEPISILYLDSANNVVKFKYEDMVVESXG

SEQ ID NO: 33385 - protein, 31 aa, Artificial Sequence
  Non-cyclic GFR-binding peptide
  MOD_RES (1)..(1): Xaa is C or S
XTPTKMSATSMLYYNDKQQIILRKHRGMVVD

SEQ ID NO: 33386 - protein, 41 aa, Artificial Sequence
  Non-cyclic GFR-binding peptide
  MOD_RES (5)..(6)..(40): Xaa is C or S
  MOD_RES (20)..(21)..(22)..(23)..(24): Xaa is A or G
  MOD_RES (25)..(26)..(27)..(28): Xaa is A or G or absent
SAGPXXTPTKMSATSMLYYXXXXXXXXXLRKHRGMVVDRXG

SEQ ID NO: 33387 - protein, 37 aa, Artificial Sequence
  Non-cyclic GFR-binding peptide
  MOD_RES (4)..(5)..(37): Xaa is C or S
PPTXXVPTRLSATSILYYDSANNVVLRKHRDMVVESX

SEQ ID NO: 33388 - protein, 38 aa, Artificial Sequence
  Non-cyclic GFR-binding peptide
  MOD_RES (5)..(6)..(38): Xaa is C or S
IPEPXXVPEKMSPISILYKDENKNVVLKYHYNMTVESX

SEQ ID NO: 33389 - protein, 36 aa, Artificial Sequence
  Non-cyclic GFR-binding peptide
  MOD_RES (3)..(4): Xaa is C or S
  MOD_RES (18)..(19)..(20)..(21)..(22): Xaa is A or G
  MOD_RES (23)..(24)..(25)..(26): Xaa is A or G or absent
EPXXVPEKMSATSILYYXXXXXXXXXLRKHRNMTVE

SEQ ID NO: 33390 - protein, 37 aa, Artificial Sequence
  Non-cyclic GFR-binding peptide
  MOD_RES (1)..(35)..(37): Xaa is C or S
  MOD_RES (15)..(16)..(17)..(18)..(19): Xaa is A or G
  MOD_RES (20)..(21)..(22)..(23): Xaa is A or G or absent
XVPTRLSPISILYKXXXXXXXXXLKYHYDMVVESXGX

SEQ ID NO: 33391 - protein, 38 aa, Artificial Sequence
  Non-cyclic GFR-binding peptide
  MOD_RES (2)..(3)..(37): Xaa is C or S
  MOD_RES (17)..(18)..(19)..(20)..(21): Xaa is A or G
  MOD_RES (22)..(23)..(24)..(25): Xaa is A or G or absent
PXXTPTKMSPISMLYKXXXXXXXXXLKYHYGMVVDRXG

SEQ ID NO: 33392 - protein, 39 aa, Artificial Sequence
  Non-cyclic GFR-binding peptide
  MOD_RES (2)..(3)..(36)..(38): Xaa is C or S
  MOD_RES (17)..(18)..(19)..(20)..(21): Xaa is A or G
  MOD_RES (22)..(23)..(24)..(25): Xaa is A or G or absent
PXXVSQDLSPINILYFXXXXXXXXXYGKIPMIVKSXKXS

SEQ ID NO: 33393 - protein, 34 aa, Artificial Sequence
  Non-cyclic GFR-binding peptide
  MOD_RES (1)..(2)..(34): Xaa is C or S
XXTPTKMSPISMLYKNDKQQIILKYHYGMVVDRX

SEQ ID NO: 33394 - protein, 38 aa, Artificial Sequence
  Non-cyclic GFR-binding peptide
  MOD_RES (2)..(3)..(37): Xaa is C or S
  MOD_RES (17)..(18)..(19)..(20)..(21): Xaa is A or G
  MOD_RES (22)..(23)..(24)..(25): Xaa is A or G or absent
PXXVPEKMSPISILYKXXXXXXXXXLKYHYNMTVESXA

SEQ ID NO: 33395 - protein, 39 aa, Artificial Sequence
  Non-cyclic GFR-binding peptide
  MOD_RES (6)..(7)..(39): Xaa is C or S
GIPEPXXVPEKMEPISILYLDENKNVVKFKYENMTVESX

SEQ ID NO: 33396 - protein, 32 aa, Artificial Sequence
  Non-cyclic GFR-binding peptide
  MOD_RES (1)..(2): Xaa is C or S
XXVPEKMEPISILYLDENKNVVKFKYENMTVE

SEQ ID NO: 33397 - protein, 38 aa, Artificial Sequence
  Non-cyclic GFR-binding peptide
  MOD_RES (5)..(6): Xaa is C or S
  MOD_RES (20)..(21)..(22)..(23)..(24): Xaa is A or G
  MOD_RES (25)..(26)..(27)..(28): Xaa is A or G or absent
SAGPXXTPTKMEPISMLYLXXXXXXXXXKFKYEGMVVD

SEQ ID NO: 33398 - protein, 36 aa, Artificial Sequence
  Non-cyclic GFR-binding peptide
  MOD_RES (5)..(6): Xaa is C or S
IPEPXXVPEKMSATSILYYDENKNVVLRKHRNMTVE

SEQ ID NO: 33399 - protein, 39 aa, Artificial Sequence
  Non-cyclic GFR-binding peptide
  MOD_RES (4)..(5)..(39): Xaa is C or S
  MOD_RES (19)..(20)..(21)..(22)..(23): Xaa is A or G
  MOD_RES (24)..(25)..(26)..(27): Xaa is A or G or absent
AGPXXTPTKMSATSMLYYXXXXXXXXXLRKHRGMVVDRX

SEQ ID NO: 33400 - protein, 41 aa, Artificial Sequence
  Non-cyclic GFR-binding peptide
  MOD_RES (3)..(4)..(38)..(40): Xaa is C or S
  MOD_RES (18)..(19)..(20)..(21)..(22): Xaa is A or G
  MOD_RES (23)..(24)..(25)..(26): Xaa is A or G or absent
EPXXVPEKMEPISILYLXXXXXXXXXKFKYENMTVESXAXR

SEQ ID NO: 33401 - protein, 35 aa, Artificial Sequence
  Non-cyclic GFR-binding peptide
  MOD_RES (2)..(3): Xaa is C or S
  MOD_RES (17)..(18)..(19)..(20)..(21): Xaa is A or G
  MOD_RES (22)..(23)..(24)..(25): Xaa is A or G or absent
SXXVPARLSATSILYYXXXXXXXXXLRKHRDMVVE

SEQ ID NO: 33402 - protein, 40 aa, Artificial Sequence
  Non-cyclic GFR-binding peptide
  MOD_RES (6)..(7)..(39): Xaa is C or S
GIPEPXXVPEKMEPISILYLDENKNVVKFKYENMTVESXA

SEQ ID NO: 33403 - protein, 41 aa, Artificial Sequence
  Non-cyclic GFR-binding peptide
  MOD_RES (6)..(7)..(39)..(41): Xaa is C or S
GIPEPXXVPEKMEPISILYLDENKNVVKFKYENMTVESXAX

SEQ ID NO: 33404 - protein, 35 aa, Artificial Sequence
  Non-cyclic GFR-binding peptide
  MOD_RES (3)..(4)..(35): Xaa is C or S
APXXVPQALSPINILYFVGRKPKVYGKIPMIVRSX

SEQ ID NO: 33405 - protein, 37 aa, Artificial Sequence
  Non-cyclic GFR-binding peptide
  MOD_RES (3)..(4): Xaa is C or S
  MOD_RES (18)..(19)..(20)..(21)..(22): Xaa is A or G
  MOD_RES (23)..(24)..(25)..(26): Xaa is A or G or absent
EPXXVPEKMNAISILYFXXXXXXXXXLKKYRNMTVES

SEQ ID NO: 33406 - protein, 39 aa, Artificial Sequence
  Non-cyclic GFR-binding peptide
  MOD_RES (5)..(6)..(38): Xaa is C or S
TPPTXXVPTRLSATSILYYDSANNVVLRKHRDMVVESXG

SEQ ID NO: 33407 - protein, 37 aa, Artificial Sequence
  Non-cyclic GFR-binding peptide
  MOD_RES (3)..(4)..(37): Xaa is C or S
  MOD_RES (18)..(19)..(20)..(21)..(22): Xaa is A or G
  MOD_RES (23)..(24)..(25)..(26): Xaa is A or G or absent
STXXAPVKTSPISMLYKXXXXXXXXXLKYHYMIVEEX

SEQ ID NO: 33408 - protein, 34 aa, Artificial Sequence
  Non-cyclic GFR-binding peptide
  MOD_RES (2)..(3): Xaa is C or S
PXXTPTKMEPISMLYLNDKQQIIKFKYEGMVVDR

SEQ ID NO: 33409 - protein, 39 aa, Artificial Sequence
  Non-cyclic GFR-binding peptide
  MOD_RES (4)..(5)..(39): Xaa is C or S
  MOD_RES (19)..(20)..(21)..(22)..(23): Xaa is A or G
  MOD_RES (24)..(25)..(26)..(27): Xaa is A or G or absent
PEPXXVPEKMEPISILYLXXXXXXXXXKFKYENMTVESX

SEQ ID NO: 33410 - protein, 40 aa, Artificial Sequence
  Non-cyclic GFR-binding peptide
  MOD_RES (5)..(6)..(37)..(39): Xaa is C or S
SASPXXVSQDLSPINILYFIGKTPKIYGKIPMIVKSXKXS

SEQ ID NO: 33411 - protein, 38 aa, Artificial Sequence
  Non-cyclic GFR-binding peptide
  MOD_RES (5)..(6)..(37): Xaa is C or S
VPSTXXAPVKTSPISMLYKDNGRVLLLKYHYMIVEEXG

SEQ ID NO: 33412 - protein, 39 aa, Artificial Sequence
  Non-cyclic GFR-binding peptide
  MOD_RES (6)..(7)..(39): Xaa is C or S
GSAGPXXTPTKMEPISMLYLNDKQQIIKFKYEGMVVDRX

SEQ ID NO: 33413 - protein, 40 aa, Artificial Sequence
  Non-cyclic GFR-binding peptide
  MOD_RES (6)..(7): Xaa is C or S
  MOD_RES (21)..(22)..(23)..(24)..(25): Xaa is A or G
  MOD_RES (26)..(27)..(28)..(29): Xaa is A or G or absent
GIPEPXXVPEKMSPINILYFXXXXXXXXXYGKIPNMTVES

SEQ ID NO: 33414 - protein, 32 aa, Artificial Sequence
  Non-cyclic GFR-binding peptide
  MOD_RES (1)..(1): Xaa is C or S
XVPTKLSATSILYYDKGVVTYLRKHRGMAVSE

SEQ ID NO: 33415 - protein, 40 aa, Artificial Sequence
  Non-cyclic GFR-binding peptide
  MOD_RES (4)..(5)..(38)..(40): Xaa is C or S
  MOD_RES (19)..(20)..(21)..(22)..(23): Xaa is A or G
  MOD_RES (24)..(25)..(26)..(27): Xaa is A or G or absent
PSTXXAPVKTEPISMLYLXXXXXXXXXKFKYEMIVEEXGX

SEQ ID NO: 33416 - protein, 30 aa, Artificial Sequence
  Non-cyclic GFR-binding peptide
VPEKMSPINILYFDENKNVVYGKIPNMTVE

SEQ ID NO: 33417 - protein, 38 aa, Artificial Sequence
  Non-cyclic GFR-binding peptide
  MOD_RES (5)..(6)..(38): Xaa is C or S
SAGPXXTPTKMSPISMLYKNDKQQIILKYHYGMVVDRX

SEQ ID NO: 33418 - protein, 39 aa, Artificial Sequence
  Non-cyclic GFR-binding peptide
  MOD_RES (4)..(5)..(37)..(39): Xaa is C or S
PPTXXVPTRLEPISILYLDSANNVVKFKYEDMVVESXGX

SEQ ID NO: 33419 - protein, 38 aa, Artificial Sequence
  Non-cyclic GFR-binding peptide
  MOD_RES (2)..(3)..(35)..(37): Xaa is C or S
TXXVPTRLSPISILYKDSANNVVLKYHYDMVVESXGXR

SEQ ID NO: 33420 - protein, 38 aa, Artificial Sequence
  Non-cyclic GFR-binding peptide
  MOD_RES (3)..(4)..(38): Xaa is C or S
  MOD_RES (18)..(19)..(20)..(21)..(22): Xaa is A or G
  MOD_RES (23)..(24)..(25)..(26): Xaa is A or G or absent
PTXXVPTRLSPISILYKXXXXXXXXXLKYHYDMVVESX

SEQ ID NO: 33421 - protein, 35 aa, Artificial Sequence
  Non-cyclic GFR-binding peptide
  MOD_RES (1)..(2)..(33)..(35): Xaa is C or S
XXVPQALSPINILYFVGRKPKVYGKIPMIVRSXKX

SEQ ID NO: 33422 - protein, 35 aa, Artificial Sequence
  Non-cyclic GFR-binding peptide
  MOD_RES (32)..(34): Xaa is C or S
VPEKMSPISILYKDENKNVVLKYHYNMTVESXAXR

SEQ ID NO: 33423 - protein, 39 aa, Artificial Sequence
  Non-cyclic GFR-binding peptide
  MOD_RES (3)..(4)..(37)..(39): Xaa is C or S
  MOD_RES (18)..(19)..(20)..(21)..(22): Xaa is A or G
  MOD_RES (23)..(24)..(25)..(26): Xaa is A or G or absent
STXXAPVKTEPISMLYLXXXXXXXXXKFKYEMIVEEXGX

SEQ ID NO: 33424 - protein, 36 aa, Artificial Sequence
  Non-cyclic GFR-binding peptide
  MOD_RES (1)..(2)..(34)..(36): Xaa is C or S
XXVPTRLSATSILYYDSANNVVLRKHRDMVVESXGX

SEQ ID NO: 33425 - protein, 36 aa, Artificial Sequence
  Non-cyclic GFR-binding peptide
  MOD_RES (1)..(33)..(35): Xaa is C or S
XVPTRLEPISILYLDSANNVVKFKYEDMVVESXGXR

SEQ ID NO: 33426 - protein, 39 aa, Artificial Sequence
  Non-cyclic GFR-binding peptide
  MOD_RES (3)..(4)..(38): Xaa is C or S
  MOD_RES (18)..(19)..(20)..(21)..(22): Xaa is A or G
  MOD_RES (23)..(24)..(25)..(26): Xaa is A or G or absent
EPXXVPEKMSPINILYFXXXXXXXXXYGKIPNMTVESXA

SEQ ID NO: 33427 - protein, 36 aa, Artificial Sequence
  Non-cyclic GFR-binding peptide
  MOD_RES (1)..(2)..(34)..(36): Xaa is C or S
XXVPEKMSPINILYFDENKNVVYGKIPNMTVESXAX

SEQ ID NO: 33428 - protein, 38 aa, Artificial Sequence
  Non-cyclic GFR-binding peptide
  MOD_RES (4)..(5)..(37): Xaa is C or S
AGPXXTPTKMEPISMLYLNDKQQIIKFKYEGMVVDRXG

SEQ ID NO: 33429 - protein, 35 aa, Artificial Sequence
  Non-cyclic GFR-binding peptide
  MOD_RES (3)..(4): Xaa is C or S
PTXXVPTRLSPISILYKDSANNVVLKYHYDMVVES

SEQ ID NO: 33430 - protein, 38 aa, Artificial Sequence
  Non-cyclic GFR-binding peptide
  MOD_RES (1)..(35)..(37): Xaa is C or S
  MOD_RES (15)..(16)..(17)..(18)..(19): Xaa is A or G
  MOD_RES (20)..(21)..(22)..(23): Xaa is A or G or absent
XVPEKMSATSILYYXXXXXXXXXLRKHRNMTVESXAXR

SEQ ID NO: 33431 - protein, 36 aa, Artificial Sequence
  Non-cyclic GFR-binding peptide
  MOD_RES (4)..(5)..(36): Xaa is C or S
PSTXXAPVKTSPISMLYKDNGRVLLLKYHYMIVEEX

SEQ ID NO: 33432 - protein, 35 aa, Artificial Sequence
  Non-cyclic GFR-binding peptide
  MOD_RES (2)..(3): Xaa is C or S
  MOD_RES (17)..(18)..(19)..(20)..(21): Xaa is A or G
  MOD_RES (22)..(23)..(24)..(25): Xaa is A or G or absent
TXXAPVKTSATSMLYYXXXXXXXXXLRKHRMIVEE

SEQ ID NO: 33433 - protein, 37 aa, Artificial Sequence
  Non-cyclic GFR-binding peptide
  MOD_RES (1)..(35)..(37): Xaa is C or S
  MOD_RES (15)..(16)..(17)..(18)..(19): Xaa is A or G
  MOD_RES (20)..(21)..(22)..(23): Xaa is A or G or absent
XVPEKMSPINILYFXXXXXXXXXYGKIPNMTVESXAX

SEQ ID NO: 33434 - protein, 41 aa, Artificial Sequence
  Non-cyclic GFR-binding peptide
  MOD_RES (3)..(4)..(38)..(40): Xaa is C or S
  MOD_RES (18)..(19)..(20)..(21)..(22): Xaa is A or G
  MOD_RES (23)..(24)..(25)..(26): Xaa is A or G or absent
PTXXVPTRLSPISILYKXXXXXXXXXLKYHYDMVVESXGXR

SEQ ID NO: 33435 - protein, 37 aa, Artificial Sequence
  Non-cyclic GFR-binding peptide
  MOD_RES (1)..(34)..(36): Xaa is C or S
  MOD_RES (15)..(16)..(17)..(18)..(19): Xaa is A or G
  MOD_RES (20)..(21)..(22)..(23): Xaa is A or G or absent
XAPVKTSPISMLYKXXXXXXXXXLKYHYMIVEEXGXL

SEQ ID NO: 33436 - protein, 31 aa, Artificial Sequence
  Non-cyclic GFR-binding peptide
  MOD_RES (31)..(31): Xaa is C or S
VPQALSPINILYFVGRKPKVYGKIPMIVRSX

SEQ ID NO: 33437 - protein, 37 aa, Artificial Sequence
  Non-cyclic GFR-binding peptide
  MOD_RES (34)..(36): Xaa is C or S
  MOD_RES (14)..(15)..(16)..(17)..(18): Xaa is A or G
  MOD_RES (19)..(20)..(21)..(22): Xaa is A or G or absent
VPEKMSPISILYKXXXXXXXXXLKYHYNMTVESXAXR

SEQ ID NO: 33438 - protein, 37 aa, Artificial Sequence
  Non-cyclic GFR-binding peptide
  MOD_RES (3)..(4)..(36): Xaa is C or S
GPXXTPTKMSATSMLYYNDKQQIILRKHRGMVVDRXG

SEQ ID NO: 33439 - protein, 36 aa, Artificial Sequence
  Non-cyclic GFR-binding peptide
  MOD_RES (1)..(2)..(36): Xaa is C or S
  MOD_RES (16)..(17)..(18)..(19)..(20): Xaa is A or G
  MOD_RES (21)..(22)..(23)..(24): Xaa is A or G or absent
XXTPTKMEPISMLYLXXXXXXXXXKFKYEGMVVDRX

SEQ ID NO: 33440 - protein, 38 aa, Artificial Sequence
  Non-cyclic GFR-binding peptide
  MOD_RES (3)..(4)..(36)..(38): Xaa is C or S
EPXXVPEKMEPISILYLDENKNVVKFKYENMTVESXAX

SEQ ID NO: 33441 - protein, 39 aa, Artificial Sequence
  Non-cyclic GFR-binding peptide
  MOD_RES (1)..(2)..(36)..(38): Xaa is C or S
  MOD_RES (16)..(17)..(18)..(19)..(20): Xaa is A or G
  MOD_RES (21)..(22)..(23)..(24): Xaa is A or G or absent
XXVPEKMNAISILYFXXXXXXXXXLKKYRNMTVESXAXR

SEQ ID NO: 33442 - protein, 40 aa, Artificial Sequence
  Non-cyclic GFR-binding peptide
  MOD_RES (5)..(6)..(40): Xaa is C or S
  MOD_RES (20)..(21)..(22)..(23)..(24): Xaa is A or G
  MOD_RES (25)..(26)..(27)..(28): Xaa is A or G or absent
TPPTXXVPTRLEPISILYLXXXXXXXXXKFKYEDMVVESX

SEQ ID NO: 33443 - protein, 37 aa, Artificial Sequence
  Non-cyclic GFR-binding peptide
  MOD_RES (2)..(3)..(37): Xaa is C or S
  MOD_RES (17)..(18)..(19)..(20)..(21): Xaa is A or G
  MOD_RES (22)..(23)..(24)..(25): Xaa is A or G or absent
PXXVPEKMEPISILYLXXXXXXXXXKFKYENMTVESX

SEQ ID NO: 33444 - protein, 32 aa, Artificial Sequence
  Non-cyclic GFR-binding peptide
  MOD_RES (14)..(15)..(16)..(17)..(18): Xaa is A or G
  MOD_RES (19)..(20)..(21)..(22): Xaa is A or G or absent
VPTRLSPISILYKXXXXXXXXXLKYHYDMVVE

SEQ ID NO: 33445 - protein, 32 aa, Artificial Sequence
  Non-cyclic GFR-binding peptide
  MOD_RES (14)..(15)..(16)..(17)..(18): Xaa is A or G
  MOD_RES (19)..(20)..(21)..(22): Xaa is A or G or absent
VPTRLEPISILYLXXXXXXXXXKFKYEDMVVE

SEQ ID NO: 33446 - protein, 38 aa, Artificial Sequence
  Non-cyclic GFR-binding peptide
  MOD_RES (3)..(4)..(38): Xaa is C or S
  MOD_RES (18)..(19)..(20)..(21)..(22): Xaa is A or G
  MOD_RES (23)..(24)..(25)..(26): Xaa is A or G or absent
EPXXVPEKMSPINILYFXXXXXXXXXYGKIPNMTVESX

SEQ ID NO: 33447 - protein, 35 aa, Artificial Sequence
  Non-cyclic GFR-binding peptide
  MOD_RES (2)..(3)..(35): Xaa is C or S
TXXVPTRLEPISILYLDSANNVVKFKYEDMVVESX

SEQ ID NO: 33448 - protein, 36 aa, Artificial Sequence
  Non-cyclic GFR-binding peptide
  MOD_RES (1)..(2)..(35): Xaa is C or S
  MOD_RES (16)..(17)..(18)..(19)..(20): Xaa is A or G
  MOD_RES (21)..(22)..(23)..(24): Xaa is A or G or absent
XXVPQDLSPINILYFXXXXXXXXXYGKIPMVVKSXK

SEQ ID NO: 33449 - protein, 37 aa, Artificial Sequence
  Non-cyclic GFR-binding peptide
  MOD_RES (1)..(2)..(36): Xaa is C or S
  MOD_RES (16)..(17)..(18)..(19)..(20): Xaa is A or G
  MOD_RES (21)..(22)..(23)..(24): Xaa is A or G or absent
XXTPTKMSPISMLYKXXXXXXXXXLKYHYGMVVDRXG

SEQ ID NO: 33450 - protein, 37 aa, Artificial Sequence
  Non-cyclic GFR-binding peptide
  MOD_RES (6)..(7): Xaa is C or S
HVPKPXXAPTKLEPISVLYLDDSSNVIKFKYENMVVR

SEQ ID NO: 33451 - protein, 40 aa, Artificial Sequence
  Non-cyclic GFR-binding peptide
  MOD_RES (6)..(7)..(39): Xaa is C or S
HVPKPXXAPTKLSPISVLYKDDSSNVILKYHYNMVVRSXG

SEQ ID NO: 33452 - protein, 33 aa, Artificial Sequence
  Non-cyclic GFR-binding peptide
  MOD_RES (31)..(33): Xaa is C or S
APVKTSPISMLYKDNGRVLLLKYHYMIVEEXGX

SEQ ID NO: 33453 - protein, 39 aa, Artificial Sequence
  Non-cyclic GFR-binding peptide
  MOD_RES (5)..(6): Xaa is C or S
  MOD_RES (20)..(21)..(22)..(23)..(24): Xaa is A or G
  MOD_RES (25)..(26)..(27)..(28): Xaa is A or G or absent
IPEPXXVPEKMSATSILYYXXXXXXXXXLRKHRNMTVES

SEQ ID NO: 33454 - protein, 35 aa, Artificial Sequence
  Non-cyclic GFR-binding peptide
  MOD_RES (1)..(34): Xaa is C or S
  MOD_RES (15)..(16)..(17)..(18)..(19): Xaa is A or G
  MOD_RES (20)..(21)..(22)..(23): Xaa is A or G or absent
XVPQDLSPINILYFXXXXXXXXXYGKIPMVVKSXK

SEQ ID NO: 33455 - protein, 38 aa, Artificial Sequence
  Non-cyclic GFR-binding peptide
  MOD_RES (1)..(35)..(37): Xaa is C or S
  MOD_RES (15)..(16)..(17)..(18)..(19): Xaa is A or G
  MOD_RES (20)..(21)..(22)..(23): Xaa is A or G or absent
XTPTKMSPISMLYKXXXXXXXXXLKYHYGMVVDRXGXS

SEQ ID NO: 33456 - protein, 37 aa, Artificial Sequence
  Non-cyclic GFR-binding peptide
  MOD_RES (5)..(6): Xaa is C or S
SAGPXXTPTKMSATSMLYYNDKQQIILRKHRGMVVDR

SEQ ID NO: 33457 - protein, 37 aa, Artificial Sequence
  Non-cyclic GFR-binding peptide
  MOD_RES (3)..(4): Xaa is C or S
  MOD_RES (18)..(19)..(20)..(21)..(22): Xaa is A or G
  MOD_RES (23)..(24)..(25)..(26): Xaa is A or G or absent
GPXXTPTKMSATSMLYYXXXXXXXXXLRKHRGMVVDR

SEQ ID NO: 33458 - protein, 33 aa, Artificial Sequence
  Non-cyclic GFR-binding peptide
  MOD_RES (1)..(1): Xaa is C or S
  MOD_RES (15)..(16)..(17)..(18)..(19): Xaa is A or G
  MOD_RES (20)..(21)..(22)..(23): Xaa is A or G or absent
XVSQDLSPINILYFXXXXXXXXXYGKIPMIVKS

SEQ ID NO: 33459 - protein, 34 aa, Artificial Sequence
  Non-cyclic GFR-binding peptide
  MOD_RES (1)..(34): Xaa is C or S
  MOD_RES (15)..(16)..(17)..(18)..(19): Xaa is A or G
  MOD_RES (20)..(21)..(22)..(23): Xaa is A or G or absent
XVPQALSPINILYFXXXXXXXXXYGKIPMIVRSX

SEQ ID NO: 33460 - protein, 37 aa, Artificial Sequence
  Non-cyclic GFR-binding peptide
  MOD_RES (1)..(2)..(36): Xaa is C or S
  MOD_RES (16)..(17)..(18)..(19)..(20): Xaa is A or G
  MOD_RES (21)..(22)..(23)..(24): Xaa is A or G or absent
XXTPTKMEPISMLYLXXXXXXXXXKFKYEGMVVDRXG

SEQ ID NO: 33461 - protein, 36 aa, Artificial Sequence
  Non-cyclic GFR-binding peptide
  MOD_RES (2)..(3)..(34)..(36): Xaa is C or S
TXXAPVKTSATSMLYYDNGRVLLLRKHRMIVEEXGX

SEQ ID NO: 33462 - protein, 37 aa, Artificial Sequence
  Non-cyclic GFR-binding peptide
  MOD_RES (5)..(6): Xaa is C or S
IPEPXXVPEKMSPINILYFDENKNVVYGKIPNMTVES

SEQ ID NO: 33463 - protein, 34 aa, Artificial Sequence
  Non-cyclic GFR-binding peptide
  MOD_RES (32)..(34): Xaa is C or S
TPTKMSPISMLYKNDKQQIILKYHYGMVVDRXGX

SEQ ID NO: 33464 - protein, 41 aa, Artificial Sequence
  Non-cyclic GFR-binding peptide
  MOD_RES (5)..(6)..(40): Xaa is C or S
  MOD_RES (20)..(21)..(22)..(23)..(24): Xaa is A or G
  MOD_RES (25)..(26)..(27)..(28): Xaa is A or G or absent
TPPTXXVPTRLSPISILYKXXXXXXXXXLKYHYDMVVESXG

SEQ ID NO: 33465 - protein, 41 aa, Artificial Sequence
  Non-cyclic GFR-binding peptide
  MOD_RES (6)..(7)..(39)..(41): Xaa is C or S
KASKAXXVPTKLSATSILYYDKGVVTYLRKHRGMAVSEXGX

SEQ ID NO: 33466 - protein, 38 aa, Artificial Sequence
  Non-cyclic GFR-binding peptide
  MOD_RES (3)..(4)..(38): Xaa is C or S
  MOD_RES (18)..(19)..(20)..(21)..(22): Xaa is A or G
  MOD_RES (23)..(24)..(25)..(26): Xaa is A or G or absent
GPXXTPTKMEPISMLYLXXXXXXXXXKFKYEGMVVDRX

SEQ ID NO: 33467 - protein, 41 aa, Artificial Sequence
  Non-cyclic GFR-binding peptide
  MOD_RES (6)..(7)..(39)..(41): Xaa is C or S
STPPTXXVPTRLSPISILYKDSANNVVLKYHYDMVVESXGX

SEQ ID NO: 33468 - protein, 39 aa, Artificial Sequence
  Non-cyclic GFR-binding peptide
  MOD_RES (2)..(3)..(37)..(39): Xaa is C or S
  MOD_RES (17)..(18)..(19)..(20)..(21): Xaa is A or G
  MOD_RES (22)..(23)..(24)..(25): Xaa is A or G or absent
PXXTPTKMEPISMLYLXXXXXXXXXKFKYEGMVVDRXGX

SEQ ID NO: 33469 - protein, 37 aa, Artificial Sequence
  Non-cyclic GFR-binding peptide
  MOD_RES (5)..(6): Xaa is C or S
SAGPXXTPTKMEPISMLYLNDKQQIIKFKYEGMVVDR

SEQ ID NO: 33470 - protein, 36 aa, Artificial Sequence
  Non-cyclic GFR-binding peptide
  MOD_RES (3)..(4): Xaa is C or S
  MOD_RES (18)..(19)..(20)..(21)..(22): Xaa is A or G
  MOD_RES (23)..(24)..(25)..(26): Xaa is A or G or absent
STXXAPVKTEPISMLYLXXXXXXXXXKFKYEMIVEE

SEQ ID NO: 33471 - protein, 38 aa, Artificial Sequence
  Non-cyclic GFR-binding peptide
  MOD_RES (5)..(6)..(38): Xaa is C or S
TPPTXXVPTRLEPISILYLDSANNVVKFKYEDMVVESX

SEQ ID NO: 33472 - protein, 38 aa, Artificial Sequence
  Non-cyclic GFR-binding peptide
  MOD_RES (3)..(4)..(38): Xaa is C or S
  MOD_RES (18)..(19)..(20)..(21)..(22): Xaa is A or G
  MOD_RES (23)..(24)..(25)..(26): Xaa is A or G or absent
ASXXVPARLSATSILYYXXXXXXXXXLRKHRDMVVEAX

SEQ ID NO: 33473 - protein, 35 aa, Artificial Sequence
  Non-cyclic GFR-binding peptide
  MOD_RES (1)..(2)..(35): Xaa is C or S
  MOD_RES (16)..(17)..(18)..(19)..(20): Xaa is A or G
  MOD_RES (21)..(22)..(23)..(24): Xaa is A or G or absent
XXVSQDLSPINILYFXXXXXXXXXYGKIPMIVKSX

SEQ ID NO: 33474 - protein, 36 aa, Artificial Sequence
  Non-cyclic GFR-binding peptide
  MOD_RES (5)..(6): Xaa is C or S
VPSTXXAPVKTSATSMLYYDNGRVLLLRKHRMIVEE

SEQ ID NO: 33475 - protein, 30 aa, Artificial Sequence
  Non-cyclic GFR-binding peptide
TPTKMEPISMLYLNDKQQIIKFKYEGMVVD

SEQ ID NO: 33476 - protein, 36 aa, Artificial Sequence
  Non-cyclic GFR-binding peptide
  MOD_RES (4)..(5): Xaa is C or S
PPTXXVPTRLEPISILYLDSANNVVKFKYEDMVVES

SEQ ID NO: 33477 - protein, 31 aa, Artificial Sequence
  Non-cyclic GFR-binding peptide
  MOD_RES (1)..(1): Xaa is C or S
XVPEKMSPINILYFDENKNVVYGKIPNMTVE

SEQ ID NO: 33478 - protein, 37 aa, Artificial Sequence
  Non-cyclic GFR-binding peptide
  MOD_RES (2)..(3)..(37): Xaa is C or S
  MOD_RES (17)..(18)..(19)..(20)..(21): Xaa is A or G
  MOD_RES (22)..(23)..(24)..(25): Xaa is A or G or absent
TXXVPTRLSPISILYKXXXXXXXXXLKYHYDMVVESX

SEQ ID NO: 33479 - protein, 32 aa, Artificial Sequence
  Non-cyclic GFR-binding peptide
  MOD_RES (14)..(15)..(16)..(17)..(18): Xaa is A or G
  MOD_RES (19)..(20)..(21)..(22): Xaa is A or G or absent
VPTRLSATSILYYXXXXXXXXXLRKHRDMVVE

SEQ ID NO: 33480 - protein, 36 aa, Artificial Sequence
  Non-cyclic GFR-binding peptide
  MOD_RES (4)..(5)..(36): Xaa is C or S
PSTXXAPVKTEPISMLYLDNGRVLLKFKYEMIVEEX

SEQ ID NO: 33481 - protein, 38 aa, Artificial Sequence
  Non-cyclic GFR-binding peptide
  MOD_RES (4)..(5): Xaa is C or S
  MOD_RES (19)..(20)..(21)..(22)..(23): Xaa is A or G
  MOD_RES (24)..(25)..(26)..(27): Xaa is A or G or absent
PASXXVPARLSATSILYYXXXXXXXXXLRKHRDMVVEA

SEQ ID NO: 33482 - protein, 35 aa, Artificial Sequence
  Non-cyclic GFR-binding peptide
  MOD_RES (1)..(33)..(35): Xaa is C or S
XVPARLSATSILYYDAANNVVLRKHRDMVVEAXGX

SEQ ID NO: 33483 - protein, 35 aa, Artificial Sequence
  Non-cyclic GFR-binding peptide
  MOD_RES (1)..(33)..(35): Xaa is C or S
XVPEKMEPISILYLDENKNVVKFKYENMTVESXAX

SEQ ID NO: 33484 - protein, 35 aa, Artificial Sequence
  Non-cyclic GFR-binding peptide
  MOD_RES (2)..(3): Xaa is C or S
  MOD_RES (17)..(18)..(19)..(20)..(21): Xaa is A or G
  MOD_RES (22)..(23)..(24)..(25): Xaa is A or G or absent
TXXAPVKTEPISMLYLXXXXXXXXXKFKYEMIVEE

SEQ ID NO: 33485 - protein, 35 aa, Artificial Sequence
  Non-cyclic GFR-binding peptide
  MOD_RES (1)..(35): Xaa is C or S
  MOD_RES (15)..(16)..(17)..(18)..(19): Xaa is A or G
  MOD_RES (20)..(21)..(22)..(23): Xaa is A or G or absent
XTPTKMEPISMLYLXXXXXXXXXKFKYEGMVVDRX

SEQ ID NO: 33486 - protein, 41 aa, Artificial Sequence
  Non-cyclic GFR-binding peptide
  MOD_RES (6)..(7)..(41): Xaa is C or S
  MOD_RES (21)..(22)..(23)..(24)..(25): Xaa is A or G
  MOD_RES (26)..(27)..(28)..(29): Xaa is A or G or absent
GIPEPXXVPEKMSPISILYKXXXXXXXXXLKYHYNMTVESX

SEQ ID NO: 33487 - protein, 36 aa, Artificial Sequence
  Non-cyclic GFR-binding peptide
  MOD_RES (34)..(36): Xaa is C or S
  MOD_RES (14)..(15)..(16)..(17)..(18): Xaa is A or G
  MOD_RES (19)..(20)..(21)..(22): Xaa is A or G or absent
VPEKMEPISILYLXXXXXXXXXKFKYENMTVESXAX

SEQ ID NO: 33488 - protein, 41 aa, Artificial Sequence
  Non-cyclic GFR-binding peptide
  MOD_RES (4)..(5)..(39)..(41): Xaa is C or S
  MOD_RES (19)..(20)..(21)..(22)..(23): Xaa is A or G
  MOD_RES (24)..(25)..(26)..(27): Xaa is A or G or absent
PPTXXVPTRLSATSILYYXXXXXXXXXLRKHRDMVVESXGX

SEQ ID NO: 33489 - protein, 35 aa, Artificial Sequence
  Non-cyclic GFR-binding peptide
  MOD_RES (33)..(35): Xaa is C or S
  MOD_RES (14)..(15)..(16)..(17)..(18): Xaa is A or G
  MOD_RES (19)..(20)..(21)..(22): Xaa is A or G or absent
VPQALSPINILYFXXXXXXXXXYGKIPMIVRSXKX

SEQ ID NO: 33490 - protein, 40 aa, Artificial Sequence
  Non-cyclic GFR-binding peptide
  MOD_RES (4)..(5)..(37)..(39): Xaa is C or S
PEPXXVPEKMSPISILYKDENKNVVLKYHYNMTVESXAXR

SEQ ID NO: 33491 - protein, 36 aa, Artificial Sequence
  Non-cyclic GFR-binding peptide
  MOD_RES (1)..(35): Xaa is C or S
  MOD_RES (15)..(16)..(17)..(18)..(19): Xaa is A or G
  MOD_RES (20)..(21)..(22)..(23): Xaa is A or G or absent
XTPTKMSATSMLYYXXXXXXXXXLRKHRGMVVDRXG

SEQ ID NO: 33492 - protein, 42 aa, Artificial Sequence
  Non-cyclic GFR-binding peptide
  MOD_RES (5)..(6)..(40)..(42): Xaa is C or S
  MOD_RES (20)..(21)..(22)..(23)..(24): Xaa is A or G
  MOD_RES (25)..(26)..(27)..(28): Xaa is A or G or absent
IPEPXXVPEKMEPISILYLXXXXXXXXXKFKYENMTVESXAX

SEQ ID NO: 33493 - protein, 37 aa, Artificial Sequence
  Non-cyclic GFR-binding peptide
  MOD_RES (34)..(36): Xaa is C or S
  MOD_RES (14)..(15)..(16)..(17)..(18): Xaa is A or G
  MOD_RES (19)..(20)..(21)..(22): Xaa is A or G or absent
TPTKMSATSMLYYXXXXXXXXXLRKHRGMVVDRXGXS

SEQ ID NO: 33494 - protein, 39 aa, Artificial Sequence
  Non-cyclic GFR-binding peptide
  MOD_RES (2)..(3)..(36)..(38): Xaa is C or S
  MOD_RES (17)..(18)..(19)..(20)..(21): Xaa is A or G
  MOD_RES (22)..(23)..(24)..(25): Xaa is A or G or absent
TXXAPVKTSATSMLYYXXXXXXXXXLRKHRMIVEEXGXL

SEQ ID NO: 33495 - protein, 39 aa, Artificial Sequence
  Non-cyclic GFR-binding peptide
  MOD_RES (4)..(5)..(39): Xaa is C or S
  MOD_RES (19)..(20)..(21)..(22)..(23): Xaa is A or G
  MOD_RES (24)..(25)..(26)..(27): Xaa is A or G or absent
AGPXXTPTKMSPISMLYKXXXXXXXXXLKYHYGMVVDRX

SEQ ID NO: 33496 - protein, 37 aa, Artificial Sequence
  Non-cyclic GFR-binding peptide
  MOD_RES (34)..(36): Xaa is C or S
  MOD_RES (14)..(15)..(16)..(17)..(18): Xaa is A or G
  MOD_RES (19)..(20)..(21)..(22): Xaa is A or G or absent
VPARLSATSILYYXXXXXXXXXLRKHRDMVVEAXGXR

SEQ ID NO: 33497 - protein, 34 aa, Artificial Sequence
  Non-cyclic GFR-binding peptide
  MOD_RES (1)..(2): Xaa is C or S
  MOD_RES (16)..(17)..(18)..(19)..(20): Xaa is A or G
  MOD_RES (21)..(22)..(23)..(24): Xaa is A or G or absent
XXTPTKMEPISMLYLXXXXXXXXXKFKYEGMVVD

SEQ ID NO: 33498 - protein, 35 aa, Artificial Sequence
  Non-cyclic GFR-binding peptide
  MOD_RES (1)..(2)..(34): Xaa is C or S
XXTPTKMSPISMLYKNDKQQIILKYHYGMVVDRXG

SEQ ID NO: 33499 - protein, 43 aa, Artificial Sequence
  Non-cyclic GFR-binding peptide
  MOD_RES (6)..(7)..(41)..(43): Xaa is C or S
  MOD_RES (21)..(22)..(23)..(24)..(25): Xaa is A or G
  MOD_RES (26)..(27)..(28)..(29): Xaa is A or G or absent
HVPKPXXAPTKLSATSVLYYXXXXXXXXXLRKHRNMVVRSXGX

SEQ ID NO: 33500 - protein, 42 aa, Artificial Sequence
  Non-cyclic GFR-binding peptide
  MOD_RES (6)..(7)..(39)..(41): Xaa is C or S
HVPKPXXAPTKLSATSVLYYDDSSNVILRKHRNMVVRSXGXH

SEQ ID NO: 33501 - protein, 34 aa, Artificial Sequence
  Non-cyclic GFR-binding peptide
  MOD_RES (34)..(34): Xaa is C or S
  MOD_RES (14)..(15)..(16)..(17)..(18): Xaa is A or G
  MOD_RES (19)..(20)..(21)..(22): Xaa is A or G or absent
TPTKMEPISMLYLXXXXXXXXXKFKYEGMVVDRX

SEQ ID NO: 33502 - protein, 35 aa, Artificial Sequence
  Non-cyclic GFR-binding peptide
  MOD_RES (2)..(3)..(34): Xaa is C or S
TXXAPVKTSPISMLYKDNGRVLLLKYHYMIVEEXG

SEQ ID NO: 33503 - protein, 34 aa, Artificial Sequence
  Non-cyclic GFR-binding peptide
  MOD_RES (2)..(3): Xaa is C or S
PXXTPTKMSATSMLYYNDKQQIILRKHRGMVVDR

SEQ ID NO: 33504 - protein, 36 aa, Artificial Sequence
  Non-cyclic GFR-binding peptide
  MOD_RES (5)..(6): Xaa is C or S
VPSTXXAPVKTSPISMLYKDNGRVLLLKYHYMIVEE

SEQ ID NO: 33505 - protein, 39 aa, Artificial Sequence
  Non-cyclic GFR-binding peptide
  MOD_RES (3)..(4)..(38): Xaa is C or S
  MOD_RES (18)..(19)..(20)..(21)..(22): Xaa is A or G
  MOD_RES (23)..(24)..(25)..(26): Xaa is A or G or absent
EPXXVPEKMSATSILYYXXXXXXXXXLRKHRNMTVESXA

SEQ ID NO: 33506 - protein, 41 aa, Artificial Sequence
  Non-cyclic GFR-binding peptide
  MOD_RES (6)..(7)..(41): Xaa is C or S
  MOD_RES (21)..(22)..(23)..(24)..(25): Xaa is A or G
  MOD_RES (26)..(27)..(28)..(29): Xaa is A or G or absent
HVPKPXXAPTKLSATSVLYYXXXXXXXXXLRKHRNMVVRSX

SEQ ID NO: 33507 - protein, 34 aa, Artificial Sequence
  Non-cyclic GFR-binding peptide
  MOD_RES (1)..(33): Xaa is C or S
XVPEKMSPINILYFDENKNVVYGKIPNMTVESXA

SEQ ID NO: 33508 - protein, 32 aa, Artificial Sequence
  Non-cyclic GFR-binding peptide
  MOD_RES (14)..(15)..(16)..(17)..(18): Xaa is A or G
  MOD_RES (19)..(20)..(21)..(22): Xaa is A or G or absent
VPQDLSPINILYFXXXXXXXXXYGKIPMVVKS

SEQ ID NO: 33509 - protein, 38 aa, Artificial Sequence
  Non-cyclic GFR-binding peptide
  MOD_RES (3)..(4)..(35)..(37): Xaa is C or S
SPXXVPQDLSPINILYFVGRTPKVYGKIPMVVKSXKXS

SEQ ID NO: 33510 - protein, 37 aa, Artificial Sequence
  Non-cyclic GFR-binding peptide
  MOD_RES (3)..(4)..(37): Xaa is C or S
  MOD_RES (18)..(19)..(20)..(21)..(22): Xaa is A or G
  MOD_RES (23)..(24)..(25)..(26): Xaa is A or G or absent
SPXXVPQDLSPINILYFXXXXXXXXXYGKIPMVVKSX

SEQ ID NO: 33511 - protein, 40 aa, Artificial Sequence
  Non-cyclic GFR-binding peptide
  MOD_RES (6)..(7)..(40): Xaa is C or S
  MOD_RES (21)..(22)..(23)..(24)..(25): Xaa is A or G
  MOD_RES (26)..(27)..(28)..(29): Xaa is A or G or absent
RVPSTXXAPVKTSATSMLYYXXXXXXXXXLRKHRMIVEEX

SEQ ID NO: 33512 - protein, 38 aa, Artificial Sequence
  Non-cyclic GFR-binding peptide
  MOD_RES (4)..(5)..(37): Xaa is C or S
PEPXXVPEKMSATSILYYDENKNVVLRKHRNMTVESXA

SEQ ID NO: 33513 - protein, 35 aa, Artificial Sequence
  Non-cyclic GFR-binding peptide
  MOD_RES (2)..(3): Xaa is C or S
  MOD_RES (17)..(18)..(19)..(20)..(21): Xaa is A or G
  MOD_RES (22)..(23)..(24)..(25): Xaa is A or G or absent
TXXAPVKTSPISMLYKXXXXXXXXXLKYHYMIVEE

SEQ ID NO: 33514 - protein, 38 aa, Artificial Sequence
  Non-cyclic GFR-binding peptide
  MOD_RES (2)..(3)..(37): Xaa is C or S
  MOD_RES (17)..(18)..(19)..(20)..(21): Xaa is A or G
  MOD_RES (22)..(23)..(24)..(25): Xaa is A or G or absent
PXXTPTKMEPISMLYLXXXXXXXXXKFKYEGMVVDRXG

SEQ ID NO: 33515 - protein, 37 aa, Artificial Sequence
  Non-cyclic GFR-binding peptide
  MOD_RES (34)..(36): Xaa is C or S
  MOD_RES (14)..(15)..(16)..(17)..(18): Xaa is A or G
  MOD_RES (19)..(20)..(21)..(22): Xaa is A or G or absent
TPTKMEPISMLYLXXXXXXXXXKFKYEGMVVDRXGXS

SEQ ID NO: 33516 - protein, 40 aa, Artificial Sequence
  Non-cyclic GFR-binding peptide
  MOD_RES (4)..(5)..(37)..(39): Xaa is C or S
SKAXXVPTKLSATSILYYDKGVVTYLRKHRGMAVSEXGXR

SEQ ID NO: 33517 - protein, 37 aa, Artificial Sequence
  Non-cyclic GFR-binding peptide
  MOD_RES (1)..(35)..(37): Xaa is C or S
  MOD_RES (15)..(16)..(17)..(18)..(19): Xaa is A or G
  MOD_RES (20)..(21)..(22)..(23): Xaa is A or G or absent
XTPTKMEPISMLYLXXXXXXXXXKFKYEGMVVDRXGX

SEQ ID NO: 33518 - protein, 35 aa, Artificial Sequence
  Non-cyclic GFR-binding peptide
  MOD_RES (1)..(33)..(35): Xaa is C or S
XVPTRLSPISILYKDSANNVVLKYHYDMVVESXGX

SEQ ID NO: 33519 - protein, 37 aa, Artificial Sequence
  Non-cyclic GFR-binding peptide
  MOD_RES (6)..(7): Xaa is C or S
GSAGPXXTPTKMEPISMLYLNDKQQIIKFKYEGMVVD

SEQ ID NO: 33520 - protein, 30 aa, Artificial Sequence
  Non-cyclic GFR-binding peptide
VPEKMSPISILYKDENKNVVLKYHYNMTVE

SEQ ID NO: 33521 - protein, 35 aa, Artificial Sequence
  Non-cyclic GFR-binding peptide
  MOD_RES (1)..(2)..(33)..(35): Xaa is C or S
XXAPVKTSPISMLYKDNGRVLLLKYHYMIVEEXGX

SEQ ID NO: 33522 - protein, 38 aa, Artificial Sequence
  Non-cyclic GFR-binding peptide
  MOD_RES (2)..(3)..(37): Xaa is C or S
  MOD_RES (17)..(18)..(19)..(20)..(21): Xaa is A or G
  MOD_RES (22)..(23)..(24)..(25): Xaa is A or G or absent
SXXVPARLSATSILYYXXXXXXXXXLRKHRDMVVEAXG

SEQ ID NO: 33523 - protein, 34 aa, Artificial Sequence
  Non-cyclic GFR-binding peptide
  MOD_RES (1)..(2)..(34): Xaa is C or S
XXVPTRLSPISILYKDSANNVVLKYHYDMVVESX

SEQ ID NO: 33524 - protein, 35 aa, Artificial Sequence
  Non-cyclic GFR-binding peptide
  MOD_RES (34)..(34): Xaa is C or S
  MOD_RES (14)..(15)..(16)..(17)..(18): Xaa is A or G
  MOD_RES (19)..(20)..(21)..(22): Xaa is A or G or absent
VPEKMNAISILYFXXXXXXXXXLKKYRNMTVESXA

SEQ ID NO: 33525 - protein, 33 aa, Artificial Sequence
  Non-cyclic GFR-binding peptide
  MOD_RES (14)..(15)..(16)..(17)..(18): Xaa is A or G
  MOD_RES (19)..(20)..(21)..(22): Xaa is A or G or absent
TPTKMSATSMLYYXXXXXXXXXLRKHRGMVVDR

SEQ ID NO: 33526 - protein, 37 aa, Artificial Sequence
  Non-cyclic GFR-binding peptide
  MOD_RES (1)..(2)..(36): Xaa is C or S
  MOD_RES (16)..(17)..(18)..(19)..(20): Xaa is A or G
  MOD_RES (21)..(22)..(23)..(24): Xaa is A or G or absent
XXVPEKMSPISILYKXXXXXXXXXLKYHYNMTVESXA

SEQ ID NO: 33527 - protein, 39 aa, Artificial Sequence
  Non-cyclic GFR-binding peptide
  MOD_RES (2)..(3)..(37)..(39): Xaa is C or S
  MOD_RES (17)..(18)..(19)..(20)..(21): Xaa is A or G
  MOD_RES (22)..(23)..(24)..(25): Xaa is A or G or absent
TXXVPTRLSATSILYYXXXXXXXXXLRKHRDMVVESXGX

SEQ ID NO: 33528 - protein, 38 aa, Artificial Sequence
  Non-cyclic GFR-binding peptide
  MOD_RES (2)..(3)..(35)..(37): Xaa is C or S
PXXVPEKMSPINILYFDENKNVVYGKIPNMTVESXAXR

SEQ ID NO: 33529 - protein, 38 aa, Artificial Sequence
  Non-cyclic GFR-binding peptide
  MOD_RES (4)..(5)..(37): Xaa is C or S
PPTXXVPTRLSATSILYYDSANNVVLRKHRDMVVESXG

SEQ ID NO: 33530 - protein, 41 aa, Artificial Sequence
  Non-cyclic GFR-binding peptide
  MOD_RES (5)..(6)..(40): Xaa is C or S
  MOD_RES (20)..(21)..(22)..(23)..(24): Xaa is A or G
  MOD_RES (25)..(26)..(27)..(28): Xaa is A or G or absent
TPPTXXVPTRLEPISILYLXXXXXXXXXKFKYEDMVVESXG

SEQ ID NO: 33531 - protein, 40 aa, Artificial Sequence
  Non-cyclic GFR-binding peptide
  MOD_RES (5)..(6)..(40): Xaa is C or S
  MOD_RES (20)..(21)..(22)..(23)..(24): Xaa is A or G
  MOD_RES (25)..(26)..(27)..(28): Xaa is A or G or absent
IPEPXXVPEKMSPINILYFXXXXXXXXXYGKIPNMTVESX

SEQ ID NO: 33532 - protein, 31 aa, Artificial Sequence
  Non-cyclic GFR-binding peptide
TPTKMSATSMLYYNDKQQIILRKHRGMVVDR

SEQ ID NO: 33533 - protein, 38 aa, Artificial Sequence
  Non-cyclic GFR-binding peptide
  MOD_RES (2)..(3)..(37): Xaa is C or S
  MOD_RES (17)..(18)..(19)..(20)..(21): Xaa is A or G
  MOD_RES (22)..(23)..(24)..(25): Xaa is A or G or absent
PXXVPEKMEPISILYLXXXXXXXXXKFKYENMTVESXA

SEQ ID NO: 33534 - protein, 38 aa, Artificial Sequence
  Non-cyclic GFR-binding peptide
  MOD_RES (3)..(4)..(37): Xaa is C or S
  MOD_RES (18)..(19)..(20)..(21)..(22): Xaa is A or G
  MOD_RES (23)..(24)..(25)..(26): Xaa is A or G or absent
STXXAPVKTSPISMLYKXXXXXXXXXLKYHYMIVEEXG

SEQ ID NO: 33535 - protein, 37 aa, Artificial Sequence
  Non-cyclic GFR-binding peptide
  MOD_RES (4)..(5)..(37): Xaa is C or S
PPTXXVPTRLEPISILYLDSANNVVKFKYEDMVVESX

SEQ ID NO: 33536 - protein, 36 aa, Artificial Sequence
  Non-cyclic GFR-binding peptide
  MOD_RES (1)..(2)..(35): Xaa is C or S
  MOD_RES (16)..(17)..(18)..(19)..(20): Xaa is A or G
  MOD_RES (21)..(22)..(23)..(24): Xaa is A or G or absent
XXVSQDLSPINILYFXXXXXXXXXYGKIPMIVKSXK

SEQ ID NO: 33537 - protein, 32 aa, Artificial Sequence
  Non-cyclic GFR-binding peptide
  MOD_RES (1)..(1): Xaa is C or S
XVPTRLSATSILYYDSANNVVLRKHRDMVVES

SEQ ID NO: 33538 - protein, 39 aa, Artificial Sequence
  Non-cyclic GFR-binding peptide
  MOD_RES (3)..(4)..(36)..(38): Xaa is C or S
ASXXVPARLSATSILYYDAANNVVLRKHRDMVVEAXGXR

SEQ ID NO: 33539 - protein, 30 aa, Artificial Sequence
  Non-cyclic GFR-binding peptide
VPQALSPINILYFVGRKPKVYGKIPMIVRS

SEQ ID NO: 33540 - protein, 39 aa, Artificial Sequence
  Non-cyclic GFR-binding peptide
  MOD_RES (1)..(2)..(36)..(38): Xaa is C or S
  MOD_RES (16)..(17)..(18)..(19)..(20): Xaa is A or G
  MOD_RES (21)..(22)..(23)..(24): Xaa is A or G or absent
XXTPTKMSPISMLYKXXXXXXXXXLKYHYGMVVDRXGXS

SEQ ID NO: 33541 - protein, 37 aa, Artificial Sequence
  Non-cyclic GFR-binding peptide
  MOD_RES (3)..(4)..(36): Xaa is C or S
GPXXTPTKMEPISMLYLNDKQQIIKFKYEGMVVDRXG

SEQ ID NO: 33542 - protein, 39 aa, Artificial Sequence
  Non-cyclic GFR-binding peptide
  MOD_RES (6)..(7): Xaa is C or S
  MOD_RES (21)..(22)..(23)..(24)..(25): Xaa is A or G
  MOD_RES (26)..(27)..(28)..(29): Xaa is A or G or absent
GIPEPXXVPEKMSPISILYKXXXXXXXXXLKYHYNMTVE

SEQ ID NO: 33543 - protein, 33 aa, Artificial Sequence
  Non-cyclic GFR-binding peptide
  MOD_RES (14)..(15)..(16)..(17)..(18): Xaa is A or G
  MOD_RES (19)..(20)..(21)..(22): Xaa is A or G or absent
VPEKMEPISILYLXXXXXXXXXKFKYENMTVES

SEQ ID NO: 33544 - protein, 38 aa, Artificial Sequence
  Non-cyclic GFR-binding peptide
  MOD_RES (6)..(7)..(38): Xaa is C or S
ASASPXXVPQDLSPINILYFVGRTPKVYGKIPMVVKSX

SEQ ID NO: 33545 - protein, 37 aa, Artificial Sequence
  Non-cyclic GFR-binding peptide
  MOD_RES (3)..(4)..(36): Xaa is C or S
EPXXVPEKMSATSILYYDENKNVVLRKHRNMTVESXA

SEQ ID NO: 33546 - protein, 33 aa, Artificial Sequence
  Non-cyclic GFR-binding peptide
  MOD_RES (1)..(2): Xaa is C or S
XXTPTKMEPISMLYLNDKQQIIKFKYEGMVVDR

SEQ ID NO: 33547 - protein, 35 aa, Artificial Sequence
  Non-cyclic GFR-binding peptide
  MOD_RES (1)..(35): Xaa is C or S
  MOD_RES (15)..(16)..(17)..(18)..(19): Xaa is A or G
  MOD_RES (20)..(21)..(22)..(23): Xaa is A or G or absent
XVPEKMEPISILYLXXXXXXXXXKFKYENMTVESX

SEQ ID NO: 33548 - protein, 40 aa, Artificial Sequence
  Non-cyclic GFR-binding peptide
  MOD_RES (4)..(5)..(39): Xaa is C or S
  MOD_RES (19)..(20)..(21)..(22)..(23): Xaa is A or G
  MOD_RES (24)..(25)..(26)..(27): Xaa is A or G or absent
AGPXXTPTKMSATSMLYYXXXXXXXXXLRKHRGMVVDRXG

SEQ ID NO: 33549 - protein, 39 aa, Artificial Sequence
  Non-cyclic GFR-binding peptide
  MOD_RES (6)..(7): Xaa is C or S
  MOD_RES (21)..(22)..(23)..(24)..(25): Xaa is A or G
  MOD_RES (26)..(27)..(28)..(29): Xaa is A or G or absent
GIPEPXXVPEKMEPISILYLXXXXXXXXXKFKYENMTVE

SEQ ID NO: 33550 - protein, 41 aa, Artificial Sequence
  Non-cyclic GFR-binding peptide
  MOD_RES (6)..(7)..(39)..(41): Xaa is C or S
HVPKPXXAPTKLEPISVLYLDDSSNVIKFKYENMVVRSXGX

SEQ ID NO: 33551 - protein, 41 aa, Artificial Sequence
  Non-cyclic GFR-binding peptide
  MOD_RES (5)..(6)..(39)..(41): Xaa is C or S
  MOD_RES (20)..(21)..(22)..(23)..(24): Xaa is A or G
  MOD_RES (25)..(26)..(27)..(28): Xaa is A or G or absent
SASPXXVPQDLSPINILYFXXXXXXXXXYGKIPMVVKSXKX

SEQ ID NO: 33552 - protein, 34 aa, Artificial Sequence
  Non-cyclic GFR-binding peptide
  MOD_RES (3)..(4): Xaa is C or S
GPXXTPTKMEPISMLYLNDKQQIIKFKYEGMVVD

SEQ ID NO: 33553 - protein, 35 aa, Artificial Sequence
  Non-cyclic GFR-binding peptide
  MOD_RES (2)..(3)..(35): Xaa is C or S
SXXVPARLSATSILYYDAANNVVLRKHRDMVVEAX

SEQ ID NO: 33554 - protein, 36 aa, Artificial Sequence
  Non-cyclic GFR-binding peptide
  MOD_RES (2)..(3)..(36): Xaa is C or S
  MOD_RES (17)..(18)..(19)..(20)..(21): Xaa is A or G
  MOD_RES (22)..(23)..(24)..(25): Xaa is A or G or absent
TXXAPVKTSATSMLYYXXXXXXXXXLRKHRMIVEEX

SEQ ID NO: 33555 - protein, 36 aa, Artificial Sequence
  Non-cyclic GFR-binding peptide
  MOD_RES (1)..(2)..(34)..(36): Xaa is C or S
XXVPTRLSPISILYKDSANNVVLKYHYDMVVESXGX

SEQ ID NO: 33556 - protein, 38 aa, Artificial Sequence
  Non-cyclic GFR-binding peptide
  MOD_RES (4)..(5)..(36)..(38): Xaa is C or S
ASPXXVSQDLSPINILYFIGKTPKIYGKIPMIVKSXKX

SEQ ID NO: 33557 - protein, 39 aa, Artificial Sequence
  Non-cyclic GFR-binding peptide
  MOD_RES (5)..(6): Xaa is C or S
  MOD_RES (20)..(21)..(22)..(23)..(24): Xaa is A or G
  MOD_RES (25)..(26)..(27)..(28): Xaa is A or G or absent
IPEPXXVPEKMNAISILYFXXXXXXXXXLKKYRNMTVES

SEQ ID NO: 33558 - protein, 32 aa, Artificial Sequence
  Non-cyclic GFR-binding peptide
  MOD_RES (14)..(15)..(16)..(17)..(18): Xaa is A or G
  MOD_RES (19)..(20)..(21)..(22): Xaa is A or G or absent
TPTKMSPISMLYKXXXXXXXXXLKYHYGMVVD

SEQ ID NO: 33559 - protein, 38 aa, Artificial Sequence
  Non-cyclic GFR-binding peptide
  MOD_RES (1)..(35)..(37): Xaa is C or S
  MOD_RES (15)..(16)..(17)..(18)..(19): Xaa is A or G
  MOD_RES (20)..(21)..(22)..(23): Xaa is A or G or absent
XVPEKMNAISILYFXXXXXXXXXLKKYRNMTVESXAXR

SEQ ID NO: 33560 - protein, 36 aa, Artificial Sequence
  Non-cyclic GFR-binding peptide
  MOD_RES (1)..(33)..(35): Xaa is C or S
XTPTKMSPISMLYKNDKQQIILKYHYGMVVDRXGXS

SEQ ID NO: 33561 - protein, 33 aa, Artificial Sequence
  Non-cyclic GFR-binding peptide
  MOD_RES (2)..(3): Xaa is C or S
PXXVPEKMSATSILYYDENKNVVLRKHRNMTVE

SEQ ID NO: 33562 - protein, 34 aa, Artificial Sequence
  Non-cyclic GFR-binding peptide
  MOD_RES (1)..(33): Xaa is C or S
XVPEKMSATSILYYDENKNVVLRKHRNMTVESXA

SEQ ID NO: 33563 - protein, 37 aa, Artificial Sequence
  Non-cyclic GFR-binding peptide
  MOD_RES (5)..(6): Xaa is C or S
IPEPXXVPEKMSATSILYYDENKNVVLRKHRNMTVES

SEQ ID NO: 33564 - protein, 35 aa, Artificial Sequence
  Non-cyclic GFR-binding peptide
  MOD_RES (3)..(4): Xaa is C or S
EPXXVPEKMEPISILYLDENKNVVKFKYENMTVES

SEQ ID NO: 33565 - protein, 36 aa, Artificial Sequence
  Non-cyclic GFR-binding peptide
  MOD_RES (3)..(4)..(36): Xaa is C or S
PTXXVPTRLEPISILYLDSANNVVKFKYEDMVVESX

SEQ ID NO: 33566 - protein, 34 aa, Artificial Sequence
  Non-cyclic GFR-binding peptide
  MOD_RES (1)..(2)..(33): Xaa is C or S
XXVPQALSPINILYFVGRKPKVYGKIPMIVRSXK

SEQ ID NO: 33567 - protein, 36 aa, Artificial Sequence
  Non-cyclic GFR-binding peptide
  MOD_RES (1)..(35): Xaa is C or S
  MOD_RES (15)..(16)..(17)..(18)..(19): Xaa is A or G
  MOD_RES (20)..(21)..(22)..(23): Xaa is A or G or absent
XVPEKMSATSILYYXXXXXXXXXLRKHRNMTVESXA

SEQ ID NO: 33568 - protein, 38 aa, Artificial Sequence
  Non-cyclic GFR-binding peptide
  MOD_RES (1)..(35)..(37): Xaa is C or S
  MOD_RES (15)..(16)..(17)..(18)..(19): Xaa is A or G
  MOD_RES (20)..(21)..(22)..(23): Xaa is A or G or absent
XVPTKLSATSILYYXXXXXXXXXLRKHRGMAVSEXGXR

SEQ ID NO: 33569 - protein, 33 aa, Artificial Sequence
  Non-cyclic GFR-binding peptide
  MOD_RES (1)..(2): Xaa is C or S
XXVPEKMEPISILYLDENKNVVKFKYENMTVES

SEQ ID NO: 33570 - protein, 34 aa, Artificial Sequence
  Non-cyclic GFR-binding peptide
  MOD_RES (1)..(33): Xaa is C or S
XVPTRLEPISILYLDSANNVVKFKYEDMVVESXG

SEQ ID NO: 33571 - protein, 34 aa, Artificial Sequence
  Non-cyclic GFR-binding peptide
  MOD_RES (1)..(2): Xaa is C or S
  MOD_RES (16)..(17)..(18)..(19)..(20): Xaa is A or G
  MOD_RES (21)..(22)..(23)..(24): Xaa is A or G or absent
XXVPTRLSPISILYKXXXXXXXXXLKYHYDMVVE

SEQ ID NO: 33572 - protein, 35 aa, Artificial Sequence
  Non-cyclic GFR-binding peptide
  MOD_RES (32)..(34): Xaa is C or S
VPTRLSATSILYYDSANNVVLRKHRDMVVESXGXR

SEQ ID NO: 33573 - protein, 34 aa, Artificial Sequence
  Non-cyclic GFR-binding peptide
  MOD_RES (1)..(33): Xaa is C or S
XTPTKMSATSMLYYNDKQQIILRKHRGMVVDRXG

SEQ ID NO: 33574 - protein, 37 aa, Artificial Sequence
  Non-cyclic GFR-binding peptide
  MOD_RES (1)..(34)..(36): Xaa is C or S
  MOD_RES (15)..(16)..(17)..(18)..(19): Xaa is A or G
  MOD_RES (20)..(21)..(22)..(23): Xaa is A or G or absent
XAPVKTEPISMLYLXXXXXXXXXKFKYEMIVEEXGXL

SEQ ID NO: 33575 - protein, 39 aa, Artificial Sequence
  Non-cyclic GFR-binding peptide
  MOD_RES (4)..(5)..(37)..(39): Xaa is C or S
PPTXXVPTRLSATSILYYDSANNVVLRKHRDMVVESXGX

SEQ ID NO: 33576 - protein, 32 aa, Artificial Sequence
  Non-cyclic GFR-binding peptide
  MOD_RES (1)..(2): Xaa is C or S
XXVPEKMSPINILYFDENKNVVYGKIPNMTVE

SEQ ID NO: 33577 - protein, 42 aa, Artificial Sequence
  Non-cyclic GFR-binding peptide
  MOD_RES (4)..(5)..(39)..(41): Xaa is C or S
  MOD_RES (19)..(20)..(21)..(22)..(23): Xaa is A or G
  MOD_RES (24)..(25)..(26)..(27): Xaa is A or G or absent
AGPXXTPTKMSPISMLYKXXXXXXXXXLKYHYGMVVDRXGXS

SEQ ID NO: 33578 - protein, 38 aa, Artificial Sequence
  Non-cyclic GFR-binding peptide
  MOD_RES (2)..(3)..(35)..(37): Xaa is C or S
AXXVPTKLSATSILYYDKGVVTYLRKHRGMAVSEXGXR

SEQ ID NO: 33579 - protein, 37 aa, Artificial Sequence
  Non-cyclic GFR-binding peptide
  MOD_RES (1)..(2)..(34)..(36): Xaa is C or S
XXTPTKMEPISMLYLNDKQQIIKFKYEGMVVDRXGXS

SEQ ID NO: 33580 - protein, 32 aa, Artificial Sequence
  Non-cyclic GFR-binding peptide
  MOD_RES (1)..(32): Xaa is C or S
XAPVKTSATSMLYYDNGRVLLLRKHRMIVEEX

SEQ ID NO: 33581 - protein, 42 aa, Artificial Sequence
  Non-cyclic GFR-binding peptide
  MOD_RES (5)..(6)..(39)..(41): Xaa is C or S
  MOD_RES (20)..(21)..(22)..(23)..(24): Xaa is A or G
  MOD_RES (25)..(26)..(27)..(28): Xaa is A or G or absent
SAAPXXVPQALSPINILYFXXXXXXXXXYGKIPMIVRSXKXS

SEQ ID NO: 33582 - protein, 35 aa, Artificial Sequence
  Non-cyclic GFR-binding peptide
  MOD_RES (1)..(2): Xaa is C or S
  MOD_RES (16)..(17)..(18)..(19)..(20): Xaa is A or G
  MOD_RES (21)..(22)..(23)..(24): Xaa is A or G or absent
XXTPTKMSPISMLYKXXXXXXXXXLKYHYGMVVDR

SEQ ID NO: 33583 - protein, 32 aa, Artificial Sequence
  Non-cyclic GFR-binding peptide
  MOD_RES (14)..(15)..(16)..(17)..(18): Xaa is A or G
  MOD_RES (19)..(20)..(21)..(22): Xaa is A or G or absent
TPTKMSATSMLYYXXXXXXXXXLRKHRGMVVD

SEQ ID NO: 33584 - protein, 43 aa, Artificial Sequence
  Non-cyclic GFR-binding peptide
  MOD_RES (6)..(7)..(41)..(43): Xaa is C or S
  MOD_RES (21)..(22)..(23)..(24)..(25): Xaa is A or G
  MOD_RES (26)..(27)..(28)..(29): Xaa is A or G or absent
KASKAXXVPTKLSATSILYYXXXXXXXXXLRKHRGMAVSEXGX

SEQ ID NO: 33585 - protein, 30 aa, Artificial Sequence; identical to SEQ ID NO: 878
  Non-cyclic GFR-binding peptide

SEQ ID NO: 33586 - protein, 40 aa, Artificial Sequence
  Non-cyclic GFR-binding peptide
  MOD_RES (6)..(7)..(40): Xaa is C or S
  MOD_RES (21)..(22)..(23)..(24)..(25): Xaa is A or G
  MOD_RES (26)..(27)..(28)..(29): Xaa is A or G or absent
RVPSTXXAPVKTEPISMLYLXXXXXXXXXKFKYEMIVEEX

SEQ ID NO: 33587 - protein, 34 aa, Artificial Sequence
  Non-cyclic GFR-binding peptide
  MOD_RES (3)..(4): Xaa is C or S
GPXXTPTKMSATSMLYYNDKQQIILRKHRGMVVD

SEQ ID NO: 33588 - protein, 44 aa, Artificial Sequence
  Non-cyclic GFR-binding peptide
  MOD_RES (6)..(7)..(41)..(43): Xaa is C or S
  MOD_RES (21)..(22)..(23)..(24)..(25): Xaa is A or G
  MOD_RES (26)..(27)..(28)..(29): Xaa is A or G or absent
GIPEPXXVPEKMSPISILYKXXXXXXXXXLKYHYNMTVESXAXR

SEQ ID NO: 33589 - protein, 35 aa, Artificial Sequence
  Non-cyclic GFR-binding peptide
  MOD_RES (2)..(3): Xaa is C or S
  MOD_RES (17)..(18)..(19)..(20)..(21): Xaa is A or G
  MOD_RES (22)..(23)..(24)..(25): Xaa is A or G or absent
PXXTPTKMSPISMLYKXXXXXXXXXLKYHYGMVVD

SEQ ID NO: 33590 - protein, 40 aa, Artificial Sequence
  Non-cyclic GFR-binding peptide
  MOD_RES (6)..(7)..(39): Xaa is C or S
AAPASXXVPARLSATSILYYDAANNVVLRKHRDMVVEAXG

SEQ ID NO: 33591 - protein, 34 aa, Artificial Sequence
  Non-cyclic GFR-binding peptide
  MOD_RES (1)..(1): Xaa is C or S
  MOD_RES (15)..(16)..(17)..(18)..(19): Xaa is A or G
  MOD_RES (20)..(21)..(22)..(23): Xaa is A or G or absent
XTPTKMEPISMLYLXXXXXXXXXKFKYEGMVVDR

SEQ ID NO: 33592 - protein, 33 aa, Artificial Sequence
  Non-cyclic GFR-binding peptide
  MOD_RES (14)..(15)..(16)..(17)..(18): Xaa is A or G
  MOD_RES (19)..(20)..(21)..(22): Xaa is A or G or absent
VPEKMSPISILYKXXXXXXXXXLKYHYNMTVES

SEQ ID NO: 33593 - protein, 34 aa, Artificial Sequence
  Non-cyclic GFR-binding peptide
  MOD_RES (1)..(2): Xaa is C or S
  MOD_RES (16)..(17)..(18)..(19)..(20): Xaa is A or G
  MOD_RES (21)..(22)..(23)..(24): Xaa is A or G or absent
XXVPTRLEPISILYLXXXXXXXXXKFKYEDMVVE

SEQ ID NO: 33594 - protein, 40 aa, Artificial Sequence
  Non-cyclic GFR-binding peptide
  MOD_RES (5)..(6)..(37)..(39): Xaa is C or S
VPSTXXAPVKTSATSMLYYDNGRVLLLRKHRMIVEEXGXL

SEQ ID NO: 33595 - protein, 40 aa, Artificial Sequence
  Non-cyclic GFR-binding peptide
  MOD_RES (6)..(7): Xaa is C or S
  MOD_RES (21)..(22)..(23)..(24)..(25): Xaa is A or G
  MOD_RES (26)..(27)..(28)..(29): Xaa is A or G or absent
STPPTXXVPTRLSATSILYYXXXXXXXXXLRKHRDMVVES

SEQ ID NO: 33596 - protein, 41 aa, Artificial Sequence
  Non-cyclic GFR-binding peptide
  MOD_RES (5)..(6)..(39)..(41): Xaa is C or S
  MOD_RES (20)..(21)..(22)..(23)..(24): Xaa is A or G
  MOD_RES (25)..(26)..(27)..(28): Xaa is A or G or absent
SAAPXXVPQALSPINILYFXXXXXXXXXYGKIPMIVRSXKX

SEQ ID NO: 33597 - protein, 34 aa, Artificial Sequence
  Non-cyclic GFR-binding peptide
  MOD_RES (33)..(33): Xaa is C or S
  MOD_RES (14)..(15)..(16)..(17)..(18): Xaa is A or G
  MOD_RES (19)..(20)..(21)..(22): Xaa is A or G or absent
APVKTSATSMLYYXXXXXXXXXLRKHRMIVEEXG

SEQ ID NO: 33598 - protein, 38 aa, Artificial Sequence
  Non-cyclic GFR-binding peptide
  MOD_RES (4)..(5)..(37): Xaa is C or S
SKAXXVPTKLSATSILYYDKGVVTYLRKHRGMAVSEXG

SEQ ID NO: 33599 - protein, 42 aa, Artificial Sequence
  Non-cyclic GFR-binding peptide
  MOD_RES (4)..(5)..(39)..(41): Xaa is C or S
  MOD_RES (19)..(20)..(21)..(22)..(23): Xaa is A or G
  MOD_RES (24)..(25)..(26)..(27): Xaa is A or G or absent
SKAXXVPTKLSATSILYYXXXXXXXXXLRKHRGMAVSEXGXR

SEQ ID NO: 33600 - protein, 34 aa, Artificial Sequence
  Non-cyclic GFR-binding peptide
  MOD_RES (1)..(2): Xaa is C or S
  MOD_RES (16)..(17)..(18)..(19)..(20): Xaa is A or G
  MOD_RES (21)..(22)..(23)..(24): Xaa is A or G or absent
XXVPARLSATSILYYXXXXXXXXXLRKHRDMVVE

SEQ ID NO: 33601 - protein, 36 aa, Artificial Sequence
  Non-cyclic GFR-binding peptide
  MOD_RES (3)..(4)..(35): Xaa is C or S
STXXAPVKTSATSMLYYDNGRVLLLRKHRMIVEEXG

SEQ ID NO: 33602 - protein, 39 aa, Artificial Sequence
  Non-cyclic GFR-binding peptide
  MOD_RES (4)..(5)..(38): Xaa is C or S
  MOD_RES (19)..(20)..(21)..(22)..(23): Xaa is A or G
  MOD_RES (24)..(25)..(26)..(27): Xaa is A or G or absent
ASPXXVPQDLSPINILYFXXXXXXXXXYGKIPMVVKSXK

SEQ ID NO: 33603 - protein, 38 aa, Artificial Sequence
  Non-cyclic GFR-binding peptide
  MOD_RES (5)..(6): Xaa is C or S
  MOD_RES (20)..(21)..(22)..(23)..(24): Xaa is A or G
  MOD_RES (25)..(26)..(27)..(28): Xaa is A or G or absent
APASXXVPARLSATSILYYXXXXXXXXXLRKHRDMVVE

SEQ ID NO: 33604 - protein, 36 aa, Artificial Sequence
  Non-cyclic GFR-binding peptide
  MOD_RES (1)..(34)..(36): Xaa is C or S
  MOD_RES (15)..(16)..(17)..(18)..(19): Xaa is A or G
  MOD_RES (20)..(21)..(22)..(23): Xaa is A or G or absent
XVSQDLSPINILYFXXXXXXXXXYGKIPMIVKSXKX

SEQ ID NO: 33605 - protein, 31 aa, Artificial Sequence
  Non-cyclic GFR-binding peptide
VPTRLSPISILYKDSANNVVLKYHYDMVVES

SEQ ID NO: 33606 - protein, 39 aa, Artificial Sequence
  Non-cyclic GFR-binding peptide
  MOD_RES (5)..(6)..(38): Xaa is C or S
SAGPXXTPTKMSATSMLYYNDKQQIILRKHRGMVVDRXG

SEQ ID NO: 33607 - protein, 34 aa, Artificial Sequence
  Non-cyclic GFR-binding peptide
  MOD_RES (1)..(1): Xaa is C or S
  MOD_RES (15)..(16)..(17)..(18)..(19): Xaa is A or G
  MOD_RES (20)..(21)..(22)..(23): Xaa is A or G or absent
XTPTKMSPISMLYKXXXXXXXXXLKYHYGMVVDR

SEQ ID NO: 33608 - protein, 41 aa, Artificial Sequence
  Non-cyclic GFR-binding peptide
  MOD_RES (6)..(7)..(38)..(40): Xaa is C or S
RVPSTXXAPVKTSPISMLYKDNGRVLLLKYHYMIVEEXGXL

SEQ ID NO: 33609 - protein, 35 aa, Artificial Sequence
  Non-cyclic GFR-binding peptide
  MOD_RES (33)..(35): Xaa is C or S
  MOD_RES (14)..(15)..(16)..(17)..(18): Xaa is A or G
  MOD_RES (19)..(20)..(21)..(22): Xaa is A or G or absent
APVKTEPISMLYLXXXXXXXXXKFKYEMIVEEXGX

SEQ ID NO: 33610 - protein, 32 aa, Artificial Sequence
  Non-cyclic GFR-binding peptide
  MOD_RES (32)..(32): Xaa is C or S
VPEKMSATSILYYDENKNVVLRKHRNMTVESX

SEQ ID NO: 33611 - protein, 42 aa, Artificial Sequence
  Non-cyclic GFR-binding peptide
  MOD_RES (6)..(7)..(41): Xaa is C or S
  MOD_RES (21)..(22)..(23)..(24)..(25): Xaa is A or G
  MOD_RES (26)..(27)..(28)..(29): Xaa is A or G or absent
HVPKPXXAPTKLEPISVLYLXXXXXXXXXKFKYENMVVRSXG

SEQ ID NO: 33612 - protein, 40 aa, Artificial Sequence
  Non-cyclic GFR-binding peptide
  MOD_RES (4)..(5)..(39): Xaa is C or S
  MOD_RES (19)..(20)..(21)..(22)..(23): Xaa is A or G
  MOD_RES (24)..(25)..(26)..(27): Xaa is A or G or absent
PEPXXVPEKMSPINILYFXXXXXXXXXYGKIPNMTVESXA

SEQ ID NO: 33613 - protein, 37 aa, Artificial Sequence
  Non-cyclic GFR-binding peptide
  MOD_RES (5)..(6): Xaa is C or S
TPPTXXVPTRLSPISILYKDSANNVVLKYHYDMVVES

SEQ ID NO: 33614 - protein, 33 aa, Artificial Sequence
  Non-cyclic GFR-binding peptide
  MOD_RES (1)..(32): Xaa is C or S
XVPQALSPINILYFVGRKPKVYGKIPMIVRSXK

SEQ ID NO: 33615 - protein, 35 aa, Artificial Sequence
  Non-cyclic GFR-binding peptide
  MOD_RES (1)..(2): Xaa is C or S
  MOD_RES (16)..(17)..(18)..(19)..(20): Xaa is A or G
  MOD_RES (21)..(22)..(23)..(24): Xaa is A or G or absent
XXVPTRLSATSILYYXXXXXXXXXLRKHRDMVVES

SEQ ID NO: 33616 - protein, 38 aa, Artificial Sequence
  Non-cyclic GFR-binding peptide
  MOD_RES (1)..(2)..(36)..(38): Xaa is C or S
  MOD_RES (16)..(17)..(18)..(19)..(20): Xaa is A or G
  MOD_RES (21)..(22)..(23)..(24): Xaa is A or G or absent
XXVPEKMEPISILYLXXXXXXXXXKFKYENMTVESXAX

SEQ ID NO: 33617 - protein, 36 aa, Artificial Sequence
  Non-cyclic GFR-binding peptide
  MOD_RES (5)..(6): Xaa is C or S
IPEPXXVPEKMSPINILYFDENKNVVYGKIPNMTVE

SEQ ID NO: 33618 - protein, 31 aa, Artificial Sequence
  Non-cyclic GFR-binding peptide
VPTRLEPISILYLDSANNVVKFKYEDMVVES

SEQ ID NO: 33619 - protein, 37 aa, Artificial Sequence
  Non-cyclic GFR-binding peptide
  MOD_RES (4)..(5)..(37): Xaa is C or S
AGPXXTPTKMEPISMLYLNDKQQIIKFKYEGMVVDRX

SEQ ID NO: 33620 - protein, 39 aa, Artificial Sequence
  Non-cyclic GFR-binding peptide
  MOD_RES (5)..(6)..(38): Xaa is C or S
TPPTXXVPTRLEPISILYLDSANNVVKFKYEDMVVESXG

SEQ ID NO: 33621 - protein, 37 aa, Artificial Sequence
  Non-cyclic GFR-binding peptide
  MOD_RES (1)..(35)..(37): Xaa is C or S
  MOD_RES (15)..(16)..(17)..(18)..(19): Xaa is A or G
  MOD_RES (20)..(21)..(22)..(23): Xaa is A or G or absent
XVPEKMSPISILYKXXXXXXXXXLKYHYNMTVESXAX

SEQ ID NO: 33622 - protein, 44 aa, Artificial Sequence
  Non-cyclic GFR-binding peptide
  MOD_RES (6)..(7)..(41)..(43): Xaa is C or S
  MOD_RES (21)..(22)..(23)..(24)..(25): Xaa is A or G
  MOD_RES (26)..(27)..(28)..(29): Xaa is A or G or absent
HVPKPXXAPTKLSPISVLYKXXXXXXXXXLKYHYNMVVRSXGXH

SEQ ID NO: 33623 - protein, 38 aa, Artificial Sequence
  Non-cyclic GFR-binding peptide
  MOD_RES (1)..(35)..(37): Xaa is C or S
  MOD_RES (15)..(16)..(17)..(18)..(19): Xaa is A or G
  MOD_RES (20)..(21)..(22)..(23): Xaa is A or G or absent
XVPEKMEPISILYLXXXXXXXXXKFKYENMTVESXAXR

SEQ ID NO: 33624 - protein, 36 aa, Artificial Sequence
  Non-cyclic GFR-binding peptide
  MOD_RES (4)..(5)..(36): Xaa is C or S
PSTXXAPVKTSATSMLYYDNGRVLLLRKHRMIVEEX

SEQ ID NO: 33625 - protein, 34 aa, Artificial Sequence
  Non-cyclic GFR-binding peptide
  MOD_RES (1)..(1): Xaa is C or S
  MOD_RES (15)..(16)..(17)..(18)..(19): Xaa is A or G
  MOD_RES (20)..(21)..(22)..(23): Xaa is A or G or absent
XVPTRLSATSILYYXXXXXXXXXLRKHRDMVVES

SEQ ID NO: 33626 - protein, 33 aa, Artificial Sequence
  Non-cyclic GFR-binding peptide
  MOD_RES (1)..(33): Xaa is C or S
XTPTKMSPISMLYKNDKQQIILKYHYGMVVDRX

SEQ ID NO: 33627 - protein, 37 aa, Artificial Sequence
  Non-cyclic GFR-binding peptide
  MOD_RES (6)..(7): Xaa is C or S
KASKAXXVPTKLSATSILYYDKGVVTYLRKHRGMAVS

SEQ ID NO: 33628 - protein, 36 aa, Artificial Sequence
  Non-cyclic GFR-binding peptide
  MOD_RES (2)..(3): Xaa is C or S
  MOD_RES (17)..(18)..(19)..(20)..(21): Xaa is A or G
  MOD_RES (22)..(23)..(24)..(25): Xaa is A or G or absent
PXXVPEKMSPISILYKXXXXXXXXXLKYHYNMTVES

SEQ ID NO: 33629 - protein, 42 aa, Artificial Sequence
  Non-cyclic GFR-binding peptide
  MOD_RES (6)..(7)..(39)..(41): Xaa is C or S
GSAGPXXTPTKMSATSMLYYNDKQQIILRKHRGMVVDRXGXS

SEQ ID NO: 33630 - protein, 43 aa, Artificial Sequence
  Non-cyclic GFR-binding peptide
  MOD_RES (5)..(6)..(40)..(42): Xaa is C or S
  MOD_RES (20)..(21)..(22)..(23)..(24): Xaa is A or G
  MOD_RES (25)..(26)..(27)..(28): Xaa is A or G or absent
IPEPXXVPEKMSPINILYFXXXXXXXXXYGKIPNMTVESXAXR

SEQ ID NO: 33631 - protein, 35 aa, Artificial Sequence
  Non-cyclic GFR-binding peptide
  MOD_RES (2)..(3): Xaa is C or S
  MOD_RES (17)..(18)..(19)..(20)..(21): Xaa is A or G
  MOD_RES (22)..(23)..(24)..(25): Xaa is A or G or absent
PXXVPEKMSATSILYYXXXXXXXXXLRKHRNMTVE

SEQ ID NO: 33632 - protein, 36 aa, Artificial Sequence
  Non-cyclic GFR-binding peptide
  MOD_RES (4)..(5): Xaa is C or S
PPTXXVPTRLSATSILYYDSANNVVLRKHRDMVVES

SEQ ID NO: 33633 - protein, 37 aa, Artificial Sequence
  Non-cyclic GFR-binding peptide
  MOD_RES (2)..(3)..(35)..(37): Xaa is C or S
TXXVPTRLSATSILYYDSANNVVLRKHRDMVVESXGX

SEQ ID NO: 33634 - protein, 37 aa, Artificial Sequence
  Non-cyclic GFR-binding peptide
  MOD_RES (4)..(5)..(36): Xaa is C or S
PSTXXAPVKTSPISMLYKDNGRVLLLKYHYMIVEEXG

SEQ ID NO: 33635 - protein, 43 aa, Artificial Sequence
  Non-cyclic GFR-binding peptide
  MOD_RES (6)..(7)..(41)..(43): Xaa is C or S
  MOD_RES (21)..(22)..(23)..(24)..(25): Xaa is A or G
  MOD_RES (26)..(27)..(28)..(29): Xaa is A or G or absent
AAPASXXVPARLSATSILYYXXXXXXXXXLRKHRDMVVEAXGX

SEQ ID NO: 33636 - protein, 35 aa, Artificial Sequence
  Non-cyclic GFR-binding peptide
  MOD_RES (4)..(5): Xaa is C or S
PEPXXVPEKMNAISILYFDENKNVVLKKYRNMTVE

SEQ ID NO: 33637 - protein, 32 aa, Artificial Sequence
  Non-cyclic GFR-binding peptide
  MOD_RES (31)..(31): Xaa is C or S
APVKTEPISMLYLDNGRVLLKFKYEMIVEEXG

SEQ ID NO: 33638 - protein, 43 aa, Artificial Sequence
  Non-cyclic GFR-binding peptide
  MOD_RES (5)..(6)..(40)..(42): Xaa is C or S
  MOD_RES (20)..(21)..(22)..(23)..(24): Xaa is A or G
  MOD_RES (25)..(26)..(27)..(28): Xaa is A or G or absent
IPEPXXVPEKMSATSILYYXXXXXXXXXLRKHRNMTVESXAXR

SEQ ID NO: 33639 - protein, 37 aa, Artificial Sequence
  Non-cyclic GFR-binding peptide
  MOD_RES (34)..(36): Xaa is C or S
  MOD_RES (14)..(15)..(16)..(17)..(18): Xaa is A or G
  MOD_RES (19)..(20)..(21)..(22): Xaa is A or G or absent
VPTRLSPISILYKXXXXXXXXXLKYHYDMVVESXGXR

SEQ ID NO: 33640 - protein, 35 aa, Artificial Sequence
  Non-cyclic GFR-binding peptide
  MOD_RES (2)..(3): Xaa is C or S
  MOD_RES (17)..(18)..(19)..(20)..(21): Xaa is A or G
  MOD_RES (22)..(23)..(24)..(25): Xaa is A or G or absent
PXXTPTKMSATSMLYYXXXXXXXXXLRKHRGMVVD

SEQ ID NO: 33641 - protein, 33 aa, Artificial Sequence
  Non-cyclic GFR-binding peptide
  MOD_RES (2)..(3): Xaa is C or S
PXXVPEKMEPISILYLDENKNVVKFKYENMTVE

SEQ ID NO: 33642 - protein, 39 aa, Artificial Sequence
  Non-cyclic GFR-binding peptide
  MOD_RES (3)..(4)..(36)..(38): Xaa is C or S
PTXXVPTRLSPISILYKDSANNVVLKYHYDMVVESXGXR

SEQ ID NO: 33643 - protein, 36 aa, Artificial Sequence
  Non-cyclic GFR-binding peptide
  MOD_RES (2)..(3)..(35): Xaa is C or S
TXXVPTRLSPISILYKDSANNVVLKYHYDMVVESXG

SEQ ID NO: 33644 - protein, 35 aa, Artificial Sequence
  Non-cyclic GFR-binding peptide
  MOD_RES (3)..(4)..(35): Xaa is C or S
SPXXVPQDLSPINILYFVGRTPKVYGKIPMVVKSX

SEQ ID NO: 33645 - protein, 42 aa, Artificial Sequence
  Non-cyclic GFR-binding peptide
  MOD_RES (4)..(5)..(39)..(41): Xaa is C or S
  MOD_RES (19)..(20)..(21)..(22)..(23): Xaa is A or G
  MOD_RES (24)..(25)..(26)..(27): Xaa is A or G or absent
PEPXXVPEKMNAISILYFXXXXXXXXXLKKYRNMTVESXAXR

SEQ ID NO: 33646 - protein, 33 aa, Artificial Sequence
  Non-cyclic GFR-binding peptide
  MOD_RES (1)..(1): Xaa is C or S
  MOD_RES (15)..(16)..(17)..(18)..(19): Xaa is A or G
  MOD_RES (20)..(21)..(22)..(23): Xaa is A or G or absent
XVPTRLEPISILYLXXXXXXXXXKFKYEDMVVE

SEQ ID NO: 33647 - protein, 38 aa, Artificial Sequence
  Non-cyclic GFR-binding peptide
  MOD_RES (1)..(35)..(37): Xaa is C or S
  MOD_RES (15)..(16)..(17)..(18)..(19): Xaa is A or G
  MOD_RES (20)..(21)..(22)..(23): Xaa is A or G or absent
XVPTRLSATSILYYXXXXXXXXXLRKHRDMVVESXGXR

SEQ ID NO: 33648 - protein, 36 aa, Artificial Sequence
  Non-cyclic GFR-binding peptide
  MOD_RES (1)..(2)..(36): Xaa is C or S
  MOD_RES (16)..(17)..(18)..(19)..(20): Xaa is A or G
  MOD_RES (21)..(22)..(23)..(24): Xaa is A or G or absent
XXVPEKMSPINILYFXXXXXXXXXYGKIPNMTVESX

SEQ ID NO: 33649 - protein, 35 aa, Artificial Sequence
  Non-cyclic GFR-binding peptide
  MOD_RES (4)..(5): Xaa is C or S
ASPXXVPQDLSPINILYFVGRTPKVYGKIPMVVKS

SEQ ID NO: 33650 - protein, 40 aa, Artificial Sequence
  Non-cyclic GFR-binding peptide
  MOD_RES (6)..(7)..(38)..(40): Xaa is C or S
ASAAPXXVPQALSPINILYFVGRKPKVYGKIPMIVRSXKX

SEQ ID NO: 33651 - protein, 42 aa, Artificial Sequence
  Non-cyclic GFR-binding peptide
  MOD_RES (5)..(6)..(39)..(41): Xaa is C or S
  MOD_RES (20)..(21)..(22)..(23)..(24): Xaa is A or G
  MOD_RES (25)..(26)..(27)..(28): Xaa is A or G or absent
SASPXXVPQDLSPINILYFXXXXXXXXXYGKIPMVVKSXKXS

SEQ ID NO: 33652 - protein, 34 aa, Artificial Sequence
  Non-cyclic GFR-binding peptide
  MOD_RES (34)..(34): Xaa is C or S
  MOD_RES (14)..(15)..(16)..(17)..(18): Xaa is A or G
  MOD_RES (19)..(20)..(21)..(22): Xaa is A or G or absent
VPEKMEPISILYLXXXXXXXXXKFKYENMTVESX

SEQ ID NO: 33653 - protein, 40 aa, Artificial Sequence
  Non-cyclic GFR-binding peptide
  MOD_RES (6)..(7)..(38)..(40): Xaa is C or S
RVPSTXXAPVKTEPISMLYLDNGRVLLKFKYEMIVEEXGX

SEQ ID NO: 33654 - protein, 41 aa, Artificial Sequence
  Non-cyclic GFR-binding peptide
  MOD_RES (4)..(5)..(39)..(41): Xaa is C or S
  MOD_RES (19)..(20)..(21)..(22)..(23): Xaa is A or G
  MOD_RES (24)..(25)..(26)..(27): Xaa is A or G or absent
PASXXVPARLSATSILYYXXXXXXXXXLRKHRDMVVEAXGX

SEQ ID NO: 33655 - protein, 42 aa, Artificial Sequence
  Non-cyclic GFR-binding peptide
  MOD_RES (4)..(5)..(39)..(41): Xaa is C or S
  MOD_RES (19)..(20)..(21)..(22)..(23): Xaa is A or G
  MOD_RES (24)..(25)..(26)..(27): Xaa is A or G or absent
PEPXXVPEKMEPISILYLXXXXXXXXXKFKYENMTVESXAXR

SEQ ID NO: 33656 - protein, 34 aa, Artificial Sequence
  Non-cyclic GFR-binding peptide
  MOD_RES (33)..(33): Xaa is C or S
  MOD_RES (14)..(15)..(16)..(17)..(18): Xaa is A or G
  MOD_RES (19)..(20)..(21)..(22): Xaa is A or G or absent
VPQDLSPINILYFXXXXXXXXXYGKIPMVVKSXK

SEQ ID NO: 33657 - protein, 39 aa, Artificial Sequence
  Non-cyclic GFR-binding peptide
  MOD_RES (5)..(6): Xaa is C or S
  MOD_RES (20)..(21)..(22)..(23)..(24): Xaa is A or G
  MOD_RES (25)..(26)..(27)..(28): Xaa is A or G or absent
SAGPXXTPTKMSPISMLYKXXXXXXXXXLKYHYGMVVDR

SEQ ID NO: 33658 - protein, 38 aa, Artificial Sequence
  Non-cyclic GFR-binding peptide
  MOD_RES (1)..(2)..(35)..(37): Xaa is C or S
  MOD_RES (16)..(17)..(18)..(19)..(20): Xaa is A or G
  MOD_RES (21)..(22)..(23)..(24): Xaa is A or G or absent
XXVSQDLSPINILYFXXXXXXXXXYGKIPMIVKSXKXS

SEQ ID NO: 33659 - protein, 41 aa, Artificial Sequence
  Non-cyclic GFR-binding peptide
  MOD_RES (3)..(4)..(38)..(40): Xaa is C or S
  MOD_RES (18)..(19)..(20)..(21)..(22): Xaa is A or G
  MOD_RES (23)..(24)..(25)..(26): Xaa is A or G or absent
EPXXVPEKMSATSILYYXXXXXXXXXLRKHRNMTVESXAXR

SEQ ID NO: 33660 - protein, 34 aa, Artificial Sequence
  Non-cyclic GFR-binding peptide
  MOD_RES (3)..(4): Xaa is C or S
GPXXTPTKMSPISMLYKNDKQQIILKYHYGMVVD

SEQ ID NO: 33661 - protein, 34 aa, Artificial Sequence
  Non-cyclic GFR-binding peptide
  MOD_RES (1)..(33): Xaa is C or S
XVPTKLSATSILYYDKGVVTYLRKHRGMAVSEXG

SEQ ID NO: 33662 - protein, 35 aa, Artificial Sequence
  Non-cyclic GFR-binding peptide
  MOD_RES (1)..(34): Xaa is C or S
  MOD_RES (15)..(16)..(17)..(18)..(19): Xaa is A or G
  MOD_RES (20)..(21)..(22)..(23): Xaa is A or G or absent
XAPVKTSATSMLYYXXXXXXXXXLRKHRMIVEEXG

SEQ ID NO: 33663 - protein, 35 aa, Artificial Sequence
  Non-cyclic GFR-binding peptide
  MOD_RES (34)..(34): Xaa is C or S
  MOD_RES (14)..(15)..(16)..(17)..(18): Xaa is A or G
  MOD_RES (19)..(20)..(21)..(22): Xaa is A or G or absent
TPTKMEPISMLYLXXXXXXXXXKFKYEGMVVDRXG

SEQ ID NO: 33664 - protein, 38 aa, Artificial Sequence
  Non-cyclic GFR-binding peptide
  MOD_RES (4)..(5): Xaa is C or S
  MOD_RES (19)..(20)..(21)..(22)..(23): Xaa is A or G
  MOD_RES (24)..(25)..(26)..(27): Xaa is A or G or absent
PPTXXVPTRLSATSILYYXXXXXXXXXLRKHRDMVVES

SEQ ID NO: 33665 - protein, 33 aa, Artificial Sequence
  Non-cyclic GFR-binding peptide
  MOD_RES (1)..(1): Xaa is C or S
  MOD_RES (15)..(16)..(17)..(18)..(19): Xaa is A or G
  MOD_RES (20)..(21)..(22)..(23): Xaa is A or G or absent
XVPEKMNAISILYFXXXXXXXXXLKKYRNMTVE

SEQ ID NO: 33666 - protein, 33 aa, Artificial Sequence
  Non-cyclic GFR-binding peptide
  MOD_RES (1)..(2): Xaa is C or S
XXTPTKMSPISMLYKNDKQQIILKYHYGMVVDR

SEQ ID NO: 33667 - protein, 38 aa, Artificial Sequence
  Non-cyclic GFR-binding peptide
  MOD_RES (1)..(35)..(37): Xaa is C or S
  MOD_RES (15)..(16)..(17)..(18)..(19): Xaa is A or G
  MOD_RES (20)..(21)..(22)..(23): Xaa is A or G or absent
XVPTRLEPISILYLXXXXXXXXXKFKYEDMVVESXGXR

SEQ ID NO: 33668 - protein, 34 aa, Artificial Sequence
  Non-cyclic GFR-binding peptide
  MOD_RES (1)..(33): Xaa is C or S
XVPTRLSPISILYKDSANNVVLKYHYDMVVESXG

SEQ ID NO: 33669 - protein, 39 aa, Artificial Sequence
  Non-cyclic GFR-binding peptide
  MOD_RES (5)..(6): Xaa is C or S
  MOD_RES (20)..(21)..(22)..(23)..(24): Xaa is A or G
  MOD_RES (25)..(26)..(27)..(28): Xaa is A or G or absent
SAGPXXTPTKMEPISMLYLXXXXXXXXXKFKYEGMVVDR

SEQ ID NO: 33670 - protein, 35 aa, Artificial Sequence
  Non-cyclic GFR-binding peptide
  MOD_RES (1)..(2)..(35): Xaa is C or S
  MOD_RES (16)..(17)..(18)..(19)..(20): Xaa is A or G
  MOD_RES (21)..(22)..(23)..(24): Xaa is A or G or absent
XXVPQDLSPINILYFXXXXXXXXXYGKIPMVVKSX

SEQ ID NO: 33671 - protein, 37 aa, Artificial Sequence
  Non-cyclic GFR-binding peptide
  MOD_RES (1)..(2)..(34)..(36): Xaa is C or S
XXVPTRLSPISILYKDSANNVVLKYHYDMVVESXGXR

SEQ ID NO: 33672 - protein, 36 aa, Artificial Sequence
  Non-cyclic GFR-binding peptide
  MOD_RES (3)..(4)..(36): Xaa is C or S
KAXXVPTKLSATSILYYDKGVVTYLRKHRGMAVSEX

SEQ ID NO: 33673 - protein, 43 aa, Artificial Sequence
  Non-cyclic GFR-binding peptide
  MOD_RES (6)..(7)..(40)..(42): Xaa is C or S
  MOD_RES (21)..(22)..(23)..(24)..(25): Xaa is A or G
  MOD_RES (26)..(27)..(28)..(29): Xaa is A or G or absent
ASASPXXVSQDLSPINILYFXXXXXXXXXYGKIPMIVKSXKXS

SEQ ID NO: 33674 - protein, 35 aa, Artificial Sequence
  Non-cyclic GFR-binding peptide
  MOD_RES (1)..(2)..(34): Xaa is C or S
XXVPEKMSPISILYKDENKNVVLKYHYNMTVESXA

SEQ ID NO: 33675 - protein, 41 aa, Artificial Sequence
  Non-cyclic GFR-binding peptide
  MOD_RES (6)..(7)..(38)..(40): Xaa is C or S
ASAAPXXVPQALSPINILYFVGRKPKVYGKIPMIVRSXKXS

SEQ ID NO: 33676 - protein, 40 aa, Artificial Sequence
  Non-cyclic GFR-binding peptide
  MOD_RES (6)..(7)..(40): Xaa is C or S
  MOD_RES (21)..(22)..(23)..(24)..(25): Xaa is A or G
  MOD_RES (26)..(27)..(28)..(29): Xaa is A or G or absent
ASASPXXVPQDLSPINILYFXXXXXXXXXYGKIPMVVKSX

SEQ ID NO: 33677 - protein, 39 aa, Artificial Sequence
  Non-cyclic GFR-binding peptide
  MOD_RES (5)..(6): Xaa is C or S
  MOD_RES (20)..(21)..(22)..(23)..(24): Xaa is A or G
  MOD_RES (25)..(26)..(27)..(28): Xaa is A or G or absent
TPPTXXVPTRLSATSILYYXXXXXXXXXLRKHRDMVVES

SEQ ID NO: 33678 - protein, 36 aa, Artificial Sequence
  Non-cyclic GFR-binding peptide
  MOD_RES (1)..(35): Xaa is C or S
  MOD_RES (15)..(16)..(17)..(18)..(19): Xaa is A or G
  MOD_RES (20)..(21)..(22)..(23): Xaa is A or G or absent
XVPEKMSPINILYFXXXXXXXXXYGKIPNMTVESXA

SEQ ID NO: 33679 - protein, 33 aa, Artificial Sequence
  Non-cyclic GFR-binding peptide
  MOD_RES (2)..(3): Xaa is C or S
PXXVPEKMSPISILYKDENKNVVLKYHYNMTVE

SEQ ID NO: 33680 - protein, 35 aa, Artificial Sequence
  Non-cyclic GFR-binding peptide
  MOD_RES (2)..(3): Xaa is C or S
  MOD_RES (17)..(18)..(19)..(20)..(21): Xaa is A or G
  MOD_RES (22)..(23)..(24)..(25): Xaa is A or G or absent
PXXVPEKMSPISILYKXXXXXXXXXLKYHYNMTVE

SEQ ID NO: 33681 - protein, 37 aa, Artificial Sequence
  Non-cyclic GFR-binding peptide
  MOD_RES (2)..(3)..(36): Xaa is C or S
  MOD_RES (17)..(18)..(19)..(20)..(21): Xaa is A or G
  MOD_RES (22)..(23)..(24)..(25): Xaa is A or G or absent
TXXAPVKTEPISMLYLXXXXXXXXXKFKYEMIVEEXG

SEQ ID NO: 33682 - protein, 40 aa, Artificial Sequence
  Non-cyclic GFR-binding peptide
  MOD_RES (4)..(5)..(37)..(39): Xaa is C or S
PASXXVPARLSATSILYYDAANNVVLRKHRDMVVEAXGXR

SEQ ID NO: 33683 - protein, 34 aa, Artificial Sequence
  Non-cyclic GFR-binding peptide
  MOD_RES (1)..(2): Xaa is C or S
  MOD_RES (16)..(17)..(18)..(19)..(20): Xaa is A or G
  MOD_RES (21)..(22)..(23)..(24): Xaa is A or G or absent
XXTPTKMSPISMLYKXXXXXXXXXLKYHYGMVVD

SEQ ID NO: 33684 - protein, 41 aa, Artificial Sequence
  Non-cyclic GFR-binding peptide
  MOD_RES (3)..(4)..(38)..(40): Xaa is C or S
  MOD_RES (18)..(19)..(20)..(21)..(22): Xaa is A or G
  MOD_RES (23)..(24)..(25)..(26): Xaa is A or G or absent
GPXXTPTKMSATSMLYYXXXXXXXXXLRKHRGMVVDRXGXS

SEQ ID NO: 33685 - protein, 37 aa, Artificial Sequence
  Non-cyclic GFR-binding peptide
  MOD_RES (2)..(3)..(37): Xaa is C or S
  MOD_RES (17)..(18)..(19)..(20)..(21): Xaa is A or G
  MOD_RES (22)..(23)..(24)..(25): Xaa is A or G or absent
PXXVPEKMNAISILYFXXXXXXXXXLKKYRNMTVESX

SEQ ID NO: 33686 - protein, 39 aa, Artificial Sequence
  Non-cyclic GFR-binding peptide
  MOD_RES (3)..(4)..(36)..(38): Xaa is C or S
GPXXTPTKMSPISMLYKNDKQQIILKYHYGMVVDRXGXS

SEQ ID NO: 33687 - protein, 36 aa, Artificial Sequence
  Non-cyclic GFR-binding peptide
  MOD_RES (2)..(3)..(34)..(36): Xaa is C or S
PXXVPQALSPINILYFVGRKPKVYGKIPMIVRSXKX

SEQ ID NO: 33688 - protein, 36 aa, Artificial Sequence
  Non-cyclic GFR-binding peptide
  MOD_RES (2)..(3): Xaa is C or S
  MOD_RES (17)..(18)..(19)..(20)..(21): Xaa is A or G
  MOD_RES (22)..(23)..(24)..(25): Xaa is A or G or absent
PXXTPTKMEPISMLYLXXXXXXXXXKFKYEGMVVDR

SEQ ID NO: 33689 - protein, 35 aa, Artificial Sequence
  Non-cyclic GFR-binding peptide
  MOD_RES (1)..(2): Xaa is C or S
  MOD_RES (16)..(17)..(18)..(19)..(20): Xaa is A or G
  MOD_RES (21)..(22)..(23)..(24): Xaa is A or G or absent
XXTPTKMEPISMLYLXXXXXXXXXKFKYEGMVVDR

SEQ ID NO: 33690 - protein, 43 aa, Artificial Sequence
  Non-cyclic GFR-binding peptide
  MOD_RES (6)..(7)..(40)..(42): Xaa is C or S
  MOD_RES (21)..(22)..(23)..(24)..(25): Xaa is A or G
  MOD_RES (26)..(27)..(28)..(29): Xaa is A or G or absent
RVPSTXXAPVKTSPISMLYKXXXXXXXXXLKYHYMIVEEXGXL

SEQ ID NO: 33691 - protein, 39 aa, Artificial Sequence
  Non-cyclic GFR-binding peptide
  MOD_RES (4)..(5)..(38): Xaa is C or S
  MOD_RES (19)..(20)..(21)..(22)..(23): Xaa is A or G
  MOD_RES (24)..(25)..(26)..(27): Xaa is A or G or absent
PSTXXAPVKTSPISMLYKXXXXXXXXXLKYHYMIVEEXG

SEQ ID NO: 33692 - protein, 40 aa, Artificial Sequence
  Non-cyclic GFR-binding peptide
  MOD_RES (5)..(6)..(39): Xaa is C or S
  MOD_RES (20)..(21)..(22)..(23)..(24): Xaa is A or G
  MOD_RES (25)..(26)..(27)..(28): Xaa is A or G or absent
VPSTXXAPVKTSATSMLYYXXXXXXXXXLRKHRMIVEEXG

SEQ ID NO: 33693 - protein, 35 aa, Artificial Sequence
  Non-cyclic GFR-binding peptide
  MOD_RES (1)..(2)..(33)..(35): Xaa is C or S
XXAPVKTEPISMLYLDNGRVLLKFKYEMIVEEXGX

SEQ ID NO: 33694 - protein, 37 aa, Artificial Sequence
  Non-cyclic GFR-binding peptide
  MOD_RES (2)..(3)..(35)..(37): Xaa is C or S
SXXVPARLSATSILYYDAANNVVLRKHRDMVVEAXGX

SEQ ID NO: 33695 - protein, 36 aa, Artificial Sequence
  Non-cyclic GFR-binding peptide
  MOD_RES (3)..(4)..(35): Xaa is C or S
STXXAPVKTSPISMLYKDNGRVLLLKYHYMIVEEXG

SEQ ID NO: 33696 - protein, 36 aa, Artificial Sequence
  Non-cyclic GFR-binding peptide
  MOD_RES (4)..(5): Xaa is C or S
AGPXXTPTKMEPISMLYLNDKQQIIKFKYEGMVVDR

SEQ ID NO: 33697 - protein, 37 aa, Artificial Sequence
  Non-cyclic GFR-binding peptide
  MOD_RES (4)..(5)..(37): Xaa is C or S
PEPXXVPEKMSPINILYFDENKNVVYGKIPNMTVESX

SEQ ID NO: 33698 - protein, 32 aa, Artificial Sequence
  Non-cyclic GFR-binding peptide
  MOD_RES (1)..(2): Xaa is C or S
XXVPQALSPINILYFVGRKPKVYGKIPMIVRS

SEQ ID NO: 33699 - protein, 36 aa, Artificial Sequence
  Non-cyclic GFR-binding peptide
  MOD_RES (5)..(6): Xaa is C or S
TPPTXXVPTRLEPISILYLDSANNVVKFKYEDMVVE

SEQ ID NO: 33700 - protein, 35 aa, Artificial Sequence
  Non-cyclic GFR-binding peptide
  MOD_RES (34)..(34): Xaa is C or S
  MOD_RES (14)..(15)..(16)..(17)..(18): Xaa is A or G
  MOD_RES (19)..(20)..(21)..(22): Xaa is A or G or absent
TPTKMSPISMLYKXXXXXXXXXLKYHYGMVVDRXG

SEQ ID NO: 33701 - protein, 35 aa, Artificial Sequence
  Non-cyclic GFR-binding peptide
  MOD_RES (2)..(3): Xaa is C or S
  MOD_RES (17)..(18)..(19)..(20)..(21): Xaa is A or G
  MOD_RES (22)..(23)..(24)..(25): Xaa is A or G or absent
PXXVPEKMEPISILYLXXXXXXXXXKFKYENMTVE

SEQ ID NO: 33702 - protein, 36 aa, Artificial Sequence
  Non-cyclic GFR-binding peptide
  MOD_RES (3)..(4)..(35): Xaa is C or S
SPXXVPQDLSPINILYFVGRTPKVYGKIPMVVKSXK

SEQ ID NO: 33703 - protein, 40 aa, Artificial Sequence
  Non-cyclic GFR-binding peptide
  MOD_RES (6)..(7): Xaa is C or S
  MOD_RES (21)..(22)..(23)..(24)..(25): Xaa is A or G
  MOD_RES (26)..(27)..(28)..(29): Xaa is A or G or absent
HVPKPXXAPTKLSATSVLYYXXXXXXXXXLRKHRNMVVRS

SEQ ID NO: 33704 - protein, 36 aa, Artificial Sequence
  Non-cyclic GFR-binding peptide
  MOD_RES (3)..(4)..(36): Xaa is C or S
EPXXVPEKMSPINILYFDENKNVVYGKIPNMTVESX

SEQ ID NO: 33705 - protein, 40 aa, Artificial Sequence
  Non-cyclic GFR-binding peptide
  MOD_RES (4)..(5)..(37)..(39): Xaa is C or S
AGPXXTPTKMSPISMLYKNDKQQIILKYHYGMVVDRXGXS

SEQ ID NO: 33706 - protein, 37 aa, Artificial Sequence
  Non-cyclic GFR-binding peptide
  MOD_RES (1)..(35)..(37): Xaa is C or S
  MOD_RES (15)..(16)..(17)..(18)..(19): Xaa is A or G
  MOD_RES (20)..(21)..(22)..(23): Xaa is A or G or absent
XVPEKMNAISILYFXXXXXXXXXLKKYRNMTVESXAX

SEQ ID NO: 33707 - protein, 37 aa, Artificial Sequence
  Non-cyclic GFR-binding peptide
  MOD_RES (2)..(3)..(35)..(37): Xaa is C or S
PXXVPEKMSPINILYFDENKNVVYGKIPNMTVESXAX

SEQ ID NO: 33708 - protein, 34 aa, Artificial Sequence
  Non-cyclic GFR-binding peptide
  MOD_RES (33)..(33): Xaa is C or S
  MOD_RES (14)..(15)..(16)..(17)..(18): Xaa is A or G
  MOD_RES (19)..(20)..(21)..(22): Xaa is A or G or absent
VPQALSPINILYFXXXXXXXXXYGKIPMIVRSXK

SEQ ID NO: 33709 - protein, 35 aa, Artificial Sequence
  Non-cyclic GFR-binding peptide
  MOD_RES (34)..(34): Xaa is C or S
  MOD_RES (14)..(15)..(16)..(17)..(18): Xaa is A or G
  MOD_RES (19)..(20)..(21)..(22): Xaa is A or G or absent
VPTKLSATSILYYXXXXXXXXXLRKHRGMAVSEXG

SEQ ID NO: 33710 - protein, 41 aa, Artificial Sequence
  Non-cyclic GFR-binding peptide
  MOD_RES (6)..(7)..(39)..(41): Xaa is C or S
AAPASXXVPARLSATSILYYDAANNVVLRKHRDMVVEAXGX

SEQ ID NO: 33711 - protein, 35 aa, Artificial Sequence
  Non-cyclic GFR-binding peptide
  MOD_RES (32)..(34): Xaa is C or S
VPTRLEPISILYLDSANNVVKFKYEDMVVESXGXR

SEQ ID NO: 33712 - protein, 37 aa, Artificial Sequence
  Non-cyclic GFR-binding peptide
  MOD_RES (1)..(2)..(34)..(36): Xaa is C or S
XXVPEKMSPINILYFDENKNVVYGKIPNMTVESXAXR

SEQ ID NO: 33713 - protein, 36 aa, Artificial Sequence
  Non-cyclic GFR-binding peptide
  MOD_RES (2)..(3): Xaa is C or S
  MOD_RES (17)..(18)..(19)..(20)..(21): Xaa is A or G
  MOD_RES (22)..(23)..(24)..(25): Xaa is A or G or absent
PXXTPTKMSPISMLYKXXXXXXXXXLKYHYGMVVDR

SEQ ID NO: 33714 - protein, 37 aa, Artificial Sequence
  Non-cyclic GFR-binding peptide
  MOD_RES (4)..(5)..(37): Xaa is C or S
AGPXXTPTKMSATSMLYYNDKQQIILRKHRGMVVDRX

SEQ ID NO: 33715 - protein, 37 aa, Artificial Sequence
  Non-cyclic GFR-binding peptide
  MOD_RES (2)..(3)..(37): Xaa is C or S
  MOD_RES (17)..(18)..(19)..(20)..(21): Xaa is A or G
  MOD_RES (22)..(23)..(24)..(25): Xaa is A or G or absent
PXXTPTKMSATSMLYYXXXXXXXXXLRKHRGMVVDRX

SEQ ID NO: 33716 - protein, 40 aa, Artificial Sequence
  Non-cyclic GFR-binding peptide
  MOD_RES (3)..(4)..(37)..(39): Xaa is C or S
  MOD_RES (18)..(19)..(20)..(21)..(22): Xaa is A or G
  MOD_RES (23)..(24)..(25)..(26): Xaa is A or G or absent
SPXXVSQDLSPINILYFXXXXXXXXXYGKIPMIVKSXKXS

SEQ ID NO: 33717 - protein, 35 aa, Artificial Sequence
  Non-cyclic GFR-binding peptide
  MOD_RES (2)..(3)..(35): Xaa is C or S
PXXTPTKMSPISMLYKNDKQQIILKYHYGMVVDRX

SEQ ID NO: 33718 - protein, 36 aa, Artificial Sequence
  Non-cyclic GFR-binding peptide
  MOD_RES (4)..(5): Xaa is C or S
AGPXXTPTKMSATSMLYYNDKQQIILRKHRGMVVDR

SEQ ID NO: 33719 - protein, 41 aa, Artificial Sequence
  Non-cyclic GFR-binding peptide
  MOD_RES (6)..(7)..(39)..(41): Xaa is C or S
STPPTXXVPTRLSATSILYYDSANNVVLRKHRDMVVESXGX

SEQ ID NO: 33720 - protein, 42 aa, Artificial Sequence
  Non-cyclic GFR-binding peptide
  MOD_RES (6)..(7)..(41): Xaa is C or S
  MOD_RES (21)..(22)..(23)..(24)..(25): Xaa is A or G
  MOD_RES (26)..(27)..(28)..(29): Xaa is A or G or absent
GIPEPXXVPEKMSPISILYKXXXXXXXXXLKYHYNMTVESXA

SEQ ID NO: 33721 - protein, 32 aa, Artificial Sequence
  Non-cyclic GFR-binding peptide
  MOD_RES (14)..(15)..(16)..(17)..(18): Xaa is A or G
  MOD_RES (19)..(20)..(21)..(22): Xaa is A or G or absent
VPARLSATSILYYXXXXXXXXXLRKHRDMVVE

SEQ ID NO: 33722 - protein, 32 aa, Artificial Sequence
  Non-cyclic GFR-binding peptide
  MOD_RES (32)..(32): Xaa is C or S
VPEKMEPISILYLDENKNVVKFKYENMTVESX

SEQ ID NO: 33723 - protein, 36 aa, Artificial Sequence
  Non-cyclic GFR-binding peptide
  MOD_RES (1)..(2)..(34)..(36): Xaa is C or S
XXVPTRLEPISILYLDSANNVVKFKYEDMVVESXGX

SEQ ID NO: 33724 - protein, 39 aa, Artificial Sequence
  Non-cyclic GFR-binding peptide
  MOD_RES (4)..(5)..(39): Xaa is C or S
  MOD_RES (19)..(20)..(21)..(22)..(23): Xaa is A or G
  MOD_RES (24)..(25)..(26)..(27): Xaa is A or G or absent
PASXXVPARLSATSILYYXXXXXXXXXLRKHRDMVVEAX

SEQ ID NO: 33725 - protein, 42 aa, Artificial Sequence
  Non-cyclic GFR-binding peptide
  MOD_RES (5)..(6)..(40)..(42): Xaa is C or S
  MOD_RES (20)..(21)..(22)..(23)..(24): Xaa is A or G
  MOD_RES (25)..(26)..(27)..(28): Xaa is A or G or absent
IPEPXXVPEKMSPISILYKXXXXXXXXXLKYHYNMTVESXAX

SEQ ID NO: 33726 - protein, 40 aa, Artificial Sequence
  Non-cyclic GFR-binding peptide
  MOD_RES (3)..(4)..(38)..(40): Xaa is C or S
  MOD_RES (18)..(19)..(20)..(21)..(22): Xaa is A or G
  MOD_RES (23)..(24)..(25)..(26): Xaa is A or G or absent
PTXXVPTRLSATSILYYXXXXXXXXXLRKHRDMVVESXGX

SEQ ID NO: 33727 - protein, 37 aa, Artificial Sequence
  Non-cyclic GFR-binding peptide
  MOD_RES (6)..(7): Xaa is C or S
GIPEPXXVPEKMNAISILYFDENKNVVLKKYRNMTVE

SEQ ID NO: 33728 - protein, 36 aa, Artificial Sequence
  Non-cyclic GFR-binding peptide
  MOD_RES (34)..(36): Xaa is C or S
  MOD_RES (14)..(15)..(16)..(17)..(18): Xaa is A or G
  MOD_RES (19)..(20)..(21)..(22): Xaa is A or G or absent
VPTRLEPISILYLXXXXXXXXXKFKYEDMVVESXGX

SEQ ID NO: 33729 - protein, 35 aa, Artificial Sequence
  Non-cyclic GFR-binding peptide
  MOD_RES (1)..(2)..(33)..(35): Xaa is C or S
XXVSQDLSPINILYFIGKTPKIYGKIPMIVKSXKX

SEQ ID NO: 33730 - protein, 39 aa, Artificial Sequence
  Non-cyclic GFR-binding peptide
  MOD_RES (4)..(5)..(36)..(38): Xaa is C or S
ASPXXVSQDLSPINILYFIGKTPKIYGKIPMIVKSXKXS

SEQ ID NO: 33731 - protein, 34 aa, Artificial Sequence
  Non-cyclic GFR-binding peptide
  MOD_RES (1)..(2): Xaa is C or S
  MOD_RES (16)..(17)..(18)..(19)..(20): Xaa is A or G
  MOD_RES (21)..(22)..(23)..(24): Xaa is A or G or absent
XXAPVKTSPISMLYKXXXXXXXXXLKYHYMIVEE

SEQ ID NO: 33732 - protein, 32 aa, Artificial Sequence
  Non-cyclic GFR-binding peptide
  MOD_RES (14)..(15)..(16)..(17)..(18): Xaa is A or G
  MOD_RES (19)..(20)..(21)..(22): Xaa is A or G or absent
VPEKMNAISILYFXXXXXXXXXLKKYRNMTVE

SEQ ID NO: 33733 - protein, 38 aa, Artificial Sequence
  Non-cyclic GFR-binding peptide
  MOD_RES (2)..(3)..(37): Xaa is C or S
  MOD_RES (17)..(18)..(19)..(20)..(21): Xaa is A or G
  MOD_RES (22)..(23)..(24)..(25): Xaa is A or G or absent
PXXVPEKMNAISILYFXXXXXXXXXLKKYRNMTVESXA

SEQ ID NO: 33734 - protein, 39 aa, Artificial Sequence
  Non-cyclic GFR-binding peptide
  MOD_RES (6)..(7): Xaa is C or S
  MOD_RES (21)..(22)..(23)..(24)..(25): Xaa is A or G
  MOD_RES (26)..(27)..(28)..(29): Xaa is A or G or absent
GIPEPXXVPEKMSATSILYYXXXXXXXXXLRKHRNMTVE

SEQ ID NO: 33735 - protein, 40 aa, Artificial Sequence
  Non-cyclic GFR-binding peptide
  MOD_RES (6)..(7)..(39): Xaa is C or S
HVPKPXXAPTKLEPISVLYLDDSSNVIKFKYENMVVRSXG

SEQ ID NO: 33736 - protein, 35 aa, Artificial Sequence
  Non-cyclic GFR-binding peptide
  MOD_RES (1)..(2)..(35): Xaa is C or S
  MOD_RES (16)..(17)..(18)..(19)..(20): Xaa is A or G
  MOD_RES (21)..(22)..(23)..(24): Xaa is A or G or absent
XXAPVKTSPISMLYKXXXXXXXXXLKYHYMIVEEX

SEQ ID NO: 33737 - protein, 36 aa, Artificial Sequence
  Non-cyclic GFR-binding peptide
  MOD_RES (2)..(3): Xaa is C or S
  MOD_RES (17)..(18)..(19)..(20)..(21): Xaa is A or G
  MOD_RES (22)..(23)..(24)..(25): Xaa is A or G or absent
PXXVPEKMEPISILYLXXXXXXXXXKFKYENMTVES

SEQ ID NO: 33738 - protein, 38 aa, Artificial Sequence
  Non-cyclic GFR-binding peptide
  MOD_RES (4)..(5)..(38): Xaa is C or S
  MOD_RES (19)..(20)..(21)..(22)..(23): Xaa is A or G
  MOD_RES (24)..(25)..(26)..(27): Xaa is A or G or absent
ASPXXVSQDLSPINILYFXXXXXXXXXYGKIPMIVKSX

SEQ ID NO: 33739 - protein, 42 aa, Artificial Sequence
  Non-cyclic GFR-binding peptide
  MOD_RES (5)..(6)..(40)..(42): Xaa is C or S
  MOD_RES (20)..(21)..(22)..(23)..(24): Xaa is A or G
  MOD_RES (25)..(26)..(27)..(28): Xaa is A or G or absent
TPPTXXVPTRLSPISILYKXXXXXXXXXLKYHYDMVVESXGX

SEQ ID NO: 33740 - protein, 42 aa, Artificial Sequence
  Non-cyclic GFR-binding peptide
  MOD_RES (6)..(7)..(39)..(41): Xaa is C or S
HVPKPXXAPTKLEPISVLYLDDSSNVIKFKYENMVVRSXGXH

SEQ ID NO: 33741 - protein, 42 aa, Artificial Sequence
  Non-cyclic GFR-binding peptide
  MOD_RES (6)..(7)..(41): Xaa is C or S
  MOD_RES (21)..(22)..(23)..(24)..(25): Xaa is A or G
  MOD_RES (26)..(27)..(28)..(29): Xaa is A or G or absent
HVPKPXXAPTKLSPISVLYKXXXXXXXXXLKYHYNMVVRSXG

SEQ ID NO: 33742 - protein, 34 aa, Artificial Sequence
  Non-cyclic GFR-binding peptide
  MOD_RES (1)..(2): Xaa is C or S
  MOD_RES (16)..(17)..(18)..(19)..(20): Xaa is A or G
  MOD_RES (21)..(22)..(23)..(24): Xaa is A or G or absent
XXTPTKMSATSMLYYXXXXXXXXXLRKHRGMVVD

SEQ ID NO: 33743 - protein, 35 aa, Artificial Sequence
  Non-cyclic GFR-binding peptide
  MOD_RES (1)..(2)..(33)..(35): Xaa is C or S
XXVPQDLSPINILYFVGRTPKVYGKIPMVVKSXKX

SEQ ID NO: 33744 - protein, 33 aa, Artificial Sequence
  Non-cyclic GFR-binding peptide
  MOD_RES (2)..(3): Xaa is C or S
PXXVPEKMNAISILYFDENKNVVLKKYRNMTVE

SEQ ID NO: 33745 - protein, 39 aa, Artificial Sequence
  Non-cyclic GFR-binding peptide
  MOD_RES (6)..(7): Xaa is C or S
  MOD_RES (21)..(22)..(23)..(24)..(25): Xaa is A or G
  MOD_RES (26)..(27)..(28)..(29): Xaa is A or G or absent
ASAAPXXVPQALSPINILYFXXXXXXXXXYGKIPMIVRS

SEQ ID NO: 33746 - protein, 42 aa, Artificial Sequence
  Non-cyclic GFR-binding peptide
  MOD_RES (4)..(5)..(39)..(41): Xaa is C or S
  MOD_RES (19)..(20)..(21)..(22)..(23): Xaa is A or G
  MOD_RES (24)..(25)..(26)..(27): Xaa is A or G or absent
PASXXVPARLSATSILYYXXXXXXXXXLRKHRDMVVEAXGXR

SEQ ID NO: 33747 - protein, 37 aa, Artificial Sequence
  Non-cyclic GFR-binding peptide
  MOD_RES (4)..(5): Xaa is C or S
  MOD_RES (19)..(20)..(21)..(22)..(23): Xaa is A or G
  MOD_RES (24)..(25)..(26)..(27): Xaa is A or G or absent
PSTXXAPVKTEPISMLYLXXXXXXXXXKFKYEMIVEE

SEQ ID NO: 33748 - protein, 42 aa, Artificial Sequence
  Non-cyclic GFR-binding peptide
  MOD_RES (5)..(6)..(40)..(42): Xaa is C or S
  MOD_RES (20)..(21)..(22)..(23)..(24): Xaa is A or G
  MOD_RES (25)..(26)..(27)..(28): Xaa is A or G or absent
IPEPXXVPEKMSPINILYFXXXXXXXXXYGKIPNMTVESXAX

SEQ ID NO: 33749 - protein, 36 aa, Artificial Sequence
  Non-cyclic GFR-binding peptide
  MOD_RES (1)..(2)..(35): Xaa is C or S
  MOD_RES (16)..(17)..(18)..(19)..(20): Xaa is A or G
  MOD_RES (21)..(22)..(23)..(24): Xaa is A or G or absent
XXAPVKTEPISMLYLXXXXXXXXXKFKYEMIVEEXG

SEQ ID NO: 33750 - protein, 41 aa, Artificial Sequence
  Non-cyclic GFR-binding peptide
  MOD_RES (3)..(4)..(38)..(40): Xaa is C or S
  MOD_RES (18)..(19)..(20)..(21)..(22): Xaa is A or G
  MOD_RES (23)..(24)..(25)..(26): Xaa is A or G or absent
GPXXTPTKMEPISMLYLXXXXXXXXXKFKYEGMVVDRXGXS

SEQ ID NO: 33751 - protein, 36 aa, Artificial Sequence
  Non-cyclic GFR-binding peptide
  MOD_RES (1)..(2)..(36): Xaa is C or S
  MOD_RES (16)..(17)..(18)..(19)..(20): Xaa is A or G
  MOD_RES (21)..(22)..(23)..(24): Xaa is A or G or absent
XXVPARLSATSILYYXXXXXXXXXLRKHRDMVVEAX

SEQ ID NO: 33752 - protein, 39 aa, Artificial Sequence
  Non-cyclic GFR-binding peptide
  MOD_RES (6)..(7): Xaa is C or S
  MOD_RES (21)..(22)..(23)..(24)..(25): Xaa is A or G
  MOD_RES (26)..(27)..(28)..(29): Xaa is A or G or absent
GSAGPXXTPTKMSATSMLYYXXXXXXXXXLRKHRGMVVD

SEQ ID NO: 33753 - protein, 38 aa, Artificial Sequence
  Non-cyclic GFR-binding peptide
  MOD_RES (5)..(6): Xaa is C or S
  MOD_RES (20)..(21)..(22)..(23)..(24): Xaa is A or G
  MOD_RES (25)..(26)..(27)..(28): Xaa is A or G or absent
SAAPXXVPQALSPINILYFXXXXXXXXXYGKIPMIVRS

SEQ ID NO: 33754 - protein, 32 aa, Artificial Sequence
  Non-cyclic GFR-binding peptide
  MOD_RES (14)..(15)..(16)..(17)..(18): Xaa is A or G
  MOD_RES (19)..(20)..(21)..(22): Xaa is A or G or absent
TPTKMEPISMLYLXXXXXXXXXKFKYEGMVVD

SEQ ID NO: 33755 - protein, 40 aa, Artificial Sequence
  Non-cyclic GFR-binding peptide
  MOD_RES (4)..(5)..(38)..(40): Xaa is C or S
  MOD_RES (19)..(20)..(21)..(22)..(23): Xaa is A or G
  MOD_RES (24)..(25)..(26)..(27): Xaa is A or G or absent
PSTXXAPVKTSATSMLYYXXXXXXXXXLRKHRMIVEEXGX

SEQ ID NO: 33756 - protein, 41 aa, Artificial Sequence
  Non-cyclic GFR-binding peptide
  MOD_RES (5)..(6)..(40): Xaa is C or S
  MOD_RES (20)..(21)..(22)..(23)..(24): Xaa is A or G
  MOD_RES (25)..(26)..(27)..(28): Xaa is A or G or absent
IPEPXXVPEKMSPINILYFXXXXXXXXXYGKIPNMTVESXA

SEQ ID NO: 33757 - protein, 35 aa, Artificial Sequence
  Non-cyclic GFR-binding peptide
  MOD_RES (1)..(35): Xaa is C or S
  MOD_RES (15)..(16)..(17)..(18)..(19): Xaa is A or G
  MOD_RES (20)..(21)..(22)..(23): Xaa is A or G or absent
XVPTRLSPISILYKXXXXXXXXXLKYHYDMVVESX

SEQ ID NO: 33758 - protein, 35 aa, Artificial Sequence
  Non-cyclic GFR-binding peptide
  MOD_RES (2)..(3)..(34): Xaa is C or S
TXXAPVKTEPISMLYLDNGRVLLKFKYEMIVEEXG

SEQ ID NO: 33759 - protein, 39 aa, Artificial Sequence
  Non-cyclic GFR-binding peptide
  MOD_RES (3)..(4)..(36)..(38): Xaa is C or S
KAXXVPTKLSATSILYYDKGVVTYLRKHRGMAVSEXGXR

SEQ ID NO: 33760 - protein, 39 aa, Artificial Sequence
  Non-cyclic GFR-binding peptide
  MOD_RES (6)..(7)..(39): Xaa is C or S
GIPEPXXVPEKMSPISILYKDENKNVVLKYHYNMTVESX

SEQ ID NO: 33761 - protein, 40 aa, Artificial Sequence
  Non-cyclic GFR-binding peptide
  MOD_RES (6)..(7)..(39): Xaa is C or S
GIPEPXXVPEKMSPINILYFDENKNVVYGKIPNMTVESXA

SEQ ID NO: 33762 - protein, 39 aa, Artificial Sequence
  Non-cyclic GFR-binding peptide
  MOD_RES (5)..(6): Xaa is C or S
  MOD_RES (20)..(21)..(22)..(23)..(24): Xaa is A or G
  MOD_RES (25)..(26)..(27)..(28): Xaa is A or G or absent
TPPTXXVPTRLEPISILYLXXXXXXXXXKFKYEDMVVES

SEQ ID NO: 33763 - protein, 36 aa, Artificial Sequence
  Non-cyclic GFR-binding peptide
  MOD_RES (3)..(4)..(36): Xaa is C or S
GPXXTPTKMEPISMLYLNDKQQIIKFKYEGMVVDRX

SEQ ID NO: 33764 - protein, 36 aa, Artificial Sequence
  Non-cyclic GFR-binding peptide
  MOD_RES (4)..(5): Xaa is C or S
PEPXXVPEKMEPISILYLDENKNVVKFKYENMTVES

SEQ ID NO: 33765 - protein, 40 aa, Artificial Sequence
  Non-cyclic GFR-binding peptide
  MOD_RES (4)..(5)..(37)..(39): Xaa is C or S
PEPXXVPEKMSPINILYFDENKNVVYGKIPNMTVESXAXR

SEQ ID NO: 33766 - protein, 40 aa, Artificial Sequence
  Non-cyclic GFR-binding peptide
  MOD_RES (3)..(4)..(38)..(40): Xaa is C or S
  MOD_RES (18)..(19)..(20)..(21)..(22): Xaa is A or G
  MOD_RES (23)..(24)..(25)..(26): Xaa is A or G or absent
ASXXVPARLSATSILYYXXXXXXXXXLRKHRDMVVEAXGX

SEQ ID NO: 33767 - protein, 39 aa, Artificial Sequence
  Non-cyclic GFR-binding peptide
  MOD_RES (3)..(4)..(38): Xaa is C or S
  MOD_RES (18)..(19)..(20)..(21)..(22): Xaa is A or G
  MOD_RES (23)..(24)..(25)..(26): Xaa is A or G or absent
GPXXTPTKMEPISMLYLXXXXXXXXXKFKYEGMVVDRXG

SEQ ID NO: 33768 - protein, 37 aa, Artificial Sequence
  Non-cyclic GFR-binding peptide
  MOD_RES (2)..(3)..(37): Xaa is C or S
  MOD_RES (17)..(18)..(19)..(20)..(21): Xaa is A or G
  MOD_RES (22)..(23)..(24)..(25): Xaa is A or G or absent
AXXVPTKLSATSILYYXXXXXXXXXLRKHRGMAVSEX

SEQ ID NO: 33769 - protein, 32 aa, Artificial Sequence
  Non-cyclic GFR-binding peptide
  MOD_RES (1)..(32): Xaa is C or S
XAPVKTSPISMLYKDNGRVLLLKYHYMIVEEX

SEQ ID NO: 33770 - protein, 37 aa, Artificial Sequence
  Non-cyclic GFR-binding peptide
  MOD_RES (1)..(2)..(36): Xaa is C or S
  MOD_RES (16)..(17)..(18)..(19)..(20): Xaa is A or G
  MOD_RES (21)..(22)..(23)..(24): Xaa is A or G or absent
XXVPEKMSPINILYFXXXXXXXXXYGKIPNMTVESXA

SEQ ID NO: 33771 - protein, 37 aa, Artificial Sequence
  Non-cyclic GFR-binding peptide
  MOD_RES (1)..(2)..(35)..(37): Xaa is C or S
  MOD_RES (16)..(17)..(18)..(19)..(20): Xaa is A or G
  MOD_RES (21)..(22)..(23)..(24): Xaa is A or G or absent
XXAPVKTSPISMLYKXXXXXXXXXLKYHYMIVEEXGX

SEQ ID NO: 33772 - protein, 41 aa, Artificial Sequence
  Non-cyclic GFR-binding peptide
  MOD_RES (4)..(5)..(38)..(40): Xaa is C or S
  MOD_RES (19)..(20)..(21)..(22)..(23): Xaa is A or G
  MOD_RES (24)..(25)..(26)..(27): Xaa is A or G or absent
ASPXXVPQDLSPINILYFXXXXXXXXXYGKIPMVVKSXKXS

SEQ ID NO: 33773 - protein, 36 aa, Artificial Sequence
  Non-cyclic GFR-binding peptide
  MOD_RES (2)..(3)..(35): Xaa is C or S
PXXTPTKMSPISMLYKNDKQQIILKYHYGMVVDRXG

SEQ ID NO: 33774 - protein, 38 aa, Artificial Sequence
  Non-cyclic GFR-binding peptide
  MOD_RES (5)..(6)..(37): Xaa is C or S
VPSTXXAPVKTEPISMLYLDNGRVLLKFKYEMIVEEXG

SEQ ID NO: 33775 - protein, 36 aa, Artificial Sequence
  Non-cyclic GFR-binding peptide
  MOD_RES (5)..(6): Xaa is C or S
SASPXXVPQDLSPINILYFVGRTPKVYGKIPMVVKS

SEQ ID NO: 33776 - protein, 39 aa, Artificial Sequence
  Non-cyclic GFR-binding peptide
  MOD_RES (3)..(4)..(38): Xaa is C or S
  MOD_RES (18)..(19)..(20)..(21)..(22): Xaa is A or G
  MOD_RES (23)..(24)..(25)..(26): Xaa is A or G or absent
GPXXTPTKMSPISMLYKXXXXXXXXXLKYHYGMVVDRXG

SEQ ID NO: 33777 - protein, 34 aa, Artificial Sequence
  Non-cyclic GFR-binding peptide
  MOD_RES (32)..(34): Xaa is C or S
VPEKMSPISILYKDENKNVVLKYHYNMTVESXAX

SEQ ID NO: 33778 - protein, 36 aa, Artificial Sequence
  Non-cyclic GFR-binding peptide
  MOD_RES (2)..(3)..(35): Xaa is C or S
PXXVPEKMSPISILYKDENKNVVLKYHYNMTVESXA

SEQ ID NO: 33779 - protein, 32 aa, Artificial Sequence
  Non-cyclic GFR-binding peptide
  MOD_RES (1)..(2): Xaa is C or S
XXVPTRLSATSILYYDSANNVVLRKHRDMVVE

SEQ ID NO: 33780 - protein, 39 aa, Artificial Sequence
  Non-cyclic GFR-binding peptide
  MOD_RES (5)..(6)..(38): Xaa is C or S
IPEPXXVPEKMSATSILYYDENKNVVLRKHRNMTVESXA

SEQ ID NO: 33781 - protein, 33 aa, Artificial Sequence
  Non-cyclic GFR-binding peptide
  MOD_RES (2)..(3): Xaa is C or S
TXXAPVKTSPISMLYKDNGRVLLLKYHYMIVEE

SEQ ID NO: 33782 - protein, 36 aa, Artificial Sequence
  Non-cyclic GFR-binding peptide
  MOD_RES (5)..(6): Xaa is C or S
IPEPXXVPEKMNAISILYFDENKNVVLKKYRNMTVE

SEQ ID NO: 33783 - protein, 33 aa, Artificial Sequence
  Non-cyclic GFR-binding peptide
  MOD_RES (1)..(2): Xaa is C or S
XXTPTKMSATSMLYYNDKQQIILRKHRGMVVDR

SEQ ID NO: 33784 - protein, 36 aa, Artificial Sequence
  Non-cyclic GFR-binding peptide
  MOD_RES (1)..(2)..(33)..(35): Xaa is C or S
XXVSQDLSPINILYFIGKTPKIYGKIPMIVKSXKXS

SEQ ID NO: 33785 - protein, 36 aa, Artificial Sequence
  Non-cyclic GFR-binding peptide
  MOD_RES (1)..(2)..(34)..(36): Xaa is C or S
XXTPTKMSATSMLYYNDKQQIILRKHRGMVVDRXGX

SEQ ID NO: 33786 - protein, 34 aa, Artificial Sequence
  Non-cyclic GFR-binding peptide
  MOD_RES (1)..(2)..(33): Xaa is C or S
XXVSQDLSPINILYFIGKTPKIYGKIPMIVKSXK

SEQ ID NO: 33787 - protein, 34 aa, Artificial Sequence
  Non-cyclic GFR-binding peptide
  MOD_RES (2)..(3): Xaa is C or S
AXXVPTKLSATSILYYDKGVVTYLRKHRGMAVSE

SEQ ID NO: 33788 - protein, 34 aa, Artificial Sequence
  Non-cyclic GFR-binding peptide
  MOD_RES (1)..(2)..(34): Xaa is C or S
XXVPTRLEPISILYLDSANNVVKFKYEDMVVESX

SEQ ID NO: 33789 - protein, 37 aa, Artificial Sequence
  Non-cyclic GFR-binding peptide
  MOD_RES (6)..(7): Xaa is C or S
STPPTXXVPTRLSPISILYKDSANNVVLKYHYDMVVE

SEQ ID NO: 33790 - protein, 39 aa, Artificial Sequence
  Non-cyclic GFR-binding peptide
  MOD_RES (6)..(7): Xaa is C or S
  MOD_RES (21)..(22)..(23)..(24)..(25): Xaa is A or G
  MOD_RES (26)..(27)..(28)..(29): Xaa is A or G or absent
GSAGPXXTPTKMEPISMLYLXXXXXXXXXKFKYEGMVVD

SEQ ID NO: 33791 - protein, 42 aa, Artificial Sequence
  Non-cyclic GFR-binding peptide
  MOD_RES (4)..(5)..(39)..(41): Xaa is C or S
  MOD_RES (19)..(20)..(21)..(22)..(23): Xaa is A or G
  MOD_RES (24)..(25)..(26)..(27): Xaa is A or G or absent
PPTXXVPTRLSPISILYKXXXXXXXXXLKYHYDMVVESXGXR

SEQ ID NO: 33792 - protein, 43 aa, Artificial Sequence
  Non-cyclic GFR-binding peptide
  MOD_RES (5)..(6)..(40)..(42): Xaa is C or S
  MOD_RES (20)..(21)..(22)..(23)..(24): Xaa is A or G
  MOD_RES (25)..(26)..(27)..(28): Xaa is A or G or absent
TPPTXXVPTRLSATSILYYXXXXXXXXXLRKHRDMVVESXGXR

SEQ ID NO: 33793 - protein, 39 aa, Artificial Sequence
  Non-cyclic GFR-binding peptide
  MOD_RES (6)..(7): Xaa is C or S
  MOD_RES (21)..(22)..(23)..(24)..(25): Xaa is A or G
  MOD_RES (26)..(27)..(28)..(29): Xaa is A or G or absent
GSAGPXXTPTKMSPISMLYKXXXXXXXXXLKYHYGMVVD

SEQ ID NO: 33794 - protein, 40 aa, Artificial Sequence
  Non-cyclic GFR-binding peptide
  MOD_RES (5)..(6)..(40): Xaa is C or S
  MOD_RES (20)..(21)..(22)..(23)..(24): Xaa is A or G
  MOD_RES (25)..(26)..(27)..(28): Xaa is A or G or absent
SAGPXXTPTKMSPISMLYKXXXXXXXXXLKYHYGMVVDRX

SEQ ID NO: 33795 - protein, 39 aa, Artificial Sequence
  Non-cyclic GFR-binding peptide
  MOD_RES (5)..(6)..(37)..(39): Xaa is C or S
VPSTXXAPVKTSATSMLYYDNGRVLLLRKHRMIVEEXGX

SEQ ID NO: 33796 - protein, 43 aa, Artificial Sequence
  Non-cyclic GFR-binding peptide
  MOD_RES (6)..(7)..(41)..(43): Xaa is C or S
  MOD_RES (21)..(22)..(23)..(24)..(25): Xaa is A or G
  MOD_RES (26)..(27)..(28)..(29): Xaa is A or G or absent
STPPTXXVPTRLSPISILYKXXXXXXXXXLKYHYDMVVESXGX

SEQ ID NO: 33797 - protein, 37 aa, Artificial Sequence
  Non-cyclic GFR-binding peptide
  MOD_RES (1)..(35)..(37): Xaa is C or S
  MOD_RES (15)..(16)..(17)..(18)..(19): Xaa is A or G
  MOD_RES (20)..(21)..(22)..(23): Xaa is A or G or absent
XVPEKMEPISILYLXXXXXXXXXKFKYENMTVESXAX

SEQ ID NO: 33798 - protein, 37 aa, Artificial Sequence
  Non-cyclic GFR-binding peptide
  MOD_RES (3)..(4)..(37): Xaa is C or S
  MOD_RES (18)..(19)..(20)..(21)..(22): Xaa is A or G
  MOD_RES (23)..(24)..(25)..(26): Xaa is A or G or absent
STXXAPVKTEPISMLYLXXXXXXXXXKFKYEMIVEEX

SEQ ID NO: 33799 - protein, 38 aa, Artificial Sequence
  Non-cyclic GFR-binding peptide
  MOD_RES (5)..(6)..(38): Xaa is C or S
IPEPXXVPEKMNAISILYFDENKNVVLKKYRNMTVESX

SEQ ID NO: 33800 - protein, 32 aa, Artificial Sequence
  Non-cyclic GFR-binding peptide
  MOD_RES (1)..(2): Xaa is C or S
XXTPTKMSPISMLYKNDKQQIILKYHYGMVVD

SEQ ID NO: 33801 - protein, 40 aa, Artificial Sequence
  Non-cyclic GFR-binding peptide
  MOD_RES (5)..(6)..(39): Xaa is C or S
  MOD_RES (20)..(21)..(22)..(23)..(24): Xaa is A or G
  MOD_RES (25)..(26)..(27)..(28): Xaa is A or G or absent
VPSTXXAPVKTEPISMLYLXXXXXXXXXKFKYEMIVEEXG

SEQ ID NO: 33802 - protein, 34 aa, Artificial Sequence
  Non-cyclic GFR-binding peptide
  MOD_RES (1)..(2): Xaa is C or S
  MOD_RES (16)..(17)..(18)..(19)..(20): Xaa is A or G
  MOD_RES (21)..(22)..(23)..(24): Xaa is A or G or absent
XXAPVKTSATSMLYYXXXXXXXXXLRKHRMIVEE

SEQ ID NO: 33803 - protein, 40 aa, Artificial Sequence
  Non-cyclic GFR-binding peptide
  MOD_RES (6)..(7)..(40): Xaa is C or S
  MOD_RES (21)..(22)..(23)..(24)..(25): Xaa is A or G
  MOD_RES (26)..(27)..(28)..(29): Xaa is A or G or absent
ASAAPXXVPQALSPINILYFXXXXXXXXXYGKIPMIVRSX

SEQ ID NO: 33804 - protein, 37 aa, Artificial Sequence
  Non-cyclic GFR-binding peptide
  MOD_RES (1)..(35)..(37): Xaa is C or S
  MOD_RES (15)..(16)..(17)..(18)..(19): Xaa is A or G
  MOD_RES (20)..(21)..(22)..(23): Xaa is A or G or absent
XVPARLSATSILYYXXXXXXXXXLRKHRDMVVEAXGX

SEQ ID NO: 33805 - protein, 37 aa, Artificial Sequence
  Non-cyclic GFR-binding peptide
  MOD_RES (4)..(5): Xaa is C or S
  MOD_RES (19)..(20)..(21)..(22)..(23): Xaa is A or G
  MOD_RES (24)..(25)..(26)..(27): Xaa is A or G or absent
PSTXXAPVKTSATSMLYYXXXXXXXXXLRKHRMIVEE

SEQ ID NO: 33806 - protein, 38 aa, Artificial Sequence
  Non-cyclic GFR-binding peptide
  MOD_RES (3)..(4)..(36)..(38): Xaa is C or S
EPXXVPEKMSPISILYKDENKNVVLKYHYNMTVESXAX

SEQ ID NO: 33807 - protein, 35 aa, Artificial Sequence
  Non-cyclic GFR-binding peptide
  MOD_RES (1)..(34): Xaa is C or S
  MOD_RES (15)..(16)..(17)..(18)..(19): Xaa is A or G
  MOD_RES (20)..(21)..(22)..(23): Xaa is A or G or absent
XAPVKTSPISMLYKXXXXXXXXXLKYHYMIVEEXG

SEQ ID NO: 33808 - protein, 39 aa, Artificial Sequence
  Non-cyclic GFR-binding peptide
  MOD_RES (5)..(6): Xaa is C or S
  MOD_RES (20)..(21)..(22)..(23)..(24): Xaa is A or G
  MOD_RES (25)..(26)..(27)..(28): Xaa is A or G or absent
APASXXVPARLSATSILYYXXXXXXXXXLRKHRDMVVEA

SEQ ID NO: 33809 - protein, 40 aa, Artificial Sequence
  Non-cyclic GFR-binding peptide
  MOD_RES (5)..(6)..(40): Xaa is C or S
  MOD_RES (20)..(21)..(22)..(23)..(24): Xaa is A or G
  MOD_RES (25)..(26)..(27)..(28): Xaa is A or G or absent
TPPTXXVPTRLSATSILYYXXXXXXXXXLRKHRDMVVESX

SEQ ID NO: 33810 - protein, 32 aa, Artificial Sequence
  Non-cyclic GFR-binding peptide
  MOD_RES (1)..(2): Xaa is C or S
XXVPTRLEPISILYLDSANNVVKFKYEDMVVE

SEQ ID NO: 33811 - protein, 39 aa, Artificial Sequence
  Non-cyclic GFR-binding peptide
  MOD_RES (1)..(2)..(36)..(38): Xaa is C or S
  MOD_RES (16)..(17)..(18)..(19)..(20): Xaa is A or G
  MOD_RES (21)..(22)..(23)..(24): Xaa is A or G or absent
XXVPTRLSATSILYYXXXXXXXXXLRKHRDMVVESXGXR

SEQ ID NO: 33812 - protein, 41 aa, Artificial Sequence
  Non-cyclic GFR-binding peptide
  MOD_RES (5)..(6)..(40): Xaa is C or S
  MOD_RES (20)..(21)..(22)..(23)..(24): Xaa is A or G
  MOD_RES (25)..(26)..(27)..(28): Xaa is A or G or absent
APASXXVPARLSATSILYYXXXXXXXXXLRKHRDMVVEAXG

SEQ ID NO: 33813 - protein, 40 aa, Artificial Sequence
  Non-cyclic GFR-binding peptide
  MOD_RES (6)..(7): Xaa is C or S
  MOD_RES (21)..(22)..(23)..(24)..(25): Xaa is A or G
  MOD_RES (26)..(27)..(28)..(29): Xaa is A or G or absent
GIPEPXXVPEKMSPISILYKXXXXXXXXXLKYHYNMTVES

SEQ ID NO: 33814 - protein, 35 aa, Artificial Sequence
  Non-cyclic GFR-binding peptide
  MOD_RES (34)..(34): Xaa is C or S
  MOD_RES (14)..(15)..(16)..(17)..(18): Xaa is A or G
  MOD_RES (19)..(20)..(21)..(22): Xaa is A or G or absent
VPARLSATSILYYXXXXXXXXXLRKHRDMVVEAXG

SEQ ID NO: 33815 - protein, 36 aa, Artificial Sequence
  Non-cyclic GFR-binding peptide
  MOD_RES (1)..(2)..(36): Xaa is C or S
  MOD_RES (16)..(17)..(18)..(19)..(20): Xaa is A or G
  MOD_RES (21)..(22)..(23)..(24): Xaa is A or G or absent
XXVPTRLSPISILYKXXXXXXXXXLKYHYDMVVESX

SEQ ID NO: 33816 - protein, 34 aa, Artificial Sequence
  Non-cyclic GFR-binding peptide
  MOD_RES (34)..(34): Xaa is C or S
  MOD_RES (14)..(15)..(16)..(17)..(18): Xaa is A or G
  MOD_RES (19)..(20)..(21)..(22): Xaa is A or G or absent
TPTKMSATSMLYYXXXXXXXXXLRKHRGMVVDRX

SEQ ID NO: 33817 - protein, 37 aa, Artificial Sequence
  Non-cyclic GFR-binding peptide
  MOD_RES (6)..(7): Xaa is C or S
STPPTXXVPTRLSATSILYYDSANNVVLRKHRDMVVE

SEQ ID NO: 33818 - protein, 36 aa, Artificial Sequence
  Non-cyclic GFR-binding peptide
  MOD_RES (1)..(2)..(36): Xaa is C or S
  MOD_RES (16)..(17)..(18)..(19)..(20): Xaa is A or G
  MOD_RES (21)..(22)..(23)..(24): Xaa is A or G or absent
XXVPEKMNAISILYFXXXXXXXXXLKKYRNMTVESX

SEQ ID NO: 33819 - protein, 39 aa, Artificial Sequence
  Non-cyclic GFR-binding peptide
  MOD_RES (6)..(7): Xaa is C or S
  MOD_RES (21)..(22)..(23)..(24)..(25): Xaa is A or G
  MOD_RES (26)..(27)..(28)..(29): Xaa is A or G or absent
HVPKPXXAPTKLSATSVLYYXXXXXXXXXLRKHRNMVVR

SEQ ID NO: 33820 - protein, 41 aa, Artificial Sequence
  Non-cyclic GFR-binding peptide
  MOD_RES (5)..(6)..(38)..(40): Xaa is C or S
TPPTXXVPTRLSPISILYKDSANNVVLKYHYDMVVESXGXR

SEQ ID NO: 33821 - protein, 41 aa, Artificial Sequence
  Non-cyclic GFR-binding peptide
  MOD_RES (4)..(5)..(39)..(41): Xaa is C or S
  MOD_RES (19)..(20)..(21)..(22)..(23): Xaa is A or G
  MOD_RES (24)..(25)..(26)..(27): Xaa is A or G or absent
PEPXXVPEKMSPISILYKXXXXXXXXXLKYHYNMTVESXAX

SEQ ID NO: 33822 - protein, 36 aa, Artificial Sequence
  Non-cyclic GFR-binding peptide
  MOD_RES (1)..(2)..(34)..(36): Xaa is C or S
XXVPARLSATSILYYDAANNVVLRKHRDMVVEAXGX

SEQ ID NO: 33823 - protein, 33 aa, Artificial Sequence
  Non-cyclic GFR-binding peptide
  MOD_RES (32)..(32): Xaa is C or S
TPTKMSPISMLYKNDKQQIILKYHYGMVVDRXG

SEQ ID NO: 33824 - protein, 34 aa, Artificial Sequence
  Non-cyclic GFR-binding peptide
  MOD_RES (1)..(2)..(34): Xaa is C or S
XXVPARLSATSILYYDAANNVVLRKHRDMVVEAX

SEQ ID NO: 33825 - protein, 36 aa, Artificial Sequence
  Non-cyclic GFR-binding peptide
  MOD_RES (4)..(5): Xaa is C or S
AGPXXTPTKMSPISMLYKNDKQQIILKYHYGMVVDR

SEQ ID NO: 33826 - protein, 41 aa, Artificial Sequence
  Non-cyclic GFR-binding peptide
  MOD_RES (5)..(6)..(39)..(41): Xaa is C or S
  MOD_RES (20)..(21)..(22)..(23)..(24): Xaa is A or G
  MOD_RES (25)..(26)..(27)..(28): Xaa is A or G or absent
VPSTXXAPVKTSPISMLYKXXXXXXXXXLKYHYMIVEEXGX

SEQ ID NO: 33827 - protein, 37 aa, Artificial Sequence
  Non-cyclic GFR-binding peptide
  MOD_RES (2)..(3)..(35)..(37): Xaa is C or S
PXXVPEKMEPISILYLDENKNVVKFKYENMTVESXAX

SEQ ID NO: 33828 - protein, 34 aa, Artificial Sequence
  Non-cyclic GFR-binding peptide
  MOD_RES (33)..(33): Xaa is C or S
  MOD_RES (14)..(15)..(16)..(17)..(18): Xaa is A or G
  MOD_RES (19)..(20)..(21)..(22): Xaa is A or G or absent
APVKTSPISMLYKXXXXXXXXXLKYHYMIVEEXG

SEQ ID NO: 33829 - protein, 39 aa, Artificial Sequence
  Non-cyclic GFR-binding peptide
  MOD_RES (2)..(3)..(37)..(39): Xaa is C or S
  MOD_RES (17)..(18)..(19)..(20)..(21): Xaa is A or G
  MOD_RES (22)..(23)..(24)..(25): Xaa is A or G or absent
PXXVPEKMEPISILYLXXXXXXXXXKFKYENMTVESXAX

SEQ ID NO: 33830 - protein, 37 aa, Artificial Sequence
  Non-cyclic GFR-binding peptide
  MOD_RES (2)..(3)..(34)..(36): Xaa is C or S
TXXAPVKTSPISMLYKDNGRVLLLKYHYMIVEEXGXL

SEQ ID NO: 33831 - protein, 40 aa, Artificial Sequence
  Non-cyclic GFR-binding peptide
  MOD_RES (2)..(3)..(37)..(39): Xaa is C or S
  MOD_RES (17)..(18)..(19)..(20)..(21): Xaa is A or G
  MOD_RES (22)..(23)..(24)..(25): Xaa is A or G or absent
TXXVPTRLSATSILYYXXXXXXXXXLRKHRDMVVESXGXR

SEQ ID NO: 33832 - protein, 41 aa, Artificial Sequence
  Non-cyclic GFR-binding peptide
  MOD_RES (5)..(6)..(38)..(40): Xaa is C or S
IPEPXXVPEKMSPINILYFDENKNVVYGKIPNMTVESXAXR

SEQ ID NO: 33833 - protein, 34 aa, Artificial Sequence
  Non-cyclic GFR-binding peptide
  MOD_RES (1)..(33): Xaa is C or S
XVPARLSATSILYYDAANNVVLRKHRDMVVEAXG

SEQ ID NO: 33834 - protein, 38 aa, Artificial Sequence
  Non-cyclic GFR-binding peptide
  MOD_RES (5)..(6): Xaa is C or S
  MOD_RES (20)..(21)..(22)..(23)..(24): Xaa is A or G
  MOD_RES (25)..(26)..(27)..(28): Xaa is A or G or absent
SASPXXVSQDLSPINILYFXXXXXXXXXYGKIPMIVKS

SEQ ID NO: 33835 - protein, 42 aa, Artificial Sequence
  Non-cyclic GFR-binding peptide
  MOD_RES (4)..(5)..(39)..(41): Xaa is C or S
  MOD_RES (19)..(20)..(21)..(22)..(23): Xaa is A or G
  MOD_RES (24)..(25)..(26)..(27): Xaa is A or G or absent
PEPXXVPEKMSATSILYYXXXXXXXXXLRKHRNMTVESXAXR

SEQ ID NO: 33836 - protein, 37 aa, Artificial Sequence
  Non-cyclic GFR-binding peptide
  MOD_RES (1)..(2)..(36): Xaa is C or S
  MOD_RES (16)..(17)..(18)..(19)..(20): Xaa is A or G
  MOD_RES (21)..(22)..(23)..(24): Xaa is A or G or absent
XXVPEKMNAISILYFXXXXXXXXXLKKYRNMTVESXA

SEQ ID NO: 33837 - protein, 41 aa, Artificial Sequence
  Non-cyclic GFR-binding peptide
  MOD_RES (6)..(7)..(41): Xaa is C or S
  MOD_RES (21)..(22)..(23)..(24)..(25): Xaa is A or G
  MOD_RES (26)..(27)..(28)..(29): Xaa is A or G or absent
HVPKPXXAPTKLEPISVLYLXXXXXXXXXKFKYENMVVRSX

SEQ ID NO: 33838 - protein, 39 aa, Artificial Sequence
  Non-cyclic GFR-binding peptide
  MOD_RES (4)..(5)..(39): Xaa is C or S
  MOD_RES (19)..(20)..(21)..(22)..(23): Xaa is A or G
  MOD_RES (24)..(25)..(26)..(27): Xaa is A or G or absent
PEPXXVPEKMSPINILYFXXXXXXXXXYGKIPNMTVESX

SEQ ID NO: 33839 - protein, 33 aa, Artificial Sequence
  Non-cyclic GFR-binding peptide
  MOD_RES (33)..(33): Xaa is C or S
  MOD_RES (14)..(15)..(16)..(17)..(18): Xaa is A or G
  MOD_RES (19)..(20)..(21)..(22): Xaa is A or G or absent
APVKTSPISMLYKXXXXXXXXXLKYHYMIVEEX

SEQ ID NO: 33840 - protein, 41 aa, Artificial Sequence
  Non-cyclic GFR-binding peptide
  MOD_RES (6)..(7)..(39)..(41): Xaa is C or S
GIPEPXXVPEKMSPISILYKDENKNVVLKYHYNMTVESXAX

SEQ ID NO: 33841 - protein, 40 aa, Artificial Sequence
  Non-cyclic GFR-binding peptide
  MOD_RES (3)..(4)..(38)..(40): Xaa is C or S
  MOD_RES (18)..(19)..(20)..(21)..(22): Xaa is A or G
  MOD_RES (23)..(24)..(25)..(26): Xaa is A or G or absent
GPXXTPTKMEPISMLYLXXXXXXXXXKFKYEGMVVDRXGX

SEQ ID NO: 33842 - protein, 40 aa, Artificial Sequence
  Non-cyclic GFR-binding peptide
  MOD_RES (5)..(6)..(40): Xaa is C or S
  MOD_RES (20)..(21)..(22)..(23)..(24): Xaa is A or G
  MOD_RES (25)..(26)..(27)..(28): Xaa is A or G or absent
ASKAXXVPTKLSATSILYYXXXXXXXXXLRKHRGMAVSEX

SEQ ID NO: 33843 - protein, 37 aa, Artificial Sequence
  Non-cyclic GFR-binding peptide
  MOD_RES (6)..(7): Xaa is C or S
ASASPXXVSQDLSPINILYFIGKTPKIYGKIPMIVKS

SEQ ID NO: 33844 - protein, 33 aa, Artificial Sequence
  Non-cyclic GFR-binding peptide
  MOD_RES (1)..(32): Xaa is C or S
XVSQDLSPINILYFIGKTPKIYGKIPMIVKSXK

SEQ ID NO: 33845 - protein, 34 aa, Artificial Sequence
  Non-cyclic GFR-binding peptide
  MOD_RES (1)..(2): Xaa is C or S
  MOD_RES (16)..(17)..(18)..(19)..(20): Xaa is A or G
  MOD_RES (21)..(22)..(23)..(24): Xaa is A or G or absent
XXAPVKTEPISMLYLXXXXXXXXXKFKYEMIVEE

SEQ ID NO: 33846 - protein, 37 aa, Artificial Sequence
  Non-cyclic GFR-binding peptide
  MOD_RES (5)..(6)..(37): Xaa is C or S
SASPXXVPQDLSPINILYFVGRTPKVYGKIPMVVKSX
